United States Patent Application Publication US 2007/0048756 A1 - sequence listing, part 21

SEQ ID NO: 726855 - DNA, 33 bp, Homo sapien
aatcagtttacctcaaatcctggtttggatgtg

SEQ ID NO: 726856 - DNA, 33 bp, Homo sapien
aatcagtttacctcaagtcctggtttggatgtg

SEQ ID NO: 726857 - DNA, 33 bp, Homo sapien
cttatcttactgtgcccatgctatgtggcagtt

SEQ ID NO: 726858 - DNA, 33 bp, Homo sapien
cttatcttactgtgcctatgctatgtggcagtt

SEQ ID NO: 726859 - DNA, 33 bp, Homo sapien
tggtttaaaatcagaaaggctacaataaaaaag

SEQ ID NO: 726860 - DNA, 33 bp, Homo sapien
tggtttaaaatcagaagggctacaataaaaaag

SEQ ID NO: 726861 - DNA, 33 bp, Homo sapien
aataactcctgttgatcagatattggaattcct

SEQ ID NO: 726862 - DNA, 33 bp, Homo sapien
aataactcctgttgattagatattggaattcct

SEQ ID NO: 726863 - DNA, 33 bp, Homo sapien
tgaaaatgacaaagaacctctgcctgtttcttg

SEQ ID NO: 726864 - DNA, 33 bp, Homo sapien
tgaaaatgacaaagaatctctgcctgtttcttg

SEQ ID NO: 726865 - DNA, 33 bp, Homo sapien
gattctttaaatgtcacgctgagaaatcaagta

SEQ ID NO: 726866 - DNA, 33 bp, Homo sapien
gattctttaaatgtcatgctgagaaatcaagta

SEQ ID NO: 726867 - DNA, 33 bp, Homo sapien
ggatgtggtgagaaataaagttggaaagaaagg

SEQ ID NO: 726868 - DNA, 33 bp, Homo sapien
ggatgtggtgagaaatgaagttggaaagaaagg

SEQ ID NO: 726869 - DNA, 33 bp, Homo sapien
aagaatctagacactacgagaaagaccacttaa

SEQ ID NO: 726870 - DNA, 33 bp, Homo sapien
aagaatctagacactatgagaaagaccacttaa

SEQ ID NO: 726871 - DNA, 33 bp, Homo sapien
agtggagaaaagcaaccagacagcgagaaagtc

SEQ ID NO: 726872 - DNA, 33 bp, Homo sapien
agtggagaaaagcaacgagacagcgagaaagtc

SEQ ID NO: 726873 - DNA, 33 bp, Homo sapien
ggctctgtatgaatacgggtgtggtaacatcat

SEQ ID NO: 726874 - DNA, 33 bp, Homo sapien
ggctctgtatgaatactggtgtggtaacatcat

SEQ ID NO: 726875 - DNA, 33 bp, Homo sapien
gctgcaaattagcaaaacttcccaggaagagtc

SEQ ID NO: 726876 - DNA, 33 bp, Homo sapien
gctgcaaattagcaaagcttcccaggaagagtc

SEQ ID NO: 726877 - DNA, 33 bp, Homo sapien
ggcaatgtagagatgtcacaaactggaagtcca

SEQ ID NO: 726878 - DNA, 33 bp, Homo sapien
ggcaatgtagagatgtgacaaactggaagtcca

SEQ ID NO: 726879 - DNA, 33 bp, Homo sapien
atcaaggaaattttgcaatgattatcctgtcct

SEQ ID NO: 726880 - DNA, 33 bp, Homo sapien
atcaaggaaattttgccatgattatcctgtcct

SEQ ID NO: 726881 - DNA, 33 bp, Homo sapien
ttaaatatagtcataccagacctgctctggcct

SEQ ID NO: 726882 - DNA, 33 bp, Homo sapien
ttaaatatagtcatacgagacctgctctggcct

SEQ ID NO: 726883 - DNA, 33 bp, Homo sapien
aataagcatcagaagccaatcctgcctttctgg

SEQ ID NO: 726884 - DNA, 33 bp, Homo sapien
aataagcatcagaagctaatcctgcctttctgg

SEQ ID NO: 726885 - DNA, 33 bp, Homo sapien
aaaatttctgacaccacagtagcagagtatctc

SEQ ID NO: 726886 - DNA, 33 bp, Homo sapien
aaaatttctgacaccatagtagcagagtatctc

SEQ ID NO: 726887 - DNA, 33 bp, Homo sapien
gtatacctgttgttgacgaaaattagctattat

SEQ ID NO: 726888 - DNA, 33 bp, Homo sapien
gtatacctgttgttgatgaaaattagctattat

SEQ ID NO: 726889 - DNA, 33 bp, Homo sapien
tctgacttttagcccactcttgaatagactgtt

SEQ ID NO: 726890 - DNA, 33 bp, Homo sapien
tctgacttttagcccattcttgaatagactgtt

SEQ ID NO: 726891 - DNA, 33 bp, Homo sapien
gacaaagcagagtggcaatagattccaagaagt

SEQ ID NO: 726892 - DNA, 33 bp, Homo sapien
gacaaagcagagtggcgatagattccaagaagt

SEQ ID NO: 726893 - DNA, 33 bp, Homo sapien
aggccatttacattcacagttcgtattgagata

SEQ ID NO: 726894 - DNA, 33 bp, Homo sapien
aggccatttacattcagagttcgtattgagata

SEQ ID NO: 726895 - DNA, 33 bp, Homo sapien
ctgaacagcatctcccagctctaaaatgtctct

SEQ ID NO: 726896 - DNA, 33 bp, Homo sapien
ctgaacagcatctcccggctctaaaatgtctct

SEQ ID NO: 726897 - DNA, 33 bp, Homo sapien
agagagaggagggaagaaacagagggctattga

SEQ ID NO: 726898 - DNA, 33 bp, Homo sapien
agagagaggagggaagcaacagagggctattga

SEQ ID NO: 726899 - DNA, 33 bp, Homo sapien
tactattatggttaccacttgttaagataaaag

SEQ ID NO: 726900 - DNA, 33 bp, Homo sapien
tactattatggttacctcttgttaagataaaag

SEQ ID NO: 726901 - DNA, 33 bp, Homo sapien
attgaggttaaggcaacacgccccaagttattt

SEQ ID NO: 726902 - DNA, 33 bp, Homo sapien
attgaggttaaggcaatacgccccaagttattt

SEQ ID NO: 726903 - DNA, 33 bp, Homo sapien
tataggcctctgtaaaaagaaaaatatggctgt

SEQ ID NO: 726904 - DNA, 33 bp, Homo sapien
tataggcctctgtaaacagaaaaatatggctgt

SEQ ID NO: 726905 - DNA, 33 bp, Homo sapien; identical to SEQ ID NO: 726903

SEQ ID NO: 726906 - DNA, 33 bp, Homo sapien; identical to SEQ ID NO: 726904

SEQ ID NO: 726907 - DNA, 33 bp, Homo sapien
aaatatgagtgttaaacagacctgtaatttatg

SEQ ID NO: 726908 - DNA, 33 bp, Homo sapien
aaatatgagtgttaaagagacctgtaatttatg

SEQ ID NO: 726909 - DNA, 33 bp, Homo sapien
tccctttgctccaatacacaaactgaagaacct

SEQ ID NO: 726910 - DNA, 33 bp, Homo sapien
tccctttgctccaatatacaaactgaagaacct

SEQ ID NO: 726911 - DNA, 33 bp, Homo sapien
ttttttatttgttggaaacctagaaactcattt

SEQ ID NO: 726912 - DNA, 33 bp, Homo sapien
ttttttatttgttggagacctagaaactcattt

SEQ ID NO: 726913 - DNA, 33 bp, Homo sapien
tacatccaggaactccaaggtttaaagtgtaag

SEQ ID NO: 726914 - DNA, 33 bp, Homo sapien
tacatccaggaactcccaggtttaaagtgtaag

SEQ ID NO: 726915 - DNA, 33 bp, Homo sapien
tgaaaggaagaacacaaacctggcttactgact

SEQ ID NO: 726916 - DNA, 33 bp, Homo sapien
tgaaaggaagaacacagacctggcttactgact

SEQ ID NO: 726917 - DNA, 33 bp, Homo sapien
ccagcatagcagcagtaaaatagaacactaggt

SEQ ID NO: 726918 - DNA, 33 bp, Homo sapien
ccagcatagcagcagtgaaatagaacactaggt

SEQ ID NO: 726919 - DNA, 33 bp, Homo sapien
cattcccttttgacagacagaggagcccctccc

SEQ ID NO: 726920 - DNA, 33 bp, Homo sapien
cattcccttttgacaggcagaggagcccctccc

SEQ ID NO: 726921 - DNA, 33 bp, Homo sapien
taaatgtgatttaccgaatgaatagaattaaaa

SEQ ID NO: 726922 - DNA, 33 bp, Homo sapien
taaatgtgatttaccgtatgaatagaattaaaa

SEQ ID NO: 726923 - DNA, 33 bp, Homo sapien
atctattacaaaaacacaatgcaaaaaagaaca

SEQ ID NO: 726924 - DNA, 33 bp, Homo sapien
atctattacaaaaacagaatgcaaaaaagaaca

SEQ ID NO: 726925 - DNA, 33 bp, Homo sapien
actcagatatactacaaattgaaggcctccaat

SEQ ID NO: 726926 - DNA, 33 bp, Homo sapien
actcagatatactacagattgaaggcctccaat

SEQ ID NO: 726927 - DNA, 33 bp, Homo sapien
tcaacataatccaccacattaaatgttcaagtt

SEQ ID NO: 726928 - DNA, 33 bp, Homo sapien
tcaacataatccaccatattaaatgttcaagtt

SEQ ID NO: 726929 - DNA, 33 bp, Homo sapien
catgacaaattgcaaagcttcaatcaaagcaac

SEQ ID NO: 726930 - DNA, 33 bp, Homo sapien
catgacaaattgcaaatcttcaatcaaagcaac

SEQ ID NO: 726931 - DNA, 33 bp, Homo sapien
taagaaggatatcgcaaaaactacaatcactta

SEQ ID NO: 726932 - DNA, 33 bp, Homo sapien
taagaaggatatcgcagaaactacaatcactta

SEQ ID NO: 726933 - DNA, 33 bp, Homo sapien
taagctgtatcatttaagtttgtgcacgtacac

SEQ ID NO: 726934 - DNA, 33 bp, Homo sapien
taagctgtatcatttaggtttgtgcacgtacac

SEQ ID NO: 726935 - DNA, 33 bp, Homo sapien
ttaacacactctccaccactacctctgttcctc

SEQ ID NO: 726936 - DNA, 33 bp, Homo sapien
ttaacacactctccactactacctctgttcctc

SEQ ID NO: 726937 - DNA, 33 bp, Homo sapien
aagcttatgaagagagaagtcacatgatctgac

SEQ ID NO: 726938 - DNA, 33 bp, Homo sapien
aagcttatgaagagaggagtcacatgatctgac

SEQ ID NO: 726939 - DNA, 33 bp, Homo sapien
gcaatgagttgaaggaactgagtatttggccaa

SEQ ID NO: 726940 - DNA, 33 bp, Homo sapien
gcaatgagttgaaggagctgagtatttggccaa

SEQ ID NO: 726941 - DNA, 33 bp, Homo sapien
ctagtatttaaaaaaaattctggagcaccaaac

SEQ ID NO: 726942 - DNA, 33 bp, Homo sapien
ctagtatttaaaaaaagttctggagcaccaaac

SEQ ID NO: 726943 - DNA, 33 bp, Homo sapien
cttagcatgcatatgcaaacaaagaggacaaag

SEQ ID NO: 726944 - DNA, 33 bp, Homo sapien
cttagcatgcatatgcgaacaaagaggacaaag

SEQ ID NO: 726945 - DNA, 33 bp, Homo sapien
gccctctttatttcagactccaaaccaatctcc

SEQ ID NO: 726946 - DNA, 33 bp, Homo sapien
gccctctttatttcaggctccaaaccaatctcc

SEQ ID NO: 726947 - DNA, 33 bp, Homo sapien
ccaagacaaggacccacaggctaaaaagatttt

SEQ ID NO: 726948 - DNA, 33 bp, Homo sapien
ccaagacaaggacccagaggctaaaaagatttt

SEQ ID NO: 726949 - DNA, 33 bp, Homo sapien
aagcttttaaatttgaagcaataccatgtgtct

SEQ ID NO: 726950 - DNA, 33 bp, Homo sapien
aagcttttaaatttgatgcaataccatgtgtct

SEQ ID NO: 726951 - DNA, 33 bp, Homo sapien
ttattcttactctggcaagtgttttactaagac

SEQ ID NO: 726952 - DNA, 33 bp, Homo sapien
ttattcttactctggcgagtgttttactaagac

SEQ ID NO: 726953 - DNA, 33 bp, Homo sapien
tacctcctacttcccaatcaccgagtctaatca

SEQ ID NO: 726954 - DNA, 33 bp, Homo sapien
tacctcctacttcccattcaccgagtctaatca

SEQ ID NO: 726955 - DNA, 33 bp, Homo sapien
atacatatggattctcaaaaagtatagtggatt

SEQ ID NO: 726956 - DNA, 33 bp, Homo sapien
atacatatggattctcgaaaagtatagtggatt

SEQ ID NO: 726957 - DNA, 33 bp, Homo sapien
ttccctgaaacatagacaccagacagaaaaagt

SEQ ID NO: 726958 - DNA, 33 bp, Homo sapien
ttccctgaaacatagataccagacagaaaaagt

SEQ ID NO: 726959 - DNA, 33 bp, Homo sapien
catgttgaaatttcatcaggatgataatgttag

SEQ ID NO: 726960 - DNA, 33 bp, Homo sapien
catgttgaaatttcattaggatgataatgttag

SEQ ID NO: 726961 - DNA, 33 bp, Homo sapien
ttcacatgagatttaaactgcacacttttctaa

SEQ ID NO: 726962 - DNA, 33 bp, Homo sapien
ttcacatgagatttaatctgcacacttttctaa

SEQ ID NO: 726963 - DNA, 33 bp, Homo sapien
aagatgggccacaagagcattgcattgtgtttt

SEQ ID NO: 726964 - DNA, 33 bp, Homo sapien
aagatgggccacaagatcattgcattgtgtttt

SEQ ID NO: 726965 - DNA, 33 bp, Homo sapien
tgtactcagattcaagaagaaaagatctagatt

SEQ ID NO: 726966 - DNA, 33 bp, Homo sapien
tgtactcagattcaaggagaaaagatctagatt

SEQ ID NO: 726967 - DNA, 33 bp, Homo sapien
aggactttcagccatccccttagactcaaacaa

SEQ ID NO: 726968 - DNA, 33 bp, Homo sapien
aggactttcagccatcgccttagactcaaacaa

SEQ ID NO: 726969 - DNA, 33 bp, Homo sapien
tatttttctcttctaccatccttagcacttagc

SEQ ID NO: 726970 - DNA, 33 bp, Homo sapien
tatttttctcttctactatccttagcacttagc

SEQ ID NO: 726971 - DNA, 33 bp, Homo sapien
tgttaggatctagaacaaaactatttcaagtgt

SEQ ID NO: 726972 - DNA, 33 bp, Homo sapien
tgttaggatctagaacgaaactatttcaagtgt

SEQ ID NO: 726973 - DNA, 33 bp, Homo sapien
tgagcagtgggatgaggagtggttaacagctgc

SEQ ID NO: 726974 - DNA, 33 bp, Homo sapien
tgagcagtgggatgagtagtggttaacagctgc

SEQ ID NO: 726975 - DNA, 33 bp, Homo sapien
atcagagcacatagggaaagcttattgcttagt

SEQ ID NO: 726976 - DNA, 33 bp, Homo sapien
atcagagcacataggggaagcttattgcttagt

SEQ ID NO: 726977 - DNA, 33 bp, Homo sapien
tagaactgctaaacaaattcagtaaactgacag

SEQ ID NO: 726978 - DNA, 33 bp, Homo sapien
tagaactgctaaacaagttcagtaaactgacag

SEQ ID NO: 726979 - DNA, 33 bp, Homo sapien
gcacgtggtgagattcccttgactgtcattcaa

SEQ ID NO: 726980 - DNA, 33 bp, Homo sapien
gcacgtggtgagattctcttgactgtcattcaa

SEQ ID NO: 726981 - DNA, 33 bp, Homo sapien
aaaccacatacatagcactcagtagagaaggat

SEQ ID NO: 726982 - DNA, 33 bp, Homo sapien
aaaccacatacatagcgctcagtagagaaggat

SEQ ID NO: 726983 - DNA, 33 bp, Homo sapien
catccataggtgtaagacagaccttggcattct

SEQ ID NO: 726984 - DNA, 33 bp, Homo sapien
catccataggtgtaagccagaccttggcattct

SEQ ID NO: 726985 - DNA, 33 bp, Homo sapien
cagtgtcagatcttagcactttaccagacaaga

SEQ ID NO: 726986 - DNA, 33 bp, Homo sapien
cagtgtcagatcttagtactttaccagacaaga

SEQ ID NO: 726987 - DNA, 33 bp, Homo sapien
gagcacatgtacatgcaatcattttacggttca

SEQ ID NO: 726988 - DNA, 33 bp, Homo sapien
gagcacatgtacatgcgatcattttacggttca

SEQ ID NO: 726989 - DNA, 33 bp, Homo sapien
aatattcagcaatgaaataaactccagctccac

SEQ ID NO: 726990 - DNA, 33 bp, Homo sapien
aatattcagcaatgaagtaaactccagctccac

SEQ ID NO: 726991 - DNA, 33 bp, Homo sapien
ctaacagctgtataacacttcattatgtgtaca

SEQ ID NO: 726992 - DNA, 33 bp, Homo sapien
ctaacagctgtataacgcttcattatgtgtaca

SEQ ID NO: 726993 - DNA, 33 bp, Homo sapien
agagagattccttctcaatgattttgggcctgc

SEQ ID NO: 726994 - DNA, 33 bp, Homo sapien
agagagattccttctcgatgattttgggcctgc

SEQ ID NO: 726995 - DNA, 33 bp, Homo sapien
aatctgtgaatacacaacttaaagctccaaatt

SEQ ID NO: 726996 - DNA, 33 bp, Homo sapien
aatctgtgaatacacaccttaaagctccaaatt

SEQ ID NO: 726997 - DNA, 33 bp, Homo sapien
tattcaggtaacataccggtgagagcaaagtag

SEQ ID NO: 726998 - DNA, 33 bp, Homo sapien
tattcaggtaacatactggtgagagcaaagtag

SEQ ID NO: 726999 - DNA, 33 bp, Homo sapien
cttacttctattactaagccaagtcagcctgtc

SEQ ID NO: 727000 - DNA, 33 bp, Homo sapien
cttacttctattactaggccaagtcagcctgtc

SEQ ID NO: 727001 - DNA, 33 bp, Homo sapien
gccattctgccaacaccgcctagattcctctgt

SEQ ID NO: 727002 - DNA, 33 bp, Homo sapien
gccattctgccaacactgcctagattcctctgt

SEQ ID NO: 727003 - DNA, 33 bp, Homo sapien
accatgatactttaatcagaagcttagccttga

SEQ ID NO: 727004 - DNA, 33 bp, Homo sapien
accatgatactttaattagaagcttagccttga

SEQ ID NO: 727005 - DNA, 33 bp, Homo sapien
gaaggactaataaagacagctggaattgataaa

SEQ ID NO: 727006 - DNA, 33 bp, Homo sapien
gaaggactaataaagagagctggaattgataaa

SEQ ID NO: 727007 - DNA, 33 bp, Homo sapien
tctctgcatttccttcaacagaattttaagtag

SEQ ID NO: 727008 - DNA, 33 bp, Homo sapien
tctctgcatttccttcgacagaattttaagtag

SEQ ID NO: 727009 - DNA, 33 bp, Homo sapien
tgctgggtgatgataacgtgaaatagtgcagga

SEQ ID NO: 727010 - DNA, 33 bp, Homo sapien
tgctgggtgatgataatgtgaaatagtgcagga

SEQ ID NO: 727011 - DNA, 33 bp, Homo sapien
agtgcctgtgaattaaatccaaattcctaatcc

SEQ ID NO: 727012 - DNA, 33 bp, Homo sapien
agtgcctgtgaattaagtccaaattcctaatcc

SEQ ID NO: 727013 - DNA, 33 bp, Homo sapien
ccagtgctcaattacacggctgagtaggacaga

SEQ ID NO: 727014 - DNA, 33 bp, Homo sapien
ccagtgctcaattacatggctgagtaggacaga

SEQ ID NO: 727015 - DNA, 33 bp, Homo sapien
cagggacatattgaataaagactggataagaaa

SEQ ID NO: 727016 - DNA, 33 bp, Homo sapien
cagggacatattgaatcaagactggataagaaa

SEQ ID NO: 727017 - DNA, 33 bp, Homo sapien
ccttaactctgactcaacatacttgccctggtt

SEQ ID NO: 727018 - DNA, 33 bp, Homo sapien
ccttaactctgactcagcatacttgccctggtt

SEQ ID NO: 727019 - DNA, 33 bp, Homo sapien
aatgactaatagatggcagagctagaatttgaa

SEQ ID NO: 727020 - DNA, 33 bp, Homo sapien
aatgactaatagatggtagagctagaatttgaa

SEQ ID NO: 727021 - DNA, 33 bp, Homo sapien
gctagaatttgaactcagacagtccaatcccag

SEQ ID NO: 727022 - DNA, 33 bp, Homo sapien
gctagaatttgaactcggacagtccaatcccag

SEQ ID NO: 727023 - DNA, 33 bp, Homo sapien
atgttattcacggaaaagctactaaaaattttg

SEQ ID NO: 727024 - DNA, 33 bp, Homo sapien
atgttattcacggaaaggctactaaaaattttg

SEQ ID NO: 727025 - DNA, 33 bp, Homo sapien
cgttaggaacagggaacgtcatggaattcagaa

SEQ ID NO: 727026 - DNA, 33 bp, Homo sapien
cgttaggaacagggaaggtcatggaattcagaa

SEQ ID NO: 727027 - DNA, 33 bp, Homo sapien
agttgttgtaacaatgaaacaatttcgtctcac

SEQ ID NO: 727028 - DNA, 33 bp, Homo sapien
agttgttgtaacaatgtaacaatttcgtctcac

SEQ ID NO: 727029 - DNA, 33 bp, Homo sapien
cactttttgttgtttgaatcccaatattaagat

SEQ ID NO: 727030 - DNA, 33 bp, Homo sapien
cactttttgttgtttggatcccaatattaagat

SEQ ID NO: 727031 - DNA, 33 bp, Homo sapien
taatttctgccatccaatattgaaagttcaaca

SEQ ID NO: 727032 - DNA, 33 bp, Homo sapien
taatttctgccatccagtattgaaagttcaaca

SEQ ID NO: 727033 - DNA, 33 bp, Homo sapien
tgttagagtgatagtaaagacccacagacaacc

SEQ ID NO: 727034 - DNA, 33 bp, Homo sapien
tgttagagtgatagtacagacccacagacaacc

SEQ ID NO: 727035 - DNA, 33 bp, Homo sapien
tacctgtgaaaataaaacccaatgctgcttgca

SEQ ID NO: 727036 - DNA, 33 bp, Homo sapien
tacctgtgaaaataaatcccaatgctgcttgca

SEQ ID NO: 727037 - DNA, 33 bp, Homo sapien
ttcccactgagattcaaaagttatagctaaggc

SEQ ID NO: 727038 - DNA, 33 bp, Homo sapien
ttcccactgagattcagaagttatagctaaggc

SEQ ID NO: 727039 - DNA, 33 bp, Homo sapien
agaaaaggtaagttaccagttgtgcaatacagt

SEQ ID NO: 727040 - DNA, 33 bp, Homo sapien
agaaaaggtaagttactagttgtgcaatacagt

SEQ ID NO: 727041 - DNA, 33 bp, Homo sapien
cccacaagttgcctcacgttctaattaagttta

SEQ ID NO: 727042 - DNA, 33 bp, Homo sapien
cccacaagttgcctcatgttctaattaagttta

SEQ ID NO: 727043 - DNA, 33 bp, Homo sapien
taaaagtcttgagacgaattctgattgaatagg

SEQ ID NO: 727044 - DNA, 33 bp, Homo sapien
taaaagtcttgagacgcattctgattgaatagg

SEQ ID NO: 727045 - DNA, 33 bp, Homo sapien
tgttgagtttacattccagtaaaagtcttgaga

SEQ ID NO: 727046 - DNA, 33 bp, Homo sapien
tgttgagtttacattctagtaaaagtcttgaga

SEQ ID NO: 727047 - DNA, 33 bp, Homo sapien
agttgcagaggagcataaagttcaaaaagatca

SEQ ID NO: 727048 - DNA, 33 bp, Homo sapien
agttgcagaggagcatgaagttcaaaaagatca

SEQ ID NO: 727049 - DNA, 33 bp, Homo sapien
ctcccaagatccaccaccatcttcttcttcatc

SEQ ID NO: 727050 - DNA, 33 bp, Homo sapien
ctcccaagatccaccatcatcttcttcttcatc

SEQ ID NO: 727051 - DNA, 33 bp, Homo sapien
cccctgctttcttaggaacctgagtcagtagaa

SEQ ID NO: 727052 - DNA, 33 bp, Homo sapien
cccctgctttcttagggacctgagtcagtagaa

SEQ ID NO: 727053 - DNA, 33 bp, Homo sapien
cccatcattcttcctaaacaagagactattgaa

SEQ ID NO: 727054 - DNA, 33 bp, Homo sapien
cccatcattcttcctagacaagagactattgaa

SEQ ID NO: 727055 - DNA, 33 bp, Homo sapien
agaagttatatagcacaaagatttcaaatattg

SEQ ID NO: 727056 - DNA, 33 bp, Homo sapien
agaagttatatagcacgaagatttcaaatattg

SEQ ID NO: 727057 - DNA, 33 bp, Homo sapien
attttattaggttggtaaaaaggcaatcacggt

SEQ ID NO: 727058 - DNA, 33 bp, Homo sapien
attttattaggttggtgaaaaggcaatcacggt

SEQ ID NO: 727059 - DNA, 33 bp, Homo sapien
tatcattcatttcaataaagtaagttgctactg

SEQ ID NO: 727060 - DNA, 33 bp, Homo sapien
tatcattcatttcaatgaagtaagttgctactg

SEQ ID NO: 727061 - DNA, 33 bp, Homo sapien
cagcttctaatcgggaataatgatttcagaggg

SEQ ID NO: 727062 - DNA, 33 bp, Homo sapien
cagcttctaatcgggattaatgatttcagaggg

SEQ ID NO: 727063 - DNA, 33 bp, Homo sapien
ctggcttggagagagaagcaaggactcttttta

SEQ ID NO: 727064 - DNA, 33 bp, Homo sapien
ctggcttggagagagaggcaaggactcttttta

SEQ ID NO: 727065 - DNA, 33 bp, Homo sapien
acacaactcattatataaagctcagcacctgct

SEQ ID NO: 727066 - DNA, 33 bp, Homo sapien
acacaactcattatatgaagctcagcacctgct

SEQ ID NO: 727067 - DNA, 33 bp, Homo sapien
cattttttgttatcaagcatctgacaatccatt

SEQ ID NO: 727068 - DNA, 33 bp, Homo sapien
cattttttgttatcaatcatctgacaatccatt

SEQ ID NO: 727069 - DNA, 33 bp, Homo sapien
gaaacaatagctggagaatggtacgtgtgatta

SEQ ID NO: 727070 - DNA, 33 bp, Homo sapien
gaaacaatagctggagtatggtacgtgtgatta

SEQ ID NO: 727071 - DNA, 33 bp, Homo sapien
taacatttaatactacaattttcctaacctcaa

SEQ ID NO: 727072 - DNA, 33 bp, Homo sapien
taacatttaatactacgattttcctaacctcaa

SEQ ID NO: 727073 - DNA, 33 bp, Homo sapien
tctgttgttaaacgacccacatagtatttcaga

SEQ ID NO: 727074 - DNA, 33 bp, Homo sapien
tctgttgttaaacgactcacatagtatttcaga

SEQ ID NO: 727075 - DNA, 33 bp, Homo sapien
agttaagtaatgaaaacgctggaaaacttaaga

SEQ ID NO: 727076 - DNA, 33 bp, Homo sapien
agttaagtaatgaaaatgctggaaaacttaaga

SEQ ID NO: 727077 - DNA, 33 bp, Homo sapien
ttcattctcatcttcaacagttcatcaaatagc

SEQ ID NO: 727078 - DNA, 33 bp, Homo sapien
ttcattctcatcttcagcagttcatcaaatagc

SEQ ID NO: 727079 - DNA, 33 bp, Homo sapien
agtaagaattaacttgcatattgaagcttactt

SEQ ID NO: 727080 - DNA, 33 bp, Homo sapien
agtaagaattaacttggatattgaagcttactt

SEQ ID NO: 727081 - DNA, 33 bp, Homo sapien
ttttcatcttctaatacaattgacatgtccata

SEQ ID NO: 727082 - DNA, 33 bp, Homo sapien
ttttcatcttctaatataattgacatgtccata

SEQ ID NO: 727083 - DNA, 33 bp, Homo sapien
aggccaatacgtgacaagtttaggaaagacagc

SEQ ID NO: 727084 - DNA, 33 bp, Homo sapien
aggccaatacgtgacacgtttaggaaagacagc

SEQ ID NO: 727085 - DNA, 33 bp, Homo sapien
cttatttcctggctacaatttatagcactgagc

SEQ ID NO: 727086 - DNA, 33 bp, Homo sapien
cttatttcctggctacgatttatagcactgagc

SEQ ID NO: 727087 - DNA, 33 bp, Homo sapien
gagaaatagcagtctcaaaaattacatataaat

SEQ ID NO: 727088 - DNA, 33 bp, Homo sapien
gagaaatagcagtctcgaaaattacatataaat

SEQ ID NO: 727089 - DNA, 33 bp, Homo sapien
ccctgttaacttagtccaggcccttatcatgtc

SEQ ID NO: 727090 - DNA, 33 bp, Homo sapien
ccctgttaacttagtctaggcccttatcatgtc

SEQ ID NO: 727091 - DNA, 33 bp, Homo sapien
agaaatgactatttaaaaagtagtgctgagaca

SEQ ID NO: 727092 - DNA, 33 bp, Homo sapien
agaaatgactatttaacaagtagtgctgagaca

SEQ ID NO: 727093 - DNA, 33 bp, Homo sapien
gcttgtctagtaaacccaagacagtattgtgta

SEQ ID NO: 727094 - DNA, 33 bp, Homo sapien
gcttgtctagtaaaccgaagacagtattgtgta

SEQ ID NO: 727095 - DNA, 33 bp, Homo sapien
ctgagtatgttcttgacaaaaaaatcacgccca

SEQ ID NO: 727096 - DNA, 33 bp, Homo sapien
ctgagtatgttcttgagaaaaaaatcacgccca

SEQ ID NO: 727097 - DNA, 33 bp, Homo sapien
aaactgcaaagcactaaaaagatactgaaaact

SEQ ID NO: 727098 - DNA, 33 bp, Homo sapien
aaactgcaaagcactagaaagatactgaaaact

SEQ ID NO: 727099 - DNA, 33 bp, Homo sapien
ccaagttcttttgttacgtatcatggaaaatta

SEQ ID NO: 727100 - DNA, 33 bp, Homo sapien
ccaagttcttttgttatgtatcatggaaaatta

SEQ ID NO: 727101 - DNA, 33 bp, Homo sapien
actgtgattaaggacaacaccaattttaccttc

SEQ ID NO: 727102 - DNA, 33 bp, Homo sapien
actgtgattaaggacaccaccaattttaccttc

SEQ ID NO: 727103 - DNA, 33 bp, Homo sapien
aaaattttacaagtagccagttatggtagtgtg

SEQ ID NO: 727104 - DNA, 33 bp, Homo sapien
aaaattttacaagtagtcagttatggtagtgtg

SEQ ID NO: 727105 - DNA, 33 bp, Homo sapien
tgtccatttaatggaactaccagctgtgtatta

SEQ ID NO: 727106 - DNA, 33 bp, Homo sapien
tgtccatttaatggaattaccagctgtgtatta

SEQ ID NO: 727107 - DNA, 33 bp, Homo sapien
tttgctcaatattgaaactatacataaatcccc

SEQ ID NO: 727108 - DNA, 33 bp, Homo sapien
tttgctcaatattgaagctatacataaatcccc

SEQ ID NO: 727109 - DNA, 33 bp, Homo sapien
tgtttataagactcaccgtaaaatctccagact

SEQ ID NO: 727110 - DNA, 33 bp, Homo sapien
tgtttataagactcactgtaaaatctccagact

SEQ ID NO: 727111 - DNA, 33 bp, Homo sapien
catagctattctcaccacagtttaagaagagaa

SEQ ID NO: 727112 - DNA, 33 bp, Homo sapien
catagctattctcacctcagtttaagaagagaa

SEQ ID NO: 727113 - DNA, 33 bp, Homo sapien
ctatggcatggggatgcagtcaatgagattagt

SEQ ID NO: 727114 - DNA, 33 bp, Homo sapien
ctatggcatggggatgtagtcaatgagattagt

SEQ ID NO: 727115 - DNA, 33 bp, Homo sapien
atgttttcattaaaggaaactgaaagtgcaaag

SEQ ID NO: 727116 - DNA, 33 bp, Homo sapien
atgttttcattaaagggaactgaaagtgcaaag

SEQ ID NO: 727117 - DNA, 33 bp, Homo sapien
cttcatctgccaccaaattacccttcatcctac

SEQ ID NO: 727118 - DNA, 33 bp, Homo sapien
cttcatctgccaccaagttacccttcatcctac

SEQ ID NO: 727119 - DNA, 33 bp, Homo sapien
agacatggtgtctgtacattccagagcagagtc

SEQ ID NO: 727120 - DNA, 33 bp, Homo sapien
agacatggtgtctgtatattccagagcagagtc

SEQ ID NO: 727121 - DNA, 33 bp, Homo sapien
tattgctccagggaaaacattttgggtacttct

SEQ ID NO: 727122 - DNA, 33 bp, Homo sapien
tattgctccagggaaagcattttgggtacttct

SEQ ID NO: 727123 - DNA, 33 bp, Homo sapien
gtagacaaattccagtaacattacaattacaat

SEQ ID NO: 727124 - DNA, 33 bp, Homo sapien
gtagacaaattccagtgacattacaattacaat

SEQ ID NO: 727125 - DNA, 33 bp, Homo sapien
aactgctgcctttcaaacttcttaagtggtgcc

SEQ ID NO: 727126 - DNA, 33 bp, Homo sapien
aactgctgcctttcaagcttcttaagtggtgcc

SEQ ID NO: 727127 - DNA, 33 bp, Homo sapien
atcctcagttgcaaaaatcttgtgtttcaggca

SEQ ID NO: 727128 - DNA, 33 bp, Homo sapien
atcctcagttgcaaaagtcttgtgtttcaggca

SEQ ID NO: 727129 - DNA, 33 bp, Homo sapien
acagtcatttccccaaacattaggctttctgag

SEQ ID NO: 727130 - DNA, 33 bp, Homo sapien
acagtcatttccccaaccattaggctttctgag

SEQ ID NO: 727131 - DNA, 33 bp, Homo sapien
agatttggataggagacaatctagaaattacat

SEQ ID NO: 727132 - DNA, 33 bp, Homo sapien
agatttggataggagataatctagaaattacat

SEQ ID NO: 727133 - DNA, 33 bp, Homo sapien
ctgggttagaaatacaaatcagggaacacaggc

SEQ ID NO: 727134 - DNA, 33 bp, Homo sapien
ctgggttagaaatacacatcagggaacacaggc

SEQ ID NO: 727135 - DNA, 33 bp, Homo sapien
gatcaaaacttaaggcaactaactcatcttggt

SEQ ID NO: 727136 - DNA, 33 bp, Homo sapien
gatcaaaacttaaggcgactaactcatcttggt

SEQ ID NO: 727137 - DNA, 33 bp, Homo sapien
actcactcactatcacgagtattgcaaggggaa

SEQ ID NO: 727138 - DNA, 33 bp, Homo sapien
actcactcactatcactagtattgcaaggggaa

SEQ ID NO: 727139 - DNA, 33 bp, Homo sapien; identical to SEQ ID NO: 727137

SEQ ID NO: 727140 - DNA, 33 bp, Homo sapien; identical to SEQ ID NO: 727138

SEQ ID NO: 727141 - DNA, 33 bp, Homo sapien
gagaacttgtcgaagacgcccagttgctagctg

SEQ ID NO: 727142 - DNA, 33 bp, Homo sapien
gagaacttgtcgaagaggcccagttgctagctg

SEQ ID NO: 727143 - DNA, 33 bp, Homo sapien
tttccaaaagccctaactggagctggcaaaatg

SEQ ID NO: 727144 - DNA, 33 bp, Homo sapien
tttccaaaagccctaattggagctggcaaaatg

SEQ ID NO: 727145 - DNA, 33 bp, Homo sapien
agcctcatagtagaacggcggattcatctatta

SEQ ID NO: 727146 - DNA, 33 bp, Homo sapien
agcctcatagtagaactgcggattcatctatta

SEQ ID NO: 727147 - DNA, 33 bp, Homo sapien
acctctctttgggtgacctaacatattcatagg

SEQ ID NO: 727148 - DNA, 33 bp, Homo sapien
acctctctttgggtgatctaacatattcatagg

SEQ ID NO: 727149 - DNA, 33 bp, Homo sapien
ctgagatttcatgagacatcaaaggtcattttg

SEQ ID NO: 727150 - DNA, 33 bp, Homo sapien
ctgagatttcatgagatatcaaaggtcattttg

SEQ ID NO: 727151 - DNA, 33 bp, Homo sapien
aaggataaggcggtcacgcttacctaagagcaa

SEQ ID NO: 727152 - DNA, 33 bp, Homo sapien
aaggataaggcggtcatgcttacctaagagcaa

SEQ ID NO: 727153 - DNA, 33 bp, Homo sapien
gtgtatattcttggcaacttttttaaaaatgac

SEQ ID NO: 727154 - DNA, 33 bp, Homo sapien
gtgtatattcttggcaccttttttaaaaatgac

SEQ ID NO: 727155 - DNA, 33 bp, Homo sapien
atgacttgaagcaaaagatacctttcctccaaa

SEQ ID NO: 727156 - DNA, 33 bp, Homo sapien
atgacttgaagcaaaatatacctttcctccaaa

SEQ ID NO: 727157 - DNA, 33 bp, Homo sapien
atgggtacaagtgcagaaaagtatatagatttg

SEQ ID NO: 727158 - DNA, 33 bp, Homo sapien
atgggtacaagtgcaggaaagtatatagatttg

SEQ ID NO: 727159 - DNA, 33 bp, Homo sapien
tggaacatttatcataataacgccaatgtctac

SEQ ID NO: 727160 - DNA, 33 bp, Homo sapien
tggaacatttatcatagtaacgccaatgtctac

SEQ ID NO: 727161 - DNA, 33 bp, Homo sapien
gaacaaaatctacctgcacctaacagctgttct

SEQ ID NO: 727162 - DNA, 33 bp, Homo sapien
gaacaaaatctacctgtacctaacagctgttct

SEQ ID NO: 727163 - DNA, 33 bp, Homo sapien
tggtagaagttttacaaaggcttaatgtgttga

SEQ ID NO: 727164 - DNA, 33 bp, Homo sapien
tggtagaagttttacagaggcttaatgtgttga

SEQ ID NO: 727165 - DNA, 33 bp, Homo sapien
ctaggcctgaagagaaatatagaggagtaggta

SEQ ID NO: 727166 - DNA, 33 bp, Homo sapien
ctaggcctgaagagaagtatagaggagtaggta

SEQ ID NO: 727167 - DNA, 33 bp, Homo sapien
tcctcacagcactgggcagggtgtaagatattg

SEQ ID NO: 727168 - DNA, 33 bp, Homo sapien
tcctcacagcactgggtagggtgtaagatattg

SEQ ID NO: 727169 - DNA, 33 bp, Homo sapien
tacatttaagtcacaacatgcatcttctgacct

SEQ ID NO: 727170 - DNA, 33 bp, Homo sapien
tacatttaagtcacaatatgcatcttctgacct

SEQ ID NO: 727171 - DNA, 33 bp, Homo sapien
cagtggtcttccaaccagccactttgctcatta

SEQ ID NO: 727172 - DNA, 33 bp, Homo sapien
cagtggtcttccaaccggccactttgctcatta

SEQ ID NO: 727173 - DNA, 33 bp, Homo sapien
taaattatactcttggaaggaaaatgtggagca

SEQ ID NO: 727174 - DNA, 33 bp, Homo sapien
taaattatactcttgggaggaaaatgtggagca

SEQ ID NO: 727175 - DNA, 33 bp, Homo sapien
cctgagttgccatatgcattaacacaggaccac

SEQ ID NO: 727176 - DNA, 33 bp, Homo sapien
cctgagttgccatatgtattaacacaggaccac

SEQ ID NO: 727177 - DNA, 33 bp, Homo sapien
gcttacttcagactgaaagaacaaagaaataga

SEQ ID NO: 727178 - DNA, 33 bp, Homo sapien
gcttacttcagactgagagaacaaagaaataga

SEQ ID NO: 727179 - DNA, 33 bp, Homo sapien
ggttaagaagacaaaactaaggtagctttaggt

SEQ ID NO: 727180 - DNA, 33 bp, Homo sapien
ggttaagaagacaaaattaaggtagctttaggt

SEQ ID NO: 727181 - DNA, 33 bp, Homo sapien
gggctaattctaaaaaatatctcatcatccaaa

SEQ ID NO: 727182 - DNA, 33 bp, Homo sapien
gggctaattctaaaaagtatctcatcatccaaa

SEQ ID NO: 727183 - DNA, 33 bp, Homo sapien
cttggaatgtttggaacctatggtcagaaacaa

SEQ ID NO: 727184 - DNA, 33 bp, Homo sapien
cttggaatgtttggaatctatggtcagaaacaa

SEQ ID NO: 727185 - DNA, 33 bp, Homo sapien
gttccctgtgacacaccgtacatatattgctca

SEQ ID NO: 727186 - DNA, 33 bp, Homo sapien
gttccctgtgacacacggtacatatattgctca

SEQ ID NO: 727187 - DNA, 33 bp, Homo sapien
agaagcttagaacctgacaactgccctatgttc

SEQ ID NO: 727188 - DNA, 33 bp, Homo sapien
agaagcttagaacctgtcaactgccctatgttc

SEQ ID NO: 727189 - DNA, 33 bp, Homo sapien
ggaaaaaaatgcactccacctgcccagatctcc

SEQ ID NO: 727190 - DNA, 33 bp, Homo sapien
ggaaaaaaatgcactctacctgcccagatctcc

SEQ ID NO: 727191 - DNA, 33 bp, Homo sapien
taattatcaaaacatacatttctagcatctcat

SEQ ID NO: 727192 - DNA, 33 bp, Homo sapien
taattatcaaaacatatatttctagcatctcat

SEQ ID NO: 727193 - DNA, 33 bp, Homo sapien
aaagctgttctgtcatcaagatctgcatcaatc

SEQ ID NO: 727194 - DNA, 33 bp, Homo sapien
aaagctgttctgtcatgaagatctgcatcaatc

SEQ ID NO: 727195 - DNA, 33 bp, Homo sapien
ttctagaaaattatgacgatgacttccctatag

SEQ ID NO: 727196 - DNA, 33 bp, Homo sapien
ttctagaaaattatgatgatgacttccctatag

SEQ ID NO: 727197 - DNA, 33 bp, Homo sapien
ggaatattttttaagaatctctagaggccattt

SEQ ID NO: 727198 - DNA, 33 bp, Homo sapien
ggaatattttttaagactctctagaggccattt

SEQ ID NO: 727199 - DNA, 33 bp, Homo sapien
ttgatcctactagctacggattgtcccttactc

SEQ ID NO: 727200 - DNA, 33 bp, Homo sapien
ttgatcctactagctatggattgtcccttactc

SEQ ID NO: 727201 - DNA, 33 bp, Homo sapien
catgttgggcttatggcacgcaactccaagcag

SEQ ID NO: 727202 - DNA, 33 bp, Homo sapien
catgttgggcttatggtacgcaactccaagcag

SEQ ID NO: 727203 - DNA, 33 bp, Homo sapien
cctggattctattcccaaacaactaaatcagta

SEQ ID NO: 727204 - DNA, 33 bp, Homo sapien
cctggattctattcccgaacaactaaatcagta

SEQ ID NO: 727205 - DNA, 33 bp, Homo sapien
cctgaatgttatggaaaagataccaccatgttt

SEQ ID NO: 727206 - DNA, 33 bp, Homo sapien
cctgaatgttatggaagagataccaccatgttt

SEQ ID NO: 727207 - DNA, 33 bp, Homo sapien
actgagttctggctaaaggaatgggtgtagaac

SEQ ID NO: 727208 - DNA, 33 bp, Homo sapien
actgagttctggctaatggaatgggtgtagaac

SEQ ID NO: 727209 - DNA, 33 bp, Homo sapien
agcctttaaacaaagacacaatgaattcaccat

SEQ ID NO: 727210 - DNA, 33 bp, Homo sapien
agcctttaaacaaagagacaatgaattcaccat

SEQ ID NO: 727211 - DNA, 33 bp, Homo sapien
ctctgcatttgcctgcactgctctgtctgttca

SEQ ID NO: 727212 - DNA, 33 bp, Homo sapien
ctctgcatttgcctgcgctgctctgtctgttca

SEQ ID NO: 727213 - DNA, 33 bp, Homo sapien
atacaataaatggagaaaaacagaaagtgtata

SEQ ID NO: 727214 - DNA, 33 bp, Homo sapien
atacaataaatggagagaaacagaaagtgtata

SEQ ID NO: 727215 - DNA, 33 bp, Homo sapien
gtcactgaaaggaaagacagcagaacggtttct

SEQ ID NO: 727216 - DNA, 33 bp, Homo sapien
gtcactgaaaggaaaggcagcagaacggtttct

SEQ ID NO: 727217 - DNA, 33 bp, Homo sapien
gactcatacattcctccaacatttttctcaaaa

SEQ ID NO: 727218 - DNA, 33 bp, Homo sapien
gactcatacattcctcgaacatttttctcaaaa

SEQ ID NO: 727219 - DNA, 33 bp, Homo sapien
ttcatgtttgttactgcagactatttgatccta

SEQ ID NO: 727220 - DNA, 33 bp, Homo sapien
ttcatgtttgttactggagactatttgatccta

SEQ ID NO: 727221 - DNA, 33 bp, Homo sapien
tagcagcctttcttatcagcaagaagccctgtg

SEQ ID NO: 727222 - DNA, 33 bp, Homo sapien
tagcagcctttcttattagcaagaagccctgtg

SEQ ID NO: 727223 - DNA, 33 bp, Homo sapien
gtgtctgtttttcccactcacccaagaaactga

SEQ ID NO: 727224 - DNA, 33 bp, Homo sapien
gtgtctgtttttcccattcacccaagaaactga

SEQ ID NO: 727225 - DNA, 33 bp, Homo sapien
taagtaattgttttcccacaaaagagttgttct

SEQ ID NO: 727226 - DNA, 33 bp, Homo sapien
taagtaattgttttcctacaaaagagttgttct

SEQ ID NO: 727227 - DNA, 33 bp, Homo sapien
ctttgtataaagccaaattagctcacacagatg

SEQ ID NO: 727228 - DNA, 33 bp, Homo sapien
ctttgtataaagccaatttagctcacacagatg

SEQ ID NO: 727229 - DNA, 33 bp, Homo sapien
gcatcctaaattttaccatctgcaaagtctaca

SEQ ID NO: 727230 - DNA, 33 bp, Homo sapien
gcatcctaaattttactatctgcaaagtctaca

SEQ ID NO: 727231 - DNA, 33 bp, Homo sapien
gtgcaatggctcttcacaggcacaatcatagca

SEQ ID NO: 727232 - DNA, 33 bp, Homo sapien
gtgcaatggctcttcataggcacaatcatagca

SEQ ID NO: 727233 - DNA, 33 bp, Homo sapien
aacacgcccatacttacatgacttgatttaaga

SEQ ID NO: 727234 - DNA, 33 bp, Homo sapien
aacacgcccatacttatatgacttgatttaaga

SEQ ID NO: 727235 - DNA, 33 bp, Homo sapien
taaggactttgacttcaactccaagtgaaatgg

SEQ ID NO: 727236 - DNA, 33 bp, Homo sapien
taaggactttgacttcgactccaagtgaaatgg

SEQ ID NO: 727237 - DNA, 33 bp, Homo sapien
acaaaactaatgtataagcaaaaagtcacataa

SEQ ID NO: 727238 - DNA, 33 bp, Homo sapien
acaaaactaatgtataggcaaaaagtcacataa

SEQ ID NO: 727239 - DNA, 33 bp, Homo sapien
tttaagatgacttatgaacataaatataaaagc

SEQ ID NO: 727240 - DNA, 33 bp, Homo sapien
tttaagatgacttatggacataaatataaaagc

SEQ ID NO: 727241 - DNA, 33 bp, Homo sapien
ggattaacacctgtaacacgtgatttgcccaca

SEQ ID NO: 727242 - DNA, 33 bp, Homo sapien
ggattaacacctgtaatacgtgatttgcccaca

SEQ ID NO: 727243 - DNA, 33 bp, Homo sapien
cctacattacacaagtcaatgaagattgtgtgg

SEQ ID NO: 727244 - DNA, 33 bp, Homo sapien
cctacattacacaagtgaatgaagattgtgtgg

SEQ ID NO: 727245 - DNA, 33 bp, Homo sapien
ttgtcaaagttatgataaaaagaaaactgagat

SEQ ID NO: 727246 - DNA, 33 bp, Homo sapien
ttgtcaaagttatgatgaaaagaaaactgagat

SEQ ID NO: 727247 - DNA, 33 bp, Homo sapien
gccctataaataaaccaggcattctcttttctt

SEQ ID NO: 727248 - DNA, 33 bp, Homo sapien
gccctataaataaaccgggcattctcttttctt

SEQ ID NO: 727249 - DNA, 33 bp, Homo sapien
agtaaaatagtttcaacggtatcatatcattcc

SEQ ID NO: 727250 - DNA, 33 bp, Homo sapien
agtaaaatagtttcaatggtatcatatcattcc

SEQ ID NO: 727251 - DNA, 33 bp, Homo sapien
agagaatattacgtgacagctatagcagagaaa

SEQ ID NO: 727252 - DNA, 33 bp, Homo sapien
agagaatattacgtgatagctatagcagagaaa

SEQ ID NO: 727253 - DNA, 33 bp, Homo sapien
tcctttgagtaagacactggagtaagctatcta

SEQ ID NO: 727254 - DNA, 33 bp, Homo sapien
tcctttgagtaagacattggagtaagctatcta

SEQ ID NO: 727255 - DNA, 33 bp, Homo sapien
tctttaccttcttttacacataccctgtttctc

SEQ ID NO: 727256 - DNA, 33 bp, Homo sapien
tctttaccttcttttatacataccctgtttctc

SEQ ID NO: 727257 - DNA, 33 bp, Homo sapien
ttttcggataacattgaaatgactatttcctag

SEQ ID NO: 727258 - DNA, 33 bp, Homo sapien
ttttcggataacattggaatgactatttcctag

SEQ ID NO: 727259 - DNA, 33 bp, Homo sapien
taagaactttatgtctcacagcaccaactcaat

SEQ ID NO: 727260 - DNA, 33 bp, Homo sapien
taagaactttatgtcttacagcaccaactcaat

SEQ ID NO: 727261 - DNA, 33 bp, Homo sapien
tttatatacctttgcccatggatcttttctcat

SEQ ID NO: 727262 - DNA, 33 bp, Homo sapien
tttatatacctttgcctatggatcttttctcat

SEQ ID NO: 727263 - DNA, 33 bp, Homo sapien
tccccacgctgagttacccgatgtctgaaatgt

SEQ ID NO: 727264 - DNA, 33 bp, Homo sapien
tccccacgctgagttatccgatgtctgaaatgt

SEQ ID NO: 727265 - DNA, 33 bp, Homo sapien
atgagtaacacaaataccagtagaaagtaggcc

SEQ ID NO: 727266 - DNA, 33 bp, Homo sapien
atgagtaacacaaatagcagtagaaagtaggcc

SEQ ID NO: 727267 - DNA, 33 bp, Homo sapien
ggtggtaagaagctcactcaggataaaaaaaga

SEQ ID NO: 727268 - DNA, 33 bp, Homo sapien
ggtggtaagaagctcattcaggataaaaaaaga

SEQ ID NO: 727269 - DNA, 33 bp, Homo sapien
attacagtaaatatcaagttcattaagtaaaat

SEQ ID NO: 727270 - DNA, 33 bp, Homo sapien
attacagtaaatatcacgttcattaagtaaaat

SEQ ID NO: 727271 - DNA, 33 bp, Homo sapien
agaaagaagagtagaaagctaaaaacagaacct

SEQ ID NO: 727272 - DNA, 33 bp, Homo sapien
agaaagaagagtagaaggctaaaaacagaacct

SEQ ID NO: 727273 - DNA, 33 bp, Homo sapien
ttctaaggcaaagcacaccaaaaatctaaaatc

SEQ ID NO: 727274 - DNA, 33 bp, Homo sapien
ttctaaggcaaagcaccccaaaaatctaaaatc

SEQ ID NO: 727275 - DNA, 33 bp, Homo sapien
ctttggagtctcatcacagaggatgaccttgct

SEQ ID NO: 727276 - DNA, 33 bp, Homo sapien
ctttggagtctcatcatagaggatgaccttgct

SEQ ID NO: 727277 - DNA, 33 bp, Homo sapien
aaaattcctctcagtacgctgaaatcataagca

SEQ ID NO: 727278 - DNA, 33 bp, Homo sapien
aaaattcctctcagtatgctgaaatcataagca

SEQ ID NO: 727279 - DNA, 33 bp, Homo sapien
gaagaaaagaaggatgaagctcaaatatcactt

SEQ ID NO: 727280 - DNA, 33 bp, Homo sapien
gaagaaaagaaggatggagctcaaatatcactt

SEQ ID NO: 727281 - DNA, 33 bp, Homo sapien
ctgattatcttagtaccctaaattgagagtttc

SEQ ID NO: 727282 - DNA, 33 bp, Homo sapien
ctgattatcttagtacgctaaattgagagtttc

SEQ ID NO: 727283 - DNA, 33 bp, Homo sapien
atggagtggtcagtacaagctagtgcaggaaga

SEQ ID NO: 727284 - DNA, 33 bp, Homo sapien
atggagtggtcagtacgagctagtgcaggaaga

SEQ ID NO: 727285 - DNA, 33 bp, Homo sapien
acagtcctgtgtttcacatagctgggtcctgtc

SEQ ID NO: 727286 - DNA, 33 bp, Homo sapien
acagtcctgtgtttcatatagctgggtcctgtc

SEQ ID NO: 727287 - DNA, 33 bp, Homo sapien
agctgctttatagttcgctggctaatgcagcag

SEQ ID NO: 727288 - DNA, 33 bp, Homo sapien
agctgctttatagttctctggctaatgcagcag

SEQ ID NO: 727289 - DNA, 33 bp, Homo sapien
ttaatctgtctgaaaaggagaagctttggatat

SEQ ID NO: 727290 - DNA, 33 bp, Homo sapien
ttaatctgtctgaaaatgagaagctttggatat

SEQ ID NO: 727291 - DNA, 33 bp, Homo sapien
ggtcaaccatagtctcaaagtgttacatcacta

SEQ ID NO: 727292 - DNA, 33 bp, Homo sapien
ggtcaaccatagtctcgaagtgttacatcacta

SEQ ID NO: 727293 - DNA, 33 bp, Homo sapien
aatgtacaaatcttaactgtacatttcatgcga

SEQ ID NO: 727294 - DNA, 33 bp, Homo sapien
aatgtacaaatcttaagtgtacatttcatgcga

SEQ ID NO: 727295 - DNA, 33 bp, Homo sapien
ttatagagggaggaaacttaacgtgattccatt

SEQ ID NO: 727296 - DNA, 33 bp, Homo sapien
ttatagagggaggaaagttaacgtgattccatt

SEQ ID NO: 727297 - DNA, 33 bp, Homo sapien
cagagaccactccattcaagaagcttggcaatg

SEQ ID NO: 727298 - DNA, 33 bp, Homo sapien
cagagaccactccatttaagaagcttggcaatg

SEQ ID NO: 727299 - DNA, 33 bp, Homo sapien
tctgattttaattttcaacacaagcaggaataa

SEQ ID NO: 727300 - DNA, 33 bp, Homo sapien
tctgattttaattttccacacaagcaggaataa

SEQ ID NO: 727301 - DNA, 33 bp, Homo sapien
tttagcagtgtttttcaccttgacttgcagtgt

SEQ ID NO: 727302 - DNA, 33 bp, Homo sapien
tttagcagtgtttttccccttgacttgcagtgt

SEQ ID NO: 727303 - DNA, 33 bp, Homo sapien
atttagtaaaacaaaccgtcattactatcagat

SEQ ID NO: 727304 - DNA, 33 bp, Homo sapien
atttagtaaaacaaacggtcattactatcagat

SEQ ID NO: 727305 - DNA, 33 bp, Homo sapien
acaatatgttgagtaccggctgtatacagaagc

SEQ ID NO: 727306 - DNA, 33 bp, Homo sapien
acaatatgttgagtactggctgtatacagaagc

SEQ ID NO: 727307 - DNA, 33 bp, Homo sapien
ggggtgttcctgtgcacgggtaagacattgctg

SEQ ID NO: 727308 - DNA, 33 bp, Homo sapien
ggggtgttcctgtgcatgggtaagacattgctg

SEQ ID NO: 727309 - DNA, 33 bp, Homo sapien
ggcattggttaaatcaataacagagtggtagtg

SEQ ID NO: 727310 - DNA, 33 bp, Homo sapien
ggcattggttaaatcagtaacagagtggtagtg

SEQ ID NO: 727311 - DNA, 33 bp, Homo sapien
gtggggttggcaactagactggtgtccatttcg

SEQ ID NO: 727312 - DNA, 33 bp, Homo sapien
gtggggttggcaactatactggtgtccatttcg

SEQ ID NO: 727313 - DNA, 33 bp, Homo sapien
tatcacagggttggtaagaggattcaatcaaat

SEQ ID NO: 727314 - DNA, 33 bp, Homo sapien
tatcacagggttggtaggaggattcaatcaaat

SEQ ID NO: 727315 - DNA, 33 bp, Homo sapien
gcgaatcaaatgtccaatcacagacaagggcaa

SEQ ID NO: 727316 - DNA, 33 bp, Homo sapien
gcgaatcaaatgtccagtcacagacaagggcaa

SEQ ID NO: 727317 - DNA, 33 bp, Homo sapien
gcatattcttactgacaggcaagatttttactg

SEQ ID NO: 727318 - DNA, 33 bp, Homo sapien
gcatattcttactgacgggcaagatttttactg

SEQ ID NO: 727319 - DNA, 33 bp, Homo sapien
gatataaagtatggtgcattgttagaaaggaga

SEQ ID NO: 727320 - DNA, 33 bp, Homo sapien
gatataaagtatggtggattgttagaaaggaga

SEQ ID NO: 727321 - DNA, 33 bp, Homo sapien
ctcacatacctacaaacgaagtaatagagttgg

SEQ ID NO: 727322 - DNA, 33 bp, Homo sapien
ctcacatacctacaaatgaagtaatagagttgg

SEQ ID NO: 727323 - DNA, 33 bp, Homo sapien
caagaatgagcatagcactttagagattaggag

SEQ ID NO: 727324 - DNA, 33 bp, Homo sapien
caagaatgagcatagcgctttagagattaggag

SEQ ID NO: 727325 - DNA, 33 bp, Homo sapien
taatacttaaacaatcaaattcagcaataaaaa

SEQ ID NO: 727326 - DNA, 33 bp, Homo sapien
taatacttaaacaatcgaattcagcaataaaaa

SEQ ID NO: 727327 - DNA, 33 bp, Homo sapien
tagtagatataggtgcactgttatccttccatg

SEQ ID NO: 727328 - DNA, 33 bp, Homo sapien
tagtagatataggtgcgctgttatccttccatg

SEQ ID NO: 727329 - DNA, 33 bp, Homo sapien
tggggcaaataaggaactacattaaacctaagt

SEQ ID NO: 727330 - DNA, 33 bp, Homo sapien
tggggcaaataaggaagtacattaaacctaagt

SEQ ID NO: 727331 - DNA, 33 bp, Homo sapien
ctctgaagtttgcttcactcttgtatttcaaaa

SEQ ID NO: 727332 - DNA, 33 bp, Homo sapien
ctctgaagtttgcttcgctcttgtatttcaaaa

SEQ ID NO: 727333 - DNA, 33 bp, Homo sapien
gtatctgtgatgaatacgcaaaccttttcatga

SEQ ID NO: 727334 - DNA, 33 bp, Homo sapien
gtatctgtgatgaatatgcaaaccttttcatga

SEQ ID NO: 727335 - DNA, 33 bp, Homo sapien
aggaatccaagtgagagattagagtacctgggt

SEQ ID NO: 727336 - DNA, 33 bp, Homo sapien
aggaatccaagtgagatattagagtacctgggt

SEQ ID NO: 727337 - DNA, 33 bp, Homo sapien
taatgcagttgttttgcaaatttaggctgagaa

SEQ ID NO: 727338 - DNA, 33 bp, Homo sapien
taatgcagttgttttgtaaatttaggctgagaa

SEQ ID NO: 727339 - DNA, 33 bp, Homo sapien
ttaaacacattccccactggcagtaattttaaa

SEQ ID NO: 727340 - DNA, 33 bp, Homo sapien
ttaaacacattccccattggcagtaattttaaa

SEQ ID NO: 727341 - DNA, 33 bp, Homo sapien
ctgtacacatggtataataacacttaaaggtag

SEQ ID NO: 727342 - DNA, 33 bp, Homo sapien
ctgtacacatggtatagtaacacttaaaggtag

SEQ ID NO: 727343 - DNA, 33 bp, Homo sapien
tgcacctaccagttcacagcctttttccccttt

SEQ ID NO: 727344 - DNA, 33 bp, Homo sapien
tgcacctaccagttcatagcctttttccccttt

SEQ ID NO: 727345 - DNA, 33 bp, Homo sapien
tttttcctgcaatatgcagtatctttagtaatt

SEQ ID NO: 727346 - DNA, 33 bp, Homo sapien
tttttcctgcaatatgtagtatctttagtaatt

SEQ ID NO: 727347 - DNA, 33 bp, Homo sapien
cgagctgttcctctcaaaaagtataatacaatc

SEQ ID NO: 727348 - DNA, 33 bp, Homo sapien
cgagctgttcctctcataaagtataatacaatc

SEQ ID NO: 727349 - DNA, 33 bp, Homo sapien
taaaactcgagaccaacgcaacatacgagttca

SEQ ID NO: 727350 - DNA, 33 bp, Homo sapien
taaaactcgagaccaatgcaacatacgagttca

SEQ ID NO: 727351 - DNA, 33 bp, Homo sapien
ctgagctaaactcctaagaaagcaagatattac

SEQ ID NO: 727352 - DNA, 33 bp, Homo sapien
ctgagctaaactcctatgaaagcaagatattac

SEQ ID NO: 727353 - DNA, 33 bp, Homo sapien
tggtaatatgatgtttaaaaacaaaatcaaagt

SEQ ID NO: 727354 - DNA, 33 bp, Homo sapien
tggtaatatgatgtttgaaaacaaaatcaaagt

SEQ ID NO: 727355 - DNA, 33 bp, Homo sapien
ctctcaagaataactgaagcatgtgcaggaaaa

SEQ ID NO: 727356 - DNA, 33 bp, Homo sapien
ctctcaagaataactgtagcatgtgcaggaaaa

SEQ ID NO: 727357 - DNA, 33 bp, Homo sapien
actggttttgcacctacactacttaatttaatg

SEQ ID NO: 727358 - DNA, 33 bp, Homo sapien
actggttttgcacctatactacttaatttaatg

SEQ ID NO: 727359 - DNA, 33 bp, Homo sapien
atgaacactagaggacgcaacttcaacttctct

SEQ ID NO: 727360 - DNA, 33 bp, Homo sapien
atgaacactagaggactcaacttcaacttctct

SEQ ID NO: 727361 - DNA, 33 bp, Homo sapien
tttccttaagattcaacacaaatgtataaaatg

SEQ ID NO: 727362 - DNA, 33 bp, Homo sapien
tttccttaagattcaagacaaatgtataaaatg

SEQ ID NO: 727363 - DNA, 33 bp, Homo sapien
gctttagacggaaaaacaatggcatatgaaata

SEQ ID NO: 727364 - DNA, 33 bp, Homo sapien
gctttagacggaaaaagaatggcatatgaaata

SEQ ID NO: 727365 - DNA, 33 bp, Homo sapien
aataaagtcatcaggaacaacaacaaaggtgaa

SEQ ID NO: 727366 - DNA, 33 bp, Homo sapien
aataaagtcatcaggagcaacaacaaaggtgaa

SEQ ID NO: 727367 - DNA, 33 bp, Homo sapien
agccagggctacgcaactaatatagagaaaaat

SEQ ID NO: 727368 - DNA, 33 bp, Homo sapien
agccagggctacgcaattaatatagagaaaaat

SEQ ID NO: 727369 - DNA, 33 bp, Homo sapien
taagccaaacacagaaagacaagtactacatga

SEQ ID NO: 727370 - DNA, 33 bp, Homo sapien
taagccaaacacagaaggacaagtactacatga

SEQ ID NO: 727371 - DNA, 33 bp, Homo sapien
ttgatttggaaaagccacaggtaacagtgtaaa

SEQ ID NO: 727372 - DNA, 33 bp, Homo sapien
ttgatttggaaaagccgcaggtaacagtgtaaa

SEQ ID NO: 727373 - DNA, 33 bp, Homo sapien
ggtctgtactccacccaaagtgaattattatta

SEQ ID NO: 727374 - DNA, 33 bp, Homo sapien
ggtctgtactccaccccaagtgaattattatta

SEQ ID NO: 727375 - DNA, 33 bp, Homo sapien
tagtattaggtgattaacagttagggatgagct

SEQ ID NO: 727376 - DNA, 33 bp, Homo sapien
tagtattaggtgattagcagttagggatgagct

SEQ ID NO: 727377 - DNA, 33 bp, Homo sapien
tgacatcaggcatacccaaatttgaaaccagct

SEQ ID NO: 727378 - DNA, 33 bp, Homo sapien
tgacatcaggcatacctaaatttgaaaccagct

SEQ ID NO: 727379 - DNA, 33 bp, Homo sapien
ggaaggattagtccgacgtattacagtctcaaa

SEQ ID NO: 727380 - DNA, 33 bp, Homo sapien
ggaaggattagtccgaggtattacagtctcaaa

SEQ ID NO: 727381 - DNA, 33 bp, Homo sapien
agggttatagagcataataagaagccgaaaaga

SEQ ID NO: 727382 - DNA, 33 bp, Homo sapien
agggttatagagcatagtaagaagccgaaaaga

SEQ ID NO: 727383 - DNA, 33 bp, Homo sapien
ggggcctagttctagaccaagttctgccccaaa

SEQ ID NO: 727384 - DNA, 33 bp, Homo sapien
ggggcctagttctagatcaagttctgccccaaa

SEQ ID NO: 727385 - DNA, 33 bp, Homo sapien
atctattatttccccaatgaatggtcttagtat

SEQ ID NO: 727386 - DNA, 33 bp, Homo sapien
atctattatttccccattgaatggtcttagtat

SEQ ID NO: 727387 - DNA, 33 bp, Homo sapien
tatgtaaatatctaaggaagttcttcactccta

SEQ ID NO: 727388 - DNA, 33 bp, Homo sapien
tatgtaaatatctaagtaagttcttcactccta

SEQ ID NO: 727389 - DNA, 33 bp, Homo sapien
atcttttaactttagaatatagctaagtgggta

SEQ ID NO: 727390 - DNA, 33 bp, Homo sapien
atcttttaactttagagtatagctaagtgggta

SEQ ID NO: 727391 - DNA, 33 bp, Homo sapien
agtttggaaaaaatcacgtaagaagtcatgtaa

SEQ ID NO: 727392 - DNA, 33 bp, Homo sapien
agtttggaaaaaatcatgtaagaagtcatgtaa

SEQ ID NO: 727393 - DNA, 33 bp, Homo sapien
aacttgaatatcatccaaacttgcttttctcct

SEQ ID NO: 727394 - DNA, 33 bp, Homo sapien
aacttgaatatcatccgaacttgcttttctcct

SEQ ID NO: 727395 - DNA, 33 bp, Homo sapien
agaaaatattacttagcattgcacatggtattg

SEQ ID NO: 727396 - DNA, 33 bp, Homo sapien
agaaaatattacttaggattgcacatggtattg

SEQ ID NO: 727397 - DNA, 33 bp, Homo sapien
taaactgtgtactaccaccattttaattaataa

SEQ ID NO: 727398 - DNA, 33 bp, Homo sapien
taaactgtgtactaccgccattttaattaataa

SEQ ID NO: 727399 - DNA, 33 bp, Homo sapien
ctcaatagtagtcaaagccagctctactgaacc

SEQ ID NO: 727400 - DNA, 33 bp, Homo sapien
ctcaatagtagtcaaatccagctctactgaacc

SEQ ID NO: 727401 - DNA, 33 bp, Homo sapien
gaagggacactatgcaaacaaggcagtgccctc

SEQ ID NO: 727402 - DNA, 33 bp, Homo sapien
gaagggacactatgcagacaaggcagtgccctc

SEQ ID NO: 727403 - DNA, 33 bp, Homo sapien
cttaactgagagtctacggatatctagatggat

SEQ ID NO: 727404 - DNA, 33 bp, Homo sapien
cttaactgagagtctatggatatctagatggat

SEQ ID NO: 727405 - DNA, 33 bp, Homo sapien
ttctatgggaaacaacaagtgtcgtagtccatt

SEQ ID NO: 727406 - DNA, 33 bp, Homo sapien
ttctatgggaaacaacgagtgtcgtagtccatt

SEQ ID NO: 727407 - DNA, 33 bp, Homo sapien
caatgatagtgttttcaaagtcatgtgggccac

SEQ ID NO: 727408 - DNA, 33 bp, Homo sapien
caatgatagtgttttcgaagtcatgtgggccac

SEQ ID NO: 727409 - DNA, 33 bp, Homo sapien
ctagtcaataaggtcaccttcttctgccactct

SEQ ID NO: 727410 - DNA, 33 bp, Homo sapien
ctagtcaataaggtcatcttcttctgccactct

SEQ ID NO: 727411 - DNA, 33 bp, Homo sapien
ttctcttttcattaacactcagaagttctctag

SEQ ID NO: 727412 - DNA, 33 bp, Homo sapien
ttctcttttcattaactctcagaagttctctag

SEQ ID NO: 727413 - DNA, 33 bp, Homo sapien
ggcacataatggttggaaacatttattgagcac

SEQ ID NO: 727414 - DNA, 33 bp, Homo sapien
ggcacataatggttgggaacatttattgagcac

SEQ ID NO: 727415 - DNA, 33 bp, Homo sapien
aaatagggatgaaacacggatgaacaaagaatg

SEQ ID NO: 727416 - DNA, 33 bp, Homo sapien
aaatagggatgaaacatggatgaacaaagaatg

SEQ ID NO: 727417 - DNA, 33 bp, Homo sapien
tgtgtttatgggggcacatatagtggaagaata

SEQ ID NO: 727418 - DNA, 33 bp, Homo sapien
tgtgtttatgggggcatatatagtggaagaata

SEQ ID NO: 727419 - DNA, 33 bp, Homo sapien
tggtgtaaaattgaaacctgtaatacgtgttat

SEQ ID NO: 727420 - DNA, 33 bp, Homo sapien
tggtgtaaaattgaaatctgtaatacgtgttat

SEQ ID NO: 727421 - DNA, 33 bp, Homo sapien
aagtctgctctaggtactaaggacacagtagca

SEQ ID NO: 727422 - DNA, 33 bp, Homo sapien
aagtctgctctaggtattaaggacacagtagca

SEQ ID NO: 727423 - DNA, 33 bp, Homo sapien
caggtgtactggctagaaaacaaaccagccctt

SEQ ID NO: 727424 - DNA, 33 bp, Homo sapien
caggtgtactggctaggaaacaaaccagccctt

SEQ ID NO: 727425 - DNA, 33 bp, Homo sapien
aggcagttccgcagtgaaaatatgggtgagcaa

SEQ ID NO: 727426 - DNA, 33 bp, Homo sapien
aggcagttccgcagtggaaatatgggtgagcaa

SEQ ID NO: 727427 - DNA, 33 bp, Homo sapien
gagtgaaattgatataagttgaaggatacctaa

SEQ ID NO: 727428 - DNA, 33 bp, Homo sapien
gagtgaaattgatataggttgaaggatacctaa

SEQ ID NO: 727429 - DNA, 33 bp, Homo sapien
ccttgcctcctggaaaacatccaaaggcaacaa

SEQ ID NO: 727430 - DNA, 33 bp, Homo sapien
ccttgcctcctggaaatcatccaaaggcaacaa

SEQ ID NO: 727431 - DNA, 33 bp, Homo sapien
agactcaaattaaataggggtggagtctggaca

SEQ ID NO: 727432 - DNA, 33 bp, Homo sapien
agactcaaattaaatatgggtggagtctggaca

SEQ ID NO: 727433 - DNA, 33 bp, Homo sapien
attttgtaattttcaaaatacagatcctacaca

SEQ ID NO: 727434 - DNA, 33 bp, Homo sapien
attttgtaattttcaacatacagatcctacaca

SEQ ID NO: 727435 - DNA, 33 bp, Homo sapien
tcttcttctgagcccacgaaactcttccagcgt

SEQ ID NO: 727436 - DNA, 33 bp, Homo sapien
tcttcttctgagcccatgaaactcttccagcgt

SEQ ID NO: 727437 - DNA, 33 bp, Homo sapien
cctctttcctactgccaaggtgatctttctcct

SEQ ID NO: 727438 - DNA, 33 bp, Homo sapien
cctctttcctactgccgaggtgatctttctcct

SEQ ID NO: 727439 - DNA, 33 bp, Homo sapien
cacaaattgcctaaaccgcctagtaatgacctc

SEQ ID NO: 727440 - DNA, 33 bp, Homo sapien
cacaaattgcctaaactgcctagtaatgacctc

SEQ ID NO: 727441 - DNA, 33 bp, Homo sapien
ctctgttgtataatcacgattccaggtactaga

SEQ ID NO: 727442 - DNA, 33 bp, Homo sapien
ctctgttgtataatcatgattccaggtactaga

SEQ ID NO: 727443 - DNA, 33 bp, Homo sapien
aaaacctgaattcttacagaagcaacacagaag

SEQ ID NO: 727444 - DNA, 33 bp, Homo sapien
aaaacctgaattcttatagaagcaacacagaag

SEQ ID NO: 727445 - DNA, 33 bp, Homo sapien
ttgtgttaaatctggcaatgtttttagacaaac

SEQ ID NO: 727446 - DNA, 33 bp, Homo sapien
ttgtgttaaatctggccatgtttttagacaaac

SEQ ID NO: 727447 - DNA, 33 bp, Homo sapien
atattagcaatcaatcaaggcctgatactttac

SEQ ID NO: 727448 - DNA, 33 bp, Homo sapien
atattagcaatcaatccaggcctgatactttac

SEQ ID NO: 727449 - DNA, 33 bp, Homo sapien
cagagtcagaaactaacatataacaggattaca

SEQ ID NO: 727450 - DNA, 33 bp, Homo sapien
cagagtcagaaactaatatataacaggattaca

SEQ ID NO: 727451 - DNA, 33 bp, Homo sapien
atatttatagaatttcccaaagcttcacttcaa

SEQ ID NO: 727452 - DNA, 33 bp, Homo sapien
atatttatagaatttctcaaagcttcacttcaa

SEQ ID NO: 727453 - DNA, 33 bp, Homo sapien
atgtggacttacaagccgaccatcaagtgtaca

SEQ ID NO: 727454 - DNA, 33 bp, Homo sapien
atgtggacttacaagctgaccatcaagtgtaca

SEQ ID NO: 727455 - DNA, 33 bp, Homo sapien
atgaaaggtgaacataggtaggttactctatgt

SEQ ID NO: 727456 - DNA, 33 bp, Homo sapien
atgaaaggtgaacatatgtaggttactctatgt

SEQ ID NO: 727457 - DNA, 33 bp, Homo sapien
cagaagtgaaaataaacgaattgaagccatgat

SEQ ID NO: 727458 - DNA, 33 bp, Homo sapien
cagaagtgaaaataaatgaattgaagccatgat

SEQ ID NO: 727459 - DNA, 33 bp, Homo sapien
tacatcagaatgtggccctacttggagataggg

SEQ ID NO: 727460 - DNA, 33 bp, Homo sapien
tacatcagaatgtggctctacttggagataggg

SEQ ID NO: 727461 - DNA, 33 bp, Homo sapien
ctatttttgtaagtcaatacagatgctgccttt

SEQ ID NO: 727462 - DNA, 33 bp, Homo sapien
ctatttttgtaagtcagtacagatgctgccttt

SEQ ID NO: 727463 - DNA, 33 bp, Homo sapien
ttactttcatctcctcacaacatattttcccac

SEQ ID NO: 727464 - DNA, 33 bp, Homo sapien
ttactttcatctcctcgcaacatattttcccac

SEQ ID NO: 727465 - DNA, 33 bp, Homo sapien
acctacagttcttccaaacagacacacctacct

SEQ ID NO: 727466 - DNA, 33 bp, Homo sapien
acctacagttcttccagacagacacacctacct

SEQ ID NO: 727467 - DNA, 33 bp, Homo sapien
tagtagtttaaagctaagtggtaattaaaagtc

SEQ ID NO: 727468 - DNA, 33 bp, Homo sapien
tagtagtttaaagctacgtggtaattaaaagtc

SEQ ID NO: 727469 - DNA, 33 bp, Homo sapien
ggtcaattcttggaccaaggccgtgatgaaaga

SEQ ID NO: 727470 - DNA, 33 bp, Homo sapien
ggtcaattcttggaccgaggccgtgatgaaaga

SEQ ID NO: 727471 - DNA, 33 bp, Homo sapien
tctttctggtatggagaatcaccataattattt

SEQ ID NO: 727472 - DNA, 33 bp, Homo sapien
tctttctggtatggaggatcaccataattattt

SEQ ID NO: 727473 - DNA, 33 bp, Homo sapien
acttggagagctttcccaaactaattccacacc

SEQ ID NO: 727474 - DNA, 33 bp, Homo sapien
acttggagagctttcctaaactaattccacacc

SEQ ID NO: 727475 - DNA, 33 bp, Homo sapien
gtagcagttgatactgacaaccaccacagatac

SEQ ID NO: 727476 - DNA, 33 bp, Homo sapien
gtagcagttgatactggcaaccaccacagatac

SEQ ID NO: 727477 - DNA, 33 bp, Homo sapien
acagctcagtgtgttacggccaaacgtgcctcc

SEQ ID NO: 727478 - DNA, 33 bp, Homo sapien
acagctcagtgtgttatggccaaacgtgcctcc

SEQ ID NO: 727479 - DNA, 33 bp, Homo sapien
caatagcaatggcagaggatttgattcagagac

SEQ ID NO: 727480 - DNA, 33 bp, Homo sapien
caatagcaatggcagatgatttgattcagagac

SEQ ID NO: 727481 - DNA, 33 bp, Homo sapien
gcaataagaggtgaatcataaactgtgatggag

SEQ ID NO: 727482 - DNA, 33 bp, Homo sapien
gcaataagaggtgaatgataaactgtgatggag

SEQ ID NO: 727483 - DNA, 33 bp, Homo sapien
tgtgaagggtacagataaaacaattttggacat

SEQ ID NO: 727484 - DNA, 33 bp, Homo sapien
tgtgaagggtacagattaaacaattttggacat

SEQ ID NO: 727485 - DNA, 33 bp, Homo sapien
gactgagcccattcagaccaaacagagtcagca

SEQ ID NO: 727486 - DNA, 33 bp, Homo sapien
gactgagcccattcaggccaaacagagtcagca

SEQ ID NO: 727487 - DNA, 33 bp, Homo sapien
ggtgatgccattgactaaagtaaggacgttgga

SEQ ID NO: 727488 - DNA, 33 bp, Homo sapien
ggtgatgccattgactgaagtaaggacgttgga

SEQ ID NO: 727489 - DNA, 33 bp, Homo sapien
aaatgtacaatacaaacttccccaagctccagt

SEQ ID NO: 727490 - DNA, 33 bp, Homo sapien
aaatgtacaatacaaatttccccaagctccagt

SEQ ID NO: 727491 - DNA, 33 bp, Homo sapien
gtagtagtcagatatacgttgggaaatccatgt

SEQ ID NO: 727492 - DNA, 33 bp, Homo sapien
gtagtagtcagatatatgttgggaaatccatgt

SEQ ID NO: 727493 - DNA, 33 bp, Homo sapien
tacacatctctgttcaaaagaatacagacatct

SEQ ID NO: 727494 - DNA, 33 bp, Homo sapien
tacacatctctgttcagaagaatacagacatct

SEQ ID NO: 727495 - DNA, 33 bp, Homo sapien
cttatcccccaatcacaagcacatacaggaact

SEQ ID NO: 727496 - DNA, 33 bp, Homo sapien
cttatcccccaatcacgagcacatacaggaact

SEQ ID NO: 727497 - DNA, 33 bp, Homo sapien
taagaaggatgcttagaaatgtgcctaaaatgg

SEQ ID NO: 727498 - DNA, 33 bp, Homo sapien
taagaaggatgcttaggaatgtgcctaaaatgg

SEQ ID NO: 727499 - DNA, 33 bp, Homo sapien
actataaacagcaatacctatcactagtctaaa

SEQ ID NO: 727500 - DNA, 33 bp, Homo sapien
actataaacagcaatatctatcactagtctaaa

SEQ ID NO: 727501 - DNA, 33 bp, Homo sapien
aacagtagtcagacacactgctaactccaaaag

SEQ ID NO: 727502 - DNA, 33 bp, Homo sapien
aacagtagtcagacacgctgctaactccaaaag

SEQ ID NO: 727503 - DNA, 33 bp, Homo sapien
ttactcaaacacacataaaccataagaaaagcc

SEQ ID NO: 727504 - DNA, 33 bp, Homo sapien
ttactcaaacacacatgaaccataagaaaagcc

SEQ ID NO: 727505 - DNA, 33 bp, Homo sapien
atttaacaaggacagtaaaccgacttcttctcc

SEQ ID NO: 727506 - DNA, 33 bp, Homo sapien
atttaacaaggacagtgaaccgacttcttctcc

SEQ ID NO: 727507 - DNA, 33 bp, Homo sapien
tagtcagggatttgaaatgcggtaatgtctttg

SEQ ID NO: 727508 - DNA, 33 bp, Homo sapien
tagtcagggatttgaactgcggtaatgtctttg

SEQ ID NO: 727509 - DNA, 33 bp, Homo sapien
tgcttgttatgaaatcactttaatataagccaa

SEQ ID NO: 727510 - DNA, 33 bp, Homo sapien
tgcttgttatgaaatcgctttaatataagccaa

SEQ ID NO: 727511 - DNA, 33 bp, Homo sapien
gaactccattgaggacaccagaagactatcatt

SEQ ID NO: 727512 - DNA, 33 bp, Homo sapien
gaactccattgaggacgccagaagactatcatt

SEQ ID NO: 727513 - DNA, 33 bp, Homo sapien
gtggcctcactgtctaaaatcacttctgagaga

SEQ ID NO: 727514 - DNA, 33 bp, Homo sapien
gtggcctcactgtctataatcacttctgagaga

SEQ ID NO: 727515 - DNA, 33 bp, Homo sapien
ttattttcgtggagcaagtggcaagttctcaaa

SEQ ID NO: 727516 - DNA, 33 bp, Homo sapien
ttattttcgtggagcaggtggcaagttctcaaa

SEQ ID NO: 727517 - DNA, 33 bp, Homo sapien
ttaacctacagtccacaccaagatacatgggta

SEQ ID NO: 727518 - DNA, 33 bp, Homo sapien
ttaacctacagtccacgccaagatacatgggta

SEQ ID NO: 727519 - DNA, 33 bp, Homo sapien
tagactccattagagacgggtggcttttgtttt

SEQ ID NO: 727520 - DNA, 33 bp, Homo sapien
tagactccattagagatgggtggcttttgtttt

SEQ ID NO: 727521 - DNA, 33 bp, Homo sapien
gtcagctaaacaaatacagcaaggtagaacaca

SEQ ID NO: 727522 - DNA, 33 bp, Homo sapien
gtcagctaaacaaatatagcaaggtagaacaca

SEQ ID NO: 727523 - DNA, 33 bp, Homo sapien
ggatgaaggaagcatccccagactgaaactaca

SEQ ID NO: 727524 - DNA, 33 bp, Homo sapien
ggatgaaggaagcatctccagactgaaactaca

SEQ ID NO: 727525 - DNA, 33 bp, Homo sapien
ttaagtaaggtcaaaaactgtctcttattggtc

SEQ ID NO: 727526 - DNA, 33 bp, Homo sapien
ttaagtaaggtcaaaagctgtctcttattggtc

SEQ ID NO: 727527 - DNA, 33 bp, Homo sapien
tctctaagattaatgacgtgcttggacataaat

SEQ ID NO: 727528 - DNA, 33 bp, Homo sapien
tctctaagattaatgatgtgcttggacataaat

SEQ ID NO: 727529 - DNA, 33 bp, Homo sapien
catgctccaagtatagaccattatgaggcacag

SEQ ID NO: 727530 - DNA, 33 bp, Homo sapien
catgctccaagtataggccattatgaggcacag

SEQ ID NO: 727531 - DNA, 33 bp, Homo sapien
ttctattatgtgcctacgggtttcttctatgag

SEQ ID NO: 727532 - DNA, 33 bp, Homo sapien
ttctattatgtgcctatgggtttcttctatgag

SEQ ID NO: 727533 - DNA, 33 bp, Homo sapien
gtaaaggtgtcaagaagtataattgcacgttcc

SEQ ID NO: 727534 - DNA, 33 bp, Homo sapien
gtaaaggtgtcaagaattataattgcacgttcc

SEQ ID NO: 727535 - DNA, 33 bp, Homo sapien
gggtattagggcatcacgggtttttttgggagg

SEQ ID NO: 727536 - DNA, 33 bp, Homo sapien
gggtattagggcatcatgggtttttttgggagg

SEQ ID NO: 727537 - DNA, 33 bp, Homo sapien
gaagacagggaaaaatcactgaaaaataagtga

SEQ ID NO: 727538 - DNA, 33 bp, Homo sapien
gaagacagggaaaaattactgaaaaataagtga

SEQ ID NO: 727539 - DNA, 33 bp, Homo sapien
gatctaggtgagtaacaaatggcgttaagaaaa

SEQ ID NO: 727540 - DNA, 33 bp, Homo sapien
gatctaggtgagtaacgaatggcgttaagaaaa

SEQ ID NO: 727541 - DNA, 33 bp, Homo sapien
ttcaaaggtagtaaaaccaaaacactggtgaaa

SEQ ID NO: 727542 - DNA, 33 bp, Homo sapien
ttcaaaggtagtaaaatcaaaacactggtgaaa

SEQ ID NO: 727543 - DNA, 33 bp, Homo sapien
atataatatggataacagatgtctaataaatgc

SEQ ID NO: 727544 - DNA, 33 bp, Homo sapien
atataatatggataacggatgtctaataaatgc

SEQ ID NO: 727545 - DNA, 33 bp, Homo sapien
agtactctgccttcaacatatatatcctcatag

SEQ ID NO: 727546 - DNA, 33 bp, Homo sapien
agtactctgccttcaatatatatatcctcatag

SEQ ID NO: 727547 - DNA, 33 bp, Homo sapien
tgtccctcactacagacaggatttattgtctgt

SEQ ID NO: 727548 - DNA, 33 bp, Homo sapien
tgtccctcactacagataggatttattgtctgt

SEQ ID NO: 727549 - DNA, 33 bp, Homo sapien
acagctgctactgatactaaagcttcctgcatg

SEQ ID NO: 727550 - DNA, 33 bp, Homo sapien
acagctgctactgatattaaagcttcctgcatg

SEQ ID NO: 727551 - DNA, 33 bp, Homo sapien
agctcttctcctaatagatcatccaacacattt

SEQ ID NO: 727552 - DNA, 33 bp, Homo sapien
agctcttctcctaatatatcatccaacacattt

SEQ ID NO: 727553 - DNA, 33 bp, Homo sapien
cacagaggcaggatcagtgagtttctggaagga

SEQ ID NO: 727554 - DNA, 33 bp, Homo sapien
cacagaggcaggatcattgagtttctggaagga

SEQ ID NO: 727555 - DNA, 33 bp, Homo sapien
tgtgtataagttcttcccagaaggttgactacc

SEQ ID NO: 727556 - DNA, 33 bp, Homo sapien
tgtgtataagttcttctcagaaggttgactacc

SEQ ID NO: 727557 - DNA, 33 bp, Homo sapien
gggcaaagcagacttacagcatttcgtccttcc

SEQ ID NO: 727558 - DNA, 33 bp, Homo sapien
gggcaaagcagacttatagcatttcgtccttcc

SEQ ID NO: 727559 - DNA, 33 bp, Homo sapien
tttctgatagtaatgcaaatggtttcagcccag

SEQ ID NO: 727560 - DNA, 33 bp, Homo sapien
tttctgatagtaatgcgaatggtttcagcccag

SEQ ID NO: 727561 - DNA, 33 bp, Homo sapien
ggtttcagcccagtaaaaaagatcacctcaaag

SEQ ID NO: 727562 - DNA, 33 bp, Homo sapien
ggtttcagcccagtaagaaagatcacctcaaag

SEQ ID NO: 727563 - DNA, 33 bp, Homo sapien
atccagaaactagaaaatccaatcggaacaaaa

SEQ ID NO: 727564 - DNA, 33 bp, Homo sapien
atccagaaactagaaattccaatcggaacaaaa

SEQ ID NO: 727565 - DNA, 33 bp, Homo sapien
cttctttttcttctccaagatgttaccattctc

SEQ ID NO: 727566 - DNA, 33 bp, Homo sapien
cttctttttcttctcccagatgttaccattctc

SEQ ID NO: 727567 - DNA, 33 bp, Homo sapien
gaaactaattgttaacagtagcagcatatccaa

SEQ ID NO: 727568 - DNA, 33 bp, Homo sapien
gaaactaattgttaacggtagcagcatatccaa

SEQ ID NO: 727569 - DNA, 33 bp, Homo sapien
taccacataatggttacgacttgggctctagag

SEQ ID NO: 727570 - DNA, 33 bp, Homo sapien
taccacataatggttaggacttgggctctagag

SEQ ID NO: 727571 - DNA, 33 bp, Homo sapien
tatatggcatacagaaaaatataaaatgtcagg

SEQ ID NO: 727572 - DNA, 33 bp, Homo sapien
tatatggcatacagaagaatataaaatgtcagg

SEQ ID NO: 727573 - DNA, 33 bp, Homo sapien
tgtgagaaataagctacggcacttacattacat

SEQ ID NO: 727574 - DNA, 33 bp, Homo sapien
tgtgagaaataagctatggcacttacattacat

SEQ ID NO: 727575 - DNA, 33 bp, Homo sapien
ggactgtaaaatccatcaagggttaacaggtct

SEQ ID NO: 727576 - DNA, 33 bp, Homo sapien
ggactgtaaaatccatgaagggttaacaggtct

SEQ ID NO: 727577 - DNA, 33 bp, Homo sapien
gattctctggttcttaacaaaaatatccaatta

SEQ ID NO: 727578 - DNA, 33 bp, Homo sapien
gattctctggttcttaccaaaaatatccaatta

SEQ ID NO: 727579 - DNA, 33 bp, Homo sapien
ggatttggaaaaggcaacctttagattggaaaa

SEQ ID NO: 727580 - DNA, 33 bp, Homo sapien
ggatttggaaaaggcagcctttagattggaaaa

SEQ ID NO: 727581 - DNA, 33 bp, Homo sapien
caataattgtaacaaaatatggagttatagtac

SEQ ID NO: 727582 - DNA, 33 bp, Homo sapien
caataattgtaacaaagtatggagttatagtac

SEQ ID NO: 727583 - DNA, 33 bp, Homo sapien
aggaatgttcaaaatacagcttgagatttatag

SEQ ID NO: 727584 - DNA, 33 bp, Homo sapien
aggaatgttcaaaatatagcttgagatttatag

SEQ ID NO: 727585 - DNA, 33 bp, Homo sapien
accaacaaaattaccacacagtgaccacctctg

SEQ ID NO: 727586 - DNA, 33 bp, Homo sapien
accaacaaaattaccatacagtgaccacctctg

SEQ ID NO: 727587 - DNA, 33 bp, Homo sapien
gtttgcaacccaacagaaagaggagtaagccag

SEQ ID NO: 727588 - DNA, 33 bp, Homo sapien
gtttgcaacccaacaggaagaggagtaagccag

SEQ ID NO: 727589 - DNA, 33 bp, Homo sapien
ctgaacgagttaagtaaacaacagcctctgtat

SEQ ID NO: 727590 - DNA, 33 bp, Homo sapien
ctgaacgagttaagtagacaacagcctctgtat

SEQ ID NO: 727591 - DNA, 33 bp, Homo sapien
tggcagtcatcctcaccattcccaaggtaagag

SEQ ID NO: 727592 - DNA, 33 bp, Homo sapien
tggcagtcatcctcactattcccaaggtaagag

SEQ ID NO: 727593 - DNA, 33 bp, Homo sapien
caccatttatgaagtacaagtgaaaactcactt

SEQ ID NO: 727594 - DNA, 33 bp, Homo sapien
caccatttatgaagtagaagtgaaaactcactt

SEQ ID NO: 727595 - DNA, 33 bp, Homo sapien
gcttctgttggttgcaaatgagtcataaggcca

SEQ ID NO: 727596 - DNA, 33 bp, Homo sapien
gcttctgttggttgcagatgagtcataaggcca

SEQ ID NO: 727597 - DNA, 33 bp, Homo sapien
atactcatacaatatcacaactagaaactttcc

SEQ ID NO: 727598 - DNA, 33 bp, Homo sapien
atactcatacaatatcgcaactagaaactttcc

SEQ ID NO: 727599 - DNA, 33 bp, Homo sapien
gatttcaacagacgatcaaagagaggagggctt

SEQ ID NO: 727600 - DNA, 33 bp, Homo sapien
gatttcaacagacgattaaagagaggagggctt

SEQ ID NO: 727601 - DNA, 33 bp, Homo sapien
tgtactttgatgattacgtttcaggactggaat

SEQ ID NO: 727602 - DNA, 33 bp, Homo sapien
tgtactttgatgattatgtttcaggactggaat

SEQ ID NO: 727603 - DNA, 33 bp, Homo sapien
atgaaacgcttgtagcaagtatttgatcacaac

SEQ ID NO: 727604 - DNA, 33 bp, Homo sapien
atgaaacgcttgtagccagtatttgatcacaac

SEQ ID NO: 727605 - DNA, 33 bp, Homo sapien
cctagctaaaaataaaccttagtgataaccata

SEQ ID NO: 727606 - DNA, 33 bp, Homo sapien
cctagctaaaaataaagcttagtgataaccata

SEQ ID NO: 727607 - DNA, 33 bp, Homo sapien
atgattctgcaggctggaaagttcaggatcgag

SEQ ID NO: 727608 - DNA, 33 bp, Homo sapien
atgattctgcaggctgtaaagttcaggatcgag

SEQ ID NO: 727609 - DNA, 33 bp, Homo sapien
tgatttaataacctagaagacagtgtttgaaga

SEQ ID NO: 727610 - DNA, 33 bp, Homo sapien
tgatttaataacctaggagacagtgtttgaaga

SEQ ID NO: 727611 - DNA, 33 bp, Homo sapien
gattcaattttggaccagaatgaatgtgggaag

SEQ ID NO: 727612 - DNA, 33 bp, Homo sapien
gattcaattttggacctgaatgaatgtgggaag

SEQ ID NO: 727613 - DNA, 33 bp, Homo sapien
tacttcaaatctcttacgtgccatgcctacatg

SEQ ID NO: 727614 - DNA, 33 bp, Homo sapien
tacttcaaatctcttatgtgccatgcctacatg

SEQ ID NO: 727615 - DNA, 33 bp, Homo sapien
caattttcctaaagtcccgccaaattccagggg

SEQ ID NO: 727616 - DNA, 33 bp, Homo sapien
caattttcctaaagtctcgccaaattccagggg

SEQ ID NO: 727617 - DNA, 33 bp, Homo sapien
gggtgcctggtctcaagatcacgattttatctc

SEQ ID NO: 727618 - DNA, 33 bp, Homo sapien
gggtgcctggtctcaatatcacgattttatctc

SEQ ID NO: 727619 - DNA, 33 bp, Homo sapien
ttttctggataattgccgcaacaagtaattgga

SEQ ID NO: 727620 - DNA, 33 bp, Homo sapien
ttttctggataattgctgcaacaagtaattgga

SEQ ID NO: 727621 - DNA, 33 bp, Homo sapien
gatttgtagttgatgaataattgactccatctg

SEQ ID NO: 727622 - DNA, 33 bp, Homo sapien
gatttgtagttgatgagtaattgactccatctg

SEQ ID NO: 727623 - DNA, 33 bp, Homo sapien
gctctttattgtgccccagcaatcatactgtgc

SEQ ID NO: 727624 - DNA, 33 bp, Homo sapien
gctctttattgtgccctagcaatcatactgtgc

SEQ ID NO: 727625 - DNA, 33 bp, Homo sapien
gtcttcatggtttaaaactatttctagaaagat

SEQ ID NO: 727626 - DNA, 33 bp, Homo sapien
gtcttcatggtttaaatctatttctagaaagat

SEQ ID NO: 727627 - DNA, 33 bp, Homo sapien
gcttcaagaaatgagcagcagtcatatgcccgg

SEQ ID NO: 727628 - DNA, 33 bp, Homo sapien
gcttcaagaaatgagcggcagtcatatgcccgg

SEQ ID NO: 727629 - DNA, 33 bp, Homo sapien
cagggacaatcgaaaacgagagtatattagttt

SEQ ID NO: 727630 - DNA, 33 bp, Homo sapien
cagggacaatcgaaaatgagagtatattagttt

SEQ ID NO: 727631 - DNA, 33 bp, Homo sapien
tccaaaaaaatgtatacagcagacgcgatttga

SEQ ID NO: 727632 - DNA, 33 bp, Homo sapien
tccaaaaaaatgtatagagcagacgcgatttga

SEQ ID NO: 727633 - DNA, 33 bp, Homo sapien
aagtaatgagaaattcaaagatgctggccttga

SEQ ID NO: 727634 - DNA, 33 bp, Homo sapien
aagtaatgagaaattcgaagatgctggccttga

SEQ ID NO: 727635 - DNA, 33 bp, Homo sapien
tggtgggactttaatacgatatgcaaacttcaa

SEQ ID NO: 727636 - DNA, 33 bp, Homo sapien
tggtgggactttaatatgatatgcaaacttcaa

SEQ ID NO: 727637 - DNA, 33 bp, Homo sapien
ctttcctgatagtcaccaactttaaactttagg

SEQ ID NO: 727638 - DNA, 33 bp, Homo sapien
ctttcctgatagtcactaactttaaactttagg

SEQ ID NO: 727639 - DNA, 33 bp, Homo sapien
tgatttacaaggtcaaattattggcttttatga

SEQ ID NO: 727640 - DNA, 33 bp, Homo sapien
tgatttacaaggtcaagttattggcttttatga

SEQ ID NO: 727641 - DNA, 33 bp, Homo sapien
tcattatcattactaacgctgagtagtcatggc

SEQ ID NO: 727642 - DNA, 33 bp, Homo sapien
tcattatcattactaatgctgagtagtcatggc

SEQ ID NO: 727643 - DNA, 33 bp, Homo sapien
aacgtatgagctttgaagctggaatgcctgggt

SEQ ID NO: 727644 - DNA, 33 bp, Homo sapien
aacgtatgagctttgaggctggaatgcctgggt

SEQ ID NO: 727645 - DNA, 33 bp, Homo sapien
ataagtaaatcacaaaccccatgaacatacatt

SEQ ID NO: 727646 - DNA, 33 bp, Homo sapien
ataagtaaatcacaaatcccatgaacatacatt

SEQ ID NO: 727647 - DNA, 33 bp, Homo sapien
gttgaagaggcacctgcagtcattttatactga

SEQ ID NO: 727648 - DNA, 33 bp, Homo sapien
gttgaagaggcacctgtagtcattttatactga

SEQ ID NO: 727649 - DNA, 33 bp, Homo sapien
agctgcttggataagaatcttagaccttttcat

SEQ ID NO: 727650 - DNA, 33 bp, Homo sapien
agctgcttggataagactcttagaccttttcat

SEQ ID NO: 727651 - DNA, 33 bp, Homo sapien
caagttaacaagtattaaaggaaacatgcatat

SEQ ID NO: 727652 - DNA, 33 bp, Homo sapien
caagttaacaagtatttaaggaaacatgcatat

SEQ ID NO: 727653 - DNA, 33 bp, Homo sapien
aacaccaatattcatcactgtttaaaagagtca

SEQ ID NO: 727654 - DNA, 33 bp, Homo sapien
aacaccaatattcatcgctgtttaaaagagtca

SEQ ID NO: 727655 - DNA, 33 bp, Homo sapien
ttgcatactctgacaacagtttgaggccccaga

SEQ ID NO: 727656 - DNA, 33 bp, Homo sapien
ttgcatactctgacaatagtttgaggccccaga

SEQ ID NO: 727657 - DNA, 33 bp, Homo sapien
gcctttacttcctcaaagaccaaaatgtactgt

SEQ ID NO: 727658 - DNA, 33 bp, Homo sapien
gcctttacttcctcaatgaccaaaatgtactgt

SEQ ID NO: 727659 - DNA, 33 bp, Homo sapien
ttgtgtttgagtcaacagagatgtagatgggaa

SEQ ID NO: 727660 - DNA, 33 bp, Homo sapien
ttgtgtttgagtcaacggagatgtagatgggaa

SEQ ID NO: 727661 - DNA, 33 bp, Homo sapien
cgtgctcagtgttaagcatcagattcccaaatg

SEQ ID NO: 727662 - DNA, 33 bp, Homo sapien
cgtgctcagtgttaagtatcagattcccaaatg

SEQ ID NO: 727663 - DNA, 33 bp, Homo sapien
cttgatcagtaagaataaaaagcctgagataca

SEQ ID NO: 727664 - DNA, 33 bp, Homo sapien
cttgatcagtaagaattaaaagcctgagataca

SEQ ID NO: 727665 - DNA, 33 bp, Homo sapien
aggctgaagaaccgcaaactcatggcgagaatg

SEQ ID NO: 727666 - DNA, 33 bp, Homo sapien
aggctgaagaaccgcacactcatggcgagaatg

SEQ ID NO: 727667 - DNA, 33 bp, Homo sapien
tttatcctataggccaatatttcagccattgtc

SEQ ID NO: 727668 - DNA, 33 bp, Homo sapien
tttatcctataggccagtatttcagccattgtc

SEQ ID NO: 727669 - DNA, 33 bp, Homo sapien
catttgactttcggcaagatattgagtaggtat

SEQ ID NO: 727670 - DNA, 33 bp, Homo sapien
catttgactttcggcatgatattgagtaggtat

SEQ ID NO: 727671 - DNA, 33 bp, Homo sapien
ggaagaatgatcaaaacacagactgcctcttca

SEQ ID NO: 727672 - DNA, 33 bp, Homo sapien
ggaagaatgatcaaaatacagactgcctcttca

SEQ ID NO: 727673 - DNA, 33 bp, Homo sapien
ctccttcctctgtgcaacttcatcaggaaatat

SEQ ID NO: 727674 - DNA, 33 bp, Homo sapien
ctccttcctctgtgcagcttcatcaggaaatat

SEQ ID NO: 727675 - DNA, 33 bp, Homo sapien
caattaaagggagaaaattaggatgcagaaaac

SEQ ID NO: 727676 - DNA, 33 bp, Homo sapien
caattaaagggagaaagttaggatgcagaaaac

SEQ ID NO: 727677 - DNA, 33 bp, Homo sapien
gctgccctaggcaacagtcagcagaccgccaaa

SEQ ID NO: 727678 - DNA, 33 bp, Homo sapien
gctgccctaggcaacattcagcagaccgccaaa

SEQ ID NO: 727679 - DNA, 33 bp, Homo sapien
ctttcatgctaatgcccctttaatgtttccatt

SEQ ID NO: 727680 - DNA, 33 bp, Homo sapien
ctttcatgctaatgcctctttaatgtttccatt

SEQ ID NO: 727681 - DNA, 33 bp, Homo sapien
agcagtcttcaaacttcaagctagagtctctca

SEQ ID NO: 727682 - DNA, 33 bp, Homo sapien
agcagtcttcaaactttaagctagagtctctca

SEQ ID NO: 727683 - DNA, 33 bp, Homo sapien
ccagcctgctgtttcaccctgctgattttgtat

SEQ ID NO: 727684 - DNA, 33 bp, Homo sapien
ccagcctgctgtttcatcctgctgattttgtat

SEQ ID NO: 727685 - DNA, 33 bp, Homo sapien
gaggctaacgctttaaagtaaatgtgaaatgct

SEQ ID NO: 727686 - DNA, 33 bp, Homo sapien
gaggctaacgctttaacgtaaatgtgaaatgct

SEQ ID NO: 727687 - DNA, 33 bp, Homo sapien
gaagaggaggtccaggaaagtgtgatatttgag

SEQ ID NO: 727688 - DNA, 33 bp, Homo sapien
gaagaggaggtccagggaagtgtgatatttgag

SEQ ID NO: 727689 - DNA, 33 bp, Homo sapien
aatagagctagttaaaggggattgacagtattt

SEQ ID NO: 727690 - DNA, 33 bp, Homo sapien
aatagagctagttaaatgggattgacagtattt

SEQ ID NO: 727691 - DNA, 33 bp, Homo sapien
ctagtatctctgcaaccaaacatcaaatcagtc

SEQ ID NO: 727692 - DNA, 33 bp, Homo sapien
ctagtatctctgcaacgaaacatcaaatcagtc

SEQ ID NO: 727693 - DNA, 33 bp, Homo sapien
agtttaactccaattactttatgggtagtctgt

SEQ ID NO: 727694 - DNA, 33 bp, Homo sapien
agtttaactccaattattttatgggtagtctgt

SEQ ID NO: 727695 - DNA, 33 bp, Homo sapien
acttcgctgtttgtatcagccctcctcagagac

SEQ ID NO: 727696 - DNA, 33 bp, Homo sapien
acttcgctgtttgtatgagccctcctcagagac

SEQ ID NO: 727697 - DNA, 33 bp, Homo sapien
aataagcagcaaaaaaaattaactgacttgtgt

SEQ ID NO: 727698 - DNA, 33 bp, Homo sapien
aataagcagcaaaaaagattaactgacttgtgt

SEQ ID NO: 727699 - DNA, 33 bp, Homo sapien
ccaaatagtgctcttaaaaaattctctagtgct

SEQ ID NO: 727700 - DNA, 33 bp, Homo sapien
ccaaatagtgctcttacaaaattctctagtgct

SEQ ID NO: 727701 - DNA, 33 bp, Homo sapien
agtttttctgattccaacattattaacatcttt

SEQ ID NO: 727702 - DNA, 33 bp, Homo sapien
agtttttctgattccaccattattaacatcttt

SEQ ID NO: 727703 - DNA, 33 bp, Homo sapien
ggagggtcataagaagaaaattacttccatggg

SEQ ID NO: 727704 - DNA, 33 bp, Homo sapien
ggagggtcataagaaggaaattacttccatggg

SEQ ID NO: 727705 - DNA, 33 bp, Homo sapien
gagctttgcacagttaacctgaagaaatcttct

SEQ ID NO: 727706 - DNA, 33 bp, Homo sapien
gagctttgcacagttagcctgaagaaatcttct

SEQ ID NO: 727707 - DNA, 33 bp, Homo sapien
aataaaacaactattacgaaagtgcttaagaat

SEQ ID NO: 727708 - DNA, 33 bp, Homo sapien
aataaaacaactattatgaaagtgcttaagaat

SEQ ID NO: 727709 - DNA, 33 bp, Homo sapien
aatttccacttccggccatacaattttgaaatg

SEQ ID NO: 727710 - DNA, 33 bp, Homo sapien
aatttccacttccggctatacaattttgaaatg

SEQ ID NO: 727711 - DNA, 33 bp, Homo sapien
ctgcttcctataggccaccaaaagctacaggat

SEQ ID NO: 727712 - DNA, 33 bp, Homo sapien
ctgcttcctataggccgccaaaagctacaggat

SEQ ID NO: 727713 - DNA, 33 bp, Homo sapien
agtacttccctagttaagagactaaacaaagac

SEQ ID NO: 727714 - DNA, 33 bp, Homo sapien
agtacttccctagttaggagactaaacaaagac

SEQ ID NO: 727715 - DNA, 33 bp, Homo sapien
agcttctagactctcacgtgaaatccctactaa

SEQ ID NO: 727716 - DNA, 33 bp, Homo sapien
agcttctagactctcatgtgaaatccctactaa

SEQ ID NO: 727717 - DNA, 33 bp, Homo sapien
gaataatgggagagaacgattcaaaaattaccc

SEQ ID NO: 727718 - DNA, 33 bp, Homo sapien
gaataatgggagagaatgattcaaaaattaccc

SEQ ID NO: 727719 - DNA, 33 bp, Homo sapien
acaacagctaaacaagccaaccaataaaattaa

SEQ ID NO: 727720 - DNA, 33 bp, Homo sapien
acaacagctaaacaagtcaaccaataaaattaa

SEQ ID NO: 727721 - DNA, 33 bp, Homo sapien
tttctatttttatgaaaagcatcattggtatta

SEQ ID NO: 727722 - DNA, 33 bp, Homo sapien
tttctatttttatgaagagcatcattggtatta

SEQ ID NO: 727723 - DNA, 33 bp, Homo sapien
tgtctaatagctgaaaactacccaagtacctat

SEQ ID NO: 727724 - DNA, 33 bp, Homo sapien
tgtctaatagctgaaatctacccaagtacctat

SEQ ID NO: 727725 - DNA, 33 bp, Homo sapien
caaaattagaaggaataaaaggagcggatcaat

SEQ ID NO: 727726 - DNA, 33 bp, Homo sapien
caaaattagaaggaatgaaaggagcggatcaat

SEQ ID NO: 727727 - DNA, 33 bp, Homo sapien
taatattggaatgtgtaaaggtaggataaagga

SEQ ID NO: 727728 - DNA, 33 bp, Homo sapien
taatattggaatgtgtgaaggtaggataaagga

SEQ ID NO: 727729 - DNA, 33 bp, Homo sapien
tattgggaagcaacagaccaatagagaagtgat

SEQ ID NO: 727730 - DNA, 33 bp, Homo sapien
tattgggaagcaacagcccaatagagaagtgat

SEQ ID NO: 727731 - DNA, 33 bp, Homo sapien
tgcacacatttgcagaacagattaggaattttg

SEQ ID NO: 727732 - DNA, 33 bp, Homo sapien
tgcacacatttgcagagcagattaggaattttg

SEQ ID NO: 727733 - DNA, 33 bp, Homo sapien
tgatttaggcaggaaactggcaaaagataaatc

SEQ ID NO: 727734 - DNA, 33 bp, Homo sapien
tgatttaggcaggaaattggcaaaagataaatc

SEQ ID NO: 727735 - DNA, 33 bp, Homo sapien
taagcctagccaaaacccttcaaattgctgaat

SEQ ID NO: 727736 - DNA, 33 bp, Homo sapien
taagcctagccaaaacgcttcaaattgctgaat

SEQ ID NO: 727737 - DNA, 33 bp, Homo sapien
cctaaagttaaacaacaatcctagatgagccag

SEQ ID NO: 727738 - DNA, 33 bp, Homo sapien
cctaaagttaaacaaccatcctagatgagccag

SEQ ID NO: 727739 - DNA, 33 bp, Homo sapien
tcatgttctggatgtgaatattaatgtagcaat

SEQ ID NO: 727740 - DNA, 33 bp, Homo sapien
tcatgttctggatgtggatattaatgtagcaat

SEQ ID NO: 727741 - DNA, 33 bp, Homo sapien
attcttatctttcactcaaatgaattcaaactg

SEQ ID NO: 727742 - DNA, 33 bp, Homo sapien
attcttatctttcacttaaatgaattcaaactg

SEQ ID NO: 727743 - DNA, 33 bp, Homo sapien
atggtaaatccattgacagtttgcacaatgcac

SEQ ID NO: 727744 - DNA, 33 bp, Homo sapien
atggtaaatccattgagagtttgcacaatgcac

SEQ ID NO: 727745 - DNA, 33 bp, Homo sapien
ctaacattaaatttcaatatcttttggcccaga

SEQ ID NO: 727746 - DNA, 33 bp, Homo sapien
ctaacattaaatttcagtatcttttggcccaga

SEQ ID NO: 727747 - DNA, 33 bp, Homo sapien
cctgcatagaattttaaaggaggagtgggctga

SEQ ID NO: 727748 - DNA, 33 bp, Homo sapien
cctgcatagaattttagaggaggagtgggctga

SEQ ID NO: 727749 - DNA, 33 bp, Homo sapien
cttactgaatgcatgacgattgactaataggtg

SEQ ID NO: 727750 - DNA, 33 bp, Homo sapien
cttactgaatgcatgaggattgactaataggtg

SEQ ID NO: 727751 - DNA, 33 bp, Homo sapien
caaaatagcagtcaaaatatttcattctcaatg

SEQ ID NO: 727752 - DNA, 33 bp, Homo sapien
caaaatagcagtcaaagtatttcattctcaatg

SEQ ID NO: 727753 - DNA, 33 bp, Homo sapien
tatttaactgaagggaatcagcaattttcttca

SEQ ID NO: 727754 - DNA, 33 bp, Homo sapien
tatttaactgaagggactcagcaattttcttca

SEQ ID NO: 727755 - DNA, 33 bp, Homo sapien
ggcaagaagaactctcaaggcatctgacggcca

SEQ ID NO: 727756 - DNA, 33 bp, Homo sapien
ggcaagaagaactctcgaggcatctgacggcca

SEQ ID NO: 727757 - DNA, 33 bp, Homo sapien
tgagtgcttttatacaagagttagcaaattaaa

SEQ ID NO: 727758 - DNA, 33 bp, Homo sapien
tgagtgcttttatacaggagttagcaaattaaa

SEQ ID NO: 727759 - DNA, 33 bp, Homo sapien
caattcaggagtcaaaatatcctgtaggtattg

SEQ ID NO: 727760 - DNA, 33 bp, Homo sapien
caattcaggagtcaaagtatcctgtaggtattg

SEQ ID NO: 727761 - DNA, 33 bp, Homo sapien
acaaggatatatttgagacaacggtgaccttat

SEQ ID NO: 727762 - DNA, 33 bp, Homo sapien
acaaggatatatttgatacaacggtgaccttat

SEQ ID NO: 727763 - DNA, 33 bp, Homo sapien
agatgtccctctataacgatacacacttgtgat

SEQ ID NO: 727764 - DNA, 33 bp, Homo sapien
agatgtccctctataatgatacacacttgtgat

SEQ ID NO: 727765 - DNA, 33 bp, Homo sapien
cactgctttaaagaagactccttaggactgatc

SEQ ID NO: 727766 - DNA, 33 bp, Homo sapien
cactgctttaaagaagcctccttaggactgatc

SEQ ID NO: 727767 - DNA, 33 bp, Homo sapien
tgcaaagcagttcactcaagatggccacctagt

SEQ ID NO: 727768 - DNA, 33 bp, Homo sapien
tgcaaagcagttcacttaagatggccacctagt

SEQ ID NO: 727769 - DNA, 33 bp, Homo sapien
atgtgtggtaattatacgaacaggcgacagaga

SEQ ID NO: 727770 - DNA, 33 bp, Homo sapien
atgtgtggtaattatatgaacaggcgacagaga

SEQ ID NO: 727771 - DNA, 33 bp, Homo sapien
tatcctgtacctatataaacgatgaaccccagg

SEQ ID NO: 727772 - DNA, 33 bp, Homo sapien
tatcctgtacctatatcaacgatgaaccccagg

SEQ ID NO: 727773 - DNA, 33 bp, Homo sapien
cctttcaggagcgggaacatgcagatgagcagg

SEQ ID NO: 727774 - DNA, 33 bp, Homo sapien
cctttcaggagcgggagcatgcagatgagcagg

SEQ ID NO: 727775 - DNA, 33 bp, Homo sapien
cttgggttcaaataagaatacaatacttgctag

SEQ ID NO: 727776 - DNA, 33 bp, Homo sapien
cttgggttcaaataaggatacaatacttgctag

SEQ ID NO: 727777 - DNA, 33 bp, Homo sapien
tgagtaggtactaagcccggtaagactgccaaa

SEQ ID NO: 727778 - DNA, 33 bp, Homo sapien
tgagtaggtactaagctcggtaagactgccaaa

SEQ ID NO: 727779 - DNA, 33 bp, Homo sapien
caaaaacaaactgtaaccatctcttaatgccag

SEQ ID NO: 727780 - DNA, 33 bp, Homo sapien
caaaaacaaactgtaatcatctcttaatgccag

SEQ ID NO: 727781 - DNA, 33 bp, Homo sapien
gtcttttattgtttggaaaatcaagtcatgtta

SEQ ID NO: 727782 - DNA, 33 bp, Homo sapien
gtcttttattgtttggcaaatcaagtcatgtta

SEQ ID NO: 727783 - DNA, 33 bp, Homo sapien
tacttgtacagaaaaaaaagttatgactagtaa

SEQ ID NO: 727784 - DNA, 33 bp, Homo sapien
tacttgtacagaaaaagaagttatgactagtaa

SEQ ID NO: 727785 - DNA, 33 bp, Homo sapien
atattacctttactgaactcatacatccccaat

SEQ ID NO: 727786 - DNA, 33 bp, Homo sapien
atattacctttactgacctcatacatccccaat

SEQ ID NO: 727787 - DNA, 33 bp, Homo sapien
atttgctaaaaatgcaataagcctgatagacta

SEQ ID NO: 727788 - DNA, 33 bp, Homo sapien
atttgctaaaaatgcagtaagcctgatagacta

SEQ ID NO: 727789 - DNA, 33 bp, Homo sapien
gaaaatacacaaaccaatagtttcactagtaag

SEQ ID NO: 727790 - DNA, 33 bp, Homo sapien
gaaaatacacaaaccagtagtttcactagtaag

SEQ ID NO: 727791 - DNA, 33 bp, Homo sapien
ccctcaacattggaaactacaactcaaaatgag

SEQ ID NO: 727792 - DNA, 33 bp, Homo sapien
ccctcaacattggaaattacaactcaaaatgag

SEQ ID NO: 727793 - DNA, 33 bp, Homo sapien
ttttaattatcatgtgaaatgaaagaagaccct

SEQ ID NO: 727794 - DNA, 33 bp, Homo sapien
ttttaattatcatgtggaatgaaagaagaccct

SEQ ID NO: 727795 - DNA, 33 bp, Homo sapien
tatctatccagtaatacacataaccaaaggaat

SEQ ID NO: 727796 - DNA, 33 bp, Homo sapien
tatctatccagtaatagacataaccaaaggaat

SEQ ID NO: 727797 - DNA, 33 bp, Homo sapien
catttacttggaagggaattctgagatgtatgg

SEQ ID NO: 727798 - DNA, 33 bp, Homo sapien
catttacttggaaggggattctgagatgtatgg

SEQ ID NO: 727799 - DNA, 33 bp, Homo sapien
ttcatatacctccttaccagagttttgccttta

SEQ ID NO: 727800 - DNA, 33 bp, Homo sapien
ttcatatacctccttatcagagttttgccttta

SEQ ID NO: 727801 - DNA, 33 bp, Homo sapien
ggaacattgaattaaccatgtttttcctcaaaa

SEQ ID NO: 727802 - DNA, 33 bp, Homo sapien
ggaacattgaattaactatgtttttcctcaaaa

SEQ ID NO: 727803 - DNA, 33 bp, Homo sapien
ttaaatttaatccatacgactggaacattgaat

SEQ ID NO: 727804 - DNA, 33 bp, Homo sapien
ttaaatttaatccatatgactggaacattgaat

SEQ ID NO: 727805 - DNA, 33 bp, Homo sapien
tcattgttctgatgaagaggatctggctgtctt

SEQ ID NO: 727806 - DNA, 33 bp, Homo sapien
tcattgttctgatgaataggatctggctgtctt

SEQ ID NO: 727807 - DNA, 33 bp, Homo sapien
gttatgatggaagaaacgcactgcgggttgctg

SEQ ID NO: 727808 - DNA, 33 bp, Homo sapien
gttatgatggaagaaatgcactgcgggttgctg

SEQ ID NO: 727809 - DNA, 33 bp, Homo sapien
atgcatgacccatagaagctgctgctaagaggg

SEQ ID NO: 727810 - DNA, 33 bp, Homo sapien
atgcatgacccatagacgctgctgctaagaggg

SEQ ID NO: 727811 - DNA, 33 bp, Homo sapien
cttcagcgccatgttgcagcaaattcagtacaa

SEQ ID NO: 727812 - DNA, 33 bp, Homo sapien
cttcagcgccatgttgtagcaaattcagtacaa

SEQ ID NO: 727813 - DNA, 33 bp, Homo sapien
tacaaaatcgttagtaacagcttggagtaggaa

SEQ ID NO: 727814 - DNA, 33 bp, Homo sapien
tacaaaatcgttagtatcagcttggagtaggaa

SEQ ID NO: 727815 - DNA, 33 bp, Homo sapien
ttgagtagtagttgaaaaatgatataggctggg

SEQ ID NO: 727816 - DNA, 33 bp, Homo sapien
ttgagtagtagttgaagaatgatataggctggg

SEQ ID NO: 727817 - DNA, 33 bp, Homo sapien
taataactcatatccccgagtcctgtgtcagtc

SEQ ID NO: 727818 - DNA, 33 bp, Homo sapien
taataactcatatccctgagtcctgtgtcagtc

SEQ ID NO: 727819 - DNA, 33 bp, Homo sapien
ctcaaacatctccagaccatatacccttttctt

SEQ ID NO: 727820 - DNA, 33 bp, Homo sapien
ctcaaacatctccagatcatatacccttttctt

SEQ ID NO: 727821 - DNA, 33 bp, Homo sapien
tgtacaactttttgccacaacctcagaaaaatc

SEQ ID NO: 727822 - DNA, 33 bp, Homo sapien
tgtacaactttttgccgcaacctcagaaaaatc

SEQ ID NO: 727823 - DNA, 33 bp, Homo sapien
ttacatggaccaacaaacagagaaccaatgaga

SEQ ID NO: 727824 - DNA, 33 bp, Homo sapien
ttacatggaccaacaaccagagaaccaatgaga

SEQ ID NO: 727825 - DNA, 33 bp, Homo sapien
gtgactatatgataacaaccattaatcagacca

SEQ ID NO: 727826 - DNA, 33 bp, Homo sapien
gtgactatatgataacgaccattaatcagacca

SEQ ID NO: 727827 - DNA, 33 bp, Homo sapien
tttaaggagtaaaagaaacattaagcattatct

SEQ ID NO: 727828 - DNA, 33 bp, Homo sapien
tttaaggagtaaaagagacattaagcattatct

SEQ ID NO: 727829 - DNA, 33 bp, Homo sapien
cttgaggcagcaataacgtagccagaattttta

SEQ ID NO: 727830 - DNA, 33 bp, Homo sapien
cttgaggcagcaataatgtagccagaattttta

SEQ ID NO: 727831 - DNA, 33 bp, Homo sapien
ggatgaagataaacccagacgcactggtacatg

SEQ ID NO: 727832 - DNA, 33 bp, Homo sapien
ggatgaagataaacccggacgcactggtacatg

SEQ ID NO: 727833 - DNA, 33 bp, Homo sapien
gagccaaacgatatcaagcatgaggaccaaagg

SEQ ID NO: 727834 - DNA, 33 bp, Homo sapien
gagccaaacgatatcaggcatgaggaccaaagg

SEQ ID NO: 727835 - DNA, 33 bp, Homo sapien
taaggtgcaaaggagacaggctttcccacattg

SEQ ID NO: 727836 - DNA, 33 bp, Homo sapien
taaggtgcaaaggagataggctttcccacattg

SEQ ID NO: 727837 - DNA, 33 bp, Homo sapien
aacgtaatttcacaacaactacctgagaataaa

SEQ ID NO: 727838 - DNA, 33 bp, Homo sapien
aacgtaatttcacaacgactacctgagaataaa

SEQ ID NO: 727839 - DNA, 33 bp, Homo sapien
gagggttaggagatgaaggcagacatagctgaa

SEQ ID NO: 727840 - DNA, 33 bp, Homo sapien
gagggttaggagatgatggcagacatagctgaa

SEQ ID NO: 727841 - DNA, 33 bp, Homo sapien
ttctaacctacagaaactttaaggtaatgcata

SEQ ID NO: 727842 - DNA, 33 bp, Homo sapien
ttctaacctacagaaagtttaaggtaatgcata

SEQ ID NO: 727843 - DNA, 33 bp, Homo sapien
tagggaccatgtttcacataatcttgtgtagtg

SEQ ID NO: 727844 - DNA, 33 bp, Homo sapien
tagggaccatgtttcatataatcttgtgtagtg

SEQ ID NO: 727845 - DNA, 33 bp, Homo sapien
tcacttgagatcaggaaattgaccacttgaggt

SEQ ID NO: 727846 - DNA, 33 bp, Homo sapien
tcacttgagatcaggagattgaccacttgaggt

SEQ ID NO: 727847 - DNA, 33 bp, Homo sapien
gaaacagtaacaaatacgggggctcactttgcc

SEQ ID NO: 727848 - DNA, 33 bp, Homo sapien
gaaacagtaacaaatatgggggctcactttgcc

SEQ ID NO: 727849 - DNA, 33 bp, Homo sapien
tagctagtgaaattaacgtataccagacattgt

SEQ ID NO: 727850 - DNA, 33 bp, Homo sapien
tagctagtgaaattaatgtataccagacattgt

SEQ ID NO: 727851 - DNA, 33 bp, Homo sapien
ggaaacgaaatttgtacctctagaaactagcac

SEQ ID NO: 727852 - DNA, 33 bp, Homo sapien
ggaaacgaaatttgtatctctagaaactagcac

SEQ ID NO: 727853 - DNA, 33 bp, Homo sapien
cattaccaaatcagtaaaatctgaactttttat

SEQ ID NO: 727854 - DNA, 33 bp, Homo sapien
cattaccaaatcagtacaatctgaactttttat

SEQ ID NO: 727855 - DNA, 33 bp, Homo sapien
ccatgttcctgagcataaagaaatctgtcgaga

SEQ ID NO: 727856 - DNA, 33 bp, Homo sapien
ccatgttcctgagcatgaagaaatctgtcgaga

SEQ ID NO: 727857 - DNA, 33 bp, Homo sapien
agcaaaatttcattcccactaaaccacctacat

SEQ ID NO: 727858 - DNA, 33 bp, Homo sapien
agcaaaatttcattcctactaaaccacctacat

SEQ ID NO: 727859 - DNA, 33 bp, Homo sapien
gccatcaaagatagttaaaagaatgctattttc

SEQ ID NO: 727860 - DNA, 33 bp, Homo sapien
gccatcaaagatagttgaaagaatgctattttc

SEQ ID NO: 727861 - DNA, 33 bp, Homo sapien
ttgtgctgaggctcaacaaatgacaagaagctt

SEQ ID NO: 727862 - DNA, 33 bp, Homo sapien
ttgtgctgaggctcaataaatgacaagaagctt

SEQ ID NO: 727863 - DNA, 33 bp, Homo sapien
ctatgcaacttccatcaatttgttgtctggttg

SEQ ID NO: 727864 - DNA, 33 bp, Homo sapien
ctatgcaacttccatccatttgttgtctggttg

SEQ ID NO: 727865 - DNA, 33 bp, Homo sapien
acgaaagaggcagaaaaaaatcttgattaatgg

SEQ ID NO: 727866 - DNA, 33 bp, Homo sapien
acgaaagaggcagaaacaaatcttgattaatgg

SEQ ID NO: 727867 - DNA, 33 bp, Homo sapien
aaatggcagacaaccaacaaatttctgctatca

SEQ ID NO: 727868 - DNA, 33 bp, Homo sapien
aaatggcagacaaccagcaaatttctgctatca

SEQ ID NO: 727869 - DNA, 33 bp, Homo sapien
gacttttattctcccacgtagatcagccaccag

SEQ ID NO: 727870 - DNA, 33 bp, Homo sapien
gacttttattctcccatgtagatcagccaccag

SEQ ID NO: 727871 - DNA, 33 bp, Homo sapien
cctgactggtttagataaaggattcacgccagg

SEQ ID NO: 727872 - DNA, 33 bp, Homo sapien
cctgactggtttagatcaaggattcacgccagg

SEQ ID NO: 727873 - DNA, 33 bp, Homo sapien
gtattctgaaacctaacggccaatatgaaggta

SEQ ID NO: 727874 - DNA, 33 bp, Homo sapien
gtattctgaaacctaatggccaatatgaaggta

SEQ ID NO: 727875 - DNA, 33 bp, Homo sapien
tttatgcaatgggagacgtattcgtttgctatc

SEQ ID NO: 727876 - DNA, 33 bp, Homo sapien
tttatgcaatgggagatgtattcgtttgctatc

SEQ ID NO: 727877 - DNA, 33 bp, Homo sapien
acgagtcgcattggaaacagaaactagggaggt

SEQ ID NO: 727878 - DNA, 33 bp, Homo sapien
acgagtcgcattggaagcagaaactagggaggt

SEQ ID NO: 727879 - DNA, 33 bp, Homo sapien
tccaggaataatattacatgacctgtaagtgtt

SEQ ID NO: 727880 - DNA, 33 bp, Homo sapien
tccaggaataatattatatgacctgtaagtgtt

SEQ ID NO: 727881 - DNA, 33 bp, Homo sapien
actctgctacacaacaagaacttatatttggta

SEQ ID NO: 727882 - DNA, 33 bp, Homo sapien
actctgctacacaacaggaacttatatttggta

SEQ ID NO: 727883 - DNA, 33 bp, Homo sapien
gtacttactcaagcagaaaaacagaaaaataaa

SEQ ID NO: 727884 - DNA, 33 bp, Homo sapien
gtacttactcaagcaggaaaacagaaaaataaa

SEQ ID NO: 727885 - DNA, 33 bp, Homo sapien
ggtgacactgaccatgcaactggcacatatacc

SEQ ID NO: 727886 - DNA, 33 bp, Homo sapien
ggtgacactgaccatgtaactggcacatatacc

SEQ ID NO: 727887 - DNA, 33 bp, Homo sapien
cagtgaggacaagggtcacatacaaagtataga

SEQ ID NO: 727888 - DNA, 33 bp, Homo sapien
cagtgaggacaagggttacatacaaagtataga

SEQ ID NO: 727889 - DNA, 33 bp, Homo sapien
gacatctttagctgcacatctattttacctgtt

SEQ ID NO: 727890 - DNA, 33 bp, Homo sapien
gacatctttagctgcagatctattttacctgtt

SEQ ID NO: 727891 - DNA, 33 bp, Homo sapien
tatttttaagcaactacgtgaaatggtgacagg

SEQ ID NO: 727892 - DNA, 33 bp, Homo sapien
tatttttaagcaactatgtgaaatggtgacagg

SEQ ID NO: 727893 - DNA, 33 bp, Homo sapien
gtgtgttaataagttgaatggaccctctgcctt

SEQ ID NO: 727894 - DNA, 33 bp, Homo sapien
gtgtgttaataagttgcatggaccctctgcctt

SEQ ID NO: 727895 - DNA, 33 bp, Homo sapien
gtgaatattgtacaggaagagatacattttgga

SEQ ID NO: 727896 - DNA, 33 bp, Homo sapien
gtgaatattgtacagggagagatacattttgga

SEQ ID NO: 727897 - DNA, 33 bp, Homo sapien
tccaaataacaactaactggttggtctttgggg

SEQ ID NO: 727898 - DNA, 33 bp, Homo sapien
tccaaataacaactaattggttggtctttgggg

SEQ ID NO: 727899 - DNA, 33 bp, Homo sapien
ctgttcaagtaagttgaattgctttgggagagt

SEQ ID NO: 727900 - DNA, 33 bp, Homo sapien
ctgttcaagtaagttggattgctttgggagagt

SEQ ID NO: 727901 - DNA, 33 bp, Homo sapien
aaagacagaatgaacacgtaagaaaacagtatg

SEQ ID NO: 727902 - DNA, 33 bp, Homo sapien
aaagacagaatgaacatgtaagaaaacagtatg

SEQ ID NO: 727903 - DNA, 33 bp, Homo sapien
acaagagggtctaagaaagtggtcaatacttaa

SEQ ID NO: 727904 - DNA, 33 bp, Homo sapien
acaagagggtctaagagagtggtcaatacttaa

SEQ ID NO: 727905 - DNA, 33 bp, Homo sapien
ttacttgcaggcaacaatggtctaaaaatatta

SEQ ID NO: 727906 - DNA, 33 bp, Homo sapien
ttacttgcaggcaacagtggtctaaaaatatta

SEQ ID NO: 727907 - DNA, 33 bp, Homo sapien
atgaagagattgcaaagaattaactacacagaa

SEQ ID NO: 727908 - DNA, 33 bp, Homo sapien
atgaagagattgcaaataattaactacacagaa

SEQ ID NO: 727909 - DNA, 33 bp, Homo sapien
atcctctagttgagtacgcaaacttctgaaatc

SEQ ID NO: 727910 - DNA, 33 bp, Homo sapien
atcctctagttgagtatgcaaacttctgaaatc

SEQ ID NO: 727911 - DNA, 33 bp, Homo sapien
gtcctagatggccaccacctacaacaacattta

SEQ ID NO: 727912 - DNA, 33 bp, Homo sapien
gtcctagatggccaccgcctacaacaacattta

SEQ ID NO: 727913 - DNA, 33 bp, Homo sapien
gtcattaaatctttaagctccaacatctcattt

SEQ ID NO: 727914 - DNA, 33 bp, Homo sapien
gtcattaaatctttaatctccaacatctcattt

SEQ ID NO: 727915 - DNA, 33 bp, Homo sapien
gatagatagttcaggaaaaaagctaaccttttc

SEQ ID NO: 727916 - DNA, 33 bp, Homo sapien
gatagatagttcaggataaaagctaaccttttc

SEQ ID NO: 727917 - DNA, 33 bp, Homo sapien
tcctactacatgatagcatacatctagtgctga

SEQ ID NO: 727918 - DNA, 33 bp, Homo sapien
tcctactacatgataggatacatctagtgctga

SEQ ID NO: 727919 - DNA, 33 bp, Homo sapien
ttgacaggataagttaaagtaaaggaaacaagt

SEQ ID NO: 727920 - DNA, 33 bp, Homo sapien
ttgacaggataagttagagtaaaggaaacaagt

SEQ ID NO: 727921 - DNA, 33 bp, Homo sapien
atgaggatgagcacacaattgccttaagcacga

SEQ ID NO: 727922 - DNA, 33 bp, Homo sapien
atgaggatgagcacacgattgccttaagcacga

SEQ ID NO: 727923 - DNA, 33 bp, Homo sapien
gtatggttctacacaaatgcaagtaattaggca

SEQ ID NO: 727924 - DNA, 33 bp, Homo sapien
gtatggttctacacaagtgcaagtaattaggca

SEQ ID NO: 727925 - DNA, 33 bp, Homo sapien
ttaggttgacagaaaaatggcatattgtagaaa

SEQ ID NO: 727926 - DNA, 33 bp, Homo sapien
ttaggttgacagaaaagtggcatattgtagaaa

SEQ ID NO: 727927 - DNA, 33 bp, Homo sapien
tagtttcaggagaagacagttgattcaccaatt

SEQ ID NO: 727928 - DNA, 33 bp, Homo sapien
tagtttcaggagaagagagttgattcaccaatt

SEQ ID NO: 727929 - DNA, 33 bp, Homo sapien
gtcctggcagaagatccaatagaagcagaatat

SEQ ID NO: 727930 - DNA, 33 bp, Homo sapien
gtcctggcagaagatcgaatagaagcagaatat

SEQ ID NO: 727931 - DNA, 33 bp, Homo sapien
attcctatgccttgtccatacatttctaaatag

SEQ ID NO: 727932 - DNA, 33 bp, Homo sapien
attcctatgccttgtctatacatttctaaatag

SEQ ID NO: 727933 - DNA, 33 bp, Homo sapien
actgagctctcttggaaatataggcttacacaa

SEQ ID NO: 727934 - DNA, 33 bp, Homo sapien
actgagctctcttggacatataggcttacacaa

SEQ ID NO: 727935 - DNA, 33 bp, Homo sapien
agacacttaggatgctcacaaatcttagctatt

SEQ ID NO: 727936 - DNA, 33 bp, Homo sapien
agacacttaggatgcttacaaatcttagctatt

SEQ ID NO: 727937 - DNA, 33 bp, Homo sapien
aaaatttattctgatgcatggctttttctttca

SEQ ID NO: 727938 - DNA, 33 bp, Homo sapien
aaaatttattctgatgtatggctttttctttca

SEQ ID NO: 727939 - DNA, 33 bp, Homo sapien
tactttttgagtagggccagttttttatgtcta

SEQ ID NO: 727940 - DNA, 33 bp, Homo sapien
tactttttgagtagggtcagttttttatgtcta

SEQ ID NO: 727941 - DNA, 33 bp, Homo sapien
gagtagatgacatacaaagtactaagagaaggt

SEQ ID NO: 727942 - DNA, 33 bp, Homo sapien
gagtagatgacatacatagtactaagagaaggt

SEQ ID NO: 727943 - DNA, 33 bp, Homo sapien
tgttactgtttctatcactattcctccttccac

SEQ ID NO: 727944 - DNA, 33 bp, Homo sapien
tgttactgtttctatcgctattcctccttccac

SEQ ID NO: 727945 - DNA, 33 bp, Homo sapien
atgagaaagttggtaacggaataagccctatgt

SEQ ID NO: 727946 - DNA, 33 bp, Homo sapien
atgagaaagttggtaatggaataagccctatgt

SEQ ID NO: 727947 - DNA, 33 bp, Homo sapien
ttggattcaagtacagcattgcattttatgata

SEQ ID NO: 727948 - DNA, 33 bp, Homo sapien
ttggattcaagtacagtattgcattttatgata

SEQ ID NO: 727949 - DNA, 33 bp, Homo sapien
accaaatgctgtttcacggagaaaaataaaaca

SEQ ID NO: 727950 - DNA, 33 bp, Homo sapien
accaaatgctgtttcatggagaaaaataaaaca

SEQ ID NO: 727951 - DNA, 33 bp, Homo sapien
tgtcgtctgtcaattacaggcagctgttgaaag

SEQ ID NO: 727952 - DNA, 33 bp, Homo sapien
tgtcgtctgtcaattataggcagctgttgaaag

SEQ ID NO: 727953 - DNA, 33 bp, Homo sapien
ttcccttttgttgtacagtaagagaagtgaata

SEQ ID NO: 727954 - DNA, 33 bp, Homo sapien
ttcccttttgttgtacggtaagagaagtgaata

SEQ ID NO: 727955 - DNA, 33 bp, Homo sapien
agataagaatttttcaggtagtgttcatagcaa

SEQ ID NO: 727956 - DNA, 33 bp, Homo sapien
agataagaatttttcatgtagtgttcatagcaa

SEQ ID NO: 727957 - DNA, 33 bp, Homo sapien
gctaaattaagtgcagaaggtatgctgaaaggg

SEQ ID NO: 727958 - DNA, 33 bp, Homo sapien
gctaaattaagtgcaggaggtatgctgaaaggg

SEQ ID NO: 727959 - DNA, 33 bp, Homo sapien
tctctaaaacatggtccattgttcatgtcagac

SEQ ID NO: 727960 - DNA, 33 bp, Homo sapien
tctctaaaacatggtctattgttcatgtcagac

SEQ ID NO: 727961 - DNA, 33 bp, Homo sapien
tcttccatatttaggagaaacacagctcaatgg

SEQ ID NO: 727962 - DNA, 33 bp, Homo sapien
tcttccatatttaggataaacacagctcaatgg

SEQ ID NO: 727963 - DNA, 33 bp, Homo sapien
attatgcttagttttaactccacagaattgttg

SEQ ID NO: 727964 - DNA, 33 bp, Homo sapien
attatgcttagttttatctccacagaattgttg

SEQ ID NO: 727965 - DNA, 33 bp, Homo sapien
tagctatttaatcctggataacttgtttccctc

SEQ ID NO: 727966 - DNA, 33 bp, Homo sapien
tagctatttaatcctgtataacttgtttccctc

SEQ ID NO: 727967 - DNA, 33 bp, Homo sapien
ctgttaactgtgcaaaaaagtcgtgtcataaaa

SEQ ID NO: 727968 - DNA, 33 bp, Homo sapien
ctgttaactgtgcaaagaagtcgtgtcataaaa

SEQ ID NO: 727969 - DNA, 33 bp, Homo sapien
gtcacggtgattaatgcactgggcatggaaaaa

SEQ ID NO: 727970 - DNA, 33 bp, Homo sapien
gtcacggtgattaatgtactgggcatggaaaaa

SEQ ID NO: 727971 - DNA, 33 bp, Homo sapien
aatttgaaccttcagaatatcatgttcatataa

SEQ ID NO: 727972 - DNA, 33 bp, Homo sapien
aatttgaaccttcagagtatcatgttcatataa

SEQ ID NO: 727973 - DNA, 33 bp, Homo sapien
taaattgtttgctctaaaatggtctatctaggg

SEQ ID NO: 727974 - DNA, 33 bp, Homo sapien
taaattgtttgctctacaatggtctatctaggg

SEQ ID NO: 727975 - DNA, 33 bp, Homo sapien
agatctctttggtctgcattatgtcagaaggtg

SEQ ID NO: 727976 - DNA, 33 bp, Homo sapien
agatctctttggtctgtattatgtcagaaggtg

SEQ ID NO: 727977 - DNA, 33 bp, Homo sapien
ctagttactcctataactactgcaaccacttat

SEQ ID NO: 727978 - DNA, 33 bp, Homo sapien
ctagttactcctataattactgcaaccacttat

SEQ ID NO: 727979 - DNA, 33 bp, Homo sapien
tggctatggcatctgacattccctcctataggt

SEQ ID NO: 727980 - DNA, 33 bp, Homo sapien
tggctatggcatctgatattccctcctataggt

SEQ ID NO: 727981 - DNA, 33 bp, Homo sapien
atgtattttacgtaataaagatgctcaaacaat

SEQ ID NO: 727982 - DNA, 33 bp, Homo sapien
atgtattttacgtaattaagatgctcaaacaat

SEQ ID NO: 727983 - DNA, 33 bp, Homo sapien
tctcacacattttatcaatacctccattttggc

SEQ ID NO: 727984 - DNA, 33 bp, Homo sapien
tctcacacattttatcgatacctccattttggc

SEQ ID NO: 727985 - DNA, 33 bp, Homo sapien
tattatttcaagctaacggtgaatgtgaaacat

SEQ ID NO: 727986 - DNA, 33 bp, Homo sapien
tattatttcaagctaatggtgaatgtgaaacat

SEQ ID NO: 727987 - DNA, 33 bp, Homo sapien
agcactatgactaaaccataactatctgccttg

SEQ ID NO: 727988 - DNA, 33 bp, Homo sapien
agcactatgactaaactataactatctgccttg

SEQ ID NO: 727989 - DNA, 33 bp, Homo sapien
tgtttgaagaaagataaggaggtgaagaattag

SEQ ID NO: 727990 - DNA, 33 bp, Homo sapien
tgtttgaagaaagatagggaggtgaagaattag

SEQ ID NO: 727991 - DNA, 33 bp, Homo sapien
agggacacagcaggtagctcacaggcagattta

SEQ ID NO: 727992 - DNA, 33 bp, Homo sapien
agggacacagcaggtatctcacaggcagattta

SEQ ID NO: 727993 - DNA, 33 bp, Homo sapien
cattaggagacaaatacagaggttgtttctata

SEQ ID NO: 727994 - DNA, 33 bp, Homo sapien
cattaggagacaaatatagaggttgtttctata

SEQ ID NO: 727995 - DNA, 33 bp, Homo sapien
ttccttcaggtcaggaaaatgtgtttatgcatc

SEQ ID NO: 727996 - DNA, 33 bp, Homo sapien
ttccttcaggtcaggagaatgtgtttatgcatc

SEQ ID NO: 727997 - DNA, 33 bp, Homo sapien
atacccaaacctctacaactcataaagattgta

SEQ ID NO: 727998 - DNA, 33 bp, Homo sapien
atacccaaacctctaccactcataaagattgta

SEQ ID NO: 727999 - DNA, 33 bp, Homo sapien
gtttacagccactcccaattgttcccattacca

SEQ ID NO: 728000 - DNA, 33 bp, Homo sapien
gtttacagccactccccattgttcccattacca

SEQ ID NO: 728001 - DNA, 33 bp, Homo sapien
acttaattctcccaacaatgatgtttgataaca

SEQ ID NO: 728002 - DNA, 33 bp, Homo sapien
acttaattctcccaacgatgatgtttgataaca

SEQ ID NO: 728003 - DNA, 33 bp, Homo sapien
aaagagacatgactaaagagcaattcaaataaa

SEQ ID NO: 728004 - DNA, 33 bp, Homo sapien
aaagagacatgactaaggagcaattcaaataaa

SEQ ID NO: 728005 - DNA, 33 bp, Homo sapien
gtgattggtatcagacactataacattgcatat

SEQ ID NO: 728006 - DNA, 33 bp, Homo sapien
gtgattggtatcagaccctataacattgcatat

SEQ ID NO: 728007 - DNA, 33 bp, Homo sapien
cacatgatatcccagcaccacgttctcaaaaac

SEQ ID NO: 728008 - DNA, 33 bp, Homo sapien
cacatgatatcccagcgccacgttctcaaaaac

SEQ ID NO: 728009 - DNA, 33 bp, Homo sapien
aaatgacagatgtaccaatgggaatgttctcaa

SEQ ID NO: 728010 - DNA, 33 bp, Homo sapien
aaatgacagatgtaccgatgggaatgttctcaa

SEQ ID NO: 728011 - DNA, 33 bp, Homo sapien
acttgattggctaagaacgtgtaacccaaactt

SEQ ID NO: 728012 - DNA, 33 bp, Homo sapien
acttgattggctaagagcgtgtaacccaaactt

SEQ ID NO: 728013 - DNA, 33 bp, Homo sapien
atttgtaaaatggtaaggatagcctacttcata

SEQ ID NO: 728014 - DNA, 33 bp, Homo sapien
atttgtaaaatggtaatgatagcctacttcata

SEQ ID NO: 728015 - DNA, 33 bp, Homo sapien
tcccttgtttttcctcaacaaaccatggcacaa

SEQ ID NO: 728016 - DNA, 33 bp, Homo sapien
tcccttgtttttcctcgacaaaccatggcacaa

SEQ ID NO: 728017 - DNA, 33 bp, Homo sapien
tatactgtggtaagagaaatatttaagatataa

SEQ ID NO: 728018 - DNA, 33 bp, Homo sapien
tatactgtggtaagaggaatatttaagatataa

SEQ ID NO: 728019 - DNA, 33 bp, Homo sapien
tcatatacttcatataaaatttcacttgtgcta

SEQ ID NO: 728020 - DNA, 33 bp, Homo sapien
tcatatacttcatatacaatttcacttgtgcta

SEQ ID NO: 728021 - DNA, 33 bp, Homo sapien
ggaaataaatgtgtaaagagtaagaaggcagaa

SEQ ID NO: 728022 - DNA, 33 bp, Homo sapien
ggaaataaatgtgtaatgagtaagaaggcagaa

SEQ ID NO: 728023 - DNA, 33 bp, Homo sapien
agaccctgagtggaaggctggtaaaagcaacct

SEQ ID NO: 728024 - DNA, 33 bp, Homo sapien
agaccctgagtggaagtctggtaaaagcaacct

SEQ ID NO: 728025 - DNA, 33 bp, Homo sapien
ctggagcacaacagagaagtctagattaaaatt

SEQ ID NO: 728026 - DNA, 33 bp, Homo sapien
ctggagcacaacagagtagtctagattaaaatt

SEQ ID NO: 728027 - DNA, 33 bp, Homo sapien
atggaagaatggctggacagtagaggactctga

SEQ ID NO: 728028 - DNA, 33 bp, Homo sapien
atggaagaatggctggccagtagaggactctga

SEQ ID NO: 728029 - DNA, 33 bp, Homo sapien
atttacaagggactgaaaactcaatcagttcag

SEQ ID NO: 728030 - DNA, 33 bp, Homo sapien
atttacaagggactgacaactcaatcagttcag

SEQ ID NO: 728031 - DNA, 33 bp, Homo sapien
ctgtctagtagaagcacagtcacctaaaccaaa

SEQ ID NO: 728032 - DNA, 33 bp, Homo sapien
ctgtctagtagaagcatagtcacctaaaccaaa

SEQ ID NO: 728033 - DNA, 33 bp, Homo sapien
ctgagccctgagcagtaaaactctggtaaatga

SEQ ID NO: 728034 - DNA, 33 bp, Homo sapien
ctgagccctgagcagtgaaactctggtaaatga

SEQ ID NO: 728035 - DNA, 33 bp, Homo sapien
ctagataattaaaaccccaggctactgagataa

SEQ ID NO: 728036 - DNA, 33 bp, Homo sapien
ctagataattaaaaccgcaggctactgagataa

SEQ ID NO: 728037 - DNA, 33 bp, Homo sapien
actaccaggaatccacacaatcaagactgccaa

SEQ ID NO: 728038 - DNA, 33 bp, Homo sapien
actaccaggaatccacgcaatcaagactgccaa

SEQ ID NO: 728039 - DNA, 33 bp, Homo sapien
tctggccctaatacccgactctgtctcatctca

SEQ ID NO: 728040 - DNA, 33 bp, Homo sapien
tctggccctaataccctactctgtctcatctca

SEQ ID NO: 728041 - DNA, 33 bp, Homo sapien
tacattcaattcagacccatgaaaatagtaagt

SEQ ID NO: 728042 - DNA, 33 bp, Homo sapien
tacattcaattcagactcatgaaaatagtaagt

SEQ ID NO: 728043 - DNA, 33 bp, Homo sapien
ggaaaaaatgtatgtaagctatgatggaaaaga

SEQ ID NO: 728044 - DNA, 33 bp, Homo sapien
ggaaaaaatgtatgtacgctatgatggaaaaga

SEQ ID NO: 728045 - DNA, 33 bp, Homo sapien
acgatgttaataagaaactcaagaactgacatc

SEQ ID NO: 728046 - DNA, 33 bp, Homo sapien
acgatgttaataagaatctcaagaactgacatc

SEQ ID NO: 728047 - DNA, 33 bp, Homo sapien
aaacaaacaatgcatcccatgaaataaaatgcc

SEQ ID NO: 728048 - DNA, 33 bp, Homo sapien
aaacaaacaatgcatctcatgaaataaaatgcc

SEQ ID NO: 728049 - DNA, 33 bp, Homo sapien
ctgtaaaccttgctcacatatttatatctaaat

SEQ ID NO: 728050 - DNA, 33 bp, Homo sapien
ctgtaaaccttgctcatatatttatatctaaat

SEQ ID NO: 728051 - DNA, 33 bp, Homo sapien
tatggaatggaattaagctcgttgttttatcta

SEQ ID NO: 728052 - DNA, 33 bp, Homo sapien
tatggaatggaattaatctcgttgttttatcta

SEQ ID NO: 728053 - DNA, 33 bp, Homo sapien
taacaccagttggatgaaaatttatacttctaa

SEQ ID NO: 728054 - DNA, 33 bp, Homo sapien
taacaccagttggatgcaaatttatacttctaa

SEQ ID NO: 728055 - DNA, 33 bp, Homo sapien
taaaaatctgagtgacacaaagtattttatcaa

SEQ ID NO: 728056 - DNA, 33 bp, Homo sapien
taaaaatctgagtgacgcaaagtattttatcaa

SEQ ID NO: 728057 - DNA, 33 bp, Homo sapien
catttgtaatcctggccactaaccacaatatta

SEQ ID NO: 728058 - DNA, 33 bp, Homo sapien
catttgtaatcctggctactaaccacaatatta

SEQ ID NO: 728059 - DNA, 33 bp, Homo sapien
aataggtagagatctacgtatatatggacatca

SEQ ID NO: 728060 - DNA, 33 bp, Homo sapien
aataggtagagatctatgtatatatggacatca

SEQ ID NO: 728061 - DNA, 33 bp, Homo sapien
ttattcatgatcttagcatataaataactctca

SEQ ID NO: 728062 - DNA, 33 bp, Homo sapien
ttattcatgatcttaggatataaataactctca

SEQ ID NO: 728063 - DNA, 33 bp, Homo sapien
attcccagccgataaactaattttggggatggg

SEQ ID NO: 728064 - DNA, 33 bp, Homo sapien
attcccagccgataaagtaattttggggatggg

SEQ ID NO: 728065 - DNA, 33 bp, Homo sapien
aaataaacaagccagacagaagtaacttactca

SEQ ID NO: 728066 - DNA, 33 bp, Homo sapien
aaataaacaagccagagagaagtaacttactca

SEQ ID NO: 728067 - DNA, 33 bp, Homo sapien
ttagaaaagtatgcaacgtatatttaaatgaaa

SEQ ID NO: 728068 - DNA, 33 bp, Homo sapien
ttagaaaagtatgcaatgtatatttaaatgaaa

SEQ ID NO: 728069 - DNA, 33 bp, Homo sapien
gtttaggaaagtctgcagataccatggattcct

SEQ ID NO: 728070 - DNA, 33 bp, Homo sapien
gtttaggaaagtctgcggataccatggattcct

SEQ ID NO: 728071 - DNA, 33 bp, Homo sapien
catgtcgcctttataacgtctgaagcactatgt

SEQ ID NO: 728072 - DNA, 33 bp, Homo sapien
catgtcgcctttataatgtctgaagcactatgt

SEQ ID NO: 728073 - DNA, 33 bp, Homo sapien
gctttgctttgtcctactaccttacagagatga

SEQ ID NO: 728074 - DNA, 33 bp, Homo sapien
gctttgctttgtcctattaccttacagagatga

SEQ ID NO: 728075 - DNA, 33 bp, Homo sapien
taaggaggctgcctacaaagcaagagaaagaaa

SEQ ID NO: 728076 - DNA, 33 bp, Homo sapien
taaggaggctgcctacgaagcaagagaaagaaa

SEQ ID NO: 728077 - DNA, 33 bp, Homo sapien
acgaaccagcataacacactccaatggcaggtt

SEQ ID NO: 728078 - DNA, 33 bp, Homo sapien
acgaaccagcataacatactccaatggcaggtt

SEQ ID NO: 728079 - DNA, 33 bp, Homo sapien
caaaatgtcccaaaccaaatctaatatttctca

SEQ ID NO: 728080 - DNA, 33 bp, Homo sapien
caaaatgtcccaaaccgaatctaatatttctca

SEQ ID NO: 728081 - DNA, 33 bp, Homo sapien
gaataagtcggaaaagaagactaagtaatagga

SEQ ID NO: 728082 - DNA, 33 bp, Homo sapien
gaataagtcggaaaaggagactaagtaatagga

SEQ ID NO: 728083 - DNA, 33 bp, Homo sapien
tggtatatacttccagaatgcccaaattatctc

SEQ ID NO: 728084 - DNA, 33 bp, Homo sapien
tggtatatacttccaggatgcccaaattatctc

SEQ ID NO: 728085 - DNA, 33 bp, Homo sapien
ggtatggctacttgaactgtatatgagcagcat

SEQ ID NO: 728086 - DNA, 33 bp, Homo sapien
ggtatggctacttgaagtgtatatgagcagcat

SEQ ID NO: 728087 - DNA, 33 bp, Homo sapien
tagagaaaatactcagaccatgctaagcatctt

SEQ ID NO: 728088 - DNA, 33 bp, Homo sapien
tagagaaaatactcagcccatgctaagcatctt

SEQ ID NO: 728089 - DNA, 33 bp, Homo sapien
aaaagattacatttccatacaagaagtccagat

SEQ ID NO: 728090 - DNA, 33 bp, Homo sapien
aaaagattacatttccgtacaagaagtccagat

SEQ ID NO: 728091 - DNA, 33 bp, Homo sapien
agacaagaagagtcacactcctaaaccattccc

SEQ ID NO: 728092 - DNA, 33 bp, Homo sapien
agacaagaagagtcactctcctaaaccattccc

SEQ ID NO: 728093 - DNA, 33 bp, Homo sapien
gttaaagcagcaataggaaatgtaggtagacac

SEQ ID NO: 728094 - DNA, 33 bp, Homo sapien
gttaaagcagcaatagtaaatgtaggtagacac

SEQ ID NO: 728095 - DNA, 33 bp, Homo sapien
agaagatagtgatagaactccatgaaagggaag

SEQ ID NO: 728096 - DNA, 33 bp, Homo sapien
agaagatagtgatagacctccatgaaagggaag

SEQ ID NO: 728097 - DNA, 33 bp, Homo sapien
aagaagtgttttggcactgattggagaggcaca

SEQ ID NO: 728098 - DNA, 33 bp, Homo sapien
aagaagtgttttggcagtgattggagaggcaca

SEQ ID NO: 728099 - DNA, 33 bp, Homo sapien
aaagaattcctccaaactccaacattcctacct

SEQ ID NO: 728100 - DNA, 33 bp, Homo sapien
aaagaattcctccaaattccaacattcctacct

SEQ ID NO: 728101 - DNA, 33 bp, Homo sapien
tctgttgtatagactaataaactgtgcagtata

SEQ ID NO: 728102 - DNA, 33 bp, Homo sapien
tctgttgtatagactattaaactgtgcagtata

SEQ ID NO: 728103 - DNA, 33 bp, Homo sapien
agccattctttaagacagtaatgtgagatgtta

SEQ ID NO: 728104 - DNA, 33 bp, Homo sapien
agccattctttaagacggtaatgtgagatgtta

SEQ ID NO: 728105 - DNA, 33 bp, Homo sapien
tacagtatctacagcactcggtaatttagagaa

SEQ ID NO: 728106 - DNA, 33 bp, Homo sapien
tacagtatctacagcattcggtaatttagagaa

SEQ ID NO: 728107 - DNA, 33 bp, Homo sapien
tcccattttatattctcaaccatgtcacgtgct

SEQ ID NO: 728108 - DNA, 33 bp, Homo sapien
tcccattttatattcttaaccatgtcacgtgct

SEQ ID NO: 728109 - DNA, 33 bp, Homo sapien
tttgtaataaggaatcaccagtgtgccaaacaa

SEQ ID NO: 728110 - DNA, 33 bp, Homo sapien
tttgtaataaggaatccccagtgtgccaaacaa

SEQ ID NO: 728111 - DNA, 33 bp, Homo sapien
tgtgtgtagtaagatcactcggtctccttctta

SEQ ID NO: 728112 - DNA, 33 bp, Homo sapien
tgtgtgtagtaagatcgctcggtctccttctta

SEQ ID NO: 728113 - DNA, 33 bp, Homo sapien
atactgaagcacagagaaccaaaatgaaggtgt

SEQ ID NO: 728114 - DNA, 33 bp, Homo sapien
atactgaagcacagaggaccaaaatgaaggtgt

SEQ ID NO: 728115 - DNA, 33 bp, Homo sapien
gtcttcatgtttagtcaagaatgaagtaatggc

SEQ ID NO: 728116 - DNA, 33 bp, Homo sapien
gtcttcatgtttagtcgagaatgaagtaatggc

SEQ ID NO: 728117 - DNA, 33 bp, Homo sapien
tctcttccaaaaatgaaaggtttaaatttactg

SEQ ID NO: 728118 - DNA, 33 bp, Homo sapien
tctcttccaaaaatgagaggtttaaatttactg

SEQ ID NO: 728119 - DNA, 33 bp, Homo sapien
ctaagagcaaaggagaactaggagggttgttgc

SEQ ID NO: 728120 - DNA, 33 bp, Homo sapien
ctaagagcaaaggagagctaggagggttgttgc

SEQ ID NO: 728121 - DNA, 33 bp, Homo sapien
aagatgaggtctgttacagaaaatacataagct

SEQ ID NO: 728122 - DNA, 33 bp, Homo sapien
aagatgaggtctgttatagaaaatacataagct

SEQ ID NO: 728123 - DNA, 33 bp, Homo sapien
tcatgaataagacaaacgccaattgtttgaatt

SEQ ID NO: 728124 - DNA, 33 bp, Homo sapien
tcatgaataagacaaatgccaattgtttgaatt

SEQ ID NO: 728125 - DNA, 33 bp, Homo sapien
cagattctatattagccctttcatggaaaatac

SEQ ID NO: 728126 - DNA, 33 bp, Homo sapien
cagattctatattagcgctttcatggaaaatac

SEQ ID NO: 728127 - DNA, 33 bp, Homo sapien
aattagtcagtttataaagcaaatattcctcta

SEQ ID NO: 728128 - DNA, 33 bp, Homo sapien
aattagtcagtttatacagcaaatattcctcta

SEQ ID NO: 728129 - DNA, 33 bp, Homo sapien
acaatgaactagccaacttagaatacatgtggt

SEQ ID NO: 728130 - DNA, 33 bp, Homo sapien
acaatgaactagccaatttagaatacatgtggt

SEQ ID NO: 728131 - DNA, 33 bp, Homo sapien
gaaaccctaaccaagaaatgacattgaagtagt

SEQ ID NO: 728132 - DNA, 33 bp, Homo sapien
gaaaccctaaccaagatatgacattgaagtagt

SEQ ID NO: 728133 - DNA, 33 bp, Homo sapien
actataaacatgccaaactggaaaatcatctgc

SEQ ID NO: 728134 - DNA, 33 bp, Homo sapien
actataaacatgccaagctggaaaatcatctgc

SEQ ID NO: 728135 - DNA, 33 bp, Homo sapien
tgcagctttgctcaaccagtaatggaaatggag

SEQ ID NO: 728136 - DNA, 33 bp, Homo sapien
tgcagctttgctcaactagtaatggaaatggag

SEQ ID NO: 728137 - DNA, 33 bp, Homo sapien
catgaataagtcctgacagttgaaagcaatgtc

SEQ ID NO: 728138 - DNA, 33 bp, Homo sapien
catgaataagtcctgagagttgaaagcaatgtc

SEQ ID NO: 728139 - DNA, 33 bp, Homo sapien
attctgagcccgtaaaaaccctcgactcagcct

SEQ ID NO: 728140 - DNA, 33 bp, Homo sapien
attctgagcccgtaaagaccctcgactcagcct

SEQ ID NO: 728141 - DNA, 33 bp, Homo sapien
gtgagcccagcgggccaaacaaggctgcaggca

SEQ ID NO: 728142 - DNA, 33 bp, Homo sapien
gtgagcccagcgggccgaacaaggctgcaggca

SEQ ID NO: 728143 - DNA, 33 bp, Homo sapien
gagagagtaggggagacagaggtattatgagga

SEQ ID NO: 728144 - DNA, 33 bp, Homo sapien
gagagagtaggggagagagaggtattatgagga

SEQ ID NO: 728145 - DNA, 33 bp, Homo sapien
cagtgtatatgtgagaagagggtttgacttaag

SEQ ID NO: 728146 - DNA, 33 bp, Homo sapien
cagtgtatatgtgagaggagggtttgacttaag

SEQ ID NO: 728147 - DNA, 33 bp, Homo sapien
cggacacacaagtacaagtgctgaaagacacca

SEQ ID NO: 728148 - DNA, 33 bp, Homo sapien
cggacacacaagtacaggtgctgaaagacacca

SEQ ID NO: 728149 - DNA, 33 bp, Homo sapien
tgtgtttgaagccagaaaacagaagccaagagg

SEQ ID NO: 728150 - DNA, 33 bp, Homo sapien
tgtgtttgaagccagacaacagaagccaagagg

SEQ ID NO: 728151 - DNA, 33 bp, Homo sapien
accaggacttcaaaacaaagatacaacttccgc

SEQ ID NO: 728152 - DNA, 33 bp, Homo sapien
accaggacttcaaaacgaagatacaacttccgc

SEQ ID NO: 728153 - DNA, 33 bp, Homo sapien
agccagtgaggaactaagtggggtatacttatt

SEQ ID NO: 728154 - DNA, 33 bp, Homo sapien
agccagtgaggaactaggtggggtatacttatt

SEQ ID NO: 728155 - DNA, 33 bp, Homo sapien
atgatcaatagtgaaaccaattattaaaatgct

SEQ ID NO: 728156 - DNA, 33 bp, Homo sapien
atgatcaatagtgaaatcaattattaaaatgct

SEQ ID NO: 728157 - DNA, 33 bp, Homo sapien
tttccctcaatgcctacgaaaagcctccagtat

SEQ ID NO: 728158 - DNA, 33 bp, Homo sapien
tttccctcaatgcctatgaaaagcctccagtat

SEQ ID NO: 728159 - DNA, 33 bp, Homo sapien
caagttcctaagtgaaagaaaatattgtttatc

SEQ ID NO: 728160 - DNA, 33 bp, Homo sapien
caagttcctaagtgaaggaaaatattgtttatc

SEQ ID NO: 728161 - DNA, 33 bp, Homo sapien
acattcatgatgggaacctggttgtgaaggaca

SEQ ID NO: 728162 - DNA, 33 bp, Homo sapien
acattcatgatgggaatctggttgtgaaggaca

SEQ ID NO: 728163 - DNA, 33 bp, Homo sapien
caaattttctgaatatgactgggccaattttga

SEQ ID NO: 728164 - DNA, 33 bp, Homo sapien
caaattttctgaatattactgggccaattttga

SEQ ID NO: 728165 - DNA, 33 bp, Homo sapien
gaatgcccagtgaaaaatgagatataaggtcac

SEQ ID NO: 728166 - DNA, 33 bp, Homo sapien
gaatgcccagtgaaaattgagatataaggtcac

SEQ ID NO: 728167 - DNA, 33 bp, Homo sapien
tttaagtcaatttccacgttgaatgtgagatta

SEQ ID NO: 728168 - DNA, 33 bp, Homo sapien
tttaagtcaatttccatgttgaatgtgagatta

SEQ ID NO: 728169 - DNA, 33 bp, Homo sapien
tattattttctgaatacctttacccattttgta

SEQ ID NO: 728170 - DNA, 33 bp, Homo sapien
tattattttctgaatatctttacccattttgta

SEQ ID NO: 728171 - DNA, 33 bp, Homo sapien
aaactttctcaacacaacagaagatacgacaat

SEQ ID NO: 728172 - DNA, 33 bp, Homo sapien
aaactttctcaacacagcagaagatacgacaat

SEQ ID NO: 728173 - DNA, 33 bp, Homo sapien
ggtattacattagagagaccaagtttatgcact

SEQ ID NO: 728174 - DNA, 33 bp, Homo sapien
ggtattacattagagataccaagtttatgcact

SEQ ID NO: 728175 - DNA, 33 bp, Homo sapien
gggctatcaaatataaaccttgggaaatatata

SEQ ID NO: 728176 - DNA, 33 bp, Homo sapien
gggctatcaaatataagccttgggaaatatata

SEQ ID NO: 728177 - DNA, 33 bp, Homo sapien
aaatggtagaattatacgcaaacggcaatctga

SEQ ID NO: 728178 - DNA, 33 bp, Homo sapien
aaatggtagaattatatgcaaacggcaatctga

SEQ ID NO: 728179 - DNA, 33 bp, Homo sapien
ccttacctacccacaactgtcagtgagattgat

SEQ ID NO: 728180 - DNA, 33 bp, Homo sapien
ccttacctacccacaattgtcagtgagattgat

SEQ ID NO: 728181 - DNA, 33 bp, Homo sapien
gaactgattgaataaacctaaggctgtttctat

SEQ ID NO: 728182 - DNA, 33 bp, Homo sapien
gaactgattgaataaatctaaggctgtttctat

SEQ ID NO: 728183 - DNA, 33 bp, Homo sapien
gatggttccttgtcacaatgtattcagtatggt

SEQ ID NO: 728184 - DNA, 33 bp, Homo sapien
gatggttccttgtcaccatgtattcagtatggt

SEQ ID NO: 728185 - DNA, 33 bp, Homo sapien
tattttgacctcattacgataaacttcgtgtga

SEQ ID NO: 728186 - DNA, 33 bp, Homo sapien
tattttgacctcattatgataaacttcgtgtga

SEQ ID NO: 728187 - DNA, 33 bp, Homo sapien
cttctacacaatttagaagaccaatgtatttat

SEQ ID NO: 728188 - DNA, 33 bp, Homo sapien
cttctacacaatttaggagaccaatgtatttat

SEQ ID NO: 728189 - DNA, 33 bp, Homo sapien
tagcctgagcaattagacaagaaaaaaagacat

SEQ ID NO: 728190 - DNA, 33 bp, Homo sapien
tagcctgagcaattaggcaagaaaaaaagacat

SEQ ID NO: 728191 - DNA, 33 bp, Homo sapien
aaatagtaacaaagaacgagtagtttcttaagt

SEQ ID NO: 728192 - DNA, 33 bp, Homo sapien
aaatagtaacaaagaatgagtagtttcttaagt

SEQ ID NO: 728193 - DNA, 33 bp, Homo sapien
ccaagtctgagacaaaatcggaaaattatctta

SEQ ID NO: 728194 - DNA, 33 bp, Homo sapien
ccaagtctgagacaaactcggaaaattatctta

SEQ ID NO: 728195 - DNA, 33 bp, Homo sapien
tattttttagccttaaactacctgccagagact

SEQ ID NO: 728196 - DNA, 33 bp, Homo sapien
tattttttagccttaagctacctgccagagact

SEQ ID NO: 728197 - DNA, 33 bp, Homo sapien
aaacactctctttgaaatcgttgctgtcactag

SEQ ID NO: 728198 - DNA, 33 bp, Homo sapien
aaacactctctttgaagtcgttgctgtcactag

SEQ ID NO: 728199 - DNA, 33 bp, Homo sapien
ttagtgcctgattatacggtggaaagatacatt

SEQ ID NO: 728200 - DNA, 33 bp, Homo sapien
ttagtgcctgattatatggtggaaagatacatt

SEQ ID NO: 728201 - DNA, 33 bp, Homo sapien
ttaacaagacgagcaaattattattcacatttt

SEQ ID NO: 728202 - DNA, 33 bp, Homo sapien
ttaacaagacgagcaatttattattcacatttt

SEQ ID NO: 728203 - DNA, 33 bp, Homo sapien
agctaaaaggtacagaaaatgcacaaaagaatt

SEQ ID NO: 728204 - DNA, 33 bp, Homo sapien
agctaaaaggtacagagaatgcacaaaagaatt

SEQ ID NO: 728205 - DNA, 33 bp, Homo sapien
tctggaaagccatcccaaaaaggacagctacaa

SEQ ID NO: 728206 - DNA, 33 bp, Homo sapien
tctggaaagccatcccgaaaaggacagctacaa

SEQ ID NO: 728207 - DNA, 33 bp, Homo sapien
acgacttagagttaataagagagcaatgctgaa

SEQ ID NO: 728208 - DNA, 33 bp, Homo sapien
acgacttagagttaatgagagagcaatgctgaa

SEQ ID NO: 728209 - DNA, 33 bp, Homo sapien
ttatgtccacacaacaaacctaaacatagatgt

SEQ ID NO: 728210 - DNA, 33 bp, Homo sapien
ttatgtccacacaacatacctaaacatagatgt

SEQ ID NO: 728211 - DNA, 33 bp, Homo sapien
tgtttctgactccaaaatctatgctctactcac

SEQ ID NO: 728212 - DNA, 33 bp, Homo sapien
tgtttctgactccaaattctatgctctactcac

SEQ ID NO: 728213 - DNA, 33 bp, Homo sapien
ctgacaagtgacagaacgaggaccataacccaa

SEQ ID NO: 728214 - DNA, 33 bp, Homo sapien
ctgacaagtgacagaatgaggaccataacccaa

SEQ ID NO: 728215 - DNA, 33 bp, Homo sapien
aaatataacgctgagagaatatttgggttatgg

SEQ ID NO: 728216 - DNA, 33 bp, Homo sapien
aaatataacgctgagataatatttgggttatgg

SEQ ID NO: 728217 - DNA, 33 bp, Homo sapien
ctgagagtttcacaggaaagatacttgtgactt

SEQ ID NO: 728218 - DNA, 33 bp, Homo sapien
ctgagagtttcacagggaagatacttgtgactt

SEQ ID NO: 728219 - DNA, 33 bp, Homo sapien
atactaatcctataaccggggtagaataaatat

SEQ ID NO: 728220 - DNA, 33 bp, Homo sapien
atactaatcctataactggggtagaataaatat

SEQ ID NO: 728221 - DNA, 33 bp, Homo sapien
tccacaaatgtgaggaactttccacacagagta

SEQ ID NO: 728222 - DNA, 33 bp, Homo sapien
tccacaaatgtgaggagctttccacacagagta

SEQ ID NO: 728223 - DNA, 33 bp, Homo sapien
aaacttctaggaattacggtagcagtgatattt

SEQ ID NO: 728224 - DNA, 33 bp, Homo sapien
aaacttctaggaattatggtagcagtgatattt

SEQ ID NO: 728225 - DNA, 33 bp, Homo sapien
cctttataattgccagaaaataaacatacatag

SEQ ID NO: 728226 - DNA, 33 bp, Homo sapien
cctttataattgccaggaaataaacatacatag

SEQ ID NO: 728227 - DNA, 33 bp, Homo sapien
tatctgcttatgaagaatatgtccaatatacca

SEQ ID NO: 728228 - DNA, 33 bp, Homo sapien
tatctgcttatgaagagtatgtccaatatacca

SEQ ID NO: 728229 - DNA, 33 bp, Homo sapien
tgaagatggtttaaggaacagacataaggctga

SEQ ID NO: 728230 - DNA, 33 bp, Homo sapien
tgaagatggtttaagggacagacataaggctga

SEQ ID NO: 728231 - DNA, 33 bp, Homo sapien
tacttacattttaccaataagtgtgtgtgtgaa

SEQ ID NO: 728232 - DNA, 33 bp, Homo sapien
tacttacattttaccagtaagtgtgtgtgtgaa

SEQ ID NO: 728233 - DNA, 33 bp, Homo sapien
tttaaccactcggatgaataatagatagatatt

SEQ ID NO: 728234 - DNA, 33 bp, Homo sapien
tttaaccactcggatgtataatagatagatatt

SEQ ID NO: 728235 - DNA, 33 bp, Homo sapien
tagctgtggttatctacgcaaagggaattctat

SEQ ID NO: 728236 - DNA, 33 bp, Homo sapien
tagctgtggttatctatgcaaagggaattctat

SEQ ID NO: 728237 - DNA, 33 bp, Homo sapien
cttacgtattcttctacagatgatgtttacaca

SEQ ID NO: 728238 - DNA, 33 bp, Homo sapien
cttacgtattcttctagagatgatgtttacaca

SEQ ID NO: 728239 - DNA, 33 bp, Homo sapien
ctttggagcataaagacagattataagaacaaa

SEQ ID NO: 728240 - DNA, 33 bp, Homo sapien
ctttggagcataaagagagattataagaacaaa

SEQ ID NO: 728241 - DNA, 33 bp, Homo sapien
ttgcctctgggaagcactgaatgataagactat

SEQ ID NO: 728242 - DNA, 33 bp, Homo sapien
ttgcctctgggaagcagtgaatgataagactat

SEQ ID NO: 728243 - DNA, 33 bp, Homo sapien
ctcttagcccctcttcaaaaatagtcttatcat

SEQ ID NO: 728244 - DNA, 33 bp, Homo sapien
ctcttagcccctcttcgaaaatagtcttatcat

SEQ ID NO: 728245 - DNA, 33 bp, Homo sapien
agaggccagaggtacacgttagaatagagaagg

SEQ ID NO: 728246 - DNA, 33 bp, Homo sapien
agaggccagaggtacaggttagaatagagaagg

SEQ ID NO: 728247 - DNA, 33 bp, Homo sapien
tctgtgaacaagagtacaacaaaagagttgata

SEQ ID NO: 728248 - DNA, 33 bp, Homo sapien
tctgtgaacaagagtataacaaaagagttgata

SEQ ID NO: 728249 - DNA, 33 bp, Homo sapien
aaaaactctaaagtgacgatacataattcttta

SEQ ID NO: 728250 - DNA, 33 bp, Homo sapien
aaaaactctaaagtgatgatacataattcttta

SEQ ID NO: 728251 - DNA, 33 bp, Homo sapien
gattggcgaggtaataccagatagtggagaagc

SEQ ID NO: 728252 - DNA, 33 bp, Homo sapien
gattggcgaggtaatatcagatagtggagaagc

SEQ ID NO: 728253 - DNA, 33 bp, Homo sapien
ttgtatgcaaatgaacactgtgaaaagatagag

SEQ ID NO: 728254 - DNA, 33 bp, Homo sapien
ttgtatgcaaatgaactctgtgaaaagatagag

SEQ ID NO: 728255 - DNA, 33 bp, Homo sapien
ccttgaatttgcataaatctcacaccctaaatg

SEQ ID NO: 728256 - DNA, 33 bp, Homo sapien
ccttgaatttgcataagtctcacaccctaaatg

SEQ ID NO: 728257 - DNA, 33 bp, Homo sapien
tgtacaaaacatattcaactggagccagtattt

SEQ ID NO: 728258 - DNA, 33 bp, Homo sapien
tgtacaaaacatattctactggagccagtattt

SEQ ID NO: 728259 - DNA, 33 bp, Homo sapien
gacaaagcagcttaaacgttacttcactttaca

SEQ ID NO: 728260 - DNA, 33 bp, Homo sapien
gacaaagcagcttaaatgttacttcactttaca

SEQ ID NO: 728261 - DNA, 33 bp, Homo sapien
tatgctaatttattcactcacaagcagtgtatg

SEQ ID NO: 728262 - DNA, 33 bp, Homo sapien
tatgctaatttattcattcacaagcagtgtatg

SEQ ID NO: 728263 - DNA, 33 bp, Homo sapien
taaaacctggttattcaagtttctctgtactta

SEQ ID NO: 728264 - DNA, 33 bp, Homo sapien
taaaacctggttattcgagtttctctgtactta

SEQ ID NO: 728265 - DNA, 33 bp, Homo sapien
aaagacaactacagaccggtattcttcatagac

SEQ ID NO: 728266 - DNA, 33 bp, Homo sapien
aaagacaactacagactggtattcttcatagac

SEQ ID NO: 728267 - DNA, 33 bp, Homo sapien
ttgagctactcaggtcaaacttgagctactcag

SEQ ID NO: 728268 - DNA, 33 bp, Homo sapien
ttgagctactcaggtcgaacttgagctactcag

SEQ ID NO: 728269 - DNA, 33 bp, Homo sapien
gatgtcatgaataacaacaccattgaggaatgt

SEQ ID NO: 728270 - DNA, 33 bp, Homo sapien
gatgtcatgaataacagcaccattgaggaatgt

SEQ ID NO: 728271 - DNA, 33 bp, Homo sapien
aatcatagaagaatgcacagtatcaatagacac

SEQ ID NO: 728272 - DNA, 33 bp, Homo sapien
aatcatagaagaatgcgcagtatcaatagacac

SEQ ID NO: 728273 - DNA, 33 bp, Homo sapien
aatattctcaccaaaacttgtcttagctgtcct

SEQ ID NO: 728274 - DNA, 33 bp, Homo sapien
aatattctcaccaaaagttgtcttagctgtcct

SEQ ID NO: 728275 - DNA, 33 bp, Homo sapien
gatcttccatgaaacactgtcagttgcccatac

SEQ ID NO: 728276 - DNA, 33 bp, Homo sapien
gatcttccatgaaacattgtcagttgcccatac

SEQ ID NO: 728277 - DNA, 33 bp, Homo sapien
ttatccatttgtgttccactaaggaggataaag

SEQ ID NO: 728278 - DNA, 33 bp, Homo sapien
ttatccatttgtgttctactaaggaggataaag

SEQ ID NO: 728279 - DNA, 33 bp, Homo sapien
caaatcaggggacaaaacagtagatatgacatg

SEQ ID NO: 728280 - DNA, 33 bp, Homo sapien
caaatcaggggacaaagcagtagatatgacatg

SEQ ID NO: 728281 - DNA, 33 bp, Homo sapien
atgaagccaagcaaataaaaaaaaccatgaagt

SEQ ID NO: 728282 - DNA, 33 bp, Homo sapien
atgaagccaagcaaattaaaaaaaccatgaagt

SEQ ID NO: 728283 - DNA, 33 bp, Homo sapien
tttttgtggcggaatcaaatctctatcctgtaa

SEQ ID NO: 728284 - DNA, 33 bp, Homo sapien
tttttgtggcggaatcgaatctctatcctgtaa

SEQ ID NO: 728285 - DNA, 33 bp, Homo sapien
gcttgtttctgaaacactcgaatcttggcaaaa

SEQ ID NO: 728286 - DNA, 33 bp, Homo sapien
gcttgtttctgaaacagtcgaatcttggcaaaa

SEQ ID NO: 728287 - DNA, 33 bp, Homo sapien
ccttccttttctaagcacaaactaaagtgagta

SEQ ID NO: 728288 - DNA, 33 bp, Homo sapien
ccttccttttctaagcgcaaactaaagtgagta

SEQ ID NO: 728289 - DNA, 33 bp, Homo sapien
agaaaataagcatcaacgtagaaggttcttcat

SEQ ID NO: 728290 - DNA, 33 bp, Homo sapien
agaaaataagcatcaaggtagaaggttcttcat

SEQ ID NO: 728291 - DNA, 33 bp, Homo sapien
acacatctaggaagtacagaaggttgagacatt

SEQ ID NO: 728292 - DNA, 33 bp, Homo sapien
acacatctaggaagtatagaaggttgagacatt

SEQ ID NO: 728293 - DNA, 33 bp, Homo sapien
gtatcagtaaaaaacactctcaatgtgactcac

SEQ ID NO: 728294 - DNA, 33 bp, Homo sapien
gtatcagtaaaaaacattctcaatgtgactcac

SEQ ID NO: 728295 - DNA, 33 bp, Homo sapien
tgcacagattgtttcacgctttgagtcacataa

SEQ ID NO: 728296 - DNA, 33 bp, Homo sapien
tgcacagattgtttcatgctttgagtcacataa

SEQ ID NO: 728297 - DNA, 33 bp, Homo sapien
agaaatgttctaacagcgaattttgagtgaaag

SEQ ID NO: 728298 - DNA, 33 bp, Homo sapien
agaaatgttctaacagtgaattttgagtgaaag

SEQ ID NO: 728299 - DNA, 33 bp, Homo sapien
aggccttttcatgaaaacatctctgcataggcc

SEQ ID NO: 728300 - DNA, 33 bp, Homo sapien
aggccttttcatgaaaccatctctgcataggcc

SEQ ID NO: 728301 - DNA, 33 bp, Homo sapien
agattgcaagagacaacatcttagttttattca

SEQ ID NO: 728302 - DNA, 33 bp, Homo sapien
agattgcaagagacaatatcttagttttattca

SEQ ID NO: 728303 - DNA, 33 bp, Homo sapien
gacaaaggacgagtagacattttcaaaaagaaa

SEQ ID NO: 728304 - DNA, 33 bp, Homo sapien
gacaaaggacgagtaggcattttcaaaaagaaa

SEQ ID NO: 728305 - DNA, 33 bp, Homo sapien
tacaacggtttaaagaactacaactagcaagga

SEQ ID NO: 728306 - DNA, 33 bp, Homo sapien
tacaacggtttaaagacctacaactagcaagga

SEQ ID NO: 728307 - DNA, 33 bp, Homo sapien
tgaaataagaccaatgaaaggagcaactttttt

SEQ ID NO: 728308 - DNA, 33 bp, Homo sapien
tgaaataagaccaatggaaggagcaactttttt

SEQ ID NO: 728309 - DNA, 33 bp, Homo sapien
gtaacgtgaatgacaaacacaaatctctgtgga

SEQ ID NO: 728310 - DNA, 33 bp, Homo sapien
gtaacgtgaatgacaagcacaaatctctgtgga

SEQ ID NO: 728311 - DNA, 33 bp, Homo sapien
tgtattcacagttcaccgcttttaattgtggag

SEQ ID NO: 728312 - DNA, 33 bp, Homo sapien
tgtattcacagttcactgcttttaattgtggag

SEQ ID NO: 728313 - DNA, 33 bp, Homo sapien
ctgttggtgctagaaaagttgaaacagactgct

SEQ ID NO: 728314 - DNA, 33 bp, Homo sapien
ctgttggtgctagaaatgttgaaacagactgct

SEQ ID NO: 728315 - DNA, 33 bp, Homo sapien
ggtgtttctcttgagacattagtttctggaatc

SEQ ID NO: 728316 - DNA, 33 bp, Homo sapien
ggtgtttctcttgagatattagtttctggaatc

SEQ ID NO: 728317 - DNA, 33 bp, Homo sapien
gctcacaattttatggaaagctggaaatgcagt

SEQ ID NO: 728318 - DNA, 33 bp, Homo sapien
gctcacaattttatgggaagctggaaatgcagt

SEQ ID NO: 728319 - DNA, 33 bp, Homo sapien
agagcttcagtcataaacatcattcatttcagt

SEQ ID NO: 728320 - DNA, 33 bp, Homo sapien
agagcttcagtcataagcatcattcatttcagt

SEQ ID NO: 728321 - DNA, 33 bp, Homo sapien
agattagcttcatatcaccaagctggccctggt

SEQ ID NO: 728322 - DNA, 33 bp, Homo sapien
agattagcttcatatcgccaagctggccctggt

SEQ ID NO: 728323 - DNA, 33 bp, Homo sapien
acaggtaaattttaaaaaagctccacatcacta

SEQ ID NO: 728324 - DNA, 33 bp, Homo sapien
acaggtaaattttaaagaagctccacatcacta

SEQ ID NO: 728325 - DNA, 33 bp, Homo sapien
gagctatttctcaaaaacagtgctgtatgtatg

SEQ ID NO: 728326 - DNA, 33 bp, Homo sapien
gagctatttctcaaaagcagtgctgtatgtatg

SEQ ID NO: 728327 - DNA, 33 bp, Homo sapien
tcttgcctttctttaaccagtgttttatagttt

SEQ ID NO: 728328 - DNA, 33 bp, Homo sapien
tcttgcctttctttaagcagtgttttatagttt

SEQ ID NO: 728329 - DNA, 33 bp, Homo sapien
gcataattatgccatcaattcaaatttttaaaa

SEQ ID NO: 728330 - DNA, 33 bp, Homo sapien
gcataattatgccatctattcaaatttttaaaa

SEQ ID NO: 728331 - DNA, 33 bp, Homo sapien
atgctcacaagtggaaaattttacccctgacct

SEQ ID NO: 728332 - DNA, 33 bp, Homo sapien
atgctcacaagtggaatattttacccctgacct

SEQ ID NO: 728333 - DNA, 33 bp, Homo sapien
ctgggaattgtgctgtaaactaccatgttaata

SEQ ID NO: 728334 - DNA, 33 bp, Homo sapien
ctgggaattgtgctgtcaactaccatgttaata

SEQ ID NO: 728335 - DNA, 33 bp, Homo sapien
tgcccaagaggaaagaggtcacacggacttgaa

SEQ ID NO: 728336 - DNA, 33 bp, Homo sapien
tgcccaagaggaaagatgtcacacggacttgaa

SEQ ID NO: 728337 - DNA, 33 bp, Homo sapien
aaaaatacataaacagaatttcatggatgtttg

SEQ ID NO: 728338 - DNA, 33 bp, Homo sapien
aaaaatacataaacaggatttcatggatgtttg

SEQ ID NO: 728339 - DNA, 33 bp, Homo sapien
gactagccatttgccaataatcataaactctgg

SEQ ID NO: 728340 - DNA, 33 bp, Homo sapien
gactagccatttgccagtaatcataaactctgg

SEQ ID NO: 728341 - DNA, 33 bp, Homo sapien
ttctgacctttggctaaaaatcatttgtgttcc

SEQ ID NO: 728342 - DNA, 33 bp, Homo sapien
ttctgacctttggctataaatcatttgtgttcc

SEQ ID NO: 728343 - DNA, 33 bp, Homo sapien
ctactattgaatagaaaccttaccaataaccta

SEQ ID NO: 728344 - DNA, 33 bp, Homo sapien
ctactattgaatagaagccttaccaataaccta

SEQ ID NO: 728345 - DNA, 33 bp, Homo sapien
caatggcttcctcgcacacttgtggttacaaca

SEQ ID NO: 728346 - DNA, 33 bp, Homo sapien
caatggcttcctcgcatacttgtggttacaaca

SEQ ID NO: 728347 - DNA, 33 bp, Homo sapien
gatacagagctttccaactttatgttattatga

SEQ ID NO: 728348 - DNA, 33 bp, Homo sapien
gatacagagctttccatctttatgttattatga

SEQ ID NO: 728349 - DNA, 33 bp, Homo sapien
gctataaatccatgaccggaacacaagagcata

SEQ ID NO: 728350 - DNA, 33 bp, Homo sapien
gctataaatccatgactggaacacaagagcata

SEQ ID NO: 728351 - DNA, 33 bp, Homo sapien
gagtttgtatcctgcacggaagtccatttcagc

SEQ ID NO: 728352 - DNA, 33 bp, Homo sapien
gagtttgtatcctgcatggaagtccatttcagc

SEQ ID NO: 728353 - DNA, 33 bp, Homo sapien
tgtgatgggctaagcacatattttcatgaagtg

SEQ ID NO: 728354 - DNA, 33 bp, Homo sapien
tgtgatgggctaagcagatattttcatgaagtg

SEQ ID NO: 728355 - DNA, 33 bp, Homo sapien
ctataaaagtggaagaaagcgtaatgagaaagg

SEQ ID NO: 728356 - DNA, 33 bp, Homo sapien
ctataaaagtggaagagagcgtaatgagaaagg

SEQ ID NO: 728357 - DNA, 33 bp, Homo sapien
tgtacacttcatcaaactggcctatggtcttgc

SEQ ID NO: 728358 - DNA, 33 bp, Homo sapien
tgtacacttcatcaaattggcctatggtcttgc

SEQ ID NO: 728359 - DNA, 33 bp, Homo sapien
atcctatctaaattcccgaccacagtgcttcat

SEQ ID NO: 728360 - DNA, 33 bp, Homo sapien
atcctatctaaattcctgaccacagtgcttcat

SEQ ID NO: 728361 - DNA, 33 bp, Homo sapien
aggaagctggtgattacctgaacatcactataa

SEQ ID NO: 728362 - DNA, 33 bp, Homo sapien
aggaagctggtgattatctgaacatcactataa

SEQ ID NO: 728363 - DNA, 33 bp, Homo sapien
tgcccaaatataaaggccattcaatctcaataa

SEQ ID NO: 728364 - DNA, 33 bp, Homo sapien
tgcccaaatataaaggtcattcaatctcaataa

SEQ ID NO: 728365 - DNA, 33 bp, Homo sapien
gtctgtcaactgcctcggaaggagtaatagcct

SEQ ID NO: 728366 - DNA, 33 bp, Homo sapien
gtctgtcaactgcctctgaaggagtaatagcct

SEQ ID NO: 728367 - DNA, 33 bp, Homo sapien
gttaaaacaatctcacaagactattccaagaac

SEQ ID NO: 728368 - DNA, 33 bp, Homo sapien
gttaaaacaatctcaccagactattccaagaac

SEQ ID NO: 728369 - DNA, 33 bp, Homo sapien
tcattaaaattgggtactaaactcaacagttta

SEQ ID NO: 728370 - DNA, 33 bp, Homo sapien
tcattaaaattgggtagtaaactcaacagttta

SEQ ID NO: 728371 - DNA, 33 bp, Homo sapien
tataatgcttgatcaacgagtaggttttcaatt

SEQ ID NO: 728372 - DNA, 33 bp, Homo sapien
tataatgcttgatcaatgagtaggttttcaatt

SEQ ID NO: 728373 - DNA, 33 bp, Homo sapien
gaagcagaagggtatacgcttgatctttgttta

SEQ ID NO: 728374 - DNA, 33 bp, Homo sapien
gaagcagaagggtatatgcttgatctttgttta

SEQ ID NO: 728375 - DNA, 33 bp, Homo sapien
aactgatctttcacaaagtagacacaaatatac

SEQ ID NO: 728376 - DNA, 33 bp, Homo sapien
aactgatctttcacaaggtagacacaaatatac

SEQ ID NO: 728377 - DNA, 33 bp, Homo sapien
atttggtcattcaatacgtaaaatcaactgatc

SEQ ID NO: 728378 - DNA, 33 bp, Homo sapien
atttggtcattcaatatgtaaaatcaactgatc

SEQ ID NO: 728379 - DNA, 33 bp, Homo sapien
ctctgatttcatgttaccacttttttcagtcta

SEQ ID NO: 728380 - DNA, 33 bp, Homo sapien
ctctgatttcatgttatcacttttttcagtcta

SEQ ID NO: 728381 - DNA, 33 bp, Homo sapien
ttcctgctctcctactcactggtcatatggtct

SEQ ID NO: 728382 - DNA, 33 bp, Homo sapien
ttcctgctctcctacttactggtcatatggtct

SEQ ID NO: 728383 - DNA, 33 bp, Homo sapien
taggagcaaggaggcactaagtaaaataaacac

SEQ ID NO: 728384 - DNA, 33 bp, Homo sapien
taggagcaaggaggcattaagtaaaataaacac

SEQ ID NO: 728385 - DNA, 33 bp, Homo sapien
agtaaagattaataaactgaaatccaagtgaac

SEQ ID NO: 728386 - DNA, 33 bp, Homo sapien
agtaaagattaataaagtgaaatccaagtgaac

SEQ ID NO: 728387 - DNA, 33 bp, Homo sapien
caaactttatacagcactgaaacctacataaat

SEQ ID NO: 728388 - DNA, 33 bp, Homo sapien
caaactttatacagcattgaaacctacataaat

SEQ ID NO: 728389 - DNA, 33 bp, Homo sapien
ttaaatgtaagatatcaaactacaaaaatccta

SEQ ID NO: 728390 - DNA, 33 bp, Homo sapien
ttaaatgtaagatatcgaactacaaaaatccta

SEQ ID NO: 728391 - DNA, 33 bp, Homo sapien
aaaaagtcaaacaataacagatgtgttgaggct

SEQ ID NO: 728392 - DNA, 33 bp, Homo sapien
aaaaagtcaaacaatagcagatgtgttgaggct

SEQ ID NO: 728393 - DNA, 33 bp, Homo sapien
ttacatatgattctcaaccttaagactatggat

SEQ ID NO: 728394 - DNA, 33 bp, Homo sapien
ttacatatgattctcatccttaagactatggat

SEQ ID NO: 728395 - DNA, 33 bp, Homo sapien
aatgtggatgcaactaaaggaccttatgtgaag

SEQ ID NO: 728396 - DNA, 33 bp, Homo sapien
aatgtggatgcaactagaggaccttatgtgaag

SEQ ID NO: 728397 - DNA, 33 bp, Homo sapien
tgcttccttctttctgcaggggatataagatgc

SEQ ID NO: 728398 - DNA, 33 bp, Homo sapien
tgcttccttctttctgtaggggatataagatgc

SEQ ID NO: 728399 - DNA, 33 bp, Homo sapien
gatatgggaatttccaacttttagctggtctag

SEQ ID NO: 728400 - DNA, 33 bp, Homo sapien
gatatgggaatttccaccttttagctggtctag

SEQ ID NO: 728401 - DNA, 33 bp, Homo sapien
ttgaaccccatcttcaagtaaaaccaagtacaa

SEQ ID NO: 728402 - DNA, 33 bp, Homo sapien
ttgaaccccatcttcaggtaaaaccaagtacaa

SEQ ID NO: 728403 - DNA, 33 bp, Homo sapien
tttctggccttattaaatgaggatagtattagg

SEQ ID NO: 728404 - DNA, 33 bp, Homo sapien
tttctggccttattaagtgaggatagtattagg

SEQ ID NO: 728405 - DNA, 33 bp, Homo sapien
atgttaagtttgtagacattctgtacgcttgtt

SEQ ID NO: 728406 - DNA, 33 bp, Homo sapien
atgttaagtttgtagagattctgtacgcttgtt

SEQ ID NO: 728407 - DNA, 33 bp, Homo sapien
caattgcactaaggaaacatacctacattgtac

SEQ ID NO: 728408 - DNA, 33 bp, Homo sapien
caattgcactaaggaaccatacctacattgtac

SEQ ID NO: 728409 - DNA, 33 bp, Homo sapien
aaatgacagttagaccaagttgattgtaatgat

SEQ ID NO: 728410 - DNA, 33 bp, Homo sapien
aaatgacagttagacctagttgattgtaatgat

SEQ ID NO: 728411 - DNA, 33 bp, Homo sapien
acataggctgggatcagactcatgcatctgaga

SEQ ID NO: 728412 - DNA, 33 bp, Homo sapien
acataggctgggatcatactcatgcatctgaga

SEQ ID NO: 728413 - DNA, 33 bp, Homo sapien
tttctatcagggtgcacattcactaaattactt

SEQ ID NO: 728414 - DNA, 33 bp, Homo sapien
tttctatcagggtgcatattcactaaattactt

SEQ ID NO: 728415 - DNA, 33 bp, Homo sapien
ccacttatgagatttccaccctcataatctagt

SEQ ID NO: 728416 - DNA, 33 bp, Homo sapien
ccacttatgagatttctaccctcataatctagt

SEQ ID NO: 728417 - DNA, 33 bp, Homo sapien
gctgtttgagatatcaaaataaaagataccatt

SEQ ID NO: 728418 - DNA, 33 bp, Homo sapien
gctgtttgagatatcagaataaaagataccatt

SEQ ID NO: 728419 - DNA, 33 bp, Homo sapien
aattagaaatgggaaacgcactgttcaggtgat

SEQ ID NO: 728420 - DNA, 33 bp, Homo sapien
aattagaaatgggaaatgcactgttcaggtgat

SEQ ID NO: 728421 - DNA, 33 bp, Homo sapien
aatttcaccaaacgaaagagaaagggaatcctg

SEQ ID NO: 728422 - DNA, 33 bp, Homo sapien
aatttcaccaaacgaaggagaaagggaatcctg

SEQ ID NO: 728423 - DNA, 33 bp, Homo sapien
ggataaaggccacctgcattaatctctcaaatg

SEQ ID NO: 728424 - DNA, 33 bp, Homo sapien
ggataaaggccacctgtattaatctctcaaatg

SEQ ID NO: 728425 - DNA, 33 bp, Homo sapien
ccaatgtggctggatactagaaagtgagatgta

SEQ ID NO: 728426 - DNA, 33 bp, Homo sapien
ccaatgtggctggatattagaaagtgagatgta

SEQ ID NO: 728427 - DNA, 33 bp, Homo sapien
atttactgagaatctacaatgtgctgaatgcta

SEQ ID NO: 728428 - DNA, 33 bp, Homo sapien
atttactgagaatctataatgtgctgaatgcta

SEQ ID NO: 728429 - DNA, 33 bp, Homo sapien
gcaactggcaagaaaaattcaatatggggagtg

SEQ ID NO: 728430 - DNA, 33 bp, Homo sapien
gcaactggcaagaaaagttcaatatggggagtg

SEQ ID NO: 728431 - DNA, 33 bp, Homo sapien
agttgccatagccgaacaacgatggcctcaaac

SEQ ID NO: 728432 - DNA, 33 bp, Homo sapien
agttgccatagccgaagaacgatggcctcaaac

SEQ ID NO: 728433 - DNA, 33 bp, Homo sapien
gataaaatataggtggccatttacactggactt

SEQ ID NO: 728434 - DNA, 33 bp, Homo sapien
gataaaatataggtggtcatttacactggactt

SEQ ID NO: 728435 - DNA, 33 bp, Homo sapien
cttctcaaaatggtgaagattaataaaattaac

SEQ ID NO: 728436 - DNA, 33 bp, Homo sapien
cttctcaaaatggtgatgattaataaaattaac

SEQ ID NO: 728437 - DNA, 33 bp, Homo sapien
atctcaataagataccagattaatacaggtttg

SEQ ID NO: 728438 - DNA, 33 bp, Homo sapien
atctcaataagatacccgattaatacaggtttg

SEQ ID NO: 728439 - DNA, 33 bp, Homo sapien
gtaaaactacatttgaagtactgaactaatcta

SEQ ID NO: 728440 - DNA, 33 bp, Homo sapien
gtaaaactacatttgaggtactgaactaatcta

SEQ ID NO: 728441 - DNA, 33 bp, Homo sapien
atcactatgttcccaacgattagcaaatggctt

SEQ ID NO: 728442 - DNA, 33 bp, Homo sapien
atcactatgttcccaatgattagcaaatggctt

SEQ ID NO: 728443 - DNA, 33 bp, Homo sapien
ttatccaagagattacaaggttgagaggaaaaa

SEQ ID NO: 728444 - DNA, 33 bp, Homo sapien
ttatccaagagattacgaggttgagaggaaaaa

SEQ ID NO: 728445 - DNA, 33 bp, Homo sapien
attctcttacttaaagcccattaacatgaatta

SEQ ID NO: 728446 - DNA, 33 bp, Homo sapien
attctcttacttaaaggccattaacatgaatta

SEQ ID NO: 728447 - DNA, 33 bp, Homo sapien
tattcttacaaaggaaagttaccaactccacaa

SEQ ID NO: 728448 - DNA, 33 bp, Homo sapien
tattcttacaaaggaaggttaccaactccacaa

SEQ ID NO: 728449 - DNA, 33 bp, Homo sapien
tctctgagtttgtttaacttggaccaaagacct

SEQ ID NO: 728450 - DNA, 33 bp, Homo sapien
tctctgagtttgtttatcttggaccaaagacct

SEQ ID NO: 728451 - DNA, 33 bp, Homo sapien
ccatcgatttgtcaaccaataaaagggtaaggt

SEQ ID NO: 728452 - DNA, 33 bp, Homo sapien
ccatcgatttgtcaacgaataaaagggtaaggt

SEQ ID NO: 728453 - DNA, 33 bp, Homo sapien
ccaggttgttttttcacagaactgagatttcct

SEQ ID NO: 728454 - DNA, 33 bp, Homo sapien
ccaggttgttttttcatagaactgagatttcct

SEQ ID NO: 728455 - DNA, 33 bp, Homo sapien
gcaaacagatcaaaaacattttccagctttcct

SEQ ID NO: 728456 - DNA, 33 bp, Homo sapien
gcaaacagatcaaaaatattttccagctttcct

SEQ ID NO: 728457 - DNA, 33 bp, Homo sapien
tttttgatctgtttgcaagtattggagcactac

SEQ ID NO: 728458 - DNA, 33 bp, Homo sapien
tttttgatctgtttgcgagtattggagcactac

SEQ ID NO: 728459 - DNA, 33 bp, Homo sapien
tgttgatgtacaattaacaagaatcgtatgtat

SEQ ID NO: 728460 - DNA, 33 bp, Homo sapien
tgttgatgtacaattagcaagaatcgtatgtat

SEQ ID NO: 728461 - DNA, 33 bp, Homo sapien
tagctaatgtcattggccataaatctcagcctc

SEQ ID NO: 728462 - DNA, 33 bp, Homo sapien
tagctaatgtcattgggcataaatctcagcctc

SEQ ID NO: 728463 - DNA, 33 bp, Homo sapien
gataccatgcctgaaaaagaatctgaaacatta

SEQ ID NO: 728464 - DNA, 33 bp, Homo sapien
gataccatgcctgaaagagaatctgaaacatta

SEQ ID NO: 728465 - DNA, 33 bp, Homo sapien
gaggttccaacctcaaagagtattctaatggaa

SEQ ID NO: 728466 - DNA, 33 bp, Homo sapien
gaggttccaacctcaaggagtattctaatggaa

SEQ ID NO: 728467 - DNA, 33 bp, Homo sapien
ctacacaaatttcatcaaatgcgtgaatctccc

SEQ ID NO: 728468 - DNA, 33 bp, Homo sapien
ctacacaaatttcatcgaatgcgtgaatctccc

SEQ ID NO: 728469 - DNA, 33 bp, Homo sapien
gcaaaattactgggacaataaaaagatcagtgg

SEQ ID NO: 728470 - DNA, 33 bp, Homo sapien
gcaaaattactgggacgataaaaagatcagtgg

SEQ ID NO: 728471 - DNA, 33 bp, Homo sapien
atgtacgtggcacaaaagtaacttcatatgcac

SEQ ID NO: 728472 - DNA, 33 bp, Homo sapien
atgtacgtggcacaaacgtaacttcatatgcac

SEQ ID NO: 728473 - DNA, 33 bp, Homo sapien
catgtatgttcaaggacatagatgacagattta

SEQ ID NO: 728474 - DNA, 33 bp, Homo sapien
catgtatgttcaaggatatagatgacagattta

SEQ ID NO: 728475 - DNA, 33 bp, Homo sapien
agtttagcgaatatacaaaagatatataaaaca

SEQ ID NO: 728476 - DNA, 33 bp, Homo sapien
agtttagcgaatatacgaaagatatataaaaca

SEQ ID NO: 728477 - DNA, 33 bp, Homo sapien
catcatctcgtcaataactttctggctgtcaat

SEQ ID NO: 728478 - DNA, 33 bp, Homo sapien
catcatctcgtcaatatctttctggctgtcaat

SEQ ID NO: 728479 - DNA, 33 bp, Homo sapien
caagccattcacacataacacaaaataaactct

SEQ ID NO: 728480 - DNA, 33 bp, Homo sapien
caagccattcacacattacacaaaataaactct

SEQ ID NO: 728481 - DNA, 33 bp, Homo sapien
ataatattttcctctacagcaaaggacaagcat

SEQ ID NO: 728482 - DNA, 33 bp, Homo sapien
ataatattttcctctatagcaaaggacaagcat

SEQ ID NO: 728483 - DNA, 33 bp, Homo sapien
agatgggtaaaggaacaatgaatagagtctctc

SEQ ID NO: 728484 - DNA, 33 bp, Homo sapien
agatgggtaaaggaacgatgaatagagtctctc

SEQ ID NO: 728485 - DNA, 33 bp, Homo sapien
caaaatcttagcttcaagtgacccttccatctt

SEQ ID NO: 728486 - DNA, 33 bp, Homo sapien
caaaatcttagcttcaggtgacccttccatctt

SEQ ID NO: 728487 - DNA, 33 bp, Homo sapien
gatgttggaactgaaacagctacatgaatgttc

SEQ ID NO: 728488 - DNA, 33 bp, Homo sapien
gatgttggaactgaaatagctacatgaatgttc

SEQ ID NO: 728489 - DNA, 33 bp, Homo sapien
ttatattgagctttgaactacccttgcattcct

SEQ ID NO: 728490 - DNA, 33 bp, Homo sapien
ttatattgagctttgacctacccttgcattcct

SEQ ID NO: 728491 - DNA, 33 bp, Homo sapien
ctgcttcctcctatacccatttctctttctcct

SEQ ID NO: 728492 - DNA, 33 bp, Homo sapien
ctgcttcctcctatacgcatttctctttctcct

SEQ ID NO: 728493 - DNA, 33 bp, Homo sapien
atgtttccagaagattgaagatttcagtgattt

SEQ ID NO: 728494 - DNA, 33 bp, Homo sapien
atgtttccagaagatttaagatttcagtgattt

SEQ ID NO: 728495 - DNA, 33 bp, Homo sapien
ggatattctgaatggccgaggttaaactttggt

SEQ ID NO: 728496 - DNA, 33 bp, Homo sapien
ggatattctgaatggctgaggttaaactttggt

SEQ ID NO: 728497 - DNA, 33 bp, Homo sapien
tacaattagaataccaaatttcgggcttttatt

SEQ ID NO: 728498 - DNA, 33 bp, Homo sapien
tacaattagaataccacatttcgggcttttatt

SEQ ID NO: 728499 - DNA, 33 bp, Homo sapien
gctacactccaaattaacagcacttattgagag

SEQ ID NO: 728500 - DNA, 33 bp, Homo sapien
gctacactccaaattagcagcacttattgagag

SEQ ID NO: 728501 - DNA, 33 bp, Homo sapien
tccccaaaacaacccaatggcctaaattcaatc

SEQ ID NO: 728502 - DNA, 33 bp, Homo sapien
tccccaaaacaacccagtggcctaaattcaatc

SEQ ID NO: 728503 - DNA, 33 bp, Homo sapien
ttaaacaggacaagacagagttgcaataatgag

SEQ ID NO: 728504 - DNA, 33 bp, Homo sapien
ttaaacaggacaagacggagttgcaataatgag

SEQ ID NO: 728505 - DNA, 33 bp, Homo sapien
tgtagctcatttctgacaatggataaataaggt

SEQ ID NO: 728506 - DNA, 33 bp, Homo sapien
tgtagctcatttctgataatggataaataaggt

SEQ ID NO: 728507 - DNA, 33 bp, Homo sapien
ttttatgttctgtcaacttagctaagctgcaag

SEQ ID NO: 728508 - DNA, 33 bp, Homo sapien
ttttatgttctgtcaatttagctaagctgcaag

SEQ ID NO: 728509 - DNA, 33 bp, Homo sapien
ttggagtttttggagacaacactaaagagagtg

SEQ ID NO: 728510 - DNA, 33 bp, Homo sapien
ttggagtttttggagataacactaaagagagtg

SEQ ID NO: 728511 - DNA, 33 bp, Homo sapien
acattgtatggaacaactggctttaagaaagaa

SEQ ID NO: 728512 - DNA, 33 bp, Homo sapien
acattgtatggaacaattggctttaagaaagaa

SEQ ID NO: 728513 - DNA, 33 bp, Homo sapien
ggcaagcccttaaaaacgacatggctcagccag

SEQ ID NO: 728514 - DNA, 33 bp, Homo sapien
ggcaagcccttaaaaatgacatggctcagccag

SEQ ID NO: 728515 - DNA, 33 bp, Homo sapien
aagtttacttttacctcagatgcaggcccctaa

SEQ ID NO: 728516 - DNA, 33 bp, Homo sapien
aagtttacttttaccttagatgcaggcccctaa

SEQ ID NO: 728517 - DNA, 33 bp, Homo sapien
catattaaaggactcacatacataggcagattt

SEQ ID NO: 728518 - DNA, 33 bp, Homo sapien
catattaaaggactcagatacataggcagattt

SEQ ID NO: 728519 - DNA, 33 bp, Homo sapien
ggtaagctgatttgcaacagaaagaacagagct

SEQ ID NO: 728520 - DNA, 33 bp, Homo sapien
ggtaagctgatttgcagcagaaagaacagagct

SEQ ID NO: 728521 - DNA, 33 bp, Homo sapien
agaaaagtattaatcacggtgaaagtgtacaag

SEQ ID NO: 728522 - DNA, 33 bp, Homo sapien
agaaaagtattaatcatggtgaaagtgtacaag

SEQ ID NO: 728523 - DNA, 33 bp, Homo sapien
ttatttgtacattagaacaccttgctttttcag

SEQ ID NO: 728524 - DNA, 33 bp, Homo sapien
ttatttgtacattagagcaccttgctttttcag

SEQ ID NO: 728525 - DNA, 33 bp, Homo sapien
gtatttgtcaggttgacctaatcacacggaaac

SEQ ID NO: 728526 - DNA, 33 bp, Homo sapien
gtatttgtcaggttgatctaatcacacggaaac

SEQ ID NO: 728527 - DNA, 33 bp, Homo sapien
atgctgctcacaaggaagtaagcacagcctcaa

SEQ ID NO: 728528 - DNA, 33 bp, Homo sapien
atgctgctcacaaggacgtaagcacagcctcaa

SEQ ID NO: 728529 - DNA, 33 bp, Homo sapien
tctgcctgcactgtcagtacattatgctgcagg

SEQ ID NO: 728530 - DNA, 33 bp, Homo sapien
tctgcctgcactgtcattacattatgctgcagg

SEQ ID NO: 728531 - DNA, 33 bp, Homo sapien
tcctactttgaaagaaccaggccatataattaa

SEQ ID NO: 728532 - DNA, 33 bp, Homo sapien
tcctactttgaaagaatcaggccatataattaa

SEQ ID NO: 728533 - DNA, 33 bp, Homo sapien
gagggagagcaggaaaagactcaaacacctata

SEQ ID NO: 728534 - DNA, 33 bp, Homo sapien
gagggagagcaggaaaggactcaaacacctata

SEQ ID NO: 728535 - DNA, 33 bp, Homo sapien
tgctaaaggtaaaaaacgaacatatgctaattt

SEQ ID NO: 728536 - DNA, 33 bp, Homo sapien
tgctaaaggtaaaaaatgaacatatgctaattt

SEQ ID NO: 728537 - DNA, 33 bp, Homo sapien
acttctcaggaacttacgcctcttaaatagtct

SEQ ID NO: 728538 - DNA, 33 bp, Homo sapien
acttctcaggaacttatgcctcttaaatagtct

SEQ ID NO: 728539 - DNA, 33 bp, Homo sapien
agatcaaggtgctgcacggtcgagttctgatga

SEQ ID NO: 728540 - DNA, 33 bp, Homo sapien
agatcaaggtgctgcatggtcgagttctgatga

SEQ ID NO: 728541 - DNA, 33 bp, Homo sapien
catgtaaactgaaacacaaaggtgcattttata

SEQ ID NO: 728542 - DNA, 33 bp, Homo sapien
catgtaaactgaaacagaaaggtgcattttata

SEQ ID NO: 728543 - DNA, 33 bp, Homo sapien
actgaccagggacatcactaacagaaacattta

SEQ ID NO: 728544 - DNA, 33 bp, Homo sapien
actgaccagggacatcgctaacagaaacattta

SEQ ID NO: 728545 - DNA, 33 bp, Homo sapien
aaaggatctgggacatcagaacaattgtaaact

SEQ ID NO: 728546 - DNA, 33 bp, Homo sapien
aaaggatctgggacattagaacaattgtaaact

SEQ ID NO: 728547 - DNA, 33 bp, Homo sapien
tgagagtgaagaataaaaaatggatggtgaagg

SEQ ID NO: 728548 - DNA, 33 bp, Homo sapien
tgagagtgaagaataagaaatggatggtgaagg

SEQ ID NO: 728549 - DNA, 33 bp, Homo sapien
atcgtctaaatttaccaaaactcagatcccatt

SEQ ID NO: 728550 - DNA, 33 bp, Homo sapien
atcgtctaaatttaccgaaactcagatcccatt

SEQ ID NO: 728551 - DNA, 33 bp, Homo sapien
actgttatttctggtaacaacttagaatcaact

SEQ ID NO: 728552 - DNA, 33 bp, Homo sapien
actgttatttctggtagcaacttagaatcaact

SEQ ID NO: 728553 - DNA, 33 bp, Homo sapien
gtgattttgactttcaagtgttattatttaaaa

SEQ ID NO: 728554 - DNA, 33 bp, Homo sapien
gtgattttgactttcacgtgttattatttaaaa

SEQ ID NO: 728555 - DNA, 33 bp, Homo sapien
gtgtacaaattttgaacctgcagttgaaataga

SEQ ID NO: 728556 - DNA, 33 bp, Homo sapien
gtgtacaaattttgaatctgcagttgaaataga

SEQ ID NO: 728557 - DNA, 33 bp, Homo sapien
aggaatacagaaacagaattctctgaaaaaaat

SEQ ID NO: 728558 - DNA, 33 bp, Homo sapien
aggaatacagaaacaggattctctgaaaaaaat

SEQ ID NO: 728559 - DNA, 33 bp, Homo sapien
ggggcattatatcatacggatttttttcagaga

SEQ ID NO: 728560 - DNA, 33 bp, Homo sapien
ggggcattatatcatatggatttttttcagaga

SEQ ID NO: 728561 - DNA, 33 bp, Homo sapien
ggtacccagtgacttacctgctgaaacactact

SEQ ID NO: 728562 - DNA, 33 bp, Homo sapien
ggtacccagtgacttatctgctgaaacactact

SEQ ID NO: 728563 - DNA, 33 bp, Homo sapien
aagccagtttcttttcaaattgaacgtcaaggg

SEQ ID NO: 728564 - DNA, 33 bp, Homo sapien
aagccagtttcttttctaattgaacgtcaaggg

SEQ ID NO: 728565 - DNA, 33 bp, Homo sapien
gcaacagagcgagagcagactcaacttaaagaa

SEQ ID NO: 728566 - DNA, 33 bp, Homo sapien
gcaacagagcgagagcggactcaacttaaagaa

SEQ ID NO: 728567 - DNA, 33 bp, Homo sapien
aaactaatacagatgacggaacaagaaagcata

SEQ ID NO: 728568 - DNA, 33 bp, Homo sapien
aaactaatacagatgatggaacaagaaagcata

SEQ ID NO: 728569 - DNA, 33 bp, Homo sapien
actcaggctttgtcaacgattaaatgtatgacc

SEQ ID NO: 728570 - DNA, 33 bp, Homo sapien
actcaggctttgtcaatgattaaatgtatgacc

SEQ ID NO: 728571 - DNA, 33 bp, Homo sapien
agccaaatattttgtaacttagcagcacaggga

SEQ ID NO: 728572 - DNA, 33 bp, Homo sapien
agccaaatattttgtaccttagcagcacaggga

SEQ ID NO: 728573 - DNA, 33 bp, Homo sapien
tgcaccttgaaaaaaacattctatgccaatgaa

SEQ ID NO: 728574 - DNA, 33 bp, Homo sapien
tgcaccttgaaaaaaatattctatgccaatgaa

SEQ ID NO: 728575 - DNA, 33 bp, Homo sapien
tttgtatcaggcctccaaagatcttctttaaag

SEQ ID NO: 728576 - DNA, 33 bp, Homo sapien
tttgtatcaggcctccgaagatcttctttaaag

SEQ ID NO: 728577 - DNA, 33 bp, Homo sapien
ttaatgtcattatggcaaaagtgtgttcattat

SEQ ID NO: 728578 - DNA, 33 bp, Homo sapien
ttaatgtcattatggcgaaagtgtgttcattat

SEQ ID NO: 728579 - DNA, 33 bp, Homo sapien
aacatacagcaacttaccctgtactggcccatc

SEQ ID NO: 728580 - DNA, 33 bp, Homo sapien
aacatacagcaacttatcctgtactggcccatc

SEQ ID NO: 728581 - DNA, 33 bp, Homo sapien
gatatttcctttgttcactcacactaaataatc

SEQ ID NO: 728582 - DNA, 33 bp, Homo sapien
gatatttcctttgttcgctcacactaaataatc

SEQ ID NO: 728583 - DNA, 33 bp, Homo sapien
aaaaatagacaatggggactattgggggaaaga

SEQ ID NO: 728584 - DNA, 33 bp, Homo sapien
aaaaatagacaatgggtactattgggggaaaga

SEQ ID NO: 728585 - DNA, 33 bp, Homo sapien
cagtgacttatactcacaggaaatcctttgaca

SEQ ID NO: 728586 - DNA, 33 bp, Homo sapien
cagtgacttatactcagaggaaatcctttgaca

SEQ ID NO: 728587 - DNA, 33 bp, Homo sapien
gaaattcaccgcaaaaacatctttgcatgggca

SEQ ID NO: 728588 - DNA, 33 bp, Homo sapien
gaaattcaccgcaaaagcatctttgcatgggca

SEQ ID NO: 728589 - DNA, 33 bp, Homo sapien
aggaatcctaaagaaaacagttcacttccatgt

SEQ ID NO: 728590 - DNA, 33 bp, Homo sapien
aggaatcctaaagaaaccagttcacttccatgt

SEQ ID NO: 728591 - DNA, 33 bp, Homo sapien
caacaaattcaaaaacagtgaaatcatatcaag

SEQ ID NO: 728592 - DNA, 33 bp, Homo sapien
caacaaattcaaaaacggtgaaatcatatcaag

SEQ ID NO: 728593 - DNA, 33 bp, Homo sapien
gccacaaattcaagcacgtgagaaataatcaag

SEQ ID NO: 728594 - DNA, 33 bp, Homo sapien
gccacaaattcaagcatgtgagaaataatcaag

SEQ ID NO: 728595 - DNA, 33 bp, Homo sapien
caaaagacaactgcagaacctattaaacaacag

SEQ ID NO: 728596 - DNA, 33 bp, Homo sapien
caaaagacaactgcagtacctattaaacaacag

SEQ ID NO: 728597 - DNA, 33 bp, Homo sapien
ttgagtagtggcttcacgggacatctagactgg

SEQ ID NO: 728598 - DNA, 33 bp, Homo sapien
ttgagtagtggcttcatgggacatctagactgg

SEQ ID NO: 728599 - DNA, 33 bp, Homo sapien
cctgaatctgattttaccttcttgcaagcattt

SEQ ID NO: 728600 - DNA, 33 bp, Homo sapien
cctgaatctgattttatcttcttgcaagcattt

SEQ ID NO: 728601 - DNA, 33 bp, Homo sapien
aattcatcagataatacgtcttgaaagtcaagt

SEQ ID NO: 728602 - DNA, 33 bp, Homo sapien
aattcatcagataatatgtcttgaaagtcaagt

SEQ ID NO: 728603 - DNA, 33 bp, Homo sapien
ggttcacatggacaacgcagtgtaaaaagaaac

SEQ ID NO: 728604 - DNA, 33 bp, Homo sapien
ggttcacatggacaactcagtgtaaaaagaaac

SEQ ID NO: 728605 - DNA, 33 bp, Homo sapien
tggatttttagtttcaaagtatatcttgcctaa

SEQ ID NO: 728606 - DNA, 33 bp, Homo sapien
tggatttttagtttcatagtatatcttgcctaa

SEQ ID NO: 728607 - DNA, 33 bp, Homo sapien
ccataagcatatatttaaaaaagtcagtggtaa

SEQ ID NO: 728608 - DNA, 33 bp, Homo sapien
ccataagcatatattttaaaaagtcagtggtaa

SEQ ID NO: 728609 - DNA, 33 bp, Homo sapien
aatcttgtggcactaacagcatcaagcttgttt

SEQ ID NO: 728610 - DNA, 33 bp, Homo sapien
aatcttgtggcactaatagcatcaagcttgttt

SEQ ID NO: 728611 - DNA, 33 bp, Homo sapien
cattgctggatttacagtctatggcccagttct

SEQ ID NO: 728612 - DNA, 33 bp, Homo sapien
cattgctggatttacattctatggcccagttct

SEQ ID NO: 728613 - DNA, 33 bp, Homo sapien
tctgaaaatgttaaggaagaaactgatatgagg

SEQ ID NO: 728614 - DNA, 33 bp, Homo sapien
tctgaaaatgttaagggagaaactgatatgagg

SEQ ID NO: 728615 - DNA, 33 bp, Homo sapien
aaaaaaggctaaattacggatctttcaatgtga

SEQ ID NO: 728616 - DNA, 33 bp, Homo sapien
aaaaaaggctaaattatggatctttcaatgtga

SEQ ID NO: 728617 - DNA, 33 bp, Homo sapien
atagattaggaattcaaaagaaccagaattttg

SEQ ID NO: 728618 - DNA, 33 bp, Homo sapien
atagattaggaattcagaagaaccagaattttg

SEQ ID NO: 728619 - DNA, 33 bp, Homo sapien
gtttatgtgtgtggccagatgtggtttgaacat

SEQ ID NO: 728620 - DNA, 33 bp, Homo sapien
gtttatgtgtgtggccggatgtggtttgaacat

SEQ ID NO: 728621 - DNA, 33 bp, Homo sapien
aaatttagtcgaactaaaactgcaaatcggaag

SEQ ID NO: 728622 - DNA, 33 bp, Homo sapien
aaatttagtcgaactagaactgcaaatcggaag

SEQ ID NO: 728623 - DNA, 33 bp, Homo sapien
tatgataaatgaaacactctgtatcagggcact

SEQ ID NO: 728624 - DNA, 33 bp, Homo sapien
tatgataaatgaaacattctgtatcagggcact

SEQ ID NO: 728625 - DNA, 33 bp, Homo sapien
tttgaattcttctcaaggtatggtttacttatt

SEQ ID NO: 728626 - DNA, 33 bp, Homo sapien
tttgaattcttctcaatgtatggtttacttatt

SEQ ID NO: 728627 - DNA, 33 bp, Homo sapien
tgacactatctcccatcaccccgagatgggacc

SEQ ID NO: 728628 - DNA, 33 bp, Homo sapien
tgacactatctcccattaccccgagatgggacc

SEQ ID NO: 728629 - DNA, 33 bp, Homo sapien
gcacgactctgaagtgaaactctgcacctgctc

SEQ ID NO: 728630 - DNA, 33 bp, Homo sapien
gcacgactctgaagtggaactctgcacctgctc

SEQ ID NO: 728631 - DNA, 33 bp, Homo sapien
acaccattgccttgggaatttctactagtctca

SEQ ID NO: 728632 - DNA, 33 bp, Homo sapien
acaccattgccttggggatttctactagtctca

SEQ ID NO: 728633 - DNA, 33 bp, Homo sapien
caatagtaggtttgtgaagtgagactagtagaa

SEQ ID NO: 728634 - DNA, 33 bp, Homo sapien
caatagtaggtttgtggagtgagactagtagaa

SEQ ID NO: 728635 - DNA, 33 bp, Homo sapien
ctgaaaaatgcaatcacgtttggaagatttata

SEQ ID NO: 728636 - DNA, 33 bp, Homo sapien
ctgaaaaatgcaatcatgtttggaagatttata

SEQ ID NO: 728637 - DNA, 33 bp, Homo sapien
ttcagtcttgttcctcacaccaagtcacacact

SEQ ID NO: 728638 - DNA, 33 bp, Homo sapien
ttcagtcttgttcctcgcaccaagtcacacact

SEQ ID NO: 728639 - DNA, 33 bp, Homo sapien
aaagttcacttaaaaacgcagcaggtgtaagtc

SEQ ID NO: 728640 - DNA, 33 bp, Homo sapien
aaagttcacttaaaaatgcagcaggtgtaagtc

SEQ ID NO: 728641 - DNA, 33 bp, Homo sapien
tgtgatgcaaggaaacgctaagctgtgagaatt

SEQ ID NO: 728642 - DNA, 33 bp, Homo sapien
tgtgatgcaaggaaactctaagctgtgagaatt

SEQ ID NO: 728643 - DNA, 33 bp, Homo sapien
acatacaaccatcaaacggatatgcctcgagtt

SEQ ID NO: 728644 - DNA, 33 bp, Homo sapien
acatacaaccatcaaatggatatgcctcgagtt

SEQ ID NO: 728645 - DNA, 33 bp, Homo sapien
gcaagttgaacagttaaaagttgagatggaatt

SEQ ID NO: 728646 - DNA, 33 bp, Homo sapien
gcaagttgaacagttagaagttgagatggaatt

SEQ ID NO: 728647 - DNA, 33 bp, Homo sapien
tgagggcaaaagtcagacctttctttgggtaag

SEQ ID NO: 728648 - DNA, 33 bp, Homo sapien
tgagggcaaaagtcaggcctttctttgggtaag

SEQ ID NO: 728649 - DNA, 33 bp, Homo sapien
agttggatttgttttacgtacaggtatcagttt

SEQ ID NO: 728650 - DNA, 33 bp, Homo sapien
agttggatttgttttatgtacaggtatcagttt

SEQ ID NO: 728651 - DNA, 33 bp, Homo sapien
tttattataagtagaaatgtcatgctgctattt

SEQ ID NO: 728652 - DNA, 33 bp, Homo sapien
tttattataagtagaagtgtcatgctgctattt

SEQ ID NO: 728653 - DNA, 33 bp, Homo sapien
tctatcataattttaacagtcctgaatgcaatc

SEQ ID NO: 728654 - DNA, 33 bp, Homo sapien
tctatcataattttaatagtcctgaatgcaatc

SEQ ID NO: 728655 - DNA, 33 bp, Homo sapien
cacaaatactcccataccatgaatgatttcaag

SEQ ID NO: 728656 - DNA, 33 bp, Homo sapien
cacaaatactcccatagcatgaatgatttcaag

SEQ ID NO: 728657 - DNA, 33 bp, Homo sapien
ttacttttagaagttcactgcactgggattctg

SEQ ID NO: 728658 - DNA, 33 bp, Homo sapien
ttacttttagaagttcgctgcactgggattctg

SEQ ID NO: 728659 - DNA, 33 bp, Homo sapien
agcccagagaaggcaccagagaaatccacataa

SEQ ID NO: 728660 - DNA, 33 bp, Homo sapien
agcccagagaaggcacgagagaaatccacataa

SEQ ID NO: 728661 - DNA, 33 bp, Homo sapien
gcaacaacagtgacaacaacattaggtcaggag

SEQ ID NO: 728662 - DNA, 33 bp, Homo sapien
gcaacaacagtgacaagaacattaggtcaggag

SEQ ID NO: 728663 - DNA, 33 bp, Homo sapien
gcttcctgagtgagaaaagccctactgaactca

SEQ ID NO: 728664 - DNA, 33 bp, Homo sapien
gcttcctgagtgagaagagccctactgaactca

SEQ ID NO: 728665 - DNA, 33 bp, Homo sapien
ttggcatttcttgaacactcgatatttgttaca

SEQ ID NO: 728666 - DNA, 33 bp, Homo sapien
ttggcatttcttgaacgctcgatatttgttaca

SEQ ID NO: 728667 - DNA, 33 bp, Homo sapien
gggaaattatgctctacgcatttcttagcttca

SEQ ID NO: 728668 - DNA, 33 bp, Homo sapien
gggaaattatgctctaggcatttcttagcttca

SEQ ID NO: 728669 - DNA, 33 bp, Homo sapien
tgaccatttcaggggccattcatggtattttta

SEQ ID NO: 728670 - DNA, 33 bp, Homo sapien
tgaccatttcaggggctattcatggtattttta

SEQ ID NO: 728671 - DNA, 33 bp, Homo sapien
aatttaagtgcattcaactgtctttctggaata

SEQ ID NO: 728672 - DNA, 33 bp, Homo sapien
aatttaagtgcattcacctgtctttctggaata

SEQ ID NO: 728673 - DNA, 33 bp, Homo sapien
agatgcagcaaaccaccattgcacaggtacatc

SEQ ID NO: 728674 - DNA, 33 bp, Homo sapien
agatgcagcaaaccactattgcacaggtacatc

SEQ ID NO: 728675 - DNA, 33 bp, Homo sapien
aagacatttgtaataaacccagagacacaagta

SEQ ID NO: 728676 - DNA, 33 bp, Homo sapien
aagacatttgtaataagcccagagacacaagta

SEQ ID NO: 728677 - DNA, 33 bp, Homo sapien
ctttatctacactcccaagaaaagaaagagcct

SEQ ID NO: 728678 - DNA, 33 bp, Homo sapien
ctttatctacactcccgagaaaagaaagagcct

SEQ ID NO: 728679 - DNA, 33 bp, Homo sapien
ctaatagtaatatagacgatcgagtttactggc

SEQ ID NO: 728680 - DNA, 33 bp, Homo sapien
ctaatagtaatatagatgatcgagtttactggc

SEQ ID NO: 728681 - DNA, 33 bp, Homo sapien
acaatgtatacatgaactgaaacatcacactgc

SEQ ID NO: 728682 - DNA, 33 bp, Homo sapien
acaatgtatacatgaattgaaacatcacactgc

SEQ ID NO: 728683 - DNA, 33 bp, Homo sapien
atacatccagagcctacattagaattaaacaca

SEQ ID NO: 728684 - DNA, 33 bp, Homo sapien
atacatccagagcctatattagaattaaacaca

SEQ ID NO: 728685 - DNA, 33 bp, Homo sapien
accttagtgaatggagaacacttttgtcaggca

SEQ ID NO: 728686 - DNA, 33 bp, Homo sapien
accttagtgaatggaggacacttttgtcaggca

SEQ ID NO: 728687 - DNA, 33 bp, Homo sapien
agtcctatcattctaccggaaaacttatttcca

SEQ ID NO: 728688 - DNA, 33 bp, Homo sapien
agtcctatcattctacgggaaaacttatttcca

SEQ ID NO: 728689 - DNA, 33 bp, Homo sapien
taagtaagagattagacatgagaggtaaagaag

SEQ ID NO: 728690 - DNA, 33 bp, Homo sapien
taagtaagagattagatatgagaggtaaagaag

SEQ ID NO: 728691 - DNA, 33 bp, Homo sapien
gtcagaggtagaaacaagatcgtttacaaactc

SEQ ID NO: 728692 - DNA, 33 bp, Homo sapien
gtcagaggtagaaacaggatcgtttacaaactc

SEQ ID NO: 728693 - DNA, 33 bp, Homo sapien
tccgtctggtaggctacaatgctattgggacct

SEQ ID NO: 728694 - DNA, 33 bp, Homo sapien
tccgtctggtaggctataatgctattgggacct

SEQ ID NO: 728695 - DNA, 33 bp, Homo sapien
aaaaaacaatttggaaacaatactgacagtgat

SEQ ID NO: 728696 - DNA, 33 bp, Homo sapien
aaaaaacaatttggaaccaatactgacagtgat

SEQ ID NO: 728697 - DNA, 33 bp, Homo sapien
aggaggctggtatcccaggacaagttctcagcc

SEQ ID NO: 728698 - DNA, 33 bp, Homo sapien
aggaggctggtatcccgggacaagttctcagcc

SEQ ID NO: 728699 - DNA, 33 bp, Homo sapien
ccaatcactgcctgaactgtctcctctgcagcc

SEQ ID NO: 728700 - DNA, 33 bp, Homo sapien
ccaatcactgcctgaattgtctcctctgcagcc

SEQ ID NO: 728701 - DNA, 33 bp, Homo sapien
tccatagccttggagaagagatgcctggccagc

SEQ ID NO: 728702 - DNA, 33 bp, Homo sapien
tccatagccttggagaggagatgcctggccagc

SEQ ID NO: 728703 - DNA, 33 bp, Homo sapien
aaggtttgggtctaacacctgtgaaagaaacgg

SEQ ID NO: 728704 - DNA, 33 bp, Homo sapien
aaggtttgggtctaacgcctgtgaaagaaacgg

SEQ ID NO: 728705 - DNA, 33 bp, Homo sapien
ttccagcagtatgataacaaccagtaatttaac

SEQ ID NO: 728706 - DNA, 33 bp, Homo sapien
ttccagcagtatgataccaaccagtaatttaac

SEQ ID NO: 728707 - DNA, 33 bp, Homo sapien
gtcagtaagaaaatgaagattagataggaggac

SEQ ID NO: 728708 - DNA, 33 bp, Homo sapien
gtcagtaagaaaatgaggattagataggaggac

SEQ ID NO: 728709 - DNA, 33 bp, Homo sapien
ctgtatgctgtactcacaggtcagatatttgtt

SEQ ID NO: 728710 - DNA, 33 bp, Homo sapien
ctgtatgctgtactcataggtcagatatttgtt

SEQ ID NO: 728711 - DNA, 33 bp, Homo sapien
taaaaaaatgtgttaccgctaatgttacttaca

SEQ ID NO: 728712 - DNA, 33 bp, Homo sapien
taaaaaaatgtgttactgctaatgttacttaca

SEQ ID NO: 728713 - DNA, 33 bp, Homo sapien
ctgctgctcacacatactaatagcttgcaagaa

SEQ ID NO: 728714 - DNA, 33 bp, Homo sapien
ctgctgctcacacatattaatagcttgcaagaa

SEQ ID NO: 728715 - DNA, 33 bp, Homo sapien
cacacacacacacataaaatagatatagggaat

SEQ ID NO: 728716 - DNA, 33 bp, Homo sapien
cacacacacacacatagaatagatatagggaat

SEQ ID NO: 728717 - DNA, 33 bp, Homo sapien
aagtaacacttcctccacactcatcctgtggaa

SEQ ID NO: 728718 - DNA, 33 bp, Homo sapien
aagtaacacttcctcctcactcatcctgtggaa

SEQ ID NO: 728719 - DNA, 33 bp, Homo sapien
ttttaatactagcctgacactgactatacagat

SEQ ID NO: 728720 - DNA, 33 bp, Homo sapien
ttttaatactagcctgtcactgactatacagat

SEQ ID NO: 728721 - DNA, 33 bp, Homo sapien
aaacaaaaagctaggaaggtggtcaagatatct

SEQ ID NO: 728722 - DNA, 33 bp, Homo sapien
aaacaaaaagctaggagggtggtcaagatatct

SEQ ID NO: 728723 - DNA, 33 bp, Homo sapien
ctaagtcctgctgatagccgtaatagtttactg

SEQ ID NO: 728724 - DNA, 33 bp, Homo sapien
ctaagtcctgctgatatccgtaatagtttactg

SEQ ID NO: 728725 - DNA, 33 bp, Homo sapien
attcataatataatacaatgcgttaactccttt

SEQ ID NO: 728726 - DNA, 33 bp, Homo sapien
attcataatataatacgatgcgttaactccttt

SEQ ID NO: 728727 - DNA, 33 bp, Homo sapien
atgtctccaggaagaccaaactaggaagacaat

SEQ ID NO: 728728 - DNA, 33 bp, Homo sapien
atgtctccaggaagactaaactaggaagacaat

SEQ ID NO: 728729 - DNA, 33 bp, Homo sapien
ctcaaaatggttgatcacaagggagtggagaga

SEQ ID NO: 728730 - DNA, 33 bp, Homo sapien
ctcaaaatggttgatcgcaagggagtggagaga

SEQ ID NO: 728731 - DNA, 33 bp, Homo sapien
gtgtcagaaggagagaaggaataattcattgag

SEQ ID NO: 728732 - DNA, 33 bp, Homo sapien
gtgtcagaaggagagagggaataattcattgag

SEQ ID NO: 728733 - DNA, 33 bp, Homo sapien
actgttggaaaagcacagtattagtgtgggagt

SEQ ID NO: 728734 - DNA, 33 bp, Homo sapien
actgttggaaaagcacggtattagtgtgggagt

SEQ ID NO: 728735 - DNA, 33 bp, Homo sapien
cgtaatgattttcttacggttggtaacttaggt

SEQ ID NO: 728736 - DNA, 33 bp, Homo sapien
cgtaatgattttcttatggttggtaacttaggt

SEQ ID NO: 728737 - DNA, 33 bp, Homo sapien
tatctaaagcacagtacgcacccagtaaatgat

SEQ ID NO: 728738 - DNA, 33 bp, Homo sapien
tatctaaagcacagtaggcacccagtaaatgat

SEQ ID NO: 728739 - DNA, 33 bp, Homo sapien
tttttggaatgatactaagatgatattggcatt

SEQ ID NO: 728740 - DNA, 33 bp, Homo sapien
tttttggaatgatactgagatgatattggcatt

SEQ ID NO: 728741 - DNA, 33 bp, Homo sapien
gaggaaagagagttcaccttaagcgttttcaga

SEQ ID NO: 728742 - DNA, 33 bp, Homo sapien
gaggaaagagagttcatcttaagcgttttcaga

SEQ ID NO: 728743 - DNA, 33 bp, Homo sapien
ttccttgtgggagaagaccattatgcacatatc

SEQ ID NO: 728744 - DNA, 33 bp, Homo sapien
ttccttgtgggagaaggccattatgcacatatc

SEQ ID NO: 728745 - DNA, 33 bp, Homo sapien
caattatcaacttagaacattatcacttagaag

SEQ ID NO: 728746 - DNA, 33 bp, Homo sapien
caattatcaacttagagcattatcacttagaag

SEQ ID NO: 728747 - DNA, 33 bp, Homo sapien
ttcaaggttttagttaactgcgtgttcttttta

SEQ ID NO: 728748 - DNA, 33 bp, Homo sapien
ttcaaggttttagttacctgcgtgttcttttta

SEQ ID NO: 728749 - DNA, 33 bp, Homo sapien
aagacttgacactataaaaatgctagaggaaaa

SEQ ID NO: 728750 - DNA, 33 bp, Homo sapien
aagacttgacactatagaaatgctagaggaaaa

SEQ ID NO: 728751 - DNA, 33 bp, Homo sapien
tcggctggtgtcatcaaagtgtggttgaacagc

SEQ ID NO: 728752 - DNA, 33 bp, Homo sapien
tcggctggtgtcatcagagtgtggttgaacagc

SEQ ID NO: 728753 - DNA, 33 bp, Homo sapien
cttacttttcactggaagctcaggaaagagaat

SEQ ID NO: 728754 - DNA, 33 bp, Homo sapien
cttacttttcactggaggctcaggaaagagaat

SEQ ID NO: 728755 - DNA, 33 bp, Homo sapien
gttttaatctaggaataaagattgacaaccctt

SEQ ID NO: 728756 - DNA, 33 bp, Homo sapien
gttttaatctaggaatgaagattgacaaccctt

SEQ ID NO: 728757 - DNA, 33 bp, Homo sapien
gtaacccaagacatcaaattcagtataaaataa

SEQ ID NO: 728758 - DNA, 33 bp, Homo sapien
gtaacccaagacatcagattcagtataaaataa

SEQ ID NO: 728759 - DNA, 33 bp, Homo sapien
aacattgagcttgaaccgcactttagatcaaat

SEQ ID NO: 728760 - DNA, 33 bp, Homo sapien
aacattgagcttgaactgcactttagatcaaat

SEQ ID NO: 728761 - DNA, 33 bp, Homo sapien
tgtgaaataaacagagaaattaagaatcttggc

SEQ ID NO: 728762 - DNA, 33 bp, Homo sapien
tgtgaaataaacagaggaattaagaatcttggc

SEQ ID NO: 728763 - DNA, 33 bp, Homo sapien
aagtaacatatctgctaaaaacattactaatta

SEQ ID NO: 728764 - DNA, 33 bp, Homo sapien
aagtaacatatctgctgaaaacattactaatta

SEQ ID NO: 728765 - DNA, 33 bp, Homo sapien
ttaactatcattgaaaggtatgttctagacaga

SEQ ID NO: 728766 - DNA, 33 bp, Homo sapien
ttaactatcattgaaatgtatgttctagacaga

SEQ ID NO: 728767 - DNA, 33 bp, Homo sapien
tttccatgaactgcccaggatttaggtagcctg

SEQ ID NO: 728768 - DNA, 33 bp, Homo sapien
tttccatgaactgcccgggatttaggtagcctg

SEQ ID NO: 728769 - DNA, 33 bp, Homo sapien
gatcagtgtgagtttaaaaaggaaaggctctct

SEQ ID NO: 728770 - DNA, 33 bp, Homo sapien
gatcagtgtgagtttagaaaggaaaggctctct

SEQ ID NO: 728771 - DNA, 33 bp, Homo sapien
tctgtccacagaccatcatcaaatcaataaagt

SEQ ID NO: 728772 - DNA, 33 bp, Homo sapien
tctgtccacagaccattatcaaatcaataaagt

SEQ ID NO: 728773 - DNA, 33 bp, Homo sapien
ctccaagcatttggcacacctactcccacggat

SEQ ID NO: 728774 - DNA, 33 bp, Homo sapien
ctccaagcatttggcatacctactcccacggat

SEQ ID NO: 728775 - DNA, 33 bp, Homo sapien
tgagcagcatgcccagaatcctctctcttttag

SEQ ID NO: 728776 - DNA, 33 bp, Homo sapien
tgagcagcatgcccaggatcctctctcttttag

SEQ ID NO: 728777 - DNA, 33 bp, Homo sapien
gtatctttactacacaaattctgctactaataa

SEQ ID NO: 728778 - DNA, 33 bp, Homo sapien
gtatctttactacacacattctgctactaataa

SEQ ID NO: 728779 - DNA, 33 bp, Homo sapien
ctctaaaagtgagttcaattctctattgctctc

SEQ ID NO: 728780 - DNA, 33 bp, Homo sapien
ctctaaaagtgagttcgattctctattgctctc

SEQ ID NO: 728781 - DNA, 33 bp, Homo sapien
atattggaaataataacctattagcaggctatc

SEQ ID NO: 728782 - DNA, 33 bp, Homo sapien
atattggaaataataatctattagcaggctatc

SEQ ID NO: 728783 - DNA, 33 bp, Homo sapien
ggtattatgaaccagaagaaatgagtctatcca

SEQ ID NO: 728784 - DNA, 33 bp, Homo sapien
ggtattatgaaccagaggaaatgagtctatcca

SEQ ID NO: 728785 - DNA, 33 bp, Homo sapien
actgtggggctctaaaagtcctgaattctcact

SEQ ID NO: 728786 - DNA, 33 bp, Homo sapien
actgtggggctctaaaggtcctgaattctcact

SEQ ID NO: 728787 - DNA, 33 bp, Homo sapien
tggcatccagcttgccgctttgcaatggactga

SEQ ID NO: 728788 - DNA, 33 bp, Homo sapien
tggcatccagcttgcctctttgcaatggactga

SEQ ID NO: 728789 - DNA, 33 bp, Homo sapien
ctagcaaaaaatcaaccccatttgacacataga

SEQ ID NO: 728790 - DNA, 33 bp, Homo sapien
ctagcaaaaaatcaactccatttgacacataga

SEQ ID NO: 728791 - DNA, 33 bp, Homo sapien
taagtgatcagtctacagtaaaagttaaagtgt

SEQ ID NO: 728792 - DNA, 33 bp, Homo sapien
taagtgatcagtctacggtaaaagttaaagtgt

SEQ ID NO: 728793 - DNA, 33 bp, Homo sapien
agtccataaggctgaacactgttttcgtttttc

SEQ ID NO: 728794 - DNA, 33 bp, Homo sapien
agtccataaggctgaatactgttttcgtttttc

SEQ ID NO: 728795 - DNA, 33 bp, Homo sapien
agtgaaaaatcagaaaaaaaaggctacaacctg

SEQ ID NO: 728796 - DNA, 33 bp, Homo sapien
agtgaaaaatcagaaacaaaaggctacaacctg

SEQ ID NO: 728797 - DNA, 33 bp, Homo sapien
taaagccactttggacaataggttggcattttc

SEQ ID NO: 728798 - DNA, 33 bp, Homo sapien
taaagccactttggacgataggttggcattttc

SEQ ID NO: 728799 - DNA, 33 bp, Homo sapien
gttactgggtacatcaatattttccagtatctg

SEQ ID NO: 728800 - DNA, 33 bp, Homo sapien
gttactgggtacatcagtattttccagtatctg

SEQ ID NO: 728801 - DNA, 33 bp, Homo sapien
gtctcttgttctactaaggtctatactaaagcc

SEQ ID NO: 728802 - DNA, 33 bp, Homo sapien
gtctcttgttctactagggtctatactaaagcc

SEQ ID NO: 728803 - DNA, 33 bp, Homo sapien
taaagcatgtcaccaactcttacacagaccact

SEQ ID NO: 728804 - DNA, 33 bp, Homo sapien
taaagcatgtcaccaagtcttacacagaccact

SEQ ID NO: 728805 - DNA, 33 bp, Homo sapien
cacatctaaattcctccagggtagtgccagcca

SEQ ID NO: 728806 - DNA, 33 bp, Homo sapien
cacatctaaattcctcgagggtagtgccagcca

SEQ ID NO: 728807 - DNA, 33 bp, Homo sapien
attgcatagtcacttaagtgtttccggccctga

SEQ ID NO: 728808 - DNA, 33 bp, Homo sapien
attgcatagtcacttaggtgtttccggccctga

SEQ ID NO: 728809 - DNA, 33 bp, Homo sapien
gtagaaccagtggcaaagaggactgatgaggaa

SEQ ID NO: 728810 - DNA, 33 bp, Homo sapien
gtagaaccagtggcaacgaggactgatgaggaa

SEQ ID NO: 728811 - DNA, 33 bp, Homo sapien
cttcttatctttgctcacattacctatttagaa

SEQ ID NO: 728812 - DNA, 33 bp, Homo sapien
cttcttatctttgctctcattacctatttagaa

SEQ ID NO: 728813 - DNA, 33 bp, Homo sapien
ttcattagtcaccagcaaagaatgttaaggaac

SEQ ID NO: 728814 - DNA, 33 bp, Homo sapien
ttcattagtcaccagcgaagaatgttaaggaac

SEQ ID NO: 728815 - DNA, 33 bp, Homo sapien
atatttaaaaactagacattatagcacacaaat

SEQ ID NO: 728816 - DNA, 33 bp, Homo sapien
atatttaaaaactagagattatagcacacaaat

SEQ ID NO: 728817 - DNA, 33 bp, Homo sapien
acctggttaactctggaatcactttgaatctac

SEQ ID NO: 728818 - DNA, 33 bp, Homo sapien
acctggttaactctggtatcactttgaatctac

SEQ ID NO: 728819 - DNA, 33 bp, Homo sapien
taaagtaatccatcaagcttaactttttaaaaa

SEQ ID NO: 728820 - DNA, 33 bp, Homo sapien
taaagtaatccatcaatcttaactttttaaaaa

SEQ ID NO: 728821 - DNA, 33 bp, Homo sapien
gtttctttactctttacatttggatgaagaacc

SEQ ID NO: 728822 - DNA, 33 bp, Homo sapien
gtttctttactctttatatttggatgaagaacc

SEQ ID NO: 728823 - DNA, 33 bp, Homo sapien
aactagggcacggagaaggtaagtggcttgccc

SEQ ID NO: 728824 - DNA, 33 bp, Homo sapien
aactagggcacggagagggtaagtggcttgccc

SEQ ID NO: 728825 - DNA, 33 bp, Homo sapien
ccccaagtttatctcggaatctcaagaggagag

SEQ ID NO: 728826 - DNA, 33 bp, Homo sapien
ccccaagtttatctcgtaatctcaagaggagag

SEQ ID NO: 728827 - DNA, 33 bp, Homo sapien
aagctccaataaagaccacccaactttcctgtt

SEQ ID NO: 728828 - DNA, 33 bp, Homo sapien
aagctccaataaagacgacccaactttcctgtt

SEQ ID NO: 728829 - DNA, 33 bp, Homo sapien
gttctaattaaagtagcaaatgcttaaaagata

SEQ ID NO: 728830 - DNA, 33 bp, Homo sapien
gttctaattaaagtaggaaatgcttaaaagata

SEQ ID NO: 728831 - DNA, 33 bp, Homo sapien
ctaaatattcatgcagaaaaaattatgcggtct

SEQ ID NO: 728832 - DNA, 33 bp, Homo sapien
ctaaatattcatgcagtaaaaattatgcggtct

SEQ ID NO: 728833 - DNA, 33 bp, Homo sapien
tgagataccattttaacctctcaagagtgacaa

SEQ ID NO: 728834 - DNA, 33 bp, Homo sapien
tgagataccattttaatctctcaagagtgacaa

SEQ ID NO: 728835 - DNA, 33 bp, Homo sapien
atataaatcagacctaccacttcccttcctata

SEQ ID NO: 728836 - DNA, 33 bp, Homo sapien
atataaatcagacctatcacttcccttcctata

SEQ ID NO: 728837 - DNA, 33 bp, Homo sapien
tgtcatttatctggctaactctgttgtttttct

SEQ ID NO: 728838 - DNA, 33 bp, Homo sapien
tgtcatttatctggcttactctgttgtttttct

SEQ ID NO: 728839 - DNA, 33 bp, Homo sapien
cagagttgtggttcaaagtcagtagcagtcagc

SEQ ID NO: 728840 - DNA, 33 bp, Homo sapien
cagagttgtggttcaacgtcagtagcagtcagc

SEQ ID NO: 728841 - DNA, 33 bp, Homo sapien
acctacagccaaataaaggtttaccagaaaggg

SEQ ID NO: 728842 - DNA, 33 bp, Homo sapien
acctacagccaaataagggtttaccagaaaggg

SEQ ID NO: 728843 - DNA, 33 bp, Homo sapien
ggtcattgaaagaagacggagatctgttagaaa

SEQ ID NO: 728844 - DNA, 33 bp, Homo sapien
ggtcattgaaagaagatggagatctgttagaaa

SEQ ID NO: 728845 - DNA, 33 bp, Homo sapien
ttccaagaaactcataagtccatgacacccagg

SEQ ID NO: 728846 - DNA, 33 bp, Homo sapien
ttccaagaaactcataggtccatgacacccagg

SEQ ID NO: 728847 - DNA, 33 bp, Homo sapien
ggtcagggaaggcctacgcagatatttgaataa

SEQ ID NO: 728848 - DNA, 33 bp, Homo sapien
ggtcagggaaggcctatgcagatatttgaataa

SEQ ID NO: 728849 - DNA, 33 bp, Homo sapien
cttctcttcttgcacactcaacctatatacgaa

SEQ ID NO: 728850 - DNA, 33 bp, Homo sapien
cttctcttcttgcacattcaacctatatacgaa

SEQ ID NO: 728851 - DNA, 33 bp, Homo sapien
ctaaatgcaaggggtcaacccaaatcagtagat

SEQ ID NO: 728852 - DNA, 33 bp, Homo sapien
ctaaatgcaaggggtcgacccaaatcagtagat

SEQ ID NO: 728853 - DNA, 33 bp, Homo sapien
ttagagcatatgtttacgctatacatgaagcag

SEQ ID NO: 728854 - DNA, 33 bp, Homo sapien
ttagagcatatgtttaggctatacatgaagcag

SEQ ID NO: 728855 - DNA, 33 bp, Homo sapien
aatatgcaaaatatgcaataggcccaggggtga

SEQ ID NO: 728856 - DNA, 33 bp, Homo sapien
aatatgcaaaatatgcgataggcccaggggtga

SEQ ID NO: 728857 - DNA, 33 bp, Homo sapien
ttgcttctcaatatcacggattggtttcaattg

SEQ ID NO: 728858 - DNA, 33 bp, Homo sapien
ttgcttctcaatatcatggattggtttcaattg

SEQ ID NO: 728859 - DNA, 33 bp, Homo sapien
cttctaattcttccaccgtatcatcaaatgtac

SEQ ID NO: 728860 - DNA, 33 bp, Homo sapien
cttctaattcttccactgtatcatcaaatgtac

SEQ ID NO: 728861 - DNA, 33 bp, Homo sapien
tcatggacctgatagacgctgatgtcccacaga

SEQ ID NO: 728862 - DNA, 33 bp, Homo sapien
tcatggacctgatagatgctgatgtcccacaga

SEQ ID NO: 728863 - DNA, 33 bp, Homo sapien
tgtgcagagttcctcacgaagtaagttatttta

SEQ ID NO: 728864 - DNA, 33 bp, Homo sapien
tgtgcagagttcctcatgaagtaagttatttta

SEQ ID NO: 728865 - DNA, 33 bp, Homo sapien
gaggagatggaactacaacatgacaaataatag

SEQ ID NO: 728866 - DNA, 33 bp, Homo sapien
gaggagatggaactacgacatgacaaataatag

SEQ ID NO: 728867 - DNA, 33 bp, Homo sapien
tatttacatttgccaaaacaaagcagtaatttc

SEQ ID NO: 728868 - DNA, 33 bp, Homo sapien
tatttacatttgccaatacaaagcagtaatttc

SEQ ID NO: 728869 - DNA, 33 bp, Homo sapien
tgaaatccatacctcactgaagaaggaagaatc

SEQ ID NO: 728870 - DNA, 33 bp, Homo sapien
tgaaatccatacctcattgaagaaggaagaatc

SEQ ID NO: 728871 - DNA, 33 bp, Homo sapien
ttatatgtattatctcccttaaccctcacaaga

SEQ ID NO: 728872 - DNA, 33 bp, Homo sapien
ttatatgtattatctctcttaaccctcacaaga

SEQ ID NO: 728873 - DNA, 33 bp, Homo sapien
cacttggcacagtaggaagtgttacattcggta

SEQ ID NO: 728874 - DNA, 33 bp, Homo sapien
cacttggcacagtaggtagtgttacattcggta

SEQ ID NO: 728875 - DNA, 33 bp, Homo sapien
cctaattaagatgtcaaggaggcagttagagac

SEQ ID NO: 728876 - DNA, 33 bp, Homo sapien
cctaattaagatgtcagggaggcagttagagac

SEQ ID NO: 728877 - DNA, 33 bp, Homo sapien
tggttgctgcacaggaatagcccctggtattag

SEQ ID NO: 728878 - DNA, 33 bp, Homo sapien
tggttgctgcacaggactagcccctggtattag

SEQ ID NO: 728879 - DNA, 33 bp, Homo sapien
acttgagtcagctccacgttaaacacacattga

SEQ ID NO: 728880 - DNA, 33 bp, Homo sapien
acttgagtcagctccatgttaaacacacattga

SEQ ID NO: 728881 - DNA, 33 bp, Homo sapien
ctcttgggatcatgggaatttaaattattttga

SEQ ID NO: 728882 - DNA, 33 bp, Homo sapien
ctcttgggatcatggggatttaaattattttga

SEQ ID NO: 728883 - DNA, 33 bp, Homo sapien
ttcatatatttgtctgaatagagtgctgaggtc

SEQ ID NO: 728884 - DNA, 33 bp, Homo sapien
ttcatatatttgtctgcatagagtgctgaggtc

SEQ ID NO: 728885 - DNA, 33 bp, Homo sapien
caaagctaagtgtcaactgatagctttaataaa

SEQ ID NO: 728886 - DNA, 33 bp, Homo sapien
caaagctaagtgtcaattgatagctttaataaa

SEQ ID NO: 728887 - DNA, 33 bp, Homo sapien
agaatgaggaaattagcatccagttctctagaa

SEQ ID NO: 728888 - DNA, 33 bp, Homo sapien
agaatgaggaaattagtatccagttctctagaa

SEQ ID NO: 728889 - DNA, 33 bp, Homo sapien
caagaggttagataagccctctgtgcatcattt

SEQ ID NO: 728890 - DNA, 33 bp, Homo sapien
caagaggttagataagtcctctgtgcatcattt

SEQ ID NO: 728891 - DNA, 33 bp, Homo sapien
gtggataaagagagtacagaagattgcctagaa

SEQ ID NO: 728892 - DNA, 33 bp, Homo sapien
gtggataaagagagtatagaagattgcctagaa

SEQ ID NO: 728893 - DNA, 33 bp, Homo sapien
tcactctctggagaagcatttatgatcagccat

SEQ ID NO: 728894 - DNA, 33 bp, Homo sapien
tcactctctggagaaggatttatgatcagccat

SEQ ID NO: 728895 - DNA, 33 bp, Homo sapien
tcactacatgggtgacagctaatttgtacccca

SEQ ID NO: 728896 - DNA, 33 bp, Homo sapien
tcactacatgggtgacggctaatttgtacccca

SEQ ID NO: 728897 - DNA, 33 bp, Homo sapien
tgttgatacacttttaggtagtaccaggttttg

SEQ ID NO: 728898 - DNA, 33 bp, Homo sapien
tgttgatacacttttatgtagtaccaggttttg

SEQ ID NO: 728899 - DNA, 33 bp, Homo sapien
tcatgaaacctgaaagacctggtaaggaagtaa

SEQ ID NO: 728900 - DNA, 33 bp, Homo sapien
tcatgaaacctgaaagccctggtaaggaagtaa

SEQ ID NO: 728901 - DNA, 33 bp, Homo sapien
ttcccctgatagtacaaggactcagagctcacc

SEQ ID NO: 728902 - DNA, 33 bp, Homo sapien
ttcccctgatagtacatggactcagagctcacc

SEQ ID NO: 728903 - DNA, 33 bp, Homo sapien
tcaactcagtttaagaacatacaatcttctctt

SEQ ID NO: 728904 - DNA, 33 bp, Homo sapien
tcaactcagtttaagaccatacaatcttctctt

SEQ ID NO: 728905 - DNA, 33 bp, Homo sapien
tccaccaaggtgtgaaaatcaaaagcccagcag

SEQ ID NO: 728906 - DNA, 33 bp, Homo sapien
tccaccaaggtgtgaacatcaaaagcccagcag

SEQ ID NO: 728907 - DNA, 33 bp, Homo sapien
tttgcttttataaagactctaaccagcactgag

SEQ ID NO: 728908 - DNA, 33 bp, Homo sapien
tttgcttttataaagattctaaccagcactgag

SEQ ID NO: 728909 - DNA, 33 bp, Homo sapien
aaagcacccagggtgaaaaacaatgcctaacta

SEQ ID NO: 728910 - DNA, 33 bp, Homo sapien
aaagcacccagggtgagaaacaatgcctaacta

SEQ ID NO: 728911 - DNA, 33 bp, Homo sapien
tctgtcacttacgaaacgtgtaatcctgaataa

SEQ ID NO: 728912 - DNA, 33 bp, Homo sapien
tctgtcacttacgaaatgtgtaatcctgaataa

SEQ ID NO: 728913 - DNA, 33 bp, Homo sapien
acacaggacgggtgagacaacatggatccacaa

SEQ ID NO: 728914 - DNA, 33 bp, Homo sapien
acacaggacgggtgaggcaacatggatccacaa

SEQ ID NO: 728915 - DNA, 33 bp, Homo sapien
taagtctacattctccacagagtccatctggtc

SEQ ID NO: 728916 - DNA, 33 bp, Homo sapien
taagtctacattctccgcagagtccatctggtc

SEQ ID NO: 728917 - DNA, 33 bp, Homo sapien
ttgattattttgagctcaaggcacttgaaaaac

SEQ ID NO: 728918 - DNA, 33 bp, Homo sapien
ttgattattttgagcttaaggcacttgaaaaac

SEQ ID NO: 728919 - DNA, 33 bp, Homo sapien
actctttcacctatgaactgtggaacaaatcaa

SEQ ID NO: 728920 - DNA, 33 bp, Homo sapien
actctttcacctatgagctgtggaacaaatcaa

SEQ ID NO: 728921 - DNA, 33 bp, Homo sapien
gcagaatcaccagcacaattaaatgagttctcc

SEQ ID NO: 728922 - DNA, 33 bp, Homo sapien
gcagaatcaccagcaccattaaatgagttctcc

SEQ ID NO: 728923 - DNA, 33 bp, Homo sapien
tgaggaagagaccagaaggtcacaggtttacat

SEQ ID NO: 728924 - DNA, 33 bp, Homo sapien
tgaggaagagaccagagggtcacaggtttacat

SEQ ID NO: 728925 - DNA, 33 bp, Homo sapien
tatctgggctatttcccataatgcaatagagta

SEQ ID NO: 728926 - DNA, 33 bp, Homo sapien
tatctgggctatttcctataatgcaatagagta

SEQ ID NO: 728927 - DNA, 33 bp, Homo sapien
agtctctcaacctacaatggttttgctcatcac

SEQ ID NO: 728928 - DNA, 33 bp, Homo sapien
agtctctcaacctacagtggttttgctcatcac

SEQ ID NO: 728929 - DNA, 33 bp, Homo sapien
gcgtctctatacctgaacagcctgcggtacgct

SEQ ID NO: 728930 - DNA, 33 bp, Homo sapien
gcgtctctatacctgagcagcctgcggtacgct

SEQ ID NO: 728931 - DNA, 33 bp, Homo sapien
aaaaacaaagacttagaaccaggaaccagatgg

SEQ ID NO: 728932 - DNA, 33 bp, Homo sapien
aaaaacaaagacttagtaccaggaaccagatgg

SEQ ID NO: 728933 - DNA, 33 bp, Homo sapien
actattatgttttagcacaatatgaagtctaga

SEQ ID NO: 728934 - DNA, 33 bp, Homo sapien
actattatgttttagcgcaatatgaagtctaga

SEQ ID NO: 728935 - DNA, 33 bp, Homo sapien
aaaatacttttgtctaaaggtaaatcggtctct

SEQ ID NO: 728936 - DNA, 33 bp, Homo sapien
aaaatacttttgtctataggtaaatcggtctct

SEQ ID NO: 728937 - DNA, 33 bp, Homo sapien
tgactaaatgcggctaatacacagctcttctgt

SEQ ID NO: 728938 - DNA, 33 bp, Homo sapien
tgactaaatgcggctagtacacagctcttctgt

SEQ ID NO: 728939 - DNA, 33 bp, Homo sapien
tgatggtggcaatactcaaaaggaatcagacat

SEQ ID NO: 728940 - DNA, 33 bp, Homo sapien
tgatggtggcaatacttaaaaggaatcagacat

SEQ ID NO: 728941 - DNA, 33 bp, Homo sapien
ctactcaagacagtacgcataagtgccaattaa

SEQ ID NO: 728942 - DNA, 33 bp, Homo sapien
ctactcaagacagtactcataagtgccaattaa

SEQ ID NO: 728943 - DNA, 33 bp, Homo sapien
aacccattgtgaccgacgtgctcatgagaacag

SEQ ID NO: 728944 - DNA, 33 bp, Homo sapien
aacccattgtgaccgatgtgctcatgagaacag

SEQ ID NO: 728945 - DNA, 33 bp, Homo sapien
aaaaatggaatgttcaacttggatagaacacag

SEQ ID NO: 728946 - DNA, 33 bp, Homo sapien
aaaaatggaatgttcagcttggatagaacacag

SEQ ID NO: 728947 - DNA, 33 bp, Homo sapien
aggcctgataagggaacctggaaacagcatcaa

SEQ ID NO: 728948 - DNA, 33 bp, Homo sapien
aggcctgataagggaatctggaaacagcatcaa

SEQ ID NO: 728949 - DNA, 33 bp, Homo sapien
agccctgtaattggaaaatcacatttcatcatt

SEQ ID NO: 728950 - DNA, 33 bp, Homo sapien
agccctgtaattggaacatcacatttcatcatt

SEQ ID NO: 728951 - DNA, 33 bp, Homo sapien
ggacaacattgtgaaacgtcgtatctacaaaaa

SEQ ID NO: 728952 - DNA, 33 bp, Homo sapien
ggacaacattgtgaaatgtcgtatctacaaaaa

SEQ ID NO: 728953 - DNA, 33 bp, Homo sapien; identical to SEQ ID NO: 728951

SEQ ID NO: 728954 - DNA, 33 bp, Homo sapien; identical to SEQ ID NO: 728952

SEQ ID NO: 728955 - DNA, 33 bp, Homo sapien
tcaactgtgccagccaatacctgttccttccca

SEQ ID NO: 728956 - DNA, 33 bp, Homo sapien
tcaactgtgccagccagtacctgttccttccca

SEQ ID NO: 728957 - DNA, 33 bp, Homo sapien
aaataaaaggcatccacgagggaaaaattaaga

SEQ ID NO: 728958 - DNA, 33 bp, Homo sapien
aaataaaaggcatccatgagggaaaaattaaga

SEQ ID NO: 728959 - DNA, 33 bp, Homo sapien
gactcataaaacccaccgtaaggacaatgttaa

SEQ ID NO: 728960 - DNA, 33 bp, Homo sapien
gactcataaaacccactgtaaggacaatgttaa

SEQ ID NO: 728961 - DNA, 33 bp, Homo sapien
aactggtttcagaacactaagtgggtggcaaat

SEQ ID NO: 728962 - DNA, 33 bp, Homo sapien
aactggtttcagaacattaagtgggtggcaaat

SEQ ID NO: 728963 - DNA, 33 bp, Homo sapien
agatctatatacctcccgattcctcaacacgtc

SEQ ID NO: 728964 - DNA, 33 bp, Homo sapien
agatctatatacctcctgattcctcaacacgtc

SEQ ID NO: 728965 - DNA, 33 bp, Homo sapien
gtcacagtaaaatgtaaagaatattccaggcag

SEQ ID NO: 728966 - DNA, 33 bp, Homo sapien
gtcacagtaaaatgtagagaatattccaggcag

SEQ ID NO: 728967 - DNA, 33 bp, Homo sapien
gtttgtctgtccccagcaaccccttgtcctcac

SEQ ID NO: 728968 - DNA, 33 bp, Homo sapien
gtttgtctgtccccaggaaccccttgtcctcac

SEQ ID NO: 728969 - DNA, 33 bp, Homo sapien
tcacattgaactaaacacgcataatggtggttt

SEQ ID NO: 728970 - DNA, 33 bp, Homo sapien
tcacattgaactaaacccgcataatggtggttt

SEQ ID NO: 728971 - DNA, 33 bp, Homo sapien
ttgacggaggccagtacagacttgtgagttgac

SEQ ID NO: 728972 - DNA, 33 bp, Homo sapien
ttgacggaggccagtatagacttgtgagttgac

SEQ ID NO: 728973 - DNA, 33 bp, Homo sapien
cagtctctgaagttacacattgcgccagagcat

SEQ ID NO: 728974 - DNA, 33 bp, Homo sapien
cagtctctgaagttacgcattgcgccagagcat

SEQ ID NO: 728975 - DNA, 33 bp, Homo sapien
agggggttgtgaacccaagggaactgctctgcc

SEQ ID NO: 728976 - DNA, 33 bp, Homo sapien
agggggttgtgaacccgagggaactgctctgcc

SEQ ID NO: 728977 - DNA, 33 bp, Homo sapien
tttgtgctgcttcttacgggatgagttcacaaa

SEQ ID NO: 728978 - DNA, 33 bp, Homo sapien
tttgtgctgcttcttatgggatgagttcacaaa

SEQ ID NO: 728979 - DNA, 33 bp, Homo sapien
ttagtttccagaaccacaagacaatacattttt

SEQ ID NO: 728980 - DNA, 33 bp, Homo sapien
ttagtttccagaaccataagacaatacattttt

SEQ ID NO: 728981 - DNA, 33 bp, Homo sapien
atagccttgatttctgcagtttatgccatcttg

SEQ ID NO: 728982 - DNA, 33 bp, Homo sapien
atagccttgatttctgtagtttatgccatcttg

SEQ ID NO: 728983 - DNA, 33 bp, Homo sapien
caaagatctggcttagaaacaaaacctttgaaa

SEQ ID NO: 728984 - DNA, 33 bp, Homo sapien
caaagatctggcttagcaacaaaacctttgaaa

SEQ ID NO: 728985 - DNA, 33 bp, Homo sapien
gatctctactcaaataccagttcctcagaggcc

SEQ ID NO: 728986 - DNA, 33 bp, Homo sapien
gatctctactcaaatatcagttcctcagaggcc

SEQ ID NO: 728987 - DNA, 33 bp, Homo sapien
ctagtccatccagtaagaacatttctaatatct

SEQ ID NO: 728988 - DNA, 33 bp, Homo sapien
ctagtccatccagtaataacatttctaatatct

SEQ ID NO: 728989 - DNA, 33 bp, Homo sapien
attattcaattttttgaactcctattctgaaat

SEQ ID NO: 728990 - DNA, 33 bp, Homo sapien
attattcaattttttggactcctattctgaaat

SEQ ID NO: 728991 - DNA, 33 bp, Homo sapien
tagcagaatgcttggaaaagaatggtcactcag

SEQ ID NO: 728992 - DNA, 33 bp, Homo sapien
tagcagaatgcttggagaagaatggtcactcag

SEQ ID NO: 728993 - DNA, 33 bp, Homo sapien
gcaccataagagctaaaataaaactcaaaaaga

SEQ ID NO: 728994 - DNA, 33 bp, Homo sapien
gcaccataagagctaacataaaactcaaaaaga

SEQ ID NO: 728995 - DNA, 33 bp, Homo sapien
tagtacagtgttttgcagagtatatttttaaat

SEQ ID NO: 728996 - DNA, 33 bp, Homo sapien
tagtacagtgttttgcggagtatatttttaaat

SEQ ID NO: 728997 - DNA, 33 bp, Homo sapien
ttaataaccttgcttacaggagaataaaagtat

SEQ ID NO: 728998 - DNA, 33 bp, Homo sapien
ttaataaccttgcttataggagaataaaagtat

SEQ ID NO: 728999 - DNA, 33 bp, Homo sapien
atacccagagatagcactatttttagcattgtt

SEQ ID NO: 729000 - DNA, 33 bp, Homo sapien
atacccagagatagcattatttttagcattgtt

SEQ ID NO: 729001 - DNA, 33 bp, Homo sapien
tgtagccaaatggaaaatagaaatcataacaat

SEQ ID NO: 729002 - DNA, 33 bp, Homo sapien
tgtagccaaatggaaagtagaaatcataacaat

SEQ ID NO: 729003 - DNA, 33 bp, Homo sapien
atcgtacatggatatacgctgttgcaaggtttc

SEQ ID NO: 729004 - DNA, 33 bp, Homo sapien
atcgtacatggatatatgctgttgcaaggtttc

SEQ ID NO: 729005 - DNA, 33 bp, Homo sapien
agagagtttgtccccaacagacctgcattcaaa

SEQ ID NO: 729006 - DNA, 33 bp, Homo sapien
agagagtttgtccccagcagacctgcattcaaa

SEQ ID NO: 729007 - DNA, 33 bp, Homo sapien
ccggcaatattgctgacaaaagggaatgtttat

SEQ ID NO: 729008 - DNA, 33 bp, Homo sapien
ccggcaatattgctgagaaaagggaatgtttat

SEQ ID NO: 729009 - DNA, 33 bp, Homo sapien
tttttcggagttgttcaattatcacactttgtt

SEQ ID NO: 729010 - DNA, 33 bp, Homo sapien
tttttcggagttgttcgattatcacactttgtt

SEQ ID NO: 729011 - DNA, 33 bp, Homo sapien
aaatgctttgttcttgaattgacaagaaaaagc

SEQ ID NO: 729012 - DNA, 33 bp, Homo sapien
aaatgctttgttcttggattgacaagaaaaagc

SEQ ID NO: 729013 - DNA, 33 bp, Homo sapien
tatacctagaagtaagcaacttgagccagtaga

SEQ ID NO: 729014 - DNA, 33 bp, Homo sapien
tatacctagaagtaaggaacttgagccagtaga

SEQ ID NO: 729015 - DNA, 33 bp, Homo sapien
aagaatgctttacccaacaagactacccttcag

SEQ ID NO: 729016 - DNA, 33 bp, Homo sapien
aagaatgctttacccagcaagactacccttcag

SEQ ID NO: 729017 - DNA, 33 bp, Homo sapien
atttacataaagtgaacatctcaggtgaaaact

SEQ ID NO: 729018 - DNA, 33 bp, Homo sapien
atttacataaagtgaatatctcaggtgaaaact

SEQ ID NO: 729019 - DNA, 33 bp, Homo sapien
aaacttttatgtctgcactcgaattttttagct

SEQ ID NO: 729020 - DNA, 33 bp, Homo sapien
aaacttttatgtctgcgctcgaattttttagct

SEQ ID NO: 729021 - DNA, 33 bp, Homo sapien
gaaatagagcagtgtacaggttaatagagaatg

SEQ ID NO: 729022 - DNA, 33 bp, Homo sapien
gaaatagagcagtgtataggttaatagagaatg

SEQ ID NO: 729023 - DNA, 33 bp, Homo sapien
gcttacaaatggcataaactagacatattgact

SEQ ID NO: 729024 - DNA, 33 bp, Homo sapien
gcttacaaatggcatacactagacatattgact

SEQ ID NO: 729025 - DNA, 33 bp, Homo sapien
acattggactctactagatacttgtgcacatat

SEQ ID NO: 729026 - DNA, 33 bp, Homo sapien
acattggactctactatatacttgtgcacatat

SEQ ID NO: 729027 - DNA, 33 bp, Homo sapien
gaaagcatagcagataacttggctcaaatgcct

SEQ ID NO: 729028 - DNA, 33 bp, Homo sapien
gaaagcatagcagataccttggctcaaatgcct

SEQ ID NO: 729029 - DNA, 33 bp, Homo sapien
acatgacgtcttgataggaggaccttgagtcag

SEQ ID NO: 729030 - DNA, 33 bp, Homo sapien
acatgacgtcttgatatgaggaccttgagtcag

SEQ ID NO: 729031 - DNA, 33 bp, Homo sapien
acatttcaatcaccccagaaaatttcctcaggc

SEQ ID NO: 729032 - DNA, 33 bp, Homo sapien
acatttcaatcaccccggaaaatttcctcaggc

SEQ ID NO: 729033 - DNA, 33 bp, Homo sapien
attttagaagcgaatcaaacactgtgaatcaca

SEQ ID NO: 729034 - DNA, 33 bp, Homo sapien
attttagaagcgaatcgaacactgtgaatcaca

SEQ ID NO: 729035 - DNA, 33 bp, Homo sapien
tagattctcatcctgacgaacggctttctaggg

SEQ ID NO: 729036 - DNA, 33 bp, Homo sapien
tagattctcatcctgatgaacggctttctaggg

SEQ ID NO: 729037 - DNA, 33 bp, Homo sapien
tgctaatctactctgacgtatatgcaaacctgg

SEQ ID NO: 729038 - DNA, 33 bp, Homo sapien
tgctaatctactctgatgtatatgcaaacctgg

SEQ ID NO: 729039 - DNA, 33 bp, Homo sapien
tgttgcactggattagcagtacaaggtgtatac

SEQ ID NO: 729040 - DNA, 33 bp, Homo sapien
tgttgcactggattagtagtacaaggtgtatac

SEQ ID NO: 729041 - DNA, 33 bp, Homo sapien
tatgactctggtcttgcatggcagagaaaccaa

SEQ ID NO: 729042 - DNA, 33 bp, Homo sapien
tatgactctggtcttgtatggcagagaaaccaa

SEQ ID NO: 729043 - DNA, 33 bp, Homo sapien
tatactcagaaatacacgaaagatgtctaggca

SEQ ID NO: 729044 - DNA, 33 bp, Homo sapien
tatactcagaaatacatgaaagatgtctaggca

SEQ ID NO: 729045 - DNA, 33 bp, Homo sapien
ggtgtttactgtttcacgtcttcattcctgagt

SEQ ID NO: 729046 - DNA, 33 bp, Homo sapien
ggtgtttactgtttcatgtcttcattcctgagt

SEQ ID NO: 729047 - DNA, 33 bp, Homo sapien; identical to SEQ ID NO: 729045

SEQ ID NO: 729048 - DNA, 33 bp, Homo sapien; identical to SEQ ID NO: 729046

SEQ ID NO: 729049 - DNA, 33 bp, Homo sapien
ccatgggaacgtagggaatcaacctgagcacag

SEQ ID NO: 729050 - DNA, 33 bp, Homo sapien
ccatgggaacgtagggcatcaacctgagcacag

SEQ ID NO: 729051 - DNA, 33 bp, Homo sapien
cttatccagaccaagacgaacgatattcacaag

SEQ ID NO: 729052 - DNA, 33 bp, Homo sapien
cttatccagaccaagatgaacgatattcacaag

SEQ ID NO: 729053 - DNA, 33 bp, Homo sapien
gagttcaaattatgcccccaccacttatgtgtc

SEQ ID NO: 729054 - DNA, 33 bp, Homo sapien
gagttcaaattatgccgccaccacttatgtgtc

SEQ ID NO: 729055 - DNA, 33 bp, Homo sapien
ggcataatttgaactcaccttctttgcacgtac

SEQ ID NO: 729056 - DNA, 33 bp, Homo sapien
ggcataatttgaactcgccttctttgcacgtac

SEQ ID NO: 729057 - DNA, 33 bp, Homo sapien
ccacagaatttctacaaataatgggcattaaat

SEQ ID NO: 729058 - DNA, 33 bp, Homo sapien
ccacagaatttctacagataatgggcattaaat

SEQ ID NO: 729059 - DNA, 33 bp, Homo sapien
ggctgaaagaatctaaagctgattgcttctgct

SEQ ID NO: 729060 - DNA, 33 bp, Homo sapien
ggctgaaagaatctaatgctgattgcttctgct

SEQ ID NO: 729061 - DNA, 33 bp, Homo sapien
tgtggcaaggtctataaacttttgcataggaaa

SEQ ID NO: 729062 - DNA, 33 bp, Homo sapien
tgtggcaaggtctatacacttttgcataggaaa

SEQ ID NO: 729063 - DNA, 33 bp, Homo sapien
catatcttttacgtagcatttaacacttctaaa

SEQ ID NO: 729064 - DNA, 33 bp, Homo sapien
catatcttttacgtaggatttaacacttctaaa

SEQ ID NO: 729065 - DNA, 33 bp, Homo sapien
tcaccccatccagatgaaagtacgctcatgata

SEQ ID NO: 729066 - DNA, 33 bp, Homo sapien
tcaccccatccagatgcaagtacgctcatgata

SEQ ID NO: 729067 - DNA, 33 bp, Homo sapien
ttttctttttttccaccctccactgcagccata

SEQ ID NO: 729068 - DNA, 33 bp, Homo sapien
ttttctttttttccactctccactgcagccata

SEQ ID NO: 729069 - DNA, 33 bp, Homo sapien
atttatctgctctgaccctatttctagcaaaag

SEQ ID NO: 729070 - DNA, 33 bp, Homo sapien
atttatctgctctgactctatttctagcaaaag

SEQ ID NO: 729071 - DNA, 33 bp, Homo sapien
caatttgttactcagagaatttccagagacatt

SEQ ID NO: 729072 - DNA, 33 bp, Homo sapien
caatttgttactcagataatttccagagacatt

SEQ ID NO: 729073 - DNA, 33 bp, Homo sapien
ctaaaagaaaaaaatcacacatacataagccaa

SEQ ID NO: 729074 - DNA, 33 bp, Homo sapien
ctaaaagaaaaaaatcgcacatacataagccaa

SEQ ID NO: 729075 - DNA, 33 bp, Homo sapien
actttctctaccgtgacataccagtaactctat

SEQ ID NO: 729076 - DNA, 33 bp, Homo sapien
actttctctaccgtgatataccagtaactctat

SEQ ID NO: 729077 - DNA, 33 bp, Homo sapien
tagtagaaattggttgcaatctgtcagcctcac

SEQ ID NO: 729078 - DNA, 33 bp, Homo sapien
tagtagaaattggttgtaatctgtcagcctcac

SEQ ID NO: 729079 - DNA, 33 bp, Homo sapien
cactgttatttagtcacgtgtttagcgttcact

SEQ ID NO: 729080 - DNA, 33 bp, Homo sapien
cactgttatttagtcatgtgtttagcgttcact

SEQ ID NO: 729081 - DNA, 33 bp, Homo sapien
ttaaataacttatgtaaaaaaatgagtgagcct

SEQ ID NO: 729082 - DNA, 33 bp, Homo sapien
ttaaataacttatgtacaaaaatgagtgagcct

SEQ ID NO: 729083 - DNA, 33 bp, Homo sapien
gtgaaggatcaactagaaatctatagcaataaa

SEQ ID NO: 729084 - DNA, 33 bp, Homo sapien
gtgaaggatcaactaggaatctatagcaataaa

SEQ ID NO: 729085 - DNA, 33 bp, Homo sapien
ctttatgtgtttttatcagttacagagcttcaa

SEQ ID NO: 729086 - DNA, 33 bp, Homo sapien
ctttatgtgtttttattagttacagagcttcaa

SEQ ID NO: 729087 - DNA, 33 bp, Homo sapien
ccacctccacgcatgaaaatatcaaaaatgctg

SEQ ID NO: 729088 - DNA, 33 bp, Homo sapien
ccacctccacgcatgataatatcaaaaatgctg

SEQ ID NO: 729089 - DNA, 33 bp, Homo sapien
aattggtcaaattagaagtgtaaaaatgatgat

SEQ ID NO: 729090 - DNA, 33 bp, Homo sapien
aattggtcaaattagatgtgtaaaaatgatgat

SEQ ID NO: 729091 - DNA, 33 bp, Homo sapien
ttggggatttatggtacgtgcagtggaaacaaa

SEQ ID NO: 729092 - DNA, 33 bp, Homo sapien
ttggggatttatggtaggtgcagtggaaacaaa

SEQ ID NO: 729093 - DNA, 33 bp, Homo sapien
ggacataccaggaaaactggtggatgatgacat

SEQ ID NO: 729094 - DNA, 33 bp, Homo sapien
ggacataccaggaaaattggtggatgatgacat

SEQ ID NO: 729095 - DNA, 33 bp, Homo sapien
tttttgaccagccttaacacattctctggaaat

SEQ ID NO: 729096 - DNA, 33 bp, Homo sapien
tttttgaccagccttatcacattctctggaaat

SEQ ID NO: 729097 - DNA, 33 bp, Homo sapien
atgcatttgtgtacacagcctaaaattgcattg

SEQ ID NO: 729098 - DNA, 33 bp, Homo sapien
atgcatttgtgtacacggcctaaaattgcattg

SEQ ID NO: 729099 - DNA, 33 bp, Homo sapien
cacagggtatcgacaaatgccagagagagatgc

SEQ ID NO: 729100 - DNA, 33 bp, Homo sapien
cacagggtatcgacaagtgccagagagagatgc

SEQ ID NO: 729101 - DNA, 33 bp, Homo sapien
tgctcatctccttatcagactgggctccttacc

SEQ ID NO: 729102 - DNA, 33 bp, Homo sapien
tgctcatctccttatcggactgggctccttacc

SEQ ID NO: 729103 - DNA, 33 bp, Homo sapien
tttcttcaattaacaacgtagcccacaaatcac

SEQ ID NO: 729104 - DNA, 33 bp, Homo sapien
tttcttcaattaacaatgtagcccacaaatcac

SEQ ID NO: 729105 - DNA, 33 bp, Homo sapien
actggaaaaccaccacaaggtagaattcgacag

SEQ ID NO: 729106 - DNA, 33 bp, Homo sapien
actggaaaaccaccacgaggtagaattcgacag

SEQ ID NO: 729107 - DNA, 33 bp, Homo sapien
ctgtgtattccgaacaatctagcaaagaaccag

SEQ ID NO: 729108 - DNA, 33 bp, Homo sapien
ctgtgtattccgaacagtctagcaaagaaccag

SEQ ID NO: 729109 - DNA, 33 bp, Homo sapien
aattaaacaaagctccaaaacataaattagaat

SEQ ID NO: 729110 - DNA, 33 bp, Homo sapien
aattaaacaaagctccgaaacataaattagaat

SEQ ID NO: 729111 - DNA, 33 bp, Homo sapien
cacaggatgctagaacaaacggaaggtataaaa

SEQ ID NO: 729112 - DNA, 33 bp, Homo sapien
cacaggatgctagaacgaacggaaggtataaaa

SEQ ID NO: 729113 - DNA, 33 bp, Homo sapien
gtaattttaagagtgaataccccagtggtttta

SEQ ID NO: 729114 - DNA, 33 bp, Homo sapien
gtaattttaagagtgattaccccagtggtttta

SEQ ID NO: 729115 - DNA, 33 bp, Homo sapien
cccctcactctacccaatcatggtccttccact

SEQ ID NO: 729116 - DNA, 33 bp, Homo sapien
cccctcactctacccagtcatggtccttccact

SEQ ID NO: 729117 - DNA, 33 bp, Homo sapien
ggattctttctgaatgccagggaagataattat

SEQ ID NO: 729118 - DNA, 33 bp, Homo sapien
ggattctttctgaatgtcagggaagataattat

SEQ ID NO: 729119 - DNA, 33 bp, Homo sapien
atggcctcatttattacagcctcagatggaagc

SEQ ID NO: 729120 - DNA, 33 bp, Homo sapien
atggcctcatttattatagcctcagatggaagc

SEQ ID NO: 729121 - DNA, 33 bp, Homo sapien
gtctcacgacctccccccaatgcaccctactgc

SEQ ID NO: 729122 - DNA, 33 bp, Homo sapien
gtctcacgacctcccctcaatgcaccctactgc

SEQ ID NO: 729123 - DNA, 33 bp, Homo sapien
acaacagctctggacccctcagtcaatcctcaa

SEQ ID NO: 729124 - DNA, 33 bp, Homo sapien
acaacagctctggacctctcagtcaatcctcaa

SEQ ID NO: 729125 - DNA, 33 bp, Homo sapien
aggaaaatgattctcccctagagcctacaaaat

SEQ ID NO: 729126 - DNA, 33 bp, Homo sapien
aggaaaatgattctcctctagagcctacaaaat

SEQ ID NO: 729127 - DNA, 33 bp, Homo sapien
gtacctccttgctggaatcattggcctctggca

SEQ ID NO: 729128 - DNA, 33 bp, Homo sapien
gtacctccttgctggactcattggcctctggca

SEQ ID NO: 729129 - DNA, 33 bp, Homo sapien
tcagtcacggccttccaactaatgatttctgaa

SEQ ID NO: 729130 - DNA, 33 bp, Homo sapien
tcagtcacggccttccgactaatgatttctgaa

SEQ ID NO: 729131 - DNA, 33 bp, Homo sapien
acttcttcttgaagtacccaatctgtggaggaa

SEQ ID NO: 729132 - DNA, 33 bp, Homo sapien
acttcttcttgaagtatccaatctgtggaggaa

SEQ ID NO: 729133 - DNA, 33 bp, Homo sapien
ctagcattccctataaaaccattatgatctgta

SEQ ID NO: 729134 - DNA, 33 bp, Homo sapien
ctagcattccctataagaccattatgatctgta

SEQ ID NO: 729135 - DNA, 33 bp, Homo sapien
cataaagcatatcagaacaacagggaaactggt

SEQ ID NO: 729136 - DNA, 33 bp, Homo sapien
cataaagcatatcagagcaacagggaaactggt

SEQ ID NO: 729137 - DNA, 33 bp, Homo sapien
aaatgaaataacacaaataggttcttcattctt

SEQ ID NO: 729138 - DNA, 33 bp, Homo sapien
aaatgaaataacacaattaggttcttcattctt

SEQ ID NO: 729139 - DNA, 33 bp, Homo sapien
ttaactgccactcttcaaatacagctgtccaat

SEQ ID NO: 729140 - DNA, 33 bp, Homo sapien
ttaactgccactcttcgaatacagctgtccaat

SEQ ID NO: 729141 - DNA, 33 bp, Homo sapien
cctttctttctgccaaaattaatctattcaaag

SEQ ID NO: 729142 - DNA, 33 bp, Homo sapien
cctttctttctgccaatattaatctattcaaag

SEQ ID NO: 729143 - DNA, 33 bp, Homo sapien
ccaaaaaggctttggcactttagcagttgtgaa

SEQ ID NO: 729144 - DNA, 33 bp, Homo sapien
ccaaaaaggctttggcgctttagcagttgtgaa

SEQ ID NO: 729145 - DNA, 33 bp, Homo sapien
gtcacagctgatgaataatgaactgctcccttc

SEQ ID NO: 729146 - DNA, 33 bp, Homo sapien
gtcacagctgatgaatgatgaactgctcccttc

SEQ ID NO: 729147 - DNA, 33 bp, Homo sapien
aggctgcaccaggcaacttctacaggttccttc

SEQ ID NO: 729148 - DNA, 33 bp, Homo sapien
aggctgcaccaggcaatttctacaggttccttc

SEQ ID NO: 729149 - DNA, 33 bp, Homo sapien
taatttcattatactaaccttgtttctgcagat

SEQ ID NO: 729150 - DNA, 33 bp, Homo sapien
taatttcattatactagccttgtttctgcagat

SEQ ID NO: 729151 - DNA, 33 bp, Homo sapien
caagcataataaaacacatagtctggaactggg

SEQ ID NO: 729152 - DNA, 33 bp, Homo sapien
caagcataataaaacagatagtctggaactggg

SEQ ID NO: 729153 - DNA, 33 bp, Homo sapien
cttgttattggactggaagaacaagcagccaga

SEQ ID NO: 729154 - DNA, 33 bp, Homo sapien
cttgttattggactgggagaacaagcagccaga

SEQ ID NO: 729155 - DNA, 33 bp, Homo sapien
ttaacagtaatggaacaaatgtgaagcttctgc

SEQ ID NO: 729156 - DNA, 33 bp, Homo sapien
ttaacagtaatggaaccaatgtgaagcttctgc

SEQ ID NO: 729157 - DNA, 33 bp, Homo sapien
tctgatgatataccaaagattaagtgagtgaag

SEQ ID NO: 729158 - DNA, 33 bp, Homo sapien
tctgatgatataccaaggattaagtgagtgaag

SEQ ID NO: 729159 - DNA, 33 bp, Homo sapien
aagctggaggacatggaaaagtaaaaagaaaaa

SEQ ID NO: 729160 - DNA, 33 bp, Homo sapien
aagctggaggacatgggaaagtaaaaagaaaaa

SEQ ID NO: 729161 - DNA, 33 bp, Homo sapien
tccagcttgacttagaaatctttctgtatatat

SEQ ID NO: 729162 - DNA, 33 bp, Homo sapien
tccagcttgacttagacatctttctgtatatat

SEQ ID NO: 729163 - DNA, 33 bp, Homo sapien
attcttctgaatgggagatttatattttgtgct

SEQ ID NO: 729164 - DNA, 33 bp, Homo sapien
attcttctgaatgggatatttatattttgtgct

SEQ ID NO: 729165 - DNA, 33 bp, Homo sapien
taaaagccaactgaaccaactcccaatggctaa

SEQ ID NO: 729166 - DNA, 33 bp, Homo sapien
taaaagccaactgaactaactcccaatggctaa

SEQ ID NO: 729167 - DNA, 33 bp, Homo sapien
aatgatgcatgtaatgaattagagttgaagata

SEQ ID NO: 729168 - DNA, 33 bp, Homo sapien
aatgatgcatgtaatggattagagttgaagata

SEQ ID NO: 729169 - DNA, 33 bp, Homo sapien
tatgtggaatgtggaagttatgtttttacatgt

SEQ ID NO: 729170 - DNA, 33 bp, Homo sapien
tatgtggaatgtggaatttatgtttttacatgt

SEQ ID NO: 729171 - DNA, 33 bp, Homo sapien
cacagaatagttttacggcccccagacatttca

SEQ ID NO: 729172 - DNA, 33 bp, Homo sapien
cacagaatagttttactgcccccagacatttca

SEQ ID NO: 729173 - DNA, 33 bp, Homo sapien
gatttgaaatgacaaaaaagatatccagcaaag

SEQ ID NO: 729174 - DNA, 33 bp, Homo sapien
gatttgaaatgacaaacaagatatccagcaaag

SEQ ID NO: 729175 - DNA, 33 bp, Homo sapien
aggaagagagcaaagacagtaaaagcatggcct

SEQ ID NO: 729176 - DNA, 33 bp, Homo sapien
aggaagagagcaaagatagtaaaagcatggcct

SEQ ID NO: 729177 - DNA, 33 bp, Homo sapien
tagccatacatgactaacagtaattgaaatggg

SEQ ID NO: 729178 - DNA, 33 bp, Homo sapien
tagccatacatgactagcagtaattgaaatggg

SEQ ID NO: 729179 - DNA, 33 bp, Homo sapien
tttcccttctcctttaagcaatcatacaaataa

SEQ ID NO: 729180 - DNA, 33 bp, Homo sapien
tttcccttctcctttaggcaatcatacaaataa

SEQ ID NO: 729181 - DNA, 33 bp, Homo sapien
aaacagaaagggcttcgctaaagtaaaatggga

SEQ ID NO: 729182 - DNA, 33 bp, Homo sapien
aaacagaaagggcttctctaaagtaaaatggga

SEQ ID NO: 729183 - DNA, 33 bp, Homo sapien
cctatttgtctgtgaaataagttggtgtaaata

SEQ ID NO: 729184 - DNA, 33 bp, Homo sapien
cctatttgtctgtgaagtaagttggtgtaaata

SEQ ID NO: 729185 - DNA, 33 bp, Homo sapien
aagcaatgcatcatgagactagattgcttatgt

SEQ ID NO: 729186 - DNA, 33 bp, Homo sapien
aagcaatgcatcatgatactagattgcttatgt

SEQ ID NO: 729187 - DNA, 33 bp, Homo sapien
agttagtctgcctagacggggaagaacatttgg

SEQ ID NO: 729188 - DNA, 33 bp, Homo sapien
agttagtctgcctagatggggaagaacatttgg

SEQ ID NO: 729189 - DNA, 33 bp, Homo sapien
tcccaattggatggaaatattgtaggagttggg

SEQ ID NO: 729190 - DNA, 33 bp, Homo sapien
tcccaattggatggaagtattgtaggagttggg

SEQ ID NO: 729191 - DNA, 33 bp, Homo sapien
atttgttttcaaaagacgcagacaatatagaaa

SEQ ID NO: 729192 - DNA, 33 bp, Homo sapien
atttgttttcaaaagatgcagacaatatagaaa

SEQ ID NO: 729193 - DNA, 33 bp, Homo sapien
taagatctttgtatccccaagcagccataatgt

SEQ ID NO: 729194 - DNA, 33 bp, Homo sapien
taagatctttgtatcctcaagcagccataatgt

SEQ ID NO: 729195 - DNA, 33 bp, Homo sapien
caaagatcttacaaagccttactgctgttcttc

SEQ ID NO: 729196 - DNA, 33 bp, Homo sapien
caaagatcttacaaaggcttactgctgttcttc

SEQ ID NO: 729197 - DNA, 33 bp, Homo sapien
ctctgactattaaagagatagcctcatacagta

SEQ ID NO: 729198 - DNA, 33 bp, Homo sapien
ctctgactattaaagatatagcctcatacagta

SEQ ID NO: 729199 - DNA, 33 bp, Homo sapien
tcatgatagaccaagacgagaatatgcacaaaa

SEQ ID NO: 729200 - DNA, 33 bp, Homo sapien
tcatgatagaccaagatgagaatatgcacaaaa

SEQ ID NO: 729201 - DNA, 33 bp, Homo sapien
gcctacatgaaaaagaacactaggatttcagtc

SEQ ID NO: 729202 - DNA, 33 bp, Homo sapien
gcctacatgaaaaagaccactaggatttcagtc

SEQ ID NO: 729203 - DNA, 33 bp, Homo sapien
ccttgtactgatgggccaccattgaataaatcc

SEQ ID NO: 729204 - DNA, 33 bp, Homo sapien
ccttgtactgatgggctaccattgaataaatcc

SEQ ID NO: 729205 - DNA, 33 bp, Homo sapien
agctaaaggcattctgacaaactaatacataca

SEQ ID NO: 729206 - DNA, 33 bp, Homo sapien
agctaaaggcattctggcaaactaatacataca

SEQ ID NO: 729207 - DNA, 33 bp, Homo sapien
taattagaacatttagaaagccctaacagtgga

SEQ ID NO: 729208 - DNA, 33 bp, Homo sapien
taattagaacatttaggaagccctaacagtgga

SEQ ID NO: 729209 - DNA, 33 bp, Homo sapien
caaaaccagcatacaaaggacatacttcaatat

SEQ ID NO: 729210 - DNA, 33 bp, Homo sapien
caaaaccagcatacaagggacatacttcaatat

SEQ ID NO: 729211 - DNA, 33 bp, Homo sapien
ctagaacaactgcaggaataaattgggaaacct

SEQ ID NO: 729212 - DNA, 33 bp, Homo sapien
ctagaacaactgcagggataaattgggaaacct

SEQ ID NO: 729213 - DNA, 33 bp, Homo sapien
taaagttacttcataacgcctggcagacctcac

SEQ ID NO: 729214 - DNA, 33 bp, Homo sapien
taaagttacttcataatgcctggcagacctcac

SEQ ID NO: 729215 - DNA, 33 bp, Homo sapien
tatggtttggagcctgaagggaataaggagaga

SEQ ID NO: 729216 - DNA, 33 bp, Homo sapien
tatggtttggagcctgcagggaataaggagaga

SEQ ID NO: 729217 - DNA, 33 bp, Homo sapien
acattgggttgattatgacactcctcataaatc

SEQ ID NO: 729218 - DNA, 33 bp, Homo sapien
acattgggttgattattacactcctcataaatc

SEQ ID NO: 729219 - DNA, 33 bp, Homo sapien
accagcttaacattgcaccacaaaaattgcttc

SEQ ID NO: 729220 - DNA, 33 bp, Homo sapien
accagcttaacattgcgccacaaaaattgcttc

SEQ ID NO: 729221 - DNA, 33 bp, Homo sapien
ccatcttggaaaaatacgtaagcctcttcagct

SEQ ID NO: 729222 - DNA, 33 bp, Homo sapien
ccatcttggaaaaatatgtaagcctcttcagct

SEQ ID NO: 729223 - DNA, 33 bp, Homo sapien
tctgtttttacacctacgccgggtcaataggat

SEQ ID NO: 729224 - DNA, 33 bp, Homo sapien
tctgtttttacacctatgccgggtcaataggat

SEQ ID NO: 729225 - DNA, 33 bp, Homo sapien
gtttagtattgccataacctctcagtgagagaa

SEQ ID NO: 729226 - DNA, 33 bp, Homo sapien
gtttagtattgccatatcctctcagtgagagaa

SEQ ID NO: 729227 - DNA, 33 bp, Homo sapien
tatgtgctgagtcatacgtagagtgctaattat

SEQ ID NO: 729228 - DNA, 33 bp, Homo sapien
tatgtgctgagtcatatgtagagtgctaattat

SEQ ID NO: 729229 - DNA, 33 bp, Homo sapien
aataattgtaatgatcaatcaatccagaacttt

SEQ ID NO: 729230 - DNA, 33 bp, Homo sapien
aataattgtaatgatcgatcaatccagaacttt

SEQ ID NO: 729231 - DNA, 33 bp, Homo sapien
gccttagatgatcaagaatagaagtatgagagg

SEQ ID NO: 729232 - DNA, 33 bp, Homo sapien
gccttagatgatcaaggatagaagtatgagagg

SEQ ID NO: 729233 - DNA, 33 bp, Homo sapien
tgtttcacagctgaccggcctatagactggcta

SEQ ID NO: 729234 - DNA, 33 bp, Homo sapien
tgtttcacagctgacctgcctatagactggcta

SEQ ID NO: 729235 - DNA, 33 bp, Homo sapien
agttgagttaatttcacccaaattgcataactg

SEQ ID NO: 729236 - DNA, 33 bp, Homo sapien
agttgagttaatttcatccaaattgcataactg

SEQ ID NO: 729237 - DNA, 33 bp, Homo sapien
gaaacgtatacttgaccaaattgtcccctacag

SEQ ID NO: 729238 - DNA, 33 bp, Homo sapien
gaaacgtatacttgactaaattgtcccctacag

SEQ ID NO: 729239 - DNA, 33 bp, Homo sapien
ctccatgtcttatttcaaactgtcctacacatg

SEQ ID NO: 729240 - DNA, 33 bp, Homo sapien
ctccatgtcttatttccaactgtcctacacatg

SEQ ID NO: 729241 - DNA, 33 bp, Homo sapien
tgtggcttcacaataaactaggtaaatatatgc

SEQ ID NO: 729242 - DNA, 33 bp, Homo sapien
tgtggcttcacaataagctaggtaaatatatgc

SEQ ID NO: 729243 - DNA, 33 bp, Homo sapien
attggaaaaaagaatgcagcctgtattttaaca

SEQ ID NO: 729244 - DNA, 33 bp, Homo sapien
attggaaaaaagaatggagcctgtattttaaca

SEQ ID NO: 729245 - DNA, 33 bp, Homo sapien
ttttgcctgtctggaaatctcttccacatgatt

SEQ ID NO: 729246 - DNA, 33 bp, Homo sapien
ttttgcctgtctggaactctcttccacatgatt

SEQ ID NO: 729247 - DNA, 33 bp, Homo sapien
agtagagaagacaagacgtacaagtaaataaat

SEQ ID NO: 729248 - DNA, 33 bp, Homo sapien
agtagagaagacaagatgtacaagtaaataaat

SEQ ID NO: 729249 - DNA, 33 bp, Homo sapien
aggcaatttaattccaagaaatgttagaactga

SEQ ID NO: 729250 - DNA, 33 bp, Homo sapien
aggcaatttaattccaggaaatgttagaactga

SEQ ID NO: 729251 - DNA, 33 bp, Homo sapien
gaaacaatggctaaaaagtccccaaatctgagg

SEQ ID NO: 729252 - DNA, 33 bp, Homo sapien
gaaacaatggctaaaacgtccccaaatctgagg

SEQ ID NO: 729253 - DNA, 33 bp, Homo sapien
ttttcccggtggggaaagacttctgaacttatt

SEQ ID NO: 729254 - DNA, 33 bp, Homo sapien
ttttcccggtggggaaggacttctgaacttatt

SEQ ID NO: 729255 - DNA, 33 bp, Homo sapien
tctcacctaaatcagaccaatgacaagacccag

SEQ ID NO: 729256 - DNA, 33 bp, Homo sapien
tctcacctaaatcagagcaatgacaagacccag

SEQ ID NO: 729257 - DNA, 33 bp, Homo sapien
gtgagacagaaactagaccctcaaacagtcttc

SEQ ID NO: 729258 - DNA, 33 bp, Homo sapien
gtgagacagaaactagtccctcaaacagtcttc

SEQ ID NO: 729259 - DNA, 33 bp, Homo sapien
tgccttgagacaaaaaataatatcaaattctgg

SEQ ID NO: 729260 - DNA, 33 bp, Homo sapien
tgccttgagacaaaaagtaatatcaaattctgg

SEQ ID NO: 729261 - DNA, 33 bp, Homo sapien
tataagcaataaggagccaaatgttagtcccca

SEQ ID NO: 729262 - DNA, 33 bp, Homo sapien
tataagcaataaggagtcaaatgttagtcccca

SEQ ID NO: 729263 - DNA, 33 bp, Homo sapien; identical to SEQ ID NO: 729261

SEQ ID NO: 729264 - DNA, 33 bp, Homo sapien; identical to SEQ ID NO: 729262

SEQ ID NO: 729265 - DNA, 33 bp, Homo sapien
gagagcaaagaaaaaagacgttttcagtttctt

SEQ ID NO: 729266 - DNA, 33 bp, Homo sapien
gagagcaaagaaaaaatacgttttcagtttctt

SEQ ID NO: 729267 - DNA, 33 bp, Homo sapien
atagggactactacaacggagttttgccttaaa

SEQ ID NO: 729268 - DNA, 33 bp, Homo sapien
atagggactactacaatggagttttgccttaaa

SEQ ID NO: 729269 - DNA, 33 bp, Homo sapien
aatgctgatagcaataaggatagtaaaatccag

SEQ ID NO: 729270 - DNA, 33 bp, Homo sapien
aatgctgatagcaatatggatagtaaaatccag

SEQ ID NO: 729271 - DNA, 33 bp, Homo sapien
gagtgattacctatcacctttgccctattttat

SEQ ID NO: 729272 - DNA, 33 bp, Homo sapien
gagtgattacctatcagctttgccctattttat

SEQ ID NO: 729273 - DNA, 33 bp, Homo sapien
tacctactcttttagcagatcgattatatttac

SEQ ID NO: 729274 - DNA, 33 bp, Homo sapien
tacctactcttttagcggatcgattatatttac

SEQ ID NO: 729275 - DNA, 33 bp, Homo sapien
ttcaccatgatattaaaatgtgttttctacaga

SEQ ID NO: 729276 - DNA, 33 bp, Homo sapien
ttcaccatgatattaatatgtgttttctacaga

SEQ ID NO: 729277 - DNA, 33 bp, Homo sapien
ctagatcttcttcaccaaagtcttaaaattttg

SEQ ID NO: 729278 - DNA, 33 bp, Homo sapien
ctagatcttcttcaccgaagtcttaaaattttg

SEQ ID NO: 729279 - DNA, 33 bp, Homo sapien
aaagatgaggaggcccactctctgttgttctga

SEQ ID NO: 729280 - DNA, 33 bp, Homo sapien
aaagatgaggaggcccgctctctgttgttctga

SEQ ID NO: 729281 - DNA, 33 bp, Homo sapien
aacgatgctacactatgaaaaacattgcttttt

SEQ ID NO: 729282 - DNA, 33 bp, Homo sapien
aacgatgctacactattaaaaacattgcttttt

SEQ ID NO: 729283 - DNA, 33 bp, Homo sapien
agaaattttagcctataaaacataagccattta

SEQ ID NO: 729284 - DNA, 33 bp, Homo sapien
agaaattttagcctatgaaacataagccattta

SEQ ID NO: 729285 - DNA, 33 bp, Homo sapien
aattgattcaaaatacaagagtcacttaagcat

SEQ ID NO: 729286 - DNA, 33 bp, Homo sapien
aattgattcaaaatacgagagtcacttaagcat

SEQ ID NO: 729287 - DNA, 33 bp, Homo sapien
aaaaaatgaaaagaacaatgcctctttgaatgc

SEQ ID NO: 729288 - DNA, 33 bp, Homo sapien
aaaaaatgaaaagaacgatgcctctttgaatgc

SEQ ID NO: 729289 - DNA, 33 bp, Homo sapien
agtcctgcataggcttcaaccattctgcccagg

SEQ ID NO: 729290 - DNA, 33 bp, Homo sapien
agtcctgcataggctttaaccattctgcccagg

SEQ ID NO: 729291 - DNA, 33 bp, Homo sapien
acatgagccattgcacccgtcagagaactgctg

SEQ ID NO: 729292 - DNA, 33 bp, Homo sapien
acatgagccattgcactcgtcagagaactgctg

SEQ ID NO: 729293 - DNA, 33 bp, Homo sapien
aagatatcaggaggaaatagaaactgtccagag

SEQ ID NO: 729294 - DNA, 33 bp, Homo sapien
aagatatcaggaggaactagaaactgtccagag

SEQ ID NO: 729295 - DNA, 33 bp, Homo sapien
atcaaagactactcaactcattagcagatatag

SEQ ID NO: 729296 - DNA, 33 bp, Homo sapien
atcaaagactactcaagtcattagcagatatag

SEQ ID NO: 729297 - DNA, 33 bp, Homo sapien
agtagtgatggctaaacttcctttctttcaagg

SEQ ID NO: 729298 - DNA, 33 bp, Homo sapien
agtagtgatggctaaatttcctttctttcaagg

SEQ ID NO: 729299 - DNA, 33 bp, Homo sapien
tttttaaatatgattacgaggggcaggagaaat

SEQ ID NO: 729300 - DNA, 33 bp, Homo sapien
tttttaaatatgattatgaggggcaggagaaat

SEQ ID NO: 729301 - DNA, 33 bp, Homo sapien
gaatcttgacaaggaactagtcctaaccacgac

SEQ ID NO: 729302 - DNA, 33 bp, Homo sapien
gaatcttgacaaggaagtagtcctaaccacgac

SEQ ID NO: 729303 - DNA, 33 bp, Homo sapien
taatcatttcttttcactcagaatactccatag

SEQ ID NO: 729304 - DNA, 33 bp, Homo sapien
taatcatttcttttcattcagaatactccatag

SEQ ID NO: 729305 - DNA, 33 bp, Homo sapien
ttccagtaatgcatcacatttgtactcatgcca

SEQ ID NO: 729306 - DNA, 33 bp, Homo sapien
ttccagtaatgcatcagatttgtactcatgcca

SEQ ID NO: 729307 - DNA, 33 bp, Homo sapien
aaacccattgatttcacctgtaagcatccccaa

SEQ ID NO: 729308 - DNA, 33 bp, Homo sapien
aaacccattgatttcatctgtaagcatccccaa

SEQ ID NO: 729309 - DNA, 33 bp, Homo sapien
ggatgaaagttaagtaagtctctatgtctaaaa

SEQ ID NO: 729310 - DNA, 33 bp, Homo sapien
ggatgaaagttaagtaggtctctatgtctaaaa

SEQ ID NO: 729311 - DNA, 33 bp, Homo sapien
ggaaataagtcagaacaagagctatgatcatct

SEQ ID NO: 729312 - DNA, 33 bp, Homo sapien
ggaaataagtcagaacgagagctatgatcatct

SEQ ID NO: 729313 - DNA, 33 bp, Homo sapien
gctgtgaggtgtcaggaaaagaagagctagttt

SEQ ID NO: 729314 - DNA, 33 bp, Homo sapien
gctgtgaggtgtcaggtaaagaagagctagttt

SEQ ID NO: 729315 - DNA, 33 bp, Homo sapien
acatttactagagaaacgagctatcaaattctt

SEQ ID NO: 729316 - DNA, 33 bp, Homo sapien
acatttactagagaaatgagctatcaaattctt

SEQ ID NO: 729317 - DNA, 33 bp, Homo sapien
gcctactccctaatcactcacaatcccttctat

SEQ ID NO: 729318 - DNA, 33 bp, Homo sapien
gcctactccctaatcattcacaatcccttctat

SEQ ID NO: 729319 - DNA, 33 bp, Homo sapien
actgggaacagtgtaacggagagatagatgttg

SEQ ID NO: 729320 - DNA, 33 bp, Homo sapien
actgggaacagtgtaatggagagatagatgttg

SEQ ID NO: 729321 - DNA, 33 bp, Homo sapien
atgcagcaacaccgtaaagaaaagtatacttta

SEQ ID NO: 729322 - DNA, 33 bp, Homo sapien
atgcagcaacaccgtagagaaaagtatacttta

SEQ ID NO: 729323 - DNA, 33 bp, Homo sapien
aggaggacaagaaatactagaacgtaacaatga

SEQ ID NO: 729324 - DNA, 33 bp, Homo sapien
aggaggacaagaaatattagaacgtaacaatga

SEQ ID NO: 729325 - DNA, 33 bp, Homo sapien
atgcaaccaggctgtgaattcaaactagtttac

SEQ ID NO: 729326 - DNA, 33 bp, Homo sapien
atgcaaccaggctgtgtattcaaactagtttac

SEQ ID NO: 729327 - DNA, 33 bp, Homo sapien
ggttgcccgggttttgaaagagagagagtgggg

SEQ ID NO: 729328 - DNA, 33 bp, Homo sapien
ggttgcccgggttttggaagagagagagtgggg

SEQ ID NO: 729329 - DNA, 33 bp, Homo sapien
gctgaaagaaggtgaacactacacgatccggtg

SEQ ID NO: 729330 - DNA, 33 bp, Homo sapien
gctgaaagaaggtgaatactacacgatccggtg

SEQ ID NO: 729331 - DNA, 33 bp, Homo sapien
aatcttggcttgagaaagaaccagttttcttat

SEQ ID NO: 729332 - DNA, 33 bp, Homo sapien
aatcttggcttgagaaggaaccagttttcttat

SEQ ID NO: 729333 - DNA, 33 bp, Homo sapien
ctagaagaatgtgaaacagtgtcttaaaaattc

SEQ ID NO: 729334 - DNA, 33 bp, Homo sapien
ctagaagaatgtgaaatagtgtcttaaaaattc

SEQ ID NO: 729335 - DNA, 33 bp, Homo sapien
aaaggaaaaccaagaactgtcatgatatataat

SEQ ID NO: 729336 - DNA, 33 bp, Homo sapien
aaaggaaaaccaagaattgtcatgatatataat

SEQ ID NO: 729337 - DNA, 33 bp, Homo sapien
tataaaatgtcttgaaaagaatggtatataatg

SEQ ID NO: 729338 - DNA, 33 bp, Homo sapien
tataaaatgtcttgaagagaatggtatataatg

SEQ ID NO: 729339 - DNA, 33 bp, Homo sapien
acttgtgtatggtgacaagatttaactcaacta

SEQ ID NO: 729340 - DNA, 33 bp, Homo sapien
acttgtgtatggtgaccagatttaactcaacta

SEQ ID NO: 729341 - DNA, 33 bp, Homo sapien
ggccaggaaggcctcacggtggaaatggaagca

SEQ ID NO: 729342 - DNA, 33 bp, Homo sapien
ggccaggaaggcctcatggtggaaatggaagca

SEQ ID NO: 729343 - DNA, 33 bp, Homo sapien
tatttcagcatggaacagtggaaatttttagtg

SEQ ID NO: 729344 - DNA, 33 bp, Homo sapien
tatttcagcatggaacggtggaaatttttagtg

SEQ ID NO: 729345 - DNA, 33 bp, Homo sapien
ctcgcataacccaaaacggaatcacaagtttaa

SEQ ID NO: 729346 - DNA, 33 bp, Homo sapien
ctcgcataacccaaaatggaatcacaagtttaa

SEQ ID NO: 729347 - DNA, 33 bp, Homo sapien
cttactctgatttatagccagaacaataataaa

SEQ ID NO: 729348 - DNA, 33 bp, Homo sapien
cttactctgatttatatccagaacaataataaa

SEQ ID NO: 729349 - DNA, 33 bp, Homo sapien
tttaagaattggggaaaatgaagcacgtcaagt

SEQ ID NO: 729350 - DNA, 33 bp, Homo sapien
tttaagaattggggaagatgaagcacgtcaagt

SEQ ID NO: 729351 - DNA, 33 bp, Homo sapien
attcattgaaggatgacccattgccagaatttt

SEQ ID NO: 729352 - DNA, 33 bp, Homo sapien
attcattgaaggatgatccattgccagaatttt

SEQ ID NO: 729353 - DNA, 33 bp, Homo sapien
ttgttatcaaagggtacatatctctagtgtttt

SEQ ID NO: 729354 - DNA, 33 bp, Homo sapien
ttgttatcaaagggtagatatctctagtgtttt

SEQ ID NO: 729355 - DNA, 33 bp, Homo sapien
aacaagaagagttaaccatgccaaatatatatg

SEQ ID NO: 729356 - DNA, 33 bp, Homo sapien
aacaagaagagttaactatgccaaatatatatg

SEQ ID NO: 729357 - DNA, 33 bp, Homo sapien
tcttgtttcattgatccctacaccattatgtag

SEQ ID NO: 729358 - DNA, 33 bp, Homo sapien
tcttgtttcattgatctctacaccattatgtag

SEQ ID NO: 729359 - DNA, 33 bp, Homo sapien
ccaaacagacaaatccaatgccaactccttaac

SEQ ID NO: 729360 - DNA, 33 bp, Homo sapien
ccaaacagacaaatccgatgccaactccttaac

SEQ ID NO: 729361 - DNA, 33 bp, Homo sapien
tttatttgcagatctgaacttactgctgaaatt

SEQ ID NO: 729362 - DNA, 33 bp, Homo sapien
tttatttgcagatctggacttactgctgaaatt

SEQ ID NO: 729363 - DNA, 33 bp, Homo sapien
agatgggctgtgacaacttgattgtgttcagac

SEQ ID NO: 729364 - DNA, 33 bp, Homo sapien
agatgggctgtgacaatttgattgtgttcagac

SEQ ID NO: 729365 - DNA, 33 bp, Homo sapien
cactgaaattgtgacacgaaggttatgacaagc

SEQ ID NO: 729366 - DNA, 33 bp, Homo sapien
cactgaaattgtgacatgaaggttatgacaagc

SEQ ID NO: 729367 - DNA, 33 bp, Homo sapien
ttagagaatccacatacaggagctttgaggttc

SEQ ID NO: 729368 - DNA, 33 bp, Homo sapien
ttagagaatccacatataggagctttgaggttc

SEQ ID NO: 729369 - DNA, 33 bp, Homo sapien
gtataaaaagaaagaacgtgtaagtgattaaat

SEQ ID NO: 729370 - DNA, 33 bp, Homo sapien
gtataaaaagaaagaatgtgtaagtgattaaat

SEQ ID NO: 729371 - DNA, 33 bp, Homo sapien
gaaaatccagctgggacaggtttataatccaaa

SEQ ID NO: 729372 - DNA, 33 bp, Homo sapien
gaaaatccagctgggataggtttataatccaaa

SEQ ID NO: 729373 - DNA, 33 bp, Homo sapien
aaaatgaaaaggctcactatttaaactaatttc

SEQ ID NO: 729374 - DNA, 33 bp, Homo sapien
aaaatgaaaaggctcattatttaaactaatttc

SEQ ID NO: 729375 - DNA, 33 bp, Homo sapien
aaaaatattgtgaaaaatgactggatatttcat

SEQ ID NO: 729376 - DNA, 33 bp, Homo sapien
aaaaatattgtgaaaagtgactggatatttcat

SEQ ID NO: 729377 - DNA, 33 bp, Homo sapien
aggaagatattttatcacaactgacctggctaa

SEQ ID NO: 729378 - DNA, 33 bp, Homo sapien
aggaagatattttatcgcaactgacctggctaa

SEQ ID NO: 729379 - DNA, 33 bp, Homo sapien
tcacacttggtaataaaatagagctttgtttat

SEQ ID NO: 729380 - DNA, 33 bp, Homo sapien
tcacacttggtaataatatagagctttgtttat

SEQ ID NO: 729381 - DNA, 33 bp, Homo sapien
tttgatgactagaaacaatatttttaaccatgt

SEQ ID NO: 729382 - DNA, 33 bp, Homo sapien
tttgatgactagaaacgatatttttaaccatgt

SEQ ID NO: 729383 - DNA, 33 bp, Homo sapien
atactagaggataaaaagctgataagagcctcc

SEQ ID NO: 729384 - DNA, 33 bp, Homo sapien
atactagaggataaaacgctgataagagcctcc

SEQ ID NO: 729385 - DNA, 33 bp, Homo sapien
gcatagtgccacttcacagggattcagaaaaag

SEQ ID NO: 729386 - DNA, 33 bp, Homo sapien
gcatagtgccacttcagagggattcagaaaaag

SEQ ID NO: 729387 - DNA, 33 bp, Homo sapien
ttcctgctaagatgccacactgagatttgtctg

SEQ ID NO: 729388 - DNA, 33 bp, Homo sapien
ttcctgctaagatgccgcactgagatttgtctg

SEQ ID NO: 729389 - DNA, 33 bp, Homo sapien
cagattcccatagaaacgcaaaccgtattgtga

SEQ ID NO: 729390 - DNA, 33 bp, Homo sapien
cagattcccatagaaaggcaaaccgtattgtga

SEQ ID NO: 729391 - DNA, 33 bp, Homo sapien
tcagcacttcctttaaataatatctggaatgca

SEQ ID NO: 729392 - DNA, 33 bp, Homo sapien
tcagcacttcctttaattaatatctggaatgca

SEQ ID NO: 729393 - DNA, 33 bp, Homo sapien
gttccccggcttaaaaatacagccagagtcctt

SEQ ID NO: 729394 - DNA, 33 bp, Homo sapien
gttccccggcttaaaagtacagccagagtcctt

SEQ ID NO: 729395 - DNA, 33 bp, Homo sapien
cccatagattgaatcccgctgaagcccactgat

SEQ ID NO: 729396 - DNA, 33 bp, Homo sapien
cccatagattgaatcctgctgaagcccactgat

SEQ ID NO: 729397 - DNA, 33 bp, Homo sapien
atatgctagttactgacctatcaaaaattagat

SEQ ID NO: 729398 - DNA, 33 bp, Homo sapien
atatgctagttactgatctatcaaaaattagat

SEQ ID NO: 729399 - DNA, 33 bp, Homo sapien
tcatgatgaactagacaaaggcaaaaacaatga

SEQ ID NO: 729400 - DNA, 33 bp, Homo sapien
tcatgatgaactagactaaggcaaaaacaatga

SEQ ID NO: 729401 - DNA, 33 bp, Homo sapien
tgaatatgtaatgagacgcttgctttgttggaa

SEQ ID NO: 729402 - DNA, 33 bp, Homo sapien
tgaatatgtaatgagatgcttgctttgttggaa

SEQ ID NO: 729403 - DNA, 33 bp, Homo sapien
aataatagctacctggaagaattgttggaagga

SEQ ID NO: 729404 - DNA, 33 bp, Homo sapien
aataatagctacctggcagaattgttggaagga

SEQ ID NO: 729405 - DNA, 33 bp, Homo sapien
gactttaaatgaaacaaaatgtaaggaaaccac

SEQ ID NO: 729406 - DNA, 33 bp, Homo sapien
gactttaaatgaaacagaatgtaaggaaaccac

SEQ ID NO: 729407 - DNA, 33 bp, Homo sapien
ctttcctatgcctagaatactcttcagagagag

SEQ ID NO: 729408 - DNA, 33 bp, Homo sapien
ctttcctatgcctagactactcttcagagagag

SEQ ID NO: 729409 - DNA, 33 bp, Homo sapien
actttatatagcaatgaaaaagaatgaattggg

SEQ ID NO: 729410 - DNA, 33 bp, Homo sapien
actttatatagcaatggaaaagaatgaattggg

SEQ ID NO: 729411 - DNA, 33 bp, Homo sapien
gatttatgccaatggaccttcagaacaaaaaaa

SEQ ID NO: 729412 - DNA, 33 bp, Homo sapien
gatttatgccaatggatcttcagaacaaaaaaa

SEQ ID NO: 729413 - DNA, 33 bp, Homo sapien
agcttctccacttccaacgagaaagctaggaag

SEQ ID NO: 729414 - DNA, 33 bp, Homo sapien
agcttctccacttccagcgagaaagctaggaag

SEQ ID NO: 729415 - DNA, 33 bp, Homo sapien
ctcagcagctctcttacatgaaatgatgtatcc

SEQ ID NO: 729416 - DNA, 33 bp, Homo sapien
ctcagcagctctcttatatgaaatgatgtatcc

SEQ ID NO: 729417 - DNA, 33 bp, Homo sapien
ttctcctgttatttgcaccttctgtaatgtagg

SEQ ID NO: 729418 - DNA, 33 bp, Homo sapien
ttctcctgttatttgcgccttctgtaatgtagg

SEQ ID NO: 729419 - DNA, 33 bp, Homo sapien
atgagcactagtaaaagtcaggtctccattatt

SEQ ID NO: 729420 - DNA, 33 bp, Homo sapien
atgagcactagtaaaattcaggtctccattatt

SEQ ID NO: 729421 - DNA, 33 bp, Homo sapien
acattacccaaagttaagaggcaaaagcaatac

SEQ ID NO: 729422 - DNA, 33 bp, Homo sapien
acattacccaaagttaggaggcaaaagcaatac

SEQ ID NO: 729423 - DNA, 33 bp, Homo sapien
ttacacattaacccagaaaaagtccactgaaac

SEQ ID NO: 729424 - DNA, 33 bp, Homo sapien
ttacacattaacccagcaaaagtccactgaaac

SEQ ID NO: 729425 - DNA, 33 bp, Homo sapien
tcctttctctacggaacttagaaactacttttg

SEQ ID NO: 729426 - DNA, 33 bp, Homo sapien
tcctttctctacggaatttagaaactacttttg

SEQ ID NO: 729427 - DNA, 33 bp, Homo sapien
ggtcatagataattcactcacactaactagaaa

SEQ ID NO: 729428 - DNA, 33 bp, Homo sapien
ggtcatagataattcattcacactaactagaaa

SEQ ID NO: 729429 - DNA, 33 bp, Homo sapien
atttccaatactaaaccgtgcctagtatgtaat

SEQ ID NO: 729430 - DNA, 33 bp, Homo sapien
atttccaatactaaactgtgcctagtatgtaat

SEQ ID NO: 729431 - DNA, 33 bp, Homo sapien
ttcaatccagctctaaaacactgaaaacaattt

SEQ ID NO: 729432 - DNA, 33 bp, Homo sapien
ttcaatccagctctaagacactgaaaacaattt

SEQ ID NO: 729433 - DNA, 33 bp, Homo sapien
tgcttcctgctcccaacttccccgcacaggccc

SEQ ID NO: 729434 - DNA, 33 bp, Homo sapien
tgcttcctgctcccaatttccccgcacaggccc

SEQ ID NO: 729435 - DNA, 33 bp, Homo sapien
tcatttagcagctgtaacatctctgagttgggt

SEQ ID NO: 729436 - DNA, 33 bp, Homo sapien
tcatttagcagctgtagcatctctgagttgggt

SEQ ID NO: 729437 - DNA, 33 bp, Homo sapien
tttaatatttttggctcaaatgtatgcttgctc

SEQ ID NO: 729438 - DNA, 33 bp, Homo sapien
tttaatatttttggctgaaatgtatgcttgctc

SEQ ID NO: 729439 - DNA, 33 bp, Homo sapien
cacattttaagttaccaacagccatatttccat

SEQ ID NO: 729440 - DNA, 33 bp, Homo sapien
cacattttaagttaccgacagccatatttccat

SEQ ID NO: 729441 - DNA, 33 bp, Homo sapien
ctttgtcacctttaaaatgagatgtagagcaat

SEQ ID NO: 729442 - DNA, 33 bp, Homo sapien
ctttgtcacctttaaagtgagatgtagagcaat

SEQ ID NO: 729443 - DNA, 33 bp, Homo sapien
ttggaactgtgccaaaaaatctccatgtagact

SEQ ID NO: 729444 - DNA, 33 bp, Homo sapien
ttggaactgtgccaaagaatctccatgtagact

SEQ ID NO: 729445 - DNA, 33 bp, Homo sapien
actattaattaggcaaaaatacacagtctacat

SEQ ID NO: 729446 - DNA, 33 bp, Homo sapien
actattaattaggcaacaatacacagtctacat

SEQ ID NO: 729447 - DNA, 33 bp, Homo sapien
tgaataggcaaggtcaacaatcagtgtatgtat

SEQ ID NO: 729448 - DNA, 33 bp, Homo sapien
tgaataggcaaggtcatcaatcagtgtatgtat

SEQ ID NO: 729449 - DNA, 33 bp, Homo sapien
taacttttcaatccacagtaaacctgctcacca

SEQ ID NO: 729450 - DNA, 33 bp, Homo sapien
taacttttcaatccacggtaaacctgctcacca

SEQ ID NO: 729451 - DNA, 33 bp, Homo sapien
gtttctagatacagcagccacctccttgtgagc

SEQ ID NO: 729452 - DNA, 33 bp, Homo sapien
gtttctagatacagcatccacctccttgtgagc

SEQ ID NO: 729453 - DNA, 33 bp, Homo sapien
catcagtagtttgtaaccttgctatcttgcatg

SEQ ID NO: 729454 - DNA, 33 bp, Homo sapien
catcagtagtttgtaatcttgctatcttgcatg

SEQ ID NO: 729455 - DNA, 33 bp, Homo sapien
gctttcaaaggatgtaaggacacatctggttgt

SEQ ID NO: 729456 - DNA, 33 bp, Homo sapien
gctttcaaaggatgtatggacacatctggttgt

SEQ ID NO: 729457 - DNA, 33 bp, Homo sapien
acacagaaaaagaatcagagtaattttcagcac

SEQ ID NO: 729458 - DNA, 33 bp, Homo sapien
acacagaaaaagaatctgagtaattttcagcac

SEQ ID NO: 729459 - DNA, 33 bp, Homo sapien
aagcaaagtgttcttaaacttgatactaaaggc

SEQ ID NO: 729460 - DNA, 33 bp, Homo sapien
aagcaaagtgttcttagacttgatactaaaggc

SEQ ID NO: 729461 - DNA, 33 bp, Homo sapien
cactttttcttttctaagtaaagcaacctcaaa

SEQ ID NO: 729462 - DNA, 33 bp, Homo sapien
cactttttcttttctaggtaaagcaacctcaaa

SEQ ID NO: 729463 - DNA, 33 bp, Homo sapien
atcaaaccttcataacaaaagttgctaggcatt

SEQ ID NO: 729464 - DNA, 33 bp, Homo sapien
atcaaaccttcataaccaaagttgctaggcatt

SEQ ID NO: 729465 - DNA, 33 bp, Homo sapien
gtctttgtgagagataacacctctacctgtgct

SEQ ID NO: 729466 - DNA, 33 bp, Homo sapien
gtctttgtgagagataccacctctacctgtgct

SEQ ID NO: 729467 - DNA, 33 bp, Homo sapien
ttcttctcaggcaacccaaatgcttccaagtgc

SEQ ID NO: 729468 - DNA, 33 bp, Homo sapien
ttcttctcaggcaaccgaaatgcttccaagtgc

SEQ ID NO: 729469 - DNA, 33 bp, Homo sapien
cagccatgggtaaccaacgttctattcactacc

SEQ ID NO: 729470 - DNA, 33 bp, Homo sapien
cagccatgggtaaccatcgttctattcactacc

SEQ ID NO: 729471 - DNA, 33 bp, Homo sapien
ttttaaaagtttaacaatgaatgatcctcaaat

SEQ ID NO: 729472 - DNA, 33 bp, Homo sapien
ttttaaaagtttaacactgaatgatcctcaaat

SEQ ID NO: 729473 - DNA, 33 bp, Homo sapien
ctgaacaaaaaccccaatcagcatcttgataca

SEQ ID NO: 729474 - DNA, 33 bp, Homo sapien
ctgaacaaaaaccccagtcagcatcttgataca

SEQ ID NO: 729475 - DNA, 33 bp, Homo sapien
tacaaaaagtgtttaaagtcacaactacttatt

SEQ ID NO: 729476 - DNA, 33 bp, Homo sapien
tacaaaaagtgtttaaggtcacaactacttatt

SEQ ID NO: 729477 - DNA, 33 bp, Homo sapien
aaatgattcgaagcacagaaaaattacttagaa

SEQ ID NO: 729478 - DNA, 33 bp, Homo sapien
aaatgattcgaagcaccgaaaaattacttagaa

SEQ ID NO: 729479 - DNA, 33 bp, Homo sapien
tagctcctgccaaataaagtgtcaagaatctag

SEQ ID NO: 729480 - DNA, 33 bp, Homo sapien
tagctcctgccaaatatagtgtcaagaatctag

SEQ ID NO: 729481 - DNA, 33 bp, Homo sapien
aaactttgactacttcaacaaaatttgctataa

SEQ ID NO: 729482 - DNA, 33 bp, Homo sapien
aaactttgactacttctacaaaatttgctataa

SEQ ID NO: 729483 - DNA, 33 bp, Homo sapien
tttatggatagagaaccaaaacctgcaacttac

SEQ ID NO: 729484 - DNA, 33 bp, Homo sapien
tttatggatagagaacgaaaacctgcaacttac

SEQ ID NO: 729485 - DNA, 33 bp, Homo sapien
ccacatttgctagaaaaccacttctccaaacac

SEQ ID NO: 729486 - DNA, 33 bp, Homo sapien
ccacatttgctagaaagccacttctccaaacac

SEQ ID NO: 729487 - DNA, 33 bp, Homo sapien
atttgagaggactcacagaaaataaattcagtg

SEQ ID NO: 729488 - DNA, 33 bp, Homo sapien
atttgagaggactcacggaaaataaattcagtg

SEQ ID NO: 729489 - DNA, 33 bp, Homo sapien
atggtgtttacaagacagcaaaaatgttacacg

SEQ ID NO: 729490 - DNA, 33 bp, Homo sapien
atggtgtttacaagaccgcaaaaatgttacacg

SEQ ID NO: 729491 - DNA, 33 bp, Homo sapien
ctgctaggcttaggaaaaaacttcagaactaca

SEQ ID NO: 729492 - DNA, 33 bp, Homo sapien
ctgctaggcttaggaagaaacttcagaactaca

SEQ ID NO: 729493 - DNA, 33 bp, Homo sapien
acagaatgggcacttacgtcaggtattctgaat

SEQ ID NO: 729494 - DNA, 33 bp, Homo sapien
acagaatgggcacttatgtcaggtattctgaat

SEQ ID NO: 729495 - DNA, 33 bp, Homo sapien
tcatctatggacactacaccagaacaattggtc

SEQ ID NO: 729496 - DNA, 33 bp, Homo sapien
tcatctatggacactataccagaacaattggtc

SEQ ID NO: 729497 - DNA, 33 bp, Homo sapien
gatatgcaaggtatagactagcatctagtgaca

SEQ ID NO: 729498 - DNA, 33 bp, Homo sapien
gatatgcaaggtatagcctagcatctagtgaca

SEQ ID NO: 729499 - DNA, 33 bp, Homo sapien
ctttactcaaattcaacgatgccagaaccttcc

SEQ ID NO: 729500 - DNA, 33 bp, Homo sapien
ctttactcaaattcaatgatgccagaaccttcc

SEQ ID NO: 729501 - DNA, 33 bp, Homo sapien
ttaaactgcatgatacccaggataaagatgaat

SEQ ID NO: 729502 - DNA, 33 bp, Homo sapien
ttaaactgcatgatactcaggataaagatgaat

SEQ ID NO: 729503 - DNA, 33 bp, Homo sapien
gctatttgttgtttccaaggttttgtaatctac

SEQ ID NO: 729504 - DNA, 33 bp, Homo sapien
gctatttgttgtttccgaggttttgtaatctac

SEQ ID NO: 729505 - DNA, 33 bp, Homo sapien
tgaagtcttacacttaaacatttaatccatctt

SEQ ID NO: 729506 - DNA, 33 bp, Homo sapien
tgaagtcttacacttagacatttaatccatctt

SEQ ID NO: 729507 - DNA, 33 bp, Homo sapien
agcaaagaaattggtcaaagtgactatgtcatc

SEQ ID NO: 729508 - DNA, 33 bp, Homo sapien
agcaaagaaattggtcgaagtgactatgtcatc

SEQ ID NO: 729509 - DNA, 33 bp, Homo sapien
agattttcatcctgccaaataataaagacagac

SEQ ID NO: 729510 - DNA, 33 bp, Homo sapien
agattttcatcctgccgaataataaagacagac

SEQ ID NO: 729511 - DNA, 33 bp, Homo sapien
tgaattcaaccctttaacatgatgtagtgtcac

SEQ ID NO: 729512 - DNA, 33 bp, Homo sapien
tgaattcaaccctttagcatgatgtagtgtcac

SEQ ID NO: 729513 - DNA, 33 bp, Homo sapien
gtttagaaatagctccgagaaaagtttttatat

SEQ ID NO: 729514 - DNA, 33 bp, Homo sapien
gtttagaaatagctcctagaaaagtttttatat

SEQ ID NO: 729515 - DNA, 33 bp, Homo sapien
gaccatcctctgttctaaacaaccacccctgcc

SEQ ID NO: 729516 - DNA, 33 bp, Homo sapien
gaccatcctctgttctgaacaaccacccctgcc

SEQ ID NO: 729517 - DNA, 33 bp, Homo sapien
cactaagctaaaagggaacgtcaaactaggaat

SEQ ID NO: 729518 - DNA, 33 bp, Homo sapien
cactaagctaaaaggggacgtcaaactaggaat

SEQ ID NO: 729519 - DNA, 33 bp, Homo sapien
tggaagagggccaagcaaatgattttagagatc

SEQ ID NO: 729520 - DNA, 33 bp, Homo sapien
tggaagagggccaagcgaatgattttagagatc

SEQ ID NO: 729521 - DNA, 33 bp, Homo sapien
aaaaattacttcaaaacggatcattgtcttaaa

SEQ ID NO: 729522 - DNA, 33 bp, Homo sapien
aaaaattacttcaaaatggatcattgtcttaaa

SEQ ID NO: 729523 - DNA, 33 bp, Homo sapien
ttcgcattataaatgaaaaagcttgacagtgtc

SEQ ID NO: 729524 - DNA, 33 bp, Homo sapien
ttcgcattataaatgagaaagcttgacagtgtc

SEQ ID NO: 729525 - DNA, 33 bp, Homo sapien
aatgtgctttgtattacatagtcttgcaatcat

SEQ ID NO: 729526 - DNA, 33 bp, Homo sapien
aatgtgctttgtattatatagtcttgcaatcat

SEQ ID NO: 729527 - DNA, 33 bp, Homo sapien
gtgcatgactgtatccagaatattcacccttca

SEQ ID NO: 729528 - DNA, 33 bp, Homo sapien
gtgcatgactgtatccggaatattcacccttca

SEQ ID NO: 729529 - DNA, 33 bp, Homo sapien
acatctgcccattgccaagttccagagttgctt

SEQ ID NO: 729530 - DNA, 33 bp, Homo sapien
acatctgcccattgccgagttccagagttgctt

SEQ ID NO: 729531 - DNA, 33 bp, Homo sapien
tcacgcctactattccaacaaaactgctgaatt

SEQ ID NO: 729532 - DNA, 33 bp, Homo sapien
tcacgcctactattccgacaaaactgctgaatt

SEQ ID NO: 729533 - DNA, 33 bp, Homo sapien
tgttgcctccaagtagaatgtaaatgtaggact

SEQ ID NO: 729534 - DNA, 33 bp, Homo sapien
tgttgcctccaagtaggatgtaaatgtaggact

SEQ ID NO: 729535 - DNA, 33 bp, Homo sapien
ttaaagattacatcaacgaaatgtcaaaataat

SEQ ID NO: 729536 - DNA, 33 bp, Homo sapien
ttaaagattacatcaatgaaatgtcaaaataat

SEQ ID NO: 729537 - DNA, 33 bp, Homo sapien
ttagtactcattaggacgcattgtatttattta

SEQ ID NO: 729538 - DNA, 33 bp, Homo sapien
ttagtactcattaggatgcattgtatttattta

SEQ ID NO: 729539 - DNA, 33 bp, Homo sapien
aacagttaccttcctccgactatactcaaatat

SEQ ID NO: 729540 - DNA, 33 bp, Homo sapien
aacagttaccttcctctgactatactcaaatat

SEQ ID NO: 729541 - DNA, 33 bp, Homo sapien
tgtgtgttgtagttaccaatgaattttcaatac

SEQ ID NO: 729542 - DNA, 33 bp, Homo sapien
tgtgtgttgtagttactaatgaattttcaatac

SEQ ID NO: 729543 - DNA, 33 bp, Homo sapien
gccactgacaacttgcactgtgaccctggaaaa

SEQ ID NO: 729544 - DNA, 33 bp, Homo sapien
gccactgacaacttgccctgtgaccctggaaaa

SEQ ID NO: 729545 - DNA, 33 bp, Homo sapien
tacttcagtttcaaaacttatttcagatgttaa

SEQ ID NO: 729546 - DNA, 33 bp, Homo sapien
tacttcagtttcaaaatttatttcagatgttaa

SEQ ID NO: 729547 - DNA, 33 bp, Homo sapien
agaacgtgggcaacaaacaaagaaatgacaagg

SEQ ID NO: 729548 - DNA, 33 bp, Homo sapien
agaacgtgggcaacaagcaaagaaatgacaagg

SEQ ID NO: 729549 - DNA, 33 bp, Homo sapien
tctggaaacagataccacttcacgttgctctgc

SEQ ID NO: 729550 - DNA, 33 bp, Homo sapien
tctggaaacagataccgcttcacgttgctctgc

SEQ ID NO: 729551 - DNA, 33 bp, Homo sapien
ctaattccattcatgaagactgtacctttatta

SEQ ID NO: 729552 - DNA, 33 bp, Homo sapien
ctaattccattcatgaggactgtacctttatta

SEQ ID NO: 729553 - DNA, 33 bp, Homo sapien
taatgttctgtttcaaattaaagttcagagaga

SEQ ID NO: 729554 - DNA, 33 bp, Homo sapien
taatgttctgtttcaacttaaagttcagagaga

SEQ ID NO: 729555 - DNA, 33 bp, Homo sapien
atggtgataagacctacattttaccttccccgt

SEQ ID NO: 729556 - DNA, 33 bp, Homo sapien
atggtgataagacctatattttaccttccccgt

SEQ ID NO: 729557 - DNA, 33 bp, Homo sapien
gggtagctgcccacaaaaggagccagtctgtct

SEQ ID NO: 729558 - DNA, 33 bp, Homo sapien
gggtagctgcccacaacaggagccagtctgtct

SEQ ID NO: 729559 - DNA, 33 bp, Homo sapien
atgcctatttgtcacacaaggctgatcttggat

SEQ ID NO: 729560 - DNA, 33 bp, Homo sapien
atgcctatttgtcacagaaggctgatcttggat

SEQ ID NO: 729561 - DNA, 33 bp, Homo sapien
atgtcagatctctctcactgtaataataatctc

SEQ ID NO: 729562 - DNA, 33 bp, Homo sapien
atgtcagatctctctcgctgtaataataatctc

SEQ ID NO: 729563 - DNA, 33 bp, Homo sapien
agacttgtaaatgggacagatgacagaaatttc

SEQ ID NO: 729564 - DNA, 33 bp, Homo sapien
agacttgtaaatgggagagatgacagaaatttc

SEQ ID NO: 729565 - DNA, 33 bp, Homo sapien
tatgtgcacatactacacttctatgccttttct

SEQ ID NO: 729566 - DNA, 33 bp, Homo sapien
tatgtgcacatactacgcttctatgccttttct

SEQ ID NO: 729567 - DNA, 33 bp, Homo sapien
aaatgttttgaagagcagaaaatcctttagcga

SEQ ID NO: 729568 - DNA, 33 bp, Homo sapien
aaatgttttgaagagcggaaaatcctttagcga

SEQ ID NO: 729569 - DNA, 33 bp, Homo sapien
gaaataattcgaccgacggggcataaggcaaag

SEQ ID NO: 729570 - DNA, 33 bp, Homo sapien
gaaataattcgaccgagggggcataaggcaaag

SEQ ID NO: 729571 - DNA, 33 bp, Homo sapien
atatgctgtacttaggaaaatcaattaattgag

SEQ ID NO: 729572 - DNA, 33 bp, Homo sapien
atatgctgtacttagggaaatcaattaattgag

SEQ ID NO: 729573 - DNA, 33 bp, Homo sapien
cgatttcctagaggatgaatatgtgctatgtaa

SEQ ID NO: 729574 - DNA, 33 bp, Homo sapien
cgatttcctagaggattaatatgtgctatgtaa

SEQ ID NO: 729575 - DNA, 33 bp, Homo sapien
ttagcagtatcttcaacgtaagtgtttcttatg

SEQ ID NO: 729576 - DNA, 33 bp, Homo sapien
ttagcagtatcttcaatgtaagtgtttcttatg

SEQ ID NO: 729577 - DNA, 33 bp, Homo sapien
aaatatatcgtctaaaacattcatacataagat

SEQ ID NO: 729578 - DNA, 33 bp, Homo sapien
aaatatatcgtctaaagcattcatacataagat

SEQ ID NO: 729579 - DNA, 33 bp, Homo sapien
tgtagttagtgagaaacttagtcaaacacaatt

SEQ ID NO: 729580 - DNA, 33 bp, Homo sapien
tgtagttagtgagaaatttagtcaaacacaatt

SEQ ID NO: 729581 - DNA, 33 bp, Homo sapien
tcactgcaggccttcaaataggttgctatctgt

SEQ ID NO: 729582 - DNA, 33 bp, Homo sapien
tcactgcaggccttcagataggttgctatctgt

SEQ ID NO: 729583 - DNA, 33 bp, Homo sapien
caaagtgctgggtcaacgccattccatctcagc

SEQ ID NO: 729584 - DNA, 33 bp, Homo sapien
caaagtgctgggtcaaggccattccatctcagc

SEQ ID NO: 729585 - DNA, 33 bp, Homo sapien
agagatggcatcttgaacttttagtaattccac

SEQ ID NO: 729586 - DNA, 33 bp, Homo sapien
agagatggcatcttgaccttttagtaattccac

SEQ ID NO: 729587 - DNA, 33 bp, Homo sapien
gcctctgaaatctgtaaaaattgtgttatcatc

SEQ ID NO: 729588 - DNA, 33 bp, Homo sapien
gcctctgaaatctgtataaattgtgttatcatc

SEQ ID NO: 729589 - DNA, 33 bp, Homo sapien
ggagtttatatactgaaatggtttgactctgtg

SEQ ID NO: 729590 - DNA, 33 bp, Homo sapien
ggagtttatatactgatatggtttgactctgtg

SEQ ID NO: 729591 - DNA, 33 bp, Homo sapien
ttttttgacaaatttacatcttaaccttattga

SEQ ID NO: 729592 - DNA, 33 bp, Homo sapien
ttttttgacaaatttagatcttaaccttattga

SEQ ID NO: 729593 - DNA, 33 bp, Homo sapien
ctctgttcttgtaaccactgtgcaaataataga

SEQ ID NO: 729594 - DNA, 33 bp, Homo sapien
ctctgttcttgtaaccgctgtgcaaataataga

SEQ ID NO: 729595 - DNA, 33 bp, Homo sapien
caagtgccagcattgacaggagctagaaggcag

SEQ ID NO: 729596 - DNA, 33 bp, Homo sapien
caagtgccagcattgataggagctagaaggcag

SEQ ID NO: 729597 - DNA, 33 bp, Homo sapien
gtggcagtagggcttaggcttgaattacttctt

SEQ ID NO: 729598 - DNA, 33 bp, Homo sapien
gtggcagtagggcttatgcttgaattacttctt

SEQ ID NO: 729599 - DNA, 33 bp, Homo sapien
agtatagattgatcacaaaaaacttgtttgctc

SEQ ID NO: 729600 - DNA, 33 bp, Homo sapien
agtatagattgatcacgaaaaacttgtttgctc

SEQ ID NO: 729601 - DNA, 33 bp, Homo sapien
tttttgtcagctactaagtgtgaattttataca

SEQ ID NO: 729602 - DNA, 33 bp, Homo sapien
tttttgtcagctactaggtgtgaattttataca

SEQ ID NO: 729603 - DNA, 33 bp, Homo sapien
aggggaatgttgaggaataatggaggaatctcc

SEQ ID NO: 729604 - DNA, 33 bp, Homo sapien
aggggaatgttgaggagtaatggaggaatctcc

SEQ ID NO: 729605 - DNA, 33 bp, Homo sapien
ggtaaacatacagctgaatatctaactgggaaa

SEQ ID NO: 729606 - DNA, 33 bp, Homo sapien
ggtaaacatacagctggatatctaactgggaaa

SEQ ID NO: 729607 - DNA, 33 bp, Homo sapien
ataactttgatccatgcagtcactaatggcaaa

SEQ ID NO: 729608 - DNA, 33 bp, Homo sapien
ataactttgatccatgtagtcactaatggcaaa

SEQ ID NO: 729609 - DNA, 33 bp, Homo sapien
atgggactgactgaaacgtaggatgaatttact

SEQ ID NO: 729610 - DNA, 33 bp, Homo sapien
atgggactgactgaaatgtaggatgaatttact

SEQ ID NO: 729611 - DNA, 33 bp, Homo sapien
gaaatgcatctagacaaaaaccttaacactttt

SEQ ID NO: 729612 - DNA, 33 bp, Homo sapien
gaaatgcatctagacagaaaccttaacactttt

SEQ ID NO: 729613 - DNA, 33 bp, Homo sapien
atattagtgcattaagaaattggaatgaaaaac

SEQ ID NO: 729614 - DNA, 33 bp, Homo sapien
atattagtgcattaaggaattggaatgaaaaac

SEQ ID NO: 729615 - DNA, 33 bp, Homo sapien
aagatttagtctcaccactatattctcattaaa

SEQ ID NO: 729616 - DNA, 33 bp, Homo sapien
aagatttagtctcaccgctatattctcattaaa

SEQ ID NO: 729617 - DNA, 33 bp, Homo sapien
ttggctatctttcttacggttatatatcacttt

SEQ ID NO: 729618 - DNA, 33 bp, Homo sapien
ttggctatctttcttagggttatatatcacttt

SEQ ID NO: 729619 - DNA, 33 bp, Homo sapien
cctcaattccctttccagacaagtcccaaagaa

SEQ ID NO: 729620 - DNA, 33 bp, Homo sapien
cctcaattccctttccggacaagtcccaaagaa

SEQ ID NO: 729621 - DNA, 33 bp, Homo sapien
aataggtcaagttctagtaagaatccagttgag

SEQ ID NO: 729622 - DNA, 33 bp, Homo sapien
aataggtcaagttctattaagaatccagttgag

SEQ ID NO: 729623 - DNA, 33 bp, Homo sapien
aatacggggatagaaaaattgtgagtcagacca

SEQ ID NO: 729624 - DNA, 33 bp, Homo sapien
aatacggggatagaaagattgtgagtcagacca

SEQ ID NO: 729625 - DNA, 33 bp, Homo sapien
actgtctctctgctaccaagtactctcagagta

SEQ ID NO: 729626 - DNA, 33 bp, Homo sapien
actgtctctctgctactaagtactctcagagta

SEQ ID NO: 729627 - DNA, 33 bp, Homo sapien
actcatgaacataaagacgacaaaaatatatac

SEQ ID NO: 729628 - DNA, 33 bp, Homo sapien
actcatgaacataaaggcgacaaaaatatatac

SEQ ID NO: 729629 - DNA, 33 bp, Homo sapien
atctgaacatcaagaactgcttttccctggacc

SEQ ID NO: 729630 - DNA, 33 bp, Homo sapien
atctgaacatcaagaattgcttttccctggacc

SEQ ID NO: 729631 - DNA, 33 bp, Homo sapien
actttactgtaactgaaccccatttcttgtcta

SEQ ID NO: 729632 - DNA, 33 bp, Homo sapien
actttactgtaactgacccccatttcttgtcta

SEQ ID NO: 729633 - DNA, 33 bp, Homo sapien
ttccccaaaaagatgcaaatgaaaataggtttc

SEQ ID NO: 729634 - DNA, 33 bp, Homo sapien
ttccccaaaaagatgccaatgaaaataggtttc

SEQ ID NO: 729635 - DNA, 33 bp, Homo sapien
aaaaagaagcaactcaggagaaattgtaggaaa

SEQ ID NO: 729636 - DNA, 33 bp, Homo sapien
aaaaagaagcaactcatgagaaattgtaggaaa

SEQ ID NO: 729637 - DNA, 33 bp, Homo sapien
gtccccgggcttgtgaaatgtcttttatctaca

SEQ ID NO: 729638 - DNA, 33 bp, Homo sapien
gtccccgggcttgtgacatgtcttttatctaca

SEQ ID NO: 729639 - DNA, 33 bp, Homo sapien
tgacagacatttccgagctattgagagtagctg

SEQ ID NO: 729640 - DNA, 33 bp, Homo sapien
tgacagacatttccgatctattgagagtagctg

SEQ ID NO: 729641 - DNA, 33 bp, Homo sapien
tgggaatattgtgtgaggccgaggtttaggtat

SEQ ID NO: 729642 - DNA, 33 bp, Homo sapien
tgggaatattgtgtgatgccgaggtttaggtat

SEQ ID NO: 729643 - DNA, 33 bp, Homo sapien
ttatacccaatcaacaaatctacagttgcatac

SEQ ID NO: 729644 - DNA, 33 bp, Homo sapien
ttatacccaatcaacacatctacagttgcatac

SEQ ID NO: 729645 - DNA, 33 bp, Homo sapien
tgcaaagaattcaccacgtatgcaactgtagat

SEQ ID NO: 729646 - DNA, 33 bp, Homo sapien
tgcaaagaattcaccatgtatgcaactgtagat

SEQ ID NO: 729647 - DNA, 33 bp, Homo sapien
atttaaatctttaataccttgagctagtttgtt

SEQ ID NO: 729648 - DNA, 33 bp, Homo sapien
atttaaatctttaatatcttgagctagtttgtt

SEQ ID NO: 729649 - DNA, 33 bp, Homo sapien
atatggaaacaaaaaacaacatgaacagccaaa

SEQ ID NO: 729650 - DNA, 33 bp, Homo sapien
atatggaaacaaaaaagaacatgaacagccaaa

SEQ ID NO: 729651 - DNA, 33 bp, Homo sapien
tttccatttgtatcacacatgttttcttttagc

SEQ ID NO: 729652 - DNA, 33 bp, Homo sapien
tttccatttgtatcacgcatgttttcttttagc

SEQ ID NO: 729653 - DNA, 33 bp, Homo sapien
tttggagactggttcactcactacctgacaggc

SEQ ID NO: 729654 - DNA, 33 bp, Homo sapien
tttggagactggttcattcactacctgacaggc

SEQ ID NO: 729655 - DNA, 33 bp, Homo sapien
gcatattgaaacaaaaggatgcatgcgaatagg

SEQ ID NO: 729656 - DNA, 33 bp, Homo sapien
gcatattgaaacaaaatgatgcatgcgaatagg

SEQ ID NO: 729657 - DNA, 33 bp, Homo sapien
tgtataatgcactacccaagtgagagaatttcc

SEQ ID NO: 729658 - DNA, 33 bp, Homo sapien
tgtataatgcactacctaagtgagagaatttcc

SEQ ID NO: 729659 - DNA, 33 bp, Homo sapien
ccacatctatatttgactatctcatacttgcat

SEQ ID NO: 729660 - DNA, 33 bp, Homo sapien
ccacatctatatttgattatctcatacttgcat

SEQ ID NO: 729661 - DNA, 33 bp, Homo sapien
gctgccttatagtagcagagactaaagtttttc

SEQ ID NO: 729662 - DNA, 33 bp, Homo sapien
gctgccttatagtagcggagactaaagtttttc

SEQ ID NO: 729663 - DNA, 33 bp, Homo sapien
ttagcaactgatgaggaacaaacacagtgatgg

SEQ ID NO: 729664 - DNA, 33 bp, Homo sapien
ttagcaactgatgaggtacaaacacagtgatgg

SEQ ID NO: 729665 - DNA, 33 bp, Homo sapien
tctaaagttcctaacaaagaaaaatcagataga

SEQ ID NO: 729666 - DNA, 33 bp, Homo sapien
tctaaagttcctaacagagaaaaatcagataga

SEQ ID NO: 729667 - DNA, 33 bp, Homo sapien
gctacctgggatgtccaactaaaaaaactcctc

SEQ ID NO: 729668 - DNA, 33 bp, Homo sapien
gctacctgggatgtcctactaaaaaaactcctc

SEQ ID NO: 729669 - DNA, 33 bp, Homo sapien
aagttcttagcatttgccaaaccagctgacctg

SEQ ID NO: 729670 - DNA, 33 bp, Homo sapien
aagttcttagcatttgtcaaaccagctgacctg

SEQ ID NO: 729671 - DNA, 33 bp, Homo sapien
aattcttatatcaagaaacacaaagcgtacaga

SEQ ID NO: 729672 - DNA, 33 bp, Homo sapien
aattcttatatcaagatacacaaagcgtacaga

SEQ ID NO: 729673 - DNA, 33 bp, Homo sapien
tcaaattgtttcaaaactctttagatggaatcc

SEQ ID NO: 729674 - DNA, 33 bp, Homo sapien
tcaaattgtttcaaaagtctttagatggaatcc

SEQ ID NO: 729675 - DNA, 33 bp, Homo sapien
aatacaatctttgaaaataaaacctgcaaaaaa

SEQ ID NO: 729676 - DNA, 33 bp, Homo sapien
aatacaatctttgaaagtaaaacctgcaaaaaa

SEQ ID NO: 729677 - DNA, 33 bp, Homo sapien
ttaaagaagaaactgacgaagatggcaacagat

SEQ ID NO: 729678 - DNA, 33 bp, Homo sapien
ttaaagaagaaactgatgaagatggcaacagat

SEQ ID NO: 729679 - DNA, 33 bp, Homo sapien
ttaatagaaatcaaacagacttctattgctaca

SEQ ID NO: 729680 - DNA, 33 bp, Homo sapien
ttaatagaaatcaaacggacttctattgctaca

SEQ ID NO: 729681 - DNA, 33 bp, Homo sapien
agctgatttatcaagactcccttaagttacatg

SEQ ID NO: 729682 - DNA, 33 bp, Homo sapien
agctgatttatcaagagtcccttaagttacatg

SEQ ID NO: 729683 - DNA, 33 bp, Homo sapien
gtcaaagaagacagtcaaatatattagtactaa

SEQ ID NO: 729684 - DNA, 33 bp, Homo sapien
gtcaaagaagacagtcgaatatattagtactaa

SEQ ID NO: 729685 - DNA, 33 bp, Homo sapien
tcttcagatttcaggagaaaatagttgtgaagt

SEQ ID NO: 729686 - DNA, 33 bp, Homo sapien
tcttcagatttcaggataaaatagttgtgaagt

SEQ ID NO: 729687 - DNA, 33 bp, Homo sapien
gttagataagttgatcagaagggtatacaaggt

SEQ ID NO: 729688 - DNA, 33 bp, Homo sapien
gttagataagttgatcggaagggtatacaaggt

SEQ ID NO: 729689 - DNA, 33 bp, Homo sapien
gtgatcaactctattacagctaccattagacca

SEQ ID NO: 729690 - DNA, 33 bp, Homo sapien
gtgatcaactctattatagctaccattagacca

SEQ ID NO: 729691 - DNA, 33 bp, Homo sapien
ttttctgtagcaagcaactgatcgttcagtaaa

SEQ ID NO: 729692 - DNA, 33 bp, Homo sapien
ttttctgtagcaagcacctgatcgttcagtaaa

SEQ ID NO: 729693 - DNA, 33 bp, Homo sapien
aaattaagttgtgagacgcaattgaacatttgt

SEQ ID NO: 729694 - DNA, 33 bp, Homo sapien
aaattaagttgtgagatgcaattgaacatttgt

SEQ ID NO: 729695 - DNA, 33 bp, Homo sapien
tttgcttttcttataacgatgggctattataat

SEQ ID NO: 729696 - DNA, 33 bp, Homo sapien
tttgcttttcttataaggatgggctattataat

SEQ ID NO: 729697 - DNA, 33 bp, Homo sapien
aaaatccataataaaaaggtaaaggtgtgcagt

SEQ ID NO: 729698 - DNA, 33 bp, Homo sapien
aaaatccataataaaacggtaaaggtgtgcagt

SEQ ID NO: 729699 - DNA, 33 bp, Homo sapien
tggaaacgatctgtgagtaagtgttcttacggc

SEQ ID NO: 729700 - DNA, 33 bp, Homo sapien
tggaaacgatctgtgattaagtgttcttacggc

SEQ ID NO: 729701 - DNA, 33 bp, Homo sapien
atttgaatgaaatgtcactacaaaatatataga

SEQ ID NO: 729702 - DNA, 33 bp, Homo sapien
atttgaatgaaatgtcgctacaaaatatataga

SEQ ID NO: 729703 - DNA, 33 bp, Homo sapien
tttttaaacacagtaaacatcaaacaaattaac

SEQ ID NO: 729704 - DNA, 33 bp, Homo sapien
tttttaaacacagtaatcatcaaacaaattaac

SEQ ID NO: 729705 - DNA, 33 bp, Homo sapien
tgtctgggtgtacaggaaggaaaggcctcaaaa

SEQ ID NO: 729706 - DNA, 33 bp, Homo sapien
tgtctgggtgtacaggcaggaaaggcctcaaaa

SEQ ID NO: 729707 - DNA, 33 bp, Homo sapien
acataaaactcaccagactatgatgctttttga

SEQ ID NO: 729708 - DNA, 33 bp, Homo sapien
acataaaactcaccaggctatgatgctttttga

SEQ ID NO: 729709 - DNA, 33 bp, Homo sapien
tgccagtaatttttggaaaacctgtggcaggtc

SEQ ID NO: 729710 - DNA, 33 bp, Homo sapien
tgccagtaatttttggcaaacctgtggcaggtc

SEQ ID NO: 729711 - DNA, 33 bp, Homo sapien
aaatcaaaactacaacaggataccacttcgtac

SEQ ID NO: 729712 - DNA, 33 bp, Homo sapien
aaatcaaaactacaacgggataccacttcgtac

SEQ ID NO: 729713 - DNA, 33 bp, Homo sapien
tacaagtaagaaactaaagctgaaaaggtgaag

SEQ ID NO: 729714 - DNA, 33 bp, Homo sapien
tacaagtaagaaactacagctgaaaaggtgaag

SEQ ID NO: 729715 - DNA, 33 bp, Homo sapien
taagtctaacagtcaaacaatattttgtatcag

SEQ ID NO: 729716 - DNA, 33 bp, Homo sapien
taagtctaacagtcaagcaatattttgtatcag

SEQ ID NO: 729717 - DNA, 33 bp, Homo sapien
tcttgaatccagtaaaggtttttagacaagaga

SEQ ID NO: 729718 - DNA, 33 bp, Homo sapien
tcttgaatccagtaaatgtttttagacaagaga

SEQ ID NO: 729719 - DNA, 33 bp, Homo sapien
aaatgattttgatctacgtgttacaggagcagt

SEQ ID NO: 729720 - DNA, 33 bp, Homo sapien
aaatgattttgatctatgtgttacaggagcagt

SEQ ID NO: 729721 - DNA, 33 bp, Homo sapien
ctccaaattttggccgaaatggaacaaaagagg

SEQ ID NO: 729722 - DNA, 33 bp, Homo sapien
ctccaaattttggccgcaatggaacaaaagagg

SEQ ID NO: 729723 - DNA, 33 bp, Homo sapien
gcatatgtttctgccacgttttagtccaatttg

SEQ ID NO: 729724 - DNA, 33 bp, Homo sapien
gcatatgtttctgccatgttttagtccaatttg

SEQ ID NO: 729725 - DNA, 33 bp, Homo sapien
cagactatcagctctgaaaaaagagaagcaaat

SEQ ID NO: 729726 - DNA, 33 bp, Homo sapien
cagactatcagctctgtaaaaagagaagcaaat

SEQ ID NO: 729727 - DNA, 33 bp, Homo sapien
agtctatatttggacaccttttttgtgtgtgtg

SEQ ID NO: 729728 - DNA, 33 bp, Homo sapien
agtctatatttggacatcttttttgtgtgtgtg

SEQ ID NO: 729729 - DNA, 33 bp, Homo sapien
acatagcagatgattacactaaggcaccaaagt

SEQ ID NO: 729730 - DNA, 33 bp, Homo sapien
acatagcagatgattatactaaggcaccaaagt

SEQ ID NO: 729731 - DNA, 33 bp, Homo sapien
taaattatcctattcaacataaccttcaaatga

SEQ ID NO: 729732 - DNA, 33 bp, Homo sapien
taaattatcctattcagcataaccttcaaatga

SEQ ID NO: 729733 - DNA, 33 bp, Homo sapien
aatgtgaatgagcctacaggaagaaggattgtg

SEQ ID NO: 729734 - DNA, 33 bp, Homo sapien
aatgtgaatgagcctagaggaagaaggattgtg

SEQ ID NO: 729735 - DNA, 33 bp, Homo sapien
gtgatgtgcctggtaggacaactgtgatcatgg

SEQ ID NO: 729736 - DNA, 33 bp, Homo sapien
gtgatgtgcctggtagtacaactgtgatcatgg

SEQ ID NO: 729737 - DNA, 33 bp, Homo sapien
tagtgaggaaagatacaaggaagtgaaatttca

SEQ ID NO: 729738 - DNA, 33 bp, Homo sapien
tagtgaggaaagatacgaggaagtgaaatttca

SEQ ID NO: 729739 - DNA, 33 bp, Homo sapien
aataataacttttgtgaaactgtttatcttata

SEQ ID NO: 729740 - DNA, 33 bp, Homo sapien
aataataacttttgtggaactgtttatcttata

SEQ ID NO: 729741 - DNA, 33 bp, Homo sapien
gatgagaagcatttccaaaaaagatttttctta

SEQ ID NO: 729742 - DNA, 33 bp, Homo sapien
gatgagaagcatttcccaaaaagatttttctta

SEQ ID NO: 729743 - DNA, 33 bp, Homo sapien
tagtgaatttgaagacaaaatacatgtaacaaa

SEQ ID NO: 729744 - DNA, 33 bp, Homo sapien
tagtgaatttgaagacgaaatacatgtaacaaa

SEQ ID NO: 729745 - DNA, 33 bp, Homo sapien
atcttaaaatgctgaacggttttgtttctgctg

SEQ ID NO: 729746 - DNA, 33 bp, Homo sapien
atcttaaaatgctgaatggttttgtttctgctg

SEQ ID NO: 729747 - DNA, 33 bp, Homo sapien
catatcaggctgtccaatccagtgcacacatta

SEQ ID NO: 729748 - DNA, 33 bp, Homo sapien
catatcaggctgtccactccagtgcacacatta

SEQ ID NO: 729749 - DNA, 33 bp, Homo sapien
tgccatattcaaatacacaagcaaattatttaa

SEQ ID NO: 729750 - DNA, 33 bp, Homo sapien
tgccatattcaaatacgcaagcaaattatttaa

SEQ ID NO: 729751 - DNA, 33 bp, Homo sapien
taggttcagcaaacaccgccatttttccactcc

SEQ ID NO: 729752 - DNA, 33 bp, Homo sapien
taggttcagcaaacactgccatttttccactcc

SEQ ID NO: 729753 - DNA, 33 bp, Homo sapien
attccatatttttacaccaatagagaagcagag

SEQ ID NO: 729754 - DNA, 33 bp, Homo sapien
attccatatttttacatcaatagagaagcagag

SEQ ID NO: 729755 - DNA, 33 bp, Homo sapien
tagactaaaaggcttgaagaatcagttggtact

SEQ ID NO: 729756 - DNA, 33 bp, Homo sapien
tagactaaaaggcttgcagaatcagttggtact

SEQ ID NO: 729757 - DNA, 33 bp, Homo sapien
tgttactagagctcaaaacatattataaattat

SEQ ID NO: 729758 - DNA, 33 bp, Homo sapien
tgttactagagctcaagacatattataaattat

SEQ ID NO: 729759 - DNA, 33 bp, Homo sapien
atgtattgcttctgtaccattataaagttgaaa

SEQ ID NO: 729760 - DNA, 33 bp, Homo sapien
atgtattgcttctgtagcattataaagttgaaa

SEQ ID NO: 729761 - DNA, 33 bp, Homo sapien
tagttagttattacacagcaagtttctctcata

SEQ ID NO: 729762 - DNA, 33 bp, Homo sapien
tagttagttattacacggcaagtttctctcata

SEQ ID NO: 729763 - DNA, 33 bp, Homo sapien
aaagtagtcactttcacctatggacatttgtag

SEQ ID NO: 729764 - DNA, 33 bp, Homo sapien
aaagtagtcactttcatctatggacatttgtag

SEQ ID NO: 729765 - DNA, 33 bp, Homo sapien
tcagttaatctttgcacatggtgataagtagga

SEQ ID NO: 729766 - DNA, 33 bp, Homo sapien
tcagttaatctttgcatatggtgataagtagga

SEQ ID NO: 729767 - DNA, 33 bp, Homo sapien
ttatttccaaatgtacagagaaaaatacaggga

SEQ ID NO: 729768 - DNA, 33 bp, Homo sapien
ttatttccaaatgtacggagaaaaatacaggga

SEQ ID NO: 729769 - DNA, 33 bp, Homo sapien
ttctcttctgccaaataataaatataatcatag

SEQ ID NO: 729770 - DNA, 33 bp, Homo sapien
ttctcttctgccaaatgataaatataatcatag

SEQ ID NO: 729771 - DNA, 33 bp, Homo sapien
cgtaagctcctttccactgcacgtagaataaaa

SEQ ID NO: 729772 - DNA, 33 bp, Homo sapien
cgtaagctcctttccattgcacgtagaataaaa

SEQ ID NO: 729773 - DNA, 33 bp, Homo sapien
cctacagagattctaacagagtgaaggatgaag

SEQ ID NO: 729774 - DNA, 33 bp, Homo sapien
cctacagagattctaagagagtgaaggatgaag

SEQ ID NO: 729775 - DNA, 33 bp, Homo sapien
aaaacaaaggatcccacgtaaataggtcctcat

SEQ ID NO: 729776 - DNA, 33 bp, Homo sapien
aaaacaaaggatcccaggtaaataggtcctcat

SEQ ID NO: 729777 - DNA, 33 bp, Homo sapien
caaatgtggacttgccaggactggatagtgtgg

SEQ ID NO: 729778 - DNA, 33 bp, Homo sapien
caaatgtggacttgccgggactggatagtgtgg

SEQ ID NO: 729779 - DNA, 33 bp, Homo sapien
aggcgtcaaggactcaatcatacccactaatca

SEQ ID NO: 729780 - DNA, 33 bp, Homo sapien
aggcgtcaaggactcactcatacccactaatca

SEQ ID NO: 729781 - DNA, 33 bp, Homo sapien
taaaactgcatttacacagaaattcatcagttg

SEQ ID NO: 729782 - DNA, 33 bp, Homo sapien
taaaactgcatttacatagaaattcatcagttg

SEQ ID NO: 729783 - DNA, 33 bp, Homo sapien
ctgtctttatgtgttacgaaagggctataaaat

SEQ ID NO: 729784 - DNA, 33 bp, Homo sapien
ctgtctttatgtgttaggaaagggctataaaat

SEQ ID NO: 729785 - DNA, 33 bp, Homo sapien
gaagaagcaaaataacagtatgtgaacaagagt

SEQ ID NO: 729786 - DNA, 33 bp, Homo sapien
gaagaagcaaaataacggtatgtgaacaagagt

SEQ ID NO: 729787 - DNA, 33 bp, Homo sapien
gtaaattgacacattggatccattgagtttact

SEQ ID NO: 729788 - DNA, 33 bp, Homo sapien
gtaaattgacacattgtatccattgagtttact

SEQ ID NO: 729789 - DNA, 33 bp, Homo sapien
tgctaaatttgatgcccggaaaattagactctt

SEQ ID NO: 729790 - DNA, 33 bp, Homo sapien
tgctaaatttgatgcctggaaaattagactctt

SEQ ID NO: 729791 - DNA, 33 bp, Homo sapien
gcttttatgttggtcaaaaggtggagctggtga

SEQ ID NO: 729792 - DNA, 33 bp, Homo sapien
gcttttatgttggtcagaaggtggagctggtga

SEQ ID NO: 729793 - DNA, 33 bp, Homo sapien
atcatctgagaaaaaaatatagacccagaacaa

SEQ ID NO: 729794 - DNA, 33 bp, Homo sapien
atcatctgagaaaaaagtatagacccagaacaa

SEQ ID NO: 729795 - DNA, 33 bp, Homo sapien
tctataaagacaatacgagagctaaacaatgac

SEQ ID NO: 729796 - DNA, 33 bp, Homo sapien
tctataaagacaatactagagctaaacaatgac

SEQ ID NO: 729797 - DNA, 33 bp, Homo sapien
ttttgtctatcctaggcaacttatgtcacaaga

SEQ ID NO: 729798 - DNA, 33 bp, Homo sapien
ttttgtctatcctaggtaacttatgtcacaaga

SEQ ID NO: 729799 - DNA, 33 bp, Homo sapien
tttaagacaagggttacagattatgcattaaat

SEQ ID NO: 729800 - DNA, 33 bp, Homo sapien
tttaagacaagggttagagattatgcattaaat

SEQ ID NO: 729801 - DNA, 33 bp, Homo sapien
actacacctcgcagaaatctatttaacaccagt

SEQ ID NO: 729802 - DNA, 33 bp, Homo sapien
actacacctcgcagaagtctatttaacaccagt

SEQ ID NO: 729803 - DNA, 33 bp, Homo sapien
tgcaagtgaaaccttacgctatgtgctgatcca

SEQ ID NO: 729804 - DNA, 33 bp, Homo sapien
tgcaagtgaaaccttatgctatgtgctgatcca

SEQ ID NO: 729805 - DNA, 33 bp, Homo sapien
ggcctactgactaacacccttaaataagtgtaa

SEQ ID NO: 729806 - DNA, 33 bp, Homo sapien
ggcctactgactaacatccttaaataagtgtaa

SEQ ID NO: 729807 - DNA, 33 bp, Homo sapien
tgtgaaaagtgaagagaagaatttaccacgttc

SEQ ID NO: 729808 - DNA, 33 bp, Homo sapien
tgtgaaaagtgaagagcagaatttaccacgttc

SEQ ID NO: 729809 - DNA, 33 bp, Homo sapien
gttagccaatttagaccactcaccatttaaaat

SEQ ID NO: 729810 - DNA, 33 bp, Homo sapien
gttagccaatttagacgactcaccatttaaaat

SEQ ID NO: 729811 - DNA, 33 bp, Homo sapien
atttgactaccatttacggatcgagtcttaaat

SEQ ID NO: 729812 - DNA, 33 bp, Homo sapien
atttgactaccatttatggatcgagtcttaaat

SEQ ID NO: 729813 - DNA, 33 bp, Homo sapien
taaacattacaaaacagtctcacattggacagg

SEQ ID NO: 729814 - DNA, 33 bp, Homo sapien
taaacattacaaaacattctcacattggacagg

SEQ ID NO: 729815 - DNA, 33 bp, Homo sapien
acagaatgtgggttagaaaacacgttattggag

SEQ ID NO: 729816 - DNA, 33 bp, Homo sapien
acagaatgtgggttagcaaacacgttattggag

SEQ ID NO: 729817 - DNA, 33 bp, Homo sapien
acataagaatgttcaccaacaagcctaaaaaat

SEQ ID NO: 729818 - DNA, 33 bp, Homo sapien
acataagaatgttcactaacaagcctaaaaaat

SEQ ID NO: 729819 - DNA, 33 bp, Homo sapien
atgcaataagccgccaatgaacatcgctgagtt

SEQ ID NO: 729820 - DNA, 33 bp, Homo sapien
atgcaataagccgccagtgaacatcgctgagtt

SEQ ID NO: 729821 - DNA, 33 bp, Homo sapien
taaagtcactttaatcgcaatactgtatttctc

SEQ ID NO: 729822 - DNA, 33 bp, Homo sapien
taaagtcactttaatctcaatactgtatttctc

SEQ ID NO: 729823 - DNA, 33 bp, Homo sapien
tatctgttataaaatacgacactcctaaaatta

SEQ ID NO: 729824 - DNA, 33 bp, Homo sapien
tatctgttataaaatatgacactcctaaaatta

SEQ ID NO: 729825 - DNA, 33 bp, Homo sapien
gcaccaaatctgcataaaactgccatttactca

SEQ ID NO: 729826 - DNA, 33 bp, Homo sapien
gcaccaaatctgcatagaactgccatttactca

SEQ ID NO: 729827 - DNA, 33 bp, Homo sapien
tccgagtgacggaaacagcctgtatcttcatgc

SEQ ID NO: 729828 - DNA, 33 bp, Homo sapien
tccgagtgacggaaacggcctgtatcttcatgc

SEQ ID NO: 729829 - DNA, 33 bp, Homo sapien
gtcatcatcatgtgtacagagagcaatattgta

SEQ ID NO: 729830 - DNA, 33 bp, Homo sapien
gtcatcatcatgtgtagagagagcaatattgta

SEQ ID NO: 729831 - DNA, 33 bp, Homo sapien
tggattacaatggaaactattgcctaaagctca

SEQ ID NO: 729832 - DNA, 33 bp, Homo sapien
tggattacaatggaaattattgcctaaagctca

SEQ ID NO: 729833 - DNA, 33 bp, Homo sapien
tcacattaatcacataagtagaatggtcatttc

SEQ ID NO: 729834 - DNA, 33 bp, Homo sapien
tcacattaatcacatatgtagaatggtcatttc

SEQ ID NO: 729835 - DNA, 33 bp, Homo sapien
gcagatggtttctaaagccatgagagtggtgga

SEQ ID NO: 729836 - DNA, 33 bp, Homo sapien
gcagatggtttctaaatccatgagagtggtgga

SEQ ID NO: 729837 - DNA, 33 bp, Homo sapien
aatagatttgcaatcacgaacatttttgagtgg

SEQ ID NO: 729838 - DNA, 33 bp, Homo sapien
aatagatttgcaatcatgaacatttttgagtgg

SEQ ID NO: 729839 - DNA, 33 bp, Homo sapien
tttgtagtaaggaattaaaaatgtgcctttgta

SEQ ID NO: 729840 - DNA, 33 bp, Homo sapien
tttgtagtaaggaatttaaaatgtgcctttgta

SEQ ID NO: 729841 - DNA, 33 bp, Homo sapien
cattgtcacaaaaatccatgtacagatagcacc

SEQ ID NO: 729842 - DNA, 33 bp, Homo sapien
cattgtcacaaaaatctatgtacagatagcacc

SEQ ID NO: 729843 - DNA, 33 bp, Homo sapien
aagtgctttatggctcacctaatttttggttcc

SEQ ID NO: 729844 - DNA, 33 bp, Homo sapien
aagtgctttatggctcgcctaatttttggttcc

SEQ ID NO: 729845 - DNA, 33 bp, Homo sapien
actttgacaggaaaacaaaatttaactagcaaa

SEQ ID NO: 729846 - DNA, 33 bp, Homo sapien
actttgacaggaaaaccaaatttaactagcaaa

SEQ ID NO: 729847 - DNA, 33 bp, Homo sapien
gcacagctttgctctcaattataacaggccagc

SEQ ID NO: 729848 - DNA, 33 bp, Homo sapien
gcacagctttgctctccattataacaggccagc

SEQ ID NO: 729849 - DNA, 33 bp, Homo sapien
ccagatacctttttcaaaactgcctcctcatgg

SEQ ID NO: 729850 - DNA, 33 bp, Homo sapien
ccagatacctttttcacaactgcctcctcatgg

SEQ ID NO: 729851 - DNA, 33 bp, Homo sapien
agcaaaaacttgacaccaaaagaacactaaaca

SEQ ID NO: 729852 - DNA, 33 bp, Homo sapien
agcaaaaacttgacactaaaagaacactaaaca

SEQ ID NO: 729853 - DNA, 33 bp, Homo sapien
cattcttcctgatgtaactaaaatgtcttcaaa

SEQ ID NO: 729854 - DNA, 33 bp, Homo sapien
cattcttcctgatgtatctaaaatgtcttcaaa

SEQ ID NO: 729855 - DNA, 33 bp, Homo sapien
gttatttcccaagccaatatgaaccaaacagac

SEQ ID NO: 729856 - DNA, 33 bp, Homo sapien
gttatttcccaagccagtatgaaccaaacagac

SEQ ID NO: 729857 - DNA, 33 bp, Homo sapien
taaatgttgtgtcctcaaatttcaaaaccaatc

SEQ ID NO: 729858 - DNA, 33 bp, Homo sapien
taaatgttgtgtcctcgaatttcaaaaccaatc

SEQ ID NO: 729859 - DNA, 33 bp, Homo sapien
aattaagtaattcccgaaagacagaaaacaaag

SEQ ID NO: 729860 - DNA, 33 bp, Homo sapien
aattaagtaattcccggaagacagaaaacaaag

SEQ ID NO: 729861 - DNA, 33 bp, Homo sapien; identical to SEQ ID NO: 729859

SEQ ID NO: 729862 - DNA, 33 bp, Homo sapien; identical to SEQ ID NO: 729860

SEQ ID NO: 729863 - DNA, 33 bp, Homo sapien
aggaattacttgatcaaaaatcactttgggagg

SEQ ID NO: 729864 - DNA, 33 bp, Homo sapien
aggaattacttgatcagaaatcactttgggagg

SEQ ID NO: 729865 - DNA, 33 bp, Homo sapien
tttttaatcaatttaaagctgactagatcctat

SEQ ID NO: 729866 - DNA, 33 bp, Homo sapien
tttttaatcaatttaatgctgactagatcctat

SEQ ID NO: 729867 - DNA, 33 bp, Homo sapien; identical to SEQ ID NO: 729865

SEQ ID NO: 729868 - DNA, 33 bp, Homo sapien; identical to SEQ ID NO: 729866

SEQ ID NO: 729869 - DNA, 33 bp, Homo sapien
atcatgcacagttttacgcacacagcagaaaat

SEQ ID NO: 729870 - DNA, 33 bp, Homo sapien
atcatgcacagttttaggcacacagcagaaaat

SEQ ID NO: 729871 - DNA, 33 bp, Homo sapien
cacatctggacatttacctaagccaaaacttta

SEQ ID NO: 729872 - DNA, 33 bp, Homo sapien
cacatctggacatttatctaagccaaaacttta

SEQ ID NO: 729873 - DNA, 33 bp, Homo sapien
tatacattacccaagacgtgatattcttgtcat

SEQ ID NO: 729874 - DNA, 33 bp, Homo sapien
tatacattacccaagatgtgatattcttgtcat

SEQ ID NO: 729875 - DNA, 33 bp, Homo sapien
agggagtgaaggggaacgcaataatatataact

SEQ ID NO: 729876 - DNA, 33 bp, Homo sapien
agggagtgaaggggaatgcaataatatataact

SEQ ID NO: 729877 - DNA, 33 bp, Homo sapien
gagactactatgagaaataaatcacaaaatcca

SEQ ID NO: 729878 - DNA, 33 bp, Homo sapien
gagactactatgagaagtaaatcacaaaatcca

SEQ ID NO: 729879 - DNA, 33 bp, Homo sapien
ctgggaagaacacatcaattaatcattttgtat

SEQ ID NO: 729880 - DNA, 33 bp, Homo sapien
ctgggaagaacacatcgattaatcattttgtat

SEQ ID NO: 729881 - DNA, 33 bp, Homo sapien
accaaaaactccagaaacactgctagaccctcc

SEQ ID NO: 729882 - DNA, 33 bp, Homo sapien
accaaaaactccagaagcactgctagaccctcc

SEQ ID NO: 729883 - DNA, 33 bp, Homo sapien
taagtgaagcaggggtcacatattaacatgttg

SEQ ID NO: 729884 - DNA, 33 bp, Homo sapien
taagtgaagcaggggttacatattaacatgttg

SEQ ID NO: 729885 - DNA, 33 bp, Homo sapien
aatatggtactgatacgatttcctatttctaga

SEQ ID NO: 729886 - DNA, 33 bp, Homo sapien
aatatggtactgatactatttcctatttctaga

SEQ ID NO: 729887 - DNA, 33 bp, Homo sapien; identical to SEQ ID NO: 729885

SEQ ID NO: 729888 - DNA, 33 bp, Homo sapien; identical to SEQ ID NO: 729886

SEQ ID NO: 729889 - DNA, 33 bp, Homo sapien
ccacctataagtttcagggacagggtggcaaca

SEQ ID NO: 729890 - DNA, 33 bp, Homo sapien
ccacctataagtttcatggacagggtggcaaca

SEQ ID NO: 729891 - DNA, 33 bp, Homo sapien
tttaattcatagaaaagaaggcaaacaagaggg

SEQ ID NO: 729892 - DNA, 33 bp, Homo sapien
tttaattcatagaaaataaggcaaacaagaggg

SEQ ID NO: 729893 - DNA, 33 bp, Homo sapien
atacatcttgtgtgaagaattttttttgttgtt

SEQ ID NO: 729894 - DNA, 33 bp, Homo sapien
atacatcttgtgtgaataattttttttgttgtt

SEQ ID NO: 729895 - DNA, 33 bp, Homo sapien
taatgaaaggacttgacctcacaagcatcacct

SEQ ID NO: 729896 - DNA, 33 bp, Homo sapien
taatgaaaggacttgatctcacaagcatcacct

SEQ ID NO: 729897 - DNA, 33 bp, Homo sapien
cagtggtgtgctctcagcttacttgtagcctct

SEQ ID NO: 729898 - DNA, 33 bp, Homo sapien
cagtggtgtgctctcatcttacttgtagcctct

SEQ ID NO: 729899 - DNA, 33 bp, Homo sapien
tgattgaccaaagttaactgacaatatatattc

SEQ ID NO: 729900 - DNA, 33 bp, Homo sapien
tgattgaccaaagttatctgacaatatatattc

SEQ ID NO: 729901 - DNA, 33 bp, Homo sapien
ttttctcagtgtttacccaattccgctatgaga

SEQ ID NO: 729902 - DNA, 33 bp, Homo sapien
ttttctcagtgtttactcaattccgctatgaga

SEQ ID NO: 729903 - DNA, 33 bp, Homo sapien
ttatcaggtcagccatcacctgtgcttctactg

SEQ ID NO: 729904 - DNA, 33 bp, Homo sapien
ttatcaggtcagccattacctgtgcttctactg

SEQ ID NO: 729905 - DNA, 33 bp, Homo sapien
acagtagccatgaaaaactgctaatgtttaatg

SEQ ID NO: 729906 - DNA, 33 bp, Homo sapien
acagtagccatgaaaagctgctaatgtttaatg

SEQ ID NO: 729907 - DNA, 33 bp, Homo sapien
aaatctctcctaaagcgctatatactgacaaat

SEQ ID NO: 729908 - DNA, 33 bp, Homo sapien
aaatctctcctaaagctctatatactgacaaat

SEQ ID NO: 729909 - DNA, 33 bp, Homo sapien
ttttagaagaaacaaaaatagtcacatttcaaa

SEQ ID NO: 729910 - DNA, 33 bp, Homo sapien
ttttagaagaaacaaagatagtcacatttcaaa

SEQ ID NO: 729911 - DNA, 33 bp, Homo sapien
tgaagaataaacccacgcttattatttatgcac

SEQ ID NO: 729912 - DNA, 33 bp, Homo sapien
tgaagaataaacccactcttattatttatgcac

SEQ ID NO: 729913 - DNA, 33 bp, Homo sapien
tctgaagtaacctgacaacttagtgaataacaa

SEQ ID NO: 729914 - DNA, 33 bp, Homo sapien
tctgaagtaacctgacgacttagtgaataacaa

SEQ ID NO: 729915 - DNA, 33 bp, Homo sapien
ctctcattgtgttctcaccacattttacatcct

SEQ ID NO: 729916 - DNA, 33 bp, Homo sapien
ctctcattgtgttctcgccacattttacatcct

SEQ ID NO: 729917 - DNA, 33 bp, Homo sapien
tatatcttcaattgcacatttagtcttggatta

SEQ ID NO: 729918 - DNA, 33 bp, Homo sapien
tatatcttcaattgcatatttagtcttggatta

SEQ ID NO: 729919 - DNA, 33 bp, Homo sapien
tgggcaagaaatctgccaatcatgatagctatt

SEQ ID NO: 729920 - DNA, 33 bp, Homo sapien
tgggcaagaaatctgcgaatcatgatagctatt

SEQ ID NO: 729921 - DNA, 33 bp, Homo sapien
aagacagaggaaaaccagataaccaggagaatt

SEQ ID NO: 729922 - DNA, 33 bp, Homo sapien
aagacagaggaaaaccggataaccaggagaatt

SEQ ID NO: 729923 - DNA, 33 bp, Homo sapien
ggtatcatgggagtcaactcacttacctgaatc

SEQ ID NO: 729924 - DNA, 33 bp, Homo sapien
ggtatcatgggagtcagctcacttacctgaatc

SEQ ID NO: 729925 - DNA, 33 bp, Homo sapien
agaatcagaaactccaatatccaagggtagggg

SEQ ID NO: 729926 - DNA, 33 bp, Homo sapien
agaatcagaaactccagtatccaagggtagggg

SEQ ID NO: 729927 - DNA, 33 bp, Homo sapien
taccaaaaaggaagagccaatcatttacataac

SEQ ID NO: 729928 - DNA, 33 bp, Homo sapien
taccaaaaaggaagagtcaatcatttacataac

SEQ ID NO: 729929 - DNA, 33 bp, Homo sapien
cacacacaaaaataaaaagtttatcacatattt

SEQ ID NO: 729930 - DNA, 33 bp, Homo sapien
cacacacaaaaataaagagtttatcacatattt

SEQ ID NO: 729931 - DNA, 33 bp, Homo sapien
gatgagaaattagctcgagaaattttaaagaaa

SEQ ID NO: 729932 - DNA, 33 bp, Homo sapien
gatgagaaattagctctagaaattttaaagaaa

SEQ ID NO: 729933 - DNA, 33 bp, Homo sapien
gtttttactactgtacagcattgcttttttgcc

SEQ ID NO: 729934 - DNA, 33 bp, Homo sapien
gtttttactactgtacggcattgcttttttgcc

SEQ ID NO: 729935 - DNA, 33 bp, Homo sapien
cttacaatgtaatatgacagactttgctatgtg

SEQ ID NO: 729936 - DNA, 33 bp, Homo sapien
cttacaatgtaatatggcagactttgctatgtg

SEQ ID NO: 729937 - DNA, 33 bp, Homo sapien
tgaagagtgaaaaggacaaagtggttgagggac

SEQ ID NO: 729938 - DNA, 33 bp, Homo sapien
tgaagagtgaaaaggagaaagtggttgagggac

SEQ ID NO: 729939 - DNA, 33 bp, Homo sapien
taagttcctgaacttacagggaaccaaactgtt

SEQ ID NO: 729940 - DNA, 33 bp, Homo sapien
taagttcctgaacttatagggaaccaaactgtt

SEQ ID NO: 729941 - DNA, 33 bp, Homo sapien
acttgaaaatgatgccacttacacagggaagca

SEQ ID NO: 729942 - DNA, 33 bp, Homo sapien
acttgaaaatgatgccgcttacacagggaagca

SEQ ID NO: 729943 - DNA, 33 bp, Homo sapien; identical to SEQ ID NO: 729941

SEQ ID NO: 729944 - DNA, 33 bp, Homo sapien; identical to SEQ ID NO: 729942

SEQ ID NO: 729945 - DNA, 33 bp, Homo sapien
ccagaaatctcattaagggacatatattcaaaa

SEQ ID NO: 729946 - DNA, 33 bp, Homo sapien
ccagaaatctcattaatggacatatattcaaaa

SEQ ID NO: 729947 - DNA, 33 bp, Homo sapien
aatttaaaattctaaaatgtcagaacaaacaat

SEQ ID NO: 729948 - DNA, 33 bp, Homo sapien
aatttaaaattctaaagtgtcagaacaaacaat

SEQ ID NO: 729949 - DNA, 33 bp, Homo sapien
tctagtcatccaagtacaagaagcccaaaaatc

SEQ ID NO: 729950 - DNA, 33 bp, Homo sapien
tctagtcatccaagtataagaagcccaaaaatc

SEQ ID NO: 729951 - DNA, 33 bp, Homo sapien
tcttgcagaagaagagaaatctaagttaggaaa

SEQ ID NO: 729952 - DNA, 33 bp, Homo sapien
tcttgcagaagaagaggaatctaagttaggaaa

SEQ ID NO: 729953 - DNA, 33 bp, Homo sapien
ttaccagagcgagcaaaaaaggcaattaactat

SEQ ID NO: 729954 - DNA, 33 bp, Homo sapien
ttaccagagcgagcaacaaaggcaattaactat

SEQ ID NO: 729955 - DNA, 33 bp, Homo sapien
tgaatactggtgttacaaaataatgttctatat

SEQ ID NO: 729956 - DNA, 33 bp, Homo sapien
tgaatactggtgttaccaaataatgttctatat

SEQ ID NO: 729957 - DNA, 33 bp, Homo sapien
atgtgacagaatattcacagttgctgtatttgt

SEQ ID NO: 729958 - DNA, 33 bp, Homo sapien
atgtgacagaatattcgcagttgctgtatttgt

SEQ ID NO: 729959 - DNA, 33 bp, Homo sapien
aaatatttaaccactgaataagcaaaacacagg

SEQ ID NO: 729960 - DNA, 33 bp, Homo sapien
aaatatttaaccactgcataagcaaaacacagg

SEQ ID NO: 729961 - DNA, 33 bp, Homo sapien
catagaagctcttttacgtatcagttaagtatc

SEQ ID NO: 729962 - DNA, 33 bp, Homo sapien
catagaagctcttttatgtatcagttaagtatc

SEQ ID NO: 729963 - DNA, 33 bp, Homo sapien
ctaatagtcattaaagcctgtgagtgcataaca

SEQ ID NO: 729964 - DNA, 33 bp, Homo sapien
ctaatagtcattaaagtctgtgagtgcataaca

SEQ ID NO: 729965 - DNA, 33 bp, Homo sapien
ctgttccttagtcccaccatctttatatacacc

SEQ ID NO: 729966 - DNA, 33 bp, Homo sapien
ctgttccttagtcccatcatctttatatacacc

SEQ ID NO: 729967 - DNA, 33 bp, Homo sapien
gatgacttattggttccagccatatttaaaagt

SEQ ID NO: 729968 - DNA, 33 bp, Homo sapien
gatgacttattggttctagccatatttaaaagt

SEQ ID NO: 729969 - DNA, 33 bp, Homo sapien
aactgattatcaattccagtgtttacattttgt

SEQ ID NO: 729970 - DNA, 33 bp, Homo sapien
aactgattatcaattctagtgtttacattttgt

SEQ ID NO: 729971 - DNA, 33 bp, Homo sapien
ataccagcacaacctggatcccatttgtcagag

SEQ ID NO: 729972 - DNA, 33 bp, Homo sapien
ataccagcacaacctgtatcccatttgtcagag

SEQ ID NO: 729973 - DNA, 33 bp, Homo sapien
gacctggcccagctggacatcctacaaatatta

SEQ ID NO: 729974 - DNA, 33 bp, Homo sapien
gacctggcccagctggtcatcctacaaatatta

SEQ ID NO: 729975 - DNA, 33 bp, Homo sapien
tatatttctctttatgccacatttagttggaca

SEQ ID NO: 729976 - DNA, 33 bp, Homo sapien
tatatttctctttatggcacatttagttggaca

SEQ ID NO: 729977 - DNA, 33 bp, Homo sapien
tgtgaggaaatttaccagagaagttggagctgc

SEQ ID NO: 729978 - DNA, 33 bp, Homo sapien
tgtgaggaaatttaccggagaagttggagctgc

SEQ ID NO: 729979 - DNA, 33 bp, Homo sapien
aatgttactggtgcaacgttcttggctctcagt

SEQ ID NO: 729980 - DNA, 33 bp, Homo sapien
aatgttactggtgcaaggttcttggctctcagt

SEQ ID NO: 729981 - DNA, 33 bp, Homo sapien
gtggagcaggcctgaaccttactcacaactagg

SEQ ID NO: 729982 - DNA, 33 bp, Homo sapien
gtggagcaggcctgaagcttactcacaactagg

SEQ ID NO: 729983 - DNA, 33 bp, Homo sapien
aagttggtttcagttacgttcctatgtccactc

SEQ ID NO: 729984 - DNA, 33 bp, Homo sapien
aagttggtttcagttatgttcctatgtccactc

SEQ ID NO: 729985 - DNA, 33 bp, Homo sapien
gtagaagtggagaatgcagtctaactaaaagac

SEQ ID NO: 729986 - DNA, 33 bp, Homo sapien
gtagaagtggagaatggagtctaactaaaagac

SEQ ID NO: 729987 - DNA, 33 bp, Homo sapien
gagtgattttgtttaaggcttataacttgttat

SEQ ID NO: 729988 - DNA, 33 bp, Homo sapien
gagtgattttgtttaatgcttataacttgttat

SEQ ID NO: 729989 - DNA, 33 bp, Homo sapien
cagcaagttcacccaccggcaaatacacattaa

SEQ ID NO: 729990 - DNA, 33 bp, Homo sapien
cagcaagttcacccactggcaaatacacattaa

SEQ ID NO: 729991 - DNA, 33 bp, Homo sapien
gttgcatccacattgccgcaaaaagcatgattt

SEQ ID NO: 729992 - DNA, 33 bp, Homo sapien
gttgcatccacattgctgcaaaaagcatgattt

SEQ ID NO: 729993 - DNA, 33 bp, Homo sapien
ataatgtggatcctcaatgacatagtgcagccc

SEQ ID NO: 729994 - DNA, 33 bp, Homo sapien
ataatgtggatcctcagtgacatagtgcagccc

SEQ ID NO: 729995 - DNA, 33 bp, Homo sapien
gggtttgtttaggaagacagatcagtggaatgt

SEQ ID NO: 729996 - DNA, 33 bp, Homo sapien
gggtttgtttaggaaggcagatcagtggaatgt

SEQ ID NO: 729997 - DNA, 33 bp, Homo sapien
gtcttgcctcaagtccgactgctagttagttca

SEQ ID NO: 729998 - DNA, 33 bp, Homo sapien
gtcttgcctcaagtcctactgctagttagttca

SEQ ID NO: 729999 - DNA, 33 bp, Homo sapien
taggttaaggcaaaaaggacttatgatattaat

SEQ ID NO: 730000 - DNA, 33 bp, Homo sapien
taggttaaggcaaaaatgacttatgatattaat

SEQ ID NO: 730001 - DNA, 33 bp, Homo sapien
ctgtagactttgtaaacgatgtacacttaggtt

SEQ ID NO: 730002 - DNA, 33 bp, Homo sapien
ctgtagactttgtaaatgatgtacacttaggtt

SEQ ID NO: 730003 - DNA, 33 bp, Homo sapien
ctatatttattgaagacggcagcccatagtttt

SEQ ID NO: 730004 - DNA, 33 bp, Homo sapien
ctatatttattgaagatggcagcccatagtttt

SEQ ID NO: 730005 - DNA, 33 bp, Homo sapien
attttattaacctgtggaactcttcttctctct

SEQ ID NO: 730006 - DNA, 33 bp, Homo sapien
attttattaacctgtgtaactcttcttctctct

SEQ ID NO: 730007 - DNA, 33 bp, Homo sapien
cttccagttccaaataccataagacattctgaa

SEQ ID NO: 730008 - DNA, 33 bp, Homo sapien
cttccagttccaaatatcataagacattctgaa

SEQ ID NO: 730009 - DNA, 33 bp, Homo sapien
atctccagcttttgcaacagtaatcttgacctc

SEQ ID NO: 730010 - DNA, 33 bp, Homo sapien
atctccagcttttgcagcagtaatcttgacctc

SEQ ID NO: 730011 - DNA, 33 bp, Homo sapien
tcctgctcccacccggaaatgctgtatatgtga

SEQ ID NO: 730012 - DNA, 33 bp, Homo sapien
tcctgctcccacccgggaatgctgtatatgtga

SEQ ID NO: 730013 - DNA, 33 bp, Homo sapien
ggaggtagtctggcagcatttcctatagcctag

SEQ ID NO: 730014 - DNA, 33 bp, Homo sapien
ggaggtagtctggcagtatttcctatagcctag

SEQ ID NO: 730015 - DNA, 33 bp, Homo sapien
gtttatgcactaataacagcaattgaaggcatt

SEQ ID NO: 730016 - DNA, 33 bp, Homo sapien
gtttatgcactaataatagcaattgaaggcatt

SEQ ID NO: 730017 - DNA, 33 bp, Homo sapien
tttccctataaccctcccgtgtctaccgtgtct

SEQ ID NO: 730018 - DNA, 33 bp, Homo sapien
tttccctataaccctctcgtgtctaccgtgtct

SEQ ID NO: 730019 - DNA, 33 bp, Homo sapien
cttccactttctatcacgtgagaatgaagcaag

SEQ ID NO: 730020 - DNA, 33 bp, Homo sapien
cttccactttctatcatgtgagaatgaagcaag

SEQ ID NO: 730021 - DNA, 33 bp, Homo sapien
agggcaaaaggaatacagacaagtgatgggaga

SEQ ID NO: 730022 - DNA, 33 bp, Homo sapien
agggcaaaaggaatacggacaagtgatgggaga

SEQ ID NO: 730023 - DNA, 33 bp, Homo sapien
tactccagatcgtttaagaattaagatttgggt

SEQ ID NO: 730024 - DNA, 33 bp, Homo sapien
tactccagatcgtttaggaattaagatttgggt

SEQ ID NO: 730025 - DNA, 33 bp, Homo sapien
tggcactagacctggaatagtaaactgggattg

SEQ ID NO: 730026 - DNA, 33 bp, Homo sapien
tggcactagacctggagtagtaaactgggattg

SEQ ID NO: 730027 - DNA, 33 bp, Homo sapien
aacagaggacgtatccaagtgtacaagaggccc

SEQ ID NO: 730028 - DNA, 33 bp, Homo sapien
aacagaggacgtatccgagtgtacaagaggccc

SEQ ID NO: 730029 - DNA, 33 bp, Homo sapien
gcagctaagactacacacttcagacaggaaaat

SEQ ID NO: 730030 - DNA, 33 bp, Homo sapien
gcagctaagactacacgcttcagacaggaaaat

SEQ ID NO: 730031 - DNA, 33 bp, Homo sapien
ttccattgcttacttacgtgcaagattaaaata

SEQ ID NO: 730032 - DNA, 33 bp, Homo sapien
ttccattgcttacttaggtgcaagattaaaata

SEQ ID NO: 730033 - DNA, 33 bp, Homo sapien
taatctttgagttttcacaagggcatttggaat

SEQ ID NO: 730034 - DNA, 33 bp, Homo sapien
taatctttgagttttctcaagggcatttggaat

SEQ ID NO: 730035 - DNA, 33 bp, Homo sapien
ttgtcctctggatgaaagttaaatactaacacc

SEQ ID NO: 730036 - DNA, 33 bp, Homo sapien
ttgtcctctggatgaaggttaaatactaacacc

SEQ ID NO: 730037 - DNA, 33 bp, Homo sapien
cattatgaaactgaaaccttcctcccttccctc

SEQ ID NO: 730038 - DNA, 33 bp, Homo sapien
cattatgaaactgaaatcttcctcccttccctc

SEQ ID NO: 730039 - DNA, 33 bp, Homo sapien
tgttagctaaattgaaaaggctgtaactaaagg

SEQ ID NO: 730040 - DNA, 33 bp, Homo sapien
tgttagctaaattgaagaggctgtaactaaagg

SEQ ID NO: 730041 - DNA, 33 bp, Homo sapien
taatgcttgagctaaaactggagaaattatttt

SEQ ID NO: 730042 - DNA, 33 bp, Homo sapien
taatgcttgagctaaatctggagaaattatttt

SEQ ID NO: 730043 - DNA, 33 bp, Homo sapien
gaggctggcagctatacaatgtgtggtccactt

SEQ ID NO: 730044 - DNA, 33 bp, Homo sapien
gaggctggcagctatataatgtgtggtccactt

SEQ ID NO: 730045 - DNA, 33 bp, Homo sapien
gcaggtatttccaccaccatgggttggcggaat

SEQ ID NO: 730046 - DNA, 33 bp, Homo sapien
gcaggtatttccaccatcatgggttggcggaat

SEQ ID NO: 730047 - DNA, 33 bp, Homo sapien
actatactcatgattacaacagttctccttaga

SEQ ID NO: 730048 - DNA, 33 bp, Homo sapien
actatactcatgattataacagttctccttaga

SEQ ID NO: 730049 - DNA, 33 bp, Homo sapien
aattacatatgcattcaaattatacagtttgat

SEQ ID NO: 730050 - DNA, 33 bp, Homo sapien
aattacatatgcattcgaattatacagtttgat

SEQ ID NO: 730051 - DNA, 33 bp, Homo sapien
tttgagcctataagagaacataaaaagtgaaag

SEQ ID NO: 730052 - DNA, 33 bp, Homo sapien
tttgagcctataagaggacataaaaagtgaaag

SEQ ID NO: 730053 - DNA, 33 bp, Homo sapien
acacgtttcagaagtccagtgatccagaagtgg

SEQ ID NO: 730054 - DNA, 33 bp, Homo sapien
acacgtttcagaagtctagtgatccagaagtgg

SEQ ID NO: 730055 - DNA, 33 bp, Homo sapien
gctggaaatcacatgggaaaaagtcgaagttat

SEQ ID NO: 730056 - DNA, 33 bp, Homo sapien
gctggaaatcacatggtaaaaagtcgaagttat

SEQ ID NO: 730057 - DNA, 33 bp, Homo sapien
tgcctaccttcgtacacgcctcttaactgtttg

SEQ ID NO: 730058 - DNA, 33 bp, Homo sapien
tgcctaccttcgtacatgcctcttaactgtttg

SEQ ID NO: 730059 - DNA, 33 bp, Homo sapien
tcaatttgcatacctcacttagagacctttttg

SEQ ID NO: 730060 - DNA, 33 bp, Homo sapien
tcaatttgcatacctctcttagagacctttttg

SEQ ID NO: 730061 - DNA, 33 bp, Homo sapien
tcacatcctagccaacacttgttttcacatttt

SEQ ID NO: 730062 - DNA, 33 bp, Homo sapien
tcacatcctagccaacccttgttttcacatttt

SEQ ID NO: 730063 - DNA, 33 bp, Homo sapien
acactgttcacatgcaaagagtagatttctatt

SEQ ID NO: 730064 - DNA, 33 bp, Homo sapien
acactgttcacatgcacagagtagatttctatt

SEQ ID NO: 730065 - DNA, 33 bp, Homo sapien
gaattttggttaaaaccattcaacacatctcta

SEQ ID NO: 730066 - DNA, 33 bp, Homo sapien
gaattttggttaaaacgattcaacacatctcta

SEQ ID NO: 730067 - DNA, 33 bp, Homo sapien
taacgagataaagaaaactccctagatcaaggt

SEQ ID NO: 730068 - DNA, 33 bp, Homo sapien
taacgagataaagaaagctccctagatcaaggt

SEQ ID NO: 730069 - DNA, 33 bp, Homo sapien
ataagaagtcagtacccagaatttcaacagtat

SEQ ID NO: 730070 - DNA, 33 bp, Homo sapien
ataagaagtcagtacctagaatttcaacagtat

SEQ ID NO: 730071 - DNA, 33 bp, Homo sapien
actgaataataagctacgtggtcctagaggcaa

SEQ ID NO: 730072 - DNA, 33 bp, Homo sapien
actgaataataagctatgtggtcctagaggcaa

SEQ ID NO: 730073 - DNA, 33 bp, Homo sapien
ctatgaaccaggaagaagatgaaaatgtgctag

SEQ ID NO: 730074 - DNA, 33 bp, Homo sapien
ctatgaaccaggaagatgatgaaaatgtgctag

SEQ ID NO: 730075 - DNA, 33 bp, Homo sapien
aactggtgtgttagagaatcagattttccagaa

SEQ ID NO: 730076 - DNA, 33 bp, Homo sapien
aactggtgtgttagaggatcagattttccagaa

SEQ ID NO: 730077 - DNA, 33 bp, Homo sapien
tattttgtgcaaagacagaagattttcttaaat

SEQ ID NO: 730078 - DNA, 33 bp, Homo sapien
tattttgtgcaaagacggaagattttcttaaat

SEQ ID NO: 730079 - DNA, 33 bp, Homo sapien
caaaccatatcagagggatttatgaagaatttg

SEQ ID NO: 730080 - DNA, 33 bp, Homo sapien
caaaccatatcagaggtatttatgaagaatttg

SEQ ID NO: 730081 - DNA, 33 bp, Homo sapien
tactgatgatcatggcaatttatctcttccaag

SEQ ID NO: 730082 - DNA, 33 bp, Homo sapien
tactgatgatcatggctatttatctcttccaag

SEQ ID NO: 730083 - DNA, 33 bp, Homo sapien
attcttccttctcctcaactgttagcttcattg

SEQ ID NO: 730084 - DNA, 33 bp, Homo sapien
attcttccttctcctcgactgttagcttcattg

SEQ ID NO: 730085 - DNA, 33 bp, Homo sapien
cttcccttgagatcaaccactattgagtggagc

SEQ ID NO: 730086 - DNA, 33 bp, Homo sapien
cttcccttgagatcaatcactattgagtggagc

SEQ ID NO: 730087 - DNA, 33 bp, Homo sapien
atgtagcgcacagaaacagaatgttgatgtcag

SEQ ID NO: 730088 - DNA, 33 bp, Homo sapien
atgtagcgcacagaaatagaatgttgatgtcag

SEQ ID NO: 730089 - DNA, 33 bp, Homo sapien
taattaattgcctttacaaaacagcaggagttc

SEQ ID NO: 730090 - DNA, 33 bp, Homo sapien
taattaattgcctttataaaacagcaggagttc

SEQ ID NO: 730091 - DNA, 33 bp, Homo sapien
ttcacagtgtccaggggatatacacacctcgtt

SEQ ID NO: 730092 - DNA, 33 bp, Homo sapien
ttcacagtgtccagggtatatacacacctcgtt

SEQ ID NO: 730093 - DNA, 33 bp, Homo sapien
aggtactcagatttcacatagttccttctattt

SEQ ID NO: 730094 - DNA, 33 bp, Homo sapien
aggtactcagatttcagatagttccttctattt

SEQ ID NO: 730095 - DNA, 33 bp, Homo sapien
ccctaaccttccaaaagctatctatgcactaat

SEQ ID NO: 730096 - DNA, 33 bp, Homo sapien
ccctaaccttccaaaatctatctatgcactaat

SEQ ID NO: 730097 - DNA, 33 bp, Homo sapien
ggtttgaaaaactaccaattgagtactatcctc

SEQ ID NO: 730098 - DNA, 33 bp, Homo sapien
ggtttgaaaaactaccgattgagtactatcctc

SEQ ID NO: 730099 - DNA, 33 bp, Homo sapien
acgtacataataatcccacgcaagtaccccctg

SEQ ID NO: 730100 - DNA, 33 bp, Homo sapien
acgtacataataatcctacgcaagtaccccctg

SEQ ID NO: 730101 - DNA, 33 bp, Homo sapien
ttgataggtggatgaaatagacaagatacatag

SEQ ID NO: 730102 - DNA, 33 bp, Homo sapien
ttgataggtggatgaagtagacaagatacatag

SEQ ID NO: 730103 - DNA, 33 bp, Homo sapien
ttgcctatgagtctgtaaaaccaaagaaagtaa

SEQ ID NO: 730104 - DNA, 33 bp, Homo sapien
ttgcctatgagtctgtgaaaccaaagaaagtaa

SEQ ID NO: 730105 - DNA, 33 bp, Homo sapien
ctattataacgttaaaatagacatacattattg

SEQ ID NO: 730106 - DNA, 33 bp, Homo sapien
ctattataacgttaaagtagacatacattattg

SEQ ID NO: 730107 - DNA, 33 bp, Homo sapien
tgcctggcatcatcacaaaagtgcattatgaat

SEQ ID NO: 730108 - DNA, 33 bp, Homo sapien
tgcctggcatcatcaccaaagtgcattatgaat

SEQ ID NO: 730109 - DNA, 33 bp, Homo sapien
ttttgattactgactcaactgcttttcttattg

SEQ ID NO: 730110 - DNA, 33 bp, Homo sapien
ttttgattactgactccactgcttttcttattg

SEQ ID NO: 730111 - DNA, 33 bp, Homo sapien
ggtaacactgttctcccagaatccgttaggaaa

SEQ ID NO: 730112 - DNA, 33 bp, Homo sapien
ggtaacactgttctcctagaatccgttaggaaa

SEQ ID NO: 730113 - DNA, 33 bp, Homo sapien
tgctaccttgatttcaagtataagaccatacat

SEQ ID NO: 730114 - DNA, 33 bp, Homo sapien
tgctaccttgatttcaggtataagaccatacat

SEQ ID NO: 730115 - DNA, 33 bp, Homo sapien
agaggcaacacatctcaataccttatatgaagg

SEQ ID NO: 730116 - DNA, 33 bp, Homo sapien
agaggcaacacatctcgataccttatatgaagg

SEQ ID NO: 730117 - DNA, 33 bp, Homo sapien
aatccatcagctcattaaaaagattgtacacca

SEQ ID NO: 730118 - DNA, 33 bp, Homo sapien
aatccatcagctcattcaaaagattgtacacca

SEQ ID NO: 730119 - DNA, 33 bp, Homo sapien
gtatcaggtaatgccaatcccatagaataagct

SEQ ID NO: 730120 - DNA, 33 bp, Homo sapien
gtatcaggtaatgccagtcccatagaataagct

SEQ ID NO: 730121 - DNA, 33 bp, Homo sapien
taaaccattatctaaacacttccaggagttaca

SEQ ID NO: 730122 - DNA, 33 bp, Homo sapien
taaaccattatctaaatacttccaggagttaca

SEQ ID NO: 730123 - DNA, 33 bp, Homo sapien
cacttcaagtcttggcagcacattttggtaaac

SEQ ID NO: 730124 - DNA, 33 bp, Homo sapien
cacttcaagtcttggcggcacattttggtaaac

SEQ ID NO: 730125 - DNA, 33 bp, Homo sapien
gtcaaagaagacccataacaaacaagcaagtga

SEQ ID NO: 730126 - DNA, 33 bp, Homo sapien
gtcaaagaagacccatgacaaacaagcaagtga

SEQ ID NO: 730127 - DNA, 33 bp, Homo sapien
atcttcttgaagtaaccagaggagaaaatatct

SEQ ID NO: 730128 - DNA, 33 bp, Homo sapien
atcttcttgaagtaactagaggagaaaatatct

SEQ ID NO: 730129 - DNA, 33 bp, Homo sapien
actgataactctattcactgcacacgtttcata

SEQ ID NO: 730130 - DNA, 33 bp, Homo sapien
actgataactctattctctgcacacgtttcata

SEQ ID NO: 730131 - DNA, 33 bp, Homo sapien
agcaaggtccaaaacaatggagatggaaaactg

SEQ ID NO: 730132 - DNA, 33 bp, Homo sapien
agcaaggtccaaaacagtggagatggaaaactg

SEQ ID NO: 730133 - DNA, 33 bp, Homo sapien
caatcctgaaactgaccacaattacttcagtta

SEQ ID NO: 730134 - DNA, 33 bp, Homo sapien
caatcctgaaactgactacaattacttcagtta

SEQ ID NO: 730135 - DNA, 33 bp, Homo sapien
aagaatttgattagagaaggtagaaggaagaac

SEQ ID NO: 730136 - DNA, 33 bp, Homo sapien
aagaatttgattagaggaggtagaaggaagaac

SEQ ID NO: 730137 - DNA, 33 bp, Homo sapien
tgactctaggtaaagtaaatccatgaccaaaaa

SEQ ID NO: 730138 - DNA, 33 bp, Homo sapien
tgactctaggtaaagttaatccatgaccaaaaa

SEQ ID NO: 730139 - DNA, 33 bp, Homo sapien
gagaagtattgaatcccatgaatccatgtatgt

SEQ ID NO: 730140 - DNA, 33 bp, Homo sapien
gagaagtattgaatcctatgaatccatgtatgt

SEQ ID NO: 730141 - DNA, 33 bp, Homo sapien
aatgatggatgcactaaaggccctgacttcacc

SEQ ID NO: 730142 - DNA, 33 bp, Homo sapien
aatgatggatgcactagaggccctgacttcacc

SEQ ID NO: 730143 - DNA, 33 bp, Homo sapien
tatttaatgatatagcaatgtgataactataaa

SEQ ID NO: 730144 - DNA, 33 bp, Homo sapien
tatttaatgatatagccatgtgataactataaa

SEQ ID NO: 730145 - DNA, 33 bp, Homo sapien
gtgacagggacgtgaaatgactggcttatttgg

SEQ ID NO: 730146 - DNA, 33 bp, Homo sapien
gtgacagggacgtgaagtgactggcttatttgg

SEQ ID NO: 730147 - DNA, 33 bp, Homo sapien
gataggtccatatcaaaggtgttgccaacaaat

SEQ ID NO: 730148 - DNA, 33 bp, Homo sapien
gataggtccatatcaagggtgttgccaacaaat

SEQ ID NO: 730149 - DNA, 33 bp, Homo sapien
agcaactggaaggataaaggatgttgacatcaa

SEQ ID NO: 730150 - DNA, 33 bp, Homo sapien
agcaactggaaggatagaggatgttgacatcaa

SEQ ID NO: 730151 - DNA, 33 bp, Homo sapien
gtaatcttcccccaagccttgctgcccagtcta

SEQ ID NO: 730152 - DNA, 33 bp, Homo sapien
gtaatcttcccccaagtcttgctgcccagtcta

SEQ ID NO: 730153 - DNA, 33 bp, Homo sapien
gctgctgcttgtaaaactcttccttaaatacat

SEQ ID NO: 730154 - DNA, 33 bp, Homo sapien
gctgctgcttgtaaaattcttccttaaatacat

SEQ ID NO: 730155 - DNA, 33 bp, Homo sapien
gaccaaaatagatgggacacattgttctcacct

SEQ ID NO: 730156 - DNA, 33 bp, Homo sapien
gaccaaaatagatggggcacattgttctcacct

SEQ ID NO: 730157 - DNA, 33 bp, Homo sapien
actctcttgaatagtgaaaatgttttacatctg

SEQ ID NO: 730158 - DNA, 33 bp, Homo sapien
actctcttgaatagtggaaatgttttacatctg

SEQ ID NO: 730159 - DNA, 33 bp, Homo sapien
ctcttttaggtgttccaattgctttccaaagtt

SEQ ID NO: 730160 - DNA, 33 bp, Homo sapien
ctcttttaggtgttcccattgctttccaaagtt

SEQ ID NO: 730161 - DNA, 33 bp, Homo sapien
ttgggcttaaaattcacattgtgtggtataatt

SEQ ID NO: 730162 - DNA, 33 bp, Homo sapien
ttgggcttaaaattcagattgtgtggtataatt

SEQ ID NO: 730163 - DNA, 33 bp, Homo sapien
tttaacaaactgatagacaaacttaattttgga

SEQ ID NO: 730164 - DNA, 33 bp, Homo sapien
tttaacaaactgataggcaaacttaattttgga

SEQ ID NO: 730165 - DNA, 33 bp, Homo sapien
attgaatgagataacacagacatcattcagact

SEQ ID NO: 730166 - DNA, 33 bp, Homo sapien
attgaatgagataacagagacatcattcagact

SEQ ID NO: 730167 - DNA, 33 bp, Homo sapien
taaatacatattacaaataccctgagaaataag

SEQ ID NO: 730168 - DNA, 33 bp, Homo sapien
taaatacatattacaagtaccctgagaaataag

SEQ ID NO: 730169 - DNA, 33 bp, Homo sapien
atcaatgaaatctaaagcaattcttggttataa

SEQ ID NO: 730170 - DNA, 33 bp, Homo sapien
atcaatgaaatctaaatcaattcttggttataa

SEQ ID NO: 730171 - DNA, 33 bp, Homo sapien
tatacatatttccacactgagaatatttggagt

SEQ ID NO: 730172 - DNA, 33 bp, Homo sapien
tatacatatttccacagtgagaatatttggagt

SEQ ID NO: 730173 - DNA, 33 bp, Homo sapien
gacaattttaaatcaacggtgagtatttgggta

SEQ ID NO: 730174 - DNA, 33 bp, Homo sapien
gacaattttaaatcaatggtgagtatttgggta

SEQ ID NO: 730175 - DNA, 33 bp, Homo sapien
tattgactctgagaaactgtctataaattggac

SEQ ID NO: 730176 - DNA, 33 bp, Homo sapien
tattgactctgagaaattgtctataaattggac

SEQ ID NO: 730177 - DNA, 33 bp, Homo sapien
ggctacattaccagtaagcagtccaatttatag

SEQ ID NO: 730178 - DNA, 33 bp, Homo sapien
ggctacattaccagtaggcagtccaatttatag

SEQ ID NO: 730179 - DNA, 33 bp, Homo sapien
tctaacctgtagaaaacttgcccagacttggtc

SEQ ID NO: 730180 - DNA, 33 bp, Homo sapien
tctaacctgtagaaaatttgcccagacttggtc

SEQ ID NO: 730181 - DNA, 33 bp, Homo sapien
tacaactttatttttcacacaaggtgtgtatgc

SEQ ID NO: 730182 - DNA, 33 bp, Homo sapien
tacaactttatttttcgcacaaggtgtgtatgc

SEQ ID NO: 730183 - DNA, 33 bp, Homo sapien
gtaaaaaattctaatgaaaccatagtacttaac

SEQ ID NO: 730184 - DNA, 33 bp, Homo sapien
gtaaaaaattctaatggaaccatagtacttaac

SEQ ID NO: 730185 - DNA, 33 bp, Homo sapien
ggtggttgtgaggcacaagggggaaaagggaat

SEQ ID NO: 730186 - DNA, 33 bp, Homo sapien
ggtggttgtgaggcacgagggggaaaagggaat

SEQ ID NO: 730187 - DNA, 33 bp, Homo sapien
atatccagtttgtcatcaactaaaacaccctta

SEQ ID NO: 730188 - DNA, 33 bp, Homo sapien
atatccagtttgtcattaactaaaacaccctta

SEQ ID NO: 730189 - DNA, 33 bp, Homo sapien
tctatgatgtttgcacaacaaccaaatcatcta

SEQ ID NO: 730190 - DNA, 33 bp, Homo sapien
tctatgatgtttgcactacaaccaaatcatcta

SEQ ID NO: 730191 - DNA, 33 bp, Homo sapien
tggataaatatataaaatgacatttcatcaaag

SEQ ID NO: 730192 - DNA, 33 bp, Homo sapien
tggataaatatataaattgacatttcatcaaag

SEQ ID NO: 730193 - DNA, 33 bp, Homo sapien
ttcttccatagattgcactattgctgtcatatt

SEQ ID NO: 730194 - DNA, 33 bp, Homo sapien
ttcttccatagattgcgctattgctgtcatatt

SEQ ID NO: 730195 - DNA, 33 bp, Homo sapien
gtatttgtgtcatatccgagtctgtttttgatg

SEQ ID NO: 730196 - DNA, 33 bp, Homo sapien
gtatttgtgtcatatctgagtctgtttttgatg

SEQ ID NO: 730197 - DNA, 33 bp, Homo sapien
gacatcatcaaagtagcaatgcaaatggcaagt

SEQ ID NO: 730198 - DNA, 33 bp, Homo sapien
gacatcatcaaagtagtaatgcaaatggcaagt

SEQ ID NO: 730199 - DNA, 33 bp, Homo sapien
tccaattgaaattgcagagcccacagcaggggt

SEQ ID NO: 730200 - DNA, 33 bp, Homo sapien
tccaattgaaattgcatagcccacagcaggggt

SEQ ID NO: 730201 - DNA, 33 bp, Homo sapien
agttttggaggtaaaactgaaagcagaatgtgt

SEQ ID NO: 730202 - DNA, 33 bp, Homo sapien
agttttggaggtaaaattgaaagcagaatgtgt

SEQ ID NO: 730203 - DNA, 33 bp, Homo sapien
ctgttgcctgagcaataaacagttaggcatttt

SEQ ID NO: 730204 - DNA, 33 bp, Homo sapien
ctgttgcctgagcaattaacagttaggcatttt

SEQ ID NO: 730205 - DNA, 33 bp, Homo sapien
ttgtgtatttatgcaacgagtattaagctgtta

SEQ ID NO: 730206 - DNA, 33 bp, Homo sapien
ttgtgtatttatgcaaggagtattaagctgtta

SEQ ID NO: 730207 - DNA, 33 bp, Homo sapien
aataatttctctagcaatagctgaatatggtat

SEQ ID NO: 730208 - DNA, 33 bp, Homo sapien
aataatttctctagcagtagctgaatatggtat

SEQ ID NO: 730209 - DNA, 33 bp, Homo sapien
agtaatagctgcagaaaattaggcaaataacct

SEQ ID NO: 730210 - DNA, 33 bp, Homo sapien
agtaatagctgcagaacattaggcaaataacct

SEQ ID NO: 730211 - DNA, 33 bp, Homo sapien
ctttgtggtcaagaaaagaaggaaaacaggtgc

SEQ ID NO: 730212 - DNA, 33 bp, Homo sapien
ctttgtggtcaagaaaggaaggaaaacaggtgc

SEQ ID NO: 730213 - DNA, 33 bp, Homo sapien
ggattcgttacgctcaccaatgcagcagtcctg

SEQ ID NO: 730214 - DNA, 33 bp, Homo sapien
ggattcgttacgctcatcaatgcagcagtcctg

SEQ ID NO: 730215 - DNA, 33 bp, Homo sapien
tactatataaagtggaacctgtgctatctcttt

SEQ ID NO: 730216 - DNA, 33 bp, Homo sapien
tactatataaagtggagcctgtgctatctcttt

SEQ ID NO: 730217 - DNA, 33 bp, Homo sapien
ttaccaaactgttcaaatctttgtataagtagt

SEQ ID NO: 730218 - DNA, 33 bp, Homo sapien
ttaccaaactgttcaagtctttgtataagtagt

SEQ ID NO: 730219 - DNA, 33 bp, Homo sapien
ccttgtgataaaagaccgagtagaggtccaaaa

SEQ ID NO: 730220 - DNA, 33 bp, Homo sapien
ccttgtgataaaagactgagtagaggtccaaaa

SEQ ID NO: 730221 - DNA, 33 bp, Homo sapien
caatggacattaacaacactttaaaccaagttg

SEQ ID NO: 730222 - DNA, 33 bp, Homo sapien
caatggacattaacaagactttaaaccaagttg

SEQ ID NO: 730223 - DNA, 33 bp, Homo sapien
agaggataagggcatcaacctccatgcacagtc

SEQ ID NO: 730224 - DNA, 33 bp, Homo sapien
agaggataagggcatcgacctccatgcacagtc

SEQ ID NO: 730225 - DNA, 33 bp, Homo sapien
cattggacaatgaatccacagttgacccttgaa

SEQ ID NO: 730226 - DNA, 33 bp, Homo sapien
cattggacaatgaatctacagttgacccttgaa

SEQ ID NO: 730227 - DNA, 33 bp, Homo sapien
gttgtttattttgaccacttatgacttttattt

SEQ ID NO: 730228 - DNA, 33 bp, Homo sapien
gttgtttattttgaccgcttatgacttttattt

SEQ ID NO: 730229 - DNA, 33 bp, Homo sapien
gaattatcatagtccaataaatggtcttgaatt

SEQ ID NO: 730230 - DNA, 33 bp, Homo sapien
gaattatcatagtccagtaaatggtcttgaatt

SEQ ID NO: 730231 - DNA, 33 bp, Homo sapien
aacaccattttgtcaccgaggacccataagact

SEQ ID NO: 730232 - DNA, 33 bp, Homo sapien
aacaccattttgtcactgaggacccataagact

SEQ ID NO: 730233 - DNA, 33 bp, Homo sapien
aatgaaattttggagacgattaatttatatgtg

SEQ ID NO: 730234 - DNA, 33 bp, Homo sapien
aatgaaattttggagatgattaatttatatgtg

SEQ ID NO: 730235 - DNA, 33 bp, Homo sapien
gccttaatcgtcatgcaccattcttttggaaat

SEQ ID NO: 730236 - DNA, 33 bp, Homo sapien
gccttaatcgtcatgcgccattcttttggaaat

SEQ ID NO: 730237 - DNA, 33 bp, Homo sapien
catattaacaaagataacgagtcaatatttaca

SEQ ID NO: 730238 - DNA, 33 bp, Homo sapien
catattaacaaagatagcgagtcaatatttaca

SEQ ID NO: 730239 - DNA, 33 bp, Homo sapien
taagtgatttgcaacaagaagtatttactacct

SEQ ID NO: 730240 - DNA, 33 bp, Homo sapien
taagtgatttgcaacaggaagtatttactacct

SEQ ID NO: 730241 - DNA, 33 bp, Homo sapien
gtccaacagaccctgaaaatctgaatcttgcca

SEQ ID NO: 730242 - DNA, 33 bp, Homo sapien
gtccaacagaccctgagaatctgaatcttgcca

SEQ ID NO: 730243 - DNA, 33 bp, Homo sapien
tttcaactgagagatacgtgagaaggacaaaag

SEQ ID NO: 730244 - DNA, 33 bp, Homo sapien
tttcaactgagagatatgtgagaaggacaaaag

SEQ ID NO: 730245 - DNA, 33 bp, Homo sapien
tatactaaccaattcacaaccataatgtgtctg

SEQ ID NO: 730246 - DNA, 33 bp, Homo sapien
tatactaaccaattcataaccataatgtgtctg

SEQ ID NO: 730247 - DNA, 33 bp, Homo sapien
gtcccatgtctgagcccattaatgtgtagcttg

SEQ ID NO: 730248 - DNA, 33 bp, Homo sapien
gtcccatgtctgagcctattaatgtgtagcttg

SEQ ID NO: 730249 - DNA, 33 bp, Homo sapien
aattccaaagctgatcaatctaaaaagtaacac

SEQ ID NO: 730250 - DNA, 33 bp, Homo sapien
aattccaaagctgatcgatctaaaaagtaacac

SEQ ID NO: 730251 - DNA, 33 bp, Homo sapien
tattattcagcatagaaaatttcagaagtctat

SEQ ID NO: 730252 - DNA, 33 bp, Homo sapien
tattattcagcatagacaatttcagaagtctat

SEQ ID NO: 730253 - DNA, 33 bp, Homo sapien
cattctgaggaactgacggtagggcttcaacat

SEQ ID NO: 730254 - DNA, 33 bp, Homo sapien
cattctgaggaactgagggtagggcttcaacat

SEQ ID NO: 730255 - DNA, 33 bp, Homo sapien
ttttatttcagtatgcaaaatgtaaatataagt

SEQ ID NO: 730256 - DNA, 33 bp, Homo sapien
ttttatttcagtatgcgaaatgtaaatataagt

SEQ ID NO: 730257 - DNA, 33 bp, Homo sapien
aaacatagaaaaagtacagtttaagccactgtt

SEQ ID NO: 730258 - DNA, 33 bp, Homo sapien
aaacatagaaaaagtatagtttaagccactgtt

SEQ ID NO: 730259 - DNA, 33 bp, Homo sapien
atctactgtaaagttacactgacttgtcatttc

SEQ ID NO: 730260 - DNA, 33 bp, Homo sapien
atctactgtaaagttatactgacttgtcatttc

SEQ ID NO: 730261 - DNA, 33 bp, Homo sapien
cctgcgtgcacttggccgaagatgcaggcagga

SEQ ID NO: 730262 - DNA, 33 bp, Homo sapien
cctgcgtgcacttggcggaagatgcaggcagga

SEQ ID NO: 730263 - DNA, 33 bp, Homo sapien
tcaatcattaccttaaagcataaacaaaaagta

SEQ ID NO: 730264 - DNA, 33 bp, Homo sapien
tcaatcattaccttaaggcataaacaaaaagta

SEQ ID NO: 730265 - DNA, 33 bp, Homo sapien
actaggcagtaatacaatgaaggaattcctggt

SEQ ID NO: 730266 - DNA, 33 bp, Homo sapien
actaggcagtaatacagtgaaggaattcctggt

SEQ ID NO: 730267 - DNA, 33 bp, Homo sapien
aaggtgaccacagaaccgaatcagccggaaacc

SEQ ID NO: 730268 - DNA, 33 bp, Homo sapien
aaggtgaccacagaactgaatcagccggaaacc

SEQ ID NO: 730269 - DNA, 33 bp, Homo sapien
tgatctttacttaataccattttgcagaaatga

SEQ ID NO: 730270 - DNA, 33 bp, Homo sapien
tgatctttacttaatagcattttgcagaaatga

SEQ ID NO: 730271 - DNA, 33 bp, Homo sapien
aacctctgaccatgtacgtcctaccactttcta

SEQ ID NO: 730272 - DNA, 33 bp, Homo sapien
aacctctgaccatgtatgtcctaccactttcta

SEQ ID NO: 730273 - DNA, 33 bp, Homo sapien
accatgcaattctggaagcatatttttcccaag

SEQ ID NO: 730274 - DNA, 33 bp, Homo sapien
accatgcaattctggaggcatatttttcccaag

SEQ ID NO: 730275 - DNA, 33 bp, Homo sapien
atgttattggataaaaaaattctgtctttctag

SEQ ID NO: 730276 - DNA, 33 bp, Homo sapien
atgttattggataaaataattctgtctttctag

SEQ ID NO: 730277 - DNA, 33 bp, Homo sapien
ttgataagcttttgcagataaaacatttgtaaa

SEQ ID NO: 730278 - DNA, 33 bp, Homo sapien
ttgataagcttttgcatataaaacatttgtaaa

SEQ ID NO: 730279 - DNA, 33 bp, Homo sapien
tgaaaaacaaatgataacttggacatggtattc

SEQ ID NO: 730280 - DNA, 33 bp, Homo sapien
tgaaaaacaaatgatatcttggacatggtattc

SEQ ID NO: 730281 - DNA, 33 bp, Homo sapien
aagacaagcctcctcgcagaattcatagtcaat

SEQ ID NO: 730282 - DNA, 33 bp, Homo sapien
aagacaagcctcctcggagaattcatagtcaat

SEQ ID NO: 730283 - DNA, 33 bp, Homo sapien
ctacacatcactgcacaaaactatggtaaatgt

SEQ ID NO: 730284 - DNA, 33 bp, Homo sapien
ctacacatcactgcaccaaactatggtaaatgt

SEQ ID NO: 730285 - DNA, 33 bp, Homo sapien
gacaaattacaggagcaaaaaagccacgtatca

SEQ ID NO: 730286 - DNA, 33 bp, Homo sapien
gacaaattacaggagcgaaaaagccacgtatca

SEQ ID NO: 730287 - DNA, 33 bp, Homo sapien
cagtattttaagtggacggaatttgagaaatca

SEQ ID NO: 730288 - DNA, 33 bp, Homo sapien
cagtattttaagtggatggaatttgagaaatca

SEQ ID NO: 730289 - DNA, 33 bp, Homo sapien
ttcctccttcaatctaagtctcaggtcatttct

SEQ ID NO: 730290 - DNA, 33 bp, Homo sapien
ttcctccttcaatctatgtctcaggtcatttct

SEQ ID NO: 730291 - DNA, 33 bp, Homo sapien
gcaataagaatcagctgaagatagaatgaatgg

SEQ ID NO: 730292 - DNA, 33 bp, Homo sapien
gcaataagaatcagcttaagatagaatgaatgg

SEQ ID NO: 730293 - DNA, 33 bp, Homo sapien
catctcagtctattcacgtgtaccgactccctg

SEQ ID NO: 730294 - DNA, 33 bp, Homo sapien
catctcagtctattcatgtgtaccgactccctg

SEQ ID NO: 730295 - DNA, 33 bp, Homo sapien
aacaatagtttaagggaaacctcaacttacttc

SEQ ID NO: 730296 - DNA, 33 bp, Homo sapien
aacaatagtttaaggggaacctcaacttacttc

SEQ ID NO: 730297 - DNA, 33 bp, Homo sapien
cctgtccattccttgcacacaaagtaggcatct

SEQ ID NO: 730298 - DNA, 33 bp, Homo sapien
cctgtccattccttgcgcacaaagtaggcatct

SEQ ID NO: 730299 - DNA, 33 bp, Homo sapien
ccttgatttgtttttaagtgatagagttttcct

SEQ ID NO: 730300 - DNA, 33 bp, Homo sapien
ccttgatttgtttttaggtgatagagttttcct

SEQ ID NO: 730301 - DNA, 33 bp, Homo sapien
agataacaccataggacactgcataccacaaaa

SEQ ID NO: 730302 - DNA, 33 bp, Homo sapien
agataacaccataggatactgcataccacaaaa

SEQ ID NO: 730303 - DNA, 33 bp, Homo sapien
tctgcaccctccatatcaactatccaaatggct

SEQ ID NO: 730304 - DNA, 33 bp, Homo sapien
tctgcaccctccatattaactatccaaatggct

SEQ ID NO: 730305 - DNA, 33 bp, Homo sapien
gtaggtgggattgttacctatctaatcttctgt

SEQ ID NO: 730306 - DNA, 33 bp, Homo sapien
gtaggtgggattgttatctatctaatcttctgt

SEQ ID NO: 730307 - DNA, 33 bp, Homo sapien
gagttttcaagacatacaaaggatgagaagaat

SEQ ID NO: 730308 - DNA, 33 bp, Homo sapien
gagttttcaagacatataaaggatgagaagaat

SEQ ID NO: 730309 - DNA, 33 bp, Homo sapien
acctttactgcttccaatgctatagtcaggtga

SEQ ID NO: 730310 - DNA, 33 bp, Homo sapien
acctttactgcttccagtgctatagtcaggtga

SEQ ID NO: 730311 - DNA, 33 bp, Homo sapien
ttttgacattggagtagcaagagggggtaagta

SEQ ID NO: 730312 - DNA, 33 bp, Homo sapien
ttttgacattggagtatcaagagggggtaagta

SEQ ID NO: 730313 - DNA, 33 bp, Homo sapien
taagcgctgtcatccccacatcctttagcgtga

SEQ ID NO: 730314 - DNA, 33 bp, Homo sapien
taagcgctgtcatccctacatcctttagcgtga

SEQ ID NO: 730315 - DNA, 33 bp, Homo sapien
ttctgtagagttaccaccattagacctatggaa

SEQ ID NO: 730316 - DNA, 33 bp, Homo sapien
ttctgtagagttaccagcattagacctatggaa

SEQ ID NO: 730317 - DNA, 33 bp, Homo sapien
tttgaatggtaggaataagtctatagataagag

SEQ ID NO: 730318 - DNA, 33 bp, Homo sapien
tttgaatggtaggaatgagtctatagataagag

SEQ ID NO: 730319 - DNA, 33 bp, Homo sapien
cataataattgtctcacagacattctcgttcta

SEQ ID NO: 730320 - DNA, 33 bp, Homo sapien
cataataattgtctcatagacattctcgttcta

SEQ ID NO: 730321 - DNA, 33 bp, Homo sapien
tcaacagactggcaccaaacttgatcctctaat

SEQ ID NO: 730322 - DNA, 33 bp, Homo sapien
tcaacagactggcaccgaacttgatcctctaat

SEQ ID NO: 730323 - DNA, 33 bp, Homo sapien
gggctcttaaatcctacgatgcaaccatttcct

SEQ ID NO: 730324 - DNA, 33 bp, Homo sapien
gggctcttaaatcctatgatgcaaccatttcct

SEQ ID NO: 730325 - DNA, 33 bp, Homo sapien
ggccacatcacaccagaaaaatcaatacttcat

SEQ ID NO: 730326 - DNA, 33 bp, Homo sapien
ggccacatcacaccaggaaaatcaatacttcat

SEQ ID NO: 730327 - DNA, 33 bp, Homo sapien
caatatataatggataacatgatgactctaaaa

SEQ ID NO: 730328 - DNA, 33 bp, Homo sapien
caatatataatggatagcatgatgactctaaaa

SEQ ID NO: 730329 - DNA, 33 bp, Homo sapien
atgctaattttctagacctgtctttgacttatc

SEQ ID NO: 730330 - DNA, 33 bp, Homo sapien
atgctaattttctagagctgtctttgacttatc

SEQ ID NO: 730331 - DNA, 33 bp, Homo sapien
tagctcatgcctataacgtcagaactttgggag

SEQ ID NO: 730332 - DNA, 33 bp, Homo sapien
tagctcatgcctataatgtcagaactttgggag

SEQ ID NO: 730333 - DNA, 33 bp, Homo sapien
acaatgcttgagaaaaatcattacaaactcaaa

SEQ ID NO: 730334 - DNA, 33 bp, Homo sapien
acaatgcttgagaaaagtcattacaaactcaaa

SEQ ID NO: 730335 - DNA, 33 bp, Homo sapien
ccaatggaatactttacgaagctaatttatatg

SEQ ID NO: 730336 - DNA, 33 bp, Homo sapien
ccaatggaatactttatgaagctaatttatatg

SEQ ID NO: 730337 - DNA, 33 bp, Homo sapien
tatacagcaattatgaacaattggtgccaatca

SEQ ID NO: 730338 - DNA, 33 bp, Homo sapien
tatacagcaattatgagcaattggtgccaatca

SEQ ID NO: 730339 - DNA, 33 bp, Homo sapien
gctttgatccacctgagtatgttccttgcagcc

SEQ ID NO: 730340 - DNA, 33 bp, Homo sapien
gctttgatccacctgattatgttccttgcagcc

SEQ ID NO: 730341 - DNA, 33 bp, Homo sapien
ttccaggactgccctgcagaggaaggcacatcc

SEQ ID NO: 730342 - DNA, 33 bp, Homo sapien
ttccaggactgccctgtagaggaaggcacatcc

SEQ ID NO: 730343 - DNA, 33 bp, Homo sapien
catgctggagttctcacctatagacttcaaaga

SEQ ID NO: 730344 - DNA, 33 bp, Homo sapien
catgctggagttctcagctatagacttcaaaga

SEQ ID NO: 730345 - DNA, 33 bp, Homo sapien
aatttgtgcagagaaaataacctaaaaagtatt

SEQ ID NO: 730346 - DNA, 33 bp, Homo sapien
aatttgtgcagagaaagtaacctaaaaagtatt

SEQ ID NO: 730347 - DNA, 33 bp, Homo sapien
atgctgcttttatcagaaaaactatatatggcc

SEQ ID NO: 730348 - DNA, 33 bp, Homo sapien
atgctgcttttatcaggaaaactatatatggcc

SEQ ID NO: 730349 - DNA, 33 bp, Homo sapien
tatagtgcatatcaaagtaaactctaaatatga

SEQ ID NO: 730350 - DNA, 33 bp, Homo sapien
tatagtgcatatcaaattaaactctaaatatga

SEQ ID NO: 730351 - DNA, 33 bp, Homo sapien
cacttcaaggaagtagccagaataattgccagt

SEQ ID NO: 730352 - DNA, 33 bp, Homo sapien
cacttcaaggaagtaggcagaataattgccagt

SEQ ID NO: 730353 - DNA, 33 bp, Homo sapien
tggccattaaattgtacaaaattctcacactct

SEQ ID NO: 730354 - DNA, 33 bp, Homo sapien
tggccattaaattgtataaaattctcacactct

SEQ ID NO: 730355 - DNA, 33 bp, Homo sapien
tctccaattctctctccatatgtgtgtatgtgt

SEQ ID NO: 730356 - DNA, 33 bp, Homo sapien
tctccaattctctctctatatgtgtgtatgtgt

SEQ ID NO: 730357 - DNA, 33 bp, Homo sapien
ctgtgacattttattaagaacatttccacccta

SEQ ID NO: 730358 - DNA, 33 bp, Homo sapien
ctgtgacattttattaggaacatttccacccta

SEQ ID NO: 730359 - DNA, 33 bp, Homo sapien
tttctatatgaagaaacagtataccacactagg

SEQ ID NO: 730360 - DNA, 33 bp, Homo sapien
tttctatatgaagaaagagtataccacactagg

SEQ ID NO: 730361 - DNA, 33 bp, Homo sapien
ctgacatggtttggtaacttcaattagctttgt

SEQ ID NO: 730362 - DNA, 33 bp, Homo sapien
ctgacatggtttggtaccttcaattagctttgt

SEQ ID NO: 730363 - DNA, 33 bp, Homo sapien
taactgttagataatacgggtttcaggttatag

SEQ ID NO: 730364 - DNA, 33 bp, Homo sapien
taactgttagataatatgggtttcaggttatag

SEQ ID NO: 730365 - DNA, 33 bp, Homo sapien
tcttgggaccaagaggaatcaggtatgcacaca

SEQ ID NO: 730366 - DNA, 33 bp, Homo sapien
tcttgggaccaagagggatcaggtatgcacaca

SEQ ID NO: 730367 - DNA, 33 bp, Homo sapien
taagtaggattccatacgtaaaaataacccact

SEQ ID NO: 730368 - DNA, 33 bp, Homo sapien
taagtaggattccataggtaaaaataacccact

SEQ ID NO: 730369 - DNA, 33 bp, Homo sapien
aaagtttcatgtgtaaatgtatctctttggggc

SEQ ID NO: 730370 - DNA, 33 bp, Homo sapien
aaagtttcatgtgtaagtgtatctctttggggc

SEQ ID NO: 730371 - DNA, 33 bp, Homo sapien
ctgcaccaacagggacggtagtttatcctacta

SEQ ID NO: 730372 - DNA, 33 bp, Homo sapien
ctgcaccaacagggactgtagtttatcctacta

SEQ ID NO: 730373 - DNA, 33 bp, Homo sapien
gtaggaagaagagaacaaggtaacagttgtgtc

SEQ ID NO: 730374 - DNA, 33 bp, Homo sapien
gtaggaagaagagaacgaggtaacagttgtgtc

SEQ ID NO: 730375 - DNA, 33 bp, Homo sapien
agttttaagcaatagggactagaagtatggaat

SEQ ID NO: 730376 - DNA, 33 bp, Homo sapien
agttttaagcaataggtactagaagtatggaat

SEQ ID NO: 730377 - DNA, 33 bp, Homo sapien
atgaccccatagtctaggaatgaagatactgcc

SEQ ID NO: 730378 - DNA, 33 bp, Homo sapien
atgaccccatagtctatgaatgaagatactgcc

SEQ ID NO: 730379 - DNA, 33 bp, Homo sapien
ttatcgcacaaattacaggctatgatgcataca

SEQ ID NO: 730380 - DNA, 33 bp, Homo sapien
ttatcgcacaaattacgggctatgatgcataca

SEQ ID NO: 730381 - DNA, 33 bp, Homo sapien
ctataaccaaatagaaacttcgtgcatattata

SEQ ID NO: 730382 - DNA, 33 bp, Homo sapien
ctataaccaaatagaaccttcgtgcatattata

SEQ ID NO: 730383 - DNA, 33 bp, Homo sapien
ttggaaagtgttaaaaagtcctcatattccaat

SEQ ID NO: 730384 - DNA, 33 bp, Homo sapien
ttggaaagtgttaaaaggtcctcatattccaat

SEQ ID NO: 730385 - DNA, 33 bp, Homo sapien
aaacaccaatgtgcaaataaaaatcttgaattc

SEQ ID NO: 730386 - DNA, 33 bp, Homo sapien
aaacaccaatgtgcaagtaaaaatcttgaattc

SEQ ID NO: 730387 - DNA, 33 bp, Homo sapien
tttggaatggatcccaaacatgcctcaaaactc

SEQ ID NO: 730388 - DNA, 33 bp, Homo sapien
tttggaatggatcccatacatgcctcaaaactc

SEQ ID NO: 730389 - DNA, 33 bp, Homo sapien
tccacacctggaaatactattctgagctatata

SEQ ID NO: 730390 - DNA, 33 bp, Homo sapien
tccacacctggaaatattattctgagctatata

SEQ ID NO: 730391 - DNA, 33 bp, Homo sapien
ttagggtcatggaaaacttactatgccattcct

SEQ ID NO: 730392 - DNA, 33 bp, Homo sapien
ttagggtcatggaaaatttactatgccattcct

SEQ ID NO: 730393 - DNA, 33 bp, Homo sapien
tcttcatttctatcacagattctttcatttcta

SEQ ID NO: 730394 - DNA, 33 bp, Homo sapien
tcttcatttctatcacggattctttcatttcta

SEQ ID NO: 730395 - DNA, 33 bp, Homo sapien
cagagatattcaaaacggctttgcttacattga

SEQ ID NO: 730396 - DNA, 33 bp, Homo sapien
cagagatattcaaaactgctttgcttacattga

SEQ ID NO: 730397 - DNA, 33 bp, Homo sapien
ggagagctagagagataaagtaggataatggta

SEQ ID NO: 730398 - DNA, 33 bp, Homo sapien
ggagagctagagagatgaagtaggataatggta

SEQ ID NO: 730399 - DNA, 33 bp, Homo sapien
tcattctctacatgaaaagccaacatttgtatt

SEQ ID NO: 730400 - DNA, 33 bp, Homo sapien
tcattctctacatgaagagccaacatttgtatt

SEQ ID NO: 730401 - DNA, 33 bp, Homo sapien
ctatattttaatctacaccactagcacttctta

SEQ ID NO: 730402 - DNA, 33 bp, Homo sapien
ctatattttaatctacgccactagcacttctta

SEQ ID NO: 730403 - DNA, 33 bp, Homo sapien
agtatgtctgtcataactgagtcactagaaaca

SEQ ID NO: 730404 - DNA, 33 bp, Homo sapien
agtatgtctgtcataattgagtcactagaaaca

SEQ ID NO: 730405 - DNA, 33 bp, Homo sapien
tgttatttgtctattcacagatttggcttcttc

SEQ ID NO: 730406 - DNA, 33 bp, Homo sapien
tgttatttgtctattcgcagatttggcttcttc

SEQ ID NO: 730407 - DNA, 33 bp, Homo sapien
aaaaaacacagagatacggagagctatagttga

SEQ ID NO: 730408 - DNA, 33 bp, Homo sapien
aaaaaacacagagatagggagagctatagttga

SEQ ID NO: 730409 - DNA, 33 bp, Homo sapien
gaatcaacataagctcgccacacctatttagct

SEQ ID NO: 730410 - DNA, 33 bp, Homo sapien
gaatcaacataagctctccacacctatttagct

SEQ ID NO: 730411 - DNA, 33 bp, Homo sapien
ttataatccaacgttacggaaaattgatttatt

SEQ ID NO: 730412 - DNA, 33 bp, Homo sapien
ttataatccaacgttatggaaaattgatttatt

SEQ ID NO: 730413 - DNA, 33 bp, Homo sapien
tacaaagcatgaattaggtggtttatgtaaatc

SEQ ID NO: 730414 - DNA, 33 bp, Homo sapien
tacaaagcatgaattatgtggtttatgtaaatc

SEQ ID NO: 730415 - DNA, 33 bp, Homo sapien
tggcttagactgagcaaaagtcttttaaaaatg

SEQ ID NO: 730416 - DNA, 33 bp, Homo sapien
tggcttagactgagcagaagtcttttaaaaatg

SEQ ID NO: 730417 - DNA, 33 bp, Homo sapien
ggatgctgttctttcagcttggattattgacat

SEQ ID NO: 730418 - DNA, 33 bp, Homo sapien
ggatgctgttctttcatcttggattattgacat

SEQ ID NO: 730419 - DNA, 33 bp, Homo sapien
gtaaatattttattgaaggcaacatatctgaca

SEQ ID NO: 730420 - DNA, 33 bp, Homo sapien
gtaaatattttattgacggcaacatatctgaca

SEQ ID NO: 730421 - DNA, 33 bp, Homo sapien
tcccactgagaacaacaatttagcaatatttgt

SEQ ID NO: 730422 - DNA, 33 bp, Homo sapien
tcccactgagaacaaccatttagcaatatttgt

SEQ ID NO: 730423 - DNA, 33 bp, Homo sapien
ggctaaacatttctaaacaatactgcaccgttg

SEQ ID NO: 730424 - DNA, 33 bp, Homo sapien
ggctaaacatttctaagcaatactgcaccgttg

SEQ ID NO: 730425 - DNA, 33 bp, Homo sapien
ctttgcttaaatttaccgcaatcgcgatcctag

SEQ ID NO: 730426 - DNA, 33 bp, Homo sapien
ctttgcttaaatttacggcaatcgcgatcctag

SEQ ID NO: 730427 - DNA, 33 bp, Homo sapien
tttgacatggagtatacggttaatatcggcagt

SEQ ID NO: 730428 - DNA, 33 bp, Homo sapien
tttgacatggagtatatggttaatatcggcagt

SEQ ID NO: 730429 - DNA, 33 bp, Homo sapien
agcatttgtattatgcccaaacatatttaactg

SEQ ID NO: 730430 - DNA, 33 bp, Homo sapien
agcatttgtattatgctcaaacatatttaactg

SEQ ID NO: 730431 - DNA, 33 bp, Homo sapien
aaaaattagtattttgaaacttggcaagatggc

SEQ ID NO: 730432 - DNA, 33 bp, Homo sapien
aaaaattagtattttgcaacttggcaagatggc

SEQ ID NO: 730433 - DNA, 33 bp, Homo sapien
ggctttcatcactctaccttcaaaatcgtgaaa

SEQ ID NO: 730434 - DNA, 33 bp, Homo sapien
ggctttcatcactctagcttcaaaatcgtgaaa

SEQ ID NO: 730435 - DNA, 33 bp, Homo sapien
aggcactttctattgaagaatttggccaaagtg

SEQ ID NO: 730436 - DNA, 33 bp, Homo sapien
aggcactttctattgaggaatttggccaaagtg

SEQ ID NO: 730437 - DNA, 33 bp, Homo sapien
tgctcactggagtcacaattattggaaattcat

SEQ ID NO: 730438 - DNA, 33 bp, Homo sapien
tgctcactggagtcaccattattggaaattcat

SEQ ID NO: 730439 - DNA, 33 bp, Homo sapien
ggtaaatcaatggaaacttgacaatgtgtacct

SEQ ID NO: 730440 - DNA, 33 bp, Homo sapien
ggtaaatcaatggaaatttgacaatgtgtacct

SEQ ID NO: 730441 - DNA, 33 bp, Homo sapien
taaattgcttaatataggccctgtgcaacaaaa

SEQ ID NO: 730442 - DNA, 33 bp, Homo sapien
taaattgcttaatatatgccctgtgcaacaaaa

SEQ ID NO: 730443 - DNA, 33 bp, Homo sapien
tttgaaggtgcatttaaactatcaacagacttt

SEQ ID NO: 730444 - DNA, 33 bp, Homo sapien
tttgaaggtgcatttagactatcaacagacttt

SEQ ID NO: 730445 - DNA, 33 bp, Homo sapien
tatagacttgcttacaaaaaccttggagtagga

SEQ ID NO: 730446 - DNA, 33 bp, Homo sapien
tatagacttgcttacagaaaccttggagtagga

SEQ ID NO: 730447 - DNA, 33 bp, Homo sapien
caacaacagcaagaaccaaactgaaaaataagt

SEQ ID NO: 730448 - DNA, 33 bp, Homo sapien
caacaacagcaagaactaaactgaaaaataagt

SEQ ID NO: 730449 - DNA, 33 bp, Homo sapien
tgtctaaggttcaacaacagggatttattaagg

SEQ ID NO: 730450 - DNA, 33 bp, Homo sapien
tgtctaaggttcaacatcagggatttattaagg

SEQ ID NO: 730451 - DNA, 33 bp, Homo sapien
actcccagtattatcaagggattaaaggctcat

SEQ ID NO: 730452 - DNA, 33 bp, Homo sapien
actcccagtattatcatgggattaaaggctcat

SEQ ID NO: 730453 - DNA, 33 bp, Homo sapien
cataaattactgaatgacacttttccaaattat

SEQ ID NO: 730454 - DNA, 33 bp, Homo sapien
cataaattactgaatgccacttttccaaattat

SEQ ID NO: 730455 - DNA, 33 bp, Homo sapien
aatcaggtattactgaggttgatatcttaagca

SEQ ID NO: 730456 - DNA, 33 bp, Homo sapien
aatcaggtattactgatgttgatatcttaagca

SEQ ID NO: 730457 - DNA, 33 bp, Homo sapien
gtatcctttcccaaaacagtgtcttcttggtga

SEQ ID NO: 730458 - DNA, 33 bp, Homo sapien
gtatcctttcccaaaatagtgtcttcttggtga

SEQ ID NO: 730459 - DNA, 33 bp, Homo sapien
gtgtgagagaagatacaaggccaaagtgatgag

SEQ ID NO: 730460 - DNA, 33 bp, Homo sapien
gtgtgagagaagatacgaggccaaagtgatgag

SEQ ID NO: 730461 - DNA, 33 bp, Homo sapien
tcataacacatagtagccaggatctatttaact

SEQ ID NO: 730462 - DNA, 33 bp, Homo sapien
tcataacacatagtaggcaggatctatttaact

SEQ ID NO: 730463 - DNA, 33 bp, Homo sapien
ttctcatctgtggcacaagaacaaaataatcat

SEQ ID NO: 730464 - DNA, 33 bp, Homo sapien
ttctcatctgtggcacgagaacaaaataatcat

SEQ ID NO: 730465 - DNA, 33 bp, Homo sapien
tttctgacactgacctcaatcttcttttccttt

SEQ ID NO: 730466 - DNA, 33 bp, Homo sapien
tttctgacactgacctgaatcttcttttccttt

SEQ ID NO: 730467 - DNA, 33 bp, Homo sapien
ctttgaataattaagcaagaatggattacaaga

SEQ ID NO: 730468 - DNA, 33 bp, Homo sapien
ctttgaataattaagctagaatggattacaaga

SEQ ID NO: 730469 - DNA, 33 bp, Homo sapien
accgtctggttacaagaaaacaagctcagggct

SEQ ID NO: 730470 - DNA, 33 bp, Homo sapien
accgtctggttacaagcaaacaagctcagggct

SEQ ID NO: 730471 - DNA, 33 bp, Homo sapien
gtgtgtgaaactaccaggagagaagttcagttt

SEQ ID NO: 730472 - DNA, 33 bp, Homo sapien
gtgtgtgaaactaccatgagagaagttcagttt

SEQ ID NO: 730473 - DNA, 33 bp, Homo sapien
atttatactctaaaaaaaacattttggctacag

SEQ ID NO: 730474 - DNA, 33 bp, Homo sapien
atttatactctaaaaagaacattttggctacag

SEQ ID NO: 730475 - DNA, 33 bp, Homo sapien
ataaaagagtagataacagtgccactttccctt

SEQ ID NO: 730476 - DNA, 33 bp, Homo sapien
ataaaagagtagataatagtgccactttccctt

SEQ ID NO: 730477 - DNA, 33 bp, Homo sapien
actggtggcaccaaaacgatgatttttctgaaa

SEQ ID NO: 730478 - DNA, 33 bp, Homo sapien
actggtggcaccaaaatgatgatttttctgaaa

SEQ ID NO: 730479 - DNA, 33 bp, Homo sapien
gaatcatttcatactcacccctccagtagaaag

SEQ ID NO: 730480 - DNA, 33 bp, Homo sapien
gaatcatttcatactcgcccctccagtagaaag

SEQ ID NO: 730481 - DNA, 33 bp, Homo sapien
gtaaaccatgataaaactgatgtgttgtcatgc

SEQ ID NO: 730482 - DNA, 33 bp, Homo sapien
gtaaaccatgataaaattgatgtgttgtcatgc

SEQ ID NO: 730483 - DNA, 33 bp, Homo sapien
ggttcgtgaagtttacaaagccatcttcataac

SEQ ID NO: 730484 - DNA, 33 bp, Homo sapien
ggttcgtgaagtttacgaagccatcttcataac

SEQ ID NO: 730485 - DNA, 33 bp, Homo sapien
caatccaaaaacttcacggagctgaatgtttcc

SEQ ID NO: 730486 - DNA, 33 bp, Homo sapien
caatccaaaaacttcatggagctgaatgtttcc

SEQ ID NO: 730487 - DNA, 33 bp, Homo sapien
aatttttgcttcaataaaaagagagtatgcaag

SEQ ID NO: 730488 - DNA, 33 bp, Homo sapien
aatttttgcttcaatataaagagagtatgcaag

SEQ ID NO: 730489 - DNA, 33 bp, Homo sapien
atctcttcctccaatgacaccaattagatggca

SEQ ID NO: 730490 - DNA, 33 bp, Homo sapien
atctcttcctccaatgtcaccaattagatggca

SEQ ID NO: 730491 - DNA, 33 bp, Homo sapien
caaatccctgaactaagagacttgactaacccc

SEQ ID NO: 730492 - DNA, 33 bp, Homo sapien
caaatccctgaactaatagacttgactaacccc

SEQ ID NO: 730493 - DNA, 33 bp, Homo sapien
tatccaggatttacaacgaagttaaattaacaa

SEQ ID NO: 730494 - DNA, 33 bp, Homo sapien
tatccaggatttacaaggaagttaaattaacaa

SEQ ID NO: 730495 - DNA, 33 bp, Homo sapien
ctgggaattctaaaagcatgatgtggacatctg

SEQ ID NO: 730496 - DNA, 33 bp, Homo sapien
ctgggaattctaaaagtatgatgtggacatctg

SEQ ID NO: 730497 - DNA, 33 bp, Homo sapien
gtgtgggaaaagggataaggataaatagcaatt

SEQ ID NO: 730498 - DNA, 33 bp, Homo sapien
gtgtgggaaaagggatcaggataaatagcaatt

SEQ ID NO: 730499 - DNA, 33 bp, Homo sapien
gttctggaaaatctaaaaaagtggcacttaggt

SEQ ID NO: 730500 - DNA, 33 bp, Homo sapien
gttctggaaaatctaagaaagtggcacttaggt

SEQ ID NO: 730501 - DNA, 33 bp, Homo sapien
tcctttgtaaatgaaacgacagtgtagatatat

SEQ ID NO: 730502 - DNA, 33 bp, Homo sapien
tcctttgtaaatgaaatgacagtgtagatatat

SEQ ID NO: 730503 - DNA, 33 bp, Homo sapien
tggtccttagatattaacactccgtcataaaat

SEQ ID NO: 730504 - DNA, 33 bp, Homo sapien
tggtccttagatattagcactccgtcataaaat

SEQ ID NO: 730505 - DNA, 33 bp, Homo sapien
tgcctgtatatttccgaaaaaaaaaggcctagc

SEQ ID NO: 730506 - DNA, 33 bp, Homo sapien
tgcctgtatatttccggaaaaaaaaggcctagc

SEQ ID NO: 730507 - DNA, 33 bp, Homo sapien
gatttttgataccttgcaatgcaatttaaagta

SEQ ID NO: 730508 - DNA, 33 bp, Homo sapien
gatttttgataccttggaatgcaatttaaagta

SEQ ID NO: 730509 - DNA, 33 bp, Homo sapien
acagcaaattgcttaggatcacttgacctgtga

SEQ ID NO: 730510 - DNA, 33 bp, Homo sapien
acagcaaattgcttagtatcacttgacctgtga

SEQ ID NO: 730511 - DNA, 33 bp, Homo sapien
tctaatttaagatctacctttctgtcacagcca

SEQ ID NO: 730512 - DNA, 33 bp, Homo sapien
tctaatttaagatctagctttctgtcacagcca

SEQ ID NO: 730513 - DNA, 33 bp, Homo sapien
attcctaaggttttgccgaggtaacagatttct

SEQ ID NO: 730514 - DNA, 33 bp, Homo sapien
attcctaaggttttgcggaggtaacagatttct

SEQ ID NO: 730515 - DNA, 33 bp, Homo sapien
cttgaaggtaaactgaactgggtatgatatgat

SEQ ID NO: 730516 - DNA, 33 bp, Homo sapien
cttgaaggtaaactgagctgggtatgatatgat

SEQ ID NO: 730517 - DNA, 33 bp, Homo sapien
acttttgacagtatgacgagaaaatattgatga

SEQ ID NO: 730518 - DNA, 33 bp, Homo sapien
acttttgacagtatgatgagaaaatattgatga

SEQ ID NO: 730519 - DNA, 33 bp, Homo sapien
ccatggaagcaagccactcaaatctctcctcaa

SEQ ID NO: 730520 - DNA, 33 bp, Homo sapien
ccatggaagcaagccagtcaaatctctcctcaa

SEQ ID NO: 730521 - DNA, 33 bp, Homo sapien
agccatcctgtagtaacacgtttcagtagtaac

SEQ ID NO: 730522 - DNA, 33 bp, Homo sapien
agccatcctgtagtaatacgtttcagtagtaac

SEQ ID NO: 730523 - DNA, 33 bp, Homo sapien
aaatagggtgcttaggaaagcttcattgagaag

SEQ ID NO: 730524 - DNA, 33 bp, Homo sapien
aaatagggtgcttaggtaagcttcattgagaag

SEQ ID NO: 730525 - DNA, 33 bp, Homo sapien
ctcaatttgaccttcactatttcttcctttcaa

SEQ ID NO: 730526 - DNA, 33 bp, Homo sapien
ctcaatttgaccttcagtatttcttcctttcaa

SEQ ID NO: 730527 - DNA, 33 bp, Homo sapien
aaagcaagctttttacaaaattctactagtagt

SEQ ID NO: 730528 - DNA, 33 bp, Homo sapien
aaagcaagctttttacgaaattctactagtagt

SEQ ID NO: 730529 - DNA, 33 bp, Homo sapien
atatagttttttgctcacaaggtgttttaaacc

SEQ ID NO: 730530 - DNA, 33 bp, Homo sapien
atatagttttttgctcgcaaggtgttttaaacc

SEQ ID NO: 730531 - DNA, 33 bp, Homo sapien
aatatgtttgcattacacatgatgatgcggtga

SEQ ID NO: 730532 - DNA, 33 bp, Homo sapien
aatatgtttgcattacccatgatgatgcggtga

SEQ ID NO: 730533 - DNA, 33 bp, Homo sapien
ttaactatgttacaaaacagcacaacctgccca

SEQ ID NO: 730534 - DNA, 33 bp, Homo sapien
ttaactatgttacaaagcagcacaacctgccca

SEQ ID NO: 730535 - DNA, 33 bp, Homo sapien
attcagctctgagctacactaataattaaccaa

SEQ ID NO: 730536 - DNA, 33 bp, Homo sapien
attcagctctgagctatactaataattaaccaa

SEQ ID NO: 730537 - DNA, 33 bp, Homo sapien
aatggaagccagttaaactcgaggatgctaagg

SEQ ID NO: 730538 - DNA, 33 bp, Homo sapien
aatggaagccagttaacctcgaggatgctaagg

SEQ ID NO: 730539 - DNA, 33 bp, Homo sapien
tccacaattctaaacaaattttcatatttcata

SEQ ID NO: 730540 - DNA, 33 bp, Homo sapien
tccacaattctaaacacattttcatatttcata

SEQ ID NO: 730541 - DNA, 33 bp, Homo sapien
ccaagctatacccagaagaagatacaatgtgag

SEQ ID NO: 730542 - DNA, 33 bp, Homo sapien
ccaagctatacccagaggaagatacaatgtgag

SEQ ID NO: 730543 - DNA, 33 bp, Homo sapien
actatgacaggcctacactagcttttgaatatt

SEQ ID NO: 730544 - DNA, 33 bp, Homo sapien
actatgacaggcctacgctagcttttgaatatt

SEQ ID NO: 730545 - DNA, 33 bp, Homo sapien
cgctatccagctctaaatggttgcttaacattc

SEQ ID NO: 730546 - DNA, 33 bp, Homo sapien
cgctatccagctctaagtggttgcttaacattc

SEQ ID NO: 730547 - DNA, 33 bp, Homo sapien
gcagacagaatgaggaaaaattgttctgtaata

SEQ ID NO: 730548 - DNA, 33 bp, Homo sapien
gcagacagaatgaggagaaattgttctgtaata

SEQ ID NO: 730549 - DNA, 33 bp, Homo sapien
ttccaaaaccacctgacgtggcaaatttcacaa

SEQ ID NO: 730550 - DNA, 33 bp, Homo sapien
ttccaaaaccacctgatgtggcaaatttcacaa

SEQ ID NO: 730551 - DNA, 33 bp, Homo sapien
tattatacccatgaaaaaacaattctcctagtt

SEQ ID NO: 730552 - DNA, 33 bp, Homo sapien
tattatacccatgaaagaacaattctcctagtt

SEQ ID NO: 730553 - DNA, 33 bp, Homo sapien
atacaaaaaccatgacaaaaagtaattctgagt

SEQ ID NO: 730554 - DNA, 33 bp, Homo sapien
atacaaaaaccatgacgaaaagtaattctgagt

SEQ ID NO: 730555 - DNA, 33 bp, Homo sapien
tggaatgatgatatccacacaaagaaccttaaa

SEQ ID NO: 730556 - DNA, 33 bp, Homo sapien
tggaatgatgatatccgcacaaagaaccttaaa

SEQ ID NO: 730557 - DNA, 33 bp, Homo sapien
aaaccagatgaatgccaaaaagaaattaagtta

SEQ ID NO: 730558 - DNA, 33 bp, Homo sapien
aaaccagatgaatgcccaaaagaaattaagtta

SEQ ID NO: 730559 - DNA, 33 bp, Homo sapien
ctgtgggccagcaaaaggtgcaggtgaactggt

SEQ ID NO: 730560 - DNA, 33 bp, Homo sapien
ctgtgggccagcaaaatgtgcaggtgaactggt

SEQ ID NO: 730561 - DNA, 33 bp, Homo sapien
ctattctaatagcatccgaagtagactgtgtta

SEQ ID NO: 730562 - DNA, 33 bp, Homo sapien
ctattctaatagcatctgaagtagactgtgtta

SEQ ID NO: 730563 - DNA, 33 bp, Homo sapien
atgacttcttgttgaaaataacttagttgaaat

SEQ ID NO: 730564 - DNA, 33 bp, Homo sapien
atgacttcttgttgaagataacttagttgaaat

SEQ ID NO: 730565 - DNA, 33 bp, Homo sapien
atagaggcttctaatacctggtaagtctgaccc

SEQ ID NO: 730566 - DNA, 33 bp, Homo sapien
atagaggcttctaatatctggtaagtctgaccc

SEQ ID NO: 730567 - DNA, 33 bp, Homo sapien
aacctgtaaaaatcaacattcaagaaacaaagc

SEQ ID NO: 730568 - DNA, 33 bp, Homo sapien
aacctgtaaaaatcaagattcaagaaacaaagc

SEQ ID NO: 730569 - DNA, 33 bp, Homo sapien
tatcattgcagagaaacagtatagattcaaacc

SEQ ID NO: 730570 - DNA, 33 bp, Homo sapien
tatcattgcagagaaatagtatagattcaaacc

SEQ ID NO: 730571 - DNA, 33 bp, Homo sapien
tctaaatattcaaactaactaatatcagctagt

SEQ ID NO: 730572 - DNA, 33 bp, Homo sapien
tctaaatattcaaactgactaatatcagctagt

SEQ ID NO: 730573 - DNA, 33 bp, Homo sapien
gagtgagtaagatggcaatggaagttctcactc

SEQ ID NO: 730574 - DNA, 33 bp, Homo sapien
gagtgagtaagatggcgatggaagttctcactc

SEQ ID NO: 730575 - DNA, 33 bp, Homo sapien
ggactcctggtacaaacattttccacgttccaa

SEQ ID NO: 730576 - DNA, 33 bp, Homo sapien
ggactcctggtacaaagattttccacgttccaa

SEQ ID NO: 730577 - DNA, 33 bp, Homo sapien
ccacgttccaatccaaaatatgaaacctccccc

SEQ ID NO: 730578 - DNA, 33 bp, Homo sapien
ccacgttccaatccaagatatgaaacctccccc

SEQ ID NO: 730579 - DNA, 33 bp, Homo sapien
gcagtgaccacaggatgaagtcagaacactcaa

SEQ ID NO: 730580 - DNA, 33 bp, Homo sapien
gcagtgaccacaggattaagtcagaacactcaa

SEQ ID NO: 730581 - DNA, 33 bp, Homo sapien
tagagatatttcatgcccctgttaggtgtattc

SEQ ID NO: 730582 - DNA, 33 bp, Homo sapien
tagagatatttcatgcgcctgttaggtgtattc

SEQ ID NO: 730583 - DNA, 33 bp, Homo sapien
aaagacacaattcgtgaaaagtaatagataagc

SEQ ID NO: 730584 - DNA, 33 bp, Homo sapien
aaagacacaattcgtgcaaagtaatagataagc

SEQ ID NO: 730585 - DNA, 33 bp, Homo sapien
gtgtactgtacaggtgaaacaaatcttccaact

SEQ ID NO: 730586 - DNA, 33 bp, Homo sapien
gtgtactgtacaggtggaacaaatcttccaact

SEQ ID NO: 730587 - DNA, 33 bp, Homo sapien
actcagcctgtcgctcgactttcttttgagccc

SEQ ID NO: 730588 - DNA, 33 bp, Homo sapien
actcagcctgtcgctctactttcttttgagccc

SEQ ID NO: 730589 - DNA, 33 bp, Homo sapien
ttacattagagcagtcaaatatgatgtttaggt

SEQ ID NO: 730590 - DNA, 33 bp, Homo sapien
ttacattagagcagtcgaatatgatgtttaggt

SEQ ID NO: 730591 - DNA, 33 bp, Homo sapien
tgcagactttgtatgacataaaggcaggctggt

SEQ ID NO: 730592 - DNA, 33 bp, Homo sapien
tgcagactttgtatgatataaaggcaggctggt

SEQ ID NO: 730593 - DNA, 33 bp, Homo sapien
taaagttctctacaaaacaaccattaatacaca

SEQ ID NO: 730594 - DNA, 33 bp, Homo sapien
taaagttctctacaaagcaaccattaatacaca

SEQ ID NO: 730595 - DNA, 33 bp, Homo sapien
aaccttttgactggtaccatttcacaggtcaca

SEQ ID NO: 730596 - DNA, 33 bp, Homo sapien
aaccttttgactggtatcatttcacaggtcaca

SEQ ID NO: 730597 - DNA, 33 bp, Homo sapien
ttacagacctatgagaagttgtttctacccaat

SEQ ID NO: 730598 - DNA, 33 bp, Homo sapien
ttacagacctatgagaggttgtttctacccaat

SEQ ID NO: 730599 - DNA, 33 bp, Homo sapien
tgtacactttctgatcccagagtagataatatc

SEQ ID NO: 730600 - DNA, 33 bp, Homo sapien
tgtacactttctgatcgcagagtagataatatc

SEQ ID NO: 730601 - DNA, 33 bp, Homo sapien
taagctgtttaagtcaagaaccctagcttttag

SEQ ID NO: 730602 - DNA, 33 bp, Homo sapien
taagctgtttaagtcatgaaccctagcttttag

SEQ ID NO: 730603 - DNA, 33 bp, Homo sapien
tggtctctggaaatagactagacacatttacag

SEQ ID NO: 730604 - DNA, 33 bp, Homo sapien
tggtctctggaaataggctagacacatttacag

SEQ ID NO: 730605 - DNA, 33 bp, Homo sapien
gattaagcaaaacataactacttgaaaatggtc

SEQ ID NO: 730606 - DNA, 33 bp, Homo sapien
gattaagcaaaacatatctacttgaaaatggtc

SEQ ID NO: 730607 - DNA, 33 bp, Homo sapien
actggcactcaaatcgaccttgatttttcggcc

SEQ ID NO: 730608 - DNA, 33 bp, Homo sapien
actggcactcaaatcggccttgatttttcggcc

SEQ ID NO: 730609 - DNA, 33 bp, Homo sapien
tctacaaatatttcagaagtgcactgctcttac

SEQ ID NO: 730610 - DNA, 33 bp, Homo sapien
tctacaaatatttcaggagtgcactgctcttac

SEQ ID NO: 730611 - DNA, 33 bp, Homo sapien
ttgttttcagtgtcacagggattatgcaattgt

SEQ ID NO: 730612 - DNA, 33 bp, Homo sapien
ttgttttcagtgtcacggggattatgcaattgt

SEQ ID NO: 730613 - DNA, 33 bp, Homo sapien
gaagtctacttttgtccctcaggaaaacagaca

SEQ ID NO: 730614 - DNA, 33 bp, Homo sapien
gaagtctacttttgtctctcaggaaaacagaca

SEQ ID NO: 730615 - DNA, 33 bp, Homo sapien
caagtctcccttcaagaaaagtcttagctctcc

SEQ ID NO: 730616 - DNA, 33 bp, Homo sapien
caagtctcccttcaaggaaagtcttagctctcc

SEQ ID NO: 730617 - DNA, 33 bp, Homo sapien
ttgtaaaaatgtggtacaaagagcatttcactt

SEQ ID NO: 730618 - DNA, 33 bp, Homo sapien
ttgtaaaaatgtggtataaagagcatttcactt

SEQ ID NO: 730619 - DNA, 33 bp, Homo sapien
gtgttgtgggacagcccgaaaaccatcaaacat

SEQ ID NO: 730620 - DNA, 33 bp, Homo sapien
gtgttgtgggacagcctgaaaaccatcaaacat

SEQ ID NO: 730621 - DNA, 33 bp, Homo sapien
agatagataagaaaaaaatattggttgcaagtt

SEQ ID NO: 730622 - DNA, 33 bp, Homo sapien
agatagataagaaaaacatattggttgcaagtt

SEQ ID NO: 730623 - DNA, 33 bp, Homo sapien
tagaacaatgtggagaattttttaggacaaagt

SEQ ID NO: 730624 - DNA, 33 bp, Homo sapien
tagaacaatgtggagatttttttaggacaaagt

SEQ ID NO: 730625 - DNA, 33 bp, Homo sapien
aagcatgagacataataagctaatggtgaggga

SEQ ID NO: 730626 - DNA, 33 bp, Homo sapien
aagcatgagacataatgagctaatggtgaggga

SEQ ID NO: 730627 - DNA, 33 bp, Homo sapien
cttatgatctcagaaacaaagataatttttgat

SEQ ID NO: 730628 - DNA, 33 bp, Homo sapien
cttatgatctcagaaagaaagataatttttgat

SEQ ID NO: 730629 - DNA, 33 bp, Homo sapien
atggtggaaaccatgaagtctttcacttcggta

SEQ ID NO: 730630 - DNA, 33 bp, Homo sapien
atggtggaaaccatgatgtctttcacttcggta

SEQ ID NO: 730631 - DNA, 33 bp, Homo sapien
actcctgcctatgcccaaaagcgcttgctgcag

SEQ ID NO: 730632 - DNA, 33 bp, Homo sapien
actcctgcctatgcccgaaagcgcttgctgcag

SEQ ID NO: 730633 - DNA, 33 bp, Homo sapien
caaggcatccctgtcacgagtccacgatctagt

SEQ ID NO: 730634 - DNA, 33 bp, Homo sapien
caaggcatccctgtcatgagtccacgatctagt

SEQ ID NO: 730635 - DNA, 33 bp, Homo sapien
gagtccagataatccaaaaaagccaggataatc

SEQ ID NO: 730636 - DNA, 33 bp, Homo sapien
gagtccagataatccacaaaagccaggataatc

SEQ ID NO: 730637 - DNA, 33 bp, Homo sapien
gacaagggcactactgccactgcaagtttattc

SEQ ID NO: 730638 - DNA, 33 bp, Homo sapien
gacaagggcactactgtcactgcaagtttattc

SEQ ID NO: 730639 - DNA, 33 bp, Homo sapien
ggtggaggctgctgaaatccttctgttctattt

SEQ ID NO: 730640 - DNA, 33 bp, Homo sapien
ggtggaggctgctgaactccttctgttctattt

SEQ ID NO: 730641 - DNA, 33 bp, Homo sapien
ctcaacctcatcaacacctattggtttcaggtt

SEQ ID NO: 730642 - DNA, 33 bp, Homo sapien
ctcaacctcatcaacatctattggtttcaggtt

SEQ ID NO: 730643 - DNA, 33 bp, Homo sapien
caccaacaatatatacacatttcctttcctctg

SEQ ID NO: 730644 - DNA, 33 bp, Homo sapien
caccaacaatatatacgcatttcctttcctctg

SEQ ID NO: 730645 - DNA, 33 bp, Homo sapien
cagatttagaaaaaaaattgatattcatacaga

SEQ ID NO: 730646 - DNA, 33 bp, Homo sapien
cagatttagaaaaaaagttgatattcatacaga

SEQ ID NO: 730647 - DNA, 33 bp, Homo sapien
ctctttaacatagccactagtatggacttgcat

SEQ ID NO: 730648 - DNA, 33 bp, Homo sapien
ctctttaacatagccattagtatggacttgcat

SEQ ID NO: 730649 - DNA, 33 bp, Homo sapien
atataaaaagatcatgcaattttgagttgcaaa

SEQ ID NO: 730650 - DNA, 33 bp, Homo sapien
atataaaaagatcatggaattttgagttgcaaa

SEQ ID NO: 730651 - DNA, 33 bp, Homo sapien
atattcatgcaatataatagtcactcgctcctt

SEQ ID NO: 730652 - DNA, 33 bp, Homo sapien
atattcatgcaatatagtagtcactcgctcctt

SEQ ID NO: 730653 - DNA, 33 bp, Homo sapien
atgatagtcgacataaacttccgccacagtgga

SEQ ID NO: 730654 - DNA, 33 bp, Homo sapien
atgatagtcgacataatcttccgccacagtgga

SEQ ID NO: 730655 - DNA, 33 bp, Homo sapien
agtaaataatggtggacgactttggtagaaaac

SEQ ID NO: 730656 - DNA, 33 bp, Homo sapien
agtaaataatggtggatgactttggtagaaaac

SEQ ID NO: 730657 - DNA, 33 bp, Homo sapien
gtcactgacaaaaaaaatctatacagagagaaa

SEQ ID NO: 730658 - DNA, 33 bp, Homo sapien
gtcactgacaaaaaaagtctatacagagagaaa

SEQ ID NO: 730659 - DNA, 33 bp, Homo sapien
attaactgtagttttaaccattaatctcagccc

SEQ ID NO: 730660 - DNA, 33 bp, Homo sapien
attaactgtagttttagccattaatctcagccc

SEQ ID NO: 730661 - DNA, 33 bp, Homo sapien
tacatttcaagatagaataaaattttgccaata

SEQ ID NO: 730662 - DNA, 33 bp, Homo sapien
tacatttcaagatagagtaaaattttgccaata

SEQ ID NO: 730663 - DNA, 33 bp, Homo sapien
taaagagatttccaagacatcaatagctctcaa

SEQ ID NO: 730664 - DNA, 33 bp, Homo sapien
taaagagatttccaagtcatcaatagctctcaa

SEQ ID NO: 730665 - DNA, 33 bp, Homo sapien
gacatttggagaaaaacctaagcaggaaaaaaa

SEQ ID NO: 730666 - DNA, 33 bp, Homo sapien
gacatttggagaaaaatctaagcaggaaaaaaa

SEQ ID NO: 730667 - DNA, 33 bp, Homo sapien
attgtaatcaagtcaacggataatattcaccca

SEQ ID NO: 730668 - DNA, 33 bp, Homo sapien
attgtaatcaagtcaatggataatattcaccca

SEQ ID NO: 730669 - DNA, 33 bp, Homo sapien
aacagtgtagtgaagaacttaaatgacttgatg

SEQ ID NO: 730670 - DNA, 33 bp, Homo sapien
aacagtgtagtgaagaccttaaatgacttgatg

SEQ ID NO: 730671 - DNA, 33 bp, Homo sapien
catttctccattgcaccatgtatgaacaaaatc

SEQ ID NO: 730672 - DNA, 33 bp, Homo sapien
catttctccattgcactatgtatgaacaaaatc

SEQ ID NO: 730673 - DNA, 33 bp, Homo sapien
gaaggtagaaaattagacagaagccatgatctt

SEQ ID NO: 730674 - DNA, 33 bp, Homo sapien
gaaggtagaaaattagtcagaagccatgatctt

SEQ ID NO: 730675 - DNA, 33 bp, Homo sapien
tcaatgttcttaactacatccgaaaagaaaatt

SEQ ID NO: 730676 - DNA, 33 bp, Homo sapien
tcaatgttcttaactatatccgaaaagaaaatt

SEQ ID NO: 730677 - DNA, 33 bp, Homo sapien
tatttgaatgcttaaaagttaatcgggctacag

SEQ ID NO: 730678 - DNA, 33 bp, Homo sapien
tatttgaatgcttaaatgttaatcgggctacag

SEQ ID NO: 730679 - DNA, 33 bp, Homo sapien
gagagggcaaatgttgaatatctctagtcaggc

SEQ ID NO: 730680 - DNA, 33 bp, Homo sapien
gagagggcaaatgttggatatctctagtcaggc

SEQ ID NO: 730681 - DNA, 33 bp, Homo sapien
ttctgacagaagttacactagagttgtcatgta

SEQ ID NO: 730682 - DNA, 33 bp, Homo sapien
ttctgacagaagttactctagagttgtcatgta

SEQ ID NO: 730683 - DNA, 33 bp, Homo sapien
gtgggtttacaaagagaaagagtttgagttatc

SEQ ID NO: 730684 - DNA, 33 bp, Homo sapien
gtgggtttacaaagagtaagagtttgagttatc

SEQ ID NO: 730685 - DNA, 33 bp, Homo sapien
aacttaacagaactagaaaagagatcgaagaac

SEQ ID NO: 730686 - DNA, 33 bp, Homo sapien
aacttaacagaactagtaaagagatcgaagaac

SEQ ID NO: 730687 - DNA, 33 bp, Homo sapien
cgtctattgaaatgctaaatctgaaaagtatct

SEQ ID NO: 730688 - DNA, 33 bp, Homo sapien
cgtctattgaaatgctcaatctgaaaagtatct

SEQ ID NO: 730689 - DNA, 33 bp, Homo sapien
tctacccttttcaaacagtatgttctagttaca

SEQ ID NO: 730690 - DNA, 33 bp, Homo sapien
tctacccttttcaaactgtatgttctagttaca

SEQ ID NO: 730691 - DNA, 33 bp, Homo sapien
caccaaatgatgataacaaaactgttcatgata

SEQ ID NO: 730692 - DNA, 33 bp, Homo sapien
caccaaatgatgataagaaaactgttcatgata

SEQ ID NO: 730693 - DNA, 33 bp, Homo sapien
gtgtatttctgccaccggatggaccatttgtca

SEQ ID NO: 730694 - DNA, 33 bp, Homo sapien
gtgtatttctgccacctgatggaccatttgtca

SEQ ID NO: 730695 - DNA, 33 bp, Homo sapien
aaatagtgacccctcaggttgacttacaagata

SEQ ID NO: 730696 - DNA, 33 bp, Homo sapien
aaatagtgacccctcatgttgacttacaagata

SEQ ID NO: 730697 - DNA, 33 bp, Homo sapien
atgacctgatcagaaacggaagaacaagagaaa

SEQ ID NO: 730698 - DNA, 33 bp, Homo sapien
atgacctgatcagaaatggaagaacaagagaaa

SEQ ID NO: 730699 - DNA, 33 bp, Homo sapien
agaaaaaactactctcacaggctggaaaatcag

SEQ ID NO: 730700 - DNA, 33 bp, Homo sapien
agaaaaaactactctcgcaggctggaaaatcag

SEQ ID NO: 730701 - DNA, 33 bp, Homo sapien
atataggtcttttaaccagcatgaaagaggtta

SEQ ID NO: 730702 - DNA, 33 bp, Homo sapien
atataggtcttttaactagcatgaaagaggtta

SEQ ID NO: 730703 - DNA, 33 bp, Homo sapien
cttagcagtaaagtcacacagttttattcaaaa

SEQ ID NO: 730704 - DNA, 33 bp, Homo sapien
cttagcagtaaagtcatacagttttattcaaaa

SEQ ID NO: 730705 - DNA, 33 bp, Homo sapien
tagagtataggcaataacaatggtccaattgtt

SEQ ID NO: 730706 - DNA, 33 bp, Homo sapien
tagagtataggcaatatcaatggtccaattgtt

SEQ ID NO: 730707 - DNA, 33 bp, Homo sapien
tggggagccaaagagcaatggacctatggacct

SEQ ID NO: 730708 - DNA, 33 bp, Homo sapien
tggggagccaaagagcgatggacctatggacct

SEQ ID NO: 730709 - DNA, 33 bp, Homo sapien
gttgtcattctgtgtaagtgaccaaacttagcc

SEQ ID NO: 730710 - DNA, 33 bp, Homo sapien
gttgtcattctgtgtatgtgaccaaacttagcc

SEQ ID NO: 730711 - DNA, 33 bp, Homo sapien
gtacaaccatttagcaaagtaaccaagttctag

SEQ ID NO: 730712 - DNA, 33 bp, Homo sapien
gtacaaccatttagcagagtaaccaagttctag

SEQ ID NO: 730713 - DNA, 33 bp, Homo sapien
ttaaattcacagcacaatgccaattacattgta

SEQ ID NO: 730714 - DNA, 33 bp, Homo sapien
ttaaattcacagcacagtgccaattacattgta

SEQ ID NO: 730715 - DNA, 33 bp, Homo sapien
aagaaaaagtttggaacggttactgattaatat

SEQ ID NO: 730716 - DNA, 33 bp, Homo sapien
aagaaaaagtttggaatggttactgattaatat

SEQ ID NO: 730717 - DNA, 33 bp, Homo sapien
taattattaaataaatcagatcccacaaaatag

SEQ ID NO: 730718 - DNA, 33 bp, Homo sapien
taattattaaataaatgagatcccacaaaatag

SEQ ID NO: 730719 - DNA, 33 bp, Homo sapien
tttccccaaaactataaccaatagcacatatct

SEQ ID NO: 730720 - DNA, 33 bp, Homo sapien
tttccccaaaactatatccaatagcacatatct

SEQ ID NO: 730721 - DNA, 33 bp, Homo sapien
gtttgatcataaaaaaaagaaaggaaggagagg

SEQ ID NO: 730722 - DNA, 33 bp, Homo sapien
gtttgatcataaaaaagagaaaggaaggagagg

SEQ ID NO: 730723 - DNA, 33 bp, Homo sapien
acatcagcttgcttaacgagggaatgttcaccc

SEQ ID NO: 730724 - DNA, 33 bp, Homo sapien
acatcagcttgcttaatgagggaatgttcaccc

SEQ ID NO: 730725 - DNA, 33 bp, Homo sapien
ctgttatctttcaaataagagtgaaatcgaaca

SEQ ID NO: 730726 - DNA, 33 bp, Homo sapien
ctgttatctttcaaatgagagtgaaatcgaaca

SEQ ID NO: 730727 - DNA, 33 bp, Homo sapien
ttgatctaggtgataccggatgtaaagctagtt

SEQ ID NO: 730728 - DNA, 33 bp, Homo sapien
ttgatctaggtgatactggatgtaaagctagtt

SEQ ID NO: 730729 - DNA, 33 bp, Homo sapien
tcttgttcacaaataacgtagttgtccatataa

SEQ ID NO: 730730 - DNA, 33 bp, Homo sapien
tcttgttcacaaataatgtagttgtccatataa

SEQ ID NO: 730731 - DNA, 33 bp, Homo sapien
aaaatctggagagataagcaaatgaaaagagtg

SEQ ID NO: 730732 - DNA, 33 bp, Homo sapien
aaaatctggagagataggcaaatgaaaagagtg

SEQ ID NO: 730733 - DNA, 33 bp, Homo sapien
agagaatgggttgccaaattggaaattccaaat

SEQ ID NO: 730734 - DNA, 33 bp, Homo sapien
agagaatgggttgccatattggaaattccaaat

SEQ ID NO: 730735 - DNA, 33 bp, Homo sapien
actctgtatgttatcacgagagagaaatagaca

SEQ ID NO: 730736 - DNA, 33 bp, Homo sapien
actctgtatgttatcatgagagagaaatagaca

SEQ ID NO: 730737 - DNA, 33 bp, Homo sapien
atacattattaggaaccattttacagaaaataa

SEQ ID NO: 730738 - DNA, 33 bp, Homo sapien
atacattattaggaacgattttacagaaaataa

SEQ ID NO: 730739 - DNA, 33 bp, Homo sapien
atgttcaaggctgttaaaggtaagattcagaca

SEQ ID NO: 730740 - DNA, 33 bp, Homo sapien
atgttcaaggctgttagaggtaagattcagaca

SEQ ID NO: 730741 - DNA, 33 bp, Homo sapien
tgaatgtgacgtggcaaactcaaggggatgctc

SEQ ID NO: 730742 - DNA, 33 bp, Homo sapien
tgaatgtgacgtggcagactcaaggggatgctc

SEQ ID NO: 730743 - DNA, 33 bp, Homo sapien
aactacttgctgtaaaattaaatgcttttaatt

SEQ ID NO: 730744 - DNA, 33 bp, Homo sapien
aactacttgctgtaaagttaaatgcttttaatt

SEQ ID NO: 730745 - DNA, 33 bp, Homo sapien
ttgattatctaaattacgatgaaccatttttgc

SEQ ID NO: 730746 - DNA, 33 bp, Homo sapien
ttgattatctaaattatgatgaaccatttttgc

SEQ ID NO: 730747 - DNA, 33 bp, Homo sapien
ttattgatccttataagaaaattcctctcagtt

SEQ ID NO: 730748 - DNA, 33 bp, Homo sapien
ttattgatccttataataaaattcctctcagtt

SEQ ID NO: 730749 - DNA, 33 bp, Homo sapien
tgggttcgaaagcaaacggcaaataattttggt

SEQ ID NO: 730750 - DNA, 33 bp, Homo sapien
tgggttcgaaagcaaatggcaaataattttggt

SEQ ID NO: 730751 - DNA, 33 bp, Homo sapien
tgtaaatatgtataaccacacaatctaagtctt

SEQ ID NO: 730752 - DNA, 33 bp, Homo sapien
tgtaaatatgtataacgacacaatctaagtctt

SEQ ID NO: 730753 - DNA, 33 bp, Homo sapien
actaagtactatgttaagattggagatttttct

SEQ ID NO: 730754 - DNA, 33 bp, Homo sapien
actaagtactatgttaggattggagatttttct

SEQ ID NO: 730755 - DNA, 33 bp, Homo sapien
acatagtacttagttcacaaatattcactatgt

SEQ ID NO: 730756 - DNA, 33 bp, Homo sapien
acatagtacttagttcccaaatattcactatgt

SEQ ID NO: 730757 - DNA, 33 bp, Homo sapien
cctagcttccgataaactatgttactaaatgaa

SEQ ID NO: 730758 - DNA, 33 bp, Homo sapien
cctagcttccgataaattatgttactaaatgaa

SEQ ID NO: 730759 - DNA, 33 bp, Homo sapien
caccaatttaataacaataactgagcaatattc

SEQ ID NO: 730760 - DNA, 33 bp, Homo sapien
caccaatttaataacagtaactgagcaatattc

SEQ ID NO: 730761 - DNA, 33 bp, Homo sapien
ttaacagcttcttttgaaggatagatgttttac

SEQ ID NO: 730762 - DNA, 33 bp, Homo sapien
ttaacagcttcttttggaggatagatgttttac

SEQ ID NO: 730763 - DNA, 33 bp, Homo sapien
ggaggaagtgtaagtagggctatcagtcatata

SEQ ID NO: 730764 - DNA, 33 bp, Homo sapien
ggaggaagtgtaagtatggctatcagtcatata

SEQ ID NO: 730765 - DNA, 33 bp, Homo sapien
taggctgaggttcataacaggtgggttagcttc

SEQ ID NO: 730766 - DNA, 33 bp, Homo sapien
taggctgaggttcatagcaggtgggttagcttc

SEQ ID NO: 730767 - DNA, 33 bp, Homo sapien
tgagcaagtcatttgacgtatctagggtaacac

SEQ ID NO: 730768 - DNA, 33 bp, Homo sapien
tgagcaagtcatttgatgtatctagggtaacac

SEQ ID NO: 730769 - DNA, 33 bp, Homo sapien
tttacaaagtgtgaatcactactaaaatgtgag

SEQ ID NO: 730770 - DNA, 33 bp, Homo sapien
tttacaaagtgtgaatgactactaaaatgtgag

SEQ ID NO: 730771 - DNA, 33 bp, Homo sapien
tttcaacactgtggcccaacaaatacaagctta

SEQ ID NO: 730772 - DNA, 33 bp, Homo sapien
tttcaacactgtggcctaacaaatacaagctta

SEQ ID NO: 730773 - DNA, 33 bp, Homo sapien
tttcctcatgattgaacacaggctatagaattt

SEQ ID NO: 730774 - DNA, 33 bp, Homo sapien
tttcctcatgattgaatacaggctatagaattt

SEQ ID NO: 730775 - DNA, 33 bp, Homo sapien
atatatctgctttcacaagagtatacttttagc

SEQ ID NO: 730776 - DNA, 33 bp, Homo sapien
atatatctgctttcacgagagtatacttttagc

SEQ ID NO: 730777 - DNA, 33 bp, Homo sapien
tgaccgggcaattcaaatattcaaagaggtaga

SEQ ID NO: 730778 - DNA, 33 bp, Homo sapien
tgaccgggcaattcaagtattcaaagaggtaga

SEQ ID NO: 730779 - DNA, 33 bp, Homo sapien
tatcagttgttttatactaggaaaatcagtaaa

SEQ ID NO: 730780 - DNA, 33 bp, Homo sapien
tatcagttgttttatagtaggaaaatcagtaaa

SEQ ID NO: 730781 - DNA, 33 bp, Homo sapien
tgcagctctggcagtcaataaggctactttgtt

SEQ ID NO: 730782 - DNA, 33 bp, Homo sapien
tgcagctctggcagtctataaggctactttgtt

SEQ ID NO: 730783 - DNA, 33 bp, Homo sapien
ttaaatcatgtatgacaggaaaagcagacattt

SEQ ID NO: 730784 - DNA, 33 bp, Homo sapien
ttaaatcatgtatgaccggaaaagcagacattt

SEQ ID NO: 730785 - DNA, 33 bp, Homo sapien
gttttccaattacaacagcttttttttccataa

SEQ ID NO: 730786 - DNA, 33 bp, Homo sapien
gttttccaattacaactgcttttttttccataa

SEQ ID NO: 730787 - DNA, 33 bp, Homo sapien
gtcaaataaaggaaccactttcgctgccacatc

SEQ ID NO: 730788 - DNA, 33 bp, Homo sapien
gtcaaataaaggaacctctttcgctgccacatc

SEQ ID NO: 730789 - DNA, 33 bp, Homo sapien
ccatatatcaaagatgaaaacaattcaaactgt

SEQ ID NO: 730790 - DNA, 33 bp, Homo sapien
ccatatatcaaagatggaaacaattcaaactgt

SEQ ID NO: 730791 - DNA, 33 bp, Homo sapien
atccaataaattgcgccctactctcagtctgat

SEQ ID NO: 730792 - DNA, 33 bp, Homo sapien
atccaataaattgcgctctactctcagtctgat

SEQ ID NO: 730793 - DNA, 33 bp, Homo sapien
aatgagtgagtattatcaggtaaaggtctagca

SEQ ID NO: 730794 - DNA, 33 bp, Homo sapien
aatgagtgagtattatgaggtaaaggtctagca

SEQ ID NO: 730795 - DNA, 33 bp, Homo sapien
cactacctgcatttgacacaaaccttgatcctt

SEQ ID NO: 730796 - DNA, 33 bp, Homo sapien
cactacctgcatttgatacaaaccttgatcctt

SEQ ID NO: 730797 - DNA, 33 bp, Homo sapien
acacctaactctccacggtcactgaatttgaaa

SEQ ID NO: 730798 - DNA, 33 bp, Homo sapien
acacctaactctccactgtcactgaatttgaaa

SEQ ID NO: 730799 - DNA, 33 bp, Homo sapien
tttgcatccaaaaggtcacatccaaatagaggg

SEQ ID NO: 730800 - DNA, 33 bp, Homo sapien
tttgcatccaaaaggttacatccaaatagaggg

SEQ ID NO: 730801 - DNA, 33 bp, Homo sapien
cgaagaattgcagtgaggtcattaataacttta

SEQ ID NO: 730802 - DNA, 33 bp, Homo sapien
cgaagaattgcagtgatgtcattaataacttta

SEQ ID NO: 730803 - DNA, 33 bp, Homo sapien
ttgtgctgagttaaccacatactgtccagcata

SEQ ID NO: 730804 - DNA, 33 bp, Homo sapien
ttgtgctgagttaaccgcatactgtccagcata

SEQ ID NO: 730805 - DNA, 33 bp, Homo sapien
atatattttacagcacaagtctcatattccata

SEQ ID NO: 730806 - DNA, 33 bp, Homo sapien
atatattttacagcaccagtctcatattccata

SEQ ID NO: 730807 - DNA, 33 bp, Homo sapien
aaatagaataatgcaaactggcctttcaatgag

SEQ ID NO: 730808 - DNA, 33 bp, Homo sapien
aaatagaataatgcaagctggcctttcaatgag

SEQ ID NO: 730809 - DNA, 33 bp, Homo sapien
tgtaagcacttttcatcacagaaattcaataat

SEQ ID NO: 730810 - DNA, 33 bp, Homo sapien
tgtaagcacttttcatgacagaaattcaataat

SEQ ID NO: 730811 - DNA, 33 bp, Homo sapien
gtatttttattgcaagacagaagacacggaaat

SEQ ID NO: 730812 - DNA, 33 bp, Homo sapien
gtatttttattgcaagtcagaagacacggaaat

SEQ ID NO: 730813 - DNA, 33 bp, Homo sapien
cgggagatatgtttgcgaatcttcataatactg

SEQ ID NO: 730814 - DNA, 33 bp, Homo sapien
cgggagatatgtttgctaatcttcataatactg

SEQ ID NO: 730815 - DNA, 33 bp, Homo sapien
actgtatacaatgccaccaaaatatgtaatgaa

SEQ ID NO: 730816 - DNA, 33 bp, Homo sapien
actgtatacaatgccatcaaaatatgtaatgaa

SEQ ID NO: 730817 - DNA, 33 bp, Homo sapien
attaataatagcagacaatgtaaagaagaaaaa

SEQ ID NO: 730818 - DNA, 33 bp, Homo sapien
attaataatagcagacgatgtaaagaagaaaaa

SEQ ID NO: 730819 - DNA, 33 bp, Homo sapien
ggaaccaacaaatggccgaggagatctgctgtg

SEQ ID NO: 730820 - DNA, 33 bp, Homo sapien
ggaaccaacaaatggctgaggagatctgctgtg

SEQ ID NO: 730821 - DNA, 33 bp, Homo sapien
tgagaaagagtgtggcaaggtctggaatttagt

SEQ ID NO: 730822 - DNA, 33 bp, Homo sapien
tgagaaagagtgtggcgaggtctggaatttagt

SEQ ID NO: 730823 - DNA, 33 bp, Homo sapien
ttattgaaggtcattgcattaatttagtgacta

SEQ ID NO: 730824 - DNA, 33 bp, Homo sapien
ttattgaaggtcattgtattaatttagtgacta

SEQ ID NO: 730825 - DNA, 33 bp, Homo sapien
agaagaaagctgaaaaagacacattctaagaag

SEQ ID NO: 730826 - DNA, 33 bp, Homo sapien
agaagaaagctgaaaaggacacattctaagaag

SEQ ID NO: 730827 - DNA, 33 bp, Homo sapien
ttcaatcttcttatcacgcttgtcatcacttga

SEQ ID NO: 730828 - DNA, 33 bp, Homo sapien
ttcaatcttcttatcatgcttgtcatcacttga

SEQ ID NO: 730829 - DNA, 33 bp, Homo sapien
agtaatcttcacaatgaaagtgacttgaagatt

SEQ ID NO: 730830 - DNA, 33 bp, Homo sapien
agtaatcttcacaatggaagtgacttgaagatt

SEQ ID NO: 730831 - DNA, 33 bp, Homo sapien
tttggaattgatgtacacagctatttaattatg

SEQ ID NO: 730832 - DNA, 33 bp, Homo sapien
tttggaattgatgtacccagctatttaattatg

SEQ ID NO: 730833 - DNA, 33 bp, Homo sapien
tattgtaatttaagtacgaatgagagtgccaag

SEQ ID NO: 730834 - DNA, 33 bp, Homo sapien
tattgtaatttaagtatgaatgagagtgccaag

SEQ ID NO: 730835 - DNA, 33 bp, Homo sapien
ttccaaagtattggtcaagatagtcattggcta

SEQ ID NO: 730836 - DNA, 33 bp, Homo sapien
ttccaaagtattggtcgagatagtcattggcta

SEQ ID NO: 730837 - DNA, 33 bp, Homo sapien
caggagaaaattattacgcgatatatactatac

SEQ ID NO: 730838 - DNA, 33 bp, Homo sapien
caggagaaaattattatgcgatatatactatac

SEQ ID NO: 730839 - DNA, 33 bp, Homo sapien
tataaatgcatccacactagtctctgtttctgt

SEQ ID NO: 730840 - DNA, 33 bp, Homo sapien
tataaatgcatccacagtagtctctgtttctgt

SEQ ID NO: 730841 - DNA, 33 bp, Homo sapien
ttcataattttctacccgcataattcccatata

SEQ ID NO: 730842 - DNA, 33 bp, Homo sapien
ttcataattttctacctgcataattcccatata

SEQ ID NO: 730843 - DNA, 33 bp, Homo sapien
cagttctaaatatggaatagacttgccatgaat

SEQ ID NO: 730844 - DNA, 33 bp, Homo sapien
cagttctaaatatggagtagacttgccatgaat

SEQ ID NO: 730845 - DNA, 33 bp, Homo sapien
atgtacagtgtaaaacaattgatctcatagaaa

SEQ ID NO: 730846 - DNA, 33 bp, Homo sapien
atgtacagtgtaaaacgattgatctcatagaaa

SEQ ID NO: 730847 - DNA, 33 bp, Homo sapien
gttcctagaacattaacaaggaaacgatggcca

SEQ ID NO: 730848 - DNA, 33 bp, Homo sapien
gttcctagaacattaagaaggaaacgatggcca

SEQ ID NO: 730849 - DNA, 33 bp, Homo sapien
gagatcagtctggacaacatagtgatacactat

SEQ ID NO: 730850 - DNA, 33 bp, Homo sapien
gagatcagtctggacagcatagtgatacactat

SEQ ID NO: 730851 - DNA, 33 bp, Homo sapien
ttacttgatataataaaatcacataggaagtac

SEQ ID NO: 730852 - DNA, 33 bp, Homo sapien
ttacttgatataataagatcacataggaagtac

SEQ ID NO: 730853 - DNA, 33 bp, Homo sapien
gaacacagcattcctcaaaattcttagtactct

SEQ ID NO: 730854 - DNA, 33 bp, Homo sapien
gaacacagcattcctccaaattcttagtactct

SEQ ID NO: 730855 - DNA, 33 bp, Homo sapien
ctgtcacagatgtctgaaattgttaaaattagc

SEQ ID NO: 730856 - DNA, 33 bp, Homo sapien
ctgtcacagatgtctgcaattgttaaaattagc

SEQ ID NO: 730857 - DNA, 33 bp, Homo sapien
gaaatgtggggttgaacgtcctatgcagagtcc

SEQ ID NO: 730858 - DNA, 33 bp, Homo sapien
gaaatgtggggttgaaggtcctatgcagagtcc

SEQ ID NO: 730859 - DNA, 33 bp, Homo sapien
gtttgggtatttgccacccctaattccatgttg

SEQ ID NO: 730860 - DNA, 33 bp, Homo sapien
gtttgggtatttgccatccctaattccatgttg

SEQ ID NO: 730861 - DNA, 33 bp, Homo sapien
atgaaaatcttgcaacggctattcttagtaact

SEQ ID NO: 730862 - DNA, 33 bp, Homo sapien
atgaaaatcttgcaactgctattcttagtaact

SEQ ID NO: 730863 - DNA, 33 bp, Homo sapien
tcttctttagttgaaactaggctatcttacaaa

SEQ ID NO: 730864 - DNA, 33 bp, Homo sapien
tcttctttagttgaaagtaggctatcttacaaa

SEQ ID NO: 730865 - DNA, 33 bp, Homo sapien
attatatacttatgacaatagagcctgggttct

SEQ ID NO: 730866 - DNA, 33 bp, Homo sapien
attatatacttatgactatagagcctgggttct

SEQ ID NO: 730867 - DNA, 33 bp, Homo sapien
agatgctgtgcctaagacttaagtgacaggaaa

SEQ ID NO: 730868 - DNA, 33 bp, Homo sapien
agatgctgtgcctaaggcttaagtgacaggaaa

SEQ ID NO: 730869 - DNA, 33 bp, Homo sapien
catagaaaggtatgagaaagacaatagccatca

SEQ ID NO: 730870 - DNA, 33 bp, Homo sapien
catagaaaggtatgaggaagacaatagccatca

SEQ ID NO: 730871 - DNA, 33 bp, Homo sapien
aagacaatagccatcacgtatgacaatatagtt

SEQ ID NO: 730872 - DNA, 33 bp, Homo sapien
aagacaatagccatcatgtatgacaatatagtt

SEQ ID NO: 730873 - DNA, 33 bp, Homo sapien
tgagagattcataagactacctcaaataaaatt

SEQ ID NO: 730874 - DNA, 33 bp, Homo sapien
tgagagattcataagattacctcaaataaaatt

SEQ ID NO: 730875 - DNA, 33 bp, Homo sapien
atccataaaacaatgactagtcactttcttcct

SEQ ID NO: 730876 - DNA, 33 bp, Homo sapien
atccataaaacaatgattagtcactttcttcct

SEQ ID NO: 730877 - DNA, 33 bp, Homo sapien
agtcatgatattaaaagaaatgtttgatgctct

SEQ ID NO: 730878 - DNA, 33 bp, Homo sapien
agtcatgatattaaaataaatgtttgatgctct

SEQ ID NO: 730879 - DNA, 33 bp, Homo sapien
attccatcttcagtccacgtagatttatatgtc

SEQ ID NO: 730880 - DNA, 33 bp, Homo sapien
attccatcttcagtcctcgtagatttatatgtc

SEQ ID NO: 730881 - DNA, 33 bp, Homo sapien
gctgaacacctaactcactgttttgtgtacgtc

SEQ ID NO: 730882 - DNA, 33 bp, Homo sapien
gctgaacacctaactcgctgttttgtgtacgtc

SEQ ID NO: 730883 - DNA, 33 bp, Homo sapien
ccttaccttgaaactaccttttagagactgttg

SEQ ID NO: 730884 - DNA, 33 bp, Homo sapien
ccttaccttgaaactatcttttagagactgttg

SEQ ID NO: 730885 - DNA, 33 bp, Homo sapien
tagacacaactacaccacaaataattgtaaatt

SEQ ID NO: 730886 - DNA, 33 bp, Homo sapien
tagacacaactacaccgcaaataattgtaaatt

SEQ ID NO: 730887 - DNA, 33 bp, Homo sapien
tttgacttcaccatcaaatttttatagttttct

SEQ ID NO: 730888 - DNA, 33 bp, Homo sapien
tttgacttcaccatcatatttttatagttttct

SEQ ID NO: 730889 - DNA, 33 bp, Homo sapien
ggggagaatttgagagacaatttaaatctaaat

SEQ ID NO: 730890 - DNA, 33 bp, Homo sapien
ggggagaatttgagaggcaatttaaatctaaat

SEQ ID NO: 730891 - DNA, 33 bp, Homo sapien
taagttcctccattaccaattttacaggcaatg

SEQ ID NO: 730892 - DNA, 33 bp, Homo sapien
taagttcctccattacgaattttacaggcaatg

SEQ ID NO: 730893 - DNA, 33 bp, Homo sapien
ataaactctgaaactcaaatattgtcataatgg

SEQ ID NO: 730894 - DNA, 33 bp, Homo sapien
ataaactctgaaactcgaatattgtcataatgg

SEQ ID NO: 730895 - DNA, 33 bp, Homo sapien
aagagtttagagttatcagagtggaataatgtg

SEQ ID NO: 730896 - DNA, 33 bp, Homo sapien
aagagtttagagttattagagtggaataatgtg

SEQ ID NO: 730897 - DNA, 33 bp, Homo sapien
aagaggaagtataatcacaatcttctgcttaaa

SEQ ID NO: 730898 - DNA, 33 bp, Homo sapien
aagaggaagtataatcgcaatcttctgcttaaa

SEQ ID NO: 730899 - DNA, 33 bp, Homo sapien
tttgagaagagttctagatcaagaggaagtata

SEQ ID NO: 730900 - DNA, 33 bp, Homo sapien
tttgagaagagttctatatcaagaggaagtata

SEQ ID NO: 730901 - DNA, 33 bp, Homo sapien
cacttagaccagacaaacatctcagatgcacaa

SEQ ID NO: 730902 - DNA, 33 bp, Homo sapien
cacttagaccagacaagcatctcagatgcacaa

SEQ ID NO: 730903 - DNA, 33 bp, Homo sapien
actcttgtgtgggaaacttacatctgtagagtc

SEQ ID NO: 730904 - DNA, 33 bp, Homo sapien
actcttgtgtgggaaatttacatctgtagagtc

SEQ ID NO: 730905 - DNA, 33 bp, Homo sapien
atttatcacgtggttgacaaacataaggcattg

SEQ ID NO: 730906 - DNA, 33 bp, Homo sapien
atttatcacgtggttggcaaacataaggcattg

SEQ ID NO: 730907 - DNA, 33 bp, Homo sapien
acgcttcagtttctaaggagaaataaggagaat

SEQ ID NO: 730908 - DNA, 33 bp, Homo sapien
acgcttcagtttctaatgagaaataaggagaat

SEQ ID NO: 730909 - DNA, 33 bp, Homo sapien
ttggattccagcacgacgtattaaaccatacca

SEQ ID NO: 730910 - DNA, 33 bp, Homo sapien
ttggattccagcacgatgtattaaaccatacca

SEQ ID NO: 730911 - DNA, 33 bp, Homo sapien
gagtattcacatattcacaaatatctggactct

SEQ ID NO: 730912 - DNA, 33 bp, Homo sapien
gagtattcacatattcgcaaatatctggactct

SEQ ID NO: 730913 - DNA, 33 bp, Homo sapien
gtcaattgtagtttgacatctataaatcccctt

SEQ ID NO: 730914 - DNA, 33 bp, Homo sapien
gtcaattgtagtttgagatctataaatcccctt

SEQ ID NO: 730915 - DNA, 33 bp, Homo sapien
ttccttatgaatttacactttgatcattatata

SEQ ID NO: 730916 - DNA, 33 bp, Homo sapien
ttccttatgaatttacgctttgatcattatata

SEQ ID NO: 730917 - DNA, 33 bp, Homo sapien
cagataaagctctggaaattctagaaaagagat

SEQ ID NO: 730918 - DNA, 33 bp, Homo sapien
cagataaagctctggatattctagaaaagagat

SEQ ID NO: 730919 - DNA, 33 bp, Homo sapien
gtctgagaagatttaacgccaagctccctggtg

SEQ ID NO: 730920 - DNA, 33 bp, Homo sapien
gtctgagaagatttaatgccaagctccctggtg

SEQ ID NO: 730921 - DNA, 33 bp, Homo sapien
atccagtcttccttcacggatttcgaactccct

SEQ ID NO: 730922 - DNA, 33 bp, Homo sapien
atccagtcttccttcatggatttcgaactccct

SEQ ID NO: 730923 - DNA, 33 bp, Homo sapien
gtcaaggttttttcacaatgtactgctagtgta

SEQ ID NO: 730924 - DNA, 33 bp, Homo sapien
gtcaaggttttttcaccatgtactgctagtgta

SEQ ID NO: 730925 - DNA, 33 bp, Homo sapien
ttttttcttgtagacaccattgtcagtgtgaag

SEQ ID NO: 730926 - DNA, 33 bp, Homo sapien
ttttttcttgtagacatcattgtcagtgtgaag

SEQ ID NO: 730927 - DNA, 33 bp, Homo sapien
aagtacgggaaattgagctatttataactgcct

SEQ ID NO: 730928 - DNA, 33 bp, Homo sapien
aagtacgggaaattgatctatttataactgcct

SEQ ID NO: 730929 - DNA, 33 bp, Homo sapien
aaatacagatgactcacagtttctaatttatac

SEQ ID NO: 730930 - DNA, 33 bp, Homo sapien
aaatacagatgactcatagtttctaatttatac

SEQ ID NO: 730931 - DNA, 33 bp, Homo sapien
ggtcacctatatgtaacggaatgaggagttcaa

SEQ ID NO: 730932 - DNA, 33 bp, Homo sapien
ggtcacctatatgtaatggaatgaggagttcaa

SEQ ID NO: 730933 - DNA, 33 bp, Homo sapien
gaggaagtcacttaaactgaagcatcccttctc

SEQ ID NO: 730934 - DNA, 33 bp, Homo sapien
gaggaagtcacttaaattgaagcatcccttctc

SEQ ID NO: 730935 - DNA, 33 bp, Homo sapien
taagattaaagtagatcaaggtgctaagctttt

SEQ ID NO: 730936 - DNA, 33 bp, Homo sapien
taagattaaagtagatgaaggtgctaagctttt

SEQ ID NO: 730937 - DNA, 33 bp, Homo sapien
accacagattgcatctaaatgttgtatactcag

SEQ ID NO: 730938 - DNA, 33 bp, Homo sapien
accacagattgcatcttaatgttgtatactcag

SEQ ID NO: 730939 - DNA, 33 bp, Homo sapien
tagttgaggcataacaataagttttcttgtcag

SEQ ID NO: 730940 - DNA, 33 bp, Homo sapien
tagttgaggcataacagtaagttttcttgtcag

SEQ ID NO: 730941 - DNA, 33 bp, Homo sapien
aaaagagacagaaaaacttcttcaaagctgatg

SEQ ID NO: 730942 - DNA, 33 bp, Homo sapien
aaaagagacagaaaaatttcttcaaagctgatg

SEQ ID NO: 730943 - DNA, 33 bp, Homo sapien
tttggctcattcttgcagagtttctttctgcgg

SEQ ID NO: 730944 - DNA, 33 bp, Homo sapien
tttggctcattcttgcggagtttctttctgcgg

SEQ ID NO: 730945 - DNA, 33 bp, Homo sapien
ccccacacacctagccactatgcaatgactcag

SEQ ID NO: 730946 - DNA, 33 bp, Homo sapien
ccccacacacctagccgctatgcaatgactcag

SEQ ID NO: 730947 - DNA, 33 bp, Homo sapien
tttttgcaagttactaggttggttatgatactt

SEQ ID NO: 730948 - DNA, 33 bp, Homo sapien
tttttgcaagttactatgttggttatgatactt

SEQ ID NO: 730949 - DNA, 33 bp, Homo sapien
cagttggtgagcccatcatgcaggcttagacac

SEQ ID NO: 730950 - DNA, 33 bp, Homo sapien
cagttggtgagcccattatgcaggcttagacac

SEQ ID NO: 730951 - DNA, 33 bp, Homo sapien
ttgttgtacaagagcacattgtttaacttcaat

SEQ ID NO: 730952 - DNA, 33 bp, Homo sapien
ttgttgtacaagagcatattgtttaacttcaat

SEQ ID NO: 730953 - DNA, 33 bp, Homo sapien
tacctctgtttcctgaatagttgagatcacagg

SEQ ID NO: 730954 - DNA, 33 bp, Homo sapien
tacctctgtttcctgagtagttgagatcacagg

SEQ ID NO: 730955 - DNA, 33 bp, Homo sapien
ggaaggttgcttccccaagtgaaaatcaggtgg

SEQ ID NO: 730956 - DNA, 33 bp, Homo sapien
ggaaggttgcttccccgagtgaaaatcaggtgg

SEQ ID NO: 730957 - DNA, 33 bp, Homo sapien
gagtcttgtcttcaaacacttgtttcaaacagc

SEQ ID NO: 730958 - DNA, 33 bp, Homo sapien
gagtcttgtcttcaaatacttgtttcaaacagc

SEQ ID NO: 730959 - DNA, 33 bp, Homo sapien
ggtgatagtgggatccaatgaaataccatcttg

SEQ ID NO: 730960 - DNA, 33 bp, Homo sapien
ggtgatagtgggatccgatgaaataccatcttg

SEQ ID NO: 730961 - DNA, 33 bp, Homo sapien
gtttatcttgttttaacgggtagctggctctct

SEQ ID NO: 730962 - DNA, 33 bp, Homo sapien
gtttatcttgttttaatgggtagctggctctct

SEQ ID NO: 730963 - DNA, 33 bp, Homo sapien
tttaatggagcttgaagtgtagttttaaaataa

SEQ ID NO: 730964 - DNA, 33 bp, Homo sapien
tttaatggagcttgaattgtagttttaaaataa

SEQ ID NO: 730965 - DNA, 33 bp, Homo sapien
ttcatattgttactcaactgtacatttatatag

SEQ ID NO: 730966 - DNA, 33 bp, Homo sapien
ttcatattgttactcagctgtacatttatatag

SEQ ID NO: 730967 - DNA, 33 bp, Homo sapien
gccctacgttattgaaaaatttctgtgagagaa

SEQ ID NO: 730968 - DNA, 33 bp, Homo sapien
gccctacgttattgaacaatttctgtgagagaa

SEQ ID NO: 730969 - DNA, 33 bp, Homo sapien
tattttgattgggagaggttttataggaaatgt

SEQ ID NO: 730970 - DNA, 33 bp, Homo sapien
tattttgattgggagatgttttataggaaatgt

SEQ ID NO: 730971 - DNA, 33 bp, Homo sapien
ttatgtggttaggtagaaaacagaaagaataaa

SEQ ID NO: 730972 - DNA, 33 bp, Homo sapien
ttatgtggttaggtagcaaacagaaagaataaa

SEQ ID NO: 730973 - DNA, 33 bp, Homo sapien
cagttcctttgataagacctgatgtttacatag

SEQ ID NO: 730974 - DNA, 33 bp, Homo sapien
cagttcctttgataaggcctgatgtttacatag

SEQ ID NO: 730975 - DNA, 33 bp, Homo sapien
tgaggagtttagcaacagagttttaataggtag

SEQ ID NO: 730976 - DNA, 33 bp, Homo sapien
tgaggagtttagcaacggagttttaataggtag

SEQ ID NO: 730977 - DNA, 33 bp, Homo sapien
gctaagtcctctgtgaaaagaagcttgttaaag

SEQ ID NO: 730978 - DNA, 33 bp, Homo sapien
gctaagtcctctgtgacaagaagcttgttaaag

SEQ ID NO: 730979 - DNA, 33 bp, Homo sapien
gacttgtggaactagaggctgaaaagagtcaga

SEQ ID NO: 730980 - DNA, 33 bp, Homo sapien
gacttgtggaactagatgctgaaaagagtcaga

SEQ ID NO: 730981 - DNA, 33 bp, Homo sapien
tcgtatggagatttaaccaaaagagaagattgg

SEQ ID NO: 730982 - DNA, 33 bp, Homo sapien
tcgtatggagatttaatcaaaagagaagattgg

SEQ ID NO: 730983 - DNA, 33 bp, Homo sapien
caagacaatgaaatgcaaaagaaaagatctcca

SEQ ID NO: 730984 - DNA, 33 bp, Homo sapien
caagacaatgaaatgccaaagaaaagatctcca

SEQ ID NO: 730985 - DNA, 33 bp, Homo sapien
gacttatcaacttttcaaagtcacccagaaaat

SEQ ID NO: 730986 - DNA, 33 bp, Homo sapien
gacttatcaacttttctaagtcacccagaaaat

SEQ ID NO: 730987 - DNA, 33 bp, Homo sapien
ctataaaatgagcataataatacctgcatctca

SEQ ID NO: 730988 - DNA, 33 bp, Homo sapien
ctataaaatgagcatagtaatacctgcatctca

SEQ ID NO: 730989 - DNA, 33 bp, Homo sapien
acatttaacattatccaaaactacttggagtct

SEQ ID NO: 730990 - DNA, 33 bp, Homo sapien
acatttaacattatcccaaactacttggagtct

SEQ ID NO: 730991 - DNA, 33 bp, Homo sapien
actctgggttgcaaaacaggagatgagcttaag

SEQ ID NO: 730992 - DNA, 33 bp, Homo sapien
actctgggttgcaaaataggagatgagcttaag

SEQ ID NO: 730993 - DNA, 33 bp, Homo sapien
acaagaaagctgtgtcagaaacttaaatgaaaa

SEQ ID NO: 730994 - DNA, 33 bp, Homo sapien
acaagaaagctgtgtcggaaacttaaatgaaaa

SEQ ID NO: 730995 - DNA, 33 bp, Homo sapien
ctgggactagatcataagaatcttgaagttcct

SEQ ID NO: 730996 - DNA, 33 bp, Homo sapien
ctgggactagatcataggaatcttgaagttcct

SEQ ID NO: 730997 - DNA, 33 bp, Homo sapien
tcagacaaaaataaagacaacagaataagaaag

SEQ ID NO: 730998 - DNA, 33 bp, Homo sapien
tcagacaaaaataaagtcaacagaataagaaag

SEQ ID NO: 730999 - DNA, 33 bp, Homo sapien
tgattagtactcctcaaactgtcaagatcatca

SEQ ID NO: 731000 - DNA, 33 bp, Homo sapien
tgattagtactcctcagactgtcaagatcatca

SEQ ID NO: 731001 - DNA, 33 bp, Homo sapien
agctgactcactaaataaagtcagcgaataaat

SEQ ID NO: 731002 - DNA, 33 bp, Homo sapien
agctgactcactaaatcaagtcagcgaataaat

SEQ ID NO: 731003 - DNA, 33 bp, Homo sapien
cacataatgtgcatgacgaaatgtaccctcaca

SEQ ID NO: 731004 - DNA, 33 bp, Homo sapien
cacataatgtgcatgatgaaatgtaccctcaca

SEQ ID NO: 731005 - DNA, 33 bp, Homo sapien
gacacctccagtacgagaaaatgtgctagatta

SEQ ID NO: 731006 - DNA, 33 bp, Homo sapien
gacacctccagtacgataaaatgtgctagatta

SEQ ID NO: 731007 - DNA, 33 bp, Homo sapien
acctctgaccactggaaccttacaaaattcaca

SEQ ID NO: 731008 - DNA, 33 bp, Homo sapien
acctctgaccactggacccttacaaaattcaca

SEQ ID NO: 731009 - DNA, 33 bp, Homo sapien
atttattggatgttcccctagaaatataatcca

SEQ ID NO: 731010 - DNA, 33 bp, Homo sapien
atttattggatgttcctctagaaatataatcca

SEQ ID NO: 731011 - DNA, 33 bp, Homo sapien
ttggatctcattctccacactttttttaccata

SEQ ID NO: 731012 - DNA, 33 bp, Homo sapien
ttggatctcattctccgcactttttttaccata

SEQ ID NO: 731013 - DNA, 33 bp, Homo sapien
ttctggttgggagtcaaagatagttaaacttga

SEQ ID NO: 731014 - DNA, 33 bp, Homo sapien
ttctggttgggagtcagagatagttaaacttga

SEQ ID NO: 731015 - DNA, 33 bp, Homo sapien
acagaagtttcacaaaatcaagcaaaaaatgca

SEQ ID NO: 731016 - DNA, 33 bp, Homo sapien
acagaagtttcacaaagtcaagcaaaaaatgca

SEQ ID NO: 731017 - DNA, 33 bp, Homo sapien
tctataatttttcaagacccaattgcaaataca

SEQ ID NO: 731018 - DNA, 33 bp, Homo sapien
tctataatttttcaaggcccaattgcaaataca

SEQ ID NO: 731019 - DNA, 33 bp, Homo sapien
aaaacactttaaaaaaatttggatgtcactgca

SEQ ID NO: 731020 - DNA, 33 bp, Homo sapien
aaaacactttaaaaaactttggatgtcactgca

SEQ ID NO: 731021 - DNA, 33 bp, Homo sapien
agttcatgaaattcctcagaccttatttttctc

SEQ ID NO: 731022 - DNA, 33 bp, Homo sapien
agttcatgaaattcctgagaccttatttttctc

SEQ ID NO: 731023 - DNA, 33 bp, Homo sapien
tgccaaaatatttcccactgccagtagtacaca

SEQ ID NO: 731024 - DNA, 33 bp, Homo sapien
tgccaaaatatttcccgctgccagtagtacaca

SEQ ID NO: 731025 - DNA, 33 bp, Homo sapien
gcaaaagtcaaggagcaactaagattgtgctat

SEQ ID NO: 731026 - DNA, 33 bp, Homo sapien
gcaaaagtcaaggagctactaagattgtgctat

SEQ ID NO: 731027 - DNA, 33 bp, Homo sapien
ggggtttctcatccaccgctagtaggagcaacc

SEQ ID NO: 731028 - DNA, 33 bp, Homo sapien
ggggtttctcatccactgctagtaggagcaacc

SEQ ID NO: 731029 - DNA, 33 bp, Homo sapien
ggtatttactgaagccagaatacactgatgata

SEQ ID NO: 731030 - DNA, 33 bp, Homo sapien
ggtatttactgaagccggaatacactgatgata

SEQ ID NO: 731031 - DNA, 33 bp, Homo sapien
aaaaaaagtcaggaaaaatcatcacatttcttg

SEQ ID NO: 731032 - DNA, 33 bp, Homo sapien
aaaaaaagtcaggaaagatcatcacatttcttg

SEQ ID NO: 731033 - DNA, 33 bp, Homo sapien
ataatgtacattagtcactacaggattaaatgg

SEQ ID NO: 731034 - DNA, 33 bp, Homo sapien
ataatgtacattagtcgctacaggattaaatgg

SEQ ID NO: 731035 - DNA, 33 bp, Homo sapien
ttgtgagacccattcaaaataacaagaacagca

SEQ ID NO: 731036 - DNA, 33 bp, Homo sapien
ttgtgagacccattcacaataacaagaacagca

SEQ ID NO: 731037 - DNA, 33 bp, Homo sapien
gggctaccttcaactcactagcagcaagttttt

SEQ ID NO: 731038 - DNA, 33 bp, Homo sapien
gggctaccttcaactcgctagcagcaagttttt

SEQ ID NO: 731039 - DNA, 33 bp, Homo sapien
gcttagcctgtcaaaagtaaacctgcaattgct

SEQ ID NO: 731040 - DNA, 33 bp, Homo sapien
gcttagcctgtcaaaattaaacctgcaattgct

SEQ ID NO: 731041 - DNA, 33 bp, Homo sapien
tgacctatggagtgacagctattataatggaaa

SEQ ID NO: 731042 - DNA, 33 bp, Homo sapien
tgacctatggagtgacggctattataatggaaa

SEQ ID NO: 731043 - DNA, 33 bp, Homo sapien
tattcacatgtggtacaaatatctgcatgtttt

SEQ ID NO: 731044 - DNA, 33 bp, Homo sapien
tattcacatgtggtaccaatatctgcatgtttt

SEQ ID NO: 731045 - DNA, 33 bp, Homo sapien
ttaattcatgttggtacagcgagtgcaaattca

SEQ ID NO: 731046 - DNA, 33 bp, Homo sapien
ttaattcatgttggtatagcgagtgcaaattca

SEQ ID NO: 731047 - DNA, 33 bp, Homo sapien
gataactgttttaccacatgcagaagatggaaa

SEQ ID NO: 731048 - DNA, 33 bp, Homo sapien
gataactgttttaccatatgcagaagatggaaa

SEQ ID NO: 731049 - DNA, 33 bp, Homo sapien
aatagaagtaactacaacaaagtatgtgtgtgt

SEQ ID NO: 731050 - DNA, 33 bp, Homo sapien
aatagaagtaactacagcaaagtatgtgtgtgt

SEQ ID NO: 731051 - DNA, 33 bp, Homo sapien
cacatttcggcaaccaaggtaatgtgaaggggt

SEQ ID NO: 731052 - DNA, 33 bp, Homo sapien
cacatttcggcaaccatggtaatgtgaaggggt

SEQ ID NO: 731053 - DNA, 33 bp, Homo sapien
atctcataacaaacaacctttagagaaactcaa

SEQ ID NO: 731054 - DNA, 33 bp, Homo sapien
atctcataacaaacaatctttagagaaactcaa

SEQ ID NO: 731055 - DNA, 33 bp, Homo sapien
atgaagaacacttcaaagagaactgcaaaacac

SEQ ID NO: 731056 - DNA, 33 bp, Homo sapien
atgaagaacacttcaaggagaactgcaaaacac

SEQ ID NO: 731057 - DNA, 33 bp, Homo sapien
aaaatgacaaaccccaagttagaagctgagatg

SEQ ID NO: 731058 - DNA, 33 bp, Homo sapien
aaaatgacaaaccccacgttagaagctgagatg

SEQ ID NO: 731059 - DNA, 33 bp, Homo sapien
tttaatgattatttagacaacggcagactaaat

SEQ ID NO: 731060 - DNA, 33 bp, Homo sapien
tttaatgattatttaggcaacggcagactaaat

SEQ ID NO: 731061 - DNA, 33 bp, Homo sapien
atgtagaacatccaaaaacataggcattaagaa

SEQ ID NO: 731062 - DNA, 33 bp, Homo sapien
atgtagaacatccaaatacataggcattaagaa

SEQ ID NO: 731063 - DNA, 33 bp, Homo sapien
aaataaatggtgctcaaaaactgccataatact

SEQ ID NO: 731064 - DNA, 33 bp, Homo sapien
aaataaatggtgctcagaaactgccataatact

SEQ ID NO: 731065 - DNA, 33 bp, Homo sapien
agtgctaataattctcaaagcagctaactaatg

SEQ ID NO: 731066 - DNA, 33 bp, Homo sapien
agtgctaataattctccaagcagctaactaatg

SEQ ID NO: 731067 - DNA, 33 bp, Homo sapien
tcctcctgagtatctccacttacaggcatgcat

SEQ ID NO: 731068 - DNA, 33 bp, Homo sapien
tcctcctgagtatctcgacttacaggcatgcat

SEQ ID NO: 731069 - DNA, 33 bp, Homo sapien
cctggcacccaagatcaagactttttgagcaag

SEQ ID NO: 731070 - DNA, 33 bp, Homo sapien
cctggcacccaagatccagactttttgagcaag

SEQ ID NO: 731071 - DNA, 33 bp, Homo sapien
atggcagaaatatcagcctctataactggaggt

SEQ ID NO: 731072 - DNA, 33 bp, Homo sapien
atggcagaaatatcagtctctataactggaggt

SEQ ID NO: 731073 - DNA, 33 bp, Homo sapien
ttgatttttattaacagtctatgctcaattata

SEQ ID NO: 731074 - DNA, 33 bp, Homo sapien
ttgatttttattaacattctatgctcaattata

SEQ ID NO: 731075 - DNA, 33 bp, Homo sapien
atctgaatgtctgaaacacccaacctacctcaa

SEQ ID NO: 731076 - DNA, 33 bp, Homo sapien
atctgaatgtctgaaatacccaacctacctcaa

SEQ ID NO: 731077 - DNA, 33 bp, Homo sapien
aatcattcagccttgaagtactcataattttac

SEQ ID NO: 731078 - DNA, 33 bp, Homo sapien
aatcattcagccttgaggtactcataattttac

SEQ ID NO: 731079 - DNA, 33 bp, Homo sapien
atatatataatctcggacattcatgtgaaagaa

SEQ ID NO: 731080 - DNA, 33 bp, Homo sapien
atatatataatctcgggcattcatgtgaaagaa

SEQ ID NO: 731081 - DNA, 33 bp, Homo sapien
cagaataagctgaaaaatctctagtggtcaaca

SEQ ID NO: 731082 - DNA, 33 bp, Homo sapien
cagaataagctgaaaattctctagtggtcaaca

SEQ ID NO: 731083 - DNA, 33 bp, Homo sapien
gctatgcacaagattccctgaaggatatgttaa

SEQ ID NO: 731084 - DNA, 33 bp, Homo sapien
gctatgcacaagattctctgaaggatatgttaa

SEQ ID NO: 731085 - DNA, 33 bp, Homo sapien
atctcaaaattgaacaaaagaagccgaaaatgt

SEQ ID NO: 731086 - DNA, 33 bp, Homo sapien
atctcaaaattgaacagaagaagccgaaaatgt

SEQ ID NO: 731087 - DNA, 33 bp, Homo sapien
tctctagtggtccaaaactgtgtttctaaatgt

SEQ ID NO: 731088 - DNA, 33 bp, Homo sapien
tctctagtggtccaaagctgtgtttctaaatgt

SEQ ID NO: 731089 - DNA, 33 bp, Homo sapien
ttcctatttggacctacaaaataagatggctgc

SEQ ID NO: 731090 - DNA, 33 bp, Homo sapien
ttcctatttggacctagaaaataagatggctgc

SEQ ID NO: 731091 - DNA, 33 bp, Homo sapien
tgtgaaagtttatggaaatttttatgcaagatc

SEQ ID NO: 731092 - DNA, 33 bp, Homo sapien
tgtgaaagtttatggacatttttatgcaagatc

SEQ ID NO: 731093 - DNA, 33 bp, Homo sapien
cactgggatgacctcaataacgactgccacacc

SEQ ID NO: 731094 - DNA, 33 bp, Homo sapien
cactgggatgacctcagtaacgactgccacacc

SEQ ID NO: 731095 - DNA, 33 bp, Homo sapien
gtttacataatgtgcaaaagtatgaaatgaaaa

SEQ ID NO: 731096 - DNA, 33 bp, Homo sapien
gtttacataatgtgcagaagtatgaaatgaaaa

SEQ ID NO: 731097 - DNA, 33 bp, Homo sapien
tgttcaaacaagtccactaatgtgacacataaa

SEQ ID NO: 731098 - DNA, 33 bp, Homo sapien
tgttcaaacaagtccattaatgtgacacataaa

SEQ ID NO: 731099 - DNA, 33 bp, Homo sapien
aaacagaagacttggcaaacaggggtgtgttac

SEQ ID NO: 731100 - DNA, 33 bp, Homo sapien
aaacagaagacttggcgaacaggggtgtgttac

SEQ ID NO: 731101 - DNA, 33 bp, Homo sapien
cattattgctaaaataaagatgcaaaaggtgca

SEQ ID NO: 731102 - DNA, 33 bp, Homo sapien
cattattgctaaaatagagatgcaaaaggtgca

SEQ ID NO: 731103 - DNA, 33 bp, Homo sapien
aatatctacaactcaacatttccagcttaaacc

SEQ ID NO: 731104 - DNA, 33 bp, Homo sapien
aatatctacaactcaagatttccagcttaaacc

SEQ ID NO: 731105 - DNA, 33 bp, Homo sapien
cacatctcagggcataagttattagaaaatgta

SEQ ID NO: 731106 - DNA, 33 bp, Homo sapien
cacatctcagggcataggttattagaaaatgta

SEQ ID NO: 731107 - DNA, 33 bp, Homo sapien
aaattaaaactgaggcaatcacatacttaaatt

SEQ ID NO: 731108 - DNA, 33 bp, Homo sapien
aaattaaaactgaggcgatcacatacttaaatt

SEQ ID NO: 731109 - DNA, 33 bp, Homo sapien
gaatgtcacaaatttgaatggtaaaataggaca

SEQ ID NO: 731110 - DNA, 33 bp, Homo sapien
gaatgtcacaaatttggatggtaaaataggaca

SEQ ID NO: 731111 - DNA, 33 bp, Homo sapien
tggagaaggagtcatcacttaccttctctctac

SEQ ID NO: 731112 - DNA, 33 bp, Homo sapien
tggagaaggagtcatctcttaccttctctctac

SEQ ID NO: 731113 - DNA, 33 bp, Homo sapien
aatgttcccaatcataataaagaggtcaacata

SEQ ID NO: 731114 - DNA, 33 bp, Homo sapien
aatgttcccaatcatactaaagaggtcaacata

SEQ ID NO: 731115 - DNA, 33 bp, Homo sapien
tggttttgtttaatagaccagatatttcagtca

SEQ ID NO: 731116 - DNA, 33 bp, Homo sapien
tggttttgtttaatagcccagatatttcagtca

SEQ ID NO: 731117 - DNA, 33 bp, Homo sapien
tgtgtgacttgacacaatcttcaggtagatagt

SEQ ID NO: 731118 - DNA, 33 bp, Homo sapien
tgtgtgacttgacacagtcttcaggtagatagt

SEQ ID NO: 731119 - DNA, 33 bp, Homo sapien
ctcagactgaaattacacatcaggttccgggtc

SEQ ID NO: 731120 - DNA, 33 bp, Homo sapien
ctcagactgaaattacccatcaggttccgggtc

SEQ ID NO: 731121 - DNA, 33 bp, Homo sapien
aaatgtatcgttatgacgtatcagtggagggag

SEQ ID NO: 731122 - DNA, 33 bp, Homo sapien
aaatgtatcgttatgatgtatcagtggagggag

SEQ ID NO: 731123 - DNA, 33 bp, Homo sapien
atgtgacacttggttcaattgtaaatcaataaa

SEQ ID NO: 731124 - DNA, 33 bp, Homo sapien
atgtgacacttggttcgattgtaaatcaataaa

SEQ ID NO: 731125 - DNA, 33 bp, Homo sapien
taaaacagtcagtataaacgtggtttttgtgca

SEQ ID NO: 731126 - DNA, 33 bp, Homo sapien
taaaacagtcagtatatacgtggtttttgtgca

SEQ ID NO: 731127 - DNA, 33 bp, Homo sapien
aagatagtctttattgaaaatagagctgaacat

SEQ ID NO: 731128 - DNA, 33 bp, Homo sapien
aagatagtctttattgcaaatagagctgaacat

SEQ ID NO: 731129 - DNA, 33 bp, Homo sapien
aggttgactctatttccctgacattttgcacag

SEQ ID NO: 731130 - DNA, 33 bp, Homo sapien
aggttgactctatttcgctgacattttgcacag

SEQ ID NO: 731131 - DNA, 33 bp, Homo sapien
ggaattcagagggaaaaattcagactggactgg

SEQ ID NO: 731132 - DNA, 33 bp, Homo sapien
ggaattcagagggaaagattcagactggactgg

SEQ ID NO: 731133 - DNA, 33 bp, Homo sapien
tctcacagtggagtaccgaaaaggagtactgaa

SEQ ID NO: 731134 - DNA, 33 bp, Homo sapien
tctcacagtggagtactgaaaaggagtactgaa

SEQ ID NO: 731135 - DNA, 33 bp, Homo sapien
gatggataacaggtcaaatagatttaggaaact

SEQ ID NO: 731136 - DNA, 33 bp, Homo sapien
gatggataacaggtcagatagatttaggaaact

SEQ ID NO: 731137 - DNA, 33 bp, Homo sapien
agggtaaaaattcctcaaagtatataccaaatt

SEQ ID NO: 731138 - DNA, 33 bp, Homo sapien
agggtaaaaattcctcgaagtatataccaaatt

SEQ ID NO: 731139 - DNA, 33 bp, Homo sapien
gcctgccctattatcacgtcagtttcatctacc

SEQ ID NO: 731140 - DNA, 33 bp, Homo sapien
gcctgccctattatcatgtcagtttcatctacc

SEQ ID NO: 731141 - DNA, 33 bp, Homo sapien
gctgtagaaaagaatcggaggcagcccagatca

SEQ ID NO: 731142 - DNA, 33 bp, Homo sapien
gctgtagaaaagaatctgaggcagcccagatca

SEQ ID NO: 731143 - DNA, 33 bp, Homo sapien
ttgttatccaaggtcaaactcaaatatcttcca

SEQ ID NO: 731144 - DNA, 33 bp, Homo sapien
ttgttatccaaggtcatactcaaatatcttcca

SEQ ID NO: 731145 - DNA, 33 bp, Homo sapien
tccatatcaacacagaaaaaggaaagtacagta

SEQ ID NO: 731146 - DNA, 33 bp, Homo sapien
tccatatcaacacagagaaaggaaagtacagta

SEQ ID NO: 731147 - DNA, 33 bp, Homo sapien
gtacacagaaacattacatgaaagtcaactata

SEQ ID NO: 731148 - DNA, 33 bp, Homo sapien
gtacacagaaacattatatgaaagtcaactata

SEQ ID NO: 731149 - DNA, 33 bp, Homo sapien
atttgtagtcactgacaatcacactgtggtctg

SEQ ID NO: 731150 - DNA, 33 bp, Homo sapien
atttgtagtcactgaccatcacactgtggtctg

SEQ ID NO: 731151 - DNA, 33 bp, Homo sapien
ctagagagaagcaccaatgaaattccaaagtgc

SEQ ID NO: 731152 - DNA, 33 bp, Homo sapien
ctagagagaagcaccattgaaattccaaagtgc

SEQ ID NO: 731153 - DNA, 33 bp, Homo sapien
tcaccacactgtgggcaaagaggagagaagagc

SEQ ID NO: 731154 - DNA, 33 bp, Homo sapien
tcaccacactgtgggccaagaggagagaagagc

SEQ ID NO: 731155 - DNA, 33 bp, Homo sapien
tttaatgattctgtcaaaacctcaaaaatctta

SEQ ID NO: 731156 - DNA, 33 bp, Homo sapien
tttaatgattctgtcataacctcaaaaatctta

SEQ ID NO: 731157 - DNA, 33 bp, Homo sapien
aatttatttatcacaactctgtagacttggaag

SEQ ID NO: 731158 - DNA, 33 bp, Homo sapien
aatttatttatcacaattctgtagacttggaag

SEQ ID NO: 731159 - DNA, 33 bp, Homo sapien
agcatcaggaaaaatacctcataaatgctgggc

SEQ ID NO: 731160 - DNA, 33 bp, Homo sapien
agcatcaggaaaaatagctcataaatgctgggc

SEQ ID NO: 731161 - DNA, 33 bp, Homo sapien
gttctaaaagtgtagtaaatggacttaaggtgg

SEQ ID NO: 731162 - DNA, 33 bp, Homo sapien
gttctaaaagtgtagttaatggacttaaggtgg

SEQ ID NO: 731163 - DNA, 33 bp, Homo sapien
gagttgaagtgttctacaggcccatccttccta

SEQ ID NO: 731164 - DNA, 33 bp, Homo sapien
gagttgaagtgttctataggcccatccttccta

SEQ ID NO: 731165 - DNA, 33 bp, Homo sapien
tgcaataaagtcttagcagttgtataatagtag

SEQ ID NO: 731166 - DNA, 33 bp, Homo sapien
tgcaataaagtcttagtagttgtataatagtag

SEQ ID NO: 731167 - DNA, 33 bp, Homo sapien
caaagatagaggaaccaattatacacaaattat

SEQ ID NO: 731168 - DNA, 33 bp, Homo sapien
caaagatagaggaaccgattatacacaaattat

SEQ ID NO: 731169 - DNA, 33 bp, Homo sapien
attgtatttaatagagcatggcataaaacccaa

SEQ ID NO: 731170 - DNA, 33 bp, Homo sapien
attgtatttaatagagtatggcataaaacccaa

SEQ ID NO: 731171 - DNA, 33 bp, Homo sapien
aaacccaatgaccaaaaactagaagattaatcc

SEQ ID NO: 731172 - DNA, 33 bp, Homo sapien
aaacccaatgaccaaagactagaagattaatcc

SEQ ID NO: 731173 - DNA, 33 bp, Homo sapien
accacaaagtaattgacaaaagagttagagaac

SEQ ID NO: 731174 - DNA, 33 bp, Homo sapien
accacaaagtaattgagaaaagagttagagaac

SEQ ID NO: 731175 - DNA, 33 bp, Homo sapien
gtatgtcatagatgaaccaaaatgtattaactt

SEQ ID NO: 731176 - DNA, 33 bp, Homo sapien
gtatgtcatagatgaatcaaaatgtattaactt

SEQ ID NO: 731177 - DNA, 33 bp, Homo sapien
gttgtatggtcatcaagttcagctatcataccg

SEQ ID NO: 731178 - DNA, 33 bp, Homo sapien
gttgtatggtcatcaatttcagctatcataccg

SEQ ID NO: 731179 - DNA, 33 bp, Homo sapien
tgctgactctaacagaaagattttgggtgaaga

SEQ ID NO: 731180 - DNA, 33 bp, Homo sapien
tgctgactctaacagagagattttgggtgaaga

SEQ ID NO: 731181 - DNA, 33 bp, Homo sapien
attagatgtacctccaaaatagtcttcaaagtc

SEQ ID NO: 731182 - DNA, 33 bp, Homo sapien
attagatgtacctccagaatagtcttcaaagtc

SEQ ID NO: 731183 - DNA, 33 bp, Homo sapien
aatgttgaattgctaacaaattgcttgtttttg

SEQ ID NO: 731184 - DNA, 33 bp, Homo sapien
aatgttgaattgctaataaattgcttgtttttg

SEQ ID NO: 731185 - DNA, 33 bp, Homo sapien
aatatatgcttgaataaaagacaaagagaaatg

SEQ ID NO: 731186 - DNA, 33 bp, Homo sapien
aatatatgcttgaatataagacaaagagaaatg

SEQ ID NO: 731187 - DNA, 33 bp, Homo sapien
tgccttttggaaataaacactgtctatagatca

SEQ ID NO: 731188 - DNA, 33 bp, Homo sapien
tgccttttggaaataaccactgtctatagatca

SEQ ID NO: 731189 - DNA, 33 bp, Homo sapien
aaattcctaaatatacacactctctgttacaaa

SEQ ID NO: 731190 - DNA, 33 bp, Homo sapien
aaattcctaaatatactcactctctgttacaaa

SEQ ID NO: 731191 - DNA, 33 bp, Homo sapien
ttgcctctccagattcaaatagctgttgaaaga

SEQ ID NO: 731192 - DNA, 33 bp, Homo sapien
ttgcctctccagattcgaatagctgttgaaaga

SEQ ID NO: 731193 - DNA, 33 bp, Homo sapien
gttcaatttccacaaacgactaatcaaaagcaa

SEQ ID NO: 731194 - DNA, 33 bp, Homo sapien
gttcaatttccacaaaggactaatcaaaagcaa

SEQ ID NO: 731195 - DNA, 33 bp, Homo sapien
tactaaatagcaacaccaagtattcttttacat

SEQ ID NO: 731196 - DNA, 33 bp, Homo sapien
tactaaatagcaacactaagtattcttttacat

SEQ ID NO: 731197 - DNA, 33 bp, Homo sapien
tgtataggttcaggacccctaaaaaatgtgata

SEQ ID NO: 731198 - DNA, 33 bp, Homo sapien
tgtataggttcaggactcctaaaaaatgtgata

SEQ ID NO: 731199 - DNA, 33 bp, Homo sapien
atgcatcgtaaaacagccatctttgttcctctt

SEQ ID NO: 731200 - DNA, 33 bp, Homo sapien
atgcatcgtaaaacagtcatctttgttcctctt

SEQ ID NO: 731201 - DNA, 33 bp, Homo sapien
ttaaatataattgataactgtttgttgcattaa

SEQ ID NO: 731202 - DNA, 33 bp, Homo sapien
ttaaatataattgatacctgtttgttgcattaa

SEQ ID NO: 731203 - DNA, 33 bp, Homo sapien
tacttacccatattcacgtggcaaagggtggta

SEQ ID NO: 731204 - DNA, 33 bp, Homo sapien
tacttacccatattcatgtggcaaagggtggta

SEQ ID NO: 731205 - DNA, 33 bp, Homo sapien
atttacagtcagatacacttgagattatttatt

SEQ ID NO: 731206 - DNA, 33 bp, Homo sapien
atttacagtcagatacgcttgagattatttatt

SEQ ID NO: 731207 - DNA, 33 bp, Homo sapien
caacatcagtagggaacagtattgtattctatt

SEQ ID NO: 731208 - DNA, 33 bp, Homo sapien
caacatcagtagggaagagtattgtattctatt

SEQ ID NO: 731209 - DNA, 33 bp, Homo sapien
tccagtgaaacacttgaaataggcaatgatcaa

SEQ ID NO: 731210 - DNA, 33 bp, Homo sapien
tccagtgaaacacttggaataggcaatgatcaa

SEQ ID NO: 731211 - DNA, 33 bp, Homo sapien
agtggatttatatgacaaaaaatgtattattct

SEQ ID NO: 731212 - DNA, 33 bp, Homo sapien
agtggatttatatgacgaaaaatgtattattct

SEQ ID NO: 731213 - DNA, 33 bp, Homo sapien
ttagaattctgcttaccacagtcctgaagggat

SEQ ID NO: 731214 - DNA, 33 bp, Homo sapien
ttagaattctgcttactacagtcctgaagggat

SEQ ID NO: 731215 - DNA, 33 bp, Homo sapien
aattctcattgtatcacatcatcacactcagaa

SEQ ID NO: 731216 - DNA, 33 bp, Homo sapien
aattctcattgtatcatatcatcacactcagaa

SEQ ID NO: 731217 - DNA, 33 bp, Homo sapien
gcccagcataacatcaatatttgtttaagaatt

SEQ ID NO: 731218 - DNA, 33 bp, Homo sapien
gcccagcataacatcagtatttgtttaagaatt

SEQ ID NO: 731219 - DNA, 33 bp, Homo sapien
tggcctgaagccacatcaaccacaaggaaccct

SEQ ID NO: 731220 - DNA, 33 bp, Homo sapien
tggcctgaagccacatgaaccacaaggaaccct

SEQ ID NO: 731221 - DNA, 33 bp, Homo sapien
gacctgccagctcaaggaccatctcaccaattt

SEQ ID NO: 731222 - DNA, 33 bp, Homo sapien
gacctgccagctcaagtaccatctcaccaattt

SEQ ID NO: 731223 - DNA, 33 bp, Homo sapien
gcttccagttataaaactacctatgtcataaag

SEQ ID NO: 731224 - DNA, 33 bp, Homo sapien
gcttccagttataaaattacctatgtcataaag

SEQ ID NO: 731225 - DNA, 33 bp, Homo sapien
atcatttctaccataacgactaaaagcaacagc

SEQ ID NO: 731226 - DNA, 33 bp, Homo sapien
atcatttctaccataatgactaaaagcaacagc

SEQ ID NO: 731227 - DNA, 33 bp, Homo sapien
agttggggaatagtaacgcaagttgaataaaac

SEQ ID NO: 731228 - DNA, 33 bp, Homo sapien
agttggggaatagtaatgcaagttgaataaaac

SEQ ID NO: 731229 - DNA, 33 bp, Homo sapien
ccatggcttttaggtgcaagttataatgaacaa

SEQ ID NO: 731230 - DNA, 33 bp, Homo sapien
ccatggcttttaggtgtaagttataatgaacaa

SEQ ID NO: 731231 - DNA, 33 bp, Homo sapien
tgagttatgtctagccccgtaacctaactatta

SEQ ID NO: 731232 - DNA, 33 bp, Homo sapien
tgagttatgtctagcctcgtaacctaactatta

SEQ ID NO: 731233 - DNA, 33 bp, Homo sapien
tggtgtatgttacttcacatttttcccagacaa

SEQ ID NO: 731234 - DNA, 33 bp, Homo sapien
tggtgtatgttacttcgcatttttcccagacaa

SEQ ID NO: 731235 - DNA, 33 bp, Homo sapien
gattacacaaagtacacgatgattttttactaa

SEQ ID NO: 731236 - DNA, 33 bp, Homo sapien
gattacacaaagtacatgatgattttttactaa

SEQ ID NO: 731237 - DNA, 33 bp, Homo sapien
caaatttagcaaaacaaatgcaaatacaagaca

SEQ ID NO: 731238 - DNA, 33 bp, Homo sapien
caaatttagcaaaacagatgcaaatacaagaca

SEQ ID NO: 731239 - DNA, 33 bp, Homo sapien
ttttgtaccaacctaacgtttctgttggcaaag

SEQ ID NO: 731240 - DNA, 33 bp, Homo sapien
ttttgtaccaacctaatgtttctgttggcaaag

SEQ ID NO: 731241 - DNA, 33 bp, Homo sapien
tcttggctctaagttcacccttgattgcctgtc

SEQ ID NO: 731242 - DNA, 33 bp, Homo sapien
tcttggctctaagttcgcccttgattgcctgtc

SEQ ID NO: 731243 - DNA, 33 bp, Homo sapien
aatctctcttgcagaaatacctcattttttttc

SEQ ID NO: 731244 - DNA, 33 bp, Homo sapien
aatctctcttgcagaattacctcattttttttc

SEQ ID NO: 731245 - DNA, 33 bp, Homo sapien
ctttacaaattttgccaaaaaacaaattagcac

SEQ ID NO: 731246 - DNA, 33 bp, Homo sapien
ctttacaaattttgccgaaaaacaaattagcac

SEQ ID NO: 731247 - DNA, 33 bp, Homo sapien
gtccttatctttattgcaatggcagttagatgt

SEQ ID NO: 731248 - DNA, 33 bp, Homo sapien
gtccttatctttattgtaatggcagttagatgt

SEQ ID NO: 731249 - DNA, 33 bp, Homo sapien
ttccttggtaatctcacccatttcatgctcttg

SEQ ID NO: 731250 - DNA, 33 bp, Homo sapien
ttccttggtaatctcatccatttcatgctcttg

SEQ ID NO: 731251 - DNA, 33 bp, Homo sapien
ggaaaaatttggtaaaatctgcaaataggaaga

SEQ ID NO: 731252 - DNA, 33 bp, Homo sapien
ggaaaaatttggtaaagtctgcaaataggaaga

SEQ ID NO: 731253 - DNA, 33 bp, Homo sapien
cattgttatcaaaaaacaaaatggccaaatatg

SEQ ID NO: 731254 - DNA, 33 bp, Homo sapien
cattgttatcaaaaaagaaaatggccaaatatg

SEQ ID NO: 731255 - DNA, 33 bp, Homo sapien
taagtattgccatcaaacaacccttttagatgg

SEQ ID NO: 731256 - DNA, 33 bp, Homo sapien
taagtattgccatcaagcaacccttttagatgg

SEQ ID NO: 731257 - DNA, 33 bp, Homo sapien
ctgaaacctggtatacaaagatggcctagagct

SEQ ID NO: 731258 - DNA, 33 bp, Homo sapien
ctgaaacctggtataccaagatggcctagagct

SEQ ID NO: 731259 - DNA, 33 bp, Homo sapien
tctttgttgaaaatacaggaagagacatccatc

SEQ ID NO: 731260 - DNA, 33 bp, Homo sapien
tctttgttgaaaatacgggaagagacatccatc

SEQ ID NO: 731261 - DNA, 33 bp, Homo sapien
gtcaagtctccaataagtgatagaggacaccag

SEQ ID NO: 731262 - DNA, 33 bp, Homo sapien
gtcaagtctccaataattgatagaggacaccag

SEQ ID NO: 731263 - DNA, 33 bp, Homo sapien
tttaaattacacaaaaagtttacctccaacatt

SEQ ID NO: 731264 - DNA, 33 bp, Homo sapien
tttaaattacacaaaaggtttacctccaacatt

SEQ ID NO: 731265 - DNA, 33 bp, Homo sapien
cactttctgtgactcaactggtttttgttatgc

SEQ ID NO: 731266 - DNA, 33 bp, Homo sapien
cactttctgtgactcagctggtttttgttatgc

SEQ ID NO: 731267 - DNA, 33 bp, Homo sapien
aagctatgataggtagaaactgaaagatacctt

SEQ ID NO: 731268 - DNA, 33 bp, Homo sapien
aagctatgataggtaggaactgaaagatacctt

SEQ ID NO: 731269 - DNA, 33 bp, Homo sapien
gtaaacctgtgcattacaaaaccatatttttga

SEQ ID NO: 731270 - DNA, 33 bp, Homo sapien
gtaaacctgtgcattataaaaccatatttttga

SEQ ID NO: 731271 - DNA, 33 bp, Homo sapien
ctgataccactcattgacaacatggctaattgt

SEQ ID NO: 731272 - DNA, 33 bp, Homo sapien
ctgataccactcattgtcaacatggctaattgt

SEQ ID NO: 731273 - DNA, 33 bp, Homo sapien
catttacttcaagaaactataccaactttaccc

SEQ ID NO: 731274 - DNA, 33 bp, Homo sapien
catttacttcaagaaattataccaactttaccc

SEQ ID NO: 731275 - DNA, 33 bp, Homo sapien
actcgctggtcagaaaaccatgtaattcccaga

SEQ ID NO: 731276 - DNA, 33 bp, Homo sapien
actcgctggtcagaaagccatgtaattcccaga

SEQ ID NO: 731277 - DNA, 33 bp, Homo sapien
ctcttattccaaatgacggcagtagtcaaatga

SEQ ID NO: 731278 - DNA, 33 bp, Homo sapien
ctcttattccaaatgatggcagtagtcaaatga

SEQ ID NO: 731279 - DNA, 33 bp, Homo sapien
ctatgaatcgaagttgaaggaaggctttggtaa

SEQ ID NO: 731280 - DNA, 33 bp, Homo sapien
ctatgaatcgaagttgcaggaaggctttggtaa

SEQ ID NO: 731281 - DNA, 33 bp, Homo sapien
ctctttgagttccaaaattagattgagaaaagt

SEQ ID NO: 731282 - DNA, 33 bp, Homo sapien
ctctttgagttccaaacttagattgagaaaagt

SEQ ID NO: 731283 - DNA, 33 bp, Homo sapien
gatgaacaatcataaggactcaagcatttccag

SEQ ID NO: 731284 - DNA, 33 bp, Homo sapien
gatgaacaatcataagtactcaagcatttccag

SEQ ID NO: 731285 - DNA, 33 bp, Homo sapien
tctagtcttctgctccaacatccattgcttgag

SEQ ID NO: 731286 - DNA, 33 bp, Homo sapien
tctagtcttctgctccgacatccattgcttgag

SEQ ID NO: 731287 - DNA, 33 bp, Homo sapien
aatgtcatgttaatgaagttataatgagctggg

SEQ ID NO: 731288 - DNA, 33 bp, Homo sapien
aatgtcatgttaatgatgttataatgagctggg

SEQ ID NO: 731289 - DNA, 33 bp, Homo sapien
ggtgaaagacctgataactacaaaacacaccta

SEQ ID NO: 731290 - DNA, 33 bp, Homo sapien
ggtgaaagacctgatagctacaaaacacaccta

SEQ ID NO: 731291 - DNA, 33 bp, Homo sapien
tatgtactattatcacacccattttgaagagga

SEQ ID NO: 731292 - DNA, 33 bp, Homo sapien
tatgtactattatcacgcccattttgaagagga

SEQ ID NO: 731293 - DNA, 33 bp, Homo sapien
tgaagaggagaaaaacactacataacgtgctaa

SEQ ID NO: 731294 - DNA, 33 bp, Homo sapien
tgaagaggagaaaaacgctacataacgtgctaa

SEQ ID NO: 731295 - DNA, 33 bp, Homo sapien
gactgcctggtaaatacaattttgggattttaa

SEQ ID NO: 731296 - DNA, 33 bp, Homo sapien
gactgcctggtaaatataattttgggattttaa

SEQ ID NO: 731297 - DNA, 33 bp, Homo sapien
atttccaattatataacagaagccagccttctg

SEQ ID NO: 731298 - DNA, 33 bp, Homo sapien
atttccaattatataagagaagccagccttctg

SEQ ID NO: 731299 - DNA, 33 bp, Homo sapien
gtatgctacaaaataaagacaccttcatttctt

SEQ ID NO: 731300 - DNA, 33 bp, Homo sapien
gtatgctacaaaataaggacaccttcatttctt

SEQ ID NO: 731301 - DNA, 33 bp, Homo sapien
ttattttgtagcataccagccgcctctatcttc

SEQ ID NO: 731302 - DNA, 33 bp, Homo sapien
ttattttgtagcatacgagccgcctctatcttc

SEQ ID NO: 731303 - DNA, 33 bp, Homo sapien
ctgtgaaacattctcaaaagagtgagtagaaaa

SEQ ID NO: 731304 - DNA, 33 bp, Homo sapien
ctgtgaaacattctcagaagagtgagtagaaaa

SEQ ID NO: 731305 - DNA, 33 bp, Homo sapien
agtggcacattcttacaccttagggactgaaaa

SEQ ID NO: 731306 - DNA, 33 bp, Homo sapien
agtggcacattcttacgccttagggactgaaaa

SEQ ID NO: 731307 - DNA, 33 bp, Homo sapien
gaagggaaagttctaggacctataccaagaagt

SEQ ID NO: 731308 - DNA, 33 bp, Homo sapien
gaagggaaagttctagtacctataccaagaagt

SEQ ID NO: 731309 - DNA, 33 bp, Homo sapien
aattcatattacactaccttgcacataatattt

SEQ ID NO: 731310 - DNA, 33 bp, Homo sapien
aattcatattacactatcttgcacataatattt

SEQ ID NO: 731311 - DNA, 33 bp, Homo sapien
tcactaataaggaccaaatggtatcgtatgcct

SEQ ID NO: 731312 - DNA, 33 bp, Homo sapien
tcactaataaggaccagatggtatcgtatgcct

SEQ ID NO: 731313 - DNA, 33 bp, Homo sapien
ataatatgtaggatgacgcttagaacctgtata

SEQ ID NO: 731314 - DNA, 33 bp, Homo sapien
ataatatgtaggatgatgcttagaacctgtata

SEQ ID NO: 731315 - DNA, 33 bp, Homo sapien
tattaacattgttttccctgacaagtactgaaa

SEQ ID NO: 731316 - DNA, 33 bp, Homo sapien
tattaacattgttttctctgacaagtactgaaa

SEQ ID NO: 731317 - DNA, 33 bp, Homo sapien
tgaaagctgctgaaaaacttcagaaactgtctt

SEQ ID NO: 731318 - DNA, 33 bp, Homo sapien
tgaaagctgctgaaaatcttcagaaactgtctt

SEQ ID NO: 731319 - DNA, 33 bp, Homo sapien
atgggcaaccatgagcaagcccaaaaaaagcac

SEQ ID NO: 731320 - DNA, 33 bp, Homo sapien
atgggcaaccatgagcgagcccaaaaaaagcac

SEQ ID NO: 731321 - DNA, 33 bp, Homo sapien
tgtaacacatgcccaccggatcttcaagagctg

SEQ ID NO: 731322 - DNA, 33 bp, Homo sapien
tgtaacacatgcccactggatcttcaagagctg

SEQ ID NO: 731323 - DNA, 33 bp, Homo sapien
ccacttttcctgtaccaatcagtctgcgtcttg

SEQ ID NO: 731324 - DNA, 33 bp, Homo sapien
ccacttttcctgtacctatcagtctgcgtcttg

SEQ ID NO: 731325 - DNA, 33 bp, Homo sapien
agttacagccgagccaaatggtagaaaccttgc

SEQ ID NO: 731326 - DNA, 33 bp, Homo sapien
agttacagccgagccagatggtagaaaccttgc

SEQ ID NO: 731327 - DNA, 33 bp, Homo sapien
tgattgtcaagtgttacaggcagagtaagggag

SEQ ID NO: 731328 - DNA, 33 bp, Homo sapien
tgattgtcaagtgttagaggcagagtaagggag

SEQ ID NO: 731329 - DNA, 33 bp, Homo sapien
taagttgcccataagccaattaatcttcaaata

SEQ ID NO: 731330 - DNA, 33 bp, Homo sapien
taagttgcccataagctaattaatcttcaaata

SEQ ID NO: 731331 - DNA, 33 bp, Homo sapien
attatccacattttaaagttgaggagtttgaga

SEQ ID NO: 731332 - DNA, 33 bp, Homo sapien
attatccacattttaaggttgaggagtttgaga

SEQ ID NO: 731333 - DNA, 33 bp, Homo sapien
catatgcaagtaaaacactggttaccaaaaagt

SEQ ID NO: 731334 - DNA, 33 bp, Homo sapien
catatgcaagtaaaacgctggttaccaaaaagt

SEQ ID NO: 731335 - DNA, 33 bp, Homo sapien
ggtgtgcccacaggaactcaagggatccttaaa

SEQ ID NO: 731336 - DNA, 33 bp, Homo sapien
ggtgtgcccacaggaattcaagggatccttaaa

SEQ ID NO: 731337 - DNA, 33 bp, Homo sapien
tggcatggaaatgcagacgagaaggccattatg

SEQ ID NO: 731338 - DNA, 33 bp, Homo sapien
tggcatggaaatgcagtcgagaaggccattatg

SEQ ID NO: 731339 - DNA, 33 bp, Homo sapien
attgctcatgacaaccacattctttcatcatgg

SEQ ID NO: 731340 - DNA, 33 bp, Homo sapien
attgctcatgacaaccgcattctttcatcatgg

SEQ ID NO: 731341 - DNA, 33 bp, Homo sapien
ctggagtttccctacccaaatgctgcttatgtt

SEQ ID NO: 731342 - DNA, 33 bp, Homo sapien
ctggagtttccctaccgaaatgctgcttatgtt

SEQ ID NO: 731343 - DNA, 33 bp, Homo sapien
ggttgaaagtcagtttgaaaagttaggcaatag

SEQ ID NO: 731344 - DNA, 33 bp, Homo sapien
ggttgaaagtcagttttaaaagttaggcaatag

SEQ ID NO: 731345 - DNA, 33 bp, Homo sapien
tagtataaatgtagaacagcccattggccagcc

SEQ ID NO: 731346 - DNA, 33 bp, Homo sapien
tagtataaatgtagaatagcccattggccagcc

SEQ ID NO: 731347 - DNA, 33 bp, Homo sapien
tacaaaattatttagaacacgtgagatagtgag

SEQ ID NO: 731348 - DNA, 33 bp, Homo sapien
tacaaaattatttagaccacgtgagatagtgag

SEQ ID NO: 731349 - DNA, 33 bp, Homo sapien
atctcaactggagttacaatgatggtgttgttt

SEQ ID NO: 731350 - DNA, 33 bp, Homo sapien
atctcaactggagttataatgatggtgttgttt

SEQ ID NO: 731351 - DNA, 33 bp, Homo sapien
tcaagtcctgcttccacattttcaaggttttat

SEQ ID NO: 731352 - DNA, 33 bp, Homo sapien
tcaagtcctgcttccatattttcaaggttttat

SEQ ID NO: 731353 - DNA, 33 bp, Homo sapien
tctcaattcacttacaccaaataaaaatatgaa

SEQ ID NO: 731354 - DNA, 33 bp, Homo sapien
tctcaattcacttacagcaaataaaaatatgaa

SEQ ID NO: 731355 - DNA, 33 bp, Homo sapien
actttcacgcttatacagatatgggtttttatt

SEQ ID NO: 731356 - DNA, 33 bp, Homo sapien
actttcacgcttatacggatatgggtttttatt

SEQ ID NO: 731357 - DNA, 33 bp, Homo sapien
tttcatttattacctcacccttatcagctctga

SEQ ID NO: 731358 - DNA, 33 bp, Homo sapien
tttcatttattacctcgcccttatcagctctga

SEQ ID NO: 731359 - DNA, 33 bp, Homo sapien
gctacaatgtttataacgatggtgaagaaagta

SEQ ID NO: 731360 - DNA, 33 bp, Homo sapien
gctacaatgtttataatgatggtgaagaaagta

SEQ ID NO: 731361 - DNA, 33 bp, Homo sapien
ttaagaactttggacacccattgtaaaaggttt

SEQ ID NO: 731362 - DNA, 33 bp, Homo sapien
ttaagaactttggacagccattgtaaaaggttt

SEQ ID NO: 731363 - DNA, 33 bp, Homo sapien
gccaaatatcagaacactggattatacttagag

SEQ ID NO: 731364 - DNA, 33 bp, Homo sapien
gccaaatatcagaacattggattatacttagag

SEQ ID NO: 731365 - DNA, 33 bp, Homo sapien
ccatcacggatagttccaagactcgggtttgtc

SEQ ID NO: 731366 - DNA, 33 bp, Homo sapien
ccatcacggatagttctaagactcgggtttgtc

SEQ ID NO: 731367 - DNA, 33 bp, Homo sapien
gtgattgtaaaattcaactgactgtaaaatgca

SEQ ID NO: 731368 - DNA, 33 bp, Homo sapien
gtgattgtaaaattcagctgactgtaaaatgca

SEQ ID NO: 731369 - DNA, 33 bp, Homo sapien
aacaagaatccttgtaacctctatgtggatgtg

SEQ ID NO: 731370 - DNA, 33 bp, Homo sapien
aacaagaatccttgtagcctctatgtggatgtg

SEQ ID NO: 731371 - DNA, 33 bp, Homo sapien
atgcaaagaggcagagaaaatattgtgatagca

SEQ ID NO: 731372 - DNA, 33 bp, Homo sapien
atgcaaagaggcagaggaaatattgtgatagca

SEQ ID NO: 731373 - DNA, 33 bp, Homo sapien
gatacgttgagtcccaaaaacattatagagtat

SEQ ID NO: 731374 - DNA, 33 bp, Homo sapien
gatacgttgagtcccagaaacattatagagtat

SEQ ID NO: 731375 - DNA, 33 bp, Homo sapien
agtgtatgagctttaacaaggcccaccttatac

SEQ ID NO: 731376 - DNA, 33 bp, Homo sapien
agtgtatgagctttaagaaggcccaccttatac

SEQ ID NO: 731377 - DNA, 33 bp, Homo sapien
ctttgcccatatttgacggtttttgtttcttgt

SEQ ID NO: 731378 - DNA, 33 bp, Homo sapien
ctttgcccatatttgatggtttttgtttcttgt

SEQ ID NO: 731379 - DNA, 33 bp, Homo sapien
agggttgtttctggcaaaggtatttgtttttgt

SEQ ID NO: 731380 - DNA, 33 bp, Homo sapien
agggttgtttctggcagaggtatttgtttttgt

SEQ ID NO: 731381 - DNA, 33 bp, Homo sapien
ctgtagaggtaaaatccactagctaaatagatt

SEQ ID NO: 731382 - DNA, 33 bp, Homo sapien
ctgtagaggtaaaatcgactagctaaatagatt

SEQ ID NO: 731383 - DNA, 33 bp, Homo sapien
ataaagttctggcttcaagaagaatgatggtta

SEQ ID NO: 731384 - DNA, 33 bp, Homo sapien
ataaagttctggcttcgagaagaatgatggtta

SEQ ID NO: 731385 - DNA, 33 bp, Homo sapien
ttgcttactataaagacaaggaaaggcatagat

SEQ ID NO: 731386 - DNA, 33 bp, Homo sapien
ttgcttactataaagagaaggaaaggcatagat

SEQ ID NO: 731387 - DNA, 33 bp, Homo sapien
ctatctgctatcatgtaaatccaaagcttgaat

SEQ ID NO: 731388 - DNA, 33 bp, Homo sapien
ctatctgctatcatgttaatccaaagcttgaat

SEQ ID NO: 731389 - DNA, 33 bp, Homo sapien
aataaacacaaagatgaatgaatagaggaatca

SEQ ID NO: 731390 - DNA, 33 bp, Homo sapien
aataaacacaaagatgtatgaatagaggaatca

SEQ ID NO: 731391 - DNA, 33 bp, Homo sapien
acagagacagtaattacatcattcaagttttct

SEQ ID NO: 731392 - DNA, 33 bp, Homo sapien
acagagacagtaattatatcattcaagttttct

SEQ ID NO: 731393 - DNA, 33 bp, Homo sapien
tgagacatccatgtacaaagctggcctaagact

SEQ ID NO: 731394 - DNA, 33 bp, Homo sapien
tgagacatccatgtacgaagctggcctaagact

SEQ ID NO: 731395 - DNA, 33 bp, Homo sapien
gaagaatagaaacagaagcattagagacaaatt

SEQ ID NO: 731396 - DNA, 33 bp, Homo sapien
gaagaatagaaacagacgcattagagacaaatt

SEQ ID NO: 731397 - DNA, 33 bp, Homo sapien
ttaataaaatttgtaacaactctgaatcaaccg

SEQ ID NO: 731398 - DNA, 33 bp, Homo sapien
ttaataaaatttgtaagaactctgaatcaaccg

SEQ ID NO: 731399 - DNA, 33 bp, Homo sapien
aattttatctggataacggttgaagaatggtta

SEQ ID NO: 731400 - DNA, 33 bp, Homo sapien
aattttatctggataatggttgaagaatggtta

SEQ ID NO: 731401 - DNA, 33 bp, Homo sapien
ataaatctactctcaggatgtcccaaagtacaa

SEQ ID NO: 731402 - DNA, 33 bp, Homo sapien
ataaatctactctcagtatgtcccaaagtacaa

SEQ ID NO: 731403 - DNA, 33 bp, Homo sapien
tgcatcaagtcaagaaactactggacagaaact

SEQ ID NO: 731404 - DNA, 33 bp, Homo sapien
tgcatcaagtcaagaagctactggacagaaact

SEQ ID NO: 731405 - DNA, 33 bp, Homo sapien
tctgaagtcaagtaaactactatgctatatatc

SEQ ID NO: 731406 - DNA, 33 bp, Homo sapien
tctgaagtcaagtaaagtactatgctatatatc

SEQ ID NO: 731407 - DNA, 33 bp, Homo sapien
gcccaaatgattagataagcctttttcaaaagt

SEQ ID NO: 731408 - DNA, 33 bp, Homo sapien
gcccaaatgattagattagcctttttcaaaagt

SEQ ID NO: 731409 - DNA, 33 bp, Homo sapien
taaatatgtatttcccaacaatctctccaatgg

SEQ ID NO: 731410 - DNA, 33 bp, Homo sapien
taaatatgtatttcccgacaatctctccaatgg

SEQ ID NO: 731411 - DNA, 33 bp, Homo sapien
tgcatatgccactttaaaattttgcctggatag

SEQ ID NO: 731412 - DNA, 33 bp, Homo sapien
tgcatatgccactttagaattttgcctggatag

SEQ ID NO: 731413 - DNA, 33 bp, Homo sapien
tacaaactatgaattacaccactgtgaacaaat

SEQ ID NO: 731414 - DNA, 33 bp, Homo sapien
tacaaactatgaattataccactgtgaacaaat

SEQ ID NO: 731415 - DNA, 33 bp, Homo sapien
gtaaatatatcaatcaaatcatacaggtaatta

SEQ ID NO: 731416 - DNA, 33 bp, Homo sapien
gtaaatatatcaatcagatcatacaggtaatta

SEQ ID NO: 731417 - DNA, 33 bp, Homo sapien
tttttttttacgatcaatacacctacagagaca

SEQ ID NO: 731418 - DNA, 33 bp, Homo sapien
tttttttttacgatcagtacacctacagagaca

SEQ ID NO: 731419 - DNA, 33 bp, Homo sapien
ttgaaatgtgaaacataaactaaagacataaat

SEQ ID NO: 731420 - DNA, 33 bp, Homo sapien
ttgaaatgtgaaacatgaactaaagacataaat

SEQ ID NO: 731421 - DNA, 33 bp, Homo sapien
tgtctttactttgcacagtgagagataactcat

SEQ ID NO: 731422 - DNA, 33 bp, Homo sapien
tgtctttactttgcactgtgagagataactcat

SEQ ID NO: 731423 - DNA, 33 bp, Homo sapien
tagctgtaacaattgacgatttgaaagctaaca

SEQ ID NO: 731424 - DNA, 33 bp, Homo sapien
tagctgtaacaattgatgatttgaaagctaaca

SEQ ID NO: 731425 - DNA, 33 bp, Homo sapien
aaaatttctttctcacagtctggaagctacgag

SEQ ID NO: 731426 - DNA, 33 bp, Homo sapien
aaaatttctttctcacggtctggaagctacgag

SEQ ID NO: 731427 - DNA, 33 bp, Homo sapien
ctcaaaaaaagacagacatgtgggtgacaaagg

SEQ ID NO: 731428 - DNA, 33 bp, Homo sapien
ctcaaaaaaagacagatatgtgggtgacaaagg

SEQ ID NO: 731429 - DNA, 33 bp, Homo sapien
cagtccataatttagccgaaatctaaaaaatgc

SEQ ID NO: 731430 - DNA, 33 bp, Homo sapien
cagtccataatttagctgaaatctaaaaaatgc

SEQ ID NO: 731431 - DNA, 33 bp, Homo sapien
ttaatacatggtgatacgattactacagtaaaa

SEQ ID NO: 731432 - DNA, 33 bp, Homo sapien
ttaatacatggtgatatgattactacagtaaaa

SEQ ID NO: 731433 - DNA, 33 bp, Homo sapien
tgagtttctgattaaacgcataagttgagcctg

SEQ ID NO: 731434 - DNA, 33 bp, Homo sapien
tgagtttctgattaaatgcataagttgagcctg

SEQ ID NO: 731435 - DNA, 33 bp, Homo sapien
ctgtaggatgaatgaaatagatctttccaaatg

SEQ ID NO: 731436 - DNA, 33 bp, Homo sapien
ctgtaggatgaatgaagtagatctttccaaatg

SEQ ID NO: 731437 - DNA, 33 bp, Homo sapien
aggaataagtttaaccagatgcttgaagttaac

SEQ ID NO: 731438 - DNA, 33 bp, Homo sapien
aggaataagtttaaccggatgcttgaagttaac

SEQ ID NO: 731439 - DNA, 33 bp, Homo sapien
taactgagcattgaacaccaaatatgacttaaa

SEQ ID NO: 731440 - DNA, 33 bp, Homo sapien
taactgagcattgaacgccaaatatgacttaaa

SEQ ID NO: 731441 - DNA, 33 bp, Homo sapien
aaattatttgcacatcaattctggaaaagtgag

SEQ ID NO: 731442 - DNA, 33 bp, Homo sapien
aaattatttgcacatcgattctggaaaagtgag

SEQ ID NO: 731443 - DNA, 33 bp, Homo sapien
aagtagaagtagcaaaatatatctcaggaaagt

SEQ ID NO: 731444 - DNA, 33 bp, Homo sapien
aagtagaagtagcaaactatatctcaggaaagt

SEQ ID NO: 731445 - DNA, 33 bp, Homo sapien
tacatactgaagcaaactggtgtccactgaata

SEQ ID NO: 731446 - DNA, 33 bp, Homo sapien
tacatactgaagcaaattggtgtccactgaata

SEQ ID NO: 731447 - DNA, 33 bp, Homo sapien
agctattccagccatagtactgcatagggtaat

SEQ ID NO: 731448 - DNA, 33 bp, Homo sapien
agctattccagccatattactgcatagggtaat

SEQ ID NO: 731449 - DNA, 33 bp, Homo sapien
tcctgaattaactgtacactttctactctgtct

SEQ ID NO: 731450 - DNA, 33 bp, Homo sapien
tcctgaattaactgtatactttctactctgtct

SEQ ID NO: 731451 - DNA, 33 bp, Homo sapien
ctttctttcaaaccaactcctttaattattttc

SEQ ID NO: 731452 - DNA, 33 bp, Homo sapien
ctttctttcaaaccaagtcctttaattattttc

SEQ ID NO: 731453 - DNA, 33 bp, Homo sapien
cactctgtgaaaataactaacttcgtacacaga

SEQ ID NO: 731454 - DNA, 33 bp, Homo sapien
cactctgtgaaaataattaacttcgtacacaga

SEQ ID NO: 731455 - DNA, 33 bp, Homo sapien
tattagctctaatataccatcaaagcaactgct

SEQ ID NO: 731456 - DNA, 33 bp, Homo sapien
tattagctctaatatatcatcaaagcaactgct

SEQ ID NO: 731457 - DNA, 33 bp, Homo sapien
accaactgtcttgaaaaagtcaacatgcaatca

SEQ ID NO: 731458 - DNA, 33 bp, Homo sapien
accaactgtcttgaaagagtcaacatgcaatca

SEQ ID NO: 731459 - DNA, 33 bp, Homo sapien
ttatcttacaaggctaacattaccctgattaaa

SEQ ID NO: 731460 - DNA, 33 bp, Homo sapien
ttatcttacaaggctagcattaccctgattaaa

SEQ ID NO: 731461 - DNA, 33 bp, Homo sapien
tgtgccatgttagatactacttgcaaaagaaaa

SEQ ID NO: 731462 - DNA, 33 bp, Homo sapien
tgtgccatgttagatattacttgcaaaagaaaa

SEQ ID NO: 731463 - DNA, 33 bp, Homo sapien
tgatttttataagaagccaaatgccacaattat

SEQ ID NO: 731464 - DNA, 33 bp, Homo sapien
tgatttttataagaagtcaaatgccacaattat

SEQ ID NO: 731465 - DNA, 33 bp, Homo sapien
taggtttcagtgtgcaaaagactcatacaatca

SEQ ID NO: 731466 - DNA, 33 bp, Homo sapien
taggtttcagtgtgcagaagactcatacaatca

SEQ ID NO: 731467 - DNA, 33 bp, Homo sapien
cacaggctatgaaaacgaattgtatgtgcacac

SEQ ID NO: 731468 - DNA, 33 bp, Homo sapien
cacaggctatgaaaactaattgtatgtgcacac

SEQ ID NO: 731469 - DNA, 33 bp, Homo sapien
acaggcaaagttcaaggcaattgcccacttgag

SEQ ID NO: 731470 - DNA, 33 bp, Homo sapien
acaggcaaagttcaagtcaattgcccacttgag

SEQ ID NO: 731471 - DNA, 33 bp, Homo sapien
acagtctaggattatccaggatctttccagcat

SEQ ID NO: 731472 - DNA, 33 bp, Homo sapien
acagtctaggattatctaggatctttccagcat

SEQ ID NO: 731473 - DNA, 33 bp, Homo sapien
catcagctgtgtgaagcagaaataagcatagag

SEQ ID NO: 731474 - DNA, 33 bp, Homo sapien
catcagctgtgtgaagtagaaataagcatagag

SEQ ID NO: 731475 - DNA, 33 bp, Homo sapien
tatacttctttaactcacaggtagtttactgta

SEQ ID NO: 731476 - DNA, 33 bp, Homo sapien
tatacttctttaactcgcaggtagtttactgta

SEQ ID NO: 731477 - DNA, 33 bp, Homo sapien
ccagagtaaatgaggcccctctagctatatact

SEQ ID NO: 731478 - DNA, 33 bp, Homo sapien
ccagagtaaatgaggctcctctagctatatact

SEQ ID NO: 731479 - DNA, 33 bp, Homo sapien
ccttctttctccacaacggttagtcaccagttc

SEQ ID NO: 731480 - DNA, 33 bp, Homo sapien
ccttctttctccacaatggttagtcaccagttc

SEQ ID NO: 731481 - DNA, 33 bp, Homo sapien
cagtacaagaagctctcaagatacctgggaaat

SEQ ID NO: 731482 - DNA, 33 bp, Homo sapien
cagtacaagaagctctgaagatacctgggaaat

SEQ ID NO: 731483 - DNA, 33 bp, Homo sapien
tgcgatttttaagcaacagtatagcaatgtagg

SEQ ID NO: 731484 - DNA, 33 bp, Homo sapien
tgcgatttttaagcaatagtatagcaatgtagg

SEQ ID NO: 731485 - DNA, 33 bp, Homo sapien
aatggagtggttgaaaagcaatgaattggaatc

SEQ ID NO: 731486 - DNA, 33 bp, Homo sapien
aatggagtggttgaaacgcaatgaattggaatc

SEQ ID NO: 731487 - DNA, 33 bp, Homo sapien
tcagactattcctttgaagccatttttataaga

SEQ ID NO: 731488 - DNA, 33 bp, Homo sapien
tcagactattcctttggagccatttttataaga

SEQ ID NO: 731489 - DNA, 33 bp, Homo sapien
ttaaaatacagtgacaacttgtttatatatgta

SEQ ID NO: 731490 - DNA, 33 bp, Homo sapien
ttaaaatacagtgacatcttgtttatatatgta

SEQ ID NO: 731491 - DNA, 33 bp, Homo sapien
tcatttaccctgtagaagaagccagtttattat

SEQ ID NO: 731492 - DNA, 33 bp, Homo sapien
tcatttaccctgtagaggaagccagtttattat

SEQ ID NO: 731493 - DNA, 33 bp, Homo sapien
aacttcagtaccaagaaatatacccttgtaaca

SEQ ID NO: 731494 - DNA, 33 bp, Homo sapien
aacttcagtaccaagacatatacccttgtaaca

SEQ ID NO: 731495 - DNA, 33 bp, Homo sapien
aaatgatgaaaagaatcaaggtgtactcaggca

SEQ ID NO: 731496 - DNA, 33 bp, Homo sapien
aaatgatgaaaagaatgaaggtgtactcaggca

SEQ ID NO: 731497 - DNA, 33 bp, Homo sapien
tttgccttcttgctcaaattatcatatgttaca

SEQ ID NO: 731498 - DNA, 33 bp, Homo sapien
tttgccttcttgctcagattatcatatgttaca

SEQ ID NO: 731499 - DNA, 33 bp, Homo sapien
acttgtttcattagaactacaccattttttctc

SEQ ID NO: 731500 - DNA, 33 bp, Homo sapien
acttgtttcattagaagtacaccattttttctc

SEQ ID NO: 731501 - DNA, 33 bp, Homo sapien
taaaggtcacacaaacaaagatttgaaccacag

SEQ ID NO: 731502 - DNA, 33 bp, Homo sapien
taaaggtcacacaaacgaagatttgaaccacag

SEQ ID NO: 731503 - DNA, 33 bp, Homo sapien
atccttcttctcataaagatagcattttagtaa

SEQ ID NO: 731504 - DNA, 33 bp, Homo sapien
atccttcttctcataatgatagcattttagtaa

SEQ ID NO: 731505 - DNA, 33 bp, Homo sapien
atcatacaacctagtcaagcagtaggctataca

SEQ ID NO: 731506 - DNA, 33 bp, Homo sapien
atcatacaacctagtcgagcagtaggctataca

SEQ ID NO: 731507 - DNA, 33 bp, Homo sapien
tggagagttgcataggaaggcatgtagaaaacg

SEQ ID NO: 731508 - DNA, 33 bp, Homo sapien
tggagagttgcataggcaggcatgtagaaaacg

SEQ ID NO: 731509 - DNA, 33 bp, Homo sapien
ataaaccaacttcttgcaaataagaccaacaaa

SEQ ID NO: 731510 - DNA, 33 bp, Homo sapien
ataaaccaacttcttgtaaataagaccaacaaa

SEQ ID NO: 731511 - DNA, 33 bp, Homo sapien
aaaattacacaggtcaataaaatgatcacgatg

SEQ ID NO: 731512 - DNA, 33 bp, Homo sapien
aaaattacacaggtcagtaaaatgatcacgatg

SEQ ID NO: 731513 - DNA, 33 bp, Homo sapien
cacactgccaataaagacctattcaaggctggg

SEQ ID NO: 731514 - DNA, 33 bp, Homo sapien
cacactgccaataaagtcctattcaaggctggg

SEQ ID NO: 731515 - DNA, 33 bp, Homo sapien
ttcctttaatgcaatgaaaatcagactaataca

SEQ ID NO: 731516 - DNA, 33 bp, Homo sapien
ttcctttaatgcaatgcaaatcagactaataca

SEQ ID NO: 731517 - DNA, 33 bp, Homo sapien
ttacttgttcttaggcacatgaaactatcactc

SEQ ID NO: 731518 - DNA, 33 bp, Homo sapien
ttacttgttcttaggcgcatgaaactatcactc

SEQ ID NO: 731519 - DNA, 33 bp, Homo sapien
tttttgtaggagtcaaattagcccaaattcttt

SEQ ID NO: 731520 - DNA, 33 bp, Homo sapien
tttttgtaggagtcaagttagcccaaattcttt

SEQ ID NO: 731521 - DNA, 33 bp, Homo sapien
attaggtgcttatggccatatctgcatgatatt

SEQ ID NO: 731522 - DNA, 33 bp, Homo sapien
attaggtgcttatggctatatctgcatgatatt

SEQ ID NO: 731523 - DNA, 33 bp, Homo sapien
gttaccaaacactagcactgattgcctctttca

SEQ ID NO: 731524 - DNA, 33 bp, Homo sapien
gttaccaaacactagcgctgattgcctctttca

SEQ ID NO: 731525 - DNA, 33 bp, Homo sapien
actttttacaggcatccgaggaactggtgtttt

SEQ ID NO: 731526 - DNA, 33 bp, Homo sapien
actttttacaggcatctgaggaactggtgtttt

SEQ ID NO: 731527 - DNA, 33 bp, Homo sapien
ttcttccacttctccccgccatataaggactca

SEQ ID NO: 731528 - DNA, 33 bp, Homo sapien
ttcttccacttctccctgccatataaggactca

SEQ ID NO: 731529 - DNA, 33 bp, Homo sapien
tcttctgattggtaaaacaataccttttgcaaa

SEQ ID NO: 731530 - DNA, 33 bp, Homo sapien
tcttctgattggtaaagcaataccttttgcaaa

SEQ ID NO: 731531 - DNA, 33 bp, Homo sapien
tgaatcatgctagaaacatgagtgccacaatag

SEQ ID NO: 731532 - DNA, 33 bp, Homo sapien
tgaatcatgctagaaatatgagtgccacaatag

SEQ ID NO: 731533 - DNA, 33 bp, Homo sapien
gttctcaaggagaagacagttaaaaggcaatat

SEQ ID NO: 731534 - DNA, 33 bp, Homo sapien
gttctcaaggagaagagagttaaaaggcaatat

SEQ ID NO: 731535 - DNA, 33 bp, Homo sapien
aaagtgacttgtgcaaaataagagaacatgaga

SEQ ID NO: 731536 - DNA, 33 bp, Homo sapien
aaagtgacttgtgcaacataagagaacatgaga

SEQ ID NO: 731537 - DNA, 33 bp, Homo sapien
gaacaaaaacagtgccatgttactcaataagtt

SEQ ID NO: 731538 - DNA, 33 bp, Homo sapien
gaacaaaaacagtgccgtgttactcaataagtt

SEQ ID NO: 731539 - DNA, 33 bp, Homo sapien
aacataccactacaccaagacagaagggtttgc

SEQ ID NO: 731540 - DNA, 33 bp, Homo sapien
aacataccactacaccgagacagaagggtttgc

SEQ ID NO: 731541 - DNA, 33 bp, Homo sapien
ttaggctattctcttcaatgaaagctgtatctt

SEQ ID NO: 731542 - DNA, 33 bp, Homo sapien
ttaggctattctcttccatgaaagctgtatctt

SEQ ID NO: 731543 - DNA, 33 bp, Homo sapien
ctcctctgcagtcacaaagctttctctttaaca

SEQ ID NO: 731544 - DNA, 33 bp, Homo sapien
ctcctctgcagtcacagagctttctctttaaca

SEQ ID NO: 731545 - DNA, 33 bp, Homo sapien
ttaaggataaactcaaatatcgcaccacttaga

SEQ ID NO: 731546 - DNA, 33 bp, Homo sapien
ttaaggataaactcaagtatcgcaccacttaga

SEQ ID NO: 731547 - DNA, 33 bp, Homo sapien
ggaaagtaagtgaacacaataatagccaaatat

SEQ ID NO: 731548 - DNA, 33 bp, Homo sapien
ggaaagtaagtgaacagaataatagccaaatat

SEQ ID NO: 731549 - DNA, 33 bp, Homo sapien
aaacactcttaaaatgacagttttgaacaaagg

SEQ ID NO: 731550 - DNA, 33 bp, Homo sapien
aaacactcttaaaatgtcagttttgaacaaagg

SEQ ID NO: 731551 - DNA, 33 bp, Homo sapien
ttctactcattgagaacctatttttctcactgc

SEQ ID NO: 731552 - DNA, 33 bp, Homo sapien
ttctactcattgagaagctatttttctcactgc

SEQ ID NO: 731553 - DNA, 33 bp, Homo sapien
tctgcccagtttaaaggaagactaaagagtatg

SEQ ID NO: 731554 - DNA, 33 bp, Homo sapien
tctgcccagtttaaagtaagactaaagagtatg

SEQ ID NO: 731555 - DNA, 33 bp, Homo sapien
gtggttcagggagaagactattgaaacccataa

SEQ ID NO: 731556 - DNA, 33 bp, Homo sapien
gtggttcagggagaagtctattgaaacccataa

SEQ ID NO: 731557 - DNA, 33 bp, Homo sapien
gatagaggagtagagtaacaaggtatctataaa

SEQ ID NO: 731558 - DNA, 33 bp, Homo sapien
gatagaggagtagagtgacaaggtatctataaa

SEQ ID NO: 731559 - DNA, 33 bp, Homo sapien
gatcattggcactgtacgtgaatctggatatag

SEQ ID NO: 731560 - DNA, 33 bp, Homo sapien
gatcattggcactgtatgtgaatctggatatag

SEQ ID NO: 731561 - DNA, 33 bp, Homo sapien
ttattcatagcttaatcaactgcttctagtact

SEQ ID NO: 731562 - DNA, 33 bp, Homo sapien
ttattcatagcttaatgaactgcttctagtact

SEQ ID NO: 731563 - DNA, 33 bp, Homo sapien
tttccctgattaagctaaacattccattaaatg

SEQ ID NO: 731564 - DNA, 33 bp, Homo sapien
tttccctgattaagcttaacattccattaaatg

SEQ ID NO: 731565 - DNA, 33 bp, Homo sapien
aaaaccatgaaaatccagctatattaagagctt

SEQ ID NO: 731566 - DNA, 33 bp, Homo sapien
aaaaccatgaaaatccggctatattaagagctt

SEQ ID NO: 731567 - DNA, 33 bp, Homo sapien
ggcaatatgagggatacgattacttttgttttt

SEQ ID NO: 731568 - DNA, 33 bp, Homo sapien
ggcaatatgagggatatgattacttttgttttt

SEQ ID NO: 731569 - DNA, 33 bp, Homo sapien
catttttttacatgcaagatgaattagaatgtt

SEQ ID NO: 731570 - DNA, 33 bp, Homo sapien
catttttttacatgcacgatgaattagaatgtt

SEQ ID NO: 731571 - DNA, 33 bp, Homo sapien
gggcaccctgagaaataactgtgtaatggaaag

SEQ ID NO: 731572 - DNA, 33 bp, Homo sapien
gggcaccctgagaaattactgtgtaatggaaag

SEQ ID NO: 731573 - DNA, 33 bp, Homo sapien
aagacatgaaataaacaagttaaggaccttcaa

SEQ ID NO: 731574 - DNA, 33 bp, Homo sapien
aagacatgaaataaacgagttaaggaccttcaa

SEQ ID NO: 731575 - DNA, 33 bp, Homo sapien
ccactgcctccctaccaaaaggaccttcagtgt

SEQ ID NO: 731576 - DNA, 33 bp, Homo sapien
ccactgcctccctaccgaaaggaccttcagtgt

SEQ ID NO: 731577 - DNA, 33 bp, Homo sapien
gaatcagtttctctcccaggtctcatgaaagtg

SEQ ID NO: 731578 - DNA, 33 bp, Homo sapien
gaatcagtttctctccgaggtctcatgaaagtg

SEQ ID NO: 731579 - DNA, 33 bp, Homo sapien
ctactgacttaatgcacagataagtataaaaat

SEQ ID NO: 731580 - DNA, 33 bp, Homo sapien
ctactgacttaatgcagagataagtataaaaat

SEQ ID NO: 731581 - DNA, 33 bp, Homo sapien
ttgtctttactgtgcaatacttacccaggagag

SEQ ID NO: 731582 - DNA, 33 bp, Homo sapien
ttgtctttactgtgcagtacttacccaggagag

SEQ ID NO: 731583 - DNA, 33 bp, Homo sapien
aattggtttcctcatcaataatatagagctcat

SEQ ID NO: 731584 - DNA, 33 bp, Homo sapien
aattggtttcctcatcgataatatagagctcat

SEQ ID NO: 731585 - DNA, 33 bp, Homo sapien
atgttaagtttatttaccatcagagaaggataa

SEQ ID NO: 731586 - DNA, 33 bp, Homo sapien
atgttaagtttatttatcatcagagaaggataa

SEQ ID NO: 731587 - DNA, 33 bp, Homo sapien
agtgtacatacagtgaacctcacacagtgttag

SEQ ID NO: 731588 - DNA, 33 bp, Homo sapien
agtgtacatacagtgagcctcacacagtgttag

SEQ ID NO: 731589 - DNA, 33 bp, Homo sapien
tctttgagttttctcactgaagttccagacagg

SEQ ID NO: 731590 - DNA, 33 bp, Homo sapien
tctttgagttttctcattgaagttccagacagg

SEQ ID NO: 731591 - DNA, 33 bp, Homo sapien
taacgaggtcccgtaaagagagtgttccattca

SEQ ID NO: 731592 - DNA, 33 bp, Homo sapien
taacgaggtcccgtaaggagagtgttccattca

SEQ ID NO: 731593 - DNA, 33 bp, Homo sapien
ttccatgatgatataaagtgaggagaaaagaag

SEQ ID NO: 731594 - DNA, 33 bp, Homo sapien
ttccatgatgatataaggtgaggagaaaagaag

SEQ ID NO: 731595 - DNA, 33 bp, Homo sapien
tctaataagtggttctcaatgaatgtgcttgga

SEQ ID NO: 731596 - DNA, 33 bp, Homo sapien
tctaataagtggttctgaatgaatgtgcttgga

SEQ ID NO: 731597 - DNA, 33 bp, Homo sapien
aaattgtttggttatactagcacacagaaatgt

SEQ ID NO: 731598 - DNA, 33 bp, Homo sapien
aaattgtttggttatattagcacacagaaatgt

SEQ ID NO: 731599 - DNA, 33 bp, Homo sapien
aagttaagggagaatcaataccaaactaatttt

SEQ ID NO: 731600 - DNA, 33 bp, Homo sapien
aagttaagggagaatccataccaaactaatttt

SEQ ID NO: 731601 - DNA, 33 bp, Homo sapien
tattccatacatgaaactgaaggaatacattta

SEQ ID NO: 731602 - DNA, 33 bp, Homo sapien
tattccatacatgaaattgaaggaatacattta

SEQ ID NO: 731603 - DNA, 33 bp, Homo sapien
aattgaattcaagtaacagtgaagggcaaattt

SEQ ID NO: 731604 - DNA, 33 bp, Homo sapien
aattgaattcaagtaatagtgaagggcaaattt

SEQ ID NO: 731605 - DNA, 33 bp, Homo sapien
aaatactatgcagagaagtaataagagctccaa

SEQ ID NO: 731606 - DNA, 33 bp, Homo sapien
aaatactatgcagagaggtaataagagctccaa

SEQ ID NO: 731607 - DNA, 33 bp, Homo sapien
aaaagaataatttgacaggcagataaaaacagt

SEQ ID NO: 731608 - DNA, 33 bp, Homo sapien
aaaagaataatttgacgggcagataaaaacagt

SEQ ID NO: 731609 - DNA, 33 bp, Homo sapien
ttataatcacgtggtacaaagagagaaagagag

SEQ ID NO: 731610 - DNA, 33 bp, Homo sapien
ttataatcacgtggtagaaagagagaaagagag

SEQ ID NO: 731611 - DNA, 33 bp, Homo sapien
aagagacagcagatgaaactgatttatgctcag

SEQ ID NO: 731612 - DNA, 33 bp, Homo sapien
aagagacagcagatgacactgatttatgctcag

SEQ ID NO: 731613 - DNA, 33 bp, Homo sapien
tgaatcattgtttttacagcattggttacatga

SEQ ID NO: 731614 - DNA, 33 bp, Homo sapien
tgaatcattgtttttatagcattggttacatga

SEQ ID NO: 731615 - DNA, 33 bp, Homo sapien
actgaaattggttaagaaacgaggataataatt

SEQ ID NO: 731616 - DNA, 33 bp, Homo sapien
actgaaattggttaaggaacgaggataataatt

SEQ ID NO: 731617 - DNA, 33 bp, Homo sapien
aaactgctatgaaatacgaagtgtggttgtgtg

SEQ ID NO: 731618 - DNA, 33 bp, Homo sapien
aaactgctatgaaatatgaagtgtggttgtgtg

SEQ ID NO: 731619 - DNA, 33 bp, Homo sapien
aaatatttaaagctatcaaaatgtatgaacact

SEQ ID NO: 731620 - DNA, 33 bp, Homo sapien
aaatatttaaagctatgaaaatgtatgaacact

SEQ ID NO: 731621 - DNA, 33 bp, Homo sapien
agtacaagggggtcgacatatgtggtataatgt

SEQ ID NO: 731622 - DNA, 33 bp, Homo sapien
agtacaagggggtcgatatatgtggtataatgt

SEQ ID NO: 731623 - DNA, 33 bp, Homo sapien
tcttcagtgctacccaatacaaagatgtaaccc

SEQ ID NO: 731624 - DNA, 33 bp, Homo sapien
tcttcagtgctacccagtacaaagatgtaaccc

SEQ ID NO: 731625 - DNA, 33 bp, Homo sapien
cgaatactatttgacactctcaattcagtacat

SEQ ID NO: 731626 - DNA, 33 bp, Homo sapien
cgaatactatttgacattctcaattcagtacat

SEQ ID NO: 731627 - DNA, 33 bp, Homo sapien
tgggaccagctgttacactttgtagtttctgaa

SEQ ID NO: 731628 - DNA, 33 bp, Homo sapien
tgggaccagctgttacgctttgtagtttctgaa

SEQ ID NO: 731629 - DNA, 33 bp, Homo sapien
gtcttgtctgaattaacgctcttctgaagaggg

SEQ ID NO: 731630 - DNA, 33 bp, Homo sapien
gtcttgtctgaattaatgctcttctgaagaggg

SEQ ID NO: 731631 - DNA, 33 bp, Homo sapien
tttatattcagaaaaaccgacttttgagtatta

SEQ ID NO: 731632 - DNA, 33 bp, Homo sapien
tttatattcagaaaaagcgacttttgagtatta

SEQ ID NO: 731633 - DNA, 33 bp, Homo sapien
gggaaaataaatgcaaaagttattcatgttttt

SEQ ID NO: 731634 - DNA, 33 bp, Homo sapien
gggaaaataaatgcaacagttattcatgttttt

SEQ ID NO: 731635 - DNA, 33 bp, Homo sapien
aatttttagcacatgaagttttagccacagtta

SEQ ID NO: 731636 - DNA, 33 bp, Homo sapien
aatttttagcacatgacgttttagccacagtta

SEQ ID NO: 731637 - DNA, 33 bp, Homo sapien
agctggtaatacagaaatgcccaagagtttcac

SEQ ID NO: 731638 - DNA, 33 bp, Homo sapien
agctggtaatacagaagtgcccaagagtttcac

SEQ ID NO: 731639 - DNA, 33 bp, Homo sapien
agaggagatttacttacaaaaacggatagatgt

SEQ ID NO: 731640 - DNA, 33 bp, Homo sapien
agaggagatttacttataaaaacggatagatgt

SEQ ID NO: 731641 - DNA, 33 bp, Homo sapien
cagaatcagtttttgacaaggccttttgtttgg

SEQ ID NO: 731642 - DNA, 33 bp, Homo sapien
cagaatcagtttttgagaaggccttttgtttgg

SEQ ID NO: 731643 - DNA, 33 bp, Homo sapien
aattctcaactgtcaacaggtgtgattagaata

SEQ ID NO: 731644 - DNA, 33 bp, Homo sapien
aattctcaactgtcaagaggtgtgattagaata

SEQ ID NO: 731645 - DNA, 33 bp, Homo sapien
aggtccccagagcccacaaggaaagtcaggtga

SEQ ID NO: 731646 - DNA, 33 bp, Homo sapien
aggtccccagagcccataaggaaagtcaggtga

SEQ ID NO: 731647 - DNA, 33 bp, Homo sapien
aagaagagggtcatcaagtattattttgtatct

SEQ ID NO: 731648 - DNA, 33 bp, Homo sapien
aagaagagggtcatcatgtattattttgtatct

SEQ ID NO: 731649 - DNA, 33 bp, Homo sapien
agttactcaggtagtccaggaaaaaaaattctc

SEQ ID NO: 731650 - DNA, 33 bp, Homo sapien
agttactcaggtagtcgaggaaaaaaaattctc

SEQ ID NO: 731651 - DNA, 33 bp, Homo sapien
agcattttaacaagcaacagatttaaaacgtat

SEQ ID NO: 731652 - DNA, 33 bp, Homo sapien
agcattttaacaagcaccagatttaaaacgtat

SEQ ID NO: 731653 - DNA, 33 bp, Homo sapien
cagaacaaaaatctccaagcacataataaatgt

SEQ ID NO: 731654 - DNA, 33 bp, Homo sapien
cagaacaaaaatctccgagcacataataaatgt

SEQ ID NO: 731655 - DNA, 33 bp, Homo sapien
ttccacctctcccacaactgcttcaattatctg

SEQ ID NO: 731656 - DNA, 33 bp, Homo sapien
ttccacctctcccacagctgcttcaattatctg

SEQ ID NO: 731657 - DNA, 33 bp, Homo sapien
ctgatcaagtccacacaccaactttatcaaact

SEQ ID NO: 731658 - DNA, 33 bp, Homo sapien
ctgatcaagtccacaccccaactttatcaaact

SEQ ID NO: 731659 - DNA, 33 bp, Homo sapien
cattattataggccagaaatactacatagatca

SEQ ID NO: 731660 - DNA, 33 bp, Homo sapien
cattattataggccaggaatactacatagatca

SEQ ID NO: 731661 - DNA, 33 bp, Homo sapien
tttagtgtcaataacacagtccacagctcagca

SEQ ID NO: 731662 - DNA, 33 bp, Homo sapien
tttagtgtcaataacatagtccacagctcagca

SEQ ID NO: 731663 - DNA, 33 bp, Homo sapien
aactgatctttgacaaaggagtatagacaattc

SEQ ID NO: 731664 - DNA, 33 bp, Homo sapien
aactgatctttgacaatggagtatagacaattc

SEQ ID NO: 731665 - DNA, 33 bp, Homo sapien
taattaaacttgtgaacataactctgggtcctg

SEQ ID NO: 731666 - DNA, 33 bp, Homo sapien
taattaaacttgtgaatataactctgggtcctg

SEQ ID NO: 731667 - DNA, 33 bp, Homo sapien
catactcttcttcacaactgttggaccgttacc

SEQ ID NO: 731668 - DNA, 33 bp, Homo sapien
catactcttcttcacagctgttggaccgttacc

SEQ ID NO: 731669 - DNA, 33 bp, Homo sapien
tcccttgagattttacactagagaaaataggca

SEQ ID NO: 731670 - DNA, 33 bp, Homo sapien
tcccttgagattttacgctagagaaaataggca

SEQ ID NO: 731671 - DNA, 33 bp, Homo sapien
tgtatcatactatacaaaaatgaaataaccatg

SEQ ID NO: 731672 - DNA, 33 bp, Homo sapien
tgtatcatactatacagaaatgaaataaccatg

SEQ ID NO: 731673 - DNA, 33 bp, Homo sapien
attttatgctgctctaaaatgtgtttccatata

SEQ ID NO: 731674 - DNA, 33 bp, Homo sapien
attttatgctgctctagaatgtgtttccatata

SEQ ID NO: 731675 - DNA, 33 bp, Homo sapien
aaacctcattgattccagatacctctcatttat

SEQ ID NO: 731676 - DNA, 33 bp, Homo sapien
aaacctcattgattccggatacctctcatttat

SEQ ID NO: 731677 - DNA, 33 bp, Homo sapien
catccactatgtcctccgaaatgtatgaaccat

SEQ ID NO: 731678 - DNA, 33 bp, Homo sapien
catccactatgtcctctgaaatgtatgaaccat

SEQ ID NO: 731679 - DNA, 33 bp, Homo sapien
taattcctgagacaacaagcttaaatggagact

SEQ ID NO: 731680 - DNA, 33 bp, Homo sapien
taattcctgagacaacgagcttaaatggagact

SEQ ID NO: 731681 - DNA, 33 bp, Homo sapien
aaaaatgggatcgatacactctcaagaaagtca

SEQ ID NO: 731682 - DNA, 33 bp, Homo sapien
aaaaatgggatcgatatactctcaagaaagtca

SEQ ID NO: 731683 - DNA, 33 bp, Homo sapien
caaattaccacacacaaaaaaaatattcccatt

SEQ ID NO: 731684 - DNA, 33 bp, Homo sapien
caaattaccacacacacaaaaaatattcccatt

SEQ ID NO: 731685 - DNA, 33 bp, Homo sapien
aggagttatatgtagacgagtcaggtttagtta

SEQ ID NO: 731686 - DNA, 33 bp, Homo sapien
aggagttatatgtagatgagtcaggtttagtta

SEQ ID NO: 731687 - DNA, 33 bp, Homo sapien
gccatctcctggataacagaaaagagttttcat

SEQ ID NO: 731688 - DNA, 33 bp, Homo sapien
gccatctcctggataatagaaaagagttttcat

SEQ ID NO: 731689 - DNA, 33 bp, Homo sapien
cctggttgtgctgttacgtagcctttccttggt

SEQ ID NO: 731690 - DNA, 33 bp, Homo sapien
cctggttgtgctgttatgtagcctttccttggt

SEQ ID NO: 731691 - DNA, 33 bp, Homo sapien
cttttgaaaagagtcaagtttacttgcaagaca

SEQ ID NO: 731692 - DNA, 33 bp, Homo sapien
cttttgaaaagagtcaggtttacttgcaagaca

SEQ ID NO: 731693 - DNA, 33 bp, Homo sapien
aaggggtacctaccacaacagtatctggaaaaa

SEQ ID NO: 731694 - DNA, 33 bp, Homo sapien
aaggggtacctaccacgacagtatctggaaaaa

SEQ ID NO: 731695 - DNA, 33 bp, Homo sapien
tttgtctttggtatcacgctaagagaggtattt

SEQ ID NO: 731696 - DNA, 33 bp, Homo sapien
tttgtctttggtatcatgctaagagaggtattt

SEQ ID NO: 731697 - DNA, 33 bp, Homo sapien
taatgcttagcacaaacttagcagtttaaaaca

SEQ ID NO: 731698 - DNA, 33 bp, Homo sapien
taatgcttagcacaaatttagcagtttaaaaca

SEQ ID NO: 731699 - DNA, 33 bp, Homo sapien
gtaaggttgccaatagaagaaaccattacacca

SEQ ID NO: 731700 - DNA, 33 bp, Homo sapien
gtaaggttgccaatagcagaaaccattacacca

SEQ ID NO: 731701 - DNA, 33 bp, Homo sapien
gcaacagaaaaacaaaattatatcacacagtag

SEQ ID NO: 731702 - DNA, 33 bp, Homo sapien
gcaacagaaaaacaaagttatatcacacagtag

SEQ ID NO: 731703 - DNA, 33 bp, Homo sapien
caaagtttaaggactcaccaaactgttatcccc

SEQ ID NO: 731704 - DNA, 33 bp, Homo sapien
caaagtttaaggactcgccaaactgttatcccc

SEQ ID NO: 731705 - DNA, 33 bp, Homo sapien
aaaattcccaccaccaaaataggcttcaaatct

SEQ ID NO: 731706 - DNA, 33 bp, Homo sapien
aaaattcccaccaccagaataggcttcaaatct

SEQ ID NO: 731707 - DNA, 33 bp, Homo sapien
aatacaattaagtatacagaggagctgaataac

SEQ ID NO: 731708 - DNA, 33 bp, Homo sapien
aatacaattaagtatatagaggagctgaataac

SEQ ID NO: 731709 - DNA, 33 bp, Homo sapien
tactattactatctgcaattacatggttaaata

SEQ ID NO: 731710 - DNA, 33 bp, Homo sapien
tactattactatctgctattacatggttaaata

SEQ ID NO: 731711 - DNA, 33 bp, Homo sapien
agtttttcaaaatctacaacaatgcttccactc

SEQ ID NO: 731712 - DNA, 33 bp, Homo sapien
agtttttcaaaatctataacaatgcttccactc

SEQ ID NO: 731713 - DNA, 33 bp, Homo sapien
aaatgctgagtgatgacatacagttcctcaaaa

SEQ ID NO: 731714 - DNA, 33 bp, Homo sapien
aaatgctgagtgatgatatacagttcctcaaaa

SEQ ID NO: 731715 - DNA, 33 bp, Homo sapien
gataagttatcacatacgaagggactaggaatg

SEQ ID NO: 731716 - DNA, 33 bp, Homo sapien
gataagttatcacatatgaagggactaggaatg

SEQ ID NO: 731717 - DNA, 33 bp, Homo sapien
catttttagagaaaataaggtttcaggaaaagg

SEQ ID NO: 731718 - DNA, 33 bp, Homo sapien
catttttagagaaaattaggtttcaggaaaagg

SEQ ID NO: 731719 - DNA, 33 bp, Homo sapien
agtgtcttacttaagccgaaaatcctcctaaca

SEQ ID NO: 731720 - DNA, 33 bp, Homo sapien
agtgtcttacttaagctgaaaatcctcctaaca

SEQ ID NO: 731721 - DNA, 33 bp, Homo sapien
ggtacttttcacattcaaagtgccgcactccca

SEQ ID NO: 731722 - DNA, 33 bp, Homo sapien
ggtacttttcacattcgaagtgccgcactccca

SEQ ID NO: 731723 - DNA, 33 bp, Homo sapien
gaaatcagagatacctaaccttcattttctgta

SEQ ID NO: 731724 - DNA, 33 bp, Homo sapien
gaaatcagagatacctcaccttcattttctgta

SEQ ID NO: 731725 - DNA, 33 bp, Homo sapien
aattttataaacaccacggcattgacactggaa

SEQ ID NO: 731726 - DNA, 33 bp, Homo sapien
aattttataaacaccatggcattgacactggaa

SEQ ID NO: 731727 - DNA, 33 bp, Homo sapien
gtctgatatttgattggagaagtctaattataa

SEQ ID NO: 731728 - DNA, 33 bp, Homo sapien
gtctgatatttgattgtagaagtctaattataa

SEQ ID NO: 731729 - DNA, 33 bp, Homo sapien
tatttccagattgttacgattcaaaatgaccta

SEQ ID NO: 731730 - DNA, 33 bp, Homo sapien
tatttccagattgttatgattcaaaatgaccta

SEQ ID NO: 731731 - DNA, 33 bp, Homo sapien
ttgtttgttcaattaacgttgagaggtcagcaa

SEQ ID NO: 731732 - DNA, 33 bp, Homo sapien
ttgtttgttcaattaatgttgagaggtcagcaa

SEQ ID NO: 731733 - DNA, 33 bp, Homo sapien
cacttatttctcccacacttcataatgctgact

SEQ ID NO: 731734 - DNA, 33 bp, Homo sapien
cacttatttctcccacgcttcataatgctgact

SEQ ID NO: 731735 - DNA, 33 bp, Homo sapien
tatcttcagtgtagcactatttgtagaagtagg

SEQ ID NO: 731736 - DNA, 33 bp, Homo sapien
tatcttcagtgtagcattatttgtagaagtagg

SEQ ID NO: 731737 - DNA, 33 bp, Homo sapien
gaggaatgactgtctcacatagtatatattttc

SEQ ID NO: 731738 - DNA, 33 bp, Homo sapien
gaggaatgactgtctcgcatagtatatattttc

SEQ ID NO: 731739 - DNA, 33 bp, Homo sapien
agacactcagtattccaggaagcataattcatt

SEQ ID NO: 731740 - DNA, 33 bp, Homo sapien
agacactcagtattccgggaagcataattcatt

SEQ ID NO: 731741 - DNA, 33 bp, Homo sapien
atttataagggttaggcacaggaatgtgtctat

SEQ ID NO: 731742 - DNA, 33 bp, Homo sapien
atttataagggttaggtacaggaatgtgtctat

SEQ ID NO: 731743 - DNA, 33 bp, Homo sapien
aatatggctcattttcgcccatctctggcaatt

SEQ ID NO: 731744 - DNA, 33 bp, Homo sapien
aatatggctcattttctcccatctctggcaatt

SEQ ID NO: 731745 - DNA, 33 bp, Homo sapien
acggagaccattgagactatagtttaaagtaag

SEQ ID NO: 731746 - DNA, 33 bp, Homo sapien
acggagaccattgagattatagtttaaagtaag

SEQ ID NO: 731747 - DNA, 33 bp, Homo sapien
attacttagctagtaagagtagaataatcgaac

SEQ ID NO: 731748 - DNA, 33 bp, Homo sapien
attacttagctagtaatagtagaataatcgaac

SEQ ID NO: 731749 - DNA, 33 bp, Homo sapien
acctatacatcagttacggtttctgactttaag

SEQ ID NO: 731750 - DNA, 33 bp, Homo sapien
acctatacatcagttatggtttctgactttaag

SEQ ID NO: 731751 - DNA, 33 bp, Homo sapien
tttgatttgtagtttaactttgaagtaaggatg

SEQ ID NO: 731752 - DNA, 33 bp, Homo sapien
tttgatttgtagtttacctttgaagtaaggatg

SEQ ID NO: 731753 - DNA, 33 bp, Homo sapien
gagaggcaaaaacaaaactgcagtgaatgagtg

SEQ ID NO: 731754 - DNA, 33 bp, Homo sapien
gagaggcaaaaacaaacctgcagtgaatgagtg

SEQ ID NO: 731755 - DNA, 33 bp, Homo sapien
cacctttctgaaaaagactcaaacatgataaga

SEQ ID NO: 731756 - DNA, 33 bp, Homo sapien
cacctttctgaaaaagtctcaaacatgataaga

SEQ ID NO: 731757 - DNA, 33 bp, Homo sapien
aggttaagtgaggtgaacagcattactggtttc

SEQ ID NO: 731758 - DNA, 33 bp, Homo sapien
aggttaagtgaggtgagcagcattactggtttc

SEQ ID NO: 731759 - DNA, 33 bp, Homo sapien
ttcttagcctgttacccggcagcctgttacctg

SEQ ID NO: 731760 - DNA, 33 bp, Homo sapien
ttcttagcctgttacctggcagcctgttacctg

SEQ ID NO: 731761 - DNA, 33 bp, Homo sapien
tatgcagttgattatacgccaattagtctcaaa

SEQ ID NO: 731762 - DNA, 33 bp, Homo sapien
tatgcagttgattatatgccaattagtctcaaa

SEQ ID NO: 731763 - DNA, 33 bp, Homo sapien
catatgtatacacttaagatctcaatcaaggta

SEQ ID NO: 731764 - DNA, 33 bp, Homo sapien
catatgtatacacttacgatctcaatcaaggta

SEQ ID NO: 731765 - DNA, 33 bp, Homo sapien
ttccaagatacttccaagactgtgtcacctctt

SEQ ID NO: 731766 - DNA, 33 bp, Homo sapien
ttccaagatacttccatgactgtgtcacctctt

SEQ ID NO: 731767 - DNA, 33 bp, Homo sapien
tttgggaggtggtagaatcagtggtgatgaaca

SEQ ID NO: 731768 - DNA, 33 bp, Homo sapien
tttgggaggtggtagactcagtggtgatgaaca

SEQ ID NO: 731769 - DNA, 33 bp, Homo sapien
caaatataacaaaatccacccatgcacttaaac

SEQ ID NO: 731770 - DNA, 33 bp, Homo sapien
caaatataacaaaatctacccatgcacttaaac

SEQ ID NO: 731771 - DNA, 33 bp, Homo sapien
ttatatcaactcacaacactttccagagagaga

SEQ ID NO: 731772 - DNA, 33 bp, Homo sapien
ttatatcaactcacaatactttccagagagaga

SEQ ID NO: 731773 - DNA, 33 bp, Homo sapien
agtaaatatttcatcaaagcagtaatacttctt

SEQ ID NO: 731774 - DNA, 33 bp, Homo sapien
agtaaatatttcatcatagcagtaatacttctt

SEQ ID NO: 731775 - DNA, 33 bp, Homo sapien
ccactctcagaacataagctctagcccaggaac

SEQ ID NO: 731776 - DNA, 33 bp, Homo sapien
ccactctcagaacataggctctagcccaggaac

SEQ ID NO: 731777 - DNA, 33 bp, Homo sapien
attcctttggtgaatgccagtcagcctcaggtc

SEQ ID NO: 731778 - DNA, 33 bp, Homo sapien
attcctttggtgaatgtcagtcagcctcaggtc

SEQ ID NO: 731779 - DNA, 33 bp, Homo sapien
tgttcatttttcttacagattggatgggccata

SEQ ID NO: 731780 - DNA, 33 bp, Homo sapien
tgttcatttttcttactgattggatgggccata

SEQ ID NO: 731781 - DNA, 33 bp, Homo sapien
tttctgcttacaaaatcaagacttcagtaccac

SEQ ID NO: 731782 - DNA, 33 bp, Homo sapien
tttctgcttacaaaatgaagacttcagtaccac

SEQ ID NO: 731783 - DNA, 33 bp, Homo sapien
attccttgttcttctacgtatgaaggagattcg

SEQ ID NO: 731784 - DNA, 33 bp, Homo sapien
attccttgttcttctatgtatgaaggagattcg

SEQ ID NO: 731785 - DNA, 33 bp, Homo sapien
accttgaagtccactacgcaagcaattgggaag

SEQ ID NO: 731786 - DNA, 33 bp, Homo sapien
accttgaagtccactatgcaagcaattgggaag

SEQ ID NO: 731787 - DNA, 33 bp, Homo sapien
gcacactacttagaaaatgtaaagtccataggt

SEQ ID NO: 731788 - DNA, 33 bp, Homo sapien
gcacactacttagaaagtgtaaagtccataggt

SEQ ID NO: 731789 - DNA, 33 bp, Homo sapien
ctcaacaaacatgaacagaatattttatggttt

SEQ ID NO: 731790 - DNA, 33 bp, Homo sapien
ctcaacaaacatgaacggaatattttatggttt

SEQ ID NO: 731791 - DNA, 33 bp, Homo sapien
ttgtcctcttaatccactccattagatttttat

SEQ ID NO: 731792 - DNA, 33 bp, Homo sapien
ttgtcctcttaatccattccattagatttttat

SEQ ID NO: 731793 - DNA, 33 bp, Homo sapien
ggagaaatacggaaaactgcatatttgcacatc

SEQ ID NO: 731794 - DNA, 33 bp, Homo sapien
ggagaaatacggaaaattgcatatttgcacatc

SEQ ID NO: 731795 - DNA, 33 bp, Homo sapien
agatgagcaaatacaacgtgtagatatcaaggc

SEQ ID NO: 731796 - DNA, 33 bp, Homo sapien
agatgagcaaatacaatgtgtagatatcaaggc

SEQ ID NO: 731797 - DNA, 33 bp, Homo sapien
gaggagtcacatataaagaagcgaaaaacagaa

SEQ ID NO: 731798 - DNA, 33 bp, Homo sapien
gaggagtcacatataaggaagcgaaaaacagaa

SEQ ID NO: 731799 - DNA, 33 bp, Homo sapien
acagtgcacaaatagccaatcgaataccgagca

SEQ ID NO: 731800 - DNA, 33 bp, Homo sapien
acagtgcacaaatagctaatcgaataccgagca

SEQ ID NO: 731801 - DNA, 33 bp, Homo sapien
ccttggctgtggagaaactttgtagattaatct

SEQ ID NO: 731802 - DNA, 33 bp, Homo sapien
ccttggctgtggagaagctttgtagattaatct

SEQ ID NO: 731803 - DNA, 33 bp, Homo sapien
gtgtcattataaaaacacacctggaagattctg

SEQ ID NO: 731804 - DNA, 33 bp, Homo sapien
gtgtcattataaaaacgcacctggaagattctg

SEQ ID NO: 731805 - DNA, 33 bp, Homo sapien
gacttttaaacagctcacattgtatttgccttt

SEQ ID NO: 731806 - DNA, 33 bp, Homo sapien
gacttttaaacagctcgcattgtatttgccttt

SEQ ID NO: 731807 - DNA, 33 bp, Homo sapien
acaatcaatggtcaacaaagaaattaaaagaaa

SEQ ID NO: 731808 - DNA, 33 bp, Homo sapien
acaatcaatggtcaacgaagaaattaaaagaaa

SEQ ID NO: 731809 - DNA, 33 bp, Homo sapien
ataggtacaggagagaagttaatcagcaagtac

SEQ ID NO: 731810 - DNA, 33 bp, Homo sapien
ataggtacaggagagatgttaatcagcaagtac

SEQ ID NO: 731811 - DNA, 33 bp, Homo sapien
aacttgctacacttaacagcctggttggtgcag

SEQ ID NO: 731812 - DNA, 33 bp, Homo sapien
aacttgctacacttaatagcctggttggtgcag

SEQ ID NO: 731813 - DNA, 33 bp, Homo sapien
cctggtcacttggcagaagcatactgtgaatgt

SEQ ID NO: 731814 - DNA, 33 bp, Homo sapien
cctggtcacttggcaggagcatactgtgaatgt

SEQ ID NO: 731815 - DNA, 33 bp, Homo sapien
ttttttgtttgttgaacgagttaaattattgaa

SEQ ID NO: 731816 - DNA, 33 bp, Homo sapien
ttttttgtttgttgaatgagttaaattattgaa

SEQ ID NO: 731817 - DNA, 33 bp, Homo sapien
ggaattttcaccacccaaaattcaggacttcac

SEQ ID NO: 731818 - DNA, 33 bp, Homo sapien
ggaattttcaccaccccaaattcaggacttcac

SEQ ID NO: 731819 - DNA, 33 bp, Homo sapien
actcattcagctgaaacctcagagtcacaatga

SEQ ID NO: 731820 - DNA, 33 bp, Homo sapien
actcattcagctgaaatctcagagtcacaatga

SEQ ID NO: 731821 - DNA, 33 bp, Homo sapien
atgttatgcaatatagccagagaaatattaaaa

SEQ ID NO: 731822 - DNA, 33 bp, Homo sapien
atgttatgcaatatagtcagagaaatattaaaa

SEQ ID NO: 731823 - DNA, 33 bp, Homo sapien
tctcttactagttttacgtattgacattctatc

SEQ ID NO: 731824 - DNA, 33 bp, Homo sapien
tctcttactagttttatgtattgacattctatc

SEQ ID NO: 731825 - DNA, 33 bp, Homo sapien
cttgaggataacaaaccgtcctgacaacccttc

SEQ ID NO: 731826 - DNA, 33 bp, Homo sapien
cttgaggataacaaactgtcctgacaacccttc

SEQ ID NO: 731827 - DNA, 33 bp, Homo sapien
caatatgtgtccattacgagaaatactgaaaca

SEQ ID NO: 731828 - DNA, 33 bp, Homo sapien
caatatgtgtccattatgagaaatactgaaaca

SEQ ID NO: 731829 - DNA, 33 bp, Homo sapien
tttcatccttctgcataaggctggctggttatc

SEQ ID NO: 731830 - DNA, 33 bp, Homo sapien
tttcatccttctgcatgaggctggctggttatc

SEQ ID NO: 731831 - DNA, 33 bp, Homo sapien
aacatagattaacctgaaggacattatattaag

SEQ ID NO: 731832 - DNA, 33 bp, Homo sapien
aacatagattaacctggaggacattatattaag

SEQ ID NO: 731833 - DNA, 33 bp, Homo sapien
acatcctcttcaaatacagcttccttcaaatat

SEQ ID NO: 731834 - DNA, 33 bp, Homo sapien
acatcctcttcaaatatagcttccttcaaatat

SEQ ID NO: 731835 - DNA, 33 bp, Homo sapien
tcactttggagttaaacttatatgaatactaat

SEQ ID NO: 731836 - DNA, 33 bp, Homo sapien
tcactttggagttaaagttatatgaatactaat

SEQ ID NO: 731837 - DNA, 33 bp, Homo sapien
ctacacaggaataactcaactgcataatcgtgg

SEQ ID NO: 731838 - DNA, 33 bp, Homo sapien
ctacacaggaataactgaactgcataatcgtgg

SEQ ID NO: 731839 - DNA, 33 bp, Homo sapien
attttaaatcaccatccgagtgtgactaataca

SEQ ID NO: 731840 - DNA, 33 bp, Homo sapien
attttaaatcaccatctgagtgtgactaataca

SEQ ID NO: 731841 - DNA, 33 bp, Homo sapien
atgatagtgccattcaagtgttctatattctga

SEQ ID NO: 731842 - DNA, 33 bp, Homo sapien
atgatagtgccattcaggtgttctatattctga

SEQ ID NO: 731843 - DNA, 33 bp, Homo sapien
ggtaggaaagtgtcaacgaatatggaactaaca

SEQ ID NO: 731844 - DNA, 33 bp, Homo sapien
ggtaggaaagtgtcaatgaatatggaactaaca

SEQ ID NO: 731845 - DNA, 33 bp, Homo sapien
tgtaaaggagattaggaagatagtttgtttaaa

SEQ ID NO: 731846 - DNA, 33 bp, Homo sapien
tgtaaaggagattaggcagatagtttgtttaaa

SEQ ID NO: 731847 - DNA, 33 bp, Homo sapien
atttattaatggatagaaggttttgcttttgaa

SEQ ID NO: 731848 - DNA, 33 bp, Homo sapien
atttattaatggatagcaggttttgcttttgaa

SEQ ID NO: 731849 - DNA, 33 bp, Homo sapien
atggctccttaggcaacaacacaagcatgattt

SEQ ID NO: 731850 - DNA, 33 bp, Homo sapien
atggctccttaggcaagaacacaagcatgattt

SEQ ID NO: 731851 - DNA, 33 bp, Homo sapien
ttacaatcacctagtaagcgcatttttcactcc

SEQ ID NO: 731852 - DNA, 33 bp, Homo sapien
ttacaatcacctagtacgcgcatttttcactcc

SEQ ID NO: 731853 - DNA, 33 bp, Homo sapien
ggttgggaactctaaaacataccgagttacctc

SEQ ID NO: 731854 - DNA, 33 bp, Homo sapien
ggttgggaactctaaagcataccgagttacctc

SEQ ID NO: 731855 - DNA, 33 bp, Homo sapien
aacttgtcaaaaggaaatcatctatccaaacag

SEQ ID NO: 731856 - DNA, 33 bp, Homo sapien
aacttgtcaaaaggaattcatctatccaaacag

SEQ ID NO: 731857 - DNA, 33 bp, Homo sapien
gggtgccagtaaagaacagattcaactagagca

SEQ ID NO: 731858 - DNA, 33 bp, Homo sapien
gggtgccagtaaagaatagattcaactagagca

SEQ ID NO: 731859 - DNA, 33 bp, Homo sapien
atgtggtcatattttacataagcttgagataat

SEQ ID NO: 731860 - DNA, 33 bp, Homo sapien
atgtggtcatattttatataagcttgagataat

SEQ ID NO: 731861 - DNA, 33 bp, Homo sapien
aatgctgtgcataaaaacataagtcttactgat

SEQ ID NO: 731862 - DNA, 33 bp, Homo sapien
aatgctgtgcataaaatcataagtcttactgat

SEQ ID NO: 731863 - DNA, 33 bp, Homo sapien
cacagcattgtgatgaagatccccaggttttga

SEQ ID NO: 731864 - DNA, 33 bp, Homo sapien
cacagcattgtgatgaggatccccaggttttga

SEQ ID NO: 731865 - DNA, 33 bp, Homo sapien
tgcaatttgagtaagaagttcaaaattaggctt

SEQ ID NO: 731866 - DNA, 33 bp, Homo sapien
tgcaatttgagtaagaggttcaaaattaggctt

SEQ ID NO: 731867 - DNA, 33 bp, Homo sapien
aatatgacgcagctataaaaaaaacaacaacga

SEQ ID NO: 731868 - DNA, 33 bp, Homo sapien
aatatgacgcagctatgaaaaaaacaacaacga

SEQ ID NO: 731869 - DNA, 33 bp, Homo sapien
ctagcagtgattcccacgatttagagttcctga

SEQ ID NO: 731870 - DNA, 33 bp, Homo sapien
ctagcagtgattcccatgatttagagttcctga

SEQ ID NO: 731871 - DNA, 33 bp, Homo sapien
cttagagagaaggtcactcaggtatttggatgt

SEQ ID NO: 731872 - DNA, 33 bp, Homo sapien
cttagagagaaggtcattcaggtatttggatgt

SEQ ID NO: 731873 - DNA, 33 bp, Homo sapien
actttcttaaatgaggacatagacttcaaccat

SEQ ID NO: 731874 - DNA, 33 bp, Homo sapien
actttcttaaatgaggccatagacttcaaccat

SEQ ID NO: 731875 - DNA, 33 bp, Homo sapien
acatcagagcctctgacaagtgaatctgttctc

SEQ ID NO: 731876 - DNA, 33 bp, Homo sapien
acatcagagcctctgagaagtgaatctgttctc

SEQ ID NO: 731877 - DNA, 33 bp, Homo sapien
gacatcaccaataggacgctatttcttcccagg

SEQ ID NO: 731878 - DNA, 33 bp, Homo sapien
gacatcaccaataggatgctatttcttcccagg

SEQ ID NO: 731879 - DNA, 33 bp, Homo sapien
gggaaagaaagaagtgcactgcaggtcaagatt

SEQ ID NO: 731880 - DNA, 33 bp, Homo sapien
gggaaagaaagaagtgtactgcaggtcaagatt

SEQ ID NO: 731881 - DNA, 33 bp, Homo sapien
aggaagctagtctttaagttgagaaaatgaaag

SEQ ID NO: 731882 - DNA, 33 bp, Homo sapien
aggaagctagtctttacgttgagaaaatgaaag

SEQ ID NO: 731883 - DNA, 33 bp, Homo sapien
agaactattaattttcaaagggctttcattttc

SEQ ID NO: 731884 - DNA, 33 bp, Homo sapien
agaactattaattttcgaagggctttcattttc

SEQ ID NO: 731885 - DNA, 33 bp, Homo sapien
gttcctgggcccctcacgcagtcagtaagtaga

SEQ ID NO: 731886 - DNA, 33 bp, Homo sapien
gttcctgggcccctcaggcagtcagtaagtaga

SEQ ID NO: 731887 - DNA, 33 bp, Homo sapien
aaaggttaatactcacccgcaaatactaatgca

SEQ ID NO: 731888 - DNA, 33 bp, Homo sapien
aaaggttaatactcactcgcaaatactaatgca

SEQ ID NO: 731889 - DNA, 33 bp, Homo sapien
gagtctggcataatcaccgaaagactgtcctaa

SEQ ID NO: 731890 - DNA, 33 bp, Homo sapien
gagtctggcataatcagcgaaagactgtcctaa

SEQ ID NO: 731891 - DNA, 33 bp, Homo sapien
tatagctctttatatcaaaagccgagaaataga

SEQ ID NO: 731892 - DNA, 33 bp, Homo sapien
tatagctctttatatcgaaagccgagaaataga

SEQ ID NO: 731893 - DNA, 33 bp, Homo sapien
gtgtacttgcaaaaaaaggacatctggatacat

SEQ ID NO: 731894 - DNA, 33 bp, Homo sapien
gtgtacttgcaaaaaagggacatctggatacat

SEQ ID NO: 731895 - DNA, 33 bp, Homo sapien
gggaaattatattagaaacagattcctggttga

SEQ ID NO: 731896 - DNA, 33 bp, Homo sapien
gggaaattatattagatacagattcctggttga

SEQ ID NO: 731897 - DNA, 33 bp, Homo sapien
tgggattctgtgcttgcaaaaatttggggactt

SEQ ID NO: 731898 - DNA, 33 bp, Homo sapien
tgggattctgtgcttgtaaaaatttggggactt

SEQ ID NO: 731899 - DNA, 33 bp, Homo sapien
tatactactcaggtgacgggaacactaaaatct

SEQ ID NO: 731900 - DNA, 33 bp, Homo sapien
tatactactcaggtgatgggaacactaaaatct

SEQ ID NO: 731901 - DNA, 33 bp, Homo sapien; identical to SEQ ID NO: 731899

SEQ ID NO: 731902 - DNA, 33 bp, Homo sapien; identical to SEQ ID NO: 731900

SEQ ID NO: 731903 - DNA, 33 bp, Homo sapien
atgtctaaagccctaacacctgtctttccttgg

SEQ ID NO: 731904 - DNA, 33 bp, Homo sapien
atgtctaaagccctaatacctgtctttccttgg

SEQ ID NO: 731905 - DNA, 33 bp, Homo sapien
acttcatgtccaggtaagcagcgctgggaagca

SEQ ID NO: 731906 - DNA, 33 bp, Homo sapien
acttcatgtccaggtaggcagcgctgggaagca

SEQ ID NO: 731907 - DNA, 33 bp, Homo sapien
aatttctcttgttttaagccactcaatttgtgg

SEQ ID NO: 731908 - DNA, 33 bp, Homo sapien
aatttctcttgttttaggccactcaatttgtgg

SEQ ID NO: 731909 - DNA, 33 bp, Homo sapien
ggcaacattagccagaagtagtagacagaatac

SEQ ID NO: 731910 - DNA, 33 bp, Homo sapien
ggcaacattagccagaggtagtagacagaatac

SEQ ID NO: 731911 - DNA, 33 bp, Homo sapien
caggtagttttaaatgaaagcatttgatgattt

SEQ ID NO: 731912 - DNA, 33 bp, Homo sapien
caggtagttttaaatggaagcatttgatgattt

SEQ ID NO: 731913 - DNA, 33 bp, Homo sapien
tctattggcactcacaactatttccaactctaa

SEQ ID NO: 731914 - DNA, 33 bp, Homo sapien
tctattggcactcacagctatttccaactctaa

SEQ ID NO: 731915 - DNA, 33 bp, Homo sapien
tttattttgacgacaaagaatgacaggtccagg

SEQ ID NO: 731916 - DNA, 33 bp, Homo sapien
tttattttgacgacaaggaatgacaggtccagg

SEQ ID NO: 731917 - DNA, 33 bp, Homo sapien
tgggctgataatcaaccagatctactaaaaaca

SEQ ID NO: 731918 - DNA, 33 bp, Homo sapien
tgggctgataatcaactagatctactaaaaaca

SEQ ID NO: 731919 - DNA, 33 bp, Homo sapien
agatcacaggtgtgaaacttacgtcatgtagtg

SEQ ID NO: 731920 - DNA, 33 bp, Homo sapien
agatcacaggtgtgaagcttacgtcatgtagtg

SEQ ID NO: 731921 - DNA, 33 bp, Homo sapien
caaatcataaccgctccctctctaagagctact

SEQ ID NO: 731922 - DNA, 33 bp, Homo sapien
caaatcataaccgctcgctctctaagagctact

SEQ ID NO: 731923 - DNA, 33 bp, Homo sapien
aaagaacctgggaagcaccttgatctagttgca

SEQ ID NO: 731924 - DNA, 33 bp, Homo sapien
aaagaacctgggaagcgccttgatctagttgca

SEQ ID NO: 731925 - DNA, 33 bp, Homo sapien
aggatctgtggtctcacggtggtgttgcctagt

SEQ ID NO: 731926 - DNA, 33 bp, Homo sapien
aggatctgtggtctcatggtggtgttgcctagt

SEQ ID NO: 731927 - DNA, 33 bp, Homo sapien
tatatcaagtctagtgcacttcctgctgtacca

SEQ ID NO: 731928 - DNA, 33 bp, Homo sapien
tatatcaagtctagtgtacttcctgctgtacca

SEQ ID NO: 731929 - DNA, 33 bp, Homo sapien
aagatctaacacttaaaggccagggagatcaga

SEQ ID NO: 731930 - DNA, 33 bp, Homo sapien
aagatctaacacttaagggccagggagatcaga

SEQ ID NO: 731931 - DNA, 33 bp, Homo sapien
actggcaccagcaatacatgagtagatccaaat

SEQ ID NO: 731932 - DNA, 33 bp, Homo sapien
actggcaccagcaatatatgagtagatccaaat

SEQ ID NO: 731933 - DNA, 33 bp, Homo sapien
ggtaataagtttgcacacacaaatgtagatgtt

SEQ ID NO: 731934 - DNA, 33 bp, Homo sapien
ggtaataagtttgcacgcacaaatgtagatgtt

SEQ ID NO: 731935 - DNA, 33 bp, Homo sapien
aaatgccatgtaattgcaaaaagctataccaca

SEQ ID NO: 731936 - DNA, 33 bp, Homo sapien
aaatgccatgtaattgtaaaaagctataccaca

SEQ ID NO: 731937 - DNA, 33 bp, Homo sapien
tataaggatcgaatgcactaataaatataaaaa

SEQ ID NO: 731938 - DNA, 33 bp, Homo sapien
tataaggatcgaatgcgctaataaatataaaaa

SEQ ID NO: 731939 - DNA, 33 bp, Homo sapien
attgtatgctgtaaaaagtgatagagtgagtcg

SEQ ID NO: 731940 - DNA, 33 bp, Homo sapien
attgtatgctgtaaaatgtgatagagtgagtcg

SEQ ID NO: 731941 - DNA, 33 bp, Homo sapien
ccttaatcaaaaaatcaaattactgctctcaat

SEQ ID NO: 731942 - DNA, 33 bp, Homo sapien
ccttaatcaaaaaatcgaattactgctctcaat

SEQ ID NO: 731943 - DNA, 33 bp, Homo sapien
tctcatgggcgagaacaataggatttcgtttgt

SEQ ID NO: 731944 - DNA, 33 bp, Homo sapien
tctcatgggcgagaacgataggatttcgtttgt

SEQ ID NO: 731945 - DNA, 33 bp, Homo sapien
gatttatttgtacaaaattgagttcctattctt

SEQ ID NO: 731946 - DNA, 33 bp, Homo sapien
gatttatttgtacaaatttgagttcctattctt

SEQ ID NO: 731947 - DNA, 33 bp, Homo sapien
acaccttctggatgcccgagttcaggtagagaa

SEQ ID NO: 731948 - DNA, 33 bp, Homo sapien
acaccttctggatgcctgagttcaggtagagaa

SEQ ID NO: 731949 - DNA, 33 bp, Homo sapien
actacatcttttgaaccctatcaggcatcttaa

SEQ ID NO: 731950 - DNA, 33 bp, Homo sapien
actacatcttttgaacgctatcaggcatcttaa

SEQ ID NO: 731951 - DNA, 33 bp, Homo sapien
taaaatgggtataaaaagcagatttaagaggca

SEQ ID NO: 731952 - DNA, 33 bp, Homo sapien
taaaatgggtataaaatgcagatttaagaggca

SEQ ID NO: 731953 - DNA, 33 bp, Homo sapien
ttttcataataaattcacaaaaggcaatacaaa

SEQ ID NO: 731954 - DNA, 33 bp, Homo sapien
ttttcataataaattctcaaaaggcaatacaaa

SEQ ID NO: 731955 - DNA, 33 bp, Homo sapien
ggactgtgtgaaccaaccaggggccagttttcc

SEQ ID NO: 731956 - DNA, 33 bp, Homo sapien
ggactgtgtgaaccaagcaggggccagttttcc

SEQ ID NO: 731957 - DNA, 33 bp, Homo sapien
agatgagagtcccacaaatgaacagtacaaggt

SEQ ID NO: 731958 - DNA, 33 bp, Homo sapien
agatgagagtcccacagatgaacagtacaaggt

SEQ ID NO: 731959 - DNA, 33 bp, Homo sapien
ttcacttttcacaactcacggagctttcataac

SEQ ID NO: 731960 - DNA, 33 bp, Homo sapien
ttcacttttcacaacttacggagctttcataac

SEQ ID NO: 731961 - DNA, 33 bp, Homo sapien
atgtctcactaggtaccgcgtctcaccattctt

SEQ ID NO: 731962 - DNA, 33 bp, Homo sapien
atgtctcactaggtactgcgtctcaccattctt

SEQ ID NO: 731963 - DNA, 33 bp, Homo sapien
ttttataactattgccactatgataggcaaaaa

SEQ ID NO: 731964 - DNA, 33 bp, Homo sapien
ttttataactattgccgctatgataggcaaaaa

SEQ ID NO: 731965 - DNA, 33 bp, Homo sapien
taattccctaaaacataagtctctgccaagttt

SEQ ID NO: 731966 - DNA, 33 bp, Homo sapien
taattccctaaaacatgagtctctgccaagttt

SEQ ID NO: 731967 - DNA, 33 bp, Homo sapien
tatcacattctcacaacaccatgaataatatat

SEQ ID NO: 731968 - DNA, 33 bp, Homo sapien
tatcacattctcacaataccatgaataatatat

SEQ ID NO: 731969 - DNA, 33 bp, Homo sapien
aataaagaaaccaaaactgtctgtatacctgtc

SEQ ID NO: 731970 - DNA, 33 bp, Homo sapien
aataaagaaaccaaaattgtctgtatacctgtc

SEQ ID NO: 731971 - DNA, 33 bp, Homo sapien
acccaagccagtaaaaaaaatatgcttccagag

SEQ ID NO: 731972 - DNA, 33 bp, Homo sapien
acccaagccagtaaaacaaatatgcttccagag

SEQ ID NO: 731973 - DNA, 33 bp, Homo sapien
caaggaagattaagaccgagaaatgtccacaag

SEQ ID NO: 731974 - DNA, 33 bp, Homo sapien
caaggaagattaagactgagaaatgtccacaag

SEQ ID NO: 731975 - DNA, 33 bp, Homo sapien
ctggaccgtcctaaaaatggcaaaacagttagc

SEQ ID NO: 731976 - DNA, 33 bp, Homo sapien
ctggaccgtcctaaaagtggcaaaacagttagc

SEQ ID NO: 731977 - DNA, 33 bp, Homo sapien
taaattttggagtgtacggtttaagtctggtta

SEQ ID NO: 731978 - DNA, 33 bp, Homo sapien
taaattttggagtgtatggtttaagtctggtta

SEQ ID NO: 731979 - DNA, 33 bp, Homo sapien
gtgagttgagctcagaagaatatatgacagttt

SEQ ID NO: 731980 - DNA, 33 bp, Homo sapien
gtgagttgagctcagaggaatatatgacagttt

SEQ ID NO: 731981 - DNA, 33 bp, Homo sapien
caaacaaataattataacatcctcagctgacat

SEQ ID NO: 731982 - DNA, 33 bp, Homo sapien
caaacaaataattatagcatcctcagctgacat

SEQ ID NO: 731983 - DNA, 33 bp, Homo sapien
tttgtaaattgctacaggagtaacagtggctaa

SEQ ID NO: 731984 - DNA, 33 bp, Homo sapien
tttgtaaattgctacatgagtaacagtggctaa

SEQ ID NO: 731985 - DNA, 33 bp, Homo sapien
ggcagaagacgtcaccaagcagatgtcccagtc

SEQ ID NO: 731986 - DNA, 33 bp, Homo sapien
ggcagaagacgtcaccgagcagatgtcccagtc

SEQ ID NO: 731987 - DNA, 33 bp, Homo sapien
cttaaccagtctaaaacgactagaatgattgac

SEQ ID NO: 731988 - DNA, 33 bp, Homo sapien
cttaaccagtctaaaatgactagaatgattgac

SEQ ID NO: 731989 - DNA, 33 bp, Homo sapien
gaagaatataaccagaaacttacttttcaccat

SEQ ID NO: 731990 - DNA, 33 bp, Homo sapien
gaagaatataaccagacacttacttttcaccat

SEQ ID NO: 731991 - DNA, 33 bp, Homo sapien
tttttttctactgtaaccaatgtcatcggtttc

SEQ ID NO: 731992 - DNA, 33 bp, Homo sapien
tttttttctactgtaatcaatgtcatcggtttc

SEQ ID NO: 731993 - DNA, 33 bp, Homo sapien
atgattacactacccaaagcaatctacaaattt

SEQ ID NO: 731994 - DNA, 33 bp, Homo sapien
atgattacactacccacagcaatctacaaattt

SEQ ID NO: 731995 - DNA, 33 bp, Homo sapien
taactgaacacatgaacattaccacagagtggt

SEQ ID NO: 731996 - DNA, 33 bp, Homo sapien
taactgaacacatgaagattaccacagagtggt

SEQ ID NO: 731997 - DNA, 33 bp, Homo sapien
gtagtctcagaaatacagtagtgtggaagtgac

SEQ ID NO: 731998 - DNA, 33 bp, Homo sapien
gtagtctcagaaatacggtagtgtggaagtgac

SEQ ID NO: 731999 - DNA, 33 bp, Homo sapien
aagtaataaggaaaaaatatcctggcaaggtag

SEQ ID NO: 732000 - DNA, 33 bp, Homo sapien
aagtaataaggaaaaactatcctggcaaggtag

SEQ ID NO: 732001 - DNA, 33 bp, Homo sapien
caagggtgaagaactgaacggaggataagatgg

SEQ ID NO: 732002 - DNA, 33 bp, Homo sapien
caagggtgaagaactggacggaggataagatgg

SEQ ID NO: 732003 - DNA, 33 bp, Homo sapien
ctgaatacagcacatcaatatgtcttgactctt

SEQ ID NO: 732004 - DNA, 33 bp, Homo sapien
ctgaatacagcacatcgatatgtcttgactctt

SEQ ID NO: 732005 - DNA, 33 bp, Homo sapien
tgccacggacatccaactgcttgcgctcacata

SEQ ID NO: 732006 - DNA, 33 bp, Homo sapien
tgccacggacatccaagtgcttgcgctcacata

SEQ ID NO: 732007 - DNA, 33 bp, Homo sapien
taaaggggctgaataaagttaaattcacaagtc

SEQ ID NO: 732008 - DNA, 33 bp, Homo sapien
taaaggggctgaataatgttaaattcacaagtc

SEQ ID NO: 732009 - DNA, 33 bp, Homo sapien
aatatcagattatactcacacaaacctacgcgg

SEQ ID NO: 732010 - DNA, 33 bp, Homo sapien
aatatcagattatactgacacaaacctacgcgg

SEQ ID NO: 732011 - DNA, 33 bp, Homo sapien
tcaatgctggatacagaagtgatgagaccatga

SEQ ID NO: 732012 - DNA, 33 bp, Homo sapien
tcaatgctggatacaggagtgatgagaccatga

SEQ ID NO: 732013 - DNA, 33 bp, Homo sapien
gtcactaggcaatacaaattttcacccccattg

SEQ ID NO: 732014 - DNA, 33 bp, Homo sapien
gtcactaggcaatacagattttcacccccattg

SEQ ID NO: 732015 - DNA, 33 bp, Homo sapien
taaagttatttctgtcaatgatagactgcataa

SEQ ID NO: 732016 - DNA, 33 bp, Homo sapien
taaagttatttctgtcgatgatagactgcataa

SEQ ID NO: 732017 - DNA, 33 bp, Homo sapien
gagtactgaggatgaaaggctatatttataatt

SEQ ID NO: 732018 - DNA, 33 bp, Homo sapien
gagtactgaggatgaagggctatatttataatt

SEQ ID NO: 732019 - DNA, 33 bp, Homo sapien
ctggccagtctctgaacgacagcaattttccac

SEQ ID NO: 732020 - DNA, 33 bp, Homo sapien
ctggccagtctctgaatgacagcaattttccac

SEQ ID NO: 732021 - DNA, 33 bp, Homo sapien
aacattctgtacctgacgtccaaaaaacaaaga

SEQ ID NO: 732022 - DNA, 33 bp, Homo sapien
aacattctgtacctgatgtccaaaaaacaaaga

SEQ ID NO: 732023 - DNA, 33 bp, Homo sapien
aaaggctctcaagtcaatatcaagaaaaactaa

SEQ ID NO: 732024 - DNA, 33 bp, Homo sapien
aaaggctctcaagtcagtatcaagaaaaactaa

SEQ ID NO: 732025 - DNA, 33 bp, Homo sapien
gttactacggagtctgcaatcactggaaatata

SEQ ID NO: 732026 - DNA, 33 bp, Homo sapien
gttactacggagtctggaatcactggaaatata

SEQ ID NO: 732027 - DNA, 33 bp, Homo sapien
ttttttttagggtcacaaatcaggagcaaattt

SEQ ID NO: 732028 - DNA, 33 bp, Homo sapien
ttttttttagggtcaccaatcaggagcaaattt

SEQ ID NO: 732029 - DNA, 33 bp, Homo sapien
tatattgccaagtaataagtaccacaaacatct

SEQ ID NO: 732030 - DNA, 33 bp, Homo sapien
tatattgccaagtaatgagtaccacaaacatct

SEQ ID NO: 732031 - DNA, 33 bp, Homo sapien
ttatcactctgacacacgatgtattttatttat

SEQ ID NO: 732032 - DNA, 33 bp, Homo sapien
ttatcactctgacacatgatgtattttatttat

SEQ ID NO: 732033 - DNA, 33 bp, Homo sapien
aagccagtctcagggccgccacattgtacaact

SEQ ID NO: 732034 - DNA, 33 bp, Homo sapien
aagccagtctcagggctgccacattgtacaact

SEQ ID NO: 732035 - DNA, 33 bp, Homo sapien
aagagagaaataacaaaatggaaatcacagcat

SEQ ID NO: 732036 - DNA, 33 bp, Homo sapien
aagagagaaataacaacatggaaatcacagcat

SEQ ID NO: 732037 - DNA, 33 bp, Homo sapien
cagacctgctcaactacagtgttttcctgcaat

SEQ ID NO: 732038 - DNA, 33 bp, Homo sapien
cagacctgctcaactatagtgttttcctgcaat

SEQ ID NO: 732039 - DNA, 33 bp, Homo sapien
ctattgttttatctccactgtaactaattcaca

SEQ ID NO: 732040 - DNA, 33 bp, Homo sapien
ctattgttttatctccgctgtaactaattcaca

SEQ ID NO: 732041 - DNA, 33 bp, Homo sapien
aagataaaacattgacagaaaaagactgaagaa

SEQ ID NO: 732042 - DNA, 33 bp, Homo sapien
aagataaaacattgacggaaaaagactgaagaa

SEQ ID NO: 732043 - DNA, 33 bp, Homo sapien
gggttgtatccatcaaagtcccagcaggaaaca

SEQ ID NO: 732044 - DNA, 33 bp, Homo sapien
gggttgtatccatcaaggtcccagcaggaaaca

SEQ ID NO: 732045 - DNA, 33 bp, Homo sapien
atccctggtgaaactacgtctgttctggatctg

SEQ ID NO: 732046 - DNA, 33 bp, Homo sapien
atccctggtgaaactatgtctgttctggatctg

SEQ ID NO: 732047 - DNA, 33 bp, Homo sapien
gtgataaaaacaagaaaagctgattccaaacag

SEQ ID NO: 732048 - DNA, 33 bp, Homo sapien
gtgataaaaacaagaagagctgattccaaacag

SEQ ID NO: 732049 - DNA, 33 bp, Homo sapien
tcttcctaagatgtcacatcctgaagaaaaaca

SEQ ID NO: 732050 - DNA, 33 bp, Homo sapien
tcttcctaagatgtcatatcctgaagaaaaaca

SEQ ID NO: 732051 - DNA, 33 bp, Homo sapien
gagggaaggatttggaagtaaagtgcaagaggt

SEQ ID NO: 732052 - DNA, 33 bp, Homo sapien
gagggaaggatttggaggtaaagtgcaagaggt

SEQ ID NO: 732053 - DNA, 33 bp, Homo sapien
ctggagcgtttgtccacatgaaaagttatacgg

SEQ ID NO: 732054 - DNA, 33 bp, Homo sapien
ctggagcgtttgtccagatgaaaagttatacgg

SEQ ID NO: 732055 - DNA, 33 bp, Homo sapien
ctatactgtgaacatcagaataaacttgtactt

SEQ ID NO: 732056 - DNA, 33 bp, Homo sapien
ctatactgtgaacatcggaataaacttgtactt

SEQ ID NO: 732057 - DNA, 33 bp, Homo sapien
cagtagatattcaacaaaaggcaactattattg

SEQ ID NO: 732058 - DNA, 33 bp, Homo sapien
cagtagatattcaacagaaggcaactattattg

SEQ ID NO: 732059 - DNA, 33 bp, Homo sapien
aaatatatctctcataactaagtggctgtggga

SEQ ID NO: 732060 - DNA, 33 bp, Homo sapien
aaatatatctctcatagctaagtggctgtggga

SEQ ID NO: 732061 - DNA, 33 bp, Homo sapien
acactttgctagatacgaattcctgcttttgag

SEQ ID NO: 732062 - DNA, 33 bp, Homo sapien
acactttgctagatactaattcctgcttttgag

SEQ ID NO: 732063 - DNA, 33 bp, Homo sapien
actggatgtagtcagcgaaatttttcttatggc

SEQ ID NO: 732064 - DNA, 33 bp, Homo sapien
actggatgtagtcagctaaatttttcttatggc

SEQ ID NO: 732065 - DNA, 33 bp, Homo sapien
cttagttaactcagaaatgaagctgagggtagc

SEQ ID NO: 732066 - DNA, 33 bp, Homo sapien
cttagttaactcagaagtgaagctgagggtagc

SEQ ID NO: 732067 - DNA, 33 bp, Homo sapien
ctgcttttatgaaggaacataatgctagcttgg

SEQ ID NO: 732068 - DNA, 33 bp, Homo sapien
ctgcttttatgaaggaccataatgctagcttgg

SEQ ID NO: 732069 - DNA, 33 bp, Homo sapien
gtatatttcccaaccgaaggaaagaggtctgca

SEQ ID NO: 732070 - DNA, 33 bp, Homo sapien
gtatatttcccaaccggaggaaagaggtctgca

SEQ ID NO: 732071 - DNA, 33 bp, Homo sapien
ttcttgtcctgcactccccacacacaggtggta

SEQ ID NO: 732072 - DNA, 33 bp, Homo sapien
ttcttgtcctgcactctccacacacaggtggta

SEQ ID NO: 732073 - DNA, 33 bp, Homo sapien
ctgcgatgccaacagaaaggtgatttttgtttg

SEQ ID NO: 732074 - DNA, 33 bp, Homo sapien
ctgcgatgccaacagagaggtgatttttgtttg

SEQ ID NO: 732075 - DNA, 33 bp, Homo sapien
catacgggcttgaaaacggcaaaaacattaatt

SEQ ID NO: 732076 - DNA, 33 bp, Homo sapien
catacgggcttgaaaatggcaaaaacattaatt

SEQ ID NO: 732077 - DNA, 33 bp, Homo sapien
gaaggtggaaaatgaaaaggcggcaagagactc

SEQ ID NO: 732078 - DNA, 33 bp, Homo sapien
gaaggtggaaaatgaagaggcggcaagagactc

SEQ ID NO: 732079 - DNA, 33 bp, Homo sapien
tatcttaagagtgagcagagaaagtaagactta

SEQ ID NO: 732080 - DNA, 33 bp, Homo sapien
tatcttaagagtgagcggagaaagtaagactta

SEQ ID NO: 732081 - DNA, 33 bp, Homo sapien
tcatttatgggttgaaggcccccatcactgcct

SEQ ID NO: 732082 - DNA, 33 bp, Homo sapien
tcatttatgggttgaatgcccccatcactgcct

SEQ ID NO: 732083 - DNA, 33 bp, Homo sapien
catttggcatgcacaaaagataaataatttcag

SEQ ID NO: 732084 - DNA, 33 bp, Homo sapien
catttggcatgcacaagagataaataatttcag

SEQ ID NO: 732085 - DNA, 33 bp, Homo sapien
cttgcaaagcagaaacaacagtcatagcagcag

SEQ ID NO: 732086 - DNA, 33 bp, Homo sapien
cttgcaaagcagaaactacagtcatagcagcag

SEQ ID NO: 732087 - DNA, 33 bp, Homo sapien
atacaatgatatgcacagaatgggaccagcaca

SEQ ID NO: 732088 - DNA, 33 bp, Homo sapien
atacaatgatatgcaccgaatgggaccagcaca

SEQ ID NO: 732089 - DNA, 33 bp, Homo sapien
gtgttcattttaataactagacacaggctgcat

SEQ ID NO: 732090 - DNA, 33 bp, Homo sapien
gtgttcattttaataattagacacaggctgcat

SEQ ID NO: 732091 - DNA, 33 bp, Homo sapien
aattaaagcacaaaaactcaaagacagttcatg

SEQ ID NO: 732092 - DNA, 33 bp, Homo sapien
aattaaagcacaaaaattcaaagacagttcatg

SEQ ID NO: 732093 - DNA, 33 bp, Homo sapien
ttcctaagatccttacagatggaacgtggtgaa

SEQ ID NO: 732094 - DNA, 33 bp, Homo sapien
ttcctaagatccttacggatggaacgtggtgaa

SEQ ID NO: 732095 - DNA, 33 bp, Homo sapien
gccagacctgggctggaatccaatatttttcac

SEQ ID NO: 732096 - DNA, 33 bp, Homo sapien
gccagacctgggctggtatccaatatttttcac

SEQ ID NO: 732097 - DNA, 33 bp, Homo sapien
accctgtacatgtaacacttgtgtattagtctg

SEQ ID NO: 732098 - DNA, 33 bp, Homo sapien
accctgtacatgtaacccttgtgtattagtctg

SEQ ID NO: 732099 - DNA, 33 bp, Homo sapien
agagcatttatctgaagccttcatcagttcgta

SEQ ID NO: 732100 - DNA, 33 bp, Homo sapien
agagcatttatctgaatccttcatcagttcgta

SEQ ID NO: 732101 - DNA, 33 bp, Homo sapien
acaccgctgttgaaaccgactgtcttgattaat

SEQ ID NO: 732102 - DNA, 33 bp, Homo sapien
acaccgctgttgaaactgactgtcttgattaat

SEQ ID NO: 732103 - DNA, 33 bp, Homo sapien
gctagaggaaggcaacacatttgtctatgagtc

SEQ ID NO: 732104 - DNA, 33 bp, Homo sapien
gctagaggaaggcaacgcatttgtctatgagtc

SEQ ID NO: 732105 - DNA, 33 bp, Homo sapien
tctcctgtccagcaaacgtcatctgtgtcggga

SEQ ID NO: 732106 - DNA, 33 bp, Homo sapien
tctcctgtccagcaaatgtcatctgtgtcggga

SEQ ID NO: 732107 - DNA, 33 bp, Homo sapien
aaaattctggaagatgaaaaggaggtggacccc

SEQ ID NO: 732108 - DNA, 33 bp, Homo sapien
aaaattctggaagatggaaaggaggtggacccc

SEQ ID NO: 732109 - DNA, 33 bp, Homo sapien
caaatggtttccctaccctgaggtttccttcaa

SEQ ID NO: 732110 - DNA, 33 bp, Homo sapien
caaatggtttccctacgctgaggtttccttcaa

SEQ ID NO: 732111 - DNA, 33 bp, Homo sapien
tttccttttggagccaccaatgtacacatttca

SEQ ID NO: 732112 - DNA, 33 bp, Homo sapien
tttccttttggagccagcaatgtacacatttca

SEQ ID NO: 732113 - DNA, 33 bp, Homo sapien
tagtaatagtgtaaaacgtaaacaaggctagaa

SEQ ID NO: 732114 - DNA, 33 bp, Homo sapien
tagtaatagtgtaaaatgtaaacaaggctagaa

SEQ ID NO: 732115 - DNA, 33 bp, Homo sapien
ttattttcaccaaacaactcattaaatcactat

SEQ ID NO: 732116 - DNA, 33 bp, Homo sapien
ttattttcaccaaacatctcattaaatcactat

SEQ ID NO: 732117 - DNA, 33 bp, Homo sapien
tattgtctgtaatatagctcagtctattttctt

SEQ ID NO: 732118 - DNA, 33 bp, Homo sapien
tattgtctgtaatatatctcagtctattttctt

SEQ ID NO: 732119 - DNA, 33 bp, Homo sapien
ggttgtcattttccaacggtaggaatatcaaac

SEQ ID NO: 732120 - DNA, 33 bp, Homo sapien
ggttgtcattttccaatggtaggaatatcaaac

SEQ ID NO: 732121 - DNA, 33 bp, Homo sapien
gaggtgttaattctaccgcttcttttttgtgtg

SEQ ID NO: 732122 - DNA, 33 bp, Homo sapien
gaggtgttaattctactgcttcttttttgtgtg

SEQ ID NO: 732123 - DNA, 33 bp, Homo sapien
ccaaacttactgtaccaatggggaagaaaaaat

SEQ ID NO: 732124 - DNA, 33 bp, Homo sapien
ccaaacttactgtaccgatggggaagaaaaaat

SEQ ID NO: 732125 - DNA, 33 bp, Homo sapien
ggagaaaaatcctgcaaattaacctttcagact

SEQ ID NO: 732126 - DNA, 33 bp, Homo sapien
ggagaaaaatcctgcatattaacctttcagact

SEQ ID NO: 732127 - DNA, 33 bp, Homo sapien
aaggacattcaaacctcacatagcaaagccatc

SEQ ID NO: 732128 - DNA, 33 bp, Homo sapien
aaggacattcaaaccttacatagcaaagccatc

SEQ ID NO: 732129 - DNA, 33 bp, Homo sapien
tgaaattctataactcaaatgtaagctatacaa

SEQ ID NO: 732130 - DNA, 33 bp, Homo sapien
tgaaattctataactcgaatgtaagctatacaa

SEQ ID NO: 732131 - DNA, 33 bp, Homo sapien
tcaattgctgtcacccaaggaagttagagcaca

SEQ ID NO: 732132 - DNA, 33 bp, Homo sapien
tcaattgctgtcacccgaggaagttagagcaca

SEQ ID NO: 732133 - DNA, 33 bp, Homo sapien
ccttcctcctctcacaacaagctttaaagaaga

SEQ ID NO: 732134 - DNA, 33 bp, Homo sapien
ccttcctcctctcacatcaagctttaaagaaga

SEQ ID NO: 732135 - DNA, 33 bp, Homo sapien
tacaaatagatacacaaataatgacacatacat

SEQ ID NO: 732136 - DNA, 33 bp, Homo sapien
tacaaatagatacacagataatgacacatacat

SEQ ID NO: 732137 - DNA, 33 bp, Homo sapien
actgtctgtttttacacgaaccctatttccttc

SEQ ID NO: 732138 - DNA, 33 bp, Homo sapien
actgtctgtttttacatgaaccctatttccttc

SEQ ID NO: 732139 - DNA, 33 bp, Homo sapien
gctacttgtgatttgaactccactttgactccc

SEQ ID NO: 732140 - DNA, 33 bp, Homo sapien
gctacttgtgatttgagctccactttgactccc

SEQ ID NO: 732141 - DNA, 33 bp, Homo sapien
atccttgacaaagctacagaagagctatcagta

SEQ ID NO: 732142 - DNA, 33 bp, Homo sapien
atccttgacaaagctatagaagagctatcagta

SEQ ID NO: 732143 - DNA, 33 bp, Homo sapien
attcagcctctcacaactgctagataaacgctg

SEQ ID NO: 732144 - DNA, 33 bp, Homo sapien
attcagcctctcacaagtgctagataaacgctg

SEQ ID NO: 732145 - DNA, 33 bp, Homo sapien
taccaatatccaggccccatgccaaaccttctt

SEQ ID NO: 732146 - DNA, 33 bp, Homo sapien
taccaatatccaggccgcatgccaaaccttctt

SEQ ID NO: 732147 - DNA, 33 bp, Homo sapien
ggggataaactttccccattaacacagatcagt

SEQ ID NO: 732148 - DNA, 33 bp, Homo sapien
ggggataaactttccctattaacacagatcagt

SEQ ID NO: 732149 - DNA, 33 bp, Homo sapien
taagatggcttttcctcagccaagagactagtt

SEQ ID NO: 732150 - DNA, 33 bp, Homo sapien
taagatggcttttccttagccaagagactagtt

SEQ ID NO: 732151 - DNA, 33 bp, Homo sapien
ctgacatcctgccaatgacttgactagacacag

SEQ ID NO: 732152 - DNA, 33 bp, Homo sapien
ctgacatcctgccaattacttgactagacacag

SEQ ID NO: 732153 - DNA, 33 bp, Homo sapien
tagcaggactgaccctcaaatatgccagactga

SEQ ID NO: 732154 - DNA, 33 bp, Homo sapien
tagcaggactgacccttaaatatgccagactga

SEQ ID NO: 732155 - DNA, 33 bp, Homo sapien
ggagccacagtcaaaacgtaagatgtatatgac

SEQ ID NO: 732156 - DNA, 33 bp, Homo sapien
ggagccacagtcaaaatgtaagatgtatatgac

SEQ ID NO: 732157 - DNA, 33 bp, Homo sapien
ttttaagatggcaacaatggagtatgaaatcaa

SEQ ID NO: 732158 - DNA, 33 bp, Homo sapien
ttttaagatggcaacagtggagtatgaaatcaa

SEQ ID NO: 732159 - DNA, 33 bp, Homo sapien
aaatctgacttaatataacacactctaccaaca

SEQ ID NO: 732160 - DNA, 33 bp, Homo sapien
aaatctgacttaatatgacacactctaccaaca

SEQ ID NO: 732161 - DNA, 33 bp, Homo sapien
tagggcactaatacgcacattacaagagaactt

SEQ ID NO: 732162 - DNA, 33 bp, Homo sapien
tagggcactaatacgcgcattacaagagaactt

SEQ ID NO: 732163 - DNA, 33 bp, Homo sapien
tctggtttgcggatgacatcttctcattgtgtc

SEQ ID NO: 732164 - DNA, 33 bp, Homo sapien
tctggtttgcggatgatatcttctcattgtgtc

SEQ ID NO: 732165 - DNA, 33 bp, Homo sapien
aagagttttcccagaaacagaggacgaggcaag

SEQ ID NO: 732166 - DNA, 33 bp, Homo sapien
aagagttttcccagaaccagaggacgaggcaag

SEQ ID NO: 732167 - DNA, 33 bp, Homo sapien
gaagaaacaagagatcaagtccagaaacttctg

SEQ ID NO: 732168 - DNA, 33 bp, Homo sapien
gaagaaacaagagatcgagtccagaaacttctg

SEQ ID NO: 732169 - DNA, 33 bp, Homo sapien
ctaaacagaagtatcacagctcctggagaaatg

SEQ ID NO: 732170 - DNA, 33 bp, Homo sapien
ctaaacagaagtatcatagctcctggagaaatg

SEQ ID NO: 732171 - DNA, 33 bp, Homo sapien
acagtaacaacctttcacagtgcagcccggctg

SEQ ID NO: 732172 - DNA, 33 bp, Homo sapien
acagtaacaacctttcgcagtgcagcccggctg

SEQ ID NO: 732173 - DNA, 33 bp, Homo sapien
gttcctgggttctaccacaaacctctcgcacct

SEQ ID NO: 732174 - DNA, 33 bp, Homo sapien
gttcctgggttctaccgcaaacctctcgcacct

SEQ ID NO: 732175 - DNA, 33 bp, Homo sapien
aatacagtagacaaccaatacaaacttttaatg

SEQ ID NO: 732176 - DNA, 33 bp, Homo sapien
aatacagtagacaaccgatacaaacttttaatg

SEQ ID NO: 732177 - DNA, 33 bp, Homo sapien
agctaactctgaaactcaaggatggttttaaaa

SEQ ID NO: 732178 - DNA, 33 bp, Homo sapien
agctaactctgaaactgaaggatggttttaaaa

SEQ ID NO: 732179 - DNA, 33 bp, Homo sapien
gaatgcatcaataacactggaaaacaagaaggg

SEQ ID NO: 732180 - DNA, 33 bp, Homo sapien
gaatgcatcaataacattggaaaacaagaaggg

SEQ ID NO: 732181 - DNA, 33 bp, Homo sapien
aaagcttgcccaacatgagtgcagcatcagaat

SEQ ID NO: 732182 - DNA, 33 bp, Homo sapien
aaagcttgcccaacattagtgcagcatcagaat

SEQ ID NO: 732183 - DNA, 33 bp, Homo sapien
ccataaaaacccaaaacgaatgagttcagagac

SEQ ID NO: 732184 - DNA, 33 bp, Homo sapien
ccataaaaacccaaaaggaatgagttcagagac

SEQ ID NO: 732185 - DNA, 33 bp, Homo sapien
tgatgaaaagccttcaatagatgaaaaggattt

SEQ ID NO: 732186 - DNA, 33 bp, Homo sapien
tgatgaaaagccttcagtagatgaaaaggattt

SEQ ID NO: 732187 - DNA, 33 bp, Homo sapien
aaacaggtacaaagtccattaagagaagccaca

SEQ ID NO: 732188 - DNA, 33 bp, Homo sapien
aaacaggtacaaagtctattaagagaagccaca

SEQ ID NO: 732189 - DNA, 33 bp, Homo sapien
tcaaggccatgagtaaataaggattttgagata

SEQ ID NO: 732190 - DNA, 33 bp, Homo sapien
tcaaggccatgagtaagtaaggattttgagata

SEQ ID NO: 732191 - DNA, 33 bp, Homo sapien
cattttaatcatcccccaaaagagccccatatc

SEQ ID NO: 732192 - DNA, 33 bp, Homo sapien
cattttaatcatcccctaaaagagccccatatc

SEQ ID NO: 732193 - DNA, 33 bp, Homo sapien
cagtggtagtaggtaaatcagttacttgaaatt

SEQ ID NO: 732194 - DNA, 33 bp, Homo sapien
cagtggtagtaggtaattcagttacttgaaatt

SEQ ID NO: 732195 - DNA, 33 bp, Homo sapien
ctactaccactgtgaccctcactttgattatca

SEQ ID NO: 732196 - DNA, 33 bp, Homo sapien
ctactaccactgtgacgctcactttgattatca

SEQ ID NO: 732197 - DNA, 33 bp, Homo sapien
cttctcagtttccatacggcagactgtgattct

SEQ ID NO: 732198 - DNA, 33 bp, Homo sapien
cttctcagtttccatatggcagactgtgattct

SEQ ID NO: 732199 - DNA, 33 bp, Homo sapien
aagatgtttttcagggaaatctggtcattttaa

SEQ ID NO: 732200 - DNA, 33 bp, Homo sapien
aagatgtttttcaggggaatctggtcattttaa

SEQ ID NO: 732201 - DNA, 33 bp, Homo sapien
ccagtaatctgactcaaccagttcagtgatccc

SEQ ID NO: 732202 - DNA, 33 bp, Homo sapien
ccagtaatctgactcagccagttcagtgatccc

SEQ ID NO: 732203 - DNA, 33 bp, Homo sapien
gatattaataactcaccagctttggaccagcca

SEQ ID NO: 732204 - DNA, 33 bp, Homo sapien
gatattaataactcacgagctttggaccagcca

SEQ ID NO: 732205 - DNA, 33 bp, Homo sapien
cagaatctttatgtcaagtcaattcatggtcag

SEQ ID NO: 732206 - DNA, 33 bp, Homo sapien
cagaatctttatgtcatgtcaattcatggtcag

SEQ ID NO: 732207 - DNA, 33 bp, Homo sapien
aggggagggagagggaaaaaactgaagcagaag

SEQ ID NO: 732208 - DNA, 33 bp, Homo sapien
aggggagggagagggagaaaactgaagcagaag

SEQ ID NO: 732209 - DNA, 33 bp, Homo sapien
acatatttccttctaaccggactataactgggt

SEQ ID NO: 732210 - DNA, 33 bp, Homo sapien
acatatttccttctaatcggactataactgggt

SEQ ID NO: 732211 - DNA, 33 bp, Homo sapien
aggatttagagggcccaatgaatgatatccctg

SEQ ID NO: 732212 - DNA, 33 bp, Homo sapien
aggatttagagggcccgatgaatgatatccctg

SEQ ID NO: 732213 - DNA, 33 bp, Homo sapien
tgcactttagacaaccacacatatcacaaaggc

SEQ ID NO: 732214 - DNA, 33 bp, Homo sapien
tgcactttagacaacctcacatatcacaaaggc

SEQ ID NO: 732215 - DNA, 33 bp, Homo sapien
aaaatattccgaacaaatgggttcagcataaaa

SEQ ID NO: 732216 - DNA, 33 bp, Homo sapien
aaaatattccgaacaattgggttcagcataaaa

SEQ ID NO: 732217 - DNA, 33 bp, Homo sapien
caatgatctaaagtgacattccttagaaacagg

SEQ ID NO: 732218 - DNA, 33 bp, Homo sapien
caatgatctaaagtgatattccttagaaacagg

SEQ ID NO: 732219 - DNA, 33 bp, Homo sapien
ttccaggctgatcttaagcaacattcaccaaat

SEQ ID NO: 732220 - DNA, 33 bp, Homo sapien
ttccaggctgatcttacgcaacattcaccaaat

SEQ ID NO: 732221 - DNA, 33 bp, Homo sapien
ataatcacgtagtttaaggaataatacagtgca

SEQ ID NO: 732222 - DNA, 33 bp, Homo sapien
ataatcacgtagtttagggaataatacagtgca

SEQ ID NO: 732223 - DNA, 33 bp, Homo sapien
taaaaactccaatttacgtataagagcataaac

SEQ ID NO: 732224 - DNA, 33 bp, Homo sapien
taaaaactccaatttatgtataagagcataaac

SEQ ID NO: 732225 - DNA, 33 bp, Homo sapien
acactcacacagagtacgctgaacaggtacaca

SEQ ID NO: 732226 - DNA, 33 bp, Homo sapien
acactcacacagagtaggctgaacaggtacaca

SEQ ID NO: 732227 - DNA, 33 bp, Homo sapien
tataatcagaatagcaatgcactcttatttgaa

SEQ ID NO: 732228 - DNA, 33 bp, Homo sapien
tataatcagaatagcagtgcactcttatttgaa

SEQ ID NO: 732229 - DNA, 33 bp, Homo sapien
tgttttcaataccaaactgacaatcaccacagc

SEQ ID NO: 732230 - DNA, 33 bp, Homo sapien
tgttttcaataccaaattgacaatcaccacagc

SEQ ID NO: 732231 - DNA, 33 bp, Homo sapien
agaaccacaaacatacaattgaggcaaacgatt

SEQ ID NO: 732232 - DNA, 33 bp, Homo sapien
agaaccacaaacatacgattgaggcaaacgatt

SEQ ID NO: 732233 - DNA, 33 bp, Homo sapien
cttattccatcagatgaaaatatagtcagaaca

SEQ ID NO: 732234 - DNA, 33 bp, Homo sapien
cttattccatcagatgcaaatatagtcagaaca

SEQ ID NO: 732235 - DNA, 33 bp, Homo sapien
aaaaaaagatgattacacagaatttagacccgc

SEQ ID NO: 732236 - DNA, 33 bp, Homo sapien
aaaaaaagatgattacgcagaatttagacccgc

SEQ ID NO: 732237 - DNA, 33 bp, Homo sapien
ttgtagcaggcggaggcagaatagagaaggtgg

SEQ ID NO: 732238 - DNA, 33 bp, Homo sapien
ttgtagcaggcggaggtagaatagagaaggtgg

SEQ ID NO: 732239 - DNA, 33 bp, Homo sapien
ctccaatttcagtggccagaagaatcacctggg

SEQ ID NO: 732240 - DNA, 33 bp, Homo sapien
ctccaatttcagtggcgagaagaatcacctggg

SEQ ID NO: 732241 - DNA, 33 bp, Homo sapien
ggaaaagccagatgagcagagtcccaaagacat

SEQ ID NO: 732242 - DNA, 33 bp, Homo sapien
ggaaaagccagatgaggagagtcccaaagacat

SEQ ID NO: 732243 - DNA, 33 bp, Homo sapien
atcctctccctgaccgcattccctgacctggct

SEQ ID NO: 732244 - DNA, 33 bp, Homo sapien
atcctctccctgaccgtattccctgacctggct

SEQ ID NO: 732245 - DNA, 33 bp, Homo sapien
gaaggacaagaaaagcagctataaaacagcaac

SEQ ID NO: 732246 - DNA, 33 bp, Homo sapien
gaaggacaagaaaagcggctataaaacagcaac

SEQ ID NO: 732247 - DNA, 33 bp, Homo sapien
actattcaacatttcaaaacacctgaggtctgc

SEQ ID NO: 732248 - DNA, 33 bp, Homo sapien
actattcaacatttcagaacacctgaggtctgc

SEQ ID NO: 732249 - DNA, 33 bp, Homo sapien
ggatttattggcaagagtcctgcagacctcagg

SEQ ID NO: 732250 - DNA, 33 bp, Homo sapien
ggatttattggcaagattcctgcagacctcagg

SEQ ID NO: 732251 - DNA, 33 bp, Homo sapien
agactgagaagaaagacggagatttaataccca

SEQ ID NO: 732252 - DNA, 33 bp, Homo sapien
agactgagaagaaagatggagatttaataccca

SEQ ID NO: 732253 - DNA, 33 bp, Homo sapien
ttcatttgactggataccaattacggctattaa

SEQ ID NO: 732254 - DNA, 33 bp, Homo sapien
ttcatttgactggatagcaattacggctattaa

SEQ ID NO: 732255 - DNA, 33 bp, Homo sapien
cattacttccaacctcactgttttagaattttg

SEQ ID NO: 732256 - DNA, 33 bp, Homo sapien
cattacttccaacctcgctgttttagaattttg

SEQ ID NO: 732257 - DNA, 33 bp, Homo sapien
atgtgtatgatggcaaactttctactaaaaaac

SEQ ID NO: 732258 - DNA, 33 bp, Homo sapien
atgtgtatgatggcaagctttctactaaaaaac

SEQ ID NO: 732259 - DNA, 33 bp, Homo sapien
tccttttaacatttcacaactatggctgatgag

SEQ ID NO: 732260 - DNA, 33 bp, Homo sapien
tccttttaacatttcataactatggctgatgag

SEQ ID NO: 732261 - DNA, 33 bp, Homo sapien
ctccttcacatgccaacttgattttaaaggatt

SEQ ID NO: 732262 - DNA, 33 bp, Homo sapien
ctccttcacatgccaatttgattttaaaggatt

SEQ ID NO: 732263 - DNA, 33 bp, Homo sapien
cttatactcacataacccaggcagaagctctct

SEQ ID NO: 732264 - DNA, 33 bp, Homo sapien
cttatactcacataactcaggcagaagctctct

SEQ ID NO: 732265 - DNA, 33 bp, Homo sapien
gcctttgggacttgaacagacaaaaatgtcact

SEQ ID NO: 732266 - DNA, 33 bp, Homo sapien
gcctttgggacttgaatagacaaaaatgtcact

SEQ ID NO: 732267 - DNA, 33 bp, Homo sapien
ctttgagggatgaggaacatacttgcacgcaat

SEQ ID NO: 732268 - DNA, 33 bp, Homo sapien
ctttgagggatgaggagcatacttgcacgcaat

SEQ ID NO: 732269 - DNA, 33 bp, Homo sapien
aacaaaactagaaggaccagaaactagaatcct

SEQ ID NO: 732270 - DNA, 33 bp, Homo sapien
aacaaaactagaaggatcagaaactagaatcct

SEQ ID NO: 732271 - DNA, 33 bp, Homo sapien
gccaattcacagctacagctcccaattctagct

SEQ ID NO: 732272 - DNA, 33 bp, Homo sapien
gccaattcacagctacggctcccaattctagct

SEQ ID NO: 732273 - DNA, 33 bp, Homo sapien
gatcttgagttaaaagaatgccaggccgggcga

SEQ ID NO: 732274 - DNA, 33 bp, Homo sapien
gatcttgagttaaaaggatgccaggccgggcga

SEQ ID NO: 732275 - DNA, 33 bp, Homo sapien
cactgtcttgatcccaacttcccatcatgatca

SEQ ID NO: 732276 - DNA, 33 bp, Homo sapien
cactgtcttgatcccagcttcccatcatgatca

SEQ ID NO: 732277 - DNA, 33 bp, Homo sapien
ataggacttggtatacaaatgagagagaagagc

SEQ ID NO: 732278 - DNA, 33 bp, Homo sapien
ataggacttggtatacgaatgagagagaagagc

SEQ ID NO: 732279 - DNA, 33 bp, Homo sapien
ttagcatcatgccttcaatgttcatccacgtag

SEQ ID NO: 732280 - DNA, 33 bp, Homo sapien
ttagcatcatgccttcgatgttcatccacgtag

SEQ ID NO: 732281 - DNA, 33 bp, Homo sapien
tggatggagcagtttacaggcgagtggagaagt

SEQ ID NO: 732282 - DNA, 33 bp, Homo sapien
tggatggagcagtttataggcgagtggagaagt

SEQ ID NO: 732283 - DNA, 33 bp, Homo sapien
tgggcacagtgtaatcgcgagggtccttataag

SEQ ID NO: 732284 - DNA, 33 bp, Homo sapien
tgggcacagtgtaatctcgagggtccttataag

SEQ ID NO: 732285 - DNA, 33 bp, Homo sapien
ttatactagatagtcaatagatgcagtcttcgt

SEQ ID NO: 732286 - DNA, 33 bp, Homo sapien
ttatactagatagtcagtagatgcagtcttcgt

SEQ ID NO: 732287 - DNA, 33 bp, Homo sapien
ggatcactgaaaaaaactaaatgtgtggcttgc

SEQ ID NO: 732288 - DNA, 33 bp, Homo sapien
ggatcactgaaaaaaattaaatgtgtggcttgc

SEQ ID NO: 732289 - DNA, 33 bp, Homo sapien
tattgctttcaaaccactccacgttccacaact

SEQ ID NO: 732290 - DNA, 33 bp, Homo sapien
tattgctttcaaaccagtccacgttccacaact

SEQ ID NO: 732291 - DNA, 33 bp, Homo sapien
gaacaatatgtgaaaacgtatgagtagtataga

SEQ ID NO: 732292 - DNA, 33 bp, Homo sapien
gaacaatatgtgaaaaggtatgagtagtataga

SEQ ID NO: 732293 - DNA, 33 bp, Homo sapien
aaggttctacactcaccggttttctccactcct

SEQ ID NO: 732294 - DNA, 33 bp, Homo sapien
aaggttctacactcactggttttctccactcct

SEQ ID NO: 732295 - DNA, 33 bp, Homo sapien
ctctggctctatctgcgactcttgcctgtctcc

SEQ ID NO: 732296 - DNA, 33 bp, Homo sapien
ctctggctctatctgctactcttgcctgtctcc

SEQ ID NO: 732297 - DNA, 33 bp, Homo sapien
cctacactgatgatgcaagtgatctccagtgga

SEQ ID NO: 732298 - DNA, 33 bp, Homo sapien
cctacactgatgatgcgagtgatctccagtgga

SEQ ID NO: 732299 - DNA, 33 bp, Homo sapien
tttagatgcagggggacggaagaaaggaaaaga

SEQ ID NO: 732300 - DNA, 33 bp, Homo sapien
tttagatgcagggggatggaagaaaggaaaaga

SEQ ID NO: 732301 - DNA, 33 bp, Homo sapien
tatcccagctgttcagaaggctaaggtgagagg

SEQ ID NO: 732302 - DNA, 33 bp, Homo sapien
tatcccagctgttcaggaggctaaggtgagagg

SEQ ID NO: 732303 - DNA, 33 bp, Homo sapien
cccacataactcattaaagcctaattaaatggt

SEQ ID NO: 732304 - DNA, 33 bp, Homo sapien
cccacataactcattagagcctaattaaatggt

SEQ ID NO: 732305 - DNA, 33 bp, Homo sapien
catgtctctgctcttcaatgtctgaggcctcag

SEQ ID NO: 732306 - DNA, 33 bp, Homo sapien
catgtctctgctcttcgatgtctgaggcctcag

SEQ ID NO: 732307 - DNA, 33 bp, Homo sapien
tcctatctctgtgtcacggtggaaagttgctaa

SEQ ID NO: 732308 - DNA, 33 bp, Homo sapien
tcctatctctgtgtcatggtggaaagttgctaa

SEQ ID NO: 732309 - DNA, 33 bp, Homo sapien
tggaactacacatatacaggaaagaaggaataa

SEQ ID NO: 732310 - DNA, 33 bp, Homo sapien
tggaactacacatatataggaaagaaggaataa

SEQ ID NO: 732311 - DNA, 33 bp, Homo sapien
aggactgtgacgaataaattgctattgtaagcc

SEQ ID NO: 732312 - DNA, 33 bp, Homo sapien
aggactgtgacgaatacattgctattgtaagcc

SEQ ID NO: 732313 - DNA, 33 bp, Homo sapien
attcagagcgtgaataaattagaactggcttaa

SEQ ID NO: 732314 - DNA, 33 bp, Homo sapien
attcagagcgtgaatacattagaactggcttaa

SEQ ID NO: 732315 - DNA, 33 bp, Homo sapien
agcattcaaagtcaagaagcgccatttatcttc

SEQ ID NO: 732316 - DNA, 33 bp, Homo sapien
agcattcaaagtcaagtagcgccatttatcttc

SEQ ID NO: 732317 - DNA, 33 bp, Homo sapien
taacctgagcagtctacggcttggccctatttc

SEQ ID NO: 732318 - DNA, 33 bp, Homo sapien
taacctgagcagtctatggcttggccctatttc

SEQ ID NO: 732319 - DNA, 33 bp, Homo sapien
agcatatagttcacgacgtacggagaaaccttt

SEQ ID NO: 732320 - DNA, 33 bp, Homo sapien
agcatatagttcacgatgtacggagaaaccttt

SEQ ID NO: 732321 - DNA, 33 bp, Homo sapien
cagaatacagcttttcaattattttacaaagtt

SEQ ID NO: 732322 - DNA, 33 bp, Homo sapien
cagaatacagcttttctattattttacaaagtt

SEQ ID NO: 732323 - DNA, 33 bp, Homo sapien
gagagaatggttgcccaataatccaaaggggta

SEQ ID NO: 732324 - DNA, 33 bp, Homo sapien
gagagaatggttgcccgataatccaaaggggta

SEQ ID NO: 732325 - DNA, 33 bp, Homo sapien
tacctcttccatttaccgaagctcattcctcac

SEQ ID NO: 732326 - DNA, 33 bp, Homo sapien
tacctcttccatttactgaagctcattcctcac

SEQ ID NO: 732327 - DNA, 33 bp, Homo sapien
acatttcatgcgtcaccactgatatatcattgg

SEQ ID NO: 732328 - DNA, 33 bp, Homo sapien
acatttcatgcgtcactactgatatatcattgg

SEQ ID NO: 732329 - DNA, 33 bp, Homo sapien
accaaaagaagctcaggaattgggcaccccagg

SEQ ID NO: 732330 - DNA, 33 bp, Homo sapien
accaaaagaagctcagtaattgggcaccccagg

SEQ ID NO: 732331 - DNA, 33 bp, Homo sapien
ctggatggtgtcccacaataacacgtcctcagt

SEQ ID NO: 732332 - DNA, 33 bp, Homo sapien
ctggatggtgtcccacgataacacgtcctcagt

SEQ ID NO: 732333 - DNA, 33 bp, Homo sapien
agccaaagttcatatacctgcaacatagcactc

SEQ ID NO: 732334 - DNA, 33 bp, Homo sapien
agccaaagttcatatatctgcaacatagcactc

SEQ ID NO: 732335 - DNA, 33 bp, Homo sapien
ctatatgctagatactcaagaatgagaacgaca

SEQ ID NO: 732336 - DNA, 33 bp, Homo sapien
ctatatgctagatactgaagaatgagaacgaca

SEQ ID NO: 732337 - DNA, 33 bp, Homo sapien
tgagctttgtcttcaaatctaataatctacagt

SEQ ID NO: 732338 - DNA, 33 bp, Homo sapien
tgagctttgtcttcaactctaataatctacagt

SEQ ID NO: 732339 - DNA, 33 bp, Homo sapien
tatgagcatacataacacattttgacgtcagga

SEQ ID NO: 732340 - DNA, 33 bp, Homo sapien
tatgagcatacataacgcattttgacgtcagga

SEQ ID NO: 732341 - DNA, 33 bp, Homo sapien
ctctttttgtaaatccaattttgtcctcaattc

SEQ ID NO: 732342 - DNA, 33 bp, Homo sapien
ctctttttgtaaatccgattttgtcctcaattc

SEQ ID NO: 732343 - DNA, 33 bp, Homo sapien
tcttccttgaaaagaacggtcagaggcagaaac

SEQ ID NO: 732344 - DNA, 33 bp, Homo sapien
tcttccttgaaaagaatggtcagaggcagaaac

SEQ ID NO: 732345 - DNA, 33 bp, Homo sapien
aagaggaaaagtaggcaacagaataaagtcatc

SEQ ID NO: 732346 - DNA, 33 bp, Homo sapien
aagaggaaaagtaggccacagaataaagtcatc

SEQ ID NO: 732347 - DNA, 33 bp, Homo sapien
tggccataaactttacacatttctacagcaaag

SEQ ID NO: 732348 - DNA, 33 bp, Homo sapien
tggccataaactttacgcatttctacagcaaag

SEQ ID NO: 732349 - DNA, 33 bp, Homo sapien
actgaaccgtgttccacgtcacgaatagaaaat

SEQ ID NO: 732350 - DNA, 33 bp, Homo sapien
actgaaccgtgttccatgtcacgaatagaaaat

SEQ ID NO: 732351 - DNA, 33 bp, Homo sapien
gcacagaacacctgtgcataactcaattccttt

SEQ ID NO: 732352 - DNA, 33 bp, Homo sapien
gcacagaacacctgtggataactcaattccttt

SEQ ID NO: 732353 - DNA, 33 bp, Homo sapien
tcacacctcctataagaaagagcctgctgtgca

SEQ ID NO: 732354 - DNA, 33 bp, Homo sapien
tcacacctcctataaggaagagcctgctgtgca

SEQ ID NO: 732355 - DNA, 33 bp, Homo sapien
aatattacggcttatgaagcatgtgagacagtc

SEQ ID NO: 732356 - DNA, 33 bp, Homo sapien
aatattacggcttatggagcatgtgagacagtc

SEQ ID NO: 732357 - DNA, 33 bp, Homo sapien
ggaccacccaggaggacgttggaataaaaagaa

SEQ ID NO: 732358 - DNA, 33 bp, Homo sapien
ggaccacccaggaggatgttggaataaaaagaa

SEQ ID NO: 732359 - DNA, 33 bp, Homo sapien
gaagagttctgattaaagagtgaaaagtttaag

SEQ ID NO: 732360 - DNA, 33 bp, Homo sapien
gaagagttctgattaacgagtgaaaagtttaag

SEQ ID NO: 732361 - DNA, 33 bp, Homo sapien
ccaaagtacaagaaacggtgtctatcagagaaa

SEQ ID NO: 732362 - DNA, 33 bp, Homo sapien
ccaaagtacaagaaactgtgtctatcagagaaa

SEQ ID NO: 732363 - DNA, 33 bp, Homo sapien
gactctgggagtgaaacgcactgggaatgacat

SEQ ID NO: 732364 - DNA, 33 bp, Homo sapien
gactctgggagtgaaatgcactgggaatgacat

SEQ ID NO: 732365 - DNA, 33 bp, Homo sapien
ttttaggcaatggatcaagatatggcaacagtt

SEQ ID NO: 732366 - DNA, 33 bp, Homo sapien
ttttaggcaatggatcgagatatggcaacagtt

SEQ ID NO: 732367 - DNA, 33 bp, Homo sapien
catccagcaagtattcactgatggccctctaca

SEQ ID NO: 732368 - DNA, 33 bp, Homo sapien
catccagcaagtattcgctgatggccctctaca

SEQ ID NO: 732369 - DNA, 33 bp, Homo sapien
ctatgaaggcctgcaactggctgatcttggtta

SEQ ID NO: 732370 - DNA, 33 bp, Homo sapien
ctatgaaggcctgcaattggctgatcttggtta

SEQ ID NO: 732371 - DNA, 33 bp, Homo sapien
gttaaagggaaactgaacagtggtatttggtgg

SEQ ID NO: 732372 - DNA, 33 bp, Homo sapien
gttaaagggaaactgaccagtggtatttggtgg

SEQ ID NO: 732373 - DNA, 33 bp, Homo sapien
caagaacttaactctacagaggagattcctcct

SEQ ID NO: 732374 - DNA, 33 bp, Homo sapien
caagaacttaactctagagaggagattcctcct

SEQ ID NO: 732375 - DNA, 33 bp, Homo sapien
ggccatctgtttaagcaacgagaagtacggagc

SEQ ID NO: 732376 - DNA, 33 bp, Homo sapien
ggccatctgtttaagcgacgagaagtacggagc

SEQ ID NO: 732377 - DNA, 33 bp, Homo sapien
tctatgttgatgtcaacctcaaattgtgagggc

SEQ ID NO: 732378 - DNA, 33 bp, Homo sapien
tctatgttgatgtcaatctcaaattgtgagggc

SEQ ID NO: 732379 - DNA, 33 bp, Homo sapien
gcagttactcacacaaaaaacaggtaataaaca

SEQ ID NO: 732380 - DNA, 33 bp, Homo sapien
gcagttactcacacaataaacaggtaataaaca

SEQ ID NO: 732381 - DNA, 33 bp, Homo sapien
gagggtgcgctctattaaagggttactctcatc

SEQ ID NO: 732382 - DNA, 33 bp, Homo sapien
gagggtgcgctctattgaagggttactctcatc

SEQ ID NO: 732383 - DNA, 33 bp, Homo sapien
aattaaggatgaggaacgaaactggagtttaca

SEQ ID NO: 732384 - DNA, 33 bp, Homo sapien
aattaaggatgaggaatgaaactggagtttaca

SEQ ID NO: 732385 - DNA, 33 bp, Homo sapien
atatttatttatctgacacatggtttctctctg

SEQ ID NO: 732386 - DNA, 33 bp, Homo sapien
atatttatttatctgagacatggtttctctctg

SEQ ID NO: 732387 - DNA, 33 bp, Homo sapien
cctgggatctgccagcaatacacatgaccatag

SEQ ID NO: 732388 - DNA, 33 bp, Homo sapien
cctgggatctgccagcgatacacatgaccatag

SEQ ID NO: 732389 - DNA, 33 bp, Homo sapien
tagtgggtaccgcctcagacagcatggctctag

SEQ ID NO: 732390 - DNA, 33 bp, Homo sapien
tagtgggtaccgcctcggacagcatggctctag

SEQ ID NO: 732391 - DNA, 33 bp, Homo sapien
atcgcttggaatgccactggagaggcaagatgg

SEQ ID NO: 732392 - DNA, 33 bp, Homo sapien
atcgcttggaatgccattggagaggcaagatgg

SEQ ID NO: 732393 - DNA, 33 bp, Homo sapien
actgcagacaggtggacatggtaattacggagg

SEQ ID NO: 732394 - DNA, 33 bp, Homo sapien
actgcagacaggtggatatggtaattacggagg

SEQ ID NO: 732395 - DNA, 33 bp, Homo sapien
ctacacataattaagcaaccaacttctaaagca

SEQ ID NO: 732396 - DNA, 33 bp, Homo sapien
ctacacataattaagcgaccaacttctaaagca

SEQ ID NO: 732397 - DNA, 33 bp, Homo sapien
cacagtgatagatcctaaccctgctgcagccag

SEQ ID NO: 732398 - DNA, 33 bp, Homo sapien
cacagtgatagatccttaccctgctgcagccag

SEQ ID NO: 732399 - DNA, 33 bp, Homo sapien
cccttgaggtatcctacggagtctgagctcagg

SEQ ID NO: 732400 - DNA, 33 bp, Homo sapien
cccttgaggtatcctatggagtctgagctcagg

SEQ ID NO: 732401 - DNA, 33 bp, Homo sapien
cataacagtgagctcaacttatccatcattcat

SEQ ID NO: 732402 - DNA, 33 bp, Homo sapien
cataacagtgagctcagcttatccatcattcat

SEQ ID NO: 732403 - DNA, 33 bp, Homo sapien
tttgtggagtgtgagaagtaaagtagaaaagaa

SEQ ID NO: 732404 - DNA, 33 bp, Homo sapien
tttgtggagtgtgagaggtaaagtagaaaagaa

SEQ ID NO: 732405 - DNA, 33 bp, Homo sapien
tttagaccacatgagaaccaaaacctaattttg

SEQ ID NO: 732406 - DNA, 33 bp, Homo sapien
tttagaccacatgagagccaaaacctaattttg

SEQ ID NO: 732407 - DNA, 33 bp, Homo sapien
tgaatcatttctcttacaacaggtaaatatggc

SEQ ID NO: 732408 - DNA, 33 bp, Homo sapien
tgaatcatttctcttataacaggtaaatatggc

SEQ ID NO: 732409 - DNA, 33 bp, Homo sapien
aaacttttacctctcacgcaaatgtcatagtcc

SEQ ID NO: 732410 - DNA, 33 bp, Homo sapien
aaacttttacctctcatgcaaatgtcatagtcc

SEQ ID NO: 732411 - DNA, 33 bp, Homo sapien
acgtctggaatcacagaaagccttataccccag

SEQ ID NO: 732412 - DNA, 33 bp, Homo sapien
acgtctggaatcacagtaagccttataccccag

SEQ ID NO: 732413 - DNA, 33 bp, Homo sapien
tggaaaagccgacaagaaacacgaaactgctcc

SEQ ID NO: 732414 - DNA, 33 bp, Homo sapien
tggaaaagccgacaaggaacacgaaactgctcc

SEQ ID NO: 732415 - DNA, 33 bp, Homo sapien
cagtaacaaagacaccaagagcacaatcttctc

SEQ ID NO: 732416 - DNA, 33 bp, Homo sapien
cagtaacaaagacaccgagagcacaatcttctc

SEQ ID NO: 732417 - DNA, 33 bp, Homo sapien
ggtcaggatggctcaaatggatgccaggggagg

SEQ ID NO: 732418 - DNA, 33 bp, Homo sapien
ggtcaggatggctcaagtggatgccaggggagg

SEQ ID NO: 732419 - DNA, 33 bp, Homo sapien
cgaataatggaaggaactggccatgtctgagct

SEQ ID NO: 732420 - DNA, 33 bp, Homo sapien
cgaataatggaaggaagtggccatgtctgagct

SEQ ID NO: 732421 - DNA, 33 bp, Homo sapien
gcagaggtccatacgagcacataatctgtataa

SEQ ID NO: 732422 - DNA, 33 bp, Homo sapien
gcagaggtccatacgatcacataatctgtataa

SEQ ID NO: 732423 - DNA, 33 bp, Homo sapien
cttctccaatttatcaacggggacctgccctat

SEQ ID NO: 732424 - DNA, 33 bp, Homo sapien
cttctccaatttatcagcggggacctgccctat

SEQ ID NO: 732425 - DNA, 33 bp, Homo sapien
catgacataaatcagaacctccgggagcaaggg

SEQ ID NO: 732426 - DNA, 33 bp, Homo sapien
catgacataaatcagatcctccgggagcaaggg

SEQ ID NO: 732427 - DNA, 33 bp, Homo sapien
ctgcagaccttttgggcaacgaagagccacaca

SEQ ID NO: 732428 - DNA, 33 bp, Homo sapien
ctgcagaccttttgggtaacgaagagccacaca

SEQ ID NO: 732429 - DNA, 33 bp, Homo sapien
agtgtgacttgtggggaccagcgataggatgct

SEQ ID NO: 732430 - DNA, 33 bp, Homo sapien
agtgtgacttgtgggggccagcgataggatgct

SEQ ID NO: 732431 - DNA, 33 bp, Homo sapien
cctcccaaaagctctacgtgtacccacctgata

SEQ ID NO: 732432 - DNA, 33 bp, Homo sapien
cctcccaaaagctctatgtgtacccacctgata

SEQ ID NO: 732433 - DNA, 33 bp, Homo sapien
tttgaccatccagctcactgtctcggaattccc

SEQ ID NO: 732434 - DNA, 33 bp, Homo sapien
tttgaccatccagctcgctgtctcggaattccc

SEQ ID NO: 732435 - DNA, 33 bp, Homo sapien
tttgatattcagctcaaatatctcttctgacca

SEQ ID NO: 732436 - DNA, 33 bp, Homo sapien
tttgatattcagctcagatatctcttctgacca

SEQ ID NO: 732437 - DNA, 33 bp, Homo sapien
tggagtgtgaatttgaagcctgtgcaaggaaca

SEQ ID NO: 732438 - DNA, 33 bp, Homo sapien
tggagtgtgaatttgaggcctgtgcaaggaaca

SEQ ID NO: 732439 - DNA, 33 bp, Homo sapien
tcacaagtgaagccaaaaagtaagtcatagtat

SEQ ID NO: 732440 - DNA, 33 bp, Homo sapien
tcacaagtgaagccaacaagtaagtcatagtat

SEQ ID NO: 732441 - DNA, 33 bp, Homo sapien
cccagagaggttttcacggagcttgggggctcc

SEQ ID NO: 732442 - DNA, 33 bp, Homo sapien
cccagagaggttttcatggagcttgggggctcc

SEQ ID NO: 732443 - DNA, 33 bp, Homo sapien
tgcttgtcaactggaggaaagagtagagttccc

SEQ ID NO: 732444 - DNA, 33 bp, Homo sapien
tgcttgtcaactggagtaaagagtagagttccc

SEQ ID NO: 732445 - DNA, 33 bp, Homo sapien
cacccctgagttcttccagtacatcctccagtt

SEQ ID NO: 732446 - DNA, 33 bp, Homo sapien
cacccctgagttcttcgagtacatcctccagtt

SEQ ID NO: 732447 - DNA, 33 bp, Homo sapien
atctccagagaaagaacagagctgcaaaattca

SEQ ID NO: 732448 - DNA, 33 bp, Homo sapien
atctccagagaaagaagagagctgcaaaattca

SEQ ID NO: 732449 - DNA, 33 bp, Homo sapien
ctgtgtcttaaacataaggatattcaataaatc

SEQ ID NO: 732450 - DNA, 33 bp, Homo sapien
ctgtgtcttaaacatagggatattcaataaatc

SEQ ID NO: 732451 - DNA, 33 bp, Homo sapien
aaaaaccagatgtgaccatagtaagttctattt

SEQ ID NO: 732452 - DNA, 33 bp, Homo sapien
aaaaaccagatgtgacgatagtaagttctattt

SEQ ID NO: 732453 - DNA, 33 bp, Homo sapien
tttatacaaatgttccaaataagtaaacatctg

SEQ ID NO: 732454 - DNA, 33 bp, Homo sapien
tttatacaaatgttccgaataagtaaacatctg

SEQ ID NO: 732455 - DNA, 33 bp, Homo sapien
gctgaagtcattcattaaaacgaaatgttgatc

SEQ ID NO: 732456 - DNA, 33 bp, Homo sapien
gctgaagtcattcattcaaacgaaatgttgatc

SEQ ID NO: 732457 - DNA, 33 bp, Homo sapien
aaagcacgcttttacccgatgagattttgtgag

SEQ ID NO: 732458 - DNA, 33 bp, Homo sapien
aaagcacgcttttacctgatgagattttgtgag

SEQ ID NO: 732459 - DNA, 33 bp, Homo sapien
gctgctgctggatatacggcatcaaggggtttt

SEQ ID NO: 732460 - DNA, 33 bp, Homo sapien
gctgctgctggatatatggcatcaaggggtttt

SEQ ID NO: 732461 - DNA, 33 bp, Homo sapien
agaccctcgaactgctcaacacaaggccctaac

SEQ ID NO: 732462 - DNA, 33 bp, Homo sapien
agaccctcgaactgctgaacacaaggccctaac

SEQ ID NO: 732463 - DNA, 33 bp, Homo sapien
tcactgtactgcctcaaccagctgctcactcag

SEQ ID NO: 732464 - DNA, 33 bp, Homo sapien
tcactgtactgcctcacccagctgctcactcag

SEQ ID NO: 732465 - DNA, 33 bp, Homo sapien
tcacctacctaggagccaatacatatcaatatt

SEQ ID NO: 732466 - DNA, 33 bp, Homo sapien
tcacctacctaggagctaatacatatcaatatt

SEQ ID NO: 732467 - DNA, 33 bp, Homo sapien
ggagggtctcttaaccaacatcaggagttgtag

SEQ ID NO: 732468 - DNA, 33 bp, Homo sapien
ggagggtctcttaaccgacatcaggagttgtag

SEQ ID NO: 732469 - DNA, 33 bp, Homo sapien
agagttttaaatgtgaaccatagcagaaagaaa

SEQ ID NO: 732470 - DNA, 33 bp, Homo sapien
agagttttaaatgtgacccatagcagaaagaaa

SEQ ID NO: 732471 - DNA, 33 bp, Homo sapien
tatttttaaagagtcagtaaatcaggatgttgc

SEQ ID NO: 732472 - DNA, 33 bp, Homo sapien
tatttttaaagagtcattaaatcaggatgttgc

SEQ ID NO: 732473 - DNA, 33 bp, Homo sapien
atctgtggggcaaagcggctcggcttcatccca

SEQ ID NO: 732474 - DNA, 33 bp, Homo sapien
atctgtggggcaaagctgctcggcttcatccca

SEQ ID NO: 732475 - DNA, 33 bp, Homo sapien
tgaaaacaacaaactacaaaatgctcctttctt

SEQ ID NO: 732476 - DNA, 33 bp, Homo sapien
tgaaaacaacaaactataaaatgctcctttctt

SEQ ID NO: 732477 - DNA, 33 bp, Homo sapien
attacagaatctttacagctaataaccttctgg

SEQ ID NO: 732478 - DNA, 33 bp, Homo sapien
attacagaatctttacggctaataaccttctgg

SEQ ID NO: 732479 - DNA, 33 bp, Homo sapien
ggtgattagagtgggcaccaatgtgatatgact

SEQ ID NO: 732480 - DNA, 33 bp, Homo sapien
ggtgattagagtgggcgccaatgtgatatgact

SEQ ID NO: 732481 - DNA, 33 bp, Homo sapien
cccaggagtacataaccgacagctttttcttag

SEQ ID NO: 732482 - DNA, 33 bp, Homo sapien
cccaggagtacataactgacagctttttcttag

SEQ ID NO: 732483 - DNA, 33 bp, Homo sapien
tcaacgttaattgggaaagaaaatgatggagag

SEQ ID NO: 732484 - DNA, 33 bp, Homo sapien
tcaacgttaattgggagagaaaatgatggagag

SEQ ID NO: 732485 - DNA, 33 bp, Homo sapien
accctgctaacacagacgaaccaaatttactgc

SEQ ID NO: 732486 - DNA, 33 bp, Homo sapien
accctgctaacacagatgaaccaaatttactgc

SEQ ID NO: 732487 - DNA, 33 bp, Homo sapien
tgaggcttgtaacagaaaagcacaggctttgga

SEQ ID NO: 732488 - DNA, 33 bp, Homo sapien
tgaggcttgtaacagagaagcacaggctttgga

SEQ ID NO: 732489 - DNA, 33 bp, Homo sapien
tgggtggattacaaagaaatcttaggccctgcc

SEQ ID NO: 732490 - DNA, 33 bp, Homo sapien
tgggtggattacaaaggaatcttaggccctgcc

SEQ ID NO: 732491 - DNA, 33 bp, Homo sapien
ctgtttggagaaacaaataaattgctctgggag

SEQ ID NO: 732492 - DNA, 33 bp, Homo sapien
ctgtttggagaaacaactaaattgctctgggag

SEQ ID NO: 732493 - DNA, 33 bp, Homo sapien
cgtaatgcattttacaaggaaaagcctccttct

SEQ ID NO: 732494 - DNA, 33 bp, Homo sapien
cgtaatgcattttacacggaaaagcctccttct

SEQ ID NO: 732495 - DNA, 33 bp, Homo sapien
gataccaagttaataaccctaatgtgttgttgt

SEQ ID NO: 732496 - DNA, 33 bp, Homo sapien
gataccaagttaataatcctaatgtgttgttgt

SEQ ID NO: 732497 - DNA, 33 bp, Homo sapien
aattactgatggataacatgaagagatagagat

SEQ ID NO: 732498 - DNA, 33 bp, Homo sapien
aattactgatggataatatgaagagatagagat

SEQ ID NO: 732499 - DNA, 33 bp, Homo sapien
agaagcactattttacacaggaggccaaacatt

SEQ ID NO: 732500 - DNA, 33 bp, Homo sapien
agaagcactattttacgcaggaggccaaacatt

SEQ ID NO: 732501 - DNA, 33 bp, Homo sapien
agccaggtaaagggaacggcaataatcatgaat

SEQ ID NO: 732502 - DNA, 33 bp, Homo sapien
agccaggtaaagggaatggcaataatcatgaat

SEQ ID NO: 732503 - DNA, 33 bp, Homo sapien
ggctagtgatcagttacagagcaaaattgctaa

SEQ ID NO: 732504 - DNA, 33 bp, Homo sapien
ggctagtgatcagttatagagcaaaattgctaa

SEQ ID NO: 732505 - DNA, 33 bp, Homo sapien
tccaggagggctagtgcacttgattagtgggaa

SEQ ID NO: 732506 - DNA, 33 bp, Homo sapien
tccaggagggctagtgtacttgattagtgggaa

SEQ ID NO: 732507 - DNA, 33 bp, Homo sapien
gaagctacatcaagaactaaaaaagagacatga

SEQ ID NO: 732508 - DNA, 33 bp, Homo sapien
gaagctacatcaagaattaaaaaagagacatga

SEQ ID NO: 732509 - DNA, 33 bp, Homo sapien
atcaacacagcaacaacggaaaagagaggctct

SEQ ID NO: 732510 - DNA, 33 bp, Homo sapien
atcaacacagcaacaatggaaaagagaggctct

SEQ ID NO: 732511 - DNA, 33 bp, Homo sapien
gcaccagtgaagagacagaaaggtgacctcagg

SEQ ID NO: 732512 - DNA, 33 bp, Homo sapien
gcaccagtgaagagacggaaaggtgacctcagg

SEQ ID NO: 732513 - DNA, 33 bp, Homo sapien
acccctatcaactgtcaccttatgtcctcctct

SEQ ID NO: 732514 - DNA, 33 bp, Homo sapien
acccctatcaactgtcgccttatgtcctcctct

SEQ ID NO: 732515 - DNA, 33 bp, Homo sapien
tggcttcttgatctccgcatttgcaatatattc

SEQ ID NO: 732516 - DNA, 33 bp, Homo sapien
tggcttcttgatctcctcatttgcaatatattc

SEQ ID NO: 732517 - DNA, 33 bp, Homo sapien
tgtttttgtcaggctacccttcttcactgaaag

SEQ ID NO: 732518 - DNA, 33 bp, Homo sapien
tgtttttgtcaggctatccttcttcactgaaag

SEQ ID NO: 732519 - DNA, 33 bp, Homo sapien
gggtcagcagtggtaccaagggcagagactgga

SEQ ID NO: 732520 - DNA, 33 bp, Homo sapien
gggtcagcagtggtactaagggcagagactgga

SEQ ID NO: 732521 - DNA, 33 bp, Homo sapien
agagaaaaatggcttaccacatatagggagcat

SEQ ID NO: 732522 - DNA, 33 bp, Homo sapien
agagaaaaatggcttatcacatatagggagcat

SEQ ID NO: 732523 - DNA, 33 bp, Homo sapien
tctttcctttgaaaaaagcatagtagtctctgt

SEQ ID NO: 732524 - DNA, 33 bp, Homo sapien
tctttcctttgaaaaaggcatagtagtctctgt

SEQ ID NO: 732525 - DNA, 33 bp, Homo sapien
ccaaagtcagactaacaatttggatgtccagaa

SEQ ID NO: 732526 - DNA, 33 bp, Homo sapien
ccaaagtcagactaacgatttggatgtccagaa

SEQ ID NO: 732527 - DNA, 33 bp, Homo sapien
caaaattctagggaccaaaatgcacatgacttg

SEQ ID NO: 732528 - DNA, 33 bp, Homo sapien
caaaattctagggaccgaaatgcacatgacttg

SEQ ID NO: 732529 - DNA, 33 bp, Homo sapien
taggacaagctttcccactgccctcccattcac

SEQ ID NO: 732530 - DNA, 33 bp, Homo sapien
taggacaagctttcccgctgccctcccattcac

SEQ ID NO: 732531 - DNA, 33 bp, Homo sapien
attcacagatgttcccaatcctgacccactttc

SEQ ID NO: 732532 - DNA, 33 bp, Homo sapien
attcacagatgttcccgatcctgacccactttc

SEQ ID NO: 732533 - DNA, 33 bp, Homo sapien
gcaaatggctggatggcatagaaaattaagcaa

SEQ ID NO: 732534 - DNA, 33 bp, Homo sapien
gcaaatggctggatggtatagaaaattaagcaa

SEQ ID NO: 732535 - DNA, 33 bp, Homo sapien
ggcttttgtgcggttacatataccagcagaagc

SEQ ID NO: 732536 - DNA, 33 bp, Homo sapien
ggcttttgtgcggttagatataccagcagaagc

SEQ ID NO: 732537 - DNA, 33 bp, Homo sapien
gaaatgcctatgtaaacgtcctaatgcaaacaa

SEQ ID NO: 732538 - DNA, 33 bp, Homo sapien
gaaatgcctatgtaaatgtcctaatgcaaacaa

SEQ ID NO: 732539 - DNA, 33 bp, Homo sapien
ttaataaacataattcacccaaaacagagaaat

SEQ ID NO: 732540 - DNA, 33 bp, Homo sapien
ttaataaacataattcccccaaaacagagaaat

SEQ ID NO: 732541 - DNA, 33 bp, Homo sapien
tgtcacacagtttcacaaaattattcacctttt

SEQ ID NO: 732542 - DNA, 33 bp, Homo sapien
tgtcacacagtttcaccaaattattcacctttt

SEQ ID NO: 732543 - DNA, 33 bp, Homo sapien
tgtgcttctgagccaccgtcatcttcaaggtgt

SEQ ID NO: 732544 - DNA, 33 bp, Homo sapien
tgtgcttctgagccactgtcatcttcaaggtgt

SEQ ID NO: 732545 - DNA, 33 bp, Homo sapien
gtcttcatcccaagaaagttatggcattgtgtt

SEQ ID NO: 732546 - DNA, 33 bp, Homo sapien
gtcttcatcccaagaacgttatggcattgtgtt

SEQ ID NO: 732547 - DNA, 33 bp, Homo sapien
atttttgcaagtttaaatggttgaaaagatttt

SEQ ID NO: 732548 - DNA, 33 bp, Homo sapien
atttttgcaagtttaagtggttgaaaagatttt

SEQ ID NO: 732549 - DNA, 33 bp, Homo sapien
ctgaaagagaatgtacactgatacgtttcactg

SEQ ID NO: 732550 - DNA, 33 bp, Homo sapien
ctgaaagagaatgtacgctgatacgtttcactg

SEQ ID NO: 732551 - DNA, 33 bp, Homo sapien
aggttatgtctccttccagtgtcaaggtacttt

SEQ ID NO: 732552 - DNA, 33 bp, Homo sapien
aggttatgtctccttctagtgtcaaggtacttt

SEQ ID NO: 732553 - DNA, 33 bp, Homo sapien
aaactaatcatcttaacggctgtttatgcccag

SEQ ID NO: 732554 - DNA, 33 bp, Homo sapien
aaactaatcatcttaatggctgtttatgcccag

SEQ ID NO: 732555 - DNA, 33 bp, Homo sapien
tgtgattttgttcaagcagggctcagctgagtg

SEQ ID NO: 732556 - DNA, 33 bp, Homo sapien
tgtgattttgttcaagtagggctcagctgagtg

SEQ ID NO: 732557 - DNA, 33 bp, Homo sapien
acaagcagggaagtaacccacacctcctgggca

SEQ ID NO: 732558 - DNA, 33 bp, Homo sapien
acaagcagggaagtaatccacacctcctgggca

SEQ ID NO: 732559 - DNA, 33 bp, Homo sapien
catcccttcagaatggaccataaatacacccat

SEQ ID NO: 732560 - DNA, 33 bp, Homo sapien
catcccttcagaatgggccataaatacacccat

SEQ ID NO: 732561 - DNA, 33 bp, Homo sapien
caggctgaagacttctcactttgcacgaacatc

SEQ ID NO: 732562 - DNA, 33 bp, Homo sapien
caggctgaagacttcttactttgcacgaacatc

SEQ ID NO: 732563 - DNA, 33 bp, Homo sapien
attcttttcacctcacagagtcattgatcaatg

SEQ ID NO: 732564 - DNA, 33 bp, Homo sapien
attcttttcacctcacggagtcattgatcaatg

SEQ ID NO: 732565 - DNA, 33 bp, Homo sapien
tcaaccaaatgggcaggaaaacttctttaacaa

SEQ ID NO: 732566 - DNA, 33 bp, Homo sapien
tcaaccaaatgggcagtaaaacttctttaacaa

SEQ ID NO: 732567 - DNA, 33 bp, Homo sapien
agttctgaggagttcaaccaggttccatttcct

SEQ ID NO: 732568 - DNA, 33 bp, Homo sapien
agttctgaggagttcagccaggttccatttcct

SEQ ID NO: 732569 - DNA, 33 bp, Homo sapien
tattttctttcagaagccttcaactttgtatat

SEQ ID NO: 732570 - DNA, 33 bp, Homo sapien
tattttctttcagaagtcttcaactttgtatat

SEQ ID NO: 732571 - DNA, 33 bp, Homo sapien
attcttagggctcaacacggctgaaaaactgct

SEQ ID NO: 732572 - DNA, 33 bp, Homo sapien
attcttagggctcaacgcggctgaaaaactgct

SEQ ID NO: 732573 - DNA, 33 bp, Homo sapien
tgagagatacctaataagatggaaatatgccca

SEQ ID NO: 732574 - DNA, 33 bp, Homo sapien
tgagagatacctaatatgatggaaatatgccca

SEQ ID NO: 732575 - DNA, 33 bp, Homo sapien
tccatcaagaagccaccactctaataagggaga

SEQ ID NO: 732576 - DNA, 33 bp, Homo sapien
tccatcaagaagccactactctaataagggaga

SEQ ID NO: 732577 - DNA, 33 bp, Homo sapien
aaatttgctaaatgaaaggctaaataaatacat

SEQ ID NO: 732578 - DNA, 33 bp, Homo sapien
aaatttgctaaatgaagggctaaataaatacat

SEQ ID NO: 732579 - DNA, 33 bp, Homo sapien
ttatgctttcaagttacgtgaactagtaagatc

SEQ ID NO: 732580 - DNA, 33 bp, Homo sapien
ttatgctttcaagttatgtgaactagtaagatc

SEQ ID NO: 732581 - DNA, 33 bp, Homo sapien
ttgattccatgtgaccacttgcagatgaacaga

SEQ ID NO: 732582 - DNA, 33 bp, Homo sapien
ttgattccatgtgaccgcttgcagatgaacaga

SEQ ID NO: 732583 - DNA, 33 bp, Homo sapien
attctacaaatataagcctaaatttttgtggct

SEQ ID NO: 732584 - DNA, 33 bp, Homo sapien
attctacaaatataaggctaaatttttgtggct

SEQ ID NO: 732585 - DNA, 33 bp, Homo sapien
tgccacttctttcctccctcacttaaagcacct

SEQ ID NO: 732586 - DNA, 33 bp, Homo sapien
tgccacttctttcctctctcacttaaagcacct

SEQ ID NO: 732587 - DNA, 33 bp, Homo sapien
cacgattcccctgtagaacacttgtaccactta

SEQ ID NO: 732588 - DNA, 33 bp, Homo sapien
cacgattcccctgtaggacacttgtaccactta

SEQ ID NO: 732589 - DNA, 33 bp, Homo sapien
gagctggaagaaagaactcagaggctggtgggt

SEQ ID NO: 732590 - DNA, 33 bp, Homo sapien
gagctggaagaaagaattcagaggctggtgggt

SEQ ID NO: 732591 - DNA, 33 bp, Homo sapien
tttatgggttacgtgagaaattttaatgtaggc

SEQ ID NO: 732592 - DNA, 33 bp, Homo sapien
tttatgggttacgtgataaattttaatgtaggc

SEQ ID NO: 732593 - DNA, 33 bp, Homo sapien
gtttctccctaagcaccactcttcacttctagc

SEQ ID NO: 732594 - DNA, 33 bp, Homo sapien
gtttctccctaagcacgactcttcacttctagc

SEQ ID NO: 732595 - DNA, 33 bp, Homo sapien
cacatatgagttctatcaaggccggatggacac

SEQ ID NO: 732596 - DNA, 33 bp, Homo sapien
cacatatgagttctattaaggccggatggacac

SEQ ID NO: 732597 - DNA, 33 bp, Homo sapien
gaaaataagtcccatcaccaggtctctagctgt

SEQ ID NO: 732598 - DNA, 33 bp, Homo sapien
gaaaataagtcccatcgccaggtctctagctgt

SEQ ID NO: 732599 - DNA, 33 bp, Homo sapien
ctccctctgtaggcccacgctttacagtacagc

SEQ ID NO: 732600 - DNA, 33 bp, Homo sapien
ctccctctgtaggcccgcgctttacagtacagc

SEQ ID NO: 732601 - DNA, 33 bp, Homo sapien
acagtcacccatctcccatttttgctttaaacc

SEQ ID NO: 732602 - DNA, 33 bp, Homo sapien
acagtcacccatctcctatttttgctttaaacc

SEQ ID NO: 732603 - DNA, 33 bp, Homo sapien
tttgaaatctgtccagaatttgactactttata

SEQ ID NO: 732604 - DNA, 33 bp, Homo sapien
tttgaaatctgtccaggatttgactactttata

SEQ ID NO: 732605 - DNA, 33 bp, Homo sapien
gagaggcttctggttacagcaggatgactctga

SEQ ID NO: 732606 - DNA, 33 bp, Homo sapien
gagaggcttctggttatagcaggatgactctga

SEQ ID NO: 732607 - DNA, 33 bp, Homo sapien
ttattcatcttgcataactatgactttatacct

SEQ ID NO: 732608 - DNA, 33 bp, Homo sapien
ttattcatcttgcatacctatgactttatacct

SEQ ID NO: 732609 - DNA, 33 bp, Homo sapien
tgacataggtaaggaaaaaatggataacttctc

SEQ ID NO: 732610 - DNA, 33 bp, Homo sapien
tgacataggtaaggaagaaatggataacttctc

SEQ ID NO: 732611 - DNA, 33 bp, Homo sapien
agttcaggaaacatgacgtcaaagttgctacga

SEQ ID NO: 732612 - DNA, 33 bp, Homo sapien
agttcaggaaacatgatgtcaaagttgctacga

SEQ ID NO: 732613 - DNA, 33 bp, Homo sapien
cggcacaaattgtaaacgacacccttcagcaca

SEQ ID NO: 732614 - DNA, 33 bp, Homo sapien
cggcacaaattgtaaatgacacccttcagcaca

SEQ ID NO: 732615 - DNA, 33 bp, Homo sapien
ggtggtggctcttcacacttacagaacgttagg

SEQ ID NO: 732616 - DNA, 33 bp, Homo sapien
ggtggtggctcttcacgcttacagaacgttagg

SEQ ID NO: 732617 - DNA, 33 bp, Homo sapien
agggtatagtaatctaagttgcaggagaaaagg

SEQ ID NO: 732618 - DNA, 33 bp, Homo sapien
agggtatagtaatctacgttgcaggagaaaagg

SEQ ID NO: 732619 - DNA, 33 bp, Homo sapien
caggatggccaaataaaaagtctcaatttggaa

SEQ ID NO: 732620 - DNA, 33 bp, Homo sapien
caggatggccaaataagaagtctcaatttggaa

SEQ ID NO: 732621 - DNA, 33 bp, Homo sapien
cactgctagggacaaaatcttcatacatctccc

SEQ ID NO: 732622 - DNA, 33 bp, Homo sapien
cactgctagggacaaagtcttcatacatctccc

SEQ ID NO: 732623 - DNA, 33 bp, Homo sapien
agagaatcgtattccaaagaaacatgagcttgg

SEQ ID NO: 732624 - DNA, 33 bp, Homo sapien
agagaatcgtattccacagaaacatgagcttgg

SEQ ID NO: 732625 - DNA, 33 bp, Homo sapien
aaaattgacattttcaagcaaagatagaaggga

SEQ ID NO: 732626 - DNA, 33 bp, Homo sapien
aaaattgacattttcacgcaaagatagaaggga

SEQ ID NO: 732627 - DNA, 33 bp, Homo sapien
tacaccaggctatagacgagataagcataaaaa

SEQ ID NO: 732628 - DNA, 33 bp, Homo sapien
tacaccaggctatagatgagataagcataaaaa

SEQ ID NO: 732629 - DNA, 33 bp, Homo sapien
cttctatgaacagtaaataagcattaaatccca

SEQ ID NO: 732630 - DNA, 33 bp, Homo sapien
cttctatgaacagtaagtaagcattaaatccca

SEQ ID NO: 732631 - DNA, 33 bp, Homo sapien
ttaatacaaacaatgccatagtgaatgtcctag

SEQ ID NO: 732632 - DNA, 33 bp, Homo sapien
ttaatacaaacaatgctatagtgaatgtcctag

SEQ ID NO: 732633 - DNA, 33 bp, Homo sapien
cttcatgggttgtaaacttcacttatatgttgt

SEQ ID NO: 732634 - DNA, 33 bp, Homo sapien
cttcatgggttgtaaagttcacttatatgttgt

SEQ ID NO: 732635 - DNA, 33 bp, Homo sapien
attaaaaaaggaagtacgttagctcattaaaga

SEQ ID NO: 732636 - DNA, 33 bp, Homo sapien
attaaaaaaggaagtatgttagctcattaaaga

SEQ ID NO: 732637 - DNA, 33 bp, Homo sapien
ttcaaaggagagtgaacgtttgtctcctcttaa

SEQ ID NO: 732638 - DNA, 33 bp, Homo sapien
ttcaaaggagagtgaatgtttgtctcctcttaa

SEQ ID NO: 732639 - DNA, 33 bp, Homo sapien
aaccccttccattcaactatcaggagagggtaa

SEQ ID NO: 732640 - DNA, 33 bp, Homo sapien
aaccccttccattcaagtatcaggagagggtaa

SEQ ID NO: 732641 - DNA, 33 bp, Homo sapien
aggtgaggagcggaggcaagcagaaagtaaagc

SEQ ID NO: 732642 - DNA, 33 bp, Homo sapien
aggtgaggagcggagggaagcagaaagtaaagc

SEQ ID NO: 732643 - DNA, 33 bp, Homo sapien
atgtctctaatgtttgcagagcttctatttgct

SEQ ID NO: 732644 - DNA, 33 bp, Homo sapien
atgtctctaatgtttgtagagcttctatttgct

SEQ ID NO: 732645 - DNA, 33 bp, Homo sapien
aatcttttttcataaagctacttttgaagcaaa

SEQ ID NO: 732646 - DNA, 33 bp, Homo sapien
aatcttttttcataaatctacttttgaagcaaa

SEQ ID NO: 732647 - DNA, 33 bp, Homo sapien
gtggagcctgtgggagacaattagattatgcag

SEQ ID NO: 732648 - DNA, 33 bp, Homo sapien
gtggagcctgtgggaggcaattagattatgcag

SEQ ID NO: 732649 - DNA, 33 bp, Homo sapien
atgttactaacttttaacacaaagcaaacaacc

SEQ ID NO: 732650 - DNA, 33 bp, Homo sapien
atgttactaacttttaccacaaagcaaacaacc

SEQ ID NO: 732651 - DNA, 33 bp, Homo sapien
ctacaagatcttgtgcagcaatttagtagaggt

SEQ ID NO: 732652 - DNA, 33 bp, Homo sapien
ctacaagatcttgtgcggcaatttagtagaggt

SEQ ID NO: 732653 - DNA, 33 bp, Homo sapien
tcaataagaaaaatgccgacaactcattagaga

SEQ ID NO: 732654 - DNA, 33 bp, Homo sapien
tcaataagaaaaatgctgacaactcattagaga

SEQ ID NO: 732655 - DNA, 33 bp, Homo sapien
atggctataataggacaggcatggtcccgtaat

SEQ ID NO: 732656 - DNA, 33 bp, Homo sapien
atggctataataggactggcatggtcccgtaat

SEQ ID NO: 732657 - DNA, 33 bp, Homo sapien
tttctatccactaacaacaaactatccaggaaa

SEQ ID NO: 732658 - DNA, 33 bp, Homo sapien
tttctatccactaacagcaaactatccaggaaa

SEQ ID NO: 732659 - DNA, 33 bp, Homo sapien
taattcttaaggagaaatgaggagtaggagagg

SEQ ID NO: 732660 - DNA, 33 bp, Homo sapien
taattcttaaggagaactgaggagtaggagagg

SEQ ID NO: 732661 - DNA, 33 bp, Homo sapien
acatacaagttcacaaatcttccttcttctctg

SEQ ID NO: 732662 - DNA, 33 bp, Homo sapien
acatacaagttcacaagtcttccttcttctctg

SEQ ID NO: 732663 - DNA, 33 bp, Homo sapien
tatcatggggaacgtacgtaagtcactcagggg

SEQ ID NO: 732664 - DNA, 33 bp, Homo sapien
tatcatggggaacgtatgtaagtcactcagggg

SEQ ID NO: 732665 - DNA, 33 bp, Homo sapien
caaggtaatcttggtaagagtgctgaggttgaa

SEQ ID NO: 732666 - DNA, 33 bp, Homo sapien
caaggtaatcttggtaggagtgctgaggttgaa

SEQ ID NO: 732667 - DNA, 33 bp, Homo sapien
aaatgcagagacactagaactggatcaatattt

SEQ ID NO: 732668 - DNA, 33 bp, Homo sapien
aaatgcagagacactataactggatcaatattt

SEQ ID NO: 732669 - DNA, 33 bp, Homo sapien
tttacatcatgatcaagaacaaacattcatgtg

SEQ ID NO: 732670 - DNA, 33 bp, Homo sapien
tttacatcatgatcaataacaaacattcatgtg

SEQ ID NO: 732671 - DNA, 33 bp, Homo sapien
agtaaaatatttagtacgctagtgatggtctgt

SEQ ID NO: 732672 - DNA, 33 bp, Homo sapien
agtaaaatatttagtatgctagtgatggtctgt

SEQ ID NO: 732673 - DNA, 33 bp, Homo sapien
cagggattctcacctcaccctcatgcatgtctt

SEQ ID NO: 732674 - DNA, 33 bp, Homo sapien
cagggattctcacctcgccctcatgcatgtctt

SEQ ID NO: 732675 - DNA, 33 bp, Homo sapien
ccttactctgagttgacgcacatttagtacatg

SEQ ID NO: 732676 - DNA, 33 bp, Homo sapien
ccttactctgagttgatgcacatttagtacatg

SEQ ID NO: 732677 - DNA, 33 bp, Homo sapien
gttctgtttaatatagccaccatcttgtaatta

SEQ ID NO: 732678 - DNA, 33 bp, Homo sapien
gttctgtttaatatagtcaccatcttgtaatta

SEQ ID NO: 732679 - DNA, 33 bp, Homo sapien
actgggtgacctttacaagtatatatctgcatc

SEQ ID NO: 732680 - DNA, 33 bp, Homo sapien
actgggtgacctttaccagtatatatctgcatc

SEQ ID NO: 732681 - DNA, 33 bp, Homo sapien
aagatgttggggaaagaaagtcgcgtatataga

SEQ ID NO: 732682 - DNA, 33 bp, Homo sapien
aagatgttggggaaagcaagtcgcgtatataga

SEQ ID NO: 732683 - DNA, 33 bp, Homo sapien
aatgttttgaccaatacaataatacagaactga

SEQ ID NO: 732684 - DNA, 33 bp, Homo sapien
aatgttttgaccaatagaataatacagaactga

SEQ ID NO: 732685 - DNA, 33 bp, Homo sapien
ccaccaagtgatctccaatgatgtcagtaaagc

SEQ ID NO: 732686 - DNA, 33 bp, Homo sapien
ccaccaagtgatctcctatgatgtcagtaaagc

SEQ ID NO: 732687 - DNA, 33 bp, Homo sapien
aaattcctgatccataaaattgtgagatataat

SEQ ID NO: 732688 - DNA, 33 bp, Homo sapien
aaattcctgatccatagaattgtgagatataat

SEQ ID NO: 732689 - DNA, 33 bp, Homo sapien
ttctattattttcctacgatctgtagaatgacc

SEQ ID NO: 732690 - DNA, 33 bp, Homo sapien
ttctattattttcctatgatctgtagaatgacc

SEQ ID NO: 732691 - DNA, 33 bp, Homo sapien
gcagaaaggcactctgaatcagaaatgaagttg

SEQ ID NO: 732692 - DNA, 33 bp, Homo sapien
gcagaaaggcactctggatcagaaatgaagttg

SEQ ID NO: 732693 - DNA, 33 bp, Homo sapien
aggtgatttttaccaaattctgagctttgcaat

SEQ ID NO: 732694 - DNA, 33 bp, Homo sapien
aggtgatttttaccaagttctgagctttgcaat

SEQ ID NO: 732695 - DNA, 33 bp, Homo sapien
aattaaagttactgtacgaaaatgaaatatcta

SEQ ID NO: 732696 - DNA, 33 bp, Homo sapien
aattaaagttactgtaggaaaatgaaatatcta

SEQ ID NO: 732697 - DNA, 33 bp, Homo sapien
ttcattctcaaaccacaacttttatttctctaa

SEQ ID NO: 732698 - DNA, 33 bp, Homo sapien
ttcattctcaaaccactacttttatttctctaa

SEQ ID NO: 732699 - DNA, 33 bp, Homo sapien
ccattcatttctccagaacaatgtttacccatg

SEQ ID NO: 732700 - DNA, 33 bp, Homo sapien
ccattcatttctccagcacaatgtttacccatg

SEQ ID NO: 732701 - DNA, 33 bp, Homo sapien
tctgggaaattacagaaccattcatttctccag

SEQ ID NO: 732702 - DNA, 33 bp, Homo sapien
tctgggaaattacagagccattcatttctccag

SEQ ID NO: 732703 - DNA, 33 bp, Homo sapien
ccaaatgtcaagaaataagtgcttacaggccaa

SEQ ID NO: 732704 - DNA, 33 bp, Homo sapien
ccaaatgtcaagaaatcagtgcttacaggccaa

SEQ ID NO: 732705 - DNA, 33 bp, Homo sapien
ttaaaacgagacattacagggcacatagggact

SEQ ID NO: 732706 - DNA, 33 bp, Homo sapien
ttaaaacgagacattagagggcacatagggact

SEQ ID NO: 732707 - DNA, 33 bp, Homo sapien
tattttctgtgttatgaagaattttccaagttg

SEQ ID NO: 732708 - DNA, 33 bp, Homo sapien
tattttctgtgttatggagaattttccaagttg

SEQ ID NO: 732709 - DNA, 33 bp, Homo sapien
caggttacacctaaaaaagagacttcaagccag

SEQ ID NO: 732710 - DNA, 33 bp, Homo sapien
caggttacacctaaaacagagacttcaagccag

SEQ ID NO: 732711 - DNA, 33 bp, Homo sapien
aagaggtgacagacaacgcagatatctgggcac

SEQ ID NO: 732712 - DNA, 33 bp, Homo sapien
aagaggtgacagacaatgcagatatctgggcac

SEQ ID NO: 732713 - DNA, 33 bp, Homo sapien
ttggctgctcaccactcgaaaaacaaactcaag

SEQ ID NO: 732714 - DNA, 33 bp, Homo sapien
ttggctgctcaccacttgaaaaacaaactcaag

SEQ ID NO: 732715 - DNA, 33 bp, Homo sapien
catagagaaaacactgaaaaagaatatttagac

SEQ ID NO: 732716 - DNA, 33 bp, Homo sapien
catagagaaaacactggaaaagaatatttagac

SEQ ID NO: 732717 - DNA, 33 bp, Homo sapien
ctaaagacccctttgacgctatgctaatcttct

SEQ ID NO: 732718 - DNA, 33 bp, Homo sapien
ctaaagacccctttgatgctatgctaatcttct

SEQ ID NO: 732719 - DNA, 33 bp, Homo sapien
ctgatgtagaggcaacaatttatccatatacta

SEQ ID NO: 732720 - DNA, 33 bp, Homo sapien
ctgatgtagaggcaacgatttatccatatacta

SEQ ID NO: 732721 - DNA, 33 bp, Homo sapien
caataaacaattgtgaaaagacattgatcttct

SEQ ID NO: 732722 - DNA, 33 bp, Homo sapien
caataaacaattgtgagaagacattgatcttct

SEQ ID NO: 732723 - DNA, 33 bp, Homo sapien
gagatgcaagtcacaggaggctatgtggcttgc

SEQ ID NO: 732724 - DNA, 33 bp, Homo sapien
gagatgcaagtcacagtaggctatgtggcttgc

SEQ ID NO: 732725 - DNA, 33 bp, Homo sapien
aaagatgttcacatgacagatttacatgacaac

SEQ ID NO: 732726 - DNA, 33 bp, Homo sapien
aaagatgttcacatgatagatttacatgacaac

SEQ ID NO: 732727 - DNA, 33 bp, Homo sapien
gatgtctgagatattaaagatccctgggataca

SEQ ID NO: 732728 - DNA, 33 bp, Homo sapien
gatgtctgagatattagagatccctgggataca

SEQ ID NO: 732729 - DNA, 33 bp, Homo sapien
aaaacgcagttagctacgtggatcttgataaag

SEQ ID NO: 732730 - DNA, 33 bp, Homo sapien
aaaacgcagttagctatgtggatcttgataaag

SEQ ID NO: 732731 - DNA, 33 bp, Homo sapien
ctctgtagcccaaggacagaaaattgcaactgc

SEQ ID NO: 732732 - DNA, 33 bp, Homo sapien
ctctgtagcccaaggatagaaaattgcaactgc

SEQ ID NO: 732733 - DNA, 33 bp, Homo sapien
gtaaattaagacaacacagacgtgagaatgctt

SEQ ID NO: 732734 - DNA, 33 bp, Homo sapien
gtaaattaagacaacatagacgtgagaatgctt

SEQ ID NO: 732735 - DNA, 33 bp, Homo sapien
acatataacaaaccataagcagaagtatgctat

SEQ ID NO: 732736 - DNA, 33 bp, Homo sapien
acatataacaaaccatgagcagaagtatgctat

SEQ ID NO: 732737 - DNA, 33 bp, Homo sapien
tcacctagtcactatgaaacattagaacttatt

SEQ ID NO: 732738 - DNA, 33 bp, Homo sapien
tcacctagtcactatggaacattagaacttatt

SEQ ID NO: 732739 - DNA, 33 bp, Homo sapien
aactacaaagttagtaaggcataggaaaatata

SEQ ID NO: 732740 - DNA, 33 bp, Homo sapien
aactacaaagttagtatggcataggaaaatata

SEQ ID NO: 732741 - DNA, 33 bp, Homo sapien
aggaaatcaaagcaacaagaagttaaatggcct

SEQ ID NO: 732742 - DNA, 33 bp, Homo sapien
aggaaatcaaagcaacgagaagttaaatggcct

SEQ ID NO: 732743 - DNA, 33 bp, Homo sapien
tctggctgctgctcctcagatgtaagtgataca

SEQ ID NO: 732744 - DNA, 33 bp, Homo sapien
tctggctgctgctccttagatgtaagtgataca

SEQ ID NO: 732745 - DNA, 33 bp, Homo sapien
aggcagtgcttgtcctcaaattgcccagggtct

SEQ ID NO: 732746 - DNA, 33 bp, Homo sapien
aggcagtgcttgtccttaaattgcccagggtct

SEQ ID NO: 732747 - DNA, 33 bp, Homo sapien
cttctctcaggaaggccacatttgcagaagcca

SEQ ID NO: 732748 - DNA, 33 bp, Homo sapien
cttctctcaggaaggcgacatttgcagaagcca

SEQ ID NO: 732749 - DNA, 33 bp, Homo sapien
ttcatgtatcctcttacgtaattcaactgccaa

SEQ ID NO: 732750 - DNA, 33 bp, Homo sapien
ttcatgtatcctcttatgtaattcaactgccaa

SEQ ID NO: 732751 - DNA, 33 bp, Homo sapien
gattcagtgtgtatgaatacgtaccagtttgta

SEQ ID NO: 732752 - DNA, 33 bp, Homo sapien
gattcagtgtgtatgagtacgtaccagtttgta

SEQ ID NO: 732753 - DNA, 33 bp, Homo sapien
accgcacctaactggcagcagataagtggacct

SEQ ID NO: 732754 - DNA, 33 bp, Homo sapien
accgcacctaactggccgcagataagtggacct

SEQ ID NO: 732755 - DNA, 33 bp, Homo sapien
attaataaaaccagcaagaagatgggggtttgg

SEQ ID NO: 732756 - DNA, 33 bp, Homo sapien
attaataaaaccagcaggaagatgggggtttgg

SEQ ID NO: 732757 - DNA, 33 bp, Homo sapien
agcccagtgccagacaaatggtaagtcacttag

SEQ ID NO: 732758 - DNA, 33 bp, Homo sapien
agcccagtgccagacacatggtaagtcacttag

SEQ ID NO: 732759 - DNA, 33 bp, Homo sapien
tgtcctgattagttgacattggtatagattatc

SEQ ID NO: 732760 - DNA, 33 bp, Homo sapien
tgtcctgattagttgatattggtatagattatc

SEQ ID NO: 732761 - DNA, 33 bp, Homo sapien
ctctataaacaggagaagaattgctagctcata

SEQ ID NO: 732762 - DNA, 33 bp, Homo sapien
ctctataaacaggagaggaattgctagctcata

SEQ ID NO: 732763 - DNA, 33 bp, Homo sapien
agtcaaaattctaaacaaggcagtctaaatcta

SEQ ID NO: 732764 - DNA, 33 bp, Homo sapien
agtcaaaattctaaaccaggcagtctaaatcta

SEQ ID NO: 732765 - DNA, 33 bp, Homo sapien
tcttaccactgtcaaacaatggaaaaggcaaac

SEQ ID NO: 732766 - DNA, 33 bp, Homo sapien
tcttaccactgtcaaataatggaaaaggcaaac

SEQ ID NO: 732767 - DNA, 33 bp, Homo sapien
ttttagcgcttatcacagtagacatttacattt

SEQ ID NO: 732768 - DNA, 33 bp, Homo sapien
ttttagcgcttatcactgtagacatttacattt

SEQ ID NO: 732769 - DNA, 33 bp, Homo sapien
gggacccaaagcattaaagtatcaggaggaggc

SEQ ID NO: 732770 - DNA, 33 bp, Homo sapien
gggacccaaagcattagagtatcaggaggaggc

SEQ ID NO: 732771 - DNA, 33 bp, Homo sapien
tctagcatctacgttaccattcattcattcgtt

SEQ ID NO: 732772 - DNA, 33 bp, Homo sapien
tctagcatctacgttatcattcattcattcgtt

SEQ ID NO: 732773 - DNA, 33 bp, Homo sapien
atataagcatttaaataaagtgcagataggaac

SEQ ID NO: 732774 - DNA, 33 bp, Homo sapien
atataagcatttaaatgaagtgcagataggaac

SEQ ID NO: 732775 - DNA, 33 bp, Homo sapien
tggtgtccccaattccaagcaactctgaatatc

SEQ ID NO: 732776 - DNA, 33 bp, Homo sapien
tggtgtccccaattcccagcaactctgaatatc

SEQ ID NO: 732777 - DNA, 33 bp, Homo sapien
tgagtgatgtttcagactaacaaattttacagc

SEQ ID NO: 732778 - DNA, 33 bp, Homo sapien
tgagtgatgtttcagagtaacaaattttacagc

SEQ ID NO: 732779 - DNA, 33 bp, Homo sapien
ttaactttatgtagcccaaatggattttggtct

SEQ ID NO: 732780 - DNA, 33 bp, Homo sapien
ttaactttatgtagcctaaatggattttggtct

SEQ ID NO: 732781 - DNA, 33 bp, Homo sapien
gaccatgagccaagaaatgccaccggaactgga

SEQ ID NO: 732782 - DNA, 33 bp, Homo sapien
gaccatgagccaagaactgccaccggaactgga

SEQ ID NO: 732783 - DNA, 33 bp, Homo sapien
ttaggtctacttagaacgtgcaagagactcctt

SEQ ID NO: 732784 - DNA, 33 bp, Homo sapien
ttaggtctacttagaatgtgcaagagactcctt

SEQ ID NO: 732785 - DNA, 33 bp, Homo sapien
tgacttgggtaaataaaggattaggggaggagc

SEQ ID NO: 732786 - DNA, 33 bp, Homo sapien
tgacttgggtaaataagggattaggggaggagc

SEQ ID NO: 732787 - DNA, 33 bp, Homo sapien
tatgtatgctgtgagacaaggtactcatgagag

SEQ ID NO: 732788 - DNA, 33 bp, Homo sapien
tatgtatgctgtgagataaggtactcatgagag

SEQ ID NO: 732789 - DNA, 33 bp, Homo sapien
cactgagtaactggaaaatttgccaaatgaaaa

SEQ ID NO: 732790 - DNA, 33 bp, Homo sapien
cactgagtaactggaatatttgccaaatgaaaa

SEQ ID NO: 732791 - DNA, 33 bp, Homo sapien
ctctggacattgagcacctcttaatatatgaaa

SEQ ID NO: 732792 - DNA, 33 bp, Homo sapien
ctctggacattgagcatctcttaatatatgaaa

SEQ ID NO: 732793 - DNA, 33 bp, Homo sapien
gaccactcaaaaatataaggaatggaaagcaag

SEQ ID NO: 732794 - DNA, 33 bp, Homo sapien
gaccactcaaaaatatcaggaatggaaagcaag

SEQ ID NO: 732795 - DNA, 33 bp, Homo sapien
ctcccttgtttgaaacaaaaaggtggagaggaa

SEQ ID NO: 732796 - DNA, 33 bp, Homo sapien
ctcccttgtttgaaactaaaaggtggagaggaa

SEQ ID NO: 732797 - DNA, 33 bp, Homo sapien
acctaaacacacacagaacctgactcacagagc

SEQ ID NO: 732798 - DNA, 33 bp, Homo sapien
acctaaacacacacaggacctgactcacagagc

SEQ ID NO: 732799 - DNA, 33 bp, Homo sapien
aagaaggtgccgtcctaaatctccaaccagtgg

SEQ ID NO: 732800 - DNA, 33 bp, Homo sapien
aagaaggtgccgtcctcaatctccaaccagtgg

SEQ ID NO: 732801 - DNA, 33 bp, Homo sapien
cacatgcacttgaggaacagccaggattggaca

SEQ ID NO: 732802 - DNA, 33 bp, Homo sapien
cacatgcacttgaggagcagccaggattggaca

SEQ ID NO: 732803 - DNA, 33 bp, Homo sapien
taaaggtggtgaaaaaagagcagctagtattct

SEQ ID NO: 732804 - DNA, 33 bp, Homo sapien
taaaggtggtgaaaaaggagcagctagtattct

SEQ ID NO: 732805 - DNA, 33 bp, Homo sapien
actaaggtcattgataacgtctctgaacaatca

SEQ ID NO: 732806 - DNA, 33 bp, Homo sapien
actaaggtcattgatagcgtctctgaacaatca

SEQ ID NO: 732807 - DNA, 33 bp, Homo sapien
ggaaatcagctttcaaattcccagctgccaagg

SEQ ID NO: 732808 - DNA, 33 bp, Homo sapien
ggaaatcagctttcaacttcccagctgccaagg

SEQ ID NO: 732809 - DNA, 33 bp, Homo sapien
aaatcatttaagtgaacggttcttagcctttcg

SEQ ID NO: 732810 - DNA, 33 bp, Homo sapien
aaatcatttaagtgaatggttcttagcctttcg

SEQ ID NO: 732811 - DNA, 33 bp, Homo sapien
aacataaaccaagtggaaagtagtttatctcct

SEQ ID NO: 732812 - DNA, 33 bp, Homo sapien
aacataaaccaagtgggaagtagtttatctcct

SEQ ID NO: 732813 - DNA, 33 bp, Homo sapien
taggaaggagccagtccatcctagctattagta

SEQ ID NO: 732814 - DNA, 33 bp, Homo sapien
taggaaggagccagtctatcctagctattagta

SEQ ID NO: 732815 - DNA, 33 bp, Homo sapien
tatagataattttatacggttgcagaaatggat

SEQ ID NO: 732816 - DNA, 33 bp, Homo sapien
tatagataattttatatggttgcagaaatggat

SEQ ID NO: 732817 - DNA, 33 bp, Homo sapien
agaacaataggcataaatagaatagagcaacac

SEQ ID NO: 732818 - DNA, 33 bp, Homo sapien
agaacaataggcataagtagaatagagcaacac

SEQ ID NO: 732819 - DNA, 33 bp, Homo sapien
gctgtcacatggtgaaggaactttttatgaaat

SEQ ID NO: 732820 - DNA, 33 bp, Homo sapien
gctgtcacatggtgaatgaactttttatgaaat

SEQ ID NO: 732821 - DNA, 33 bp, Homo sapien
tgtcaccctgttacaaaatagcacaacactaga

SEQ ID NO: 732822 - DNA, 33 bp, Homo sapien
tgtcaccctgttacaagatagcacaacactaga

SEQ ID NO: 732823 - DNA, 33 bp, Homo sapien
tgttcctccctgctgcaaacattagatacgaga

SEQ ID NO: 732824 - DNA, 33 bp, Homo sapien
tgttcctccctgctgcgaacattagatacgaga

SEQ ID NO: 732825 - DNA, 33 bp, Homo sapien
atacagggaaacaatacgtgtgcctatgagcca

SEQ ID NO: 732826 - DNA, 33 bp, Homo sapien
atacagggaaacaatatgtgtgcctatgagcca

SEQ ID NO: 732827 - DNA, 33 bp, Homo sapien
ggcacgttaagagtcacggaaatgattgtctgg

SEQ ID NO: 732828 - DNA, 33 bp, Homo sapien
ggcacgttaagagtcatggaaatgattgtctgg

SEQ ID NO: 732829 - DNA, 33 bp, Homo sapien
gccatatcttgattccaccattcccaccctcca

SEQ ID NO: 732830 - DNA, 33 bp, Homo sapien
gccatatcttgattccgccattcccaccctcca

SEQ ID NO: 732831 - DNA, 33 bp, Homo sapien
ggaagcaaacccaacaatctgcatcctgagctt

SEQ ID NO: 732832 - DNA, 33 bp, Homo sapien
ggaagcaaacccaacagtctgcatcctgagctt

SEQ ID NO: 732833 - DNA, 33 bp, Homo sapien
tttttaatgtttctgacatttcatcttttaaaa

SEQ ID NO: 732834 - DNA, 33 bp, Homo sapien
tttttaatgtttctgatatttcatcttttaaaa

SEQ ID NO: 732835 - DNA, 33 bp, Homo sapien
acagaatggtcactatgaactaaacactctgag

SEQ ID NO: 732836 - DNA, 33 bp, Homo sapien
acagaatggtcactattaactaaacactctgag

SEQ ID NO: 732837 - DNA, 33 bp, Homo sapien
cagttataactgatgaacctagcaatgatgtac

SEQ ID NO: 732838 - DNA, 33 bp, Homo sapien
cagttataactgatgagcctagcaatgatgtac

SEQ ID NO: 732839 - DNA, 33 bp, Homo sapien
tatacagctaagagcacaacactaggacaacag

SEQ ID NO: 732840 - DNA, 33 bp, Homo sapien
tatacagctaagagcagaacactaggacaacag

SEQ ID NO: 732841 - DNA, 33 bp, Homo sapien
ttatgttctgatgagaaagtgcagactgaaata

SEQ ID NO: 732842 - DNA, 33 bp, Homo sapien
ttatgttctgatgagagagtgcagactgaaata

SEQ ID NO: 732843 - DNA, 33 bp, Homo sapien
cctatctcaaggtctcaagttggcccctggtga

SEQ ID NO: 732844 - DNA, 33 bp, Homo sapien
cctatctcaaggtctccagttggcccctggtga

SEQ ID NO: 732845 - DNA, 33 bp, Homo sapien
gcataagtaaggaatgcagagatgaagcatgaa

SEQ ID NO: 732846 - DNA, 33 bp, Homo sapien
gcataagtaaggaatgtagagatgaagcatgaa

SEQ ID NO: 732847 - DNA, 33 bp, Homo sapien
catagtgctacccaacagtagaaggatgaaggg

SEQ ID NO: 732848 - DNA, 33 bp, Homo sapien
catagtgctacccaacggtagaaggatgaaggg

SEQ ID NO: 732849 - DNA, 33 bp, Homo sapien
tctcttatttccaagacgaataacattttaact

SEQ ID NO: 732850 - DNA, 33 bp, Homo sapien
tctcttatttccaagatgaataacattttaact

SEQ ID NO: 732851 - DNA, 33 bp, Homo sapien
ccagatttatcttcctaaaatatagcactggtt

SEQ ID NO: 732852 - DNA, 33 bp, Homo sapien
ccagatttatcttcctgaaatatagcactggtt

SEQ ID NO: 732853 - DNA, 33 bp, Homo sapien
tgtggtatgaatgctaacaatgacgactagaaa

SEQ ID NO: 732854 - DNA, 33 bp, Homo sapien
tgtggtatgaatgctagcaatgacgactagaaa

SEQ ID NO: 732855 - DNA, 33 bp, Homo sapien
tatgtattagagtgcacgaagaaaacgtttcag

SEQ ID NO: 732856 - DNA, 33 bp, Homo sapien
tatgtattagagtgcatgaagaaaacgtttcag

SEQ ID NO: 732857 - DNA, 33 bp, Homo sapien
ttttgcacgcattgcacattgatatttaaacta

SEQ ID NO: 732858 - DNA, 33 bp, Homo sapien
ttttgcacgcattgcatattgatatttaaacta

SEQ ID NO: 732859 - DNA, 33 bp, Homo sapien
caagttaaatctggtagagggtaatagctaaag

SEQ ID NO: 732860 - DNA, 33 bp, Homo sapien
caagttaaatctggtatagggtaatagctaaag

SEQ ID NO: 732861 - DNA, 33 bp, Homo sapien
aagcgtacagagttaaatgtgctatcatttgtt

SEQ ID NO: 732862 - DNA, 33 bp, Homo sapien
aagcgtacagagttaagtgtgctatcatttgtt

SEQ ID NO: 732863 - DNA, 33 bp, Homo sapien
ctgggaataactgaaactggtggctcgattttc

SEQ ID NO: 732864 - DNA, 33 bp, Homo sapien
ctgggaataactgaaagtggtggctcgattttc

SEQ ID NO: 732865 - DNA, 33 bp, Homo sapien
ccaattgatggacatacggattattgccagttt

SEQ ID NO: 732866 - DNA, 33 bp, Homo sapien
ccaattgatggacatatggattattgccagttt

SEQ ID NO: 732867 - DNA, 33 bp, Homo sapien
tcagcttcaaaaattagaagtcactcacaatga

SEQ ID NO: 732868 - DNA, 33 bp, Homo sapien
tcagcttcaaaaattataagtcactcacaatga

SEQ ID NO: 732869 - DNA, 33 bp, Homo sapien
ggtttatttttatataccttgtccttagccttc

SEQ ID NO: 732870 - DNA, 33 bp, Homo sapien
ggtttatttttatatatcttgtccttagccttc

SEQ ID NO: 732871 - DNA, 33 bp, Homo sapien
aatggctttgcaggaactaggaccctggactcc

SEQ ID NO: 732872 - DNA, 33 bp, Homo sapien
aatggctttgcaggaattaggaccctggactcc

SEQ ID NO: 732873 - DNA, 33 bp, Homo sapien
tcactaccaagagtcaagttagcttccaaaaat

SEQ ID NO: 732874 - DNA, 33 bp, Homo sapien
tcactaccaagagtcaggttagcttccaaaaat

SEQ ID NO: 732875 - DNA, 33 bp, Homo sapien
cagctaggcttctacacatggctgtttcattat

SEQ ID NO: 732876 - DNA, 33 bp, Homo sapien
cagctaggcttctacatatggctgtttcattat

SEQ ID NO: 732877 - DNA, 33 bp, Homo sapien
ctgagccattgttttcccaataatgaagtcagc

SEQ ID NO: 732878 - DNA, 33 bp, Homo sapien
ctgagccattgttttctcaataatgaagtcagc

SEQ ID NO: 732879 - DNA, 33 bp, Homo sapien
tggactgatggcatcaagaatgagaaagtaaga

SEQ ID NO: 732880 - DNA, 33 bp, Homo sapien
tggactgatggcatcaggaatgagaaagtaaga

SEQ ID NO: 732881 - DNA, 33 bp, Homo sapien
gggatgtactgggtaacgctgaagaacaaagaa

SEQ ID NO: 732882 - DNA, 33 bp, Homo sapien
gggatgtactgggtaatgctgaagaacaaagaa

SEQ ID NO: 732883 - DNA, 33 bp, Homo sapien
tttactcagcccttaacgttgtgtttcctgctc

SEQ ID NO: 732884 - DNA, 33 bp, Homo sapien
tttactcagcccttaatgttgtgtttcctgctc

SEQ ID NO: 732885 - DNA, 33 bp, Homo sapien
caggactggactctggaccagactgaagactga

SEQ ID NO: 732886 - DNA, 33 bp, Homo sapien
caggactggactctgggccagactgaagactga

SEQ ID NO: 732887 - DNA, 33 bp, Homo sapien
cagtcacagagatgtaactattgtcaccacctc

SEQ ID NO: 732888 - DNA, 33 bp, Homo sapien
cagtcacagagatgtacctattgtcaccacctc

SEQ ID NO: 732889 - DNA, 33 bp, Homo sapien
acaggaaaagcaaaggcaaagagagtttcaggc

SEQ ID NO: 732890 - DNA, 33 bp, Homo sapien
acaggaaaagcaaagggaaagagagtttcaggc

SEQ ID NO: 732891 - DNA, 33 bp, Homo sapien
attcactgaaatattacacaggttttttcctag

SEQ ID NO: 732892 - DNA, 33 bp, Homo sapien
attcactgaaatattatacaggttttttcctag

SEQ ID NO: 732893 - DNA, 33 bp, Homo sapien
tgttacctgagctgccaatgggttggtcctaag

SEQ ID NO: 732894 - DNA, 33 bp, Homo sapien
tgttacctgagctgccgatgggttggtcctaag

SEQ ID NO: 732895 - DNA, 33 bp, Homo sapien
atgattaagcttagtgaagtcaaaagccgaaat

SEQ ID NO: 732896 - DNA, 33 bp, Homo sapien
atgattaagcttagtgtagtcaaaagccgaaat

SEQ ID NO: 732897 - DNA, 33 bp, Homo sapien
tttgactgccatgttaggtcgtgttatttcgtt

SEQ ID NO: 732898 - DNA, 33 bp, Homo sapien
tttgactgccatgttatgtcgtgttatttcgtt

SEQ ID NO: 732899 - DNA, 33 bp, Homo sapien
gtaagaaagccttctcaaaaaatttcaggaaca

SEQ ID NO: 732900 - DNA, 33 bp, Homo sapien
gtaagaaagccttctcgaaaaatttcaggaaca

SEQ ID NO: 732901 - DNA, 33 bp, Homo sapien
gtttagtagattggtacggtgaatagactagac

SEQ ID NO: 732902 - DNA, 33 bp, Homo sapien
gtttagtagattggtagggtgaatagactagac

SEQ ID NO: 732903 - DNA, 33 bp, Homo sapien
cactttattataaacaagtgagctacaaatgtc

SEQ ID NO: 732904 - DNA, 33 bp, Homo sapien
cactttattataaacaggtgagctacaaatgtc

SEQ ID NO: 732905 - DNA, 33 bp, Homo sapien
attatacaccattcaaagatgttgtgagtgtta

SEQ ID NO: 732906 - DNA, 33 bp, Homo sapien
attatacaccattcaaggatgttgtgagtgtta

SEQ ID NO: 732907 - DNA, 33 bp, Homo sapien
tccatggctgcataacactatttttgtatcatt

SEQ ID NO: 732908 - DNA, 33 bp, Homo sapien
tccatggctgcataacgctatttttgtatcatt

SEQ ID NO: 732909 - DNA, 33 bp, Homo sapien
tatcttcttcttgtcacgtattaatagttgcaa

SEQ ID NO: 732910 - DNA, 33 bp, Homo sapien
tatcttcttcttgtcatgtattaatagttgcaa

SEQ ID NO: 732911 - DNA, 33 bp, Homo sapien
agtagctttttagacacgtatatagctttgtgg

SEQ ID NO: 732912 - DNA, 33 bp, Homo sapien
agtagctttttagacatgtatatagctttgtgg

SEQ ID NO: 732913 - DNA, 33 bp, Homo sapien
gccaccacacccagtcacaacaaaatctttaaa

SEQ ID NO: 732914 - DNA, 33 bp, Homo sapien
gccaccacacccagtcgcaacaaaatctttaaa

SEQ ID NO: 732915 - DNA, 33 bp, Homo sapien
tgtgtaataagggttacggtggataatagtcaa

SEQ ID NO: 732916 - DNA, 33 bp, Homo sapien
tgtgtaataagggttatggtggataatagtcaa

SEQ ID NO: 732917 - DNA, 33 bp, Homo sapien
agataactcagttacaagttgtttgggaaaagt

SEQ ID NO: 732918 - DNA, 33 bp, Homo sapien
agataactcagttacaggttgtttgggaaaagt

SEQ ID NO: 732919 - DNA, 33 bp, Homo sapien
acaaagagaattttacacaaagactcagaagga

SEQ ID NO: 732920 - DNA, 33 bp, Homo sapien
acaaagagaattttacgcaaagactcagaagga

SEQ ID NO: 732921 - DNA, 33 bp, Homo sapien
atctagtggccaggcacatctgtcctgtcttat

SEQ ID NO: 732922 - DNA, 33 bp, Homo sapien
atctagtggccaggcatatctgtcctgtcttat

SEQ ID NO: 732923 - DNA, 33 bp, Homo sapien
ttatgacccagactgaaacaggcatcaagcttt

SEQ ID NO: 732924 - DNA, 33 bp, Homo sapien
ttatgacccagactgagacaggcatcaagcttt

SEQ ID NO: 732925 - DNA, 33 bp, Homo sapien
aggcactgatgcaacacagtggtagaggagaag

SEQ ID NO: 732926 - DNA, 33 bp, Homo sapien
aggcactgatgcaacatagtggtagaggagaag

SEQ ID NO: 732927 - DNA, 33 bp, Homo sapien
gaggttaactggataaacctaatggctagagtc

SEQ ID NO: 732928 - DNA, 33 bp, Homo sapien
gaggttaactggataaccctaatggctagagtc

SEQ ID NO: 732929 - DNA, 33 bp, Homo sapien
tgaagggcagtttctcccatggtctagacgatc

SEQ ID NO: 732930 - DNA, 33 bp, Homo sapien
tgaagggcagtttctcgcatggtctagacgatc

SEQ ID NO: 732931 - DNA, 33 bp, Homo sapien
gcaggtctcgtttggcaatcagacttctcacat

SEQ ID NO: 732932 - DNA, 33 bp, Homo sapien
gcaggtctcgtttggcgatcagacttctcacat

SEQ ID NO: 732933 - DNA, 33 bp, Homo sapien
acttctgagggttagaccataaaaatagcttgc

SEQ ID NO: 732934 - DNA, 33 bp, Homo sapien
acttctgagggttagatcataaaaatagcttgc

SEQ ID NO: 732935 - DNA, 33 bp, Homo sapien
tctctgatagggtcaacgaaacttacaatttta

SEQ ID NO: 732936 - DNA, 33 bp, Homo sapien
tctctgatagggtcaatgaaacttacaatttta

SEQ ID NO: 732937 - DNA, 33 bp, Homo sapien
ctcatggaagagagctcactactgagtacaaag

SEQ ID NO: 732938 - DNA, 33 bp, Homo sapien
ctcatggaagagagcttactactgagtacaaag

SEQ ID NO: 732939 - DNA, 33 bp, Homo sapien
aataaataaaaagtataaaaagcaactgtagat

SEQ ID NO: 732940 - DNA, 33 bp, Homo sapien
aataaataaaaagtattaaaagcaactgtagat

SEQ ID NO: 732941 - DNA, 33 bp, Homo sapien
catgagagataaagacggctagaaaccgttctt

SEQ ID NO: 732942 - DNA, 33 bp, Homo sapien
catgagagataaagactgctagaaaccgttctt

SEQ ID NO: 732943 - DNA, 33 bp, Homo sapien
tatcatctttgttgcccgagcaccattatgtac

SEQ ID NO: 732944 - DNA, 33 bp, Homo sapien
tatcatctttgttgccggagcaccattatgtac

SEQ ID NO: 732945 - DNA, 33 bp, Homo sapien
agagagtgacaactacgatagccaatgtttttg

SEQ ID NO: 732946 - DNA, 33 bp, Homo sapien
agagagtgacaactactatagccaatgtttttg

SEQ ID NO: 732947 - DNA, 33 bp, Homo sapien
tgttaactggaaatgacctatgtatattcagtt

SEQ ID NO: 732948 - DNA, 33 bp, Homo sapien
tgttaactggaaatgatctatgtatattcagtt

SEQ ID NO: 732949 - DNA, 33 bp, Homo sapien
ttctgtaggctcaccaatgatttacagcctgtt

SEQ ID NO: 732950 - DNA, 33 bp, Homo sapien
ttctgtaggctcaccagtgatttacagcctgtt

SEQ ID NO: 732951 - DNA, 33 bp, Homo sapien
tttttcttttcatggcacctcatttcaaagatt

SEQ ID NO: 732952 - DNA, 33 bp, Homo sapien
tttttcttttcatggctcctcatttcaaagatt

SEQ ID NO: 732953 - DNA, 33 bp, Homo sapien
ggagctgaggaggaataataaagccaccagctg

SEQ ID NO: 732954 - DNA, 33 bp, Homo sapien
ggagctgaggaggaatgataaagccaccagctg

SEQ ID NO: 732955 - DNA, 33 bp, Homo sapien
tttctcacaattctaaaagcttgaagttcaaga

SEQ ID NO: 732956 - DNA, 33 bp, Homo sapien
tttctcacaattctaagagcttgaagttcaaga

SEQ ID NO: 732957 - DNA, 33 bp, Homo sapien
cacagagagtagaaataatgtctaacctgtctt

SEQ ID NO: 732958 - DNA, 33 bp, Homo sapien
cacagagagtagaaatgatgtctaacctgtctt

SEQ ID NO: 732959 - DNA, 33 bp, Homo sapien
tttgtcccaaagcagacaactaataagtggcat

SEQ ID NO: 732960 - DNA, 33 bp, Homo sapien
tttgtcccaaagcagagaactaataagtggcat

SEQ ID NO: 732961 - DNA, 33 bp, Homo sapien
tgtgtaactaaaaggacagcaagtgctgatagc

SEQ ID NO: 732962 - DNA, 33 bp, Homo sapien
tgtgtaactaaaaggatagcaagtgctgatagc

SEQ ID NO: 732963 - DNA, 33 bp, Homo sapien
aaccaaataaggctcacgaactttctagccaat

SEQ ID NO: 732964 - DNA, 33 bp, Homo sapien
aaccaaataaggctcatgaactttctagccaat

SEQ ID NO: 732965 - DNA, 33 bp, Homo sapien
gttatctcctgctaagactgccattgcagaatc

SEQ ID NO: 732966 - DNA, 33 bp, Homo sapien
gttatctcctgctaaggctgccattgcagaatc

SEQ ID NO: 732967 - DNA, 33 bp, Homo sapien
gtgcctggtaatataacaggagctcaacaaatc

SEQ ID NO: 732968 - DNA, 33 bp, Homo sapien
gtgcctggtaatataataggagctcaacaaatc

SEQ ID NO: 732969 - DNA, 33 bp, Homo sapien
tatcaatgaaatgagccgaacagttaagatgat

SEQ ID NO: 732970 - DNA, 33 bp, Homo sapien
tatcaatgaaatgagctgaacagttaagatgat

SEQ ID NO: 732971 - DNA, 33 bp, Homo sapien
ggcttaacctagtccacgtcattccagtctctc

SEQ ID NO: 732972 - DNA, 33 bp, Homo sapien
ggcttaacctagtccatgtcattccagtctctc

SEQ ID NO: 732973 - DNA, 33 bp, Homo sapien
ttttttactcctttgcactatttccttttatct

SEQ ID NO: 732974 - DNA, 33 bp, Homo sapien
ttttttactcctttgcgctatttccttttatct

SEQ ID NO: 732975 - DNA, 33 bp, Homo sapien
aattgggtttggaaagacaaaattagagaggaa

SEQ ID NO: 732976 - DNA, 33 bp, Homo sapien
aattgggtttggaaaggcaaaattagagaggaa

SEQ ID NO: 732977 - DNA, 33 bp, Homo sapien
gttggagactcttgcacaaagctgggaccaaca

SEQ ID NO: 732978 - DNA, 33 bp, Homo sapien
gttggagactcttgcataaagctgggaccaaca

SEQ ID NO: 732979 - DNA, 33 bp, Homo sapien
ggttaactcatatttaaaaggaaaacatgtttc

SEQ ID NO: 732980 - DNA, 33 bp, Homo sapien
ggttaactcatatttagaaggaaaacatgtttc

SEQ ID NO: 732981 - DNA, 33 bp, Homo sapien
accttatttggaagtacggtctctgcagatgta

SEQ ID NO: 732982 - DNA, 33 bp, Homo sapien
accttatttggaagtatggtctctgcagatgta

SEQ ID NO: 732983 - DNA, 33 bp, Homo sapien
agctaagatgtagtcacgctgggttagggtagg

SEQ ID NO: 732984 - DNA, 33 bp, Homo sapien
agctaagatgtagtcatgctgggttagggtagg

SEQ ID NO: 732985 - DNA, 33 bp, Homo sapien
gattataagtggaatccaggcaactcacttgag

SEQ ID NO: 732986 - DNA, 33 bp, Homo sapien
gattataagtggaatctaggcaactcacttgag

SEQ ID NO: 732987 - DNA, 33 bp, Homo sapien
aatgaacatatatggacatagccaacagcccca

SEQ ID NO: 732988 - DNA, 33 bp, Homo sapien
aatgaacatatatggatatagccaacagcccca

SEQ ID NO: 732989 - DNA, 33 bp, Homo sapien
gttctctgtactgcccaagctgctttacctgca

SEQ ID NO: 732990 - DNA, 33 bp, Homo sapien
gttctctgtactgccccagctgctttacctgca

SEQ ID NO: 732991 - DNA, 33 bp, Homo sapien
cagcctagaatatcctcaaatccttccacagtg

SEQ ID NO: 732992 - DNA, 33 bp, Homo sapien
cagcctagaatatccttaaatccttccacagtg

SEQ ID NO: 732993 - DNA, 33 bp, Homo sapien
agcaacctgtgtaaaacactgaggagagggtat

SEQ ID NO: 732994 - DNA, 33 bp, Homo sapien
agcaacctgtgtaaaatactgaggagagggtat

SEQ ID NO: 732995 - DNA, 33 bp, Homo sapien
attagtctgttcagaaattctacttcttcctga

SEQ ID NO: 732996 - DNA, 33 bp, Homo sapien
attagtctgttcagaatttctacttcttcctga

SEQ ID NO: 732997 - DNA, 33 bp, Homo sapien
agaaccagcagttgaacgtaggatcatttaagg

SEQ ID NO: 732998 - DNA, 33 bp, Homo sapien
agaaccagcagttgaatgtaggatcatttaagg

SEQ ID NO: 732999 - DNA, 33 bp, Homo sapien
tttctgatcttatactaacatttcatactcatt

SEQ ID NO: 733000 - DNA, 33 bp, Homo sapien
tttctgatcttatacttacatttcatactcatt

SEQ ID NO: 733001 - DNA, 33 bp, Homo sapien
catggtcattctctccactgtaatctcagatca

SEQ ID NO: 733002 - DNA, 33 bp, Homo sapien
catggtcattctctccgctgtaatctcagatca

SEQ ID NO: 733003 - DNA, 33 bp, Homo sapien
ttgactaaaagctagaaattaatagatcaataa

SEQ ID NO: 733004 - DNA, 33 bp, Homo sapien
ttgactaaaagctagacattaatagatcaataa

SEQ ID NO: 733005 - DNA, 33 bp, Homo sapien
atccacaaagtcaaaggctctgtaaacatcaat

SEQ ID NO: 733006 - DNA, 33 bp, Homo sapien
atccacaaagtcaaagtctctgtaaacatcaat

SEQ ID NO: 733007 - DNA, 33 bp, Homo sapien
aggaaactgcaggtgaaggaagtcccaacaagg

SEQ ID NO: 733008 - DNA, 33 bp, Homo sapien
aggaaactgcaggtgagggaagtcccaacaagg

SEQ ID NO: 733009 - DNA, 33 bp, Homo sapien
aaagttgtttttaccacaagtcatctcaggcag

SEQ ID NO: 733010 - DNA, 33 bp, Homo sapien
aaagttgtttttaccagaagtcatctcaggcag

SEQ ID NO: 733011 - DNA, 33 bp, Homo sapien
taaacatgagctctgaaggcagtgatttcttct

SEQ ID NO: 733012 - DNA, 33 bp, Homo sapien
taaacatgagctctgagggcagtgatttcttct

SEQ ID NO: 733013 - DNA, 33 bp, Homo sapien
atgagtgagacctcccaaattcaactgagattt

SEQ ID NO: 733014 - DNA, 33 bp, Homo sapien
atgagtgagacctcccgaattcaactgagattt

SEQ ID NO: 733015 - DNA, 33 bp, Homo sapien
gggtcagattcaactaccacctcctggctaatc

SEQ ID NO: 733016 - DNA, 33 bp, Homo sapien
gggtcagattcaactagcacctcctggctaatc

SEQ ID NO: 733017 - DNA, 33 bp, Homo sapien
aaataataccatcagaaaagtgttcaaaattct

SEQ ID NO: 733018 - DNA, 33 bp, Homo sapien
aaataataccatcagagaagtgttcaaaattct

SEQ ID NO: 733019 - DNA, 33 bp, Homo sapien
tctcacaggatttaacaaattttcactactacc

SEQ ID NO: 733020 - DNA, 33 bp, Homo sapien
tctcacaggatttaaccaattttcactactacc

SEQ ID NO: 733021 - DNA, 33 bp, Homo sapien
tgcccctcctgctccaataagcctgtcagatgc

SEQ ID NO: 733022 - DNA, 33 bp, Homo sapien
tgcccctcctgctccagtaagcctgtcagatgc

SEQ ID NO: 733023 - DNA, 33 bp, Homo sapien
tacttggctgtgagtcaaagagcatataaatct

SEQ ID NO: 733024 - DNA, 33 bp, Homo sapien
tacttggctgtgagtccaagagcatataaatct

SEQ ID NO: 733025 - DNA, 33 bp, Homo sapien
cacctcaagattcaacaacattgagctgggcct

SEQ ID NO: 733026 - DNA, 33 bp, Homo sapien
cacctcaagattcaacgacattgagctgggcct

SEQ ID NO: 733027 - DNA, 33 bp, Homo sapien
tgagctgggcctctaacgtttgggagagttccc

SEQ ID NO: 733028 - DNA, 33 bp, Homo sapien
tgagctgggcctctaatgtttgggagagttccc

SEQ ID NO: 733029 - DNA, 33 bp, Homo sapien
gctaatccggttgccacgtcaggcgctgtaatg

SEQ ID NO: 733030 - DNA, 33 bp, Homo sapien
gctaatccggttgccatgtcaggcgctgtaatg

SEQ ID NO: 733031 - DNA, 33 bp, Homo sapien
acaagcttaaaggtaacgctgaaggctcaggaa

SEQ ID NO: 733032 - DNA, 33 bp, Homo sapien
acaagcttaaaggtaatgctgaaggctcaggaa

SEQ ID NO: 733033 - DNA, 33 bp, Homo sapien
gtcccactgacagcatcagacagattattgatg

SEQ ID NO: 733034 - DNA, 33 bp, Homo sapien
gtcccactgacagcatgagacagattattgatg

SEQ ID NO: 733035 - DNA, 33 bp, Homo sapien
gaccagtaaagaataactgaactaacacacacc

SEQ ID NO: 733036 - DNA, 33 bp, Homo sapien
gaccagtaaagaataattgaactaacacacacc

SEQ ID NO: 733037 - DNA, 33 bp, Homo sapien
ggggtctctagaaagacagtttgctgctatcat

SEQ ID NO: 733038 - DNA, 33 bp, Homo sapien
ggggtctctagaaagatagtttgctgctatcat

SEQ ID NO: 733039 - DNA, 33 bp, Homo sapien
tttcatgattgaagaaataaacaagggtggtat

SEQ ID NO: 733040 - DNA, 33 bp, Homo sapien
tttcatgattgaagaagtaaacaagggtggtat

SEQ ID NO: 733041 - DNA, 33 bp, Homo sapien
caaactcattactgttgaaatcgatgcatgcat

SEQ ID NO: 733042 - DNA, 33 bp, Homo sapien
caaactcattactgtttaaatcgatgcatgcat

SEQ ID NO: 733043 - DNA, 33 bp, Homo sapien
caaccatagacagttacagagcttctcttcttc

SEQ ID NO: 733044 - DNA, 33 bp, Homo sapien
caaccatagacagttatagagcttctcttcttc

SEQ ID NO: 733045 - DNA, 33 bp, Homo sapien
catgaacagctgagaagatagtcattcagttct

SEQ ID NO: 733046 - DNA, 33 bp, Homo sapien
catgaacagctgagaatatagtcattcagttct

SEQ ID NO: 733047 - DNA, 33 bp, Homo sapien
aggttagaattctgtgacaatgagagaagtttt

SEQ ID NO: 733048 - DNA, 33 bp, Homo sapien
aggttagaattctgtggcaatgagagaagtttt

SEQ ID NO: 733049 - DNA, 33 bp, Homo sapien
gagggcccaagaaccacgaccatcagtgcccaa

SEQ ID NO: 733050 - DNA, 33 bp, Homo sapien
gagggcccaagaaccatgaccatcagtgcccaa

SEQ ID NO: 733051 - DNA, 33 bp, Homo sapien
ctccttcagcttggccaaactttcttaaaacag

SEQ ID NO: 733052 - DNA, 33 bp, Homo sapien
ctccttcagcttggcctaactttcttaaaacag

SEQ ID NO: 733053 - DNA, 33 bp, Homo sapien
aaagaaatgcacgaagaagtaaaattataagca

SEQ ID NO: 733054 - DNA, 33 bp, Homo sapien
aaagaaatgcacgaaggagtaaaattataagca

SEQ ID NO: 733055 - DNA, 33 bp, Homo sapien
ttagccatttttattaagatctggaggaagtag

SEQ ID NO: 733056 - DNA, 33 bp, Homo sapien
ttagccatttttattacgatctggaggaagtag

SEQ ID NO: 733057 - DNA, 33 bp, Homo sapien
actgcacattgtcaaaaatggagaaaacagtga

SEQ ID NO: 733058 - DNA, 33 bp, Homo sapien
actgcacattgtcaaacatggagaaaacagtga

SEQ ID NO: 733059 - DNA, 33 bp, Homo sapien
cttctccctgttctccaattcacattctttctg

SEQ ID NO: 733060 - DNA, 33 bp, Homo sapien
cttctccctgttctcccattcacattctttctg

SEQ ID NO: 733061 - DNA, 33 bp, Homo sapien
tacagttattagggccaaaaaggtcaagagaat

SEQ ID NO: 733062 - DNA, 33 bp, Homo sapien
tacagttattagggcccaaaaggtcaagagaat

SEQ ID NO: 733063 - DNA, 33 bp, Homo sapien
tttagtattatggtccagctttgcacccatgat

SEQ ID NO: 733064 - DNA, 33 bp, Homo sapien
tttagtattatggtccggctttgcacccatgat

SEQ ID NO: 733065 - DNA, 33 bp, Homo sapien
ctcatacattggtacactggtccttgatgagcc

SEQ ID NO: 733066 - DNA, 33 bp, Homo sapien
ctcatacattggtacattggtccttgatgagcc

SEQ ID NO: 733067 - DNA, 33 bp, Homo sapien
catatgttccagagaaaactatatcgaagatgg

SEQ ID NO: 733068 - DNA, 33 bp, Homo sapien
catatgttccagagaagactatatcgaagatgg

SEQ ID NO: 733069 - DNA, 33 bp, Homo sapien
tgttgaaactatactacgaaataacctttctgt

SEQ ID NO: 733070 - DNA, 33 bp, Homo sapien
tgttgaaactatactaggaaataacctttctgt

SEQ ID NO: 733071 - DNA, 33 bp, Homo sapien
tgtgtgaggaattcacaactgatcccacagtga

SEQ ID NO: 733072 - DNA, 33 bp, Homo sapien
tgtgtgaggaattcacgactgatcccacagtga

SEQ ID NO: 733073 - DNA, 33 bp, Homo sapien
taccacagcagagataacatatatcgtaaggca

SEQ ID NO: 733074 - DNA, 33 bp, Homo sapien
taccacagcagagatagcatatatcgtaaggca

SEQ ID NO: 733075 - DNA, 33 bp, Homo sapien
atgtgaggcctgaaaccgtaaaactcctggaag

SEQ ID NO: 733076 - DNA, 33 bp, Homo sapien
atgtgaggcctgaaactgtaaaactcctggaag

SEQ ID NO: 733077 - DNA, 33 bp, Homo sapien
gtagtatctgttaaaccatgactaacttctgta

SEQ ID NO: 733078 - DNA, 33 bp, Homo sapien
gtagtatctgttaaactatgactaacttctgta

SEQ ID NO: 733079 - DNA, 33 bp, Homo sapien
attaggaagtagcatcccagaataaactaatac

SEQ ID NO: 733080 - DNA, 33 bp, Homo sapien
attaggaagtagcatctcagaataaactaatac

SEQ ID NO: 733081 - DNA, 33 bp, Homo sapien
acccagcttatcgcacaaactacatgagcaaac

SEQ ID NO: 733082 - DNA, 33 bp, Homo sapien
acccagcttatcgcaccaactacatgagcaaac

SEQ ID NO: 733083 - DNA, 33 bp, Homo sapien
gttttcacctatattacccgaattcaagcaata

SEQ ID NO: 733084 - DNA, 33 bp, Homo sapien
gttttcacctatattatccgaattcaagcaata

SEQ ID NO: 733085 - DNA, 33 bp, Homo sapien
tcctttattgtgtataacctagcagagttcagg

SEQ ID NO: 733086 - DNA, 33 bp, Homo sapien
tcctttattgtgtataccctagcagagttcagg

SEQ ID NO: 733087 - DNA, 33 bp, Homo sapien
atttgtaattacctacaatttgtgcaacattag

SEQ ID NO: 733088 - DNA, 33 bp, Homo sapien
atttgtaattacctacgatttgtgcaacattag

SEQ ID NO: 733089 - DNA, 33 bp, Homo sapien
tggttaaatttggctcacagatatgtcttaata

SEQ ID NO: 733090 - DNA, 33 bp, Homo sapien
tggttaaatttggctcgcagatatgtcttaata

SEQ ID NO: 733091 - DNA, 33 bp, Homo sapien
tcaatttttcctctacacaattcccatgacttc

SEQ ID NO: 733092 - DNA, 33 bp, Homo sapien
tcaatttttcctctacgcaattcccatgacttc

SEQ ID NO: 733093 - DNA, 33 bp, Homo sapien
ccaatgaaaggagggccgaaacaacaaaaggca

SEQ ID NO: 733094 - DNA, 33 bp, Homo sapien
ccaatgaaaggagggctgaaacaacaaaaggca

SEQ ID NO: 733095 - DNA, 33 bp, Homo sapien
cttggactttacataacgttggcctcaagtagt

SEQ ID NO: 733096 - DNA, 33 bp, Homo sapien
cttggactttacataatgttggcctcaagtagt

SEQ ID NO: 733097 - DNA, 33 bp, Homo sapien
atgctacatatgttaacgtacttgggactatgg

SEQ ID NO: 733098 - DNA, 33 bp, Homo sapien
atgctacatatgttaatgtacttgggactatgg

SEQ ID NO: 733099 - DNA, 33 bp, Homo sapien
taatccaagtgtttcccgacctcacattttctc

SEQ ID NO: 733100 - DNA, 33 bp, Homo sapien
taatccaagtgtttcctgacctcacattttctc

SEQ ID NO: 733101 - DNA, 33 bp, Homo sapien
aaaaacatctttctccaattctcccaggaatga

SEQ ID NO: 733102 - DNA, 33 bp, Homo sapien
aaaaacatctttctcctattctcccaggaatga

SEQ ID NO: 733103 - DNA, 33 bp, Homo sapien
taagagatcagagcaacaatcaaaaggtgttct

SEQ ID NO: 733104 - DNA, 33 bp, Homo sapien
taagagatcagagcaagaatcaaaaggtgttct

SEQ ID NO: 733105 - DNA, 33 bp, Homo sapien
acaaacttatagctcacgttgaagtaatttctg

SEQ ID NO: 733106 - DNA, 33 bp, Homo sapien
acaaacttatagctcaggttgaagtaatttctg

SEQ ID NO: 733107 - DNA, 33 bp, Homo sapien
ctgagttctgtgcatacgttatgtggacctaaa

SEQ ID NO: 733108 - DNA, 33 bp, Homo sapien
ctgagttctgtgcatatgttatgtggacctaaa

SEQ ID NO: 733109 - DNA, 33 bp, Homo sapien
gcaatctgtctggaaactatattagtcctatca

SEQ ID NO: 733110 - DNA, 33 bp, Homo sapien
gcaatctgtctggaaattatattagtcctatca

SEQ ID NO: 733111 - DNA, 33 bp, Homo sapien
gcttgggaaatagcaacggtgtgagccccgaca

SEQ ID NO: 733112 - DNA, 33 bp, Homo sapien
gcttgggaaatagcaatggtgtgagccccgaca

SEQ ID NO: 733113 - DNA, 33 bp, Homo sapien
ctgatggatcttacacagaagcatgatagtcaa

SEQ ID NO: 733114 - DNA, 33 bp, Homo sapien
ctgatggatcttacacggaagcatgatagtcaa

SEQ ID NO: 733115 - DNA, 33 bp, Homo sapien
ttttgacagcacatttgaaatgccgagtgtttt

SEQ ID NO: 733116 - DNA, 33 bp, Homo sapien
ttttgacagcacattttaaatgccgagtgtttt

SEQ ID NO: 733117 - DNA, 33 bp, Homo sapien
ttgaaggaggtgagaaagtgaaaccaaaaattt

SEQ ID NO: 733118 - DNA, 33 bp, Homo sapien
ttgaaggaggtgagaaggtgaaaccaaaaattt

SEQ ID NO: 733119 - DNA, 33 bp, Homo sapien
agatttatgcactgaacagggtggttgacttct

SEQ ID NO: 733120 - DNA, 33 bp, Homo sapien
agatttatgcactgaatagggtggttgacttct

SEQ ID NO: 733121 - DNA, 33 bp, Homo sapien
accagcctgtttttcacatttgtgtaactccct

SEQ ID NO: 733122 - DNA, 33 bp, Homo sapien
accagcctgtttttcatatttgtgtaactccct

SEQ ID NO: 733123 - DNA, 33 bp, Homo sapien
ttttcatcaaatgaccacactttaattttccag

SEQ ID NO: 733124 - DNA, 33 bp, Homo sapien
ttttcatcaaatgaccgcactttaattttccag

SEQ ID NO: 733125 - DNA, 33 bp, Homo sapien
tttctcaatggtagtaaatcatcaacttttgag

SEQ ID NO: 733126 - DNA, 33 bp, Homo sapien
tttctcaatggtagtagatcatcaacttttgag

SEQ ID NO: 733127 - DNA, 33 bp, Homo sapien
tgcaagagggaaaagaaactaaactcaaatcca

SEQ ID NO: 733128 - DNA, 33 bp, Homo sapien
tgcaagagggaaaagagactaaactcaaatcca

SEQ ID NO: 733129 - DNA, 33 bp, Homo sapien
ttcttccattatttacagcgtgaacttcttgtg

SEQ ID NO: 733130 - DNA, 33 bp, Homo sapien
ttcttccattatttacggcgtgaacttcttgtg

SEQ ID NO: 733131 - DNA, 33 bp, Homo sapien
gtgtggtttttttgccaaatacatatttaacct

SEQ ID NO: 733132 - DNA, 33 bp, Homo sapien
gtgtggtttttttgcctaatacatatttaacct

SEQ ID NO: 733133 - DNA, 33 bp, Homo sapien
tcataattactcttgacgttgcatattttttac

SEQ ID NO: 733134 - DNA, 33 bp, Homo sapien
tcataattactcttgatgttgcatattttttac

SEQ ID NO: 733135 - DNA, 33 bp, Homo sapien
aatgtgtgattttcaaagaaagccaatggtaca

SEQ ID NO: 733136 - DNA, 33 bp, Homo sapien
aatgtgtgattttcaaggaaagccaatggtaca

SEQ ID NO: 733137 - DNA, 33 bp, Homo sapien
caccatatgacagctaaagaatgatactgcagc

SEQ ID NO: 733138 - DNA, 33 bp, Homo sapien
caccatatgacagctagagaatgatactgcagc

SEQ ID NO: 733139 - DNA, 33 bp, Homo sapien
gaagatgaaaaacaaaattggaggactgacaat

SEQ ID NO: 733140 - DNA, 33 bp, Homo sapien
gaagatgaaaaacaaagttggaggactgacaat

SEQ ID NO: 733141 - DNA, 33 bp, Homo sapien
tgaggtttctttttaaatcatgaatccatgtag

SEQ ID NO: 733142 - DNA, 33 bp, Homo sapien
tgaggtttctttttaagtcatgaatccatgtag

SEQ ID NO: 733143 - DNA, 33 bp, Homo sapien
ctaagctttctatctcaatgctgtttgcaagtt

SEQ ID NO: 733144 - DNA, 33 bp, Homo sapien
ctaagctttctatctcgatgctgtttgcaagtt

SEQ ID NO: 733145 - DNA, 33 bp, Homo sapien
aattcagtatgttcaactcctcttcctttcaaa

SEQ ID NO: 733146 - DNA, 33 bp, Homo sapien
aattcagtatgttcaattcctcttcctttcaaa

SEQ ID NO: 733147 - DNA, 33 bp, Homo sapien
gcatctttacagcaaacttgcttcttagaccca

SEQ ID NO: 733148 - DNA, 33 bp, Homo sapien
gcatctttacagcaaagttgcttcttagaccca

SEQ ID NO: 733149 - DNA, 33 bp, Homo sapien
ccaagaatggaagtggacatacagggaaatggg

SEQ ID NO: 733150 - DNA, 33 bp, Homo sapien
ccaagaatggaagtgggcatacagggaaatggg

SEQ ID NO: 733151 - DNA, 33 bp, Homo sapien
caggaaggattgcagtcacagctgaccaaataa

SEQ ID NO: 733152 - DNA, 33 bp, Homo sapien
caggaaggattgcagttacagctgaccaaataa

SEQ ID NO: 733153 - DNA, 33 bp, Homo sapien
taccgataagttgtcacatggtatagaaaaatg

SEQ ID NO: 733154 - DNA, 33 bp, Homo sapien
taccgataagttgtcatatggtatagaaaaatg

SEQ ID NO: 733155 - DNA, 33 bp, Homo sapien
cattcacttgcccaaaaagatcctagacagata

SEQ ID NO: 733156 - DNA, 33 bp, Homo sapien
cattcacttgcccaaacagatcctagacagata

SEQ ID NO: 733157 - DNA, 33 bp, Homo sapien
tttcaagctagccaagaatgcaaaaggagttaa

SEQ ID NO: 733158 - DNA, 33 bp, Homo sapien
tttcaagctagccaagtatgcaaaaggagttaa

SEQ ID NO: 733159 - DNA, 33 bp, Homo sapien
tactcactgtctacaaaatgcttatacaaataa

SEQ ID NO: 733160 - DNA, 33 bp, Homo sapien
tactcactgtctacaagatgcttatacaaataa

SEQ ID NO: 733161 - DNA, 33 bp, Homo sapien
agtcatatttgaacacagatgtgaaagaagaaa

SEQ ID NO: 733162 - DNA, 33 bp, Homo sapien
agtcatatttgaacactgatgtgaaagaagaaa

SEQ ID NO: 733163 - DNA, 33 bp, Homo sapien
atcacattgtgaaggacgccaagttccacagga

SEQ ID NO: 733164 - DNA, 33 bp, Homo sapien
atcacattgtgaaggatgccaagttccacagga

SEQ ID NO: 733165 - DNA, 33 bp, Homo sapien
acaaacattaaaaggagtatccagggcatgata

SEQ ID NO: 733166 - DNA, 33 bp, Homo sapien
acaaacattaaaaggattatccagggcatgata

SEQ ID NO: 733167 - DNA, 33 bp, Homo sapien
agactcttttccaacaataccttcaatggctga

SEQ ID NO: 733168 - DNA, 33 bp, Homo sapien
agactcttttccaacattaccttcaatggctga

SEQ ID NO: 733169 - DNA, 33 bp, Homo sapien
tgtgtcatttttcagtcaatgataattagtgtc

SEQ ID NO: 733170 - DNA, 33 bp, Homo sapien
tgtgtcatttttcagtgaatgataattagtgtc

SEQ ID NO: 733171 - DNA, 33 bp, Homo sapien
tgcatgaagaggtgccataattattaaacatga

SEQ ID NO: 733172 - DNA, 33 bp, Homo sapien
tgcatgaagaggtgccgtaattattaaacatga

SEQ ID NO: 733173 - DNA, 33 bp, Homo sapien
acgtagcttgtagctgaaacttctgcctctctg

SEQ ID NO: 733174 - DNA, 33 bp, Homo sapien
acgtagcttgtagctggaacttctgcctctctg

SEQ ID NO: 733175 - DNA, 33 bp, Homo sapien
tgttgagaatcaggaggacagtaactttgtcta

SEQ ID NO: 733176 - DNA, 33 bp, Homo sapien
tgttgagaatcaggagtacagtaactttgtcta

SEQ ID NO: 733177 - DNA, 33 bp, Homo sapien
tctgttctgttgtttaactttccagattttatc

SEQ ID NO: 733178 - DNA, 33 bp, Homo sapien
tctgttctgttgtttacctttccagattttatc

SEQ ID NO: 733179 - DNA, 33 bp, Homo sapien
atgtgatgctagactacagccagtttgaagttt

SEQ ID NO: 733180 - DNA, 33 bp, Homo sapien
atgtgatgctagactatagccagtttgaagttt

SEQ ID NO: 733181 - DNA, 33 bp, Homo sapien
aaacatgggtgactaaaaaaaataaatgggtgt

SEQ ID NO: 733182 - DNA, 33 bp, Homo sapien
aaacatgggtgactaagaaaaataaatgggtgt

SEQ ID NO: 733183 - DNA, 33 bp, Homo sapien
tttccattatacttcaatacctcaaagtagcac

SEQ ID NO: 733184 - DNA, 33 bp, Homo sapien
tttccattatacttcattacctcaaagtagcac

SEQ ID NO: 733185 - DNA, 33 bp, Homo sapien
gaatactatgtagtaactgcctccatttgtctt

SEQ ID NO: 733186 - DNA, 33 bp, Homo sapien
gaatactatgtagtaagtgcctccatttgtctt

SEQ ID NO: 733187 - DNA, 33 bp, Homo sapien
taatatggaatattgccccaagattttttaaat

SEQ ID NO: 733188 - DNA, 33 bp, Homo sapien
taatatggaatattgctccaagattttttaaat

SEQ ID NO: 733189 - DNA, 33 bp, Homo sapien
ataataggtcaaagagaagcattaaggaaaagc

SEQ ID NO: 733190 - DNA, 33 bp, Homo sapien
ataataggtcaaagaggagcattaaggaaaagc

SEQ ID NO: 733191 - DNA, 33 bp, Homo sapien
ttcctgcctgctgaacagaaagacaaaaaaaca

SEQ ID NO: 733192 - DNA, 33 bp, Homo sapien
ttcctgcctgctgaacggaaagacaaaaaaaca

SEQ ID NO: 733193 - DNA, 33 bp, Homo sapien
atttttacagaatgcaataaactaatgcttata

SEQ ID NO: 733194 - DNA, 33 bp, Homo sapien
atttttacagaatgcactaaactaatgcttata

SEQ ID NO: 733195 - DNA, 33 bp, Homo sapien
actgggatggttctgtcaattgcctgaaaaatt

SEQ ID NO: 733196 - DNA, 33 bp, Homo sapien
actgggatggttctgtgaattgcctgaaaaatt

SEQ ID NO: 733197 - DNA, 33 bp, Homo sapien
aacaacaaaaattagacggtctgataacccagt

SEQ ID NO: 733198 - DNA, 33 bp, Homo sapien
aacaacaaaaattagatggtctgataacccagt

SEQ ID NO: 733199 - DNA, 33 bp, Homo sapien
tttgggtgagggtaacaaaaatctccttgatga

SEQ ID NO: 733200 - DNA, 33 bp, Homo sapien
tttgggtgagggtaaccaaaatctccttgatga

SEQ ID NO: 733201 - DNA, 33 bp, Homo sapien
tcagatgatgcaaaagcagtccacaatttgagg

SEQ ID NO: 733202 - DNA, 33 bp, Homo sapien
tcagatgatgcaaaagtagtccacaatttgagg

SEQ ID NO: 733203 - DNA, 33 bp, Homo sapien
tgcttattttgtaaggcattgaatcactgtgaa

SEQ ID NO: 733204 - DNA, 33 bp, Homo sapien
tgcttattttgtaaggtattgaatcactgtgaa

SEQ ID NO: 733205 - DNA, 33 bp, Homo sapien
gtggacgtctcaccaacgccacataggctacta

SEQ ID NO: 733206 - DNA, 33 bp, Homo sapien
gtggacgtctcaccaatgccacataggctacta

SEQ ID NO: 733207 - DNA, 33 bp, Homo sapien
agtttgagagtgtaaaacattgaattaggcttt

SEQ ID NO: 733208 - DNA, 33 bp, Homo sapien
agtttgagagtgtaaagcattgaattaggcttt

SEQ ID NO: 733209 - DNA, 33 bp, Homo sapien
atgaagaaagaaaatacggcgtatatatatgca

SEQ ID NO: 733210 - DNA, 33 bp, Homo sapien
atgaagaaagaaaatagggcgtatatatatgca

SEQ ID NO: 733211 - DNA, 33 bp, Homo sapien
gatatggctctcaaaccgaaaacaagttaaaaa

SEQ ID NO: 733212 - DNA, 33 bp, Homo sapien
gatatggctctcaaactgaaaacaagttaaaaa

SEQ ID NO: 733213 - DNA, 33 bp, Homo sapien
aaacaagttaaaaaaacgtcacatctgtagcca

SEQ ID NO: 733214 - DNA, 33 bp, Homo sapien
aaacaagttaaaaaaatgtcacatctgtagcca

SEQ ID NO: 733215 - DNA, 33 bp, Homo sapien
tgcacatgataacaaacttgaattaacccatga

SEQ ID NO: 733216 - DNA, 33 bp, Homo sapien
tgcacatgataacaaagttgaattaacccatga

SEQ ID NO: 733217 - DNA, 33 bp, Homo sapien
atcaagctccaatagaaaatgtactgcccctgg

SEQ ID NO: 733218 - DNA, 33 bp, Homo sapien
atcaagctccaatagagaatgtactgcccctgg

SEQ ID NO: 733219 - DNA, 33 bp, Homo sapien
tctattacagtattgaacctttagaccaaaaat

SEQ ID NO: 733220 - DNA, 33 bp, Homo sapien
tctattacagtattgagcctttagaccaaaaat

SEQ ID NO: 733221 - DNA, 33 bp, Homo sapien
tgtaggttggactgcaaagataagtataaaacc

SEQ ID NO: 733222 - DNA, 33 bp, Homo sapien
tgtaggttggactgcacagataagtataaaacc

SEQ ID NO: 733223 - DNA, 33 bp, Homo sapien
tacatagcagaatgaaactgaacccctaccttt

SEQ ID NO: 733224 - DNA, 33 bp, Homo sapien
tacatagcagaatgaagctgaacccctaccttt

SEQ ID NO: 733225 - DNA, 33 bp, Homo sapien
gcttgaagtgctcccaataatcaaagaaaagtc

SEQ ID NO: 733226 - DNA, 33 bp, Homo sapien
gcttgaagtgctcccagtaatcaaagaaaagtc

SEQ ID NO: 733227 - DNA, 33 bp, Homo sapien
atattagtaatcttcgaaagttagaggtaaatg

SEQ ID NO: 733228 - DNA, 33 bp, Homo sapien
atattagtaatcttcgtaagttagaggtaaatg

SEQ ID NO: 733229 - DNA, 33 bp, Homo sapien
tcatgaggcagcgaataaggagggtacctttct

SEQ ID NO: 733230 - DNA, 33 bp, Homo sapien
tcatgaggcagcgaatgaggagggtacctttct

SEQ ID NO: 733231 - DNA, 33 bp, Homo sapien
attgcaaatagagctacgttgattggcctggcc

SEQ ID NO: 733232 - DNA, 33 bp, Homo sapien
attgcaaatagagctatgttgattggcctggcc

SEQ ID NO: 733233 - DNA, 33 bp, Homo sapien
atttgtaaaaatagtacaagtacacactcacta

SEQ ID NO: 733234 - DNA, 33 bp, Homo sapien
atttgtaaaaatagtataagtacacactcacta

SEQ ID NO: 733235 - DNA, 33 bp, Homo sapien
ataaaatctcatacacagtcttctagcctttaa

SEQ ID NO: 733236 - DNA, 33 bp, Homo sapien
ataaaatctcatacacggtcttctagcctttaa

SEQ ID NO: 733237 - DNA, 33 bp, Homo sapien
caggatccagtctagaaacccaaatcacattta

SEQ ID NO: 733238 - DNA, 33 bp, Homo sapien
caggatccagtctagagacccaaatcacattta

SEQ ID NO: 733239 - DNA, 33 bp, Homo sapien
tgacaaaggccataacagaaattcaaacagcat

SEQ ID NO: 733240 - DNA, 33 bp, Homo sapien
tgacaaaggccataacggaaattcaaacagcat

SEQ ID NO: 733241 - DNA, 33 bp, Homo sapien
tattttatatgagaaaagatgttctatggtaaa

SEQ ID NO: 733242 - DNA, 33 bp, Homo sapien
tattttatatgagaaaggatgttctatggtaaa

SEQ ID NO: 733243 - DNA, 33 bp, Homo sapien
aaatacattttgtctaaattatgcaggtcagat

SEQ ID NO: 733244 - DNA, 33 bp, Homo sapien
aaatacattttgtctagattatgcaggtcagat

SEQ ID NO: 733245 - DNA, 33 bp, Homo sapien
aagctgtctgcacagtcaagggaatgtggatat

SEQ ID NO: 733246 - DNA, 33 bp, Homo sapien
aagctgtctgcacagtgaagggaatgtggatat

SEQ ID NO: 733247 - DNA, 33 bp, Homo sapien
caaacgtgcacatctaccccatgaatctcaaat

SEQ ID NO: 733248 - DNA, 33 bp, Homo sapien
caaacgtgcacatctatcccatgaatctcaaat

SEQ ID NO: 733249 - DNA, 33 bp, Homo sapien
gggttatttgtgtttcacttatccaattaaatt

SEQ ID NO: 733250 - DNA, 33 bp, Homo sapien
gggttatttgtgtttcgcttatccaattaaatt

SEQ ID NO: 733251 - DNA, 33 bp, Homo sapien
cacctatcttctacaactgattgcatagggagt

SEQ ID NO: 733252 - DNA, 33 bp, Homo sapien
cacctatcttctacaattgattgcatagggagt

SEQ ID NO: 733253 - DNA, 33 bp, Homo sapien
ctgatgaagacattacagaagaggaatatttct

SEQ ID NO: 733254 - DNA, 33 bp, Homo sapien
ctgatgaagacattacggaagaggaatatttct

SEQ ID NO: 733255 - DNA, 33 bp, Homo sapien
ggaagcaagatcaaccacagtttgcccgggcat

SEQ ID NO: 733256 - DNA, 33 bp, Homo sapien
ggaagcaagatcaaccgcagtttgcccgggcat

SEQ ID NO: 733257 - DNA, 33 bp, Homo sapien
aaggaaatgcagatgactatggtaatgaatgaa

SEQ ID NO: 733258 - DNA, 33 bp, Homo sapien
aaggaaatgcagatgagtatggtaatgaatgaa

SEQ ID NO: 733259 - DNA, 33 bp, Homo sapien
agaggttcctttcagcactaatgatcagtgaag

SEQ ID NO: 733260 - DNA, 33 bp, Homo sapien
agaggttcctttcagctctaatgatcagtgaag

SEQ ID NO: 733261 - DNA, 33 bp, Homo sapien
aatactttcttctgcaaagacataaacaattgc

SEQ ID NO: 733262 - DNA, 33 bp, Homo sapien
aatactttcttctgcagagacataaacaattgc

SEQ ID NO: 733263 - DNA, 33 bp, Homo sapien
aggaggctgcttcagaacctaaagcttgagccc

SEQ ID NO: 733264 - DNA, 33 bp, Homo sapien
aggaggctgcttcagatcctaaagcttgagccc

SEQ ID NO: 733265 - DNA, 33 bp, Homo sapien
tattaatagagtaccacgtttcaggccctagac

SEQ ID NO: 733266 - DNA, 33 bp, Homo sapien
tattaatagagtaccatgtttcaggccctagac

SEQ ID NO: 733267 - DNA, 33 bp, Homo sapien
tgaagacattgagaataagaaaaatccattgca

SEQ ID NO: 733268 - DNA, 33 bp, Homo sapien
tgaagacattgagaatgagaaaaatccattgca

SEQ ID NO: 733269 - DNA, 33 bp, Homo sapien
gccttacactacatagaatttgattatttgaaa

SEQ ID NO: 733270 - DNA, 33 bp, Homo sapien
gccttacactacatagcatttgattatttgaaa

SEQ ID NO: 733271 - DNA, 33 bp, Homo sapien
gtgaagtagggagagaccgcctatgtatcatgt

SEQ ID NO: 733272 - DNA, 33 bp, Homo sapien
gtgaagtagggagagatcgcctatgtatcatgt

SEQ ID NO: 733273 - DNA, 33 bp, Homo sapien
cattttgagcttatacaaaaactaataccaacc

SEQ ID NO: 733274 - DNA, 33 bp, Homo sapien
cattttgagcttatacgaaaactaataccaacc

SEQ ID NO: 733275 - DNA, 33 bp, Homo sapien
ttaatatcccttttgccaggtacggtggcttat

SEQ ID NO: 733276 - DNA, 33 bp, Homo sapien
ttaatatcccttttgctaggtacggtggcttat

SEQ ID NO: 733277 - DNA, 33 bp, Homo sapien
aatctcagttcttacacagacagtgagtacctt

SEQ ID NO: 733278 - DNA, 33 bp, Homo sapien
aatctcagttcttacatagacagtgagtacctt

SEQ ID NO: 733279 - DNA, 33 bp, Homo sapien
tgtgctgaatcctgagacatttcaatattagag

SEQ ID NO: 733280 - DNA, 33 bp, Homo sapien
tgtgctgaatcctgaggcatttcaatattagag

SEQ ID NO: 733281 - DNA, 33 bp, Homo sapien
aagtttaaaaacaagacattgtacagaaagagg

SEQ ID NO: 733282 - DNA, 33 bp, Homo sapien
aagtttaaaaacaagagattgtacagaaagagg

SEQ ID NO: 733283 - DNA, 33 bp, Homo sapien
agccaccgcgcccagacgattctattagggttg

SEQ ID NO: 733284 - DNA, 33 bp, Homo sapien
agccaccgcgcccagatgattctattagggttg

SEQ ID NO: 733285 - DNA, 33 bp, Homo sapien
gtgttgtatattctcaaatactaacctctactc

SEQ ID NO: 733286 - DNA, 33 bp, Homo sapien
gtgttgtatattctcagatactaacctctactc

SEQ ID NO: 733287 - DNA, 33 bp, Homo sapien
ccccacttatcgttcaaccttagttcacataaa

SEQ ID NO: 733288 - DNA, 33 bp, Homo sapien
ccccacttatcgttcacccttagttcacataaa

SEQ ID NO: 733289 - DNA, 33 bp, Homo sapien
ctgcctaataaactcccacatctctgtgaagtc

SEQ ID NO: 733290 - DNA, 33 bp, Homo sapien
ctgcctaataaactccgacatctctgtgaagtc

SEQ ID NO: 733291 - DNA, 33 bp, Homo sapien
tccaagaaaccatgaacgataacctagacctag

SEQ ID NO: 733292 - DNA, 33 bp, Homo sapien
tccaagaaaccatgaatgataacctagacctag

SEQ ID NO: 733293 - DNA, 33 bp, Homo sapien
gatcaattgctaagaccagtgctatgcttatag

SEQ ID NO: 733294 - DNA, 33 bp, Homo sapien
gatcaattgctaagactagtgctatgcttatag

SEQ ID NO: 733295 - DNA, 33 bp, Homo sapien
gattttaaagcagccacgcaagctgagtggaac

SEQ ID NO: 733296 - DNA, 33 bp, Homo sapien
gattttaaagcagccatgcaagctgagtggaac

SEQ ID NO: 733297 - DNA, 33 bp, Homo sapien
aaagattgcctactaaaagataagagtggccag

SEQ ID NO: 733298 - DNA, 33 bp, Homo sapien
aaagattgcctactaagagataagagtggccag

SEQ ID NO: 733299 - DNA, 33 bp, Homo sapien
ttgttttctccatgccaatcagttccatagtta

SEQ ID NO: 733300 - DNA, 33 bp, Homo sapien
ttgttttctccatgccgatcagttccatagtta

SEQ ID NO: 733301 - DNA, 33 bp, Homo sapien
tgcattgaaaaatcgtgaaaggtgcaaaaccaa

SEQ ID NO: 733302 - DNA, 33 bp, Homo sapien
tgcattgaaaaatcgttaaaggtgcaaaaccaa

SEQ ID NO: 733303 - DNA, 33 bp, Homo sapien
tttacttgcacatgtacggtagcagggagtttg

SEQ ID NO: 733304 - DNA, 33 bp, Homo sapien
tttacttgcacatgtatggtagcagggagtttg

SEQ ID NO: 733305 - DNA, 33 bp, Homo sapien
cattcacaaaagaccacgaattgtataaatcta

SEQ ID NO: 733306 - DNA, 33 bp, Homo sapien
cattcacaaaagaccatgaattgtataaatcta

SEQ ID NO: 733307 - DNA, 33 bp, Homo sapien
cacggtcctcatatacagacaaaaccaaaagaa

SEQ ID NO: 733308 - DNA, 33 bp, Homo sapien
cacggtcctcatatacggacaaaaccaaaagaa

SEQ ID NO: 733309 - DNA, 33 bp, Homo sapien
tgagtacttgcaaaataaaactaactcattatc

SEQ ID NO: 733310 - DNA, 33 bp, Homo sapien
tgagtacttgcaaaattaaactaactcattatc

SEQ ID NO: 733311 - DNA, 33 bp, Homo sapien
agagatgaaatcattacacaggtggagaaaatt

SEQ ID NO: 733312 - DNA, 33 bp, Homo sapien
agagatgaaatcattatacaggtggagaaaatt

SEQ ID NO: 733313 - DNA, 33 bp, Homo sapien
tcctctagagttctgcaaagtttatttatttac

SEQ ID NO: 733314 - DNA, 33 bp, Homo sapien
tcctctagagttctgcgaagtttatttatttac

SEQ ID NO: 733315 - DNA, 33 bp, Homo sapien
tcttctaagaccactacggttgttaattctaac

SEQ ID NO: 733316 - DNA, 33 bp, Homo sapien
tcttctaagaccactatggttgttaattctaac

SEQ ID NO: 733317 - DNA, 33 bp, Homo sapien
gcagaaactgcaaacaaggcatttatcataaag

SEQ ID NO: 733318 - DNA, 33 bp, Homo sapien
gcagaaactgcaaacatggcatttatcataaag

SEQ ID NO: 733319 - DNA, 33 bp, Homo sapien
gtgttcagggagaagaatacgacgataacatat

SEQ ID NO: 733320 - DNA, 33 bp, Homo sapien
gtgttcagggagaagattacgacgataacatat

SEQ ID NO: 733321 - DNA, 33 bp, Homo sapien
atagttcaagcacagacgatagagcagagtggg

SEQ ID NO: 733322 - DNA, 33 bp, Homo sapien
atagttcaagcacagatgatagagcagagtggg

SEQ ID NO: 733323 - DNA, 33 bp, Homo sapien
ggtggacctttgtatacgtatatgtgtgtctac

SEQ ID NO: 733324 - DNA, 33 bp, Homo sapien
ggtggacctttgtatatgtatatgtgtgtctac

SEQ ID NO: 733325 - DNA, 33 bp, Homo sapien
gagaaagcggtggagaaggatcaaaggatcaaa

SEQ ID NO: 733326 - DNA, 33 bp, Homo sapien
gagaaagcggtggagagggatcaaaggatcaaa

SEQ ID NO: 733327 - DNA, 33 bp, Homo sapien
gaaagaggcgactcaacggtggctatttttttc

SEQ ID NO: 733328 - DNA, 33 bp, Homo sapien
gaaagaggcgactcaagggtggctatttttttc

SEQ ID NO: 733329 - DNA, 33 bp, Homo sapien
ttggcagacttctttaacaaactgcactgttgg

SEQ ID NO: 733330 - DNA, 33 bp, Homo sapien
ttggcagacttctttagcaaactgcactgttgg

SEQ ID NO: 733331 - DNA, 33 bp, Homo sapien
tctatcaactgataaacgtgttgacaaaaagtg

SEQ ID NO: 733332 - DNA, 33 bp, Homo sapien
tctatcaactgataaatgtgttgacaaaaagtg

SEQ ID NO: 733333 - DNA, 33 bp, Homo sapien
atattctgaatatgagacctttttcaaatatag

SEQ ID NO: 733334 - DNA, 33 bp, Homo sapien
atattctgaatatgagtcctttttcaaatatag

SEQ ID NO: 733335 - DNA, 33 bp, Homo sapien
ttaaaagcactaacaccggaatagtttggacct

SEQ ID NO: 733336 - DNA, 33 bp, Homo sapien
ttaaaagcactaacactggaatagtttggacct

SEQ ID NO: 733337 - DNA, 33 bp, Homo sapien
tgaccacttccttcacagacttcatgccctgtg

SEQ ID NO: 733338 - DNA, 33 bp, Homo sapien
tgaccacttccttcacggacttcatgccctgtg

SEQ ID NO: 733339 - DNA, 33 bp, Homo sapien
tgaaaggttgcgataacggaaataacaatagct

SEQ ID NO: 733340 - DNA, 33 bp, Homo sapien
tgaaaggttgcgataatggaaataacaatagct

SEQ ID NO: 733341 - DNA, 33 bp, Homo sapien
ataagcaggaaataacaagcccccaaccatgaa

SEQ ID NO: 733342 - DNA, 33 bp, Homo sapien
ataagcaggaaataaccagcccccaaccatgaa

SEQ ID NO: 733343 - DNA, 33 bp, Homo sapien
gcataggcccttcaaaatcaacaaaaattttat

SEQ ID NO: 733344 - DNA, 33 bp, Homo sapien
gcataggcccttcaaagtcaacaaaaattttat

SEQ ID NO: 733345 - DNA, 33 bp, Homo sapien
agggcaagagctaagaagcaaggccacatcaga

SEQ ID NO: 733346 - DNA, 33 bp, Homo sapien
agggcaagagctaagaggcaaggccacatcaga

SEQ ID NO: 733347 - DNA, 33 bp, Homo sapien
gaatatagaagtttcccagtaatgttcaagacc

SEQ ID NO: 733348 - DNA, 33 bp, Homo sapien
gaatatagaagtttcctagtaatgttcaagacc

SEQ ID NO: 733349 - DNA, 33 bp, Homo sapien
aaagtgtcaacagcaacggtagatccatatgac

SEQ ID NO: 733350 - DNA, 33 bp, Homo sapien
aaagtgtcaacagcaatggtagatccatatgac

SEQ ID NO: 733351 - DNA, 33 bp, Homo sapien
ctaggccttcattccacaatattgggcctctat

SEQ ID NO: 733352 - DNA, 33 bp, Homo sapien
ctaggccttcattccataatattgggcctctat

SEQ ID NO: 733353 - DNA, 33 bp, Homo sapien
tggatgtgattttgccaaatagtaataatttca

SEQ ID NO: 733354 - DNA, 33 bp, Homo sapien
tggatgtgattttgcccaatagtaataatttca

SEQ ID NO: 733355 - DNA, 33 bp, Homo sapien
ttagtgggaagacaaccgtagcataagaatgtg

SEQ ID NO: 733356 - DNA, 33 bp, Homo sapien
ttagtgggaagacaacggtagcataagaatgtg

SEQ ID NO: 733357 - DNA, 33 bp, Homo sapien
ggattaaaaacaaccactaccacctatcagaga

SEQ ID NO: 733358 - DNA, 33 bp, Homo sapien
ggattaaaaacaaccattaccacctatcagaga

SEQ ID NO: 733359 - DNA, 33 bp, Homo sapien
tgaccttcatctcccaataactacactcagttt

SEQ ID NO: 733360 - DNA, 33 bp, Homo sapien
tgaccttcatctcccagtaactacactcagttt

SEQ ID NO: 733361 - DNA, 33 bp, Homo sapien
cgttatgtgacagtcgaaaaagatggaagaatt

SEQ ID NO: 733362 - DNA, 33 bp, Homo sapien
cgttatgtgacagtcggaaaagatggaagaatt

SEQ ID NO: 733363 - DNA, 33 bp, Homo sapien
tggctagatgtgatttaaaaccattgtcctgat

SEQ ID NO: 733364 - DNA, 33 bp, Homo sapien
tggctagatgtgatttcaaaccattgtcctgat

SEQ ID NO: 733365 - DNA, 33 bp, Homo sapien
gggttaagcattcacaactgctgtaggcatcat

SEQ ID NO: 733366 - DNA, 33 bp, Homo sapien
gggttaagcattcacatctgctgtaggcatcat

SEQ ID NO: 733367 - DNA, 33 bp, Homo sapien
acaattgatttgaataaaagtaggcagatttag

SEQ ID NO: 733368 - DNA, 33 bp, Homo sapien
acaattgatttgaatagaagtaggcagatttag

SEQ ID NO: 733369 - DNA, 33 bp, Homo sapien
atttgcgagatatctacgtctattgtcgtttaa

SEQ ID NO: 733370 - DNA, 33 bp, Homo sapien
atttgcgagatatctatgtctattgtcgtttaa

SEQ ID NO: 733371 - DNA, 33 bp, Homo sapien
aatgcactataaacaccgtctgtctcctcaacc

SEQ ID NO: 733372 - DNA, 33 bp, Homo sapien
aatgcactataaacactgtctgtctcctcaacc

SEQ ID NO: 733373 - DNA, 33 bp, Homo sapien
tggaacagagcatttaagaggtgataataagga

SEQ ID NO: 733374 - DNA, 33 bp, Homo sapien
tggaacagagcatttaggaggtgataataagga

SEQ ID NO: 733375 - DNA, 33 bp, Homo sapien
cttgcaactgggacgacactaggaaagttgaag

SEQ ID NO: 733376 - DNA, 33 bp, Homo sapien
cttgcaactgggacgatactaggaaagttgaag

SEQ ID NO: 733377 - DNA, 33 bp, Homo sapien
tataggaatagtgctacactctgtcattagggc

SEQ ID NO: 733378 - DNA, 33 bp, Homo sapien
tataggaatagtgctatactctgtcattagggc

SEQ ID NO: 733379 - DNA, 33 bp, Homo sapien
aatcatgtatgtcaagaattagtattcaaaaca

SEQ ID NO: 733380 - DNA, 33 bp, Homo sapien
aatcatgtatgtcaagtattagtattcaaaaca

SEQ ID NO: 733381 - DNA, 33 bp, Homo sapien
tttctttgtatgttaaatggaaaaccataagaa

SEQ ID NO: 733382 - DNA, 33 bp, Homo sapien
tttctttgtatgttaagtggaaaaccataagaa

SEQ ID NO: 733383 - DNA, 33 bp, Homo sapien
atgaaggctaagaaacacattactagtttactt

SEQ ID NO: 733384 - DNA, 33 bp, Homo sapien
atgaaggctaagaaacgcattactagtttactt

SEQ ID NO: 733385 - DNA, 33 bp, Homo sapien
gaatgttacttcattacgtgctttatatttttt

SEQ ID NO: 733386 - DNA, 33 bp, Homo sapien
gaatgttacttcattatgtgctttatatttttt

SEQ ID NO: 733387 - DNA, 33 bp, Homo sapien
attaatgtaagcctcaacacaaggaagaggaca

SEQ ID NO: 733388 - DNA, 33 bp, Homo sapien
attaatgtaagcctcatcacaaggaagaggaca

SEQ ID NO: 733389 - DNA, 33 bp, Homo sapien
atatatatccattcatcaaactcttttcaagtt

SEQ ID NO: 733390 - DNA, 33 bp, Homo sapien
atatatatccattcatgaaactcttttcaagtt

SEQ ID NO: 733391 - DNA, 33 bp, Homo sapien
ttttgcataaaaagggaaaaatcatatcaggca

SEQ ID NO: 733392 - DNA, 33 bp, Homo sapien
ttttgcataaaaaggggaaaatcatatcaggca

SEQ ID NO: 733393 - DNA, 33 bp, Homo sapien
acctattagatactacacttattacttcggtgg

SEQ ID NO: 733394 - DNA, 33 bp, Homo sapien
acctattagatactacgcttattacttcggtgg

SEQ ID NO: 733395 - DNA, 33 bp, Homo sapien
acctgtgcacctaaacaagatatagtattttcc

SEQ ID NO: 733396 - DNA, 33 bp, Homo sapien
acctgtgcacctaaacgagatatagtattttcc

SEQ ID NO: 733397 - DNA, 33 bp, Homo sapien
gaaattcaacaataacaaacaatctttcaacca

SEQ ID NO: 733398 - DNA, 33 bp, Homo sapien
gaaattcaacaataacgaacaatctttcaacca

SEQ ID NO: 733399 - DNA, 33 bp, Homo sapien
gtagtcatcctgacagaaaatggggaaggtgag

SEQ ID NO: 733400 - DNA, 33 bp, Homo sapien
gtagtcatcctgacaggaaatggggaaggtgag

SEQ ID NO: 733401 - DNA, 33 bp, Homo sapien
gcctgagatcaagcaacgctaggacaaccacaa

SEQ ID NO: 733402 - DNA, 33 bp, Homo sapien
gcctgagatcaagcaatgctaggacaaccacaa

SEQ ID NO: 733403 - DNA, 33 bp, Homo sapien
aatacctaacatataagaagcactcaataatat

SEQ ID NO: 733404 - DNA, 33 bp, Homo sapien
aatacctaacatataataagcactcaataatat

SEQ ID NO: 733405 - DNA, 33 bp, Homo sapien
aagccaagttatcctgaagtgggttttcaacat

SEQ ID NO: 733406 - DNA, 33 bp, Homo sapien
aagccaagttatcctgcagtgggttttcaacat

SEQ ID NO: 733407 - DNA, 33 bp, Homo sapien
tactaatgtgagcatacggcaggaacccaattg

SEQ ID NO: 733408 - DNA, 33 bp, Homo sapien
tactaatgtgagcatatggcaggaacccaattg

SEQ ID NO: 733409 - DNA, 33 bp, Homo sapien
ggccttattgtttccactctaatactcttcaat

SEQ ID NO: 733410 - DNA, 33 bp, Homo sapien
ggccttattgtttccattctaatactcttcaat

SEQ ID NO: 733411 - DNA, 33 bp, Homo sapien
ggttatgtatttgtaaactgctgaagttgtgta

SEQ ID NO: 733412 - DNA, 33 bp, Homo sapien
ggttatgtatttgtaagctgctgaagttgtgta

SEQ ID NO: 733413 - DNA, 33 bp, Homo sapien
catagcatgataatcaagttaatgaataataca

SEQ ID NO: 733414 - DNA, 33 bp, Homo sapien
catagcatgataatcaggttaatgaataataca

SEQ ID NO: 733415 - DNA, 33 bp, Homo sapien
tagctcatgcaaaccaatgaaagcaatgttatt

SEQ ID NO: 733416 - DNA, 33 bp, Homo sapien
tagctcatgcaaaccagtgaaagcaatgttatt

SEQ ID NO: 733417 - DNA, 33 bp, Homo sapien
caaatgctttaagaaacggaatagatagagcta

SEQ ID NO: 733418 - DNA, 33 bp, Homo sapien
caaatgctttaagaaagggaatagatagagcta

SEQ ID NO: 733419 - DNA, 33 bp, Homo sapien
ctgatctgttgtccatcaaaatagctattcctt

SEQ ID NO: 733420 - DNA, 33 bp, Homo sapien
ctgatctgttgtccatgaaaatagctattcctt

SEQ ID NO: 733421 - DNA, 33 bp, Homo sapien
ttgtcccttcagtgacggagaactctaaaccaa

SEQ ID NO: 733422 - DNA, 33 bp, Homo sapien
ttgtcccttcagtgactgagaactctaaaccaa

SEQ ID NO: 733423 - DNA, 33 bp, Homo sapien
ttttgaaaatttcaggaaatcgtgtccctaagg

SEQ ID NO: 733424 - DNA, 33 bp, Homo sapien
ttttgaaaatttcaggcaatcgtgtccctaagg

SEQ ID NO: 733425 - DNA, 33 bp, Homo sapien
tggggttgaactgtgacaatgaagggtgacatc

SEQ ID NO: 733426 - DNA, 33 bp, Homo sapien
tggggttgaactgtgagaatgaagggtgacatc

SEQ ID NO: 733427 - DNA, 33 bp, Homo sapien
tatttacctctccctacatgtttatgaggtcca

SEQ ID NO: 733428 - DNA, 33 bp, Homo sapien
tatttacctctccctatatgtttatgaggtcca

SEQ ID NO: 733429 - DNA, 33 bp, Homo sapien
gcatagtcagagtgataaaaagataaaactgct

SEQ ID NO: 733430 - DNA, 33 bp, Homo sapien
gcatagtcagagtgattaaaagataaaactgct

SEQ ID NO: 733431 - DNA, 33 bp, Homo sapien
ataagataatgcatgaaaagtacctcacatatt

SEQ ID NO: 733432 - DNA, 33 bp, Homo sapien
ataagataatgcatgacaagtacctcacatatt

SEQ ID NO: 733433 - DNA, 33 bp, Homo sapien
aagtcacagatatccacactgctcactaggatt

SEQ ID NO: 733434 - DNA, 33 bp, Homo sapien
aagtcacagatatccagactgctcactaggatt

SEQ ID NO: 733435 - DNA, 33 bp, Homo sapien
tattcatttaacctctaaaccagcagtgttcaa

SEQ ID NO: 733436 - DNA, 33 bp, Homo sapien
tattcatttaacctcttaaccagcagtgttcaa

SEQ ID NO: 733437 - DNA, 33 bp, Homo sapien
agctaaggacttaggcgctccccaatactatgt

SEQ ID NO: 733438 - DNA, 33 bp, Homo sapien
agctaaggacttaggctctccccaatactatgt

SEQ ID NO: 733439 - DNA, 33 bp, Homo sapien
tttttgcaattaggaacgtaccctaaggcaagt

SEQ ID NO: 733440 - DNA, 33 bp, Homo sapien
tttttgcaattaggaatgtaccctaaggcaagt

SEQ ID NO: 733441 - DNA, 33 bp, Homo sapien
cttcagtgtttgaggcaagcaatctcattaaca

SEQ ID NO: 733442 - DNA, 33 bp, Homo sapien
cttcagtgtttgaggccagcaatctcattaaca

SEQ ID NO: 733443 - DNA, 33 bp, Homo sapien
tgccaaaaatcacttagaaagcctagaggtgtc

SEQ ID NO: 733444 - DNA, 33 bp, Homo sapien
tgccaaaaatcacttataaagcctagaggtgtc

SEQ ID NO: 733445 - DNA, 33 bp, Homo sapien
gaacacacagatcgcaaggattcagcctgtggg

SEQ ID NO: 733446 - DNA, 33 bp, Homo sapien
gaacacacagatcgcagggattcagcctgtggg

SEQ ID NO: 733447 - DNA, 33 bp, Homo sapien
agaatttagagaagaacaagaaggtactgggtg

SEQ ID NO: 733448 - DNA, 33 bp, Homo sapien
agaatttagagaagaataagaaggtactgggtg

SEQ ID NO: 733449 - DNA, 33 bp, Homo sapien
tttagccattaataccagcatttattttactcc

SEQ ID NO: 733450 - DNA, 33 bp, Homo sapien
tttagccattaataccggcatttattttactcc

SEQ ID NO: 733451 - DNA, 33 bp, Homo sapien
gtctaagagacaccacagaagttctcactaggt

SEQ ID NO: 733452 - DNA, 33 bp, Homo sapien
gtctaagagacaccacggaagttctcactaggt

SEQ ID NO: 733453 - DNA, 33 bp, Homo sapien
gtgagagggagcccaaaagcagatagtccaatg

SEQ ID NO: 733454 - DNA, 33 bp, Homo sapien
gtgagagggagcccaacagcagatagtccaatg

SEQ ID NO: 733455 - DNA, 33 bp, Homo sapien
cctttggcgccatttacctcaagaaccatcagt

SEQ ID NO: 733456 - DNA, 33 bp, Homo sapien
cctttggcgccatttagctcaagaaccatcagt

SEQ ID NO: 733457 - DNA, 33 bp, Homo sapien
gaactatgaacctggcacaattctcaaactttg

SEQ ID NO: 733458 - DNA, 33 bp, Homo sapien
gaactatgaacctggcgcaattctcaaactttg

SEQ ID NO: 733459 - DNA, 33 bp, Homo sapien
tatttgtgagactaggaaggcagcaggagtcag

SEQ ID NO: 733460 - DNA, 33 bp, Homo sapien
tatttgtgagactaggtaggcagcaggagtcag

SEQ ID NO: 733461 - DNA, 33 bp, Homo sapien
tggtgccctttcataaagcagaaagtgtttgag

SEQ ID NO: 733462 - DNA, 33 bp, Homo sapien
tggtgccctttcataatgcagaaagtgtttgag

SEQ ID NO: 733463 - DNA, 33 bp, Homo sapien
ctatgaggttgtgggtaaaacctaactgcctaa

SEQ ID NO: 733464 - DNA, 33 bp, Homo sapien
ctatgaggttgtgggtcaaacctaactgcctaa

SEQ ID NO: 733465 - DNA, 33 bp, Homo sapien
tttgtcttaacccacacgtactggaattcttga

SEQ ID NO: 733466 - DNA, 33 bp, Homo sapien
tttgtcttaacccacatgtactggaattcttga

SEQ ID NO: 733467 - DNA, 33 bp, Homo sapien
ggatctgaaagtctggcaagaagttaagcagtt

SEQ ID NO: 733468 - DNA, 33 bp, Homo sapien
ggatctgaaagtctggtaagaagttaagcagtt

SEQ ID NO: 733469 - DNA, 33 bp, Homo sapien
gcaacaagaattttaacactctcaaccctctga

SEQ ID NO: 733470 - DNA, 33 bp, Homo sapien
gcaacaagaattttaagactctcaaccctctga

SEQ ID NO: 733471 - DNA, 33 bp, Homo sapien
cagatttccatgaaccaactcacaatattgctt

SEQ ID NO: 733472 - DNA, 33 bp, Homo sapien
cagatttccatgaaccgactcacaatattgctt

SEQ ID NO: 733473 - DNA, 33 bp, Homo sapien
atagatatttattgaacgtccaaatgtgcccaa

SEQ ID NO: 733474 - DNA, 33 bp, Homo sapien
atagatatttattgaatgtccaaatgtgcccaa

SEQ ID NO: 733475 - DNA, 33 bp, Homo sapien
ctaccattttctgggcaccttctaatgacaagt

SEQ ID NO: 733476 - DNA, 33 bp, Homo sapien
ctaccattttctgggcgccttctaatgacaagt

SEQ ID NO: 733477 - DNA, 33 bp, Homo sapien
tggtagttcagggaaactcaatgttttataagg

SEQ ID NO: 733478 - DNA, 33 bp, Homo sapien
tggtagttcagggaaattcaatgttttataagg

SEQ ID NO: 733479 - DNA, 33 bp, Homo sapien
ttctttatggaaacaactgtggaaaatgtataa

SEQ ID NO: 733480 - DNA, 33 bp, Homo sapien
ttctttatggaaacaattgtggaaaatgtataa

SEQ ID NO: 733481 - DNA, 33 bp, Homo sapien
tttaaatagtatctgacgaatgcaccagcaaaa

SEQ ID NO: 733482 - DNA, 33 bp, Homo sapien
tttaaatagtatctgatgaatgcaccagcaaaa

SEQ ID NO: 733483 - DNA, 33 bp, Homo sapien
tcttgggtaagatagaagatagtccatgaaatg

SEQ ID NO: 733484 - DNA, 33 bp, Homo sapien
tcttgggtaagatagatgatagtccatgaaatg

SEQ ID NO: 733485 - DNA, 33 bp, Homo sapien
tacatcaccatagttcactaaatgagaggtaaa

SEQ ID NO: 733486 - DNA, 33 bp, Homo sapien
tacatcaccatagttcgctaaatgagaggtaaa

SEQ ID NO: 733487 - DNA, 33 bp, Homo sapien
ctgctgtgagaaatacaggtgtctgagcctcga

SEQ ID NO: 733488 - DNA, 33 bp, Homo sapien
ctgctgtgagaaatacgggtgtctgagcctcga

SEQ ID NO: 733489 - DNA, 33 bp, Homo sapien
gagacaccaagaaacaagtgacagaaggctacc

SEQ ID NO: 733490 - DNA, 33 bp, Homo sapien
gagacaccaagaaacaggtgacagaaggctacc

SEQ ID NO: 733491 - DNA, 33 bp, Homo sapien
tgttctcctctttaccacgaggaagcaacactg

SEQ ID NO: 733492 - DNA, 33 bp, Homo sapien
tgttctcctctttaccgcgaggaagcaacactg

SEQ ID NO: 733493 - DNA, 33 bp, Homo sapien
ttcagcatatgtgttgcaaagggcatcgacttt

SEQ ID NO: 733494 - DNA, 33 bp, Homo sapien
ttcagcatatgtgttggaaagggcatcgacttt

SEQ ID NO: 733495 - DNA, 33 bp, Homo sapien
gtggatgttggtgagagagaagttggtaagagc

SEQ ID NO: 733496 - DNA, 33 bp, Homo sapien
gtggatgttggtgagatagaagttggtaagagc

SEQ ID NO: 733497 - DNA, 33 bp, Homo sapien
ctcaggttaagaaataaggaactgaacaaatgt

SEQ ID NO: 733498 - DNA, 33 bp, Homo sapien
ctcaggttaagaaatagggaactgaacaaatgt

SEQ ID NO: 733499 - DNA, 33 bp, Homo sapien
gcaaaagcctctgaaaatcacagtaaaattatt

SEQ ID NO: 733500 - DNA, 33 bp, Homo sapien
gcaaaagcctctgaaagtcacagtaaaattatt

SEQ ID NO: 733501 - DNA, 33 bp, Homo sapien
tgtgaataattgaaagcatgagtaatccaaagt

SEQ ID NO: 733502 - DNA, 33 bp, Homo sapien
tgtgaataattgaaagtatgagtaatccaaagt

SEQ ID NO: 733503 - DNA, 33 bp, Homo sapien
tttaattctcaaaggggcaatccagtcagtcaa

SEQ ID NO: 733504 - DNA, 33 bp, Homo sapien
tttaattctcaaagggtcaatccagtcagtcaa

SEQ ID NO: 733505 - DNA, 33 bp, Homo sapien
cattatttgtcttaaacaggagcaaacaactac

SEQ ID NO: 733506 - DNA, 33 bp, Homo sapien
cattatttgtcttaaataggagcaaacaactac

SEQ ID NO: 733507 - DNA, 33 bp, Homo sapien
catcctactagcccagaagtgcccccaagagat

SEQ ID NO: 733508 - DNA, 33 bp, Homo sapien
catcctactagcccaggagtgcccccaagagat

SEQ ID NO: 733509 - DNA, 33 bp, Homo sapien
gtgtgtgattatcaaaatgtacacgcccaccta

SEQ ID NO: 733510 - DNA, 33 bp, Homo sapien
gtgtgtgattatcaaagtgtacacgcccaccta

SEQ ID NO: 733511 - DNA, 33 bp, Homo sapien
tttgtgtccattgctacacctgcatacataatg

SEQ ID NO: 733512 - DNA, 33 bp, Homo sapien
tttgtgtccattgctatacctgcatacataatg

SEQ ID NO: 733513 - DNA, 33 bp, Homo sapien
gatttcttgttgctagcagcagtcatgtctgat

SEQ ID NO: 733514 - DNA, 33 bp, Homo sapien
gatttcttgttgctagtagcagtcatgtctgat

SEQ ID NO: 733515 - DNA, 33 bp, Homo sapien
ctccactcttcccacaatgtccctcctgcattg

SEQ ID NO: 733516 - DNA, 33 bp, Homo sapien
ctccactcttcccacagtgtccctcctgcattg

SEQ ID NO: 733517 - DNA, 33 bp, Homo sapien
aagaatgagtataaaaatggaatatgacaaaat

SEQ ID NO: 733518 - DNA, 33 bp, Homo sapien
aagaatgagtataaaagtggaatatgacaaaat

SEQ ID NO: 733519 - DNA, 33 bp, Homo sapien
ttaaaaatcaaaagaaatggttgagagcttatt

SEQ ID NO: 733520 - DNA, 33 bp, Homo sapien
ttaaaaatcaaaagaagtggttgagagcttatt

SEQ ID NO: 733521 - DNA, 33 bp, Homo sapien
aaagggcataaaacacgaaaggcattaattgtc

SEQ ID NO: 733522 - DNA, 33 bp, Homo sapien
aaagggcataaaacactaaaggcattaattgtc

SEQ ID NO: 733523 - DNA, 33 bp, Homo sapien
agatttggagttgtgaagcaataaattgataag

SEQ ID NO: 733524 - DNA, 33 bp, Homo sapien
agatttggagttgtgaggcaataaattgataag

SEQ ID NO: 733525 - DNA, 33 bp, Homo sapien
gtattaagcctagtaccgattagtgatttttcc

SEQ ID NO: 733526 - DNA, 33 bp, Homo sapien
gtattaagcctagtactgattagtgatttttcc

SEQ ID NO: 733527 - DNA, 33 bp, Homo sapien
gtttaaatttcagtgacgtaaaccccttccatc

SEQ ID NO: 733528 - DNA, 33 bp, Homo sapien
gtttaaatttcagtgatgtaaaccccttccatc

SEQ ID NO: 733529 - DNA, 33 bp, Homo sapien
tagggtaatacttagaaaaggaaggagaggtct

SEQ ID NO: 733530 - DNA, 33 bp, Homo sapien
tagggtaatacttagagaaggaaggagaggtct

SEQ ID NO: 733531 - DNA, 33 bp, Homo sapien
cagaacgtagaaggggaaataggtgaatgagcc

SEQ ID NO: 733532 - DNA, 33 bp, Homo sapien
cagaacgtagaaggggtaataggtgaatgagcc

SEQ ID NO: 733533 - DNA, 33 bp, Homo sapien
ggtactgaggcttataacaatcattcagtggca

SEQ ID NO: 733534 - DNA, 33 bp, Homo sapien
ggtactgaggcttatagcaatcattcagtggca

SEQ ID NO: 733535 - DNA, 33 bp, Homo sapien
ctgacaatccaagaaacgaatctttagcattgg

SEQ ID NO: 733536 - DNA, 33 bp, Homo sapien
ctgacaatccaagaaatgaatctttagcattgg

SEQ ID NO: 733537 - DNA, 33 bp, Homo sapien
tatatgaaagtcagcaaaaagtcccagccttat

SEQ ID NO: 733538 - DNA, 33 bp, Homo sapien
tatatgaaagtcagcacaaagtcccagccttat

SEQ ID NO: 733539 - DNA, 33 bp, Homo sapien
gcagggagaggaaataccactaagagagtaaat

SEQ ID NO: 733540 - DNA, 33 bp, Homo sapien
gcagggagaggaaatagcactaagagagtaaat

SEQ ID NO: 733541 - DNA, 33 bp, Homo sapien
aggactatcttacccccggaacttgtaggagtt

SEQ ID NO: 733542 - DNA, 33 bp, Homo sapien
aggactatcttacccctggaacttgtaggagtt

SEQ ID NO: 733543 - DNA, 33 bp, Homo sapien
ttacttacagccaacacagtacgtttctgtttt

SEQ ID NO: 733544 - DNA, 33 bp, Homo sapien
ttacttacagccaacatagtacgtttctgtttt

SEQ ID NO: 733545 - DNA, 33 bp, Homo sapien
caaattcattttgtcaatattgggtgacatatt

SEQ ID NO: 733546 - DNA, 33 bp, Homo sapien
caaattcattttgtcagtattgggtgacatatt

SEQ ID NO: 733547 - DNA, 33 bp, Homo sapien
agtcacttactacaaacggtggaaaacaacggt

SEQ ID NO: 733548 - DNA, 33 bp, Homo sapien
agtcacttactacaaatggtggaaaacaacggt

SEQ ID NO: 733549 - DNA, 33 bp, Homo sapien
gatatttaacggattccgaaaatcaaatttaag

SEQ ID NO: 733550 - DNA, 33 bp, Homo sapien
gatatttaacggattctgaaaatcaaatttaag

SEQ ID NO: 733551 - DNA, 33 bp, Homo sapien
agtatctgtaacttaaagtgaagaaaagtcttt

SEQ ID NO: 733552 - DNA, 33 bp, Homo sapien
agtatctgtaacttaaggtgaagaaaagtcttt

SEQ ID NO: 733553 - DNA, 33 bp, Homo sapien
ccacttgcaaacatgaggaccacaaaaattcta

SEQ ID NO: 733554 - DNA, 33 bp, Homo sapien
ccacttgcaaacatgatgaccacaaaaattcta

SEQ ID NO: 733555 - DNA, 33 bp, Homo sapien
caaagctgtaaatggacggagttatctcagatc

SEQ ID NO: 733556 - DNA, 33 bp, Homo sapien
caaagctgtaaatggatggagttatctcagatc

SEQ ID NO: 733557 - DNA, 33 bp, Homo sapien
atatgattaaacgataggaacttatttgcttta

SEQ ID NO: 733558 - DNA, 33 bp, Homo sapien
atatgattaaacgatatgaacttatttgcttta

SEQ ID NO: 733559 - DNA, 33 bp, Homo sapien
tgccttttgtcttaaacgattgtctccacttta

SEQ ID NO: 733560 - DNA, 33 bp, Homo sapien
tgccttttgtcttaaatgattgtctccacttta

SEQ ID NO: 733561 - DNA, 33 bp, Homo sapien
gcttaaagattgttggacacagaatgggagtta

SEQ ID NO: 733562 - DNA, 33 bp, Homo sapien
gcttaaagattgttgggcacagaatgggagtta

SEQ ID NO: 733563 - DNA, 33 bp, Homo sapien
caacacaggatgcaacaggatggcaagataagg

SEQ ID NO: 733564 - DNA, 33 bp, Homo sapien
caacacaggatgcaacgggatggcaagataagg

SEQ ID NO: 733565 - DNA, 33 bp, Homo sapien
taagctcagccccttacattacccagcaaatgc

SEQ ID NO: 733566 - DNA, 33 bp, Homo sapien
taagctcagccccttatattacccagcaaatgc

SEQ ID NO: 733567 - DNA, 33 bp, Homo sapien
agagtggttgaggataacagtgaagttttggag

SEQ ID NO: 733568 - DNA, 33 bp, Homo sapien
agagtggttgaggatagcagtgaagttttggag

SEQ ID NO: 733569 - DNA, 33 bp, Homo sapien
tctagccaatcacaaacgtacttgttttccttt

SEQ ID NO: 733570 - DNA, 33 bp, Homo sapien
tctagccaatcacaaatgtacttgttttccttt

SEQ ID NO: 733571 - DNA, 33 bp, Homo sapien
atttatatggtaacaaatatgtctttaaaatgc

SEQ ID NO: 733572 - DNA, 33 bp, Homo sapien
atttatatggtaacaagtatgtctttaaaatgc

SEQ ID NO: 733573 - DNA, 33 bp, Homo sapien
aaataagtaagtcgtacgcatatgagatcaacc

SEQ ID NO: 733574 - DNA, 33 bp, Homo sapien
aaataagtaagtcgtatgcatatgagatcaacc

SEQ ID NO: 733575 - DNA, 33 bp, Homo sapien
aattgtacctgatgccagagctctaaacttctg

SEQ ID NO: 733576 - DNA, 33 bp, Homo sapien
aattgtacctgatgccggagctctaaacttctg

SEQ ID NO: 733577 - DNA, 33 bp, Homo sapien
acagcaaacaaaaagacattcaagaaaagcaca

SEQ ID NO: 733578 - DNA, 33 bp, Homo sapien
acagcaaacaaaaagagattcaagaaaagcaca

SEQ ID NO: 733579 - DNA, 33 bp, Homo sapien
cactgtttcagactcaaaaccttacactgtata

SEQ ID NO: 733580 - DNA, 33 bp, Homo sapien
cactgtttcagactcagaaccttacactgtata

SEQ ID NO: 733581 - DNA, 33 bp, Homo sapien
tttagcatggcaaaagaccttgatctagttttc

SEQ ID NO: 733582 - DNA, 33 bp, Homo sapien
tttagcatggcaaaagtccttgatctagttttc

SEQ ID NO: 733583 - DNA, 33 bp, Homo sapien
gtggagataatgagctaaagtaagatatgtttt

SEQ ID NO: 733584 - DNA, 33 bp, Homo sapien
gtggagataatgagctcaagtaagatatgtttt

SEQ ID NO: 733585 - DNA, 33 bp, Homo sapien
tatatactaaaaactccaccttgtgaaacgatt

SEQ ID NO: 733586 - DNA, 33 bp, Homo sapien
tatatactaaaaactctaccttgtgaaacgatt

SEQ ID NO: 733587 - DNA, 33 bp, Homo sapien
gataaggccattggaggatttgatacctagtaa

SEQ ID NO: 733588 - DNA, 33 bp, Homo sapien
gataaggccattggagtatttgatacctagtaa

SEQ ID NO: 733589 - DNA, 33 bp, Homo sapien
ttgcctatggagtttaaaaaatgcacaaagcca

SEQ ID NO: 733590 - DNA, 33 bp, Homo sapien
ttgcctatggagtttacaaaatgcacaaagcca

SEQ ID NO: 733591 - DNA, 33 bp, Homo sapien
gcataaaccattcctaaaacctctcaaaataca

SEQ ID NO: 733592 - DNA, 33 bp, Homo sapien
gcataaaccattcctagaacctctcaaaataca

SEQ ID NO: 733593 - DNA, 33 bp, Homo sapien
aacgtgtgggtccaaaagtatttgcacttttac

SEQ ID NO: 733594 - DNA, 33 bp, Homo sapien
aacgtgtgggtccaaaggtatttgcacttttac

SEQ ID NO: 733595 - DNA, 33 bp, Homo sapien
tcacctctatcatgtaaaatttttgcattgctt

SEQ ID NO: 733596 - DNA, 33 bp, Homo sapien
tcacctctatcatgtataatttttgcattgctt

SEQ ID NO: 733597 - DNA, 33 bp, Homo sapien
tctgttaaaataaatgccaggttcaggataata

SEQ ID NO: 733598 - DNA, 33 bp, Homo sapien
tctgttaaaataaatgtcaggttcaggataata

SEQ ID NO: 733599 - DNA, 33 bp, Homo sapien
cttctccattgatgtaaatttgacaggttgtat

SEQ ID NO: 733600 - DNA, 33 bp, Homo sapien
cttctccattgatgtagatttgacaggttgtat

SEQ ID NO: 733601 - DNA, 33 bp, Homo sapien
cctcagcctgcagctgaaagcactctccagtca

SEQ ID NO: 733602 - DNA, 33 bp, Homo sapien
cctcagcctgcagctgtaagcactctccagtca

SEQ ID NO: 733603 - DNA, 33 bp, Homo sapien
cacagtaatggtggaacaccctgataggggaaa

SEQ ID NO: 733604 - DNA, 33 bp, Homo sapien
cacagtaatggtggaataccctgataggggaaa

SEQ ID NO: 733605 - DNA, 33 bp, Homo sapien
agagactatgtaaaaacggagagaatgtccact

SEQ ID NO: 733606 - DNA, 33 bp, Homo sapien
agagactatgtaaaaatggagagaatgtccact

SEQ ID NO: 733607 - DNA, 33 bp, Homo sapien
acattctataacaggcaaagagtagttgttaag

SEQ ID NO: 733608 - DNA, 33 bp, Homo sapien
acattctataacaggccaagagtagttgttaag

SEQ ID NO: 733609 - DNA, 33 bp, Homo sapien
ctataatgtgttttagaccatgaaaaaaaaatt

SEQ ID NO: 733610 - DNA, 33 bp, Homo sapien
ctataatgtgttttaggccatgaaaaaaaaatt

SEQ ID NO: 733611 - DNA, 33 bp, Homo sapien
ctttggtgtcagtttacacagatcaaaggggat

SEQ ID NO: 733612 - DNA, 33 bp, Homo sapien
ctttggtgtcagtttatacagatcaaaggggat

SEQ ID NO: 733613 - DNA, 33 bp, Homo sapien
tatgcttattcttatgccaacaacacactgttt

SEQ ID NO: 733614 - DNA, 33 bp, Homo sapien
tatgcttattcttatgtcaacaacacactgttt

SEQ ID NO: 733615 - DNA, 33 bp, Homo sapien
tacctggtatggtctaactttttgaatatagcc

SEQ ID NO: 733616 - DNA, 33 bp, Homo sapien
tacctggtatggtctatctttttgaatatagcc

SEQ ID NO: 733617 - DNA, 33 bp, Homo sapien
ccaaaggcaaaaaatacagttggtagagacaga

SEQ ID NO: 733618 - DNA, 33 bp, Homo sapien
ccaaaggcaaaaaatagagttggtagagacaga

SEQ ID NO: 733619 - DNA, 33 bp, Homo sapien
atcctagggcagcgggccaaactatggtgaact

SEQ ID NO: 733620 - DNA, 33 bp, Homo sapien
atcctagggcagcgggtcaaactatggtgaact

SEQ ID NO: 733621 - DNA, 33 bp, Homo sapien
ggggatgcttatgtaccgacggtgggaatgtaa

SEQ ID NO: 733622 - DNA, 33 bp, Homo sapien
ggggatgcttatgtacggacggtgggaatgtaa

SEQ ID NO: 733623 - DNA, 33 bp, Homo sapien
tctagaaaaactgttgaacctgaagagtcagga

SEQ ID NO: 733624 - DNA, 33 bp, Homo sapien
tctagaaaaactgttggacctgaagagtcagga

SEQ ID NO: 733625 - DNA, 33 bp, Homo sapien
ccttggcttccagacaatgaaaagctgcttttg

SEQ ID NO: 733626 - DNA, 33 bp, Homo sapien
ccttggcttccagacactgaaaagctgcttttg

SEQ ID NO: 733627 - DNA, 33 bp, Homo sapien
attggccagagataacaatgctgcattaaaatt

SEQ ID NO: 733628 - DNA, 33 bp, Homo sapien
attggccagagataacgatgctgcattaaaatt

SEQ ID NO: 733629 - DNA, 33 bp, Homo sapien
ccattacacatgtatccagtttaatgttacctt

SEQ ID NO: 733630 - DNA, 33 bp, Homo sapien
ccattacacatgtatctagtttaatgttacctt

SEQ ID NO: 733631 - DNA, 33 bp, Homo sapien
aactgagctttgtctacggaggcagactgatgt

SEQ ID NO: 733632 - DNA, 33 bp, Homo sapien
aactgagctttgtctatggaggcagactgatgt

SEQ ID NO: 733633 - DNA, 33 bp, Homo sapien
attataggtaatgactaagggcactgtgctgaa

SEQ ID NO: 733634 - DNA, 33 bp, Homo sapien
attataggtaatgactgagggcactgtgctgaa

SEQ ID NO: 733635 - DNA, 33 bp, Homo sapien
cacttaaagcctagtcaacacacagataaggta

SEQ ID NO: 733636 - DNA, 33 bp, Homo sapien
cacttaaagcctagtcgacacacagataaggta

SEQ ID NO: 733637 - DNA, 33 bp, Homo sapien
agtgtaaatatatccacgtctctgctcagttgt

SEQ ID NO: 733638 - DNA, 33 bp, Homo sapien
agtgtaaatatatccatgtctctgctcagttgt

SEQ ID NO: 733639 - DNA, 33 bp, Homo sapien
tcctaaacagatcctaaggaaggagtgaggaag

SEQ ID NO: 733640 - DNA, 33 bp, Homo sapien
tcctaaacagatcctacggaaggagtgaggaag

SEQ ID NO: 733641 - DNA, 33 bp, Homo sapien
gctaaaaactttaagccatgggcaccacacagc

SEQ ID NO: 733642 - DNA, 33 bp, Homo sapien
gctaaaaactttaagctatgggcaccacacagc

SEQ ID NO: 733643 - DNA, 33 bp, Homo sapien
gatctcttggaatgctcacttctggaacactgg

SEQ ID NO: 733644 - DNA, 33 bp, Homo sapien
gatctcttggaatgcttacttctggaacactgg

SEQ ID NO: 733645 - DNA, 33 bp, Homo sapien
ataaaattggctttcaacatgataaaattttat

SEQ ID NO: 733646 - DNA, 33 bp, Homo sapien
ataaaattggctttcagcatgataaaattttat

SEQ ID NO: 733647 - DNA, 33 bp, Homo sapien
gagaagtaattgttggaacaaaatttcccagga

SEQ ID NO: 733648 - DNA, 33 bp, Homo sapien
gagaagtaattgttgggacaaaatttcccagga

SEQ ID NO: 733649 - DNA, 33 bp, Homo sapien
gttaccttcactgtcaaaagagcaattaaaatg

SEQ ID NO: 733650 - DNA, 33 bp, Homo sapien
gttaccttcactgtcagaagagcaattaaaatg

SEQ ID NO: 733651 - DNA, 33 bp, Homo sapien
ctacctcacctcttaactgactctcagtgtttt

SEQ ID NO: 733652 - DNA, 33 bp, Homo sapien
ctacctcacctcttaattgactctcagtgtttt

SEQ ID NO: 733653 - DNA, 33 bp, Homo sapien
ttactaagaagttcacccaataaagaagatagg

SEQ ID NO: 733654 - DNA, 33 bp, Homo sapien
ttactaagaagttcactcaataaagaagatagg

SEQ ID NO: 733655 - DNA, 33 bp, Homo sapien
aaatgttatgaggatacgaattattagtaagtt

SEQ ID NO: 733656 - DNA, 33 bp, Homo sapien
aaatgttatgaggatatgaattattagtaagtt

SEQ ID NO: 733657 - DNA, 33 bp, Homo sapien
atttatgcttgggaaactaatgtattcaaaaaa

SEQ ID NO: 733658 - DNA, 33 bp, Homo sapien
atttatgcttgggaaagtaatgtattcaaaaaa

SEQ ID NO: 733659 - DNA, 33 bp, Homo sapien
cttaatctttggcaacggcattatctataatcc

SEQ ID NO: 733660 - DNA, 33 bp, Homo sapien
cttaatctttggcaactgcattatctataatcc

SEQ ID NO: 733661 - DNA, 33 bp, Homo sapien
aactttttgacctgtaagtgcttgtaatactct

SEQ ID NO: 733662 - DNA, 33 bp, Homo sapien
aactttttgacctgtaggtgcttgtaatactct

SEQ ID NO: 733663 - DNA, 33 bp, Homo sapien
ataaataataaaaatgaaagcacgaataaaata

SEQ ID NO: 733664 - DNA, 33 bp, Homo sapien
ataaataataaaaatggaagcacgaataaaata

SEQ ID NO: 733665 - DNA, 33 bp, Homo sapien
agggggcagggagttacgcacaggacaatacta

SEQ ID NO: 733666 - DNA, 33 bp, Homo sapien
agggggcagggagttatgcacaggacaatacta

SEQ ID NO: 733667 - DNA, 33 bp, Homo sapien
aggcacagtattggaacgggtttagttctccag

SEQ ID NO: 733668 - DNA, 33 bp, Homo sapien
aggcacagtattggaatgggtttagttctccag

SEQ ID NO: 733669 - DNA, 33 bp, Homo sapien
aataaaacttgaaaaactgctagaggtacataa

SEQ ID NO: 733670 - DNA, 33 bp, Homo sapien
aataaaacttgaaaaattgctagaggtacataa

SEQ ID NO: 733671 - DNA, 33 bp, Homo sapien
gctgtcaagagaaattaaagttgaaacaaatac

SEQ ID NO: 733672 - DNA, 33 bp, Homo sapien
gctgtcaagagaaatttaagttgaaacaaatac

SEQ ID NO: 733673 - DNA, 33 bp, Homo sapien
ttccttgattagaatgcatctgctggaatacaa

SEQ ID NO: 733674 - DNA, 33 bp, Homo sapien
ttccttgattagaatggatctgctggaatacaa

SEQ ID NO: 733675 - DNA, 33 bp, Homo sapien
tttgcaccaacctataaaagacctgtatattct

SEQ ID NO: 733676 - DNA, 33 bp, Homo sapien
tttgcaccaacctatataagacctgtatattct

SEQ ID NO: 733677 - DNA, 33 bp, Homo sapien
ctcaagttctgttggcaagatctggtcatatag

SEQ ID NO: 733678 - DNA, 33 bp, Homo sapien
ctcaagttctgttggcgagatctggtcatatag

SEQ ID NO: 733679 - DNA, 33 bp, Homo sapien
aagacacaaaaggaggaaaagcatacattcaga

SEQ ID NO: 733680 - DNA, 33 bp, Homo sapien
aagacacaaaaggagggaaagcatacattcaga

SEQ ID NO: 733681 - DNA, 33 bp, Homo sapien
tctaatcaatcagtagacctctctctaatttat

SEQ ID NO: 733682 - DNA, 33 bp, Homo sapien
tctaatcaatcagtaggcctctctctaatttat

SEQ ID NO: 733683 - DNA, 33 bp, Homo sapien
ggtagccaggaagaccgctagaagaagatgata

SEQ ID NO: 733684 - DNA, 33 bp, Homo sapien
ggtagccaggaagacctctagaagaagatgata

SEQ ID NO: 733685 - DNA, 33 bp, Homo sapien
gttcttctattcctcaatcgttcaatttattca

SEQ ID NO: 733686 - DNA, 33 bp, Homo sapien
gttcttctattcctcattcgttcaatttattca

SEQ ID NO: 733687 - DNA, 33 bp, Homo sapien
cttgcttagaaggcccggacctcaattcctgcc

SEQ ID NO: 733688 - DNA, 33 bp, Homo sapien
cttgcttagaaggccctgacctcaattcctgcc

SEQ ID NO: 733689 - DNA, 33 bp, Homo sapien
acatccaatatccacactattagagttctaaat

SEQ ID NO: 733690 - DNA, 33 bp, Homo sapien
acatccaatatccacattattagagttctaaat

SEQ ID NO: 733691 - DNA, 33 bp, Homo sapien
ttccaagctgatagaaatctgagtaactttttt

SEQ ID NO: 733692 - DNA, 33 bp, Homo sapien
ttccaagctgatagaagtctgagtaactttttt

SEQ ID NO: 733693 - DNA, 33 bp, Homo sapien
aatatctcactgtgtgaaatcattgtctatcat

SEQ ID NO: 733694 - DNA, 33 bp, Homo sapien
aatatctcactgtgtgtaatcattgtctatcat

SEQ ID NO: 733695 - DNA, 33 bp, Homo sapien
tgaacgtgatatgaacgactgagagatgattcc

SEQ ID NO: 733696 - DNA, 33 bp, Homo sapien
tgaacgtgatatgaactactgagagatgattcc

SEQ ID NO: 733697 - DNA, 33 bp, Homo sapien
ataatattgcatcagactaaaggatacactttt

SEQ ID NO: 733698 - DNA, 33 bp, Homo sapien
ataatattgcatcagattaaaggatacactttt

SEQ ID NO: 733699 - DNA, 33 bp, Homo sapien
agagaactgtgaattaaaagttgccattgttac

SEQ ID NO: 733700 - DNA, 33 bp, Homo sapien
agagaactgtgaattagaagttgccattgttac

SEQ ID NO: 733701 - DNA, 33 bp, Homo sapien
catcaagcctgtaaacagatgtggcttcttgaa

SEQ ID NO: 733702 - DNA, 33 bp, Homo sapien
catcaagcctgtaaacggatgtggcttcttgaa

SEQ ID NO: 733703 - DNA, 33 bp, Homo sapien
ttaataattacacatcaaacattatacagcacc

SEQ ID NO: 733704 - DNA, 33 bp, Homo sapien
ttaataattacacatcgaacattatacagcacc

SEQ ID NO: 733705 - DNA, 33 bp, Homo sapien
gcaactggggctcagaaaagttaggcaatttgc

SEQ ID NO: 733706 - DNA, 33 bp, Homo sapien
gcaactggggctcagagaagttaggcaatttgc

SEQ ID NO: 733707 - DNA, 33 bp, Homo sapien
cttcccctatagactcaaaactccttgaaagca

SEQ ID NO: 733708 - DNA, 33 bp, Homo sapien
cttcccctatagactcgaaactccttgaaagca

SEQ ID NO: 733709 - DNA, 33 bp, Homo sapien
cgtgagtttgtagtaaatcttatggttgacaat

SEQ ID NO: 733710 - DNA, 33 bp, Homo sapien
cgtgagtttgtagtaagtcttatggttgacaat

SEQ ID NO: 733711 - DNA, 33 bp, Homo sapien
agatgtggaggtgaaaaactaataatatagatg

SEQ ID NO: 733712 - DNA, 33 bp, Homo sapien
agatgtggaggtgaaagactaataatatagatg

SEQ ID NO: 733713 - DNA, 33 bp, Homo sapien
cataggtgaaaaatcacgtccagaaagatatta

SEQ ID NO: 733714 - DNA, 33 bp, Homo sapien
cataggtgaaaaatcaggtccagaaagatatta

SEQ ID NO: 733715 - DNA, 33 bp, Homo sapien
acaggggtgagaatgacgaagagctcaggcatg

SEQ ID NO: 733716 - DNA, 33 bp, Homo sapien
acaggggtgagaatgatgaagagctcaggcatg

SEQ ID NO: 733717 - DNA, 33 bp, Homo sapien
gaaggaatgatttctaacatgggaaagattttg

SEQ ID NO: 733718 - DNA, 33 bp, Homo sapien
gaaggaatgatttctagcatgggaaagattttg

SEQ ID NO: 733719 - DNA, 33 bp, Homo sapien
gtttctgagcactaaaagcagtttcatttctga

SEQ ID NO: 733720 - DNA, 33 bp, Homo sapien
gtttctgagcactaaaggcagtttcatttctga

SEQ ID NO: 733721 - DNA, 33 bp, Homo sapien
aaagaacagctcctcacgctcaaatattgtata

SEQ ID NO: 733722 - DNA, 33 bp, Homo sapien
aaagaacagctcctcatgctcaaatattgtata

SEQ ID NO: 733723 - DNA, 33 bp, Homo sapien
tgaaagctcttcaggacgattatgctaacaagt

SEQ ID NO: 733724 - DNA, 33 bp, Homo sapien
tgaaagctcttcaggatgattatgctaacaagt

SEQ ID NO: 733725 - DNA, 33 bp, Homo sapien
aaagcccatgcagacacaaggagaatgtgcaaa

SEQ ID NO: 733726 - DNA, 33 bp, Homo sapien
aaagcccatgcagacagaaggagaatgtgcaaa

SEQ ID NO: 733727 - DNA, 33 bp, Homo sapien
cagtgtcatccttataataagcatccaggaaaa

SEQ ID NO: 733728 - DNA, 33 bp, Homo sapien
cagtgtcatccttatagtaagcatccaggaaaa

SEQ ID NO: 733729 - DNA, 33 bp, Homo sapien
aatctatgcttcttcccgaaaaagaagaatcgg

SEQ ID NO: 733730 - DNA, 33 bp, Homo sapien
aatctatgcttcttcctgaaaaagaagaatcgg

SEQ ID NO: 733731 - DNA, 33 bp, Homo sapien
cagagagaatcacaaactggaggcctggcttct

SEQ ID NO: 733732 - DNA, 33 bp, Homo sapien
cagagagaatcacaaagtggaggcctggcttct

SEQ ID NO: 733733 - DNA, 33 bp, Homo sapien
ctaattgtaaggtacacacaataaatgtttttc

SEQ ID NO: 733734 - DNA, 33 bp, Homo sapien
ctaattgtaaggtacagacaataaatgtttttc

SEQ ID NO: 733735 - DNA, 33 bp, Homo sapien
gaggaaaggcctggaactgtttagtccactcaa

SEQ ID NO: 733736 - DNA, 33 bp, Homo sapien
gaggaaaggcctggaattgtttagtccactcaa

SEQ ID NO: 733737 - DNA, 33 bp, Homo sapien
cagatttgctgactaacgcttttaatgaatgtc

SEQ ID NO: 733738 - DNA, 33 bp, Homo sapien
cagatttgctgactaatgcttttaatgaatgtc

SEQ ID NO: 733739 - DNA, 33 bp, Homo sapien
gtgcaagggccagagaagatgttaagaaaagta

SEQ ID NO: 733740 - DNA, 33 bp, Homo sapien
gtgcaagggccagagaggatgttaagaaaagta

SEQ ID NO: 733741 - DNA, 33 bp, Homo sapien
catttgtctcaaaacactacttttcttaacatc

SEQ ID NO: 733742 - DNA, 33 bp, Homo sapien
catttgtctcaaaacattacttttcttaacatc

SEQ ID NO: 733743 - DNA, 33 bp, Homo sapien
cctttggaaccgctgcccacaaaactaggccag

SEQ ID NO: 733744 - DNA, 33 bp, Homo sapien
cctttggaaccgctgctcacaaaactaggccag

SEQ ID NO: 733745 - DNA, 33 bp, Homo sapien
agactgtatatcctcaaaagacactactgagag

SEQ ID NO: 733746 - DNA, 33 bp, Homo sapien
agactgtatatcctcagaagacactactgagag

SEQ ID NO: 733747 - DNA, 33 bp, Homo sapien
ttttattatttattaccacttggtactcttaga

SEQ ID NO: 733748 - DNA, 33 bp, Homo sapien
ttttattatttattactacttggtactcttaga

SEQ ID NO: 733749 - DNA, 33 bp, Homo sapien
gaacatagagattttgaaatcaaacagactcag

SEQ ID NO: 733750 - DNA, 33 bp, Homo sapien
gaacatagagattttggaatcaaacagactcag

SEQ ID NO: 733751 - DNA, 33 bp, Homo sapien
cttattctgggatcaacgaatacatttcaaggt

SEQ ID NO: 733752 - DNA, 33 bp, Homo sapien
cttattctgggatcaatgaatacatttcaaggt

SEQ ID NO: 733753 - DNA, 33 bp, Homo sapien
gccatttgcaaagacacaaggaagtgatggaat

SEQ ID NO: 733754 - DNA, 33 bp, Homo sapien
gccatttgcaaagacataaggaagtgatggaat

SEQ ID NO: 733755 - DNA, 33 bp, Homo sapien
acttttcaggtcatcaactgagtagtcgtgacc

SEQ ID NO: 733756 - DNA, 33 bp, Homo sapien
acttttcaggtcatcagctgagtagtcgtgacc

SEQ ID NO: 733757 - DNA, 33 bp, Homo sapien
ctgtagttttgttgaccctttatttgcttacta

SEQ ID NO: 733758 - DNA, 33 bp, Homo sapien
ctgtagttttgttgactctttatttgcttacta

SEQ ID NO: 733759 - DNA, 33 bp, Homo sapien
aagagcaaaagagcgccgcagaacagcttcgag

SEQ ID NO: 733760 - DNA, 33 bp, Homo sapien
aagagcaaaagagcgcggcagaacagcttcgag

SEQ ID NO: 733761 - DNA, 33 bp, Homo sapien
gtacctaactgtcgccaagaaactcaaaagaca

SEQ ID NO: 733762 - DNA, 33 bp, Homo sapien
gtacctaactgtcgccgagaaactcaaaagaca

SEQ ID NO: 733763 - DNA, 33 bp, Homo sapien
taatcatttttaagtgcacggcacagtaggtta

SEQ ID NO: 733764 - DNA, 33 bp, Homo sapien
taatcatttttaagtgtacggcacagtaggtta

SEQ ID NO: 733765 - DNA, 33 bp, Homo sapien
ccgttcaatctcagtaacattggaaacaacaga

SEQ ID NO: 733766 - DNA, 33 bp, Homo sapien
ccgttcaatctcagtagcattggaaacaacaga

SEQ ID NO: 733767 - DNA, 33 bp, Homo sapien
gcgcacgccttcctgaaaggtatttgcataaag

SEQ ID NO: 733768 - DNA, 33 bp, Homo sapien
gcgcacgccttcctgacaggtatttgcataaag

SEQ ID NO: 733769 - DNA, 33 bp, Homo sapien
gcttaactatgccaacagaaacagtgatgccat

SEQ ID NO: 733770 - DNA, 33 bp, Homo sapien
gcttaactatgccaacggaaacagtgatgccat

SEQ ID NO: 733771 - DNA, 33 bp, Homo sapien
tcaaaagcagttataaagatggggagacataca

SEQ ID NO: 733772 - DNA, 33 bp, Homo sapien
tcaaaagcagttataatgatggggagacataca

SEQ ID NO: 733773 - DNA, 33 bp, Homo sapien
taaacagctgaagaaaaccatcatatttgcatg

SEQ ID NO: 733774 - DNA, 33 bp, Homo sapien
taaacagctgaagaaagccatcatatttgcatg

SEQ ID NO: 733775 - DNA, 33 bp, Homo sapien
gcctggtggctcgagaccctgccattttctcct

SEQ ID NO: 733776 - DNA, 33 bp, Homo sapien
gcctggtggctcgagatcctgccattttctcct

SEQ ID NO: 733777 - DNA, 33 bp, Homo sapien
tggtttactacttaaacgcatgagagtgttata

SEQ ID NO: 733778 - DNA, 33 bp, Homo sapien
tggtttactacttaaatgcatgagagtgttata

SEQ ID NO: 733779 - DNA, 33 bp, Homo sapien
tccagaacaagatatagggcaatgaaaagtttc

SEQ ID NO: 733780 - DNA, 33 bp, Homo sapien
tccagaacaagatatatggcaatgaaaagtttc

SEQ ID NO: 733781 - DNA, 33 bp, Homo sapien
ggctttgagcatctgaataaagcaatgaaaact

SEQ ID NO: 733782 - DNA, 33 bp, Homo sapien
ggctttgagcatctgattaaagcaatgaaaact

SEQ ID NO: 733783 - DNA, 33 bp, Homo sapien
tagttgagaaggactacgtaaaaacttattttg

SEQ ID NO: 733784 - DNA, 33 bp, Homo sapien
tagttgagaaggactatgtaaaaacttattttg

SEQ ID NO: 733785 - DNA, 33 bp, Homo sapien
atttatttgtgtagtacgtaactccccaaacag

SEQ ID NO: 733786 - DNA, 33 bp, Homo sapien
atttatttgtgtagtatgtaactccccaaacag

SEQ ID NO: 733787 - DNA, 33 bp, Homo sapien
ttgacattacatggagcatagtaaagataaaaa

SEQ ID NO: 733788 - DNA, 33 bp, Homo sapien
ttgacattacatggagtatagtaaagataaaaa

SEQ ID NO: 733789 - DNA, 33 bp, Homo sapien
gtggtgcaaacgatgacaaaatagaggtgtttc

SEQ ID NO: 733790 - DNA, 33 bp, Homo sapien
gtggtgcaaacgatgagaaaatagaggtgtttc

SEQ ID NO: 733791 - DNA, 33 bp, Homo sapien
tgctctagagataggacacttataaatatcacc

SEQ ID NO: 733792 - DNA, 33 bp, Homo sapien
tgctctagagataggagacttataaatatcacc

SEQ ID NO: 733793 - DNA, 33 bp, Homo sapien
ctcaggggagcttccccaatagtgccaagagtt

SEQ ID NO: 733794 - DNA, 33 bp, Homo sapien
ctcaggggagcttccctaatagtgccaagagtt

SEQ ID NO: 733795 - DNA, 33 bp, Homo sapien
tgattgaaacaaaatacacttagccaatggagt

SEQ ID NO: 733796 - DNA, 33 bp, Homo sapien
tgattgaaacaaaatagacttagccaatggagt

SEQ ID NO: 733797 - DNA, 33 bp, Homo sapien
tatctgtcgtttaaaaattactagcgtggctta

SEQ ID NO: 733798 - DNA, 33 bp, Homo sapien
tatctgtcgtttaaaacttactagcgtggctta

SEQ ID NO: 733799 - DNA, 33 bp, Homo sapien
ttgatttcagtatatacaaaaacagcgggtcac

SEQ ID NO: 733800 - DNA, 33 bp, Homo sapien
ttgatttcagtatatataaaaacagcgggtcac

SEQ ID NO: 733801 - DNA, 33 bp, Homo sapien
gaggtgattaggaaaagattactgtcagtatct

SEQ ID NO: 733802 - DNA, 33 bp, Homo sapien
gaggtgattaggaaaatattactgtcagtatct

SEQ ID NO: 733803 - DNA, 33 bp, Homo sapien
ctgtctgctttaataaatactcgaatctatttg

SEQ ID NO: 733804 - DNA, 33 bp, Homo sapien
ctgtctgctttaataagtactcgaatctatttg

SEQ ID NO: 733805 - DNA, 33 bp, Homo sapien
cactcgccaacggataataagttctgcttctca

SEQ ID NO: 733806 - DNA, 33 bp, Homo sapien
cactcgccaacggatagtaagttctgcttctca

SEQ ID NO: 733807 - DNA, 33 bp, Homo sapien
ataaaaattttaaacaagctgccgtgatgtaag

SEQ ID NO: 733808 - DNA, 33 bp, Homo sapien
ataaaaattttaaacaggctgccgtgatgtaag

SEQ ID NO: 733809 - DNA, 33 bp, Homo sapien
cctacacatatctactcactttattttcattac

SEQ ID NO: 733810 - DNA, 33 bp, Homo sapien
cctacacatatctactgactttattttcattac

SEQ ID NO: 733811 - DNA, 33 bp, Homo sapien
gaaagacgggaacattcaaagtaaggtgataaa

SEQ ID NO: 733812 - DNA, 33 bp, Homo sapien
gaaagacgggaacatttaaagtaaggtgataaa

SEQ ID NO: 733813 - DNA, 33 bp, Homo sapien
ctactggtttgaaatacagtagcacatcctttc

SEQ ID NO: 733814 - DNA, 33 bp, Homo sapien
ctactggtttgaaatatagtagcacatcctttc

SEQ ID NO: 733815 - DNA, 33 bp, Homo sapien
tggaagcaatcatatcaaccaaatgttgtggtt

SEQ ID NO: 733816 - DNA, 33 bp, Homo sapien
tggaagcaatcatatccaccaaatgttgtggtt

SEQ ID NO: 733817 - DNA, 33 bp, Homo sapien
caaatggccaacatcgcaaaaattgttcagcat

SEQ ID NO: 733818 - DNA, 33 bp, Homo sapien
caaatggccaacatcggaaaaattgttcagcat

SEQ ID NO: 733819 - DNA, 33 bp, Homo sapien
aggaattttttgagagaagtacattgatatctc

SEQ ID NO: 733820 - DNA, 33 bp, Homo sapien
aggaattttttgagaggagtacattgatatctc

SEQ ID NO: 733821 - DNA, 33 bp, Homo sapien
tcttaaagtctttcaaccaaaggaactacaagc

SEQ ID NO: 733822 - DNA, 33 bp, Homo sapien
tcttaaagtctttcaatcaaaggaactacaagc

SEQ ID NO: 733823 - DNA, 33 bp, Homo sapien
gagaaaagaaatgagacaaacaataacagttga

SEQ ID NO: 733824 - DNA, 33 bp, Homo sapien
gagaaaagaaatgagataaacaataacagttga

SEQ ID NO: 733825 - DNA, 33 bp, Homo sapien
ttagacatagttgatcaatttaatacattctgt

SEQ ID NO: 733826 - DNA, 33 bp, Homo sapien
ttagacatagttgatccatttaatacattctgt

SEQ ID NO: 733827 - DNA, 33 bp, Homo sapien
tctggacctctttttacggttacctagcagggc

SEQ ID NO: 733828 - DNA, 33 bp, Homo sapien
tctggacctctttttatggttacctagcagggc

SEQ ID NO: 733829 - DNA, 33 bp, Homo sapien
caaagtgtccagcagaaaatggtgctaaagtct

SEQ ID NO: 733830 - DNA, 33 bp, Homo sapien
caaagtgtccagcagacaatggtgctaaagtct

SEQ ID NO: 733831 - DNA, 33 bp, Homo sapien
accattgtatctcacactgggtattttaacact

SEQ ID NO: 733832 - DNA, 33 bp, Homo sapien
accattgtatctcacattgggtattttaacact

SEQ ID NO: 733833 - DNA, 33 bp, Homo sapien
tgagattgaatgtccaatatttaggaagagcct

SEQ ID NO: 733834 - DNA, 33 bp, Homo sapien
tgagattgaatgtccagtatttaggaagagcct

SEQ ID NO: 733835 - DNA, 33 bp, Homo sapien
tcattcctatagcagcgccacttagctctacct

SEQ ID NO: 733836 - DNA, 33 bp, Homo sapien
tcattcctatagcagctccacttagctctacct

SEQ ID NO: 733837 - DNA, 33 bp, Homo sapien
ttcaacatcttttcacaggtgattatttgtagc

SEQ ID NO: 733838 - DNA, 33 bp, Homo sapien
ttcaacatcttttcacgggtgattatttgtagc

SEQ ID NO: 733839 - DNA, 33 bp, Homo sapien
aaggaagctgggagccaaccaccagattcccgt

SEQ ID NO: 733840 - DNA, 33 bp, Homo sapien
aaggaagctgggagccgaccaccagattcccgt

SEQ ID NO: 733841 - DNA, 33 bp, Homo sapien
ctccttgtctcttaccacctgtgcaacccacgg

SEQ ID NO: 733842 - DNA, 33 bp, Homo sapien
ctccttgtctcttaccgcctgtgcaacccacgg

SEQ ID NO: 733843 - DNA, 33 bp, Homo sapien
cagtgagaagggtttaacaattagagacagata

SEQ ID NO: 733844 - DNA, 33 bp, Homo sapien
cagtgagaagggtttagcaattagagacagata

SEQ ID NO: 733845 - DNA, 33 bp, Homo sapien
tactttaaaccaagtacgttaggagaaagaggc

SEQ ID NO: 733846 - DNA, 33 bp, Homo sapien
tactttaaaccaagtatgttaggagaaagaggc

SEQ ID NO: 733847 - DNA, 33 bp, Homo sapien
caaatgataaagtggcagccactgtcaaatgtt

SEQ ID NO: 733848 - DNA, 33 bp, Homo sapien
caaatgataaagtggcggccactgtcaaatgtt

SEQ ID NO: 733849 - DNA, 33 bp, Homo sapien
tgtattctcctaagccacagagatgccactcac

SEQ ID NO: 733850 - DNA, 33 bp, Homo sapien
tgtattctcctaagccgcagagatgccactcac

SEQ ID NO: 733851 - DNA, 33 bp, Homo sapien
agaaagaatcacagaacgttaaacctgaaaagg

SEQ ID NO: 733852 - DNA, 33 bp, Homo sapien
agaaagaatcacagaatgttaaacctgaaaagg

SEQ ID NO: 733853 - DNA, 33 bp, Homo sapien
caatacctgttgaatgacaatgctttctggaga

SEQ ID NO: 733854 - DNA, 33 bp, Homo sapien
caatacctgttgaatgtcaatgctttctggaga

SEQ ID NO: 733855 - DNA, 33 bp, Homo sapien
tgtattctttgcaacaagaaccctttgtagggg

SEQ ID NO: 733856 - DNA, 33 bp, Homo sapien
tgtattctttgcaacaggaaccctttgtagggg

SEQ ID NO: 733857 - DNA, 33 bp, Homo sapien
cattctagtatcaaaaacttgtacagctttttt

SEQ ID NO: 733858 - DNA, 33 bp, Homo sapien
cattctagtatcaaaaccttgtacagctttttt

SEQ ID NO: 733859 - DNA, 33 bp, Homo sapien
tcttccctatttgaggccccagatgagaatgca

SEQ ID NO: 733860 - DNA, 33 bp, Homo sapien
tcttccctatttgaggtcccagatgagaatgca

SEQ ID NO: 733861 - DNA, 33 bp, Homo sapien
ttgttttgcttgttcaagaattctcactttatg

SEQ ID NO: 733862 - DNA, 33 bp, Homo sapien
ttgttttgcttgttcatgaattctcactttatg

SEQ ID NO: 733863 - DNA, 33 bp, Homo sapien
cagggaaggacaggaaaatcacaaaattctaat

SEQ ID NO: 733864 - DNA, 33 bp, Homo sapien
cagggaaggacaggaagatcacaaaattctaat

SEQ ID NO: 733865 - DNA, 33 bp, Homo sapien
tcataatttgactacccagagacatttctaact

SEQ ID NO: 733866 - DNA, 33 bp, Homo sapien
tcataatttgactacctagagacatttctaact

SEQ ID NO: 733867 - DNA, 33 bp, Homo sapien
atcacacttacttagaacattaaactctttaga

SEQ ID NO: 733868 - DNA, 33 bp, Homo sapien
atcacacttacttagagcattaaactctttaga

SEQ ID NO: 733869 - DNA, 33 bp, Homo sapien
aaaagaaaaaggcaaaattgatagagacaacaa

SEQ ID NO: 733870 - DNA, 33 bp, Homo sapien
aaaagaaaaaggcaaatttgatagagacaacaa

SEQ ID NO: 733871 - DNA, 33 bp, Homo sapien
catggtagctacataaaattcaccttacagtgt

SEQ ID NO: 733872 - DNA, 33 bp, Homo sapien
catggtagctacataatattcaccttacagtgt

SEQ ID NO: 733873 - DNA, 33 bp, Homo sapien
cctgacacctaaactgaaaagtatgtcgatcac

SEQ ID NO: 733874 - DNA, 33 bp, Homo sapien
cctgacacctaaactgcaaagtatgtcgatcac

SEQ ID NO: 733875 - DNA, 33 bp, Homo sapien
atttctctccctatgacccttcacttccgtttt

SEQ ID NO: 733876 - DNA, 33 bp, Homo sapien
atttctctccctatgagccttcacttccgtttt

SEQ ID NO: 733877 - DNA, 33 bp, Homo sapien
ttgaaagttttcatgacaaaaagtaagtgagag

SEQ ID NO: 733878 - DNA, 33 bp, Homo sapien
ttgaaagttttcatgataaaaagtaagtgagag

SEQ ID NO: 733879 - DNA, 33 bp, Homo sapien
gcccaagtaggatcccaataaggaagtgttggg

SEQ ID NO: 733880 - DNA, 33 bp, Homo sapien
gcccaagtaggatcccgataaggaagtgttggg

SEQ ID NO: 733881 - DNA, 33 bp, Homo sapien
ctaggaaagtgactgcaatgccaagggagaaag

SEQ ID NO: 733882 - DNA, 33 bp, Homo sapien
ctaggaaagtgactgccatgccaagggagaaag

SEQ ID NO: 733883 - DNA, 33 bp, Homo sapien
aaacagaagtaggaaaggttgctaaattgtaga

SEQ ID NO: 733884 - DNA, 33 bp, Homo sapien
aaacagaagtaggaaatgttgctaaattgtaga

SEQ ID NO: 733885 - DNA, 33 bp, Homo sapien
acatttactgctaaaactgaactattgtgcaaa

SEQ ID NO: 733886 - DNA, 33 bp, Homo sapien
acatttactgctaaaattgaactattgtgcaaa

SEQ ID NO: 733887 - DNA, 33 bp, Homo sapien
gtctggctccctggtgaaaggaaaaatattaca

SEQ ID NO: 733888 - DNA, 33 bp, Homo sapien
gtctggctccctggtggaaggaaaaatattaca

SEQ ID NO: 733889 - DNA, 33 bp, Homo sapien
atattgttgttgagtcggacctgaaatttgatg

SEQ ID NO: 733890 - DNA, 33 bp, Homo sapien
atattgttgttgagtctgacctgaaatttgatg

SEQ ID NO: 733891 - DNA, 33 bp, Homo sapien
tgatagatgtagtgaacgatctcctcaacaatt

SEQ ID NO: 733892 - DNA, 33 bp, Homo sapien
tgatagatgtagtgaatgatctcctcaacaatt

SEQ ID NO: 733893 - DNA, 33 bp, Homo sapien
attctacctgggatcaaattgaatcagcagtca

SEQ ID NO: 733894 - DNA, 33 bp, Homo sapien
attctacctgggatcagattgaatcagcagtca

SEQ ID NO: 733895 - DNA, 33 bp, Homo sapien
attatgttgtctttaaatgatcttcaataatgt

SEQ ID NO: 733896 - DNA, 33 bp, Homo sapien
attatgttgtctttaagtgatcttcaataatgt

SEQ ID NO: 733897 - DNA, 33 bp, Homo sapien
atacattttccatagcaatgaggtagtattttc

SEQ ID NO: 733898 - DNA, 33 bp, Homo sapien
atacattttccatagcgatgaggtagtattttc

SEQ ID NO: 733899 - DNA, 33 bp, Homo sapien
atcatgtgagtgagaactgggaataggtatcag

SEQ ID NO: 733900 - DNA, 33 bp, Homo sapien
atcatgtgagtgagaattgggaataggtatcag

SEQ ID NO: 733901 - DNA, 33 bp, Homo sapien
aaagaatgatacaatgaactctgtaggtattgg

SEQ ID NO: 733902 - DNA, 33 bp, Homo sapien
aaagaatgatacaatggactctgtaggtattgg

SEQ ID NO: 733903 - DNA, 33 bp, Homo sapien
ctctacctttacttcaaaatggagtttctctgg

SEQ ID NO: 733904 - DNA, 33 bp, Homo sapien
ctctacctttacttcataatggagtttctctgg

SEQ ID NO: 733905 - DNA, 33 bp, Homo sapien
tcatagattagacttacgaatcatgaggattaa

SEQ ID NO: 733906 - DNA, 33 bp, Homo sapien
tcatagattagacttaggaatcatgaggattaa

SEQ ID NO: 733907 - DNA, 33 bp, Homo sapien
ctatttatggaccacacagtaaatgtatacagg

SEQ ID NO: 733908 - DNA, 33 bp, Homo sapien
ctatttatggaccacagagtaaatgtatacagg

SEQ ID NO: 733909 - DNA, 33 bp, Homo sapien
taaaatttgctgacaccaaaaataatttaattt

SEQ ID NO: 733910 - DNA, 33 bp, Homo sapien
taaaatttgctgacactaaaaataatttaattt

SEQ ID NO: 733911 - DNA, 33 bp, Homo sapien
aggggagagattcagaacaataaacacctcagc

SEQ ID NO: 733912 - DNA, 33 bp, Homo sapien
aggggagagattcagagcaataaacacctcagc

SEQ ID NO: 733913 - DNA, 33 bp, Homo sapien
agagtacagtttcttgaatgccaaggaatgaca

SEQ ID NO: 733914 - DNA, 33 bp, Homo sapien
agagtacagtttcttggatgccaaggaatgaca

SEQ ID NO: 733915 - DNA, 33 bp, Homo sapien
gcatgactttgtgtaaataacttaacatctttg

SEQ ID NO: 733916 - DNA, 33 bp, Homo sapien
gcatgactttgtgtaagtaacttaacatctttg

SEQ ID NO: 733917 - DNA, 33 bp, Homo sapien
tctcatgccggccagaatcactattattaagaa

SEQ ID NO: 733918 - DNA, 33 bp, Homo sapien
tctcatgccggccagagtcactattattaagaa

SEQ ID NO: 733919 - DNA, 33 bp, Homo sapien
cactctccttgtccaaatgactatctgcccagt

SEQ ID NO: 733920 - DNA, 33 bp, Homo sapien
cactctccttgtccaattgactatctgcccagt

SEQ ID NO: 733921 - DNA, 33 bp, Homo sapien
atgtgaattaccaccaagggatctttcaataat

SEQ ID NO: 733922 - DNA, 33 bp, Homo sapien
atgtgaattaccaccaggggatctttcaataat

SEQ ID NO: 733923 - DNA, 33 bp, Homo sapien
agcagagccaaaggaactgagggaaaagttgca

SEQ ID NO: 733924 - DNA, 33 bp, Homo sapien
agcagagccaaaggaattgagggaaaagttgca

SEQ ID NO: 733925 - DNA, 33 bp, Homo sapien
atgaaaatcctaattaccaagatttgatcctta

SEQ ID NO: 733926 - DNA, 33 bp, Homo sapien
atgaaaatcctaattagcaagatttgatcctta

SEQ ID NO: 733927 - DNA, 33 bp, Homo sapien
gcatcacagcacaaaaatagctcagattagtca

SEQ ID NO: 733928 - DNA, 33 bp, Homo sapien
gcatcacagcacaaaagtagctcagattagtca

SEQ ID NO: 733929 - DNA, 33 bp, Homo sapien
aaggacaaggttgggggactctctacacgttgt

SEQ ID NO: 733930 - DNA, 33 bp, Homo sapien
aaggacaaggttggggtactctctacacgttgt

SEQ ID NO: 733931 - DNA, 33 bp, Homo sapien
acagaatctccagtgtcaaagtgggcaatatta

SEQ ID NO: 733932 - DNA, 33 bp, Homo sapien
acagaatctccagtgtgaaagtgggcaatatta

SEQ ID NO: 733933 - DNA, 33 bp, Homo sapien
gcagagagttaaagccagatgctctttctacca

SEQ ID NO: 733934 - DNA, 33 bp, Homo sapien
gcagagagttaaagccggatgctctttctacca

SEQ ID NO: 733935 - DNA, 33 bp, Homo sapien
ctatttctaaaatccaatctcttttctccatgc

SEQ ID NO: 733936 - DNA, 33 bp, Homo sapien
ctatttctaaaatccagtctcttttctccatgc

SEQ ID NO: 733937 - DNA, 33 bp, Homo sapien
tcttagttcatggcaccgtctttcatagcccaa

SEQ ID NO: 733938 - DNA, 33 bp, Homo sapien
tcttagttcatggcactgtctttcatagcccaa

SEQ ID NO: 733939 - DNA, 33 bp, Homo sapien
agaagtacagaagagggatgcaaagcccagcca

SEQ ID NO: 733940 - DNA, 33 bp, Homo sapien
agaagtacagaagaggtatgcaaagcccagcca

SEQ ID NO: 733941 - DNA, 33 bp, Homo sapien
cagtgacttccaactggcagtatttgtatcctc

SEQ ID NO: 733942 - DNA, 33 bp, Homo sapien
cagtgacttccaactgtcagtatttgtatcctc

SEQ ID NO: 733943 - DNA, 33 bp, Homo sapien
cttatccctctagttgaataatttgtaggcgta

SEQ ID NO: 733944 - DNA, 33 bp, Homo sapien
cttatccctctagttggataatttgtaggcgta

SEQ ID NO: 733945 - DNA, 33 bp, Homo sapien
gataaaagttgtattacgaagccagctaccatt

SEQ ID NO: 733946 - DNA, 33 bp, Homo sapien
gataaaagttgtattatgaagccagctaccatt

SEQ ID NO: 733947 - DNA, 33 bp, Homo sapien
tcaaactctattcttaagatcagtgccttacat

SEQ ID NO: 733948 - DNA, 33 bp, Homo sapien
tcaaactctattcttaggatcagtgccttacat

SEQ ID NO: 733949 - DNA, 33 bp, Homo sapien
aagcagctttcaaatcaatataaaaagatagat

SEQ ID NO: 733950 - DNA, 33 bp, Homo sapien
aagcagctttcaaatccatataaaaagatagat

SEQ ID NO: 733951 - DNA, 33 bp, Homo sapien
attcttatgcatagtccccaatatagtcaataa

SEQ ID NO: 733952 - DNA, 33 bp, Homo sapien
attcttatgcatagtctccaatatagtcaataa

SEQ ID NO: 733953 - DNA, 33 bp, Homo sapien
gctcttttactgtgagcagtagctgttgaagaa

SEQ ID NO: 733954 - DNA, 33 bp, Homo sapien
gctcttttactgtgaggagtagctgttgaagaa

SEQ ID NO: 733955 - DNA, 33 bp, Homo sapien
aatcacacttcatgaaatcaaaacttctaacca

SEQ ID NO: 733956 - DNA, 33 bp, Homo sapien
aatcacacttcatgaattcaaaacttctaacca

SEQ ID NO: 733957 - DNA, 33 bp, Homo sapien; identical to SEQ ID NO: 733955

SEQ ID NO: 733958 - DNA, 33 bp, Homo sapien; identical to SEQ ID NO: 733956

SEQ ID NO: 733959 - DNA, 33 bp, Homo sapien
aatcaccaatcacatacgtaggtttgttcccta

SEQ ID NO: 733960 - DNA, 33 bp, Homo sapien
aatcaccaatcacataggtaggtttgttcccta

SEQ ID NO: 733961 - DNA, 33 bp, Homo sapien
taagcagtagctatcaatagttacagactaggg

SEQ ID NO: 733962 - DNA, 33 bp, Homo sapien
taagcagtagctatcagtagttacagactaggg

SEQ ID NO: 733963 - DNA, 33 bp, Homo sapien
agagacagagactccactgaagggatttaaaaa

SEQ ID NO: 733964 - DNA, 33 bp, Homo sapien
agagacagagactccattgaagggatttaaaaa

SEQ ID NO: 733965 - DNA, 33 bp, Homo sapien
aattgttctaccacgagacacttaatttcctat

SEQ ID NO: 733966 - DNA, 33 bp, Homo sapien
aattgttctaccacgatacacttaatttcctat

SEQ ID NO: 733967 - DNA, 33 bp, Homo sapien; identical to SEQ ID NO: 733965

SEQ ID NO: 733968 - DNA, 33 bp, Homo sapien; identical to SEQ ID NO: 733966

SEQ ID NO: 733969 - DNA, 33 bp, Homo sapien
aaccttgtgtacaatcaaaaaagacataaatct

SEQ ID NO: 733970 - DNA, 33 bp, Homo sapien
aaccttgtgtacaatcgaaaaagacataaatct

SEQ ID NO: 733971 - DNA, 33 bp, Homo sapien
acaaatgccgtgcaggacaaacaaaactagccc

SEQ ID NO: 733972 - DNA, 33 bp, Homo sapien
acaaatgccgtgcaggccaaacaaaactagccc

SEQ ID NO: 733973 - DNA, 33 bp, Homo sapien
tgaccacatggtaccaatcaatcagaatgaata

SEQ ID NO: 733974 - DNA, 33 bp, Homo sapien
tgaccacatggtaccactcaatcagaatgaata

SEQ ID NO: 733975 - DNA, 33 bp, Homo sapien; identical to SEQ ID NO: 733973

SEQ ID NO: 733976 - DNA, 33 bp, Homo sapien; identical to SEQ ID NO: 733974

SEQ ID NO: 733977 - DNA, 33 bp, Homo sapien
gggacagctagtattccatgattctctgaagaa

SEQ ID NO: 733978 - DNA, 33 bp, Homo sapien
gggacagctagtattcgatgattctctgaagaa

SEQ ID NO: 733979 - DNA, 33 bp, Homo sapien
aactcagaatcaaagcacaaagaagtacactcc

SEQ ID NO: 733980 - DNA, 33 bp, Homo sapien
aactcagaatcaaagcgcaaagaagtacactcc

SEQ ID NO: 733981 - DNA, 33 bp, Homo sapien
ctgccaaatgatctcgcccgtatttaatatggg

SEQ ID NO: 733982 - DNA, 33 bp, Homo sapien
ctgccaaatgatctcggccgtatttaatatggg

SEQ ID NO: 733983 - DNA, 33 bp, Homo sapien
aaaattgtataaaatacacgcctacaaattatc

SEQ ID NO: 733984 - DNA, 33 bp, Homo sapien
aaaattgtataaaatatacgcctacaaattatc

SEQ ID NO: 733985 - DNA, 33 bp, Homo sapien
caaagagtgtcagcaccggacttctatgaaagt

SEQ ID NO: 733986 - DNA, 33 bp, Homo sapien
caaagagtgtcagcactggacttctatgaaagt

SEQ ID NO: 733987 - DNA, 33 bp, Homo sapien
atacttacagttgagcagactttatattctgtt

SEQ ID NO: 733988 - DNA, 33 bp, Homo sapien
atacttacagttgagctgactttatattctgtt

SEQ ID NO: 733989 - DNA, 33 bp, Homo sapien
gggagcatacctttacagacttagcaatctgga

SEQ ID NO: 733990 - DNA, 33 bp, Homo sapien
gggagcatacctttacggacttagcaatctgga

SEQ ID NO: 733991 - DNA, 33 bp, Homo sapien; identical to SEQ ID NO: 733989

SEQ ID NO: 733992 - DNA, 33 bp, Homo sapien; identical to SEQ ID NO: 733990

SEQ ID NO: 733993 - DNA, 33 bp, Homo sapien
gagataggccatggaacagccaaactctagggg

SEQ ID NO: 733994 - DNA, 33 bp, Homo sapien
gagataggccatggaagagccaaactctagggg

SEQ ID NO: 733995 - DNA, 33 bp, Homo sapien
cactcaataaaagtcccatattcaccatccttc

SEQ ID NO: 733996 - DNA, 33 bp, Homo sapien
cactcaataaaagtccgatattcaccatccttc

SEQ ID NO: 733997 - DNA, 33 bp, Homo sapien
ttgaccatgagctaagactccacttcagcctct

SEQ ID NO: 733998 - DNA, 33 bp, Homo sapien
ttgaccatgagctaagcctccacttcagcctct

SEQ ID NO: 733999 - DNA, 33 bp, Homo sapien; identical to SEQ ID NO: 733997

SEQ ID NO: 734000 - DNA, 33 bp, Homo sapien; identical to SEQ ID NO: 733998

SEQ ID NO: 734001 - DNA, 33 bp, Homo sapien
gtattcatggatgagaaataagcaaattgtctc

SEQ ID NO: 734002 - DNA, 33 bp, Homo sapien
gtattcatggatgagatataagcaaattgtctc

SEQ ID NO: 734003 - DNA, 33 bp, Homo sapien
aaaacaacattttgacacaattgagctgtgttt

SEQ ID NO: 734004 - DNA, 33 bp, Homo sapien
aaaacaacattttgacccaattgagctgtgttt

SEQ ID NO: 734005 - DNA, 33 bp, Homo sapien
gtatgtcatctttggcaaaatctctattcaagt

SEQ ID NO: 734006 - DNA, 33 bp, Homo sapien
gtatgtcatctttggcgaaatctctattcaagt

SEQ ID NO: 734007 - DNA, 33 bp, Homo sapien
atcccaccgaaaaacacaaggactgaaagtggc

SEQ ID NO: 734008 - DNA, 33 bp, Homo sapien
atcccaccgaaaaacataaggactgaaagtggc

SEQ ID NO: 734009 - DNA, 33 bp, Homo sapien
gggccagcctgaatagaatgcctgtcacaccta

SEQ ID NO: 734010 - DNA, 33 bp, Homo sapien
gggccagcctgaatagcatgcctgtcacaccta

SEQ ID NO: 734011 - DNA, 33 bp, Homo sapien
gttagcacttgaaaatgaagtgtgtagctattt

SEQ ID NO: 734012 - DNA, 33 bp, Homo sapien
gttagcacttgaaaattaagtgtgtagctattt

SEQ ID NO: 734013 - DNA, 33 bp, Homo sapien
gttatgttccaacagactcaatgtaagctgaaa

SEQ ID NO: 734014 - DNA, 33 bp, Homo sapien
gttatgttccaacagattcaatgtaagctgaaa

SEQ ID NO: 734015 - DNA, 33 bp, Homo sapien
gacacaatattttacagacgaacactttaaaat

SEQ ID NO: 734016 - DNA, 33 bp, Homo sapien
gacacaatattttacatacgaacactttaaaat

SEQ ID NO: 734017 - DNA, 33 bp, Homo sapien
ctcccttggcagacacagaaattctaaacaaat

SEQ ID NO: 734018 - DNA, 33 bp, Homo sapien
ctcccttggcagacacggaaattctaaacaaat

SEQ ID NO: 734019 - DNA, 33 bp, Homo sapien
tttcaaagggaaggaaagccagaaatatctgtt

SEQ ID NO: 734020 - DNA, 33 bp, Homo sapien
tttcaaagggaaggaacgccagaaatatctgtt

SEQ ID NO: 734021 - DNA, 33 bp, Homo sapien
tacctgcaagatactacattacttgtctgcaaa

SEQ ID NO: 734022 - DNA, 33 bp, Homo sapien
tacctgcaagatactatattacttgtctgcaaa

SEQ ID NO: 734023 - DNA, 33 bp, Homo sapien
ttttgtagcattactacgatctgaattccatac

SEQ ID NO: 734024 - DNA, 33 bp, Homo sapien
ttttgtagcattactatgatctgaattccatac

SEQ ID NO: 734025 - DNA, 33 bp, Homo sapien
tttggtattcgtggggaaagaaatgaccatttc

SEQ ID NO: 734026 - DNA, 33 bp, Homo sapien
tttggtattcgtgggggaagaaatgaccatttc

SEQ ID NO: 734027 - DNA, 33 bp, Homo sapien
cattctcataaatgtaataacgccttatagagg

SEQ ID NO: 734028 - DNA, 33 bp, Homo sapien
cattctcataaatgtagtaacgccttatagagg

SEQ ID NO: 734029 - DNA, 33 bp, Homo sapien
agtgagtgctccgacacagttctactgttagac

SEQ ID NO: 734030 - DNA, 33 bp, Homo sapien
agtgagtgctccgacatagttctactgttagac

SEQ ID NO: 734031 - DNA, 33 bp, Homo sapien
attttctttgtgaacacctgcaagactctgcat

SEQ ID NO: 734032 - DNA, 33 bp, Homo sapien
attttctttgtgaacatctgcaagactctgcat

SEQ ID NO: 734033 - DNA, 33 bp, Homo sapien; identical to SEQ ID NO: 734031

SEQ ID NO: 734034 - DNA, 33 bp, Homo sapien; identical to SEQ ID NO: 734032

SEQ ID NO: 734035 - DNA, 33 bp, Homo sapien
cttatgaataatgcccaaattcttgcatttcac

SEQ ID NO: 734036 - DNA, 33 bp, Homo sapien
cttatgaataatgcccgaattcttgcatttcac

SEQ ID NO: 734037 - DNA, 33 bp, Homo sapien
ttttgtgtggcttctaaggctatgtaataaaaa

SEQ ID NO: 734038 - DNA, 33 bp, Homo sapien
ttttgtgtggcttctacggctatgtaataaaaa

SEQ ID NO: 734039 - DNA, 33 bp, Homo sapien
tgatgtcttttccaaaatactttatccatgcta

SEQ ID NO: 734040 - DNA, 33 bp, Homo sapien
tgatgtcttttccaaagtactttatccatgcta

SEQ ID NO: 734041 - DNA, 33 bp, Homo sapien
cagtaccccaaatacactggcattcacattaag

SEQ ID NO: 734042 - DNA, 33 bp, Homo sapien
cagtaccccaaatacagtggcattcacattaag

SEQ ID NO: 734043 - DNA, 33 bp, Homo sapien
ttaaatggataagccacagaataataagtctag

SEQ ID NO: 734044 - DNA, 33 bp, Homo sapien
ttaaatggataagccagagaataataagtctag

SEQ ID NO: 734045 - DNA, 33 bp, Homo sapien
tcaaaaagcgggccaaagatatgaatggacact

SEQ ID NO: 734046 - DNA, 33 bp, Homo sapien
tcaaaaagcgggccaaggatatgaatggacact

SEQ ID NO: 734047 - DNA, 33 bp, Homo sapien; identical to SEQ ID NO: 734045

SEQ ID NO: 734048 - DNA, 33 bp, Homo sapien; identical to SEQ ID NO: 734046

SEQ ID NO: 734049 - DNA, 33 bp, Homo sapien
aagtcaaagatcaccaatcagattcacctcaat

SEQ ID NO: 734050 - DNA, 33 bp, Homo sapien
aagtcaaagatcaccagtcagattcacctcaat

SEQ ID NO: 734051 - DNA, 33 bp, Homo sapien
gttcaacttgctagaaactttgtcttacttctc

SEQ ID NO: 734052 - DNA, 33 bp, Homo sapien
gttcaacttgctagaagctttgtcttacttctc

SEQ ID NO: 734053 - DNA, 33 bp, Homo sapien
ctcattcctaaactagacattgacaaggggaaa

SEQ ID NO: 734054 - DNA, 33 bp, Homo sapien
ctcattcctaaactaggcattgacaaggggaaa

SEQ ID NO: 734055 - DNA, 33 bp, Homo sapien
taactttaacactgaaaacaggtgaacatcagg

SEQ ID NO: 734056 - DNA, 33 bp, Homo sapien
taactttaacactgaatacaggtgaacatcagg

SEQ ID NO: 734057 - DNA, 33 bp, Homo sapien
cttggtcatttgagaaacatcaaggaaagtaaa

SEQ ID NO: 734058 - DNA, 33 bp, Homo sapien
cttggtcatttgagaagcatcaaggaaagtaaa

SEQ ID NO: 734059 - DNA, 33 bp, Homo sapien
tctaccctaattacagaccaatttcatcttaac

SEQ ID NO: 734060 - DNA, 33 bp, Homo sapien
tctaccctaattacaggccaatttcatcttaac

SEQ ID NO: 734061 - DNA, 33 bp, Homo sapien
ctttctttaaggtgtacgtgttggatctattat

SEQ ID NO: 734062 - DNA, 33 bp, Homo sapien
ctttctttaaggtgtatgtgttggatctattat

SEQ ID NO: 734063 - DNA, 33 bp, Homo sapien
agttgagaatgtttatcactcttggcaaaagtg

SEQ ID NO: 734064 - DNA, 33 bp, Homo sapien
agttgagaatgtttattactcttggcaaaagtg

SEQ ID NO: 734065 - DNA, 33 bp, Homo sapien
aggaagaaacaagccacgaggcagaaaaacaat

SEQ ID NO: 734066 - DNA, 33 bp, Homo sapien
aggaagaaacaagccatgaggcagaaaaacaat

SEQ ID NO: 734067 - DNA, 33 bp, Homo sapien
tccagctgatagcttacatttttgctaaatgaa

SEQ ID NO: 734068 - DNA, 33 bp, Homo sapien
tccagctgatagcttatatttttgctaaatgaa

SEQ ID NO: 734069 - DNA, 33 bp, Homo sapien
ggctgaaatcaccttaagaagcattatgaaaca

SEQ ID NO: 734070 - DNA, 33 bp, Homo sapien
ggctgaaatcaccttaggaagcattatgaaaca

SEQ ID NO: 734071 - DNA, 33 bp, Homo sapien
tggctgtttaatgctccattttttagcagttgg

SEQ ID NO: 734072 - DNA, 33 bp, Homo sapien
tggctgtttaatgctctattttttagcagttgg

SEQ ID NO: 734073 - DNA, 33 bp, Homo sapien; identical to SEQ ID NO: 734071

SEQ ID NO: 734074 - DNA, 33 bp, Homo sapien; identical to SEQ ID NO: 734072

SEQ ID NO: 734075 - DNA, 33 bp, Homo sapien; identical to SEQ ID NO: 734071

SEQ ID NO: 734076 - DNA, 33 bp, Homo sapien; identical to SEQ ID NO: 734072

SEQ ID NO: 734077 - DNA, 33 bp, Homo sapien
tataacctttcccagaatcaaggaaactaacat

SEQ ID NO: 734078 - DNA, 33 bp, Homo sapien
tataacctttcccagactcaaggaaactaacat

SEQ ID NO: 734079 - DNA, 33 bp, Homo sapien
actggctgttataccacgtgaccagcaggggca

SEQ ID NO: 734080 - DNA, 33 bp, Homo sapien
actggctgttataccatgtgaccagcaggggca

SEQ ID NO: 734081 - DNA, 33 bp, Homo sapien
cagttcctagctgtcacagcattgaggttctta

SEQ ID NO: 734082 - DNA, 33 bp, Homo sapien
cagttcctagctgtcatagcattgaggttctta

SEQ ID NO: 734083 - DNA, 33 bp, Homo sapien
tagcacaaaaagaagaaggctgctgcttcacct

SEQ ID NO: 734084 - DNA, 33 bp, Homo sapien
tagcacaaaaagaagacggctgctgcttcacct

SEQ ID NO: 734085 - DNA, 33 bp, Homo sapien
accgtgccctcccttgcagctctctgttggcta

SEQ ID NO: 734086 - DNA, 33 bp, Homo sapien
accgtgccctcccttgtagctctctgttggcta

SEQ ID NO: 734087 - DNA, 33 bp, Homo sapien
gatgatatatctggcacccttagtaagaaggaa

SEQ ID NO: 734088 - DNA, 33 bp, Homo sapien
gatgatatatctggcatccttagtaagaaggaa

SEQ ID NO: 734089 - DNA, 33 bp, Homo sapien
ttttttcaccatgacaacttttgtggaaccata

SEQ ID NO: 734090 - DNA, 33 bp, Homo sapien
ttttttcaccatgacaccttttgtggaaccata

SEQ ID NO: 734091 - DNA, 33 bp, Homo sapien
ttttgcaaagcctcacaccataaattaattacc

SEQ ID NO: 734092 - DNA, 33 bp, Homo sapien
ttttgcaaagcctcacgccataaattaattacc

SEQ ID NO: 734093 - DNA, 33 bp, Homo sapien
tgcaaacaagaggaacagtgacaatacatagtt

SEQ ID NO: 734094 - DNA, 33 bp, Homo sapien
tgcaaacaagaggaacggtgacaatacatagtt

SEQ ID NO: 734095 - DNA, 33 bp, Homo sapien
attcggtcgctttcccaccggtcagccttattc

SEQ ID NO: 734096 - DNA, 33 bp, Homo sapien
attcggtcgctttcccgccggtcagccttattc

SEQ ID NO: 734097 - DNA, 33 bp, Homo sapien
ggaaagtggcataaaaacttagggtctaatgtc

SEQ ID NO: 734098 - DNA, 33 bp, Homo sapien
ggaaagtggcataaaatcttagggtctaatgtc

SEQ ID NO: 734099 - DNA, 33 bp, Homo sapien
catcttccataggcacagaatatttctaaaata

SEQ ID NO: 734100 - DNA, 33 bp, Homo sapien
catcttccataggcactgaatatttctaaaata

SEQ ID NO: 734101 - DNA, 33 bp, Homo sapien
ctcttcatcttcctaaatcagtaggcagttcat

SEQ ID NO: 734102 - DNA, 33 bp, Homo sapien
ctcttcatcttcctaagtcagtaggcagttcat

SEQ ID NO: 734103 - DNA, 33 bp, Homo sapien
cgtagatggccacataaatttacaatatgatac

SEQ ID NO: 734104 - DNA, 33 bp, Homo sapien
cgtagatggccacatacatttacaatatgatac

SEQ ID NO: 734105 - DNA, 33 bp, Homo sapien
aatggatcaacttctcccccaagttatactgtc

SEQ ID NO: 734106 - DNA, 33 bp, Homo sapien
aatggatcaacttctctcccaagttatactgtc

SEQ ID NO: 734107 - DNA, 33 bp, Homo sapien
attacttcttctgaaacagtctgacaaaaagct

SEQ ID NO: 734108 - DNA, 33 bp, Homo sapien
attacttcttctgaaatagtctgacaaaaagct

SEQ ID NO: 734109 - DNA, 33 bp, Homo sapien
ttgttttgttaatcaccacacatttaatgcctg

SEQ ID NO: 734110 - DNA, 33 bp, Homo sapien
ttgttttgttaatcactacacatttaatgcctg

SEQ ID NO: 734111 - DNA, 33 bp, Homo sapien
tctaaatcatgtctctcaaactcaaaagtccac

SEQ ID NO: 734112 - DNA, 33 bp, Homo sapien
tctaaatcatgtctctgaaactcaaaagtccac

SEQ ID NO: 734113 - DNA, 33 bp, Homo sapien
acaggcagaggtttgaataggtaggggggccca

SEQ ID NO: 734114 - DNA, 33 bp, Homo sapien
acaggcagaggtttgactaggtaggggggccca

SEQ ID NO: 734115 - DNA, 33 bp, Homo sapien
gtaagtattcataaagcattatagtggcattaa

SEQ ID NO: 734116 - DNA, 33 bp, Homo sapien
gtaagtattcataaagtattatagtggcattaa

SEQ ID NO: 734117 - DNA, 33 bp, Homo sapien
tagactgtcacagaaaatagtgagcttcctatc

SEQ ID NO: 734118 - DNA, 33 bp, Homo sapien
tagactgtcacagaaagtagtgagcttcctatc

SEQ ID NO: 734119 - DNA, 33 bp, Homo sapien
cctttggtccttcccaatcttttcaacattaga

SEQ ID NO: 734120 - DNA, 33 bp, Homo sapien
cctttggtccttcccactcttttcaacattaga

SEQ ID NO: 734121 - DNA, 33 bp, Homo sapien
gacctgaaggaaaagagtatgatgtaggcacct

SEQ ID NO: 734122 - DNA, 33 bp, Homo sapien
gacctgaaggaaaagattatgatgtaggcacct

SEQ ID NO: 734123 - DNA, 33 bp, Homo sapien
gggagaaactgggaaagatctaaaatcaacacc

SEQ ID NO: 734124 - DNA, 33 bp, Homo sapien
gggagaaactgggaaatatctaaaatcaacacc

SEQ ID NO: 734125 - DNA, 33 bp, Homo sapien
tggaaatccacatcccagagacatctaattctt

SEQ ID NO: 734126 - DNA, 33 bp, Homo sapien
tggaaatccacatcccggagacatctaattctt

SEQ ID NO: 734127 - DNA, 33 bp, Homo sapien
cttactgtcagcaataaaatgaaaatcaggaaa

SEQ ID NO: 734128 - DNA, 33 bp, Homo sapien
cttactgtcagcaatacaatgaaaatcaggaaa

SEQ ID NO: 734129 - DNA, 33 bp, Homo sapien
actcatggtcccaaaacggctgcaacaaaaccc

SEQ ID NO: 734130 - DNA, 33 bp, Homo sapien
actcatggtcccaaaatggctgcaacaaaaccc

SEQ ID NO: 734131 - DNA, 33 bp, Homo sapien
tctgacggtgggataagattgcaggagaatgaa

SEQ ID NO: 734132 - DNA, 33 bp, Homo sapien
tctgacggtgggataatattgcaggagaatgaa

SEQ ID NO: 734133 - DNA, 33 bp, Homo sapien
tgttatccaaaaccaacggtatgagatttctac

SEQ ID NO: 734134 - DNA, 33 bp, Homo sapien
tgttatccaaaaccaatggtatgagatttctac

SEQ ID NO: 734135 - DNA, 33 bp, Homo sapien
tcacacatttacgtgactatttctgcaaagaga

SEQ ID NO: 734136 - DNA, 33 bp, Homo sapien
tcacacatttacgtgattatttctgcaaagaga

SEQ ID NO: 734137 - DNA, 33 bp, Homo sapien
aaattattaccactaagatttgctgtctttttc

SEQ ID NO: 734138 - DNA, 33 bp, Homo sapien
aaattattaccactaatatttgctgtctttttc

SEQ ID NO: 734139 - DNA, 33 bp, Homo sapien
atatcactttgccaaccataatttttacaattc

SEQ ID NO: 734140 - DNA, 33 bp, Homo sapien
atatcactttgccaactataatttttacaattc

SEQ ID NO: 734141 - DNA, 33 bp, Homo sapien
gagagagaacacccacaagtgtccaaaacctat

SEQ ID NO: 734142 - DNA, 33 bp, Homo sapien
gagagagaacacccacgagtgtccaaaacctat

SEQ ID NO: 734143 - DNA, 33 bp, Homo sapien
tgtttctgataaagtgcatcttgccactgacac

SEQ ID NO: 734144 - DNA, 33 bp, Homo sapien
tgtttctgataaagtgtatcttgccactgacac

SEQ ID NO: 734145 - DNA, 33 bp, Homo sapien
ttgatgctcagtcctacgaatgacactaaatat

SEQ ID NO: 734146 - DNA, 33 bp, Homo sapien
ttgatgctcagtcctatgaatgacactaaatat

SEQ ID NO: 734147 - DNA, 33 bp, Homo sapien
ttcatgaggtcagttccctaaagccagaaaatg

SEQ ID NO: 734148 - DNA, 33 bp, Homo sapien
ttcatgaggtcagttctctaaagccagaaaatg

SEQ ID NO: 734149 - DNA, 33 bp, Homo sapien
tggaaagaaagacaaacaatttccaagcattta

SEQ ID NO: 734150 - DNA, 33 bp, Homo sapien
tggaaagaaagacaaagaatttccaagcattta

SEQ ID NO: 734151 - DNA, 33 bp, Homo sapien
tggtcagcatcggtcaatcagaaagcaggaata

SEQ ID NO: 734152 - DNA, 33 bp, Homo sapien
tggtcagcatcggtcagtcagaaagcaggaata

SEQ ID NO: 734153 - DNA, 33 bp, Homo sapien
aaaaatctaactgagcaatgaaagagattgttc

SEQ ID NO: 734154 - DNA, 33 bp, Homo sapien
aaaaatctaactgagctatgaaagagattgttc

SEQ ID NO: 734155 - DNA, 33 bp, Homo sapien
tggagaagtaaaagcaagatggaatggaagaga

SEQ ID NO: 734156 - DNA, 33 bp, Homo sapien
tggagaagtaaaagcaggatggaatggaagaga

SEQ ID NO: 734157 - DNA, 33 bp, Homo sapien
aagttaaaagccgaaactgttttcataacttct

SEQ ID NO: 734158 - DNA, 33 bp, Homo sapien
aagttaaaagccgaaattgttttcataacttct

SEQ ID NO: 734159 - DNA, 33 bp, Homo sapien
cgatggtaagcacaccaatgggaagataaaaag

SEQ ID NO: 734160 - DNA, 33 bp, Homo sapien
cgatggtaagcacaccgatgggaagataaaaag

SEQ ID NO: 734161 - DNA, 33 bp, Homo sapien
ggccaatctcaagataacaacatgatatcactg

SEQ ID NO: 734162 - DNA, 33 bp, Homo sapien
ggccaatctcaagataccaacatgatatcactg

SEQ ID NO: 734163 - DNA, 33 bp, Homo sapien
ttcacttcaccttatcaacctactactgagata

SEQ ID NO: 734164 - DNA, 33 bp, Homo sapien
ttcacttcaccttatccacctactactgagata

SEQ ID NO: 734165 - DNA, 33 bp, Homo sapien
agctcctgtgttgcaactgaattaagtttcaaa

SEQ ID NO: 734166 - DNA, 33 bp, Homo sapien
agctcctgtgttgcaattgaattaagtttcaaa

SEQ ID NO: 734167 - DNA, 33 bp, Homo sapien
aaccgtagaatgcaccaagagaatttttttaag

SEQ ID NO: 734168 - DNA, 33 bp, Homo sapien
aaccgtagaatgcaccgagagaatttttttaag

SEQ ID NO: 734169 - DNA, 33 bp, Homo sapien
aattacatgattgtaaagaaaaaaagcccatgt

SEQ ID NO: 734170 - DNA, 33 bp, Homo sapien
aattacatgattgtaaggaaaaaaagcccatgt

SEQ ID NO: 734171 - DNA, 33 bp, Homo sapien
ttttactatgacattaagtgcttctaatgagtc

SEQ ID NO: 734172 - DNA, 33 bp, Homo sapien
ttttactatgacattaggtgcttctaatgagtc

SEQ ID NO: 734173 - DNA, 33 bp, Homo sapien
caagagtgacacagtacaacattagcagtacta

SEQ ID NO: 734174 - DNA, 33 bp, Homo sapien
caagagtgacacagtataacattagcagtacta

SEQ ID NO: 734175 - DNA, 33 bp, Homo sapien
tgttaaccatcatctaacatactaacataaaaa

SEQ ID NO: 734176 - DNA, 33 bp, Homo sapien
tgttaaccatcatctatcatactaacataaaaa

SEQ ID NO: 734177 - DNA, 33 bp, Homo sapien
caagaatttttgtggccatatataaaactgtaa

SEQ ID NO: 734178 - DNA, 33 bp, Homo sapien
caagaatttttgtggctatatataaaactgtaa

SEQ ID NO: 734179 - DNA, 33 bp, Homo sapien
tgatctctaatgggtcacattcctgtaatatcc

SEQ ID NO: 734180 - DNA, 33 bp, Homo sapien
tgatctctaatgggtcgcattcctgtaatatcc

SEQ ID NO: 734181 - DNA, 33 bp, Homo sapien
aatatatagttaatgagaagttcctattccttg

SEQ ID NO: 734182 - DNA, 33 bp, Homo sapien
aatatatagttaatgataagttcctattccttg

SEQ ID NO: 734183 - DNA, 33 bp, Homo sapien
acaggaggtcttcaaaaatttaaggcaacacaa

SEQ ID NO: 734184 - DNA, 33 bp, Homo sapien
acaggaggtcttcaaagatttaaggcaacacaa

SEQ ID NO: 734185 - DNA, 33 bp, Homo sapien
gcatatacaattttcaaatgctgttgggacaca

SEQ ID NO: 734186 - DNA, 33 bp, Homo sapien
gcatatacaattttcagatgctgttgggacaca

SEQ ID NO: 734187 - DNA, 33 bp, Homo sapien
gagtcaatattaaaatcaccagaacaagataat

SEQ ID NO: 734188 - DNA, 33 bp, Homo sapien
gagtcaatattaaaatgaccagaacaagataat

SEQ ID NO: 734189 - DNA, 33 bp, Homo sapien
aaaaaaagcaacttccaaggaaacagaaaagga

SEQ ID NO: 734190 - DNA, 33 bp, Homo sapien
aaaaaaagcaacttccgaggaaacagaaaagga

SEQ ID NO: 734191 - DNA, 33 bp, Homo sapien
atttagatgaactgagcacaaaatcttggcaat

SEQ ID NO: 734192 - DNA, 33 bp, Homo sapien
atttagatgaactgaggacaaaatcttggcaat

SEQ ID NO: 734193 - DNA, 33 bp, Homo sapien
aataatgatggaagtgaaactctgaaaagtgga

SEQ ID NO: 734194 - DNA, 33 bp, Homo sapien
aataatgatggaagtggaactctgaaaagtgga

SEQ ID NO: 734195 - DNA, 33 bp, Homo sapien
taaaagacactcttacgcattttcctctaatct

SEQ ID NO: 734196 - DNA, 33 bp, Homo sapien
taaaagacactcttactcattttcctctaatct

SEQ ID NO: 734197 - DNA, 33 bp, Homo sapien
tacaaaatcaatgcacacgaatctgctatacac

SEQ ID NO: 734198 - DNA, 33 bp, Homo sapien
tacaaaatcaatgcacgcgaatctgctatacac

SEQ ID NO: 734199 - DNA, 33 bp, Homo sapien
agatcagtacctcatactactggagttacttcg

SEQ ID NO: 734200 - DNA, 33 bp, Homo sapien
agatcagtacctcatattactggagttacttcg

SEQ ID NO: 734201 - DNA, 33 bp, Homo sapien
tcagggaatttatgatgacatcgtcaaagtaaa

SEQ ID NO: 734202 - DNA, 33 bp, Homo sapien
tcagggaatttatgattacatcgtcaaagtaaa

SEQ ID NO: 734203 - DNA, 33 bp, Homo sapien
actgtattttgcctcaaagaaaagattcagctt

SEQ ID NO: 734204 - DNA, 33 bp, Homo sapien
actgtattttgcctcatagaaaagattcagctt

SEQ ID NO: 734205 - DNA, 33 bp, Homo sapien
aagttgtcacactctaaagcaagtaaaccaaag

SEQ ID NO: 734206 - DNA, 33 bp, Homo sapien
aagttgtcacactctacagcaagtaaaccaaag

SEQ ID NO: 734207 - DNA, 33 bp, Homo sapien
gtttatgcccctattgcaatattccttcaaatc

SEQ ID NO: 734208 - DNA, 33 bp, Homo sapien
gtttatgcccctattgtaatattccttcaaatc

SEQ ID NO: 734209 - DNA, 33 bp, Homo sapien
cccaagatgagaaattcaagagcaaagcctctc

SEQ ID NO: 734210 - DNA, 33 bp, Homo sapien
cccaagatgagaaatttaagagcaaagcctctc

SEQ ID NO: 734211 - DNA, 33 bp, Homo sapien
gtcattcctaaaatcacaacctacagttttcag

SEQ ID NO: 734212 - DNA, 33 bp, Homo sapien
gtcattcctaaaatcataacctacagttttcag

SEQ ID NO: 734213 - DNA, 33 bp, Homo sapien
ttaaaaacaatttatgaatggtggtgagggtgc

SEQ ID NO: 734214 - DNA, 33 bp, Homo sapien
ttaaaaacaatttatgcatggtggtgagggtgc

SEQ ID NO: 734215 - DNA, 33 bp, Homo sapien
tattcaatgtatagtgcatcctggtgtgtaatg

SEQ ID NO: 734216 - DNA, 33 bp, Homo sapien
tattcaatgtatagtgtatcctggtgtgtaatg

SEQ ID NO: 734217 - DNA, 33 bp, Homo sapien
tttataaggagtaaaaaatgaggagatgaattg

SEQ ID NO: 734218 - DNA, 33 bp, Homo sapien
tttataaggagtaaaagatgaggagatgaattg

SEQ ID NO: 734219 - DNA, 33 bp, Homo sapien
agtaaaagctaaataaaaaattccagctcaaac

SEQ ID NO: 734220 - DNA, 33 bp, Homo sapien
agtaaaagctaaataagaaattccagctcaaac

SEQ ID NO: 734221 - DNA, 33 bp, Homo sapien
tatgttttctgccataccaaagacaaaaggaca

SEQ ID NO: 734222 - DNA, 33 bp, Homo sapien
tatgttttctgccatatcaaagacaaaaggaca

SEQ ID NO: 734223 - DNA, 33 bp, Homo sapien
cagtaggaagacatgtaaacagttttgtactta

SEQ ID NO: 734224 - DNA, 33 bp, Homo sapien
cagtaggaagacatgtgaacagttttgtactta

SEQ ID NO: 734225 - DNA, 33 bp, Homo sapien
atgttccttctctgtaggccattactagtaaat

SEQ ID NO: 734226 - DNA, 33 bp, Homo sapien
atgttccttctctgtatgccattactagtaaat

SEQ ID NO: 734227 - DNA, 33 bp, Homo sapien
gtcctgaagtatttcagaggtattttcaatgac

SEQ ID NO: 734228 - DNA, 33 bp, Homo sapien
gtcctgaagtatttcataggtattttcaatgac

SEQ ID NO: 734229 - DNA, 33 bp, Homo sapien
ctgagaatgcattaaaatacagtaacacaatca

SEQ ID NO: 734230 - DNA, 33 bp, Homo sapien
ctgagaatgcattaaactacagtaacacaatca

SEQ ID NO: 734231 - DNA, 33 bp, Homo sapien
taactagatgctaagacgaaagttttcgcggaa

SEQ ID NO: 734232 - DNA, 33 bp, Homo sapien
taactagatgctaagatgaaagttttcgcggaa

SEQ ID NO: 734233 - DNA, 33 bp, Homo sapien
ccccaattattgaaaccgatacagaaattgaat

SEQ ID NO: 734234 - DNA, 33 bp, Homo sapien
ccccaattattgaaactgatacagaaattgaat

SEQ ID NO: 734235 - DNA, 33 bp, Homo sapien
gtagatattataaaaaggcgcttcaccagaatt

SEQ ID NO: 734236 - DNA, 33 bp, Homo sapien
gtagatattataaaaatgcgcttcaccagaatt

SEQ ID NO: 734237 - DNA, 33 bp, Homo sapien
caaagaatcacaagcacaatcaagagacaaaat

SEQ ID NO: 734238 - DNA, 33 bp, Homo sapien
caaagaatcacaagcagaatcaagagacaaaat

SEQ ID NO: 734239 - DNA, 33 bp, Homo sapien
acctccatatctcctacctaaaagaaagaaaac

SEQ ID NO: 734240 - DNA, 33 bp, Homo sapien
acctccatatctcctagctaaaagaaagaaaac

SEQ ID NO: 734241 - DNA, 33 bp, Homo sapien
gaaaagccaaaacacacacactgagcaattatt

SEQ ID NO: 734242 - DNA, 33 bp, Homo sapien
gaaaagccaaaacacatacactgagcaattatt

SEQ ID NO: 734243 - DNA, 33 bp, Homo sapien
attcagaaaattcacaaatggggcagactattt

SEQ ID NO: 734244 - DNA, 33 bp, Homo sapien
attcagaaaattcacagatggggcagactattt

SEQ ID NO: 734245 - DNA, 33 bp, Homo sapien
agcatgctgtgggggagaattgcaatctgatcc

SEQ ID NO: 734246 - DNA, 33 bp, Homo sapien
agcatgctgtgggggataattgcaatctgatcc

SEQ ID NO: 734247 - DNA, 33 bp, Homo sapien
ggctgatttatgtaacagtctatcccaaggcac

SEQ ID NO: 734248 - DNA, 33 bp, Homo sapien
ggctgatttatgtaacggtctatcccaaggcac

SEQ ID NO: 734249 - DNA, 33 bp, Homo sapien
catactcctaactacacgtctcatactcaccat

SEQ ID NO: 734250 - DNA, 33 bp, Homo sapien
catactcctaactacaggtctcatactcaccat

SEQ ID NO: 734251 - DNA, 33 bp, Homo sapien
actatcatagtctaaaatgccttcttctactgc

SEQ ID NO: 734252 - DNA, 33 bp, Homo sapien
actatcatagtctaaagtgccttcttctactgc

SEQ ID NO: 734253 - DNA, 33 bp, Homo sapien
aatggtcatgtttgggaaaaactcaggaaatat

SEQ ID NO: 734254 - DNA, 33 bp, Homo sapien
aatggtcatgtttggggaaaactcaggaaatat

SEQ ID NO: 734255 - DNA, 33 bp, Homo sapien
cattgatggtcatgtcaccaatgaaggcaccag

SEQ ID NO: 734256 - DNA, 33 bp, Homo sapien
cattgatggtcatgtcgccaatgaaggcaccag

SEQ ID NO: 734257 - DNA, 33 bp, Homo sapien
agctggaccctgatacacttcttgctggcagca

SEQ ID NO: 734258 - DNA, 33 bp, Homo sapien
agctggaccctgatacgcttcttgctggcagca

SEQ ID NO: 734259 - DNA, 33 bp, Homo sapien
aatacaagataatccaatcaattccaaatattc

SEQ ID NO: 734260 - DNA, 33 bp, Homo sapien
aatacaagataatccattcaattccaaatattc

SEQ ID NO: 734261 - DNA, 33 bp, Homo sapien
caagaggcctacctgcacttcagaaataaagcc

SEQ ID NO: 734262 - DNA, 33 bp, Homo sapien
caagaggcctacctgcgcttcagaaataaagcc

SEQ ID NO: 734263 - DNA, 33 bp, Homo sapien
tgctggagcccagaaacaacttgagtgaatcat

SEQ ID NO: 734264 - DNA, 33 bp, Homo sapien
tgctggagcccagaaataacttgagtgaatcat

SEQ ID NO: 734265 - DNA, 33 bp, Homo sapien
gtatgtagtggtgactaacaaagatatatctga

SEQ ID NO: 734266 - DNA, 33 bp, Homo sapien
gtatgtagtggtgactgacaaagatatatctga

SEQ ID NO: 734267 - DNA, 33 bp, Homo sapien
aagataacgggaagataagttagagatagggag

SEQ ID NO: 734268 - DNA, 33 bp, Homo sapien
aagataacgggaagatgagttagagatagggag

SEQ ID NO: 734269 - DNA, 33 bp, Homo sapien
taaaactatgcctccagcactcatttttctcaa

SEQ ID NO: 734270 - DNA, 33 bp, Homo sapien
taaaactatgcctccatcactcatttttctcaa

SEQ ID NO: 734271 - DNA, 33 bp, Homo sapien
gtcaaacattgatgagaaagcaggtccaaaact

SEQ ID NO: 734272 - DNA, 33 bp, Homo sapien
gtcaaacattgatgagcaagcaggtccaaaact

SEQ ID NO: 734273 - DNA, 33 bp, Homo sapien
gatttatgacatgcttaaaattcactttgtttc

SEQ ID NO: 734274 - DNA, 33 bp, Homo sapien
gatttatgacatgcttgaaattcactttgtttc

SEQ ID NO: 734275 - DNA, 33 bp, Homo sapien
aaaactctgagacagtaaatgttcgttgtttta

SEQ ID NO: 734276 - DNA, 33 bp, Homo sapien
aaaactctgagacagtcaatgttcgttgtttta

SEQ ID NO: 734277 - DNA, 33 bp, Homo sapien
atgtcctggaaaatcaatcttgacttctttgtt

SEQ ID NO: 734278 - DNA, 33 bp, Homo sapien
atgtcctggaaaatcagtcttgacttctttgtt

SEQ ID NO: 734279 - DNA, 33 bp, Homo sapien
tctctcttctcctttacgctgtgaacatcttgt

SEQ ID NO: 734280 - DNA, 33 bp, Homo sapien
tctctcttctcctttatgctgtgaacatcttgt

SEQ ID NO: 734281 - DNA, 33 bp, Homo sapien
attaatgatttcctagaactccccaattttgtg

SEQ ID NO: 734282 - DNA, 33 bp, Homo sapien
attaatgatttcctagtactccccaattttgtg

SEQ ID NO: 734283 - DNA, 33 bp, Homo sapien
tataagtggaatcctacagcatctgcctttttg

SEQ ID NO: 734284 - DNA, 33 bp, Homo sapien
tataagtggaatcctatagcatctgcctttttg

SEQ ID NO: 734285 - DNA, 33 bp, Homo sapien
atcctgaactttgttacggagggagacagacag

SEQ ID NO: 734286 - DNA, 33 bp, Homo sapien
atcctgaactttgttatggagggagacagacag

SEQ ID NO: 734287 - DNA, 33 bp, Homo sapien
tatacattgttggatacgacttgctaatatttt

SEQ ID NO: 734288 - DNA, 33 bp, Homo sapien
tatacattgttggatatgacttgctaatatttt

SEQ ID NO: 734289 - DNA, 33 bp, Homo sapien
aacaattcttggttcacgatgcaagatcactat

SEQ ID NO: 734290 - DNA, 33 bp, Homo sapien
aacaattcttggttcatgatgcaagatcactat

SEQ ID NO: 734291 - DNA, 33 bp, Homo sapien
ccactaaaaattgattgaactccaaacgttgag

SEQ ID NO: 734292 - DNA, 33 bp, Homo sapien
ccactaaaaattgatttaactccaaacgttgag

SEQ ID NO: 734293 - DNA, 33 bp, Homo sapien
ttcagagtatatcacaaaaaagcctgaccattt

SEQ ID NO: 734294 - DNA, 33 bp, Homo sapien
ttcagagtatatcacacaaaagcctgaccattt

SEQ ID NO: 734295 - DNA, 33 bp, Homo sapien
gtctacacaaaacatgaacaggttttttttctt

SEQ ID NO: 734296 - DNA, 33 bp, Homo sapien
gtctacacaaaacatgtacaggttttttttctt

SEQ ID NO: 734297 - DNA, 33 bp, Homo sapien
aacacttctaagcataccttcaaactgataagt

SEQ ID NO: 734298 - DNA, 33 bp, Homo sapien
aacacttctaagcatatcttcaaactgataagt

SEQ ID NO: 734299 - DNA, 33 bp, Homo sapien
ttcagccttttcacacaccttgctataaattgc

SEQ ID NO: 734300 - DNA, 33 bp, Homo sapien
ttcagccttttcacacgccttgctataaattgc

SEQ ID NO: 734301 - DNA, 33 bp, Homo sapien
ggaagaagtaagaagcagaggtaaatatagcac

SEQ ID NO: 734302 - DNA, 33 bp, Homo sapien
ggaagaagtaagaagcggaggtaaatatagcac

SEQ ID NO: 734303 - DNA, 33 bp, Homo sapien
ggtgcaaaatgggagacaccaaagaagtaacat

SEQ ID NO: 734304 - DNA, 33 bp, Homo sapien
ggtgcaaaatgggagataccaaagaagtaacat

SEQ ID NO: 734305 - DNA, 33 bp, Homo sapien
gtgatgggaataagccactacgtttccatccct

SEQ ID NO: 734306 - DNA, 33 bp, Homo sapien
gtgatgggaataagcctctacgtttccatccct

SEQ ID NO: 734307 - DNA, 33 bp, Homo sapien
tggtgaaagtgaaacacaggggtgcaaacatga

SEQ ID NO: 734308 - DNA, 33 bp, Homo sapien
tggtgaaagtgaaacataggggtgcaaacatga

SEQ ID NO: 734309 - DNA, 33 bp, Homo sapien
accttctgcatggacaactttctgcgtcctcac

SEQ ID NO: 734310 - DNA, 33 bp, Homo sapien
accttctgcatggacacctttctgcgtcctcac

SEQ ID NO: 734311 - DNA, 33 bp, Homo sapien
gtcttcactaaagcccaactctgattatgacac

SEQ ID NO: 734312 - DNA, 33 bp, Homo sapien
gtcttcactaaagcccgactctgattatgacac

SEQ ID NO: 734313 - DNA, 33 bp, Homo sapien
acaaagtgagaaagaaagtaaaagatgaatgca

SEQ ID NO: 734314 - DNA, 33 bp, Homo sapien
acaaagtgagaaagaaggtaaaagatgaatgca

SEQ ID NO: 734315 - DNA, 33 bp, Homo sapien
tctattaattcctaaccgtgggctccaatggaa

SEQ ID NO: 734316 - DNA, 33 bp, Homo sapien
tctattaattcctaactgtgggctccaatggaa

SEQ ID NO: 734317 - DNA, 33 bp, Homo sapien
agaaataaatctagtaagtgcaggagctgtatg

SEQ ID NO: 734318 - DNA, 33 bp, Homo sapien
agaaataaatctagtatgtgcaggagctgtatg

SEQ ID NO: 734319 - DNA, 33 bp, Homo sapien
cctagctctcttgccaatgcatgtagtaaccat

SEQ ID NO: 734320 - DNA, 33 bp, Homo sapien
cctagctctcttgccagtgcatgtagtaaccat

SEQ ID NO: 734321 - DNA, 33 bp, Homo sapien
ttctcccttgtactaacaggcagtttgagggta

SEQ ID NO: 734322 - DNA, 33 bp, Homo sapien
ttctcccttgtactaataggcagtttgagggta

SEQ ID NO: 734323 - DNA, 33 bp, Homo sapien
tgtatgtattgtaacacaggttttggatagaca

SEQ ID NO: 734324 - DNA, 33 bp, Homo sapien
tgtatgtattgtaacataggttttggatagaca

SEQ ID NO: 734325 - DNA, 33 bp, Homo sapien
tcctgcccgttttgctcagagattgaaagatca

SEQ ID NO: 734326 - DNA, 33 bp, Homo sapien
tcctgcccgttttgcttagagattgaaagatca

SEQ ID NO: 734327 - DNA, 33 bp, Homo sapien
cccaggactgctttgccgatcctcaactctaag

SEQ ID NO: 734328 - DNA, 33 bp, Homo sapien
cccaggactgctttgctgatcctcaactctaag

SEQ ID NO: 734329 - DNA, 33 bp, Homo sapien
ctcaaactgaatgcacgctttgctgtcatctca

SEQ ID NO: 734330 - DNA, 33 bp, Homo sapien
ctcaaactgaatgcactctttgctgtcatctca

SEQ ID NO: 734331 - DNA, 33 bp, Homo sapien
ttggtatttcctgggcagatataatataatcat

SEQ ID NO: 734332 - DNA, 33 bp, Homo sapien
ttggtatttcctgggctgatataatataatcat

SEQ ID NO: 734333 - DNA, 33 bp, Homo sapien
tggcaagtctatataactcagtatccactccta

SEQ ID NO: 734334 - DNA, 33 bp, Homo sapien
tggcaagtctatataagtcagtatccactccta

SEQ ID NO: 734335 - DNA, 33 bp, Homo sapien
attttgtatacactagacctgtattaatgaacc

SEQ ID NO: 734336 - DNA, 33 bp, Homo sapien
attttgtatacactaggcctgtattaatgaacc

SEQ ID NO: 734337 - DNA, 33 bp, Homo sapien
gagatccattccaaaaaggccaaataagaactg

SEQ ID NO: 734338 - DNA, 33 bp, Homo sapien
gagatccattccaaaatggccaaataagaactg

SEQ ID NO: 734339 - DNA, 33 bp, Homo sapien
caagggtaagggatgccctaaaaagcagctgac

SEQ ID NO: 734340 - DNA, 33 bp, Homo sapien
caagggtaagggatgctctaaaaagcagctgac

SEQ ID NO: 734341 - DNA, 33 bp, Homo sapien
aaaagtggactcacctaaagctatataaactct

SEQ ID NO: 734342 - DNA, 33 bp, Homo sapien
aaaagtggactcacctgaagctatataaactct

SEQ ID NO: 734343 - DNA, 33 bp, Homo sapien
taatggcataacaaaaattcattgaacaatgct

SEQ ID NO: 734344 - DNA, 33 bp, Homo sapien
taatggcataacaaaagttcattgaacaatgct

SEQ ID NO: 734345 - DNA, 33 bp, Homo sapien
gtctcaagaactgtcaatctgtttgtgttcgat

SEQ ID NO: 734346 - DNA, 33 bp, Homo sapien
gtctcaagaactgtcattctgtttgtgttcgat

SEQ ID NO: 734347 - DNA, 33 bp, Homo sapien
caacaatttaattgcaatctttctcagaaaatc

SEQ ID NO: 734348 - DNA, 33 bp, Homo sapien
caacaatttaattgcagtctttctcagaaaatc

SEQ ID NO: 734349 - DNA, 33 bp, Homo sapien
cttaccaccctcaaataaaggacataagcctgt

SEQ ID NO: 734350 - DNA, 33 bp, Homo sapien
cttaccaccctcaaatgaaggacataagcctgt

SEQ ID NO: 734351 - DNA, 33 bp, Homo sapien
cttctagggaggtcacaatcacattgagccaaa

SEQ ID NO: 734352 - DNA, 33 bp, Homo sapien
cttctagggaggtcacgatcacattgagccaaa

SEQ ID NO: 734353 - DNA, 33 bp, Homo sapien
aatggcgacttttttcacaatatttggatgaat

SEQ ID NO: 734354 - DNA, 33 bp, Homo sapien
aatggcgacttttttcgcaatatttggatgaat

SEQ ID NO: 734355 - DNA, 33 bp, Homo sapien
gctctggatcccaggacagaaatattcatagga

SEQ ID NO: 734356 - DNA, 33 bp, Homo sapien
gctctggatcccaggatagaaatattcatagga

SEQ ID NO: 734357 - DNA, 33 bp, Homo sapien
atgtctactgtgttcaccaagaaaattaatgta

SEQ ID NO: 734358 - DNA, 33 bp, Homo sapien
atgtctactgtgttcatcaagaaaattaatgta

SEQ ID NO: 734359 - DNA, 33 bp, Homo sapien
acatatctgacaataaatggtagttatctctta

SEQ ID NO: 734360 - DNA, 33 bp, Homo sapien
acatatctgacaataagtggtagttatctctta

SEQ ID NO: 734361 - DNA, 33 bp, Homo sapien
actttataagagaacactgatccttgaaatagc

SEQ ID NO: 734362 - DNA, 33 bp, Homo sapien
actttataagagaacattgatccttgaaatagc

SEQ ID NO: 734363 - DNA, 33 bp, Homo sapien
agaattgggaggtgaaagagtatattcttattt

SEQ ID NO: 734364 - DNA, 33 bp, Homo sapien
agaattgggaggtgaaggagtatattcttattt

SEQ ID NO: 734365 - DNA, 33 bp, Homo sapien
cgtacactctcaggcgaataagccaaaaggctc

SEQ ID NO: 734366 - DNA, 33 bp, Homo sapien
cgtacactctcaggcgcataagccaaaaggctc

SEQ ID NO: 734367 - DNA, 33 bp, Homo sapien
taccactgggtaggacggtccaagatgaagtta

SEQ ID NO: 734368 - DNA, 33 bp, Homo sapien
taccactgggtaggactgtccaagatgaagtta

SEQ ID NO: 734369 - DNA, 33 bp, Homo sapien
agaggcaagttttagaagagtagtgaaagtttg

SEQ ID NO: 734370 - DNA, 33 bp, Homo sapien
agaggcaagttttagaggagtagtgaaagtttg

SEQ ID NO: 734371 - DNA, 33 bp, Homo sapien
tgcctgttgtgaaaaagagagttctcagatagt

SEQ ID NO: 734372 - DNA, 33 bp, Homo sapien
tgcctgttgtgaaaaatagagttctcagatagt

SEQ ID NO: 734373 - DNA, 33 bp, Homo sapien
ccgggcaaccagggtgcatatgcggcagggcag

SEQ ID NO: 734374 - DNA, 33 bp, Homo sapien
ccgggcaaccagggtggatatgcggcagggcag

SEQ ID NO: 734375 - DNA, 33 bp, Homo sapien
acctcatttatgccagccaaagttcattctcat

SEQ ID NO: 734376 - DNA, 33 bp, Homo sapien
acctcatttatgccagtcaaagttcattctcat

SEQ ID NO: 734377 - DNA, 33 bp, Homo sapien
taccttcttcagcatcacaaagatcttggtgaa

SEQ ID NO: 734378 - DNA, 33 bp, Homo sapien
taccttcttcagcatcgcaaagatcttggtgaa

SEQ ID NO: 734379 - DNA, 33 bp, Homo sapien
cccagagcacctgccacctggccgaagcatccc

SEQ ID NO: 734380 - DNA, 33 bp, Homo sapien
cccagagcacctgccatctggccgaagcatccc

SEQ ID NO: 734381 - DNA, 33 bp, Homo sapien
aaggtatcaaggaaagaatggttcaagtcatat

SEQ ID NO: 734382 - DNA, 33 bp, Homo sapien
aaggtatcaaggaaagcatggttcaagtcatat

SEQ ID NO: 734383 - DNA, 33 bp, Homo sapien
gtggctagtaattgcaaatgagtctccgtaact

SEQ ID NO: 734384 - DNA, 33 bp, Homo sapien
gtggctagtaattgcatatgagtctccgtaact

SEQ ID NO: 734385 - DNA, 33 bp, Homo sapien
cctgaaaatgaacaaactggatctgaagataac

SEQ ID NO: 734386 - DNA, 33 bp, Homo sapien
cctgaaaatgaacaaattggatctgaagataac

SEQ ID NO: 734387 - DNA, 33 bp, Homo sapien
gctgctgtgaacacaacgttcctgttgaagaat

SEQ ID NO: 734388 - DNA, 33 bp, Homo sapien
gctgctgtgaacacaatgttcctgttgaagaat

SEQ ID NO: 734389 - DNA, 33 bp, Homo sapien
acctgggatttattacggcttctgataggccat

SEQ ID NO: 734390 - DNA, 33 bp, Homo sapien
acctgggatttattactgcttctgataggccat

SEQ ID NO: 734391 - DNA, 33 bp, Homo sapien
aagggtggaagggagaccttatctggtcacttg

SEQ ID NO: 734392 - DNA, 33 bp, Homo sapien
aagggtggaagggagatcttatctggtcacttg

SEQ ID NO: 734393 - DNA, 33 bp, Homo sapien
aactgcaaattactctaacagatgcatacaaaa

SEQ ID NO: 734394 - DNA, 33 bp, Homo sapien
aactgcaaattactctgacagatgcatacaaaa

SEQ ID NO: 734395 - DNA, 33 bp, Homo sapien
gaaggagattgggagacggaatgcaaaagcact

SEQ ID NO: 734396 - DNA, 33 bp, Homo sapien
gaaggagattgggagatggaatgcaaaagcact

SEQ ID NO: 734397 - DNA, 33 bp, Homo sapien
agttgtagacctcctcacccctacgagaaacaa

SEQ ID NO: 734398 - DNA, 33 bp, Homo sapien
agttgtagacctcctcgcccctacgagaaacaa

SEQ ID NO: 734399 - DNA, 33 bp, Homo sapien
gagatctaggaggagggatcgatgtagaaggac

SEQ ID NO: 734400 - DNA, 33 bp, Homo sapien
gagatctaggaggaggtatcgatgtagaaggac

SEQ ID NO: 734401 - DNA, 33 bp, Homo sapien
tgaattgaaagggagacaatcaccgagggaaac

SEQ ID NO: 734402 - DNA, 33 bp, Homo sapien
tgaattgaaagggagataatcaccgagggaaac

SEQ ID NO: 734403 - DNA, 33 bp, Homo sapien
cccagttgttaagccactgcaatactggttttc

SEQ ID NO: 734404 - DNA, 33 bp, Homo sapien
cccagttgttaagccattgcaatactggttttc

SEQ ID NO: 734405 - DNA, 33 bp, Homo sapien
tgaaagttatctcaataattaatctgactttag

SEQ ID NO: 734406 - DNA, 33 bp, Homo sapien
tgaaagttatctcaatgattaatctgactttag

SEQ ID NO: 734407 - DNA, 33 bp, Homo sapien
ttcctagagaacacctaaagagcataaaataat

SEQ ID NO: 734408 - DNA, 33 bp, Homo sapien
ttcctagagaacacctgaagagcataaaataat

SEQ ID NO: 734409 - DNA, 33 bp, Homo sapien
cacttatagttatcagacaacacttacgcaaac

SEQ ID NO: 734410 - DNA, 33 bp, Homo sapien
cacttatagttatcaggcaacacttacgcaaac

SEQ ID NO: 734411 - DNA, 33 bp, Homo sapien
taactataagtgagaaccgctgtccccattgga

SEQ ID NO: 734412 - DNA, 33 bp, Homo sapien
taactataagtgagaatcgctgtccccattgga

SEQ ID NO: 734413 - DNA, 33 bp, Homo sapien
tgtggtctgatttgaacgaggccttggtaaata

SEQ ID NO: 734414 - DNA, 33 bp, Homo sapien
tgtggtctgatttgaatgaggccttggtaaata

SEQ ID NO: 734415 - DNA, 33 bp, Homo sapien
cctcactaggagtttgaaagtcttcctcactag

SEQ ID NO: 734416 - DNA, 33 bp, Homo sapien
cctcactaggagtttggaagtcttcctcactag

SEQ ID NO: 734417 - DNA, 33 bp, Homo sapien
tgcattcttgttcacaaagttttaagtaatgat

SEQ ID NO: 734418 - DNA, 33 bp, Homo sapien
tgcattcttgttcacacagttttaagtaatgat

SEQ ID NO: 734419 - DNA, 33 bp, Homo sapien
gttatttataaccaaaagggccctaattacagc

SEQ ID NO: 734420 - DNA, 33 bp, Homo sapien
gttatttataaccaaaggggccctaattacagc

SEQ ID NO: 734421 - DNA, 33 bp, Homo sapien
tgatgtaatgctgaaaatgacacaaaattttgt

SEQ ID NO: 734422 - DNA, 33 bp, Homo sapien
tgatgtaatgctgaaagtgacacaaaattttgt

SEQ ID NO: 734423 - DNA, 33 bp, Homo sapien
tgacctaagtcttttgcacacagaatgctgagg

SEQ ID NO: 734424 - DNA, 33 bp, Homo sapien
tgacctaagtcttttgtacacagaatgctgagg

SEQ ID NO: 734425 - DNA, 33 bp, Homo sapien
aacaagttttcatttccacatcacgaagcaggg

SEQ ID NO: 734426 - DNA, 33 bp, Homo sapien
aacaagttttcatttctacatcacgaagcaggg

SEQ ID NO: 734427 - DNA, 33 bp, Homo sapien
tgggtcccccaaagcacgagtttcttaacagaa

SEQ ID NO: 734428 - DNA, 33 bp, Homo sapien
tgggtcccccaaagcatgagtttcttaacagaa

SEQ ID NO: 734429 - DNA, 33 bp, Homo sapien
attgaagacttggaaagaagtgactgataaaac

SEQ ID NO: 734430 - DNA, 33 bp, Homo sapien
attgaagacttggaaataagtgactgataaaac

SEQ ID NO: 734431 - DNA, 33 bp, Homo sapien
aggctttgctgaaatgccaccacttctgtgaag

SEQ ID NO: 734432 - DNA, 33 bp, Homo sapien
aggctttgctgaaatgtcaccacttctgtgaag

SEQ ID NO: 734433 - DNA, 33 bp, Homo sapien
taaccaaaaattatcaaagtgccatcaagtacg

SEQ ID NO: 734434 - DNA, 33 bp, Homo sapien
taaccaaaaattatcagagtgccatcaagtacg

SEQ ID NO: 734435 - DNA, 33 bp, Homo sapien
aaaaaacagcttttaccactgaagttctgtctc

SEQ ID NO: 734436 - DNA, 33 bp, Homo sapien
aaaaaacagcttttactactgaagttctgtctc

SEQ ID NO: 734437 - DNA, 33 bp, Homo sapien
gacctctcaagaaaggaattagtgcgtttataa

SEQ ID NO: 734438 - DNA, 33 bp, Homo sapien
gacctctcaagaaagggattagtgcgtttataa

SEQ ID NO: 734439 - DNA, 33 bp, Homo sapien
actttctggccataaagttctgtggctctaatt

SEQ ID NO: 734440 - DNA, 33 bp, Homo sapien
actttctggccataaatttctgtggctctaatt

SEQ ID NO: 734441 - DNA, 33 bp, Homo sapien
tggtattcaggtattcacatcaattacactaca

SEQ ID NO: 734442 - DNA, 33 bp, Homo sapien
tggtattcaggtattctcatcaattacactaca

SEQ ID NO: 734443 - DNA, 33 bp, Homo sapien
cgcccggtgagacaaaacttcttatatttgctt

SEQ ID NO: 734444 - DNA, 33 bp, Homo sapien
cgcccggtgagacaaagcttcttatatttgctt

SEQ ID NO: 734445 - DNA, 33 bp, Homo sapien
gagaagttaagggtcacggataggaagagctgt

SEQ ID NO: 734446 - DNA, 33 bp, Homo sapien
gagaagttaagggtcatggataggaagagctgt

SEQ ID NO: 734447 - DNA, 33 bp, Homo sapien
gaatcctgctgtactaacccctgaaggaccaac

SEQ ID NO: 734448 - DNA, 33 bp, Homo sapien
gaatcctgctgtactagcccctgaaggaccaac

SEQ ID NO: 734449 - DNA, 33 bp, Homo sapien
ttgcagatattacagaagggagaacaaatgatt

SEQ ID NO: 734450 - DNA, 33 bp, Homo sapien
ttgcagatattacagaggggagaacaaatgatt

SEQ ID NO: 734451 - DNA, 33 bp, Homo sapien
gtcatggttgaccaggaacttagttctagccaa

SEQ ID NO: 734452 - DNA, 33 bp, Homo sapien
gtcatggttgaccaggtacttagttctagccaa

SEQ ID NO: 734453 - DNA, 33 bp, Homo sapien
ctggttgttcatgcacaagactcataggattcc

SEQ ID NO: 734454 - DNA, 33 bp, Homo sapien
ctggttgttcatgcacgagactcataggattcc

SEQ ID NO: 734455 - DNA, 33 bp, Homo sapien
agtgggtaagaatgaaaatgggcttagaacaga

SEQ ID NO: 734456 - DNA, 33 bp, Homo sapien
agtgggtaagaatgaagatgggcttagaacaga

SEQ ID NO: 734457 - DNA, 33 bp, Homo sapien
gaagcccagggataccagaagagttggcccggg

SEQ ID NO: 734458 - DNA, 33 bp, Homo sapien
gaagcccagggataccggaagagttggcccggg

SEQ ID NO: 734459 - DNA, 33 bp, Homo sapien
acccaattggcctgcacgagaataggacttttc

SEQ ID NO: 734460 - DNA, 33 bp, Homo sapien
acccaattggcctgcatgagaataggacttttc

SEQ ID NO: 734461 - DNA, 33 bp, Homo sapien
atggcgatcactaaaaactcaagaaacaacaag

SEQ ID NO: 734462 - DNA, 33 bp, Homo sapien
atggcgatcactaaaacctcaagaaacaacaag

SEQ ID NO: 734463 - DNA, 33 bp, Homo sapien
tatggcttaaaatgagcaaagcttgtttatttc

SEQ ID NO: 734464 - DNA, 33 bp, Homo sapien
tatggcttaaaatgaggaaagcttgtttatttc

SEQ ID NO: 734465 - DNA, 33 bp, Homo sapien
actctctccaatatgcccttgtagatgctgtca

SEQ ID NO: 734466 - DNA, 33 bp, Homo sapien
actctctccaatatgctcttgtagatgctgtca

SEQ ID NO: 734467 - DNA, 33 bp, Homo sapien
agaaggagtagtcaggaaggtagaaagcaagcc

SEQ ID NO: 734468 - DNA, 33 bp, Homo sapien
agaaggagtagtcagggaggtagaaagcaagcc

SEQ ID NO: 734469 - DNA, 33 bp, Homo sapien
ttgggatctccaagcacaggtctaataggtatt

SEQ ID NO: 734470 - DNA, 33 bp, Homo sapien
ttgggatctccaagcagaggtctaataggtatt

SEQ ID NO: 734471 - DNA, 33 bp, Homo sapien
ggtctccttcacatgaacaaatgcatcaggcaa

SEQ ID NO: 734472 - DNA, 33 bp, Homo sapien
ggtctccttcacatgaccaaatgcatcaggcaa

SEQ ID NO: 734473 - DNA, 33 bp, Homo sapien
atctggggaagaaataaagaacgaacttgagag

SEQ ID NO: 734474 - DNA, 33 bp, Homo sapien
atctggggaagaaatagagaacgaacttgagag

SEQ ID NO: 734475 - DNA, 33 bp, Homo sapien
gcaagaagattaattaaaaaggagcatcatgaa

SEQ ID NO: 734476 - DNA, 33 bp, Homo sapien
gcaagaagattaattacaaaggagcatcatgaa

SEQ ID NO: 734477 - DNA, 33 bp, Homo sapien
gatttaacactctgtcaaggatcttaggagata

SEQ ID NO: 734478 - DNA, 33 bp, Homo sapien
gatttaacactctgtcgaggatcttaggagata

SEQ ID NO: 734479 - DNA, 33 bp, Homo sapien
cggctgggtggttctcagaaacatgaagaaagt

SEQ ID NO: 734480 - DNA, 33 bp, Homo sapien
cggctgggtggttctcggaaacatgaagaaagt

SEQ ID NO: 734481 - DNA, 33 bp, Homo sapien
agcaggctgagcctccaaaggcaagaaatgcaa

SEQ ID NO: 734482 - DNA, 33 bp, Homo sapien
agcaggctgagcctccgaaggcaagaaatgcaa

SEQ ID NO: 734483 - DNA, 33 bp, Homo sapien
aactctcagataggaaacttagcaggctgagcc

SEQ ID NO: 734484 - DNA, 33 bp, Homo sapien
aactctcagataggaagcttagcaggctgagcc

SEQ ID NO: 734485 - DNA, 33 bp, Homo sapien
gttttcaggttgaaagcctctttgttgccactt

SEQ ID NO: 734486 - DNA, 33 bp, Homo sapien
gttttcaggttgaaagtctctttgttgccactt

SEQ ID NO: 734487 - DNA, 33 bp, Homo sapien
tcacaggtgtggcagaagatgtcttaaggcttt

SEQ ID NO: 734488 - DNA, 33 bp, Homo sapien
tcacaggtgtggcagaggatgtcttaaggcttt

SEQ ID NO: 734489 - DNA, 33 bp, Homo sapien
aaagtaagcaaataaaggtggctcttcttaggg

SEQ ID NO: 734490 - DNA, 33 bp, Homo sapien
aaagtaagcaaataaatgtggctcttcttaggg

SEQ ID NO: 734491 - DNA, 33 bp, Homo sapien
tcatttggagacacaacttggcaattaaaaaaa

SEQ ID NO: 734492 - DNA, 33 bp, Homo sapien
tcatttggagacacaagttggcaattaaaaaaa

SEQ ID NO: 734493 - DNA, 33 bp, Homo sapien
ttgtccccaaagtagcagagacttttttatttt

SEQ ID NO: 734494 - DNA, 33 bp, Homo sapien
ttgtccccaaagtagcggagacttttttatttt

SEQ ID NO: 734495 - DNA, 33 bp, Homo sapien
ttcttacctttttaaacacaggaaactgcacaa

SEQ ID NO: 734496 - DNA, 33 bp, Homo sapien
ttcttacctttttaaatacaggaaactgcacaa

SEQ ID NO: 734497 - DNA, 33 bp, Homo sapien
tatctgtggtattaaaacactcatactaaaaca

SEQ ID NO: 734498 - DNA, 33 bp, Homo sapien
tatctgtggtattaaatcactcatactaaaaca

SEQ ID NO: 734499 - DNA, 33 bp, Homo sapien
taatttcacctaaacacaaagaagaagcaaaac

SEQ ID NO: 734500 - DNA, 33 bp, Homo sapien
taatttcacctaaacataaagaagaagcaaaac

SEQ ID NO: 734501 - DNA, 33 bp, Homo sapien
gactatcttgaaaacagatattgactgcccttt

SEQ ID NO: 734502 - DNA, 33 bp, Homo sapien
gactatcttgaaaacatatattgactgcccttt

SEQ ID NO: 734503 - DNA, 33 bp, Homo sapien
tcttggaaaagggcaactctggtatttttgcaa

SEQ ID NO: 734504 - DNA, 33 bp, Homo sapien
tcttggaaaagggcaattctggtatttttgcaa

SEQ ID NO: 734505 - DNA, 33 bp, Homo sapien
tatatcatgtggataaataaaagagttctgcat

SEQ ID NO: 734506 - DNA, 33 bp, Homo sapien
tatatcatgtggataagtaaaagagttctgcat

SEQ ID NO: 734507 - DNA, 33 bp, Homo sapien
gcttcaggagataagcacctcatttaaacagag

SEQ ID NO: 734508 - DNA, 33 bp, Homo sapien
gcttcaggagataagcgcctcatttaaacagag

SEQ ID NO: 734509 - DNA, 33 bp, Homo sapien
atgtggggaaaggcgaatcattctatgggccta

SEQ ID NO: 734510 - DNA, 33 bp, Homo sapien
atgtggggaaaggcgagtcattctatgggccta

SEQ ID NO: 734511 - DNA, 33 bp, Homo sapien
gatgattttgacttaaaaatgtattcaaatctt

SEQ ID NO: 734512 - DNA, 33 bp, Homo sapien
gatgattttgacttaagaatgtattcaaatctt

SEQ ID NO: 734513 - DNA, 33 bp, Homo sapien
tggttaagcacgcgataaatgctgtattactcc

SEQ ID NO: 734514 - DNA, 33 bp, Homo sapien
tggttaagcacgcgatgaatgctgtattactcc

SEQ ID NO: 734515 - DNA, 33 bp, Homo sapien
cacctctaaataggagaagcatcaaagtcacat

SEQ ID NO: 734516 - DNA, 33 bp, Homo sapien
cacctctaaataggaggagcatcaaagtcacat

SEQ ID NO: 734517 - DNA, 33 bp, Homo sapien
ttttaaatgtctgaaactggtgattatagccca

SEQ ID NO: 734518 - DNA, 33 bp, Homo sapien
ttttaaatgtctgaaattggtgattatagccca

SEQ ID NO: 734519 - DNA, 33 bp, Homo sapien
tgaagtcccttgatgaaaactctataggaatca

SEQ ID NO: 734520 - DNA, 33 bp, Homo sapien
tgaagtcccttgatgagaactctataggaatca

SEQ ID NO: 734521 - DNA, 33 bp, Homo sapien
tctgaaaccaagcgccaatgatgtagaatatat

SEQ ID NO: 734522 - DNA, 33 bp, Homo sapien
tctgaaaccaagcgcccatgatgtagaatatat

SEQ ID NO: 734523 - DNA, 33 bp, Homo sapien
ccttgggtaagcaaaacgacatactactttttc

SEQ ID NO: 734524 - DNA, 33 bp, Homo sapien
ccttgggtaagcaaaatgacatactactttttc

SEQ ID NO: 734525 - DNA, 33 bp, Homo sapien
tgcttatgaatctaacgctggtagcacatagtt

SEQ ID NO: 734526 - DNA, 33 bp, Homo sapien
tgcttatgaatctaactctggtagcacatagtt

SEQ ID NO: 734527 - DNA, 33 bp, Homo sapien
gtaacacaaagacaaggccttaagccctcagag

SEQ ID NO: 734528 - DNA, 33 bp, Homo sapien
gtaacacaaagacaagtccttaagccctcagag

SEQ ID NO: 734529 - DNA, 33 bp, Homo sapien
tattttacttaaattacgattgcgtttgtttac

SEQ ID NO: 734530 - DNA, 33 bp, Homo sapien
tattttacttaaattatgattgcgtttgtttac

SEQ ID NO: 734531 - DNA, 33 bp, Homo sapien
gcactgagacttaaaaattagtatggatacaat

SEQ ID NO: 734532 - DNA, 33 bp, Homo sapien
gcactgagacttaaaagttagtatggatacaat

SEQ ID NO: 734533 - DNA, 33 bp, Homo sapien
taatggttgtaatgggcatactgactatgtgtc

SEQ ID NO: 734534 - DNA, 33 bp, Homo sapien
taatggttgtaatgggtatactgactatgtgtc

SEQ ID NO: 734535 - DNA, 33 bp, Homo sapien
tatacccaataggccaaaaaagtactggtcatc

SEQ ID NO: 734536 - DNA, 33 bp, Homo sapien
tatacccaataggccagaaaagtactggtcatc

SEQ ID NO: 734537 - DNA, 33 bp, Homo sapien
aaaaaaggccacaaaaacctgtgctatggtttg

SEQ ID NO: 734538 - DNA, 33 bp, Homo sapien
aaaaaaggccacaaaaccctgtgctatggtttg

SEQ ID NO: 734539 - DNA, 33 bp, Homo sapien
aaaaaatcaggttgcaagtagttgactccattt

SEQ ID NO: 734540 - DNA, 33 bp, Homo sapien
aaaaaatcaggttgcatgtagttgactccattt

SEQ ID NO: 734541 - DNA, 33 bp, Homo sapien
gttagaaaaaacaggacgctacagattagtggg

SEQ ID NO: 734542 - DNA, 33 bp, Homo sapien
gttagaaaaaacaggatgctacagattagtggg

SEQ ID NO: 734543 - DNA, 33 bp, Homo sapien
actatgtgaaggtatacacaggggacaacttga

SEQ ID NO: 734544 - DNA, 33 bp, Homo sapien
actatgtgaaggtatatacaggggacaacttga

SEQ ID NO: 734545 - DNA, 33 bp, Homo sapien
ttgtgatattcttggcagagcctgcttcacacc

SEQ ID NO: 734546 - DNA, 33 bp, Homo sapien
ttgtgatattcttggcggagcctgcttcacacc

SEQ ID NO: 734547 - DNA, 33 bp, Homo sapien
ctcgtagtcactgaacaaggtagtccctttttc

SEQ ID NO: 734548 - DNA, 33 bp, Homo sapien
ctcgtagtcactgaactaggtagtccctttttc

SEQ ID NO: 734549 - DNA, 33 bp, Homo sapien
aaacttagcgcctccaatcatgggcaatgtgac

SEQ ID NO: 734550 - DNA, 33 bp, Homo sapien
aaacttagcgcctccattcatgggcaatgtgac

SEQ ID NO: 734551 - DNA, 33 bp, Homo sapien
ggaacacatagagttccgaacagagagatccat

SEQ ID NO: 734552 - DNA, 33 bp, Homo sapien
ggaacacatagagttctgaacagagagatccat

SEQ ID NO: 734553 - DNA, 33 bp, Homo sapien
tcagtgtccaaatccaacctaaatcgtattagc

SEQ ID NO: 734554 - DNA, 33 bp, Homo sapien
tcagtgtccaaatccagcctaaatcgtattagc

SEQ ID NO: 734555 - DNA, 33 bp, Homo sapien
tagaggaaaaactgaaaggagaagaaaatactt

SEQ ID NO: 734556 - DNA, 33 bp, Homo sapien
tagaggaaaaactgaagggagaagaaaatactt

SEQ ID NO: 734557 - DNA, 33 bp, Homo sapien
gtaaaactagctatcaaaacaatagactaagga

SEQ ID NO: 734558 - DNA, 33 bp, Homo sapien
gtaaaactagctatcagaacaatagactaagga

SEQ ID NO: 734559 - DNA, 33 bp, Homo sapien
ttgatcttggccttgaacattagcaatcctggg

SEQ ID NO: 734560 - DNA, 33 bp, Homo sapien
ttgatcttggccttgagcattagcaatcctggg

SEQ ID NO: 734561 - DNA, 33 bp, Homo sapien
attccaggtatgtaccagagaggcttagagaga

SEQ ID NO: 734562 - DNA, 33 bp, Homo sapien
attccaggtatgtaccggagaggcttagagaga

SEQ ID NO: 734563 - DNA, 33 bp, Homo sapien
ttggctttggttcttacgcagcgcagagggtgt

SEQ ID NO: 734564 - DNA, 33 bp, Homo sapien
ttggctttggttcttatgcagcgcagagggtgt

SEQ ID NO: 734565 - DNA, 33 bp, Homo sapien
actgttgtgtggaacaatccagtttgaggaagt

SEQ ID NO: 734566 - DNA, 33 bp, Homo sapien
actgttgtgtggaacagtccagtttgaggaagt

SEQ ID NO: 734567 - DNA, 33 bp, Homo sapien
acttccccaaagccagaaattagtggacgactg

SEQ ID NO: 734568 - DNA, 33 bp, Homo sapien
acttccccaaagccaggaattagtggacgactg

SEQ ID NO: 734569 - DNA, 33 bp, Homo sapien
gcccaattacagatgtcaagacaacaaagctca

SEQ ID NO: 734570 - DNA, 33 bp, Homo sapien
gcccaattacagatgttaagacaacaaagctca

SEQ ID NO: 734571 - DNA, 33 bp, Homo sapien
cccactctggtgtttacggccttgtgttgcatg

SEQ ID NO: 734572 - DNA, 33 bp, Homo sapien
cccactctggtgtttatggccttgtgttgcatg

SEQ ID NO: 734573 - DNA, 33 bp, Homo sapien
agctgtgctttggttgaatttacatcttgggct

SEQ ID NO: 734574 - DNA, 33 bp, Homo sapien
agctgtgctttggttggatttacatcttgggct

SEQ ID NO: 734575 - DNA, 33 bp, Homo sapien
cttcatttccagtcaaagcatgcgacattttag

SEQ ID NO: 734576 - DNA, 33 bp, Homo sapien
cttcatttccagtcaaggcatgcgacattttag

SEQ ID NO: 734577 - DNA, 33 bp, Homo sapien
accgccagtgctgtggaaccctgttggaatccc

SEQ ID NO: 734578 - DNA, 33 bp, Homo sapien
accgccagtgctgtgggaccctgttggaatccc

SEQ ID NO: 734579 - DNA, 33 bp, Homo sapien
agagcagaggtaaaataaagggaagcacaggtg

SEQ ID NO: 734580 - DNA, 33 bp, Homo sapien
agagcagaggtaaaatgaagggaagcacaggtg

SEQ ID NO: 734581 - DNA, 33 bp, Homo sapien
ccactttctgtaaaccagcaagacctcccaaat

SEQ ID NO: 734582 - DNA, 33 bp, Homo sapien
ccactttctgtaaaccggcaagacctcccaaat

SEQ ID NO: 734583 - DNA, 33 bp, Homo sapien
ctgcagcacctttgtgcaatacaaccctatagt

SEQ ID NO: 734584 - DNA, 33 bp, Homo sapien
ctgcagcacctttgtgtaatacaaccctatagt

SEQ ID NO: 734585 - DNA, 33 bp, Homo sapien
attagaaggaagaagaagcccacccagatggca

SEQ ID NO: 734586 - DNA, 33 bp, Homo sapien
attagaaggaagaagaggcccacccagatggca

SEQ ID NO: 734587 - DNA, 33 bp, Homo sapien
ccaaacctctggatacaaacagatttccctgcc

SEQ ID NO: 734588 - DNA, 33 bp, Homo sapien
ccaaacctctggatacgaacagatttccctgcc

SEQ ID NO: 734589 - DNA, 33 bp, Homo sapien
tacagccatagtgaacagcaaattaatcagagt

SEQ ID NO: 734590 - DNA, 33 bp, Homo sapien
tacagccatagtgaacggcaaattaatcagagt

SEQ ID NO: 734591 - DNA, 33 bp, Homo sapien
tgaatagctttaatagcctagctttcttgtttc

SEQ ID NO: 734592 - DNA, 33 bp, Homo sapien
tgaatagctttaatagtctagctttcttgtttc

SEQ ID NO: 734593 - DNA, 33 bp, Homo sapien
tgagagatacaaacttcaagtggatgggctctc

SEQ ID NO: 734594 - DNA, 33 bp, Homo sapien
tgagagatacaaactttaagtggatgggctctc

SEQ ID NO: 734595 - DNA, 33 bp, Homo sapien
ctgcatatattggaaccctagataagcaaagtg

SEQ ID NO: 734596 - DNA, 33 bp, Homo sapien
ctgcatatattggaactctagataagcaaagtg

SEQ ID NO: 734597 - DNA, 33 bp, Homo sapien
cactctgattctttagacccttagagctccctg

SEQ ID NO: 734598 - DNA, 33 bp, Homo sapien
cactctgattctttaggcccttagagctccctg

SEQ ID NO: 734599 - DNA, 33 bp, Homo sapien
ttagaggaagatggaaaagctctatgcaacctg

SEQ ID NO: 734600 - DNA, 33 bp, Homo sapien
ttagaggaagatggaacagctctatgcaacctg

SEQ ID NO: 734601 - DNA, 33 bp, Homo sapien
cacaacctgatatagacgcctcagaattctctc

SEQ ID NO: 734602 - DNA, 33 bp, Homo sapien
cacaacctgatatagatgcctcagaattctctc

SEQ ID NO: 734603 - DNA, 33 bp, Homo sapien
aatttccaagatctaccatgagaagaatgcata

SEQ ID NO: 734604 - DNA, 33 bp, Homo sapien
aatttccaagatctactatgagaagaatgcata

SEQ ID NO: 734605 - DNA, 33 bp, Homo sapien
tgtctaacatcacttaaaaacttgcatatcttt

SEQ ID NO: 734606 - DNA, 33 bp, Homo sapien
tgtctaacatcacttacaaacttgcatatcttt

SEQ ID NO: 734607 - DNA, 33 bp, Homo sapien
gttctacttacaactacctcctatcagatttac

SEQ ID NO: 734608 - DNA, 33 bp, Homo sapien
gttctacttacaactatctcctatcagatttac

SEQ ID NO: 734609 - DNA, 33 bp, Homo sapien
atgatataactgctgcaaccggcgctgccacaa

SEQ ID NO: 734610 - DNA, 33 bp, Homo sapien
atgatataactgctgcgaccggcgctgccacaa

SEQ ID NO: 734611 - DNA, 33 bp, Homo sapien
ttgaaatatgaaacaaagcaagtgtagtgcaga

SEQ ID NO: 734612 - DNA, 33 bp, Homo sapien
ttgaaatatgaaacaaggcaagtgtagtgcaga

SEQ ID NO: 734613 - DNA, 33 bp, Homo sapien
gtgttttaataacatcagacataagaatgtaac

SEQ ID NO: 734614 - DNA, 33 bp, Homo sapien
gtgttttaataacatcggacataagaatgtaac

SEQ ID NO: 734615 - DNA, 33 bp, Homo sapien
gtttttttgttccttaagtattccactcaaaaa

SEQ ID NO: 734616 - DNA, 33 bp, Homo sapien
gtttttttgttccttacgtattccactcaaaaa

SEQ ID NO: 734617 - DNA, 33 bp, Homo sapien
tgagccttcaatcaaagaacaatagcaagtgac

SEQ ID NO: 734618 - DNA, 33 bp, Homo sapien
tgagccttcaatcaaataacaatagcaagtgac

SEQ ID NO: 734619 - DNA, 33 bp, Homo sapien
cccctgataggtgttgcaggtcatcaagtaaaa

SEQ ID NO: 734620 - DNA, 33 bp, Homo sapien
cccctgataggtgttgtaggtcatcaagtaaaa

SEQ ID NO: 734621 - DNA, 33 bp, Homo sapien
tgcagtagcttttgtccataattctagcactct

SEQ ID NO: 734622 - DNA, 33 bp, Homo sapien
tgcagtagcttttgtcgataattctagcactct

SEQ ID NO: 734623 - DNA, 33 bp, Homo sapien
aataaacagtatgtacagattggttacctatgg

SEQ ID NO: 734624 - DNA, 33 bp, Homo sapien
aataaacagtatgtacggattggttacctatgg

SEQ ID NO: 734625 - DNA, 33 bp, Homo sapien
tctccagaaatcctcacgcttaactccctcatg

SEQ ID NO: 734626 - DNA, 33 bp, Homo sapien
tctccagaaatcctcatgcttaactccctcatg

SEQ ID NO: 734627 - DNA, 33 bp, Homo sapien
aaagtaataatgcctaaaagccataaagaaaaa

SEQ ID NO: 734628 - DNA, 33 bp, Homo sapien
aaagtaataatgcctagaagccataaagaaaaa

SEQ ID NO: 734629 - DNA, 33 bp, Homo sapien
tttttgctattgtgaacaattcagtgatgaaca

SEQ ID NO: 734630 - DNA, 33 bp, Homo sapien
tttttgctattgtgaataattcagtgatgaaca

SEQ ID NO: 734631 - DNA, 33 bp, Homo sapien
atagtgtctttatgaccagggttggtttatcag

SEQ ID NO: 734632 - DNA, 33 bp, Homo sapien
atagtgtctttatgactagggttggtttatcag

SEQ ID NO: 734633 - DNA, 33 bp, Homo sapien
tgtatgctaagttctacagagttcaaactgaac

SEQ ID NO: 734634 - DNA, 33 bp, Homo sapien
tgtatgctaagttctatagagttcaaactgaac

SEQ ID NO: 734635 - DNA, 33 bp, Homo sapien
taactagattctggtaccatttgacattttgtt

SEQ ID NO: 734636 - DNA, 33 bp, Homo sapien
taactagattctggtatcatttgacattttgtt

SEQ ID NO: 734637 - DNA, 33 bp, Homo sapien
agtcagtatcctacaacttgacatttattttgg

SEQ ID NO: 734638 - DNA, 33 bp, Homo sapien
agtcagtatcctacaatttgacatttattttgg

SEQ ID NO: 734639 - DNA, 33 bp, Homo sapien
aacaattgctagcctagattattcccaagtaga

SEQ ID NO: 734640 - DNA, 33 bp, Homo sapien
aacaattgctagcctatattattcccaagtaga

SEQ ID NO: 734641 - DNA, 33 bp, Homo sapien
actctgctatgaacaactcaaatggagcgtgct

SEQ ID NO: 734642 - DNA, 33 bp, Homo sapien
actctgctatgaacaattcaaatggagcgtgct

SEQ ID NO: 734643 - DNA, 33 bp, Homo sapien
cttagataggtattctcaatcattgcttttagg

SEQ ID NO: 734644 - DNA, 33 bp, Homo sapien
cttagataggtattcttaatcattgcttttagg

SEQ ID NO: 734645 - DNA, 33 bp, Homo sapien
tgtgaagtagattaggacagattatccctgtat

SEQ ID NO: 734646 - DNA, 33 bp, Homo sapien
tgtgaagtagattagggcagattatccctgtat

SEQ ID NO: 734647 - DNA, 33 bp, Homo sapien
tataatagaataatttcaaatgatcaataaaca

SEQ ID NO: 734648 - DNA, 33 bp, Homo sapien
tataatagaataatttgaaatgatcaataaaca

SEQ ID NO: 734649 - DNA, 33 bp, Homo sapien
caagatcaacttctcaaccaaaaaattataatt

SEQ ID NO: 734650 - DNA, 33 bp, Homo sapien
caagatcaacttctcagccaaaaaattataatt

SEQ ID NO: 734651 - DNA, 33 bp, Homo sapien
ttttttagagaaagtcacttacagatataaaac

SEQ ID NO: 734652 - DNA, 33 bp, Homo sapien
ttttttagagaaagtcgcttacagatataaaac

SEQ ID NO: 734653 - DNA, 33 bp, Homo sapien
agtgtataatttaccacgtgaaacagccatgag

SEQ ID NO: 734654 - DNA, 33 bp, Homo sapien
agtgtataatttaccatgtgaaacagccatgag

SEQ ID NO: 734655 - DNA, 33 bp, Homo sapien
cagaatcagtagtataactagggatatttcaag

SEQ ID NO: 734656 - DNA, 33 bp, Homo sapien
cagaatcagtagtatacctagggatatttcaag

SEQ ID NO: 734657 - DNA, 33 bp, Homo sapien
cagcagaagaattcatcagaagacaaagtcctc

SEQ ID NO: 734658 - DNA, 33 bp, Homo sapien
cagcagaagaattcatgagaagacaaagtcctc

SEQ ID NO: 734659 - DNA, 33 bp, Homo sapien
gattctcagactgaggacatccagtatggcgat

SEQ ID NO: 734660 - DNA, 33 bp, Homo sapien
gattctcagactgagggcatccagtatggcgat

SEQ ID NO: 734661 - DNA, 33 bp, Homo sapien
gaaacaaatgtccaaaaataagagaatcattta

SEQ ID NO: 734662 - DNA, 33 bp, Homo sapien
gaaacaaatgtccaaacataagagaatcattta

SEQ ID NO: 734663 - DNA, 33 bp, Homo sapien
ttaagtattgttctcgaagtgttaacacatttg

SEQ ID NO: 734664 - DNA, 33 bp, Homo sapien
ttaagtattgttctcgcagtgttaacacatttg

SEQ ID NO: 734665 - DNA, 33 bp, Homo sapien
ctagcgtcgtggaagcaccgtaatgtcccgaag

SEQ ID NO: 734666 - DNA, 33 bp, Homo sapien
ctagcgtcgtggaagcgccgtaatgtcccgaag

SEQ ID NO: 734667 - DNA, 33 bp, Homo sapien
caccctcctggctgaacactcctaatagtagtg

SEQ ID NO: 734668 - DNA, 33 bp, Homo sapien
caccctcctggctgaatactcctaatagtagtg

SEQ ID NO: 734669 - DNA, 33 bp, Homo sapien
gtctgtgtggaagatgcaatgctacttactttc

SEQ ID NO: 734670 - DNA, 33 bp, Homo sapien
gtctgtgtggaagatgtaatgctacttactttc

SEQ ID NO: 734671 - DNA, 33 bp, Homo sapien
tcttgttgttgccccaccttagaggacactcag

SEQ ID NO: 734672 - DNA, 33 bp, Homo sapien
tcttgttgttgccccatcttagaggacactcag

SEQ ID NO: 734673 - DNA, 33 bp, Homo sapien
ttcaaaaaatcaattcaaacattgctgtgaaac

SEQ ID NO: 734674 - DNA, 33 bp, Homo sapien
ttcaaaaaatcaattcgaacattgctgtgaaac

SEQ ID NO: 734675 - DNA, 33 bp, Homo sapien
aagacacacttgctcaccaaaaaaatgtctctg

SEQ ID NO: 734676 - DNA, 33 bp, Homo sapien
aagacacacttgctcatcaaaaaaatgtctctg

SEQ ID NO: 734677 - DNA, 33 bp, Homo sapien
ggcatccattttttcaataattgtgtgagcttc

SEQ ID NO: 734678 - DNA, 33 bp, Homo sapien
ggcatccattttttcagtaattgtgtgagcttc

SEQ ID NO: 734679 - DNA, 33 bp, Homo sapien
gcacagagaatagctacgacttctgggcccagt

SEQ ID NO: 734680 - DNA, 33 bp, Homo sapien
gcacagagaatagctatgacttctgggcccagt

SEQ ID NO: 734681 - DNA, 33 bp, Homo sapien
ttgctttcacatagtcaattcatacaatgggcc

SEQ ID NO: 734682 - DNA, 33 bp, Homo sapien
ttgctttcacatagtccattcatacaatgggcc

SEQ ID NO: 734683 - DNA, 33 bp, Homo sapien
ctaccattctaccacactagtctgttctcacac

SEQ ID NO: 734684 - DNA, 33 bp, Homo sapien
ctaccattctaccacattagtctgttctcacac

SEQ ID NO: 734685 - DNA, 33 bp, Homo sapien
tcttctggactaactacgcaacaatctctctta

SEQ ID NO: 734686 - DNA, 33 bp, Homo sapien
tcttctggactaactatgcaacaatctctctta

SEQ ID NO: 734687 - DNA, 33 bp, Homo sapien
tattacttcattgaatgactctttgccattttt

SEQ ID NO: 734688 - DNA, 33 bp, Homo sapien
tattacttcattgaattactctttgccattttt

SEQ ID NO: 734689 - DNA, 33 bp, Homo sapien
attaactagcacaaaaagtgaccctgtccctgc

SEQ ID NO: 734690 - DNA, 33 bp, Homo sapien
attaactagcacaaaaggtgaccctgtccctgc

SEQ ID NO: 734691 - DNA, 33 bp, Homo sapien
actttcaagaaaagtacggaatgagatctttaa

SEQ ID NO: 734692 - DNA, 33 bp, Homo sapien
actttcaagaaaagtatggaatgagatctttaa

SEQ ID NO: 734693 - DNA, 33 bp, Homo sapien
tcagcaagccctatctcaattgtactgctggtc

SEQ ID NO: 734694 - DNA, 33 bp, Homo sapien
tcagcaagccctatctgaattgtactgctggtc

SEQ ID NO: 734695 - DNA, 33 bp, Homo sapien
gagggtggagtaaacaactttggtgccagagat

SEQ ID NO: 734696 - DNA, 33 bp, Homo sapien
gagggtggagtaaacatctttggtgccagagat

SEQ ID NO: 734697 - DNA, 33 bp, Homo sapien
tactggctcccattgacgctttccaatatggtt

SEQ ID NO: 734698 - DNA, 33 bp, Homo sapien
tactggctcccattgatgctttccaatatggtt

SEQ ID NO: 734699 - DNA, 33 bp, Homo sapien
ggaaatgggagagtaccggaggaaaatgagaaa

SEQ ID NO: 734700 - DNA, 33 bp, Homo sapien
ggaaatgggagagtactggaggaaaatgagaaa

SEQ ID NO: 734701 - DNA, 33 bp, Homo sapien
atttgttaattaactcaaagatccattcaggga

SEQ ID NO: 734702 - DNA, 33 bp, Homo sapien
atttgttaattaactccaagatccattcaggga

SEQ ID NO: 734703 - DNA, 33 bp, Homo sapien
gagatttgcagacatacaactagaattcaatgg

SEQ ID NO: 734704 - DNA, 33 bp, Homo sapien
gagatttgcagacatataactagaattcaatgg

SEQ ID NO: 734705 - DNA, 33 bp, Homo sapien
cagtgcctcgaacaaacgtcaacagagcactct

SEQ ID NO: 734706 - DNA, 33 bp, Homo sapien
cagtgcctcgaacaaatgtcaacagagcactct

SEQ ID NO: 734707 - DNA, 33 bp, Homo sapien
gagaacctcagggaacagacttagaggagccag

SEQ ID NO: 734708 - DNA, 33 bp, Homo sapien
gagaacctcagggaaccgacttagaggagccag

SEQ ID NO: 734709 - DNA, 33 bp, Homo sapien
acactaatgaagtctaagctttgatggaggaaa

SEQ ID NO: 734710 - DNA, 33 bp, Homo sapien
acactaatgaagtctatgctttgatggaggaaa

SEQ ID NO: 734711 - DNA, 33 bp, Homo sapien
aatgaacttaggacgacaaggaaagactaagaa

SEQ ID NO: 734712 - DNA, 33 bp, Homo sapien
aatgaacttaggacgagaaggaaagactaagaa

SEQ ID NO: 734713 - DNA, 33 bp, Homo sapien
tgtctgaaacatcacaatatttaggacatttta

SEQ ID NO: 734714 - DNA, 33 bp, Homo sapien
tgtctgaaacatcacagtatttaggacatttta

SEQ ID NO: 734715 - DNA, 33 bp, Homo sapien
tatacagtatttgatgcagttcatgtattacct

SEQ ID NO: 734716 - DNA, 33 bp, Homo sapien
tatacagtatttgatgtagttcatgtattacct

SEQ ID NO: 734717 - DNA, 33 bp, Homo sapien
tgctgaatatctctgtaaagccttgctatatat

SEQ ID NO: 734718 - DNA, 33 bp, Homo sapien
tgctgaatatctctgtgaagccttgctatatat

SEQ ID NO: 734719 - DNA, 33 bp, Homo sapien
aactcatgctgcacagaattttaagtgtaaaat

SEQ ID NO: 734720 - DNA, 33 bp, Homo sapien
aactcatgctgcacaggattttaagtgtaaaat

SEQ ID NO: 734721 - DNA, 33 bp, Homo sapien
ttctcacaaaacaatcacttcttgatacttgtt

SEQ ID NO: 734722 - DNA, 33 bp, Homo sapien
ttctcacaaaacaatcgcttcttgatacttgtt

SEQ ID NO: 734723 - DNA, 33 bp, Homo sapien
gtgatatgttttttagaaattgcttctatgcat

SEQ ID NO: 734724 - DNA, 33 bp, Homo sapien
gtgatatgttttttaggaattgcttctatgcat

SEQ ID NO: 734725 - DNA, 33 bp, Homo sapien
ggaccctggctaacaggcagcaatgaaacggcg

SEQ ID NO: 734726 - DNA, 33 bp, Homo sapien
ggaccctggctaacagtcagcaatgaaacggcg

SEQ ID NO: 734727 - DNA, 33 bp, Homo sapien
taaaaccaatttccacagtatctctgattcctg

SEQ ID NO: 734728 - DNA, 33 bp, Homo sapien
taaaaccaatttccaccgtatctctgattcctg

SEQ ID NO: 734729 - DNA, 33 bp, Homo sapien
aaatatgacacaataaaatgttagttggcacat

SEQ ID NO: 734730 - DNA, 33 bp, Homo sapien
aaatatgacacaataagatgttagttggcacat

SEQ ID NO: 734731 - DNA, 33 bp, Homo sapien
agacagagtgagttaacgcatctattcttaaaa

SEQ ID NO: 734732 - DNA, 33 bp, Homo sapien
agacagagtgagttaatgcatctattcttaaaa

SEQ ID NO: 734733 - DNA, 33 bp, Homo sapien
tatcagataggaattacgtacacaagtgaggaa

SEQ ID NO: 734734 - DNA, 33 bp, Homo sapien
tatcagataggaattatgtacacaagtgaggaa

SEQ ID NO: 734735 - DNA, 33 bp, Homo sapien
gtatagtcatctaaaaatttcacaccctggatc

SEQ ID NO: 734736 - DNA, 33 bp, Homo sapien
gtatagtcatctaaaagtttcacaccctggatc

SEQ ID NO: 734737 - DNA, 33 bp, Homo sapien
gcacttgaaggacaccactgtgctaaagacata

SEQ ID NO: 734738 - DNA, 33 bp, Homo sapien
gcacttgaaggacaccgctgtgctaaagacata

SEQ ID NO: 734739 - DNA, 33 bp, Homo sapien
atcaggctccaatctgacacatttgatgtttgt

SEQ ID NO: 734740 - DNA, 33 bp, Homo sapien
atcaggctccaatctggcacatttgatgtttgt

SEQ ID NO: 734741 - DNA, 33 bp, Homo sapien
ctgcagaacattattacaaattcacagatggaa

SEQ ID NO: 734742 - DNA, 33 bp, Homo sapien
ctgcagaacattattataaattcacagatggaa

SEQ ID NO: 734743 - DNA, 33 bp, Homo sapien
tacatacacagactctcaaagagattaacagaa

SEQ ID NO: 734744 - DNA, 33 bp, Homo sapien
tacatacacagactctgaaagagattaacagaa

SEQ ID NO: 734745 - DNA, 33 bp, Homo sapien
ggtttaaaataacttacgatgaaagggtcactt

SEQ ID NO: 734746 - DNA, 33 bp, Homo sapien
ggtttaaaataacttatgatgaaagggtcactt

SEQ ID NO: 734747 - DNA, 33 bp, Homo sapien
agttgcctactataaaacagtataaaacatctg

SEQ ID NO: 734748 - DNA, 33 bp, Homo sapien
agttgcctactataaatcagtataaaacatctg

SEQ ID NO: 734749 - DNA, 33 bp, Homo sapien
gagtaatcttcatgccacaggtgaagaaactga

SEQ ID NO: 734750 - DNA, 33 bp, Homo sapien
gagtaatcttcatgccgcaggtgaagaaactga

SEQ ID NO: 734751 - DNA, 33 bp, Homo sapien
atcatcttactgacaactctaccaattacaaca

SEQ ID NO: 734752 - DNA, 33 bp, Homo sapien
atcatcttactgacaattctaccaattacaaca

SEQ ID NO: 734753 - DNA, 33 bp, Homo sapien
taccgtaggtctagagcagaagcccgacattgt

SEQ ID NO: 734754 - DNA, 33 bp, Homo sapien
taccgtaggtctagaggagaagcccgacattgt

SEQ ID NO: 734755 - DNA, 33 bp, Homo sapien
agcagatctgggattccatgcttgattagtttg

SEQ ID NO: 734756 - DNA, 33 bp, Homo sapien
agcagatctgggattctatgcttgattagtttg

SEQ ID NO: 734757 - DNA, 33 bp, Homo sapien
caaatcttttcatatacacatgagaggctatga

SEQ ID NO: 734758 - DNA, 33 bp, Homo sapien
caaatcttttcatatatacatgagaggctatga

SEQ ID NO: 734759 - DNA, 33 bp, Homo sapien
cagtcctgctcactctaaataagccatctatta

SEQ ID NO: 734760 - DNA, 33 bp, Homo sapien
cagtcctgctcactcttaataagccatctatta

SEQ ID NO: 734761 - DNA, 33 bp, Homo sapien
atccttcgaagatgtacataataacttgtatgc

SEQ ID NO: 734762 - DNA, 33 bp, Homo sapien
atccttcgaagatgtatataataacttgtatgc

SEQ ID NO: 734763 - DNA, 33 bp, Homo sapien
actagttctgtaacaacctgactgccatatagg

SEQ ID NO: 734764 - DNA, 33 bp, Homo sapien
actagttctgtaacaatctgactgccatatagg

SEQ ID NO: 734765 - DNA, 33 bp, Homo sapien
ttatggaatcaagatgaagctttacagtcagtg

SEQ ID NO: 734766 - DNA, 33 bp, Homo sapien
ttatggaatcaagatgcagctttacagtcagtg

SEQ ID NO: 734767 - DNA, 33 bp, Homo sapien
ttgaaatggccacacaaaagtacaaaggataat

SEQ ID NO: 734768 - DNA, 33 bp, Homo sapien
ttgaaatggccacacagaagtacaaaggataat

SEQ ID NO: 734769 - DNA, 33 bp, Homo sapien
actcttaccaaagatgccaactgaaccatcaat

SEQ ID NO: 734770 - DNA, 33 bp, Homo sapien
actcttaccaaagatggcaactgaaccatcaat

SEQ ID NO: 734771 - DNA, 33 bp, Homo sapien
aggcctgtagcataaaaggagcatatcaccact

SEQ ID NO: 734772 - DNA, 33 bp, Homo sapien
aggcctgtagcataaatggagcatatcaccact

SEQ ID NO: 734773 - DNA, 33 bp, Homo sapien
cctttcttgactgatacagctgttctttccttg

SEQ ID NO: 734774 - DNA, 33 bp, Homo sapien
cctttcttgactgatatagctgttctttccttg

SEQ ID NO: 734775 - DNA, 33 bp, Homo sapien
ggttgatgggttacaaagttggaaaacaaaagt

SEQ ID NO: 734776 - DNA, 33 bp, Homo sapien
ggttgatgggttacaaggttggaaaacaaaagt

SEQ ID NO: 734777 - DNA, 33 bp, Homo sapien
ctcataaaatgccatacgaggtagcctagattt

SEQ ID NO: 734778 - DNA, 33 bp, Homo sapien
ctcataaaatgccatatgaggtagcctagattt

SEQ ID NO: 734779 - DNA, 33 bp, Homo sapien
aatgaggtcatggatacattgccagtttcagcc

SEQ ID NO: 734780 - DNA, 33 bp, Homo sapien
aatgaggtcatggatatattgccagtttcagcc

SEQ ID NO: 734781 - DNA, 33 bp, Homo sapien
atagagaccgtattaacgatgtgatctggaaga

SEQ ID NO: 734782 - DNA, 33 bp, Homo sapien
atagagaccgtattaatgatgtgatctggaaga

SEQ ID NO: 734783 - DNA, 33 bp, Homo sapien
ttgtaaaaaaaggagaagtgatttggagaattt

SEQ ID NO: 734784 - DNA, 33 bp, Homo sapien
ttgtaaaaaaaggagaggtgatttggagaattt

SEQ ID NO: 734785 - DNA, 33 bp, Homo sapien
tggcccaagttctacactggcccctctaagcca

SEQ ID NO: 734786 - DNA, 33 bp, Homo sapien
tggcccaagttctacattggcccctctaagcca

SEQ ID NO: 734787 - DNA, 33 bp, Homo sapien
atggcagatggcacaaaaggagtccttgacaca

SEQ ID NO: 734788 - DNA, 33 bp, Homo sapien
atggcagatggcacaacaggagtccttgacaca

SEQ ID NO: 734789 - DNA, 33 bp, Homo sapien
tgcctaaggcagatacaaagaagagcaaaaaga

SEQ ID NO: 734790 - DNA, 33 bp, Homo sapien
tgcctaaggcagatacgaagaagagcaaaaaga

SEQ ID NO: 734791 - DNA, 33 bp, Homo sapien
ccatatgacctgcaataagttatctagcccctc

SEQ ID NO: 734792 - DNA, 33 bp, Homo sapien
ccatatgacctgcaattagttatctagcccctc

SEQ ID NO: 734793 - DNA, 33 bp, Homo sapien
atcttgttaacccaaacgagccagtaattatat

SEQ ID NO: 734794 - DNA, 33 bp, Homo sapien
atcttgttaacccaaatgagccagtaattatat

SEQ ID NO: 734795 - DNA, 33 bp, Homo sapien
atgatggttttcagggaatctatgaaatcaaaa

SEQ ID NO: 734796 - DNA, 33 bp, Homo sapien
atgatggttttcaggggatctatgaaatcaaaa

SEQ ID NO: 734797 - DNA, 33 bp, Homo sapien
ttcctaccgcgctgaacatggcaggaatgaaaa

SEQ ID NO: 734798 - DNA, 33 bp, Homo sapien
ttcctaccgcgctgaatatggcaggaatgaaaa

SEQ ID NO: 734799 - DNA, 33 bp, Homo sapien
agacatctccctatacaacaattgtcctggatg

SEQ ID NO: 734800 - DNA, 33 bp, Homo sapien
agacatctccctatacgacaattgtcctggatg

SEQ ID NO: 734801 - DNA, 33 bp, Homo sapien
gttacaatgagtttaaacaaattacctgaagtc

SEQ ID NO: 734802 - DNA, 33 bp, Homo sapien
gttacaatgagtttaagcaaattacctgaagtc

SEQ ID NO: 734803 - DNA, 33 bp, Homo sapien
ggctaagcattttaaccagagcatccccagact

SEQ ID NO: 734804 - DNA, 33 bp, Homo sapien
ggctaagcattttaactagagcatccccagact

SEQ ID NO: 734805 - DNA, 33 bp, Homo sapien
gtatggagaagcttcccgaagaaacacatcagt

SEQ ID NO: 734806 - DNA, 33 bp, Homo sapien
gtatggagaagcttcctgaagaaacacatcagt

SEQ ID NO: 734807 - DNA, 33 bp, Homo sapien
ataaattactttaacaactggcacaataggctc

SEQ ID NO: 734808 - DNA, 33 bp, Homo sapien
ataaattactttaacatctggcacaataggctc

SEQ ID NO: 734809 - DNA, 33 bp, Homo sapien
tctgaaggccagtaaaacaattgggatctccag

SEQ ID NO: 734810 - DNA, 33 bp, Homo sapien
tctgaaggccagtaaagcaattgggatctccag

SEQ ID NO: 734811 - DNA, 33 bp, Homo sapien
cttggtctaccagatacccactggccatttttg

SEQ ID NO: 734812 - DNA, 33 bp, Homo sapien
cttggtctaccagatatccactggccatttttg

SEQ ID NO: 734813 - DNA, 33 bp, Homo sapien
cattttaacgctggcactaaacttttgttctac

SEQ ID NO: 734814 - DNA, 33 bp, Homo sapien
cattttaacgctggcagtaaacttttgttctac

SEQ ID NO: 734815 - DNA, 33 bp, Homo sapien
gatgaaatgtctttcaataacaaggcttcaggc

SEQ ID NO: 734816 - DNA, 33 bp, Homo sapien
gatgaaatgtctttcagtaacaaggcttcaggc

SEQ ID NO: 734817 - DNA, 33 bp, Homo sapien
gcgaaaaggtcatcagaatgaggcacaacaaag

SEQ ID NO: 734818 - DNA, 33 bp, Homo sapien
gcgaaaaggtcatcagcatgaggcacaacaaag

SEQ ID NO: 734819 - DNA, 33 bp, Homo sapien
gaacaacttgaaggaaatggagcatagcctggc

SEQ ID NO: 734820 - DNA, 33 bp, Homo sapien
gaacaacttgaaggaagtggagcatagcctggc

SEQ ID NO: 734821 - DNA, 33 bp, Homo sapien
gcactgagtctggtcaaaatggtaacacgtggg

SEQ ID NO: 734822 - DNA, 33 bp, Homo sapien
gcactgagtctggtcagaatggtaacacgtggg

SEQ ID NO: 734823 - DNA, 33 bp, Homo sapien
gctgaagcactgatgaaagggatggagacagtg

SEQ ID NO: 734824 - DNA, 33 bp, Homo sapien
gctgaagcactgatgagagggatggagacagtg

SEQ ID NO: 734825 - DNA, 33 bp, Homo sapien
ttcagcaggatgcataagtcataagtccttccc

SEQ ID NO: 734826 - DNA, 33 bp, Homo sapien
ttcagcaggatgcataggtcataagtccttccc

SEQ ID NO: 734827 - DNA, 33 bp, Homo sapien
attctgccttttcttacagatgctttggtattt

SEQ ID NO: 734828 - DNA, 33 bp, Homo sapien
attctgccttttcttagagatgctttggtattt

SEQ ID NO: 734829 - DNA, 33 bp, Homo sapien
atgtgttgagactataactggggtctgcatctt

SEQ ID NO: 734830 - DNA, 33 bp, Homo sapien
atgtgttgagactatatctggggtctgcatctt

SEQ ID NO: 734831 - DNA, 33 bp, Homo sapien
cttacccagtggacaaagatgatggagagactt

SEQ ID NO: 734832 - DNA, 33 bp, Homo sapien
cttacccagtggacaaggatgatggagagactt

SEQ ID NO: 734833 - DNA, 33 bp, Homo sapien
atcccataattgattaactcaccattctgttga

SEQ ID NO: 734834 - DNA, 33 bp, Homo sapien
atcccataattgattagctcaccattctgttga

SEQ ID NO: 734835 - DNA, 33 bp, Homo sapien
ttaaggtcaggcaaagacgttttgtgagtcaaa

SEQ ID NO: 734836 - DNA, 33 bp, Homo sapien
ttaaggtcaggcaaaggcgttttgtgagtcaaa

SEQ ID NO: 734837 - DNA, 33 bp, Homo sapien
ctgacccaagtaattacaaagttagcacttgga

SEQ ID NO: 734838 - DNA, 33 bp, Homo sapien
ctgacccaagtaattataaagttagcacttgga

SEQ ID NO: 734839 - DNA, 33 bp, Homo sapien
aagatgggattaataaaatagtactgacattca

SEQ ID NO: 734840 - DNA, 33 bp, Homo sapien
aagatgggattaataacatagtactgacattca

SEQ ID NO: 734841 - DNA, 33 bp, Homo sapien
tcacacaaaatggcaacgtggacaaagtgatat

SEQ ID NO: 734842 - DNA, 33 bp, Homo sapien
tcacacaaaatggcaatgtggacaaagtgatat

SEQ ID NO: 734843 - DNA, 33 bp, Homo sapien
ttttcctagagccatacacatagaaggacaaaa

SEQ ID NO: 734844 - DNA, 33 bp, Homo sapien
ttttcctagagccatatacatagaaggacaaaa

SEQ ID NO: 734845 - DNA, 33 bp, Homo sapien
attaatggggattggacacaggagcaacataga

SEQ ID NO: 734846 - DNA, 33 bp, Homo sapien
attaatggggattggagacaggagcaacataga

SEQ ID NO: 734847 - DNA, 33 bp, Homo sapien
tctcttgaaatacacaaaaacatcgtctctaga

SEQ ID NO: 734848 - DNA, 33 bp, Homo sapien
tctcttgaaatacacataaacatcgtctctaga

SEQ ID NO: 734849 - DNA, 33 bp, Homo sapien
gttccttataaactaccgagtctgtggtattct

SEQ ID NO: 734850 - DNA, 33 bp, Homo sapien
gttccttataaactactgagtctgtggtattct

SEQ ID NO: 734851 - DNA, 33 bp, Homo sapien
gactttctctagtgggaaataaatggccacctg

SEQ ID NO: 734852 - DNA, 33 bp, Homo sapien
gactttctctagtgggtaataaatggccacctg

SEQ ID NO: 734853 - DNA, 33 bp, Homo sapien
tatgtagaactgctgaactatcacctctgagaa

SEQ ID NO: 734854 - DNA, 33 bp, Homo sapien
tatgtagaactgctgatctatcacctctgagaa

SEQ ID NO: 734855 - DNA, 33 bp, Homo sapien
agaaaatattctaaaaatgtcttggtcctcaag

SEQ ID NO: 734856 - DNA, 33 bp, Homo sapien
agaaaatattctaaaagtgtcttggtcctcaag

SEQ ID NO: 734857 - DNA, 33 bp, Homo sapien
gtatcaataagaaatgaacacttgtttttctcc

SEQ ID NO: 734858 - DNA, 33 bp, Homo sapien
gtatcaataagaaatggacacttgtttttctcc

SEQ ID NO: 734859 - DNA, 33 bp, Homo sapien
tgcatctacaagccaactaacaccaaagatggc

SEQ ID NO: 734860 - DNA, 33 bp, Homo sapien
tgcatctacaagccaagtaacaccaaagatggc

SEQ ID NO: 734861 - DNA, 33 bp, Homo sapien
atctcaattctgaaaccatgtacctggaggtag

SEQ ID NO: 734862 - DNA, 33 bp, Homo sapien
atctcaattctgaaactatgtacctggaggtag

SEQ ID NO: 734863 - DNA, 33 bp, Homo sapien
gtgatttattcacttccattaattgccaactat

SEQ ID NO: 734864 - DNA, 33 bp, Homo sapien
gtgatttattcacttctattaattgccaactat

SEQ ID NO: 734865 - DNA, 33 bp, Homo sapien
aatcctgttgtctccacctcacacttcacagtc

SEQ ID NO: 734866 - DNA, 33 bp, Homo sapien
aatcctgttgtctccatctcacacttcacagtc

SEQ ID NO: 734867 - DNA, 33 bp, Homo sapien
tggtgcatcttttttaacccatggtgaatgttt

SEQ ID NO: 734868 - DNA, 33 bp, Homo sapien
tggtgcatcttttttagcccatggtgaatgttt

SEQ ID NO: 734869 - DNA, 33 bp, Homo sapien
agaaacatgatttttcccagatcataaaactta

SEQ ID NO: 734870 - DNA, 33 bp, Homo sapien
agaaacatgatttttcgcagatcataaaactta

SEQ ID NO: 734871 - DNA, 33 bp, Homo sapien
cctcttgaagaatttacgggtagcctgaggcca

SEQ ID NO: 734872 - DNA, 33 bp, Homo sapien
cctcttgaagaatttatgggtagcctgaggcca

SEQ ID NO: 734873 - DNA, 33 bp, Homo sapien
tctcagtggtagcaaactcactctcttttatga

SEQ ID NO: 734874 - DNA, 33 bp, Homo sapien
tctcagtggtagcaaagtcactctcttttatga

SEQ ID NO: 734875 - DNA, 33 bp, Homo sapien
agtacattccaattcacacttgctacatttctg

SEQ ID NO: 734876 - DNA, 33 bp, Homo sapien
agtacattccaattcagacttgctacatttctg

SEQ ID NO: 734877 - DNA, 33 bp, Homo sapien
ttgtctcaatttttgaaccagaataatttaagc

SEQ ID NO: 734878 - DNA, 33 bp, Homo sapien
ttgtctcaatttttgagccagaataatttaagc

SEQ ID NO: 734879 - DNA, 33 bp, Homo sapien
aacagcttcactaaaaggaacgtcaatgaatga

SEQ ID NO: 734880 - DNA, 33 bp, Homo sapien
aacagcttcactaaaatgaacgtcaatgaatga

SEQ ID NO: 734881 - DNA, 33 bp, Homo sapien
ccacaggagctgcagcaatcacccaatttttta

SEQ ID NO: 734882 - DNA, 33 bp, Homo sapien
ccacaggagctgcagcgatcacccaatttttta

SEQ ID NO: 734883 - DNA, 33 bp, Homo sapien
agttggcaaatgtgcacggcataccctaaaaca

SEQ ID NO: 734884 - DNA, 33 bp, Homo sapien
agttggcaaatgtgcatggcataccctaaaaca

SEQ ID NO: 734885 - DNA, 33 bp, Homo sapien
tatttaacaagataaccaatgcccacctcaaat

SEQ ID NO: 734886 - DNA, 33 bp, Homo sapien
tatttaacaagataactaatgcccacctcaaat

SEQ ID NO: 734887 - DNA, 33 bp, Homo sapien
gtgtcaacagccaggaaaagttatgagctccat

SEQ ID NO: 734888 - DNA, 33 bp, Homo sapien
gtgtcaacagccaggagaagttatgagctccat

SEQ ID NO: 734889 - DNA, 33 bp, Homo sapien
tgcctctttctgattgcagagctgtgactacat

SEQ ID NO: 734890 - DNA, 33 bp, Homo sapien
tgcctctttctgattgtagagctgtgactacat

SEQ ID NO: 734891 - DNA, 33 bp, Homo sapien
gtcaggaaggttctaccgcattgaggtatcaat

SEQ ID NO: 734892 - DNA, 33 bp, Homo sapien
gtcaggaaggttctactgcattgaggtatcaat

SEQ ID NO: 734893 - DNA, 33 bp, Homo sapien
tagctctcccaaaaaaattgttgaatctttgca

SEQ ID NO: 734894 - DNA, 33 bp, Homo sapien
tagctctcccaaaaaagttgttgaatctttgca

SEQ ID NO: 734895 - DNA, 33 bp, Homo sapien
tttcctaccagctcacaccatcgtaccaactca

SEQ ID NO: 734896 - DNA, 33 bp, Homo sapien
tttcctaccagctcacgccatcgtaccaactca

SEQ ID NO: 734897 - DNA, 33 bp, Homo sapien
gccttcatggcttgaaactaaagtgtcagaata

SEQ ID NO: 734898 - DNA, 33 bp, Homo sapien
gccttcatggcttgaacctaaagtgtcagaata

SEQ ID NO: 734899 - DNA, 33 bp, Homo sapien
caaagatgaatattacaagtactgtgaatagat

SEQ ID NO: 734900 - DNA, 33 bp, Homo sapien
caaagatgaatattaccagtactgtgaatagat

SEQ ID NO: 734901 - DNA, 33 bp, Homo sapien
ccaacttcatctggcaatcaaagcccactaact

SEQ ID NO: 734902 - DNA, 33 bp, Homo sapien
ccaacttcatctggcattcaaagcccactaact

SEQ ID NO: 734903 - DNA, 33 bp, Homo sapien
tctcccttttttgcaaccacttggattatgtat

SEQ ID NO: 734904 - DNA, 33 bp, Homo sapien
tctcccttttttgcaatcacttggattatgtat

SEQ ID NO: 734905 - DNA, 33 bp, Homo sapien
gtgattgattggattacgtttactgccagctaa

SEQ ID NO: 734906 - DNA, 33 bp, Homo sapien
gtgattgattggattatgtttactgccagctaa

SEQ ID NO: 734907 - DNA, 33 bp, Homo sapien
ctccccactgaggctacggatatgcacaagttg

SEQ ID NO: 734908 - DNA, 33 bp, Homo sapien
ctccccactgaggctatggatatgcacaagttg

SEQ ID NO: 734909 - DNA, 33 bp, Homo sapien
gtgcacttttcactcactattccttttcagagg

SEQ ID NO: 734910 - DNA, 33 bp, Homo sapien
gtgcacttttcactcagtattccttttcagagg

SEQ ID NO: 734911 - DNA, 33 bp, Homo sapien
tataaaaactgaaactcaactctgacagtcaga

SEQ ID NO: 734912 - DNA, 33 bp, Homo sapien
tataaaaactgaaactgaactctgacagtcaga

SEQ ID NO: 734913 - DNA, 33 bp, Homo sapien
atactggcttctaaaacccatatctacccacac

SEQ ID NO: 734914 - DNA, 33 bp, Homo sapien
atactggcttctaaaatccatatctacccacac

SEQ ID NO: 734915 - DNA, 33 bp, Homo sapien
gaaaacactgaatccaaacagtgactgggtctt

SEQ ID NO: 734916 - DNA, 33 bp, Homo sapien
gaaaacactgaatccagacagtgactgggtctt

SEQ ID NO: 734917 - DNA, 33 bp, Homo sapien
ataaacagttgattaaaacacattttgcttgtt

SEQ ID NO: 734918 - DNA, 33 bp, Homo sapien
ataaacagttgattaacacacattttgcttgtt

SEQ ID NO: 734919 - DNA, 33 bp, Homo sapien
gcatattcaactgatccacaatatttatctctg

SEQ ID NO: 734920 - DNA, 33 bp, Homo sapien
gcatattcaactgatcgacaatatttatctctg

SEQ ID NO: 734921 - DNA, 33 bp, Homo sapien
aagaccatcgcagtctaaaacagaaaacaatag

SEQ ID NO: 734922 - DNA, 33 bp, Homo sapien
aagaccatcgcagtctgaaacagaaaacaatag

SEQ ID NO: 734923 - DNA, 33 bp, Homo sapien
cttcccatggaaactacaatactggcccttgct

SEQ ID NO: 734924 - DNA, 33 bp, Homo sapien
cttcccatggaaactataatactggcccttgct

SEQ ID NO: 734925 - DNA, 33 bp, Homo sapien
aatattgtaaaatttaagtttagcaggatttgg

SEQ ID NO: 734926 - DNA, 33 bp, Homo sapien
aatattgtaaaatttaggtttagcaggatttgg

SEQ ID NO: 734927 - DNA, 33 bp, Homo sapien
caaccattgtagaacacagtgtggtgattcctg

SEQ ID NO: 734928 - DNA, 33 bp, Homo sapien
caaccattgtagaacatagtgtggtgattcctg

SEQ ID NO: 734929 - DNA, 33 bp, Homo sapien
aaaggggttgagcaagaactgtgaaaggttgaa

SEQ ID NO: 734930 - DNA, 33 bp, Homo sapien
aaaggggttgagcaaggactgtgaaaggttgaa

SEQ ID NO: 734931 - DNA, 33 bp, Homo sapien
atagttttgtaattcacctaagaggctaaacta

SEQ ID NO: 734932 - DNA, 33 bp, Homo sapien
atagttttgtaattcatctaagaggctaaacta

SEQ ID NO: 734933 - DNA, 33 bp, Homo sapien
ccagcatctcttttgtcaagatttctagaaatt

SEQ ID NO: 734934 - DNA, 33 bp, Homo sapien
ccagcatctcttttgtgaagatttctagaaatt

SEQ ID NO: 734935 - DNA, 33 bp, Homo sapien
atatttgtacaactgtcacactaggacaaggaa

SEQ ID NO: 734936 - DNA, 33 bp, Homo sapien
atatttgtacaactgttacactaggacaaggaa

SEQ ID NO: 734937 - DNA, 33 bp, Homo sapien
cacgagcagttacaaaagatttcaaaagacaga

SEQ ID NO: 734938 - DNA, 33 bp, Homo sapien
cacgagcagttacaaatgatttcaaaagacaga

SEQ ID NO: 734939 - DNA, 33 bp, Homo sapien
cacatggtcagtctaaaaacttagtgtctcagt

SEQ ID NO: 734940 - DNA, 33 bp, Homo sapien
cacatggtcagtctaacaacttagtgtctcagt

SEQ ID NO: 734941 - DNA, 33 bp, Homo sapien
taataccatctccttcagaaatgaaacagaaat

SEQ ID NO: 734942 - DNA, 33 bp, Homo sapien
taataccatctccttctgaaatgaaacagaaat

SEQ ID NO: 734943 - DNA, 33 bp, Homo sapien
aatgaacacgggtgagaaacctggagctgttgc

SEQ ID NO: 734944 - DNA, 33 bp, Homo sapien
aatgaacacgggtgaggaacctggagctgttgc

SEQ ID NO: 734945 - DNA, 33 bp, Homo sapien
tcgtgtgtcacttaaccacaggaatgccttctg

SEQ ID NO: 734946 - DNA, 33 bp, Homo sapien
tcgtgtgtcacttaacgacaggaatgccttctg

SEQ ID NO: 734947 - DNA, 33 bp, Homo sapien
aaaaggagggaaagtcaattcggaggggcacta

SEQ ID NO: 734948 - DNA, 33 bp, Homo sapien
aaaaggagggaaagtcgattcggaggggcacta

SEQ ID NO: 734949 - DNA, 33 bp, Homo sapien
ctgaagctggatgcaacagcaaggctgaaatta

SEQ ID NO: 734950 - DNA, 33 bp, Homo sapien
ctgaagctggatgcaagagcaaggctgaaatta

SEQ ID NO: 734951 - DNA, 33 bp, Homo sapien
ttcagccactaatgcaaaacccaggtaaagcat

SEQ ID NO: 734952 - DNA, 33 bp, Homo sapien
ttcagccactaatgcagaacccaggtaaagcat

SEQ ID NO: 734953 - DNA, 33 bp, Homo sapien
acattgccaaagtgaactggttctccagagttt

SEQ ID NO: 734954 - DNA, 33 bp, Homo sapien
acattgccaaagtgaattggttctccagagttt

SEQ ID NO: 734955 - DNA, 33 bp, Homo sapien
aaagaaacgagtaaccactaattctgctctgaa

SEQ ID NO: 734956 - DNA, 33 bp, Homo sapien
aaagaaacgagtaacctctaattctgctctgaa

SEQ ID NO: 734957 - DNA, 33 bp, Homo sapien
ctgtcttcactgttaacatactacctcaggcca

SEQ ID NO: 734958 - DNA, 33 bp, Homo sapien
ctgtcttcactgttaatatactacctcaggcca

SEQ ID NO: 734959 - DNA, 33 bp, Homo sapien
ggtgttactttaaggacagccagaaattcaaag

SEQ ID NO: 734960 - DNA, 33 bp, Homo sapien
ggtgttactttaaggagagccagaaattcaaag

SEQ ID NO: 734961 - DNA, 33 bp, Homo sapien
gatatctttttctcaccgctggcaaatggcaaa

SEQ ID NO: 734962 - DNA, 33 bp, Homo sapien
gatatctttttctcactgctggcaaatggcaaa

SEQ ID NO: 734963 - DNA, 33 bp, Homo sapien
aatcttctgaaacttacacatgattcaaagaca

SEQ ID NO: 734964 - DNA, 33 bp, Homo sapien
aatcttctgaaacttatacatgattcaaagaca

SEQ ID NO: 734965 - DNA, 33 bp, Homo sapien
gcattttactcagtagacagtcgtaggaggaaa

SEQ ID NO: 734966 - DNA, 33 bp, Homo sapien
gcattttactcagtagtcagtcgtaggaggaaa

SEQ ID NO: 734967 - DNA, 33 bp, Homo sapien
agggacacaggacactcagaaaattcaattgtg

SEQ ID NO: 734968 - DNA, 33 bp, Homo sapien
agggacacaggacacttagaaaattcaattgtg

SEQ ID NO: 734969 - DNA, 33 bp, Homo sapien
agcagttcttgcctaactcttcccttctgcatc

SEQ ID NO: 734970 - DNA, 33 bp, Homo sapien
agcagttcttgcctaattcttcccttctgcatc

SEQ ID NO: 734971 - DNA, 33 bp, Homo sapien
tcaaactgaaagaggccaaaaactgcaagagga

SEQ ID NO: 734972 - DNA, 33 bp, Homo sapien
tcaaactgaaagaggctaaaaactgcaagagga

SEQ ID NO: 734973 - DNA, 33 bp, Homo sapien
ctcactaggagcaaagcatctctcagactccat

SEQ ID NO: 734974 - DNA, 33 bp, Homo sapien
ctcactaggagcaaagtatctctcagactccat

SEQ ID NO: 734975 - DNA, 33 bp, Homo sapien
tgatgagatacaactgcatgcctattagaacgg

SEQ ID NO: 734976 - DNA, 33 bp, Homo sapien
tgatgagatacaactgtatgcctattagaacgg

SEQ ID NO: 734977 - DNA, 33 bp, Homo sapien
cacgaatcttagcatacggattgatgaattttt

SEQ ID NO: 734978 - DNA, 33 bp, Homo sapien
cacgaatcttagcatatggattgatgaattttt

SEQ ID NO: 734979 - DNA, 33 bp, Homo sapien
cctgattgtcaagacccaggaaaagcctgaggt

SEQ ID NO: 734980 - DNA, 33 bp, Homo sapien
cctgattgtcaagacctaggaaaagcctgaggt

SEQ ID NO: 734981 - DNA, 33 bp, Homo sapien
gcactgtaagcagcaacgaaattttattttctg

SEQ ID NO: 734982 - DNA, 33 bp, Homo sapien
gcactgtaagcagcaatgaaattttattttctg

SEQ ID NO: 734983 - DNA, 33 bp, Homo sapien
tatctgaaaccgtaaaatatggtgtgaggttaa

SEQ ID NO: 734984 - DNA, 33 bp, Homo sapien
tatctgaaaccgtaaagtatggtgtgaggttaa

SEQ ID NO: 734985 - DNA, 33 bp, Homo sapien
tgggttcatctttcccaccctcttcctttatct

SEQ ID NO: 734986 - DNA, 33 bp, Homo sapien
tgggttcatctttcccgccctcttcctttatct

SEQ ID NO: 734987 - DNA, 33 bp, Homo sapien
agcacactgaaggccaacgtagatacagctgcc

SEQ ID NO: 734988 - DNA, 33 bp, Homo sapien
agcacactgaaggccagcgtagatacagctgcc

SEQ ID NO: 734989 - DNA, 33 bp, Homo sapien
ctataatctttccccaagtaccaatgttcactt

SEQ ID NO: 734990 - DNA, 33 bp, Homo sapien
ctataatctttccccatgtaccaatgttcactt

SEQ ID NO: 734991 - DNA, 33 bp, Homo sapien
taaagaacaaacagaaaaacaacttacagagac

SEQ ID NO: 734992 - DNA, 33 bp, Homo sapien
taaagaacaaacagaagaacaacttacagagac

SEQ ID NO: 734993 - DNA, 33 bp, Homo sapien
catcaaggagataaaaatcatactggaaattac

SEQ ID NO: 734994 - DNA, 33 bp, Homo sapien
catcaaggagataaaagtcatactggaaattac

SEQ ID NO: 734995 - DNA, 33 bp, Homo sapien
tctcaggcatattccacggagctcttgaggctg

SEQ ID NO: 734996 - DNA, 33 bp, Homo sapien
tctcaggcatattccagggagctcttgaggctg

SEQ ID NO: 734997 - DNA, 33 bp, Homo sapien
aaagcatcttaacgtagcctgcaaagccatgca

SEQ ID NO: 734998 - DNA, 33 bp, Homo sapien
aaagcatcttaacgtatcctgcaaagccatgca

SEQ ID NO: 734999 - DNA, 33 bp, Homo sapien
caggacaaatctcatacaaggcatgcagttagg

SEQ ID NO: 735000 - DNA, 33 bp, Homo sapien
caggacaaatctcatagaaggcatgcagttagg

SEQ ID NO: 735001 - DNA, 33 bp, Homo sapien
caaaattccttgagtaaatactgtgtaccaggc

SEQ ID NO: 735002 - DNA, 33 bp, Homo sapien
caaaattccttgagtagatactgtgtaccaggc

SEQ ID NO: 735003 - DNA, 33 bp, Homo sapien
tttttggtacttacctaaataattgaaagcaga

SEQ ID NO: 735004 - DNA, 33 bp, Homo sapien
tttttggtacttacctgaataattgaaagcaga

SEQ ID NO: 735005 - DNA, 33 bp, Homo sapien
tgttagtttttctccacgtgcgtctctccacaa

SEQ ID NO: 735006 - DNA, 33 bp, Homo sapien
tgttagtttttctccatgtgcgtctctccacaa

SEQ ID NO: 735007 - DNA, 33 bp, Homo sapien
aggactgaatccttacacttacactttaaccat

SEQ ID NO: 735008 - DNA, 33 bp, Homo sapien
aggactgaatccttacgcttacactttaaccat

SEQ ID NO: 735009 - DNA, 33 bp, Homo sapien
actctcagattccaaacaggaagaatgctgaat

SEQ ID NO: 735010 - DNA, 33 bp, Homo sapien
actctcagattccaaataggaagaatgctgaat

SEQ ID NO: 735011 - DNA, 33 bp, Homo sapien
gtgctttgaatcatcactcataatcagtcatag

SEQ ID NO: 735012 - DNA, 33 bp, Homo sapien
gtgctttgaatcatcagtcataatcagtcatag

SEQ ID NO: 735013 - DNA, 33 bp, Homo sapien
cttctgcttttattgaacagaatgctggaacca

SEQ ID NO: 735014 - DNA, 33 bp, Homo sapien
cttctgcttttattgatcagaatgctggaacca

SEQ ID NO: 735015 - DNA, 33 bp, Homo sapien
aatcaagtgtgttgtcgctgaagttgattttga

SEQ ID NO: 735016 - DNA, 33 bp, Homo sapien
aatcaagtgtgttgtctctgaagttgattttga

SEQ ID NO: 735017 - DNA, 33 bp, Homo sapien
gactggagtggttaaacaaaggctgttctaaga

SEQ ID NO: 735018 - DNA, 33 bp, Homo sapien
gactggagtggttaaataaaggctgttctaaga

SEQ ID NO: 735019 - DNA, 33 bp, Homo sapien
gggctagccatagacactcattcttctgtatcc

SEQ ID NO: 735020 - DNA, 33 bp, Homo sapien
gggctagccatagacattcattcttctgtatcc

SEQ ID NO: 735021 - DNA, 33 bp, Homo sapien
acgaagagacaatagaccttggttgttgtaact

SEQ ID NO: 735022 - DNA, 33 bp, Homo sapien
acgaagagacaatagatcttggttgttgtaact

SEQ ID NO: 735023 - DNA, 33 bp, Homo sapien
gcctctgcaaaaatcacgaataggtcaatgctc

SEQ ID NO: 735024 - DNA, 33 bp, Homo sapien
gcctctgcaaaaatcatgaataggtcaatgctc

SEQ ID NO: 735025 - DNA, 33 bp, Homo sapien
ggattggccctccaaaaaggctggtgtaagagc

SEQ ID NO: 735026 - DNA, 33 bp, Homo sapien
ggattggccctccaaacaggctggtgtaagagc

SEQ ID NO: 735027 - DNA, 33 bp, Homo sapien
ctaagaggaagacttcccaatgtgtaccttttt

SEQ ID NO: 735028 - DNA, 33 bp, Homo sapien
ctaagaggaagacttctcaatgtgtaccttttt

SEQ ID NO: 735029 - DNA, 33 bp, Homo sapien
cagatggttgtgtgtaacagtgacttgtttcct

SEQ ID NO: 735030 - DNA, 33 bp, Homo sapien
cagatggttgtgtgtatcagtgacttgtttcct

SEQ ID NO: 735031 - DNA, 33 bp, Homo sapien
attactgtgggccagcaaagagagaatccagag

SEQ ID NO: 735032 - DNA, 33 bp, Homo sapien
attactgtgggccagcgaagagagaatccagag

SEQ ID NO: 735033 - DNA, 33 bp, Homo sapien
ttctcccctatattcaagatgggttgtgaacct

SEQ ID NO: 735034 - DNA, 33 bp, Homo sapien
ttctcccctatattcaggatgggttgtgaacct

SEQ ID NO: 735035 - DNA, 33 bp, Homo sapien
acctgaaaatgaaagcacttctaaacagcagag

SEQ ID NO: 735036 - DNA, 33 bp, Homo sapien
acctgaaaatgaaagctcttctaaacagcagag

SEQ ID NO: 735037 - DNA, 33 bp, Homo sapien
tcaaacaactcgatggcaggtttctttcaacat

SEQ ID NO: 735038 - DNA, 33 bp, Homo sapien
tcaaacaactcgatggtaggtttctttcaacat

SEQ ID NO: 735039 - DNA, 33 bp, Homo sapien
gagcactactttgagacactgataaacaacttt

SEQ ID NO: 735040 - DNA, 33 bp, Homo sapien
gagcactactttgagatactgataaacaacttt

SEQ ID NO: 735041 - DNA, 33 bp, Homo sapien
tcactgtgtagacttccctaacttgtatgtcct

SEQ ID NO: 735042 - DNA, 33 bp, Homo sapien
tcactgtgtagacttctctaacttgtatgtcct

SEQ ID NO: 735043 - DNA, 33 bp, Homo sapien
tagttatcaaagagaaatggggtagcaaaatta

SEQ ID NO: 735044 - DNA, 33 bp, Homo sapien
tagttatcaaagagaagtggggtagcaaaatta

SEQ ID NO: 735045 - DNA, 33 bp, Homo sapien
atttataggcacacgcactaacaaacatcttta

SEQ ID NO: 735046 - DNA, 33 bp, Homo sapien
atttataggcacacgcgctaacaaacatcttta

SEQ ID NO: 735047 - DNA, 33 bp, Homo sapien
ttctggtgaagaaacaatcaacataattctaag

SEQ ID NO: 735048 - DNA, 33 bp, Homo sapien
ttctggtgaagaaacagtcaacataattctaag

SEQ ID NO: 735049 - DNA, 33 bp, Homo sapien
gtatcaagtatccttgccaagataatttttgta

SEQ ID NO: 735050 - DNA, 33 bp, Homo sapien
gtatcaagtatccttgtcaagataatttttgta

SEQ ID NO: 735051 - DNA, 33 bp, Homo sapien
tgcatggggagaaagtcacatgcttttttgtgt

SEQ ID NO: 735052 - DNA, 33 bp, Homo sapien
tgcatggggagaaagttacatgcttttttgtgt

SEQ ID NO: 735053 - DNA, 33 bp, Homo sapien
ttgtagaaataaaatacgcatgcaaaacaactg

SEQ ID NO: 735054 - DNA, 33 bp, Homo sapien
ttgtagaaataaaatatgcatgcaaaacaactg

SEQ ID NO: 735055 - DNA, 33 bp, Homo sapien
aacagcctggcttacactgcctctacctcttca

SEQ ID NO: 735056 - DNA, 33 bp, Homo sapien
aacagcctggcttacattgcctctacctcttca

SEQ ID NO: 735057 - DNA, 33 bp, Homo sapien
tcaatatacggcttaaatgaagagggaaccagc

SEQ ID NO: 735058 - DNA, 33 bp, Homo sapien
tcaatatacggcttaagtgaagagggaaccagc

SEQ ID NO: 735059 - DNA, 33 bp, Homo sapien
aaactgtgtataacgaaatggacaagaaccgat

SEQ ID NO: 735060 - DNA, 33 bp, Homo sapien
aaactgtgtataacgagatggacaagaaccgat

SEQ ID NO: 735061 - DNA, 33 bp, Homo sapien
aatgagtatattaaacagtcaacagacacagcc

SEQ ID NO: 735062 - DNA, 33 bp, Homo sapien
aatgagtatattaaaccgtcaacagacacagcc

SEQ ID NO: 735063 - DNA, 33 bp, Homo sapien
cagacatatattaaccaaggaatcacacaaaca

SEQ ID NO: 735064 - DNA, 33 bp, Homo sapien
cagacatatattaaccgaggaatcacacaaaca

SEQ ID NO: 735065 - DNA, 33 bp, Homo sapien
cttgattttccctcccccaatgaatatgtaaat

SEQ ID NO: 735066 - DNA, 33 bp, Homo sapien
cttgattttccctccctcaatgaatatgtaaat

SEQ ID NO: 735067 - DNA, 33 bp, Homo sapien
tgaacttgtgaaaaagaactatctgattgaagc

SEQ ID NO: 735068 - DNA, 33 bp, Homo sapien
tgaacttgtgaaaaaggactatctgattgaagc

SEQ ID NO: 735069 - DNA, 33 bp, Homo sapien
gaggatatacaattccaaggcagttcttcttac

SEQ ID NO: 735070 - DNA, 33 bp, Homo sapien
gaggatatacaattcccaggcagttcttcttac

SEQ ID NO: 735071 - DNA, 33 bp, Homo sapien
ctatttgtgccatacaaagaaaagtgcctgtat

SEQ ID NO: 735072 - DNA, 33 bp, Homo sapien
ctatttgtgccatacatagaaaagtgcctgtat

SEQ ID NO: 735073 - DNA, 33 bp, Homo sapien
aatcaaggtgttacaacaggaaatggcaaaggt

SEQ ID NO: 735074 - DNA, 33 bp, Homo sapien
aatcaaggtgttacaataggaaatggcaaaggt

SEQ ID NO: 735075 - DNA, 33 bp, Homo sapien
caactcgccagtttgaagtttctagcttatcta

SEQ ID NO: 735076 - DNA, 33 bp, Homo sapien
caactcgccagtttgaggtttctagcttatcta

SEQ ID NO: 735077 - DNA, 33 bp, Homo sapien
aagcaaacagaatccaatgaagaagacctttgc

SEQ ID NO: 735078 - DNA, 33 bp, Homo sapien
aagcaaacagaatccagtgaagaagacctttgc

SEQ ID NO: 735079 - DNA, 33 bp, Homo sapien
aggagaggctgactgaagtttcctctggcagct

SEQ ID NO: 735080 - DNA, 33 bp, Homo sapien
aggagaggctgactgacgtttcctctggcagct

SEQ ID NO: 735081 - DNA, 33 bp, Homo sapien
tacaacaggttgaaaggagaatttaaagtacca

SEQ ID NO: 735082 - DNA, 33 bp, Homo sapien
tacaacaggttgaaagtagaatttaaagtacca

SEQ ID NO: 735083 - DNA, 33 bp, Homo sapien
tggtgaaactaaatacaacttaagtcagatatg

SEQ ID NO: 735084 - DNA, 33 bp, Homo sapien
tggtgaaactaaataccacttaagtcagatatg

SEQ ID NO: 735085 - DNA, 33 bp, Homo sapien
atgagattggatctcaaattagctggaaacagg

SEQ ID NO: 735086 - DNA, 33 bp, Homo sapien
atgagattggatctcagattagctggaaacagg

SEQ ID NO: 735087 - DNA, 33 bp, Homo sapien
acagaatttcattatcaacaactaatacatatt

SEQ ID NO: 735088 - DNA, 33 bp, Homo sapien
acagaatttcattatcgacaactaatacatatt

SEQ ID NO: 735089 - DNA, 33 bp, Homo sapien
tttttttcttgtactaactaggctggatttccc

SEQ ID NO: 735090 - DNA, 33 bp, Homo sapien
tttttttcttgtactagctaggctggatttccc

SEQ ID NO: 735091 - DNA, 33 bp, Homo sapien
catatgtacataaatcacaaagttccaataaat

SEQ ID NO: 735092 - DNA, 33 bp, Homo sapien
catatgtacataaatcgcaaagttccaataaat

SEQ ID NO: 735093 - DNA, 33 bp, Homo sapien
actcatctgataacaaaatagagtctgtgttcc

SEQ ID NO: 735094 - DNA, 33 bp, Homo sapien
actcatctgataacaagatagagtctgtgttcc

SEQ ID NO: 735095 - DNA, 33 bp, Homo sapien
catcctcttgataaagcagtgtaacatcaggaa

SEQ ID NO: 735096 - DNA, 33 bp, Homo sapien
catcctcttgataaagtagtgtaacatcaggaa

SEQ ID NO: 735097 - DNA, 33 bp, Homo sapien
aaaacagaaagtgccacagtatgttacagaaag

SEQ ID NO: 735098 - DNA, 33 bp, Homo sapien
aaaacagaaagtgccatagtatgttacagaaag

SEQ ID NO: 735099 - DNA, 33 bp, Homo sapien
ttgaatttttctcaacaccagccttaggattag

SEQ ID NO: 735100 - DNA, 33 bp, Homo sapien
ttgaatttttctcaaccccagccttaggattag

SEQ ID NO: 735101 - DNA, 33 bp, Homo sapien
aatggatgttgcaaaaagttttacccagaataa

SEQ ID NO: 735102 - DNA, 33 bp, Homo sapien
aatggatgttgcaaaaggttttacccagaataa

SEQ ID NO: 735103 - DNA, 33 bp, Homo sapien
gtataaggaagaaccaagtcctacaataaagac

SEQ ID NO: 735104 - DNA, 33 bp, Homo sapien
gtataaggaagaaccaggtcctacaataaagac

SEQ ID NO: 735105 - DNA, 33 bp, Homo sapien
gatcaagaaatcagtaccaatacctacttaaaa

SEQ ID NO: 735106 - DNA, 33 bp, Homo sapien
gatcaagaaatcagtatcaatacctacttaaaa

SEQ ID NO: 735107 - DNA, 33 bp, Homo sapien
tagttcttaacaatcaatctgctacctttgtct

SEQ ID NO: 735108 - DNA, 33 bp, Homo sapien
tagttcttaacaatcagtctgctacctttgtct

SEQ ID NO: 735109 - DNA, 33 bp, Homo sapien
tgttaactctgcataccagtacatgtgcgtgaa

SEQ ID NO: 735110 - DNA, 33 bp, Homo sapien
tgttaactctgcatactagtacatgtgcgtgaa

SEQ ID NO: 735111 - DNA, 33 bp, Homo sapien
cttaatcactattgaacaatcaccttaaacttc

SEQ ID NO: 735112 - DNA, 33 bp, Homo sapien
cttaatcactattgaataatcaccttaaacttc

SEQ ID NO: 735113 - DNA, 33 bp, Homo sapien
tctgcacttgtaaatacgattagtgatgcttta

SEQ ID NO: 735114 - DNA, 33 bp, Homo sapien
tctgcacttgtaaatatgattagtgatgcttta

SEQ ID NO: 735115 - DNA, 33 bp, Homo sapien
tcctggattgcagattaaaaaagcagttcctat

SEQ ID NO: 735116 - DNA, 33 bp, Homo sapien
tcctggattgcagattgaaaaagcagttcctat

SEQ ID NO: 735117 - DNA, 33 bp, Homo sapien
gagccactgcacccgacctagagaggacatgac

SEQ ID NO: 735118 - DNA, 33 bp, Homo sapien
gagccactgcacccgatctagagaggacatgac

SEQ ID NO: 735119 - DNA, 33 bp, Homo sapien
catgaaatagaggttaacagataggaaaccttc

SEQ ID NO: 735120 - DNA, 33 bp, Homo sapien
catgaaatagaggttagcagataggaaaccttc

SEQ ID NO: 735121 - DNA, 33 bp, Homo sapien
tctcccggccactgaccctggttaacatcaagt

SEQ ID NO: 735122 - DNA, 33 bp, Homo sapien
tctcccggccactgactctggttaacatcaagt

SEQ ID NO: 735123 - DNA, 33 bp, Homo sapien
tagaactcttctgcaccaatatacacgtttctt

SEQ ID NO: 735124 - DNA, 33 bp, Homo sapien
tagaactcttctgcactaatatacacgtttctt

SEQ ID NO: 735125 - DNA, 33 bp, Homo sapien
cccatctggctcctggaatgtttgagttggaag

SEQ ID NO: 735126 - DNA, 33 bp, Homo sapien
cccatctggctcctggtatgtttgagttggaag

SEQ ID NO: 735127 - DNA, 33 bp, Homo sapien
ataaaacacacttaataaatgtttactgggctg

SEQ ID NO: 735128 - DNA, 33 bp, Homo sapien
ataaaacacacttaatcaatgtttactgggctg

SEQ ID NO: 735129 - DNA, 33 bp, Homo sapien
ggattcaactgactgcaatcaaaacaatttgag

SEQ ID NO: 735130 - DNA, 33 bp, Homo sapien
ggattcaactgactgcgatcaaaacaatttgag

SEQ ID NO: 735131 - DNA, 33 bp, Homo sapien
tgttctttttaccactaaactctggaatgcagg

SEQ ID NO: 735132 - DNA, 33 bp, Homo sapien
tgttctttttaccactgaactctggaatgcagg

SEQ ID NO: 735133 - DNA, 33 bp, Homo sapien
atccttttgcacagaactatggtataaaacagc

SEQ ID NO: 735134 - DNA, 33 bp, Homo sapien
atccttttgcacagaattatggtataaaacagc

SEQ ID NO: 735135 - DNA, 33 bp, Homo sapien
tccagcattcccactaccgaatatttatccaag

SEQ ID NO: 735136 - DNA, 33 bp, Homo sapien
tccagcattcccactatcgaatatttatccaag

SEQ ID NO: 735137 - DNA, 33 bp, Homo sapien
tccttcactgcaattcaacatgtaaactccaat

SEQ ID NO: 735138 - DNA, 33 bp, Homo sapien
tccttcactgcaattctacatgtaaactccaat

SEQ ID NO: 735139 - DNA, 33 bp, Homo sapien
ctctgccattggagtaacaacattcacggcaca

SEQ ID NO: 735140 - DNA, 33 bp, Homo sapien
ctctgccattggagtatcaacattcacggcaca

SEQ ID NO: 735141 - DNA, 33 bp, Homo sapien
aagtttgggtgaatgaataagtgctatgaagga

SEQ ID NO: 735142 - DNA, 33 bp, Homo sapien
aagtttgggtgaatgagtaagtgctatgaagga

SEQ ID NO: 735143 - DNA, 33 bp, Homo sapien
ggcttgttctcgtgaaagactgagggttccatg

SEQ ID NO: 735144 - DNA, 33 bp, Homo sapien
ggcttgttctcgtgaaggactgagggttccatg

SEQ ID NO: 735145 - DNA, 33 bp, Homo sapien
aagtgcagaagtcagtcaacaccttcttagaaa

SEQ ID NO: 735146 - DNA, 33 bp, Homo sapien
aagtgcagaagtcagtgaacaccttcttagaaa

SEQ ID NO: 735147 - DNA, 33 bp, Homo sapien
tctggacgttggatacactctaaattgtttcgt

SEQ ID NO: 735148 - DNA, 33 bp, Homo sapien
tctggacgttggatacgctctaaattgtttcgt

SEQ ID NO: 735149 - DNA, 33 bp, Homo sapien
tcaggagtggtaggcaatgaaaaccagatagtc

SEQ ID NO: 735150 - DNA, 33 bp, Homo sapien
tcaggagtggtaggcattgaaaaccagatagtc

SEQ ID NO: 735151 - DNA, 33 bp, Homo sapien
gtacttcacagcatcaactttttaaaatagtgg

SEQ ID NO: 735152 - DNA, 33 bp, Homo sapien
gtacttcacagcatcagctttttaaaatagtgg

SEQ ID NO: 735153 - DNA, 33 bp, Homo sapien
caaagttgtagccaagcccaggtactgttgcca

SEQ ID NO: 735154 - DNA, 33 bp, Homo sapien
caaagttgtagccaagtccaggtactgttgcca

SEQ ID NO: 735155 - DNA, 33 bp, Homo sapien
ccatctgcggccctcacaacgtctgatcccctg

SEQ ID NO: 735156 - DNA, 33 bp, Homo sapien
ccatctgcggccctcagaacgtctgatcccctg

SEQ ID NO: 735157 - DNA, 33 bp, Homo sapien
gggagtgatggcggcaagtgagaaggagccagc

SEQ ID NO: 735158 - DNA, 33 bp, Homo sapien
gggagtgatggcggcaggtgagaaggagccagc

SEQ ID NO: 735159 - DNA, 33 bp, Homo sapien
tgtcaaacggctacaccgaaaacatatatacaa

SEQ ID NO: 735160 - DNA, 33 bp, Homo sapien
tgtcaaacggctacactgaaaacatatatacaa

SEQ ID NO: 735161 - DNA, 33 bp, Homo sapien
attgaattgttgctcaaaagtgactgaactgtg

SEQ ID NO: 735162 - DNA, 33 bp, Homo sapien
attgaattgttgctcagaagtgactgaactgtg

SEQ ID NO: 735163 - DNA, 33 bp, Homo sapien
cagatttaagcccatacgtatcaaacattatat

SEQ ID NO: 735164 - DNA, 33 bp, Homo sapien
cagatttaagcccatatgtatcaaacattatat

SEQ ID NO: 735165 - DNA, 33 bp, Homo sapien
cagagtaggtggattacgacacagagtagccca

SEQ ID NO: 735166 - DNA, 33 bp, Homo sapien
cagagtaggtggattaggacacagagtagccca

SEQ ID NO: 735167 - DNA, 33 bp, Homo sapien
accaataagaacaagacggagaacctatgaaac

SEQ ID NO: 735168 - DNA, 33 bp, Homo sapien
accaataagaacaagatggagaacctatgaaac

SEQ ID NO: 735169 - DNA, 33 bp, Homo sapien
ttgtaaacagagtagcacttaagtgaataaaca

SEQ ID NO: 735170 - DNA, 33 bp, Homo sapien
ttgtaaacagagtagctcttaagtgaataaaca

SEQ ID NO: 735171 - DNA, 33 bp, Homo sapien
cagtctacattcttcaaaacacttcacacttgc

SEQ ID NO: 735172 - DNA, 33 bp, Homo sapien
cagtctacattcttcagaacacttcacacttgc

SEQ ID NO: 735173 - DNA, 33 bp, Homo sapien
taatatattttggtagaactggcagttacttat

SEQ ID NO: 735174 - DNA, 33 bp, Homo sapien
taatatattttggtaggactggcagttacttat

SEQ ID NO: 735175 - DNA, 33 bp, Homo sapien
atcttgcaaaaagcaacggcccacttttgcctt

SEQ ID NO: 735176 - DNA, 33 bp, Homo sapien
atcttgcaaaaagcaatggcccacttttgcctt

SEQ ID NO: 735177 - DNA, 33 bp, Homo sapien
gaggaaagtgaaaacgaactctaagcctcccag

SEQ ID NO: 735178 - DNA, 33 bp, Homo sapien
gaggaaagtgaaaacggactctaagcctcccag

SEQ ID NO: 735179 - DNA, 33 bp, Homo sapien
ccaacatcctcaaaaaaaggtcagactatagtg

SEQ ID NO: 735180 - DNA, 33 bp, Homo sapien
ccaacatcctcaaaaacaggtcagactatagtg

SEQ ID NO: 735181 - DNA, 33 bp, Homo sapien
agctcccctatcaccaataagttgcactgtcca

SEQ ID NO: 735182 - DNA, 33 bp, Homo sapien
agctcccctatcaccactaagttgcactgtcca

SEQ ID NO: 735183 - DNA, 33 bp, Homo sapien
tctcggcactttgccaatagcttgggtagaaag

SEQ ID NO: 735184 - DNA, 33 bp, Homo sapien
tctcggcactttgccagtagcttgggtagaaag

SEQ ID NO: 735185 - DNA, 33 bp, Homo sapien
gcccacagtgatactcccttcttctaaacataa

SEQ ID NO: 735186 - DNA, 33 bp, Homo sapien
gcccacagtgatactctcttcttctaaacataa

SEQ ID NO: 735187 - DNA, 33 bp, Homo sapien
cttaatcacaacagacagctcgaccatcaccca

SEQ ID NO: 735188 - DNA, 33 bp, Homo sapien
cttaatcacaacagacggctcgaccatcaccca

SEQ ID NO: 735189 - DNA, 33 bp, Homo sapien
atttctatggttttcaaaaatcatccaaacaat

SEQ ID NO: 735190 - DNA, 33 bp, Homo sapien
atttctatggttttcagaaatcatccaaacaat

SEQ ID NO: 735191 - DNA, 33 bp, Homo sapien
tcaaggatgccagatacgtcccatgagatgggc

SEQ ID NO: 735192 - DNA, 33 bp, Homo sapien
tcaaggatgccagatatgtcccatgagatgggc

SEQ ID NO: 735193 - DNA, 33 bp, Homo sapien
cagggttaacaagagtaaaacaacacagtgtga

SEQ ID NO: 735194 - DNA, 33 bp, Homo sapien
cagggttaacaagagtgaaacaacacagtgtga

SEQ ID NO: 735195 - DNA, 33 bp, Homo sapien
catgacgtggggaaaacggaggcacccagctga

SEQ ID NO: 735196 - DNA, 33 bp, Homo sapien
catgacgtggggaaaatggaggcacccagctga

SEQ ID NO: 735197 - DNA, 33 bp, Homo sapien
acttactatctgacacacttttctttcggaaag

SEQ ID NO: 735198 - DNA, 33 bp, Homo sapien
acttactatctgacacgcttttctttcggaaag

SEQ ID NO: 735199 - DNA, 33 bp, Homo sapien
aaagaggttcacacaccgcatgaagggcttgaa

SEQ ID NO: 735200 - DNA, 33 bp, Homo sapien
aaagaggttcacacactgcatgaagggcttgaa

SEQ ID NO: 735201 - DNA, 33 bp, Homo sapien
ctgtctcccaagttaaactgctcaagcattgtg

SEQ ID NO: 735202 - DNA, 33 bp, Homo sapien
ctgtctcccaagttaacctgctcaagcattgtg

SEQ ID NO: 735203 - DNA, 33 bp, Homo sapien
acattaatctgctgacggcttctcaatctcagc

SEQ ID NO: 735204 - DNA, 33 bp, Homo sapien
acattaatctgctgactgcttctcaatctcagc

SEQ ID NO: 735205 - DNA, 33 bp, Homo sapien
caaggtgttagatgataaatgcgcagcaaccag

SEQ ID NO: 735206 - DNA, 33 bp, Homo sapien
caaggtgttagatgatgaatgcgcagcaaccag

SEQ ID NO: 735207 - DNA, 33 bp, Homo sapien
ctcccgccagggaaacaagacagaggcccaggt

SEQ ID NO: 735208 - DNA, 33 bp, Homo sapien
ctcccgccagggaaaccagacagaggcccaggt

SEQ ID NO: 735209 - DNA, 33 bp, Homo sapien
ttttctagtagccccaatgctatcttaatacaa

SEQ ID NO: 735210 - DNA, 33 bp, Homo sapien
ttttctagtagccccagtgctatcttaatacaa

SEQ ID NO: 735211 - DNA, 33 bp, Homo sapien
ttctatgcaaaacaggccctcagggttgtaaca

SEQ ID NO: 735212 - DNA, 33 bp, Homo sapien
ttctatgcaaaacaggtcctcagggttgtaaca

SEQ ID NO: 735213 - DNA, 33 bp, Homo sapien
tatttttgctattttacatcttggtgatctctg

SEQ ID NO: 735214 - DNA, 33 bp, Homo sapien
tatttttgctattttatatcttggtgatctctg

SEQ ID NO: 735215 - DNA, 33 bp, Homo sapien
aaaacatctggccagcaaaggagtaaccagaac

SEQ ID NO: 735216 - DNA, 33 bp, Homo sapien
aaaacatctggccagcgaaggagtaaccagaac

SEQ ID NO: 735217 - DNA, 33 bp, Homo sapien
attttgagacagtgaaatacatcaaggacaagt

SEQ ID NO: 735218 - DNA, 33 bp, Homo sapien
attttgagacagtgaactacatcaaggacaagt

SEQ ID NO: 735219 - DNA, 33 bp, Homo sapien
tgaaaggtgtggccaccagacactcgtccttgt

SEQ ID NO: 735220 - DNA, 33 bp, Homo sapien
tgaaaggtgtggccactagacactcgtccttgt

SEQ ID NO: 735221 - DNA, 33 bp, Homo sapien
ctagttactacgtggcccactacagaagttcgc

SEQ ID NO: 735222 - DNA, 33 bp, Homo sapien
ctagttactacgtggcgcactacagaagttcgc

SEQ ID NO: 735223 - DNA, 33 bp, Homo sapien
tgtggttgagagaatacacaatgtctttgtgtt

SEQ ID NO: 735224 - DNA, 33 bp, Homo sapien
tgtggttgagagaatatacaatgtctttgtgtt

SEQ ID NO: 735225 - DNA, 33 bp, Homo sapien
aaaagtctgggaaagcactgctgctaaaggaag

SEQ ID NO: 735226 - DNA, 33 bp, Homo sapien
aaaagtctgggaaagcgctgctgctaaaggaag

SEQ ID NO: 735227 - DNA, 33 bp, Homo sapien
aactggattgaaaacccggcatgaaaggtggtg

SEQ ID NO: 735228 - DNA, 33 bp, Homo sapien
aactggattgaaaacctggcatgaaaggtggtg

SEQ ID NO: 735229 - DNA, 33 bp, Homo sapien
ttcaaattaaatgaataactgacatgggagatc

SEQ ID NO: 735230 - DNA, 33 bp, Homo sapien
ttcaaattaaatgaatgactgacatgggagatc

SEQ ID NO: 735231 - DNA, 33 bp, Homo sapien
agagaaggctttgctaccagttagctgactatg

SEQ ID NO: 735232 - DNA, 33 bp, Homo sapien
agagaaggctttgctatcagttagctgactatg

SEQ ID NO: 735233 - DNA, 33 bp, Homo sapien
tctctcctcataatggcagcgtccggagcactc

SEQ ID NO: 735234 - DNA, 33 bp, Homo sapien
tctctcctcataatggtagcgtccggagcactc

SEQ ID NO: 735235 - DNA, 33 bp, Homo sapien
caggatctcatgaccactaaggcacgtgacctt

SEQ ID NO: 735236 - DNA, 33 bp, Homo sapien
caggatctcatgaccattaaggcacgtgacctt

SEQ ID NO: 735237 - DNA, 33 bp, Homo sapien
ggctctctctggatgacggtaaccccactcacc

SEQ ID NO: 735238 - DNA, 33 bp, Homo sapien
ggctctctctggatgatggtaaccccactcacc

SEQ ID NO: 735239 - DNA, 33 bp, Homo sapien
gagacactattggtgaaaaatgggaaaggactt

SEQ ID NO: 735240 - DNA, 33 bp, Homo sapien
gagacactattggtgagaaatgggaaaggactt

SEQ ID NO: 735241 - DNA, 33 bp, Homo sapien
ccaaagaaacagaaaacgaggtctggatagtgg

SEQ ID NO: 735242 - DNA, 33 bp, Homo sapien
ccaaagaaacagaaaatgaggtctggatagtgg

SEQ ID NO: 735243 - DNA, 33 bp, Homo sapien
aaaaagggccaaaaatcattactcagcttggca

SEQ ID NO: 735244 - DNA, 33 bp, Homo sapien
aaaaagggccaaaaatgattactcagcttggca

SEQ ID NO: 735245 - DNA, 33 bp, Homo sapien
aagtaaatccatgaccaaaagtcacccttgaac

SEQ ID NO: 735246 - DNA, 33 bp, Homo sapien
aagtaaatccatgaccgaaagtcacccttgaac

SEQ ID NO: 735247 - DNA, 33 bp, Homo sapien
ctctctaacacattagaccagtaaggcagacca

SEQ ID NO: 735248 - DNA, 33 bp, Homo sapien
ctctctaacacattagtccagtaaggcagacca

SEQ ID NO: 735249 - DNA, 33 bp, Homo sapien
ctgcttctaagcaatgaacacaaaaaaccaaca

SEQ ID NO: 735250 - DNA, 33 bp, Homo sapien
ctgcttctaagcaatggacacaaaaaaccaaca

SEQ ID NO: 735251 - DNA, 33 bp, Homo sapien
ttaagtctccaaaacactgtaaggtcaatccac

SEQ ID NO: 735252 - DNA, 33 bp, Homo sapien
ttaagtctccaaaacattgtaaggtcaatccac

SEQ ID NO: 735253 - DNA, 33 bp, Homo sapien
ctctggaataagtcaaacgcagtcttttctacc

SEQ ID NO: 735254 - DNA, 33 bp, Homo sapien
ctctggaataagtcaaccgcagtcttttctacc

SEQ ID NO: 735255 - DNA, 33 bp, Homo sapien
aggtcaagataagatacgaagggtttaaagggc

SEQ ID NO: 735256 - DNA, 33 bp, Homo sapien
aggtcaagataagatatgaagggtttaaagggc

SEQ ID NO: 735257 - DNA, 33 bp, Homo sapien
ctaccactgtaggttccagcgtttaactagtta

SEQ ID NO: 735258 - DNA, 33 bp, Homo sapien
ctaccactgtaggttcgagcgtttaactagtta

SEQ ID NO: 735259 - DNA, 33 bp, Homo sapien
ttcataaagtacccaacaattaccatgcatcac

SEQ ID NO: 735260 - DNA, 33 bp, Homo sapien
ttcataaagtacccaataattaccatgcatcac

SEQ ID NO: 735261 - DNA, 33 bp, Homo sapien
tgcattttccttgccaaccctaacatagcctta

SEQ ID NO: 735262 - DNA, 33 bp, Homo sapien
tgcattttccttgccagccctaacatagcctta

SEQ ID NO: 735263 - DNA, 33 bp, Homo sapien
caaggagttacagataccactttgaagcaaaga

SEQ ID NO: 735264 - DNA, 33 bp, Homo sapien
caaggagttacagatatcactttgaagcaaaga

SEQ ID NO: 735265 - DNA, 33 bp, Homo sapien
atatggagatattaggaaagggaggacagacca

SEQ ID NO: 735266 - DNA, 33 bp, Homo sapien
atatggagatattagggaagggaggacagacca

SEQ ID NO: 735267 - DNA, 33 bp, Homo sapien
ctgaaataatgtaacaatgtgaggtgtcatgaa

SEQ ID NO: 735268 - DNA, 33 bp, Homo sapien
ctgaaataatgtaacagtgtgaggtgtcatgaa

SEQ ID NO: 735269 - DNA, 33 bp, Homo sapien
ctttagagccaatcctgaatttcctccatgaaa

SEQ ID NO: 735270 - DNA, 33 bp, Homo sapien
ctttagagccaatccttaatttcctccatgaaa

SEQ ID NO: 735271 - DNA, 33 bp, Homo sapien
gtcttccaagtattacactatgttgccatatgc

SEQ ID NO: 735272 - DNA, 33 bp, Homo sapien
gtcttccaagtattacgctatgttgccatatgc

SEQ ID NO: 735273 - DNA, 33 bp, Homo sapien
tagtttcaatttgggaaaaagaaacaccagcaa

SEQ ID NO: 735274 - DNA, 33 bp, Homo sapien
tagtttcaatttgggagaaagaaacaccagcaa

SEQ ID NO: 735275 - DNA, 33 bp, Homo sapien
attttgccaatagatgccactctctaagcctgt

SEQ ID NO: 735276 - DNA, 33 bp, Homo sapien
attttgccaatagatgtcactctctaagcctgt

SEQ ID NO: 735277 - DNA, 33 bp, Homo sapien
gtcctatagatgttcaatctaacagtgtggaca

SEQ ID NO: 735278 - DNA, 33 bp, Homo sapien
gtcctatagatgttcagtctaacagtgtggaca

SEQ ID NO: 735279 - DNA, 33 bp, Homo sapien
ataatatacacataaagcaagaagcacaaagcc

SEQ ID NO: 735280 - DNA, 33 bp, Homo sapien
ataatatacacataaatcaagaagcacaaagcc

SEQ ID NO: 735281 - DNA, 33 bp, Homo sapien
agaaagtttgttgagcaccagttgtgttccaca

SEQ ID NO: 735282 - DNA, 33 bp, Homo sapien
agaaagtttgttgagcgccagttgtgttccaca

SEQ ID NO: 735283 - DNA, 33 bp, Homo sapien
actccctgactccctcaaaagcccagtcccaag

SEQ ID NO: 735284 - DNA, 33 bp, Homo sapien
actccctgactccctcgaaagcccagtcccaag

SEQ ID NO: 735285 - DNA, 33 bp, Homo sapien
gcctttcttgagagcccacctgctgagatttct

SEQ ID NO: 735286 - DNA, 33 bp, Homo sapien
gcctttcttgagagcctacctgctgagatttct

SEQ ID NO: 735287 - DNA, 33 bp, Homo sapien
gttaaaatagctattgaatttatgtgcccttca

SEQ ID NO: 735288 - DNA, 33 bp, Homo sapien
gttaaaatagctattggatttatgtgcccttca

SEQ ID NO: 735289 - DNA, 33 bp, Homo sapien
ttgcctaagtgtttgccgagagtaaatgaaaga

SEQ ID NO: 735290 - DNA, 33 bp, Homo sapien
ttgcctaagtgtttgcggagagtaaatgaaaga

SEQ ID NO: 735291 - DNA, 33 bp, Homo sapien
tccagtgagttccaaacactccattgcacaagt

SEQ ID NO: 735292 - DNA, 33 bp, Homo sapien
tccagtgagttccaaagactccattgcacaagt

SEQ ID NO: 735293 - DNA, 33 bp, Homo sapien
gtaatgaacccttgtaaccactagtgagaactt

SEQ ID NO: 735294 - DNA, 33 bp, Homo sapien
gtaatgaacccttgtagccactagtgagaactt

SEQ ID NO: 735295 - DNA, 33 bp, Homo sapien
gtgagaactttcaacaatggtatctttgaacat

SEQ ID NO: 735296 - DNA, 33 bp, Homo sapien
gtgagaactttcaacagtggtatctttgaacat

SEQ ID NO: 735297 - DNA, 33 bp, Homo sapien
acaagctatttgctaacgtggttgtgccatttt

SEQ ID NO: 735298 - DNA, 33 bp, Homo sapien
acaagctatttgctaatgtggttgtgccatttt

SEQ ID NO: 735299 - DNA, 33 bp, Homo sapien
tctaaagatcattgaaataagtggcccatatac

SEQ ID NO: 735300 - DNA, 33 bp, Homo sapien
tctaaagatcattgaagtaagtggcccatatac

SEQ ID NO: 735301 - DNA, 33 bp, Homo sapien
tctaaagcagtttaaacgtatgtgtgttaattt

SEQ ID NO: 735302 - DNA, 33 bp, Homo sapien
tctaaagcagtttaaatgtatgtgtgttaattt

SEQ ID NO: 735303 - DNA, 33 bp, Homo sapien
tacaaatctaggagggcatcataactatcaaca

SEQ ID NO: 735304 - DNA, 33 bp, Homo sapien
tacaaatctaggagggtatcataactatcaaca

SEQ ID NO: 735305 - DNA, 33 bp, Homo sapien
ctcatacaaagctgaacgctactagctctccag

SEQ ID NO: 735306 - DNA, 33 bp, Homo sapien
ctcatacaaagctgaatgctactagctctccag

SEQ ID NO: 735307 - DNA, 33 bp, Homo sapien
ttatttaggctcttacagtaaataattagaaag

SEQ ID NO: 735308 - DNA, 33 bp, Homo sapien
ttatttaggctcttacggtaaataattagaaag

SEQ ID NO: 735309 - DNA, 33 bp, Homo sapien
tctcctttagcagttaacactcttgctcttgta

SEQ ID NO: 735310 - DNA, 33 bp, Homo sapien
tctcctttagcagttaccactcttgctcttgta

SEQ ID NO: 735311 - DNA, 33 bp, Homo sapien
acccaaaagctgaagtaaagggtagagaagatc

SEQ ID NO: 735312 - DNA, 33 bp, Homo sapien
acccaaaagctgaagtgaagggtagagaagatc

SEQ ID NO: 735313 - DNA, 33 bp, Homo sapien
catattttgttgctgagaaaggtcagcatgatg

SEQ ID NO: 735314 - DNA, 33 bp, Homo sapien
catattttgttgctgataaaggtcagcatgatg

SEQ ID NO: 735315 - DNA, 33 bp, Homo sapien
atcacattaagtctgacagtagttagccaaaag

SEQ ID NO: 735316 - DNA, 33 bp, Homo sapien
atcacattaagtctgatagtagttagccaaaag

SEQ ID NO: 735317 - DNA, 33 bp, Homo sapien
tacttgatatgctaagacaatgtgaaaactccc

SEQ ID NO: 735318 - DNA, 33 bp, Homo sapien
tacttgatatgctaaggcaatgtgaaaactccc

SEQ ID NO: 735319 - DNA, 33 bp, Homo sapien
aagcaaggagcaaaaaaagaaactgagtcccag

SEQ ID NO: 735320 - DNA, 33 bp, Homo sapien
aagcaaggagcaaaaagagaaactgagtcccag

SEQ ID NO: 735321 - DNA, 33 bp, Homo sapien
aactgtcatgtgattacaccatactgaaaaagt

SEQ ID NO: 735322 - DNA, 33 bp, Homo sapien
aactgtcatgtgattataccatactgaaaaagt

SEQ ID NO: 735323 - DNA, 33 bp, Homo sapien
ctggacttttctataaaccagtttgttgcttct

SEQ ID NO: 735324 - DNA, 33 bp, Homo sapien
ctggacttttctataagccagtttgttgcttct

SEQ ID NO: 735325 - DNA, 33 bp, Homo sapien
atgtgaatatgacagccaacaactctgaaatct

SEQ ID NO: 735326 - DNA, 33 bp, Homo sapien
atgtgaatatgacagcgaacaactctgaaatct

SEQ ID NO: 735327 - DNA, 33 bp, Homo sapien
aaatgatggtttacaaacgctatggaactttga

SEQ ID NO: 735328 - DNA, 33 bp, Homo sapien
aaatgatggtttacaatcgctatggaactttga

SEQ ID NO: 735329 - DNA, 33 bp, Homo sapien
gcatgggttgaacttccagtgtcttaagtgaat

SEQ ID NO: 735330 - DNA, 33 bp, Homo sapien
gcatgggttgaacttctagtgtcttaagtgaat

SEQ ID NO: 735331 - DNA, 33 bp, Homo sapien
atttgctaaacatccaccatgtagacattcaca

SEQ ID NO: 735332 - DNA, 33 bp, Homo sapien
atttgctaaacatccatcatgtagacattcaca

SEQ ID NO: 735333 - DNA, 33 bp, Homo sapien
aaaggcaacaattcgcccagttaaaaatacgga

SEQ ID NO: 735334 - DNA, 33 bp, Homo sapien
aaaggcaacaattcgctcagttaaaaatacgga

SEQ ID NO: 735335 - DNA, 33 bp, Homo sapien
tccctaacctgacagaacagagttttctagatt

SEQ ID NO: 735336 - DNA, 33 bp, Homo sapien
tccctaacctgacagagcagagttttctagatt

SEQ ID NO: 735337 - DNA, 33 bp, Homo sapien
tgcattctctaaatcaacttccatacttaattc

SEQ ID NO: 735338 - DNA, 33 bp, Homo sapien
tgcattctctaaatcagcttccatacttaattc

SEQ ID NO: 735339 - DNA, 33 bp, Homo sapien
ctattgtgccgtgtagaaaagccacgtacttcg

SEQ ID NO: 735340 - DNA, 33 bp, Homo sapien
ctattgtgccgtgtaggaaagccacgtacttcg

SEQ ID NO: 735341 - DNA, 33 bp, Homo sapien
tatttgtgagcctcagacatacaggttcccact

SEQ ID NO: 735342 - DNA, 33 bp, Homo sapien
tatttgtgagcctcaggcatacaggttcccact

SEQ ID NO: 735343 - DNA, 33 bp, Homo sapien
cttctttttactcttccaaacttcagttactat

SEQ ID NO: 735344 - DNA, 33 bp, Homo sapien
cttctttttactcttctaaacttcagttactat

SEQ ID NO: 735345 - DNA, 33 bp, Homo sapien
cgctggcctcagtaaaggcaccagtgggaataa

SEQ ID NO: 735346 - DNA, 33 bp, Homo sapien
cgctggcctcagtaaatgcaccagtgggaataa

SEQ ID NO: 735347 - DNA, 33 bp, Homo sapien
tgagttacaataggccacccctgtttgcctatt

SEQ ID NO: 735348 - DNA, 33 bp, Homo sapien
tgagttacaataggccgcccctgtttgcctatt

SEQ ID NO: 735349 - DNA, 33 bp, Homo sapien
gagagagacaccaaccaagagtgtccattcctc

SEQ ID NO: 735350 - DNA, 33 bp, Homo sapien
gagagagacaccaaccgagagtgtccattcctc

SEQ ID NO: 735351 - DNA, 33 bp, Homo sapien
tcaaaatccttgcatacgaagcaaaaataagac

SEQ ID NO: 735352 - DNA, 33 bp, Homo sapien
tcaaaatccttgcatatgaagcaaaaataagac

SEQ ID NO: 735353 - DNA, 33 bp, Homo sapien
cttacccttttaaagactcatttggccatattt

SEQ ID NO: 735354 - DNA, 33 bp, Homo sapien
cttacccttttaaagattcatttggccatattt

SEQ ID NO: 735355 - DNA, 33 bp, Homo sapien
gggagacagcagaaccggagaaagaaatgggtg

SEQ ID NO: 735356 - DNA, 33 bp, Homo sapien
gggagacagcagaacctgagaaagaaatgggtg

SEQ ID NO: 735357 - DNA, 33 bp, Homo sapien
aatgggtgtgtggtacaaatgaagaccgggcaa

SEQ ID NO: 735358 - DNA, 33 bp, Homo sapien
aatgggtgtgtggtacgaatgaagaccgggcaa

SEQ ID NO: 735359 - DNA, 33 bp, Homo sapien
actgtgtgaatgaaaaatacaacaaggttctat

SEQ ID NO: 735360 - DNA, 33 bp, Homo sapien
actgtgtgaatgaaaactacaacaaggttctat

SEQ ID NO: 735361 - DNA, 33 bp, Homo sapien
gaggttaaacaaaatagtatcaaggccaaagac

SEQ ID NO: 735362 - DNA, 33 bp, Homo sapien
gaggttaaacaaaatattatcaaggccaaagac

SEQ ID NO: 735363 - DNA, 33 bp, Homo sapien
ttgatcagtgtaccctcaaagtatccaagtaga

SEQ ID NO: 735364 - DNA, 33 bp, Homo sapien
ttgatcagtgtacccttaaagtatccaagtaga

SEQ ID NO: 735365 - DNA, 33 bp, Homo sapien
aactattatatctcaaataagttcacggtacaa

SEQ ID NO: 735366 - DNA, 33 bp, Homo sapien
aactattatatctcaagtaagttcacggtacaa

SEQ ID NO: 735367 - DNA, 33 bp, Homo sapien
attattgtagagagagaaaattcttctagttct

SEQ ID NO: 735368 - DNA, 33 bp, Homo sapien
attattgtagagagaggaaattcttctagttct

SEQ ID NO: 735369 - DNA, 33 bp, Homo sapien
agaccggatacccatcacttcttctagacgaca

SEQ ID NO: 735370 - DNA, 33 bp, Homo sapien
agaccggatacccatcgcttcttctagacgaca

SEQ ID NO: 735371 - DNA, 33 bp, Homo sapien
tcctttcctcctgtcaatactttagtggagtca

SEQ ID NO: 735372 - DNA, 33 bp, Homo sapien
tcctttcctcctgtcagtactttagtggagtca

SEQ ID NO: 735373 - DNA, 33 bp, Homo sapien
aacaagaaccagatgacgggagctattacccag

SEQ ID NO: 735374 - DNA, 33 bp, Homo sapien
aacaagaaccagatgatgggagctattacccag

SEQ ID NO: 735375 - DNA, 33 bp, Homo sapien
atagggcttttaacaacggcgcgcatgacgcca

SEQ ID NO: 735376 - DNA, 33 bp, Homo sapien
atagggcttttaacaatggcgcgcatgacgcca

SEQ ID NO: 735377 - DNA, 33 bp, Homo sapien
gcctttggtctccatccctaacaaataaattta

SEQ ID NO: 735378 - DNA, 33 bp, Homo sapien
gcctttggtctccatcgctaacaaataaattta

SEQ ID NO: 735379 - DNA, 33 bp, Homo sapien
gcaaaaaaaggtaactcaggacttagtgaagtg

SEQ ID NO: 735380 - DNA, 33 bp, Homo sapien
gcaaaaaaaggtaactgaggacttagtgaagtg

SEQ ID NO: 735381 - DNA, 33 bp, Homo sapien
ttttaacaaggccatgaattaaatatggaaggc

SEQ ID NO: 735382 - DNA, 33 bp, Homo sapien
ttttaacaaggccatgtattaaatatggaaggc

SEQ ID NO: 735383 - DNA, 33 bp, Homo sapien
aatcttacctgtctacacttgaaagtttgttac

SEQ ID NO: 735384 - DNA, 33 bp, Homo sapien
aatcttacctgtctacccttgaaagtttgttac

SEQ ID NO: 735385 - DNA, 33 bp, Homo sapien
gtccagactggacaagccttaggaattcagtga

SEQ ID NO: 735386 - DNA, 33 bp, Homo sapien
gtccagactggacaaggcttaggaattcagtga

SEQ ID NO: 735387 - DNA, 33 bp, Homo sapien
tcaaaccagtctcaaaaaataatcagtgaaaga

SEQ ID NO: 735388 - DNA, 33 bp, Homo sapien
tcaaaccagtctcaaacaataatcagtgaaaga

SEQ ID NO: 735389 - DNA, 33 bp, Homo sapien
accaacaaggatgacacaaaagcctttgacttt

SEQ ID NO: 735390 - DNA, 33 bp, Homo sapien
accaacaaggatgacataaaagcctttgacttt

SEQ ID NO: 735391 - DNA, 33 bp, Homo sapien
tggataaggtccaaacccttgagtctgacaatc

SEQ ID NO: 735392 - DNA, 33 bp, Homo sapien
tggataaggtccaaactcttgagtctgacaatc

SEQ ID NO: 735393 - DNA, 33 bp, Homo sapien
aagaaaaccacacaaccgaaaatgagcgtggca

SEQ ID NO: 735394 - DNA, 33 bp, Homo sapien
aagaaaaccacacaactgaaaatgagcgtggca

SEQ ID NO: 735395 - DNA, 33 bp, Homo sapien
ggaaaagtccaggcaacagacaatgcaaggaag

SEQ ID NO: 735396 - DNA, 33 bp, Homo sapien
ggaaaagtccaggcaagagacaatgcaaggaag

SEQ ID NO: 735397 - DNA, 33 bp, Homo sapien
agagcaccacaagagaaaaatgatattgaagga

SEQ ID NO: 735398 - DNA, 33 bp, Homo sapien
agagcaccacaagagagaaatgatattgaagga

SEQ ID NO: 735399 - DNA, 33 bp, Homo sapien
gtaatagtgagaaaaaaatgatggatataagga

SEQ ID NO: 735400 - DNA, 33 bp, Homo sapien
gtaatagtgagaaaaagatgatggatataagga

SEQ ID NO: 735401 - DNA, 33 bp, Homo sapien
aattctacctctataacctctttacttcaatat

SEQ ID NO: 735402 - DNA, 33 bp, Homo sapien
aattctacctctataatctctttacttcaatat

SEQ ID NO: 735403 - DNA, 33 bp, Homo sapien
tcccccaagtacaggcactaattgttgtgagaa

SEQ ID NO: 735404 - DNA, 33 bp, Homo sapien
tcccccaagtacaggcgctaattgttgtgagaa

SEQ ID NO: 735405 - DNA, 33 bp, Homo sapien
tggtaaacaagagacacagcaggcagtaactat

SEQ ID NO: 735406 - DNA, 33 bp, Homo sapien
tggtaaacaagagacatagcaggcagtaactat

SEQ ID NO: 735407 - DNA, 33 bp, Homo sapien
ctgaccaacaaatctccaagatgcttgatgctt

SEQ ID NO: 735408 - DNA, 33 bp, Homo sapien
ctgaccaacaaatctctaagatgcttgatgctt

SEQ ID NO: 735409 - DNA, 33 bp, Homo sapien
gcaactgccaccacaactgactgacaattaaaa

SEQ ID NO: 735410 - DNA, 33 bp, Homo sapien
gcaactgccaccacaattgactgacaattaaaa

SEQ ID NO: 735411 - DNA, 33 bp, Homo sapien
agaattacataagccaataaaagaattatgtcg

SEQ ID NO: 735412 - DNA, 33 bp, Homo sapien
agaattacataagccactaaaagaattatgtcg

SEQ ID NO: 735413 - DNA, 33 bp, Homo sapien
ttttagaatggtacagcctggcaatatctgcag

SEQ ID NO: 735414 - DNA, 33 bp, Homo sapien
ttttagaatggtacagtctggcaatatctgcag

SEQ ID NO: 735415 - DNA, 33 bp, Homo sapien
tgggtgagacatttccaaggtatgcaaaggcta

SEQ ID NO: 735416 - DNA, 33 bp, Homo sapien
tgggtgagacatttccgaggtatgcaaaggcta

SEQ ID NO: 735417 - DNA, 33 bp, Homo sapien
cacgtgcattaggaacagcctcaatcccccatt

SEQ ID NO: 735418 - DNA, 33 bp, Homo sapien
cacgtgcattaggaacggcctcaatcccccatt

SEQ ID NO: 735419 - DNA, 33 bp, Homo sapien
tagttaatatagtatgacactggagaaatgact

SEQ ID NO: 735420 - DNA, 33 bp, Homo sapien
tagttaatatagtatggcactggagaaatgact

SEQ ID NO: 735421 - DNA, 33 bp, Homo sapien
gaagagtgggacaaggaccagtggtagaagatt

SEQ ID NO: 735422 - DNA, 33 bp, Homo sapien
gaagagtgggacaagggccagtggtagaagatt

SEQ ID NO: 735423 - DNA, 33 bp, Homo sapien
catggctgctagatggcaataggaattttgtga

SEQ ID NO: 735424 - DNA, 33 bp, Homo sapien
catggctgctagatggtaataggaattttgtga

SEQ ID NO: 735425 - DNA, 33 bp, Homo sapien
accaatccaacataaagaacatcatagaacttc

SEQ ID NO: 735426 - DNA, 33 bp, Homo sapien
accaatccaacataaataacatcatagaacttc

SEQ ID NO: 735427 - DNA, 33 bp, Homo sapien
catttccattgctcgaagcagaatactgtttaa

SEQ ID NO: 735428 - DNA, 33 bp, Homo sapien
catttccattgctcgatgcagaatactgtttaa

SEQ ID NO: 735429 - DNA, 33 bp, Homo sapien
aatatctgtaaaaacacaaggtttccaaatttg

SEQ ID NO: 735430 - DNA, 33 bp, Homo sapien
aatatctgtaaaaacataaggtttccaaatttg

SEQ ID NO: 735431 - DNA, 33 bp, Homo sapien
ggtgtcaaatgaagagaccctccactagaggaa

SEQ ID NO: 735432 - DNA, 33 bp, Homo sapien
ggtgtcaaatgaagagtccctccactagaggaa

SEQ ID NO: 735433 - DNA, 33 bp, Homo sapien
gatgcacctggtctcacataggtgcctgtgagg

SEQ ID NO: 735434 - DNA, 33 bp, Homo sapien
gatgcacctggtctcatataggtgcctgtgagg

SEQ ID NO: 735435 - DNA, 33 bp, Homo sapien
gtgactggtagtttgaataaatgactcttacta

SEQ ID NO: 735436 - DNA, 33 bp, Homo sapien
gtgactggtagtttgagtaaatgactcttacta

SEQ ID NO: 735437 - DNA, 33 bp, Homo sapien
tttttactatggcggccgataactcacaaaaga

SEQ ID NO: 735438 - DNA, 33 bp, Homo sapien
tttttactatggcggctgataactcacaaaaga

SEQ ID NO: 735439 - DNA, 33 bp, Homo sapien
tcacattgcctctcacagatgaggaaatgaaga

SEQ ID NO: 735440 - DNA, 33 bp, Homo sapien
tcacattgcctctcaccgatgaggaaatgaaga

SEQ ID NO: 735441 - DNA, 33 bp, Homo sapien
accttcctggatgttaaaagcaaggaatacgga

SEQ ID NO: 735442 - DNA, 33 bp, Homo sapien
accttcctggatgttacaagcaaggaatacgga

SEQ ID NO: 735443 - DNA, 33 bp, Homo sapien
gagaggaaggcaggtccgaaaataggaaggtac

SEQ ID NO: 735444 - DNA, 33 bp, Homo sapien
gagaggaaggcaggtctgaaaataggaaggtac

SEQ ID NO: 735445 - DNA, 33 bp, Homo sapien
ggatttagtactaggacataatgatggtattgt

SEQ ID NO: 735446 - DNA, 33 bp, Homo sapien
ggatttagtactaggagataatgatggtattgt

SEQ ID NO: 735447 - DNA, 33 bp, Homo sapien
tcagctggtgaacacagatgctatttcattaac

SEQ ID NO: 735448 - DNA, 33 bp, Homo sapien
tcagctggtgaacacatatgctatttcattaac

SEQ ID NO: 735449 - DNA, 33 bp, Homo sapien
ttacacattcatgaaaattgcctagttataggt

SEQ ID NO: 735450 - DNA, 33 bp, Homo sapien
ttacacattcatgaaatttgcctagttataggt

SEQ ID NO: 735451 - DNA, 33 bp, Homo sapien
ttttctggaccaaccaatggacatgtaacatgt

SEQ ID NO: 735452 - DNA, 33 bp, Homo sapien
ttttctggaccaaccagtggacatgtaacatgt

SEQ ID NO: 735453 - DNA, 33 bp, Homo sapien
tgtattttgggtagaaacttctgtaatccagga

SEQ ID NO: 735454 - DNA, 33 bp, Homo sapien
tgtattttgggtagaaccttctgtaatccagga

SEQ ID NO: 735455 - DNA, 33 bp, Homo sapien
gcacctcagtttcaaaagatattctacaattac

SEQ ID NO: 735456 - DNA, 33 bp, Homo sapien
gcacctcagtttcaaacgatattctacaattac

SEQ ID NO: 735457 - DNA, 33 bp, Homo sapien
catttttgattcattgcattcggagttatcttt

SEQ ID NO: 735458 - DNA, 33 bp, Homo sapien
catttttgattcattgtattcggagttatcttt

SEQ ID NO: 735459 - DNA, 33 bp, Homo sapien
ctgaggagaaggtcagaagatttgtctctatat

SEQ ID NO: 735460 - DNA, 33 bp, Homo sapien
ctgaggagaaggtcaggagatttgtctctatat

SEQ ID NO: 735461 - DNA, 33 bp, Homo sapien
gctctccaccacactgaattgccctctctgaaa

SEQ ID NO: 735462 - DNA, 33 bp, Homo sapien
gctctccaccacactggattgccctctctgaaa

SEQ ID NO: 735463 - DNA, 33 bp, Homo sapien
atatttttctgagaaacccagtcatgcctgttt

SEQ ID NO: 735464 - DNA, 33 bp, Homo sapien
atatttttctgagaaagccagtcatgcctgttt

SEQ ID NO: 735465 - DNA, 33 bp, Homo sapien
cgcttggcaggaattaagcaactgatgctctat

SEQ ID NO: 735466 - DNA, 33 bp, Homo sapien
cgcttggcaggaattaggcaactgatgctctat

SEQ ID NO: 735467 - DNA, 33 bp, Homo sapien
ggcacctacaagaaaggcttcaaccattattca

SEQ ID NO: 735468 - DNA, 33 bp, Homo sapien
ggcacctacaagaaagtcttcaaccattattca

SEQ ID NO: 735469 - DNA, 33 bp, Homo sapien
aaccaatgtagtgatacaagatcaaggcctctc

SEQ ID NO: 735470 - DNA, 33 bp, Homo sapien
aaccaatgtagtgatataagatcaaggcctctc

SEQ ID NO: 735471 - DNA, 33 bp, Homo sapien
gagtgagaatgaattacggaattatggaacaaa

SEQ ID NO: 735472 - DNA, 33 bp, Homo sapien
gagtgagaatgaattatggaattatggaacaaa

SEQ ID NO: 735473 - DNA, 33 bp, Homo sapien
ctgacgactatcatcacaaaggcaaagttaact

SEQ ID NO: 735474 - DNA, 33 bp, Homo sapien
ctgacgactatcatcagaaaggcaaagttaact

SEQ ID NO: 735475 - DNA, 33 bp, Homo sapien
caagcatgagatgaccaaatgtgattgggtttc

SEQ ID NO: 735476 - DNA, 33 bp, Homo sapien
caagcatgagatgaccgaatgtgattgggtttc

SEQ ID NO: 735477 - DNA, 33 bp, Homo sapien
agatgaatcccgaggagatggttcaaagagtcc

SEQ ID NO: 735478 - DNA, 33 bp, Homo sapien
agatgaatcccgaggatatggttcaaagagtcc

SEQ ID NO: 735479 - DNA, 33 bp, Homo sapien
tctcacttcaaactaccattgaccttcacctgg

SEQ ID NO: 735480 - DNA, 33 bp, Homo sapien
tctcacttcaaactactattgaccttcacctgg

SEQ ID NO: 735481 - DNA, 33 bp, Homo sapien
ttagtagcctaaatcaccagaacagaattgacc

SEQ ID NO: 735482 - DNA, 33 bp, Homo sapien
ttagtagcctaaatcatcagaacagaattgacc

SEQ ID NO: 735483 - DNA, 33 bp, Homo sapien
aatcgaatgaaaaaagaaagtgtgcaaaatatg

SEQ ID NO: 735484 - DNA, 33 bp, Homo sapien
aatcgaatgaaaaaaggaagtgtgcaaaatatg

SEQ ID NO: 735485 - DNA, 33 bp, Homo sapien
attagaatccttaaagcagaatagccttgtgag

SEQ ID NO: 735486 - DNA, 33 bp, Homo sapien
attagaatccttaaagtagaatagccttgtgag

SEQ ID NO: 735487 - DNA, 33 bp, Homo sapien
gaattggtgaaaattaacatagactttggaagg

SEQ ID NO: 735488 - DNA, 33 bp, Homo sapien
gaattggtgaaaattagcatagactttggaagg

SEQ ID NO: 735489 - DNA, 33 bp, Homo sapien
agtttttctgccaacaatgcttaaaactaatta

SEQ ID NO: 735490 - DNA, 33 bp, Homo sapien
agtttttctgccaacagtgcttaaaactaatta

SEQ ID NO: 735491 - DNA, 33 bp, Homo sapien
cagaatgtgtaaactcagaattttaagcatttg

SEQ ID NO: 735492 - DNA, 33 bp, Homo sapien
cagaatgtgtaaactcggaattttaagcatttg

SEQ ID NO: 735493 - DNA, 33 bp, Homo sapien
tagccaggggttccaccagaaatcgtaacaagg

SEQ ID NO: 735494 - DNA, 33 bp, Homo sapien
tagccaggggttccactagaaatcgtaacaagg

SEQ ID NO: 735495 - DNA, 33 bp, Homo sapien
agttccatttgtttgaagtgggcaaccaaaact

SEQ ID NO: 735496 - DNA, 33 bp, Homo sapien
agttccatttgtttgacgtgggcaaccaaaact

SEQ ID NO: 735497 - DNA, 33 bp, Homo sapien
catgtgtcagactaaaccactgcagtcaggaaa

SEQ ID NO: 735498 - DNA, 33 bp, Homo sapien
catgtgtcagactaaatcactgcagtcaggaaa

SEQ ID NO: 735499 - DNA, 33 bp, Homo sapien
ggtctctgttttcctacgtaaccaggatcacat

SEQ ID NO: 735500 - DNA, 33 bp, Homo sapien
ggtctctgttttcctatgtaaccaggatcacat

SEQ ID NO: 735501 - DNA, 33 bp, Homo sapien
cattttattttgttacggagacactcaaaagtg

SEQ ID NO: 735502 - DNA, 33 bp, Homo sapien
cattttattttgttactgagacactcaaaagtg

SEQ ID NO: 735503 - DNA, 33 bp, Homo sapien
accatgtaggaatgtaagatcttccaagttctt

SEQ ID NO: 735504 - DNA, 33 bp, Homo sapien
accatgtaggaatgtacgatcttccaagttctt

SEQ ID NO: 735505 - DNA, 33 bp, Homo sapien
gtattggggtctgtcacggggtaagtgttgagt

SEQ ID NO: 735506 - DNA, 33 bp, Homo sapien
gtattggggtctgtcatggggtaagtgttgagt

SEQ ID NO: 735507 - DNA, 33 bp, Homo sapien
ggagttagccagacaaagatggatggaaaaatc

SEQ ID NO: 735508 - DNA, 33 bp, Homo sapien
ggagttagccagacaacgatggatggaaaaatc

SEQ ID NO: 735509 - DNA, 33 bp, Homo sapien
atgctatgccagttccacctgttgtctttgtgt

SEQ ID NO: 735510 - DNA, 33 bp, Homo sapien
atgctatgccagttcctcctgttgtctttgtgt

SEQ ID NO: 735511 - DNA, 33 bp, Homo sapien
gtgaggggcattctccaagatttgaatgggagt

SEQ ID NO: 735512 - DNA, 33 bp, Homo sapien
gtgaggggcattctccgagatttgaatgggagt

SEQ ID NO: 735513 - DNA, 33 bp, Homo sapien
actaatcttttgggtaacattgctgagagccat

SEQ ID NO: 735514 - DNA, 33 bp, Homo sapien
actaatcttttgggtagcattgctgagagccat

SEQ ID NO: 735515 - DNA, 33 bp, Homo sapien
aaattgtggaatattacgtatagttgatcctgt

SEQ ID NO: 735516 - DNA, 33 bp, Homo sapien
aaattgtggaatattaggtatagttgatcctgt

SEQ ID NO: 735517 - DNA, 33 bp, Homo sapien
gcacaaggtttcatgactattggagggataccc

SEQ ID NO: 735518 - DNA, 33 bp, Homo sapien
gcacaaggtttcatgattattggagggataccc

SEQ ID NO: 735519 - DNA, 33 bp, Homo sapien
ttcgtccgtccatccacctatctatctgtacat

SEQ ID NO: 735520 - DNA, 33 bp, Homo sapien
ttcgtccgtccatccatctatctatctgtacat

SEQ ID NO: 735521 - DNA, 33 bp, Homo sapien
attttgagttcattgaagctagacctacctttg

SEQ ID NO: 735522 - DNA, 33 bp, Homo sapien
attttgagttcattgatgctagacctacctttg

SEQ ID NO: 735523 - DNA, 33 bp, Homo sapien
gtcacaataatgattacagttatggccaaactg

SEQ ID NO: 735524 - DNA, 33 bp, Homo sapien
gtcacaataatgattatagttatggccaaactg

SEQ ID NO: 735525 - DNA, 33 bp, Homo sapien
aggcactccaggaaataagtatgtatagtattg

SEQ ID NO: 735526 - DNA, 33 bp, Homo sapien
aggcactccaggaaatgagtatgtatagtattg

SEQ ID NO: 735527 - DNA, 33 bp, Homo sapien
aaagccagagtttcacaggaacctaaagaatca

SEQ ID NO: 735528 - DNA, 33 bp, Homo sapien
aaagccagagtttcaccggaacctaaagaatca

SEQ ID NO: 735529 - DNA, 33 bp, Homo sapien
ctgcacttctgtgcctcactatgcagcataatt

SEQ ID NO: 735530 - DNA, 33 bp, Homo sapien
ctgcacttctgtgccttactatgcagcataatt

SEQ ID NO: 735531 - DNA, 33 bp, Homo sapien
ataccattggtagtcagaaaactgtcaccagga

SEQ ID NO: 735532 - DNA, 33 bp, Homo sapien
ataccattggtagtcataaaactgtcaccagga

SEQ ID NO: 735533 - DNA, 33 bp, Homo sapien
tgtccaacaggttggcaataagctctaggaggg

SEQ ID NO: 735534 - DNA, 33 bp, Homo sapien
tgtccaacaggttggcgataagctctaggaggg

SEQ ID NO: 735535 - DNA, 33 bp, Homo sapien
tggggatgggtttttcaatgctgtttttgtgat

SEQ ID NO: 735536 - DNA, 33 bp, Homo sapien
tggggatgggtttttcgatgctgtttttgtgat

SEQ ID NO: 735537 - DNA, 33 bp, Homo sapien
tcatagaagtgaagtacatttattgcacctcct

SEQ ID NO: 735538 - DNA, 33 bp, Homo sapien
tcatagaagtgaagtatatttattgcacctcct

SEQ ID NO: 735539 - DNA, 33 bp, Homo sapien
atcctcatgtgggagaccagggaatgcacattc

SEQ ID NO: 735540 - DNA, 33 bp, Homo sapien
atcctcatgtgggagatcagggaatgcacattc

SEQ ID NO: 735541 - DNA, 33 bp, Homo sapien
ttgagaatactcaaggaagaaataaactcagaa

SEQ ID NO: 735542 - DNA, 33 bp, Homo sapien
ttgagaatactcaaggcagaaataaactcagaa

SEQ ID NO: 735543 - DNA, 33 bp, Homo sapien
actctacattggttcacgttcagggaattcctg

SEQ ID NO: 735544 - DNA, 33 bp, Homo sapien
actctacattggttcatgttcagggaattcctg

SEQ ID NO: 735545 - DNA, 33 bp, Homo sapien
acctgtattcaggctcacagcatcttaaagaag

SEQ ID NO: 735546 - DNA, 33 bp, Homo sapien
acctgtattcaggctcgcagcatcttaaagaag

SEQ ID NO: 735547 - DNA, 33 bp, Homo sapien
tgctggaatatactaacgctatggaaatatttt

SEQ ID NO: 735548 - DNA, 33 bp, Homo sapien
tgctggaatatactaatgctatggaaatatttt

SEQ ID NO: 735549 - DNA, 33 bp, Homo sapien
gagtaagctactgacacagtggactttttaatt

SEQ ID NO: 735550 - DNA, 33 bp, Homo sapien
gagtaagctactgacatagtggactttttaatt

SEQ ID NO: 735551 - DNA, 33 bp, Homo sapien
tacctctgtggagaagaagcctatgcccagagc

SEQ ID NO: 735552 - DNA, 33 bp, Homo sapien
tacctctgtggagaaggagcctatgcccagagc

SEQ ID NO: 735553 - DNA, 33 bp, Homo sapien
caattcagttcatatccaataaggtatcatcac

SEQ ID NO: 735554 - DNA, 33 bp, Homo sapien
caattcagttcatatctaataaggtatcatcac

SEQ ID NO: 735555 - DNA, 33 bp, Homo sapien
ccttgagggacattaacgggttatagagaccag

SEQ ID NO: 735556 - DNA, 33 bp, Homo sapien
ccttgagggacattaatgggttatagagaccag

SEQ ID NO: 735557 - DNA, 33 bp, Homo sapien
tatgtttaccctagaaagccaactgagttgctt

SEQ ID NO: 735558 - DNA, 33 bp, Homo sapien
tatgtttaccctagaaggccaactgagttgctt

SEQ ID NO: 735559 - DNA, 33 bp, Homo sapien
atagctgaaggtatcacgtagtggaaggagttg

SEQ ID NO: 735560 - DNA, 33 bp, Homo sapien
atagctgaaggtatcatgtagtggaaggagttg

SEQ ID NO: 735561 - DNA, 33 bp, Homo sapien
ctctaggcacccactaactttgctaaggccctc

SEQ ID NO: 735562 - DNA, 33 bp, Homo sapien
ctctaggcacccactatctttgctaaggccctc

SEQ ID NO: 735563 - DNA, 33 bp, Homo sapien
gaaacctgactatagagaattctgtgcctccct

SEQ ID NO: 735564 - DNA, 33 bp, Homo sapien
gaaacctgactatagataattctgtgcctccct

SEQ ID NO: 735565 - DNA, 33 bp, Homo sapien
tcaacaaattatagcacagttcgagtttggttc

SEQ ID NO: 735566 - DNA, 33 bp, Homo sapien
tcaacaaattatagcatagttcgagtttggttc

SEQ ID NO: 735567 - DNA, 33 bp, Homo sapien
ataataggagacggcaccaggaaatggatttgt

SEQ ID NO: 735568 - DNA, 33 bp, Homo sapien
ataataggagacggcatcaggaaatggatttgt

SEQ ID NO: 735569 - DNA, 33 bp, Homo sapien
aacatactcaactcaacggctttcttttacaat

SEQ ID NO: 735570 - DNA, 33 bp, Homo sapien
aacatactcaactcaatggctttcttttacaat

SEQ ID NO: 735571 - DNA, 33 bp, Homo sapien
aagtgcaatgggaatccatctataggctctaga

SEQ ID NO: 735572 - DNA, 33 bp, Homo sapien
aagtgcaatgggaatctatctataggctctaga

SEQ ID NO: 735573 - DNA, 33 bp, Homo sapien
ggagttagtgtatgggaataacaattttggata

SEQ ID NO: 735574 - DNA, 33 bp, Homo sapien
ggagttagtgtatgggtataacaattttggata

SEQ ID NO: 735575 - DNA, 33 bp, Homo sapien
tttacacctcactggcacattttcttttaatat

SEQ ID NO: 735576 - DNA, 33 bp, Homo sapien
tttacacctcactggcgcattttcttttaatat

SEQ ID NO: 735577 - DNA, 33 bp, Homo sapien
tggagtggcatgtaaaactcttcttttgaaact

SEQ ID NO: 735578 - DNA, 33 bp, Homo sapien
tggagtggcatgtaaagctcttcttttgaaact

SEQ ID NO: 735579 - DNA, 33 bp, Homo sapien
ttcagtgggacactaaaaaagtagtagtcagaa

SEQ ID NO: 735580 - DNA, 33 bp, Homo sapien
ttcagtgggacactaagaaagtagtagtcagaa

SEQ ID NO: 735581 - DNA, 33 bp, Homo sapien
ggagcccacacagacaaatagggcataaagtct

SEQ ID NO: 735582 - DNA, 33 bp, Homo sapien
ggagcccacacagacagatagggcataaagtct

SEQ ID NO: 735583 - DNA, 33 bp, Homo sapien
cacaagtctttcatgcacctggtccagaaattg

SEQ ID NO: 735584 - DNA, 33 bp, Homo sapien
cacaagtctttcatgcgcctggtccagaaattg

SEQ ID NO: 735585 - DNA, 33 bp, Homo sapien
tcctaccactaaaaaaagggacatacctagagg

SEQ ID NO: 735586 - DNA, 33 bp, Homo sapien
tcctaccactaaaaaaggggacatacctagagg

SEQ ID NO: 735587 - DNA, 33 bp, Homo sapien
gtgaagcatgcctgtaaataaaattaagaaaga

SEQ ID NO: 735588 - DNA, 33 bp, Homo sapien
gtgaagcatgcctgtatataaaattaagaaaga

SEQ ID NO: 735589 - DNA, 33 bp, Homo sapien
gactgaaacatcgttacaaggtgcatgactgta

SEQ ID NO: 735590 - DNA, 33 bp, Homo sapien
gactgaaacatcgttataaggtgcatgactgta

SEQ ID NO: 735591 - DNA, 33 bp, Homo sapien
attctcagctagcacaacttccattctcgggtg

SEQ ID NO: 735592 - DNA, 33 bp, Homo sapien
attctcagctagcacatcttccattctcgggtg

SEQ ID NO: 735593 - DNA, 33 bp, Homo sapien
ccattattgatgtttcacagaaggtatgctact

SEQ ID NO: 735594 - DNA, 33 bp, Homo sapien
ccattattgatgtttcgcagaaggtatgctact

SEQ ID NO: 735595 - DNA, 33 bp, Homo sapien
tgctctgcagtttgaaagagagtctgatatctg

SEQ ID NO: 735596 - DNA, 33 bp, Homo sapien
tgctctgcagtttgaaggagagtctgatatctg

SEQ ID NO: 735597 - DNA, 33 bp, Homo sapien
agaaaatgaatgtgaacacaagagttattcagc

SEQ ID NO: 735598 - DNA, 33 bp, Homo sapien
agaaaatgaatgtgaagacaagagttattcagc

SEQ ID NO: 735599 - DNA, 33 bp, Homo sapien
aggcaaatatcttgaccgaggaggaccaagaga

SEQ ID NO: 735600 - DNA, 33 bp, Homo sapien
aggcaaatatcttgactgaggaggaccaagaga

SEQ ID NO: 735601 - DNA, 33 bp, Homo sapien
gtgatttgcaccttaagtgagtgatttgcacct

SEQ ID NO: 735602 - DNA, 33 bp, Homo sapien
gtgatttgcaccttaattgagtgatttgcacct

SEQ ID NO: 735603 - DNA, 33 bp, Homo sapien
caagggaatatttgacaccaaagctttcaaatc

SEQ ID NO: 735604 - DNA, 33 bp, Homo sapien
caagggaatatttgacgccaaagctttcaaatc

SEQ ID NO: 735605 - DNA, 33 bp, Homo sapien
accaggttttccttccagcttctcccatttcac

SEQ ID NO: 735606 - DNA, 33 bp, Homo sapien
accaggttttccttccggcttctcccatttcac

SEQ ID NO: 735607 - DNA, 33 bp, Homo sapien
gtctatgttataatacccaagagaaatatggtg

SEQ ID NO: 735608 - DNA, 33 bp, Homo sapien
gtctatgttataatactcaagagaaatatggtg

SEQ ID NO: 735609 - DNA, 33 bp, Homo sapien
tacagcagatgaagggccatacgaagttgcaat

SEQ ID NO: 735610 - DNA, 33 bp, Homo sapien
tacagcagatgaagggtcatacgaagttgcaat

SEQ ID NO: 735611 - DNA, 33 bp, Homo sapien
gttctatcctggtcatcaattgctatgtcacac

SEQ ID NO: 735612 - DNA, 33 bp, Homo sapien
gttctatcctggtcatgaattgctatgtcacac

SEQ ID NO: 735613 - DNA, 33 bp, Homo sapien
caaaggaacagcagaaatctcttaagtaactct

SEQ ID NO: 735614 - DNA, 33 bp, Homo sapien
caaaggaacagcagaactctcttaagtaactct

SEQ ID NO: 735615 - DNA, 33 bp, Homo sapien
actaattattgttacacgaaagattctggatta

SEQ ID NO: 735616 - DNA, 33 bp, Homo sapien
actaattattgttacatgaaagattctggatta

SEQ ID NO: 735617 - DNA, 33 bp, Homo sapien
gaattattaaatgcaactgtgctccaatataga

SEQ ID NO: 735618 - DNA, 33 bp, Homo sapien
gaattattaaatgcaattgtgctccaatataga

SEQ ID NO: 735619 - DNA, 33 bp, Homo sapien
gtataactgcaatgtcaatcagctttaattcaa

SEQ ID NO: 735620 - DNA, 33 bp, Homo sapien
gtataactgcaatgtcgatcagctttaattcaa

SEQ ID NO: 735621 - DNA, 33 bp, Homo sapien
ctgaccttgaggagtacaggtagtgaggagggc

SEQ ID NO: 735622 - DNA, 33 bp, Homo sapien
ctgaccttgaggagtagaggtagtgaggagggc

SEQ ID NO: 735623 - DNA, 33 bp, Homo sapien
aggctgaaactgtgtcaccacttgtgaggtaaa

SEQ ID NO: 735624 - DNA, 33 bp, Homo sapien
aggctgaaactgtgtctccacttgtgaggtaaa

SEQ ID NO: 735625 - DNA, 33 bp, Homo sapien
gaaaataagggtgataatatatgtcacagtcca

SEQ ID NO: 735626 - DNA, 33 bp, Homo sapien
gaaaataagggtgatagtatatgtcacagtcca

SEQ ID NO: 735627 - DNA, 33 bp, Homo sapien
aatctactttgttaaacgtgttctgcgcctcaa

SEQ ID NO: 735628 - DNA, 33 bp, Homo sapien
aatctactttgttaaatgtgttctgcgcctcaa

SEQ ID NO: 735629 - DNA, 33 bp, Homo sapien
gatcaaggtcagaggtaaatatgcgtgtctgct

SEQ ID NO: 735630 - DNA, 33 bp, Homo sapien
gatcaaggtcagaggtgaatatgcgtgtctgct

SEQ ID NO: 735631 - DNA, 33 bp, Homo sapien
cgggacgcaccttgaaggacttggtggtgtccc

SEQ ID NO: 735632 - DNA, 33 bp, Homo sapien
cgggacgcaccttgaatgacttggtggtgtccc

SEQ ID NO: 735633 - DNA, 33 bp, Homo sapien
aactctccaagtgtcaaggagaacggttgcgag

SEQ ID NO: 735634 - DNA, 33 bp, Homo sapien
aactctccaagtgtcatggagaacggttgcgag

SEQ ID NO: 735635 - DNA, 33 bp, Homo sapien
ttaaattggcaataaactgtatctgttttagtc

SEQ ID NO: 735636 - DNA, 33 bp, Homo sapien
ttaaattggcaataaattgtatctgttttagtc

SEQ ID NO: 735637 - DNA, 33 bp, Homo sapien
ttatcaattgtgtttacgactcgatttagttac

SEQ ID NO: 735638 - DNA, 33 bp, Homo sapien
ttatcaattgtgtttatgactcgatttagttac

SEQ ID NO: 735639 - DNA, 33 bp, Homo sapien
cattatttagtctttcccttaaagtcctccttg

SEQ ID NO: 735640 - DNA, 33 bp, Homo sapien
cattatttagtctttctcttaaagtcctccttg

SEQ ID NO: 735641 - DNA, 33 bp, Homo sapien
caataaaactctgactaaaaaagagtacttgtg

SEQ ID NO: 735642 - DNA, 33 bp, Homo sapien
caataaaactctgactgaaaaagagtacttgtg

SEQ ID NO: 735643 - DNA, 33 bp, Homo sapien
ttgacaaacaaagggagagataaaactggagat

SEQ ID NO: 735644 - DNA, 33 bp, Homo sapien
ttgacaaacaaagggatagataaaactggagat

SEQ ID NO: 735645 - DNA, 33 bp, Homo sapien
ttactgcaaggcagcacattctctcttatccac

SEQ ID NO: 735646 - DNA, 33 bp, Homo sapien
ttactgcaaggcagcatattctctcttatccac

SEQ ID NO: 735647 - DNA, 33 bp, Homo sapien
accaagaatttcacttcaaaactggccagctgc

SEQ ID NO: 735648 - DNA, 33 bp, Homo sapien
accaagaatttcacttgaaaactggccagctgc

SEQ ID NO: 735649 - DNA, 33 bp, Homo sapien
attcacattatattcccgatttggcttgttctg

SEQ ID NO: 735650 - DNA, 33 bp, Homo sapien
attcacattatattcctgatttggcttgttctg

SEQ ID NO: 735651 - DNA, 33 bp, Homo sapien
tgaaacatggctttaccggtacaatcctggaaa

SEQ ID NO: 735652 - DNA, 33 bp, Homo sapien
tgaaacatggctttactggtacaatcctggaaa

SEQ ID NO: 735653 - DNA, 33 bp, Homo sapien
atctggattggaaaaaagttagagtcaagtaaa

SEQ ID NO: 735654 - DNA, 33 bp, Homo sapien
atctggattggaaaaatgttagagtcaagtaaa

SEQ ID NO: 735655 - DNA, 33 bp, Homo sapien
gattttctattttctacactatggctctaatct

SEQ ID NO: 735656 - DNA, 33 bp, Homo sapien
gattttctattttctagactatggctctaatct

SEQ ID NO: 735657 - DNA, 33 bp, Homo sapien
gatgtgtaaattcatacagacagttgtacagtg

SEQ ID NO: 735658 - DNA, 33 bp, Homo sapien
gatgtgtaaattcatagagacagttgtacagtg

SEQ ID NO: 735659 - DNA, 33 bp, Homo sapien
tctctttctctcatcaaatttcatgactatttc

SEQ ID NO: 735660 - DNA, 33 bp, Homo sapien
tctctttctctcatcagatttcatgactatttc

SEQ ID NO: 735661 - DNA, 33 bp, Homo sapien
taaaaaaaatttgatgaatctccataaaagcaa

SEQ ID NO: 735662 - DNA, 33 bp, Homo sapien
taaaaaaaatttgatgcatctccataaaagcaa

SEQ ID NO: 735663 - DNA, 33 bp, Homo sapien
taataggagcatgtaactggccaattaagccat

SEQ ID NO: 735664 - DNA, 33 bp, Homo sapien
taataggagcatgtaagtggccaattaagccat

SEQ ID NO: 735665 - DNA, 33 bp, Homo sapien
attatgattatgctgacgaatttttcttggtct

SEQ ID NO: 735666 - DNA, 33 bp, Homo sapien
attatgattatgctgatgaatttttcttggtct

SEQ ID NO: 735667 - DNA, 33 bp, Homo sapien
tcagaagatactgcaacgcaatttacacgttga

SEQ ID NO: 735668 - DNA, 33 bp, Homo sapien
tcagaagatactgcaatgcaatttacacgttga

SEQ ID NO: 735669 - DNA, 33 bp, Homo sapien
tataatcatatttcacacattacaaagtcccga

SEQ ID NO: 735670 - DNA, 33 bp, Homo sapien
tataatcatatttcactcattacaaagtcccga

SEQ ID NO: 735671 - DNA, 33 bp, Homo sapien
atgaagtaaacctgcagagtgtcaagtactcct

SEQ ID NO: 735672 - DNA, 33 bp, Homo sapien
atgaagtaaacctgcatagtgtcaagtactcct

SEQ ID NO: 735673 - DNA, 33 bp, Homo sapien
tgtcttctgaatcttaagtgagtgtagctaatt

SEQ ID NO: 735674 - DNA, 33 bp, Homo sapien
tgtcttctgaatcttaggtgagtgtagctaatt

SEQ ID NO: 735675 - DNA, 33 bp, Homo sapien
gggagtatttagcccacgaaaatcagcaaatgc

SEQ ID NO: 735676 - DNA, 33 bp, Homo sapien
gggagtatttagcccatgaaaatcagcaaatgc

SEQ ID NO: 735677 - DNA, 33 bp, Homo sapien
ctattaatccacataccggtgttttgcctgaaa

SEQ ID NO: 735678 - DNA, 33 bp, Homo sapien
ctattaatccacatactggtgttttgcctgaaa

SEQ ID NO: 735679 - DNA, 33 bp, Homo sapien
ttcaactcagaagtaacgctaattgggaaaaag

SEQ ID NO: 735680 - DNA, 33 bp, Homo sapien
ttcaactcagaagtaatgctaattgggaaaaag

SEQ ID NO: 735681 - DNA, 33 bp, Homo sapien
acaaattatgtccaaaccacttacgtagttggc

SEQ ID NO: 735682 - DNA, 33 bp, Homo sapien
acaaattatgtccaaagcacttacgtagttggc

SEQ ID NO: 735683 - DNA, 33 bp, Homo sapien
tcctcaaaacttgaaaataaggctagtgaggtt

SEQ ID NO: 735684 - DNA, 33 bp, Homo sapien
tcctcaaaacttgaaagtaaggctagtgaggtt

SEQ ID NO: 735685 - DNA, 33 bp, Homo sapien
gtgggcaggggagtgcaaatgccaggatgccat

SEQ ID NO: 735686 - DNA, 33 bp, Homo sapien
gtgggcaggggagtgcgaatgccaggatgccat

SEQ ID NO: 735687 - DNA, 33 bp, Homo sapien
cataataccgaggcaaacaatacatagatactt

SEQ ID NO: 735688 - DNA, 33 bp, Homo sapien
cataataccgaggcaagcaatacatagatactt

SEQ ID NO: 735689 - DNA, 33 bp, Homo sapien
tatgcaagtggcattacgttgttattttcaaac

SEQ ID NO: 735690 - DNA, 33 bp, Homo sapien
tatgcaagtggcattatgttgttattttcaaac

SEQ ID NO: 735691 - DNA, 33 bp, Homo sapien
tattaaaagacagaaaagacaaactatacactg

SEQ ID NO: 735692 - DNA, 33 bp, Homo sapien
tattaaaagacagaaaggacaaactatacactg

SEQ ID NO: 735693 - DNA, 33 bp, Homo sapien
ggtcctaaaattcaacaaagcagtctcctgagg

SEQ ID NO: 735694 - DNA, 33 bp, Homo sapien
ggtcctaaaattcaaccaagcagtctcctgagg

SEQ ID NO: 735695 - DNA, 33 bp, Homo sapien
gatatagaaaaataaccaaaatgatgcgatttg

SEQ ID NO: 735696 - DNA, 33 bp, Homo sapien
gatatagaaaaataacgaaaatgatgcgatttg

SEQ ID NO: 735697 - DNA, 33 bp, Homo sapien
acactgtgttaggtaacagggataaaaagagag

SEQ ID NO: 735698 - DNA, 33 bp, Homo sapien
acactgtgttaggtaatagggataaaaagagag

SEQ ID NO: 735699 - DNA, 33 bp, Homo sapien
ccagtctacctttatcagaatttaggttgattc

SEQ ID NO: 735700 - DNA, 33 bp, Homo sapien
ccagtctacctttatcggaatttaggttgattc

SEQ ID NO: 735701 - DNA, 33 bp, Homo sapien
tagtgtcatacaatgaaaataaaatgaaggcag

SEQ ID NO: 735702 - DNA, 33 bp, Homo sapien
tagtgtcatacaatgagaataaaatgaaggcag

SEQ ID NO: 735703 - DNA, 33 bp, Homo sapien
taagatttaactcagcaaaattagagatgaggg

SEQ ID NO: 735704 - DNA, 33 bp, Homo sapien
taagatttaactcagcgaaattagagatgaggg

SEQ ID NO: 735705 - DNA, 33 bp, Homo sapien
tatgctagcctctggaaatacaaaggaaagagg

SEQ ID NO: 735706 - DNA, 33 bp, Homo sapien
tatgctagcctctggagatacaaaggaaagagg

SEQ ID NO: 735707 - DNA, 33 bp, Homo sapien
cttgttgctttctatacgtttccatagtacttt

SEQ ID NO: 735708 - DNA, 33 bp, Homo sapien
cttgttgctttctatatgtttccatagtacttt

SEQ ID NO: 735709 - DNA, 33 bp, Homo sapien
atccctctagggaactcagaaaaaacagtgtaa

SEQ ID NO: 735710 - DNA, 33 bp, Homo sapien
atccctctagggaactgagaaaaaacagtgtaa

SEQ ID NO: 735711 - DNA, 33 bp, Homo sapien
atattatggaaatctgcacacaagtataggaag

SEQ ID NO: 735712 - DNA, 33 bp, Homo sapien
atattatggaaatctggacacaagtataggaag

SEQ ID NO: 735713 - DNA, 33 bp, Homo sapien
gtgttcatgtgtatgcaatcgagataactattt

SEQ ID NO: 735714 - DNA, 33 bp, Homo sapien
gtgttcatgtgtatgcgatcgagataactattt

SEQ ID NO: 735715 - DNA, 33 bp, Homo sapien
ttgattagaatggtcaacgtcatgcaggcacat

SEQ ID NO: 735716 - DNA, 33 bp, Homo sapien
ttgattagaatggtcaccgtcatgcaggcacat

SEQ ID NO: 735717 - DNA, 33 bp, Homo sapien
gattacgcaattgagaataatgttggaaatgca

SEQ ID NO: 735718 - DNA, 33 bp, Homo sapien
gattacgcaattgagagtaatgttggaaatgca

SEQ ID NO: 735719 - DNA, 33 bp, Homo sapien
catatttgcagcttaaaaagtatttggctttta

SEQ ID NO: 735720 - DNA, 33 bp, Homo sapien
catatttgcagcttaagaagtatttggctttta

SEQ ID NO: 735721 - DNA, 33 bp, Homo sapien
agaggtgaaggtatcccaaagataatgctggtc

SEQ ID NO: 735722 - DNA, 33 bp, Homo sapien
agaggtgaaggtatcctaaagataatgctggtc

SEQ ID NO: 735723 - DNA, 33 bp, Homo sapien
accagtcactagagaaaatttctttaaccttca

SEQ ID NO: 735724 - DNA, 33 bp, Homo sapien
accagtcactagagaagatttctttaaccttca

SEQ ID NO: 735725 - DNA, 33 bp, Homo sapien
taatcatttatgtagacatttaagctaagtgta

SEQ ID NO: 735726 - DNA, 33 bp, Homo sapien
taatcatttatgtagatatttaagctaagtgta

SEQ ID NO: 735727 - DNA, 33 bp, Homo sapien
gagtaaggacaatgacaattgaatgactcacat

SEQ ID NO: 735728 - DNA, 33 bp, Homo sapien
gagtaaggacaatgactattgaatgactcacat

SEQ ID NO: 735729 - DNA, 33 bp, Homo sapien
atcactgaggactcaactgtcttaaaataatct

SEQ ID NO: 735730 - DNA, 33 bp, Homo sapien
atcactgaggactcaagtgtcttaaaataatct

SEQ ID NO: 735731 - DNA, 33 bp, Homo sapien
aaaactccctgacaaaatgagaatggccactga

SEQ ID NO: 735732 - DNA, 33 bp, Homo sapien
aaaactccctgacaaattgagaatggccactga

SEQ ID NO: 735733 - DNA, 33 bp, Homo sapien
ttgcagatcattctaaaagctcatcagcctaaa

SEQ ID NO: 735734 - DNA, 33 bp, Homo sapien
ttgcagatcattctaacagctcatcagcctaaa

SEQ ID NO: 735735 - DNA, 33 bp, Homo sapien
tttttatagatttaggcatagtgcagttgtttt

SEQ ID NO: 735736 - DNA, 33 bp, Homo sapien
tttttatagatttagggatagtgcagttgtttt

SEQ ID NO: 735737 - DNA, 33 bp, Homo sapien
gaaaccaaaatggtcacatcagtttaacaagga

SEQ ID NO: 735738 - DNA, 33 bp, Homo sapien
gaaaccaaaatggtcatatcagtttaacaagga

SEQ ID NO: 735739 - DNA, 33 bp, Homo sapien
cacctctacactgataccaggcaattatttttt

SEQ ID NO: 735740 - DNA, 33 bp, Homo sapien
cacctctacactgatagcaggcaattatttttt

SEQ ID NO: 735741 - DNA, 33 bp, Homo sapien
aaatcttcttaggccacatgtttagtcaaaata

SEQ ID NO: 735742 - DNA, 33 bp, Homo sapien
aaatcttcttaggccatatgtttagtcaaaata

SEQ ID NO: 735743 - DNA, 33 bp, Homo sapien
taaaggtctgaattgacagagtatgagtgggaa

SEQ ID NO: 735744 - DNA, 33 bp, Homo sapien
taaaggtctgaattgagagagtatgagtgggaa

SEQ ID NO: 735745 - DNA, 33 bp, Homo sapien
tcagctggcttagacgcatcaggctagataggt

SEQ ID NO: 735746 - DNA, 33 bp, Homo sapien
tcagctggcttagacggatcaggctagataggt

SEQ ID NO: 735747 - DNA, 33 bp, Homo sapien
atatagctgctgaataaatacatgaatgaagag

SEQ ID NO: 735748 - DNA, 33 bp, Homo sapien
atatagctgctgaatagatacatgaatgaagag

SEQ ID NO: 735749 - DNA, 33 bp, Homo sapien
agggaggaaacatttacccactggctctcatcc

SEQ ID NO: 735750 - DNA, 33 bp, Homo sapien
agggaggaaacatttatccactggctctcatcc

SEQ ID NO: 735751 - DNA, 33 bp, Homo sapien
agttacaaagggggaaatcgaaacagctgcatc

SEQ ID NO: 735752 - DNA, 33 bp, Homo sapien
agttacaaagggggaagtcgaaacagctgcatc

SEQ ID NO: 735753 - DNA, 33 bp, Homo sapien
atttaactcctctgtcaaaagctaattctagtt

SEQ ID NO: 735754 - DNA, 33 bp, Homo sapien
atttaactcctctgtcgaaagctaattctagtt

SEQ ID NO: 735755 - DNA, 33 bp, Homo sapien
gatacttacagtaacacctacattaatttctaa

SEQ ID NO: 735756 - DNA, 33 bp, Homo sapien
gatacttacagtaacatctacattaatttctaa

SEQ ID NO: 735757 - DNA, 33 bp, Homo sapien
aggcctgtcctccctaaccgtgacagatataat

SEQ ID NO: 735758 - DNA, 33 bp, Homo sapien
aggcctgtcctccctacccgtgacagatataat

SEQ ID NO: 735759 - DNA, 33 bp, Homo sapien
ctagctaagaaattgaaattatctgtactaaat

SEQ ID NO: 735760 - DNA, 33 bp, Homo sapien
ctagctaagaaattgagattatctgtactaaat

SEQ ID NO: 735761 - DNA, 33 bp, Homo sapien
ggactaccttgggggcagatatgtccagcaggc

SEQ ID NO: 735762 - DNA, 33 bp, Homo sapien
ggactaccttgggggcggatatgtccagcaggc

SEQ ID NO: 735763 - DNA, 33 bp, Homo sapien
ccttcactggttgtataaaaaaactgtagagtg

SEQ ID NO: 735764 - DNA, 33 bp, Homo sapien
ccttcactggttgtattaaaaaactgtagagtg

SEQ ID NO: 735765 - DNA, 33 bp, Homo sapien; identical to SEQ ID NO: 735763

SEQ ID NO: 735766 - DNA, 33 bp, Homo sapien; identical to SEQ ID NO: 735764

SEQ ID NO: 735767 - DNA, 33 bp, Homo sapien
tgagtttaagatttagcattccaatgtgatagc

SEQ ID NO: 735768 - DNA, 33 bp, Homo sapien
tgagtttaagatttagtattccaatgtgatagc

SEQ ID NO: 735769 - DNA, 33 bp, Homo sapien
taaacagaagccataactaactcctatgcttac

SEQ ID NO: 735770 - DNA, 33 bp, Homo sapien
taaacagaagccataattaactcctatgcttac

SEQ ID NO: 735771 - DNA, 33 bp, Homo sapien
ctagaaggcttgggtacaaacctcagttccatt

SEQ ID NO: 735772 - DNA, 33 bp, Homo sapien
ctagaaggcttgggtataaacctcagttccatt

SEQ ID NO: 735773 - DNA, 33 bp, Homo sapien
gtcagaactataacagaaacaggaaaattgcca

SEQ ID NO: 735774 - DNA, 33 bp, Homo sapien
gtcagaactataacaggaacaggaaaattgcca

SEQ ID NO: 735775 - DNA, 33 bp, Homo sapien
ggagactgaaataacaaacttgttttgagactg

SEQ ID NO: 735776 - DNA, 33 bp, Homo sapien
ggagactgaaataacatacttgttttgagactg

SEQ ID NO: 735777 - DNA, 33 bp, Homo sapien
cctcagtgaaatagaaagattgcaagctgtaca

SEQ ID NO: 735778 - DNA, 33 bp, Homo sapien
cctcagtgaaatagaaggattgcaagctgtaca

SEQ ID NO: 735779 - DNA, 33 bp, Homo sapien
agatatcccaaatgtacggctgcatcactatgg

SEQ ID NO: 735780 - DNA, 33 bp, Homo sapien
agatatcccaaatgtatggctgcatcactatgg

SEQ ID NO: 735781 - DNA, 33 bp, Homo sapien
agaatcctaaggcatcaaaacaatagaacactt

SEQ ID NO: 735782 - DNA, 33 bp, Homo sapien
agaatcctaaggcatctaaacaatagaacactt

SEQ ID NO: 735783 - DNA, 33 bp, Homo sapien
actatatggaccaaaaaaatgtataaagtgcag

SEQ ID NO: 735784 - DNA, 33 bp, Homo sapien
actatatggaccaaaagaatgtataaagtgcag

SEQ ID NO: 735785 - DNA, 33 bp, Homo sapien
ggagatgcttaggtcacaaggatggaacgctca

SEQ ID NO: 735786 - DNA, 33 bp, Homo sapien
ggagatgcttaggtcataaggatggaacgctca

SEQ ID NO: 735787 - DNA, 33 bp, Homo sapien
cacaacagtttacgccaaccatctgtgtctgca

SEQ ID NO: 735788 - DNA, 33 bp, Homo sapien
cacaacagtttacgccgaccatctgtgtctgca

SEQ ID NO: 735789 - DNA, 33 bp, Homo sapien
ttgctcttcagagtgacgctgtatcagcaacac

SEQ ID NO: 735790 - DNA, 33 bp, Homo sapien
ttgctcttcagagtgaggctgtatcagcaacac

SEQ ID NO: 735791 - DNA, 33 bp, Homo sapien
taaaagttcaagatgacagaatattagaagtgt

SEQ ID NO: 735792 - DNA, 33 bp, Homo sapien
taaaagttcaagatgatagaatattagaagtgt

SEQ ID NO: 735793 - DNA, 33 bp, Homo sapien
taacttagcacctagcccacctggaaggaagaa

SEQ ID NO: 735794 - DNA, 33 bp, Homo sapien
taacttagcacctagcgcacctggaaggaagaa

SEQ ID NO: 735795 - DNA, 33 bp, Homo sapien
tacaattgttaagtacaagtgtctctggtacat

SEQ ID NO: 735796 - DNA, 33 bp, Homo sapien
tacaattgttaagtactagtgtctctggtacat

SEQ ID NO: 735797 - DNA, 33 bp, Homo sapien
taataggtgcttaatgaatgaaaagtaattcaa

SEQ ID NO: 735798 - DNA, 33 bp, Homo sapien
taataggtgcttaatggatgaaaagtaattcaa

SEQ ID NO: 735799 - DNA, 33 bp, Homo sapien
aaaactattcctgttcacagataacatgatcct

SEQ ID NO: 735800 - DNA, 33 bp, Homo sapien
aaaactattcctgttcgcagataacatgatcct

SEQ ID NO: 735801 - DNA, 33 bp, Homo sapien
acagtatcgattaatacgtgttggataaggtgc

SEQ ID NO: 735802 - DNA, 33 bp, Homo sapien
acagtatcgattaatatgtgttggataaggtgc

SEQ ID NO: 735803 - DNA, 33 bp, Homo sapien
gcttctgctctttggacagatagactctttctc

SEQ ID NO: 735804 - DNA, 33 bp, Homo sapien
gcttctgctctttggatagatagactctttctc

SEQ ID NO: 735805 - DNA, 33 bp, Homo sapien
ttataacaccaaatgagagttggcaacaaggct

SEQ ID NO: 735806 - DNA, 33 bp, Homo sapien
ttataacaccaaatgatagttggcaacaaggct

SEQ ID NO: 735807 - DNA, 33 bp, Homo sapien
gggggaacaaacaaaacgagtaggttaataggt

SEQ ID NO: 735808 - DNA, 33 bp, Homo sapien
gggggaacaaacaaaatgagtaggttaataggt

SEQ ID NO: 735809 - DNA, 33 bp, Homo sapien
ctgactcatcaggcaccgccttccatgtttgct

SEQ ID NO: 735810 - DNA, 33 bp, Homo sapien
ctgactcatcaggcactgccttccatgtttgct

SEQ ID NO: 735811 - DNA, 33 bp, Homo sapien
ttggatggtaaactggccacgtgtttgaggccc

SEQ ID NO: 735812 - DNA, 33 bp, Homo sapien
ttggatggtaaactgggcacgtgtttgaggccc

SEQ ID NO: 735813 - DNA, 33 bp, Homo sapien
atcatcctcaagtaaagagtcatacaaagtata

SEQ ID NO: 735814 - DNA, 33 bp, Homo sapien
atcatcctcaagtaaatagtcatacaaagtata

SEQ ID NO: 735815 - DNA, 33 bp, Homo sapien
gctcaaggatgtatgcacttaacaaaagactcc

SEQ ID NO: 735816 - DNA, 33 bp, Homo sapien
gctcaaggatgtatgcccttaacaaaagactcc

SEQ ID NO: 735817 - DNA, 33 bp, Homo sapien
ccaatatcaataaggcacctctataacagcaga

SEQ ID NO: 735818 - DNA, 33 bp, Homo sapien
ccaatatcaataaggctcctctataacagcaga

SEQ ID NO: 735819 - DNA, 33 bp, Homo sapien
cctttaatgggctcatcaacagactagacacag

SEQ ID NO: 735820 - DNA, 33 bp, Homo sapien
cctttaatgggctcatgaacagactagacacag

SEQ ID NO: 735821 - DNA, 33 bp, Homo sapien
atacacataatggaaacgccagaaggacaagaa

SEQ ID NO: 735822 - DNA, 33 bp, Homo sapien
atacacataatggaaatgccagaaggacaagaa

SEQ ID NO: 735823 - DNA, 33 bp, Homo sapien
ttttatgtgagaaaccaagacttaggaagttat

SEQ ID NO: 735824 - DNA, 33 bp, Homo sapien
ttttatgtgagaaaccgagacttaggaagttat

SEQ ID NO: 735825 - DNA, 33 bp, Homo sapien
gaggtttggctcagaccagggctagtaatttgc

SEQ ID NO: 735826 - DNA, 33 bp, Homo sapien
gaggtttggctcagactagggctagtaatttgc

SEQ ID NO: 735827 - DNA, 33 bp, Homo sapien
ctgattttttcctctaacctaatgagtgtcagc

SEQ ID NO: 735828 - DNA, 33 bp, Homo sapien
ctgattttttcctctaccctaatgagtgtcagc

SEQ ID NO: 735829 - DNA, 33 bp, Homo sapien
tagaaaggatgcaaacaaacagctagatgaaga

SEQ ID NO: 735830 - DNA, 33 bp, Homo sapien
tagaaaggatgcaaacgaacagctagatgaaga

SEQ ID NO: 735831 - DNA, 33 bp, Homo sapien
cctggtaatgaactgcacataataccaacagca

SEQ ID NO: 735832 - DNA, 33 bp, Homo sapien
cctggtaatgaactgcgcataataccaacagca

SEQ ID NO: 735833 - DNA, 33 bp, Homo sapien
ctggaattgcatattcccaaaagaaaagactct

SEQ ID NO: 735834 - DNA, 33 bp, Homo sapien
ctggaattgcatattctcaaaagaaaagactct

SEQ ID NO: 735835 - DNA, 33 bp, Homo sapien
aaaaatggatagacaacgtggaaaagtgcattg

SEQ ID NO: 735836 - DNA, 33 bp, Homo sapien
aaaaatggatagacaaggtggaaaagtgcattg

SEQ ID NO: 735837 - DNA, 33 bp, Homo sapien
tgtttttaggtgaaaacactgagacacagtgag

SEQ ID NO: 735838 - DNA, 33 bp, Homo sapien
tgtttttaggtgaaaatactgagacacagtgag

SEQ ID NO: 735839 - DNA, 33 bp, Homo sapien
cagtaaattcattgatgaaataactcagacaat

SEQ ID NO: 735840 - DNA, 33 bp, Homo sapien
cagtaaattcattgattaaataactcagacaat

SEQ ID NO: 735841 - DNA, 33 bp, Homo sapien
ttacatacaaagtgaaagggaaattagagtaat

SEQ ID NO: 735842 - DNA, 33 bp, Homo sapien
ttacatacaaagtgaaggggaaattagagtaat

SEQ ID NO: 735843 - DNA, 33 bp, Homo sapien
ctcacagcaagattaaaataaaggcacagtgga

SEQ ID NO: 735844 - DNA, 33 bp, Homo sapien
ctcacagcaagattaacataaaggcacagtgga

SEQ ID NO: 735845 - DNA, 33 bp, Homo sapien
acaatataaaaatccaacatccaaattgcagaa

SEQ ID NO: 735846 - DNA, 33 bp, Homo sapien
acaatataaaaatccagcatccaaattgcagaa

SEQ ID NO: 735847 - DNA, 33 bp, Homo sapien
ttagaccaaagtcaacagttctgccaattttgt

SEQ ID NO: 735848 - DNA, 33 bp, Homo sapien
ttagaccaaagtcaaccgttctgccaattttgt

SEQ ID NO: 735849 - DNA, 33 bp, Homo sapien
ttagtactagacaaaaagatgacccttagagtt

SEQ ID NO: 735850 - DNA, 33 bp, Homo sapien
ttagtactagacaaaaggatgacccttagagtt

SEQ ID NO: 735851 - DNA, 33 bp, Homo sapien
acaaccatatacctacaacaagatgatcttgag

SEQ ID NO: 735852 - DNA, 33 bp, Homo sapien
acaaccatatacctaccacaagatgatcttgag

SEQ ID NO: 735853 - DNA, 33 bp, Homo sapien
tcctgattatatccaacatgacaaatcaaaacc

SEQ ID NO: 735854 - DNA, 33 bp, Homo sapien
tcctgattatatccaatatgacaaatcaaaacc

SEQ ID NO: 735855 - DNA, 33 bp, Homo sapien
accctcaaatgatgaacagtgacaaccatcaat

SEQ ID NO: 735856 - DNA, 33 bp, Homo sapien
accctcaaatgatgaagagtgacaaccatcaat

SEQ ID NO: 735857 - DNA, 33 bp, Homo sapien
agtgaaaatgcttctacgctttggctaatcata

SEQ ID NO: 735858 - DNA, 33 bp, Homo sapien
agtgaaaatgcttctatgctttggctaatcata

SEQ ID NO: 735859 - DNA, 33 bp, Homo sapien
ctcgtgtttgttaaacagagtctcggatccaag

SEQ ID NO: 735860 - DNA, 33 bp, Homo sapien
ctcgtgtttgttaaaccgagtctcggatccaag

SEQ ID NO: 735861 - DNA, 33 bp, Homo sapien
tatatttaaatatgcaaactaaagaagcagctc

SEQ ID NO: 735862 - DNA, 33 bp, Homo sapien
tatatttaaatatgcagactaaagaagcagctc

SEQ ID NO: 735863 - DNA, 33 bp, Homo sapien
gttcaatattgaatacacacactatggaattga

SEQ ID NO: 735864 - DNA, 33 bp, Homo sapien
gttcaatattgaatacgcacactatggaattga

SEQ ID NO: 735865 - DNA, 33 bp, Homo sapien
acagtgcacaaatagggatcaaggctggcaggc

SEQ ID NO: 735866 - DNA, 33 bp, Homo sapien
acagtgcacaaataggtatcaaggctggcaggc

SEQ ID NO: 735867 - DNA, 33 bp, Homo sapien
tacctcagcttgtatacagaaggaaaatacatg

SEQ ID NO: 735868 - DNA, 33 bp, Homo sapien
tacctcagcttgtatatagaaggaaaatacatg

SEQ ID NO: 735869 - DNA, 33 bp, Homo sapien
tctatgcacatacacacaccactttatggtaca

SEQ ID NO: 735870 - DNA, 33 bp, Homo sapien
tctatgcacatacacataccactttatggtaca

SEQ ID NO: 735871 - DNA, 33 bp, Homo sapien
gctggctgactttccaaaaaccatttaggaagt

SEQ ID NO: 735872 - DNA, 33 bp, Homo sapien
gctggctgactttccacaaaccatttaggaagt

SEQ ID NO: 735873 - DNA, 33 bp, Homo sapien
gcccagcctgggactacgtatttaactgttcct

SEQ ID NO: 735874 - DNA, 33 bp, Homo sapien
gcccagcctgggactatgtatttaactgttcct

SEQ ID NO: 735875 - DNA, 33 bp, Homo sapien
accgatacccttgcaaacagaaatgacagattc

SEQ ID NO: 735876 - DNA, 33 bp, Homo sapien
accgatacccttgcaagcagaaatgacagattc

SEQ ID NO: 735877 - DNA, 33 bp, Homo sapien
ttcttccctctcctaaaaactctgcttcccact

SEQ ID NO: 735878 - DNA, 33 bp, Homo sapien
ttcttccctctcctaacaactctgcttcccact

SEQ ID NO: 735879 - DNA, 33 bp, Homo sapien
taattcattcaaaatccacacaactccaaaacc

SEQ ID NO: 735880 - DNA, 33 bp, Homo sapien
taattcattcaaaatctacacaactccaaaacc

SEQ ID NO: 735881 - DNA, 33 bp, Homo sapien
agcctccccagaactgaagaaatgtgcagataa

SEQ ID NO: 735882 - DNA, 33 bp, Homo sapien
agcctccccagaactggagaaatgtgcagataa

SEQ ID NO: 735883 - DNA, 33 bp, Homo sapien
aatttaaaagtccactaaaatcacattatgaac

SEQ ID NO: 735884 - DNA, 33 bp, Homo sapien
aatttaaaagtccactgaaatcacattatgaac

SEQ ID NO: 735885 - DNA, 33 bp, Homo sapien
caattcaagtggtaaacggtctataagtgtcaa

SEQ ID NO: 735886 - DNA, 33 bp, Homo sapien
caattcaagtggtaaatggtctataagtgtcaa

SEQ ID NO: 735887 - DNA, 33 bp, Homo sapien
aatcctcttctgctaagaacttttttttttgag

SEQ ID NO: 735888 - DNA, 33 bp, Homo sapien
aatcctcttctgctaataacttttttttttgag

SEQ ID NO: 735889 - DNA, 33 bp, Homo sapien
gtaaaatattctgctcaaatggtttagaaaaat

SEQ ID NO: 735890 - DNA, 33 bp, Homo sapien
gtaaaatattctgctcgaatggtttagaaaaat

SEQ ID NO: 735891 - DNA, 33 bp, Homo sapien
tgactggatatgaaatcattcaccagatggatg

SEQ ID NO: 735892 - DNA, 33 bp, Homo sapien
tgactggatatgaaatgattcaccagatggatg

SEQ ID NO: 735893 - DNA, 33 bp, Homo sapien
tgatggtagtaggagacgggacctttgggcagc

SEQ ID NO: 735894 - DNA, 33 bp, Homo sapien
tgatggtagtaggagatgggacctttgggcagc

SEQ ID NO: 735895 - DNA, 33 bp, Homo sapien
atacctactctcctaacgccttataagcagtgc

SEQ ID NO: 735896 - DNA, 33 bp, Homo sapien
atacctactctcctaatgccttataagcagtgc

SEQ ID NO: 735897 - DNA, 33 bp, Homo sapien
ggcagtgctagctgggaatggagttctgttctg

SEQ ID NO: 735898 - DNA, 33 bp, Homo sapien
ggcagtgctagctggggatggagttctgttctg

SEQ ID NO: 735899 - DNA, 33 bp, Homo sapien
acaaagccttgaactcaaagacagctgtgggaa

SEQ ID NO: 735900 - DNA, 33 bp, Homo sapien
acaaagccttgaactcgaagacagctgtgggaa

SEQ ID NO: 735901 - DNA, 33 bp, Homo sapien
ccagcaaggttagaagacaaactgtgaatgctc

SEQ ID NO: 735902 - DNA, 33 bp, Homo sapien
ccagcaaggttagaagtcaaactgtgaatgctc

SEQ ID NO: 735903 - DNA, 33 bp, Homo sapien
ataggacttcataaaacgtaaaatcagggctag

SEQ ID NO: 735904 - DNA, 33 bp, Homo sapien
ataggacttcataaaatgtaaaatcagggctag

SEQ ID NO: 735905 - DNA, 33 bp, Homo sapien
tatgattccacttaacagaaggtgcttagaaga

SEQ ID NO: 735906 - DNA, 33 bp, Homo sapien
tatgattccacttaaccgaaggtgcttagaaga

SEQ ID NO: 735907 - DNA, 33 bp, Homo sapien
caagtatcaaattcaaatgaactacaaccataa

SEQ ID NO: 735908 - DNA, 33 bp, Homo sapien
caagtatcaaattcaagtgaactacaaccataa

SEQ ID NO: 735909 - DNA, 33 bp, Homo sapien
gtggggaaaaggcaacaattccatgtggccatg

SEQ ID NO: 735910 - DNA, 33 bp, Homo sapien
gtggggaaaaggcaacgattccatgtggccatg

SEQ ID NO: 735911 - DNA, 33 bp, Homo sapien
catataacatgaaaaaagtagtaaaactcacat

SEQ ID NO: 735912 - DNA, 33 bp, Homo sapien
catataacatgaaaaaggtagtaaaactcacat

SEQ ID NO: 735913 - DNA, 33 bp, Homo sapien
taggacacagaggagccgatccaaatactctgt

SEQ ID NO: 735914 - DNA, 33 bp, Homo sapien
taggacacagaggagctgatccaaatactctgt

SEQ ID NO: 735915 - DNA, 33 bp, Homo sapien
tccagtgactgtaaaaatggttacctgagaacc

SEQ ID NO: 735916 - DNA, 33 bp, Homo sapien
tccagtgactgtaaaactggttacctgagaacc

SEQ ID NO: 735917 - DNA, 33 bp, Homo sapien
ttatgtgcatgaaataccttacatttttaaggc

SEQ ID NO: 735918 - DNA, 33 bp, Homo sapien
ttatgtgcatgaaatatcttacatttttaaggc

SEQ ID NO: 735919 - DNA, 33 bp, Homo sapien
gacaaagcgaaaaacaaaatttgtgcaagtctg

SEQ ID NO: 735920 - DNA, 33 bp, Homo sapien
gacaaagcgaaaaacacaatttgtgcaagtctg

SEQ ID NO: 735921 - DNA, 33 bp, Homo sapien
taaagctaattccaaacgcaaacataaatcatt

SEQ ID NO: 735922 - DNA, 33 bp, Homo sapien
taaagctaattccaaatgcaaacataaatcatt

SEQ ID NO: 735923 - DNA, 33 bp, Homo sapien
tacttaggattgtggtaaagaaaaggaagtcaa

SEQ ID NO: 735924 - DNA, 33 bp, Homo sapien
tacttaggattgtggtgaagaaaaggaagtcaa

SEQ ID NO: 735925 - DNA, 33 bp, Homo sapien
attcttctgatttaccacaattcaatgtctatg

SEQ ID NO: 735926 - DNA, 33 bp, Homo sapien
attcttctgatttaccgcaattcaatgtctatg

SEQ ID NO: 735927 - DNA, 33 bp, Homo sapien
caactgaggtgcaatcaactaaaatttacttgg

SEQ ID NO: 735928 - DNA, 33 bp, Homo sapien
caactgaggtgcaatcgactaaaatttacttgg

SEQ ID NO: 735929 - DNA, 33 bp, Homo sapien
gaaagaatgaaaaatgaatgagtcttcaaaaag

SEQ ID NO: 735930 - DNA, 33 bp, Homo sapien
gaaagaatgaaaaatggatgagtcttcaaaaag

SEQ ID NO: 735931 - DNA, 33 bp, Homo sapien
acagccattttagagaagtgtacattgttcagt

SEQ ID NO: 735932 - DNA, 33 bp, Homo sapien
acagccattttagagacgtgtacattgttcagt

SEQ ID NO: 735933 - DNA, 33 bp, Homo sapien
tctaagcattaaaatgccaatgtcttggtctct

SEQ ID NO: 735934 - DNA, 33 bp, Homo sapien
tctaagcattaaaatgtcaatgtcttggtctct

SEQ ID NO: 735935 - DNA, 33 bp, Homo sapien
tttgcatcttctcttacggcagttacagctcac

SEQ ID NO: 735936 - DNA, 33 bp, Homo sapien
tttgcatcttctcttatggcagttacagctcac

SEQ ID NO: 735937 - DNA, 33 bp, Homo sapien
atgtacatatccttacaaagacgtagagaatat

SEQ ID NO: 735938 - DNA, 33 bp, Homo sapien
atgtacatatccttacgaagacgtagagaatat

SEQ ID NO: 735939 - DNA, 33 bp, Homo sapien
ctgagaagactccaggaaaaaactatgatatat

SEQ ID NO: 735940 - DNA, 33 bp, Homo sapien
ctgagaagactccagggaaaaactatgatatat

SEQ ID NO: 735941 - DNA, 33 bp, Homo sapien
tacttgtcatttagataaaagagcgctacagtt

SEQ ID NO: 735942 - DNA, 33 bp, Homo sapien
tacttgtcatttagatgaaagagcgctacagtt

SEQ ID NO: 735943 - DNA, 33 bp, Homo sapien
tcatgagagagaatacaactgaggcaaggtaga

SEQ ID NO: 735944 - DNA, 33 bp, Homo sapien
tcatgagagagaatacgactgaggcaaggtaga

SEQ ID NO: 735945 - DNA, 33 bp, Homo sapien
cttcaacaaatcctgtaaatgccttataacatc

SEQ ID NO: 735946 - DNA, 33 bp, Homo sapien
cttcaacaaatcctgttaatgccttataacatc

SEQ ID NO: 735947 - DNA, 33 bp, Homo sapien
gtgtctgggaattccaaggtgaagtcagtacca

SEQ ID NO: 735948 - DNA, 33 bp, Homo sapien
gtgtctgggaattccacggtgaagtcagtacca

SEQ ID NO: 735949 - DNA, 33 bp, Homo sapien
gtatttcattatcagtaaaaaatatgcctacag

SEQ ID NO: 735950 - DNA, 33 bp, Homo sapien
gtatttcattatcagtgaaaaatatgcctacag

SEQ ID NO: 735951 - DNA, 33 bp, Homo sapien
ccaccattttttgaggacagtaatggttatgat

SEQ ID NO: 735952 - DNA, 33 bp, Homo sapien
ccaccattttttgaggccagtaatggttatgat

SEQ ID NO: 735953 - DNA, 33 bp, Homo sapien
ctactgccatccaaaccacttcatatataacag

SEQ ID NO: 735954 - DNA, 33 bp, Homo sapien
ctactgccatccaaactacttcatatataacag

SEQ ID NO: 735955 - DNA, 33 bp, Homo sapien
atggcatcagagaaaaagaatagttgggtatct

SEQ ID NO: 735956 - DNA, 33 bp, Homo sapien
atggcatcagagaaaacgaatagttgggtatct

SEQ ID NO: 735957 - DNA, 33 bp, Homo sapien
acttatgcttccttataacttcagctaagtttc

SEQ ID NO: 735958 - DNA, 33 bp, Homo sapien
acttatgcttccttatgacttcagctaagtttc

SEQ ID NO: 735959 - DNA, 33 bp, Homo sapien
aatttgtctccaaatacgttgagtttgtttggg

SEQ ID NO: 735960 - DNA, 33 bp, Homo sapien
aatttgtctccaaatatgttgagtttgtttggg

SEQ ID NO: 735961 - DNA, 33 bp, Homo sapien
cagcatctggggaagccaagataagaggatcac

SEQ ID NO: 735962 - DNA, 33 bp, Homo sapien
cagcatctggggaagcgaagataagaggatcac

SEQ ID NO: 735963 - DNA, 33 bp, Homo sapien
gaaatttcccatgaagcctgaagacaaagtaat

SEQ ID NO: 735964 - DNA, 33 bp, Homo sapien
gaaatttcccatgaaggctgaagacaaagtaat

SEQ ID NO: 735965 - DNA, 33 bp, Homo sapien
tctgatagagattttacgccagcttgacacaaa

SEQ ID NO: 735966 - DNA, 33 bp, Homo sapien
tctgatagagattttatgccagcttgacacaaa

SEQ ID NO: 735967 - DNA, 33 bp, Homo sapien
attgtacattttaaacaggtgagcattatggtg

SEQ ID NO: 735968 - DNA, 33 bp, Homo sapien
attgtacattttaaacgggtgagcattatggtg

SEQ ID NO: 735969 - DNA, 33 bp, Homo sapien
ttcatcagtacatgaacggataatcaaaatgca

SEQ ID NO: 735970 - DNA, 33 bp, Homo sapien
ttcatcagtacatgaatggataatcaaaatgca

SEQ ID NO: 735971 - DNA, 33 bp, Homo sapien
ttcttcataatctagtaaagtcaggaagttcac

SEQ ID NO: 735972 - DNA, 33 bp, Homo sapien
ttcttcataatctagtgaagtcaggaagttcac

SEQ ID NO: 735973 - DNA, 33 bp, Homo sapien
aagccatataggctacacatcaattttctttta

SEQ ID NO: 735974 - DNA, 33 bp, Homo sapien
aagccatataggctacgcatcaattttctttta

SEQ ID NO: 735975 - DNA, 33 bp, Homo sapien
caggcaacagtaactacgaaccccaattaagta

SEQ ID NO: 735976 - DNA, 33 bp, Homo sapien
caggcaacagtaactatgaaccccaattaagta

SEQ ID NO: 735977 - DNA, 33 bp, Homo sapien
ctaagttctatgtgcacggtgacacggctatcc

SEQ ID NO: 735978 - DNA, 33 bp, Homo sapien
ctaagttctatgtgcatggtgacacggctatcc

SEQ ID NO: 735979 - DNA, 33 bp, Homo sapien
gaaacattgagggaaactgaatattggttgttt

SEQ ID NO: 735980 - DNA, 33 bp, Homo sapien
gaaacattgagggaaattgaatattggttgttt

SEQ ID NO: 735981 - DNA, 33 bp, Homo sapien
tcattcttctatgccaaacttacctcatgagat

SEQ ID NO: 735982 - DNA, 33 bp, Homo sapien
tcattcttctatgccacacttacctcatgagat

SEQ ID NO: 735983 - DNA, 33 bp, Homo sapien
tttaatatcaaatgtgaaataggaaatgtatta

SEQ ID NO: 735984 - DNA, 33 bp, Homo sapien
tttaatatcaaatgtgtaataggaaatgtatta

SEQ ID NO: 735985 - DNA, 33 bp, Homo sapien
attaatgggaaagtatcaggcctacataaccat

SEQ ID NO: 735986 - DNA, 33 bp, Homo sapien
attaatgggaaagtattaggcctacataaccat

SEQ ID NO: 735987 - DNA, 33 bp, Homo sapien
ccatgtctggccttgacatttaagtgtaagatt

SEQ ID NO: 735988 - DNA, 33 bp, Homo sapien
ccatgtctggccttgatatttaagtgtaagatt

SEQ ID NO: 735989 - DNA, 33 bp, Homo sapien
aacatgttcatatagcacattattaagactgct

SEQ ID NO: 735990 - DNA, 33 bp, Homo sapien
aacatgttcatatagcgcattattaagactgct

SEQ ID NO: 735991 - DNA, 33 bp, Homo sapien
ggaagaggtatgtgtacagatgtctatgaatgg

SEQ ID NO: 735992 - DNA, 33 bp, Homo sapien
ggaagaggtatgtgtatagatgtctatgaatgg

SEQ ID NO: 735993 - DNA, 33 bp, Homo sapien
tgttttagtgcctatacgccaaatttatttaga

SEQ ID NO: 735994 - DNA, 33 bp, Homo sapien
tgttttagtgcctatatgccaaatttatttaga

SEQ ID NO: 735995 - DNA, 33 bp, Homo sapien
gcataaccaattccacaactgaactactcgact

SEQ ID NO: 735996 - DNA, 33 bp, Homo sapien
gcataaccaattccacgactgaactactcgact

SEQ ID NO: 735997 - DNA, 33 bp, Homo sapien
caacacataattctacactccatccaaatcact

SEQ ID NO: 735998 - DNA, 33 bp, Homo sapien
caacacataattctacgctccatccaaatcact

SEQ ID NO: 735999 - DNA, 33 bp, Homo sapien
ttgactgacaataaccaacaggatctggcaaaa

SEQ ID NO: 736000 - DNA, 33 bp, Homo sapien
ttgactgacaataacccacaggatctggcaaaa

SEQ ID NO: 736001 - DNA, 33 bp, Homo sapien
attgaaatgagaccaactacagccctacagtgg

SEQ ID NO: 736002 - DNA, 33 bp, Homo sapien
attgaaatgagaccaattacagccctacagtgg

SEQ ID NO: 736003 - DNA, 33 bp, Homo sapien
aaaatttccttctatcaacattaactcgccttt

SEQ ID NO: 736004 - DNA, 33 bp, Homo sapien
aaaatttccttctatcgacattaactcgccttt

SEQ ID NO: 736005 - DNA, 33 bp, Homo sapien
tcatgaggcttatacaaagtaatttatttgaat

SEQ ID NO: 736006 - DNA, 33 bp, Homo sapien
tcatgaggcttatacagagtaatttatttgaat

SEQ ID NO: 736007 - DNA, 33 bp, Homo sapien
gaaaatactgacaaaccgtgcatttgacaaagg

SEQ ID NO: 736008 - DNA, 33 bp, Homo sapien
gaaaatactgacaaactgtgcatttgacaaagg

SEQ ID NO: 736009 - DNA, 33 bp, Homo sapien
accagcaagctgaagacgtaggaaagaactgta

SEQ ID NO: 736010 - DNA, 33 bp, Homo sapien
accagcaagctgaagatgtaggaaagaactgta

SEQ ID NO: 736011 - DNA, 33 bp, Homo sapien
atgagtgaatgagggaaggtttattcataatta

SEQ ID NO: 736012 - DNA, 33 bp, Homo sapien
atgagtgaatgagggacggtttattcataatta

SEQ ID NO: 736013 - DNA, 33 bp, Homo sapien
aacgttgcattaagaaaaaaggaaaagaataat

SEQ ID NO: 736014 - DNA, 33 bp, Homo sapien
aacgttgcattaagaagaaaggaaaagaataat

SEQ ID NO: 736015 - DNA, 33 bp, Homo sapien
tctctctcaccaaaaacgatagcaaagatgtaa

SEQ ID NO: 736016 - DNA, 33 bp, Homo sapien
tctctctcaccaaaaatgatagcaaagatgtaa

SEQ ID NO: 736017 - DNA, 33 bp, Homo sapien
gtcctcctggataaacactataagctatctatt

SEQ ID NO: 736018 - DNA, 33 bp, Homo sapien
gtcctcctggataaacgctataagctatctatt

SEQ ID NO: 736019 - DNA, 33 bp, Homo sapien
tattttaaaacatctacattcaggcaatgcaat

SEQ ID NO: 736020 - DNA, 33 bp, Homo sapien
tattttaaaacatctatattcaggcaatgcaat

SEQ ID NO: 736021 - DNA, 33 bp, Homo sapien
acaacctcatggccttgaaatctaaacaacata

SEQ ID NO: 736022 - DNA, 33 bp, Homo sapien
acaacctcatggcctttaaatctaaacaacata

SEQ ID NO: 736023 - DNA, 33 bp, Homo sapien
ctagccccacttctacaaaacgacatttccaga

SEQ ID NO: 736024 - DNA, 33 bp, Homo sapien
ctagccccacttctacgaaacgacatttccaga

SEQ ID NO: 736025 - DNA, 33 bp, Homo sapien
tattacataagttggcaatgcagtatttaaatt

SEQ ID NO: 736026 - DNA, 33 bp, Homo sapien
tattacataagttggcgatgcagtatttaaatt

SEQ ID NO: 736027 - DNA, 33 bp, Homo sapien
ctagtttttattgttaaacactgactttattct

SEQ ID NO: 736028 - DNA, 33 bp, Homo sapien
ctagtttttattgttagacactgactttattct

SEQ ID NO: 736029 - DNA, 33 bp, Homo sapien
tcaaatggaatgttcaaactgatcactagatcc

SEQ ID NO: 736030 - DNA, 33 bp, Homo sapien
tcaaatggaatgttcagactgatcactagatcc

SEQ ID NO: 736031 - DNA, 33 bp, Homo sapien; identical to SEQ ID NO: 736029

SEQ ID NO: 736032 - DNA, 33 bp, Homo sapien; identical to SEQ ID NO: 736030

SEQ ID NO: 736033 - DNA, 33 bp, Homo sapien
tgtgactctacaaccaacagaaggagtcagaca

SEQ ID NO: 736034 - DNA, 33 bp, Homo sapien
tgtgactctacaaccaccagaaggagtcagaca

SEQ ID NO: 736035 - DNA, 33 bp, Homo sapien
ctttaccaagacagataagcaaagaatattaac

SEQ ID NO: 736036 - DNA, 33 bp, Homo sapien
ctttaccaagacagatgagcaaagaatattaac

SEQ ID NO: 736037 - DNA, 33 bp, Homo sapien
aaccataaaaattgcccgagcttggtgtctcat

SEQ ID NO: 736038 - DNA, 33 bp, Homo sapien
aaccataaaaattgcctgagcttggtgtctcat

SEQ ID NO: 736039 - DNA, 33 bp, Homo sapien
tacttagtttttataacccaagcttctgatcga

SEQ ID NO: 736040 - DNA, 33 bp, Homo sapien
tacttagtttttataagccaagcttctgatcga

SEQ ID NO: 736041 - DNA, 33 bp, Homo sapien
tcacagacaggatttcaacagacctttaccttg

SEQ ID NO: 736042 - DNA, 33 bp, Homo sapien
tcacagacaggatttccacagacctttaccttg

SEQ ID NO: 736043 - DNA, 33 bp, Homo sapien
actataggtggatagcactaaatgcccacttgg

SEQ ID NO: 736044 - DNA, 33 bp, Homo sapien
actataggtggatagcgctaaatgcccacttgg

SEQ ID NO: 736045 - DNA, 33 bp, Homo sapien
acagttacttgcagagcctaaagtaaaacctat

SEQ ID NO: 736046 - DNA, 33 bp, Homo sapien
acagttacttgcagaggctaaagtaaaacctat

SEQ ID NO: 736047 - DNA, 33 bp, Homo sapien
tgtgcaagaataaatgcagagtgcaaaatgctc

SEQ ID NO: 736048 - DNA, 33 bp, Homo sapien
tgtgcaagaataaatgtagagtgcaaaatgctc

SEQ ID NO: 736049 - DNA, 33 bp, Homo sapien
ttcctggttatggtcactaagggaatgttaggc

SEQ ID NO: 736050 - DNA, 33 bp, Homo sapien
ttcctggttatggtcattaagggaatgttaggc

SEQ ID NO: 736051 - DNA, 33 bp, Homo sapien
ctgacagttcttagcacagtcgtataatgtcaa

SEQ ID NO: 736052 - DNA, 33 bp, Homo sapien
ctgacagttcttagcatagtcgtataatgtcaa

SEQ ID NO: 736053 - DNA, 33 bp, Homo sapien
cacctgctcctaaccagtacgccaatcgtagcc

SEQ ID NO: 736054 - DNA, 33 bp, Homo sapien
cacctgctcctaaccattacgccaatcgtagcc

SEQ ID NO: 736055 - DNA, 33 bp, Homo sapien
tccatcattgagccaggaattattttttcttta

SEQ ID NO: 736056 - DNA, 33 bp, Homo sapien
tccatcattgagccagtaattattttttcttta

SEQ ID NO: 736057 - DNA, 33 bp, Homo sapien
ctagcgcaagataagaagaaactggaacatcat

SEQ ID NO: 736058 - DNA, 33 bp, Homo sapien
ctagcgcaagataagaggaaactggaacatcat

SEQ ID NO: 736059 - DNA, 33 bp, Homo sapien
catcacactctccaacagaacagttagaggaaa

SEQ ID NO: 736060 - DNA, 33 bp, Homo sapien
catcacactctccaacggaacagttagaggaaa

SEQ ID NO: 736061 - DNA, 33 bp, Homo sapien
tcctgctgaggtgaataaacattacattatctc

SEQ ID NO: 736062 - DNA, 33 bp, Homo sapien
tcctgctgaggtgaatgaacattacattatctc

SEQ ID NO: 736063 - DNA, 33 bp, Homo sapien
aagcggaaagactttaccccattgttaaagtga

SEQ ID NO: 736064 - DNA, 33 bp, Homo sapien
aagcggaaagactttatcccattgttaaagtga

SEQ ID NO: 736065 - DNA, 33 bp, Homo sapien
agcgtaattccaatataaatgttggttgatatg

SEQ ID NO: 736066 - DNA, 33 bp, Homo sapien
agcgtaattccaatatgaatgttggttgatatg

SEQ ID NO: 736067 - DNA, 33 bp, Homo sapien
ggttcagtgtctatccgagtctgctttctatgc

SEQ ID NO: 736068 - DNA, 33 bp, Homo sapien
ggttcagtgtctatcctagtctgctttctatgc

SEQ ID NO: 736069 - DNA, 33 bp, Homo sapien
gatactaacctttgtcacctacgtgcactgcac

SEQ ID NO: 736070 - DNA, 33 bp, Homo sapien
gatactaacctttgtcgcctacgtgcactgcac

SEQ ID NO: 736071 - DNA, 33 bp, Homo sapien
atggaaattcagcaaaatgattcttagatgtat

SEQ ID NO: 736072 - DNA, 33 bp, Homo sapien
atggaaattcagcaaagtgattcttagatgtat

SEQ ID NO: 736073 - DNA, 33 bp, Homo sapien
cagtgtagaaaaattgcaaccagaaatgtgcta

SEQ ID NO: 736074 - DNA, 33 bp, Homo sapien
cagtgtagaaaaattggaaccagaaatgtgcta

SEQ ID NO: 736075 - DNA, 33 bp, Homo sapien
aaaaatgactgtagaacttcctgttttaaccaa

SEQ ID NO: 736076 - DNA, 33 bp, Homo sapien
aaaaatgactgtagaatttcctgttttaaccaa

SEQ ID NO: 736077 - DNA, 33 bp, Homo sapien
aggaatagaaaagtacactgtaagtagaacaaa

SEQ ID NO: 736078 - DNA, 33 bp, Homo sapien
aggaatagaaaagtactctgtaagtagaacaaa

SEQ ID NO: 736079 - DNA, 33 bp, Homo sapien
aattaagcctcatgtgcagtaccttctgcttat

SEQ ID NO: 736080 - DNA, 33 bp, Homo sapien
aattaagcctcatgtgtagtaccttctgcttat

SEQ ID NO: 736081 - DNA, 33 bp, Homo sapien
ctttttcttgctaaatgacattccattgtatgg

SEQ ID NO: 736082 - DNA, 33 bp, Homo sapien
ctttttcttgctaaattacattccattgtatgg

SEQ ID NO: 736083 - DNA, 33 bp, Homo sapien
ccaggacagcaggggacgccgcagaccccccaa

SEQ ID NO: 736084 - DNA, 33 bp, Homo sapien
ccaggacagcaggggatgccgcagaccccccaa

SEQ ID NO: 736085 - DNA, 33 bp, Homo sapien
tataatcttaaggcaacgtactaggaatgagat

SEQ ID NO: 736086 - DNA, 33 bp, Homo sapien
tataatcttaaggcaatgtactaggaatgagat

SEQ ID NO: 736087 - DNA, 33 bp, Homo sapien
aaaccaggattaagacagaggatagtcagcatg

SEQ ID NO: 736088 - DNA, 33 bp, Homo sapien
aaaccaggattaagacggaggatagtcagcatg

SEQ ID NO: 736089 - DNA, 33 bp, Homo sapien
gaagccctggtcaataagtaccatcaacatcaa

SEQ ID NO: 736090 - DNA, 33 bp, Homo sapien
gaagccctggtcaataggtaccatcaacatcaa

SEQ ID NO: 736091 - DNA, 33 bp, Homo sapien
acaacttaaggaagtaaatagacaaatccagaa

SEQ ID NO: 736092 - DNA, 33 bp, Homo sapien
acaacttaaggaagtagatagacaaatccagaa

SEQ ID NO: 736093 - DNA, 33 bp, Homo sapien
gactccttcttagtgaggccttctttaactacc

SEQ ID NO: 736094 - DNA, 33 bp, Homo sapien
gactccttcttagtgatgccttctttaactacc

SEQ ID NO: 736095 - DNA, 33 bp, Homo sapien
ttgagaggacagtttcaacaaggcgacgtctgc

SEQ ID NO: 736096 - DNA, 33 bp, Homo sapien
ttgagaggacagtttcgacaaggcgacgtctgc

SEQ ID NO: 736097 - DNA, 33 bp, Homo sapien
ccaacaactatcactaccattttaggtaagaat

SEQ ID NO: 736098 - DNA, 33 bp, Homo sapien
ccaacaactatcactatcattttaggtaagaat

SEQ ID NO: 736099 - DNA, 33 bp, Homo sapien
caagcacactgcctacagattagctagccctgt

SEQ ID NO: 736100 - DNA, 33 bp, Homo sapien
caagcacactgcctacggattagctagccctgt

SEQ ID NO: 736101 - DNA, 33 bp, Homo sapien
gatgtgtatagtatcacgcatagtccaatgcac

SEQ ID NO: 736102 - DNA, 33 bp, Homo sapien
gatgtgtatagtatcatgcatagtccaatgcac

SEQ ID NO: 736103 - DNA, 33 bp, Homo sapien
tgtttgcaacagacttcaaactggccattctgt

SEQ ID NO: 736104 - DNA, 33 bp, Homo sapien
tgtttgcaacagacttgaaactggccattctgt

SEQ ID NO: 736105 - DNA, 33 bp, Homo sapien
gggatttgccttccaaccttgtgtacataagag

SEQ ID NO: 736106 - DNA, 33 bp, Homo sapien
gggatttgccttccaatcttgtgtacataagag

SEQ ID NO: 736107 - DNA, 33 bp, Homo sapien
acttagactataaaacaatacaggagttgacta

SEQ ID NO: 736108 - DNA, 33 bp, Homo sapien
acttagactataaaacgatacaggagttgacta

SEQ ID NO: 736109 - DNA, 33 bp, Homo sapien
ctattatttcccagtacagcgcttttctccttt

SEQ ID NO: 736110 - DNA, 33 bp, Homo sapien
ctattatttcccagtatagcgcttttctccttt

SEQ ID NO: 736111 - DNA, 33 bp, Homo sapien
tccaggctcttcaccactagttgccaggagtgt

SEQ ID NO: 736112 - DNA, 33 bp, Homo sapien
tccaggctcttcaccattagttgccaggagtgt

SEQ ID NO: 736113 - DNA, 33 bp, Homo sapien
taggtctccattccaaacctagagaatcagcaa

SEQ ID NO: 736114 - DNA, 33 bp, Homo sapien
taggtctccattccaagcctagagaatcagcaa

SEQ ID NO: 736115 - DNA, 33 bp, Homo sapien
atgcctgcttttaccactcctactcaacatact

SEQ ID NO: 736116 - DNA, 33 bp, Homo sapien
atgcctgcttttaccattcctactcaacatact

SEQ ID NO: 736117 - DNA, 33 bp, Homo sapien
aattcagtaaagatgcaaatcaacaaagataaa

SEQ ID NO: 736118 - DNA, 33 bp, Homo sapien
aattcagtaaagatgcgaatcaacaaagataaa

SEQ ID NO: 736119 - DNA, 33 bp, Homo sapien
gtaaacaatgcctaacaattgttgcttccctat

SEQ ID NO: 736120 - DNA, 33 bp, Homo sapien
gtaaacaatgcctaacgattgttgcttccctat

SEQ ID NO: 736121 - DNA, 33 bp, Homo sapien
gagaataaaagtttagcccaaattccagtattt

SEQ ID NO: 736122 - DNA, 33 bp, Homo sapien
gagaataaaagtttagtccaaattccagtattt

SEQ ID NO: 736123 - DNA, 33 bp, Homo sapien
aacattttaggaacaactcttttaggactgcct

SEQ ID NO: 736124 - DNA, 33 bp, Homo sapien
aacattttaggaacaattcttttaggactgcct

SEQ ID NO: 736125 - DNA, 33 bp, Homo sapien
ttgattcagagattatcagcagtgaagtacaaa

SEQ ID NO: 736126 - DNA, 33 bp, Homo sapien
ttgattcagagattatgagcagtgaagtacaaa

SEQ ID NO: 736127 - DNA, 33 bp, Homo sapien
aatgttcaaattagggcagttagcatattcatc

SEQ ID NO: 736128 - DNA, 33 bp, Homo sapien
aatgttcaaattagggtagttagcatattcatc

SEQ ID NO: 736129 - DNA, 33 bp, Homo sapien
tgccagcgtaagccacaaagaattgcaactagg

SEQ ID NO: 736130 - DNA, 33 bp, Homo sapien
tgccagcgtaagccaccaagaattgcaactagg

SEQ ID NO: 736131 - DNA, 33 bp, Homo sapien
tcttattctgtcttcacagtaaaggtaaatgtt

SEQ ID NO: 736132 - DNA, 33 bp, Homo sapien
tcttattctgtcttcatagtaaaggtaaatgtt

SEQ ID NO: 736133 - DNA, 33 bp, Homo sapien
ccaagtgcaattcaaacttctgtggcctaaaag

SEQ ID NO: 736134 - DNA, 33 bp, Homo sapien
ccaagtgcaattcaaagttctgtggcctaaaag

SEQ ID NO: 736135 - DNA, 33 bp, Homo sapien
aactctaatgagacaaaatgacaactacatggc

SEQ ID NO: 736136 - DNA, 33 bp, Homo sapien
aactctaatgagacaatatgacaactacatggc

SEQ ID NO: 736137 - DNA, 33 bp, Homo sapien
aggaaatagcaattgaaatttgatgagcatagt

SEQ ID NO: 736138 - DNA, 33 bp, Homo sapien
aggaaatagcaattgagatttgatgagcatagt

SEQ ID NO: 736139 - DNA, 33 bp, Homo sapien
atcagagaaagtaaccagcttgcattttatggg

SEQ ID NO: 736140 - DNA, 33 bp, Homo sapien
atcagagaaagtaaccggcttgcattttatggg

SEQ ID NO: 736141 - DNA, 33 bp, Homo sapien
ccttttttactgaccccatagcagggaactgaa

SEQ ID NO: 736142 - DNA, 33 bp, Homo sapien
ccttttttactgacccgatagcagggaactgaa

SEQ ID NO: 736143 - DNA, 33 bp, Homo sapien
actcgaaaatgttcgaccataaaaatccacacc

SEQ ID NO: 736144 - DNA, 33 bp, Homo sapien
actcgaaaatgttcgatcataaaaatccacacc

SEQ ID NO: 736145 - DNA, 33 bp, Homo sapien
agttgacccttaagaaagataatgtgtcccact

SEQ ID NO: 736146 - DNA, 33 bp, Homo sapien
agttgacccttaagaaggataatgtgtcccact

SEQ ID NO: 736147 - DNA, 33 bp, Homo sapien
tgtcaacgctgaatcccgactatagtaagatcc

SEQ ID NO: 736148 - DNA, 33 bp, Homo sapien
tgtcaacgctgaatcctgactatagtaagatcc

SEQ ID NO: 736149 - DNA, 33 bp, Homo sapien
tgcttaagtgaagttacggtaagctgagtgcag

SEQ ID NO: 736150 - DNA, 33 bp, Homo sapien
tgcttaagtgaagttatggtaagctgagtgcag

SEQ ID NO: 736151 - DNA, 33 bp, Homo sapien
ttgtttattcgtttgcacataatacctttgatt

SEQ ID NO: 736152 - DNA, 33 bp, Homo sapien
ttgtttattcgtttgcgcataatacctttgatt

SEQ ID NO: 736153 - DNA, 33 bp, Homo sapien
aaatcttggagaagcacgaccccttgaagaaca

SEQ ID NO: 736154 - DNA, 33 bp, Homo sapien
aaatcttggagaagcatgaccccttgaagaaca

SEQ ID NO: 736155 - DNA, 33 bp, Homo sapien
ttcatacatatagttacatgataatacacatga

SEQ ID NO: 736156 - DNA, 33 bp, Homo sapien
ttcatacatatagttagatgataatacacatga

SEQ ID NO: 736157 - DNA, 33 bp, Homo sapien
tttccatagctgtacaatgaggatagtagacct

SEQ ID NO: 736158 - DNA, 33 bp, Homo sapien
tttccatagctgtacagtgaggatagtagacct

SEQ ID NO: 736159 - DNA, 33 bp, Homo sapien
aggttttatagctagaaagcaggacaatccctt

SEQ ID NO: 736160 - DNA, 33 bp, Homo sapien
aggttttatagctagagagcaggacaatccctt

SEQ ID NO: 736161 - DNA, 33 bp, Homo sapien
tggcatctcaagtggaagaaaggcataagcatg

SEQ ID NO: 736162 - DNA, 33 bp, Homo sapien
tggcatctcaagtggaggaaaggcataagcatg

SEQ ID NO: 736163 - DNA, 33 bp, Homo sapien
ctctgtggcccatatacagcaacagaaataggc

SEQ ID NO: 736164 - DNA, 33 bp, Homo sapien
ctctgtggcccatatatagcaacagaaataggc

SEQ ID NO: 736165 - DNA, 33 bp, Homo sapien
caatgcaagttctcagacattcaatacaccact

SEQ ID NO: 736166 - DNA, 33 bp, Homo sapien
caatgcaagttctcagtcattcaatacaccact

SEQ ID NO: 736167 - DNA, 33 bp, Homo sapien
caaataaggagtcttaaatatatgcatgaacaa

SEQ ID NO: 736168 - DNA, 33 bp, Homo sapien
caaataaggagtcttacatatatgcatgaacaa

SEQ ID NO: 736169 - DNA, 33 bp, Homo sapien
tggccatctctgtcaaacttggccctctggcag

SEQ ID NO: 736170 - DNA, 33 bp, Homo sapien
tggccatctctgtcaaccttggccctctggcag

SEQ ID NO: 736171 - DNA, 33 bp, Homo sapien
tcatagacttgtcccaataaaaagtcagctgac

SEQ ID NO: 736172 - DNA, 33 bp, Homo sapien
tcatagacttgtcccagtaaaaagtcagctgac

SEQ ID NO: 736173 - DNA, 33 bp, Homo sapien
tgtcttgtgctgtgctaagaacacaaaatgacc

SEQ ID NO: 736174 - DNA, 33 bp, Homo sapien
tgtcttgtgctgtgctgagaacacaaaatgacc

SEQ ID NO: 736175 - DNA, 33 bp, Homo sapien
atgacctggttttcagccatgctcctgtcaggg

SEQ ID NO: 736176 - DNA, 33 bp, Homo sapien
atgacctggttttcagtcatgctcctgtcaggg

SEQ ID NO: 736177 - DNA, 33 bp, Homo sapien
acaacaaatccccaaactcatcaaacctgagaa

SEQ ID NO: 736178 - DNA, 33 bp, Homo sapien
acaacaaatccccaaattcatcaaacctgagaa

SEQ ID NO: 736179 - DNA, 33 bp, Homo sapien
tcaggccacgtacatacctgctgaattgagttg

SEQ ID NO: 736180 - DNA, 33 bp, Homo sapien
tcaggccacgtacatatctgctgaattgagttg

SEQ ID NO: 736181 - DNA, 33 bp, Homo sapien
ccttctctgtaactgtcacagctccctccatgc

SEQ ID NO: 736182 - DNA, 33 bp, Homo sapien
ccttctctgtaactgtgacagctccctccatgc

SEQ ID NO: 736183 - DNA, 33 bp, Homo sapien
tgaaaactcagaaaaacagcatcatcctaagca

SEQ ID NO: 736184 - DNA, 33 bp, Homo sapien
tgaaaactcagaaaaatagcatcatcctaagca

SEQ ID NO: 736185 - DNA, 33 bp, Homo sapien
gtctaaatttatgacccaactgatgaattaagg

SEQ ID NO: 736186 - DNA, 33 bp, Homo sapien
gtctaaatttatgacctaactgatgaattaagg

SEQ ID NO: 736187 - DNA, 33 bp, Homo sapien
acttttctgtccctacaatgcctgtcacacagt

SEQ ID NO: 736188 - DNA, 33 bp, Homo sapien
acttttctgtccctacgatgcctgtcacacagt

SEQ ID NO: 736189 - DNA, 33 bp, Homo sapien
ctaaacttgagtcagacgatgacaaagatcagt

SEQ ID NO: 736190 - DNA, 33 bp, Homo sapien
ctaaacttgagtcagatgatgacaaagatcagt

SEQ ID NO: 736191 - DNA, 33 bp, Homo sapien
gacgcattcactatccagaaaccagtattacct

SEQ ID NO: 736192 - DNA, 33 bp, Homo sapien
gacgcattcactatccggaaaccagtattacct

SEQ ID NO: 736193 - DNA, 33 bp, Homo sapien
aagaagaaactgacaccgcggccttcagctctg

SEQ ID NO: 736194 - DNA, 33 bp, Homo sapien
aagaagaaactgacactgcggccttcagctctg

SEQ ID NO: 736195 - DNA, 33 bp, Homo sapien
ggcgcttggtgggacgccagctaggggcactgc

SEQ ID NO: 736196 - DNA, 33 bp, Homo sapien
ggcgcttggtgggacgtcagctaggggcactgc

SEQ ID NO: 736197 - DNA, 33 bp, Homo sapien
agcaagaaactgggcacacgcaagtgactgcaa

SEQ ID NO: 736198 - DNA, 33 bp, Homo sapien
agcaagaaactgggcagacgcaagtgactgcaa

SEQ ID NO: 736199 - DNA, 33 bp, Homo sapien
tgctcaggaaatctacaatgtctactttcttaa

SEQ ID NO: 736200 - DNA, 33 bp, Homo sapien
tgctcaggaaatctacgatgtctactttcttaa

SEQ ID NO: 736201 - DNA, 33 bp, Homo sapien
taatgaaccaacgagagaactctcaactgcaaa

SEQ ID NO: 736202 - DNA, 33 bp, Homo sapien
taatgaaccaacgagataactctcaactgcaaa

SEQ ID NO: 736203 - DNA, 33 bp, Homo sapien
cagaggacggcttatagtacttttcttctaact

SEQ ID NO: 736204 - DNA, 33 bp, Homo sapien
cagaggacggcttatattacttttcttctaact

SEQ ID NO: 736205 - DNA, 33 bp, Homo sapien
cagaaacatccatatgcatgcaggactatgtct

SEQ ID NO: 736206 - DNA, 33 bp, Homo sapien
cagaaacatccatatgtatgcaggactatgtct

SEQ ID NO: 736207 - DNA, 33 bp, Homo sapien
tgggatcataaataggccacctgttaactgaga

SEQ ID NO: 736208 - DNA, 33 bp, Homo sapien
tgggatcataaataggtcacctgttaactgaga

SEQ ID NO: 736209 - DNA, 33 bp, Homo sapien
tactcaacctggtaacagaagacgaaggacata

SEQ ID NO: 736210 - DNA, 33 bp, Homo sapien
tactcaacctggtaacggaagacgaaggacata

SEQ ID NO: 736211 - DNA, 33 bp, Homo sapien
tctgtgtttgattatacgcttctaaagagcaat

SEQ ID NO: 736212 - DNA, 33 bp, Homo sapien
tctgtgtttgattatatgcttctaaagagcaat

SEQ ID NO: 736213 - DNA, 33 bp, Homo sapien
cacgttcttaaaacaactacactgtatcattgt

SEQ ID NO: 736214 - DNA, 33 bp, Homo sapien
cacgttcttaaaacaagtacactgtatcattgt

SEQ ID NO: 736215 - DNA, 33 bp, Homo sapien
gtacaaagaccagaagaaaaacaacgtggcttg

SEQ ID NO: 736216 - DNA, 33 bp, Homo sapien
gtacaaagaccagaaggaaaacaacgtggcttg

SEQ ID NO: 736217 - DNA, 33 bp, Homo sapien
gaaatgttttgaatggcaatgcttaattctggg

SEQ ID NO: 736218 - DNA, 33 bp, Homo sapien
gaaatgttttgaatggtaatgcttaattctggg

SEQ ID NO: 736219 - DNA, 33 bp, Homo sapien
accatctgatgcggcacatttttggtcccccaa

SEQ ID NO: 736220 - DNA, 33 bp, Homo sapien
accatctgatgcggcatatttttggtcccccaa

SEQ ID NO: 736221 - DNA, 33 bp, Homo sapien
aatgtcctaggatagacagcttcttcagcaatg

SEQ ID NO: 736222 - DNA, 33 bp, Homo sapien
aatgtcctaggatagatagcttcttcagcaatg

SEQ ID NO: 736223 - DNA, 33 bp, Homo sapien
acaaagactagctttaccaagtgcaagccagtc

SEQ ID NO: 736224 - DNA, 33 bp, Homo sapien
acaaagactagctttatcaagtgcaagccagtc

SEQ ID NO: 736225 - DNA, 33 bp, Homo sapien
ttgagctgttttattcaaatgacctgagatttg

SEQ ID NO: 736226 - DNA, 33 bp, Homo sapien
ttgagctgttttattcgaatgacctgagatttg

SEQ ID NO: 736227 - DNA, 33 bp, Homo sapien
tgtctgtttcatggccacagttgctgtttgtcc

SEQ ID NO: 736228 - DNA, 33 bp, Homo sapien
tgtctgtttcatggccgcagttgctgtttgtcc

SEQ ID NO: 736229 - DNA, 33 bp, Homo sapien
atgctgtctcatcacccagttgatttattcttt

SEQ ID NO: 736230 - DNA, 33 bp, Homo sapien
atgctgtctcatcacctagttgatttattcttt

SEQ ID NO: 736231 - DNA, 33 bp, Homo sapien
agtttattattacttaagccctactttctggga

SEQ ID NO: 736232 - DNA, 33 bp, Homo sapien
agtttattattacttaggccctactttctggga

SEQ ID NO: 736233 - DNA, 33 bp, Homo sapien
ggaggaccacaggctgaagaatatctctcaaat

SEQ ID NO: 736234 - DNA, 33 bp, Homo sapien
ggaggaccacaggctggagaatatctctcaaat

SEQ ID NO: 736235 - DNA, 33 bp, Homo sapien
aagctgatgaaacagaactcccaactaatgtat

SEQ ID NO: 736236 - DNA, 33 bp, Homo sapien
aagctgatgaaacagagctcccaactaatgtat

SEQ ID NO: 736237 - DNA, 33 bp, Homo sapien
aagataatggacaatcaaagtaaaaaaactgtc

SEQ ID NO: 736238 - DNA, 33 bp, Homo sapien
aagataatggacaatcgaagtaaaaaaactgtc

SEQ ID NO: 736239 - DNA, 33 bp, Homo sapien
tccaatttcatcttgaaagtgcctcacagatca

SEQ ID NO: 736240 - DNA, 33 bp, Homo sapien
tccaatttcatcttgatagtgcctcacagatca

SEQ ID NO: 736241 - DNA, 33 bp, Homo sapien
tcatcttttatctacacccattatcctcatctt

SEQ ID NO: 736242 - DNA, 33 bp, Homo sapien
tcatcttttatctacatccattatcctcatctt

SEQ ID NO: 736243 - DNA, 33 bp, Homo sapien
cttaacaaggtactacaattcagcggcttaaaa

SEQ ID NO: 736244 - DNA, 33 bp, Homo sapien
cttaacaaggtactacgattcagcggcttaaaa

SEQ ID NO: 736245 - DNA, 33 bp, Homo sapien
cctcctctctctacacactgatttcttggcctt

SEQ ID NO: 736246 - DNA, 33 bp, Homo sapien
cctcctctctctacaccctgatttcttggcctt

SEQ ID NO: 736247 - DNA, 33 bp, Homo sapien
gatatgccaacaacgacccccccagtgaaccag

SEQ ID NO: 736248 - DNA, 33 bp, Homo sapien
gatatgccaacaacgatccccccagtgaaccag

SEQ ID NO: 736249 - DNA, 33 bp, Homo sapien
cttttctccatatctacctaccatttaaacttg

SEQ ID NO: 736250 - DNA, 33 bp, Homo sapien
cttttctccatatctagctaccatttaaacttg

SEQ ID NO: 736251 - DNA, 33 bp, Homo sapien
agaagtatttttgagacgaagagctgagatcgg

SEQ ID NO: 736252 - DNA, 33 bp, Homo sapien
agaagtatttttgagatgaagagctgagatcgg

SEQ ID NO: 736253 - DNA, 33 bp, Homo sapien
gtgacaggcacctgtcaaaactgatacactgtg

SEQ ID NO: 736254 - DNA, 33 bp, Homo sapien
gtgacaggcacctgtcgaaactgatacactgtg

SEQ ID NO: 736255 - DNA, 33 bp, Homo sapien
agtccactttgcagatcaaccagtacaggctta

SEQ ID NO: 736256 - DNA, 33 bp, Homo sapien
agtccactttgcagatgaaccagtacaggctta

SEQ ID NO: 736257 - DNA, 33 bp, Homo sapien
aaactggcacagggtacatccgaagcttgctgg

SEQ ID NO: 736258 - DNA, 33 bp, Homo sapien
aaactggcacagggtatatccgaagcttgctgg

SEQ ID NO: 736259 - DNA, 33 bp, Homo sapien
gccctgcctagaataaccagaggacatcagctg

SEQ ID NO: 736260 - DNA, 33 bp, Homo sapien
gccctgcctagaataagcagaggacatcagctg

SEQ ID NO: 736261 - DNA, 33 bp, Homo sapien
ggacttctaatctagaggatttcaagataacac

SEQ ID NO: 736262 - DNA, 33 bp, Homo sapien
ggacttctaatctagatgatttcaagataacac

SEQ ID NO: 736263 - DNA, 33 bp, Homo sapien
gcatgccagattctgactagacagtggggataa

SEQ ID NO: 736264 - DNA, 33 bp, Homo sapien
gcatgccagattctgattagacagtggggataa

SEQ ID NO: 736265 - DNA, 33 bp, Homo sapien
tgacctgatttactgacggtaagacagtttagt

SEQ ID NO: 736266 - DNA, 33 bp, Homo sapien
tgacctgatttactgatggtaagacagtttagt

SEQ ID NO: 736267 - DNA, 33 bp, Homo sapien
cttccattaggctagaactacacagaggagaat

SEQ ID NO: 736268 - DNA, 33 bp, Homo sapien
cttccattaggctagatctacacagaggagaat

SEQ ID NO: 736269 - DNA, 33 bp, Homo sapien
gtgcccagctatacaactacatctacagcctct

SEQ ID NO: 736270 - DNA, 33 bp, Homo sapien
gtgcccagctatacaattacatctacagcctct

SEQ ID NO: 736271 - DNA, 33 bp, Homo sapien
cttaacattggcaacccgactgtcctgcagcac

SEQ ID NO: 736272 - DNA, 33 bp, Homo sapien
cttaacattggcaacctgactgtcctgcagcac

SEQ ID NO: 736273 - DNA, 33 bp, Homo sapien
tgatgtgactaagtcaaatcaagggaccggaaa

SEQ ID NO: 736274 - DNA, 33 bp, Homo sapien
tgatgtgactaagtcagatcaagggaccggaaa

SEQ ID NO: 736275 - DNA, 33 bp, Homo sapien
ccaggatttggcgatcaatggtaaaaatggaca

SEQ ID NO: 736276 - DNA, 33 bp, Homo sapien
ccaggatttggcgatcgatggtaaaaatggaca

SEQ ID NO: 736277 - DNA, 33 bp, Homo sapien
agtagttcgttcatggcagtcagactcggatga

SEQ ID NO: 736278 - DNA, 33 bp, Homo sapien
agtagttcgttcatgggagtcagactcggatga

SEQ ID NO: 736279 - DNA, 33 bp, Homo sapien
ttgaacttaatatggccaacattttcactcttc

SEQ ID NO: 736280 - DNA, 33 bp, Homo sapien
ttgaacttaatatggctaacattttcactcttc

SEQ ID NO: 736281 - DNA, 33 bp, Homo sapien
aatagctggtactacaagtgtgttctaccatgc

SEQ ID NO: 736282 - DNA, 33 bp, Homo sapien
aatagctggtactacaggtgtgttctaccatgc

SEQ ID NO: 736283 - DNA, 33 bp, Homo sapien
ttgacgtttagattacagaaatttcataccaaa

SEQ ID NO: 736284 - DNA, 33 bp, Homo sapien
ttgacgtttagattacggaaatttcataccaaa

SEQ ID NO: 736285 - DNA, 33 bp, Homo sapien
caggtagctttctgcactccccaagttgccaga

SEQ ID NO: 736286 - DNA, 33 bp, Homo sapien
caggtagctttctgcattccccaagttgccaga

SEQ ID NO: 736287 - DNA, 33 bp, Homo sapien
gacttgtaaagtgctaaacaggaataataataa

SEQ ID NO: 736288 - DNA, 33 bp, Homo sapien
gacttgtaaagtgctagacaggaataataataa

SEQ ID NO: 736289 - DNA, 33 bp, Homo sapien
caccttcatgtggaaactgtacaggcccctttc

SEQ ID NO: 736290 - DNA, 33 bp, Homo sapien
caccttcatgtggaaagtgtacaggcccctttc

SEQ ID NO: 736291 - DNA, 33 bp, Homo sapien
gtgatgtaagaaaaccgggccatactgacccag

SEQ ID NO: 736292 - DNA, 33 bp, Homo sapien
gtgatgtaagaaaacctggccatactgacccag

SEQ ID NO: 736293 - DNA, 33 bp, Homo sapien
gagtaccagcactctacgctcagctttttggat

SEQ ID NO: 736294 - DNA, 33 bp, Homo sapien
gagtaccagcactctatgctcagctttttggat

SEQ ID NO: 736295 - DNA, 33 bp, Homo sapien
gttcggggacacctacaggttataaacttgggt

SEQ ID NO: 736296 - DNA, 33 bp, Homo sapien
gttcggggacacctacgggttataaacttgggt

SEQ ID NO: 736297 - DNA, 33 bp, Homo sapien
caggactgaaacagaaacaaggaagtggatgaa

SEQ ID NO: 736298 - DNA, 33 bp, Homo sapien
caggactgaaacagaagcaaggaagtggatgaa

SEQ ID NO: 736299 - DNA, 33 bp, Homo sapien
aaggagtttgaactcaaaatatacaaaggggcc

SEQ ID NO: 736300 - DNA, 33 bp, Homo sapien
aaggagtttgaactcagaatatacaaaggggcc

SEQ ID NO: 736301 - DNA, 33 bp, Homo sapien
cttggcaaaattttcactccaggccactgcatc

SEQ ID NO: 736302 - DNA, 33 bp, Homo sapien
cttggcaaaattttcattccaggccactgcatc

SEQ ID NO: 736303 - DNA, 33 bp, Homo sapien
atggggcttgaaggtcagaatagtccattaacc

SEQ ID NO: 736304 - DNA, 33 bp, Homo sapien
atggggcttgaaggtcggaatagtccattaacc

SEQ ID NO: 736305 - DNA, 33 bp, Homo sapien
ctaaagcctaagactcagaataaaaggctctaa

SEQ ID NO: 736306 - DNA, 33 bp, Homo sapien
ctaaagcctaagactcggaataaaaggctctaa

SEQ ID NO: 736307 - DNA, 33 bp, Homo sapien
aagtcagacctgcaaaagatgagtaggtgtgtg

SEQ ID NO: 736308 - DNA, 33 bp, Homo sapien
aagtcagacctgcaaaggatgagtaggtgtgtg

SEQ ID NO: 736309 - DNA, 33 bp, Homo sapien
tagtcaatgcctatcaacttttatatgactgag

SEQ ID NO: 736310 - DNA, 33 bp, Homo sapien
tagtcaatgcctatcaccttttatatgactgag

SEQ ID NO: 736311 - DNA, 33 bp, Homo sapien
cttttgatgtcatcctaaagaaatgtgcccttt

SEQ ID NO: 736312 - DNA, 33 bp, Homo sapien
cttttgatgtcatcctgaagaaatgtgcccttt

SEQ ID NO: 736313 - DNA, 33 bp, Homo sapien
ctcttttgaggaaaggaaatccagagtccataa

SEQ ID NO: 736314 - DNA, 33 bp, Homo sapien
ctcttttgaggaaaggcaatccagagtccataa

SEQ ID NO: 736315 - DNA, 33 bp, Homo sapien
ataatctctggatcataaggttacaggttacaa

SEQ ID NO: 736316 - DNA, 33 bp, Homo sapien
ataatctctggatcatgaggttacaggttacaa

SEQ ID NO: 736317 - DNA, 33 bp, Homo sapien
aggtgaatttattgtacgctccaccccaaaatg

SEQ ID NO: 736318 - DNA, 33 bp, Homo sapien
aggtgaatttattgtatgctccaccccaaaatg

SEQ ID NO: 736319 - DNA, 33 bp, Homo sapien
ggcctggtattggagacaacctacaactgccct

SEQ ID NO: 736320 - DNA, 33 bp, Homo sapien
ggcctggtattggagataacctacaactgccct

SEQ ID NO: 736321 - DNA, 33 bp, Homo sapien
ctcttgtgcaggtacaaccttgtgaaatggaca

SEQ ID NO: 736322 - DNA, 33 bp, Homo sapien
ctcttgtgcaggtacagccttgtgaaatggaca

SEQ ID NO: 736323 - DNA, 33 bp, Homo sapien
taaatatccctggggccgatggtaaaggtccat

SEQ ID NO: 736324 - DNA, 33 bp, Homo sapien
taaatatccctggggctgatggtaaaggtccat

SEQ ID NO: 736325 - DNA, 33 bp, Homo sapien
tgcccatagctggtagccctgcaagatttgcct

SEQ ID NO: 736326 - DNA, 33 bp, Homo sapien
tgcccatagctggtagtcctgcaagatttgcct

SEQ ID NO: 736327 - DNA, 33 bp, Homo sapien
atctgatggtcaccaccaagataaaagccgacc

SEQ ID NO: 736328 - DNA, 33 bp, Homo sapien
atctgatggtcaccactaagataaaagccgacc

SEQ ID NO: 736329 - DNA, 33 bp, Homo sapien
ggtagcccatttgaacagtcaccagccgccata

SEQ ID NO: 736330 - DNA, 33 bp, Homo sapien
ggtagcccatttgaacggtcaccagccgccata

SEQ ID NO: 736331 - DNA, 33 bp, Homo sapien
aaggaactagaacatacatctaacaccatctgc

SEQ ID NO: 736332 - DNA, 33 bp, Homo sapien
aaggaactagaacatatatctaacaccatctgc

SEQ ID NO: 736333 - DNA, 33 bp, Homo sapien
gtgcagagtgtgtcaaatcccatagtgaggtga

SEQ ID NO: 736334 - DNA, 33 bp, Homo sapien
gtgcagagtgtgtcaactcccatagtgaggtga

SEQ ID NO: 736335 - DNA, 33 bp, Homo sapien
gcatcctcccaatgacagattccaagactttat

SEQ ID NO: 736336 - DNA, 33 bp, Homo sapien
gcatcctcccaatgacggattccaagactttat

SEQ ID NO: 736337 - DNA, 33 bp, Homo sapien
gctcatacttgggagaacacttcactcggtgct

SEQ ID NO: 736338 - DNA, 33 bp, Homo sapien
gctcatacttgggagagcacttcactcggtgct

SEQ ID NO: 736339 - DNA, 33 bp, Homo sapien
cttgttgcattaaaccacattacaaagaaatcc

SEQ ID NO: 736340 - DNA, 33 bp, Homo sapien
cttgttgcattaaaccgcattacaaagaaatcc

SEQ ID NO: 736341 - DNA, 33 bp, Homo sapien
aactgggtattcataacagaggccataaggaga

SEQ ID NO: 736342 - DNA, 33 bp, Homo sapien
aactgggtattcataatagaggccataaggaga

SEQ ID NO: 736343 - DNA, 33 bp, Homo sapien
cagttaaaacatcacaatcctcctttctgggga

SEQ ID NO: 736344 - DNA, 33 bp, Homo sapien
cagttaaaacatcacactcctcctttctgggga

SEQ ID NO: 736345 - DNA, 33 bp, Homo sapien
attagcctttctgaaccatatttctccctgaag

SEQ ID NO: 736346 - DNA, 33 bp, Homo sapien
attagcctttctgaacgatatttctccctgaag

SEQ ID NO: 736347 - DNA, 33 bp, Homo sapien
gcaaaatcagcttcacaatcccttgacatttct

SEQ ID NO: 736348 - DNA, 33 bp, Homo sapien
gcaaaatcagcttcacgatcccttgacatttct

SEQ ID NO: 736349 - DNA, 33 bp, Homo sapien
agacaggaagtctgtacaggcagatgaaagagc

SEQ ID NO: 736350 - DNA, 33 bp, Homo sapien
agacaggaagtctgtataggcagatgaaagagc

SEQ ID NO: 736351 - DNA, 33 bp, Homo sapien
ataaatgtaaaacaccacggtccgggaaggcat

SEQ ID NO: 736352 - DNA, 33 bp, Homo sapien
ataaatgtaaaacaccgcggtccgggaaggcat

SEQ ID NO: 736353 - DNA, 33 bp, Homo sapien
acatggattcagaataacagcagggaggtatca

SEQ ID NO: 736354 - DNA, 33 bp, Homo sapien
acatggattcagaatagcagcagggaggtatca

SEQ ID NO: 736355 - DNA, 33 bp, Homo sapien
cccccacttacttggccaactccccctactttc

SEQ ID NO: 736356 - DNA, 33 bp, Homo sapien
cccccacttacttggctaactccccctactttc

SEQ ID NO: 736357 - DNA, 33 bp, Homo sapien
tagcaacaacttctccaaaatggtaagccctac

SEQ ID NO: 736358 - DNA, 33 bp, Homo sapien
tagcaacaacttctcctaaatggtaagccctac

SEQ ID NO: 736359 - DNA, 33 bp, Homo sapien
gacctttgaaattagagatgtgggatggctgtt

SEQ ID NO: 736360 - DNA, 33 bp, Homo sapien
gacctttgaaattagatatgtgggatggctgtt

SEQ ID NO: 736361 - DNA, 33 bp, Homo sapien
tcctcattatatagaaatgggcaaaatactgac

SEQ ID NO: 736362 - DNA, 33 bp, Homo sapien
tcctcattatatagaagtgggcaaaatactgac

SEQ ID NO: 736363 - DNA, 33 bp, Homo sapien
tgtgtaaaggattttgaagttacatactaagga

SEQ ID NO: 736364 - DNA, 33 bp, Homo sapien
tgtgtaaaggattttggagttacatactaagga

SEQ ID NO: 736365 - DNA, 33 bp, Homo sapien
acttgctggaacttacccatctgtgttgctggg

SEQ ID NO: 736366 - DNA, 33 bp, Homo sapien
acttgctggaacttactcatctgtgttgctggg

SEQ ID NO: 736367 - DNA, 33 bp, Homo sapien
gcactggcagaatgagacctgggagcatctctt

SEQ ID NO: 736368 - DNA, 33 bp, Homo sapien
gcactggcagaatgagccctgggagcatctctt

SEQ ID NO: 736369 - DNA, 33 bp, Homo sapien
tctcgggcttggcagcacagaggtaatatttga

SEQ ID NO: 736370 - DNA, 33 bp, Homo sapien
tctcgggcttggcagcgcagaggtaatatttga

SEQ ID NO: 736371 - DNA, 33 bp, Homo sapien
gcaaaagtggaagtgacgaagaagagaaactaa

SEQ ID NO: 736372 - DNA, 33 bp, Homo sapien
gcaaaagtggaagtgatgaagaagagaaactaa

SEQ ID NO: 736373 - DNA, 33 bp, Homo sapien
tcgttaagaattcaccaaagatcggacctgcca

SEQ ID NO: 736374 - DNA, 33 bp, Homo sapien
tcgttaagaattcaccgaagatcggacctgcca

SEQ ID NO: 736375 - DNA, 33 bp, Homo sapien
ccttctctgaggctccacatgctacatatctct

SEQ ID NO: 736376 - DNA, 33 bp, Homo sapien
ccttctctgaggctccgcatgctacatatctct

SEQ ID NO: 736377 - DNA, 33 bp, Homo sapien
ctgctctgttccctcacgtctttgaccttaaga

SEQ ID NO: 736378 - DNA, 33 bp, Homo sapien
ctgctctgttccctcatgtctttgaccttaaga

SEQ ID NO: 736379 - DNA, 33 bp, Homo sapien
tggcagttaaagaaaaatgtaaagcacccagag

SEQ ID NO: 736380 - DNA, 33 bp, Homo sapien
tggcagttaaagaaaagtgtaaagcacccagag

SEQ ID NO: 736381 - DNA, 33 bp, Homo sapien
aattgttattgaattgcagagcttctccatgcc

SEQ ID NO: 736382 - DNA, 33 bp, Homo sapien
aattgttattgaattgtagagcttctccatgcc

SEQ ID NO: 736383 - DNA, 33 bp, Homo sapien
tacctgctttactttacattcacatacacaaaa

SEQ ID NO: 736384 - DNA, 33 bp, Homo sapien
tacctgctttactttatattcacatacacaaaa

SEQ ID NO: 736385 - DNA, 33 bp, Homo sapien
cacattgtctggcacacggtaaatacacaagat

SEQ ID NO: 736386 - DNA, 33 bp, Homo sapien
cacattgtctggcacatggtaaatacacaagat

SEQ ID NO: 736387 - DNA, 33 bp, Homo sapien
accaccgacgaagttagctaggctgggcatgag

SEQ ID NO: 736388 - DNA, 33 bp, Homo sapien
accaccgacgaagttatctaggctgggcatgag

SEQ ID NO: 736389 - DNA, 33 bp, Homo sapien
tgggggcacttgggagaagaaaatctcggagca

SEQ ID NO: 736390 - DNA, 33 bp, Homo sapien
tgggggcacttgggagtagaaaatctcggagca

SEQ ID NO: 736391 - DNA, 33 bp, Homo sapien
tgtccactttgccccaaataggatcccaggcaa

SEQ ID NO: 736392 - DNA, 33 bp, Homo sapien
tgtccactttgccccagataggatcccaggcaa

SEQ ID NO: 736393 - DNA, 33 bp, Homo sapien
caggccagaagggacaagtgcttggactaagat

SEQ ID NO: 736394 - DNA, 33 bp, Homo sapien
caggccagaagggacaggtgcttggactaagat

SEQ ID NO: 736395 - DNA, 33 bp, Homo sapien
aatcaatggcaaggaacatctcagttgtccaga

SEQ ID NO: 736396 - DNA, 33 bp, Homo sapien
aatcaatggcaaggaatatctcagttgtccaga

SEQ ID NO: 736397 - DNA, 33 bp, Homo sapien
gcatagcaaatgcataagtcaaatagcaggctt

SEQ ID NO: 736398 - DNA, 33 bp, Homo sapien
gcatagcaaatgcataggtcaaatagcaggctt

SEQ ID NO: 736399 - DNA, 33 bp, Homo sapien
ccttctgtcaaccaaacgctcatagaatgctca

SEQ ID NO: 736400 - DNA, 33 bp, Homo sapien
ccttctgtcaaccaaatgctcatagaatgctca

SEQ ID NO: 736401 - DNA, 33 bp, Homo sapien
cagctttcactgtgagccagatggattcaaagg

SEQ ID NO: 736402 - DNA, 33 bp, Homo sapien
cagctttcactgtgagtcagatggattcaaagg

SEQ ID NO: 736403 - DNA, 33 bp, Homo sapien
ataagccaagaatcaccgtcgttggaggtggaa

SEQ ID NO: 736404 - DNA, 33 bp, Homo sapien
ataagccaagaatcactgtcgttggaggtggaa

SEQ ID NO: 736405 - DNA, 33 bp, Homo sapien
aaatgtcaaatgtttaactggactaaaagataa

SEQ ID NO: 736406 - DNA, 33 bp, Homo sapien
aaatgtcaaatgtttatctggactaaaagataa

SEQ ID NO: 736407 - DNA, 33 bp, Homo sapien
cctgagtctcagatgaataaatgtttgtctggt

SEQ ID NO: 736408 - DNA, 33 bp, Homo sapien
cctgagtctcagatgagtaaatgtttgtctggt

SEQ ID NO: 736409 - DNA, 33 bp, Homo sapien
cagtaaatttcctgcaagcgaactcttcctttg

SEQ ID NO: 736410 - DNA, 33 bp, Homo sapien
cagtaaatttcctgcaggcgaactcttcctttg

SEQ ID NO: 736411 - DNA, 33 bp, Homo sapien
gtggagaatgcaggacaaactagaacctgtgaa

SEQ ID NO: 736412 - DNA, 33 bp, Homo sapien
gtggagaatgcaggacgaactagaacctgtgaa

SEQ ID NO: 736413 - DNA, 33 bp, Homo sapien
aagatggtgtgagaaacaggcatttttagaaga

SEQ ID NO: 736414 - DNA, 33 bp, Homo sapien
aagatggtgtgagaaataggcatttttagaaga

SEQ ID NO: 736415 - DNA, 33 bp, Homo sapien
gggatgcagaatagagcctagaatttttgttct

SEQ ID NO: 736416 - DNA, 33 bp, Homo sapien
gggatgcagaatagaggctagaatttttgttct

SEQ ID NO: 736417 - DNA, 33 bp, Homo sapien
agggacatagatttaggaaacaggatcagtact

SEQ ID NO: 736418 - DNA, 33 bp, Homo sapien
agggacatagatttagtaaacaggatcagtact

SEQ ID NO: 736419 - DNA, 33 bp, Homo sapien
tcctaagtgctgaaaaaggacggggaagagtgt

SEQ ID NO: 736420 - DNA, 33 bp, Homo sapien
tcctaagtgctgaaaagggacggggaagagtgt

SEQ ID NO: 736421 - DNA, 33 bp, Homo sapien
agcatgtcttttcacagccctagactgtaggcc

SEQ ID NO: 736422 - DNA, 33 bp, Homo sapien
agcatgtcttttcacatccctagactgtaggcc

SEQ ID NO: 736423 - DNA, 33 bp, Homo sapien
gatggaatgtgctgcagtcaaaaacctgcaatg

SEQ ID NO: 736424 - DNA, 33 bp, Homo sapien
gatggaatgtgctgcattcaaaaacctgcaatg

SEQ ID NO: 736425 - DNA, 33 bp, Homo sapien
tcatgtagtcactgaaagaggcggctgacccta

SEQ ID NO: 736426 - DNA, 33 bp, Homo sapien
tcatgtagtcactgaatgaggcggctgacccta

SEQ ID NO: 736427 - DNA, 33 bp, Homo sapien
tcctcccctgtctcaaatcgaggaatgcagaca

SEQ ID NO: 736428 - DNA, 33 bp, Homo sapien
tcctcccctgtctcaagtcgaggaatgcagaca

SEQ ID NO: 736429 - DNA, 33 bp, Homo sapien
gaaatggcaaggcttgcaatgtgatctgcagta

SEQ ID NO: 736430 - DNA, 33 bp, Homo sapien
gaaatggcaaggcttggaatgtgatctgcagta

SEQ ID NO: 736431 - DNA, 33 bp, Homo sapien
atgtttgaatggaggacggcaactgtcgaggct

SEQ ID NO: 736432 - DNA, 33 bp, Homo sapien
atgtttgaatggaggatggcaactgtcgaggct

SEQ ID NO: 736433 - DNA, 33 bp, Homo sapien
gaaaaaggcattacccaatagtaggtattcgac

SEQ ID NO: 736434 - DNA, 33 bp, Homo sapien
gaaaaaggcattaccctatagtaggtattcgac

SEQ ID NO: 736435 - DNA, 33 bp, Homo sapien
ccctggacttttcgtgacaagtgctggcttcat

SEQ ID NO: 736436 - DNA, 33 bp, Homo sapien
ccctggacttttcgtggcaagtgctggcttcat

SEQ ID NO: 736437 - DNA, 33 bp, Homo sapien
ttgaaacggatggttacaaacaaagccttactt

SEQ ID NO: 736438 - DNA, 33 bp, Homo sapien
ttgaaacggatggttataaacaaagccttactt

SEQ ID NO: 736439 - DNA, 33 bp, Homo sapien
tggcctatagtaccctaagcaatctacctctgc

SEQ ID NO: 736440 - DNA, 33 bp, Homo sapien
tggcctatagtaccctgagcaatctacctctgc

SEQ ID NO: 736441 - DNA, 33 bp, Homo sapien
gccaccactgcagtgcaaaccagcggccacagc

SEQ ID NO: 736442 - DNA, 33 bp, Homo sapien
gccaccactgcagtgctaaccagcggccacagc

SEQ ID NO: 736443 - DNA, 33 bp, Homo sapien
cattgatcaatgtaacaaggctcctaagagact

SEQ ID NO: 736444 - DNA, 33 bp, Homo sapien
cattgatcaatgtaaccaggctcctaagagact

SEQ ID NO: 736445 - DNA, 33 bp, Homo sapien
gcactcagttggctgacagttttaatatgcctg

SEQ ID NO: 736446 - DNA, 33 bp, Homo sapien
gcactcagttggctgatagttttaatatgcctg

SEQ ID NO: 736447 - DNA, 33 bp, Homo sapien
actgcatctgaagcacagtaacattctctgtca

SEQ ID NO: 736448 - DNA, 33 bp, Homo sapien
actgcatctgaagcacggtaacattctctgtca

SEQ ID NO: 736449 - DNA, 33 bp, Homo sapien
gtgactgtgaaggaatcactgcttttccaggat

SEQ ID NO: 736450 - DNA, 33 bp, Homo sapien
gtgactgtgaaggaattactgcttttccaggat

SEQ ID NO: 736451 - DNA, 33 bp, Homo sapien
cactctcactctgcccagacagtttaagaaagt

SEQ ID NO: 736452 - DNA, 33 bp, Homo sapien
cactctcactctgcccggacagtttaagaaagt

SEQ ID NO: 736453 - DNA, 33 bp, Homo sapien
ttggagttttgctgtacgattgaagtatggatt

SEQ ID NO: 736454 - DNA, 33 bp, Homo sapien
ttggagttttgctgtatgattgaagtatggatt

SEQ ID NO: 736455 - DNA, 33 bp, Homo sapien
atcacgaaatgaaactaacattagccttcatct

SEQ ID NO: 736456 - DNA, 33 bp, Homo sapien
atcacgaaatgaaactcacattagccttcatct

SEQ ID NO: 736457 - DNA, 33 bp, Homo sapien
agttcttggttatttccattccagcccgtgagc

SEQ ID NO: 736458 - DNA, 33 bp, Homo sapien
agttcttggttatttctattccagcccgtgagc

SEQ ID NO: 736459 - DNA, 33 bp, Homo sapien
cctctctatctggacagatttgccttgaattat

SEQ ID NO: 736460 - DNA, 33 bp, Homo sapien
cctctctatctggacatatttgccttgaattat

SEQ ID NO: 736461 - DNA, 33 bp, Homo sapien
aaacaattggctaaaaattagaagactctcaac

SEQ ID NO: 736462 - DNA, 33 bp, Homo sapien
aaacaattggctaaaacttagaagactctcaac

SEQ ID NO: 736463 - DNA, 33 bp, Homo sapien
aaaagataactttgaactgggccttcaagaaga

SEQ ID NO: 736464 - DNA, 33 bp, Homo sapien
aaaagataactttgaattgggccttcaagaaga

SEQ ID NO: 736465 - DNA, 33 bp, Homo sapien
aactttgttttcatgcaaatggtttccatggaa

SEQ ID NO: 736466 - DNA, 33 bp, Homo sapien
aactttgttttcatgcgaatggtttccatggaa

SEQ ID NO: 736467 - DNA, 33 bp, Homo sapien
taccatttgcttcttggacaacatcacagtgaa

SEQ ID NO: 736468 - DNA, 33 bp, Homo sapien
taccatttgcttcttgtacaacatcacagtgaa

SEQ ID NO: 736469 - DNA, 33 bp, Homo sapien
agcgcatcactggggaaattatatacttagccc

SEQ ID NO: 736470 - DNA, 33 bp, Homo sapien
agcgcatcactggggacattatatacttagccc

SEQ ID NO: 736471 - DNA, 33 bp, Homo sapien
attgttccgtgccttcacctgcagggaaattca

SEQ ID NO: 736472 - DNA, 33 bp, Homo sapien
attgttccgtgccttcgcctgcagggaaattca

SEQ ID NO: 736473 - DNA, 33 bp, Homo sapien
gtaagggatgtcacagcctaacatcagtggagg

SEQ ID NO: 736474 - DNA, 33 bp, Homo sapien
gtaagggatgtcacaggctaacatcagtggagg

SEQ ID NO: 736475 - DNA, 33 bp, Homo sapien
tttaagattgctaaggaaagactgacccagacc

SEQ ID NO: 736476 - DNA, 33 bp, Homo sapien
tttaagattgctaagggaagactgacccagacc

SEQ ID NO: 736477 - DNA, 33 bp, Homo sapien
attgtcttggcaattccgaagcttggccacact

SEQ ID NO: 736478 - DNA, 33 bp, Homo sapien
attgtcttggcaattctgaagcttggccacact

SEQ ID NO: 736479 - DNA, 33 bp, Homo sapien
atttatctctttcctcaaactagttttggtgaa

SEQ ID NO: 736480 - DNA, 33 bp, Homo sapien
atttatctctttcctcgaactagttttggtgaa

SEQ ID NO: 736481 - DNA, 33 bp, Homo sapien
gtcaagggagtttcagaaccacacagagtaatc

SEQ ID NO: 736482 - DNA, 33 bp, Homo sapien
gtcaagggagtttcaggaccacacagagtaatc

SEQ ID NO: 736483 - DNA, 33 bp, Homo sapien
cggactttaagaagctaaatccagtttgatgca

SEQ ID NO: 736484 - DNA, 33 bp, Homo sapien
cggactttaagaagctgaatccagtttgatgca

SEQ ID NO: 736485 - DNA, 33 bp, Homo sapien
cgaaccgaatggaaccagagcgattgcataggc

SEQ ID NO: 736486 - DNA, 33 bp, Homo sapien
cgaaccgaatggaaccggagcgattgcataggc

SEQ ID NO: 736487 - DNA, 33 bp, Homo sapien
ctcgaagcttggcaaaatttcctgggactacaa

SEQ ID NO: 736488 - DNA, 33 bp, Homo sapien
ctcgaagcttggcaaagtttcctgggactacaa

SEQ ID NO: 736489 - DNA, 33 bp, Homo sapien
atcctcaaaacttgtcactgccattgagagatg

SEQ ID NO: 736490 - DNA, 33 bp, Homo sapien
atcctcaaaacttgtcgctgccattgagagatg

SEQ ID NO: 736491 - DNA, 33 bp, Homo sapien
agtgcacctcagtgaaacctcatgtgttaccca

SEQ ID NO: 736492 - DNA, 33 bp, Homo sapien
agtgcacctcagtgaagcctcatgtgttaccca

SEQ ID NO: 736493 - DNA, 33 bp, Homo sapien
tttgattaaccagtcagaaggaagtaatcagag

SEQ ID NO: 736494 - DNA, 33 bp, Homo sapien
tttgattaaccagtcataaggaagtaatcagag

SEQ ID NO: 736495 - DNA, 33 bp, Homo sapien
tgatgcccagtggaaacgtcaggagaaatgtaa

SEQ ID NO: 736496 - DNA, 33 bp, Homo sapien
tgatgcccagtggaaatgtcaggagaaatgtaa

SEQ ID NO: 736497 - DNA, 33 bp, Homo sapien
gtgcctctgttttctcacctgaaaaggagagga

SEQ ID NO: 736498 - DNA, 33 bp, Homo sapien
gtgcctctgttttctcgcctgaaaaggagagga

SEQ ID NO: 736499 - DNA, 33 bp, Homo sapien
acatttggttcaacatcagcgctatactcttct

SEQ ID NO: 736500 - DNA, 33 bp, Homo sapien
acatttggttcaacattagcgctatactcttct

SEQ ID NO: 736501 - DNA, 33 bp, Homo sapien
aattgccttcaccaataataacagttatacatt

SEQ ID NO: 736502 - DNA, 33 bp, Homo sapien
aattgccttcaccaatgataacagttatacatt

SEQ ID NO: 736503 - DNA, 33 bp, Homo sapien
agaaatctgtagcaacaaaaggtcaactggaca

SEQ ID NO: 736504 - DNA, 33 bp, Homo sapien
agaaatctgtagcaacgaaaggtcaactggaca

SEQ ID NO: 736505 - DNA, 33 bp, Homo sapien
tgaaattcaattctgccactagtaaaatgagga

SEQ ID NO: 736506 - DNA, 33 bp, Homo sapien
tgaaattcaattctgcgactagtaaaatgagga

SEQ ID NO: 736507 - DNA, 33 bp, Homo sapien
gggatgatgggtaaaactcagtctagctgtcca

SEQ ID NO: 736508 - DNA, 33 bp, Homo sapien
gggatgatgggtaaaattcagtctagctgtcca

SEQ ID NO: 736509 - DNA, 33 bp, Homo sapien
ctactatttttcttccgcttaatgctccatgct

SEQ ID NO: 736510 - DNA, 33 bp, Homo sapien
ctactatttttcttcctcttaatgctccatgct

SEQ ID NO: 736511 - DNA, 33 bp, Homo sapien
atactccatggaaatacgaactggcaaaaatca

SEQ ID NO: 736512 - DNA, 33 bp, Homo sapien
atactccatggaaatatgaactggcaaaaatca

SEQ ID NO: 736513 - DNA, 33 bp, Homo sapien
cctcacgacatccttcgatattaccttttgctt

SEQ ID NO: 736514 - DNA, 33 bp, Homo sapien
cctcacgacatccttctatattaccttttgctt

SEQ ID NO: 736515 - DNA, 33 bp, Homo sapien
gacacagtaaacaacaacaagatggaaaataag

SEQ ID NO: 736516 - DNA, 33 bp, Homo sapien
gacacagtaaacaacaccaagatggaaaataag

SEQ ID NO: 736517 - DNA, 33 bp, Homo sapien
taaaccatgtttcctcaaatctaaatggtcatc

SEQ ID NO: 736518 - DNA, 33 bp, Homo sapien
taaaccatgtttcctccaatctaaatggtcatc

SEQ ID NO: 736519 - DNA, 33 bp, Homo sapien
cacttccttagaaatgcataaagaccaagattg

SEQ ID NO: 736520 - DNA, 33 bp, Homo sapien
cacttccttagaaatggataaagaccaagattg

SEQ ID NO: 736521 - DNA, 33 bp, Homo sapien
tcatccttaggcttgggacaatgataaaattac

SEQ ID NO: 736522 - DNA, 33 bp, Homo sapien
tcatccttaggcttggtacaatgataaaattac

SEQ ID NO: 736523 - DNA, 33 bp, Homo sapien
ttcactcttaaaaatacagcaatgctggccagg

SEQ ID NO: 736524 - DNA, 33 bp, Homo sapien
ttcactcttaaaaatatagcaatgctggccagg

SEQ ID NO: 736525 - DNA, 33 bp, Homo sapien
actctgaaattttgtaacattatggctaatgca

SEQ ID NO: 736526 - DNA, 33 bp, Homo sapien
actctgaaattttgtaccattatggctaatgca

SEQ ID NO: 736527 - DNA, 33 bp, Homo sapien
gatagcattaaagcaacggtccccttaatttcc

SEQ ID NO: 736528 - DNA, 33 bp, Homo sapien
gatagcattaaagcaatggtccccttaatttcc

SEQ ID NO: 736529 - DNA, 33 bp, Homo sapien
aagcggccatgaagtaatactaacttacaatta

SEQ ID NO: 736530 - DNA, 33 bp, Homo sapien
aagcggccatgaagtagtactaacttacaatta

SEQ ID NO: 736531 - DNA, 33 bp, Homo sapien
tcagttaacacaaaggaaagtgttgcagttgaa

SEQ ID NO: 736532 - DNA, 33 bp, Homo sapien
tcagttaacacaaaggtaagtgttgcagttgaa

SEQ ID NO: 736533 - DNA, 33 bp, Homo sapien
attttacccttcaaatcatcttctggagttatt

SEQ ID NO: 736534 - DNA, 33 bp, Homo sapien
attttacccttcaaattatcttctggagttatt

SEQ ID NO: 736535 - DNA, 33 bp, Homo sapien
gcagtaaagtgctaagcctgaggagataccagc

SEQ ID NO: 736536 - DNA, 33 bp, Homo sapien
gcagtaaagtgctaagtctgaggagataccagc

SEQ ID NO: 736537 - DNA, 33 bp, Homo sapien
aaggcgtttaaatgccaactccaagttcaaaaa

SEQ ID NO: 736538 - DNA, 33 bp, Homo sapien
aaggcgtttaaatgccgactccaagttcaaaaa

SEQ ID NO: 736539 - DNA, 33 bp, Homo sapien
gtctagccagtgatgcagcaaggccagtattta

SEQ ID NO: 736540 - DNA, 33 bp, Homo sapien
gtctagccagtgatgcggcaaggccagtattta

SEQ ID NO: 736541 - DNA, 33 bp, Homo sapien
tctttcctacaaaaaacggtgctggtcacatac

SEQ ID NO: 736542 - DNA, 33 bp, Homo sapien
tctttcctacaaaaaatggtgctggtcacatac

SEQ ID NO: 736543 - DNA, 33 bp, Homo sapien
gacaaaagctaagtggcaaatatgacatcagat

SEQ ID NO: 736544 - DNA, 33 bp, Homo sapien
gacaaaagctaagtggtaaatatgacatcagat

SEQ ID NO: 736545 - DNA, 33 bp, Homo sapien
gagtatctgctgagaacgtcagttagatcatct

SEQ ID NO: 736546 - DNA, 33 bp, Homo sapien
gagtatctgctgagaaggtcagttagatcatct

SEQ ID NO: 736547 - DNA, 33 bp, Homo sapien
cagaaatgctgctatacgtgaagttgttctgga

SEQ ID NO: 736548 - DNA, 33 bp, Homo sapien
cagaaatgctgctatatgtgaagttgttctgga

SEQ ID NO: 736549 - DNA, 33 bp, Homo sapien
cacagtgactctcagagatttatgccaaaattg

SEQ ID NO: 736550 - DNA, 33 bp, Homo sapien
cacagtgactctcagatatttatgccaaaattg

SEQ ID NO: 736551 - DNA, 33 bp, Homo sapien
ctatgttgttgtattacgttttgtgccagagat

SEQ ID NO: 736552 - DNA, 33 bp, Homo sapien
ctatgttgttgtattatgttttgtgccagagat

SEQ ID NO: 736553 - DNA, 33 bp, Homo sapien
agctttgttcttctgtaacaacttttaatttca

SEQ ID NO: 736554 - DNA, 33 bp, Homo sapien
agctttgttcttctgtgacaacttttaatttca

SEQ ID NO: 736555 - DNA, 33 bp, Homo sapien
gaacgctcacttcagaccagatgttcatccgtc

SEQ ID NO: 736556 - DNA, 33 bp, Homo sapien
gaacgctcacttcagatcagatgttcatccgtc

SEQ ID NO: 736557 - DNA, 33 bp, Homo sapien
catctgagccttccgcaagttgtaattattttt

SEQ ID NO: 736558 - DNA, 33 bp, Homo sapien
catctgagccttccgcgagttgtaattattttt

SEQ ID NO: 736559 - DNA, 33 bp, Homo sapien
gtcagttactccacaaagcagggaagagtttga

SEQ ID NO: 736560 - DNA, 33 bp, Homo sapien
gtcagttactccacaacgcagggaagagtttga

SEQ ID NO: 736561 - DNA, 33 bp, Homo sapien
gcccagttgctttagggatctgttcggggctta

SEQ ID NO: 736562 - DNA, 33 bp, Homo sapien
gcccagttgctttaggtatctgttcggggctta

SEQ ID NO: 736563 - DNA, 33 bp, Homo sapien
ctgatactgtatcagacggcgcagacttggaac

SEQ ID NO: 736564 - DNA, 33 bp, Homo sapien
ctgatactgtatcagatggcgcagacttggaac

SEQ ID NO: 736565 - DNA, 33 bp, Homo sapien
ctttctgtattgtttccattggataggatttct

SEQ ID NO: 736566 - DNA, 33 bp, Homo sapien
ctttctgtattgtttcgattggataggatttct

SEQ ID NO: 736567 - DNA, 33 bp, Homo sapien
tatttagaataaatgcgcataaaaagattggaa

SEQ ID NO: 736568 - DNA, 33 bp, Homo sapien
tatttagaataaatgctcataaaaagattggaa

SEQ ID NO: 736569 - DNA, 33 bp, Homo sapien
ggtagtttctcctatgcaaacctaaatccctgt

SEQ ID NO: 736570 - DNA, 33 bp, Homo sapien
ggtagtttctcctatgtaaacctaaatccctgt

SEQ ID NO: 736571 - DNA, 33 bp, Homo sapien
gaaagtgtgtggaagcaaggcttggactctgca

SEQ ID NO: 736572 - DNA, 33 bp, Homo sapien
gaaagtgtgtggaagcgaggcttggactctgca

SEQ ID NO: 736573 - DNA, 33 bp, Homo sapien
aaatgaacaaaacttacactttgcagtagtgct

SEQ ID NO: 736574 - DNA, 33 bp, Homo sapien
aaatgaacaaaacttagactttgcagtagtgct

SEQ ID NO: 736575 - DNA, 33 bp, Homo sapien
tctcttgagctgtatccatcactgtcagactgt

SEQ ID NO: 736576 - DNA, 33 bp, Homo sapien
tctcttgagctgtatctatcactgtcagactgt

SEQ ID NO: 736577 - DNA, 33 bp, Homo sapien
tcctgataccaggcccagggatgattaaatcat

SEQ ID NO: 736578 - DNA, 33 bp, Homo sapien
tcctgataccaggcccggggatgattaaatcat

SEQ ID NO: 736579 - DNA, 33 bp, Homo sapien
gtgtaatttccatatgacaaaattcatcctaag

SEQ ID NO: 736580 - DNA, 33 bp, Homo sapien
gtgtaatttccatatggcaaaattcatcctaag

SEQ ID NO: 736581 - DNA, 33 bp, Homo sapien
tcacaggaatttacaccgaagacaaatgccaat

SEQ ID NO: 736582 - DNA, 33 bp, Homo sapien
tcacaggaatttacactgaagacaaatgccaat

SEQ ID NO: 736583 - DNA, 33 bp, Homo sapien
gtataaggcagcaaacaagagaaacagtagata

SEQ ID NO: 736584 - DNA, 33 bp, Homo sapien
gtataaggcagcaaaccagagaaacagtagata

SEQ ID NO: 736585 - DNA, 33 bp, Homo sapien
tacaagccagaacacaaacattcaccgagaaaa

SEQ ID NO: 736586 - DNA, 33 bp, Homo sapien
tacaagccagaacacagacattcaccgagaaaa

SEQ ID NO: 736587 - DNA, 33 bp, Homo sapien
gtaaacaaactgttgaccagatctagagatttc

SEQ ID NO: 736588 - DNA, 33 bp, Homo sapien
gtaaacaaactgttgatcagatctagagatttc

SEQ ID NO: 736589 - DNA, 33 bp, Homo sapien
ggttttcctagtcctgaacactagaatgctcca

SEQ ID NO: 736590 - DNA, 33 bp, Homo sapien
ggttttcctagtcctgtacactagaatgctcca

SEQ ID NO: 736591 - DNA, 33 bp, Homo sapien
ccccagcatcgacgtacgtgaataaaacaggtt

SEQ ID NO: 736592 - DNA, 33 bp, Homo sapien
ccccagcatcgacgtatgtgaataaaacaggtt

SEQ ID NO: 736593 - DNA, 33 bp, Homo sapien
ggacaggagagagaagactgagatcctaattgg

SEQ ID NO: 736594 - DNA, 33 bp, Homo sapien
ggacaggagagagaagcctgagatcctaattgg

SEQ ID NO: 736595 - DNA, 33 bp, Homo sapien
agggccaactggggcaagcagtgggaggctcag

SEQ ID NO: 736596 - DNA, 33 bp, Homo sapien
agggccaactggggcaggcagtgggaggctcag

SEQ ID NO: 736597 - DNA, 33 bp, Homo sapien
gctcagtccaaaaggaggcttatatctggctta

SEQ ID NO: 736598 - DNA, 33 bp, Homo sapien
gctcagtccaaaaggatgcttatatctggctta

SEQ ID NO: 736599 - DNA, 33 bp, Homo sapien
caaacaatctgattgcacctggaagcaaattct

SEQ ID NO: 736600 - DNA, 33 bp, Homo sapien
caaacaatctgattgcgcctggaagcaaattct

SEQ ID NO: 736601 - DNA, 33 bp, Homo sapien
attctttatttcccccaacagttgcataacttg

SEQ ID NO: 736602 - DNA, 33 bp, Homo sapien
attctttatttccccccacagttgcataacttg

SEQ ID NO: 736603 - DNA, 33 bp, Homo sapien
tcagagtaaattaagaggggtgctgctcttaac

SEQ ID NO: 736604 - DNA, 33 bp, Homo sapien
tcagagtaaattaagatgggtgctgctcttaac

SEQ ID NO: 736605 - DNA, 33 bp, Homo sapien
acaaaacggacaaagccccctgctctcatagag

SEQ ID NO: 736606 - DNA, 33 bp, Homo sapien
acaaaacggacaaagctccctgctctcatagag

SEQ ID NO: 736607 - DNA, 33 bp, Homo sapien
tagacaaattggactacaaaatgaaaaacttct

SEQ ID NO: 736608 - DNA, 33 bp, Homo sapien
tagacaaattggactagaaaatgaaaaacttct

SEQ ID NO: 736609 - DNA, 33 bp, Homo sapien
attaaaaatacagtccactaatgttatggtagg

SEQ ID NO: 736610 - DNA, 33 bp, Homo sapien
attaaaaatacagtccgctaatgttatggtagg

SEQ ID NO: 736611 - DNA, 33 bp, Homo sapien
aattatttagctcatgaaagtgtagaatctgag

SEQ ID NO: 736612 - DNA, 33 bp, Homo sapien
aattatttagctcatgtaagtgtagaatctgag

SEQ ID NO: 736613 - DNA, 33 bp, Homo sapien
ggcacataaaaaaatcaatcatagctatgattc

SEQ ID NO: 736614 - DNA, 33 bp, Homo sapien
ggcacataaaaaaatcgatcatagctatgattc

SEQ ID NO: 736615 - DNA, 33 bp, Homo sapien
agcagaggcaactcaaactgcttcaggagaaca

SEQ ID NO: 736616 - DNA, 33 bp, Homo sapien
agcagaggcaactcaagctgcttcaggagaaca

SEQ ID NO: 736617 - DNA, 33 bp, Homo sapien
acaggtggccagagcaagctttctatattttac

SEQ ID NO: 736618 - DNA, 33 bp, Homo sapien
acaggtggccagagcaggctttctatattttac

SEQ ID NO: 736619 - DNA, 33 bp, Homo sapien
tcaacaccaggagtacacagggcccacagggtg

SEQ ID NO: 736620 - DNA, 33 bp, Homo sapien
tcaacaccaggagtacgcagggcccacagggtg

SEQ ID NO: 736621 - DNA, 33 bp, Homo sapien
tcagtcttgttttaaccctttacacttctttct

SEQ ID NO: 736622 - DNA, 33 bp, Homo sapien
tcagtcttgttttaactctttacacttctttct

SEQ ID NO: 736623 - DNA, 33 bp, Homo sapien
aagctactcgctctaccgatgcattatcaattt

SEQ ID NO: 736624 - DNA, 33 bp, Homo sapien
aagctactcgctctactgatgcattatcaattt

SEQ ID NO: 736625 - DNA, 33 bp, Homo sapien
acttggttcttctcaggatttaaaaaccactgt

SEQ ID NO: 736626 - DNA, 33 bp, Homo sapien
acttggttcttctcagtatttaaaaaccactgt

SEQ ID NO: 736627 - DNA, 33 bp, Homo sapien
acagcagtgttcctgaaggaaaaggtcaggagt

SEQ ID NO: 736628 - DNA, 33 bp, Homo sapien
acagcagtgttcctgagggaaaaggtcaggagt

SEQ ID NO: 736629 - DNA, 33 bp, Homo sapien
ccattgcttctcacataagggtacactgtttgg

SEQ ID NO: 736630 - DNA, 33 bp, Homo sapien
ccattgcttctcacatgagggtacactgtttgg

SEQ ID NO: 736631 - DNA, 33 bp, Homo sapien
gcttcttggaggaaagaaccaggaatctcccag

SEQ ID NO: 736632 - DNA, 33 bp, Homo sapien
gcttcttggaggaaaggaccaggaatctcccag

SEQ ID NO: 736633 - DNA, 33 bp, Homo sapien
ctcttcagcaaagtcaacgttgaagtaagcaga

SEQ ID NO: 736634 - DNA, 33 bp, Homo sapien
ctcttcagcaaagtcagcgttgaagtaagcaga

SEQ ID NO: 736635 - DNA, 33 bp, Homo sapien
catgtccctaaccagacgtccacagctatgtgt

SEQ ID NO: 736636 - DNA, 33 bp, Homo sapien
catgtccctaaccagatgtccacagctatgtgt

SEQ ID NO: 736637 - DNA, 33 bp, Homo sapien
agaaagaaaagaagtcccccagagcaggcccct

SEQ ID NO: 736638 - DNA, 33 bp, Homo sapien
agaaagaaaagaagtctcccagagcaggcccct

SEQ ID NO: 736639 - DNA, 33 bp, Homo sapien
tctccttctctctctacgtcacttgtcctcaga

SEQ ID NO: 736640 - DNA, 33 bp, Homo sapien
tctccttctctctctatgtcacttgtcctcaga

SEQ ID NO: 736641 - DNA, 33 bp, Homo sapien
tggatgagcctcacagacatatgaacaatgctg

SEQ ID NO: 736642 - DNA, 33 bp, Homo sapien
tggatgagcctcacaggcatatgaacaatgctg

SEQ ID NO: 736643 - DNA, 33 bp, Homo sapien
caggtacatgaacaacagatacagtgggcactt

SEQ ID NO: 736644 - DNA, 33 bp, Homo sapien
caggtacatgaacaacggatacagtgggcactt

SEQ ID NO: 736645 - DNA, 33 bp, Homo sapien
catttttccatgtttcaagagaaccttcctgat

SEQ ID NO: 736646 - DNA, 33 bp, Homo sapien
catttttccatgtttcgagagaaccttcctgat

SEQ ID NO: 736647 - DNA, 33 bp, Homo sapien
gaaccgcttgttaaaacagtgaaatgctttggt

SEQ ID NO: 736648 - DNA, 33 bp, Homo sapien
gaaccgcttgttaaaatagtgaaatgctttggt

SEQ ID NO: 736649 - DNA, 33 bp, Homo sapien
acctacaacttctccactctgacatcagcaaag

SEQ ID NO: 736650 - DNA, 33 bp, Homo sapien
acctacaacttctccattctgacatcagcaaag

SEQ ID NO: 736651 - DNA, 33 bp, Homo sapien
gtgagcaagagttgcccagccagcacagaggag

SEQ ID NO: 736652 - DNA, 33 bp, Homo sapien
gtgagcaagagttgccgagccagcacagaggag

SEQ ID NO: 736653 - DNA, 33 bp, Homo sapien
caacagctagcttccgaatcaagtaggatggaa

SEQ ID NO: 736654 - DNA, 33 bp, Homo sapien
caacagctagcttccggatcaagtaggatggaa

SEQ ID NO: 736655 - DNA, 33 bp, Homo sapien
tctgattggagaccatcagcaggtcacttattc

SEQ ID NO: 736656 - DNA, 33 bp, Homo sapien
tctgattggagaccatgagcaggtcacttattc

SEQ ID NO: 736657 - DNA, 33 bp, Homo sapien
atcataatgaacatggcagcactttgtaaagtg

SEQ ID NO: 736658 - DNA, 33 bp, Homo sapien
atcataatgaacatgggagcactttgtaaagtg

SEQ ID NO: 736659 - DNA, 33 bp, Homo sapien
ttacattattattttacaggcttgcatttctgt

SEQ ID NO: 736660 - DNA, 33 bp, Homo sapien
ttacattattattttataggcttgcatttctgt

SEQ ID NO: 736661 - DNA, 33 bp, Homo sapien
ttcctcaagagttcccaaaagtcttaacttgtt

SEQ ID NO: 736662 - DNA, 33 bp, Homo sapien
ttcctcaagagttcccgaaagtcttaacttgtt

SEQ ID NO: 736663 - DNA, 33 bp, Homo sapien
ctgatgaggttttggaaggaaatgaggtagtta

SEQ ID NO: 736664 - DNA, 33 bp, Homo sapien
ctgatgaggttttggacggaaatgaggtagtta

SEQ ID NO: 736665 - DNA, 33 bp, Homo sapien
ctcttctaaagcatgcatacactcacaaaaccc

SEQ ID NO: 736666 - DNA, 33 bp, Homo sapien
ctcttctaaagcatgcgtacactcacaaaaccc

SEQ ID NO: 736667 - DNA, 33 bp, Homo sapien
aacaacaatgaatctccacacaataaaacattt

SEQ ID NO: 736668 - DNA, 33 bp, Homo sapien
aacaacaatgaatctctacacaataaaacattt

SEQ ID NO: 736669 - DNA, 33 bp, Homo sapien
aatgctaaatatggtaactgggcatagataccc

SEQ ID NO: 736670 - DNA, 33 bp, Homo sapien
aatgctaaatatggtacctgggcatagataccc

SEQ ID NO: 736671 - DNA, 33 bp, Homo sapien
tacacttgacccaggaacatttattgacagagt

SEQ ID NO: 736672 - DNA, 33 bp, Homo sapien
tacacttgacccaggaccatttattgacagagt

SEQ ID NO: 736673 - DNA, 33 bp, Homo sapien
tcatttgaaggtgctcactacatattctgcaca

SEQ ID NO: 736674 - DNA, 33 bp, Homo sapien
tcatttgaaggtgctcgctacatattctgcaca

SEQ ID NO: 736675 - DNA, 33 bp, Homo sapien
aagtagaacggaaaaggcactaactattaaaaa

SEQ ID NO: 736676 - DNA, 33 bp, Homo sapien
aagtagaacggaaaagtcactaactattaaaaa

SEQ ID NO: 736677 - DNA, 33 bp, Homo sapien
tttaaaaagtggtttaagagtatccaacctaaa

SEQ ID NO: 736678 - DNA, 33 bp, Homo sapien
tttaaaaagtggtttaggagtatccaacctaaa

SEQ ID NO: 736679 - DNA, 33 bp, Homo sapien
aaggtgaaaattcttacacatgtcagttgtact

SEQ ID NO: 736680 - DNA, 33 bp, Homo sapien
aaggtgaaaattcttatacatgtcagttgtact

SEQ ID NO: 736681 - DNA, 33 bp, Homo sapien
cacagggatgacattcaaagggacctgggaggc

SEQ ID NO: 736682 - DNA, 33 bp, Homo sapien
cacagggatgacattctaagggacctgggaggc

SEQ ID NO: 736683 - DNA, 33 bp, Homo sapien
gtaaaaggagaaaaccacaaactggatcccgtt

SEQ ID NO: 736684 - DNA, 33 bp, Homo sapien
gtaaaaggagaaaaccgcaaactggatcccgtt

SEQ ID NO: 736685 - DNA, 33 bp, Homo sapien
agaattagataaatgcaataaaggcaacatata

SEQ ID NO: 736686 - DNA, 33 bp, Homo sapien
agaattagataaatgctataaaggcaacatata

SEQ ID NO: 736687 - DNA, 33 bp, Homo sapien
ttcctctatttatttacggatgatccccaacat

SEQ ID NO: 736688 - DNA, 33 bp, Homo sapien
ttcctctatttatttatggatgatccccaacat

SEQ ID NO: 736689 - DNA, 33 bp, Homo sapien
tgttaacagcgcattcaattgccatctgacatg

SEQ ID NO: 736690 - DNA, 33 bp, Homo sapien
tgttaacagcgcattcgattgccatctgacatg

SEQ ID NO: 736691 - DNA, 33 bp, Homo sapien
tcaaaggatggcaccactcatcagtttgctgtt

SEQ ID NO: 736692 - DNA, 33 bp, Homo sapien
tcaaaggatggcaccattcatcagtttgctgtt

SEQ ID NO: 736693 - DNA, 33 bp, Homo sapien
actatttatttcagacaaggcaagtctaaacac

SEQ ID NO: 736694 - DNA, 33 bp, Homo sapien
actatttatttcagaccaggcaagtctaaacac

SEQ ID NO: 736695 - DNA, 33 bp, Homo sapien
cagaggactagaagaacccatcgccacttttac

SEQ ID NO: 736696 - DNA, 33 bp, Homo sapien
cagaggactagaagaatccatcgccacttttac

SEQ ID NO: 736697 - DNA, 33 bp, Homo sapien
gatgttgttgatcagcaaaggactgaactgctg

SEQ ID NO: 736698 - DNA, 33 bp, Homo sapien
gatgttgttgatcagcgaaggactgaactgctg

SEQ ID NO: 736699 - DNA, 33 bp, Homo sapien
ccaagagtttgacacccagccagtcagtgataa

SEQ ID NO: 736700 - DNA, 33 bp, Homo sapien
ccaagagtttgacaccgagccagtcagtgataa

SEQ ID NO: 736701 - DNA, 33 bp, Homo sapien
ttatgaaagacgaagccgaaatacagaagctgt

SEQ ID NO: 736702 - DNA, 33 bp, Homo sapien
ttatgaaagacgaagctgaaatacagaagctgt

SEQ ID NO: 736703 - DNA, 33 bp, Homo sapien
tctttcctcaatcgtaaccacccttatttgtga

SEQ ID NO: 736704 - DNA, 33 bp, Homo sapien
tctttcctcaatcgtagccacccttatttgtga

SEQ ID NO: 736705 - DNA, 33 bp, Homo sapien
tggagaccaaaagtctaaagtctctatcattgg

SEQ ID NO: 736706 - DNA, 33 bp, Homo sapien
tggagaccaaaagtctgaagtctctatcattgg

SEQ ID NO: 736707 - DNA, 33 bp, Homo sapien
ccactgaaaagatctcagaatcaacatgactgt

SEQ ID NO: 736708 - DNA, 33 bp, Homo sapien
ccactgaaaagatctcggaatcaacatgactgt

SEQ ID NO: 736709 - DNA, 33 bp, Homo sapien
caggagtgaaagcacaagtgccatcggagtgtc

SEQ ID NO: 736710 - DNA, 33 bp, Homo sapien
caggagtgaaagcacaggtgccatcggagtgtc

SEQ ID NO: 736711 - DNA, 33 bp, Homo sapien
cagatgcttcctcataggaccttaaaggataga

SEQ ID NO: 736712 - DNA, 33 bp, Homo sapien
cagatgcttcctcatatgaccttaaaggataga

SEQ ID NO: 736713 - DNA, 33 bp, Homo sapien
agggagtccaggcaccaagtgtgctcaggcttg

SEQ ID NO: 736714 - DNA, 33 bp, Homo sapien
agggagtccaggcaccgagtgtgctcaggcttg

SEQ ID NO: 736715 - DNA, 33 bp, Homo sapien
catgagggaaacgaaccgtgggaatgctctgct

SEQ ID NO: 736716 - DNA, 33 bp, Homo sapien
catgagggaaacgaactgtgggaatgctctgct

SEQ ID NO: 736717 - DNA, 33 bp, Homo sapien
ctaagagtgaaaggaaagttcacgttgaagtag

SEQ ID NO: 736718 - DNA, 33 bp, Homo sapien
ctaagagtgaaaggaatgttcacgttgaagtag

SEQ ID NO: 736719 - DNA, 33 bp, Homo sapien
aaagagggaagaggatgagttttatgagctata

SEQ ID NO: 736720 - DNA, 33 bp, Homo sapien
aaagagggaagaggattagttttatgagctata

SEQ ID NO: 736721 - DNA, 33 bp, Homo sapien
ctgatctagtcagtaaactcaccaatgtcttct

SEQ ID NO: 736722 - DNA, 33 bp, Homo sapien
ctgatctagtcagtaagctcaccaatgtcttct

SEQ ID NO: 736723 - DNA, 33 bp, Homo sapien
ctgtggtggcccaaaaggcgtcatcagctgtca

SEQ ID NO: 736724 - DNA, 33 bp, Homo sapien
ctgtggtggcccaaaatgcgtcatcagctgtca

SEQ ID NO: 736725 - DNA, 33 bp, Homo sapien
ataaaaacacctagaaaaaagaaattgacagag

SEQ ID NO: 736726 - DNA, 33 bp, Homo sapien
ataaaaacacctagaagaaagaaattgacagag

SEQ ID NO: 736727 - DNA, 33 bp, Homo sapien
catgtctatgtaataaatggaacctccaataaa

SEQ ID NO: 736728 - DNA, 33 bp, Homo sapien
catgtctatgtaataagtggaacctccaataaa

SEQ ID NO: 736729 - DNA, 33 bp, Homo sapien
tgcacctgatcttttccaaatgccttaaagctt

SEQ ID NO: 736730 - DNA, 33 bp, Homo sapien
tgcacctgatcttttctaaatgccttaaagctt

SEQ ID NO: 736731 - DNA, 33 bp, Homo sapien
ggtcccatgtcagctacggtgggacagataacc

SEQ ID NO: 736732 - DNA, 33 bp, Homo sapien
ggtcccatgtcagctatggtgggacagataacc

SEQ ID NO: 736733 - DNA, 33 bp, Homo sapien
taattcacaaaattcacgtgagactttcttaac

SEQ ID NO: 736734 - DNA, 33 bp, Homo sapien
taattcacaaaattcatgtgagactttcttaac

SEQ ID NO: 736735 - DNA, 33 bp, Homo sapien
acatacaatgaaattcactgattttaactgtac

SEQ ID NO: 736736 - DNA, 33 bp, Homo sapien
acatacaatgaaattcgctgattttaactgtac

SEQ ID NO: 736737 - DNA, 33 bp, Homo sapien
gaggtagtgattatcaaagggctaggtcactag

SEQ ID NO: 736738 - DNA, 33 bp, Homo sapien
gaggtagtgattatcagagggctaggtcactag

SEQ ID NO: 736739 - DNA, 33 bp, Homo sapien
actgtcttctgaagagaacttgatttgatagaa

SEQ ID NO: 736740 - DNA, 33 bp, Homo sapien
actgtcttctgaagaggacttgatttgatagaa

SEQ ID NO: 736741 - DNA, 33 bp, Homo sapien
actgtcaaatcatcaaagcaggtacaaggagga

SEQ ID NO: 736742 - DNA, 33 bp, Homo sapien
actgtcaaatcatcaaggcaggtacaaggagga

SEQ ID NO: 736743 - DNA, 33 bp, Homo sapien
gcactgggctttatcacggggaatgtgaaataa

SEQ ID NO: 736744 - DNA, 33 bp, Homo sapien
gcactgggctttatcatggggaatgtgaaataa

SEQ ID NO: 736745 - DNA, 33 bp, Homo sapien
cccatagcacccttccccctttgtctatggccc

SEQ ID NO: 736746 - DNA, 33 bp, Homo sapien
cccatagcacccttcctcctttgtctatggccc

SEQ ID NO: 736747 - DNA, 33 bp, Homo sapien
cttaaaacaacacaaacgtagggctcctgctgg

SEQ ID NO: 736748 - DNA, 33 bp, Homo sapien
cttaaaacaacacaaatgtagggctcctgctgg

SEQ ID NO: 736749 - DNA, 33 bp, Homo sapien
acattgaagggctttgcaaatagaaggaatgaa

SEQ ID NO: 736750 - DNA, 33 bp, Homo sapien
acattgaagggctttgtaaatagaaggaatgaa

SEQ ID NO: 736751 - DNA, 33 bp, Homo sapien
gaactgtgacaaggaaagatagtgacaagatct

SEQ ID NO: 736752 - DNA, 33 bp, Homo sapien
gaactgtgacaaggaaggatagtgacaagatct

SEQ ID NO: 736753 - DNA, 33 bp, Homo sapien
agcatggcttgtgagaaaaaaaggcagcctcat

SEQ ID NO: 736754 - DNA, 33 bp, Homo sapien
agcatggcttgtgagagaaaaaggcagcctcat

SEQ ID NO: 736755 - DNA, 33 bp, Homo sapien
atagcggccatctgcacaccgacctggtggtgt

SEQ ID NO: 736756 - DNA, 33 bp, Homo sapien
atagcggccatctgcataccgacctggtggtgt

SEQ ID NO: 736757 - DNA, 33 bp, Homo sapien
gtcgaatcgctaacaaagtgatgggctctgttt

SEQ ID NO: 736758 - DNA, 33 bp, Homo sapien
gtcgaatcgctaacaatgtgatgggctctgttt

SEQ ID NO: 736759 - DNA, 33 bp, Homo sapien
gaggaactatctaatacgctgaagacagtatca

SEQ ID NO: 736760 - DNA, 33 bp, Homo sapien
gaggaactatctaatatgctgaagacagtatca

SEQ ID NO: 736761 - DNA, 33 bp, Homo sapien
cttggtctaagaaatacgaaagaggcatgtgtt

SEQ ID NO: 736762 - DNA, 33 bp, Homo sapien
cttggtctaagaaatatgaaagaggcatgtgtt

SEQ ID NO: 736763 - DNA, 33 bp, Homo sapien
ttaagtttcaacatacaaagttggaggcacaca

SEQ ID NO: 736764 - DNA, 33 bp, Homo sapien
ttaagtttcaacatacgaagttggaggcacaca

SEQ ID NO: 736765 - DNA, 33 bp, Homo sapien
acacattcaggccacaacaatgagattctgtga

SEQ ID NO: 736766 - DNA, 33 bp, Homo sapien
acacattcaggccacagcaatgagattctgtga

SEQ ID NO: 736767 - DNA, 33 bp, Homo sapien
gcccagggtggcctccaattcttgagctcaagt

SEQ ID NO: 736768 - DNA, 33 bp, Homo sapien
gcccagggtggcctcccattcttgagctcaagt

SEQ ID NO: 736769 - DNA, 33 bp, Homo sapien
gcctataatttcatcaacatagcaggtaactag

SEQ ID NO: 736770 - DNA, 33 bp, Homo sapien
gcctataatttcatcagcatagcaggtaactag

SEQ ID NO: 736771 - DNA, 33 bp, Homo sapien
tccgtggcagaaattacgcaatgcaacatttaa

SEQ ID NO: 736772 - DNA, 33 bp, Homo sapien
tccgtggcagaaattatgcaatgcaacatttaa

SEQ ID NO: 736773 - DNA, 33 bp, Homo sapien
tgtgatttttcacaaccgctaattcattacctt

SEQ ID NO: 736774 - DNA, 33 bp, Homo sapien
tgtgatttttcacaactgctaattcattacctt

SEQ ID NO: 736775 - DNA, 33 bp, Homo sapien
ctcctggcctcttgcaatgacttaaagcatcca

SEQ ID NO: 736776 - DNA, 33 bp, Homo sapien
ctcctggcctcttgcagtgacttaaagcatcca

SEQ ID NO: 736777 - DNA, 33 bp, Homo sapien
atgaaaaagcaagagtgaactacagaatattta

SEQ ID NO: 736778 - DNA, 33 bp, Homo sapien
atgaaaaagcaagagttaactacagaatattta

SEQ ID NO: 736779 - DNA, 33 bp, Homo sapien
gttggatttttattgtcaaggtcactccgagga

SEQ ID NO: 736780 - DNA, 33 bp, Homo sapien
gttggatttttattgttaaggtcactccgagga

SEQ ID NO: 736781 - DNA, 33 bp, Homo sapien
tcagatgtcacaataacaccctctgacttagta

SEQ ID NO: 736782 - DNA, 33 bp, Homo sapien
tcagatgtcacaataataccctctgacttagta

SEQ ID NO: 736783 - DNA, 33 bp, Homo sapien
aataagtccgtttccaagttatatttcgctagt

SEQ ID NO: 736784 - DNA, 33 bp, Homo sapien
aataagtccgtttccatgttatatttcgctagt

SEQ ID NO: 736785 - DNA, 33 bp, Homo sapien
tcccattaggagtagtcaaatgttcttcctagt

SEQ ID NO: 736786 - DNA, 33 bp, Homo sapien
tcccattaggagtagtgaaatgttcttcctagt

SEQ ID NO: 736787 - DNA, 33 bp, Homo sapien
tcttcagtgtttaagaaacttctcttcctggct

SEQ ID NO: 736788 - DNA, 33 bp, Homo sapien
tcttcagtgtttaagagacttctcttcctggct

SEQ ID NO: 736789 - DNA, 33 bp, Homo sapien
cgtgtgcttgtgtataagggttttggtttgttt

SEQ ID NO: 736790 - DNA, 33 bp, Homo sapien
cgtgtgcttgtgtatatgggttttggtttgttt

SEQ ID NO: 736791 - DNA, 33 bp, Homo sapien
ccagggacacatggacgattagctggtattcat

SEQ ID NO: 736792 - DNA, 33 bp, Homo sapien
ccagggacacatggactattagctggtattcat

SEQ ID NO: 736793 - DNA, 33 bp, Homo sapien
gctgcacatcaggtaacgatcttcccatgtgtg

SEQ ID NO: 736794 - DNA, 33 bp, Homo sapien
gctgcacatcaggtaatgatcttcccatgtgtg

SEQ ID NO: 736795 - DNA, 33 bp, Homo sapien
gcaaggaagccttcccagattagggcaaattcc

SEQ ID NO: 736796 - DNA, 33 bp, Homo sapien
gcaaggaagccttcccggattagggcaaattcc

SEQ ID NO: 736797 - DNA, 33 bp, Homo sapien
ttttctctgaaattcacgctgtcttccccaggc

SEQ ID NO: 736798 - DNA, 33 bp, Homo sapien
ttttctctgaaattcatgctgtcttccccaggc

SEQ ID NO: 736799 - DNA, 33 bp, Homo sapien
tgctgttttgaaacagaagtcttcattgcatat

SEQ ID NO: 736800 - DNA, 33 bp, Homo sapien
tgctgttttgaaacagtagtcttcattgcatat

SEQ ID NO: 736801 - DNA, 33 bp, Homo sapien
caagggtgtcaacacaactcaatgggaaaaatt

SEQ ID NO: 736802 - DNA, 33 bp, Homo sapien
caagggtgtcaacacagctcaatgggaaaaatt

SEQ ID NO: 736803 - DNA, 33 bp, Homo sapien
tccacaacctcgggacaatcttaaccaccaacg

SEQ ID NO: 736804 - DNA, 33 bp, Homo sapien
tccacaacctcgggacgatcttaaccaccaacg

SEQ ID NO: 736805 - DNA, 33 bp, Homo sapien
ttgcccatttctactcacactgaaaaaacgtgt

SEQ ID NO: 736806 - DNA, 33 bp, Homo sapien
ttgcccatttctactctcactgaaaaaacgtgt

SEQ ID NO: 736807 - DNA, 33 bp, Homo sapien
gttgtgaactgccaccaataaaaaccacacaag

SEQ ID NO: 736808 - DNA, 33 bp, Homo sapien
gttgtgaactgccaccgataaaaaccacacaag

SEQ ID NO: 736809 - DNA, 33 bp, Homo sapien
tcagtggctttttaagcaaagttacagctaggc

SEQ ID NO: 736810 - DNA, 33 bp, Homo sapien
tcagtggctttttaagtaaagttacagctaggc

SEQ ID NO: 736811 - DNA, 33 bp, Homo sapien
aggagcagtaagcatcagaattcattctccgtg

SEQ ID NO: 736812 - DNA, 33 bp, Homo sapien
aggagcagtaagcatcggaattcattctccgtg

SEQ ID NO: 736813 - DNA, 33 bp, Homo sapien
ttcaataggttcatgactaaacaaactggtatg

SEQ ID NO: 736814 - DNA, 33 bp, Homo sapien
ttcaataggttcatgattaaacaaactggtatg

SEQ ID NO: 736815 - DNA, 33 bp, Homo sapien
attttattgacattaccgctatgcaccaaagta

SEQ ID NO: 736816 - DNA, 33 bp, Homo sapien
attttattgacattactgctatgcaccaaagta

SEQ ID NO: 736817 - DNA, 33 bp, Homo sapien
gttttcctggtgtgcacgttagactcctagccc

SEQ ID NO: 736818 - DNA, 33 bp, Homo sapien
gttttcctggtgtgcatgttagactcctagccc

SEQ ID NO: 736819 - DNA, 33 bp, Homo sapien
ttggagaaattggagcccttgtgcactgttgat

SEQ ID NO: 736820 - DNA, 33 bp, Homo sapien
ttggagaaattggagctcttgtgcactgttgat

SEQ ID NO: 736821 - DNA, 33 bp, Homo sapien
catccattttgtagcactcgtcagaatttcatt

SEQ ID NO: 736822 - DNA, 33 bp, Homo sapien
catccattttgtagcattcgtcagaatttcatt

SEQ ID NO: 736823 - DNA, 33 bp, Homo sapien
ctcattcttaatcaccacttctcaaaacaggta

SEQ ID NO: 736824 - DNA, 33 bp, Homo sapien
ctcattcttaatcaccgcttctcaaaacaggta

SEQ ID NO: 736825 - DNA, 33 bp, Homo sapien
gttttttgggcaataaaaaaataatagaatatg

SEQ ID NO: 736826 - DNA, 33 bp, Homo sapien
gttttttgggcaataataaaataatagaatatg

SEQ ID NO: 736827 - DNA, 33 bp, Homo sapien
aaaatttgaacttaaacgagtcgttaaatcaat

SEQ ID NO: 736828 - DNA, 33 bp, Homo sapien
aaaatttgaacttaaatgagtcgttaaatcaat

SEQ ID NO: 736829 - DNA, 33 bp, Homo sapien
atagataaaacgaatagcatgcctttaatcttt

SEQ ID NO: 736830 - DNA, 33 bp, Homo sapien
atagataaaacgaatatcatgcctttaatcttt

SEQ ID NO: 736831 - DNA, 33 bp, Homo sapien
acttgtattttaggcacgtaatttaagatgttg

SEQ ID NO: 736832 - DNA, 33 bp, Homo sapien
acttgtattttaggcatgtaatttaagatgttg

SEQ ID NO: 736833 - DNA, 33 bp, Homo sapien
tttcctaagtgtccatcatcattgtacttgctc

SEQ ID NO: 736834 - DNA, 33 bp, Homo sapien
tttcctaagtgtccattatcattgtacttgctc

SEQ ID NO: 736835 - DNA, 33 bp, Homo sapien
tttataacgatgcttacgttaataagatccaga

SEQ ID NO: 736836 - DNA, 33 bp, Homo sapien
tttataacgatgcttaggttaataagatccaga

SEQ ID NO: 736837 - DNA, 33 bp, Homo sapien
gtgtcctagcaataaaccaatcagttgccctgt

SEQ ID NO: 736838 - DNA, 33 bp, Homo sapien
gtgtcctagcaataaagcaatcagttgccctgt

SEQ ID NO: 736839 - DNA, 33 bp, Homo sapien
ttcattctttttccacccacttgtcaaagccag

SEQ ID NO: 736840 - DNA, 33 bp, Homo sapien
ttcattctttttccactcacttgtcaaagccag

SEQ ID NO: 736841 - DNA, 33 bp, Homo sapien
ttttatcaagatcaaagagatcaacctagaaat

SEQ ID NO: 736842 - DNA, 33 bp, Homo sapien
ttttatcaagatcaaatagatcaacctagaaat

SEQ ID NO: 736843 - DNA, 33 bp, Homo sapien
atttcctgatcaccaaccttcaccaagagattg

SEQ ID NO: 736844 - DNA, 33 bp, Homo sapien
atttcctgatcaccaagcttcaccaagagattg

SEQ ID NO: 736845 - DNA, 33 bp, Homo sapien
gccagactatagaaaaccagtgcttgcatagca

SEQ ID NO: 736846 - DNA, 33 bp, Homo sapien
gccagactatagaaaatcagtgcttgcatagca

SEQ ID NO: 736847 - DNA, 33 bp, Homo sapien
acctatgcgtggatcacatggaatcgcagtttc

SEQ ID NO: 736848 - DNA, 33 bp, Homo sapien
acctatgcgtggatcatatggaatcgcagtttc

SEQ ID NO: 736849 - DNA, 33 bp, Homo sapien
ctctggggagaaggtacgatccatgttcaactt

SEQ ID NO: 736850 - DNA, 33 bp, Homo sapien
ctctggggagaaggtatgatccatgttcaactt

SEQ ID NO: 736851 - DNA, 33 bp, Homo sapien
tgtggcctgccaagtgaaccatgtaaaatgtat

SEQ ID NO: 736852 - DNA, 33 bp, Homo sapien
tgtggcctgccaagtggaccatgtaaaatgtat

SEQ ID NO: 736853 - DNA, 33 bp, Homo sapien
gctatttaatttgacaacctggaacatgtgttt

SEQ ID NO: 736854 - DNA, 33 bp, Homo sapien
gctatttaatttgacatcctggaacatgtgttt

SEQ ID NO: 736855 - DNA, 33 bp, Homo sapien
cttgccatttcttacaaggatgccagtcatact

SEQ ID NO: 736856 - DNA, 33 bp, Homo sapien
cttgccatttcttacagggatgccagtcatact

SEQ ID NO: 736857 - DNA, 33 bp, Homo sapien
gctagaacatcaagaggagacacgcatttgaaa

SEQ ID NO: 736858 - DNA, 33 bp, Homo sapien
gctagaacatcaagagtagacacgcatttgaaa

SEQ ID NO: 736859 - DNA, 33 bp, Homo sapien
acaaagtgttgtgggagaagacctggactgcca

SEQ ID NO: 736860 - DNA, 33 bp, Homo sapien
acaaagtgttgtgggataagacctggactgcca

SEQ ID NO: 736861 - DNA, 33 bp, Homo sapien
tcagcaaactctaacactacaaaattatcctaa

SEQ ID NO: 736862 - DNA, 33 bp, Homo sapien
tcagcaaactctaacagtacaaaattatcctaa

SEQ ID NO: 736863 - DNA, 33 bp, Homo sapien
ttgtgtgcgaaagtgcaatggatgattattggt

SEQ ID NO: 736864 - DNA, 33 bp, Homo sapien
ttgtgtgcgaaagtgcgatggatgattattggt

SEQ ID NO: 736865 - DNA, 33 bp, Homo sapien
cctatggtttggcttcaaagggaagaagaggac

SEQ ID NO: 736866 - DNA, 33 bp, Homo sapien
cctatggtttggcttcgaagggaagaagaggac

SEQ ID NO: 736867 - DNA, 33 bp, Homo sapien
agagcgaaaacccaccagagaaactcagcaaag

SEQ ID NO: 736868 - DNA, 33 bp, Homo sapien
agagcgaaaacccaccggagaaactcagcaaag

SEQ ID NO: 736869 - DNA, 33 bp, Homo sapien
ggtaagcctgaggggaacatcttcctggagctg

SEQ ID NO: 736870 - DNA, 33 bp, Homo sapien
ggtaagcctgaggggagcatcttcctggagctg

SEQ ID NO: 736871 - DNA, 33 bp, Homo sapien
ctttgcagaaggtcttcaaaataaggactaaga

SEQ ID NO: 736872 - DNA, 33 bp, Homo sapien
ctttgcagaaggtctttaaaataaggactaaga

SEQ ID NO: 736873 - DNA, 33 bp, Homo sapien
aaaagaaggaactatcaccactaggccctgatg

SEQ ID NO: 736874 - DNA, 33 bp, Homo sapien
aaaagaaggaactatccccactaggccctgatg

SEQ ID NO: 736875 - DNA, 33 bp, Homo sapien
ggatgcagggagactaagaggaagttactgcac

SEQ ID NO: 736876 - DNA, 33 bp, Homo sapien
ggatgcagggagactaggaggaagttactgcac

SEQ ID NO: 736877 - DNA, 33 bp, Homo sapien
accacaaagtacttgacctaggtgtgaggaaag

SEQ ID NO: 736878 - DNA, 33 bp, Homo sapien
accacaaagtacttgatctaggtgtgaggaaag

SEQ ID NO: 736879 - DNA, 33 bp, Homo sapien
ggacacagtattaacccattagctcatggacct

SEQ ID NO: 736880 - DNA, 33 bp, Homo sapien
ggacacagtattaaccgattagctcatggacct

SEQ ID NO: 736881 - DNA, 33 bp, Homo sapien
atattagctctaagaaatgatacattgcattgt

SEQ ID NO: 736882 - DNA, 33 bp, Homo sapien
atattagctctaagaagtgatacattgcattgt

SEQ ID NO: 736883 - DNA, 33 bp, Homo sapien
cttttcttcctttgaaatgagttactgctgact

SEQ ID NO: 736884 - DNA, 33 bp, Homo sapien
cttttcttcctttgaagtgagttactgctgact

SEQ ID NO: 736885 - DNA, 33 bp, Homo sapien
gtcatctattgccccagcacttaaaggttttta

SEQ ID NO: 736886 - DNA, 33 bp, Homo sapien
gtcatctattgccccatcacttaaaggttttta

SEQ ID NO: 736887 - DNA, 33 bp, Homo sapien
tagggatgatactagacgtaaaattctactgtt

SEQ ID NO: 736888 - DNA, 33 bp, Homo sapien
tagggatgatactagatgtaaaattctactgtt

SEQ ID NO: 736889 - DNA, 33 bp, Homo sapien
cctttgaaatttgagaagtctagatgaccatag

SEQ ID NO: 736890 - DNA, 33 bp, Homo sapien
cctttgaaatttgagacgtctagatgaccatag

SEQ ID NO: 736891 - DNA, 33 bp, Homo sapien
aatgatggcagagtagaacttgactaacatatt

SEQ ID NO: 736892 - DNA, 33 bp, Homo sapien
aatgatggcagagtaggacttgactaacatatt

SEQ ID NO: 736893 - DNA, 33 bp, Homo sapien
tccttctgcaaaataaagatgataattgtatac

SEQ ID NO: 736894 - DNA, 33 bp, Homo sapien
tccttctgcaaaataaggatgataattgtatac

SEQ ID NO: 736895 - DNA, 33 bp, Homo sapien
taaaggtgaggataggacacactttcaggagca

SEQ ID NO: 736896 - DNA, 33 bp, Homo sapien
taaaggtgaggatagggcacactttcaggagca

SEQ ID NO: 736897 - DNA, 33 bp, Homo sapien
agggatgtggctgagaaagaacaggcctgcaat

SEQ ID NO: 736898 - DNA, 33 bp, Homo sapien
agggatgtggctgagagagaacaggcctgcaat

SEQ ID NO: 736899 - DNA, 33 bp, Homo sapien
gtttaacattaaatcccgagtctgcatatcctt

SEQ ID NO: 736900 - DNA, 33 bp, Homo sapien
gtttaacattaaatcctgagtctgcatatcctt

SEQ ID NO: 736901 - DNA, 33 bp, Homo sapien
tagaccatgcctgacactgaaaagaggaaaagg

SEQ ID NO: 736902 - DNA, 33 bp, Homo sapien
tagaccatgcctgacattgaaaagaggaaaagg

SEQ ID NO: 736903 - DNA, 33 bp, Homo sapien
tgtacgcgattccactcagcagttctccgcgtt

SEQ ID NO: 736904 - DNA, 33 bp, Homo sapien
tgtacgcgattccacttagcagttctccgcgtt

SEQ ID NO: 736905 - DNA, 33 bp, Homo sapien
gctctgtcttctcaaaatcatcagccaggaata

SEQ ID NO: 736906 - DNA, 33 bp, Homo sapien
gctctgtcttctcaaactcatcagccaggaata

SEQ ID NO: 736907 - DNA, 33 bp, Homo sapien
cactggatttaaaagccgctctgcacattggag

SEQ ID NO: 736908 - DNA, 33 bp, Homo sapien
cactggatttaaaagctgctctgcacattggag

SEQ ID NO: 736909 - DNA, 33 bp, Homo sapien
atttgtgtgctgatgaaaatgacccattagaga

SEQ ID NO: 736910 - DNA, 33 bp, Homo sapien
atttgtgtgctgatgagaatgacccattagaga

SEQ ID NO: 736911 - DNA, 33 bp, Homo sapien
gaatttttaatgacggaaagtattatagtagat

SEQ ID NO: 736912 - DNA, 33 bp, Homo sapien
gaatttttaatgacgggaagtattatagtagat

SEQ ID NO: 736913 - DNA, 33 bp, Homo sapien
cttcttcagtggctgccctgtttctctgcccct

SEQ ID NO: 736914 - DNA, 33 bp, Homo sapien
cttcttcagtggctgctctgtttctctgcccct

SEQ ID NO: 736915 - DNA, 33 bp, Homo sapien
ccctgtcattaggagaatccttagaagaattat

SEQ ID NO: 736916 - DNA, 33 bp, Homo sapien
ccctgtcattaggagactccttagaagaattat

SEQ ID NO: 736917 - DNA, 33 bp, Homo sapien
gctaattctgccctgaagaaaccctgctaggtg

SEQ ID NO: 736918 - DNA, 33 bp, Homo sapien
gctaattctgccctgatgaaaccctgctaggtg

SEQ ID NO: 736919 - DNA, 33 bp, Homo sapien
cagcatattgttttgaccgtttcttcagacagt

SEQ ID NO: 736920 - DNA, 33 bp, Homo sapien
cagcatattgttttgatcgtttcttcagacagt

SEQ ID NO: 736921 - DNA, 33 bp, Homo sapien
aaggttgccaggttagaatcctgatctgcgtga

SEQ ID NO: 736922 - DNA, 33 bp, Homo sapien
aaggttgccaggttagcatcctgatctgcgtga

SEQ ID NO: 736923 - DNA, 33 bp, Homo sapien
acacttttgttcattacgtgttaatggatatct

SEQ ID NO: 736924 - DNA, 33 bp, Homo sapien
acacttttgttcattatgtgttaatggatatct

SEQ ID NO: 736925 - DNA, 33 bp, Homo sapien
ggggttgttcaaaagacgagattagatggcaga

SEQ ID NO: 736926 - DNA, 33 bp, Homo sapien
ggggttgttcaaaagatgagattagatggcaga

SEQ ID NO: 736927 - DNA, 33 bp, Homo sapien
tggtcttggttgaaacacaggctggtcactcct

SEQ ID NO: 736928 - DNA, 33 bp, Homo sapien
tggtcttggttgaaacgcaggctggtcactcct

SEQ ID NO: 736929 - DNA, 33 bp, Homo sapien
gtcactctgatgtgcactgatggtgaatggagc

SEQ ID NO: 736930 - DNA, 33 bp, Homo sapien
gtcactctgatgtgcattgatggtgaatggagc

SEQ ID NO: 736931 - DNA, 33 bp, Homo sapien
cacatgtaaattaccaacagtacctgatgtttg

SEQ ID NO: 736932 - DNA, 33 bp, Homo sapien
cacatgtaaattaccagcagtacctgatgtttg

SEQ ID NO: 736933 - DNA, 33 bp, Homo sapien
ctctttttattcccaccgccgtcatcctagttc

SEQ ID NO: 736934 - DNA, 33 bp, Homo sapien
ctctttttattcccactgccgtcatcctagttc

SEQ ID NO: 736935 - DNA, 33 bp, Homo sapien
gcacttgcaaaggttaccagggaccactgcatt

SEQ ID NO: 736936 - DNA, 33 bp, Homo sapien
gcacttgcaaaggttatcagggaccactgcatt

SEQ ID NO: 736937 - DNA, 33 bp, Homo sapien
aaaaaatgttcaatataacgaatcatcagaaaa

SEQ ID NO: 736938 - DNA, 33 bp, Homo sapien
aaaaaatgttcaatatcacgaatcatcagaaaa

SEQ ID NO: 736939 - DNA, 33 bp, Homo sapien
ctggtatagggatagaaaaatgaacattggatc

SEQ ID NO: 736940 - DNA, 33 bp, Homo sapien
ctggtatagggatagacaaatgaacattggatc

SEQ ID NO: 736941 - DNA, 33 bp, Homo sapien
tgaagtcaattcagaacgtaagtcatctgatcc

SEQ ID NO: 736942 - DNA, 33 bp, Homo sapien
tgaagtcaattcagaatgtaagtcatctgatcc

SEQ ID NO: 736943 - DNA, 33 bp, Homo sapien
gagtcattatgaggaaactctaggtatatattt

SEQ ID NO: 736944 - DNA, 33 bp, Homo sapien
gagtcattatgaggaacctctaggtatatattt

SEQ ID NO: 736945 - DNA, 33 bp, Homo sapien
atagttcaaggcattaactattcactagggctg

SEQ ID NO: 736946 - DNA, 33 bp, Homo sapien
atagttcaaggcattatctattcactagggctg

SEQ ID NO: 736947 - DNA, 33 bp, Homo sapien
caggttgccaggccaccaaataacgaagccaat

SEQ ID NO: 736948 - DNA, 33 bp, Homo sapien
caggttgccaggccacgaaataacgaagccaat

SEQ ID NO: 736949 - DNA, 33 bp, Homo sapien
aaaaaggtctctcttacctgatgaaccagtgtt

SEQ ID NO: 736950 - DNA, 33 bp, Homo sapien
aaaaaggtctctcttatctgatgaaccagtgtt

SEQ ID NO: 736951 - DNA, 33 bp, Homo sapien
ttcaggggccattgagccagcacagaaatgtcc

SEQ ID NO: 736952 - DNA, 33 bp, Homo sapien
ttcaggggccattgagtcagcacagaaatgtcc

SEQ ID NO: 736953 - DNA, 33 bp, Homo sapien
tgggaaaggtatcacactgaaaaaaccactaca

SEQ ID NO: 736954 - DNA, 33 bp, Homo sapien
tgggaaaggtatcacagtgaaaaaaccactaca

SEQ ID NO: 736955 - DNA, 33 bp, Homo sapien
ctgtgtgatacgataaaggtggatatataacac

SEQ ID NO: 736956 - DNA, 33 bp, Homo sapien
ctgtgtgatacgataacggtggatatataacac

SEQ ID NO: 736957 - DNA, 33 bp, Homo sapien
aaaaatcagtgtaaagcaaagacatggaaacaa

SEQ ID NO: 736958 - DNA, 33 bp, Homo sapien
aaaaatcagtgtaaagtaaagacatggaaacaa

SEQ ID NO: 736959 - DNA, 33 bp, Homo sapien
atagcatctgaagaagaagaagatataaaaagt

SEQ ID NO: 736960 - DNA, 33 bp, Homo sapien
atagcatctgaagaagtagaagatataaaaagt

SEQ ID NO: 736961 - DNA, 33 bp, Homo sapien
tataaggaaataagaacgtggcatatttccaaa

SEQ ID NO: 736962 - DNA, 33 bp, Homo sapien
tataaggaaataagaatgtggcatatttccaaa

SEQ ID NO: 736963 - DNA, 33 bp, Homo sapien
ctgaatttccctcaaactgtagcactcagtgcc

SEQ ID NO: 736964 - DNA, 33 bp, Homo sapien
ctgaatttccctcaaattgtagcactcagtgcc

SEQ ID NO: 736965 - DNA, 33 bp, Homo sapien
tgcagtcctaagaagcacttgaaggctatctca

SEQ ID NO: 736966 - DNA, 33 bp, Homo sapien
tgcagtcctaagaagctcttgaaggctatctca

SEQ ID NO: 736967 - DNA, 33 bp, Homo sapien
aagaatcctggtataactgaaatatgatttaac

SEQ ID NO: 736968 - DNA, 33 bp, Homo sapien
aagaatcctggtataattgaaatatgatttaac

SEQ ID NO: 736969 - DNA, 33 bp, Homo sapien
ccctgagcaatgatctaaactgctcagtactga

SEQ ID NO: 736970 - DNA, 33 bp, Homo sapien
ccctgagcaatgatctcaactgctcagtactga

SEQ ID NO: 736971 - DNA, 33 bp, Homo sapien
aaggttattagtcctaaaacatctctaatgctg

SEQ ID NO: 736972 - DNA, 33 bp, Homo sapien
aaggttattagtcctagaacatctctaatgctg

SEQ ID NO: 736973 - DNA, 33 bp, Homo sapien
ttgagatttggaaaaccgaacacatccataaca

SEQ ID NO: 736974 - DNA, 33 bp, Homo sapien
ttgagatttggaaaactgaacacatccataaca

SEQ ID NO: 736975 - DNA, 33 bp, Homo sapien
gttcctctgcattgcacgaactgatgtgcacaa

SEQ ID NO: 736976 - DNA, 33 bp, Homo sapien
gttcctctgcattgcatgaactgatgtgcacaa

SEQ ID NO: 736977 - DNA, 33 bp, Homo sapien
cagttctcttcctgtaaatccataagtatgaac

SEQ ID NO: 736978 - DNA, 33 bp, Homo sapien
cagttctcttcctgtagatccataagtatgaac

SEQ ID NO: 736979 - DNA, 33 bp, Homo sapien
aggaggaatttcctgaggaatcagatgctgccc

SEQ ID NO: 736980 - DNA, 33 bp, Homo sapien
aggaggaatttcctgatgaatcagatgctgccc

SEQ ID NO: 736981 - DNA, 33 bp, Homo sapien
ctacttgctgcagatacggaaagtaactgcaca

SEQ ID NO: 736982 - DNA, 33 bp, Homo sapien
ctacttgctgcagatatggaaagtaactgcaca

SEQ ID NO: 736983 - DNA, 33 bp, Homo sapien
acctggatgttttcaaatagtcgcatttttagc

SEQ ID NO: 736984 - DNA, 33 bp, Homo sapien
acctggatgttttcaagtagtcgcatttttagc

SEQ ID NO: 736985 - DNA, 33 bp, Homo sapien
ggtatttagtagtatcccacatgaaataagaat

SEQ ID NO: 736986 - DNA, 33 bp, Homo sapien
ggtatttagtagtatctcacatgaaataagaat

SEQ ID NO: 736987 - DNA, 33 bp, Homo sapien
cacttttgacatcacacaggagcagttaacatt

SEQ ID NO: 736988 - DNA, 33 bp, Homo sapien
cacttttgacatcacataggagcagttaacatt

SEQ ID NO: 736989 - DNA, 33 bp, Homo sapien
aaattcagtagtgtatcaggccgtagttttttt

SEQ ID NO: 736990 - DNA, 33 bp, Homo sapien
aaattcagtagtgtattaggccgtagttttttt

SEQ ID NO: 736991 - DNA, 33 bp, Homo sapien
gatattgttcacccaaatataagaaagctggaa

SEQ ID NO: 736992 - DNA, 33 bp, Homo sapien
gatattgttcacccaagtataagaaagctggaa

SEQ ID NO: 736993 - DNA, 33 bp, Homo sapien
gatgactccagctaaccaacagaggtcagggtc

SEQ ID NO: 736994 - DNA, 33 bp, Homo sapien
gatgactccagctaactaacagaggtcagggtc

SEQ ID NO: 736995 - DNA, 33 bp, Homo sapien
catatgccacctcaaaaatcatcaaatctggcc

SEQ ID NO: 736996 - DNA, 33 bp, Homo sapien
catatgccacctcaaagatcatcaaatctggcc

SEQ ID NO: 736997 - DNA, 33 bp, Homo sapien
caagaagaaaggagtaacaggccccaagccagt

SEQ ID NO: 736998 - DNA, 33 bp, Homo sapien
caagaagaaaggagtagcaggccccaagccagt

SEQ ID NO: 736999 - DNA, 33 bp, Homo sapien
atgttcaaggtcagtagatatcctggtaggggc

SEQ ID NO: 737000 - DNA, 33 bp, Homo sapien
atgttcaaggtcagtatatatcctggtaggggc

SEQ ID NO: 737001 - DNA, 33 bp, Homo sapien
attgttctggctttgccacttggtttagaaaga

SEQ ID NO: 737002 - DNA, 33 bp, Homo sapien
attgttctggctttgctacttggtttagaaaga

SEQ ID NO: 737003 - DNA, 33 bp, Homo sapien
tccggcccttgcatccactgttctctccatctc

SEQ ID NO: 737004 - DNA, 33 bp, Homo sapien
tccggcccttgcatccgctgttctctccatctc

SEQ ID NO: 737005 - DNA, 33 bp, Homo sapien
taattcccatacttcacattaattgccagaggt

SEQ ID NO: 737006 - DNA, 33 bp, Homo sapien
taattcccatacttcagattaattgccagaggt

SEQ ID NO: 737007 - DNA, 33 bp, Homo sapien
ttcttcacacaaacgacgtactactaagaattt

SEQ ID NO: 737008 - DNA, 33 bp, Homo sapien
ttcttcacacaaacgatgtactactaagaattt

SEQ ID NO: 737009 - DNA, 33 bp, Homo sapien
tatacattttggaaacagtacatatatgatccg

SEQ ID NO: 737010 - DNA, 33 bp, Homo sapien
tatacattttggaaacggtacatatatgatccg

SEQ ID NO: 737011 - DNA, 33 bp, Homo sapien
tctctagcaggtaaataaaaaatgctatgactt

SEQ ID NO: 737012 - DNA, 33 bp, Homo sapien
tctctagcaggtaaatcaaaaatgctatgactt

SEQ ID NO: 737013 - DNA, 33 bp, Homo sapien
tcaggggagtgacttgaaacttatggaacatat

SEQ ID NO: 737014 - DNA, 33 bp, Homo sapien
tcaggggagtgacttgcaacttatggaacatat

SEQ ID NO: 737015 - DNA, 33 bp, Homo sapien
tagtatacaatccctaagtttgatcagaccact

SEQ ID NO: 737016 - DNA, 33 bp, Homo sapien
tagtatacaatccctaggtttgatcagaccact

SEQ ID NO: 737017 - DNA, 33 bp, Homo sapien
ccggcacaaaagacggacacaaaagatgggcag

SEQ ID NO: 737018 - DNA, 33 bp, Homo sapien
ccggcacaaaagacgggcacaaaagatgggcag

SEQ ID NO: 737019 - DNA, 33 bp, Homo sapien
tttttgaggttaagagaacagctctttttttcc

SEQ ID NO: 737020 - DNA, 33 bp, Homo sapien
tttttgaggttaagaggacagctctttttttcc

SEQ ID NO: 737021 - DNA, 33 bp, Homo sapien
taagtctcctaacaccacattacatctgcacga

SEQ ID NO: 737022 - DNA, 33 bp, Homo sapien
taagtctcctaacaccgcattacatctgcacga

SEQ ID NO: 737023 - DNA, 33 bp, Homo sapien
caaaatagatgacaagaagttgaaatattaact

SEQ ID NO: 737024 - DNA, 33 bp, Homo sapien
caaaatagatgacaagtagttgaaatattaact

SEQ ID NO: 737025 - DNA, 33 bp, Homo sapien
cttgctatgtaaataaggtcaaagaataagttc

SEQ ID NO: 737026 - DNA, 33 bp, Homo sapien
cttgctatgtaaataatgtcaaagaataagttc

SEQ ID NO: 737027 - DNA, 33 bp, Homo sapien
ttaagtggcctgaaaactgaaggagaaaaaaga

SEQ ID NO: 737028 - DNA, 33 bp, Homo sapien
ttaagtggcctgaaaattgaaggagaaaaaaga

SEQ ID NO: 737029 - DNA, 33 bp, Homo sapien
gctgtcttcatctgtacgcttgaggagatattc

SEQ ID NO: 737030 - DNA, 33 bp, Homo sapien
gctgtcttcatctgtatgcttgaggagatattc

SEQ ID NO: 737031 - DNA, 33 bp, Homo sapien
ttcatttcatagagaaagaaagcaagacaaaga

SEQ ID NO: 737032 - DNA, 33 bp, Homo sapien
ttcatttcatagagaaggaaagcaagacaaaga

SEQ ID NO: 737033 - DNA, 33 bp, Homo sapien
cctcaggaactggccaatggatttacagatgtc

SEQ ID NO: 737034 - DNA, 33 bp, Homo sapien
cctcaggaactggccagtggatttacagatgtc

SEQ ID NO: 737035 - DNA, 33 bp, Homo sapien
ggcactcataagcctaaatgaaaaattatgtct

SEQ ID NO: 737036 - DNA, 33 bp, Homo sapien
ggcactcataagcctacatgaaaaattatgtct

SEQ ID NO: 737037 - DNA, 33 bp, Homo sapien
ttttttcctggatgtacgctgaggaatagaagt

SEQ ID NO: 737038 - DNA, 33 bp, Homo sapien
ttttttcctggatgtatgctgaggaatagaagt

SEQ ID NO: 737039 - DNA, 33 bp, Homo sapien
gaattccacaagtcaccgtccttagtatctcaa

SEQ ID NO: 737040 - DNA, 33 bp, Homo sapien
gaattccacaagtcactgtccttagtatctcaa

SEQ ID NO: 737041 - DNA, 33 bp, Homo sapien
tactacaaaatagtccggatgtaaccttcagag

SEQ ID NO: 737042 - DNA, 33 bp, Homo sapien
tactacaaaatagtcctgatgtaaccttcagag

SEQ ID NO: 737043 - DNA, 33 bp, Homo sapien
cctccacgtgaggacacggcatttactccctct

SEQ ID NO: 737044 - DNA, 33 bp, Homo sapien
cctccacgtgaggacatggcatttactccctct

SEQ ID NO: 737045 - DNA, 33 bp, Homo sapien
caggtacctcacctgtaaaacagcagaaatgtc

SEQ ID NO: 737046 - DNA, 33 bp, Homo sapien
caggtacctcacctgtcaaacagcagaaatgtc

SEQ ID NO: 737047 - DNA, 33 bp, Homo sapien
ggtctcctatagcattcaagttcacaaggtgct

SEQ ID NO: 737048 - DNA, 33 bp, Homo sapien
ggtctcctatagcattgaagttcacaaggtgct

SEQ ID NO: 737049 - DNA, 33 bp, Homo sapien
aatatttgctgaggtgaatggaaatctatcctg

SEQ ID NO: 737050 - DNA, 33 bp, Homo sapien
aatatttgctgaggtgtatggaaatctatcctg

SEQ ID NO: 737051 - DNA, 33 bp, Homo sapien
ctcttccagactcagaataagcagctctgttgg

SEQ ID NO: 737052 - DNA, 33 bp, Homo sapien
ctcttccagactcagattaagcagctctgttgg

SEQ ID NO: 737053 - DNA, 33 bp, Homo sapien
ggatggtgcttgccaacactctgaaaaaataat

SEQ ID NO: 737054 - DNA, 33 bp, Homo sapien
ggatggtgcttgccaagactctgaaaaaataat

SEQ ID NO: 737055 - DNA, 33 bp, Homo sapien
tggccaagacaagaaaggttatcaagctgtatc

SEQ ID NO: 737056 - DNA, 33 bp, Homo sapien
tggccaagacaagaaatgttatcaagctgtatc

SEQ ID NO: 737057 - DNA, 33 bp, Homo sapien
agaagtgccagatttcccccagagcgtcttgtt

SEQ ID NO: 737058 - DNA, 33 bp, Homo sapien
agaagtgccagatttctcccagagcgtcttgtt

SEQ ID NO: 737059 - DNA, 33 bp, Homo sapien
tgatgtgtatggaagggagtttgtgttctatgt

SEQ ID NO: 737060 - DNA, 33 bp, Homo sapien
tgatgtgtatggaaggtagtttgtgttctatgt

SEQ ID NO: 737061 - DNA, 33 bp, Homo sapien
atgatatgtcagccgccgcagaacttttataaa

SEQ ID NO: 737062 - DNA, 33 bp, Homo sapien
atgatatgtcagccgctgcagaacttttataaa

SEQ ID NO: 737063 - DNA, 33 bp, Homo sapien
ggaatgagctataaacacaccttaggggactta

SEQ ID NO: 737064 - DNA, 33 bp, Homo sapien
ggaatgagctataaacgcaccttaggggactta

SEQ ID NO: 737065 - DNA, 33 bp, Homo sapien
tcatacacaatcctctcacacagaacacatggt

SEQ ID NO: 737066 - DNA, 33 bp, Homo sapien
tcatacacaatcctcttacacagaacacatggt

SEQ ID NO: 737067 - DNA, 33 bp, Homo sapien
ggttccttgtagccaaaagcaggtgagcacagg

SEQ ID NO: 737068 - DNA, 33 bp, Homo sapien
ggttccttgtagccaagagcaggtgagcacagg

SEQ ID NO: 737069 - DNA, 33 bp, Homo sapien
aaaaaacgcagagccactaaaaataatctacaa

SEQ ID NO: 737070 - DNA, 33 bp, Homo sapien
aaaaaacgcagagccattaaaaataatctacaa

SEQ ID NO: 737071 - DNA, 33 bp, Homo sapien
gttatttaacatacaaaagactcttaacatttc

SEQ ID NO: 737072 - DNA, 33 bp, Homo sapien
gttatttaacatacaagagactcttaacatttc

SEQ ID NO: 737073 - DNA, 33 bp, Homo sapien
aaaagatatgcaaatgccaaaaacacatgaaaa

SEQ ID NO: 737074 - DNA, 33 bp, Homo sapien
aaaagatatgcaaatggcaaaaacacatgaaaa

SEQ ID NO: 737075 - DNA, 33 bp, Homo sapien
ctttttttcaatacacaaaagctataacaacca

SEQ ID NO: 737076 - DNA, 33 bp, Homo sapien
ctttttttcaatacacgaaagctataacaacca

SEQ ID NO: 737077 - DNA, 33 bp, Homo sapien
ggattctgcagtccaccagtagtagaatataaa

SEQ ID NO: 737078 - DNA, 33 bp, Homo sapien
ggattctgcagtccacgagtagtagaatataaa

SEQ ID NO: 737079 - DNA, 33 bp, Homo sapien
tcaacttctgcttcacagaaaaagtaagagcca

SEQ ID NO: 737080 - DNA, 33 bp, Homo sapien
tcaacttctgcttcacggaaaaagtaagagcca

SEQ ID NO: 737081 - DNA, 33 bp, Homo sapien
ataatgaggatgtagaatagctgctgtgttatg

SEQ ID NO: 737082 - DNA, 33 bp, Homo sapien
ataatgaggatgtagagtagctgctgtgttatg

SEQ ID NO: 737083 - DNA, 33 bp, Homo sapien
tgacaacagtggtccacgctgtgctggtgagca

SEQ ID NO: 737084 - DNA, 33 bp, Homo sapien
tgacaacagtggtccatgctgtgctggtgagca

SEQ ID NO: 737085 - DNA, 33 bp, Homo sapien
cctccaactggatttcactttcttctttggagg

SEQ ID NO: 737086 - DNA, 33 bp, Homo sapien
cctccaactggatttcgctttcttctttggagg

SEQ ID NO: 737087 - DNA, 33 bp, Homo sapien
ttacacgatgcaaagaccaagttttaaaggcca

SEQ ID NO: 737088 - DNA, 33 bp, Homo sapien
ttacacgatgcaaagagcaagttttaaaggcca

SEQ ID NO: 737089 - DNA, 33 bp, Homo sapien
tgagtctgaaatgtccaagattggttcctcaaa

SEQ ID NO: 737090 - DNA, 33 bp, Homo sapien
tgagtctgaaatgtcccagattggttcctcaaa

SEQ ID NO: 737091 - DNA, 33 bp, Homo sapien
ttttgctcaagggaaacgagactggttctgatc

SEQ ID NO: 737092 - DNA, 33 bp, Homo sapien
ttttgctcaagggaaatgagactggttctgatc

SEQ ID NO: 737093 - DNA, 33 bp, Homo sapien
tgcctagctacaaaagactaggaaatgtgaggg

SEQ ID NO: 737094 - DNA, 33 bp, Homo sapien
tgcctagctacaaaaggctaggaaatgtgaggg

SEQ ID NO: 737095 - DNA, 33 bp, Homo sapien
cttctgaatagcctacaatgcataattcaaccc

SEQ ID NO: 737096 - DNA, 33 bp, Homo sapien
cttctgaatagcctacgatgcataattcaaccc

SEQ ID NO: 737097 - DNA, 33 bp, Homo sapien
aaatggttttcaaatacaatggcagttttcact

SEQ ID NO: 737098 - DNA, 33 bp, Homo sapien
aaatggttttcaaatagaatggcagttttcact

SEQ ID NO: 737099 - DNA, 33 bp, Homo sapien
tttgtaattgttgtcaaatgtattcaagaaggt

SEQ ID NO: 737100 - DNA, 33 bp, Homo sapien
tttgtaattgttgtcagatgtattcaagaaggt

SEQ ID NO: 737101 - DNA, 33 bp, Homo sapien
tatgtttagtttccaccggaatctgtctgaaga

SEQ ID NO: 737102 - DNA, 33 bp, Homo sapien
tatgtttagtttccactggaatctgtctgaaga

SEQ ID NO: 737103 - DNA, 33 bp, Homo sapien
tcagggaactccatcccctagccaagggaagcc

SEQ ID NO: 737104 - DNA, 33 bp, Homo sapien
tcagggaactccatcctctagccaagggaagcc

SEQ ID NO: 737105 - DNA, 33 bp, Homo sapien
atgataggctggaacacgaaaccttctggtgac

SEQ ID NO: 737106 - DNA, 33 bp, Homo sapien
atgataggctggaacatgaaaccttctggtgac

SEQ ID NO: 737107 - DNA, 33 bp, Homo sapien
gctctttcttatctacacacgaaatatgcagca

SEQ ID NO: 737108 - DNA, 33 bp, Homo sapien
gctctttcttatctacgcacgaaatatgcagca

SEQ ID NO: 737109 - DNA, 33 bp, Homo sapien
ttctttcgtggcaaggaatggccatgaaagtat

SEQ ID NO: 737110 - DNA, 33 bp, Homo sapien
ttctttcgtggcaagggatggccatgaaagtat

SEQ ID NO: 737111 - DNA, 33 bp, Homo sapien
ggagcattgctataatgactggagtgattgatt

SEQ ID NO: 737112 - DNA, 33 bp, Homo sapien
ggagcattgctataattactggagtgattgatt

SEQ ID NO: 737113 - DNA, 33 bp, Homo sapien
agagcaaatcttaagaacaagcaaatgtattca

SEQ ID NO: 737114 - DNA, 33 bp, Homo sapien
agagcaaatcttaagagcaagcaaatgtattca

SEQ ID NO: 737115 - DNA, 33 bp, Homo sapien
ggctgatgctgggacaagtcaatagtagactct

SEQ ID NO: 737116 - DNA, 33 bp, Homo sapien
ggctgatgctgggacaggtcaatagtagactct

SEQ ID NO: 737117 - DNA, 33 bp, Homo sapien
tacctgatctgagaacactgaatttttgtccta

SEQ ID NO: 737118 - DNA, 33 bp, Homo sapien
tacctgatctgagaaccctgaatttttgtccta

SEQ ID NO: 737119 - DNA, 33 bp, Homo sapien
cctgctgtgttcagccagatctcacactttccc

SEQ ID NO: 737120 - DNA, 33 bp, Homo sapien
cctgctgtgttcagccggatctcacactttccc

SEQ ID NO: 737121 - DNA, 33 bp, Homo sapien
atgcgtctccatacccaagcataagacacacgc

SEQ ID NO: 737122 - DNA, 33 bp, Homo sapien
atgcgtctccataccccagcataagacacacgc

SEQ ID NO: 737123 - DNA, 33 bp, Homo sapien
tatgaatgagttcctgcagatctgaggtatagg

SEQ ID NO: 737124 - DNA, 33 bp, Homo sapien
tatgaatgagttcctgtagatctgaggtatagg

SEQ ID NO: 737125 - DNA, 33 bp, Homo sapien
tccctctcaacaaagccccatttgccaagtcag

SEQ ID NO: 737126 - DNA, 33 bp, Homo sapien
tccctctcaacaaagcgccatttgccaagtcag

SEQ ID NO: 737127 - DNA, 33 bp, Homo sapien
atttaataaatttccccggaagcaccatgaaac

SEQ ID NO: 737128 - DNA, 33 bp, Homo sapien
atttaataaatttccctggaagcaccatgaaac

SEQ ID NO: 737129 - DNA, 33 bp, Homo sapien
aattcatgaaaacacactggaatgaacttctgg

SEQ ID NO: 737130 - DNA, 33 bp, Homo sapien
aattcatgaaaacacattggaatgaacttctgg

SEQ ID NO: 737131 - DNA, 33 bp, Homo sapien
atatgtgcacctctctcaagatgccattttttt

SEQ ID NO: 737132 - DNA, 33 bp, Homo sapien
atatgtgcacctctctgaagatgccattttttt

SEQ ID NO: 737133 - DNA, 33 bp, Homo sapien
tgtgagctcctgctcactattcaacacgtggct

SEQ ID NO: 737134 - DNA, 33 bp, Homo sapien
tgtgagctcctgctcattattcaacacgtggct

SEQ ID NO: 737135 - DNA, 33 bp, Homo sapien
aaggagcttcctgttacaaatcaagtttggtca

SEQ ID NO: 737136 - DNA, 33 bp, Homo sapien
aaggagcttcctgttataaatcaagtttggtca

SEQ ID NO: 737137 - DNA, 33 bp, Homo sapien
acgtaacatctgactcaacatgccaatagcacc

SEQ ID NO: 737138 - DNA, 33 bp, Homo sapien
acgtaacatctgactccacatgccaatagcacc

SEQ ID NO: 737139 - DNA, 33 bp, Homo sapien
gttttctttattcttgcaacacctgttaagagg

SEQ ID NO: 737140 - DNA, 33 bp, Homo sapien
gttttctttattcttggaacacctgttaagagg

SEQ ID NO: 737141 - DNA, 33 bp, Homo sapien
atcctctgggaacaccaatcttcagtcaagatg

SEQ ID NO: 737142 - DNA, 33 bp, Homo sapien
atcctctgggaacaccgatcttcagtcaagatg

SEQ ID NO: 737143 - DNA, 33 bp, Homo sapien
ttctttctcttgcacccgatcccatccctcttt

SEQ ID NO: 737144 - DNA, 33 bp, Homo sapien
ttctttctcttgcacctgatcccatccctcttt

SEQ ID NO: 737145 - DNA, 33 bp, Homo sapien
tgttattatacacacacgaagtcccagaaaaca

SEQ ID NO: 737146 - DNA, 33 bp, Homo sapien
tgttattatacacacatgaagtcccagaaaaca

SEQ ID NO: 737147 - DNA, 33 bp, Homo sapien
agcatcttctggttacactaactgacagcaact

SEQ ID NO: 737148 - DNA, 33 bp, Homo sapien
agcatcttctggttaccctaactgacagcaact

SEQ ID NO: 737149 - DNA, 33 bp, Homo sapien
tcataccacacttcaccgaggaagactcgttga

SEQ ID NO: 737150 - DNA, 33 bp, Homo sapien
tcataccacacttcactgaggaagactcgttga

SEQ ID NO: 737151 - DNA, 33 bp, Homo sapien
gacaatcaccagtcaccaagcacattctgacat

SEQ ID NO: 737152 - DNA, 33 bp, Homo sapien
gacaatcaccagtcacgaagcacattctgacat

SEQ ID NO: 737153 - DNA, 33 bp, Homo sapien
cactatgttgttgagtcaaaatctatgtggccc

SEQ ID NO: 737154 - DNA, 33 bp, Homo sapien
cactatgttgttgagttaaaatctatgtggccc

SEQ ID NO: 737155 - DNA, 33 bp, Homo sapien
gagtatttgatatatgcacttgttgatttggtt

SEQ ID NO: 737156 - DNA, 33 bp, Homo sapien
gagtatttgatatatggacttgttgatttggtt

SEQ ID NO: 737157 - DNA, 33 bp, Homo sapien
ctttatgccaaccatacaggatagcattttcct

SEQ ID NO: 737158 - DNA, 33 bp, Homo sapien
ctttatgccaaccatataggatagcattttcct

SEQ ID NO: 737159 - DNA, 33 bp, Homo sapien
agacctcggctcattacgctcctccattaatgc

SEQ ID NO: 737160 - DNA, 33 bp, Homo sapien
agacctcggctcattatgctcctccattaatgc

SEQ ID NO: 737161 - DNA, 33 bp, Homo sapien
ccttctagagacttgcacaactctacctgccat

SEQ ID NO: 737162 - DNA, 33 bp, Homo sapien
ccttctagagacttgcgcaactctacctgccat

SEQ ID NO: 737163 - DNA, 33 bp, Homo sapien
taattccgattcctgcccagaggtgttgaatcg

SEQ ID NO: 737164 - DNA, 33 bp, Homo sapien
taattccgattcctgctcagaggtgttgaatcg

SEQ ID NO: 737165 - DNA, 33 bp, Homo sapien
tgtcacacacttaaatcacaggacaagagcatt

SEQ ID NO: 737166 - DNA, 33 bp, Homo sapien
tgtcacacacttaaattacaggacaagagcatt

SEQ ID NO: 737167 - DNA, 33 bp, Homo sapien
tatccagaatctacaacggagtcaaacaaatca

SEQ ID NO: 737168 - DNA, 33 bp, Homo sapien
tatccagaatctacaatggagtcaaacaaatca

SEQ ID NO: 737169 - DNA, 33 bp, Homo sapien
taaaaggaagtttagaaaagtgtctgatgagat

SEQ ID NO: 737170 - DNA, 33 bp, Homo sapien
taaaaggaagtttagagaagtgtctgatgagat

SEQ ID NO: 737171 - DNA, 33 bp, Homo sapien
tatttaatgtacacaaatgaatgagttcggagt

SEQ ID NO: 737172 - DNA, 33 bp, Homo sapien
tatttaatgtacacaactgaatgagttcggagt

SEQ ID NO: 737173 - DNA, 33 bp, Homo sapien
ctgttttcataacatactagtctcttatatttg

SEQ ID NO: 737174 - DNA, 33 bp, Homo sapien
ctgttttcataacatattagtctcttatatttg

SEQ ID NO: 737175 - DNA, 33 bp, Homo sapien
acagacgtgttaaaaagcacctactgcgtgcag

SEQ ID NO: 737176 - DNA, 33 bp, Homo sapien
acagacgtgttaaaaatcacctactgcgtgcag

SEQ ID NO: 737177 - DNA, 33 bp, Homo sapien
gccagaataacaaccactgaggcattctcctca

SEQ ID NO: 737178 - DNA, 33 bp, Homo sapien
gccagaataacaaccattgaggcattctcctca

SEQ ID NO: 737179 - DNA, 33 bp, Homo sapien
ggagtgccagaaaaagcctatttgtttgagcag

SEQ ID NO: 737180 - DNA, 33 bp, Homo sapien
ggagtgccagaaaaagtctatttgtttgagcag

SEQ ID NO: 737181 - DNA, 33 bp, Homo sapien
tatggtgcattctctacacggatccaaggaagg

SEQ ID NO: 737182 - DNA, 33 bp, Homo sapien
tatggtgcattctctatacggatccaaggaagg

SEQ ID NO: 737183 - DNA, 33 bp, Homo sapien
taactgtaagatccaaacctataaaagtcctag

SEQ ID NO: 737184 - DNA, 33 bp, Homo sapien
taactgtaagatccaagcctataaaagtcctag

SEQ ID NO: 737185 - DNA, 33 bp, Homo sapien
ttctccaacctttctcactatccttccaccctt

SEQ ID NO: 737186 - DNA, 33 bp, Homo sapien
ttctccaacctttctcgctatccttccaccctt

SEQ ID NO: 737187 - DNA, 33 bp, Homo sapien
caagatactaaagacaatagaagatcaaataat

SEQ ID NO: 737188 - DNA, 33 bp, Homo sapien
caagatactaaagacagtagaagatcaaataat

SEQ ID NO: 737189 - DNA, 33 bp, Homo sapien
aggaacaacaccacaacgtaatcagttgccgta

SEQ ID NO: 737190 - DNA, 33 bp, Homo sapien
aggaacaacaccacaatgtaatcagttgccgta

SEQ ID NO: 737191 - DNA, 33 bp, Homo sapien
cagtcagacttgtacacaatatttcaaataact

SEQ ID NO: 737192 - DNA, 33 bp, Homo sapien
cagtcagacttgtacagaatatttcaaataact

SEQ ID NO: 737193 - DNA, 33 bp, Homo sapien
ttattcccagaatctacaggcagtccttaggat

SEQ ID NO: 737194 - DNA, 33 bp, Homo sapien
ttattcccagaatctagaggcagtccttaggat

SEQ ID NO: 737195 - DNA, 33 bp, Homo sapien
gattcttcatccttgaaaatggaggtagtcagt

SEQ ID NO: 737196 - DNA, 33 bp, Homo sapien
gattcttcatccttgagaatggaggtagtcagt

SEQ ID NO: 737197 - DNA, 33 bp, Homo sapien
gtatgctagataagaagtggttgaagagtgaat

SEQ ID NO: 737198 - DNA, 33 bp, Homo sapien
gtatgctagataagaattggttgaagagtgaat

SEQ ID NO: 737199 - DNA, 33 bp, Homo sapien
gctcaggtggcacaaaaactcagatgccagaat

SEQ ID NO: 737200 - DNA, 33 bp, Homo sapien
gctcaggtggcacaaagactcagatgccagaat

SEQ ID NO: 737201 - DNA, 33 bp, Homo sapien
tttgattgcaatgttccccctgcctaactagtg

SEQ ID NO: 737202 - DNA, 33 bp, Homo sapien
tttgattgcaatgttctccctgcctaactagtg

SEQ ID NO: 737203 - DNA, 33 bp, Homo sapien
ccttgatagcttagaccccccatacaggcagct

SEQ ID NO: 737204 - DNA, 33 bp, Homo sapien
ccttgatagcttagactccccatacaggcagct

SEQ ID NO: 737205 - DNA, 33 bp, Homo sapien
agaacgtacgacagcaagtgctctgtgtgatct

SEQ ID NO: 737206 - DNA, 33 bp, Homo sapien
agaacgtacgacagcaggtgctctgtgtgatct

SEQ ID NO: 737207 - DNA, 33 bp, Homo sapien
acctgagtgaaggttgatatcattttctgagat

SEQ ID NO: 737208 - DNA, 33 bp, Homo sapien
acctgagtgaaggttggtatcattttctgagat

SEQ ID NO: 737209 - DNA, 33 bp, Homo sapien
ttaaacagcaggatccagagtcccagaaatctt

SEQ ID NO: 737210 - DNA, 33 bp, Homo sapien
ttaaacagcaggatccggagtcccagaaatctt

SEQ ID NO: 737211 - DNA, 33 bp, Homo sapien
gatgtgtctgaggaaccgagaggcacacagaga

SEQ ID NO: 737212 - DNA, 33 bp, Homo sapien
gatgtgtctgaggaactgagaggcacacagaga

SEQ ID NO: 737213 - DNA, 33 bp, Homo sapien
ttaatcctgcactatacgtaacatttcatttca

SEQ ID NO: 737214 - DNA, 33 bp, Homo sapien
ttaatcctgcactatatgtaacatttcatttca

SEQ ID NO: 737215 - DNA, 33 bp, Homo sapien
attacctcttgacttacatctaggttgtcatta

SEQ ID NO: 737216 - DNA, 33 bp, Homo sapien
attacctcttgacttatatctaggttgtcatta

SEQ ID NO: 737217 - DNA, 33 bp, Homo sapien
ttaaaatgaattctggaaaacatacttggggct

SEQ ID NO: 737218 - DNA, 33 bp, Homo sapien
ttaaaatgaattctgggaaacatacttggggct

SEQ ID NO: 737219 - DNA, 33 bp, Homo sapien
catgggccttcattacagctcaatatttttatt

SEQ ID NO: 737220 - DNA, 33 bp, Homo sapien
catgggccttcattacggctcaatatttttatt

SEQ ID NO: 737221 - DNA, 33 bp, Homo sapien
gtcagggtccttgttcgcttttatatcctacaa

SEQ ID NO: 737222 - DNA, 33 bp, Homo sapien
gtcagggtccttgttctcttttatatcctacaa

SEQ ID NO: 737223 - DNA, 33 bp, Homo sapien
ccattcaactggttaccgagcatgtgccaatga

SEQ ID NO: 737224 - DNA, 33 bp, Homo sapien
ccattcaactggttacggagcatgtgccaatga

SEQ ID NO: 737225 - DNA, 33 bp, Homo sapien
cagagatgttttaagaaccatttattgctgtga

SEQ ID NO: 737226 - DNA, 33 bp, Homo sapien
cagagatgttttaagagccatttattgctgtga

SEQ ID NO: 737227 - DNA, 33 bp, Homo sapien
aacagtctaaacacacaacttaagacacaaagt

SEQ ID NO: 737228 - DNA, 33 bp, Homo sapien
aacagtctaaacacaccacttaagacacaaagt

SEQ ID NO: 737229 - DNA, 33 bp, Homo sapien
atgtagccaaaaatgaacttgataacgttattc

SEQ ID NO: 737230 - DNA, 33 bp, Homo sapien
atgtagccaaaaatgagcttgataacgttattc

SEQ ID NO: 737231 - DNA, 33 bp, Homo sapien
gagttctattgaacagcaatgtgttatagaatg

SEQ ID NO: 737232 - DNA, 33 bp, Homo sapien
gagttctattgaacaggaatgtgttatagaatg

SEQ ID NO: 737233 - DNA, 33 bp, Homo sapien
gagtggaagctagaggcataagagtagaaggaa

SEQ ID NO: 737234 - DNA, 33 bp, Homo sapien
gagtggaagctagaggtataagagtagaaggaa

SEQ ID NO: 737235 - DNA, 33 bp, Homo sapien
acattgctgctgatcacactgctatatcaaaaa

SEQ ID NO: 737236 - DNA, 33 bp, Homo sapien
acattgctgctgatcatactgctatatcaaaaa

SEQ ID NO: 737237 - DNA, 33 bp, Homo sapien
ttttgtccctcttgcccattactctgcattctc

SEQ ID NO: 737238 - DNA, 33 bp, Homo sapien
ttttgtccctcttgcctattactctgcattctc

SEQ ID NO: 737239 - DNA, 33 bp, Homo sapien
ctaaaatgttcagtaaaagagctaagcctctct

SEQ ID NO: 737240 - DNA, 33 bp, Homo sapien
ctaaaatgttcagtaagagagctaagcctctct

SEQ ID NO: 737241 - DNA, 33 bp, Homo sapien
gctgggcattaggagaactctaacctcccgtga

SEQ ID NO: 737242 - DNA, 33 bp, Homo sapien
gctgggcattaggagatctctaacctcccgtga

SEQ ID NO: 737243 - DNA, 33 bp, Homo sapien
taacgaggctagccaccgaaataagaaaaataa

SEQ ID NO: 737244 - DNA, 33 bp, Homo sapien
taacgaggctagccactgaaataagaaaaataa

SEQ ID NO: 737245 - DNA, 33 bp, Homo sapien
cccttgacagaaaaatgagctgattcttgacat

SEQ ID NO: 737246 - DNA, 33 bp, Homo sapien
cccttgacagaaaaattagctgattcttgacat

SEQ ID NO: 737247 - DNA, 33 bp, Homo sapien
ttctttgaaagttgccccattaaaatctataat

SEQ ID NO: 737248 - DNA, 33 bp, Homo sapien
ttctttgaaagttgcctcattaaaatctataat

SEQ ID NO: 737249 - DNA, 33 bp, Homo sapien
tttcttgtttctctaaaaccatcctcctgggaa

SEQ ID NO: 737250 - DNA, 33 bp, Homo sapien
tttcttgtttctctaacaccatcctcctgggaa

SEQ ID NO: 737251 - DNA, 33 bp, Homo sapien
gcatccagttaaatgggaatcgttgaaggtaga

SEQ ID NO: 737252 - DNA, 33 bp, Homo sapien
gcatccagttaaatggtaatcgttgaaggtaga

SEQ ID NO: 737253 - DNA, 33 bp, Homo sapien
ttctcagaagagggtacgtacttcacaaagcag

SEQ ID NO: 737254 - DNA, 33 bp, Homo sapien
ttctcagaagagggtatgtacttcacaaagcag

SEQ ID NO: 737255 - DNA, 33 bp, Homo sapien
gcatttcattaaaagacagtgttttccaagagg

SEQ ID NO: 737256 - DNA, 33 bp, Homo sapien
gcatttcattaaaagatagtgttttccaagagg

SEQ ID NO: 737257 - DNA, 33 bp, Homo sapien
tatgttgtcttctccaccccaaaataagacagg

SEQ ID NO: 737258 - DNA, 33 bp, Homo sapien
tatgttgtcttctccatcccaaaataagacagg

SEQ ID NO: 737259 - DNA, 33 bp, Homo sapien
ttgagaaaattttttcaacagtaccatagagcc

SEQ ID NO: 737260 - DNA, 33 bp, Homo sapien
ttgagaaaattttttccacagtaccatagagcc

SEQ ID NO: 737261 - DNA, 33 bp, Homo sapien
tgacaggctattggaccgagtgcttgtcttccc

SEQ ID NO: 737262 - DNA, 33 bp, Homo sapien
tgacaggctattggactgagtgcttgtcttccc

SEQ ID NO: 737263 - DNA, 33 bp, Homo sapien
ggacacagatggcttaactattattctctctca

SEQ ID NO: 737264 - DNA, 33 bp, Homo sapien
ggacacagatggcttagctattattctctctca

SEQ ID NO: 737265 - DNA, 33 bp, Homo sapien
acaccactatttacacaaatgcaccaccaacaa

SEQ ID NO: 737266 - DNA, 33 bp, Homo sapien
acaccactatttacaccaatgcaccaccaacaa

SEQ ID NO: 737267 - DNA, 33 bp, Homo sapien
actcgattcttttctcaattattgccaaattta

SEQ ID NO: 737268 - DNA, 33 bp, Homo sapien
actcgattcttttctccattattgccaaattta

SEQ ID NO: 737269 - DNA, 33 bp, Homo sapien
gcagctgcctgttcaccggacaactttttccca

SEQ ID NO: 737270 - DNA, 33 bp, Homo sapien
gcagctgcctgttcactggacaactttttccca

SEQ ID NO: 737271 - DNA, 33 bp, Homo sapien
tagatggaggcaacacaaaaaaagcagtatggg

SEQ ID NO: 737272 - DNA, 33 bp, Homo sapien
tagatggaggcaacaccaaaaaagcagtatggg

SEQ ID NO: 737273 - DNA, 33 bp, Homo sapien
aattttcttgattatcaaaacatgtcttttata

SEQ ID NO: 737274 - DNA, 33 bp, Homo sapien
aattttcttgattatcgaaacatgtcttttata

SEQ ID NO: 737275 - DNA, 33 bp, Homo sapien
gcacggcttctgggccaaagaagttaaaagcca

SEQ ID NO: 737276 - DNA, 33 bp, Homo sapien
gcacggcttctgggccgaagaagttaaaagcca

SEQ ID NO: 737277 - DNA, 33 bp, Homo sapien
aaaaggagaggagcataaggatatttggtgcat

SEQ ID NO: 737278 - DNA, 33 bp, Homo sapien
aaaaggagaggagcatgaggatatttggtgcat

SEQ ID NO: 737279 - DNA, 33 bp, Homo sapien
tatagtagagtggcaccgggtagccatttctgg

SEQ ID NO: 737280 - DNA, 33 bp, Homo sapien
tatagtagagtggcactgggtagccatttctgg

SEQ ID NO: 737281 - DNA, 33 bp, Homo sapien
ggctgccattatcttaagggaattaacacagga

SEQ ID NO: 737282 - DNA, 33 bp, Homo sapien
ggctgccattatcttaggggaattaacacagga

SEQ ID NO: 737283 - DNA, 33 bp, Homo sapien
gtccagaggggagtgaaagagtcggacaggagt

SEQ ID NO: 737284 - DNA, 33 bp, Homo sapien
gtccagaggggagtgagagagtcggacaggagt

SEQ ID NO: 737285 - DNA, 33 bp, Homo sapien
atgtttcattatgtcacatgctagtctaatctc

SEQ ID NO: 737286 - DNA, 33 bp, Homo sapien
atgtttcattatgtcatatgctagtctaatctc

SEQ ID NO: 737287 - DNA, 33 bp, Homo sapien
actccctcattgataacagttatgaagcagcag

SEQ ID NO: 737288 - DNA, 33 bp, Homo sapien
actccctcattgataagagttatgaagcagcag

SEQ ID NO: 737289 - DNA, 33 bp, Homo sapien
ttctgctcatacagaactgaaatgtcaaggtca

SEQ ID NO: 737290 - DNA, 33 bp, Homo sapien
ttctgctcatacagaattgaaatgtcaaggtca

SEQ ID NO: 737291 - DNA, 33 bp, Homo sapien
ggggccttgtgcctaacgaccagctgtaatccc

SEQ ID NO: 737292 - DNA, 33 bp, Homo sapien
ggggccttgtgcctaatgaccagctgtaatccc

SEQ ID NO: 737293 - DNA, 33 bp, Homo sapien
ataatgaaaacctggcacaaaatctcagaatat

SEQ ID NO: 737294 - DNA, 33 bp, Homo sapien
ataatgaaaacctggcgcaaaatctcagaatat

SEQ ID NO: 737295 - DNA, 33 bp, Homo sapien
ctgtcttctgggagaactggaaacagaaactga

SEQ ID NO: 737296 - DNA, 33 bp, Homo sapien
ctgtcttctgggagaattggaaacagaaactga

SEQ ID NO: 737297 - DNA, 33 bp, Homo sapien
tggagatatccagcatcagagagaaatgagatg

SEQ ID NO: 737298 - DNA, 33 bp, Homo sapien
tggagatatccagcatgagagagaaatgagatg

SEQ ID NO: 737299 - DNA, 33 bp, Homo sapien
aggagaagagtcttgaaaataaaccccagtaag

SEQ ID NO: 737300 - DNA, 33 bp, Homo sapien
aggagaagagtcttgataataaaccccagtaag

SEQ ID NO: 737301 - DNA, 33 bp, Homo sapien
gctgctaagaaggtgacgccgcggctacagctc

SEQ ID NO: 737302 - DNA, 33 bp, Homo sapien
gctgctaagaaggtgatgccgcggctacagctc

SEQ ID NO: 737303 - DNA, 33 bp, Homo sapien
aaagaggaaacaataggagcaggactcagggag

SEQ ID NO: 737304 - DNA, 33 bp, Homo sapien
aaagaggaaacaatagtagcaggactcagggag

SEQ ID NO: 737305 - DNA, 33 bp, Homo sapien
gcgaagaaactttccaacatgaagtaaagagtg

SEQ ID NO: 737306 - DNA, 33 bp, Homo sapien
gcgaagaaactttccagcatgaagtaaagagtg

SEQ ID NO: 737307 - DNA, 33 bp, Homo sapien
tctccatatgcctgaccagaatccctagggcac

SEQ ID NO: 737308 - DNA, 33 bp, Homo sapien
tctccatatgcctgactagaatccctagggcac

SEQ ID NO: 737309 - DNA, 33 bp, Homo sapien
acatggataaacgtcaagaagtaaaactgagca

SEQ ID NO: 737310 - DNA, 33 bp, Homo sapien
acatggataaacgtcatgaagtaaaactgagca

SEQ ID NO: 737311 - DNA, 33 bp, Homo sapien
cacattatcttcataacagtacacagaatacat

SEQ ID NO: 737312 - DNA, 33 bp, Homo sapien
cacattatcttcataagagtacacagaatacat

SEQ ID NO: 737313 - DNA, 33 bp, Homo sapien
aaaaaatgtaggtgagaataaccaagaaaatct

SEQ ID NO: 737314 - DNA, 33 bp, Homo sapien
aaaaaatgtaggtgagcataaccaagaaaatct

SEQ ID NO: 737315 - DNA, 33 bp, Homo sapien
ttgagagttactatgaagtctctttgaactttg

SEQ ID NO: 737316 - DNA, 33 bp, Homo sapien
ttgagagttactatgacgtctctttgaactttg

SEQ ID NO: 737317 - DNA, 33 bp, Homo sapien
attctaatctacctaacatgaaatgcacttagc

SEQ ID NO: 737318 - DNA, 33 bp, Homo sapien
attctaatctacctaagatgaaatgcacttagc

SEQ ID NO: 737319 - DNA, 33 bp, Homo sapien
cacagttttctctgatcagttgtttcatataca

SEQ ID NO: 737320 - DNA, 33 bp, Homo sapien
cacagttttctctgattagttgtttcatataca

SEQ ID NO: 737321 - DNA, 33 bp, Homo sapien
tttcctaagttatgaaccagtaggacaatgaat

SEQ ID NO: 737322 - DNA, 33 bp, Homo sapien
tttcctaagttatgaatcagtaggacaatgaat

SEQ ID NO: 737323 - DNA, 33 bp, Homo sapien
actattaagtcttaatcatctgaatctcattga

SEQ ID NO: 737324 - DNA, 33 bp, Homo sapien
actattaagtcttaatgatctgaatctcattga

SEQ ID NO: 737325 - DNA, 33 bp, Homo sapien
gaaatgcaagaatacaccgggagttctgcttct

SEQ ID NO: 737326 - DNA, 33 bp, Homo sapien
gaaatgcaagaatacagcgggagttctgcttct

SEQ ID NO: 737327 - DNA, 33 bp, Homo sapien
tctagccatttaacataactagccataggaatt

SEQ ID NO: 737328 - DNA, 33 bp, Homo sapien
tctagccatttaacatgactagccataggaatt

SEQ ID NO: 737329 - DNA, 33 bp, Homo sapien
tgttaccttcatttcaagctttatcactttccc

SEQ ID NO: 737330 - DNA, 33 bp, Homo sapien
tgttaccttcatttcaggctttatcactttccc

SEQ ID NO: 737331 - DNA, 33 bp, Homo sapien
cccaaaaaccatccaggaaaaagtgagtgtagc

SEQ ID NO: 737332 - DNA, 33 bp, Homo sapien
cccaaaaaccatccagtaaaaagtgagtgtagc

SEQ ID NO: 737333 - DNA, 33 bp, Homo sapien
aaatgtagctgctaaaatgtaagaaatgacata

SEQ ID NO: 737334 - DNA, 33 bp, Homo sapien
aaatgtagctgctaaagtgtaagaaatgacata

SEQ ID NO: 737335 - DNA, 33 bp, Homo sapien
gtcaagagatatcagaaattgaaaaagatagca

SEQ ID NO: 737336 - DNA, 33 bp, Homo sapien
gtcaagagatatcagacattgaaaaagatagca

SEQ ID NO: 737337 - DNA, 33 bp, Homo sapien
caacaatcccctattccatcttctctgacatgg

SEQ ID NO: 737338 - DNA, 33 bp, Homo sapien
caacaatcccctattcgatcttctctgacatgg

SEQ ID NO: 737339 - DNA, 33 bp, Homo sapien
taataataaaggccaaactctgcgcaaacactg

SEQ ID NO: 737340 - DNA, 33 bp, Homo sapien
taataataaaggccaagctctgcgcaaacactg

SEQ ID NO: 737341 - DNA, 33 bp, Homo sapien
ggaattggaataatcacggtgtgtctggttcct

SEQ ID NO: 737342 - DNA, 33 bp, Homo sapien
ggaattggaataatcatggtgtgtctggttcct

SEQ ID NO: 737343 - DNA, 33 bp, Homo sapien
caaaccactttctaccgcaacataccagttatc

SEQ ID NO: 737344 - DNA, 33 bp, Homo sapien
caaaccactttctacctcaacataccagttatc

SEQ ID NO: 737345 - DNA, 33 bp, Homo sapien
atcaaaaaaatcataactaatccaccctgctta

SEQ ID NO: 737346 - DNA, 33 bp, Homo sapien
atcaaaaaaatcataattaatccaccctgctta

SEQ ID NO: 737347 - DNA, 33 bp, Homo sapien
gtatgtgttggacagacggttggttgaacctat

SEQ ID NO: 737348 - DNA, 33 bp, Homo sapien
gtatgtgttggacagatggttggttgaacctat

SEQ ID NO: 737349 - DNA, 33 bp, Homo sapien
tttcatcatacaaacaacagagggcaagaaaaa

SEQ ID NO: 737350 - DNA, 33 bp, Homo sapien
tttcatcatacaaacaccagagggcaagaaaaa

SEQ ID NO: 737351 - DNA, 33 bp, Homo sapien
aagtcggagtttgatactactgagaattccaaa

SEQ ID NO: 737352 - DNA, 33 bp, Homo sapien
aagtcggagtttgatattactgagaattccaaa

SEQ ID NO: 737353 - DNA, 33 bp, Homo sapien
aagaaaaatggaggaaagatattgcagaagctt

SEQ ID NO: 737354 - DNA, 33 bp, Homo sapien
aagaaaaatggaggaatgatattgcagaagctt

SEQ ID NO: 737355 - DNA, 33 bp, Homo sapien
tttctccatctctccaccatttcttgaatctgg

SEQ ID NO: 737356 - DNA, 33 bp, Homo sapien
tttctccatctctccatcatttcttgaatctgg

SEQ ID NO: 737357 - DNA, 33 bp, Homo sapien
ttaatttgtttcaaaaactcaagtgctcgagat

SEQ ID NO: 737358 - DNA, 33 bp, Homo sapien
ttaatttgtttcaaaatctcaagtgctcgagat

SEQ ID NO: 737359 - DNA, 33 bp, Homo sapien
ccaagcaaaccagtgacggagatagcccaaaaa

SEQ ID NO: 737360 - DNA, 33 bp, Homo sapien
ccaagcaaaccagtgatggagatagcccaaaaa

SEQ ID NO: 737361 - DNA, 33 bp, Homo sapien
ggaagatctcacaacaatgcatggcaaataata

SEQ ID NO: 737362 - DNA, 33 bp, Homo sapien
ggaagatctcacaacagtgcatggcaaataata

SEQ ID NO: 737363 - DNA, 33 bp, Homo sapien
agtcaccagcaaggtcaaatgtagtggcttacc

SEQ ID NO: 737364 - DNA, 33 bp, Homo sapien
agtcaccagcaaggtccaatgtagtggcttacc

SEQ ID NO: 737365 - DNA, 33 bp, Homo sapien
actgagaataagtctcactcacccatatgaatt

SEQ ID NO: 737366 - DNA, 33 bp, Homo sapien
actgagaataagtctcgctcacccatatgaatt

SEQ ID NO: 737367 - DNA, 33 bp, Homo sapien
aatgagcaacggtccacgtataggcaacaacgc

SEQ ID NO: 737368 - DNA, 33 bp, Homo sapien
aatgagcaacggtccatgtataggcaacaacgc

SEQ ID NO: 737369 - DNA, 33 bp, Homo sapien
ccaagaggacaatctgcatcaagtcttcaccaa

SEQ ID NO: 737370 - DNA, 33 bp, Homo sapien
ccaagaggacaatctggatcaagtcttcaccaa

SEQ ID NO: 737371 - DNA, 33 bp, Homo sapien
cccatactcacctaccactttgccatcacattt

SEQ ID NO: 737372 - DNA, 33 bp, Homo sapien
cccatactcacctaccgctttgccatcacattt

SEQ ID NO: 737373 - DNA, 33 bp, Homo sapien
acattaagtttttccccattccaggacaggtca

SEQ ID NO: 737374 - DNA, 33 bp, Homo sapien
acattaagtttttccctattccaggacaggtca

SEQ ID NO: 737375 - DNA, 33 bp, Homo sapien
ataattgatataatttaaaaaatcctgcacatg

SEQ ID NO: 737376 - DNA, 33 bp, Homo sapien
ataattgatataattttaaaaatcctgcacatg

SEQ ID NO: 737377 - DNA, 33 bp, Homo sapien
tgagaacttctcttcccataccacccaaaatca

SEQ ID NO: 737378 - DNA, 33 bp, Homo sapien
tgagaacttctcttcctataccacccaaaatca

SEQ ID NO: 737379 - DNA, 33 bp, Homo sapien
ggtccacttagccataaattaggtgccaggaaa

SEQ ID NO: 737380 - DNA, 33 bp, Homo sapien
ggtccacttagccatagattaggtgccaggaaa

SEQ ID NO: 737381 - DNA, 33 bp, Homo sapien
atcctactctcctttacatccattctcaacctt

SEQ ID NO: 737382 - DNA, 33 bp, Homo sapien
atcctactctcctttatatccattctcaacctt

SEQ ID NO: 737383 - DNA, 33 bp, Homo sapien
tcctcggcagctataacggcttgataaggtgat

SEQ ID NO: 737384 - DNA, 33 bp, Homo sapien
tcctcggcagctataatggcttgataaggtgat

SEQ ID NO: 737385 - DNA, 33 bp, Homo sapien
taaagtgtaggctctgcaccctaggcaacccac

SEQ ID NO: 737386 - DNA, 33 bp, Homo sapien
taaagtgtaggctctggaccctaggcaacccac

SEQ ID NO: 737387 - DNA, 33 bp, Homo sapien
cactttatacctactgacctggcgtctcaccgg

SEQ ID NO: 737388 - DNA, 33 bp, Homo sapien
cactttatacctactgccctggcgtctcaccgg

SEQ ID NO: 737389 - DNA, 33 bp, Homo sapien
ggggatcaatctgaccaccaatgcagtaagccc

SEQ ID NO: 737390 - DNA, 33 bp, Homo sapien
ggggatcaatctgaccgccaatgcagtaagccc

SEQ ID NO: 737391 - DNA, 33 bp, Homo sapien
taaaatgactttggtcacattaaaaatagttat

SEQ ID NO: 737392 - DNA, 33 bp, Homo sapien
taaaatgactttggtctcattaaaaatagttat

SEQ ID NO: 737393 - DNA, 33 bp, Homo sapien
ctcccaacaaagtcaccattgcatactcctgtt

SEQ ID NO: 737394 - DNA, 33 bp, Homo sapien
ctcccaacaaagtcactattgcatactcctgtt

SEQ ID NO: 737395 - DNA, 33 bp, Homo sapien
gccccctttgcttaacaaccttctgtaaatttt

SEQ ID NO: 737396 - DNA, 33 bp, Homo sapien
gccccctttgcttaactaccttctgtaaatttt

SEQ ID NO: 737397 - DNA, 33 bp, Homo sapien
agaatacaaaagtgcacgagctttctcactgct

SEQ ID NO: 737398 - DNA, 33 bp, Homo sapien
agaatacaaaagtgcatgagctttctcactgct

SEQ ID NO: 737399 - DNA, 33 bp, Homo sapien
cctgtgagtgtcagaacaagtgcttgctattgt

SEQ ID NO: 737400 - DNA, 33 bp, Homo sapien
cctgtgagtgtcagaataagtgcttgctattgt

SEQ ID NO: 737401 - DNA, 33 bp, Homo sapien
attgtaatttgatttcaatttctgctgtttcct

SEQ ID NO: 737402 - DNA, 33 bp, Homo sapien
attgtaatttgatttccatttctgctgtttcct

SEQ ID NO: 737403 - DNA, 33 bp, Homo sapien
ctgtcctcaaggacacagaaggaaatggctgtt

SEQ ID NO: 737404 - DNA, 33 bp, Homo sapien
ctgtcctcaaggacacggaaggaaatggctgtt

SEQ ID NO: 737405 - DNA, 33 bp, Homo sapien
ccaaaaagaccagtagaaattatccaggtagat

SEQ ID NO: 737406 - DNA, 33 bp, Homo sapien
ccaaaaagaccagtaggaattatccaggtagat

SEQ ID NO: 737407 - DNA, 33 bp, Homo sapien
gactatcttaaacaccaaagcacaagaatgctc

SEQ ID NO: 737408 - DNA, 33 bp, Homo sapien
gactatcttaaacaccgaagcacaagaatgctc

SEQ ID NO: 737409 - DNA, 33 bp, Homo sapien
gctttgctgtgatctaacactaatatggttaaa

SEQ ID NO: 737410 - DNA, 33 bp, Homo sapien
gctttgctgtgatctagcactaatatggttaaa

SEQ ID NO: 737411 - DNA, 33 bp, Homo sapien
tgaaaaatccccttgaggccgatcactgagaag

SEQ ID NO: 737412 - DNA, 33 bp, Homo sapien
tgaaaaatccccttgatgccgatcactgagaag

SEQ ID NO: 737413 - DNA, 33 bp, Homo sapien
agcacagaatagaaaacgttcaatgcttagacg

SEQ ID NO: 737414 - DNA, 33 bp, Homo sapien
agcacagaatagaaaatgttcaatgcttagacg

SEQ ID NO: 737415 - DNA, 33 bp, Homo sapien
cctgggtcatcctaagaaggaaataaaatcagt

SEQ ID NO: 737416 - DNA, 33 bp, Homo sapien
cctgggtcatcctaagcaggaaataaaatcagt

SEQ ID NO: 737417 - DNA, 33 bp, Homo sapien
atctcagtcagagtttaaaaaatgaatggtaca

SEQ ID NO: 737418 - DNA, 33 bp, Homo sapien
atctcagtcagagttttaaaaatgaatggtaca

SEQ ID NO: 737419 - DNA, 33 bp, Homo sapien
atgtttctggagctacacttcttaatctccttc

SEQ ID NO: 737420 - DNA, 33 bp, Homo sapien
atgtttctggagctactcttcttaatctccttc

SEQ ID NO: 737421 - DNA, 33 bp, Homo sapien
gggaatgtgagagaataagtagctcctaagcag

SEQ ID NO: 737422 - DNA, 33 bp, Homo sapien
gggaatgtgagagaatgagtagctcctaagcag

SEQ ID NO: 737423 - DNA, 33 bp, Homo sapien
gagcgatacgaggcatcaatctgtataggtggc

SEQ ID NO: 737424 - DNA, 33 bp, Homo sapien
gagcgatacgaggcatgaatctgtataggtggc

SEQ ID NO: 737425 - DNA, 33 bp, Homo sapien
tggttcttgcaaaataaattaacttgatgacta

SEQ ID NO: 737426 - DNA, 33 bp, Homo sapien
tggttcttgcaaaatagattaacttgatgacta

SEQ ID NO: 737427 - DNA, 33 bp, Homo sapien
aaggaagattggaaagacaaaattcttcaggct

SEQ ID NO: 737428 - DNA, 33 bp, Homo sapien
aaggaagattggaaaggcaaaattcttcaggct

SEQ ID NO: 737429 - DNA, 33 bp, Homo sapien
cacacacaccactagaaagtacctagaatggtt

SEQ ID NO: 737430 - DNA, 33 bp, Homo sapien
cacacacaccactagacagtacctagaatggtt

SEQ ID NO: 737431 - DNA, 33 bp, Homo sapien
ctatgaagtctgagtagcccagggtctcacagt

SEQ ID NO: 737432 - DNA, 33 bp, Homo sapien
ctatgaagtctgagtatcccagggtctcacagt

SEQ ID NO: 737433 - DNA, 33 bp, Homo sapien
acagagccaatgacaaccagacaaagtaatggt

SEQ ID NO: 737434 - DNA, 33 bp, Homo sapien
acagagccaatgacaatcagacaaagtaatggt

SEQ ID NO: 737435 - DNA, 33 bp, Homo sapien
gatgttatattaagacgcatacctcagtatttt

SEQ ID NO: 737436 - DNA, 33 bp, Homo sapien
gatgttatattaagactcatacctcagtatttt

SEQ ID NO: 737437 - DNA, 33 bp, Homo sapien
aaaatggttttttatacgatagtcatctgggca

SEQ ID NO: 737438 - DNA, 33 bp, Homo sapien
aaaatggttttttatatgatagtcatctgggca

SEQ ID NO: 737439 - DNA, 33 bp, Homo sapien
ctttgtcacatggaaaagaaggccaagtgtatg

SEQ ID NO: 737440 - DNA, 33 bp, Homo sapien
ctttgtcacatggaaaggaaggccaagtgtatg

SEQ ID NO: 737441 - DNA, 33 bp, Homo sapien
ctcctgaaacacatccacaagctgaaggcagag

SEQ ID NO: 737442 - DNA, 33 bp, Homo sapien
ctcctgaaacacatccgcaagctgaaggcagag

SEQ ID NO: 737443 - DNA, 33 bp, Homo sapien
gcatcctctgccatgacgaaaaggcctcatagg

SEQ ID NO: 737444 - DNA, 33 bp, Homo sapien
gcatcctctgccatgatgaaaaggcctcatagg

SEQ ID NO: 737445 - DNA, 33 bp, Homo sapien
atttcaacatactttagccaagacttctctaaa

SEQ ID NO: 737446 - DNA, 33 bp, Homo sapien
atttcaacatactttatccaagacttctctaaa

SEQ ID NO: 737447 - DNA, 33 bp, Homo sapien
tttttagtcacaaacaactttacattgcttatc

SEQ ID NO: 737448 - DNA, 33 bp, Homo sapien
tttttagtcacaaacacctttacattgcttatc

SEQ ID NO: 737449 - DNA, 33 bp, Homo sapien
tgagtaagaaggaagacgataagcaatgtaaag

SEQ ID NO: 737450 - DNA, 33 bp, Homo sapien
tgagtaagaaggaagatgataagcaatgtaaag

SEQ ID NO: 737451 - DNA, 33 bp, Homo sapien
gcctaacctcatttcacataatttaaccttaaa

SEQ ID NO: 737452 - DNA, 33 bp, Homo sapien
gcctaacctcatttcagataatttaaccttaaa

SEQ ID NO: 737453 - DNA, 33 bp, Homo sapien
atagacataaagatgacagtgctgcctgcaatc

SEQ ID NO: 737454 - DNA, 33 bp, Homo sapien
atagacataaagatgatagtgctgcctgcaatc

SEQ ID NO: 737455 - DNA, 33 bp, Homo sapien
caaaagtaaatacggtgaagagtcctgcttaaa

SEQ ID NO: 737456 - DNA, 33 bp, Homo sapien
caaaagtaaatacggttaagagtcctgcttaaa

SEQ ID NO: 737457 - DNA, 33 bp, Homo sapien
atgcattttgaatttgcaggctctgctgtgcag

SEQ ID NO: 737458 - DNA, 33 bp, Homo sapien
atgcattttgaatttggaggctctgctgtgcag

SEQ ID NO: 737459 - DNA, 33 bp, Homo sapien
tcgaacattctatttaactgtttccatttggtt

SEQ ID NO: 737460 - DNA, 33 bp, Homo sapien
tcgaacattctatttacctgtttccatttggtt

SEQ ID NO: 737461 - DNA, 33 bp, Homo sapien
tggtattatatgggtacagttatatgaagagca

SEQ ID NO: 737462 - DNA, 33 bp, Homo sapien
tggtattatatgggtatagttatatgaagagca

SEQ ID NO: 737463 - DNA, 33 bp, Homo sapien
ctatctgtggaatgaacatacaaaagcaaacct

SEQ ID NO: 737464 - DNA, 33 bp, Homo sapien
ctatctgtggaatgaatatacaaaagcaaacct

SEQ ID NO: 737465 - DNA, 33 bp, Homo sapien
attgttgaaataatgaagcaactgtgactttca

SEQ ID NO: 737466 - DNA, 33 bp, Homo sapien
attgttgaaataatgaggcaactgtgactttca

SEQ ID NO: 737467 - DNA, 33 bp, Homo sapien
agttagtaatgagtgacgtcttgaggaagagat

SEQ ID NO: 737468 - DNA, 33 bp, Homo sapien
agttagtaatgagtgaggtcttgaggaagagat

SEQ ID NO: 737469 - DNA, 33 bp, Homo sapien
ttcacctagatttgccaaaattatgccaaagaa

SEQ ID NO: 737470 - DNA, 33 bp, Homo sapien
ttcacctagatttgccgaaattatgccaaagaa

SEQ ID NO: 737471 - DNA, 33 bp, Homo sapien
ataactcctagttgacacttgtataacatttat

SEQ ID NO: 737472 - DNA, 33 bp, Homo sapien
ataactcctagttgacccttgtataacatttat

SEQ ID NO: 737473 - DNA, 33 bp, Homo sapien
ctagaaagcgtgactacaatcagaggtaaaggc

SEQ ID NO: 737474 - DNA, 33 bp, Homo sapien
ctagaaagcgtgactagaatcagaggtaaaggc

SEQ ID NO: 737475 - DNA, 33 bp, Homo sapien
ctctgggtattgccatgaagtggttgaggacca

SEQ ID NO: 737476 - DNA, 33 bp, Homo sapien
ctctgggtattgccattaagtggttgaggacca

SEQ ID NO: 737477 - DNA, 33 bp, Homo sapien
tgccagggcgctgatgcacaagctgaaatgtga

SEQ ID NO: 737478 - DNA, 33 bp, Homo sapien
tgccagggcgctgatgtacaagctgaaatgtga

SEQ ID NO: 737479 - DNA, 33 bp, Homo sapien
acgatttttaagataacctctggatgctcaggt

SEQ ID NO: 737480 - DNA, 33 bp, Homo sapien
acgatttttaagataatctctggatgctcaggt

SEQ ID NO: 737481 - DNA, 33 bp, Homo sapien
gaagaggcagatgatgccaggttttataaacca

SEQ ID NO: 737482 - DNA, 33 bp, Homo sapien
gaagaggcagatgatgtcaggttttataaacca

SEQ ID NO: 737483 - DNA, 33 bp, Homo sapien
gtaagaatctagcaggaccaagagtctgtacca

SEQ ID NO: 737484 - DNA, 33 bp, Homo sapien
gtaagaatctagcaggcccaagagtctgtacca

SEQ ID NO: 737485 - DNA, 33 bp, Homo sapien
ctctgtagagctgttacacctgatagctattac

SEQ ID NO: 737486 - DNA, 33 bp, Homo sapien
ctctgtagagctgttatacctgatagctattac

SEQ ID NO: 737487 - DNA, 33 bp, Homo sapien
gtgttcaacaggttacaatcctttgaggacttt

SEQ ID NO: 737488 - DNA, 33 bp, Homo sapien
gtgttcaacaggttaccatcctttgaggacttt

SEQ ID NO: 737489 - DNA, 33 bp, Homo sapien
tgaatcccttgtttgaactgggtctgtcttaca

SEQ ID NO: 737490 - DNA, 33 bp, Homo sapien
tgaatcccttgtttgacctgggtctgtcttaca

SEQ ID NO: 737491 - DNA, 33 bp, Homo sapien
ttttctgttgacataaatattagagctatgctt

SEQ ID NO: 737492 - DNA, 33 bp, Homo sapien
ttttctgttgacataagtattagagctatgctt

SEQ ID NO: 737493 - DNA, 33 bp, Homo sapien
ttacctgattccaaaagaccttcccattctctt

SEQ ID NO: 737494 - DNA, 33 bp, Homo sapien
ttacctgattccaaaataccttcccattctctt

SEQ ID NO: 737495 - DNA, 33 bp, Homo sapien
ttttcaaggaatgtagaaggcaatggaaaatgt

SEQ ID NO: 737496 - DNA, 33 bp, Homo sapien
ttttcaaggaatgtaggaggcaatggaaaatgt

SEQ ID NO: 737497 - DNA, 33 bp, Homo sapien
tactattccctaaaccaatcacaagccaacatt

SEQ ID NO: 737498 - DNA, 33 bp, Homo sapien
tactattccctaaacccatcacaagccaacatt

SEQ ID NO: 737499 - DNA, 33 bp, Homo sapien
cttatttccagtcatagccatgtgccaataacc

SEQ ID NO: 737500 - DNA, 33 bp, Homo sapien
cttatttccagtcatatccatgtgccaataacc

SEQ ID NO: 737501 - DNA, 33 bp, Homo sapien
ctattaagaagtttcacatacaatgtttatgtt

SEQ ID NO: 737502 - DNA, 33 bp, Homo sapien
ctattaagaagtttcatatacaatgtttatgtt

SEQ ID NO: 737503 - DNA, 33 bp, Homo sapien
gttttgcaagaggtggaacaggaagaatgtaaa

SEQ ID NO: 737504 - DNA, 33 bp, Homo sapien
gttttgcaagaggtgggacaggaagaatgtaaa

SEQ ID NO: 737505 - DNA, 33 bp, Homo sapien
cagagacatctaaaagcagtttgacatgataat

SEQ ID NO: 737506 - DNA, 33 bp, Homo sapien
cagagacatctaaaagtagtttgacatgataat

SEQ ID NO: 737507 - DNA, 33 bp, Homo sapien
gcctagtgacaccataaaatattagaattgatt

SEQ ID NO: 737508 - DNA, 33 bp, Homo sapien
gcctagtgacaccatagaatattagaattgatt

SEQ ID NO: 737509 - DNA, 33 bp, Homo sapien
gcaaatacatagaaacaaactatacaagtgatt

SEQ ID NO: 737510 - DNA, 33 bp, Homo sapien
gcaaatacatagaaaccaactatacaagtgatt

SEQ ID NO: 737511 - DNA, 33 bp, Homo sapien
ggtgtaagctgtcagcagatgtaccattctggg

SEQ ID NO: 737512 - DNA, 33 bp, Homo sapien
ggtgtaagctgtcagcggatgtaccattctggg

SEQ ID NO: 737513 - DNA, 33 bp, Homo sapien
gctcccctcacttgtacatgaagctaaaagcta

SEQ ID NO: 737514 - DNA, 33 bp, Homo sapien
gctcccctcacttgtatatgaagctaaaagcta

SEQ ID NO: 737515 - DNA, 33 bp, Homo sapien
ataaagttttaggagactaagataacataaaat

SEQ ID NO: 737516 - DNA, 33 bp, Homo sapien
ataaagttttaggagattaagataacataaaat

SEQ ID NO: 737517 - DNA, 33 bp, Homo sapien
acctgagttccaaatacgaggtcatttaatagt

SEQ ID NO: 737518 - DNA, 33 bp, Homo sapien
acctgagttccaaatatgaggtcatttaatagt

SEQ ID NO: 737519 - DNA, 33 bp, Homo sapien
ttcgatggaagcccaccgcatatccatcctctt

SEQ ID NO: 737520 - DNA, 33 bp, Homo sapien
ttcgatggaagcccactgcatatccatcctctt

SEQ ID NO: 737521 - DNA, 33 bp, Homo sapien
agtgtctcactccaaacgctatgccctaacact

SEQ ID NO: 737522 - DNA, 33 bp, Homo sapien
agtgtctcactccaaatgctatgccctaacact

SEQ ID NO: 737523 - DNA, 33 bp, Homo sapien
ggaacactaaaagcacagagaatcggagttcgt

SEQ ID NO: 737524 - DNA, 33 bp, Homo sapien
ggaacactaaaagcacggagaatcggagttcgt

SEQ ID NO: 737525 - DNA, 33 bp, Homo sapien
agggatgaaggcagtaactaggtgtgtttgcgg

SEQ ID NO: 737526 - DNA, 33 bp, Homo sapien
agggatgaaggcagtatctaggtgtgtttgcgg

SEQ ID NO: 737527 - DNA, 33 bp, Homo sapien
agctctccagctgaggacagatcctggagacac

SEQ ID NO: 737528 - DNA, 33 bp, Homo sapien
agctctccagctgaggccagatcctggagacac

SEQ ID NO: 737529 - DNA, 33 bp, Homo sapien
ccttttgttacaaataccacgtagcatttatcg

SEQ ID NO: 737530 - DNA, 33 bp, Homo sapien
ccttttgttacaaatatcacgtagcatttatcg

SEQ ID NO: 737531 - DNA, 33 bp, Homo sapien
gagtaggtttaagcaccgatataaagaacacag

SEQ ID NO: 737532 - DNA, 33 bp, Homo sapien
gagtaggtttaagcactgatataaagaacacag

SEQ ID NO: 737533 - DNA, 33 bp, Homo sapien
ctactctgaagggcaccattcctctgaattttc

SEQ ID NO: 737534 - DNA, 33 bp, Homo sapien
ctactctgaagggcactattcctctgaattttc

SEQ ID NO: 737535 - DNA, 33 bp, Homo sapien
aggtttacaacttaaaactgcaaaaccaagcct

SEQ ID NO: 737536 - DNA, 33 bp, Homo sapien
aggtttacaacttaaagctgcaaaaccaagcct

SEQ ID NO: 737537 - DNA, 33 bp, Homo sapien
tgtgtttcatactagaaaagtggccatcccctt

SEQ ID NO: 737538 - DNA, 33 bp, Homo sapien
tgtgtttcatactagagaagtggccatcccctt

SEQ ID NO: 737539 - DNA, 33 bp, Homo sapien
tacttcacagctcatacacaaaacaagttattt

SEQ ID NO: 737540 - DNA, 33 bp, Homo sapien
tacttcacagctcatagacaaaacaagttattt

SEQ ID NO: 737541 - DNA, 33 bp, Homo sapien
taataataaatcatcaatcccttcgtgagtgtt

SEQ ID NO: 737542 - DNA, 33 bp, Homo sapien
taataataaatcatcagtcccttcgtgagtgtt

SEQ ID NO: 737543 - DNA, 33 bp, Homo sapien
caaaggaagcacaaaccgaaatctttggtctaa

SEQ ID NO: 737544 - DNA, 33 bp, Homo sapien
caaaggaagcacaaactgaaatctttggtctaa

SEQ ID NO: 737545 - DNA, 33 bp, Homo sapien
gaaaaataggagactacggaattattttaacat

SEQ ID NO: 737546 - DNA, 33 bp, Homo sapien
gaaaaataggagactatggaattattttaacat

SEQ ID NO: 737547 - DNA, 33 bp, Homo sapien
ttattacttgcaatcaagaggtttattgacact

SEQ ID NO: 737548 - DNA, 33 bp, Homo sapien
ttattacttgcaatcaggaggtttattgacact

SEQ ID NO: 737549 - DNA, 33 bp, Homo sapien
cttctagtttatcacaccactaacagagcctac

SEQ ID NO: 737550 - DNA, 33 bp, Homo sapien
cttctagtttatcacatcactaacagagcctac

SEQ ID NO: 737551 - DNA, 33 bp, Homo sapien
ctttaatgttcaagcactattgttacaacacat

SEQ ID NO: 737552 - DNA, 33 bp, Homo sapien
ctttaatgttcaagcattattgttacaacacat

SEQ ID NO: 737553 - DNA, 33 bp, Homo sapien
ttttagaagtaaagacactcccagatctactgg

SEQ ID NO: 737554 - DNA, 33 bp, Homo sapien
ttttagaagtaaagacgctcccagatctactgg

SEQ ID NO: 737555 - DNA, 33 bp, Homo sapien
agcactacatggcaatcatgcatagaaaaagat

SEQ ID NO: 737556 - DNA, 33 bp, Homo sapien
agcactacatggcaattatgcatagaaaaagat

SEQ ID NO: 737557 - DNA, 33 bp, Homo sapien
aattttaggtgtcatccattttgactggattaa

SEQ ID NO: 737558 - DNA, 33 bp, Homo sapien
aattttaggtgtcatcgattttgactggattaa

SEQ ID NO: 737559 - DNA, 33 bp, Homo sapien
gtgagatatctgaggacggagagtgaaagttag

SEQ ID NO: 737560 - DNA, 33 bp, Homo sapien
gtgagatatctgaggatggagagtgaaagttag

SEQ ID NO: 737561 - DNA, 33 bp, Homo sapien
aatggttttcatactacccttcctgaacttcgg

SEQ ID NO: 737562 - DNA, 33 bp, Homo sapien
aatggttttcatactatccttcctgaacttcgg

SEQ ID NO: 737563 - DNA, 33 bp, Homo sapien
ttctccagtctggaataacttcttttgggtgca

SEQ ID NO: 737564 - DNA, 33 bp, Homo sapien
ttctccagtctggaatgacttcttttgggtgca

SEQ ID NO: 737565 - DNA, 33 bp, Homo sapien
tttggaactgacaatccatgtgctttaggcatc

SEQ ID NO: 737566 - DNA, 33 bp, Homo sapien
tttggaactgacaatctatgtgctttaggcatc

SEQ ID NO: 737567 - DNA, 33 bp, Homo sapien
ctcaagtactgcgaagcaataaattcaattact

SEQ ID NO: 737568 - DNA, 33 bp, Homo sapien
ctcaagtactgcgaaggaataaattcaattact

SEQ ID NO: 737569 - DNA, 33 bp, Homo sapien
tgggaaactgatttgaacgtaagatgcactgtg

SEQ ID NO: 737570 - DNA, 33 bp, Homo sapien
tgggaaactgatttgagcgtaagatgcactgtg

SEQ ID NO: 737571 - DNA, 33 bp, Homo sapien
gacttgagatgttaaacgagtgacattagcagg

SEQ ID NO: 737572 - DNA, 33 bp, Homo sapien
gacttgagatgttaaatgagtgacattagcagg

SEQ ID NO: 737573 - DNA, 33 bp, Homo sapien
gtggtctcgtgtttcccatactctttcttgggc

SEQ ID NO: 737574 - DNA, 33 bp, Homo sapien
gtggtctcgtgtttcctatactctttcttgggc

SEQ ID NO: 737575 - DNA, 33 bp, Homo sapien
aagcaacagagcaaaaatattggaactctcaaa

SEQ ID NO: 737576 - DNA, 33 bp, Homo sapien
aagcaacagagcaaaagtattggaactctcaaa

SEQ ID NO: 737577 - DNA, 33 bp, Homo sapien
caagatgttatctgacaaaatgtttccaaaata

SEQ ID NO: 737578 - DNA, 33 bp, Homo sapien
caagatgttatctgaccaaatgtttccaaaata

SEQ ID NO: 737579 - DNA, 33 bp, Homo sapien
ttattaatttccttgcacctcatagtgtatata

SEQ ID NO: 737580 - DNA, 33 bp, Homo sapien
ttattaatttccttgctcctcatagtgtatata

SEQ ID NO: 737581 - DNA, 33 bp, Homo sapien
agtctattcaggctacaataacaaactaccaca

SEQ ID NO: 737582 - DNA, 33 bp, Homo sapien
agtctattcaggctacgataacaaactaccaca

SEQ ID NO: 737583 - DNA, 33 bp, Homo sapien
ccaaggctgatattagaacagggggcctttaca

SEQ ID NO: 737584 - DNA, 33 bp, Homo sapien
ccaaggctgatattaggacagggggcctttaca

SEQ ID NO: 737585 - DNA, 33 bp, Homo sapien
agtaatgtcccaatgaaaaaataagtcttttga

SEQ ID NO: 737586 - DNA, 33 bp, Homo sapien
agtaatgtcccaatgagaaaataagtcttttga

SEQ ID NO: 737587 - DNA, 33 bp, Homo sapien
acaagatagctaatcacgttgctcaaaagactt

SEQ ID NO: 737588 - DNA, 33 bp, Homo sapien
acaagatagctaatcatgttgctcaaaagactt

SEQ ID NO: 737589 - DNA, 33 bp, Homo sapien
gcattactttaactaacagatgcttgtaaacag

SEQ ID NO: 737590 - DNA, 33 bp, Homo sapien
gcattactttaactaatagatgcttgtaaacag

SEQ ID NO: 737591 - DNA, 33 bp, Homo sapien
gatagtgttgtaatgaaccacatttaatagtct

SEQ ID NO: 737592 - DNA, 33 bp, Homo sapien
gatagtgttgtaatgagccacatttaatagtct

SEQ ID NO: 737593 - DNA, 33 bp, Homo sapien
tccagatttgacactgaacatacttgaaataca

SEQ ID NO: 737594 - DNA, 33 bp, Homo sapien
tccagatttgacactgcacatacttgaaataca

SEQ ID NO: 737595 - DNA, 33 bp, Homo sapien
acacagagacacactacatgaaattgcactcgc

SEQ ID NO: 737596 - DNA, 33 bp, Homo sapien
acacagagacacactatatgaaattgcactcgc

SEQ ID NO: 737597 - DNA, 33 bp, Homo sapien
tatggccaatgtaaaactcagttctcttttctt

SEQ ID NO: 737598 - DNA, 33 bp, Homo sapien
tatggccaatgtaaaattcagttctcttttctt

SEQ ID NO: 737599 - DNA, 33 bp, Homo sapien
gatagaaagagaaggggagctagcaccaggcgc

SEQ ID NO: 737600 - DNA, 33 bp, Homo sapien
gatagaaagagaagggtagctagcaccaggcgc

SEQ ID NO: 737601 - DNA, 33 bp, Homo sapien
attctcctataccactcaattcattcttccttc

SEQ ID NO: 737602 - DNA, 33 bp, Homo sapien
attctcctataccactgaattcattcttccttc

SEQ ID NO: 737603 - DNA, 33 bp, Homo sapien
tagatataatagatcggccaccatggtgctaga

SEQ ID NO: 737604 - DNA, 33 bp, Homo sapien
tagatataatagatcgtccaccatggtgctaga

SEQ ID NO: 737605 - DNA, 33 bp, Homo sapien
atcccacagacagtataagaagatacaacaaaa

SEQ ID NO: 737606 - DNA, 33 bp, Homo sapien
atcccacagacagtatgagaagatacaacaaaa

SEQ ID NO: 737607 - DNA, 33 bp, Homo sapien
actgtttcttatatgaagtctatctagccaaga

SEQ ID NO: 737608 - DNA, 33 bp, Homo sapien
actgtttcttatatgaggtctatctagccaaga

SEQ ID NO: 737609 - DNA, 33 bp, Homo sapien
gtgacttggatggaccgaaataacttcttcaga

SEQ ID NO: 737610 - DNA, 33 bp, Homo sapien
gtgacttggatggacctaaataacttcttcaga

SEQ ID NO: 737611 - DNA, 33 bp, Homo sapien
aggctgtgtaaggaagaacttcaatgctgcagg

SEQ ID NO: 737612 - DNA, 33 bp, Homo sapien
aggctgtgtaaggaagcacttcaatgctgcagg

SEQ ID NO: 737613 - DNA, 33 bp, Homo sapien
tgtgtgttagatcaaacagtcccaaagtggtaa

SEQ ID NO: 737614 - DNA, 33 bp, Homo sapien
tgtgtgttagatcaaatagtcccaaagtggtaa

SEQ ID NO: 737615 - DNA, 33 bp, Homo sapien
ttccttcatgagcatcaagtaatttgaattgag

SEQ ID NO: 737616 - DNA, 33 bp, Homo sapien
ttccttcatgagcatcgagtaatttgaattgag

SEQ ID NO: 737617 - DNA, 33 bp, Homo sapien
tgaagcacttcatacaatatagcaaaataccta

SEQ ID NO: 737618 - DNA, 33 bp, Homo sapien
tgaagcacttcatacagtatagcaaaataccta

SEQ ID NO: 737619 - DNA, 33 bp, Homo sapien
tgaatatatgactctaccgtttaaatttctatt

SEQ ID NO: 737620 - DNA, 33 bp, Homo sapien
tgaatatatgactctatcgtttaaatttctatt

SEQ ID NO: 737621 - DNA, 33 bp, Homo sapien
gagtaaaaatacaccaatgattcttctgtagac

SEQ ID NO: 737622 - DNA, 33 bp, Homo sapien
gagtaaaaatacaccagtgattcttctgtagac

SEQ ID NO: 737623 - DNA, 33 bp, Homo sapien
aatggaaaacctaagacgttcagtaatgggtat

SEQ ID NO: 737624 - DNA, 33 bp, Homo sapien
aatggaaaacctaagatgttcagtaatgggtat

SEQ ID NO: 737625 - DNA, 33 bp, Homo sapien
atgccacaatcaagacgactagaaagatagagc

SEQ ID NO: 737626 - DNA, 33 bp, Homo sapien
atgccacaatcaagactactagaaagatagagc

SEQ ID NO: 737627 - DNA, 33 bp, Homo sapien
tcgttcagacattgaaaacccatttgcctactt

SEQ ID NO: 737628 - DNA, 33 bp, Homo sapien
tcgttcagacattgaacacccatttgcctactt

SEQ ID NO: 737629 - DNA, 33 bp, Homo sapien
gatgattgcaggtacggattcctttctctttca

SEQ ID NO: 737630 - DNA, 33 bp, Homo sapien
gatgattgcaggtacgtattcctttctctttca

SEQ ID NO: 737631 - DNA, 33 bp, Homo sapien
tgtggtctcatctgaggatcaactggggaagaa

SEQ ID NO: 737632 - DNA, 33 bp, Homo sapien
tgtggtctcatctgagtatcaactggggaagaa

SEQ ID NO: 737633 - DNA, 33 bp, Homo sapien
tattccactatgttgaggaaaagtacagatttc

SEQ ID NO: 737634 - DNA, 33 bp, Homo sapien
tattccactatgttgatgaaaagtacagatttc

SEQ ID NO: 737635 - DNA, 33 bp, Homo sapien
ctggtcacagggttcacgagtgactttttaatc

SEQ ID NO: 737636 - DNA, 33 bp, Homo sapien
ctggtcacagggttcatgagtgactttttaatc

SEQ ID NO: 737637 - DNA, 33 bp, Homo sapien
attaccccaatcacaaaatgatttatctgaggt

SEQ ID NO: 737638 - DNA, 33 bp, Homo sapien
attaccccaatcacaacatgatttatctgaggt

SEQ ID NO: 737639 - DNA, 33 bp, Homo sapien
ttcattggggtttaacggatgttcaggtaagtc

SEQ ID NO: 737640 - DNA, 33 bp, Homo sapien
ttcattggggtttaactgatgttcaggtaagtc

SEQ ID NO: 737641 - DNA, 33 bp, Homo sapien
catcccagtagtctccaaaatgttaattcattc

SEQ ID NO: 737642 - DNA, 33 bp, Homo sapien
catcccagtagtctccgaaatgttaattcattc

SEQ ID NO: 737643 - DNA, 33 bp, Homo sapien
ggttctgtgtagtcacaaaacagtctaatttta

SEQ ID NO: 737644 - DNA, 33 bp, Homo sapien
ggttctgtgtagtcactaaacagtctaatttta

SEQ ID NO: 737645 - DNA, 33 bp, Homo sapien
tcactttctgcatatacagtttgggttttagtc

SEQ ID NO: 737646 - DNA, 33 bp, Homo sapien
tcactttctgcatatatagtttgggttttagtc

SEQ ID NO: 737647 - DNA, 33 bp, Homo sapien
tctccatctcctcaagccaataagaccagtgga

SEQ ID NO: 737648 - DNA, 33 bp, Homo sapien
tctccatctcctcaagtcaataagaccagtgga

SEQ ID NO: 737649 - DNA, 33 bp, Homo sapien
acaaaccagtagatataaaacctagagaagtgc

SEQ ID NO: 737650 - DNA, 33 bp, Homo sapien
acaaaccagtagatatgaaacctagagaagtgc

SEQ ID NO: 737651 - DNA, 33 bp, Homo sapien
cctagagaagtgcagaagtaaaatttgattgct

SEQ ID NO: 737652 - DNA, 33 bp, Homo sapien
cctagagaagtgcagaggtaaaatttgattgct

SEQ ID NO: 737653 - DNA, 33 bp, Homo sapien
ttaactacaaatgaccggagccatgaatagttt

SEQ ID NO: 737654 - DNA, 33 bp, Homo sapien
ttaactacaaatgacctgagccatgaatagttt

SEQ ID NO: 737655 - DNA, 33 bp, Homo sapien
ctttggtgggcctggcaaacaatgcttctgaat

SEQ ID NO: 737656 - DNA, 33 bp, Homo sapien
ctttggtgggcctggcgaacaatgcttctgaat

SEQ ID NO: 737657 - DNA, 33 bp, Homo sapien
agggctatatttcttaactgtggtgctaggatt

SEQ ID NO: 737658 - DNA, 33 bp, Homo sapien
agggctatatttcttagctgtggtgctaggatt

SEQ ID NO: 737659 - DNA, 33 bp, Homo sapien
actggactactcgctacaaatgaaggtcagaga

SEQ ID NO: 737660 - DNA, 33 bp, Homo sapien
actggactactcgctagaaatgaaggtcagaga

SEQ ID NO: 737661 - DNA, 33 bp, Homo sapien
aatgacaatgcatagacgaaaagtaatgtgtgc

SEQ ID NO: 737662 - DNA, 33 bp, Homo sapien
aatgacaatgcatagaggaaaagtaatgtgtgc

SEQ ID NO: 737663 - DNA, 33 bp, Homo sapien
agcagtaggccaatataagaacaacttgtacct

SEQ ID NO: 737664 - DNA, 33 bp, Homo sapien
agcagtaggccaatatgagaacaacttgtacct

SEQ ID NO: 737665 - DNA, 33 bp, Homo sapien
tgaacctgagtcaatgaatccactcttacgact

SEQ ID NO: 737666 - DNA, 33 bp, Homo sapien
tgaacctgagtcaatggatccactcttacgact

SEQ ID NO: 737667 - DNA, 33 bp, Homo sapien
tattgtagtagcaaccaaggaactgagctaagt

SEQ ID NO: 737668 - DNA, 33 bp, Homo sapien
tattgtagtagcaaccgaggaactgagctaagt

SEQ ID NO: 737669 - DNA, 33 bp, Homo sapien
ggtcagtctggcacaggatatcagaagtcctgc

SEQ ID NO: 737670 - DNA, 33 bp, Homo sapien
ggtcagtctggcacagtatatcagaagtcctgc

SEQ ID NO: 737671 - DNA, 33 bp, Homo sapien
ttctgctgtctgtacaagaaccatgcctttata

SEQ ID NO: 737672 - DNA, 33 bp, Homo sapien
ttctgctgtctgtacaggaaccatgcctttata

SEQ ID NO: 737673 - DNA, 33 bp, Homo sapien
atattgaacaccagaaagacttggtccacaagg

SEQ ID NO: 737674 - DNA, 33 bp, Homo sapien
atattgaacaccagaaggacttggtccacaagg

SEQ ID NO: 737675 - DNA, 33 bp, Homo sapien
tctcaccatagttctccagaccaggaataatca

SEQ ID NO: 737676 - DNA, 33 bp, Homo sapien
tctcaccatagttctctagaccaggaataatca

SEQ ID NO: 737677 - DNA, 33 bp, Homo sapien
cctgcaatgcttgtataagtataacaatttgtg

SEQ ID NO: 737678 - DNA, 33 bp, Homo sapien
cctgcaatgcttgtatcagtataacaatttgtg

SEQ ID NO: 737679 - DNA, 33 bp, Homo sapien
ccatttcatcaagtcacctaatggagtacatga

SEQ ID NO: 737680 - DNA, 33 bp, Homo sapien
ccatttcatcaagtcagctaatggagtacatga

SEQ ID NO: 737681 - DNA, 33 bp, Homo sapien
ttgttgctcttgtctaactgcatagaacaaatg

SEQ ID NO: 737682 - DNA, 33 bp, Homo sapien
ttgttgctcttgtctacctgcatagaacaaatg

SEQ ID NO: 737683 - DNA, 33 bp, Homo sapien
tttattctttgcacaaattcaaatgtgattttt

SEQ ID NO: 737684 - DNA, 33 bp, Homo sapien
tttattctttgcacaagttcaaatgtgattttt

SEQ ID NO: 737685 - DNA, 33 bp, Homo sapien
tgaagattactttaacggaagaatatctaaaca

SEQ ID NO: 737686 - DNA, 33 bp, Homo sapien
tgaagattactttaactgaagaatatctaaaca

SEQ ID NO: 737687 - DNA, 33 bp, Homo sapien
gcagtttcctattagaaggctaaaatggttaat

SEQ ID NO: 737688 - DNA, 33 bp, Homo sapien
gcagtttcctattagagggctaaaatggttaat

SEQ ID NO: 737689 - DNA, 33 bp, Homo sapien
ggaaacacagacaaaacagagatgtgattttca

SEQ ID NO: 737690 - DNA, 33 bp, Homo sapien
ggaaacacagacaaaagagagatgtgattttca

SEQ ID NO: 737691 - DNA, 33 bp, Homo sapien
gtttataacactctgaataatgactgagtccca

SEQ ID NO: 737692 - DNA, 33 bp, Homo sapien
gtttataacactctgagtaatgactgagtccca

SEQ ID NO: 737693 - DNA, 33 bp, Homo sapien
tgagagataaaatgaaattaaaggtgattgtgg

SEQ ID NO: 737694 - DNA, 33 bp, Homo sapien
tgagagataaaatgaatttaaaggtgattgtgg

SEQ ID NO: 737695 - DNA, 33 bp, Homo sapien
gtatatatgtgtaagaatatcactgtgtcataa

SEQ ID NO: 737696 - DNA, 33 bp, Homo sapien
gtatatatgtgtaagagtatcactgtgtcataa

SEQ ID NO: 737697 - DNA, 33 bp, Homo sapien
atgaagatataacatacgagctgtgaatggaaa

SEQ ID NO: 737698 - DNA, 33 bp, Homo sapien
atgaagatataacatatgagctgtgaatggaaa

SEQ ID NO: 737699 - DNA, 33 bp, Homo sapien
tgtaaaattggggacaagtcattgttattttgc

SEQ ID NO: 737700 - DNA, 33 bp, Homo sapien
tgtaaaattggggacaggtcattgttattttgc

SEQ ID NO: 737701 - DNA, 33 bp, Homo sapien
aggaactatattttccacattttgacatttcta

SEQ ID NO: 737702 - DNA, 33 bp, Homo sapien
aggaactatattttccgcattttgacatttcta

SEQ ID NO: 737703 - DNA, 33 bp, Homo sapien
cactttcctcaaagggaatccatgaacaccatg

SEQ ID NO: 737704 - DNA, 33 bp, Homo sapien
cactttcctcaaaggggatccatgaacaccatg

SEQ ID NO: 737705 - DNA, 33 bp, Homo sapien
cacactccagatggacagtaagttacttggttt

SEQ ID NO: 737706 - DNA, 33 bp, Homo sapien
cacactccagatggacggtaagttacttggttt

SEQ ID NO: 737707 - DNA, 33 bp, Homo sapien
tcttcagaggactgataagaatgacaatgtaat

SEQ ID NO: 737708 - DNA, 33 bp, Homo sapien
tcttcagaggactgatgagaatgacaatgtaat

SEQ ID NO: 737709 - DNA, 33 bp, Homo sapien
tctataaattgcaatgccatattctttctttaa

SEQ ID NO: 737710 - DNA, 33 bp, Homo sapien
tctataaattgcaatggcatattctttctttaa

SEQ ID NO: 737711 - DNA, 33 bp, Homo sapien
actgagaggataagcaataggcttgtctttatt

SEQ ID NO: 737712 - DNA, 33 bp, Homo sapien
actgagaggataagcagtaggcttgtctttatt

SEQ ID NO: 737713 - DNA, 33 bp, Homo sapien
gtgctccaagaaacagactcaagctctggcata

SEQ ID NO: 737714 - DNA, 33 bp, Homo sapien
gtgctccaagaaacaggctcaagctctggcata

SEQ ID NO: 737715 - DNA, 33 bp, Homo sapien
ggagctcttttgtgcaatgactaaatgggggaa

SEQ ID NO: 737716 - DNA, 33 bp, Homo sapien
ggagctcttttgtgcagtgactaaatgggggaa

SEQ ID NO: 737717 - DNA, 33 bp, Homo sapien
tgagattgttgtacagcagtccccctttatcca

SEQ ID NO: 737718 - DNA, 33 bp, Homo sapien
tgagattgttgtacagtagtccccctttatcca

SEQ ID NO: 737719 - DNA, 33 bp, Homo sapien
ggaggttcttcaactgacagctacacatccacc

SEQ ID NO: 737720 - DNA, 33 bp, Homo sapien
ggaggttcttcaactgtcagctacacatccacc

SEQ ID NO: 737721 - DNA, 33 bp, Homo sapien
caccatattaacataactactgcattaataacc

SEQ ID NO: 737722 - DNA, 33 bp, Homo sapien
caccatattaacataattactgcattaataacc

SEQ ID NO: 737723 - DNA, 33 bp, Homo sapien
tgttgagttaaaggcaaagacaagattgtctat

SEQ ID NO: 737724 - DNA, 33 bp, Homo sapien
tgttgagttaaaggcagagacaagattgtctat

SEQ ID NO: 737725 - DNA, 33 bp, Homo sapien
agtatgaattcctgaaccggggtacaaggtcct

SEQ ID NO: 737726 - DNA, 33 bp, Homo sapien
agtatgaattcctgaatcggggtacaaggtcct

SEQ ID NO: 737727 - DNA, 33 bp, Homo sapien
tacaagggcagagccagcactctggttttgaga

SEQ ID NO: 737728 - DNA, 33 bp, Homo sapien
tacaagggcagagccatcactctggttttgaga

SEQ ID NO: 737729 - DNA, 33 bp, Homo sapien; identical to SEQ ID NO: 737727

SEQ ID NO: 737730 - DNA, 33 bp, Homo sapien; identical to SEQ ID NO: 737728

SEQ ID NO: 737731 - DNA, 33 bp, Homo sapien
ctcccaatacatagtaataaacattcaggtaat

SEQ ID NO: 737732 - DNA, 33 bp, Homo sapien
ctcccaatacatagtagtaaacattcaggtaat

SEQ ID NO: 737733 - DNA, 33 bp, Homo sapien
acacttcggcacagaaagtattaattcatgtat

SEQ ID NO: 737734 - DNA, 33 bp, Homo sapien
acacttcggcacagaaggtattaattcatgtat

SEQ ID NO: 737735 - DNA, 33 bp, Homo sapien
atgaactcaggcaaagcatcaagtaggtttgca

SEQ ID NO: 737736 - DNA, 33 bp, Homo sapien
atgaactcaggcaaagtatcaagtaggtttgca

SEQ ID NO: 737737 - DNA, 33 bp, Homo sapien
gtatgaattaaaggaacagatgaggaaatatgt

SEQ ID NO: 737738 - DNA, 33 bp, Homo sapien
gtatgaattaaaggaagagatgaggaaatatgt

SEQ ID NO: 737739 - DNA, 33 bp, Homo sapien
tgtttcatgtaggaataaaaggtgaacagctgc

SEQ ID NO: 737740 - DNA, 33 bp, Homo sapien
tgtttcatgtaggaattaaaggtgaacagctgc

SEQ ID NO: 737741 - DNA, 33 bp, Homo sapien
tatgtggcttatggagaagtaggcaataagtga

SEQ ID NO: 737742 - DNA, 33 bp, Homo sapien
tatgtggcttatggaggagtaggcaataagtga

SEQ ID NO: 737743 - DNA, 33 bp, Homo sapien
aggagattggttgaggaaatgaagagaattagg

SEQ ID NO: 737744 - DNA, 33 bp, Homo sapien
aggagattggttgaggcaatgaagagaattagg

SEQ ID NO: 737745 - DNA, 33 bp, Homo sapien
ctaaagtccagatttcaaacacacactcaacta

SEQ ID NO: 737746 - DNA, 33 bp, Homo sapien
ctaaagtccagatttcgaacacacactcaacta

SEQ ID NO: 737747 - DNA, 33 bp, Homo sapien
gaacaagacataaaacacttgcctattatctca

SEQ ID NO: 737748 - DNA, 33 bp, Homo sapien
gaacaagacataaaacgcttgcctattatctca

SEQ ID NO: 737749 - DNA, 33 bp, Homo sapien
ctaaagtggtcccatgaactggctgtatctggt

SEQ ID NO: 737750 - DNA, 33 bp, Homo sapien
ctaaagtggtcccatgcactggctgtatctggt

SEQ ID NO: 737751 - DNA, 33 bp, Homo sapien
gtaatgatttcaagacagtagttggtataccag

SEQ ID NO: 737752 - DNA, 33 bp, Homo sapien
gtaatgatttcaagacggtagttggtataccag

SEQ ID NO: 737753 - DNA, 33 bp, Homo sapien
agattaaataagacggcattcagattaatatac

SEQ ID NO: 737754 - DNA, 33 bp, Homo sapien
agattaaataagacggtattcagattaatatac

SEQ ID NO: 737755 - DNA, 33 bp, Homo sapien
agcgcattggttcaaagatcagaaaacctggca

SEQ ID NO: 737756 - DNA, 33 bp, Homo sapien
agcgcattggttcaaatatcagaaaacctggca

SEQ ID NO: 737757 - DNA, 33 bp, Homo sapien
tggaaagtcaaaagtgaatcttggcccaaatct

SEQ ID NO: 737758 - DNA, 33 bp, Homo sapien
tggaaagtcaaaagtggatcttggcccaaatct

SEQ ID NO: 737759 - DNA, 33 bp, Homo sapien
taagactcacaccttcaaaagtctgtttctaaa

SEQ ID NO: 737760 - DNA, 33 bp, Homo sapien
taagactcacaccttcgaaagtctgtttctaaa

SEQ ID NO: 737761 - DNA, 33 bp, Homo sapien
gcagacagttggatgacataaatctaaagggta

SEQ ID NO: 737762 - DNA, 33 bp, Homo sapien
gcagacagttggatgatataaatctaaagggta

SEQ ID NO: 737763 - DNA, 33 bp, Homo sapien
tcacttgtgccaactaaagaaagcgaaatcatt

SEQ ID NO: 737764 - DNA, 33 bp, Homo sapien
tcacttgtgccaactacagaaagcgaaatcatt

SEQ ID NO: 737765 - DNA, 33 bp, Homo sapien
gattgtctaacgatccaaaattttaaagtgttt

SEQ ID NO: 737766 - DNA, 33 bp, Homo sapien
gattgtctaacgatccgaaattttaaagtgttt

SEQ ID NO: 737767 - DNA, 33 bp, Homo sapien
ggtactatctatgtaaagactcaactggttttt

SEQ ID NO: 737768 - DNA, 33 bp, Homo sapien
ggtactatctatgtaaggactcaactggttttt

SEQ ID NO: 737769 - DNA, 33 bp, Homo sapien
ccacttctactagactaaaatttccatgaagcc

SEQ ID NO: 737770 - DNA, 33 bp, Homo sapien
ccacttctactagactgaaatttccatgaagcc

SEQ ID NO: 737771 - DNA, 33 bp, Homo sapien
ataaatatgaagtcaacgatgaggagatagagc

SEQ ID NO: 737772 - DNA, 33 bp, Homo sapien
ataaatatgaagtcaatgatgaggagatagagc

SEQ ID NO: 737773 - DNA, 33 bp, Homo sapien
atgtgaaatagtatgagctcccagagcaagcaa

SEQ ID NO: 737774 - DNA, 33 bp, Homo sapien
atgtgaaatagtatgatctcccagagcaagcaa

SEQ ID NO: 737775 - DNA, 33 bp, Homo sapien
aaccccagagaaactgaataagctgcataggtg

SEQ ID NO: 737776 - DNA, 33 bp, Homo sapien
aaccccagagaaactgtataagctgcataggtg

SEQ ID NO: 737777 - DNA, 33 bp, Homo sapien
gaacctgatattctggcactttgatctcagact

SEQ ID NO: 737778 - DNA, 33 bp, Homo sapien
gaacctgatattctggtactttgatctcagact

SEQ ID NO: 737779 - DNA, 33 bp, Homo sapien
ttaaatttgagtttcagataagtaactgttaag

SEQ ID NO: 737780 - DNA, 33 bp, Homo sapien
ttaaatttgagtttcatataagtaactgttaag

SEQ ID NO: 737781 - DNA, 33 bp, Homo sapien
ttactagcccatggtacacggggtttgtaatgt

SEQ ID NO: 737782 - DNA, 33 bp, Homo sapien
ttactagcccatggtatacggggtttgtaatgt

SEQ ID NO: 737783 - DNA, 33 bp, Homo sapien
gctttattttccatcccgatacctacaacattt

SEQ ID NO: 737784 - DNA, 33 bp, Homo sapien
gctttattttccatcctgatacctacaacattt

SEQ ID NO: 737785 - DNA, 33 bp, Homo sapien
attcaattccgttcaaactgtatttactagccc

SEQ ID NO: 737786 - DNA, 33 bp, Homo sapien
attcaattccgttcaatctgtatttactagccc

SEQ ID NO: 737787 - DNA, 33 bp, Homo sapien
atgatgtagaggattacaacagggaaaaaagta

SEQ ID NO: 737788 - DNA, 33 bp, Homo sapien
atgatgtagaggattagaacagggaaaaaagta

SEQ ID NO: 737789 - DNA, 33 bp, Homo sapien
taaaatgaaaaagtcacgattcatttgttcatg

SEQ ID NO: 737790 - DNA, 33 bp, Homo sapien
taaaatgaaaaagtcatgattcatttgttcatg

SEQ ID NO: 737791 - DNA, 33 bp, Homo sapien
tgagtttccctgcaacagtccagatttttgtgt

SEQ ID NO: 737792 - DNA, 33 bp, Homo sapien
tgagtttccctgcaacggtccagatttttgtgt

SEQ ID NO: 737793 - DNA, 33 bp, Homo sapien
ccctattatactcttccagtttggttgataagt

SEQ ID NO: 737794 - DNA, 33 bp, Homo sapien
ccctattatactcttctagtttggttgataagt

SEQ ID NO: 737795 - DNA, 33 bp, Homo sapien
ggttttattgaacttgaaggtcagggtgagaaa

SEQ ID NO: 737796 - DNA, 33 bp, Homo sapien
ggttttattgaacttgtaggtcagggtgagaaa

SEQ ID NO: 737797 - DNA, 33 bp, Homo sapien
tgtgctaagcactattcaaggagctagagatat

SEQ ID NO: 737798 - DNA, 33 bp, Homo sapien
tgtgctaagcactattgaaggagctagagatat

SEQ ID NO: 737799 - DNA, 33 bp, Homo sapien
tgacactgctagccacaatcactttgagatacc

SEQ ID NO: 737800 - DNA, 33 bp, Homo sapien
tgacactgctagccacgatcactttgagatacc

SEQ ID NO: 737801 - DNA, 33 bp, Homo sapien
gctcacccagatgaaacaagaattgcaacacta

SEQ ID NO: 737802 - DNA, 33 bp, Homo sapien
gctcacccagatgaaagaagaattgcaacacta

SEQ ID NO: 737803 - DNA, 33 bp, Homo sapien
gaagactggggaaagaagtgacattaaattggc

SEQ ID NO: 737804 - DNA, 33 bp, Homo sapien
gaagactggggaaagatgtgacattaaattggc

SEQ ID NO: 737805 - DNA, 33 bp, Homo sapien
tctcagtaatccaactaaactgtacttcactgt

SEQ ID NO: 737806 - DNA, 33 bp, Homo sapien
tctcagtaatccaactgaactgtacttcactgt

SEQ ID NO: 737807 - DNA, 33 bp, Homo sapien
gcaaaaagcttcagagaattgttaggatccttt

SEQ ID NO: 737808 - DNA, 33 bp, Homo sapien
gcaaaaagcttcagagtattgttaggatccttt

SEQ ID NO: 737809 - DNA, 33 bp, Homo sapien
agactacatacaacacacagaatacagcccaag

SEQ ID NO: 737810 - DNA, 33 bp, Homo sapien
agactacatacaacacgcagaatacagcccaag

SEQ ID NO: 737811 - DNA, 33 bp, Homo sapien
tccttttcaagtccgaacttcaactggttcatc

SEQ ID NO: 737812 - DNA, 33 bp, Homo sapien
tccttttcaagtccgatcttcaactggttcatc

SEQ ID NO: 737813 - DNA, 33 bp, Homo sapien
aaaatggtaaaagtcaaaaagatgttaacagaa

SEQ ID NO: 737814 - DNA, 33 bp, Homo sapien
aaaatggtaaaagtcagaaagatgttaacagaa

SEQ ID NO: 737815 - DNA, 33 bp, Homo sapien
cgagatagagaacagtaaaagggtagaaatgag

SEQ ID NO: 737816 - DNA, 33 bp, Homo sapien
cgagatagagaacagttaaagggtagaaatgag

SEQ ID NO: 737817 - DNA, 33 bp, Homo sapien
tctctgcagccgcccaatcgccataacagaaat

SEQ ID NO: 737818 - DNA, 33 bp, Homo sapien
tctctgcagccgcccagtcgccataacagaaat

SEQ ID NO: 737819 - DNA, 33 bp, Homo sapien
ctttgagagaaaggacaagaaacttatacagct

SEQ ID NO: 737820 - DNA, 33 bp, Homo sapien
ctttgagagaaaggaccagaaacttatacagct

SEQ ID NO: 737821 - DNA, 33 bp, Homo sapien
aattttagggttgctccgaagttatcaaggaga

SEQ ID NO: 737822 - DNA, 33 bp, Homo sapien
aattttagggttgctctgaagttatcaaggaga

SEQ ID NO: 737823 - DNA, 33 bp, Homo sapien
gagattttaagtattcaaattcacattttgttt

SEQ ID NO: 737824 - DNA, 33 bp, Homo sapien
gagattttaagtattcgaattcacattttgttt

SEQ ID NO: 737825 - DNA, 33 bp, Homo sapien
taagatgagtgcaatccacaatcttttaaaatt

SEQ ID NO: 737826 - DNA, 33 bp, Homo sapien
taagatgagtgcaatctacaatcttttaaaatt

SEQ ID NO: 737827 - DNA, 33 bp, Homo sapien
attaaaaaagaatgaccggttgagtataataca

SEQ ID NO: 737828 - DNA, 33 bp, Homo sapien
attaaaaaagaatgactggttgagtataataca

SEQ ID NO: 737829 - DNA, 33 bp, Homo sapien
taatgaactagtttggaatttttcttcagttac

SEQ ID NO: 737830 - DNA, 33 bp, Homo sapien
taatgaactagtttgggatttttcttcagttac

SEQ ID NO: 737831 - DNA, 33 bp, Homo sapien
acaactgcttttatcacgaaacagtgtattttg

SEQ ID NO: 737832 - DNA, 33 bp, Homo sapien
acaactgcttttatcatgaaacagtgtattttg

SEQ ID NO: 737833 - DNA, 33 bp, Homo sapien
tagtggtatcccatcacatggttgtgctctatt

SEQ ID NO: 737834 - DNA, 33 bp, Homo sapien
tagtggtatcccatcatatggttgtgctctatt

SEQ ID NO: 737835 - DNA, 33 bp, Homo sapien
tgggagtagaagtcaactgttactgtgttcata

SEQ ID NO: 737836 - DNA, 33 bp, Homo sapien
tgggagtagaagtcaagtgttactgtgttcata

SEQ ID NO: 737837 - DNA, 33 bp, Homo sapien
ctttttcaggaaatgcacaaggtttagacccat

SEQ ID NO: 737838 - DNA, 33 bp, Homo sapien
ctttttcaggaaatgcgcaaggtttagacccat

SEQ ID NO: 737839 - DNA, 33 bp, Homo sapien
gattgtgttctctatacagattttgctttctct

SEQ ID NO: 737840 - DNA, 33 bp, Homo sapien
gattgtgttctctatatagattttgctttctct

SEQ ID NO: 737841 - DNA, 33 bp, Homo sapien
ccacacatgaggaaataaagttaacatggtagg

SEQ ID NO: 737842 - DNA, 33 bp, Homo sapien
ccacacatgaggaaatgaagttaacatggtagg

SEQ ID NO: 737843 - DNA, 33 bp, Homo sapien
tttatagctagtttcaaagatagttacctgggt

SEQ ID NO: 737844 - DNA, 33 bp, Homo sapien
tttatagctagtttcagagatagttacctgggt

SEQ ID NO: 737845 - DNA, 33 bp, Homo sapien
tcagtgtttgggaaaacgattccaggagtccag

SEQ ID NO: 737846 - DNA, 33 bp, Homo sapien
tcagtgtttgggaaaatgattccaggagtccag

SEQ ID NO: 737847 - DNA, 33 bp, Homo sapien
tacttaagagtttccaatataatgagacaaaat

SEQ ID NO: 737848 - DNA, 33 bp, Homo sapien
tacttaagagtttccagtataatgagacaaaat

SEQ ID NO: 737849 - DNA, 33 bp, Homo sapien
caacctgcaaaactgacctgtcatgccctgcct

SEQ ID NO: 737850 - DNA, 33 bp, Homo sapien
caacctgcaaaactgatctgtcatgccctgcct

SEQ ID NO: 737851 - DNA, 33 bp, Homo sapien
aaagatccttccgacacgccaaattaagtgatg

SEQ ID NO: 737852 - DNA, 33 bp, Homo sapien
aaagatccttccgacatgccaaattaagtgatg

SEQ ID NO: 737853 - DNA, 33 bp, Homo sapien
gtgtcactcaggagagcatttattgttactgtt

SEQ ID NO: 737854 - DNA, 33 bp, Homo sapien
gtgtcactcaggagagtatttattgttactgtt

SEQ ID NO: 737855 - DNA, 33 bp, Homo sapien
aatcattagattaggccattgaaaacttagagg

SEQ ID NO: 737856 - DNA, 33 bp, Homo sapien
aatcattagattaggctattgaaaacttagagg

SEQ ID NO: 737857 - DNA, 33 bp, Homo sapien
tctccttgtatgtgaaattataagaaatgttac

SEQ ID NO: 737858 - DNA, 33 bp, Homo sapien
tctccttgtatgtgaagttataagaaatgttac

SEQ ID NO: 737859 - DNA, 33 bp, Homo sapien
tattctttagtttgaaagcaaatgatggacttt

SEQ ID NO: 737860 - DNA, 33 bp, Homo sapien
tattctttagtttgaatgcaaatgatggacttt

SEQ ID NO: 737861 - DNA, 33 bp, Homo sapien
ttgacggatatggataacttatgttttgtcatt

SEQ ID NO: 737862 - DNA, 33 bp, Homo sapien
ttgacggatatggataccttatgttttgtcatt

SEQ ID NO: 737863 - DNA, 33 bp, Homo sapien
attttaacatgaaatcaatcaatataaaattgt

SEQ ID NO: 737864 - DNA, 33 bp, Homo sapien
attttaacatgaaatccatcaatataaaattgt

SEQ ID NO: 737865 - DNA, 33 bp, Homo sapien
gtgaatagttagatcaacgttctttcattattt

SEQ ID NO: 737866 - DNA, 33 bp, Homo sapien
gtgaatagttagatcagcgttctttcattattt

SEQ ID NO: 737867 - DNA, 33 bp, Homo sapien
tattcaaactgaaaagccttacaattctggaat

SEQ ID NO: 737868 - DNA, 33 bp, Homo sapien
tattcaaactgaaaagtcttacaattctggaat

SEQ ID NO: 737869 - DNA, 33 bp, Homo sapien
catgagtttaaaagcaatagaataagagaaata

SEQ ID NO: 737870 - DNA, 33 bp, Homo sapien
catgagtttaaaagcagtagaataagagaaata

SEQ ID NO: 737871 - DNA, 33 bp, Homo sapien
gtaatgacaacaattacatctatagtgacatac

SEQ ID NO: 737872 - DNA, 33 bp, Homo sapien
gtaatgacaacaattatatctatagtgacatac

SEQ ID NO: 737873 - DNA, 33 bp, Homo sapien
atctactttgggtaggcactgctcaagatattt

SEQ ID NO: 737874 - DNA, 33 bp, Homo sapien
atctactttgggtaggtactgctcaagatattt

SEQ ID NO: 737875 - DNA, 33 bp, Homo sapien
tataaaaataataaccagccagatgtgatgact

SEQ ID NO: 737876 - DNA, 33 bp, Homo sapien
tataaaaataataaccggccagatgtgatgact

SEQ ID NO: 737877 - DNA, 33 bp, Homo sapien
tcaaaatgaaacacaacgccaagcccaatgtgg

SEQ ID NO: 737878 - DNA, 33 bp, Homo sapien
tcaaaatgaaacacaatgccaagcccaatgtgg

SEQ ID NO: 737879 - DNA, 33 bp, Homo sapien
tggcataaaagttgccagacactattataggaa

SEQ ID NO: 737880 - DNA, 33 bp, Homo sapien
tggcataaaagttgccggacactattataggaa

SEQ ID NO: 737881 - DNA, 33 bp, Homo sapien
cctggcattactggaaactgcctgaaaagataa

SEQ ID NO: 737882 - DNA, 33 bp, Homo sapien
cctggcattactggaagctgcctgaaaagataa

SEQ ID NO: 737883 - DNA, 33 bp, Homo sapien
aggcagttgttttgtccaatcatttgggtctca

SEQ ID NO: 737884 - DNA, 33 bp, Homo sapien
aggcagttgttttgtctaatcatttgggtctca

SEQ ID NO: 737885 - DNA, 33 bp, Homo sapien
tgtctgtgctggagtcagaagtgtaaacaaaca

SEQ ID NO: 737886 - DNA, 33 bp, Homo sapien
tgtctgtgctggagtcggaagtgtaaacaaaca

SEQ ID NO: 737887 - DNA, 33 bp, Homo sapien
gaaatcaggcagacagaataaagtatgctccac

SEQ ID NO: 737888 - DNA, 33 bp, Homo sapien
gaaatcaggcagacaggataaagtatgctccac

SEQ ID NO: 737889 - DNA, 33 bp, Homo sapien
ggagctatactaggaaaccttgaagaaaacacc

SEQ ID NO: 737890 - DNA, 33 bp, Homo sapien
ggagctatactaggaacccttgaagaaaacacc

SEQ ID NO: 737891 - DNA, 33 bp, Homo sapien
atcattaaggaattaaaagtttacatcaggaac

SEQ ID NO: 737892 - DNA, 33 bp, Homo sapien
atcattaaggaattaagagtttacatcaggaac

SEQ ID NO: 737893 - DNA, 33 bp, Homo sapien
cctgaagtagcttggaagtccatctctcaatat

SEQ ID NO: 737894 - DNA, 33 bp, Homo sapien
cctgaagtagcttggaggtccatctctcaatat

SEQ ID NO: 737895 - DNA, 33 bp, Homo sapien
ctcaacttgcagagccaataagagtttcttgag

SEQ ID NO: 737896 - DNA, 33 bp, Homo sapien
ctcaacttgcagagccgataagagtttcttgag

SEQ ID NO: 737897 - DNA, 33 bp, Homo sapien
aatatacattcaatggacatgaaaaaatgcagc

SEQ ID NO: 737898 - DNA, 33 bp, Homo sapien
aatatacattcaatgggcatgaaaaaatgcagc

SEQ ID NO: 737899 - DNA, 33 bp, Homo sapien
ctgctgcggcttcaacagtccttccattcaggg

SEQ ID NO: 737900 - DNA, 33 bp, Homo sapien
ctgctgcggcttcaacggtccttccattcaggg

SEQ ID NO: 737901 - DNA, 33 bp, Homo sapien
tactcactaagaactacaggcagaaacagcact

SEQ ID NO: 737902 - DNA, 33 bp, Homo sapien
tactcactaagaactataggcagaaacagcact

SEQ ID NO: 737903 - DNA, 33 bp, Homo sapien
cacttcggaacactaaaaaactattttcaagat

SEQ ID NO: 737904 - DNA, 33 bp, Homo sapien
cacttcggaacactaacaaactattttcaagat

SEQ ID NO: 737905 - DNA, 33 bp, Homo sapien
aactccaaaattatgcacaaattttcatgaata

SEQ ID NO: 737906 - DNA, 33 bp, Homo sapien
aactccaaaattatgcgcaaattttcatgaata

SEQ ID NO: 737907 - DNA, 33 bp, Homo sapien
atgatagaacaaacagacattttatgaatgaat

SEQ ID NO: 737908 - DNA, 33 bp, Homo sapien
atgatagaacaaacaggcattttatgaatgaat

SEQ ID NO: 737909 - DNA, 33 bp, Homo sapien
aagacaatgttggtacaagagtggatggaaggg

SEQ ID NO: 737910 - DNA, 33 bp, Homo sapien
aagacaatgttggtacgagagtggatggaaggg

SEQ ID NO: 737911 - DNA, 33 bp, Homo sapien
ttacacaaaagggagacgtgatcagatttgcct

SEQ ID NO: 737912 - DNA, 33 bp, Homo sapien
ttacacaaaagggagatgtgatcagatttgcct

SEQ ID NO: 737913 - DNA, 33 bp, Homo sapien
atatctgctcaatgatgatcaagagtttttctt

SEQ ID NO: 737914 - DNA, 33 bp, Homo sapien
atatctgctcaatgattatcaagagtttttctt

SEQ ID NO: 737915 - DNA, 33 bp, Homo sapien
ctgattaattacttcacgctttgatcatctaca

SEQ ID NO: 737916 - DNA, 33 bp, Homo sapien
ctgattaattacttcatgctttgatcatctaca

SEQ ID NO: 737917 - DNA, 33 bp, Homo sapien
tgcttttttaaggacactctgcttccatggtca

SEQ ID NO: 737918 - DNA, 33 bp, Homo sapien
tgcttttttaaggacattctgcttccatggtca

SEQ ID NO: 737919 - DNA, 33 bp, Homo sapien
aaataaacactagataatagaagcaaattgtca

SEQ ID NO: 737920 - DNA, 33 bp, Homo sapien
aaataaacactagatactagaagcaaattgtca

SEQ ID NO: 737921 - DNA, 33 bp, Homo sapien
tgacaaatataagccaaagactattaactgcta

SEQ ID NO: 737922 - DNA, 33 bp, Homo sapien
tgacaaatataagccagagactattaactgcta

SEQ ID NO: 737923 - DNA, 33 bp, Homo sapien
ctatgtgtacaatttacgatttatcctatgaaa

SEQ ID NO: 737924 - DNA, 33 bp, Homo sapien
ctatgtgtacaatttatgatttatcctatgaaa

SEQ ID NO: 737925 - DNA, 33 bp, Homo sapien
actcctaagtcttccaagaaattctcagtgatg

SEQ ID NO: 737926 - DNA, 33 bp, Homo sapien
actcctaagtcttccaggaaattctcagtgatg

SEQ ID NO: 737927 - DNA, 33 bp, Homo sapien
atgacaaatgagggacaaaattatcctcagttg

SEQ ID NO: 737928 - DNA, 33 bp, Homo sapien
atgacaaatgagggactaaattatcctcagttg

SEQ ID NO: 737929 - DNA, 33 bp, Homo sapien
aagtagttcacaaaagaatgtatttttaattca

SEQ ID NO: 737930 - DNA, 33 bp, Homo sapien
aagtagttcacaaaagtatgtatttttaattca

SEQ ID NO: 737931 - DNA, 33 bp, Homo sapien
tactttatttaatttccactgtgtctaaagaac

SEQ ID NO: 737932 - DNA, 33 bp, Homo sapien
tactttatttaatttctactgtgtctaaagaac

SEQ ID NO: 737933 - DNA, 33 bp, Homo sapien
ccttatataaagatgaaaacacgaatttgatgt

SEQ ID NO: 737934 - DNA, 33 bp, Homo sapien
ccttatataaagatgataacacgaatttgatgt

SEQ ID NO: 737935 - DNA, 33 bp, Homo sapien
caggaagaacttttaaagtggtgcgttagttta

SEQ ID NO: 737936 - DNA, 33 bp, Homo sapien
caggaagaacttttaaggtggtgcgttagttta

SEQ ID NO: 737937 - DNA, 33 bp, Homo sapien
ttttagcaatcccctcgatcgttgccactggct

SEQ ID NO: 737938 - DNA, 33 bp, Homo sapien
ttttagcaatcccctctatcgttgccactggct

SEQ ID NO: 737939 - DNA, 33 bp, Homo sapien
aagtgaaacctcgaaagcacatggtcaagtgcc

SEQ ID NO: 737940 - DNA, 33 bp, Homo sapien
aagtgaaacctcgaaatcacatggtcaagtgcc

SEQ ID NO: 737941 - DNA, 33 bp, Homo sapien
gaccatcataggcactcagcaaatgctagctga

SEQ ID NO: 737942 - DNA, 33 bp, Homo sapien
gaccatcataggcactgagcaaatgctagctga

SEQ ID NO: 737943 - DNA, 33 bp, Homo sapien
tcagagttcataaaagaattttgcaaccattaa

SEQ ID NO: 737944 - DNA, 33 bp, Homo sapien
tcagagttcataaaagcattttgcaaccattaa

SEQ ID NO: 737945 - DNA, 33 bp, Homo sapien
ggtactgaaactttgaaatttgctaacatggca

SEQ ID NO: 737946 - DNA, 33 bp, Homo sapien
ggtactgaaactttgacatttgctaacatggca

SEQ ID NO: 737947 - DNA, 33 bp, Homo sapien
gaataaagtgcattacaaagaacttgggttttg

SEQ ID NO: 737948 - DNA, 33 bp, Homo sapien
gaataaagtgcattacgaagaacttgggttttg

SEQ ID NO: 737949 - DNA, 33 bp, Homo sapien
taaaaatcaacaaaggacaatctagaccaaacc

SEQ ID NO: 737950 - DNA, 33 bp, Homo sapien
taaaaatcaacaaagggcaatctagaccaaacc

SEQ ID NO: 737951 - DNA, 33 bp, Homo sapien
ctgttgttgaactgcaactgggcactctacatt

SEQ ID NO: 737952 - DNA, 33 bp, Homo sapien
ctgttgttgaactgcagctgggcactctacatt

SEQ ID NO: 737953 - DNA, 33 bp, Homo sapien
caaaaagttacttagccagttaaatgaatctta

SEQ ID NO: 737954 - DNA, 33 bp, Homo sapien
caaaaagttacttagctagttaaatgaatctta

SEQ ID NO: 737955 - DNA, 33 bp, Homo sapien
gttggtagacaatagtcaaagttcatcaggaga

SEQ ID NO: 737956 - DNA, 33 bp, Homo sapien
gttggtagacaatagttaaagttcatcaggaga

SEQ ID NO: 737957 - DNA, 33 bp, Homo sapien
tttcccattgaatataccctgaggcatgaacag

SEQ ID NO: 737958 - DNA, 33 bp, Homo sapien
tttcccattgaatatatcctgaggcatgaacag

SEQ ID NO: 737959 - DNA, 33 bp, Homo sapien
gatcaataatgttagaaaggcatgaatgtgtag

SEQ ID NO: 737960 - DNA, 33 bp, Homo sapien
gatcaataatgttagagaggcatgaatgtgtag

SEQ ID NO: 737961 - DNA, 33 bp, Homo sapien
tcagtaatggctcacaacaaaccacagatttct

SEQ ID NO: 737962 - DNA, 33 bp, Homo sapien
tcagtaatggctcacaccaaaccacagatttct

SEQ ID NO: 737963 - DNA, 33 bp, Homo sapien
taaggtgagaggacaacggaattgaaacctggc

SEQ ID NO: 737964 - DNA, 33 bp, Homo sapien
taaggtgagaggacaatggaattgaaacctggc

SEQ ID NO: 737965 - DNA, 33 bp, Homo sapien
atttctattattgctgaaagttctattgggcag

SEQ ID NO: 737966 - DNA, 33 bp, Homo sapien
atttctattattgctgtaagttctattgggcag

SEQ ID NO: 737967 - DNA, 33 bp, Homo sapien
gcacaaaagtgggtagccgaatgtgtggctgag

SEQ ID NO: 737968 - DNA, 33 bp, Homo sapien
gcacaaaagtgggtagtcgaatgtgtggctgag

SEQ ID NO: 737969 - DNA, 33 bp, Homo sapien
cctcctgccactatcacaagtattttattcttt

SEQ ID NO: 737970 - DNA, 33 bp, Homo sapien
cctcctgccactatcataagtattttattcttt

SEQ ID NO: 737971 - DNA, 33 bp, Homo sapien
cagacagtcatttatgaatacagtaatgtgcac

SEQ ID NO: 737972 - DNA, 33 bp, Homo sapien
cagacagtcatttatggatacagtaatgtgcac

SEQ ID NO: 737973 - DNA, 33 bp, Homo sapien
ttgtttacaggacttgcaacgtttacatttaat

SEQ ID NO: 737974 - DNA, 33 bp, Homo sapien
ttgtttacaggacttggaacgtttacatttaat

SEQ ID NO: 737975 - DNA, 33 bp, Homo sapien
cctatgtcctttaataagtgctttccaagagtt

SEQ ID NO: 737976 - DNA, 33 bp, Homo sapien
cctatgtcctttaatacgtgctttccaagagtt

SEQ ID NO: 737977 - DNA, 33 bp, Homo sapien
gcttttctgctccaaaatctgttcacttactaa

SEQ ID NO: 737978 - DNA, 33 bp, Homo sapien
gcttttctgctccaaagtctgttcacttactaa

SEQ ID NO: 737979 - DNA, 33 bp, Homo sapien
gacaaagctgaaaaaaacaagcaatggggaaag

SEQ ID NO: 737980 - DNA, 33 bp, Homo sapien
gacaaagctgaaaaaaccaagcaatggggaaag

SEQ ID NO: 737981 - DNA, 33 bp, Homo sapien
atatctgtatgacagcaatgttttgaattactg

SEQ ID NO: 737982 - DNA, 33 bp, Homo sapien
atatctgtatgacagctatgttttgaattactg

SEQ ID NO: 737983 - DNA, 33 bp, Homo sapien
atcccctgactagaagcaactcaaacttaagca

SEQ ID NO: 737984 - DNA, 33 bp, Homo sapien
atcccctgactagaaggaactcaaacttaagca

SEQ ID NO: 737985 - DNA, 33 bp, Homo sapien
agattaaggacactgacagttgtataattaaaa

SEQ ID NO: 737986 - DNA, 33 bp, Homo sapien
agattaaggacactgatagttgtataattaaaa

SEQ ID NO: 737987 - DNA, 33 bp, Homo sapien
gatggcacattcaaaaaagatgttaaatcaagg

SEQ ID NO: 737988 - DNA, 33 bp, Homo sapien
gatggcacattcaaaacagatgttaaatcaagg

SEQ ID NO: 737989 - DNA, 33 bp, Homo sapien
atttttgccaacattccctggacaataagaata

SEQ ID NO: 737990 - DNA, 33 bp, Homo sapien
atttttgccaacattctctggacaataagaata

SEQ ID NO: 737991 - DNA, 33 bp, Homo sapien
gttgatgttcttttctcaaggcttcatggacta

SEQ ID NO: 737992 - DNA, 33 bp, Homo sapien
gttgatgttcttttcttaaggcttcatggacta

SEQ ID NO: 737993 - DNA, 33 bp, Homo sapien
cattttcctgcataccactgtcaattattcgca

SEQ ID NO: 737994 - DNA, 33 bp, Homo sapien
cattttcctgcataccgctgtcaattattcgca

SEQ ID NO: 737995 - DNA, 33 bp, Homo sapien
attgtttgattttgaacggtctataaacactgg

SEQ ID NO: 737996 - DNA, 33 bp, Homo sapien
attgtttgattttgaatggtctataaacactgg

SEQ ID NO: 737997 - DNA, 33 bp, Homo sapien
tcagtgtgtgaaaaaccatatggtaacatatgg

SEQ ID NO: 737998 - DNA, 33 bp, Homo sapien
tcagtgtgtgaaaaactatatggtaacatatgg

SEQ ID NO: 737999 - DNA, 33 bp, Homo sapien
ggtcgtttggcaagacaagcttcgtgttaaggt

SEQ ID NO: 738000 - DNA, 33 bp, Homo sapien
ggtcgtttggcaagacgagcttcgtgttaaggt

SEQ ID NO: 738001 - DNA, 33 bp, Homo sapien
acttgatatcatcacacgaaggtcaaattggtg

SEQ ID NO: 738002 - DNA, 33 bp, Homo sapien
acttgatatcatcacatgaaggtcaaattggtg

SEQ ID NO: 738003 - DNA, 33 bp, Homo sapien
ttacttcacttggcacagcagtgaacatgaacc

SEQ ID NO: 738004 - DNA, 33 bp, Homo sapien
ttacttcacttggcacggcagtgaacatgaacc

SEQ ID NO: 738005 - DNA, 33 bp, Homo sapien
ctggaatggaactagactatgtggtattgaata

SEQ ID NO: 738006 - DNA, 33 bp, Homo sapien
ctggaatggaactagattatgtggtattgaata

SEQ ID NO: 738007 - DNA, 33 bp, Homo sapien
aatcaacagaataaacagaatcaactatcaata

SEQ ID NO: 738008 - DNA, 33 bp, Homo sapien
aatcaacagaataaacggaatcaactatcaata

SEQ ID NO: 738009 - DNA, 33 bp, Homo sapien
acttagactgctggtgaaaatgtataaaacaga

SEQ ID NO: 738010 - DNA, 33 bp, Homo sapien
acttagactgctggtggaaatgtataaaacaga

SEQ ID NO: 738011 - DNA, 33 bp, Homo sapien
aaaaaaaagttagttacattgaagatacaatag

SEQ ID NO: 738012 - DNA, 33 bp, Homo sapien
aaaaaaaagttagttagattgaagatacaatag

SEQ ID NO: 738013 - DNA, 33 bp, Homo sapien
ctttagactttggacacgtgagttaatacttga

SEQ ID NO: 738014 - DNA, 33 bp, Homo sapien
ctttagactttggacatgtgagttaatacttga

SEQ ID NO: 738015 - DNA, 33 bp, Homo sapien
aagtggtaaataaatacattggcactctgcaat

SEQ ID NO: 738016 - DNA, 33 bp, Homo sapien
aagtggtaaataaatatattggcactctgcaat

SEQ ID NO: 738017 - DNA, 33 bp, Homo sapien
aagagagaaacacacaatgagagagagagaagg

SEQ ID NO: 738018 - DNA, 33 bp, Homo sapien
aagagagaaacacacagtgagagagagagaagg

SEQ ID NO: 738019 - DNA, 33 bp, Homo sapien
aactggatgacatgaaatgtggggtagcagaca

SEQ ID NO: 738020 - DNA, 33 bp, Homo sapien
aactggatgacatgaactgtggggtagcagaca

SEQ ID NO: 738021 - DNA, 33 bp, Homo sapien
ctgcaggaagctatgaagttgcatacaatgtgt

SEQ ID NO: 738022 - DNA, 33 bp, Homo sapien
ctgcaggaagctatgaggttgcatacaatgtgt

SEQ ID NO: 738023 - DNA, 33 bp, Homo sapien
aatagacatccttcaacgtattttccctatctt

SEQ ID NO: 738024 - DNA, 33 bp, Homo sapien
aatagacatccttcaatgtattttccctatctt

SEQ ID NO: 738025 - DNA, 33 bp, Homo sapien
taataagagttgagacagaattacttaggcagt

SEQ ID NO: 738026 - DNA, 33 bp, Homo sapien
taataagagttgagacggaattacttaggcagt

SEQ ID NO: 738027 - DNA, 33 bp, Homo sapien
aatctgtgtggttcaaagagtagacttacatat

SEQ ID NO: 738028 - DNA, 33 bp, Homo sapien
aatctgtgtggttcaaggagtagacttacatat

SEQ ID NO: 738029 - DNA, 33 bp, Homo sapien
ttcaccttgatctgtcacagacatttcccctga

SEQ ID NO: 738030 - DNA, 33 bp, Homo sapien
ttcaccttgatctgtcgcagacatttcccctga

SEQ ID NO: 738031 - DNA, 33 bp, Homo sapien
aataattcagaaatgcccttgtcagtgaattaa

SEQ ID NO: 738032 - DNA, 33 bp, Homo sapien
aataattcagaaatgctcttgtcagtgaattaa

SEQ ID NO: 738033 - DNA, 33 bp, Homo sapien
ttagcaatatttgaataatctagttactccagt

SEQ ID NO: 738034 - DNA, 33 bp, Homo sapien
ttagcaatatttgaattatctagttactccagt

SEQ ID NO: 738035 - DNA, 33 bp, Homo sapien
tctcttcttttctcagccacgcttgtagttagg

SEQ ID NO: 738036 - DNA, 33 bp, Homo sapien
tctcttcttttctcagtcacgcttgtagttagg

SEQ ID NO: 738037 - DNA, 33 bp, Homo sapien
ctggggccacattatcaaggggcttgttagaca

SEQ ID NO: 738038 - DNA, 33 bp, Homo sapien
ctggggccacattatccaggggcttgttagaca

SEQ ID NO: 738039 - DNA, 33 bp, Homo sapien
ttcttaaagcaaaagcgctatgataaagaggag

SEQ ID NO: 738040 - DNA, 33 bp, Homo sapien
ttcttaaagcaaaagctctatgataaagaggag

SEQ ID NO: 738041 - DNA, 33 bp, Homo sapien
caattgcttaataggaatagccttatggaaccc

SEQ ID NO: 738042 - DNA, 33 bp, Homo sapien
caattgcttaataggagtagccttatggaaccc

SEQ ID NO: 738043 - DNA, 33 bp, Homo sapien
ttaaaattcattcctacagtacgagtaaaggag

SEQ ID NO: 738044 - DNA, 33 bp, Homo sapien
ttaaaattcattcctagagtacgagtaaaggag

SEQ ID NO: 738045 - DNA, 33 bp, Homo sapien
attgcttacatactaactcagtgtggattggcc

SEQ ID NO: 738046 - DNA, 33 bp, Homo sapien
attgcttacatactaattcagtgtggattggcc

SEQ ID NO: 738047 - DNA, 33 bp, Homo sapien
taagataaaactttgaagagatttccaaaaatt

SEQ ID NO: 738048 - DNA, 33 bp, Homo sapien
taagataaaactttgaggagatttccaaaaatt

SEQ ID NO: 738049 - DNA, 33 bp, Homo sapien
caaatgagacccttgaataaaatagtgaaagaa

SEQ ID NO: 738050 - DNA, 33 bp, Homo sapien
caaatgagacccttgagtaaaatagtgaaagaa

SEQ ID NO: 738051 - DNA, 33 bp, Homo sapien
tataatattaaatcatcaaccataactttaaaa

SEQ ID NO: 738052 - DNA, 33 bp, Homo sapien
tataatattaaatcatgaaccataactttaaaa

SEQ ID NO: 738053 - DNA, 33 bp, Homo sapien
gttaaattttcccagcaatgaattacgacaatc

SEQ ID NO: 738054 - DNA, 33 bp, Homo sapien
gttaaattttcccagcgatgaattacgacaatc

SEQ ID NO: 738055 - DNA, 33 bp, Homo sapien
agaaatggcaggaaacagttacaggaaacaccc

SEQ ID NO: 738056 - DNA, 33 bp, Homo sapien
agaaatggcaggaaaccgttacaggaaacaccc

SEQ ID NO: 738057 - DNA, 33 bp, Homo sapien
gggaattcatacattacaaaattgcaaccagaa

SEQ ID NO: 738058 - DNA, 33 bp, Homo sapien
gggaattcatacattataaaattgcaaccagaa

SEQ ID NO: 738059 - DNA, 33 bp, Homo sapien
cacttctgtccctggaacagtttgagaaaatct

SEQ ID NO: 738060 - DNA, 33 bp, Homo sapien
cacttctgtccctggagcagtttgagaaaatct

SEQ ID NO: 738061 - DNA, 33 bp, Homo sapien
aagtgcatctaccatacaactaagactcttgta

SEQ ID NO: 738062 - DNA, 33 bp, Homo sapien
aagtgcatctaccatataactaagactcttgta

SEQ ID NO: 738063 - DNA, 33 bp, Homo sapien
ctttggattgattgaaacaaaaccagctatatt

SEQ ID NO: 738064 - DNA, 33 bp, Homo sapien
ctttggattgattgaagcaaaaccagctatatt

SEQ ID NO: 738065 - DNA, 33 bp, Homo sapien
tgcatatgaaagcccacatatgtcatgtctaaa

SEQ ID NO: 738066 - DNA, 33 bp, Homo sapien
tgcatatgaaagcccatatatgtcatgtctaaa

SEQ ID NO: 738067 - DNA, 33 bp, Homo sapien
gtaccgctaacaaaaaaaaagatgataatttga

SEQ ID NO: 738068 - DNA, 33 bp, Homo sapien
gtaccgctaacaaaaagaaagatgataatttga

SEQ ID NO: 738069 - DNA, 33 bp, Homo sapien
gaccttgctattgaaaaccagttggacattgtg

SEQ ID NO: 738070 - DNA, 33 bp, Homo sapien
gaccttgctattgaaagccagttggacattgtg

SEQ ID NO: 738071 - DNA, 33 bp, Homo sapien
ttttcaaatgtgctaaagtcgctccatatccac

SEQ ID NO: 738072 - DNA, 33 bp, Homo sapien
ttttcaaatgtgctaatgtcgctccatatccac

SEQ ID NO: 738073 - DNA, 33 bp, Homo sapien
ttccattccttctcaacggggcagaatagtatg

SEQ ID NO: 738074 - DNA, 33 bp, Homo sapien
ttccattccttctcaagggggcagaatagtatg

SEQ ID NO: 738075 - DNA, 33 bp, Homo sapien
gtactgcgcccctataagtacacttctgctttt

SEQ ID NO: 738076 - DNA, 33 bp, Homo sapien
gtactgcgcccctatacgtacacttctgctttt

SEQ ID NO: 738077 - DNA, 33 bp, Homo sapien
cttgttagcaaaccaaccctgaaccataaaatg

SEQ ID NO: 738078 - DNA, 33 bp, Homo sapien
cttgttagcaaaccaatcctgaaccataaaatg

SEQ ID NO: 738079 - DNA, 33 bp, Homo sapien
catatgggtatgccaaatataccagctgtttgg

SEQ ID NO: 738080 - DNA, 33 bp, Homo sapien
catatgggtatgccaactataccagctgtttgg

SEQ ID NO: 738081 - DNA, 33 bp, Homo sapien
ctcctcattgtccacaactcctgctagtatcga

SEQ ID NO: 738082 - DNA, 33 bp, Homo sapien
ctcctcattgtccacacctcctgctagtatcga

SEQ ID NO: 738083 - DNA, 33 bp, Homo sapien
gctctatgtgatgacactatgattgaaatacat

SEQ ID NO: 738084 - DNA, 33 bp, Homo sapien
gctctatgtgatgacattatgattgaaatacat

SEQ ID NO: 738085 - DNA, 33 bp, Homo sapien
tcttttcctcattttaaccaggtattttcattt

SEQ ID NO: 738086 - DNA, 33 bp, Homo sapien
tcttttcctcattttacccaggtattttcattt

SEQ ID NO: 738087 - DNA, 33 bp, Homo sapien
ttatttttgtgggataagaagatggattttaat

SEQ ID NO: 738088 - DNA, 33 bp, Homo sapien
ttatttttgtgggataggaagatggattttaat

SEQ ID NO: 738089 - DNA, 33 bp, Homo sapien
aaaagatcaccaaaacagttcattaacaaaagt

SEQ ID NO: 738090 - DNA, 33 bp, Homo sapien
aaaagatcaccaaaactgttcattaacaaaagt

SEQ ID NO: 738091 - DNA, 33 bp, Homo sapien
attgttttttttgttcactctggcagcctaatt

SEQ ID NO: 738092 - DNA, 33 bp, Homo sapien
attgttttttttgttcgctctggcagcctaatt

SEQ ID NO: 738093 - DNA, 33 bp, Homo sapien
gtttcttcttcacaaacgtcttcaaggcctgta

SEQ ID NO: 738094 - DNA, 33 bp, Homo sapien
gtttcttcttcacaaatgtcttcaaggcctgta

SEQ ID NO: 738095 - DNA, 33 bp, Homo sapien
ccatctacatcaggtaactctcctaatgctatc

SEQ ID NO: 738096 - DNA, 33 bp, Homo sapien
ccatctacatcaggtatctctcctaatgctatc

SEQ ID NO: 738097 - DNA, 33 bp, Homo sapien
ttatcatatttgcgacagaacatgatttttcaa

SEQ ID NO: 738098 - DNA, 33 bp, Homo sapien
ttatcatatttgcgacggaacatgatttttcaa

SEQ ID NO: 738099 - DNA, 33 bp, Homo sapien
tgtaagtcacatggtaataaaagtactcaaaag

SEQ ID NO: 738100 - DNA, 33 bp, Homo sapien
tgtaagtcacatggtagtaaaagtactcaaaag

SEQ ID NO: 738101 - DNA, 33 bp, Homo sapien
ctctagagccagatcaatcaggttgaaatctca

SEQ ID NO: 738102 - DNA, 33 bp, Homo sapien
ctctagagccagatcactcaggttgaaatctca

SEQ ID NO: 738103 - DNA, 33 bp, Homo sapien
caatgtattttactcacaggatgacgtgtctgt

SEQ ID NO: 738104 - DNA, 33 bp, Homo sapien
caatgtattttactcagaggatgacgtgtctgt

SEQ ID NO: 738105 - DNA, 33 bp, Homo sapien
tgctgaaatgagttacaacaatgggggactgcc

SEQ ID NO: 738106 - DNA, 33 bp, Homo sapien
tgctgaaatgagttacgacaatgggggactgcc

SEQ ID NO: 738107 - DNA, 33 bp, Homo sapien
ccagaggctggagagaaaatttgtgcactcggc

SEQ ID NO: 738108 - DNA, 33 bp, Homo sapien
ccagaggctggagagagaatttgtgcactcggc

SEQ ID NO: 738109 - DNA, 33 bp, Homo sapien
aataagtatttagagcactgaatcacagagaca

SEQ ID NO: 738110 - DNA, 33 bp, Homo sapien
aataagtatttagagcgctgaatcacagagaca

SEQ ID NO: 738111 - DNA, 33 bp, Homo sapien
aggatcagcttatagaagaaatttgcatcaaag

SEQ ID NO: 738112 - DNA, 33 bp, Homo sapien
aggatcagcttatagaggaaatttgcatcaaag

SEQ ID NO: 738113 - DNA, 33 bp, Homo sapien
ctcaataaagagtacaatatgcttgctctctgc

SEQ ID NO: 738114 - DNA, 33 bp, Homo sapien
ctcaataaagagtacagtatgcttgctctctgc

SEQ ID NO: 738115 - DNA, 33 bp, Homo sapien
caatcctttggcaaagaaaattcctgtccaagt

SEQ ID NO: 738116 - DNA, 33 bp, Homo sapien
caatcctttggcaaagcaaattcctgtccaagt

SEQ ID NO: 738117 - DNA, 33 bp, Homo sapien
tgtgtaagaggacatgcatccaaattatctaaa

SEQ ID NO: 738118 - DNA, 33 bp, Homo sapien
tgtgtaagaggacatgtatccaaattatctaaa

SEQ ID NO: 738119 - DNA, 33 bp, Homo sapien
ctgggtctggcataccaagttttcacaaagtat

SEQ ID NO: 738120 - DNA, 33 bp, Homo sapien
ctgggtctggcataccgagttttcacaaagtat

SEQ ID NO: 738121 - DNA, 33 bp, Homo sapien
tttcacatcttgagcaatagtagcgatttcaat

SEQ ID NO: 738122 - DNA, 33 bp, Homo sapien
tttcacatcttgagcattagtagcgatttcaat

SEQ ID NO: 738123 - DNA, 33 bp, Homo sapien
aggaggtgctagaccacgtatgaggactgaaat

SEQ ID NO: 738124 - DNA, 33 bp, Homo sapien
aggaggtgctagaccatgtatgaggactgaaat

SEQ ID NO: 738125 - DNA, 33 bp, Homo sapien
ctctttgttttctaaactaccctcttcaaactt

SEQ ID NO: 738126 - DNA, 33 bp, Homo sapien
ctctttgttttctaaagtaccctcttcaaactt

SEQ ID NO: 738127 - DNA, 33 bp, Homo sapien
tgcagaggattacaaaagaattcaagtatactg

SEQ ID NO: 738128 - DNA, 33 bp, Homo sapien
tgcagaggattacaaaggaattcaagtatactg

SEQ ID NO: 738129 - DNA, 33 bp, Homo sapien
atgggactaaggatgccatggtaaagtgacttt

SEQ ID NO: 738130 - DNA, 33 bp, Homo sapien
atgggactaaggatgctatggtaaagtgacttt

SEQ ID NO: 738131 - DNA, 33 bp, Homo sapien
tgaattgtttagtgaaaatatgtggttgaagaa

SEQ ID NO: 738132 - DNA, 33 bp, Homo sapien
tgaattgtttagtgaatatatgtggttgaagaa

SEQ ID NO: 738133 - DNA, 33 bp, Homo sapien
ttcagcctaaaaaaataatacagcctgatggtt

SEQ ID NO: 738134 - DNA, 33 bp, Homo sapien
ttcagcctaaaaaaatcatacagcctgatggtt

SEQ ID NO: 738135 - DNA, 33 bp, Homo sapien
attatacagtaaatacactggttttagatgatt

SEQ ID NO: 738136 - DNA, 33 bp, Homo sapien
attatacagtaaatacgctggttttagatgatt

SEQ ID NO: 738137 - DNA, 33 bp, Homo sapien
tgtgcattgtaactcaaaacaaaatatatcgaa

SEQ ID NO: 738138 - DNA, 33 bp, Homo sapien
tgtgcattgtaactcacaacaaaatatatcgaa

SEQ ID NO: 738139 - DNA, 33 bp, Homo sapien
ggaaaaaataggctagacaagcacttaggaagt

SEQ ID NO: 738140 - DNA, 33 bp, Homo sapien
ggaaaaaataggctagccaagcacttaggaagt

SEQ ID NO: 738141 - DNA, 33 bp, Homo sapien
aaagctggtaattaaacgcttctgatgactgaa

SEQ ID NO: 738142 - DNA, 33 bp, Homo sapien
aaagctggtaattaaatgcttctgatgactgaa

SEQ ID NO: 738143 - DNA, 33 bp, Homo sapien
atcatcatcactaaaagttctacatatttctag

SEQ ID NO: 738144 - DNA, 33 bp, Homo sapien
atcatcatcactaaaatttctacatatttctag

SEQ ID NO: 738145 - DNA, 33 bp, Homo sapien
agtataagcgtatgaaaagcaaaaatattagag

SEQ ID NO: 738146 - DNA, 33 bp, Homo sapien
agtataagcgtatgaagagcaaaaatattagag

SEQ ID NO: 738147 - DNA, 33 bp, Homo sapien
gtacagactcagaaaacgctgtgcatgcagccc

SEQ ID NO: 738148 - DNA, 33 bp, Homo sapien
gtacagactcagaaaatgctgtgcatgcagccc

SEQ ID NO: 738149 - DNA, 33 bp, Homo sapien
aaagaaaaacgcctcaagtaagcatgtgtacag

SEQ ID NO: 738150 - DNA, 33 bp, Homo sapien
aaagaaaaacgcctcaggtaagcatgtgtacag

SEQ ID NO: 738151 - DNA, 33 bp, Homo sapien
ctctttctggaagtggaatttaagcaacacatc

SEQ ID NO: 738152 - DNA, 33 bp, Homo sapien
ctctttctggaagtggtatttaagcaacacatc

SEQ ID NO: 738153 - DNA, 33 bp, Homo sapien
ggcagaacttggagtacgagccaatgtggacac

SEQ ID NO: 738154 - DNA, 33 bp, Homo sapien
ggcagaacttggagtatgagccaatgtggacac

SEQ ID NO: 738155 - DNA, 33 bp, Homo sapien
aatacttctgagtagacgtcaaaacacaggctt

SEQ ID NO: 738156 - DNA, 33 bp, Homo sapien
aatacttctgagtagatgtcaaaacacaggctt

SEQ ID NO: 738157 - DNA, 33 bp, Homo sapien
tataagaccataaaaaatgctgaacagctaagg

SEQ ID NO: 738158 - DNA, 33 bp, Homo sapien
tataagaccataaaaagtgctgaacagctaagg

SEQ ID NO: 738159 - DNA, 33 bp, Homo sapien
tttgtaatatgcagtcaaaaggtgccttcctga

SEQ ID NO: 738160 - DNA, 33 bp, Homo sapien
tttgtaatatgcagtcgaaaggtgccttcctga

SEQ ID NO: 738161 - DNA, 33 bp, Homo sapien
actatacagcctctcacgtaagggttctaggta

SEQ ID NO: 738162 - DNA, 33 bp, Homo sapien
actatacagcctctcaggtaagggttctaggta

SEQ ID NO: 738163 - DNA, 33 bp, Homo sapien
aaagtaggaaagagtagaatcaggtcaatgaaa

SEQ ID NO: 738164 - DNA, 33 bp, Homo sapien
aaagtaggaaagagtataatcaggtcaatgaaa

SEQ ID NO: 738165 - DNA, 33 bp, Homo sapien
tggactttaagcaatcacaatatgaacagtgaa

SEQ ID NO: 738166 - DNA, 33 bp, Homo sapien
tggactttaagcaatctcaatatgaacagtgaa

SEQ ID NO: 738167 - DNA, 33 bp, Homo sapien
atcagctctacttctaaaatgttgatatccttc

SEQ ID NO: 738168 - DNA, 33 bp, Homo sapien
atcagctctacttctagaatgttgatatccttc

SEQ ID NO: 738169 - DNA, 33 bp, Homo sapien
gtgccgttataaaagacgtgaaaagagctctct

SEQ ID NO: 738170 - DNA, 33 bp, Homo sapien
gtgccgttataaaagatgtgaaaagagctctct

SEQ ID NO: 738171 - DNA, 33 bp, Homo sapien
agagaccctcactgaactcccttacaggccaag

SEQ ID NO: 738172 - DNA, 33 bp, Homo sapien
agagaccctcactgaattcccttacaggccaag

SEQ ID NO: 738173 - DNA, 33 bp, Homo sapien
gaaaaggctcagaaaacgcaaagacctatctgg

SEQ ID NO: 738174 - DNA, 33 bp, Homo sapien
gaaaaggctcagaaaatgcaaagacctatctgg

SEQ ID NO: 738175 - DNA, 33 bp, Homo sapien
caatccctagcttgggacatcctagtaaaagca

SEQ ID NO: 738176 - DNA, 33 bp, Homo sapien
caatccctagcttggggcatcctagtaaaagca

SEQ ID NO: 738177 - DNA, 33 bp, Homo sapien
tgaccttcagggtgctaacaaaattggaaagca

SEQ ID NO: 738178 - DNA, 33 bp, Homo sapien
tgaccttcagggtgctgacaaaattggaaagca

SEQ ID NO: 738179 - DNA, 33 bp, Homo sapien
tctagttttaatcaaacagaagaaccattgagg

SEQ ID NO: 738180 - DNA, 33 bp, Homo sapien
tctagttttaatcaaagagaagaaccattgagg

SEQ ID NO: 738181 - DNA, 33 bp, Homo sapien
aggttagagagggtaactgcagacaaagtatta

SEQ ID NO: 738182 - DNA, 33 bp, Homo sapien
aggttagagagggtaattgcagacaaagtatta

SEQ ID NO: 738183 - DNA, 33 bp, Homo sapien
tgagaaactaaattacactgctaaatcatgtct

SEQ ID NO: 738184 - DNA, 33 bp, Homo sapien
tgagaaactaaattacgctgctaaatcatgtct

SEQ ID NO: 738185 - DNA, 33 bp, Homo sapien
ttacttggatttttcacatacagaatttatttt

SEQ ID NO: 738186 - DNA, 33 bp, Homo sapien
ttacttggatttttcatatacagaatttatttt

SEQ ID NO: 738187 - DNA, 33 bp, Homo sapien
cttcaagctaagggcaactggagctctcattta

SEQ ID NO: 738188 - DNA, 33 bp, Homo sapien
cttcaagctaagggcagctggagctctcattta

SEQ ID NO: 738189 - DNA, 33 bp, Homo sapien
caatccagtgctttcaacctaagcttgctgtct

SEQ ID NO: 738190 - DNA, 33 bp, Homo sapien
caatccagtgctttcatcctaagcttgctgtct

SEQ ID NO: 738191 - DNA, 33 bp, Homo sapien
gtgatttaaatgttcaatctcaactttaaaccc

SEQ ID NO: 738192 - DNA, 33 bp, Homo sapien
gtgatttaaatgttcagtctcaactttaaaccc

SEQ ID NO: 738193 - DNA, 33 bp, Homo sapien
aaagtatcattatcaaacacatatctgtggctt

SEQ ID NO: 738194 - DNA, 33 bp, Homo sapien
aaagtatcattatcaagcacatatctgtggctt

SEQ ID NO: 738195 - DNA, 33 bp, Homo sapien
ctcctatacggtattagctaagaccaaccaccc

SEQ ID NO: 738196 - DNA, 33 bp, Homo sapien
ctcctatacggtattatctaagaccaaccaccc

SEQ ID NO: 738197 - DNA, 33 bp, Homo sapien
ttggcaatgtctaggacgtttttaggaaagata

SEQ ID NO: 738198 - DNA, 33 bp, Homo sapien
ttggcaatgtctaggatgtttttaggaaagata

SEQ ID NO: 738199 - DNA, 33 bp, Homo sapien
ttattatgtcatttgcacctatctgcaagaaaa

SEQ ID NO: 738200 - DNA, 33 bp, Homo sapien
ttattatgtcatttgcgcctatctgcaagaaaa

SEQ ID NO: 738201 - DNA, 33 bp, Homo sapien
cggtgatctttgacaactcatccctctgtgtcc

SEQ ID NO: 738202 - DNA, 33 bp, Homo sapien
cggtgatctttgacaattcatccctctgtgtcc

SEQ ID NO: 738203 - DNA, 33 bp, Homo sapien
tatacatttttatcccagaagtaatagagttaa

SEQ ID NO: 738204 - DNA, 33 bp, Homo sapien
tatacatttttatccctgaagtaatagagttaa

SEQ ID NO: 738205 - DNA, 33 bp, Homo sapien
atttggagtcttcctacaagtagttctttagag

SEQ ID NO: 738206 - DNA, 33 bp, Homo sapien
atttggagtcttcctagaagtagttctttagag

SEQ ID NO: 738207 - DNA, 33 bp, Homo sapien
gtgccctttatgacacaatgctagctggcacaa

SEQ ID NO: 738208 - DNA, 33 bp, Homo sapien
gtgccctttatgacaccatgctagctggcacaa

SEQ ID NO: 738209 - DNA, 33 bp, Homo sapien
catagagtccttgacaatctacttccaaatgaa

SEQ ID NO: 738210 - DNA, 33 bp, Homo sapien
catagagtccttgacagtctacttccaaatgaa

SEQ ID NO: 738211 - DNA, 33 bp, Homo sapien
atttctctagttcttcccattgccagtttattg

SEQ ID NO: 738212 - DNA, 33 bp, Homo sapien
atttctctagttcttctcattgccagtttattg

SEQ ID NO: 738213 - DNA, 33 bp, Homo sapien
ttatctaaagcctcctcaaagtttctgccctat

SEQ ID NO: 738214 - DNA, 33 bp, Homo sapien
ttatctaaagcctccttaaagtttctgccctat

SEQ ID NO: 738215 - DNA, 33 bp, Homo sapien
ggggattgatgctgggaaataaataatagatgc

SEQ ID NO: 738216 - DNA, 33 bp, Homo sapien
ggggattgatgctggggaataaataatagatgc

SEQ ID NO: 738217 - DNA, 33 bp, Homo sapien
tgaatgacgaatcatgaaagcaaagggaaatac

SEQ ID NO: 738218 - DNA, 33 bp, Homo sapien
tgaatgacgaatcatggaagcaaagggaaatac

SEQ ID NO: 738219 - DNA, 33 bp, Homo sapien
aggagagtcatgttccaatgcagttacaatgaa

SEQ ID NO: 738220 - DNA, 33 bp, Homo sapien
aggagagtcatgttccgatgcagttacaatgaa

SEQ ID NO: 738221 - DNA, 33 bp, Homo sapien
gaaacaaagcaagaaacgaggaattgataattg

SEQ ID NO: 738222 - DNA, 33 bp, Homo sapien
gaaacaaagcaagaaatgaggaattgataattg

SEQ ID NO: 738223 - DNA, 33 bp, Homo sapien
ttgaagggagaagtgaagcctgacagtctatga

SEQ ID NO: 738224 - DNA, 33 bp, Homo sapien
ttgaagggagaagtgaggcctgacagtctatga

SEQ ID NO: 738225 - DNA, 33 bp, Homo sapien
taatgggaaagaattacggcaagagttcatatt

SEQ ID NO: 738226 - DNA, 33 bp, Homo sapien
taatgggaaagaattatggcaagagttcatatt

SEQ ID NO: 738227 - DNA, 33 bp, Homo sapien
tgatttgttttttaaactgtcttttatccaaag

SEQ ID NO: 738228 - DNA, 33 bp, Homo sapien
tgatttgttttttaaattgtcttttatccaaag

SEQ ID NO: 738229 - DNA, 33 bp, Homo sapien
gttggcccaaggctgccacgttcatttctgccg

SEQ ID NO: 738230 - DNA, 33 bp, Homo sapien
gttggcccaaggctgctacgttcatttctgccg

SEQ ID NO: 738231 - DNA, 33 bp, Homo sapien
aattgaaattgttgtacgtgtccctcctacttg

SEQ ID NO: 738232 - DNA, 33 bp, Homo sapien
aattgaaattgttgtatgtgtccctcctacttg

SEQ ID NO: 738233 - DNA, 33 bp, Homo sapien
ttgttgatctttccatcactttgatgttattct

SEQ ID NO: 738234 - DNA, 33 bp, Homo sapien
ttgttgatctttccattactttgatgttattct

SEQ ID NO: 738235 - DNA, 33 bp, Homo sapien
ggacagtagcactacacaacatatgactctaaa

SEQ ID NO: 738236 - DNA, 33 bp, Homo sapien
ggacagtagcactacagaacatatgactctaaa

SEQ ID NO: 738237 - DNA, 33 bp, Homo sapien
attgtactcttttacaagaatgatggcaattca

SEQ ID NO: 738238 - DNA, 33 bp, Homo sapien
attgtactcttttacaggaatgatggcaattca

SEQ ID NO: 738239 - DNA, 33 bp, Homo sapien
gaagcactcaaggttacaagaacacaacaccct

SEQ ID NO: 738240 - DNA, 33 bp, Homo sapien
gaagcactcaaggttataagaacacaacaccct

SEQ ID NO: 738241 - DNA, 33 bp, Homo sapien
tttattttccttacaagctgccataatccacac

SEQ ID NO: 738242 - DNA, 33 bp, Homo sapien
tttattttccttacaatctgccataatccacac

SEQ ID NO: 738243 - DNA, 33 bp, Homo sapien
ttggacataaacgtagaaggctccaaatcagcc

SEQ ID NO: 738244 - DNA, 33 bp, Homo sapien
ttggacataaacgtaggaggctccaaatcagcc

SEQ ID NO: 738245 - DNA, 33 bp, Homo sapien
tgttttctagaaataaatatggtgcaagttaaa

SEQ ID NO: 738246 - DNA, 33 bp, Homo sapien
tgttttctagaaataagtatggtgcaagttaaa

SEQ ID NO: 738247 - DNA, 33 bp, Homo sapien
ttccatctaaacctgaaggaaggagttgttttc

SEQ ID NO: 738248 - DNA, 33 bp, Homo sapien
ttccatctaaacctgatggaaggagttgttttc

SEQ ID NO: 738249 - DNA, 33 bp, Homo sapien
tatctacagcccagaacaggtcaatgtagttgc

SEQ ID NO: 738250 - DNA, 33 bp, Homo sapien
tatctacagcccagaataggtcaatgtagttgc

SEQ ID NO: 738251 - DNA, 33 bp, Homo sapien
tgatcaaaattcacaaattataacatacacaat

SEQ ID NO: 738252 - DNA, 33 bp, Homo sapien
tgatcaaaattcacaatttataacatacacaat

SEQ ID NO: 738253 - DNA, 33 bp, Homo sapien
agagatgggagacaaaatttcttgagtggcagc

SEQ ID NO: 738254 - DNA, 33 bp, Homo sapien
agagatgggagacaaactttcttgagtggcagc

SEQ ID NO: 738255 - DNA, 33 bp, Homo sapien
aattaccattcgataaaaatgatgattatcaac

SEQ ID NO: 738256 - DNA, 33 bp, Homo sapien
aattaccattcgataacaatgatgattatcaac

SEQ ID NO: 738257 - DNA, 33 bp, Homo sapien
ccccgttgtcacttcactccatatttcctttca

SEQ ID NO: 738258 - DNA, 33 bp, Homo sapien
ccccgttgtcacttcattccatatttcctttca

SEQ ID NO: 738259 - DNA, 33 bp, Homo sapien
gaaccaccactctctacgtatatttattttatt

SEQ ID NO: 738260 - DNA, 33 bp, Homo sapien
gaaccaccactctctatgtatatttattttatt

SEQ ID NO: 738261 - DNA, 33 bp, Homo sapien
ctataaaaagtcaggaacatgttagtatgatta

SEQ ID NO: 738262 - DNA, 33 bp, Homo sapien
ctataaaaagtcaggaccatgttagtatgatta

SEQ ID NO: 738263 - DNA, 33 bp, Homo sapien
aatatccaatccatggcaaccaactataaacac

SEQ ID NO: 738264 - DNA, 33 bp, Homo sapien
aatatccaatccatgggaaccaactataaacac

SEQ ID NO: 738265 - DNA, 33 bp, Homo sapien
tgtcctttacttcttaacagatacagagccaat

SEQ ID NO: 738266 - DNA, 33 bp, Homo sapien
tgtcctttacttcttatcagatacagagccaat

SEQ ID NO: 738267 - DNA, 33 bp, Homo sapien
cctctgttttctaattcaaggtacaagaatgac

SEQ ID NO: 738268 - DNA, 33 bp, Homo sapien
cctctgttttctaatttaaggtacaagaatgac

SEQ ID NO: 738269 - DNA, 33 bp, Homo sapien
tacatagagaggactacatgactgttgagtgat

SEQ ID NO: 738270 - DNA, 33 bp, Homo sapien
tacatagagaggactatatgactgttgagtgat

SEQ ID NO: 738271 - DNA, 33 bp, Homo sapien
gaatagagctgcacagaagtgtttgacaattgc

SEQ ID NO: 738272 - DNA, 33 bp, Homo sapien
gaatagagctgcacagcagtgtttgacaattgc

SEQ ID NO: 738273 - DNA, 33 bp, Homo sapien
ccaagaagccatctacaaaccactttatctatg

SEQ ID NO: 738274 - DNA, 33 bp, Homo sapien
ccaagaagccatctacgaaccactttatctatg

SEQ ID NO: 738275 - DNA, 33 bp, Homo sapien
tacagtatagctttaacataattcacatgagtg

SEQ ID NO: 738276 - DNA, 33 bp, Homo sapien
tacagtatagctttaagataattcacatgagtg

SEQ ID NO: 738277 - DNA, 33 bp, Homo sapien
agttttctaattggtacagtggtgatggtagtg

SEQ ID NO: 738278 - DNA, 33 bp, Homo sapien
agttttctaattggtagagtggtgatggtagtg

SEQ ID NO: 738279 - DNA, 33 bp, Homo sapien
atttatgattatagaaagaagacggaggataga

SEQ ID NO: 738280 - DNA, 33 bp, Homo sapien
atttatgattatagaaggaagacggaggataga

SEQ ID NO: 738281 - DNA, 33 bp, Homo sapien
cttgacctttgataagaaatgcttctgtaccaa

SEQ ID NO: 738282 - DNA, 33 bp, Homo sapien
cttgacctttgataaggaatgcttctgtaccaa

SEQ ID NO: 738283 - DNA, 33 bp, Homo sapien
aggtgactgtatcatacgggaagggggtataaa

SEQ ID NO: 738284 - DNA, 33 bp, Homo sapien
aggtgactgtatcatatgggaagggggtataaa

SEQ ID NO: 738285 - DNA, 33 bp, Homo sapien
gagtcaaattactgtgaacctcctcatgccagg

SEQ ID NO: 738286 - DNA, 33 bp, Homo sapien
gagtcaaattactgtgtacctcctcatgccagg

SEQ ID NO: 738287 - DNA, 33 bp, Homo sapien
tttgaatgtaaactccaatagagaatcatgcta

SEQ ID NO: 738288 - DNA, 33 bp, Homo sapien
tttgaatgtaaactccgatagagaatcatgcta

SEQ ID NO: 738289 - DNA, 33 bp, Homo sapien
ccatagatcacctgaacgaagttaaaatatgta

SEQ ID NO: 738290 - DNA, 33 bp, Homo sapien
ccatagatcacctgaatgaagttaaaatatgta

SEQ ID NO: 738291 - DNA, 33 bp, Homo sapien
agaactctatagttaaaaagtcagaagacagaa

SEQ ID NO: 738292 - DNA, 33 bp, Homo sapien
agaactctatagttaacaagtcagaagacagaa

SEQ ID NO: 738293 - DNA, 33 bp, Homo sapien
gccgcatgcgtgaaataacgctacaaaattaag

SEQ ID NO: 738294 - DNA, 33 bp, Homo sapien
gccgcatgcgtgaaatgacgctacaaaattaag

SEQ ID NO: 738295 - DNA, 33 bp, Homo sapien
tccaatgaccataacacgaagaggaaagatact

SEQ ID NO: 738296 - DNA, 33 bp, Homo sapien
tccaatgaccataacaggaagaggaaagatact

SEQ ID NO: 738297 - DNA, 33 bp, Homo sapien
attcatgcagtctaaaatgcagtttgttttgag

SEQ ID NO: 738298 - DNA, 33 bp, Homo sapien
attcatgcagtctaaagtgcagtttgttttgag

SEQ ID NO: 738299 - DNA, 33 bp, Homo sapien
ctgtaacttctgtcaaacatggttggctcattt

SEQ ID NO: 738300 - DNA, 33 bp, Homo sapien
ctgtaacttctgtcaatcatggttggctcattt

SEQ ID NO: 738301 - DNA, 33 bp, Homo sapien
gactcactgctaagtacgttagagccaaagatg

SEQ ID NO: 738302 - DNA, 33 bp, Homo sapien
gactcactgctaagtatgttagagccaaagatg

SEQ ID NO: 738303 - DNA, 33 bp, Homo sapien
ttgcagacatcctctgaactgaagatagcacct

SEQ ID NO: 738304 - DNA, 33 bp, Homo sapien
ttgcagacatcctctgtactgaagatagcacct

SEQ ID NO: 738305 - DNA, 33 bp, Homo sapien
atgaatacttgttgaacaataatgcaatcaacc

SEQ ID NO: 738306 - DNA, 33 bp, Homo sapien
atgaatacttgttgaataataatgcaatcaacc

SEQ ID NO: 738307 - DNA, 33 bp, Homo sapien
ttctagtagttgttacagagtatatacaagggg

SEQ ID NO: 738308 - DNA, 33 bp, Homo sapien
ttctagtagttgttactgagtatatacaagggg

SEQ ID NO: 738309 - DNA, 33 bp, Homo sapien
ctcctcaaccaaaagcaaagaaaattgcatcaa

SEQ ID NO: 738310 - DNA, 33 bp, Homo sapien
ctcctcaaccaaaagcgaagaaaattgcatcaa

SEQ ID NO: 738311 - DNA, 33 bp, Homo sapien
gcatacaaagtacacaatcattttaactgggac

SEQ ID NO: 738312 - DNA, 33 bp, Homo sapien
gcatacaaagtacacagtcattttaactgggac

SEQ ID NO: 738313 - DNA, 33 bp, Homo sapien
gaagtctctaagattcaattggatggcattggg

SEQ ID NO: 738314 - DNA, 33 bp, Homo sapien
gaagtctctaagattctattggatggcattggg

SEQ ID NO: 738315 - DNA, 33 bp, Homo sapien
aattatattattttgcaagccatttagggagct

SEQ ID NO: 738316 - DNA, 33 bp, Homo sapien
aattatattattttgcgagccatttagggagct

SEQ ID NO: 738317 - DNA, 33 bp, Homo sapien
gcagttttcagcagcaatctccaataagacagt

SEQ ID NO: 738318 - DNA, 33 bp, Homo sapien
gcagttttcagcagcagtctccaataagacagt

SEQ ID NO: 738319 - DNA, 33 bp, Homo sapien
tctgataaggatgagcaaggggaatgatcttta

SEQ ID NO: 738320 - DNA, 33 bp, Homo sapien
tctgataaggatgagcgaggggaatgatcttta

SEQ ID NO: 738321 - DNA, 33 bp, Homo sapien
tacacaaagcaacacaaactttccatatatgaa

SEQ ID NO: 738322 - DNA, 33 bp, Homo sapien
tacacaaagcaacacagactttccatatatgaa

SEQ ID NO: 738323 - DNA, 33 bp, Homo sapien
ttagaactcctgaaaaaaagaatggtccagttg

SEQ ID NO: 738324 - DNA, 33 bp, Homo sapien
ttagaactcctgaaaagaagaatggtccagttg

SEQ ID NO: 738325 - DNA, 33 bp, Homo sapien
aagagctcttcaattaccattttgtatctggcc

SEQ ID NO: 738326 - DNA, 33 bp, Homo sapien
aagagctcttcaattatcattttgtatctggcc

SEQ ID NO: 738327 - DNA, 33 bp, Homo sapien
aactcaatcagttgcacatattttccctaggac

SEQ ID NO: 738328 - DNA, 33 bp, Homo sapien
aactcaatcagttgcatatattttccctaggac

SEQ ID NO: 738329 - DNA, 33 bp, Homo sapien
ccccaggttgtagtcacagcagtagaggtggaa

SEQ ID NO: 738330 - DNA, 33 bp, Homo sapien
ccccaggttgtagtcatagcagtagaggtggaa

SEQ ID NO: 738331 - DNA, 33 bp, Homo sapien
agtgttatccaaggaacttccacctctactgct

SEQ ID NO: 738332 - DNA, 33 bp, Homo sapien
agtgttatccaaggaatttccacctctactgct

SEQ ID NO: 738333 - DNA, 33 bp, Homo sapien
tgtgattttagagtcacaatgttactttaaaaa

SEQ ID NO: 738334 - DNA, 33 bp, Homo sapien
tgtgattttagagtcagaatgttactttaaaaa

SEQ ID NO: 738335 - DNA, 33 bp, Homo sapien
tatcatgactgaattacgtccccctcaaaattg

SEQ ID NO: 738336 - DNA, 33 bp, Homo sapien
tatcatgactgaattatgtccccctcaaaattg

SEQ ID NO: 738337 - DNA, 33 bp, Homo sapien
tattgagcactgtaggaataaactgacgggcta

SEQ ID NO: 738338 - DNA, 33 bp, Homo sapien
tattgagcactgtagggataaactgacgggcta

SEQ ID NO: 738339 - DNA, 33 bp, Homo sapien
gatggtaaatataccactggacaacatagtgag

SEQ ID NO: 738340 - DNA, 33 bp, Homo sapien
gatggtaaatataccattggacaacatagtgag

SEQ ID NO: 738341 - DNA, 33 bp, Homo sapien
ttacagcccttatcacagcctgcaattgtcttg

SEQ ID NO: 738342 - DNA, 33 bp, Homo sapien
ttacagcccttatcacggcctgcaattgtcttg

SEQ ID NO: 738343 - DNA, 33 bp, Homo sapien
aaaaaatcaagattgacattattgacaagcttc

SEQ ID NO: 738344 - DNA, 33 bp, Homo sapien
aaaaaatcaagattgagattattgacaagcttc

SEQ ID NO: 738345 - DNA, 33 bp, Homo sapien
tatcacatgttgaccacaaaataagaagaataa

SEQ ID NO: 738346 - DNA, 33 bp, Homo sapien
tatcacatgttgaccataaaataagaagaataa

SEQ ID NO: 738347 - DNA, 33 bp, Homo sapien
ctttattagtaaaatgaaaatgacaatgcataa

SEQ ID NO: 738348 - DNA, 33 bp, Homo sapien
ctttattagtaaaatgtaaatgacaatgcataa

SEQ ID NO: 738349 - DNA, 33 bp, Homo sapien
agttgttcttgattccactctttttctcacacc

SEQ ID NO: 738350 - DNA, 33 bp, Homo sapien
agttgttcttgattccgctctttttctcacacc

SEQ ID NO: 738351 - DNA, 33 bp, Homo sapien
ggaagattaggaacaacggcagataagccttcc

SEQ ID NO: 738352 - DNA, 33 bp, Homo sapien
ggaagattaggaacaatggcagataagccttcc

SEQ ID NO: 738353 - DNA, 33 bp, Homo sapien
gataaaaagcaatagactagttcttcagagaga

SEQ ID NO: 738354 - DNA, 33 bp, Homo sapien
gataaaaagcaatagagtagttcttcagagaga

SEQ ID NO: 738355 - DNA, 33 bp, Homo sapien
gacccctggatgacccccttgcttgcctatgat

SEQ ID NO: 738356 - DNA, 33 bp, Homo sapien
gacccctggatgaccctcttgcttgcctatgat

SEQ ID NO: 738357 - DNA, 33 bp, Homo sapien
ggctgactcaattaaaaaggctgagaagtctta

SEQ ID NO: 738358 - DNA, 33 bp, Homo sapien
ggctgactcaattaaagaggctgagaagtctta

SEQ ID NO: 738359 - DNA, 33 bp, Homo sapien
agccccagccttaacacgtgatcaaggtttcac

SEQ ID NO: 738360 - DNA, 33 bp, Homo sapien
agccccagccttaacatgtgatcaaggtttcac

SEQ ID NO: 738361 - DNA, 33 bp, Homo sapien
aagccactgaagattacagcaaaaacattttcg

SEQ ID NO: 738362 - DNA, 33 bp, Homo sapien
aagccactgaagattatagcaaaaacattttcg

SEQ ID NO: 738363 - DNA, 33 bp, Homo sapien
ctttcaacagatacaacgtggcaaacgttttta

SEQ ID NO: 738364 - DNA, 33 bp, Homo sapien
ctttcaacagatacaatgtggcaaacgttttta

SEQ ID NO: 738365 - DNA, 33 bp, Homo sapien
tttcttgacaacatctaaaaaccactacctgag

SEQ ID NO: 738366 - DNA, 33 bp, Homo sapien
tttcttgacaacatctgaaaaccactacctgag

SEQ ID NO: 738367 - DNA, 33 bp, Homo sapien
tgctaagtgaaataacactatattcagtatcta

SEQ ID NO: 738368 - DNA, 33 bp, Homo sapien
tgctaagtgaaataactctatattcagtatcta

SEQ ID NO: 738369 - DNA, 33 bp, Homo sapien
gaagaagtcatagataataagatatggaagtga

SEQ ID NO: 738370 - DNA, 33 bp, Homo sapien
gaagaagtcatagatagtaagatatggaagtga

SEQ ID NO: 738371 - DNA, 33 bp, Homo sapien
tctgatactgttatacaattaatacctgtggag

SEQ ID NO: 738372 - DNA, 33 bp, Homo sapien
tctgatactgttatacgattaatacctgtggag

SEQ ID NO: 738373 - DNA, 33 bp, Homo sapien
agaaaacatttgaaaacagttactgattcaagg

SEQ ID NO: 738374 - DNA, 33 bp, Homo sapien
agaaaacatttgaaaagagttactgattcaagg

SEQ ID NO: 738375 - DNA, 33 bp, Homo sapien
aggaaatgaaggcctaagttatgataggacaga

SEQ ID NO: 738376 - DNA, 33 bp, Homo sapien
aggaaatgaaggcctacgttatgataggacaga

SEQ ID NO: 738377 - DNA, 33 bp, Homo sapien
tttgtatatccacaccaaagtaatgctacttaa

SEQ ID NO: 738378 - DNA, 33 bp, Homo sapien
tttgtatatccacacccaagtaatgctacttaa

SEQ ID NO: 738379 - DNA, 33 bp, Homo sapien
tcagaacgtttaggtcaaataccacttaaggaa

SEQ ID NO: 738380 - DNA, 33 bp, Homo sapien
tcagaacgtttaggtcgaataccacttaaggaa

SEQ ID NO: 738381 - DNA, 33 bp, Homo sapien
ttcctattgtttctcactcaatgtatcttaatg

SEQ ID NO: 738382 - DNA, 33 bp, Homo sapien
ttcctattgtttctcattcaatgtatcttaatg

SEQ ID NO: 738383 - DNA, 33 bp, Homo sapien
cagcctggcacgttgaaatttaccattgcccac

SEQ ID NO: 738384 - DNA, 33 bp, Homo sapien
cagcctggcacgttgagatttaccattgcccac

SEQ ID NO: 738385 - DNA, 33 bp, Homo sapien
cattgagctaagagcaataaattccacagaaga

SEQ ID NO: 738386 - DNA, 33 bp, Homo sapien
cattgagctaagagcagtaaattccacagaaga

SEQ ID NO: 738387 - DNA, 33 bp, Homo sapien
cttgaactaacagaggaacaactcattcattac

SEQ ID NO: 738388 - DNA, 33 bp, Homo sapien
cttgaactaacagagggacaactcattcattac

SEQ ID NO: 738389 - DNA, 33 bp, Homo sapien
attttcagtaaatcccaatttgcagcctgaagc

SEQ ID NO: 738390 - DNA, 33 bp, Homo sapien
attttcagtaaatccctatttgcagcctgaagc

SEQ ID NO: 738391 - DNA, 33 bp, Homo sapien
gttctaaggagctgtaagatgtgaggttgtagt

SEQ ID NO: 738392 - DNA, 33 bp, Homo sapien
gttctaaggagctgtacgatgtgaggttgtagt

SEQ ID NO: 738393 - DNA, 33 bp, Homo sapien
cttagttgcaaatagaataccaatcaatgatgt

SEQ ID NO: 738394 - DNA, 33 bp, Homo sapien
cttagttgcaaatagactaccaatcaatgatgt

SEQ ID NO: 738395 - DNA, 33 bp, Homo sapien
tagcattggaagcaagaagttcctctgaggtca

SEQ ID NO: 738396 - DNA, 33 bp, Homo sapien
tagcattggaagcaaggagttcctctgaggtca

SEQ ID NO: 738397 - DNA, 33 bp, Homo sapien
cctgtttctcattcacacataatatctcttcca

SEQ ID NO: 738398 - DNA, 33 bp, Homo sapien
cctgtttctcattcacgcataatatctcttcca

SEQ ID NO: 738399 - DNA, 33 bp, Homo sapien
tataacttggttgtaactggggactcggttttg

SEQ ID NO: 738400 - DNA, 33 bp, Homo sapien
tataacttggttgtaattggggactcggttttg

SEQ ID NO: 738401 - DNA, 33 bp, Homo sapien
aagataattagagcgacaggaaaagtaccaaga

SEQ ID NO: 738402 - DNA, 33 bp, Homo sapien
aagataattagagcgagaggaaaagtaccaaga

SEQ ID NO: 738403 - DNA, 33 bp, Homo sapien
ctactagtaaagtcaaatatgtgtctttttttt

SEQ ID NO: 738404 - DNA, 33 bp, Homo sapien
ctactagtaaagtcaactatgtgtctttttttt

SEQ ID NO: 738405 - DNA, 33 bp, Homo sapien
ctaataacagatagtaacttgggtgtatgtgaa

SEQ ID NO: 738406 - DNA, 33 bp, Homo sapien
ctaataacagatagtagcttgggtgtatgtgaa

SEQ ID NO: 738407 - DNA, 33 bp, Homo sapien
ctaattttctacctaaagcacaaaaatatgata

SEQ ID NO: 738408 - DNA, 33 bp, Homo sapien
ctaattttctacctaaggcacaaaaatatgata

SEQ ID NO: 738409 - DNA, 33 bp, Homo sapien
aacaaatggtcaaaaaatacgtatcaggatatt

SEQ ID NO: 738410 - DNA, 33 bp, Homo sapien
aacaaatggtcaaaaagtacgtatcaggatatt

SEQ ID NO: 738411 - DNA, 33 bp, Homo sapien
agaagaatggttctcaaagtgacataataactg

SEQ ID NO: 738412 - DNA, 33 bp, Homo sapien
agaagaatggttctcagagtgacataataactg

SEQ ID NO: 738413 - DNA, 33 bp, Homo sapien
ttgcttttgacaacagcaatttttgagaaaact

SEQ ID NO: 738414 - DNA, 33 bp, Homo sapien
ttgcttttgacaacaggaatttttgagaaaact

SEQ ID NO: 738415 - DNA, 33 bp, Homo sapien
tgaagaacttggagtcaaatattcaacagcagg

SEQ ID NO: 738416 - DNA, 33 bp, Homo sapien
tgaagaacttggagtcgaatattcaacagcagg

SEQ ID NO: 738417 - DNA, 33 bp, Homo sapien
ggctattcttttgagaacgcagaagaagataag

SEQ ID NO: 738418 - DNA, 33 bp, Homo sapien
ggctattcttttgagagcgcagaagaagataag

SEQ ID NO: 738419 - DNA, 33 bp, Homo sapien
gaaaattgttaatacaacacaaggcttaattat

SEQ ID NO: 738420 - DNA, 33 bp, Homo sapien
gaaaattgttaatacatcacaaggcttaattat

SEQ ID NO: 738421 - DNA, 33 bp, Homo sapien
gtacataagaaaatgcagacattgtacacagga

SEQ ID NO: 738422 - DNA, 33 bp, Homo sapien
gtacataagaaaatgcggacattgtacacagga

SEQ ID NO: 738423 - DNA, 33 bp, Homo sapien
gtattcacttaatcacacttaatttggctacta

SEQ ID NO: 738424 - DNA, 33 bp, Homo sapien
gtattcacttaatcacgcttaatttggctacta

SEQ ID NO: 738425 - DNA, 33 bp, Homo sapien
atttctgattctattacgaaattcttgcagtga

SEQ ID NO: 738426 - DNA, 33 bp, Homo sapien
atttctgattctattatgaaattcttgcagtga

SEQ ID NO: 738427 - DNA, 33 bp, Homo sapien
tttgaataagaacttacggcgatttggagtctt

SEQ ID NO: 738428 - DNA, 33 bp, Homo sapien
tttgaataagaacttatggcgatttggagtctt

SEQ ID NO: 738429 - DNA, 33 bp, Homo sapien
tcaataacctgtgaaacagtttggcctcacctc

SEQ ID NO: 738430 - DNA, 33 bp, Homo sapien
tcaataacctgtgaaatagtttggcctcacctc

SEQ ID NO: 738431 - DNA, 33 bp, Homo sapien
tgatttaggagaaaaaaaggacctgtcatgacg

SEQ ID NO: 738432 - DNA, 33 bp, Homo sapien
tgatttaggagaaaaagaggacctgtcatgacg

SEQ ID NO: 738433 - DNA, 33 bp, Homo sapien
gtttgtccctctctgccagttctgctgaagatc

SEQ ID NO: 738434 - DNA, 33 bp, Homo sapien
gtttgtccctctctgctagttctgctgaagatc

SEQ ID NO: 738435 - DNA, 33 bp, Homo sapien
accttgaaagcaataacgaaaataacacatgag

SEQ ID NO: 738436 - DNA, 33 bp, Homo sapien
accttgaaagcaataatgaaaataacacatgag

SEQ ID NO: 738437 - DNA, 33 bp, Homo sapien
agcaagctgaagagtccgaattaaaacccagct

SEQ ID NO: 738438 - DNA, 33 bp, Homo sapien
agcaagctgaagagtctgaattaaaacccagct

SEQ ID NO: 738439 - DNA, 33 bp, Homo sapien
gtgcttctcaactttaaatcactttgggagctt

SEQ ID NO: 738440 - DNA, 33 bp, Homo sapien
gtgcttctcaactttagatcactttgggagctt

SEQ ID NO: 738441 - DNA, 33 bp, Homo sapien
tgtgggttatgacccaaatcagtcggaatttct

SEQ ID NO: 738442 - DNA, 33 bp, Homo sapien
tgtgggttatgacccagatcagtcggaatttct

SEQ ID NO: 738443 - DNA, 33 bp, Homo sapien
tattcatcattttcccagaatttcatagaattt

SEQ ID NO: 738444 - DNA, 33 bp, Homo sapien
tattcatcattttcccggaatttcatagaattt

SEQ ID NO: 738445 - DNA, 33 bp, Homo sapien
tgtgtgaggtatttccaaagatgtggtaagcag

SEQ ID NO: 738446 - DNA, 33 bp, Homo sapien
tgtgtgaggtatttccgaagatgtggtaagcag

SEQ ID NO: 738447 - DNA, 33 bp, Homo sapien
atcacaagcattcctaaacactaataacagaca

SEQ ID NO: 738448 - DNA, 33 bp, Homo sapien
atcacaagcattcctatacactaataacagaca

SEQ ID NO: 738449 - DNA, 33 bp, Homo sapien
aaatgtctttatggcacgttctttgagggtctt

SEQ ID NO: 738450 - DNA, 33 bp, Homo sapien
aaatgtctttatggcaggttctttgagggtctt

SEQ ID NO: 738451 - DNA, 33 bp, Homo sapien
tgcaattttgctgagaagtatatttgaattaag

SEQ ID NO: 738452 - DNA, 33 bp, Homo sapien
tgcaattttgctgagacgtatatttgaattaag

SEQ ID NO: 738453 - DNA, 33 bp, Homo sapien
acttccactctcaaaacaaaagcaatctgttag

SEQ ID NO: 738454 - DNA, 33 bp, Homo sapien
acttccactctcaaaataaaagcaatctgttag

SEQ ID NO: 738455 - DNA, 33 bp, Homo sapien
gaggttaaagacacacaaaactaaatgaaatac

SEQ ID NO: 738456 - DNA, 33 bp, Homo sapien
gaggttaaagacacaccaaactaaatgaaatac

SEQ ID NO: 738457 - DNA, 33 bp, Homo sapien
caaatttctcacataaaacaaggttgctgtctg

SEQ ID NO: 738458 - DNA, 33 bp, Homo sapien
caaatttctcacataatacaaggttgctgtctg

SEQ ID NO: 738459 - DNA, 33 bp, Homo sapien
gagagctctgaccagaagaaagtgaggttcagg

SEQ ID NO: 738460 - DNA, 33 bp, Homo sapien
gagagctctgaccagaggaaagtgaggttcagg

SEQ ID NO: 738461 - DNA, 33 bp, Homo sapien
atagagacttatcataaacatttgtccattgca

SEQ ID NO: 738462 - DNA, 33 bp, Homo sapien
atagagacttatcatatacatttgtccattgca

SEQ ID NO: 738463 - DNA, 33 bp, Homo sapien
tccgaaacttacagaaactactagcaatttggg

SEQ ID NO: 738464 - DNA, 33 bp, Homo sapien
tccgaaacttacagaatctactagcaatttggg

SEQ ID NO: 738465 - DNA, 33 bp, Homo sapien
ctgcaggcgggaccccaaagttaggcagagtca

SEQ ID NO: 738466 - DNA, 33 bp, Homo sapien
ctgcaggcgggaccccgaagttaggcagagtca

SEQ ID NO: 738467 - DNA, 33 bp, Homo sapien
gatttagcaacaattccaatccaaatgaagact

SEQ ID NO: 738468 - DNA, 33 bp, Homo sapien
gatttagcaacaattctaatccaaatgaagact

SEQ ID NO: 738469 - DNA, 33 bp, Homo sapien
tcatgacgttgtccagacaaaaatcctcccata

SEQ ID NO: 738470 - DNA, 33 bp, Homo sapien
tcatgacgttgtccagccaaaaatcctcccata

SEQ ID NO: 738471 - DNA, 33 bp, Homo sapien
tttttgtatctagaaacagcttggtggcaggca

SEQ ID NO: 738472 - DNA, 33 bp, Homo sapien
tttttgtatctagaaagagcttggtggcaggca

SEQ ID NO: 738473 - DNA, 33 bp, Homo sapien
ttacaaaccatgttcacatgtccttttttgtat

SEQ ID NO: 738474 - DNA, 33 bp, Homo sapien
ttacaaaccatgttcatatgtccttttttgtat

SEQ ID NO: 738475 - DNA, 33 bp, Homo sapien
ttctcttaccttagcccgatctgattgaattgg

SEQ ID NO: 738476 - DNA, 33 bp, Homo sapien
ttctcttaccttagcctgatctgattgaattgg

SEQ ID NO: 738477 - DNA, 33 bp, Homo sapien
catttgtgaatattaccataaggaaatgcacat

SEQ ID NO: 738478 - DNA, 33 bp, Homo sapien
catttgtgaatattacgataaggaaatgcacat

SEQ ID NO: 738479 - DNA, 33 bp, Homo sapien
gtcctaatcactttccagacatcacctcatgaa

SEQ ID NO: 738480 - DNA, 33 bp, Homo sapien
gtcctaatcactttccggacatcacctcatgaa

SEQ ID NO: 738481 - DNA, 33 bp, Homo sapien
aagttacacagttctcaaaagccaaagaaatag

SEQ ID NO: 738482 - DNA, 33 bp, Homo sapien
aagttacacagttctcgaaagccaaagaaatag

SEQ ID NO: 738483 - DNA, 33 bp, Homo sapien
atctattcacttttaactgctgttgttccatga

SEQ ID NO: 738484 - DNA, 33 bp, Homo sapien
atctattcacttttaattgctgttgttccatga

SEQ ID NO: 738485 - DNA, 33 bp, Homo sapien
aaagtaattcagtctacggagaaaaaaatcttt

SEQ ID NO: 738486 - DNA, 33 bp, Homo sapien
aaagtaattcagtctatggagaaaaaaatcttt

SEQ ID NO: 738487 - DNA, 33 bp, Homo sapien
ctttacagaggatataaacagtgatctttatca

SEQ ID NO: 738488 - DNA, 33 bp, Homo sapien
ctttacagaggatatacacagtgatctttatca

SEQ ID NO: 738489 - DNA, 33 bp, Homo sapien
gtagataaccaattacaaaagggtaggcatata

SEQ ID NO: 738490 - DNA, 33 bp, Homo sapien
gtagataaccaattacgaaagggtaggcatata

SEQ ID NO: 738491 - DNA, 33 bp, Homo sapien
gggacagcacactaaccgggaagacaagttctc

SEQ ID NO: 738492 - DNA, 33 bp, Homo sapien
gggacagcacactaactgggaagacaagttctc

SEQ ID NO: 738493 - DNA, 33 bp, Homo sapien
aaaggttggatcattacgactaatataacaatt

SEQ ID NO: 738494 - DNA, 33 bp, Homo sapien
aaaggttggatcattaggactaatataacaatt

SEQ ID NO: 738495 - DNA, 33 bp, Homo sapien
aagtcaataaatgaaggcagtgtattaactctt

SEQ ID NO: 738496 - DNA, 33 bp, Homo sapien
aagtcaataaatgaagtcagtgtattaactctt

SEQ ID NO: 738497 - DNA, 33 bp, Homo sapien
ctctaaagtcctactacagcacatatatatgag

SEQ ID NO: 738498 - DNA, 33 bp, Homo sapien
ctctaaagtcctactagagcacatatatatgag

SEQ ID NO: 738499 - DNA, 33 bp, Homo sapien
gctgggaaaactagataactatatgcagagaaa

SEQ ID NO: 738500 - DNA, 33 bp, Homo sapien
gctgggaaaactagatgactatatgcagagaaa

SEQ ID NO: 738501 - DNA, 33 bp, Homo sapien
aaactacacactaaaccagacagcgctaactga

SEQ ID NO: 738502 - DNA, 33 bp, Homo sapien
aaactacacactaaacgagacagcgctaactga

SEQ ID NO: 738503 - DNA, 33 bp, Homo sapien
gaacatacacaacaggaccagaatgttttgata

SEQ ID NO: 738504 - DNA, 33 bp, Homo sapien
gaacatacacaacaggtccagaatgttttgata

SEQ ID NO: 738505 - DNA, 33 bp, Homo sapien
taaagctggttaaaaacttaatatagtgtttta

SEQ ID NO: 738506 - DNA, 33 bp, Homo sapien
taaagctggttaaaaatttaatatagtgtttta

SEQ ID NO: 738507 - DNA, 33 bp, Homo sapien
ggaggatgttctgaaacagattaccgtttgaac

SEQ ID NO: 738508 - DNA, 33 bp, Homo sapien
ggaggatgttctgaaagagattaccgtttgaac

SEQ ID NO: 738509 - DNA, 33 bp, Homo sapien
tatttaccagtcagctacaattcagagtttacc

SEQ ID NO: 738510 - DNA, 33 bp, Homo sapien
tatttaccagtcagctgcaattcagagtttacc

SEQ ID NO: 738511 - DNA, 33 bp, Homo sapien
tttatttttaacaacccagagtagatgctttga

SEQ ID NO: 738512 - DNA, 33 bp, Homo sapien
tttatttttaacaacctagagtagatgctttga

SEQ ID NO: 738513 - DNA, 33 bp, Homo sapien
cctcctgtcctattgactcaacactctacaaaa

SEQ ID NO: 738514 - DNA, 33 bp, Homo sapien
cctcctgtcctattgattcaacactctacaaaa

SEQ ID NO: 738515 - DNA, 33 bp, Homo sapien
gagattggtttaatgaagcaaccccatctgatg

SEQ ID NO: 738516 - DNA, 33 bp, Homo sapien
gagattggtttaatgaggcaaccccatctgatg

SEQ ID NO: 738517 - DNA, 33 bp, Homo sapien
tgtcatgctgctttccaaagtaacatagttcca

SEQ ID NO: 738518 - DNA, 33 bp, Homo sapien
tgtcatgctgctttccgaagtaacatagttcca

SEQ ID NO: 738519 - DNA, 33 bp, Homo sapien
taattgagattcaaaaagccatatgctacctta

SEQ ID NO: 738520 - DNA, 33 bp, Homo sapien
taattgagattcaaaatgccatatgctacctta

SEQ ID NO: 738521 - DNA, 33 bp, Homo sapien
gtatttggaagtaagtaaaaatgaaaacacaaa

SEQ ID NO: 738522 - DNA, 33 bp, Homo sapien
gtatttggaagtaagtgaaaatgaaaacacaaa

SEQ ID NO: 738523 - DNA, 33 bp, Homo sapien
attatttaatttcacaatattctgcttaacaca

SEQ ID NO: 738524 - DNA, 33 bp, Homo sapien
attatttaatttcacagtattctgcttaacaca

SEQ ID NO: 738525 - DNA, 33 bp, Homo sapien
ctttgtccttacattacgtggatggcatatttg

SEQ ID NO: 738526 - DNA, 33 bp, Homo sapien
ctttgtccttacattatgtggatggcatatttg

SEQ ID NO: 738527 - DNA, 33 bp, Homo sapien
agtgtcctacctctcacaattaactactttaaa

SEQ ID NO: 738528 - DNA, 33 bp, Homo sapien
agtgtcctacctctcataattaactactttaaa

SEQ ID NO: 738529 - DNA, 33 bp, Homo sapien
catcacagcattaaaaattataccatgcctaat

SEQ ID NO: 738530 - DNA, 33 bp, Homo sapien
catcacagcattaaaacttataccatgcctaat

SEQ ID NO: 738531 - DNA, 33 bp, Homo sapien
atgtctagattattgccgattatgttctagact

SEQ ID NO: 738532 - DNA, 33 bp, Homo sapien
atgtctagattattgctgattatgttctagact

SEQ ID NO: 738533 - DNA, 33 bp, Homo sapien
ccagaaatgtcatccaagaaccgagtcctggaa

SEQ ID NO: 738534 - DNA, 33 bp, Homo sapien
ccagaaatgtcatccacgaaccgagtcctggaa

SEQ ID NO: 738535 - DNA, 33 bp, Homo sapien
ccaaatacttggaaaccgggagaaaagtagtca

SEQ ID NO: 738536 - DNA, 33 bp, Homo sapien
ccaaatacttggaaactgggagaaaagtagtca

SEQ ID NO: 738537 - DNA, 33 bp, Homo sapien
actaggacttgctaggcattttacagcagaact

SEQ ID NO: 738538 - DNA, 33 bp, Homo sapien
actaggacttgctaggtattttacagcagaact

SEQ ID NO: 738539 - DNA, 33 bp, Homo sapien
aaaacatttgctgccaaagcttcatttttgttt

SEQ ID NO: 738540 - DNA, 33 bp, Homo sapien
aaaacatttgctgccatagcttcatttttgttt

SEQ ID NO: 738541 - DNA, 33 bp, Homo sapien
atatttaatgcatcctaaacagcatgggtggag

SEQ ID NO: 738542 - DNA, 33 bp, Homo sapien
atatttaatgcatcctgaacagcatgggtggag

SEQ ID NO: 738543 - DNA, 33 bp, Homo sapien
attttgtgtttctctacattgattccaaaaagt

SEQ ID NO: 738544 - DNA, 33 bp, Homo sapien
attttgtgtttctctatattgattccaaaaagt

SEQ ID NO: 738545 - DNA, 33 bp, Homo sapien
gctttgactagctagactccatcaaaccacaaa

SEQ ID NO: 738546 - DNA, 33 bp, Homo sapien
gctttgactagctagattccatcaaaccacaaa

SEQ ID NO: 738547 - DNA, 33 bp, Homo sapien
aaattaaaaatacaggacagtttcacttaggga

SEQ ID NO: 738548 - DNA, 33 bp, Homo sapien
aaattaaaaatacagggcagtttcacttaggga

SEQ ID NO: 738549 - DNA, 33 bp, Homo sapien
aattcccttttatctacgccatgttcagtaatt

SEQ ID NO: 738550 - DNA, 33 bp, Homo sapien
aattcccttttatctatgccatgttcagtaatt

SEQ ID NO: 738551 - DNA, 33 bp, Homo sapien
aattcttagacaatggcagttactatagtggct

SEQ ID NO: 738552 - DNA, 33 bp, Homo sapien
aattcttagacaatggtagttactatagtggct

SEQ ID NO: 738553 - DNA, 33 bp, Homo sapien
tattgtatatctgtacaccaattcttgttcttc

SEQ ID NO: 738554 - DNA, 33 bp, Homo sapien
tattgtatatctgtacgccaattcttgttcttc

SEQ ID NO: 738555 - DNA, 33 bp, Homo sapien
agatgtcaagcatgaaattagtggaatagaggg

SEQ ID NO: 738556 - DNA, 33 bp, Homo sapien
agatgtcaagcatgaacttagtggaatagaggg

SEQ ID NO: 738557 - DNA, 33 bp, Homo sapien
agcttcaacaataagcaatgtgttctaatacca

SEQ ID NO: 738558 - DNA, 33 bp, Homo sapien
agcttcaacaataagccatgtgttctaatacca

SEQ ID NO: 738559 - DNA, 33 bp, Homo sapien
gattgttagtcccccacgggttaagtggcaatg

SEQ ID NO: 738560 - DNA, 33 bp, Homo sapien
gattgttagtcccccatgggttaagtggcaatg

SEQ ID NO: 738561 - DNA, 33 bp, Homo sapien
ctattatcagttatccagaaaaaatactcagat

SEQ ID NO: 738562 - DNA, 33 bp, Homo sapien
ctattatcagttatcctgaaaaaatactcagat

SEQ ID NO: 738563 - DNA, 33 bp, Homo sapien
agacaatttggcttatcagtattgtgatctttg

SEQ ID NO: 738564 - DNA, 33 bp, Homo sapien
agacaatttggcttatgagtattgtgatctttg

SEQ ID NO: 738565 - DNA, 33 bp, Homo sapien
gctgctataaaacataaaggttggtaaagttga

SEQ ID NO: 738566 - DNA, 33 bp, Homo sapien
gctgctataaaacatagaggttggtaaagttga

SEQ ID NO: 738567 - DNA, 33 bp, Homo sapien
agcctgcatccttttacacagagtaccttcagc

SEQ ID NO: 738568 - DNA, 33 bp, Homo sapien
agcctgcatccttttatacagagtaccttcagc

SEQ ID NO: 738569 - DNA, 33 bp, Homo sapien
cacctttacctggagcactggatatcccacatc

SEQ ID NO: 738570 - DNA, 33 bp, Homo sapien
cacctttacctggagcgctggatatcccacatc

SEQ ID NO: 738571 - DNA, 33 bp, Homo sapien
ggaatgtgcaagaaaactggactccatgctctg

SEQ ID NO: 738572 - DNA, 33 bp, Homo sapien
ggaatgtgcaagaaaattggactccatgctctg

SEQ ID NO: 738573 - DNA, 33 bp, Homo sapien
ccagatatatgtgtacaaagccaaaccattctg

SEQ ID NO: 738574 - DNA, 33 bp, Homo sapien
ccagatatatgtgtacgaagccaaaccattctg

SEQ ID NO: 738575 - DNA, 33 bp, Homo sapien
acattggtggcagctaggcagtaattactacag

SEQ ID NO: 738576 - DNA, 33 bp, Homo sapien
acattggtggcagctatgcagtaattactacag

SEQ ID NO: 738577 - DNA, 33 bp, Homo sapien
accatcatggactcacaaaatgacttatccacc

SEQ ID NO: 738578 - DNA, 33 bp, Homo sapien
accatcatggactcacgaaatgacttatccacc

SEQ ID NO: 738579 - DNA, 33 bp, Homo sapien
tctcatacactcttgacggaagtgtaaatggta

SEQ ID NO: 738580 - DNA, 33 bp, Homo sapien
tctcatacactcttgatggaagtgtaaatggta

SEQ ID NO: 738581 - DNA, 33 bp, Homo sapien
atgaacgtcaaagtgccgatatctttactctgg

SEQ ID NO: 738582 - DNA, 33 bp, Homo sapien
atgaacgtcaaagtgctgatatctttactctgg

SEQ ID NO: 738583 - DNA, 33 bp, Homo sapien
gtttttcttcaatcctaagaatcacagaacact

SEQ ID NO: 738584 - DNA, 33 bp, Homo sapien
gtttttcttcaatcctgagaatcacagaacact

SEQ ID NO: 738585 - DNA, 33 bp, Homo sapien
agctggggcgatgagacgttataggtagatctt

SEQ ID NO: 738586 - DNA, 33 bp, Homo sapien
agctggggcgatgagatgttataggtagatctt

SEQ ID NO: 738587 - DNA, 33 bp, Homo sapien
ctatggtaaattgttacggcagcctgagtattc

SEQ ID NO: 738588 - DNA, 33 bp, Homo sapien
ctatggtaaattgttatggcagcctgagtattc

SEQ ID NO: 738589 - DNA, 33 bp, Homo sapien
ataagaaaagtaggctaaatctacagtatgaga

SEQ ID NO: 738590 - DNA, 33 bp, Homo sapien
ataagaaaagtaggctgaatctacagtatgaga

SEQ ID NO: 738591 - DNA, 33 bp, Homo sapien
catgagttctcacttacgttacatgttcatact

SEQ ID NO: 738592 - DNA, 33 bp, Homo sapien
catgagttctcacttatgttacatgttcatact

SEQ ID NO: 738593 - DNA, 33 bp, Homo sapien
actggagacactgacaataattgatgcctttat

SEQ ID NO: 738594 - DNA, 33 bp, Homo sapien
actggagacactgacagtaattgatgcctttat

SEQ ID NO: 738595 - DNA, 33 bp, Homo sapien
ctgccttttttgcacacggactgacttgagtag

SEQ ID NO: 738596 - DNA, 33 bp, Homo sapien
ctgccttttttgcacatggactgacttgagtag

SEQ ID NO: 738597 - DNA, 33 bp, Homo sapien
caagagtcatttcataaagtgggaaattcactt

SEQ ID NO: 738598 - DNA, 33 bp, Homo sapien
caagagtcatttcatatagtgggaaattcactt

SEQ ID NO: 738599 - DNA, 33 bp, Homo sapien
agagggctagaatgtgaatgcattagacaattt

SEQ ID NO: 738600 - DNA, 33 bp, Homo sapien
agagggctagaatgtgcatgcattagacaattt

SEQ ID NO: 738601 - DNA, 33 bp, Homo sapien
gaagccataatcctacaacttagatatttcatt

SEQ ID NO: 738602 - DNA, 33 bp, Homo sapien
gaagccataatcctactacttagatatttcatt

SEQ ID NO: 738603 - DNA, 33 bp, Homo sapien
tatttattgttgtatgccactgatatttctgtg

SEQ ID NO: 738604 - DNA, 33 bp, Homo sapien
tatttattgttgtatgtcactgatatttctgtg

SEQ ID NO: 738605 - DNA, 33 bp, Homo sapien
tacaagtacgtaattacagcaacattactgtga

SEQ ID NO: 738606 - DNA, 33 bp, Homo sapien
tacaagtacgtaattagagcaacattactgtga

SEQ ID NO: 738607 - DNA, 33 bp, Homo sapien
aactgaggctatttcaataagtctaatatgaat

SEQ ID NO: 738608 - DNA, 33 bp, Homo sapien
aactgaggctatttcagtaagtctaatatgaat

SEQ ID NO: 738609 - DNA, 33 bp, Homo sapien
ctgcctccatccccaccgaagaatgcattctgc

SEQ ID NO: 738610 - DNA, 33 bp, Homo sapien
ctgcctccatccccacggaagaatgcattctgc

SEQ ID NO: 738611 - DNA, 33 bp, Homo sapien
ttaacataaataatgcacagatctaactggtca

SEQ ID NO: 738612 - DNA, 33 bp, Homo sapien
ttaacataaataatgcgcagatctaactggtca

SEQ ID NO: 738613 - DNA, 33 bp, Homo sapien
taaaagaaacatttacaggtcacctaggaacta

SEQ ID NO: 738614 - DNA, 33 bp, Homo sapien
taaaagaaacatttacgggtcacctaggaacta

SEQ ID NO: 738615 - DNA, 33 bp, Homo sapien
atgcatatatacaaacagagataagtatctgac

SEQ ID NO: 738616 - DNA, 33 bp, Homo sapien
atgcatatatacaaactgagataagtatctgac

SEQ ID NO: 738617 - DNA, 33 bp, Homo sapien
aagagaaataggttaccgaggagccattgcaga

SEQ ID NO: 738618 - DNA, 33 bp, Homo sapien
aagagaaataggttactgaggagccattgcaga

SEQ ID NO: 738619 - DNA, 33 bp, Homo sapien
atcaattctacctcccaaatatctattgaatat

SEQ ID NO: 738620 - DNA, 33 bp, Homo sapien
atcaattctacctcccgaatatctattgaatat

SEQ ID NO: 738621 - DNA, 33 bp, Homo sapien
ttgttacagccaattacgaaatgtgcataagtg

SEQ ID NO: 738622 - DNA, 33 bp, Homo sapien
ttgttacagccaattatgaaatgtgcataagtg

SEQ ID NO: 738623 - DNA, 33 bp, Homo sapien
cactttacaaatgagaacatctaagcccaaagt

SEQ ID NO: 738624 - DNA, 33 bp, Homo sapien
cactttacaaatgagagcatctaagcccaaagt

SEQ ID NO: 738625 - DNA, 33 bp, Homo sapien
cactatagtgagtatgcataaggttgcaatgtc

SEQ ID NO: 738626 - DNA, 33 bp, Homo sapien
cactatagtgagtatgtataaggttgcaatgtc

SEQ ID NO: 738627 - DNA, 33 bp, Homo sapien
ggggatagtctctacccggaaaactggtttcca

SEQ ID NO: 738628 - DNA, 33 bp, Homo sapien
ggggatagtctctacctggaaaactggtttcca

SEQ ID NO: 738629 - DNA, 33 bp, Homo sapien
attatcattgctcacactgatggtggagtaaac

SEQ ID NO: 738630 - DNA, 33 bp, Homo sapien
attatcattgctcacagtgatggtggagtaaac

SEQ ID NO: 738631 - DNA, 33 bp, Homo sapien
tgattaacaatgtctacggagtaatcataatgt

SEQ ID NO: 738632 - DNA, 33 bp, Homo sapien
tgattaacaatgtctatggagtaatcataatgt

SEQ ID NO: 738633 - DNA, 33 bp, Homo sapien
ctcaaatcaattaacaatagtttagcaggaaaa

SEQ ID NO: 738634 - DNA, 33 bp, Homo sapien
ctcaaatcaattaacagtagtttagcaggaaaa

SEQ ID NO: 738635 - DNA, 33 bp, Homo sapien
tcagagttatttagagcacagtgactttggagg

SEQ ID NO: 738636 - DNA, 33 bp, Homo sapien
tcagagttatttagagtacagtgactttggagg

SEQ ID NO: 738637 - DNA, 33 bp, Homo sapien
agatactactcaaccaataaatggaacaaaata

SEQ ID NO: 738638 - DNA, 33 bp, Homo sapien
agatactactcaaccattaaatggaacaaaata

SEQ ID NO: 738639 - DNA, 33 bp, Homo sapien
tggccattcttggagaagtaagatggtatctca

SEQ ID NO: 738640 - DNA, 33 bp, Homo sapien
tggccattcttggagacgtaagatggtatctca

SEQ ID NO: 738641 - DNA, 33 bp, Homo sapien
aaatgatactaggaaaaccggcagggcacatac

SEQ ID NO: 738642 - DNA, 33 bp, Homo sapien
aaatgatactaggaaacccggcagggcacatac

SEQ ID NO: 738643 - DNA, 33 bp, Homo sapien
acttcctattccaaaaacagaaacagtaatata

SEQ ID NO: 738644 - DNA, 33 bp, Homo sapien
acttcctattccaaaagcagaaacagtaatata

SEQ ID NO: 738645 - DNA, 33 bp, Homo sapien
catgcaacttctggtacggataaacatcaatct

SEQ ID NO: 738646 - DNA, 33 bp, Homo sapien
catgcaacttctggtatggataaacatcaatct

SEQ ID NO: 738647 - DNA, 33 bp, Homo sapien
tgaaagatgatacgaaatacagtgactaaagtg

SEQ ID NO: 738648 - DNA, 33 bp, Homo sapien
tgaaagatgatacgaagtacagtgactaaagtg

SEQ ID NO: 738649 - DNA, 33 bp, Homo sapien
ctctcattacttaaaacgaatgtggaacatata

SEQ ID NO: 738650 - DNA, 33 bp, Homo sapien
ctctcattacttaaaatgaatgtggaacatata

SEQ ID NO: 738651 - DNA, 33 bp, Homo sapien
aactggaaagtctgatcaggttattaaggttca

SEQ ID NO: 738652 - DNA, 33 bp, Homo sapien
aactggaaagtctgattaggttattaaggttca

SEQ ID NO: 738653 - DNA, 33 bp, Homo sapien
tgagcccattccataacgtgtttgggacgaaaa

SEQ ID NO: 738654 - DNA, 33 bp, Homo sapien
tgagcccattccataatgtgtttgggacgaaaa

SEQ ID NO: 738655 - DNA, 33 bp, Homo sapien
tgagagaccaacataacgagttaggcaacattg

SEQ ID NO: 738656 - DNA, 33 bp, Homo sapien
tgagagaccaacataatgagttaggcaacattg

SEQ ID NO: 738657 - DNA, 33 bp, Homo sapien
ctccagcattacattccacaaagatttacaatg

SEQ ID NO: 738658 - DNA, 33 bp, Homo sapien
ctccagcattacattctacaaagatttacaatg

SEQ ID NO: 738659 - DNA, 33 bp, Homo sapien
tcacgggcaaataatacaccatggtccttaaga

SEQ ID NO: 738660 - DNA, 33 bp, Homo sapien
tcacgggcaaataatataccatggtccttaaga

SEQ ID NO: 738661 - DNA, 33 bp, Homo sapien
ctgtttaacaagacccaatcttctgttttctta

SEQ ID NO: 738662 - DNA, 33 bp, Homo sapien
ctgtttaacaagacccgatcttctgttttctta

SEQ ID NO: 738663 - DNA, 33 bp, Homo sapien
gaatatttgaagctgacgttactatactgagct

SEQ ID NO: 738664 - DNA, 33 bp, Homo sapien
gaatatttgaagctgaggttactatactgagct

SEQ ID NO: 738665 - DNA, 33 bp, Homo sapien
gattataagtttccacccctatttttgcctatt

SEQ ID NO: 738666 - DNA, 33 bp, Homo sapien
gattataagtttccacgcctatttttgcctatt

SEQ ID NO: 738667 - DNA, 33 bp, Homo sapien
agatttactattccaaaacctatatggcttatg

SEQ ID NO: 738668 - DNA, 33 bp, Homo sapien
agatttactattccaagacctatatggcttatg

SEQ ID NO: 738669 - DNA, 33 bp, Homo sapien
agcctgcaactacaaactaatgcttttgtctga

SEQ ID NO: 738670 - DNA, 33 bp, Homo sapien
agcctgcaactacaaattaatgcttttgtctga

SEQ ID NO: 738671 - DNA, 33 bp, Homo sapien
tctgactgttcattcacacatttacttattcat

SEQ ID NO: 738672 - DNA, 33 bp, Homo sapien
tctgactgttcattcatacatttacttattcat

SEQ ID NO: 738673 - DNA, 33 bp, Homo sapien
caagaaaaaggaacaaatgtagcaatgtgtgga

SEQ ID NO: 738674 - DNA, 33 bp, Homo sapien
caagaaaaaggaacaactgtagcaatgtgtgga

SEQ ID NO: 738675 - DNA, 33 bp, Homo sapien
tgacttctgcctttctaacaggctctttctctc

SEQ ID NO: 738676 - DNA, 33 bp, Homo sapien
tgacttctgcctttcttacaggctctttctctc

SEQ ID NO: 738677 - DNA, 33 bp, Homo sapien
atataactataccaaacaatgctttgtactgtc

SEQ ID NO: 738678 - DNA, 33 bp, Homo sapien
atataactataccaaataatgctttgtactgtc

SEQ ID NO: 738679 - DNA, 33 bp, Homo sapien
caaaattcaattaagcaatgaaaaactccagta

SEQ ID NO: 738680 - DNA, 33 bp, Homo sapien
caaaattcaattaagcgatgaaaaactccagta

SEQ ID NO: 738681 - DNA, 33 bp, Homo sapien
actcttggaaaataaaactcttaagtattcttt

SEQ ID NO: 738682 - DNA, 33 bp, Homo sapien
actcttggaaaataaagctcttaagtattcttt

SEQ ID NO: 738683 - DNA, 33 bp, Homo sapien
taaatgtctttgaataagagttcagaattgttt

SEQ ID NO: 738684 - DNA, 33 bp, Homo sapien
taaatgtctttgaatatgagttcagaattgttt

SEQ ID NO: 738685 - DNA, 33 bp, Homo sapien
aaaatgttcacatttaaaggttagacagctgtt

SEQ ID NO: 738686 - DNA, 33 bp, Homo sapien
aaaatgttcacatttacaggttagacagctgtt

SEQ ID NO: 738687 - DNA, 33 bp, Homo sapien
tggcctctcattctccacccagattgggctcct

SEQ ID NO: 738688 - DNA, 33 bp, Homo sapien
tggcctctcattctccgcccagattgggctcct

SEQ ID NO: 738689 - DNA, 33 bp, Homo sapien
tatatacaacccatgcaattttcagtatttttt

SEQ ID NO: 738690 - DNA, 33 bp, Homo sapien
tatatacaacccatgcgattttcagtatttttt

SEQ ID NO: 738691 - DNA, 33 bp, Homo sapien
gttttactacttgtaaatgaaaactggatttgt

SEQ ID NO: 738692 - DNA, 33 bp, Homo sapien
gttttactacttgtaagtgaaaactggatttgt

SEQ ID NO: 738693 - DNA, 33 bp, Homo sapien
ggcatgatcattgctaaacagaaactcagaatg

SEQ ID NO: 738694 - DNA, 33 bp, Homo sapien
ggcatgatcattgctatacagaaactcagaatg

SEQ ID NO: 738695 - DNA, 33 bp, Homo sapien
gctgcttattgttgcaatcactcaagagtagct

SEQ ID NO: 738696 - DNA, 33 bp, Homo sapien
gctgcttattgttgcagtcactcaagagtagct

SEQ ID NO: 738697 - DNA, 33 bp, Homo sapien
ttgttatctctgaaaaatgagtcaagtggtcac

SEQ ID NO: 738698 - DNA, 33 bp, Homo sapien
ttgttatctctgaaaagtgagtcaagtggtcac

SEQ ID NO: 738699 - DNA, 33 bp, Homo sapien
catgactaatgagctgaaagtattagcctttga

SEQ ID NO: 738700 - DNA, 33 bp, Homo sapien
catgactaatgagctgcaagtattagcctttga

SEQ ID NO: 738701 - DNA, 33 bp, Homo sapien
ggtttggaagctctcacagattccttattgctt

SEQ ID NO: 738702 - DNA, 33 bp, Homo sapien
ggtttggaagctctcatagattccttattgctt

SEQ ID NO: 738703 - DNA, 33 bp, Homo sapien
gatccatgctaaaatacgggtaaccatgaaaac

SEQ ID NO: 738704 - DNA, 33 bp, Homo sapien
gatccatgctaaaatatgggtaaccatgaaaac

SEQ ID NO: 738705 - DNA, 33 bp, Homo sapien
actgtatgtttccatcactcataaatgtgtaat

SEQ ID NO: 738706 - DNA, 33 bp, Homo sapien
actgtatgtttccatctctcataaatgtgtaat

SEQ ID NO: 738707 - DNA, 33 bp, Homo sapien
tacaaatggcaaaaaaacacctaaaaagatgtt

SEQ ID NO: 738708 - DNA, 33 bp, Homo sapien
tacaaatggcaaaaaatcacctaaaaagatgtt

SEQ ID NO: 738709 - DNA, 33 bp, Homo sapien
gttaaggaaagtgagacgtgagacaggtagaga

SEQ ID NO: 738710 - DNA, 33 bp, Homo sapien
gttaaggaaagtgagatgtgagacaggtagaga

SEQ ID NO: 738711 - DNA, 33 bp, Homo sapien
aagcactactaagcacagaaatcaaatcactgt

SEQ ID NO: 738712 - DNA, 33 bp, Homo sapien
aagcactactaagcaccgaaatcaaatcactgt

SEQ ID NO: 738713 - DNA, 33 bp, Homo sapien
gcagttcaatttgagagtccttgcttttaatta

SEQ ID NO: 738714 - DNA, 33 bp, Homo sapien
gcagttcaatttgagattccttgcttttaatta

SEQ ID NO: 738715 - DNA, 33 bp, Homo sapien
ctgagaaggtcagaaacctctagctgagggagt

SEQ ID NO: 738716 - DNA, 33 bp, Homo sapien
ctgagaaggtcagaaatctctagctgagggagt

SEQ ID NO: 738717 - DNA, 33 bp, Homo sapien
gttacaaaaatactgacaatgagcaaaaaactt

SEQ ID NO: 738718 - DNA, 33 bp, Homo sapien
gttacaaaaatactgataatgagcaaaaaactt

SEQ ID NO: 738719 - DNA, 33 bp, Homo sapien
caaagcaatgctatcaaattttatgaagtatca

SEQ ID NO: 738720 - DNA, 33 bp, Homo sapien
caaagcaatgctatcacattttatgaagtatca

SEQ ID NO: 738721 - DNA, 33 bp, Homo sapien
gtggcacatctgatacaagtttttctgtcctca

SEQ ID NO: 738722 - DNA, 33 bp, Homo sapien
gtggcacatctgatacgagtttttctgtcctca

SEQ ID NO: 738723 - DNA, 33 bp, Homo sapien
gcactcttatctgcaaaaacaacccattttaaa

SEQ ID NO: 738724 - DNA, 33 bp, Homo sapien
gcactcttatctgcaacaacaacccattttaaa

SEQ ID NO: 738725 - DNA, 33 bp, Homo sapien
gtgaccagctttacataaacttcatagaaaatt

SEQ ID NO: 738726 - DNA, 33 bp, Homo sapien
gtgaccagctttacatgaacttcatagaaaatt

SEQ ID NO: 738727 - DNA, 33 bp, Homo sapien
acctaaagatgttccaaccctatgcacactacc

SEQ ID NO: 738728 - DNA, 33 bp, Homo sapien
acctaaagatgttccatccctatgcacactacc

SEQ ID NO: 738729 - DNA, 33 bp, Homo sapien
ttcatgagcttttctccgaaatcctacggaagt

SEQ ID NO: 738730 - DNA, 33 bp, Homo sapien
ttcatgagcttttctctgaaatcctacggaagt

SEQ ID NO: 738731 - DNA, 33 bp, Homo sapien
gggacactagattgtaaagaatgcaacctcgga

SEQ ID NO: 738732 - DNA, 33 bp, Homo sapien
gggacactagattgtagagaatgcaacctcgga

SEQ ID NO: 738733 - DNA, 33 bp, Homo sapien
tccacattaataaatgacacgtaatgacacagt

SEQ ID NO: 738734 - DNA, 33 bp, Homo sapien
tccacattaataaatggcacgtaatgacacagt

SEQ ID NO: 738735 - DNA, 33 bp, Homo sapien
taaggtctaatttttacgaggtcaaaagagaag

SEQ ID NO: 738736 - DNA, 33 bp, Homo sapien
taaggtctaatttttatgaggtcaaaagagaag

SEQ ID NO: 738737 - DNA, 33 bp, Homo sapien
tatctaacttgtccaacgttacatagttagtaa

SEQ ID NO: 738738 - DNA, 33 bp, Homo sapien
tatctaacttgtccaatgttacatagttagtaa

SEQ ID NO: 738739 - DNA, 33 bp, Homo sapien
cactggagaccacttacatcccgaagcggacgc

SEQ ID NO: 738740 - DNA, 33 bp, Homo sapien
cactggagaccacttatatcccgaagcggacgc

SEQ ID NO: 738741 - DNA, 33 bp, Homo sapien
ggtcattcttggcataaaacaacctacgcagca

SEQ ID NO: 738742 - DNA, 33 bp, Homo sapien
ggtcattcttggcatagaacaacctacgcagca

SEQ ID NO: 738743 - DNA, 33 bp, Homo sapien
agcagattgaaaattacctattggctgtaatgt

SEQ ID NO: 738744 - DNA, 33 bp, Homo sapien
agcagattgaaaattatctattggctgtaatgt

SEQ ID NO: 738745 - DNA, 33 bp, Homo sapien
gataagctatgtgttacgattttctacatatta

SEQ ID NO: 738746 - DNA, 33 bp, Homo sapien
gataagctatgtgttatgattttctacatatta

SEQ ID NO: 738747 - DNA, 33 bp, Homo sapien
tgaagaatctaaatcaatctggaatagtaaatc

SEQ ID NO: 738748 - DNA, 33 bp, Homo sapien
tgaagaatctaaatcagtctggaatagtaaatc

SEQ ID NO: 738749 - DNA, 33 bp, Homo sapien
caaaggctgatttacacctaacttacattagtt

SEQ ID NO: 738750 - DNA, 33 bp, Homo sapien
caaaggctgatttacatctaacttacattagtt

SEQ ID NO: 738751 - DNA, 33 bp, Homo sapien
tgggtgaattcataaggctctgcaggggtttgt

SEQ ID NO: 738752 - DNA, 33 bp, Homo sapien
tgggtgaattcataagtctctgcaggggtttgt

SEQ ID NO: 738753 - DNA, 33 bp, Homo sapien
tacaaagaagttacagcccatatttctcaccta

SEQ ID NO: 738754 - DNA, 33 bp, Homo sapien
tacaaagaagttacagtccatatttctcaccta

SEQ ID NO: 738755 - DNA, 33 bp, Homo sapien
aaaatactctttgaaccgaggaagatgtgacag

SEQ ID NO: 738756 - DNA, 33 bp, Homo sapien
aaaatactctttgaactgaggaagatgtgacag

SEQ ID NO: 738757 - DNA, 33 bp, Homo sapien
ggtaataaaatcatcaactttaatatgggaatg

SEQ ID NO: 738758 - DNA, 33 bp, Homo sapien
ggtaataaaatcatcacctttaatatgggaatg

SEQ ID NO: 738759 - DNA, 33 bp, Homo sapien
cgtagttttgaacttccatcaatatgaatgcat

SEQ ID NO: 738760 - DNA, 33 bp, Homo sapien
cgtagttttgaacttcgatcaatatgaatgcat

SEQ ID NO: 738761 - DNA, 33 bp, Homo sapien
tctctctcaatttctacctttcttacacacaca

SEQ ID NO: 738762 - DNA, 33 bp, Homo sapien
tctctctcaatttctatctttcttacacacaca

SEQ ID NO: 738763 - DNA, 33 bp, Homo sapien
tcctgtgacatcattagactgaaagacagggaa

SEQ ID NO: 738764 - DNA, 33 bp, Homo sapien
tcctgtgacatcattatactgaaagacagggaa

SEQ ID NO: 738765 - DNA, 33 bp, Homo sapien
aactcatttgcatgaaagacatctctcttcctg

SEQ ID NO: 738766 - DNA, 33 bp, Homo sapien
aactcatttgcatgaaggacatctctcttcctg

SEQ ID NO: 738767 - DNA, 33 bp, Homo sapien
gggtattggaacttcaggattttctctgggata

SEQ ID NO: 738768 - DNA, 33 bp, Homo sapien
gggtattggaacttcatgattttctctgggata

SEQ ID NO: 738769 - DNA, 33 bp, Homo sapien
tatcaaaagagataccaaagtggtcatgatgta

SEQ ID NO: 738770 - DNA, 33 bp, Homo sapien
tatcaaaagagataccgaagtggtcatgatgta

SEQ ID NO: 738771 - DNA, 33 bp, Homo sapien
ttattacaatctatggaattgacatataagtag

SEQ ID NO: 738772 - DNA, 33 bp, Homo sapien
ttattacaatctatggtattgacatataagtag

SEQ ID NO: 738773 - DNA, 33 bp, Homo sapien
aggcatggggtaccttcatcggactcatcaaaa

SEQ ID NO: 738774 - DNA, 33 bp, Homo sapien
aggcatggggtacctttatcggactcatcaaaa

SEQ ID NO: 738775 - DNA, 33 bp, Homo sapien
agatgaacgcagaacacgcagcgtaggcagccc

SEQ ID NO: 738776 - DNA, 33 bp, Homo sapien
agatgaacgcagaacatgcagcgtaggcagccc

SEQ ID NO: 738777 - DNA, 33 bp, Homo sapien
gaaacagctttatgtcactacaaagtattattc

SEQ ID NO: 738778 - DNA, 33 bp, Homo sapien
gaaacagctttatgtcgctacaaagtattattc

SEQ ID NO: 738779 - DNA, 33 bp, Homo sapien
ataatatggcaaagtccacccagataacaagtg

SEQ ID NO: 738780 - DNA, 33 bp, Homo sapien
ataatatggcaaagtctacccagataacaagtg

SEQ ID NO: 738781 - DNA, 33 bp, Homo sapien
catggaggcaaatatcaagaatgaccatctaat

SEQ ID NO: 738782 - DNA, 33 bp, Homo sapien
catggaggcaaatatcgagaatgaccatctaat

SEQ ID NO: 738783 - DNA, 33 bp, Homo sapien
ggatgagataaagtgcagaaacatgaaaagatg

SEQ ID NO: 738784 - DNA, 33 bp, Homo sapien
ggatgagataaagtgccgaaacatgaaaagatg

SEQ ID NO: 738785 - DNA, 33 bp, Homo sapien
tttgcagaacactccacccaaccaccacagaat

SEQ ID NO: 738786 - DNA, 33 bp, Homo sapien
tttgcagaacactccatccaaccaccacagaat

SEQ ID NO: 738787 - DNA, 33 bp, Homo sapien
gggaaccacaagatcacaggccctaaagcagaa

SEQ ID NO: 738788 - DNA, 33 bp, Homo sapien
gggaaccacaagatcataggccctaaagcagaa

SEQ ID NO: 738789 - DNA, 33 bp, Homo sapien
agtctcgattccctaccactttctcccttgctt

SEQ ID NO: 738790 - DNA, 33 bp, Homo sapien
agtctcgattccctacgactttctcccttgctt

SEQ ID NO: 738791 - DNA, 33 bp, Homo sapien
ctagaatcatgtcttacgcttgtattttttcac

SEQ ID NO: 738792 - DNA, 33 bp, Homo sapien
ctagaatcatgtcttatgcttgtattttttcac

SEQ ID NO: 738793 - DNA, 33 bp, Homo sapien
tgtttagggtcaagacacagttatggtttcaag

SEQ ID NO: 738794 - DNA, 33 bp, Homo sapien
tgtttagggtcaagacgcagttatggtttcaag

SEQ ID NO: 738795 - DNA, 33 bp, Homo sapien
atgtctgtctcaggtaacagcaagacaagatga

SEQ ID NO: 738796 - DNA, 33 bp, Homo sapien
atgtctgtctcaggtagcagcaagacaagatga

SEQ ID NO: 738797 - DNA, 33 bp, Homo sapien
ctgttccttccaagtcaccctttctctatggta

SEQ ID NO: 738798 - DNA, 33 bp, Homo sapien
ctgttccttccaagtcgccctttctctatggta

SEQ ID NO: 738799 - DNA, 33 bp, Homo sapien
tagatgataataaaaccgggaaaacaagatttg

SEQ ID NO: 738800 - DNA, 33 bp, Homo sapien
tagatgataataaaactgggaaaacaagatttg

SEQ ID NO: 738801 - DNA, 33 bp, Homo sapien
ccaaactaaaaactacccaagtggccatcaaca

SEQ ID NO: 738802 - DNA, 33 bp, Homo sapien
ccaaactaaaaactactcaagtggccatcaaca

SEQ ID NO: 738803 - DNA, 33 bp, Homo sapien
ggcaatgttggcagagaaaacagtcagtctaaa

SEQ ID NO: 738804 - DNA, 33 bp, Homo sapien
ggcaatgttggcagaggaaacagtcagtctaaa

SEQ ID NO: 738805 - DNA, 33 bp, Homo sapien
gctttccttatgagtacggctaatagctctagg

SEQ ID NO: 738806 - DNA, 33 bp, Homo sapien
gctttccttatgagtatggctaatagctctagg

SEQ ID NO: 738807 - DNA, 33 bp, Homo sapien
aacaaatttaatacaaagaaaggcaacttatgt

SEQ ID NO: 738808 - DNA, 33 bp, Homo sapien
aacaaatttaatacaaggaaaggcaacttatgt

SEQ ID NO: 738809 - DNA, 33 bp, Homo sapien
ttgaatctcagaagcccaaattcctggactagt

SEQ ID NO: 738810 - DNA, 33 bp, Homo sapien
ttgaatctcagaagccgaaattcctggactagt

SEQ ID NO: 738811 - DNA, 33 bp, Homo sapien
atcttatatctcttaaacaggacaacttgtgtg

SEQ ID NO: 738812 - DNA, 33 bp, Homo sapien
atcttatatctcttaatcaggacaacttgtgtg

SEQ ID NO: 738813 - DNA, 33 bp, Homo sapien
gtgtgaagttgattctcaatcaagggaatcatc

SEQ ID NO: 738814 - DNA, 33 bp, Homo sapien
gtgtgaagttgattcttaatcaagggaatcatc

SEQ ID NO: 738815 - DNA, 33 bp, Homo sapien
gtttgtaacagctgaaactgtatttaaagaaga

SEQ ID NO: 738816 - DNA, 33 bp, Homo sapien
gtttgtaacagctgaacctgtatttaaagaaga

SEQ ID NO: 738817 - DNA, 33 bp, Homo sapien
caaatccaaatgaccaagaagagctgagaggaa

SEQ ID NO: 738818 - DNA, 33 bp, Homo sapien
caaatccaaatgaccaggaagagctgagaggaa

SEQ ID NO: 738819 - DNA, 33 bp, Homo sapien
ctaggccaaatggctccgaatctgcattcttag

SEQ ID NO: 738820 - DNA, 33 bp, Homo sapien
ctaggccaaatggctctgaatctgcattcttag

SEQ ID NO: 738821 - DNA, 33 bp, Homo sapien
atgccttgatgagaaacgtagtaccttgtttac

SEQ ID NO: 738822 - DNA, 33 bp, Homo sapien
atgccttgatgagaaaggtagtaccttgtttac

SEQ ID NO: 738823 - DNA, 33 bp, Homo sapien
ttttttacaaccacacaaattgggctaacacat

SEQ ID NO: 738824 - DNA, 33 bp, Homo sapien
ttttttacaaccacacgaattgggctaacacat

SEQ ID NO: 738825 - DNA, 33 bp, Homo sapien
ataaaaatttgaatcactcaatcagttaccact

SEQ ID NO: 738826 - DNA, 33 bp, Homo sapien
ataaaaatttgaatcattcaatcagttaccact

SEQ ID NO: 738827 - DNA, 33 bp, Homo sapien
acttagtaaatgtcaaactgtgtgcgaggaatt

SEQ ID NO: 738828 - DNA, 33 bp, Homo sapien
acttagtaaatgtcaagctgtgtgcgaggaatt

SEQ ID NO: 738829 - DNA, 33 bp, Homo sapien
tgaagaaatggtcacaatcaatattttacagtt

SEQ ID NO: 738830 - DNA, 33 bp, Homo sapien
tgaagaaatggtcacagtcaatattttacagtt

SEQ ID NO: 738831 - DNA, 33 bp, Homo sapien
atagcctaaactagaaacaatgtaactattcat

SEQ ID NO: 738832 - DNA, 33 bp, Homo sapien
atagcctaaactagaagcaatgtaactattcat

SEQ ID NO: 738833 - DNA, 33 bp, Homo sapien
cattctcaaggttagacgaccatatgttgtcac

SEQ ID NO: 738834 - DNA, 33 bp, Homo sapien
cattctcaaggttagatgaccatatgttgtcac

SEQ ID NO: 738835 - DNA, 33 bp, Homo sapien
agcagaactaccattcaaacaatccctttactg

SEQ ID NO: 738836 - DNA, 33 bp, Homo sapien
agcagaactaccattcgaacaatccctttactg

SEQ ID NO: 738837 - DNA, 33 bp, Homo sapien
acaacaaacctttgtcacacgagtttatctgtg

SEQ ID NO: 738838 - DNA, 33 bp, Homo sapien
acaacaaacctttgtcgcacgagtttatctgtg

SEQ ID NO: 738839 - DNA, 33 bp, Homo sapien
gctacacttatgtcacacaaaatagatttcaag

SEQ ID NO: 738840 - DNA, 33 bp, Homo sapien
gctacacttatgtcactcaaaatagatttcaag

SEQ ID NO: 738841 - DNA, 33 bp, Homo sapien
acacaaatcaaacataccttacagttttggctg

SEQ ID NO: 738842 - DNA, 33 bp, Homo sapien
acacaaatcaaacatagcttacagttttggctg

SEQ ID NO: 738843 - DNA, 33 bp, Homo sapien
tgaaagagaaattacaatggagccttagaagat

SEQ ID NO: 738844 - DNA, 33 bp, Homo sapien
tgaaagagaaattacactggagccttagaagat

SEQ ID NO: 738845 - DNA, 33 bp, Homo sapien
tgcagccactggtctacagatgggacatgattg

SEQ ID NO: 738846 - DNA, 33 bp, Homo sapien
tgcagccactggtctagagatgggacatgattg

SEQ ID NO: 738847 - DNA, 33 bp, Homo sapien
tattcaatcttttagcaaataatgtaaactcat

SEQ ID NO: 738848 - DNA, 33 bp, Homo sapien
tattcaatcttttagcgaataatgtaaactcat

SEQ ID NO: 738849 - DNA, 33 bp, Homo sapien
gaagataatggaaaaaaaatctctttcttcagc

SEQ ID NO: 738850 - DNA, 33 bp, Homo sapien
gaagataatggaaaaacaatctctttcttcagc

SEQ ID NO: 738851 - DNA, 33 bp, Homo sapien
tgcttctagtgctttagagttaacttcaaaatt

SEQ ID NO: 738852 - DNA, 33 bp, Homo sapien
tgcttctagtgctttatagttaacttcaaaatt

SEQ ID NO: 738853 - DNA, 33 bp, Homo sapien
ctcttaggtctaggcaatcctaggtatactggc

SEQ ID NO: 738854 - DNA, 33 bp, Homo sapien
ctcttaggtctaggcagtcctaggtatactggc

SEQ ID NO: 738855 - DNA, 33 bp, Homo sapien
acaaatcctctcttcacagcccttggtaggagt

SEQ ID NO: 738856 - DNA, 33 bp, Homo sapien
acaaatcctctcttcatagcccttggtaggagt

SEQ ID NO: 738857 - DNA, 33 bp, Homo sapien
ccatccttcctactaaacaaactaggccactaa

SEQ ID NO: 738858 - DNA, 33 bp, Homo sapien
ccatccttcctactaagcaaactaggccactaa

SEQ ID NO: 738859 - DNA, 33 bp, Homo sapien
gatgttttaataaccaaatgagacatgtatagt

SEQ ID NO: 738860 - DNA, 33 bp, Homo sapien
gatgttttaataaccagatgagacatgtatagt

SEQ ID NO: 738861 - DNA, 33 bp, Homo sapien
tagcagaggcttaatacatgtttttgagtgttg

SEQ ID NO: 738862 - DNA, 33 bp, Homo sapien
tagcagaggcttaatatatgtttttgagtgttg

SEQ ID NO: 738863 - DNA, 33 bp, Homo sapien
atttataaacggtatacctgaatgggagataat

SEQ ID NO: 738864 - DNA, 33 bp, Homo sapien
atttataaacggtatatctgaatgggagataat

SEQ ID NO: 738865 - DNA, 33 bp, Homo sapien
atatatttgctcttcagatttaaaaaggcagtt

SEQ ID NO: 738866 - DNA, 33 bp, Homo sapien
atatatttgctcttcatatttaaaaaggcagtt

SEQ ID NO: 738867 - DNA, 33 bp, Homo sapien
agagagtcagagcataaccaagcgtagtgccgc

SEQ ID NO: 738868 - DNA, 33 bp, Homo sapien
agagagtcagagcatagccaagcgtagtgccgc

SEQ ID NO: 738869 - DNA, 33 bp, Homo sapien
tttgccttcatattggaaagtttaagcacaact

SEQ ID NO: 738870 - DNA, 33 bp, Homo sapien
tttgccttcatattgggaagtttaagcacaact

SEQ ID NO: 738871 - DNA, 33 bp, Homo sapien
gtcattaactattgtacgttgaatgagaatatt

SEQ ID NO: 738872 - DNA, 33 bp, Homo sapien
gtcattaactattgtatgttgaatgagaatatt

SEQ ID NO: 738873 - DNA, 33 bp, Homo sapien
tagataaggggcaacaaaaaaatccacatggca

SEQ ID NO: 738874 - DNA, 33 bp, Homo sapien
tagataaggggcaacacaaaaatccacatggca

SEQ ID NO: 738875 - DNA, 33 bp, Homo sapien
ctagtatttttggtgtgacacagaggtgatgaa

SEQ ID NO: 738876 - DNA, 33 bp, Homo sapien
ctagtatttttggtgttacacagaggtgatgaa

SEQ ID NO: 738877 - DNA, 33 bp, Homo sapien
ttctcaggtctacaataaaaaaaaacacataat

SEQ ID NO: 738878 - DNA, 33 bp, Homo sapien
ttctcaggtctacaatcaaaaaaaacacataat

SEQ ID NO: 738879 - DNA, 33 bp, Homo sapien
attcaaagagcctcaacgaggttttaagaagag

SEQ ID NO: 738880 - DNA, 33 bp, Homo sapien
attcaaagagcctcaatgaggttttaagaagag

SEQ ID NO: 738881 - DNA, 33 bp, Homo sapien
gagcttaacacacaacaactgtttcccttgaat

SEQ ID NO: 738882 - DNA, 33 bp, Homo sapien
gagcttaacacacaactactgtttcccttgaat

SEQ ID NO: 738883 - DNA, 33 bp, Homo sapien
ttttatggtggtttgcaatttattgttttccct

SEQ ID NO: 738884 - DNA, 33 bp, Homo sapien
ttttatggtggtttgcgatttattgttttccct

SEQ ID NO: 738885 - DNA, 33 bp, Homo sapien
attatgtggatacaatcaagcacacgaggtagg

SEQ ID NO: 738886 - DNA, 33 bp, Homo sapien
attatgtggatacaattaagcacacgaggtagg

SEQ ID NO: 738887 - DNA, 33 bp, Homo sapien
agaatgtatcagattacctgctgtttcatttgt

SEQ ID NO: 738888 - DNA, 33 bp, Homo sapien
agaatgtatcagattatctgctgtttcatttgt

SEQ ID NO: 738889 - DNA, 33 bp, Homo sapien
ttattataaatgtctaccaggaactagttaata

SEQ ID NO: 738890 - DNA, 33 bp, Homo sapien
ttattataaatgtctatcaggaactagttaata

SEQ ID NO: 738891 - DNA, 33 bp, Homo sapien
tgtgttaacagaggaaaatgggaaatagagaat

SEQ ID NO: 738892 - DNA, 33 bp, Homo sapien
tgtgttaacagaggaagatgggaaatagagaat

SEQ ID NO: 738893 - DNA, 33 bp, Homo sapien
taaaacctcctaaagacgattttgcttcactgt

SEQ ID NO: 738894 - DNA, 33 bp, Homo sapien
taaaacctcctaaagatgattttgcttcactgt

SEQ ID NO: 738895 - DNA, 33 bp, Homo sapien
cagatgtgcataaatccatctggtcctctgccg

SEQ ID NO: 738896 - DNA, 33 bp, Homo sapien
cagatgtgcataaatctatctggtcctctgccg

SEQ ID NO: 738897 - DNA, 33 bp, Homo sapien
ggcagatggacctaaacatgagcatgaaaattc

SEQ ID NO: 738898 - DNA, 33 bp, Homo sapien
ggcagatggacctaaatatgagcatgaaaattc

SEQ ID NO: 738899 - DNA, 33 bp, Homo sapien
cataggaaagtagtctaaatagtagggggagat

SEQ ID NO: 738900 - DNA, 33 bp, Homo sapien
cataggaaagtagtctgaatagtagggggagat

SEQ ID NO: 738901 - DNA, 33 bp, Homo sapien
acaaactgcagagggtaaccaaggccaataatt

SEQ ID NO: 738902 - DNA, 33 bp, Homo sapien
acaaactgcagagggtgaccaaggccaataatt

SEQ ID NO: 738903 - DNA, 33 bp, Homo sapien
tctcatacagtggctccgaaggcacaatatttt

SEQ ID NO: 738904 - DNA, 33 bp, Homo sapien
tctcatacagtggctctgaaggcacaatatttt

SEQ ID NO: 738905 - DNA, 33 bp, Homo sapien
gctcactgtaaccttaaacttggactcaaacaa

SEQ ID NO: 738906 - DNA, 33 bp, Homo sapien
gctcactgtaaccttagacttggactcaaacaa

SEQ ID NO: 738907 - DNA, 33 bp, Homo sapien
ttacacaaactaattgaacagcctatgatacac

SEQ ID NO: 738908 - DNA, 33 bp, Homo sapien
ttacacaaactaattgtacagcctatgatacac

SEQ ID NO: 738909 - DNA, 33 bp, Homo sapien
atttggttaaaaataaatccttgtatatgtgaa

SEQ ID NO: 738910 - DNA, 33 bp, Homo sapien
atttggttaaaaataagtccttgtatatgtgaa

SEQ ID NO: 738911 - DNA, 33 bp, Homo sapien
aagcaacacttgatacaacaattccaacatgta

SEQ ID NO: 738912 - DNA, 33 bp, Homo sapien
aagcaacacttgatacgacaattccaacatgta

SEQ ID NO: 738913 - DNA, 33 bp, Homo sapien
gtctaatcatgacactaaactataaagctgcca

SEQ ID NO: 738914 - DNA, 33 bp, Homo sapien
gtctaatcatgacactgaactataaagctgcca

SEQ ID NO: 738915 - DNA, 33 bp, Homo sapien
ggtagtactcaacttacattgtcagtcagaaca

SEQ ID NO: 738916 - DNA, 33 bp, Homo sapien
ggtagtactcaacttagattgtcagtcagaaca

SEQ ID NO: 738917 - DNA, 33 bp, Homo sapien
tatgtcataattgagaacactagtgacaataag

SEQ ID NO: 738918 - DNA, 33 bp, Homo sapien
tatgtcataattgagatcactagtgacaataag

SEQ ID NO: 738919 - DNA, 33 bp, Homo sapien
caccatggcaggaagtcaatggacaaggactaa

SEQ ID NO: 738920 - DNA, 33 bp, Homo sapien
caccatggcaggaagttaatggacaaggactaa

SEQ ID NO: 738921 - DNA, 33 bp, Homo sapien
ccttttgcttcagcatcaccaatattgggtctc

SEQ ID NO: 738922 - DNA, 33 bp, Homo sapien
ccttttgcttcagcattaccaatattgggtctc

SEQ ID NO: 738923 - DNA, 33 bp, Homo sapien
aaataactttgaaaaaacaaacacaccatattt

SEQ ID NO: 738924 - DNA, 33 bp, Homo sapien
aaataactttgaaaaatcaaacacaccatattt

SEQ ID NO: 738925 - DNA, 33 bp, Homo sapien
gaatcttgttacagacaactcaaagaaatttcc

SEQ ID NO: 738926 - DNA, 33 bp, Homo sapien
gaatcttgttacagacgactcaaagaaatttcc

SEQ ID NO: 738927 - DNA, 33 bp, Homo sapien
aaaaacagagagatgaaatgatgtgcccaaaga

SEQ ID NO: 738928 - DNA, 33 bp, Homo sapien
aaaaacagagagatgagatgatgtgcccaaaga

SEQ ID NO: 738929 - DNA, 33 bp, Homo sapien
tcagatccactgaaccaaattcctagaggtaga

SEQ ID NO: 738930 - DNA, 33 bp, Homo sapien
tcagatccactgaaccgaattcctagaggtaga

SEQ ID NO: 738931 - DNA, 33 bp, Homo sapien
ttttgctggaaaaacaatactagggaagttacc

SEQ ID NO: 738932 - DNA, 33 bp, Homo sapien
ttttgctggaaaaacagtactagggaagttacc

SEQ ID NO: 738933 - DNA, 33 bp, Homo sapien
aaaatgtagaaatgaacaacagtatctcgggtg

SEQ ID NO: 738934 - DNA, 33 bp, Homo sapien
aaaatgtagaaatgaataacagtatctcgggtg

SEQ ID NO: 738935 - DNA, 33 bp, Homo sapien
agcttggctgaagaaacctgtagctctaatcca

SEQ ID NO: 738936 - DNA, 33 bp, Homo sapien
agcttggctgaagaaagctgtagctctaatcca

SEQ ID NO: 738937 - DNA, 33 bp, Homo sapien
ccacttaatgagactaagtttttttcaagacta

SEQ ID NO: 738938 - DNA, 33 bp, Homo sapien
ccacttaatgagactacgtttttttcaagacta

SEQ ID NO: 738939 - DNA, 33 bp, Homo sapien
tctcctctgtgaagaccaaacatcaggcacagg

SEQ ID NO: 738940 - DNA, 33 bp, Homo sapien
tctcctctgtgaagactaaacatcaggcacagg

SEQ ID NO: 738941 - DNA, 33 bp, Homo sapien
agggagagaaatacaggaagtgtgttgtgcctg

SEQ ID NO: 738942 - DNA, 33 bp, Homo sapien
agggagagaaatacagtaagtgtgttgtgcctg

SEQ ID NO: 738943 - DNA, 33 bp, Homo sapien
tggtaagtgaaatgaacgtaaaggtaattgtgt

SEQ ID NO: 738944 - DNA, 33 bp, Homo sapien
tggtaagtgaaatgaatgtaaaggtaattgtgt

SEQ ID NO: 738945 - DNA, 33 bp, Homo sapien
aaaagtattaactgacaacctttgtaatattct

SEQ ID NO: 738946 - DNA, 33 bp, Homo sapien
aaaagtattaactgacgacctttgtaatattct

SEQ ID NO: 738947 - DNA, 33 bp, Homo sapien
gggaaagagtatatcaagttcttagagctgttg

SEQ ID NO: 738948 - DNA, 33 bp, Homo sapien
gggaaagagtatatcacgttcttagagctgttg

SEQ ID NO: 738949 - DNA, 33 bp, Homo sapien
atccagttcagaatcacgtgttacattagtttt

SEQ ID NO: 738950 - DNA, 33 bp, Homo sapien
atccagttcagaatcatgtgttacattagtttt

SEQ ID NO: 738951 - DNA, 33 bp, Homo sapien
agtcacaatttccgtcaccagagacagacactt

SEQ ID NO: 738952 - DNA, 33 bp, Homo sapien
agtcacaatttccgtcgccagagacagacactt

SEQ ID NO: 738953 - DNA, 33 bp, Homo sapien
aaattgtcttgattaaacagttggatgttactt

SEQ ID NO: 738954 - DNA, 33 bp, Homo sapien
aaattgtcttgattaatcagttggatgttactt

SEQ ID NO: 738955 - DNA, 33 bp, Homo sapien
ccatgatgtaaaaatacacagtgtttattgatt

SEQ ID NO: 738956 - DNA, 33 bp, Homo sapien
ccatgatgtaaaaatatacagtgtttattgatt

SEQ ID NO: 738957 - DNA, 33 bp, Homo sapien
cactccaattgctaccaatcagctcacagaaac

SEQ ID NO: 738958 - DNA, 33 bp, Homo sapien
cactccaattgctaccgatcagctcacagaaac

SEQ ID NO: 738959 - DNA, 33 bp, Homo sapien
tcatctgaatgtgtgacgttccatttctaaaat

SEQ ID NO: 738960 - DNA, 33 bp, Homo sapien
tcatctgaatgtgtgatgttccatttctaaaat

SEQ ID NO: 738961 - DNA, 33 bp, Homo sapien
gatcaataggatgtgaactctgtgaccctggtc

SEQ ID NO: 738962 - DNA, 33 bp, Homo sapien
gatcaataggatgtgagctctgtgaccctggtc

SEQ ID NO: 738963 - DNA, 33 bp, Homo sapien
caggggccattctcaaaattcagaggccaccca

SEQ ID NO: 738964 - DNA, 33 bp, Homo sapien
caggggccattctcaacattcagaggccaccca

SEQ ID NO: 738965 - DNA, 33 bp, Homo sapien
gtaatttgttacgcaacagaaaaccaatatata

SEQ ID NO: 738966 - DNA, 33 bp, Homo sapien
gtaatttgttacgcaatagaaaaccaatatata

SEQ ID NO: 738967 - DNA, 33 bp, Homo sapien
gctaaaatagccagtcaaagaattttttatatt

SEQ ID NO: 738968 - DNA, 33 bp, Homo sapien
gctaaaatagccagtcgaagaattttttatatt

SEQ ID NO: 738969 - DNA, 33 bp, Homo sapien
tttcagaccctgctaggaatcatcaaccagctc

SEQ ID NO: 738970 - DNA, 33 bp, Homo sapien
tttcagaccctgctagtaatcatcaaccagctc

SEQ ID NO: 738971 - DNA, 33 bp, Homo sapien
gactattcaagcaacaaaaagctatacaagtgc

SEQ ID NO: 738972 - DNA, 33 bp, Homo sapien
gactattcaagcaacagaaagctatacaagtgc

SEQ ID NO: 738973 - DNA, 33 bp, Homo sapien
gaattaacaacagtggaaaacacattagaaaac

SEQ ID NO: 738974 - DNA, 33 bp, Homo sapien
gaattaacaacagtggcaaacacattagaaaac

SEQ ID NO: 738975 - DNA, 33 bp, Homo sapien
ttaattctaaggttagaaagtatgctcccccca

SEQ ID NO: 738976 - DNA, 33 bp, Homo sapien
ttaattctaaggttaggaagtatgctcccccca

SEQ ID NO: 738977 - DNA, 33 bp, Homo sapien
tactctttatctacaacttggtctctcaacaaa

SEQ ID NO: 738978 - DNA, 33 bp, Homo sapien
tactctttatctacaatttggtctctcaacaaa

SEQ ID NO: 738979 - DNA, 33 bp, Homo sapien
ctgcactgctgagtaacggggtcctctttgtct

SEQ ID NO: 738980 - DNA, 33 bp, Homo sapien
ctgcactgctgagtaatggggtcctctttgtct

SEQ ID NO: 738981 - DNA, 33 bp, Homo sapien
atccaccctcctggaccgccatagtttgggcca

SEQ ID NO: 738982 - DNA, 33 bp, Homo sapien
atccaccctcctggactgccatagtttgggcca

SEQ ID NO: 738983 - DNA, 33 bp, Homo sapien
tttgttgataaaattacactgtggtattctcca

SEQ ID NO: 738984 - DNA, 33 bp, Homo sapien
tttgttgataaaattatactgtggtattctcca

SEQ ID NO: 738985 - DNA, 33 bp, Homo sapien
tccagttttttctaacaccagatgctgttctcc

SEQ ID NO: 738986 - DNA, 33 bp, Homo sapien
tccagttttttctaacgccagatgctgttctcc

SEQ ID NO: 738987 - DNA, 33 bp, Homo sapien
ttcatcttctgccaacacttgaaaaaagggctg

SEQ ID NO: 738988 - DNA, 33 bp, Homo sapien
ttcatcttctgccaacgcttgaaaaaagggctg

SEQ ID NO: 738989 - DNA, 33 bp, Homo sapien
catttaccacagaatgaactcatggcccggaaa

SEQ ID NO: 738990 - DNA, 33 bp, Homo sapien
catttaccacagaatggactcatggcccggaaa

SEQ ID NO: 738991 - DNA, 33 bp, Homo sapien
gaccaacactgttcaacggaaacataattcgag

SEQ ID NO: 738992 - DNA, 33 bp, Homo sapien
gaccaacactgttcaatggaaacataattcgag

SEQ ID NO: 738993 - DNA, 33 bp, Homo sapien
acggctttgagcaaaacgctgaacatgaagaag

SEQ ID NO: 738994 - DNA, 33 bp, Homo sapien
acggctttgagcaaaatgctgaacatgaagaag

SEQ ID NO: 738995 - DNA, 33 bp, Homo sapien
cttcggggccttctacactgaggtttaacatat

SEQ ID NO: 738996 - DNA, 33 bp, Homo sapien
cttcggggccttctacgctgaggtttaacatat

SEQ ID NO: 738997 - DNA, 33 bp, Homo sapien; identical to SEQ ID NO: 738995

SEQ ID NO: 738998 - DNA, 33 bp, Homo sapien; identical to SEQ ID NO: 738996

SEQ ID NO: 738999 - DNA, 33 bp, Homo sapien
tgaagtcacaataacacgtatatgaaactgagg

SEQ ID NO: 739000 - DNA, 33 bp, Homo sapien
tgaagtcacaataacaggtatatgaaactgagg

SEQ ID NO: 739001 - DNA, 33 bp, Homo sapien
tggtctctgctgcagaagcaaccagaaatcaca

SEQ ID NO: 739002 - DNA, 33 bp, Homo sapien
tggtctctgctgcagacgcaaccagaaatcaca

SEQ ID NO: 739003 - DNA, 33 bp, Homo sapien
aacaacgtgtccactaatacatcagggcatatg

SEQ ID NO: 739004 - DNA, 33 bp, Homo sapien
aacaacgtgtccactagtacatcagggcatatg

SEQ ID NO: 739005 - DNA, 33 bp, Homo sapien
ctaagtgcaagcttcacatttagtcctattaaa

SEQ ID NO: 739006 - DNA, 33 bp, Homo sapien
ctaagtgcaagcttcatatttagtcctattaaa

SEQ ID NO: 739007 - DNA, 33 bp, Homo sapien
ggacaagtttaaagcccgctgactgtgtctgga

SEQ ID NO: 739008 - DNA, 33 bp, Homo sapien
ggacaagtttaaagcctgctgactgtgtctgga

SEQ ID NO: 739009 - DNA, 33 bp, Homo sapien
gcagctgccacgtccaaagtgaactccagctcc

SEQ ID NO: 739010 - DNA, 33 bp, Homo sapien
gcagctgccacgtccacagtgaactccagctcc

SEQ ID NO: 739011 - DNA, 33 bp, Homo sapien
acacagtacgaacctgccacaggctgtggcaag

SEQ ID NO: 739012 - DNA, 33 bp, Homo sapien
acacagtacgaacctgtcacaggctgtggcaag

SEQ ID NO: 739013 - DNA, 33 bp, Homo sapien
ctattatgatagcaacacctaatatctaatgtc

SEQ ID NO: 739014 - DNA, 33 bp, Homo sapien
ctattatgatagcaacgcctaatatctaatgtc

SEQ ID NO: 739015 - DNA, 33 bp, Homo sapien
taaactgtagaactcaactcttcgtgaatcagg

SEQ ID NO: 739016 - DNA, 33 bp, Homo sapien
taaactgtagaactcacctcttcgtgaatcagg

SEQ ID NO: 739017 - DNA, 33 bp, Homo sapien
agaagaatgtttctaacttaaaatctagcataa

SEQ ID NO: 739018 - DNA, 33 bp, Homo sapien
agaagaatgtttctaatttaaaatctagcataa

SEQ ID NO: 739019 - DNA, 33 bp, Homo sapien
ggatacagtgaagggccaacagtgttcctggtc

SEQ ID NO: 739020 - DNA, 33 bp, Homo sapien
ggatacagtgaagggcgaacagtgttcctggtc

SEQ ID NO: 739021 - DNA, 33 bp, Homo sapien
ggctgcagcattgtgaaactaacaaaacctttg

SEQ ID NO: 739022 - DNA, 33 bp, Homo sapien
ggctgcagcattgtgagactaacaaaacctttg

SEQ ID NO: 739023 - DNA, 33 bp, Homo sapien
ccctaatgtgagtgtcccatcttacctcatgtt

SEQ ID NO: 739024 - DNA, 33 bp, Homo sapien
ccctaatgtgagtgtctcatcttacctcatgtt

SEQ ID NO: 739025 - DNA, 33 bp, Homo sapien
tttttatctaatcacagtaacagtacaattcgt

SEQ ID NO: 739026 - DNA, 33 bp, Homo sapien
tttttatctaatcacattaacagtacaattcgt

SEQ ID NO: 739027 - DNA, 33 bp, Homo sapien
gcatctgtcttccaaaatcttctctccaaatat

SEQ ID NO: 739028 - DNA, 33 bp, Homo sapien
gcatctgtcttccaaattcttctctccaaatat

SEQ ID NO: 739029 - DNA, 33 bp, Homo sapien
tcttttgaaaacctggaaattgcaaatgttaca

SEQ ID NO: 739030 - DNA, 33 bp, Homo sapien
tcttttgaaaacctgggaattgcaaatgttaca

SEQ ID NO: 739031 - DNA, 33 bp, Homo sapien
caaattaatagatgacaactacctcatgcttta

SEQ ID NO: 739032 - DNA, 33 bp, Homo sapien
caaattaatagatgacgactacctcatgcttta

SEQ ID NO: 739033 - DNA, 33 bp, Homo sapien
gattaataaaaaaaatcatggctggtcattgtg

SEQ ID NO: 739034 - DNA, 33 bp, Homo sapien
gattaataaaaaaaattatggctggtcattgtg

SEQ ID NO: 739035 - DNA, 33 bp, Homo sapien
ttgtcatatcaatctagcaaggaaaatatttct

SEQ ID NO: 739036 - DNA, 33 bp, Homo sapien
ttgtcatatcaatctatcaaggaaaatatttct

SEQ ID NO: 739037 - DNA, 33 bp, Homo sapien
cagtgtcaaaatcagaaaaggtcatttgagaaa

SEQ ID NO: 739038 - DNA, 33 bp, Homo sapien
cagtgtcaaaatcagacaaggtcatttgagaaa

SEQ ID NO: 739039 - DNA, 33 bp, Homo sapien
agtgagaaggtaaataatatcataaaacacaaa

SEQ ID NO: 739040 - DNA, 33 bp, Homo sapien
agtgagaaggtaaatagtatcataaaacacaaa

SEQ ID NO: 739041 - DNA, 33 bp, Homo sapien
agcttgatgttctcaacgttttatactattagg

SEQ ID NO: 739042 - DNA, 33 bp, Homo sapien
agcttgatgttctcaatgttttatactattagg

SEQ ID NO: 739043 - DNA, 33 bp, Homo sapien
tgttgcttttgtaaacccattctcatccctctt

SEQ ID NO: 739044 - DNA, 33 bp, Homo sapien
tgttgcttttgtaaactcattctcatccctctt

SEQ ID NO: 739045 - DNA, 33 bp, Homo sapien
tttaaaaaaagagtcaccattgacaacattaac

SEQ ID NO: 739046 - DNA, 33 bp, Homo sapien
tttaaaaaaagagtcatcattgacaacattaac

SEQ ID NO: 739047 - DNA, 33 bp, Homo sapien
agataagcgtttatcactgactgcagctgtgag

SEQ ID NO: 739048 - DNA, 33 bp, Homo sapien
agataagcgtttatcattgactgcagctgtgag

SEQ ID NO: 739049 - DNA, 33 bp, Homo sapien
tttacagatttgtaaaatgtggcaattgtgaca

SEQ ID NO: 739050 - DNA, 33 bp, Homo sapien
tttacagatttgtaaagtgtggcaattgtgaca

SEQ ID NO: 739051 - DNA, 33 bp, Homo sapien
agcagggtagggcaaccgcctaaaaaatgactt

SEQ ID NO: 739052 - DNA, 33 bp, Homo sapien
agcagggtagggcaactgcctaaaaaatgactt

SEQ ID NO: 739053 - DNA, 33 bp, Homo sapien
ctttgtgcatccgagtcactcataccccagagt

SEQ ID NO: 739054 - DNA, 33 bp, Homo sapien
ctttgtgcatccgagtgactcataccccagagt

SEQ ID NO: 739055 - DNA, 33 bp, Homo sapien
ataacagggatagagacatttgaattctattac

SEQ ID NO: 739056 - DNA, 33 bp, Homo sapien
ataacagggatagagatatttgaattctattac

SEQ ID NO: 739057 - DNA, 33 bp, Homo sapien
tgaagatagctggccactaagaaacaactaaag

SEQ ID NO: 739058 - DNA, 33 bp, Homo sapien
tgaagatagctggccattaagaaacaactaaag

SEQ ID NO: 739059 - DNA, 33 bp, Homo sapien
taaagtgcttgaaagtaaaagatgtgaacttca

SEQ ID NO: 739060 - DNA, 33 bp, Homo sapien
taaagtgcttgaaagtcaaagatgtgaacttca

SEQ ID NO: 739061 - DNA, 33 bp, Homo sapien
aatataggctaatcgacgggtggtaaggatgct

SEQ ID NO: 739062 - DNA, 33 bp, Homo sapien
aatataggctaatcgatgggtggtaaggatgct

SEQ ID NO: 739063 - DNA, 33 bp, Homo sapien
tacaaattataaaaaaagaggttgacaacatgg

SEQ ID NO: 739064 - DNA, 33 bp, Homo sapien
tacaaattataaaaaaggaggttgacaacatgg

SEQ ID NO: 739065 - DNA, 33 bp, Homo sapien
ctttattacccctacgccatatttacttattct

SEQ ID NO: 739066 - DNA, 33 bp, Homo sapien
ctttattacccctacgtcatatttacttattct

SEQ ID NO: 739067 - DNA, 33 bp, Homo sapien
tttcacacattaacaccgcatatgtaaaagaat

SEQ ID NO: 739068 - DNA, 33 bp, Homo sapien
tttcacacattaacacggcatatgtaaaagaat

SEQ ID NO: 739069 - DNA, 33 bp, Homo sapien
tgtatacagatgtatcaataaaggggaaaggag

SEQ ID NO: 739070 - DNA, 33 bp, Homo sapien
tgtatacagatgtatcgataaaggggaaaggag

SEQ ID NO: 739071 - DNA, 33 bp, Homo sapien
tgatgttagctagctggacaatgcgtagacaag

SEQ ID NO: 739072 - DNA, 33 bp, Homo sapien
tgatgttagctagctgtacaatgcgtagacaag

SEQ ID NO: 739073 - DNA, 33 bp, Homo sapien
ttttggcactgaattacactgaaggccttcaaa

SEQ ID NO: 739074 - DNA, 33 bp, Homo sapien
ttttggcactgaattatactgaaggccttcaaa

SEQ ID NO: 739075 - DNA, 33 bp, Homo sapien
ttttaaattaccactaagtgatgttcttatttt

SEQ ID NO: 739076 - DNA, 33 bp, Homo sapien
ttttaaattaccactatgtgatgttcttatttt

SEQ ID NO: 739077 - DNA, 33 bp, Homo sapien
actgaacaactccataaatttcattactgtctt

SEQ ID NO: 739078 - DNA, 33 bp, Homo sapien
actgaacaactccatatatttcattactgtctt

SEQ ID NO: 739079 - DNA, 33 bp, Homo sapien
ggcctgtattgtataacgggcaatacgctgaac

SEQ ID NO: 739080 - DNA, 33 bp, Homo sapien
ggcctgtattgtataatgggcaatacgctgaac

SEQ ID NO: 739081 - DNA, 33 bp, Homo sapien
attaaaattgtcattcacaggtggtgtttttta

SEQ ID NO: 739082 - DNA, 33 bp, Homo sapien
attaaaattgtcattcgcaggtggtgtttttta

SEQ ID NO: 739083 - DNA, 33 bp, Homo sapien
tctgagaaatatatacaaggcacaacgtgacag

SEQ ID NO: 739084 - DNA, 33 bp, Homo sapien
tctgagaaatatatacgaggcacaacgtgacag

SEQ ID NO: 739085 - DNA, 33 bp, Homo sapien
gatcctatttagctggaaaatagttataaatat

SEQ ID NO: 739086 - DNA, 33 bp, Homo sapien
gatcctatttagctggcaaatagttataaatat

SEQ ID NO: 739087 - DNA, 33 bp, Homo sapien
gcatttaacaagagctaaacagttctcacacat

SEQ ID NO: 739088 - DNA, 33 bp, Homo sapien
gcatttaacaagagctgaacagttctcacacat

SEQ ID NO: 739089 - DNA, 33 bp, Homo sapien
cttaacgctgaaaccaaactttacttgctacag

SEQ ID NO: 739090 - DNA, 33 bp, Homo sapien
cttaacgctgaaaccagactttacttgctacag

SEQ ID NO: 739091 - DNA, 33 bp, Homo sapien
taatattaaaaactcaatgacatatgtatgctt

SEQ ID NO: 739092 - DNA, 33 bp, Homo sapien
taatattaaaaactcagtgacatatgtatgctt

SEQ ID NO: 739093 - DNA, 33 bp, Homo sapien
gattcttaggcactgacaattgtttgggtttga

SEQ ID NO: 739094 - DNA, 33 bp, Homo sapien
gattcttaggcactgataattgtttgggtttga

SEQ ID NO: 739095 - DNA, 33 bp, Homo sapien
tttttaaatctgtgtacgatgctggccttggaa

SEQ ID NO: 739096 - DNA, 33 bp, Homo sapien
tttttaaatctgtgtatgatgctggccttggaa

SEQ ID NO: 739097 - DNA, 33 bp, Homo sapien
ttgtagaaagaacgcacaaagagttataaagaa

SEQ ID NO: 739098 - DNA, 33 bp, Homo sapien
ttgtagaaagaacgcataaagagttataaagaa

SEQ ID NO: 739099 - DNA, 33 bp, Homo sapien
attcagcatggtcagacagatttgtagaaagaa

SEQ ID NO: 739100 - DNA, 33 bp, Homo sapien
attcagcatggtcagatagatttgtagaaagaa

SEQ ID NO: 739101 - DNA, 33 bp, Homo sapien
agaatgaggaaggagaacatggcctcccatctt

SEQ ID NO: 739102 - DNA, 33 bp, Homo sapien
agaatgaggaaggagatcatggcctcccatctt

SEQ ID NO: 739103 - DNA, 33 bp, Homo sapien
acctcccaaaagcagagaaatggattgaggctg

SEQ ID NO: 739104 - DNA, 33 bp, Homo sapien
acctcccaaaagcagataaatggattgaggctg

SEQ ID NO: 739105 - DNA, 33 bp, Homo sapien
gtggtgtttgctcttcaaagaatctcctgcagg

SEQ ID NO: 739106 - DNA, 33 bp, Homo sapien
gtggtgtttgctcttcgaagaatctcctgcagg

SEQ ID NO: 739107 - DNA, 33 bp, Homo sapien
tgtgtttttgaaacaacgtgggatataaataaa

SEQ ID NO: 739108 - DNA, 33 bp, Homo sapien
tgtgtttttgaaacaatgtgggatataaataaa

SEQ ID NO: 739109 - DNA, 33 bp, Homo sapien
aaacagtcattaggagcacaggctctgaagcta

SEQ ID NO: 739110 - DNA, 33 bp, Homo sapien
aaacagtcattaggagtacaggctctgaagcta

SEQ ID NO: 739111 - DNA, 33 bp, Homo sapien
cctaatattggaaagaaattttgcgtcttaaac

SEQ ID NO: 739112 - DNA, 33 bp, Homo sapien
cctaatattggaaagatattttgcgtcttaaac

SEQ ID NO: 739113 - DNA, 33 bp, Homo sapien
aggtgggccgattctccagccaacgtgaaatgt

SEQ ID NO: 739114 - DNA, 33 bp, Homo sapien
aggtgggccgattctctagccaacgtgaaatgt

SEQ ID NO: 739115 - DNA, 33 bp, Homo sapien
gcaacagacacgcatacgggctgacctttgttg

SEQ ID NO: 739116 - DNA, 33 bp, Homo sapien
gcaacagacacgcatatgggctgacctttgttg

SEQ ID NO: 739117 - DNA, 33 bp, Homo sapien
caaactcacaggctacgcaaggtgcaacagaca

SEQ ID NO: 739118 - DNA, 33 bp, Homo sapien
caaactcacaggctactcaaggtgcaacagaca

SEQ ID NO: 739119 - DNA, 33 bp, Homo sapien
aatttcaagcgtcccagtctttgaattctatct

SEQ ID NO: 739120 - DNA, 33 bp, Homo sapien
aatttcaagcgtcccattctttgaattctatct

SEQ ID NO: 739121 - DNA, 33 bp, Homo sapien
ttgcaatgatgaaccacagactctaagatacat

SEQ ID NO: 739122 - DNA, 33 bp, Homo sapien
ttgcaatgatgaaccatagactctaagatacat

SEQ ID NO: 739123 - DNA, 33 bp, Homo sapien
agagtgtaaggggatacctcgcaaaactaatag

SEQ ID NO: 739124 - DNA, 33 bp, Homo sapien
agagtgtaaggggatatctcgcaaaactaatag

SEQ ID NO: 739125 - DNA, 33 bp, Homo sapien
atgcaagtatgatacaatctttgccttctaatt

SEQ ID NO: 739126 - DNA, 33 bp, Homo sapien
atgcaagtatgatacagtctttgccttctaatt

SEQ ID NO: 739127 - DNA, 33 bp, Homo sapien
cattagaaatcaagtcaatatgtagaaagaaca

SEQ ID NO: 739128 - DNA, 33 bp, Homo sapien
cattagaaatcaagtcgatatgtagaaagaaca

SEQ ID NO: 739129 - DNA, 33 bp, Homo sapien
gttgtaaccttcatgaccaacagatgtcaagaa

SEQ ID NO: 739130 - DNA, 33 bp, Homo sapien
gttgtaaccttcatgatcaacagatgtcaagaa

SEQ ID NO: 739131 - DNA, 33 bp, Homo sapien
ccatcagatgtcacccaattctgttctcttttt

SEQ ID NO: 739132 - DNA, 33 bp, Homo sapien
ccatcagatgtcacccgattctgttctcttttt

SEQ ID NO: 739133 - DNA, 33 bp, Homo sapien
taagcatctagttccccgagattttgctcaaca

SEQ ID NO: 739134 - DNA, 33 bp, Homo sapien
taagcatctagttccctgagattttgctcaaca

SEQ ID NO: 739135 - DNA, 33 bp, Homo sapien
gatacttagataaccacgatcagggaaagctcc

SEQ ID NO: 739136 - DNA, 33 bp, Homo sapien
gatacttagataaccatgatcagggaaagctcc

SEQ ID NO: 739137 - DNA, 33 bp, Homo sapien
ctgttttttaaagtaccgcaaggctagaataag

SEQ ID NO: 739138 - DNA, 33 bp, Homo sapien
ctgttttttaaagtactgcaaggctagaataag

SEQ ID NO: 739139 - DNA, 33 bp, Homo sapien
ttcaaagatgagaaaactgaggtctagcaaaac

SEQ ID NO: 739140 - DNA, 33 bp, Homo sapien
ttcaaagatgagaaaattgaggtctagcaaaac

SEQ ID NO: 739141 - DNA, 33 bp, Homo sapien
taagatcattcacataagaacattggtaccacc

SEQ ID NO: 739142 - DNA, 33 bp, Homo sapien
taagatcattcacataggaacattggtaccacc

SEQ ID NO: 739143 - DNA, 33 bp, Homo sapien
caatgccttctatcccaatgtcgtattttagat

SEQ ID NO: 739144 - DNA, 33 bp, Homo sapien
caatgccttctatcccgatgtcgtattttagat

SEQ ID NO: 739145 - DNA, 33 bp, Homo sapien
taaaataagagaaaagccataaaggcagatcat

SEQ ID NO: 739146 - DNA, 33 bp, Homo sapien
taaaataagagaaaagtcataaaggcagatcat

SEQ ID NO: 739147 - DNA, 33 bp, Homo sapien
tttcaaaacaaccaaaccttgtgtgaactcaga

SEQ ID NO: 739148 - DNA, 33 bp, Homo sapien
tttcaaaacaaccaaagcttgtgtgaactcaga

SEQ ID NO: 739149 - DNA, 33 bp, Homo sapien
gccttgatcagattacaaccattaaagctacca

SEQ ID NO: 739150 - DNA, 33 bp, Homo sapien
gccttgatcagattaccaccattaaagctacca

SEQ ID NO: 739151 - DNA, 33 bp, Homo sapien
catcaatacactaaaagacttatcctggtcatt

SEQ ID NO: 739152 - DNA, 33 bp, Homo sapien
catcaatacactaaaatacttatcctggtcatt

SEQ ID NO: 739153 - DNA, 33 bp, Homo sapien
aaaaatgtcaagaagaatcagggcaaacacttt

SEQ ID NO: 739154 - DNA, 33 bp, Homo sapien
aaaaatgtcaagaagagtcagggcaaacacttt

SEQ ID NO: 739155 - DNA, 33 bp, Homo sapien
atgacagaaacagtaaatctaagaaaaacattc

SEQ ID NO: 739156 - DNA, 33 bp, Homo sapien
atgacagaaacagtaactctaagaaaaacattc

SEQ ID NO: 739157 - DNA, 33 bp, Homo sapien
aacaaaaaactcatgtcaattattgcctgaaaa

SEQ ID NO: 739158 - DNA, 33 bp, Homo sapien
aacaaaaaactcatgttaattattgcctgaaaa

SEQ ID NO: 739159 - DNA, 33 bp, Homo sapien
aagagatgctggagaacaaaaaaacaaaaaact

SEQ ID NO: 739160 - DNA, 33 bp, Homo sapien
aagagatgctggagaataaaaaaacaaaaaact

SEQ ID NO: 739161 - DNA, 33 bp, Homo sapien
gacagatagtgcagggaaatagtgtaaacaagg

SEQ ID NO: 739162 - DNA, 33 bp, Homo sapien
gacagatagtgcagggcaatagtgtaaacaagg

SEQ ID NO: 739163 - DNA, 33 bp, Homo sapien
cctgcactatctgtcacggagtaacaaggagaa

SEQ ID NO: 739164 - DNA, 33 bp, Homo sapien
cctgcactatctgtcatggagtaacaaggagaa

SEQ ID NO: 739165 - DNA, 33 bp, Homo sapien
tctcatggaattgttacctaaattaaatgacgg

SEQ ID NO: 739166 - DNA, 33 bp, Homo sapien
tctcatggaattgttatctaaattaaatgacgg

SEQ ID NO: 739167 - DNA, 33 bp, Homo sapien
accaccctttggcccaactaattgctctttttc

SEQ ID NO: 739168 - DNA, 33 bp, Homo sapien
accaccctttggcccagctaattgctctttttc

SEQ ID NO: 739169 - DNA, 33 bp, Homo sapien
gactggtccccttcaggatctgctgtgggatgg

SEQ ID NO: 739170 - DNA, 33 bp, Homo sapien
gactggtccccttcagtatctgctgtgggatgg

SEQ ID NO: 739171 - DNA, 33 bp, Homo sapien
tttctctgctgacaaaagacaaacctcttattt

SEQ ID NO: 739172 - DNA, 33 bp, Homo sapien
tttctctgctgacaaaggacaaacctcttattt

SEQ ID NO: 739173 - DNA, 33 bp, Homo sapien
gataagagtgagcagaactttgtcttaaaactg

SEQ ID NO: 739174 - DNA, 33 bp, Homo sapien
gataagagtgagcagatctttgtcttaaaactg

SEQ ID NO: 739175 - DNA, 33 bp, Homo sapien
ggaaccatcaaggtgacatgaatggcgaatggt

SEQ ID NO: 739176 - DNA, 33 bp, Homo sapien
ggaaccatcaaggtgatatgaatggcgaatggt

SEQ ID NO: 739177 - DNA, 33 bp, Homo sapien
gtaagtcaggatgaggcatacaacttattgaag

SEQ ID NO: 739178 - DNA, 33 bp, Homo sapien
gtaagtcaggatgaggtatacaacttattgaag

SEQ ID NO: 739179 - DNA, 33 bp, Homo sapien
cttattcccttttccccgcatagctgcccccac

SEQ ID NO: 739180 - DNA, 33 bp, Homo sapien
cttattcccttttccctgcatagctgcccccac

SEQ ID NO: 739181 - DNA, 33 bp, Homo sapien
gtcacaaattcaaatacgagggctgagtatgta

SEQ ID NO: 739182 - DNA, 33 bp, Homo sapien
gtcacaaattcaaatatgagggctgagtatgta

SEQ ID NO: 739183 - DNA, 33 bp, Homo sapien
tttgatggaggatcagcataacacagcaaagtc

SEQ ID NO: 739184 - DNA, 33 bp, Homo sapien
tttgatggaggatcagtataacacagcaaagtc

SEQ ID NO: 739185 - DNA, 33 bp, Homo sapien
acagctaagaggagaactgtcatagctttagat

SEQ ID NO: 739186 - DNA, 33 bp, Homo sapien
acagctaagaggagaattgtcatagctttagat

SEQ ID NO: 739187 - DNA, 33 bp, Homo sapien
gggctacttacagtttaaaaaatagtcggcctc

SEQ ID NO: 739188 - DNA, 33 bp, Homo sapien
gggctacttacagtttgaaaaatagtcggcctc

SEQ ID NO: 739189 - DNA, 33 bp, Homo sapien
atgtccaatatgtcagccacagaaataaacact

SEQ ID NO: 739190 - DNA, 33 bp, Homo sapien
atgtccaatatgtcaggcacagaaataaacact

SEQ ID NO: 739191 - DNA, 33 bp, Homo sapien
taactttcagtgatccgcttgaatagtttgtac

SEQ ID NO: 739192 - DNA, 33 bp, Homo sapien
taactttcagtgatcctcttgaatagtttgtac

SEQ ID NO: 739193 - DNA, 33 bp, Homo sapien
gactaggtggtatccacagctgaaagtttaaag

SEQ ID NO: 739194 - DNA, 33 bp, Homo sapien
gactaggtggtatccatagctgaaagtttaaag

SEQ ID NO: 739195 - DNA, 33 bp, Homo sapien
aagcagtatgtggattaaaacttaactactagg

SEQ ID NO: 739196 - DNA, 33 bp, Homo sapien
aagcagtatgtggatttaaacttaactactagg

SEQ ID NO: 739197 - DNA, 33 bp, Homo sapien
ttttatccggctccaccgcttaccagcatagtg

SEQ ID NO: 739198 - DNA, 33 bp, Homo sapien
ttttatccggctccactgcttaccagcatagtg

SEQ ID NO: 739199 - DNA, 33 bp, Homo sapien
ttctggtgatacatccagatccaaagactctcc

SEQ ID NO: 739200 - DNA, 33 bp, Homo sapien
ttctggtgatacatccggatccaaagactctcc

SEQ ID NO: 739201 - DNA, 33 bp, Homo sapien
ctggaatttatagttcccagtgcaataccaagc

SEQ ID NO: 739202 - DNA, 33 bp, Homo sapien
ctggaatttatagttctcagtgcaataccaagc

SEQ ID NO: 739203 - DNA, 33 bp, Homo sapien
aacagatatgagtagactactgacagtgtcctc

SEQ ID NO: 739204 - DNA, 33 bp, Homo sapien
aacagatatgagtagagtactgacagtgtcctc

SEQ ID NO: 739205 - DNA, 33 bp, Homo sapien
acatcagattgactccacatgggctgggcaggc

SEQ ID NO: 739206 - DNA, 33 bp, Homo sapien
acatcagattgactcctcatgggctgggcaggc

SEQ ID NO: 739207 - DNA, 33 bp, Homo sapien
tgcaagtcggaaaatacatcaaccctgtgacct

SEQ ID NO: 739208 - DNA, 33 bp, Homo sapien
tgcaagtcggaaaatagatcaaccctgtgacct

SEQ ID NO: 739209 - DNA, 33 bp, Homo sapien
atgttcaaattacagaaaagtctgctcagtaaa

SEQ ID NO: 739210 - DNA, 33 bp, Homo sapien
atgttcaaattacagagaagtctgctcagtaaa

SEQ ID NO: 739211 - DNA, 33 bp, Homo sapien
cctcctggcatgactacatgatgtgaagccact

SEQ ID NO: 739212 - DNA, 33 bp, Homo sapien
cctcctggcatgactatatgatgtgaagccact

SEQ ID NO: 739213 - DNA, 33 bp, Homo sapien
cataggttaacagctaccccaagtacgtggacc

SEQ ID NO: 739214 - DNA, 33 bp, Homo sapien
cataggttaacagctatcccaagtacgtggacc

SEQ ID NO: 739215 - DNA, 33 bp, Homo sapien
cttaatcttagatctaaccctgtcgaaaacata

SEQ ID NO: 739216 - DNA, 33 bp, Homo sapien
cttaatcttagatctacccctgtcgaaaacata

SEQ ID NO: 739217 - DNA, 33 bp, Homo sapien
ttgcaaatatctctaccgatagccactatgctt

SEQ ID NO: 739218 - DNA, 33 bp, Homo sapien
ttgcaaatatctctactgatagccactatgctt

SEQ ID NO: 739219 - DNA, 33 bp, Homo sapien
agtaaggtttcagttacagttataaaatcatgt

SEQ ID NO: 739220 - DNA, 33 bp, Homo sapien
agtaaggtttcagttagagttataaaatcatgt

SEQ ID NO: 739221 - DNA, 33 bp, Homo sapien
ctctagccattgtagaagtttgggatgggtcag

SEQ ID NO: 739222 - DNA, 33 bp, Homo sapien
ctctagccattgtagaggtttgggatgggtcag

SEQ ID NO: 739223 - DNA, 33 bp, Homo sapien
tgacctccttactaagcctaccaaccaggttac

SEQ ID NO: 739224 - DNA, 33 bp, Homo sapien
tgacctccttactaagtctaccaaccaggttac

SEQ ID NO: 739225 - DNA, 33 bp, Homo sapien
caaattctttggaaaaactgacaggctcaacta

SEQ ID NO: 739226 - DNA, 33 bp, Homo sapien
caaattctttggaaaatctgacaggctcaacta

SEQ ID NO: 739227 - DNA, 33 bp, Homo sapien
tgaataagaaatgattaaaaactggaacttata

SEQ ID NO: 739228 - DNA, 33 bp, Homo sapien
tgaataagaaatgattgaaaactggaacttata

SEQ ID NO: 739229 - DNA, 33 bp, Homo sapien
ctaaagcaatcatttcaacctgcacactgctgt

SEQ ID NO: 739230 - DNA, 33 bp, Homo sapien
ctaaagcaatcatttctacctgcacactgctgt

SEQ ID NO: 739231 - DNA, 33 bp, Homo sapien
tgaacatcgaccttccaaatttgattctgattc

SEQ ID NO: 739232 - DNA, 33 bp, Homo sapien
tgaacatcgaccttcccaatttgattctgattc

SEQ ID NO: 739233 - DNA, 33 bp, Homo sapien
aatactatcatgtgtgaaaggaacaaataatga

SEQ ID NO: 739234 - DNA, 33 bp, Homo sapien
aatactatcatgtgtgcaaggaacaaataatga

SEQ ID NO: 739235 - DNA, 33 bp, Homo sapien
aaaagaatatcataaacctgtatagatatcctc

SEQ ID NO: 739236 - DNA, 33 bp, Homo sapien
aaaagaatatcataaatctgtatagatatcctc

SEQ ID NO: 739237 - DNA, 33 bp, Homo sapien
tacatcttaaaatcacacttagaaatctggctg

SEQ ID NO: 739238 - DNA, 33 bp, Homo sapien
tacatcttaaaatcacgcttagaaatctggctg

SEQ ID NO: 739239 - DNA, 33 bp, Homo sapien
aaatcaaattctgctgcaataacaataatacat

SEQ ID NO: 739240 - DNA, 33 bp, Homo sapien
aaatcaaattctgctggaataacaataatacat

SEQ ID NO: 739241 - DNA, 33 bp, Homo sapien
actactgggttatgaaagaaaactcctgcagct

SEQ ID NO: 739242 - DNA, 33 bp, Homo sapien
actactgggttatgaaggaaaactcctgcagct

SEQ ID NO: 739243 - DNA, 33 bp, Homo sapien
cgtctccaagttgtaacccagctttcctggtgg

SEQ ID NO: 739244 - DNA, 33 bp, Homo sapien
cgtctccaagttgtaatccagctttcctggtgg

SEQ ID NO: 739245 - DNA, 33 bp, Homo sapien
ctcaccatggcaagcactccagcttccctaagg

SEQ ID NO: 739246 - DNA, 33 bp, Homo sapien
ctcaccatggcaagcagtccagcttccctaagg

SEQ ID NO: 739247 - DNA, 33 bp, Homo sapien
ctgggagagggacacaatgtaaatctaggcatt

SEQ ID NO: 739248 - DNA, 33 bp, Homo sapien
ctgggagagggacacagtgtaaatctaggcatt

SEQ ID NO: 739249 - DNA, 33 bp, Homo sapien
gaccacagtagcaaaaattttaaatctgataat

SEQ ID NO: 739250 - DNA, 33 bp, Homo sapien
gaccacagtagcaaaacttttaaatctgataat

SEQ ID NO: 739251 - DNA, 33 bp, Homo sapien
cagatttcagttgtaccatacaaggtgtttttg

SEQ ID NO: 739252 - DNA, 33 bp, Homo sapien
cagatttcagttgtactatacaaggtgtttttg

SEQ ID NO: 739253 - DNA, 33 bp, Homo sapien
aaatacaaatttatcaagggacatattcatgaa

SEQ ID NO: 739254 - DNA, 33 bp, Homo sapien
aaatacaaatttatcatgggacatattcatgaa

SEQ ID NO: 739255 - DNA, 33 bp, Homo sapien
ctgaagattacagaaagaagaagtgaaatacat

SEQ ID NO: 739256 - DNA, 33 bp, Homo sapien
ctgaagattacagaaataagaagtgaaatacat

SEQ ID NO: 739257 - DNA, 33 bp, Homo sapien
ggagtttaaaagcagacaatctagtgctgaaga

SEQ ID NO: 739258 - DNA, 33 bp, Homo sapien
ggagtttaaaagcagagaatctagtgctgaaga

SEQ ID NO: 739259 - DNA, 33 bp, Homo sapien
atatttgagtgtaaaacccccaattgcatcaaa

SEQ ID NO: 739260 - DNA, 33 bp, Homo sapien
atatttgagtgtaaaatccccaattgcatcaaa

SEQ ID NO: 739261 - DNA, 33 bp, Homo sapien
ttgaatagaaggataaaactaaactgcagaaaa

SEQ ID NO: 739262 - DNA, 33 bp, Homo sapien
ttgaatagaaggataagactaaactgcagaaaa

SEQ ID NO: 739263 - DNA, 33 bp, Homo sapien
gtaacttcagccaaacagagggggacttgcaac

SEQ ID NO: 739264 - DNA, 33 bp, Homo sapien
gtaacttcagccaaacggagggggacttgcaac

SEQ ID NO: 739265 - DNA, 33 bp, Homo sapien
atatatatttaaatcgaaagagactgaaacata

SEQ ID NO: 739266 - DNA, 33 bp, Homo sapien
atatatatttaaatcggaagagactgaaacata

SEQ ID NO: 739267 - DNA, 33 bp, Homo sapien
gttaatgtatatgagaccacagaaaacggtatt

SEQ ID NO: 739268 - DNA, 33 bp, Homo sapien
gttaatgtatatgagatcacagaaaacggtatt

SEQ ID NO: 739269 - DNA, 33 bp, Homo sapien
gaagagtcataagatgaatcccttaggaggcag

SEQ ID NO: 739270 - DNA, 33 bp, Homo sapien
gaagagtcataagatggatcccttaggaggcag

SEQ ID NO: 739271 - DNA, 33 bp, Homo sapien
aagaaattattctcccaagtgctagaagtgctg

SEQ ID NO: 739272 - DNA, 33 bp, Homo sapien
aagaaattattctcccgagtgctagaagtgctg

SEQ ID NO: 739273 - DNA, 33 bp, Homo sapien
caactcttgaagtataagatcagcatttaattt

SEQ ID NO: 739274 - DNA, 33 bp, Homo sapien
caactcttgaagtataggatcagcatttaattt

SEQ ID NO: 739275 - DNA, 33 bp, Homo sapien
tgattggagaaactgccgaatattataggttac

SEQ ID NO: 739276 - DNA, 33 bp, Homo sapien
tgattggagaaactgctgaatattataggttac

SEQ ID NO: 739277 - DNA, 33 bp, Homo sapien
cccggatgcaggacaagaactcaaaacccattg

SEQ ID NO: 739278 - DNA, 33 bp, Homo sapien
cccggatgcaggacaataactcaaaacccattg

SEQ ID NO: 739279 - DNA, 33 bp, Homo sapien
agcattttctggtatcactggctaaatcaattt

SEQ ID NO: 739280 - DNA, 33 bp, Homo sapien
agcattttctggtatcgctggctaaatcaattt

SEQ ID NO: 739281 - DNA, 33 bp, Homo sapien
gatgtgcacattgggtaaactggcccagaatga

SEQ ID NO: 739282 - DNA, 33 bp, Homo sapien
gatgtgcacattgggttaactggcccagaatga

SEQ ID NO: 739283 - DNA, 33 bp, Homo sapien
gctaagctacaaggacacagtcataagaatgat

SEQ ID NO: 739284 - DNA, 33 bp, Homo sapien
gctaagctacaaggacgcagtcataagaatgat

SEQ ID NO: 739285 - DNA, 33 bp, Homo sapien
aaataatggcattcaccgaaacatggatggagt

SEQ ID NO: 739286 - DNA, 33 bp, Homo sapien
aaataatggcattcactgaaacatggatggagt

SEQ ID NO: 739287 - DNA, 33 bp, Homo sapien
attttaggctcttcaaaatacggaattcattac

SEQ ID NO: 739288 - DNA, 33 bp, Homo sapien
attttaggctcttcaagatacggaattcattac

SEQ ID NO: 739289 - DNA, 33 bp, Homo sapien
attcattactgatatacgtaccctggtgttaat

SEQ ID NO: 739290 - DNA, 33 bp, Homo sapien
attcattactgatatatgtaccctggtgttaat

SEQ ID NO: 739291 - DNA, 33 bp, Homo sapien
gttaatggctggtggaaaactgtttgattctct

SEQ ID NO: 739292 - DNA, 33 bp, Homo sapien
gttaatggctggtggagaactgtttgattctct

SEQ ID NO: 739293 - DNA, 33 bp, Homo sapien
ttcaaaggtagaaagaataacacagggctttat

SEQ ID NO: 739294 - DNA, 33 bp, Homo sapien
ttcaaaggtagaaagagtaacacagggctttat

SEQ ID NO: 739295 - DNA, 33 bp, Homo sapien
aagctcttagacttgacatgaaagtatgattca

SEQ ID NO: 739296 - DNA, 33 bp, Homo sapien
aagctcttagacttgatatgaaagtatgattca

SEQ ID NO: 739297 - DNA, 33 bp, Homo sapien
aaaactacagagatagaaaacaaattgttgcca

SEQ ID NO: 739298 - DNA, 33 bp, Homo sapien
aaaactacagagataggaaacaaattgttgcca

SEQ ID NO: 739299 - DNA, 33 bp, Homo sapien
agggtccttcttgttacaatgttaagttcattg

SEQ ID NO: 739300 - DNA, 33 bp, Homo sapien
agggtccttcttgttataatgttaagttcattg

SEQ ID NO: 739301 - DNA, 33 bp, Homo sapien
tggaaccaatagacaccggggactacaaaaggg

SEQ ID NO: 739302 - DNA, 33 bp, Homo sapien
tggaaccaatagacactggggactacaaaaggg

SEQ ID NO: 739303 - DNA, 33 bp, Homo sapien
atcattctcccctccaaacatacactttgaatg

SEQ ID NO: 739304 - DNA, 33 bp, Homo sapien
atcattctcccctccatacatacactttgaatg

SEQ ID NO: 739305 - DNA, 33 bp, Homo sapien
tggtacattcatgtaacggcatattattcagcc

SEQ ID NO: 739306 - DNA, 33 bp, Homo sapien
tggtacattcatgtaatggcatattattcagcc

SEQ ID NO: 739307 - DNA, 33 bp, Homo sapien
tatatattataaataactgatgctcagggatga

SEQ ID NO: 739308 - DNA, 33 bp, Homo sapien
tatatattataaataattgatgctcagggatga

SEQ ID NO: 739309 - DNA, 33 bp, Homo sapien
tgtactggtccttgaactgttaggagactggct

SEQ ID NO: 739310 - DNA, 33 bp, Homo sapien
tgtactggtccttgaattgttaggagactggct

SEQ ID NO: 739311 - DNA, 33 bp, Homo sapien
tcactttgaaagagtcagaaaattatgtgtaaa

SEQ ID NO: 739312 - DNA, 33 bp, Homo sapien
tcactttgaaagagtcggaaaattatgtgtaaa

SEQ ID NO: 739313 - DNA, 33 bp, Homo sapien
cgtttgttcagacaaacttgtactctcatatca

SEQ ID NO: 739314 - DNA, 33 bp, Homo sapien
cgtttgttcagacaaagttgtactctcatatca

SEQ ID NO: 739315 - DNA, 33 bp, Homo sapien
tcaccactgccttcctgaaatatatcccacatc

SEQ ID NO: 739316 - DNA, 33 bp, Homo sapien
tcaccactgccttccttaaatatatcccacatc

SEQ ID NO: 739317 - DNA, 33 bp, Homo sapien
tttctgttttttgttcacttgctagcttgtttt

SEQ ID NO: 739318 - DNA, 33 bp, Homo sapien
tttctgttttttgttcgcttgctagcttgtttt

SEQ ID NO: 739319 - DNA, 33 bp, Homo sapien
cctccaaagttcgttacaccactctgtatgccc

SEQ ID NO: 739320 - DNA, 33 bp, Homo sapien
cctccaaagttcgttataccactctgtatgccc

SEQ ID NO: 739321 - DNA, 33 bp, Homo sapien
aagacaagcttttacccgagcaaaatagaaatc

SEQ ID NO: 739322 - DNA, 33 bp, Homo sapien
aagacaagcttttacctgagcaaaatagaaatc

SEQ ID NO: 739323 - DNA, 33 bp, Homo sapien
ttgtgacatcagcataccacttgccatgtcact

SEQ ID NO: 739324 - DNA, 33 bp, Homo sapien
ttgtgacatcagcatatcacttgccatgtcact

SEQ ID NO: 739325 - DNA, 33 bp, Homo sapien
ccaccatgagatagcaatacacacctgcaagag

SEQ ID NO: 739326 - DNA, 33 bp, Homo sapien
ccaccatgagatagcattacacacctgcaagag

SEQ ID NO: 739327 - DNA, 33 bp, Homo sapien
gctttaccccacaatggcacagaataatactct

SEQ ID NO: 739328 - DNA, 33 bp, Homo sapien
gctttaccccacaatgtcacagaataatactct

SEQ ID NO: 739329 - DNA, 33 bp, Homo sapien
aaaaagcaaatgtaaaagtatgagtagtaaaat

SEQ ID NO: 739330 - DNA, 33 bp, Homo sapien
aaaaagcaaatgtaaacgtatgagtagtaaaat

SEQ ID NO: 739331 - DNA, 33 bp, Homo sapien
gtggttcctagttaggacatattaccatctttg

SEQ ID NO: 739332 - DNA, 33 bp, Homo sapien
gtggttcctagttaggtcatattaccatctttg

SEQ ID NO: 739333 - DNA, 33 bp, Homo sapien
gctgtgaccacattccagcaatggagcatgagt

SEQ ID NO: 739334 - DNA, 33 bp, Homo sapien
gctgtgaccacattcccgcaatggagcatgagt

SEQ ID NO: 739335 - DNA, 33 bp, Homo sapien
atttaactttccacacaacacaaaccaataatc

SEQ ID NO: 739336 - DNA, 33 bp, Homo sapien
atttaactttccacacgacacaaaccaataatc

SEQ ID NO: 739337 - DNA, 33 bp, Homo sapien
tcttgttgctgagcaccgtctttacaataaagg

SEQ ID NO: 739338 - DNA, 33 bp, Homo sapien
tcttgttgctgagcactgtctttacaataaagg

SEQ ID NO: 739339 - DNA, 33 bp, Homo sapien
tgtaaatgcagataaaatcgctgaaaaggcatt

SEQ ID NO: 739340 - DNA, 33 bp, Homo sapien
tgtaaatgcagataaattcgctgaaaaggcatt

SEQ ID NO: 739341 - DNA, 33 bp, Homo sapien
atccaaatgcatgtaccgcgatgaatatgacct

SEQ ID NO: 739342 - DNA, 33 bp, Homo sapien
atccaaatgcatgtactgcgatgaatatgacct

SEQ ID NO: 739343 - DNA, 33 bp, Homo sapien
ctctggcacaatcattaaacagtcactgaacag

SEQ ID NO: 739344 - DNA, 33 bp, Homo sapien
ctctggcacaatcattgaacagtcactgaacag

SEQ ID NO: 739345 - DNA, 33 bp, Homo sapien
tttcaagatggcacccactaggaaagccaaagc

SEQ ID NO: 739346 - DNA, 33 bp, Homo sapien
tttcaagatggcacccgctaggaaagccaaagc

SEQ ID NO: 739347 - DNA, 33 bp, Homo sapien
gcatctgagaaacaagaagacacatctttgtag

SEQ ID NO: 739348 - DNA, 33 bp, Homo sapien
gcatctgagaaacaaggagacacatctttgtag

SEQ ID NO: 739349 - DNA, 33 bp, Homo sapien
aagcaaacaaacaccacggcagagaaggtagaa

SEQ ID NO: 739350 - DNA, 33 bp, Homo sapien
aagcaaacaaacaccatggcagagaaggtagaa

SEQ ID NO: 739351 - DNA, 33 bp, Homo sapien
gaaatcagcattaaagcagactaaaaataggca

SEQ ID NO: 739352 - DNA, 33 bp, Homo sapien
gaaatcagcattaaaggagactaaaaataggca

SEQ ID NO: 739353 - DNA, 33 bp, Homo sapien
gggaatttataaggacaatttcatgtatatcaa

SEQ ID NO: 739354 - DNA, 33 bp, Homo sapien
gggaatttataaggacgatttcatgtatatcaa

SEQ ID NO: 739355 - DNA, 33 bp, Homo sapien
tgcactgacatggatgaagtcatggtagcacta

SEQ ID NO: 739356 - DNA, 33 bp, Homo sapien
tgcactgacatggatgcagtcatggtagcacta

SEQ ID NO: 739357 - DNA, 33 bp, Homo sapien
atgtatgttaaagaaaccttactgcagtagaac

SEQ ID NO: 739358 - DNA, 33 bp, Homo sapien
atgtatgttaaagaaatcttactgcagtagaac

SEQ ID NO: 739359 - DNA, 33 bp, Homo sapien
cccatttcatttcccaactgaggaggacttata

SEQ ID NO: 739360 - DNA, 33 bp, Homo sapien
cccatttcatttcccagctgaggaggacttata

SEQ ID NO: 739361 - DNA, 33 bp, Homo sapien
ttagtagaaagacgacacagatatggcaatcag

SEQ ID NO: 739362 - DNA, 33 bp, Homo sapien
ttagtagaaagacgacgcagatatggcaatcag

SEQ ID NO: 739363 - DNA, 33 bp, Homo sapien
atcaaaggtaatcttacgtgaaaatgccccttt

SEQ ID NO: 739364 - DNA, 33 bp, Homo sapien
atcaaaggtaatcttatgtgaaaatgccccttt

SEQ ID NO: 739365 - DNA, 33 bp, Homo sapien
tggcttattaagggtacatatacactgtttgct

SEQ ID NO: 739366 - DNA, 33 bp, Homo sapien
tggcttattaagggtagatatacactgtttgct

SEQ ID NO: 739367 - DNA, 33 bp, Homo sapien
ctggagttcagtatcacgttcttggctcactgc

SEQ ID NO: 739368 - DNA, 33 bp, Homo sapien
ctggagttcagtatcatgttcttggctcactgc

SEQ ID NO: 739369 - DNA, 33 bp, Homo sapien
aacttttagtttagtcaatcatcttccctgagg

SEQ ID NO: 739370 - DNA, 33 bp, Homo sapien
aacttttagtttagtcgatcatcttccctgagg

SEQ ID NO: 739371 - DNA, 33 bp, Homo sapien
gacagaggtaagtcaccggactctgtaaaatcc

SEQ ID NO: 739372 - DNA, 33 bp, Homo sapien
gacagaggtaagtcactggactctgtaaaatcc

SEQ ID NO: 739373 - DNA, 33 bp, Homo sapien
tgccttgtggggaaaccaatcccatttttcagt

SEQ ID NO: 739374 - DNA, 33 bp, Homo sapien
tgccttgtggggaaacgaatcccatttttcagt

SEQ ID NO: 739375 - DNA, 33 bp, Homo sapien
gaatatgtattttccaataggctttcatcaagt

SEQ ID NO: 739376 - DNA, 33 bp, Homo sapien
gaatatgtattttccagtaggctttcatcaagt

SEQ ID NO: 739377 - DNA, 33 bp, Homo sapien
attcctgcaataaccacgagttcaccagaagat

SEQ ID NO: 739378 - DNA, 33 bp, Homo sapien
attcctgcaataaccatgagttcaccagaagat

SEQ ID NO: 739379 - DNA, 33 bp, Homo sapien
tatgatatggaaaatcagaacaaactgaaaatc

SEQ ID NO: 739380 - DNA, 33 bp, Homo sapien
tatgatatggaaaatcggaacaaactgaaaatc

SEQ ID NO: 739381 - DNA, 33 bp, Homo sapien
cttgtacgtgaatagacagatcaaaagaacaga

SEQ ID NO: 739382 - DNA, 33 bp, Homo sapien
cttgtacgtgaatagatagatcaaaagaacaga

SEQ ID NO: 739383 - DNA, 33 bp, Homo sapien
gcaccatatgcaggaaaaataacacaggtaaag

SEQ ID NO: 739384 - DNA, 33 bp, Homo sapien
gcaccatatgcaggaagaataacacaggtaaag

SEQ ID NO: 739385 - DNA, 33 bp, Homo sapien
tcaaaatatatggtaaaataggtgagaatacat

SEQ ID NO: 739386 - DNA, 33 bp, Homo sapien
tcaaaatatatggtaacataggtgagaatacat

SEQ ID NO: 739387 - DNA, 33 bp, Homo sapien
gcaccacatccgaaaccgggaaagaaacctatg

SEQ ID NO: 739388 - DNA, 33 bp, Homo sapien
gcaccacatccgaaactgggaaagaaacctatg

SEQ ID NO: 739389 - DNA, 33 bp, Homo sapien
aatcaacctaagcaaccattgatgaaagaatgg

SEQ ID NO: 739390 - DNA, 33 bp, Homo sapien
aatcaacctaagcaacgattgatgaaagaatgg

SEQ ID NO: 739391 - DNA, 33 bp, Homo sapien
ttatttccatggagaaaggttagaggaggtgag

SEQ ID NO: 739392 - DNA, 33 bp, Homo sapien
ttatttccatggagaatggttagaggaggtgag

SEQ ID NO: 739393 - DNA, 33 bp, Homo sapien
atctttaaaagagaaaactgaggctcaaaaaaa

SEQ ID NO: 739394 - DNA, 33 bp, Homo sapien
atctttaaaagagaaacctgaggctcaaaaaaa

SEQ ID NO: 739395 - DNA, 33 bp, Homo sapien
aaaggtgcacacaaataaaattcgaatcaaggt

SEQ ID NO: 739396 - DNA, 33 bp, Homo sapien
aaaggtgcacacaaatcaaattcgaatcaaggt

SEQ ID NO: 739397 - DNA, 33 bp, Homo sapien
aatatttttttggccaagtacacaacatgccaa

SEQ ID NO: 739398 - DNA, 33 bp, Homo sapien
aatatttttttggccaggtacacaacatgccaa

SEQ ID NO: 739399 - DNA, 33 bp, Homo sapien
gacttagaatactctcccctgaaaaagtgctca

SEQ ID NO: 739400 - DNA, 33 bp, Homo sapien
gacttagaatactctctcctgaaaaagtgctca

SEQ ID NO: 739401 - DNA, 33 bp, Homo sapien
gttaggtgctttgtgaagacctcagagaaatat

SEQ ID NO: 739402 - DNA, 33 bp, Homo sapien
gttaggtgctttgtgaggacctcagagaaatat

SEQ ID NO: 739403 - DNA, 33 bp, Homo sapien
atctgccctatgcaaacttcatatacaatagtg

SEQ ID NO: 739404 - DNA, 33 bp, Homo sapien
atctgccctatgcaaatttcatatacaatagtg

SEQ ID NO: 739405 - DNA, 33 bp, Homo sapien
tgacacaaatatatccacagatgtcgacaacca

SEQ ID NO: 739406 - DNA, 33 bp, Homo sapien
tgacacaaatatatccgcagatgtcgacaacca

SEQ ID NO: 739407 - DNA, 33 bp, Homo sapien
aggtagctaggcagaaatgaaagatacctacaa

SEQ ID NO: 739408 - DNA, 33 bp, Homo sapien
aggtagctaggcagaagtgaaagatacctacaa

SEQ ID NO: 739409 - DNA, 33 bp, Homo sapien
tgaatataggcttccaatatcttctggcttaaa

SEQ ID NO: 739410 - DNA, 33 bp, Homo sapien
tgaatataggcttccagtatcttctggcttaaa

SEQ ID NO: 739411 - DNA, 33 bp, Homo sapien
actctttcacccttgaactactatttctcttct

SEQ ID NO: 739412 - DNA, 33 bp, Homo sapien
actctttcacccttgacctactatttctcttct

SEQ ID NO: 739413 - DNA, 33 bp, Homo sapien
agcctatggtagatgacgatagatttttgacaa

SEQ ID NO: 739414 - DNA, 33 bp, Homo sapien
agcctatggtagatgatgatagatttttgacaa

SEQ ID NO: 739415 - DNA, 33 bp, Homo sapien
tcatatggttgtgttacatgtcatggagctctg

SEQ ID NO: 739416 - DNA, 33 bp, Homo sapien
tcatatggttgtgttatatgtcatggagctctg

SEQ ID NO: 739417 - DNA, 33 bp, Homo sapien
cttcctacttcaaaaactagttctaaagccact

SEQ ID NO: 739418 - DNA, 33 bp, Homo sapien
cttcctacttcaaaaattagttctaaagccact

SEQ ID NO: 739419 - DNA, 33 bp, Homo sapien
agatgagataatgcaagaactactgtgagacaa

SEQ ID NO: 739420 - DNA, 33 bp, Homo sapien
agatgagataatgcaataactactgtgagacaa

SEQ ID NO: 739421 - DNA, 33 bp, Homo sapien
ctcagaaataaagccacaaagtccacaaaaata

SEQ ID NO: 739422 - DNA, 33 bp, Homo sapien
ctcagaaataaagccagaaagtccacaaaaata

SEQ ID NO: 739423 - DNA, 33 bp, Homo sapien
caggtgttccaatctcggacccaaaactaaaat

SEQ ID NO: 739424 - DNA, 33 bp, Homo sapien
caggtgttccaatctctgacccaaaactaaaat

SEQ ID NO: 739425 - DNA, 33 bp, Homo sapien
cccgtgttcaagtatcacgcttgaaacaccaat

SEQ ID NO: 739426 - DNA, 33 bp, Homo sapien
cccgtgttcaagtatcgcgcttgaaacaccaat

SEQ ID NO: 739427 - DNA, 33 bp, Homo sapien
aattgcatggttaaggaaagtttgaataacata

SEQ ID NO: 739428 - DNA, 33 bp, Homo sapien
aattgcatggttaaggcaagtttgaataacata

SEQ ID NO: 739429 - DNA, 33 bp, Homo sapien
caaccacttctgcaaagcattgagcaacataga

SEQ ID NO: 739430 - DNA, 33 bp, Homo sapien
caaccacttctgcaaatcattgagcaacataga

SEQ ID NO: 739431 - DNA, 33 bp, Homo sapien
caggaaattatcacagccatgctagtttaggaa

SEQ ID NO: 739432 - DNA, 33 bp, Homo sapien
caggaaattatcacagtcatgctagtttaggaa

SEQ ID NO: 739433 - DNA, 33 bp, Homo sapien
gagaccgctctttacacaagtctaggtgattta

SEQ ID NO: 739434 - DNA, 33 bp, Homo sapien
gagaccgctctttacagaagtctaggtgattta

SEQ ID NO: 739435 - DNA, 33 bp, Homo sapien
tctctatggtatgctccacaaaaattatggctt

SEQ ID NO: 739436 - DNA, 33 bp, Homo sapien
tctctatggtatgctctacaaaaattatggctt

SEQ ID NO: 739437 - DNA, 33 bp, Homo sapien
tgaggaagagatggaaactgtatttcattggac

SEQ ID NO: 739438 - DNA, 33 bp, Homo sapien
tgaggaagagatggaagctgtatttcattggac

SEQ ID NO: 739439 - DNA, 33 bp, Homo sapien
atcaactcctattcaacaaagttctggaagtct

SEQ ID NO: 739440 - DNA, 33 bp, Homo sapien
atcaactcctattcaataaagttctggaagtct

SEQ ID NO: 739441 - DNA, 33 bp, Homo sapien
tgctgccagtggaacactgtgggagtggatctg

SEQ ID NO: 739442 - DNA, 33 bp, Homo sapien
tgctgccagtggaacattgtgggagtggatctg

SEQ ID NO: 739443 - DNA, 33 bp, Homo sapien
ctgcctgggcatgataaaatttttaggaacttt

SEQ ID NO: 739444 - DNA, 33 bp, Homo sapien
ctgcctgggcatgatacaatttttaggaacttt

SEQ ID NO: 739445 - DNA, 33 bp, Homo sapien
tttgatgacagaccacaagaaagactgatgtaa

SEQ ID NO: 739446 - DNA, 33 bp, Homo sapien
tttgatgacagaccacgagaaagactgatgtaa

SEQ ID NO: 739447 - DNA, 33 bp, Homo sapien
gatttacttagtgtgggaagtaattgacatagt

SEQ ID NO: 739448 - DNA, 33 bp, Homo sapien
gatttacttagtgtggtaagtaattgacatagt

SEQ ID NO: 739449 - DNA, 33 bp, Homo sapien
aactatagaggttttaaaaagccacattaatat

SEQ ID NO: 739450 - DNA, 33 bp, Homo sapien
aactatagaggttttagaaagccacattaatat

SEQ ID NO: 739451 - DNA, 33 bp, Homo sapien
gcattcattctctctcacaacttggttatactt

SEQ ID NO: 739452 - DNA, 33 bp, Homo sapien
gcattcattctctctcgcaacttggttatactt

SEQ ID NO: 739453 - DNA, 33 bp, Homo sapien
tatcatcagagatcaaaaatttgaagaaagaaa

SEQ ID NO: 739454 - DNA, 33 bp, Homo sapien
tatcatcagagatcaacaatttgaagaaagaaa

SEQ ID NO: 739455 - DNA, 33 bp, Homo sapien
atggatgattgaatccacaaatgtgaaaccaac

SEQ ID NO: 739456 - DNA, 33 bp, Homo sapien
atggatgattgaatccccaaatgtgaaaccaac

SEQ ID NO: 739457 - DNA, 33 bp, Homo sapien
ggaccacccagttcagactctgaggactttcca

SEQ ID NO: 739458 - DNA, 33 bp, Homo sapien
ggaccacccagttcagcctctgaggactttcca

SEQ ID NO: 739459 - DNA, 33 bp, Homo sapien
atgcagcctcactgagaacaatacagaaaagaa

SEQ ID NO: 739460 - DNA, 33 bp, Homo sapien
atgcagcctcactgaggacaatacagaaaagaa

SEQ ID NO: 739461 - DNA, 33 bp, Homo sapien
atagaaaaagaaattgcatacattgttgcttga

SEQ ID NO: 739462 - DNA, 33 bp, Homo sapien
atagaaaaagaaattggatacattgttgcttga

SEQ ID NO: 739463 - DNA, 33 bp, Homo sapien
gtataacaattatttgaatagcatttgcattat

SEQ ID NO: 739464 - DNA, 33 bp, Homo sapien
gtataacaattatttggatagcatttgcattat

SEQ ID NO: 739465 - DNA, 33 bp, Homo sapien
ttcttttgctcaaaaaaaatgttatctctattg

SEQ ID NO: 739466 - DNA, 33 bp, Homo sapien
ttcttttgctcaaaaataatgttatctctattg

SEQ ID NO: 739467 - DNA, 33 bp, Homo sapien
taagttatgggttatcaaagagaagagtaaata

SEQ ID NO: 739468 - DNA, 33 bp, Homo sapien
taagttatgggttatcgaagagaagagtaaata

SEQ ID NO: 739469 - DNA, 33 bp, Homo sapien
tttactaactcagagaagtctatcaacctactt

SEQ ID NO: 739470 - DNA, 33 bp, Homo sapien
tttactaactcagagaggtctatcaacctactt

SEQ ID NO: 739471 - DNA, 33 bp, Homo sapien
gcttggaattctggtcactgagttcatccttgt

SEQ ID NO: 739472 - DNA, 33 bp, Homo sapien
gcttggaattctggtcgctgagttcatccttgt

SEQ ID NO: 739473 - DNA, 33 bp, Homo sapien
catattcattgtggaaatactgaaaatgtaaaa

SEQ ID NO: 739474 - DNA, 33 bp, Homo sapien
catattcattgtggaagtactgaaaatgtaaaa

SEQ ID NO: 739475 - DNA, 33 bp, Homo sapien
gcaactgtaacacaaaatcaaaacataaatagg

SEQ ID NO: 739476 - DNA, 33 bp, Homo sapien
gcaactgtaacacaaattcaaaacataaatagg

SEQ ID NO: 739477 - DNA, 33 bp, Homo sapien
tctggtatgagcaaatcaattaacctatacagt

SEQ ID NO: 739478 - DNA, 33 bp, Homo sapien
tctggtatgagcaaattaattaacctatacagt

SEQ ID NO: 739479 - DNA, 33 bp, Homo sapien
aatttggtctagatccagaaagtaatgagggaa

SEQ ID NO: 739480 - DNA, 33 bp, Homo sapien
aatttggtctagatccggaaagtaatgagggaa

SEQ ID NO: 739481 - DNA, 33 bp, Homo sapien
gggaacttacctcttgaataatcatgacctgga

SEQ ID NO: 739482 - DNA, 33 bp, Homo sapien
gggaacttacctcttgcataatcatgacctgga

SEQ ID NO: 739483 - DNA, 33 bp, Homo sapien
taactagagaaagaaaaccaggtaatgagatag

SEQ ID NO: 739484 - DNA, 33 bp, Homo sapien
taactagagaaagaaacccaggtaatgagatag

SEQ ID NO: 739485 - DNA, 33 bp, Homo sapien
tgagtttcagacaggaatatcatgcaaatgtgg

SEQ ID NO: 739486 - DNA, 33 bp, Homo sapien
tgagtttcagacaggactatcatgcaaatgtgg

SEQ ID NO: 739487 - DNA, 33 bp, Homo sapien
attgcatctttgtcaccccagtttctacaacat

SEQ ID NO: 739488 - DNA, 33 bp, Homo sapien
attgcatctttgtcactccagtttctacaacat

SEQ ID NO: 739489 - DNA, 33 bp, Homo sapien
tattgttcctgagactaacttcttagccattta

SEQ ID NO: 739490 - DNA, 33 bp, Homo sapien
tattgttcctgagactgacttcttagccattta

SEQ ID NO: 739491 - DNA, 33 bp, Homo sapien
tgagcagtgaattatacgtagcaatgggggaaa

SEQ ID NO: 739492 - DNA, 33 bp, Homo sapien
tgagcagtgaattatatgtagcaatgggggaaa

SEQ ID NO: 739493 - DNA, 33 bp, Homo sapien
tccaactgtccaactacgtttgcctgcacagtc

SEQ ID NO: 739494 - DNA, 33 bp, Homo sapien
tccaactgtccaactatgtttgcctgcacagtc

SEQ ID NO: 739495 - DNA, 33 bp, Homo sapien
ggggtatatgagtgagaaagcacaggatccagc

SEQ ID NO: 739496 - DNA, 33 bp, Homo sapien
ggggtatatgagtgagcaagcacaggatccagc

SEQ ID NO: 739497 - DNA, 33 bp, Homo sapien
gctgctgcaaagacaacggctgcagcaggcgag

SEQ ID NO: 739498 - DNA, 33 bp, Homo sapien
gctgctgcaaagacaatggctgcagcaggcgag

SEQ ID NO: 739499 - DNA, 33 bp, Homo sapien
agaaggcaacttaaaacactcagtccccagaac

SEQ ID NO: 739500 - DNA, 33 bp, Homo sapien
agaaggcaacttaaaatactcagtccccagaac

SEQ ID NO: 739501 - DNA, 33 bp, Homo sapien
tgtaaattaggcttaactgatgttggctgtgtt

SEQ ID NO: 739502 - DNA, 33 bp, Homo sapien
tgtaaattaggcttaattgatgttggctgtgtt

SEQ ID NO: 739503 - DNA, 33 bp, Homo sapien
agagtaataactgggacgataaaaggaagataa

SEQ ID NO: 739504 - DNA, 33 bp, Homo sapien
agagtaataactgggatgataaaaggaagataa

SEQ ID NO: 739505 - DNA, 33 bp, Homo sapien
taagttgatagtgagcactgaaagctgtggtct

SEQ ID NO: 739506 - DNA, 33 bp, Homo sapien
taagttgatagtgagcgctgaaagctgtggtct

SEQ ID NO: 739507 - DNA, 33 bp, Homo sapien
agaagaatgactactaccacgtttacttagtgt

SEQ ID NO: 739508 - DNA, 33 bp, Homo sapien
agaagaatgactactatcacgtttacttagtgt

SEQ ID NO: 739509 - DNA, 33 bp, Homo sapien
tatcacagaaattctacgttctttctcataaga

SEQ ID NO: 739510 - DNA, 33 bp, Homo sapien
tatcacagaaattctatgttctttctcataaga

SEQ ID NO: 739511 - DNA, 33 bp, Homo sapien
tctgcaatgttggaaacgtaaaattatagcatt

SEQ ID NO: 739512 - DNA, 33 bp, Homo sapien
tctgcaatgttggaaatgtaaaattatagcatt

SEQ ID NO: 739513 - DNA, 33 bp, Homo sapien
aacacagaggcctaaaatgggttagaatactgc

SEQ ID NO: 739514 - DNA, 33 bp, Homo sapien
aacacagaggcctaaagtgggttagaatactgc

SEQ ID NO: 739515 - DNA, 33 bp, Homo sapien
gaagaaggaatcattccaaagtaacaactatta

SEQ ID NO: 739516 - DNA, 33 bp, Homo sapien
gaagaaggaatcattctaaagtaacaactatta

SEQ ID NO: 739517 - DNA, 33 bp, Homo sapien
aatgtataaaaagcaaaactctataatatgtcc

SEQ ID NO: 739518 - DNA, 33 bp, Homo sapien
aatgtataaaaagcaagactctataatatgtcc

SEQ ID NO: 739519 - DNA, 33 bp, Homo sapien
aaagcaaaactgtaaaaacgtgtgatggaattt

SEQ ID NO: 739520 - DNA, 33 bp, Homo sapien
aaagcaaaactgtaaagacgtgtgatggaattt

SEQ ID NO: 739521 - DNA, 33 bp, Homo sapien
atgtgggtggttccaacgacagttcagctttga

SEQ ID NO: 739522 - DNA, 33 bp, Homo sapien
atgtgggtggttccaatgacagttcagctttga

SEQ ID NO: 739523 - DNA, 33 bp, Homo sapien
tttatcttggctgataaaatgtcctttacttag

SEQ ID NO: 739524 - DNA, 33 bp, Homo sapien
tttatcttggctgatacaatgtcctttacttag

SEQ ID NO: 739525 - DNA, 33 bp, Homo sapien
ataagaaaaatacagacacattagtgcatttat

SEQ ID NO: 739526 - DNA, 33 bp, Homo sapien
ataagaaaaatacagatacattagtgcatttat

SEQ ID NO: 739527 - DNA, 33 bp, Homo sapien
ctccagtgtcatttcaagatcagaggagacata

SEQ ID NO: 739528 - DNA, 33 bp, Homo sapien
ctccagtgtcatttcacgatcagaggagacata

SEQ ID NO: 739529 - DNA, 33 bp, Homo sapien
ggaacaggaatagggaaatataatagtagacag

SEQ ID NO: 739530 - DNA, 33 bp, Homo sapien
ggaacaggaatagggagatataatagtagacag

SEQ ID NO: 739531 - DNA, 33 bp, Homo sapien
ccatctttgctggtccacaacttccactggtga

SEQ ID NO: 739532 - DNA, 33 bp, Homo sapien
ccatctttgctggtccgcaacttccactggtga

SEQ ID NO: 739533 - DNA, 33 bp, Homo sapien
tttttaacattcaccaataaccaaaaaagaaga

SEQ ID NO: 739534 - DNA, 33 bp, Homo sapien
tttttaacattcaccattaaccaaaaaagaaga

SEQ ID NO: 739535 - DNA, 33 bp, Homo sapien
catgaatgccagatgacagtaaactctagagag

SEQ ID NO: 739536 - DNA, 33 bp, Homo sapien
catgaatgccagatgatagtaaactctagagag

SEQ ID NO: 739537 - DNA, 33 bp, Homo sapien
tcagaagagctatgtaataatgttatgtgtcct

SEQ ID NO: 739538 - DNA, 33 bp, Homo sapien
tcagaagagctatgtagtaatgttatgtgtcct

SEQ ID NO: 739539 - DNA, 33 bp, Homo sapien
ttgaaaattagaccacaggtagaatgagtatag

SEQ ID NO: 739540 - DNA, 33 bp, Homo sapien
ttgaaaattagaccactggtagaatgagtatag

SEQ ID NO: 739541 - DNA, 33 bp, Homo sapien
acaaatactcatttgcccttgatttgcacatcc

SEQ ID NO: 739542 - DNA, 33 bp, Homo sapien
acaaatactcatttgcgcttgatttgcacatcc

SEQ ID NO: 739543 - DNA, 33 bp, Homo sapien
ctacatggaaaattgaagtagcaaggtaggtca

SEQ ID NO: 739544 - DNA, 33 bp, Homo sapien
ctacatggaaaattgacgtagcaaggtaggtca

SEQ ID NO: 739545 - DNA, 33 bp, Homo sapien
gtaatccacatattcgcaaggatctcctgaaaa

SEQ ID NO: 739546 - DNA, 33 bp, Homo sapien
gtaatccacatattcggaaggatctcctgaaaa

SEQ ID NO: 739547 - DNA, 33 bp, Homo sapien
ttgtaactctctgatgaattaaaacttttatcc

SEQ ID NO: 739548 - DNA, 33 bp, Homo sapien
ttgtaactctctgatgtattaaaacttttatcc

SEQ ID NO: 739549 - DNA, 33 bp, Homo sapien
aatgtttgtcaatatcaaccaagaacaaaagtt

SEQ ID NO: 739550 - DNA, 33 bp, Homo sapien
aatgtttgtcaatatcgaccaagaacaaaagtt

SEQ ID NO: 739551 - DNA, 33 bp, Homo sapien
caatcaactctgaagcacatcttttctcatccc

SEQ ID NO: 739552 - DNA, 33 bp, Homo sapien
caatcaactctgaagcgcatcttttctcatccc

SEQ ID NO: 739553 - DNA, 33 bp, Homo sapien
agtagtgtcagtcctcaaactatatctttcttt

SEQ ID NO: 739554 - DNA, 33 bp, Homo sapien
agtagtgtcagtcctcgaactatatctttcttt

SEQ ID NO: 739555 - DNA, 33 bp, Homo sapien
gaaatgagctatcaccaaaagatgtggaggaac

SEQ ID NO: 739556 - DNA, 33 bp, Homo sapien
gaaatgagctatcaccgaaagatgtggaggaac

SEQ ID NO: 739557 - DNA, 33 bp, Homo sapien
tcaaaacccatagaacactatgacaccaagagt

SEQ ID NO: 739558 - DNA, 33 bp, Homo sapien
tcaaaacccatagaaccctatgacaccaagagt

SEQ ID NO: 739559 - DNA, 33 bp, Homo sapien
caaaaacagcctccaacatatgttacaaaattt

SEQ ID NO: 739560 - DNA, 33 bp, Homo sapien
caaaaacagcctccaatatatgttacaaaattt

SEQ ID NO: 739561 - DNA, 33 bp, Homo sapien
aatcaagggctcagcaacttctacgagaaagaa

SEQ ID NO: 739562 - DNA, 33 bp, Homo sapien
aatcaagggctcagcatcttctacgagaaagaa

SEQ ID NO: 739563 - DNA, 33 bp, Homo sapien
atcccctgaactttcacgattctttagaggggt

SEQ ID NO: 739564 - DNA, 33 bp, Homo sapien
atcccctgaactttcatgattctttagaggggt

SEQ ID NO: 739565 - DNA, 33 bp, Homo sapien
ccttatatcctttcaaaccttattctgttgcat

SEQ ID NO: 739566 - DNA, 33 bp, Homo sapien
ccttatatcctttcaagccttattctgttgcat

SEQ ID NO: 739567 - DNA, 33 bp, Homo sapien
agaattaaccatggccacaaggagccctgggtc

SEQ ID NO: 739568 - DNA, 33 bp, Homo sapien
agaattaaccatggccgcaaggagccctgggtc

SEQ ID NO: 739569 - DNA, 33 bp, Homo sapien
gtgttgcctgcaaaaaatcctggtggagcacac

SEQ ID NO: 739570 - DNA, 33 bp, Homo sapien
gtgttgcctgcaaaaactcctggtggagcacac

SEQ ID NO: 739571 - DNA, 33 bp, Homo sapien
ttcttcttctatggccaggaatcctcctagatg

SEQ ID NO: 739572 - DNA, 33 bp, Homo sapien
ttcttcttctatggcccggaatcctcctagatg

SEQ ID NO: 739573 - DNA, 33 bp, Homo sapien
aacttagtgggagaataaattggcatggcattt

SEQ ID NO: 739574 - DNA, 33 bp, Homo sapien
aacttagtgggagaatgaattggcatggcattt

SEQ ID NO: 739575 - DNA, 33 bp, Homo sapien
tcttaacctttatgaccaatgttagcttgacct

SEQ ID NO: 739576 - DNA, 33 bp, Homo sapien
tcttaacctttatgactaatgttagcttgacct

SEQ ID NO: 739577 - DNA, 33 bp, Homo sapien
aattttaatagagctaacacccctaatagttta

SEQ ID NO: 739578 - DNA, 33 bp, Homo sapien
aattttaatagagctaccacccctaatagttta

SEQ ID NO: 739579 - DNA, 33 bp, Homo sapien
aaatctctagcaagaacgaccaaaacggtgaga

SEQ ID NO: 739580 - DNA, 33 bp, Homo sapien
aaatctctagcaagaatgaccaaaacggtgaga

SEQ ID NO: 739581 - DNA, 33 bp, Homo sapien
ccctaggagatcctgacaataggttcctaagat

SEQ ID NO: 739582 - DNA, 33 bp, Homo sapien
ccctaggagatcctgagaataggttcctaagat

SEQ ID NO: 739583 - DNA, 33 bp, Homo sapien
gattgacaatggaaataagtgactgaggcataa

SEQ ID NO: 739584 - DNA, 33 bp, Homo sapien
gattgacaatggaaatcagtgactgaggcataa

SEQ ID NO: 739585 - DNA, 33 bp, Homo sapien
aggattcattctcatcactgtttcctctcctct

SEQ ID NO: 739586 - DNA, 33 bp, Homo sapien
aggattcattctcatcgctgtttcctctcctct

SEQ ID NO: 739587 - DNA, 33 bp, Homo sapien
agaagagaagcagctcaatgttagagaaaagca

SEQ ID NO: 739588 - DNA, 33 bp, Homo sapien
agaagagaagcagctcgatgttagagaaaagca

SEQ ID NO: 739589 - DNA, 33 bp, Homo sapien
atgttcatatctttccaccagctagtatcagca

SEQ ID NO: 739590 - DNA, 33 bp, Homo sapien
atgttcatatctttccgccagctagtatcagca

SEQ ID NO: 739591 - DNA, 33 bp, Homo sapien
aagtgaattctgaggggagaggtgccattttgg

SEQ ID NO: 739592 - DNA, 33 bp, Homo sapien
aagtgaattctgagggtagaggtgccattttgg

SEQ ID NO: 739593 - DNA, 33 bp, Homo sapien
gaaaatacactgagaaatatcaaatgctgattt

SEQ ID NO: 739594 - DNA, 33 bp, Homo sapien
gaaaatacactgagaagtatcaaatgctgattt

SEQ ID NO: 739595 - DNA, 33 bp, Homo sapien
aatttcatcatagtaaacatcttgaaggaagac

SEQ ID NO: 739596 - DNA, 33 bp, Homo sapien
aatttcatcatagtaagcatcttgaaggaagac

SEQ ID NO: 739597 - DNA, 33 bp, Homo sapien
atattgttgatacagaagagaaacagcattcaa

SEQ ID NO: 739598 - DNA, 33 bp, Homo sapien
atattgttgatacagaggagaaacagcattcaa

SEQ ID NO: 739599 - DNA, 33 bp, Homo sapien
aatcccgcatcggcaacgttctatatttagagt

SEQ ID NO: 739600 - DNA, 33 bp, Homo sapien
aatcccgcatcggcaatgttctatatttagagt

SEQ ID NO: 739601 - DNA, 33 bp, Homo sapien
atgcgggattagattcccttggcaaaacattta

SEQ ID NO: 739602 - DNA, 33 bp, Homo sapien
atgcgggattagattctcttggcaaaacattta

SEQ ID NO: 739603 - DNA, 33 bp, Homo sapien
ctttttaagagcttaaacctgatgaagtgaagc

SEQ ID NO: 739604 - DNA, 33 bp, Homo sapien
ctttttaagagcttaatcctgatgaagtgaagc

SEQ ID NO: 739605 - DNA, 33 bp, Homo sapien
gctgtttgcttcttcaagtccagaaggggaatc

SEQ ID NO: 739606 - DNA, 33 bp, Homo sapien
gctgtttgcttcttcaggtccagaaggggaatc

SEQ ID NO: 739607 - DNA, 33 bp, Homo sapien
cccaaatggatccaacagtataaaaaatgtcat

SEQ ID NO: 739608 - DNA, 33 bp, Homo sapien
cccaaatggatccaacggtataaaaaatgtcat

SEQ ID NO: 739609 - DNA, 33 bp, Homo sapien
gaattaactgtccaaactgatacacttttttta

SEQ ID NO: 739610 - DNA, 33 bp, Homo sapien
gaattaactgtccaaattgatacacttttttta

SEQ ID NO: 739611 - DNA, 33 bp, Homo sapien
ggagtaaagcaatctaagagttaggtaatttta

SEQ ID NO: 739612 - DNA, 33 bp, Homo sapien
ggagtaaagcaatctaggagttaggtaatttta

SEQ ID NO: 739613 - DNA, 33 bp, Homo sapien
aaatgtgatcccttgcaatgctagtatatttta

SEQ ID NO: 739614 - DNA, 33 bp, Homo sapien
aaatgtgatcccttgcgatgctagtatatttta

SEQ ID NO: 739615 - DNA, 33 bp, Homo sapien
tgaattgggaggcatacagcggacccagagaac

SEQ ID NO: 739616 - DNA, 33 bp, Homo sapien
tgaattgggaggcatatagcggacccagagaac

SEQ ID NO: 739617 - DNA, 33 bp, Homo sapien
ccaggcatctagcgtacgttgggtctcatcagc

SEQ ID NO: 739618 - DNA, 33 bp, Homo sapien
ccaggcatctagcgtatgttgggtctcatcagc

SEQ ID NO: 739619 - DNA, 33 bp, Homo sapien
gatttatctgtagaagccaatgctatttaatag

SEQ ID NO: 739620 - DNA, 33 bp, Homo sapien
gatttatctgtagaaggcaatgctatttaatag

SEQ ID NO: 739621 - DNA, 33 bp, Homo sapien
ttcaccaaagatacgcactagaatgttcgtaag

SEQ ID NO: 739622 - DNA, 33 bp, Homo sapien
ttcaccaaagatacgcgctagaatgttcgtaag

SEQ ID NO: 739623 - DNA, 33 bp, Homo sapien
ttactgtgcaaataccaagacaatgtgttgtaa

SEQ ID NO: 739624 - DNA, 33 bp, Homo sapien
ttactgtgcaaataccgagacaatgtgttgtaa

SEQ ID NO: 739625 - DNA, 33 bp, Homo sapien
cagtgagtttcatccaaacattattttaataac

SEQ ID NO: 739626 - DNA, 33 bp, Homo sapien
cagtgagtttcatccatacattattttaataac

SEQ ID NO: 739627 - DNA, 33 bp, Homo sapien
ttcttgtccatttccacgaaggagaaaatttag

SEQ ID NO: 739628 - DNA, 33 bp, Homo sapien
ttcttgtccatttccatgaaggagaaaatttag

SEQ ID NO: 739629 - DNA, 33 bp, Homo sapien
catagatctcaaatacagtacagttttattccc

SEQ ID NO: 739630 - DNA, 33 bp, Homo sapien
catagatctcaaatacggtacagttttattccc

SEQ ID NO: 739631 - DNA, 33 bp, Homo sapien
gcaaggaatctaatgaactttaagcgatgtgtt

SEQ ID NO: 739632 - DNA, 33 bp, Homo sapien
gcaaggaatctaatgacctttaagcgatgtgtt

SEQ ID NO: 739633 - DNA, 33 bp, Homo sapien
tgcatacattttcactaaaacatggtcattcta

SEQ ID NO: 739634 - DNA, 33 bp, Homo sapien
tgcatacattttcactgaaacatggtcattcta

SEQ ID NO: 739635 - DNA, 33 bp, Homo sapien
ttaggtaatgtagaataaaaggtaaagagaact

SEQ ID NO: 739636 - DNA, 33 bp, Homo sapien
ttaggtaatgtagaatgaaaggtaaagagaact

SEQ ID NO: 739637 - DNA, 33 bp, Homo sapien
gtgatgtatgaataaactggtgtattagagaca

SEQ ID NO: 739638 - DNA, 33 bp, Homo sapien
gtgatgtatgaataaattggtgtattagagaca

SEQ ID NO: 739639 - DNA, 33 bp, Homo sapien
atgtatttttgaatgacgattaaagggagaaat

SEQ ID NO: 739640 - DNA, 33 bp, Homo sapien
atgtatttttgaatgatgattaaagggagaaat

SEQ ID NO: 739641 - DNA, 33 bp, Homo sapien
ttatcacttataaccaccttcattttgtcaaat

SEQ ID NO: 739642 - DNA, 33 bp, Homo sapien
ttatcacttataaccatcttcattttgtcaaat

SEQ ID NO: 739643 - DNA, 33 bp, Homo sapien
atttagagcggaataacaacatttgaatgagta

SEQ ID NO: 739644 - DNA, 33 bp, Homo sapien
atttagagcggaataataacatttgaatgagta

SEQ ID NO: 739645 - DNA, 33 bp, Homo sapien
agataacataaacttaactgaacaaattttcta

SEQ ID NO: 739646 - DNA, 33 bp, Homo sapien
agataacataaacttacctgaacaaattttcta

SEQ ID NO: 739647 - DNA, 33 bp, Homo sapien
ctaggtcaaatctgcaatcagagaaagtagttt

SEQ ID NO: 739648 - DNA, 33 bp, Homo sapien
ctaggtcaaatctgcagtcagagaaagtagttt

SEQ ID NO: 739649 - DNA, 33 bp, Homo sapien
cttctccctttaactaagttgcatacactgttt

SEQ ID NO: 739650 - DNA, 33 bp, Homo sapien
cttctccctttaactaggttgcatacactgttt

SEQ ID NO: 739651 - DNA, 33 bp, Homo sapien
tggtagaatataacaccgatggcatcttggtgt

SEQ ID NO: 739652 - DNA, 33 bp, Homo sapien
tggtagaatataacactgatggcatcttggtgt

SEQ ID NO: 739653 - DNA, 33 bp, Homo sapien
gagtcttgattttcataataagtcagcaccaga

SEQ ID NO: 739654 - DNA, 33 bp, Homo sapien
gagtcttgattttcatgataagtcagcaccaga

SEQ ID NO: 739655 - DNA, 33 bp, Homo sapien
tgggtattatcagaaacgctgtagaatcaattg

SEQ ID NO: 739656 - DNA, 33 bp, Homo sapien
tgggtattatcagaaatgctgtagaatcaattg

SEQ ID NO: 739657 - DNA, 33 bp, Homo sapien
tgtgattgttactcaccactcatgctaattagt

SEQ ID NO: 739658 - DNA, 33 bp, Homo sapien
tgtgattgttactcactactcatgctaattagt

SEQ ID NO: 739659 - DNA, 33 bp, Homo sapien
gcccaaatatacaccaatgattacaggagggtc

SEQ ID NO: 739660 - DNA, 33 bp, Homo sapien
gcccaaatatacaccagtgattacaggagggtc

SEQ ID NO: 739661 - DNA, 33 bp, Homo sapien
acagtgagatactgtcgcataccagttagaatg

SEQ ID NO: 739662 - DNA, 33 bp, Homo sapien
acagtgagatactgtctcataccagttagaatg

SEQ ID NO: 739663 - DNA, 33 bp, Homo sapien
ctcctactgactcaacaatataatgcttaggca

SEQ ID NO: 739664 - DNA, 33 bp, Homo sapien
ctcctactgactcaacgatataatgcttaggca

SEQ ID NO: 739665 - DNA, 33 bp, Homo sapien
tccttcacaaaatatacggtcgattcaaaatga

SEQ ID NO: 739666 - DNA, 33 bp, Homo sapien
tccttcacaaaatatatggtcgattcaaaatga

SEQ ID NO: 739667 - DNA, 33 bp, Homo sapien
atacaaaggttttcaaatgtttgatcacttagg

SEQ ID NO: 739668 - DNA, 33 bp, Homo sapien
atacaaaggttttcaagtgtttgatcacttagg

SEQ ID NO: 739669 - DNA, 33 bp, Homo sapien
cttggtaaacggacctgaattccagtgaaaaaa

SEQ ID NO: 739670 - DNA, 33 bp, Homo sapien
cttggtaaacggaccttaattccagtgaaaaaa

SEQ ID NO: 739671 - DNA, 33 bp, Homo sapien
tgaaattctcaagaaaatctgaggctaaatata

SEQ ID NO: 739672 - DNA, 33 bp, Homo sapien
tgaaattctcaagaaagtctgaggctaaatata

SEQ ID NO: 739673 - DNA, 33 bp, Homo sapien
ataggaaaacttcatgcatagagaaccactatt

SEQ ID NO: 739674 - DNA, 33 bp, Homo sapien
ataggaaaacttcatggatagagaaccactatt

SEQ ID NO: 739675 - DNA, 33 bp, Homo sapien
ctataacatcaaaacaagttatctacctccaaa

SEQ ID NO: 739676 - DNA, 33 bp, Homo sapien
ctataacatcaaaacacgttatctacctccaaa

SEQ ID NO: 739677 - DNA, 33 bp, Homo sapien
tatgctctgtcgtaacaatttttctggccaaac

SEQ ID NO: 739678 - DNA, 33 bp, Homo sapien
tatgctctgtcgtaaccatttttctggccaaac

SEQ ID NO: 739679 - DNA, 33 bp, Homo sapien
tttcaaattcttcaagcctctacccatactcaa

SEQ ID NO: 739680 - DNA, 33 bp, Homo sapien
tttcaaattcttcaaggctctacccatactcaa

SEQ ID NO: 739681 - DNA, 33 bp, Homo sapien
attaacaaattgagaacaggaatcagattgaaa

SEQ ID NO: 739682 - DNA, 33 bp, Homo sapien
attaacaaattgagaataggaatcagattgaaa

SEQ ID NO: 739683 - DNA, 33 bp, Homo sapien
tctttctgaatgaagacctgtgtctccgaatgc

SEQ ID NO: 739684 - DNA, 33 bp, Homo sapien
tctttctgaatgaagagctgtgtctccgaatgc

SEQ ID NO: 739685 - DNA, 33 bp, Homo sapien
agggtttataatgctgaaaaaaggcatataata

SEQ ID NO: 739686 - DNA, 33 bp, Homo sapien
agggtttataatgctggaaaaaggcatataata

SEQ ID NO: 739687 - DNA, 33 bp, Homo sapien
gagtgatggctactaaaaattcacagtttatat

SEQ ID NO: 739688 - DNA, 33 bp, Homo sapien
gagtgatggctactaacaattcacagtttatat

SEQ ID NO: 739689 - DNA, 33 bp, Homo sapien
ccaagacttatctttaaccaaagaagctgcctc

SEQ ID NO: 739690 - DNA, 33 bp, Homo sapien
ccaagacttatctttagccaaagaagctgcctc

SEQ ID NO: 739691 - DNA, 33 bp, Homo sapien
gatgtagcacctagccaatatgtactgttagga

SEQ ID NO: 739692 - DNA, 33 bp, Homo sapien
gatgtagcacctagcctatatgtactgttagga

SEQ ID NO: 739693 - DNA, 33 bp, Homo sapien
agccttcctatgaacacagtaaacaagcaacct

SEQ ID NO: 739694 - DNA, 33 bp, Homo sapien
agccttcctatgaacagagtaaacaagcaacct

SEQ ID NO: 739695 - DNA, 33 bp, Homo sapien
gggctcataagaagagcaccatagtgacaagga

SEQ ID NO: 739696 - DNA, 33 bp, Homo sapien
gggctcataagaagaggaccatagtgacaagga

SEQ ID NO: 739697 - DNA, 33 bp, Homo sapien
attgtgatgacatacacaggatcttggaactca

SEQ ID NO: 739698 - DNA, 33 bp, Homo sapien
attgtgatgacatacataggatcttggaactca

SEQ ID NO: 739699 - DNA, 33 bp, Homo sapien
acagacactcctagaacagcccatttatagacc

SEQ ID NO: 739700 - DNA, 33 bp, Homo sapien
acagacactcctagaagagcccatttatagacc

SEQ ID NO: 739701 - DNA, 33 bp, Homo sapien
ctatgtaggcagccctcaattagttgtttcagt

SEQ ID NO: 739702 - DNA, 33 bp, Homo sapien
ctatgtaggcagccctgaattagttgtttcagt

SEQ ID NO: 739703 - DNA, 33 bp, Homo sapien
tatataatgctgtgaaacaaagacgataacata

SEQ ID NO: 739704 - DNA, 33 bp, Homo sapien
tatataatgctgtgaagcaaagacgataacata

SEQ ID NO: 739705 - DNA, 33 bp, Homo sapien
aaaagaaatagaagctaagaaattttagatata

SEQ ID NO: 739706 - DNA, 33 bp, Homo sapien
aaaagaaatagaagctgagaaattttagatata

SEQ ID NO: 739707 - DNA, 33 bp, Homo sapien
taaagcaaggaaattagggaagagtgagtggcc

SEQ ID NO: 739708 - DNA, 33 bp, Homo sapien
taaagcaaggaaattatggaagagtgagtggcc

SEQ ID NO: 739709 - DNA, 33 bp, Homo sapien
ttccatcttgggaaacaaaacagaagaggagta

SEQ ID NO: 739710 - DNA, 33 bp, Homo sapien
ttccatcttgggaaacgaaacagaagaggagta

SEQ ID NO: 739711 - DNA, 33 bp, Homo sapien
ataaagcctcaaattacaacctgaattttacta

SEQ ID NO: 739712 - DNA, 33 bp, Homo sapien
ataaagcctcaaattataacctgaattttacta

SEQ ID NO: 739713 - DNA, 33 bp, Homo sapien
atgtataactaaaccaccagtgtctgtacaaac

SEQ ID NO: 739714 - DNA, 33 bp, Homo sapien
atgtataactaaaccatcagtgtctgtacaaac

SEQ ID NO: 739715 - DNA, 33 bp, Homo sapien
agcgtagcggccatgaatactttctgacgattg

SEQ ID NO: 739716 - DNA, 33 bp, Homo sapien
agcgtagcggccatgattactttctgacgattg

SEQ ID NO: 739717 - DNA, 33 bp, Homo sapien
gcaattggagagcgtacgaggtagcagatacag

SEQ ID NO: 739718 - DNA, 33 bp, Homo sapien
gcaattggagagcgtatgaggtagcagatacag

SEQ ID NO: 739719 - DNA, 33 bp, Homo sapien
tgaatgctgtcagaaacattgatctaagttcag

SEQ ID NO: 739720 - DNA, 33 bp, Homo sapien
tgaatgctgtcagaaatattgatctaagttcag

SEQ ID NO: 739721 - DNA, 33 bp, Homo sapien
acactgtgggcatacaaataaccttggaatgtt

SEQ ID NO: 739722 - DNA, 33 bp, Homo sapien
acactgtgggcatacagataaccttggaatgtt

SEQ ID NO: 739723 - DNA, 33 bp, Homo sapien
aaagatggataatgccaatggtctcacatattc

SEQ ID NO: 739724 - DNA, 33 bp, Homo sapien
aaagatggataatgccgatggtctcacatattc

SEQ ID NO: 739725 - DNA, 33 bp, Homo sapien
ttgacatttttggcccacgattactatctatcc

SEQ ID NO: 739726 - DNA, 33 bp, Homo sapien
ttgacatttttggcccgcgattactatctatcc

SEQ ID NO: 739727 - DNA, 33 bp, Homo sapien
gtgtattgagattaacaagggaagaatgataga

SEQ ID NO: 739728 - DNA, 33 bp, Homo sapien
gtgtattgagattaacgagggaagaatgataga

SEQ ID NO: 739729 - DNA, 33 bp, Homo sapien
tagaaaagtgtggtaaacctctcttaaaataat

SEQ ID NO: 739730 - DNA, 33 bp, Homo sapien
tagaaaagtgtggtaatcctctcttaaaataat

SEQ ID NO: 739731 - DNA, 33 bp, Homo sapien
gtacttttagttttgacgttcagaattacaaac

SEQ ID NO: 739732 - DNA, 33 bp, Homo sapien
gtacttttagttttgatgttcagaattacaaac

SEQ ID NO: 739733 - DNA, 33 bp, Homo sapien
ttgacacagtagtttccactcttggaattttat

SEQ ID NO: 739734 - DNA, 33 bp, Homo sapien
ttgacacagtagtttctactcttggaattttat

SEQ ID NO: 739735 - DNA, 33 bp, Homo sapien
taattgaatagttaggaatgaatggttctaatt

SEQ ID NO: 739736 - DNA, 33 bp, Homo sapien
taattgaatagttaggtatgaatggttctaatt

SEQ ID NO: 739737 - DNA, 33 bp, Homo sapien
aggcacttcaaaaatcaacaatggcaggcttct

SEQ ID NO: 739738 - DNA, 33 bp, Homo sapien
aggcacttcaaaaatcgacaatggcaggcttct

SEQ ID NO: 739739 - DNA, 33 bp, Homo sapien
tacccaatacagcaaaattgtatttcatatgca

SEQ ID NO: 739740 - DNA, 33 bp, Homo sapien
tacccaatacagcaaacttgtatttcatatgca

SEQ ID NO: 739741 - DNA, 33 bp, Homo sapien
tctggttcaattgttccatgcatttgatgtaga

SEQ ID NO: 739742 - DNA, 33 bp, Homo sapien
tctggttcaattgttctatgcatttgatgtaga

SEQ ID NO: 739743 - DNA, 33 bp, Homo sapien
atttgggcaaattcaaggagaatgaaggatgta

SEQ ID NO: 739744 - DNA, 33 bp, Homo sapien
atttgggcaaattcaatgagaatgaaggatgta

SEQ ID NO: 739745 - DNA, 33 bp, Homo sapien
ttttgttgaaatcaagacattttctattagatt

SEQ ID NO: 739746 - DNA, 33 bp, Homo sapien
ttttgttgaaatcaaggcattttctattagatt

SEQ ID NO: 739747 - DNA, 33 bp, Homo sapien
attaaagaagctgatacgccatagagattatta

SEQ ID NO: 739748 - DNA, 33 bp, Homo sapien
attaaagaagctgatatgccatagagattatta

SEQ ID NO: 739749 - DNA, 33 bp, Homo sapien
ctcactggttaaaacacaatagccatgcttagc

SEQ ID NO: 739750 - DNA, 33 bp, Homo sapien
ctcactggttaaaacagaatagccatgcttagc

SEQ ID NO: 739751 - DNA, 33 bp, Homo sapien
atatacaagaatataaacagttgcaagtaatgg

SEQ ID NO: 739752 - DNA, 33 bp, Homo sapien
atatacaagaatataatcagttgcaagtaatgg

SEQ ID NO: 739753 - DNA, 33 bp, Homo sapien
tttttaccatgagtagccccagaaaacaaacca

SEQ ID NO: 739754 - DNA, 33 bp, Homo sapien
tttttaccatgagtagtcccagaaaacaaacca

SEQ ID NO: 739755 - DNA, 33 bp, Homo sapien
aatgtcagatgctccacctaagtacaattttat

SEQ ID NO: 739756 - DNA, 33 bp, Homo sapien
aatgtcagatgctccatctaagtacaattttat

SEQ ID NO: 739757 - DNA, 33 bp, Homo sapien
tgtgggcaccagcataaggacaaggggaatgca

SEQ ID NO: 739758 - DNA, 33 bp, Homo sapien
tgtgggcaccagcatatggacaaggggaatgca

SEQ ID NO: 739759 - DNA, 33 bp, Homo sapien
acagctttgctccgcacaggattgggtgctggg

SEQ ID NO: 739760 - DNA, 33 bp, Homo sapien
acagctttgctccgcataggattgggtgctggg

SEQ ID NO: 739761 - DNA, 33 bp, Homo sapien
gcagggtgaggcttcccgagcccccgagagctc

SEQ ID NO: 739762 - DNA, 33 bp, Homo sapien
gcagggtgaggcttcctgagcccccgagagctc

SEQ ID NO: 739763 - DNA, 33 bp, Homo sapien
tcttaacccggaatccaaagttcttaacaaaat

SEQ ID NO: 739764 - DNA, 33 bp, Homo sapien
tcttaacccggaatcccaagttcttaacaaaat

SEQ ID NO: 739765 - DNA, 33 bp, Homo sapien
attgggaagtgcagccaagttctgaccgatatt

SEQ ID NO: 739766 - DNA, 33 bp, Homo sapien
attgggaagtgcagccgagttctgaccgatatt

SEQ ID NO: 739767 - DNA, 33 bp, Homo sapien
ctacaggaagctaccaatggaggggccaatctc

SEQ ID NO: 739768 - DNA, 33 bp, Homo sapien
ctacaggaagctaccagtggaggggccaatctc

SEQ ID NO: 739769 - DNA, 33 bp, Homo sapien
gataggattagagatccgagcacaatgtagata

SEQ ID NO: 739770 - DNA, 33 bp, Homo sapien
gataggattagagatctgagcacaatgtagata

SEQ ID NO: 739771 - DNA, 33 bp, Homo sapien
aattcttacatcattcaccaatccaaaggtttg

SEQ ID NO: 739772 - DNA, 33 bp, Homo sapien
aattcttacatcattcgccaatccaaaggtttg

SEQ ID NO: 739773 - DNA, 33 bp, Homo sapien
aataattgaatgtgcaactctaatgaaaatgtg

SEQ ID NO: 739774 - DNA, 33 bp, Homo sapien
aataattgaatgtgcacctctaatgaaaatgtg

SEQ ID NO: 739775 - DNA, 33 bp, Homo sapien
ttccataggtagcactaagagctcagttttgct

SEQ ID NO: 739776 - DNA, 33 bp, Homo sapien
ttccataggtagcacttagagctcagttttgct

SEQ ID NO: 739777 - DNA, 33 bp, Homo sapien
aatttgatagattgtacgcttactttcctgttt

SEQ ID NO: 739778 - DNA, 33 bp, Homo sapien
aatttgatagattgtatgcttactttcctgttt

SEQ ID NO: 739779 - DNA, 33 bp, Homo sapien
aatcttaacaggactaccagctgaagagacaag

SEQ ID NO: 739780 - DNA, 33 bp, Homo sapien
aatcttaacaggactatcagctgaagagacaag

SEQ ID NO: 739781 - DNA, 33 bp, Homo sapien
acattaggaaatttcaggatcccatttgtgtct

SEQ ID NO: 739782 - DNA, 33 bp, Homo sapien
acattaggaaatttcatgatcccatttgtgtct

SEQ ID NO: 739783 - DNA, 33 bp, Homo sapien
gggttcagcaaaagaaaagagtggagtacaggg

SEQ ID NO: 739784 - DNA, 33 bp, Homo sapien
gggttcagcaaaagaagagagtggagtacaggg

SEQ ID NO: 739785 - DNA, 33 bp, Homo sapien
gctatatttgctgtgaatatctgctggcaaaat

SEQ ID NO: 739786 - DNA, 33 bp, Homo sapien
gctatatttgctgtgagtatctgctggcaaaat

SEQ ID NO: 739787 - DNA, 33 bp, Homo sapien
ttactaccaatgtcaacaaaagaatgattgtta

SEQ ID NO: 739788 - DNA, 33 bp, Homo sapien
ttactaccaatgtcaataaaagaatgattgtta

SEQ ID NO: 739789 - DNA, 33 bp, Homo sapien
catgatacatttaccaaatttcactcaaaactt

SEQ ID NO: 739790 - DNA, 33 bp, Homo sapien
catgatacatttaccagatttcactcaaaactt

SEQ ID NO: 739791 - DNA, 33 bp, Homo sapien
gcactgctgagacataccttttaaaatttgaac

SEQ ID NO: 739792 - DNA, 33 bp, Homo sapien
gcactgctgagacatagcttttaaaatttgaac

SEQ ID NO: 739793 - DNA, 33 bp, Homo sapien
tttaaggatacattgaaacttggtaaaacgata

SEQ ID NO: 739794 - DNA, 33 bp, Homo sapien
tttaaggatacattgagacttggtaaaacgata

SEQ ID NO: 739795 - DNA, 33 bp, Homo sapien
tataatatcagaaaccaaactagaaaattaccg

SEQ ID NO: 739796 - DNA, 33 bp, Homo sapien
tataatatcagaaaccgaactagaaaattaccg

SEQ ID NO: 739797 - DNA, 33 bp, Homo sapien
taacatcatcaacaacaacaaggagaaagtttc

SEQ ID NO: 739798 - DNA, 33 bp, Homo sapien
taacatcatcaacaacgacaaggagaaagtttc

SEQ ID NO: 739799 - DNA, 33 bp, Homo sapien
ataacacaggtgtcaactggacagagagatttg

SEQ ID NO: 739800 - DNA, 33 bp, Homo sapien
ataacacaggtgtcaattggacagagagatttg

SEQ ID NO: 739801 - DNA, 33 bp, Homo sapien
ctagtgatcatatcacccaggtcttttgtaaca

SEQ ID NO: 739802 - DNA, 33 bp, Homo sapien
ctagtgatcatatcactcaggtcttttgtaaca

SEQ ID NO: 739803 - DNA, 33 bp, Homo sapien
ataagtgaaatatgtcactgctgaataaaaata

SEQ ID NO: 739804 - DNA, 33 bp, Homo sapien
ataagtgaaatatgtcgctgctgaataaaaata

SEQ ID NO: 739805 - DNA, 33 bp, Homo sapien
gacaaataaaaggacaaagatttcgggccatag

SEQ ID NO: 739806 - DNA, 33 bp, Homo sapien
gacaaataaaaggacacagatttcgggccatag

SEQ ID NO: 739807 - DNA, 33 bp, Homo sapien
tctaatatatggtcaacttcagaagcttgtgaa

SEQ ID NO: 739808 - DNA, 33 bp, Homo sapien
tctaatatatggtcaatttcagaagcttgtgaa

SEQ ID NO: 739809 - DNA, 33 bp, Homo sapien
agttataaacatcaaccgaatatttggagcctc

SEQ ID NO: 739810 - DNA, 33 bp, Homo sapien
agttataaacatcaactgaatatttggagcctc

SEQ ID NO: 739811 - DNA, 33 bp, Homo sapien
aacaagttataatttccagatatagaatgcatt

SEQ ID NO: 739812 - DNA, 33 bp, Homo sapien
aacaagttataatttcgagatatagaatgcatt

SEQ ID NO: 739813 - DNA, 33 bp, Homo sapien
gaggagtaaaattatacgcaagcaacttgaaac

SEQ ID NO: 739814 - DNA, 33 bp, Homo sapien
gaggagtaaaattatatgcaagcaacttgaaac

SEQ ID NO: 739815 - DNA, 33 bp, Homo sapien
atatgtaagaatgtacaaccattaatagtagat

SEQ ID NO: 739816 - DNA, 33 bp, Homo sapien
atatgtaagaatgtacgaccattaatagtagat

SEQ ID NO: 739817 - DNA, 33 bp, Homo sapien
cacttctgtgtcattcactctggtcaaagcaaa

SEQ ID NO: 739818 - DNA, 33 bp, Homo sapien
cacttctgtgtcattctctctggtcaaagcaaa

SEQ ID NO: 739819 - DNA, 33 bp, Homo sapien
tatttataggtggtagaaacaggattaaataga

SEQ ID NO: 739820 - DNA, 33 bp, Homo sapien
tatttataggtggtagtaacaggattaaataga

SEQ ID NO: 739821 - DNA, 33 bp, Homo sapien
caatattccttcatgaacccatgccattttagt

SEQ ID NO: 739822 - DNA, 33 bp, Homo sapien
caatattccttcatgatcccatgccattttagt

SEQ ID NO: 739823 - DNA, 33 bp, Homo sapien
tagccacaatactatggactgcttcaactgttc

SEQ ID NO: 739824 - DNA, 33 bp, Homo sapien
tagccacaatactatgtactgcttcaactgttc

SEQ ID NO: 739825 - DNA, 33 bp, Homo sapien
ttaggccaatgtccagaagttagaaaataatta

SEQ ID NO: 739826 - DNA, 33 bp, Homo sapien
ttaggccaatgtccaggagttagaaaataatta

SEQ ID NO: 739827 - DNA, 33 bp, Homo sapien
gtatgtttattacaacactattcacaatagcaa

SEQ ID NO: 739828 - DNA, 33 bp, Homo sapien
gtatgtttattacaacgctattcacaatagcaa

SEQ ID NO: 739829 - DNA, 33 bp, Homo sapien
ataacttcaaggagaccgataaaaagcaataat

SEQ ID NO: 739830 - DNA, 33 bp, Homo sapien
ataacttcaaggagactgataaaaagcaataat

SEQ ID NO: 739831 - DNA, 33 bp, Homo sapien
ggagcgtttttaacccactgcatatacacacaa

SEQ ID NO: 739832 - DNA, 33 bp, Homo sapien
ggagcgtttttaacccgctgcatatacacacaa

SEQ ID NO: 739833 - DNA, 33 bp, Homo sapien
ttgggcactggatagaagtcattaaaacaaaaa

SEQ ID NO: 739834 - DNA, 33 bp, Homo sapien
ttgggcactggatagaggtcattaaaacaaaaa

SEQ ID NO: 739835 - DNA, 33 bp, Homo sapien
gaaagagagaagtggcacattatgaactaagca

SEQ ID NO: 739836 - DNA, 33 bp, Homo sapien
gaaagagagaagtggcgcattatgaactaagca

SEQ ID NO: 739837 - DNA, 33 bp, Homo sapien
gcttctacatgaacacacctggactaaaaatgc

SEQ ID NO: 739838 - DNA, 33 bp, Homo sapien
gcttctacatgaacacgcctggactaaaaatgc

SEQ ID NO: 739839 - DNA, 33 bp, Homo sapien
gaagagagttgcagtcaaatacttagccctgct

SEQ ID NO: 739840 - DNA, 33 bp, Homo sapien
gaagagagttgcagtccaatacttagccctgct

SEQ ID NO: 739841 - DNA, 33 bp, Homo sapien
ccaactaatttcttgaaagatgcaatctaggct

SEQ ID NO: 739842 - DNA, 33 bp, Homo sapien
ccaactaatttcttgagagatgcaatctaggct

SEQ ID NO: 739843 - DNA, 33 bp, Homo sapien
cattagcgtaatagaaatgacagagaggtcatc

SEQ ID NO: 739844 - DNA, 33 bp, Homo sapien
cattagcgtaatagaagtgacagagaggtcatc

SEQ ID NO: 739845 - DNA, 33 bp, Homo sapien
acgtttttgttttccacgcggtgcatttgtttt

SEQ ID NO: 739846 - DNA, 33 bp, Homo sapien
acgtttttgttttccatgcggtgcatttgtttt

SEQ ID NO: 739847 - DNA, 33 bp, Homo sapien
agagacacaacactaacgacagtggaacagaaa

SEQ ID NO: 739848 - DNA, 33 bp, Homo sapien
agagacacaacactaatgacagtggaacagaaa

SEQ ID NO: 739849 - DNA, 33 bp, Homo sapien
tttctcactttcggaaatagtttaaagagattt

SEQ ID NO: 739850 - DNA, 33 bp, Homo sapien
tttctcactttcggaagtagtttaaagagattt

SEQ ID NO: 739851 - DNA, 33 bp, Homo sapien
aactatagaaattactaactatagctgtgtgtg

SEQ ID NO: 739852 - DNA, 33 bp, Homo sapien
aactatagaaattacttactatagctgtgtgtg

SEQ ID NO: 739853 - DNA, 33 bp, Homo sapien
cagaggtgaggcaagacgccagctttttgtttg

SEQ ID NO: 739854 - DNA, 33 bp, Homo sapien
cagaggtgaggcaagaggccagctttttgtttg

SEQ ID NO: 739855 - DNA, 33 bp, Homo sapien
cctttcatgaagcctacatttcaagaatgttgg

SEQ ID NO: 739856 - DNA, 33 bp, Homo sapien
cctttcatgaagcctatatttcaagaatgttgg

SEQ ID NO: 739857 - DNA, 33 bp, Homo sapien
ttcatatattccctgcaatgtatttagtttgca

SEQ ID NO: 739858 - DNA, 33 bp, Homo sapien
ttcatatattccctgctatgtatttagtttgca

SEQ ID NO: 739859 - DNA, 33 bp, Homo sapien
gttgatcaaagggtagaaacttgtgcttatagg

SEQ ID NO: 739860 - DNA, 33 bp, Homo sapien
gttgatcaaagggtagcaacttgtgcttatagg

SEQ ID NO: 739861 - DNA, 33 bp, Homo sapien
ttattctacaatatgcacccttaagaaccagga

SEQ ID NO: 739862 - DNA, 33 bp, Homo sapien
ttattctacaatatgcgcccttaagaaccagga

SEQ ID NO: 739863 - DNA, 33 bp, Homo sapien
gatatcaattgctccactaagatgatttcaggc

SEQ ID NO: 739864 - DNA, 33 bp, Homo sapien
gatatcaattgctccattaagatgatttcaggc

SEQ ID NO: 739865 - DNA, 33 bp, Homo sapien
atgactgtgtgaagcagacccttttcaatgacc

SEQ ID NO: 739866 - DNA, 33 bp, Homo sapien
atgactgtgtgaagcatacccttttcaatgacc

SEQ ID NO: 739867 - DNA, 33 bp, Homo sapien
taccttactctgaaaactgggctataagtgaaa

SEQ ID NO: 739868 - DNA, 33 bp, Homo sapien
taccttactctgaaaagtgggctataagtgaaa

SEQ ID NO: 739869 - DNA, 33 bp, Homo sapien
atatttcaccttctgaaagccaagaattaccaa

SEQ ID NO: 739870 - DNA, 33 bp, Homo sapien
atatttcaccttctgatagccaagaattaccaa

SEQ ID NO: 739871 - DNA, 33 bp, Homo sapien
ggaaatagcatacgcagctagactgattggaca

SEQ ID NO: 739872 - DNA, 33 bp, Homo sapien
ggaaatagcatacgcatctagactgattggaca

SEQ ID NO: 739873 - DNA, 33 bp, Homo sapien
tggtacgtactggctcactaccaagtaatgcaa

SEQ ID NO: 739874 - DNA, 33 bp, Homo sapien
tggtacgtactggctcgctaccaagtaatgcaa

SEQ ID NO: 739875 - DNA, 33 bp, Homo sapien
atgtttggactaggcacagctggaaataacatg

SEQ ID NO: 739876 - DNA, 33 bp, Homo sapien
atgtttggactaggcatagctggaaataacatg

SEQ ID NO: 739877 - DNA, 33 bp, Homo sapien
ggtcatactaatcaaaaaagggacaaagtgaaa

SEQ ID NO: 739878 - DNA, 33 bp, Homo sapien
ggtcatactaatcaaagaagggacaaagtgaaa

SEQ ID NO: 739879 - DNA, 33 bp, Homo sapien
ctctagtgtttgtcccacagatgttatcacaca

SEQ ID NO: 739880 - DNA, 33 bp, Homo sapien
ctctagtgtttgtcccgcagatgttatcacaca

SEQ ID NO: 739881 - DNA, 33 bp, Homo sapien
aaggatttaaatgaaacggcagaaaacatgaaa

SEQ ID NO: 739882 - DNA, 33 bp, Homo sapien
aaggatttaaatgaaatggcagaaaacatgaaa

SEQ ID NO: 739883 - DNA, 33 bp, Homo sapien
gcaactattttgcctacatgacaatacatggaa

SEQ ID NO: 739884 - DNA, 33 bp, Homo sapien
gcaactattttgcctatatgacaatacatggaa

SEQ ID NO: 739885 - DNA, 33 bp, Homo sapien
tttttttttctgtcaactgaaaaactggccata

SEQ ID NO: 739886 - DNA, 33 bp, Homo sapien
tttttttttctgtcaagtgaaaaactggccata

SEQ ID NO: 739887 - DNA, 33 bp, Homo sapien
gtaatggagctgaaaacggtaaatatcaaagta

SEQ ID NO: 739888 - DNA, 33 bp, Homo sapien
gtaatggagctgaaaatggtaaatatcaaagta

SEQ ID NO: 739889 - DNA, 33 bp, Homo sapien
tacttgtgtagaaagactcaagtatttttgtgt

SEQ ID NO: 739890 - DNA, 33 bp, Homo sapien
tacttgtgtagaaagattcaagtatttttgtgt

SEQ ID NO: 739891 - DNA, 33 bp, Homo sapien
gaagtgtaggtgtacacgtctattgtcctattt

SEQ ID NO: 739892 - DNA, 33 bp, Homo sapien
gaagtgtaggtgtacatgtctattgtcctattt

SEQ ID NO: 739893 - DNA, 33 bp, Homo sapien
gtaagagatataggacaacaatggcaagtcctt

SEQ ID NO: 739894 - DNA, 33 bp, Homo sapien
gtaagagatataggacgacaatggcaagtcctt

SEQ ID NO: 739895 - DNA, 33 bp, Homo sapien
tgtgaaatcataagggccatctattgtattcac

SEQ ID NO: 739896 - DNA, 33 bp, Homo sapien
tgtgaaatcataagggtcatctattgtattcac

SEQ ID NO: 739897 - DNA, 33 bp, Homo sapien
aatgtcatctacttaacccaggtttcagtaaat

SEQ ID NO: 739898 - DNA, 33 bp, Homo sapien
aatgtcatctacttaatccaggtttcagtaaat

SEQ ID NO: 739899 - DNA, 33 bp, Homo sapien
tggaatgtatttctaacacttgcagagtatggc

SEQ ID NO: 739900 - DNA, 33 bp, Homo sapien
tggaatgtatttctaagacttgcagagtatggc

SEQ ID NO: 739901 - DNA, 33 bp, Homo sapien
tgagtgaagtgaaaaactctataagccacttac

SEQ ID NO: 739902 - DNA, 33 bp, Homo sapien
tgagtgaagtgaaaaattctataagccacttac

SEQ ID NO: 739903 - DNA, 33 bp, Homo sapien
gcctaagaaataataccactgctgaaccaattg

SEQ ID NO: 739904 - DNA, 33 bp, Homo sapien
gcctaagaaataatactactgctgaaccaattg

SEQ ID NO: 739905 - DNA, 33 bp, Homo sapien
acaataaagaaacataggtccagtcaaaacatt

SEQ ID NO: 739906 - DNA, 33 bp, Homo sapien
acaataaagaaacatatgtccagtcaaaacatt

SEQ ID NO: 739907 - DNA, 33 bp, Homo sapien
aatgatcatgtaaaacagactatactctagaca

SEQ ID NO: 739908 - DNA, 33 bp, Homo sapien
aatgatcatgtaaaactgactatactctagaca

SEQ ID NO: 739909 - DNA, 33 bp, Homo sapien
gactaagttttacttacggaaatgatcatgtaa

SEQ ID NO: 739910 - DNA, 33 bp, Homo sapien
gactaagttttacttatggaaatgatcatgtaa

SEQ ID NO: 739911 - DNA, 33 bp, Homo sapien
agaattatatgagaaacaagttgtccacagtga

SEQ ID NO: 739912 - DNA, 33 bp, Homo sapien
agaattatatgagaaataagttgtccacagtga

SEQ ID NO: 739913 - DNA, 33 bp, Homo sapien
aatgggatgcaatggcaacagagattatgctct

SEQ ID NO: 739914 - DNA, 33 bp, Homo sapien
aatgggatgcaatggccacagagattatgctct

SEQ ID NO: 739915 - DNA, 33 bp, Homo sapien
aattgtactatccttaccagtttagatacaact

SEQ ID NO: 739916 - DNA, 33 bp, Homo sapien
aattgtactatccttatcagtttagatacaact

SEQ ID NO: 739917 - DNA, 33 bp, Homo sapien
gtggccctattctaagaagactggtccactatt

SEQ ID NO: 739918 - DNA, 33 bp, Homo sapien
gtggccctattctaagcagactggtccactatt

SEQ ID NO: 739919 - DNA, 33 bp, Homo sapien
ccatgttcagcagaaacgtagggcacttcagag

SEQ ID NO: 739920 - DNA, 33 bp, Homo sapien
ccatgttcagcagaaaggtagggcacttcagag

SEQ ID NO: 739921 - DNA, 33 bp, Homo sapien
catttaggctccttttaaaaagctgtatacttt

SEQ ID NO: 739922 - DNA, 33 bp, Homo sapien
catttaggctcctttttaaaagctgtatacttt

SEQ ID NO: 739923 - DNA, 33 bp, Homo sapien
ccaattattctcactcgaaggttacatcatatt

SEQ ID NO: 739924 - DNA, 33 bp, Homo sapien
ccaattattctcactctaaggttacatcatatt

SEQ ID NO: 739925 - DNA, 33 bp, Homo sapien
tctgaatatatcgaaaaagagtgaaatcaatat

SEQ ID NO: 739926 - DNA, 33 bp, Homo sapien
tctgaatatatcgaaagagagtgaaatcaatat

SEQ ID NO: 739927 - DNA, 33 bp, Homo sapien
ggggcaaaaatgccgacagtctctttgctaaaa

SEQ ID NO: 739928 - DNA, 33 bp, Homo sapien
ggggcaaaaatgccgagagtctctttgctaaaa

SEQ ID NO: 739929 - DNA, 33 bp, Homo sapien
gtgctcaagggtaatcacaagtagaggtaagaa

SEQ ID NO: 739930 - DNA, 33 bp, Homo sapien
gtgctcaagggtaatcccaagtagaggtaagaa

SEQ ID NO: 739931 - DNA, 33 bp, Homo sapien
gttatttatgtccagacactgtgagttagtaat

SEQ ID NO: 739932 - DNA, 33 bp, Homo sapien
gttatttatgtccagatactgtgagttagtaat

SEQ ID NO: 739933 - DNA, 33 bp, Homo sapien
aatttgcctgtgtgataaatgaacttctctcat

SEQ ID NO: 739934 - DNA, 33 bp, Homo sapien
aatttgcctgtgtgattaatgaacttctctcat

SEQ ID NO: 739935 - DNA, 33 bp, Homo sapien
cctttatagcacctaaagtatgtggcattggcc

SEQ ID NO: 739936 - DNA, 33 bp, Homo sapien
cctttatagcacctaaggtatgtggcattggcc

SEQ ID NO: 739937 - DNA, 33 bp, Homo sapien
tactgaccctctcttaccatggatgaacattac

SEQ ID NO: 739938 - DNA, 33 bp, Homo sapien
tactgaccctctcttatcatggatgaacattac

SEQ ID NO: 739939 - DNA, 33 bp, Homo sapien
gtcctctgactggggccaaattatccaggtcct

SEQ ID NO: 739940 - DNA, 33 bp, Homo sapien
gtcctctgactggggctaaattatccaggtcct

SEQ ID NO: 739941 - DNA, 33 bp, Homo sapien
gtgctaacaagctggccgcaatgtggcagctgc

SEQ ID NO: 739942 - DNA, 33 bp, Homo sapien
gtgctaacaagctggcggcaatgtggcagctgc

SEQ ID NO: 739943 - DNA, 33 bp, Homo sapien
aacaagtggtagagaaaagaaaatgaactgtaa

SEQ ID NO: 739944 - DNA, 33 bp, Homo sapien
aacaagtggtagagaacagaaaatgaactgtaa

SEQ ID NO: 739945 - DNA, 33 bp, Homo sapien
ccagatgggtctgttacgatttcagccaccttg

SEQ ID NO: 739946 - DNA, 33 bp, Homo sapien
ccagatgggtctgttatgatttcagccaccttg

SEQ ID NO: 739947 - DNA, 33 bp, Homo sapien
aaaatgtaatcatcaccggagttaatacccctt

SEQ ID NO: 739948 - DNA, 33 bp, Homo sapien
aaaatgtaatcatcactggagttaatacccctt

SEQ ID NO: 739949 - DNA, 33 bp, Homo sapien
gcagctcattgcagtaagacagatttaaacaac

SEQ ID NO: 739950 - DNA, 33 bp, Homo sapien
gcagctcattgcagtaggacagatttaaacaac

SEQ ID NO: 739951 - DNA, 33 bp, Homo sapien
tccctgcacttcacagactattacgtgggacat

SEQ ID NO: 739952 - DNA, 33 bp, Homo sapien
tccctgcacttcacaggctattacgtgggacat

SEQ ID NO: 739953 - DNA, 33 bp, Homo sapien
atttgagcatacaaaaatgaaaatacatctagg

SEQ ID NO: 739954 - DNA, 33 bp, Homo sapien
atttgagcatacaaaagtgaaaatacatctagg

SEQ ID NO: 739955 - DNA, 33 bp, Homo sapien
agagttgttgactacacggtttggagaaggaaa

SEQ ID NO: 739956 - DNA, 33 bp, Homo sapien
agagttgttgactacatggtttggagaaggaaa

SEQ ID NO: 739957 - DNA, 33 bp, Homo sapien
tccatgcacagacttcacttattttatttttaa

SEQ ID NO: 739958 - DNA, 33 bp, Homo sapien
tccatgcacagacttcgcttattttatttttaa

SEQ ID NO: 739959 - DNA, 33 bp, Homo sapien
caattagccatattatcaatgtgacaaatggta

SEQ ID NO: 739960 - DNA, 33 bp, Homo sapien
caattagccatattatgaatgtgacaaatggta

SEQ ID NO: 739961 - DNA, 33 bp, Homo sapien
accttattcttctctacgactctagtaatttta

SEQ ID NO: 739962 - DNA, 33 bp, Homo sapien
accttattcttctctatgactctagtaatttta

SEQ ID NO: 739963 - DNA, 33 bp, Homo sapien
atcttttgaggatttaaggcagtaaacacaaaa

SEQ ID NO: 739964 - DNA, 33 bp, Homo sapien
atcttttgaggatttagggcagtaaacacaaaa

SEQ ID NO: 739965 - DNA, 33 bp, Homo sapien
ggacagcactggaaacgggaaataagagaacat

SEQ ID NO: 739966 - DNA, 33 bp, Homo sapien
ggacagcactggaaactggaaataagagaacat

SEQ ID NO: 739967 - DNA, 33 bp, Homo sapien
gcataggttaggctaaaacctacatttaatggg

SEQ ID NO: 739968 - DNA, 33 bp, Homo sapien
gcataggttaggctaacacctacatttaatggg

SEQ ID NO: 739969 - DNA, 33 bp, Homo sapien
acatttaatgggataaagaaactgagaatcagt

SEQ ID NO: 739970 - DNA, 33 bp, Homo sapien
acatttaatgggataaggaaactgagaatcagt

SEQ ID NO: 739971 - DNA, 33 bp, Homo sapien
tttatacatgaggcataaataagagagcaacat

SEQ ID NO: 739972 - DNA, 33 bp, Homo sapien
tttatacatgaggcatgaataagagagcaacat

SEQ ID NO: 739973 - DNA, 33 bp, Homo sapien
acacttaggttactagaatgatcaatttataaa

SEQ ID NO: 739974 - DNA, 33 bp, Homo sapien
acacttaggttactaggatgatcaatttataaa

SEQ ID NO: 739975 - DNA, 33 bp, Homo sapien
tagctctcataattgaaaacccttttttataat

SEQ ID NO: 739976 - DNA, 33 bp, Homo sapien
tagctctcataattgataacccttttttataat

SEQ ID NO: 739977 - DNA, 33 bp, Homo sapien
tgggctcaggctttgactaacctacacaggttt

SEQ ID NO: 739978 - DNA, 33 bp, Homo sapien
tgggctcaggctttgattaacctacacaggttt

SEQ ID NO: 739979 - DNA, 33 bp, Homo sapien
gagcaatgcataaagacggaatattcctgaaca

SEQ ID NO: 739980 - DNA, 33 bp, Homo sapien
gagcaatgcataaagatggaatattcctgaaca

SEQ ID NO: 739981 - DNA, 33 bp, Homo sapien
cagaagtggcaagcaacagactcaagtcacgtt

SEQ ID NO: 739982 - DNA, 33 bp, Homo sapien
cagaagtggcaagcaatagactcaagtcacgtt

SEQ ID NO: 739983 - DNA, 33 bp, Homo sapien
ataacttctcatggaccataatatgaatgcaaa

SEQ ID NO: 739984 - DNA, 33 bp, Homo sapien
ataacttctcatggactataatatgaatgcaaa

SEQ ID NO: 739985 - DNA, 33 bp, Homo sapien
tatgttatgttctactcaatattgatcctggag

SEQ ID NO: 739986 - DNA, 33 bp, Homo sapien
tatgttatgttctacttaatattgatcctggag

SEQ ID NO: 739987 - DNA, 33 bp, Homo sapien
attacttgacacattccctcaatatgttctgat

SEQ ID NO: 739988 - DNA, 33 bp, Homo sapien
attacttgacacattctctcaatatgttctgat

SEQ ID NO: 739989 - DNA, 33 bp, Homo sapien
tttgtagttttaggaaaggttgaactatgatta

SEQ ID NO: 739990 - DNA, 33 bp, Homo sapien
tttgtagttttaggaatggttgaactatgatta

SEQ ID NO: 739991 - DNA, 33 bp, Homo sapien
aatttagtgtgttataaagagaaaaacatagta

SEQ ID NO: 739992 - DNA, 33 bp, Homo sapien
aatttagtgtgttatagagagaaaaacatagta

SEQ ID NO: 739993 - DNA, 33 bp, Homo sapien
cttttaaaaggcagaaattcatatgatgaaaca

SEQ ID NO: 739994 - DNA, 33 bp, Homo sapien
cttttaaaaggcagaatttcatatgatgaaaca

SEQ ID NO: 739995 - DNA, 33 bp, Homo sapien
gtattgcaagagatgacggtaactagttaatct

SEQ ID NO: 739996 - DNA, 33 bp, Homo sapien
gtattgcaagagatgatggtaactagttaatct

SEQ ID NO: 739997 - DNA, 33 bp, Homo sapien
ctcctagccagattggaaacacctaagcttcta

SEQ ID NO: 739998 - DNA, 33 bp, Homo sapien
ctcctagccagattggcaacacctaagcttcta

SEQ ID NO: 739999 - DNA, 33 bp, Homo sapien
tctgcagtctcatcgcactttgcttgtgtgcat

SEQ ID NO: 740000 - DNA, 33 bp, Homo sapien
tctgcagtctcatcgcgctttgcttgtgtgcat

SEQ ID NO: 740001 - DNA, 33 bp, Homo sapien
tgagtgcaggtagaaacgaagggcaacaataat

SEQ ID NO: 740002 - DNA, 33 bp, Homo sapien
tgagtgcaggtagaaatgaagggcaacaataat

SEQ ID NO: 740003 - DNA, 33 bp, Homo sapien
tataatgccttgcagaaaaaattcaggcagtag

SEQ ID NO: 740004 - DNA, 33 bp, Homo sapien
tataatgccttgcagagaaaattcaggcagtag

SEQ ID NO: 740005 - DNA, 33 bp, Homo sapien
gatgcccagtagtttacggttgctgaaaacctg

SEQ ID NO: 740006 - DNA, 33 bp, Homo sapien
gatgcccagtagtttatggttgctgaaaacctg

SEQ ID NO: 740007 - DNA, 33 bp, Homo sapien
gggcttagacaggttcaattcccatctaagttc

SEQ ID NO: 740008 - DNA, 33 bp, Homo sapien
gggcttagacaggttcgattcccatctaagttc

SEQ ID NO: 740009 - DNA, 33 bp, Homo sapien
acttgtgatcactgcccgaaccatctgaagcta

SEQ ID NO: 740010 - DNA, 33 bp, Homo sapien
acttgtgatcactgcctgaaccatctgaagcta

SEQ ID NO: 740011 - DNA, 33 bp, Homo sapien
gatatgtgataacagaacaaaaggttgtagtga

SEQ ID NO: 740012 - DNA, 33 bp, Homo sapien
gatatgtgataacagagcaaaaggttgtagtga

SEQ ID NO: 740013 - DNA, 33 bp, Homo sapien
tagtcaaatcagattacccaatattttcaaact

SEQ ID NO: 740014 - DNA, 33 bp, Homo sapien
tagtcaaatcagattatccaatattttcaaact

SEQ ID NO: 740015 - DNA, 33 bp, Homo sapien
ggaaatcaattaataaaatgtgccaaaaagttt

SEQ ID NO: 740016 - DNA, 33 bp, Homo sapien
ggaaatcaattaataacatgtgccaaaaagttt

SEQ ID NO: 740017 - DNA, 33 bp, Homo sapien
taacatagacataaacacagggcaagaacgtgt

SEQ ID NO: 740018 - DNA, 33 bp, Homo sapien
taacatagacataaacgcagggcaagaacgtgt

SEQ ID NO: 740019 - DNA, 33 bp, Homo sapien
caatcaatggaactaacctcaaatacagtccta

SEQ ID NO: 740020 - DNA, 33 bp, Homo sapien
caatcaatggaactaatctcaaatacagtccta

SEQ ID NO: 740021 - DNA, 33 bp, Homo sapien
gaacgtctccgagacaataaccaaagtaaaggt

SEQ ID NO: 740022 - DNA, 33 bp, Homo sapien
gaacgtctccgagacagtaaccaaagtaaaggt

SEQ ID NO: 740023 - DNA, 33 bp, Homo sapien
ccttcaaatttatgtaaaactctacaaacacac

SEQ ID NO: 740024 - DNA, 33 bp, Homo sapien
ccttcaaatttatgtacaactctacaaacacac

SEQ ID NO: 740025 - DNA, 33 bp, Homo sapien
atataattctataatcacagtttttctttcctt

SEQ ID NO: 740026 - DNA, 33 bp, Homo sapien
atataattctataatcgcagtttttctttcctt

SEQ ID NO: 740027 - DNA, 33 bp, Homo sapien
ttgttccactatcttaacttattcttagacata

SEQ ID NO: 740028 - DNA, 33 bp, Homo sapien
ttgttccactatcttagcttattcttagacata

SEQ ID NO: 740029 - DNA, 33 bp, Homo sapien
gtgcaaataacaagtcacgtaatggtggttctt

SEQ ID NO: 740030 - DNA, 33 bp, Homo sapien
gtgcaaataacaagtctcgtaatggtggttctt

SEQ ID NO: 740031 - DNA, 33 bp, Homo sapien
agtgcaggttgaaagcaaaggagaagtctccat

SEQ ID NO: 740032 - DNA, 33 bp, Homo sapien
agtgcaggttgaaagcgaaggagaagtctccat

SEQ ID NO: 740033 - DNA, 33 bp, Homo sapien
tagttgaggcttctaactaaactgctgaatttt

SEQ ID NO: 740034 - DNA, 33 bp, Homo sapien
tagttgaggcttctaagtaaactgctgaatttt

SEQ ID NO: 740035 - DNA, 33 bp, Homo sapien
tctctgtgcttattgaaattttccataagttat

SEQ ID NO: 740036 - DNA, 33 bp, Homo sapien
tctctgtgcttattgatattttccataagttat

SEQ ID NO: 740037 - DNA, 33 bp, Homo sapien
gtttaattctgctgtcaaggaagaaaaatataa

SEQ ID NO: 740038 - DNA, 33 bp, Homo sapien
gtttaattctgctgtcgaggaagaaaaatataa

SEQ ID NO: 740039 - DNA, 33 bp, Homo sapien
tatatttcatgtgatacactccagactttgtga

SEQ ID NO: 740040 - DNA, 33 bp, Homo sapien
tatatttcatgtgatatactccagactttgtga

SEQ ID NO: 740041 - DNA, 33 bp, Homo sapien
ttctcacagtttaggacgctgcaaaagatcaag

SEQ ID NO: 740042 - DNA, 33 bp, Homo sapien
ttctcacagtttaggatgctgcaaaagatcaag

SEQ ID NO: 740043 - DNA, 33 bp, Homo sapien
cctctcttccatattacaccaaactttgagttg

SEQ ID NO: 740044 - DNA, 33 bp, Homo sapien
cctctcttccatattataccaaactttgagttg

SEQ ID NO: 740045 - DNA, 33 bp, Homo sapien
acattgttcctcaaaaatatgccctttacactt

SEQ ID NO: 740046 - DNA, 33 bp, Homo sapien
acattgttcctcaaaattatgccctttacactt

SEQ ID NO: 740047 - DNA, 33 bp, Homo sapien
ccagcaaaggatataggctaaatgatcacagag

SEQ ID NO: 740048 - DNA, 33 bp, Homo sapien
ccagcaaaggatatagtctaaatgatcacagag

SEQ ID NO: 740049 - DNA, 33 bp, Homo sapien
tacagatgcactgaataacaatactaaaaatga

SEQ ID NO: 740050 - DNA, 33 bp, Homo sapien
tacagatgcactgaatgacaatactaaaaatga

SEQ ID NO: 740051 - DNA, 33 bp, Homo sapien
aaaatgtttataggacaattcgagggaacatac

SEQ ID NO: 740052 - DNA, 33 bp, Homo sapien
aaaatgtttataggaccattcgagggaacatac

SEQ ID NO: 740053 - DNA, 33 bp, Homo sapien
gctggactgtgcaaaagtttagggcttgccatc

SEQ ID NO: 740054 - DNA, 33 bp, Homo sapien
gctggactgtgcaaaattttagggcttgccatc

SEQ ID NO: 740055 - DNA, 33 bp, Homo sapien
catttgctattggttagatcatagaaaatgact

SEQ ID NO: 740056 - DNA, 33 bp, Homo sapien
catttgctattggttatatcatagaaaatgact

SEQ ID NO: 740057 - DNA, 33 bp, Homo sapien
tagtttcctagggctcacataagaaaataccac

SEQ ID NO: 740058 - DNA, 33 bp, Homo sapien
tagtttcctagggctcgcataagaaaataccac

SEQ ID NO: 740059 - DNA, 33 bp, Homo sapien
catgaagtgaatccagaaaattgtttcttttct

SEQ ID NO: 740060 - DNA, 33 bp, Homo sapien
catgaagtgaatccaggaaattgtttcttttct

SEQ ID NO: 740061 - DNA, 33 bp, Homo sapien
atatgtgcaacttagccattacttcctttcttc

SEQ ID NO: 740062 - DNA, 33 bp, Homo sapien
atatgtgcaacttagctattacttcctttcttc

SEQ ID NO: 740063 - DNA, 33 bp, Homo sapien
gctacattaacaaagacagggttcaagataact

SEQ ID NO: 740064 - DNA, 33 bp, Homo sapien
gctacattaacaaagatagggttcaagataact

SEQ ID NO: 740065 - DNA, 33 bp, Homo sapien
ccatttaaactgtgtcactggtttacttgtcta

SEQ ID NO: 740066 - DNA, 33 bp, Homo sapien
ccatttaaactgtgtctctggtttacttgtcta

SEQ ID NO: 740067 - DNA, 33 bp, Homo sapien
tttctatattaggtctcaacataaacacaagat

SEQ ID NO: 740068 - DNA, 33 bp, Homo sapien
tttctatattaggtctgaacataaacacaagat

SEQ ID NO: 740069 - DNA, 33 bp, Homo sapien
cctcagaaatctcaaaacatctgaaataaacac

SEQ ID NO: 740070 - DNA, 33 bp, Homo sapien
cctcagaaatctcaaagcatctgaaataaacac

SEQ ID NO: 740071 - DNA, 33 bp, Homo sapien
tgttttgagtttaatactaagtggtatcaattc

SEQ ID NO: 740072 - DNA, 33 bp, Homo sapien
tgttttgagtttaatattaagtggtatcaattc

SEQ ID NO: 740073 - DNA, 33 bp, Homo sapien
gacttgcttgactccaaaaaagaaatgggaaag

SEQ ID NO: 740074 - DNA, 33 bp, Homo sapien
gacttgcttgactccagaaaagaaatgggaaag

SEQ ID NO: 740075 - DNA, 33 bp, Homo sapien
atagattaaaagagacgcatcttagagatatgt

SEQ ID NO: 740076 - DNA, 33 bp, Homo sapien
atagattaaaagagactcatcttagagatatgt

SEQ ID NO: 740077 - DNA, 33 bp, Homo sapien
aagagagtctgacaggcaatacagagataggtt

SEQ ID NO: 740078 - DNA, 33 bp, Homo sapien
aagagagtctgacaggtaatacagagataggtt

SEQ ID NO: 740079 - DNA, 33 bp, Homo sapien
ccacttaattatgaaaagatcatggaaaagctg

SEQ ID NO: 740080 - DNA, 33 bp, Homo sapien
ccacttaattatgaaacgatcatggaaaagctg

SEQ ID NO: 740081 - DNA, 33 bp, Homo sapien
tccccactgtgaagcaagtatggttttcagatt

SEQ ID NO: 740082 - DNA, 33 bp, Homo sapien
tccccactgtgaagcaggtatggttttcagatt

SEQ ID NO: 740083 - DNA, 33 bp, Homo sapien
ttaatccttactatccacataagaacttggaaa

SEQ ID NO: 740084 - DNA, 33 bp, Homo sapien
ttaatccttactatccgcataagaacttggaaa

SEQ ID NO: 740085 - DNA, 33 bp, Homo sapien
atttttggcattgatacaatgaatacttaatag

SEQ ID NO: 740086 - DNA, 33 bp, Homo sapien
atttttggcattgatataatgaatacttaatag

SEQ ID NO: 740087 - DNA, 33 bp, Homo sapien
atagtgagcaaaagcaagcatgatttctccatt

SEQ ID NO: 740088 - DNA, 33 bp, Homo sapien
atagtgagcaaaagcaggcatgatttctccatt

SEQ ID NO: 740089 - DNA, 33 bp, Homo sapien
ttttttcttgtcataaatcctaaatgcagccag

SEQ ID NO: 740090 - DNA, 33 bp, Homo sapien
ttttttcttgtcataagtcctaaatgcagccag

SEQ ID NO: 740091 - DNA, 33 bp, Homo sapien
atcagtctatcaaagaagtaatgcacaattgtt

SEQ ID NO: 740092 - DNA, 33 bp, Homo sapien
atcagtctatcaaagaggtaatgcacaattgtt

SEQ ID NO: 740093 - DNA, 33 bp, Homo sapien
gccattaaacagaaagaatatacagatgtctgc

SEQ ID NO: 740094 - DNA, 33 bp, Homo sapien
gccattaaacagaaaggatatacagatgtctgc

SEQ ID NO: 740095 - DNA, 33 bp, Homo sapien
cagatgaagtttcccaataatctgctgtgtcgg

SEQ ID NO: 740096 - DNA, 33 bp, Homo sapien
cagatgaagtttcccagtaatctgctgtgtcgg

SEQ ID NO: 740097 - DNA, 33 bp, Homo sapien
tagatagatgactcacaaagaaatcctgagtta

SEQ ID NO: 740098 - DNA, 33 bp, Homo sapien
tagatagatgactcacgaagaaatcctgagtta

SEQ ID NO: 740099 - DNA, 33 bp, Homo sapien
agcaggaacacaataaccagatttaaacttact

SEQ ID NO: 740100 - DNA, 33 bp, Homo sapien
agcaggaacacaataagcagatttaaacttact

SEQ ID NO: 740101 - DNA, 33 bp, Homo sapien
gatgtgctcaattacactgcaagacttgcctcg

SEQ ID NO: 740102 - DNA, 33 bp, Homo sapien
gatgtgctcaattacattgcaagacttgcctcg

SEQ ID NO: 740103 - DNA, 33 bp, Homo sapien
caaaaatataggggggcatatctactgctttac

SEQ ID NO: 740104 - DNA, 33 bp, Homo sapien
caaaaatataggggggtatatctactgctttac

SEQ ID NO: 740105 - DNA, 33 bp, Homo sapien
cctaaattgaatgcgacgaagattttttccata

SEQ ID NO: 740106 - DNA, 33 bp, Homo sapien
cctaaattgaatgcgatgaagattttttccata

SEQ ID NO: 740107 - DNA, 33 bp, Homo sapien
tacagttcttctgccaatcttagtgaactgcca

SEQ ID NO: 740108 - DNA, 33 bp, Homo sapien
tacagttcttctgccagtcttagtgaactgcca

SEQ ID NO: 740109 - DNA, 33 bp, Homo sapien
ttaatctgacttctaacctttggtcagtgccaa

SEQ ID NO: 740110 - DNA, 33 bp, Homo sapien
ttaatctgacttctaatctttggtcagtgccaa

SEQ ID NO: 740111 - DNA, 33 bp, Homo sapien
ctgtgtgtggatctgacggagaattctatgaaa

SEQ ID NO: 740112 - DNA, 33 bp, Homo sapien
ctgtgtgtggatctgatggagaattctatgaaa

SEQ ID NO: 740113 - DNA, 33 bp, Homo sapien
tatttagctttacagaccttgtcattaagcact

SEQ ID NO: 740114 - DNA, 33 bp, Homo sapien
tatttagctttacagagcttgtcattaagcact

SEQ ID NO: 740115 - DNA, 33 bp, Homo sapien
ataaactgcctgagaccaaatcctggcttgacc

SEQ ID NO: 740116 - DNA, 33 bp, Homo sapien
ataaactgcctgagactaaatcctggcttgacc

SEQ ID NO: 740117 - DNA, 33 bp, Homo sapien
ttaagtgaatccaccaatcttgtactaaggctg

SEQ ID NO: 740118 - DNA, 33 bp, Homo sapien
ttaagtgaatccaccagtcttgtactaaggctg

SEQ ID NO: 740119 - DNA, 33 bp, Homo sapien
ttcaagtcctatcttacgctctttgtaagccac

SEQ ID NO: 740120 - DNA, 33 bp, Homo sapien
ttcaagtcctatcttatgctctttgtaagccac

SEQ ID NO: 740121 - DNA, 33 bp, Homo sapien
ctaatggctgataaaaggatatacagggcatgg

SEQ ID NO: 740122 - DNA, 33 bp, Homo sapien
ctaatggctgataaaatgatatacagggcatgg

SEQ ID NO: 740123 - DNA, 33 bp, Homo sapien
ctaaatatatacctaacccgccatgcgtgtcgg

SEQ ID NO: 740124 - DNA, 33 bp, Homo sapien
ctaaatatatacctaatccgccatgcgtgtcgg

SEQ ID NO: 740125 - DNA, 33 bp, Homo sapien
catcacaggtgtttgaactttttgagcacccat

SEQ ID NO: 740126 - DNA, 33 bp, Homo sapien
catcacaggtgtttgacctttttgagcacccat

SEQ ID NO: 740127 - DNA, 33 bp, Homo sapien
gtagatatatgcaaaagaactttcattgctttc

SEQ ID NO: 740128 - DNA, 33 bp, Homo sapien
gtagatatatgcaaaataactttcattgctttc

SEQ ID NO: 740129 - DNA, 33 bp, Homo sapien
tgctaaagcagaaataactctttggggagaaaa

SEQ ID NO: 740130 - DNA, 33 bp, Homo sapien
tgctaaagcagaaatacctctttggggagaaaa

SEQ ID NO: 740131 - DNA, 33 bp, Homo sapien
gacaccaaaaagtacaacacacgtatatgagga

SEQ ID NO: 740132 - DNA, 33 bp, Homo sapien
gacaccaaaaagtacagcacacgtatatgagga

SEQ ID NO: 740133 - DNA, 33 bp, Homo sapien
cattgttgctaagataccttgaactatttaatt

SEQ ID NO: 740134 - DNA, 33 bp, Homo sapien
cattgttgctaagatagcttgaactatttaatt

SEQ ID NO: 740135 - DNA, 33 bp, Homo sapien
acctcttaaggtaagacaatggtgtaatttttg

SEQ ID NO: 740136 - DNA, 33 bp, Homo sapien
acctcttaaggtaagataatggtgtaatttttg

SEQ ID NO: 740137 - DNA, 33 bp, Homo sapien
gcaagtcaggtggagagaaatgttttcagctct

SEQ ID NO: 740138 - DNA, 33 bp, Homo sapien
gcaagtcaggtggagataaatgttttcagctct

SEQ ID NO: 740139 - DNA, 33 bp, Homo sapien
gtactattatttgcaacgttctacatcttagaa

SEQ ID NO: 740140 - DNA, 33 bp, Homo sapien
gtactattatttgcaatgttctacatcttagaa

SEQ ID NO: 740141 - DNA, 33 bp, Homo sapien
aaagtataccacacaacgcaaagaaatatcagt

SEQ ID NO: 740142 - DNA, 33 bp, Homo sapien
aaagtataccacacaatgcaaagaaatatcagt

SEQ ID NO: 740143 - DNA, 33 bp, Homo sapien
acttgctatgtcttgacaggaataggagaagcc

SEQ ID NO: 740144 - DNA, 33 bp, Homo sapien
acttgctatgtcttgataggaataggagaagcc

SEQ ID NO: 740145 - DNA, 33 bp, Homo sapien
acctgttttcatgaaagaacaccataaaccgac

SEQ ID NO: 740146 - DNA, 33 bp, Homo sapien
acctgttttcatgaaataacaccataaaccgac

SEQ ID NO: 740147 - DNA, 33 bp, Homo sapien
gtgtatgcagttgaaaaatagaggcagcgatat

SEQ ID NO: 740148 - DNA, 33 bp, Homo sapien
gtgtatgcagttgaaacatagaggcagcgatat

SEQ ID NO: 740149 - DNA, 33 bp, Homo sapien
cccaaacaaggaaataggtaacacaagtgtggc

SEQ ID NO: 740150 - DNA, 33 bp, Homo sapien
cccaaacaaggaaatatgtaacacaagtgtggc

SEQ ID NO: 740151 - DNA, 33 bp, Homo sapien
aaccatagtcaaaaggacataattgctgtgcat

SEQ ID NO: 740152 - DNA, 33 bp, Homo sapien
aaccatagtcaaaagggcataattgctgtgcat

SEQ ID NO: 740153 - DNA, 33 bp, Homo sapien
gtattattctttcgaacttaagattttgataat

SEQ ID NO: 740154 - DNA, 33 bp, Homo sapien
gtattattctttcgaagttaagattttgataat

SEQ ID NO: 740155 - DNA, 33 bp, Homo sapien
acttcttaaaaccaaagagtgcaaaattatgtg

SEQ ID NO: 740156 - DNA, 33 bp, Homo sapien
acttcttaaaaccaaatagtgcaaaattatgtg

SEQ ID NO: 740157 - DNA, 33 bp, Homo sapien
tatcatgtttataggacccaaaatcatgtgagt

SEQ ID NO: 740158 - DNA, 33 bp, Homo sapien
tatcatgtttataggatccaaaatcatgtgagt

SEQ ID NO: 740159 - DNA, 33 bp, Homo sapien
caaacttgctgtctccactcacctgaagattaa

SEQ ID NO: 740160 - DNA, 33 bp, Homo sapien
caaacttgctgtctccgctcacctgaagattaa

SEQ ID NO: 740161 - DNA, 33 bp, Homo sapien
ttaaaaagtaggaaaagcacataacagacactt

SEQ ID NO: 740162 - DNA, 33 bp, Homo sapien
ttaaaaagtaggaaaatcacataacagacactt

SEQ ID NO: 740163 - DNA, 33 bp, Homo sapien
attctctgattatgtggataaatgctatgacat

SEQ ID NO: 740164 - DNA, 33 bp, Homo sapien
attctctgattatgtgtataaatgctatgacat

SEQ ID NO: 740165 - DNA, 33 bp, Homo sapien
ttgagtagttctaaatgataagcatctagaagg

SEQ ID NO: 740166 - DNA, 33 bp, Homo sapien
ttgagtagttctaaattataagcatctagaagg

SEQ ID NO: 740167 - DNA, 33 bp, Homo sapien
agcaaacaattgcctaaaggaaacagagctgga

SEQ ID NO: 740168 - DNA, 33 bp, Homo sapien
agcaaacaattgcctacaggaaacagagctgga

SEQ ID NO: 740169 - DNA, 33 bp, Homo sapien
gcttgacttcagacatgagtaagcaatattagt

SEQ ID NO: 740170 - DNA, 33 bp, Homo sapien
gcttgacttcagacattagtaagcaatattagt

SEQ ID NO: 740171 - DNA, 33 bp, Homo sapien
aggatttgtaaatttacgaagtcctacaactgt

SEQ ID NO: 740172 - DNA, 33 bp, Homo sapien
aggatttgtaaatttatgaagtcctacaactgt

SEQ ID NO: 740173 - DNA, 33 bp, Homo sapien
cagagaaaaaagttataacaagtaggctttact

SEQ ID NO: 740174 - DNA, 33 bp, Homo sapien
cagagaaaaaagttatgacaagtaggctttact

SEQ ID NO: 740175 - DNA, 33 bp, Homo sapien
gaaatgtaaagctatcagacacaaaacacaaat

SEQ ID NO: 740176 - DNA, 33 bp, Homo sapien
gaaatgtaaagctatcggacacaaaacacaaat

SEQ ID NO: 740177 - DNA, 33 bp, Homo sapien
tcaatctctgatcataacttggtactttacatt

SEQ ID NO: 740178 - DNA, 33 bp, Homo sapien
tcaatctctgatcataccttggtactttacatt

SEQ ID NO: 740179 - DNA, 33 bp, Homo sapien
aaggaaaatgggtatcccacaaaaatggcctgg

SEQ ID NO: 740180 - DNA, 33 bp, Homo sapien
aaggaaaatgggtatcgcacaaaaatggcctgg

SEQ ID NO: 740181 - DNA, 33 bp, Homo sapien
atagccagtagcataaataatacctgaaatgga

SEQ ID NO: 740182 - DNA, 33 bp, Homo sapien
atagccagtagcataagtaatacctgaaatgga

SEQ ID NO: 740183 - DNA, 33 bp, Homo sapien
agttctcagagaaaacagtagtagagtttgaga

SEQ ID NO: 740184 - DNA, 33 bp, Homo sapien
agttctcagagaaaacggtagtagagtttgaga

SEQ ID NO: 740185 - DNA, 33 bp, Homo sapien
aattactagctgataactgattactaatatcaa

SEQ ID NO: 740186 - DNA, 33 bp, Homo sapien
aattactagctgataattgattactaatatcaa

SEQ ID NO: 740187 - DNA, 33 bp, Homo sapien
tcactattattagctaccacatggttcagaact

SEQ ID NO: 740188 - DNA, 33 bp, Homo sapien
tcactattattagctagcacatggttcagaact

SEQ ID NO: 740189 - DNA, 33 bp, Homo sapien
tttgttagtattcttaagcaacattccctagtg

SEQ ID NO: 740190 - DNA, 33 bp, Homo sapien
tttgttagtattcttaggcaacattccctagtg

SEQ ID NO: 740191 - DNA, 33 bp, Homo sapien
taaatcatacaaattcactagttttcataacca

SEQ ID NO: 740192 - DNA, 33 bp, Homo sapien
taaatcatacaaattccctagttttcataacca

SEQ ID NO: 740193 - DNA, 33 bp, Homo sapien
agcaaaatatcatgcaagtaccaaaggttattt

SEQ ID NO: 740194 - DNA, 33 bp, Homo sapien
agcaaaatatcatgcaggtaccaaaggttattt

SEQ ID NO: 740195 - DNA, 33 bp, Homo sapien
gtatgaaacaaccagaaaacaattaacagaatg

SEQ ID NO: 740196 - DNA, 33 bp, Homo sapien
gtatgaaacaaccagacaacaattaacagaatg

SEQ ID NO: 740197 - DNA, 33 bp, Homo sapien
atatgtggtgataattaaaaaaataactagaga

SEQ ID NO: 740198 - DNA, 33 bp, Homo sapien
atatgtggtgataatttaaaaaataactagaga

SEQ ID NO: 740199 - DNA, 33 bp, Homo sapien
ttcttaaagagagtcaatattttacaccctaaa

SEQ ID NO: 740200 - DNA, 33 bp, Homo sapien
ttcttaaagagagtcagtattttacaccctaaa

SEQ ID NO: 740201 - DNA, 33 bp, Homo sapien
ttaatgtaaaattgaccggcatgactaccaatg

SEQ ID NO: 740202 - DNA, 33 bp, Homo sapien
ttaatgtaaaattgactggcatgactaccaatg

SEQ ID NO: 740203 - DNA, 33 bp, Homo sapien
tctgctgcataataaaaccagaagtctgtggaa

SEQ ID NO: 740204 - DNA, 33 bp, Homo sapien
tctgctgcataataaagccagaagtctgtggaa

SEQ ID NO: 740205 - DNA, 33 bp, Homo sapien
atgtccagaaaccaaaattgatagaaagctgtg

SEQ ID NO: 740206 - DNA, 33 bp, Homo sapien
atgtccagaaaccaaagttgatagaaagctgtg

SEQ ID NO: 740207 - DNA, 33 bp, Homo sapien
atgcttaaaaaaaccacgacagtcaggcaagct

SEQ ID NO: 740208 - DNA, 33 bp, Homo sapien
atgcttaaaaaaaccatgacagtcaggcaagct

SEQ ID NO: 740209 - DNA, 33 bp, Homo sapien
ctcaggtggtctaccacgtcatttaacagaaaa

SEQ ID NO: 740210 - DNA, 33 bp, Homo sapien
ctcaggtggtctaccatgtcatttaacagaaaa

SEQ ID NO: 740211 - DNA, 33 bp, Homo sapien
ttgttcatgaaatatacctggaaaacaaaacaa

SEQ ID NO: 740212 - DNA, 33 bp, Homo sapien
ttgttcatgaaatatatctggaaaacaaaacaa

SEQ ID NO: 740213 - DNA, 33 bp, Homo sapien
aaagtagtaagaggggccattcattaaccttaa

SEQ ID NO: 740214 - DNA, 33 bp, Homo sapien
aaagtagtaagagggggcattcattaaccttaa

SEQ ID NO: 740215 - DNA, 33 bp, Homo sapien
ttttttactacttctcagaaggatgttcaaaaa

SEQ ID NO: 740216 - DNA, 33 bp, Homo sapien
ttttttactacttctcggaaggatgttcaaaaa

SEQ ID NO: 740217 - DNA, 33 bp, Homo sapien
tatgagaaagagaagcaaaagataagaactgta

SEQ ID NO: 740218 - DNA, 33 bp, Homo sapien
tatgagaaagagaagcgaaagataagaactgta

SEQ ID NO: 740219 - DNA, 33 bp, Homo sapien
cttagtacattgaagaacaagaaggcttctgta

SEQ ID NO: 740220 - DNA, 33 bp, Homo sapien
cttagtacattgaagagcaagaaggcttctgta

SEQ ID NO: 740221 - DNA, 33 bp, Homo sapien
taaaaaagcaaggagaccagtcttaagagtaac

SEQ ID NO: 740222 - DNA, 33 bp, Homo sapien
taaaaaagcaaggagatcagtcttaagagtaac

SEQ ID NO: 740223 - DNA, 33 bp, Homo sapien
ggcttgggtattcctgaagagcaatgcaaatga

SEQ ID NO: 740224 - DNA, 33 bp, Homo sapien
ggcttgggtattcctgtagagcaatgcaaatga

SEQ ID NO: 740225 - DNA, 33 bp, Homo sapien
ctgtttttcattcaagacttaccactaaatggc

SEQ ID NO: 740226 - DNA, 33 bp, Homo sapien
ctgtttttcattcaagtcttaccactaaatggc

SEQ ID NO: 740227 - DNA, 33 bp, Homo sapien
acactgtttctcttgaaattgctgtgtcctatt

SEQ ID NO: 740228 - DNA, 33 bp, Homo sapien
acactgtttctcttgagattgctgtgtcctatt

SEQ ID NO: 740229 - DNA, 33 bp, Homo sapien
tcaactgctactcatacgtaatccttcagatta

SEQ ID NO: 740230 - DNA, 33 bp, Homo sapien
tcaactgctactcatatgtaatccttcagatta

SEQ ID NO: 740231 - DNA, 33 bp, Homo sapien
gggtccacaaagtaaacagacttcctcaaataa

SEQ ID NO: 740232 - DNA, 33 bp, Homo sapien
gggtccacaaagtaaatagacttcctcaaataa

SEQ ID NO: 740233 - DNA, 33 bp, Homo sapien
actccagtgatcataaagttttggactatgaat

SEQ ID NO: 740234 - DNA, 33 bp, Homo sapien
actccagtgatcataatgttttggactatgaat

SEQ ID NO: 740235 - DNA, 33 bp, Homo sapien
gatatgcacttcaataccaggcctaagggaatt

SEQ ID NO: 740236 - DNA, 33 bp, Homo sapien
gatatgcacttcaatatcaggcctaagggaatt

SEQ ID NO: 740237 - DNA, 33 bp, Homo sapien
tataaaatgctgaaaacgccatcaaaaactgtt

SEQ ID NO: 740238 - DNA, 33 bp, Homo sapien
tataaaatgctgaaaatgccatcaaaaactgtt

SEQ ID NO: 740239 - DNA, 33 bp, Homo sapien
aataagttaaagaagacggtgatagtatcaagt

SEQ ID NO: 740240 - DNA, 33 bp, Homo sapien
aataagttaaagaagatggtgatagtatcaagt

SEQ ID NO: 740241 - DNA, 33 bp, Homo sapien
gtgatgtttaatgttaggtgtcaactcagctag

SEQ ID NO: 740242 - DNA, 33 bp, Homo sapien
gtgatgtttaatgttatgtgtcaactcagctag

SEQ ID NO: 740243 - DNA, 33 bp, Homo sapien
ttaactaagaaaccaagacggcatcaaacctga

SEQ ID NO: 740244 - DNA, 33 bp, Homo sapien
ttaactaagaaaccaatacggcatcaaacctga

SEQ ID NO: 740245 - DNA, 33 bp, Homo sapien
ggtctgcagcaacctcaatacttgccttctcaa

SEQ ID NO: 740246 - DNA, 33 bp, Homo sapien
ggtctgcagcaacctcgatacttgccttctcaa

SEQ ID NO: 740247 - DNA, 33 bp, Homo sapien
aactggactcaaagagacaccacgggaggaaag

SEQ ID NO: 740248 - DNA, 33 bp, Homo sapien
aactggactcaaagaggcaccacgggaggaaag

SEQ ID NO: 740249 - DNA, 33 bp, Homo sapien
acagcaagagggaacaatatggcaatgaataac

SEQ ID NO: 740250 - DNA, 33 bp, Homo sapien
acagcaagagggaacagtatggcaatgaataac

SEQ ID NO: 740251 - DNA, 33 bp, Homo sapien
tgccttgatagagagaagtttgtatttgggtcc

SEQ ID NO: 740252 - DNA, 33 bp, Homo sapien
tgccttgatagagagaggtttgtatttgggtcc

SEQ ID NO: 740253 - DNA, 33 bp, Homo sapien
tgtaaaacagagctaccgattcgtgtacattaa

SEQ ID NO: 740254 - DNA, 33 bp, Homo sapien
tgtaaaacagagctactgattcgtgtacattaa

SEQ ID NO: 740255 - DNA, 33 bp, Homo sapien
tagcaaggagtatgaaagtattaatttgaaaat

SEQ ID NO: 740256 - DNA, 33 bp, Homo sapien
tagcaaggagtatgaatgtattaatttgaaaat

SEQ ID NO: 740257 - DNA, 33 bp, Homo sapien
ggatgaatgtcaaaaccgttacactgactgaaa

SEQ ID NO: 740258 - DNA, 33 bp, Homo sapien
ggatgaatgtcaaaactgttacactgactgaaa

SEQ ID NO: 740259 - DNA, 33 bp, Homo sapien
caaagggaaaattatacattaccgccatggagg

SEQ ID NO: 740260 - DNA, 33 bp, Homo sapien
caaagggaaaattatagattaccgccatggagg

SEQ ID NO: 740261 - DNA, 33 bp, Homo sapien
tttatctatttccatcaaagttagaacaatttt

SEQ ID NO: 740262 - DNA, 33 bp, Homo sapien
tttatctatttccatcgaagttagaacaatttt

SEQ ID NO: 740263 - DNA, 33 bp, Homo sapien
tcacttctgataccaaatagtctatactgaacc

SEQ ID NO: 740264 - DNA, 33 bp, Homo sapien
tcacttctgataccaactagtctatactgaacc

SEQ ID NO: 740265 - DNA, 33 bp, Homo sapien
tcatgactaacaaagacccagtatatattaatc

SEQ ID NO: 740266 - DNA, 33 bp, Homo sapien
tcatgactaacaaagatccagtatatattaatc

SEQ ID NO: 740267 - DNA, 33 bp, Homo sapien
cagtaagctacctttggagtgaatttcacagtg

SEQ ID NO: 740268 - DNA, 33 bp, Homo sapien
cagtaagctacctttgtagtgaatttcacagtg

SEQ ID NO: 740269 - DNA, 33 bp, Homo sapien
ttgaacttgaattaacacaagactcttctgatg

SEQ ID NO: 740270 - DNA, 33 bp, Homo sapien
ttgaacttgaattaacccaagactcttctgatg

SEQ ID NO: 740271 - DNA, 33 bp, Homo sapien
ccgctgtcagaaacacccaatttatacacacac

SEQ ID NO: 740272 - DNA, 33 bp, Homo sapien
ccgctgtcagaaacactcaatttatacacacac

SEQ ID NO: 740273 - DNA, 33 bp, Homo sapien
actggctagccatatgaacaagactgaaaccga

SEQ ID NO: 740274 - DNA, 33 bp, Homo sapien
actggctagccatatgcacaagactgaaaccga

SEQ ID NO: 740275 - DNA, 33 bp, Homo sapien
tctggggttgaatgcacagtacggctcactgtg

SEQ ID NO: 740276 - DNA, 33 bp, Homo sapien
tctggggttgaatgcatagtacggctcactgtg

SEQ ID NO: 740277 - DNA, 33 bp, Homo sapien
gtggaaactgaataaaacatacacagagttctg

SEQ ID NO: 740278 - DNA, 33 bp, Homo sapien
gtggaaactgaataaagcatacacagagttctg

SEQ ID NO: 740279 - DNA, 33 bp, Homo sapien
gagtctgcatacttctcagaaggatcctgctat

SEQ ID NO: 740280 - DNA, 33 bp, Homo sapien
gagtctgcatacttctgagaaggatcctgctat

SEQ ID NO: 740281 - DNA, 33 bp, Homo sapien
atttttttttgtcaacaagggcaggagaaactt

SEQ ID NO: 740282 - DNA, 33 bp, Homo sapien
atttttttttgtcaacgagggcaggagaaactt

SEQ ID NO: 740283 - DNA, 33 bp, Homo sapien
acaagttaggatatgacaattagatgccatttt

SEQ ID NO: 740284 - DNA, 33 bp, Homo sapien
acaagttaggatatgataattagatgccatttt

SEQ ID NO: 740285 - DNA, 33 bp, Homo sapien
gtatcaatataaaagtaaaatggcaacacacta

SEQ ID NO: 740286 - DNA, 33 bp, Homo sapien
gtatcaatataaaagtcaaatggcaacacacta

SEQ ID NO: 740287 - DNA, 33 bp, Homo sapien
tacaaatgtggtgtaacatgagtatcaatataa

SEQ ID NO: 740288 - DNA, 33 bp, Homo sapien
tacaaatgtggtgtaatatgagtatcaatataa

SEQ ID NO: 740289 - DNA, 33 bp, Homo sapien
tggcagtttgagctgactaaacagaatttggta

SEQ ID NO: 740290 - DNA, 33 bp, Homo sapien
tggcagtttgagctgattaaacagaatttggta

SEQ ID NO: 740291 - DNA, 33 bp, Homo sapien
aatagcattgaccaaaatagcatcaaccaaagc

SEQ ID NO: 740292 - DNA, 33 bp, Homo sapien
aatagcattgaccaaagtagcatcaaccaaagc

SEQ ID NO: 740293 - DNA, 33 bp, Homo sapien
tctcaatcttgctttcaaagtttaagtgaagtg

SEQ ID NO: 740294 - DNA, 33 bp, Homo sapien
tctcaatcttgctttctaagtttaagtgaagtg

SEQ ID NO: 740295 - DNA, 33 bp, Homo sapien
atagtttctgagcaaaatgaagtaaaagcatat

SEQ ID NO: 740296 - DNA, 33 bp, Homo sapien
atagtttctgagcaaactgaagtaaaagcatat

SEQ ID NO: 740297 - DNA, 33 bp, Homo sapien
ttaaaattttgatggacgggggcttctatttta

SEQ ID NO: 740298 - DNA, 33 bp, Homo sapien
ttaaaattttgatggaggggggcttctatttta

SEQ ID NO: 740299 - DNA, 33 bp, Homo sapien
tattactgtctttggcagatgaaatgtaacaat

SEQ ID NO: 740300 - DNA, 33 bp, Homo sapien
tattactgtctttggcggatgaaatgtaacaat

SEQ ID NO: 740301 - DNA, 33 bp, Homo sapien
aactaatgttagatgaaatgcaacatgtctcta

SEQ ID NO: 740302 - DNA, 33 bp, Homo sapien
aactaatgttagatgagatgcaacatgtctcta

SEQ ID NO: 740303 - DNA, 33 bp, Homo sapien
cctatctttgtataaccgtccatctttttttaa

SEQ ID NO: 740304 - DNA, 33 bp, Homo sapien
cctatctttgtataactgtccatctttttttaa

SEQ ID NO: 740305 - DNA, 33 bp, Homo sapien
aaatgattctgcattcaccatttctaatcagaa

SEQ ID NO: 740306 - DNA, 33 bp, Homo sapien
aaatgattctgcattctccatttctaatcagaa

SEQ ID NO: 740307 - DNA, 33 bp, Homo sapien
ctctatgttctttaccggcacagtcctgcaaga

SEQ ID NO: 740308 - DNA, 33 bp, Homo sapien
ctctatgttctttacctgcacagtcctgcaaga

SEQ ID NO: 740309 - DNA, 33 bp, Homo sapien
ctttcaaagcaaagtacatgacccaccagcatg

SEQ ID NO: 740310 - DNA, 33 bp, Homo sapien
ctttcaaagcaaagtagatgacccaccagcatg

SEQ ID NO: 740311 - DNA, 33 bp, Homo sapien
caaaatgcaaaatataactttctgtatgaagtg

SEQ ID NO: 740312 - DNA, 33 bp, Homo sapien
caaaatgcaaaatatacctttctgtatgaagtg

SEQ ID NO: 740313 - DNA, 33 bp, Homo sapien
gagtcattcagctcaactccatgctttgcaaaa

SEQ ID NO: 740314 - DNA, 33 bp, Homo sapien
gagtcattcagctcaagtccatgctttgcaaaa

SEQ ID NO: 740315 - DNA, 33 bp, Homo sapien
acaattaggcctcaagccacaactatcacttca

SEQ ID NO: 740316 - DNA, 33 bp, Homo sapien
acaattaggcctcaagtcacaactatcacttca

SEQ ID NO: 740317 - DNA, 33 bp, Homo sapien
tgcttctactcttccaaatattttctagacaag

SEQ ID NO: 740318 - DNA, 33 bp, Homo sapien
tgcttctactcttccagatattttctagacaag

SEQ ID NO: 740319 - DNA, 33 bp, Homo sapien
taaaaaatggtttgaaatgaatacctgcttcca

SEQ ID NO: 740320 - DNA, 33 bp, Homo sapien
taaaaaatggtttgaagtgaatacctgcttcca

SEQ ID NO: 740321 - DNA, 33 bp, Homo sapien
tatttttacataaacacgattaaatgatgttta

SEQ ID NO: 740322 - DNA, 33 bp, Homo sapien
tatttttacataaacaggattaaatgatgttta

SEQ ID NO: 740323 - DNA, 33 bp, Homo sapien
ttggctttttccaaaaataattatagacattgt

SEQ ID NO: 740324 - DNA, 33 bp, Homo sapien
ttggctttttccaaaagtaattatagacattgt

SEQ ID NO: 740325 - DNA, 33 bp, Homo sapien
gtaagatgcctgagtgcaagaagctatttttga

SEQ ID NO: 740326 - DNA, 33 bp, Homo sapien
gtaagatgcctgagtgtaagaagctatttttga

SEQ ID NO: 740327 - DNA, 33 bp, Homo sapien
tttatgcctaatatacaaaatcttttccgttat

SEQ ID NO: 740328 - DNA, 33 bp, Homo sapien
tttatgcctaatataccaaatcttttccgttat

SEQ ID NO: 740329 - DNA, 33 bp, Homo sapien
gtcatgaaacagtgtgccaagcaaagggcacag

SEQ ID NO: 740330 - DNA, 33 bp, Homo sapien
gtcatgaaacagtgtgtcaagcaaagggcacag

SEQ ID NO: 740331 - DNA, 33 bp, Homo sapien
tggtgtgaaacgaaaacgtccctaggagaatta

SEQ ID NO: 740332 - DNA, 33 bp, Homo sapien
tggtgtgaaacgaaaatgtccctaggagaatta

SEQ ID NO: 740333 - DNA, 33 bp, Homo sapien
tcctaacacctgtgaccatgtttatttttgttt

SEQ ID NO: 740334 - DNA, 33 bp, Homo sapien
tcctaacacctgtgactatgtttatttttgttt

SEQ ID NO: 740335 - DNA, 33 bp, Homo sapien
aatgaaattgagtgagacgcttcctctgatcat

SEQ ID NO: 740336 - DNA, 33 bp, Homo sapien
aatgaaattgagtgaggcgcttcctctgatcat

SEQ ID NO: 740337 - DNA, 33 bp, Homo sapien
ttcccgaaaatgttaaagctggattccatgtgt

SEQ ID NO: 740338 - DNA, 33 bp, Homo sapien
ttcccgaaaatgttaaggctggattccatgtgt

SEQ ID NO: 740339 - DNA, 33 bp, Homo sapien
tggctattatgaaaaacgtcaaaaacgacagat

SEQ ID NO: 740340 - DNA, 33 bp, Homo sapien
tggctattatgaaaaatgtcaaaaacgacagat

SEQ ID NO: 740341 - DNA, 33 bp, Homo sapien
ataaaaataaaggaccactctttctacttccac

SEQ ID NO: 740342 - DNA, 33 bp, Homo sapien
ataaaaataaaggaccgctctttctacttccac

SEQ ID NO: 740343 - DNA, 33 bp, Homo sapien
catgtttgtaaagaaaatagggctaatgaggaa

SEQ ID NO: 740344 - DNA, 33 bp, Homo sapien
catgtttgtaaagaaagtagggctaatgaggaa

SEQ ID NO: 740345 - DNA, 33 bp, Homo sapien
ttacactgaataacacccatttatgaaagtttc

SEQ ID NO: 740346 - DNA, 33 bp, Homo sapien
ttacactgaataacactcatttatgaaagtttc

SEQ ID NO: 740347 - DNA, 33 bp, Homo sapien
ctggacacttcagtgacatggtagaaactccct

SEQ ID NO: 740348 - DNA, 33 bp, Homo sapien
ctggacacttcagtgatatggtagaaactccct

SEQ ID NO: 740349 - DNA, 33 bp, Homo sapien
tggggcaccactaagaaggtatcagaaagctac

SEQ ID NO: 740350 - DNA, 33 bp, Homo sapien
tggggcaccactaagatggtatcagaaagctac

SEQ ID NO: 740351 - DNA, 33 bp, Homo sapien
aaatgaagaatagaacacacaagcaggtgccaa

SEQ ID NO: 740352 - DNA, 33 bp, Homo sapien
aaatgaagaatagaacgcacaagcaggtgccaa

SEQ ID NO: 740353 - DNA, 33 bp, Homo sapien
atcatacctgacaagtaaaactcttgcagcatc

SEQ ID NO: 740354 - DNA, 33 bp, Homo sapien
atcatacctgacaagtgaaactcttgcagcatc

SEQ ID NO: 740355 - DNA, 33 bp, Homo sapien
tattgcaattcatgtaactaaccaatttggaag

SEQ ID NO: 740356 - DNA, 33 bp, Homo sapien
tattgcaattcatgtagctaaccaatttggaag

SEQ ID NO: 740357 - DNA, 33 bp, Homo sapien
acacattctgcctccaagtctaagtgcacattt

SEQ ID NO: 740358 - DNA, 33 bp, Homo sapien
acacattctgcctccaggtctaagtgcacattt

SEQ ID NO: 740359 - DNA, 33 bp, Homo sapien
accaggaaagatctcaaccaagtaacaaaaaca

SEQ ID NO: 740360 - DNA, 33 bp, Homo sapien
accaggaaagatctcagccaagtaacaaaaaca

SEQ ID NO: 740361 - DNA, 33 bp, Homo sapien
atattacaaagagtgacggatttgcaatttacc

SEQ ID NO: 740362 - DNA, 33 bp, Homo sapien
atattacaaagagtgagggatttgcaatttacc

SEQ ID NO: 740363 - DNA, 33 bp, Homo sapien
tttctgctccatgaataataataagtcttccac

SEQ ID NO: 740364 - DNA, 33 bp, Homo sapien
tttctgctccatgaatcataataagtcttccac

SEQ ID NO: 740365 - DNA, 33 bp, Homo sapien
ctgtttctacccaacaatacaacaaactatatg

SEQ ID NO: 740366 - DNA, 33 bp, Homo sapien
ctgtttctacccaacagtacaacaaactatatg

SEQ ID NO: 740367 - DNA, 33 bp, Homo sapien
ctactaggaacaaatcgacctctttcactccag

SEQ ID NO: 740368 - DNA, 33 bp, Homo sapien
ctactaggaacaaatctacctctttcactccag

SEQ ID NO: 740369 - DNA, 33 bp, Homo sapien
gtaagaactgtttgacaatgattcttttaagtg

SEQ ID NO: 740370 - DNA, 33 bp, Homo sapien
gtaagaactgtttgacgatgattcttttaagtg

SEQ ID NO: 740371 - DNA, 33 bp, Homo sapien
acatttggtaacactcaaaggagatataaggta

SEQ ID NO: 740372 - DNA, 33 bp, Homo sapien
acatttggtaacactcgaaggagatataaggta

SEQ ID NO: 740373 - DNA, 33 bp, Homo sapien
attgtccttttccctacggcctctttctctctg

SEQ ID NO: 740374 - DNA, 33 bp, Homo sapien
attgtccttttccctatggcctctttctctctg

SEQ ID NO: 740375 - DNA, 33 bp, Homo sapien
ataccataagtctagacatttgatttgagttat

SEQ ID NO: 740376 - DNA, 33 bp, Homo sapien
ataccataagtctagatatttgatttgagttat

SEQ ID NO: 740377 - DNA, 33 bp, Homo sapien
aatgctttttgttcttgaaatatcaggacattt

SEQ ID NO: 740378 - DNA, 33 bp, Homo sapien
aatgctttttgttctttaaatatcaggacattt

SEQ ID NO: 740379 - DNA, 33 bp, Homo sapien
tcttgaatcgagtgcaaattgggggcattttgg

SEQ ID NO: 740380 - DNA, 33 bp, Homo sapien
tcttgaatcgagtgcagattgggggcattttgg

SEQ ID NO: 740381 - DNA, 33 bp, Homo sapien
tgaaatgaagacaagaaagtgacagtgaacaaa

SEQ ID NO: 740382 - DNA, 33 bp, Homo sapien
tgaaatgaagacaagatagtgacagtgaacaaa

SEQ ID NO: 740383 - DNA, 33 bp, Homo sapien
actccaaagactagaaatagattgaaggatctg

SEQ ID NO: 740384 - DNA, 33 bp, Homo sapien
actccaaagactagaattagattgaaggatctg

SEQ ID NO: 740385 - DNA, 33 bp, Homo sapien
gaaacaataacctacaataaaagaggtctggga

SEQ ID NO: 740386 - DNA, 33 bp, Homo sapien
gaaacaataacctacagtaaaagaggtctggga

SEQ ID NO: 740387 - DNA, 33 bp, Homo sapien
ctgaatactctataaccatacaaaggcagaaga

SEQ ID NO: 740388 - DNA, 33 bp, Homo sapien
ctgaatactctataacgatacaaaggcagaaga

SEQ ID NO: 740389 - DNA, 33 bp, Homo sapien
catactataaataacaacatctccttaaggcct

SEQ ID NO: 740390 - DNA, 33 bp, Homo sapien
catactataaataacatcatctccttaaggcct

SEQ ID NO: 740391 - DNA, 33 bp, Homo sapien
tgtaaagaagaatctgcagaaatggcttgatga

SEQ ID NO: 740392 - DNA, 33 bp, Homo sapien
tgtaaagaagaatctgtagaaatggcttgatga

SEQ ID NO: 740393 - DNA, 33 bp, Homo sapien
tagatgataccatccaatagtaagtgtagtagc

SEQ ID NO: 740394 - DNA, 33 bp, Homo sapien
tagatgataccatccagtagtaagtgtagtagc

SEQ ID NO: 740395 - DNA, 33 bp, Homo sapien
cagaggaatggatttaaggagggaacataatat

SEQ ID NO: 740396 - DNA, 33 bp, Homo sapien
cagaggaatggatttatggagggaacataatat

SEQ ID NO: 740397 - DNA, 33 bp, Homo sapien
cactttcaacatagaccgtaagcatgggtagaa

SEQ ID NO: 740398 - DNA, 33 bp, Homo sapien
cactttcaacatagactgtaagcatgggtagaa

SEQ ID NO: 740399 - DNA, 33 bp, Homo sapien
ggctaagactcaacataagctcagttcccacgt

SEQ ID NO: 740400 - DNA, 33 bp, Homo sapien
ggctaagactcaacatgagctcagttcccacgt

SEQ ID NO: 740401 - DNA, 33 bp, Homo sapien
aatatgtgaatccctcagaataaggctggcaaa

SEQ ID NO: 740402 - DNA, 33 bp, Homo sapien
aatatgtgaatccctcggaataaggctggcaaa

SEQ ID NO: 740403 - DNA, 33 bp, Homo sapien
atggaacacatacttacgaggttttagcatttt

SEQ ID NO: 740404 - DNA, 33 bp, Homo sapien
atggaacacatacttatgaggttttagcatttt

SEQ ID NO: 740405 - DNA, 33 bp, Homo sapien
ttgttgactttcaatccctgttttgtgagaaac

SEQ ID NO: 740406 - DNA, 33 bp, Homo sapien
ttgttgactttcaatctctgttttgtgagaaac

SEQ ID NO: 740407 - DNA, 33 bp, Homo sapien
aatctgaatgatgagaaaataaatgtagttaca

SEQ ID NO: 740408 - DNA, 33 bp, Homo sapien
aatctgaatgatgagagaataaatgtagttaca

SEQ ID NO: 740409 - DNA, 33 bp, Homo sapien
aaactagatgatgagactagatatattttgttg

SEQ ID NO: 740410 - DNA, 33 bp, Homo sapien
aaactagatgatgagattagatatattttgttg

SEQ ID NO: 740411 - DNA, 33 bp, Homo sapien
tcaggtaggcttttcccaaaacttctgtacaca

SEQ ID NO: 740412 - DNA, 33 bp, Homo sapien
tcaggtaggcttttcctaaaacttctgtacaca

SEQ ID NO: 740413 - DNA, 33 bp, Homo sapien
aatactccacagccaactgtcaggcaaaaaacc

SEQ ID NO: 740414 - DNA, 33 bp, Homo sapien
aatactccacagccaattgtcaggcaaaaaacc

SEQ ID NO: 740415 - DNA, 33 bp, Homo sapien
gtgaaaaatccccaaacaggatgataatacagt

SEQ ID NO: 740416 - DNA, 33 bp, Homo sapien
gtgaaaaatccccaaataggatgataatacagt

SEQ ID NO: 740417 - DNA, 33 bp, Homo sapien
cagaaaatctcaccaaactgttttctacatcat

SEQ ID NO: 740418 - DNA, 33 bp, Homo sapien
cagaaaatctcaccaatctgttttctacatcat

SEQ ID NO: 740419 - DNA, 33 bp, Homo sapien
accccattcctcatgacgtgcttttctcacatt

SEQ ID NO: 740420 - DNA, 33 bp, Homo sapien
accccattcctcatgatgtgcttttctcacatt

SEQ ID NO: 740421 - DNA, 33 bp, Homo sapien
acagttttgaaattacagctaaataggaagaat

SEQ ID NO: 740422 - DNA, 33 bp, Homo sapien
acagttttgaaattacggctaaataggaagaat

SEQ ID NO: 740423 - DNA, 33 bp, Homo sapien
catctgttggtgaaaaactttactgcaacttta

SEQ ID NO: 740424 - DNA, 33 bp, Homo sapien
catctgttggtgaaaacctttactgcaacttta

SEQ ID NO: 740425 - DNA, 33 bp, Homo sapien
ttcaagataaaagccaatatgaaaccacaaaag

SEQ ID NO: 740426 - DNA, 33 bp, Homo sapien
ttcaagataaaagccagtatgaaaccacaaaag

SEQ ID NO: 740427 - DNA, 33 bp, Homo sapien
tgtggtacataaacataatggaataccacacag

SEQ ID NO: 740428 - DNA, 33 bp, Homo sapien
tgtggtacataaacatgatggaataccacacag

SEQ ID NO: 740429 - DNA, 33 bp, Homo sapien
aatttccttgctctatcacattctgatctgtga

SEQ ID NO: 740430 - DNA, 33 bp, Homo sapien
aatttccttgctctattacattctgatctgtga

SEQ ID NO: 740431 - DNA, 33 bp, Homo sapien
aatatgcctgagaatgaattaaagtgttaattc

SEQ ID NO: 740432 - DNA, 33 bp, Homo sapien
aatatgcctgagaatggattaaagtgttaattc

SEQ ID NO: 740433 - DNA, 33 bp, Homo sapien
tgagttaataatgctgcatcttatcgagaattg

SEQ ID NO: 740434 - DNA, 33 bp, Homo sapien
tgagttaataatgctgtatcttatcgagaattg

SEQ ID NO: 740435 - DNA, 33 bp, Homo sapien
attgctttcaataatcacatttttactaatcac

SEQ ID NO: 740436 - DNA, 33 bp, Homo sapien
attgctttcaataatcgcatttttactaatcac

SEQ ID NO: 740437 - DNA, 33 bp, Homo sapien
gaattatgaaatgaagcagcaaatgtcaatacc

SEQ ID NO: 740438 - DNA, 33 bp, Homo sapien
gaattatgaaatgaaggagcaaatgtcaatacc

SEQ ID NO: 740439 - DNA, 33 bp, Homo sapien
ggaacctggtgctctcaaaccttcagcagtgac

SEQ ID NO: 740440 - DNA, 33 bp, Homo sapien
ggaacctggtgctctcgaaccttcagcagtgac

SEQ ID NO: 740441 - DNA, 33 bp, Homo sapien
tatagtggaagagtaacagcagattttggtgta

SEQ ID NO: 740442 - DNA, 33 bp, Homo sapien
tatagtggaagagtaagagcagattttggtgta

SEQ ID NO: 740443 - DNA, 33 bp, Homo sapien
tgattccttatactccagaaccaaaaattgaat

SEQ ID NO: 740444 - DNA, 33 bp, Homo sapien
tgattccttatactccggaaccaaaaattgaat

SEQ ID NO: 740445 - DNA, 33 bp, Homo sapien
aggttaaagagtgtgacctaaagaggcaaatat

SEQ ID NO: 740446 - DNA, 33 bp, Homo sapien
aggttaaagagtgtgatctaaagaggcaaatat

SEQ ID NO: 740447 - DNA, 33 bp, Homo sapien
tatgccaattttcatacggtacttttaattgca

SEQ ID NO: 740448 - DNA, 33 bp, Homo sapien
tatgccaattttcatatggtacttttaattgca

SEQ ID NO: 740449 - DNA, 33 bp, Homo sapien
ggtcttttgaataatacatgaccaactcaatga

SEQ ID NO: 740450 - DNA, 33 bp, Homo sapien
ggtcttttgaataatatatgaccaactcaatga

SEQ ID NO: 740451 - DNA, 33 bp, Homo sapien
tcaggaaccatccttaaatcacaagcttctaga

SEQ ID NO: 740452 - DNA, 33 bp, Homo sapien
tcaggaaccatccttacatcacaagcttctaga

SEQ ID NO: 740453 - DNA, 33 bp, Homo sapien
tgctaagcaatatgtacggtttaatcatttata

SEQ ID NO: 740454 - DNA, 33 bp, Homo sapien
tgctaagcaatatgtatggtttaatcatttata

SEQ ID NO: 740455 - DNA, 33 bp, Homo sapien
gtataagatccagttacatgttttggataattt

SEQ ID NO: 740456 - DNA, 33 bp, Homo sapien
gtataagatccagttatatgttttggataattt

SEQ ID NO: 740457 - DNA, 33 bp, Homo sapien
tccctgtcagccttcaactagagtcactgaggg

SEQ ID NO: 740458 - DNA, 33 bp, Homo sapien
tccctgtcagccttcagctagagtcactgaggg

SEQ ID NO: 740459 - DNA, 33 bp, Homo sapien
gagagacaatcctccacggtatcacatttctgt

SEQ ID NO: 740460 - DNA, 33 bp, Homo sapien
gagagacaatcctccatggtatcacatttctgt

SEQ ID NO: 740461 - DNA, 33 bp, Homo sapien
tatttattaaaataaactgccagggcttccggt

SEQ ID NO: 740462 - DNA, 33 bp, Homo sapien
tatttattaaaataaattgccagggcttccggt

SEQ ID NO: 740463 - DNA, 33 bp, Homo sapien
aatgaaatagaatgctaaaagtgaaaaagaaca

SEQ ID NO: 740464 - DNA, 33 bp, Homo sapien
aatgaaatagaatgctgaaagtgaaaaagaaca

SEQ ID NO: 740465 - DNA, 33 bp, Homo sapien
ctctggcaaataagaacataggtgctaaatttt

SEQ ID NO: 740466 - DNA, 33 bp, Homo sapien
ctctggcaaataagaagataggtgctaaatttt

SEQ ID NO: 740467 - DNA, 33 bp, Homo sapien
ttatgtcatgagaatgcagccgttatgaatgag

SEQ ID NO: 740468 - DNA, 33 bp, Homo sapien
ttatgtcatgagaatggagccgttatgaatgag

SEQ ID NO: 740469 - DNA, 33 bp, Homo sapien
tcaatcgtctgctatacgttataatttcccatt

SEQ ID NO: 740470 - DNA, 33 bp, Homo sapien
tcaatcgtctgctatatgttataatttcccatt

SEQ ID NO: 740471 - DNA, 33 bp, Homo sapien
aaagttgagctaggttgaaaaatggaagaaatt

SEQ ID NO: 740472 - DNA, 33 bp, Homo sapien
aaagttgagctaggtttaaaaatggaagaaatt

SEQ ID NO: 740473 - DNA, 33 bp, Homo sapien
cttaatggagtgtcacactgaatagcaggggtc

SEQ ID NO: 740474 - DNA, 33 bp, Homo sapien
cttaatggagtgtcacgctgaatagcaggggtc

SEQ ID NO: 740475 - DNA, 33 bp, Homo sapien
tgactagtagcatacactcaaatttccacgtgt

SEQ ID NO: 740476 - DNA, 33 bp, Homo sapien
tgactagtagcatacagtcaaatttccacgtgt

SEQ ID NO: 740477 - DNA, 33 bp, Homo sapien
taacccagatatctagaatgcttttctcacctc

SEQ ID NO: 740478 - DNA, 33 bp, Homo sapien
taacccagatatctaggatgcttttctcacctc

SEQ ID NO: 740479 - DNA, 33 bp, Homo sapien
aactcagcctccatacacaagtgaggcagaaaa

SEQ ID NO: 740480 - DNA, 33 bp, Homo sapien
aactcagcctccatactcaagtgaggcagaaaa

SEQ ID NO: 740481 - DNA, 33 bp, Homo sapien
aaaatgcaacttttagcatggaatttctcctgt

SEQ ID NO: 740482 - DNA, 33 bp, Homo sapien
aaaatgcaacttttagtatggaatttctcctgt

SEQ ID NO: 740483 - DNA, 33 bp, Homo sapien
cccattcacctccaaaggattgagcaaatggcc

SEQ ID NO: 740484 - DNA, 33 bp, Homo sapien
cccattcacctccaaatgattgagcaaatggcc

SEQ ID NO: 740485 - DNA, 33 bp, Homo sapien
ttttgcttcaaaattcaaaaagtaggccatttg

SEQ ID NO: 740486 - DNA, 33 bp, Homo sapien
ttttgcttcaaaattcgaaaagtaggccatttg

SEQ ID NO: 740487 - DNA, 33 bp, Homo sapien
taactactgctgcccagaacaccttctccttcc

SEQ ID NO: 740488 - DNA, 33 bp, Homo sapien
taactactgctgcccataacaccttctccttcc

SEQ ID NO: 740489 - DNA, 33 bp, Homo sapien
tacccttaagaaagcaacactgactttttcatg

SEQ ID NO: 740490 - DNA, 33 bp, Homo sapien
tacccttaagaaagcaccactgactttttcatg

SEQ ID NO: 740491 - DNA, 33 bp, Homo sapien
gtgccataagagggaactatgtgggcaataaga

SEQ ID NO: 740492 - DNA, 33 bp, Homo sapien
gtgccataagagggaagtatgtgggcaataaga

SEQ ID NO: 740493 - DNA, 33 bp, Homo sapien
tgagtgtgaaagctgacaaattggtctcttaca

SEQ ID NO: 740494 - DNA, 33 bp, Homo sapien
tgagtgtgaaagctgataaattggtctcttaca

SEQ ID NO: 740495 - DNA, 33 bp, Homo sapien
attcatggcccaataaggctaaaaatatgaaat

SEQ ID NO: 740496 - DNA, 33 bp, Homo sapien
attcatggcccaataatgctaaaaatatgaaat

SEQ ID NO: 740497 - DNA, 33 bp, Homo sapien
tttgttaagaacagcaataaaaactaggagaga

SEQ ID NO: 740498 - DNA, 33 bp, Homo sapien
tttgttaagaacagcagtaaaaactaggagaga

SEQ ID NO: 740499 - DNA, 33 bp, Homo sapien
ggggctggaagggtaaatcccaaatcaaagtta

SEQ ID NO: 740500 - DNA, 33 bp, Homo sapien
ggggctggaagggtaagtcccaaatcaaagtta

SEQ ID NO: 740501 - DNA, 33 bp, Homo sapien
aaagagctgactatacaagagtaattgtaggta

SEQ ID NO: 740502 - DNA, 33 bp, Homo sapien
aaagagctgactatacgagagtaattgtaggta

SEQ ID NO: 740503 - DNA, 33 bp, Homo sapien
atgttctgataattcacgcaaaaagactcactt

SEQ ID NO: 740504 - DNA, 33 bp, Homo sapien
atgttctgataattcatgcaaaaagactcactt

SEQ ID NO: 740505 - DNA, 33 bp, Homo sapien
gctccctccctgtttcaagttgtcgctgtcttt

SEQ ID NO: 740506 - DNA, 33 bp, Homo sapien
gctccctccctgtttcgagttgtcgctgtcttt

SEQ ID NO: 740507 - DNA, 33 bp, Homo sapien
gtcattgagcaaaacccgaatatcaaaatttga

SEQ ID NO: 740508 - DNA, 33 bp, Homo sapien
gtcattgagcaaaacctgaatatcaaaatttga

SEQ ID NO: 740509 - DNA, 33 bp, Homo sapien
caattagcaaagaagggatctctgacaaactga

SEQ ID NO: 740510 - DNA, 33 bp, Homo sapien
caattagcaaagaaggtatctctgacaaactga

SEQ ID NO: 740511 - DNA, 33 bp, Homo sapien
tccttcaatttctgatcagccacaaacatagac

SEQ ID NO: 740512 - DNA, 33 bp, Homo sapien
tccttcaatttctgattagccacaaacatagac

SEQ ID NO: 740513 - DNA, 33 bp, Homo sapien
ttgttcagcggctatacctgtgaatgtctggaa

SEQ ID NO: 740514 - DNA, 33 bp, Homo sapien
ttgttcagcggctatatctgtgaatgtctggaa

SEQ ID NO: 740515 - DNA, 33 bp, Homo sapien
ttaccaaattacgaagacatctcaggccctgga

SEQ ID NO: 740516 - DNA, 33 bp, Homo sapien
ttaccaaattacgaaggcatctcaggccctgga

SEQ ID NO: 740517 - DNA, 33 bp, Homo sapien
aatacttccatgaagtcaagagtgtcccctaaa

SEQ ID NO: 740518 - DNA, 33 bp, Homo sapien
aatacttccatgaagtgaagagtgtcccctaaa

SEQ ID NO: 740519 - DNA, 33 bp, Homo sapien
cacttctccccatttccaacaaatcgtcatgat

SEQ ID NO: 740520 - DNA, 33 bp, Homo sapien
cacttctccccatttctaacaaatcgtcatgat

SEQ ID NO: 740521 - DNA, 33 bp, Homo sapien
actccattaatatttaggctggagaaacagaca

SEQ ID NO: 740522 - DNA, 33 bp, Homo sapien
actccattaatatttatgctggagaaacagaca

SEQ ID NO: 740523 - DNA, 33 bp, Homo sapien
agagtggtgttcaaaacggagggtcttttctta

SEQ ID NO: 740524 - DNA, 33 bp, Homo sapien
agagtggtgttcaaaatggagggtcttttctta

SEQ ID NO: 740525 - DNA, 33 bp, Homo sapien
tttcctttctgcttacaagaacagctctctctc

SEQ ID NO: 740526 - DNA, 33 bp, Homo sapien
tttcctttctgcttacgagaacagctctctctc

SEQ ID NO: 740527 - DNA, 33 bp, Homo sapien
ataggaaaggaagggacctacctgtgacttacc

SEQ ID NO: 740528 - DNA, 33 bp, Homo sapien
ataggaaaggaagggagctacctgtgacttacc

SEQ ID NO: 740529 - DNA, 33 bp, Homo sapien
caactgcatagtcccaaaagagtacttcttccc

SEQ ID NO: 740530 - DNA, 33 bp, Homo sapien
caactgcatagtcccataagagtacttcttccc

SEQ ID NO: 740531 - DNA, 33 bp, Homo sapien
tgatgtttaatattgcccacaataccctccttg

SEQ ID NO: 740532 - DNA, 33 bp, Homo sapien
tgatgtttaatattgctcacaataccctccttg

SEQ ID NO: 740533 - DNA, 33 bp, Homo sapien
ctagttagctatctcactgaaagcatcagtgaa

SEQ ID NO: 740534 - DNA, 33 bp, Homo sapien
ctagttagctatctcattgaaagcatcagtgaa

SEQ ID NO: 740535 - DNA, 33 bp, Homo sapien
tctttccatgttttggaaaagagcaataggttt

SEQ ID NO: 740536 - DNA, 33 bp, Homo sapien
tctttccatgttttggtaaagagcaataggttt

SEQ ID NO: 740537 - DNA, 33 bp, Homo sapien
atgtcagaatatattacgtagcattcactgtac

SEQ ID NO: 740538 - DNA, 33 bp, Homo sapien
atgtcagaatatattatgtagcattcactgtac

SEQ ID NO: 740539 - DNA, 33 bp, Homo sapien
tttaagaattgtcttacgacttaacatatggtc

SEQ ID NO: 740540 - DNA, 33 bp, Homo sapien
tttaagaattgtcttatgacttaacatatggtc

SEQ ID NO: 740541 - DNA, 33 bp, Homo sapien
aggcttacattaaaaacggcagtacagaacgtt

SEQ ID NO: 740542 - DNA, 33 bp, Homo sapien
aggcttacattaaaaatggcagtacagaacgtt

SEQ ID NO: 740543 - DNA, 33 bp, Homo sapien
tgatttgattgttacacgttgtatacttgtatc

SEQ ID NO: 740544 - DNA, 33 bp, Homo sapien
tgatttgattgttacatgttgtatacttgtatc

SEQ ID NO: 740545 - DNA, 33 bp, Homo sapien
cacatcaagatgtcagaaggaatacaggaaggc

SEQ ID NO: 740546 - DNA, 33 bp, Homo sapien
cacatcaagatgtcaggaggaatacaggaaggc

SEQ ID NO: 740547 - DNA, 33 bp, Homo sapien
taggagaatcaaattaacttctattatgccaca

SEQ ID NO: 740548 - DNA, 33 bp, Homo sapien
taggagaatcaaattaccttctattatgccaca

SEQ ID NO: 740549 - DNA, 33 bp, Homo sapien
actggagaacagaagacactgtgagtcatcaga

SEQ ID NO: 740550 - DNA, 33 bp, Homo sapien
actggagaacagaagagactgtgagtcatcaga

SEQ ID NO: 740551 - DNA, 33 bp, Homo sapien
ctatctaactaaaatccacatcttctatataat

SEQ ID NO: 740552 - DNA, 33 bp, Homo sapien
ctatctaactaaaatcgacatcttctatataat

SEQ ID NO: 740553 - DNA, 33 bp, Homo sapien
atatttggtgtacttcacaattcataaaaatag

SEQ ID NO: 740554 - DNA, 33 bp, Homo sapien
atatttggtgtacttcgcaattcataaaaatag

SEQ ID NO: 740555 - DNA, 33 bp, Homo sapien
gctttttattaaatcaactccagtcatgtaagg

SEQ ID NO: 740556 - DNA, 33 bp, Homo sapien
gctttttattaaatcatctccagtcatgtaagg

SEQ ID NO: 740557 - DNA, 33 bp, Homo sapien
ttaacagcaacttatacgtacttctccacttgt

SEQ ID NO: 740558 - DNA, 33 bp, Homo sapien
ttaacagcaacttatatgtacttctccacttgt

SEQ ID NO: 740559 - DNA, 33 bp, Homo sapien
atttggaaaagtagcacctgagacctttactat

SEQ ID NO: 740560 - DNA, 33 bp, Homo sapien
atttggaaaagtagcatctgagacctttactat

SEQ ID NO: 740561 - DNA, 33 bp, Homo sapien
tgcactttactcagcaactaggcaattctgact

SEQ ID NO: 740562 - DNA, 33 bp, Homo sapien
tgcactttactcagcagctaggcaattctgact

SEQ ID NO: 740563 - DNA, 33 bp, Homo sapien
agatgatgatttacaaattgagaaggaaaataa

SEQ ID NO: 740564 - DNA, 33 bp, Homo sapien
agatgatgatttacaagttgagaaggaaaataa

SEQ ID NO: 740565 - DNA, 33 bp, Homo sapien
tgaggcaaattctgcccgaatgttggaaaggaa

SEQ ID NO: 740566 - DNA, 33 bp, Homo sapien
tgaggcaaattctgcctgaatgttggaaaggaa

SEQ ID NO: 740567 - DNA, 33 bp, Homo sapien
gaaagttaagcctgagcccttgcgaaatgctgt

SEQ ID NO: 740568 - DNA, 33 bp, Homo sapien
gaaagttaagcctgagtccttgcgaaatgctgt

SEQ ID NO: 740569 - DNA, 33 bp, Homo sapien
tgcttatcctgcgttacgtgtctcttgctttac

SEQ ID NO: 740570 - DNA, 33 bp, Homo sapien
tgcttatcctgcgttatgtgtctcttgctttac

SEQ ID NO: 740571 - DNA, 33 bp, Homo sapien
tatcatattaagccacagaaatttggaaggttc

SEQ ID NO: 740572 - DNA, 33 bp, Homo sapien
tatcatattaagccacggaaatttggaaggttc

SEQ ID NO: 740573 - DNA, 33 bp, Homo sapien
gtggtgaggtatgtcccacacatctttcttatg

SEQ ID NO: 740574 - DNA, 33 bp, Homo sapien
gtggtgaggtatgtcctacacatctttcttatg

SEQ ID NO: 740575 - DNA, 33 bp, Homo sapien
catttgtcttactgaacgcaagcaccatgagct

SEQ ID NO: 740576 - DNA, 33 bp, Homo sapien
catttgtcttactgaatgcaagcaccatgagct

SEQ ID NO: 740577 - DNA, 33 bp, Homo sapien
caccagagatgtcagacaactatcccaaggaag

SEQ ID NO: 740578 - DNA, 33 bp, Homo sapien
caccagagatgtcagataactatcccaaggaag

SEQ ID NO: 740579 - DNA, 33 bp, Homo sapien
ttaaaaaataacatcccaagaatatctctttaa

SEQ ID NO: 740580 - DNA, 33 bp, Homo sapien
ttaaaaaataacatccgaagaatatctctttaa

SEQ ID NO: 740581 - DNA, 33 bp, Homo sapien
aaagttgctatacagaacttagagaagaacatt

SEQ ID NO: 740582 - DNA, 33 bp, Homo sapien
aaagttgctatacagagcttagagaagaacatt

SEQ ID NO: 740583 - DNA, 33 bp, Homo sapien
gcctaggtgttattcaggtgccaatagctgtat

SEQ ID NO: 740584 - DNA, 33 bp, Homo sapien
gcctaggtgttattcatgtgccaatagctgtat

SEQ ID NO: 740585 - DNA, 33 bp, Homo sapien
ctgtatattttccccactgaatttagtgtctgt

SEQ ID NO: 740586 - DNA, 33 bp, Homo sapien
ctgtatattttccccattgaatttagtgtctgt

SEQ ID NO: 740587 - DNA, 33 bp, Homo sapien
ttaccgaccctccagccaagaaaactgtgttaa

SEQ ID NO: 740588 - DNA, 33 bp, Homo sapien
ttaccgaccctccagcgaagaaaactgtgttaa

SEQ ID NO: 740589 - DNA, 33 bp, Homo sapien
tacctagcagggaaaaatacacaaaaactgcag

SEQ ID NO: 740590 - DNA, 33 bp, Homo sapien
tacctagcagggaaaagtacacaaaaactgcag

SEQ ID NO: 740591 - DNA, 33 bp, Homo sapien
tctacctgggaaccaacggcacaccctatcaag

SEQ ID NO: 740592 - DNA, 33 bp, Homo sapien
tctacctgggaaccaatggcacaccctatcaag

SEQ ID NO: 740593 - DNA, 33 bp, Homo sapien
tttgctgacataataaaagtttctacataaaaa

SEQ ID NO: 740594 - DNA, 33 bp, Homo sapien
tttgctgacataataatagtttctacataaaaa

SEQ ID NO: 740595 - DNA, 33 bp, Homo sapien
tttggccattggaccaagtctaatttctctatt

SEQ ID NO: 740596 - DNA, 33 bp, Homo sapien
tttggccattggaccatgtctaatttctctatt

SEQ ID NO: 740597 - DNA, 33 bp, Homo sapien
tttaactcttgtagcaaaaattcctcagaagac

SEQ ID NO: 740598 - DNA, 33 bp, Homo sapien
tttaactcttgtagcagaaattcctcagaagac

SEQ ID NO: 740599 - DNA, 33 bp, Homo sapien
ttgtcactcagaagaaacttaataggcattaat

SEQ ID NO: 740600 - DNA, 33 bp, Homo sapien
ttgtcactcagaagaagcttaataggcattaat

SEQ ID NO: 740601 - DNA, 33 bp, Homo sapien
caccacctcaaaatctcacgcatctaattgctc

SEQ ID NO: 740602 - DNA, 33 bp, Homo sapien
caccacctcaaaatcttacgcatctaattgctc

SEQ ID NO: 740603 - DNA, 33 bp, Homo sapien
tcactcagcaacaaacgggggagcctctgggtc

SEQ ID NO: 740604 - DNA, 33 bp, Homo sapien
tcactcagcaacaaactggggagcctctgggtc

SEQ ID NO: 740605 - DNA, 33 bp, Homo sapien
actttaaatttggataacttcattgataaaggc

SEQ ID NO: 740606 - DNA, 33 bp, Homo sapien
actttaaatttggatatcttcattgataaaggc

SEQ ID NO: 740607 - DNA, 33 bp, Homo sapien
tcttagttgaactaaccacatctgccatgtctt

SEQ ID NO: 740608 - DNA, 33 bp, Homo sapien
tcttagttgaactaactacatctgccatgtctt

SEQ ID NO: 740609 - DNA, 33 bp, Homo sapien
cattgcataaccaaataatagatacaagaaagt

SEQ ID NO: 740610 - DNA, 33 bp, Homo sapien
cattgcataaccaaattatagatacaagaaagt

SEQ ID NO: 740611 - DNA, 33 bp, Homo sapien
cctggagaattttcacaggttctctggtcagtt

SEQ ID NO: 740612 - DNA, 33 bp, Homo sapien
cctggagaattttcacgggttctctggtcagtt

SEQ ID NO: 740613 - DNA, 33 bp, Homo sapien
atatcttaatgttcaacgtctgacaataaacag

SEQ ID NO: 740614 - DNA, 33 bp, Homo sapien
atatcttaatgttcaatgtctgacaataaacag

SEQ ID NO: 740615 - DNA, 33 bp, Homo sapien
actgaatttagtttcacggcacgagaaaggaaa

SEQ ID NO: 740616 - DNA, 33 bp, Homo sapien
actgaatttagtttcatggcacgagaaaggaaa

SEQ ID NO: 740617 - DNA, 33 bp, Homo sapien
tcagtggagatcatgcgctaatataatgcttcc

SEQ ID NO: 740618 - DNA, 33 bp, Homo sapien
tcagtggagatcatgctctaatataatgcttcc

SEQ ID NO: 740619 - DNA, 33 bp, Homo sapien
tgacttgttctgatgacgtatcttgagttattg

SEQ ID NO: 740620 - DNA, 33 bp, Homo sapien
tgacttgttctgatgatgtatcttgagttattg

SEQ ID NO: 740621 - DNA, 33 bp, Homo sapien
agagctatatgaactacatgaatgatgattgaa

SEQ ID NO: 740622 - DNA, 33 bp, Homo sapien
agagctatatgaactatatgaatgatgattgaa

SEQ ID NO: 740623 - DNA, 33 bp, Homo sapien
ccatataatttcatctaaaaaatgtatgcacat

SEQ ID NO: 740624 - DNA, 33 bp, Homo sapien
ccatataatttcatctcaaaaatgtatgcacat

SEQ ID NO: 740625 - DNA, 33 bp, Homo sapien
ttatcaagagagatcaaattccatcctattcac

SEQ ID NO: 740626 - DNA, 33 bp, Homo sapien
ttatcaagagagatcagattccatcctattcac

SEQ ID NO: 740627 - DNA, 33 bp, Homo sapien
cttccctcttcaaaaacaccacattccctgtag

SEQ ID NO: 740628 - DNA, 33 bp, Homo sapien
cttccctcttcaaaaataccacattccctgtag

SEQ ID NO: 740629 - DNA, 33 bp, Homo sapien
ccagatcaatatgacaacctctttcaccctcct

SEQ ID NO: 740630 - DNA, 33 bp, Homo sapien
ccagatcaatatgacaccctctttcaccctcct

SEQ ID NO: 740631 - DNA, 33 bp, Homo sapien
ctaatggtgggtgaaactaccctagtgcagtga

SEQ ID NO: 740632 - DNA, 33 bp, Homo sapien
ctaatggtgggtgaaattaccctagtgcagtga

SEQ ID NO: 740633 - DNA, 33 bp, Homo sapien
ggtgtgatgctcactccacaggggttttcaatg

SEQ ID NO: 740634 - DNA, 33 bp, Homo sapien
ggtgtgatgctcactcgacaggggttttcaatg

SEQ ID NO: 740635 - DNA, 33 bp, Homo sapien
aaatcagttattagtcacagttcaagatacaga

SEQ ID NO: 740636 - DNA, 33 bp, Homo sapien
aaatcagttattagtctcagttcaagatacaga

SEQ ID NO: 740637 - DNA, 33 bp, Homo sapien
tgctggcaaaatataccgggcatggttagaaga

SEQ ID NO: 740638 - DNA, 33 bp, Homo sapien
tgctggcaaaatatactgggcatggttagaaga

SEQ ID NO: 740639 - DNA, 33 bp, Homo sapien
aaggttaatggaggaaataactttactgagatc

SEQ ID NO: 740640 - DNA, 33 bp, Homo sapien
aaggttaatggaggaagtaactttactgagatc

SEQ ID NO: 740641 - DNA, 33 bp, Homo sapien
taagttcattggtaaacgttaaccagagtaagg

SEQ ID NO: 740642 - DNA, 33 bp, Homo sapien
taagttcattggtaaatgttaaccagagtaagg

SEQ ID NO: 740643 - DNA, 33 bp, Homo sapien
ctgagtggagtgaaataatcttgtttggtgcca

SEQ ID NO: 740644 - DNA, 33 bp, Homo sapien
ctgagtggagtgaaatgatcttgtttggtgcca

SEQ ID NO: 740645 - DNA, 33 bp, Homo sapien
tagtaggggataaactaaagaccattataacct

SEQ ID NO: 740646 - DNA, 33 bp, Homo sapien
tagtaggggataaactgaagaccattataacct

SEQ ID NO: 740647 - DNA, 33 bp, Homo sapien
tatactgaaccaaatgaattgtactgagttgat

SEQ ID NO: 740648 - DNA, 33 bp, Homo sapien
tatactgaaccaaatggattgtactgagttgat

SEQ ID NO: 740649 - DNA, 33 bp, Homo sapien
actgtactgactttaactgagccagcttgcatt

SEQ ID NO: 740650 - DNA, 33 bp, Homo sapien
actgtactgactttaattgagccagcttgcatt

SEQ ID NO: 740651 - DNA, 33 bp, Homo sapien
aaacagcaagtgctaacacagaagctacagcag

SEQ ID NO: 740652 - DNA, 33 bp, Homo sapien
aaacagcaagtgctaatacagaagctacagcag

SEQ ID NO: 740653 - DNA, 33 bp, Homo sapien
ggttttgccagaaccaatattttgaagtattgg

SEQ ID NO: 740654 - DNA, 33 bp, Homo sapien
ggttttgccagaaccagtattttgaagtattgg

SEQ ID NO: 740655 - DNA, 33 bp, Homo sapien
tgcccagctgggtatcagaatatcagacttgca

SEQ ID NO: 740656 - DNA, 33 bp, Homo sapien
tgcccagctgggtatcggaatatcagacttgca

SEQ ID NO: 740657 - DNA, 33 bp, Homo sapien
caggggaaatgctggaaacttatcaaacaacca

SEQ ID NO: 740658 - DNA, 33 bp, Homo sapien
caggggaaatgctggacacttatcaaacaacca

SEQ ID NO: 740659 - DNA, 33 bp, Homo sapien
ctgagagaaatgtgccagagttagtctatggta

SEQ ID NO: 740660 - DNA, 33 bp, Homo sapien
ctgagagaaatgtgccggagttagtctatggta

SEQ ID NO: 740661 - DNA, 33 bp, Homo sapien
tagggtgtaaatattccagattaattggagtct

SEQ ID NO: 740662 - DNA, 33 bp, Homo sapien
tagggtgtaaatattctagattaattggagtct

SEQ ID NO: 740663 - DNA, 33 bp, Homo sapien
taacggggacgctttaaagaaacgcactcgcct

SEQ ID NO: 740664 - DNA, 33 bp, Homo sapien
taacggggacgctttagagaaacgcactcgcct

SEQ ID NO: 740665 - DNA, 33 bp, Homo sapien
attacaagaaaaatcaagagataagccaggatc

SEQ ID NO: 740666 - DNA, 33 bp, Homo sapien
attacaagaaaaatcaggagataagccaggatc

SEQ ID NO: 740667 - DNA, 33 bp, Homo sapien
ggtaaatttaaatccaatcattgtctatacttt

SEQ ID NO: 740668 - DNA, 33 bp, Homo sapien
ggtaaatttaaatccagtcattgtctatacttt

SEQ ID NO: 740669 - DNA, 33 bp, Homo sapien
cacgtgtagaagcagcacagagtgagatttaat

SEQ ID NO: 740670 - DNA, 33 bp, Homo sapien
cacgtgtagaagcagcgcagagtgagatttaat

SEQ ID NO: 740671 - DNA, 33 bp, Homo sapien
tttgccctttcaaacaataaaacgatttagctt

SEQ ID NO: 740672 - DNA, 33 bp, Homo sapien
tttgccctttcaaacagtaaaacgatttagctt

SEQ ID NO: 740673 - DNA, 33 bp, Homo sapien
atctgtgtgatttgaacgctacacacctttggc

SEQ ID NO: 740674 - DNA, 33 bp, Homo sapien
atctgtgtgatttgaatgctacacacctttggc

SEQ ID NO: 740675 - DNA, 33 bp, Homo sapien
gcgaaaataatacctgaaacagcaagtgtaaag

SEQ ID NO: 740676 - DNA, 33 bp, Homo sapien
gcgaaaataatacctggaacagcaagtgtaaag

SEQ ID NO: 740677 - DNA, 33 bp, Homo sapien
ctcttttttccattcacatcatcattatgcgtg

SEQ ID NO: 740678 - DNA, 33 bp, Homo sapien
ctcttttttccattcatatcatcattatgcgtg

SEQ ID NO: 740679 - DNA, 33 bp, Homo sapien
acaagtgcagataatcagaggttctaaaataaa

SEQ ID NO: 740680 - DNA, 33 bp, Homo sapien
acaagtgcagataatcggaggttctaaaataaa

SEQ ID NO: 740681 - DNA, 33 bp, Homo sapien
aagcaaagggcagcccagacaaacagtatgtcc

SEQ ID NO: 740682 - DNA, 33 bp, Homo sapien
aagcaaagggcagcccggacaaacagtatgtcc

SEQ ID NO: 740683 - DNA, 33 bp, Homo sapien
ttaaagtagtaaggtacaattctgcatagaaag

SEQ ID NO: 740684 - DNA, 33 bp, Homo sapien
ttaaagtagtaaggtataattctgcatagaaag

SEQ ID NO: 740685 - DNA, 33 bp, Homo sapien
gagaaatttgaggtcactccaagatgaaggctg

SEQ ID NO: 740686 - DNA, 33 bp, Homo sapien
gagaaatttgaggtcattccaagatgaaggctg

SEQ ID NO: 740687 - DNA, 33 bp, Homo sapien
gacagtaatggtgtcaacttttatgaacttata

SEQ ID NO: 740688 - DNA, 33 bp, Homo sapien
gacagtaatggtgtcatcttttatgaacttata

SEQ ID NO: 740689 - DNA, 33 bp, Homo sapien
agtagacttgcagaaaacatggagacaataatg

SEQ ID NO: 740690 - DNA, 33 bp, Homo sapien
agtagacttgcagaaaccatggagacaataatg

SEQ ID NO: 740691 - DNA, 33 bp, Homo sapien
tattctgtagggaaaaaagagctaacacacatg

SEQ ID NO: 740692 - DNA, 33 bp, Homo sapien
tattctgtagggaaaagagagctaacacacatg

SEQ ID NO: 740693 - DNA, 33 bp, Homo sapien
gtgagatagatgagccaataggtattatttcct

SEQ ID NO: 740694 - DNA, 33 bp, Homo sapien
gtgagatagatgagcctataggtattatttcct

SEQ ID NO: 740695 - DNA, 33 bp, Homo sapien
aaaagagcaagaacgccgccacatagctagaaa

SEQ ID NO: 740696 - DNA, 33 bp, Homo sapien
aaaagagcaagaacgctgccacatagctagaaa

SEQ ID NO: 740697 - DNA, 33 bp, Homo sapien
gcatttcatctctgcaatcaaacaggcctgaat

SEQ ID NO: 740698 - DNA, 33 bp, Homo sapien
gcatttcatctctgcagtcaaacaggcctgaat

SEQ ID NO: 740699 - DNA, 33 bp, Homo sapien
gaggattcaggcacagcatctgctatggcagcc

SEQ ID NO: 740700 - DNA, 33 bp, Homo sapien
gaggattcaggcacagtatctgctatggcagcc

SEQ ID NO: 740701 - DNA, 33 bp, Homo sapien
atcaccaagacgatggaactaagccattcatga

SEQ ID NO: 740702 - DNA, 33 bp, Homo sapien
atcaccaagacgatgggactaagccattcatga

SEQ ID NO: 740703 - DNA, 33 bp, Homo sapien
cggacagtgcaactcacgtaattatttgtatca

SEQ ID NO: 740704 - DNA, 33 bp, Homo sapien
cggacagtgcaactcatgtaattatttgtatca

SEQ ID NO: 740705 - DNA, 33 bp, Homo sapien
tatactctgtctgaaaatccaaatagtgtgaca

SEQ ID NO: 740706 - DNA, 33 bp, Homo sapien
tatactctgtctgaaagtccaaatagtgtgaca

SEQ ID NO: 740707 - DNA, 33 bp, Homo sapien
gtggatgaaacaaagaagaacagctattttgtt

SEQ ID NO: 740708 - DNA, 33 bp, Homo sapien
gtggatgaaacaaagacgaacagctattttgtt

SEQ ID NO: 740709 - DNA, 33 bp, Homo sapien
gggaatcatttacttacacaaatgtgtttcttt

SEQ ID NO: 740710 - DNA, 33 bp, Homo sapien
gggaatcatttacttatacaaatgtgtttcttt

SEQ ID NO: 740711 - DNA, 33 bp, Homo sapien
acacatagatatcaccaattatttttcccaata

SEQ ID NO: 740712 - DNA, 33 bp, Homo sapien
acacatagatatcaccgattatttttcccaata

SEQ ID NO: 740713 - DNA, 33 bp, Homo sapien
gatataaatagcatccacaatgtagactctaag

SEQ ID NO: 740714 - DNA, 33 bp, Homo sapien
gatataaatagcatccgcaatgtagactctaag

SEQ ID NO: 740715 - DNA, 33 bp, Homo sapien
ctgcatttgagaaaaactcccatgcggtttttt

SEQ ID NO: 740716 - DNA, 33 bp, Homo sapien
ctgcatttgagaaaaagtcccatgcggtttttt

SEQ ID NO: 740717 - DNA, 33 bp, Homo sapien
ataaaataggactataagcatattcacctcatc

SEQ ID NO: 740718 - DNA, 33 bp, Homo sapien
ataaaataggactataggcatattcacctcatc

SEQ ID NO: 740719 - DNA, 33 bp, Homo sapien
agaaatgtaacagagacaaggaaaccaatctta

SEQ ID NO: 740720 - DNA, 33 bp, Homo sapien
agaaatgtaacagagataaggaaaccaatctta

SEQ ID NO: 740721 - DNA, 33 bp, Homo sapien
gatggaactttaaataatagaatgcattatctt

SEQ ID NO: 740722 - DNA, 33 bp, Homo sapien
gatggaactttaaatagtagaatgcattatctt

SEQ ID NO: 740723 - DNA, 33 bp, Homo sapien
gaaaatgttgttggaacaatcaattctgaatac

SEQ ID NO: 740724 - DNA, 33 bp, Homo sapien
gaaaatgttgttggaagaatcaattctgaatac

SEQ ID NO: 740725 - DNA, 33 bp, Homo sapien
attaactgtatgttagactaaaaacttttacat

SEQ ID NO: 740726 - DNA, 33 bp, Homo sapien
attaactgtatgttaggctaaaaacttttacat

SEQ ID NO: 740727 - DNA, 33 bp, Homo sapien
taatagtgtacaagaagcaagggtttagcactt

SEQ ID NO: 740728 - DNA, 33 bp, Homo sapien
taatagtgtacaagaatcaagggtttagcactt

SEQ ID NO: 740729 - DNA, 33 bp, Homo sapien
ggcagaggacacaagaatcatgggtcagagata

SEQ ID NO: 740730 - DNA, 33 bp, Homo sapien
ggcagaggacacaagactcatgggtcagagata

SEQ ID NO: 740731 - DNA, 33 bp, Homo sapien
tgctcacttgcttttacattgctagctcctggg

SEQ ID NO: 740732 - DNA, 33 bp, Homo sapien
tgctcacttgcttttatattgctagctcctggg

SEQ ID NO: 740733 - DNA, 33 bp, Homo sapien
tgtgctcaagatcaaaaacaagcttcagtggtc

SEQ ID NO: 740734 - DNA, 33 bp, Homo sapien
tgtgctcaagatcaaagacaagcttcagtggtc

SEQ ID NO: 740735 - DNA, 33 bp, Homo sapien
cagcagtttctagtacaacactttgctgaggta

SEQ ID NO: 740736 - DNA, 33 bp, Homo sapien
cagcagtttctagtaccacactttgctgaggta

SEQ ID NO: 740737 - DNA, 33 bp, Homo sapien
aataaaatatcacatacgacagtctagttctta

SEQ ID NO: 740738 - DNA, 33 bp, Homo sapien
aataaaatatcacatatgacagtctagttctta

SEQ ID NO: 740739 - DNA, 33 bp, Homo sapien
actgagagcattttcagtatcacagagactagc

SEQ ID NO: 740740 - DNA, 33 bp, Homo sapien
actgagagcattttcattatcacagagactagc

SEQ ID NO: 740741 - DNA, 33 bp, Homo sapien
cttgattctccagagaccttaattctagtttca

SEQ ID NO: 740742 - DNA, 33 bp, Homo sapien
cttgattctccagagatcttaattctagtttca

SEQ ID NO: 740743 - DNA, 33 bp, Homo sapien
taaacctacaccttgacgcttcaggcctgcacc

SEQ ID NO: 740744 - DNA, 33 bp, Homo sapien
taaacctacaccttgatgcttcaggcctgcacc

SEQ ID NO: 740745 - DNA, 33 bp, Homo sapien
gagatagattcacccacagactttcttgcttag

SEQ ID NO: 740746 - DNA, 33 bp, Homo sapien
gagatagattcacccatagactttcttgcttag

SEQ ID NO: 740747 - DNA, 33 bp, Homo sapien
aatcaatgaagattaaacaaccagtacagtgca

SEQ ID NO: 740748 - DNA, 33 bp, Homo sapien
aatcaatgaagattaatcaaccagtacagtgca

SEQ ID NO: 740749 - DNA, 33 bp, Homo sapien
aaattgaatgtatgtacactcagttaaattaaa

SEQ ID NO: 740750 - DNA, 33 bp, Homo sapien
aaattgaatgtatgtagactcagttaaattaaa

SEQ ID NO: 740751 - DNA, 33 bp, Homo sapien
gggctagatgcctctgaactgaattttctctct

SEQ ID NO: 740752 - DNA, 33 bp, Homo sapien
gggctagatgcctctgtactgaattttctctct

SEQ ID NO: 740753 - DNA, 33 bp, Homo sapien
cctccattatacaaacaatagaagcttgaaatg

SEQ ID NO: 740754 - DNA, 33 bp, Homo sapien
cctccattatacaaacgatagaagcttgaaatg

SEQ ID NO: 740755 - DNA, 33 bp, Homo sapien
aaggtgacttaggtaacaacttgtgaaactggg

SEQ ID NO: 740756 - DNA, 33 bp, Homo sapien
aaggtgacttaggtaataacttgtgaaactggg

SEQ ID NO: 740757 - DNA, 33 bp, Homo sapien
ggcagtggtaaatcccaataacaagggcaattc

SEQ ID NO: 740758 - DNA, 33 bp, Homo sapien
ggcagtggtaaatcccgataacaagggcaattc

SEQ ID NO: 740759 - DNA, 33 bp, Homo sapien
taacgaaaccctaatagtagttcaactcttatt

SEQ ID NO: 740760 - DNA, 33 bp, Homo sapien
taacgaaaccctaatattagttcaactcttatt

SEQ ID NO: 740761 - DNA, 33 bp, Homo sapien
atccgaggggatgggaagtctaaagaataaatg

SEQ ID NO: 740762 - DNA, 33 bp, Homo sapien
atccgaggggatgggaggtctaaagaataaatg

SEQ ID NO: 740763 - DNA, 33 bp, Homo sapien
ttttggaaattttagaaagtagaaagtagtccc

SEQ ID NO: 740764 - DNA, 33 bp, Homo sapien
ttttggaaattttagagagtagaaagtagtccc

SEQ ID NO: 740765 - DNA, 33 bp, Homo sapien
gttgctagaaagctcaaatgggtgaatacaggt

SEQ ID NO: 740766 - DNA, 33 bp, Homo sapien
gttgctagaaagctcatatgggtgaatacaggt

SEQ ID NO: 740767 - DNA, 33 bp, Homo sapien
agtgtttgcttcttccacttcaaacagagcagc

SEQ ID NO: 740768 - DNA, 33 bp, Homo sapien
agtgtttgcttcttccgcttcaaacagagcagc

SEQ ID NO: 740769 - DNA, 33 bp, Homo sapien
gagactgggagtttatgaatatgttacgttgtt

SEQ ID NO: 740770 - DNA, 33 bp, Homo sapien
gagactgggagtttattaatatgttacgttgtt

SEQ ID NO: 740771 - DNA, 33 bp, Homo sapien
agtagtaaagagacaaactgggtttagattcag

SEQ ID NO: 740772 - DNA, 33 bp, Homo sapien
agtagtaaagagacaatctgggtttagattcag

SEQ ID NO: 740773 - DNA, 33 bp, Homo sapien
gactggtgttagaatacattattgcacccctct

SEQ ID NO: 740774 - DNA, 33 bp, Homo sapien
gactggtgttagaatatattattgcacccctct

SEQ ID NO: 740775 - DNA, 33 bp, Homo sapien
agtaatgctgaatcaactacctttcatgggcct

SEQ ID NO: 740776 - DNA, 33 bp, Homo sapien
agtaatgctgaatcaattacctttcatgggcct

SEQ ID NO: 740777 - DNA, 33 bp, Homo sapien
cattctccttacctagccaaaatgcatcagagt

SEQ ID NO: 740778 - DNA, 33 bp, Homo sapien
cattctccttacctagtcaaaatgcatcagagt

SEQ ID NO: 740779 - DNA, 33 bp, Homo sapien
aaaattatagcaaaaacgtttcccagctcttgg

SEQ ID NO: 740780 - DNA, 33 bp, Homo sapien
aaaattatagcaaaaatgtttcccagctcttgg

SEQ ID NO: 740781 - DNA, 33 bp, Homo sapien
caatttgaacctgctaaatctctcaaattgtac

SEQ ID NO: 740782 - DNA, 33 bp, Homo sapien
caatttgaacctgctatatctctcaaattgtac

SEQ ID NO: 740783 - DNA, 33 bp, Homo sapien
aatgtctgtgtttctacagagagcaaactaagg

SEQ ID NO: 740784 - DNA, 33 bp, Homo sapien
aatgtctgtgtttctatagagagcaaactaagg

SEQ ID NO: 740785 - DNA, 33 bp, Homo sapien
caaaatagtcatgatacaatggtagatgatata

SEQ ID NO: 740786 - DNA, 33 bp, Homo sapien
caaaatagtcatgatataatggtagatgatata

SEQ ID NO: 740787 - DNA, 33 bp, Homo sapien
ctctccaccatgtgataatacaatgataagatg

SEQ ID NO: 740788 - DNA, 33 bp, Homo sapien
ctctccaccatgtgatgatacaatgataagatg

SEQ ID NO: 740789 - DNA, 33 bp, Homo sapien
taatgtccatgccaagcaattttacagtgatgg

SEQ ID NO: 740790 - DNA, 33 bp, Homo sapien
taatgtccatgccaagtaattttacagtgatgg

SEQ ID NO: 740791 - DNA, 33 bp, Homo sapien
atcacgttaattacaggcaggcatttcattagg

SEQ ID NO: 740792 - DNA, 33 bp, Homo sapien
atcacgttaattacagtcaggcatttcattagg

SEQ ID NO: 740793 - DNA, 33 bp, Homo sapien
aaatccaattttctacgcttccattcagcccca

SEQ ID NO: 740794 - DNA, 33 bp, Homo sapien
aaatccaattttctactcttccattcagcccca

SEQ ID NO: 740795 - DNA, 33 bp, Homo sapien
tctgcactcaactctcactaccggcttggatcc

SEQ ID NO: 740796 - DNA, 33 bp, Homo sapien
tctgcactcaactctcgctaccggcttggatcc

SEQ ID NO: 740797 - DNA, 33 bp, Homo sapien
ttggggaaaaacaagcaattttcatggagtctt

SEQ ID NO: 740798 - DNA, 33 bp, Homo sapien
ttggggaaaaacaagcgattttcatggagtctt

SEQ ID NO: 740799 - DNA, 33 bp, Homo sapien
atattgattttgtttcaaagaactgaggttatt

SEQ ID NO: 740800 - DNA, 33 bp, Homo sapien
atattgattttgtttctaagaactgaggttatt

SEQ ID NO: 740801 - DNA, 33 bp, Homo sapien
agttgctgcacaggtaacaaagcaggaaactat

SEQ ID NO: 740802 - DNA, 33 bp, Homo sapien
agttgctgcacaggtagcaaagcaggaaactat

SEQ ID NO: 740803 - DNA, 33 bp, Homo sapien
ttacagatgtttctgacacaaaccaattttgag

SEQ ID NO: 740804 - DNA, 33 bp, Homo sapien
ttacagatgtttctgatacaaaccaattttgag

SEQ ID NO: 740805 - DNA, 33 bp, Homo sapien
agtgctctgccaactaaaaacaatcagaagtct

SEQ ID NO: 740806 - DNA, 33 bp, Homo sapien
agtgctctgccaactagaaacaatcagaagtct

SEQ ID NO: 740807 - DNA, 33 bp, Homo sapien
ctgtttcggagggccaatatgtatttcttcact

SEQ ID NO: 740808 - DNA, 33 bp, Homo sapien
ctgtttcggagggccagtatgtatttcttcact

SEQ ID NO: 740809 - DNA, 33 bp, Homo sapien
tcacacagggctgtaacgctccttccccttcca

SEQ ID NO: 740810 - DNA, 33 bp, Homo sapien
tcacacagggctgtaaggctccttccccttcca

SEQ ID NO: 740811 - DNA, 33 bp, Homo sapien
agccgggtgtcacccaaattcagttctacctgg

SEQ ID NO: 740812 - DNA, 33 bp, Homo sapien
agccgggtgtcacccacattcagttctacctgg

SEQ ID NO: 740813 - DNA, 33 bp, Homo sapien
catcaatttctgacccaatttgatgagtataaa

SEQ ID NO: 740814 - DNA, 33 bp, Homo sapien
catcaatttctgaccctatttgatgagtataaa

SEQ ID NO: 740815 - DNA, 33 bp, Homo sapien
ttctgccacacatagacgcttcatctcatattt

SEQ ID NO: 740816 - DNA, 33 bp, Homo sapien
ttctgccacacatagatgcttcatctcatattt

SEQ ID NO: 740817 - DNA, 33 bp, Homo sapien
atggccgcactccgccacagctgctccatgcac

SEQ ID NO: 740818 - DNA, 33 bp, Homo sapien
atggccgcactccgccgcagctgctccatgcac

SEQ ID NO: 740819 - DNA, 33 bp, Homo sapien
tcctcgctttatgagcaacatttggtccatttt

SEQ ID NO: 740820 - DNA, 33 bp, Homo sapien
tcctcgctttatgagccacatttggtccatttt

SEQ ID NO: 740821 - DNA, 33 bp, Homo sapien
gctttattgtctatcacctgagaaacttcataa

SEQ ID NO: 740822 - DNA, 33 bp, Homo sapien
gctttattgtctatcatctgagaaacttcataa

SEQ ID NO: 740823 - DNA, 33 bp, Homo sapien
ttgacatatcaaataaatggacattcctcaaga

SEQ ID NO: 740824 - DNA, 33 bp, Homo sapien
ttgacatatcaaataagtggacattcctcaaga

SEQ ID NO: 740825 - DNA, 33 bp, Homo sapien
tgccgttaatagagaacgcagtgggaggatgaa

SEQ ID NO: 740826 - DNA, 33 bp, Homo sapien
tgccgttaatagagaatgcagtgggaggatgaa

SEQ ID NO: 740827 - DNA, 33 bp, Homo sapien
taggaatgcgagttagaatagtagtacttctca

SEQ ID NO: 740828 - DNA, 33 bp, Homo sapien
taggaatgcgagttaggatagtagtacttctca

SEQ ID NO: 740829 - DNA, 33 bp, Homo sapien
gtattcttatagtaacaggtaacattttgcatg

SEQ ID NO: 740830 - DNA, 33 bp, Homo sapien
gtattcttatagtaactggtaacattttgcatg

SEQ ID NO: 740831 - DNA, 33 bp, Homo sapien
caaagaggagtccaaagagccaaaataattcta

SEQ ID NO: 740832 - DNA, 33 bp, Homo sapien
caaagaggagtccaaatagccaaaataattcta

SEQ ID NO: 740833 - DNA, 33 bp, Homo sapien
tacctagaattttaccagaacgtatatacaaca

SEQ ID NO: 740834 - DNA, 33 bp, Homo sapien
tacctagaattttaccggaacgtatatacaaca

SEQ ID NO: 740835 - DNA, 33 bp, Homo sapien
ttttaaaaaatggtagaattcgcatagtcagaa

SEQ ID NO: 740836 - DNA, 33 bp, Homo sapien
ttttaaaaaatggtaggattcgcatagtcagaa

SEQ ID NO: 740837 - DNA, 33 bp, Homo sapien
tgtaacaaacgaccacagtactttaatgacgta

SEQ ID NO: 740838 - DNA, 33 bp, Homo sapien
tgtaacaaacgaccacggtactttaatgacgta

SEQ ID NO: 740839 - DNA, 33 bp, Homo sapien
gggtgtcagttattccaaagaactcacacataa

SEQ ID NO: 740840 - DNA, 33 bp, Homo sapien
gggtgtcagttattccgaagaactcacacataa

SEQ ID NO: 740841 - DNA, 33 bp, Homo sapien
tggagtgaagttcaacaggatgtgatatatata

SEQ ID NO: 740842 - DNA, 33 bp, Homo sapien
tggagtgaagttcaacgggatgtgatatatata

SEQ ID NO: 740843 - DNA, 33 bp, Homo sapien
tacccagttattaaccagaccttcaaattacca

SEQ ID NO: 740844 - DNA, 33 bp, Homo sapien
tacccagttattaacccgaccttcaaattacca

SEQ ID NO: 740845 - DNA, 33 bp, Homo sapien
atgagtatgacctacaaaggcactggttcaccc

SEQ ID NO: 740846 - DNA, 33 bp, Homo sapien
atgagtatgacctacagaggcactggttcaccc

SEQ ID NO: 740847 - DNA, 33 bp, Homo sapien
gagacatgattactgaaaattcttcatcataat

SEQ ID NO: 740848 - DNA, 33 bp, Homo sapien
gagacatgattactgagaattcttcatcataat

SEQ ID NO: 740849 - DNA, 33 bp, Homo sapien
ttttcttggaagtatcaataaatgtgtatgtaa

SEQ ID NO: 740850 - DNA, 33 bp, Homo sapien
ttttcttggaagtatcgataaatgtgtatgtaa

SEQ ID NO: 740851 - DNA, 33 bp, Homo sapien
ccattattactgcgcaatgaatccatgtactcc

SEQ ID NO: 740852 - DNA, 33 bp, Homo sapien
ccattattactgcgcattgaatccatgtactcc

SEQ ID NO: 740853 - DNA, 33 bp, Homo sapien
taacaagtctgtgccacaccaaatcaggctcct

SEQ ID NO: 740854 - DNA, 33 bp, Homo sapien
taacaagtctgtgccataccaaatcaggctcct

SEQ ID NO: 740855 - DNA, 33 bp, Homo sapien
aaactatgtaacagagaacgaaaaagatattgg

SEQ ID NO: 740856 - DNA, 33 bp, Homo sapien
aaactatgtaacagaggacgaaaaagatattgg

SEQ ID NO: 740857 - DNA, 33 bp, Homo sapien
ttcttagagttctggaccccaaagtggatctcc

SEQ ID NO: 740858 - DNA, 33 bp, Homo sapien
ttcttagagttctggagcccaaagtggatctcc

SEQ ID NO: 740859 - DNA, 33 bp, Homo sapien
gatttgactctgaaaacagctccatcatcttcc

SEQ ID NO: 740860 - DNA, 33 bp, Homo sapien
gatttgactctgaaaagagctccatcatcttcc

SEQ ID NO: 740861 - DNA, 33 bp, Homo sapien
ttaatcaaagttggccaaattgcttttcccatg

SEQ ID NO: 740862 - DNA, 33 bp, Homo sapien
ttaatcaaagttggccgaattgcttttcccatg

SEQ ID NO: 740863 - DNA, 33 bp, Homo sapien
taaaccagtttcctcaactataacgtgtggata

SEQ ID NO: 740864 - DNA, 33 bp, Homo sapien
taaaccagtttcctcatctataacgtgtggata

SEQ ID NO: 740865 - DNA, 33 bp, Homo sapien
attgtatagtggtgaaatctgtaaccaccacct

SEQ ID NO: 740866 - DNA, 33 bp, Homo sapien
attgtatagtggtgaagtctgtaaccaccacct

SEQ ID NO: 740867 - DNA, 33 bp, Homo sapien
ttaaatgaacaatgaagatctaagacaaacatg

SEQ ID NO: 740868 - DNA, 33 bp, Homo sapien
ttaaatgaacaatgaatatctaagacaaacatg

SEQ ID NO: 740869 - DNA, 33 bp, Homo sapien
ggtgcagaatgtaatcaagttctttaacgcatg

SEQ ID NO: 740870 - DNA, 33 bp, Homo sapien
ggtgcagaatgtaatcgagttctttaacgcatg

SEQ ID NO: 740871 - DNA, 33 bp, Homo sapien
caaatatgtgaatatgaagagtgataaaaggtc

SEQ ID NO: 740872 - DNA, 33 bp, Homo sapien
caaatatgtgaatatggagagtgataaaaggtc

SEQ ID NO: 740873 - DNA, 33 bp, Homo sapien
atgcccaacagtttcaagttagcacgttttagc

SEQ ID NO: 740874 - DNA, 33 bp, Homo sapien
atgcccaacagtttcaggttagcacgttttagc

SEQ ID NO: 740875 - DNA, 33 bp, Homo sapien
aattttttaacatggacgttttgtggtaaagaa

SEQ ID NO: 740876 - DNA, 33 bp, Homo sapien
aattttttaacatggatgttttgtggtaaagaa

SEQ ID NO: 740877 - DNA, 33 bp, Homo sapien
ctttacactgatattaaaaacgtttctgcacaa

SEQ ID NO: 740878 - DNA, 33 bp, Homo sapien
ctttacactgatattacaaacgtttctgcacaa

SEQ ID NO: 740879 - DNA, 33 bp, Homo sapien
gttatcagcgatggaaagaatgtaagctagcag

SEQ ID NO: 740880 - DNA, 33 bp, Homo sapien
gttatcagcgatggaaggaatgtaagctagcag

SEQ ID NO: 740881 - DNA, 33 bp, Homo sapien
tcatggagaagttataccttaagctgagttgtg

SEQ ID NO: 740882 - DNA, 33 bp, Homo sapien
tcatggagaagttatatcttaagctgagttgtg

SEQ ID NO: 740883 - DNA, 33 bp, Homo sapien
ttctccatgaagctttcaaagattaagccaagt

SEQ ID NO: 740884 - DNA, 33 bp, Homo sapien
ttctccatgaagcttttaaagattaagccaagt

SEQ ID NO: 740885 - DNA, 33 bp, Homo sapien
tgggagccaagagttgcaagatggatttcttct

SEQ ID NO: 740886 - DNA, 33 bp, Homo sapien
tgggagccaagagttgtaagatggatttcttct

SEQ ID NO: 740887 - DNA, 33 bp, Homo sapien
acatactcaaaacaaaatatttgcatagacatt

SEQ ID NO: 740888 - DNA, 33 bp, Homo sapien
acatactcaaaacaaattatttgcatagacatt

SEQ ID NO: 740889 - DNA, 33 bp, Homo sapien
aatcaaggctttgaacacatatgaacatgagtt

SEQ ID NO: 740890 - DNA, 33 bp, Homo sapien
aatcaaggctttgaacgcatatgaacatgagtt

SEQ ID NO: 740891 - DNA, 33 bp, Homo sapien
aaataatcagcataagaaaaagaagctcaactt

SEQ ID NO: 740892 - DNA, 33 bp, Homo sapien
aaataatcagcataaggaaaagaagctcaactt

SEQ ID NO: 740893 - DNA, 33 bp, Homo sapien
gtatcatacagcactaacaaaaggtatcaaata

SEQ ID NO: 740894 - DNA, 33 bp, Homo sapien
gtatcatacagcactaccaaaaggtatcaaata

SEQ ID NO: 740895 - DNA, 33 bp, Homo sapien
aaagaagtaatttaccaaaatcacacaataaat

SEQ ID NO: 740896 - DNA, 33 bp, Homo sapien
aaagaagtaatttaccgaaatcacacaataaat

SEQ ID NO: 740897 - DNA, 33 bp, Homo sapien
gaattgcatggcttgtaaatgacaaaggagatt

SEQ ID NO: 740898 - DNA, 33 bp, Homo sapien
gaattgcatggcttgtgaatgacaaaggagatt

SEQ ID NO: 740899 - DNA, 33 bp, Homo sapien
aaacaatcccctccaacgactctaatagcttat

SEQ ID NO: 740900 - DNA, 33 bp, Homo sapien
aaacaatcccctccaatgactctaatagcttat

SEQ ID NO: 740901 - DNA, 33 bp, Homo sapien
ttttctgtgtatattaaaatggacttcccagaa

SEQ ID NO: 740902 - DNA, 33 bp, Homo sapien
ttttctgtgtatattataatggacttcccagaa

SEQ ID NO: 740903 - DNA, 33 bp, Homo sapien
ctaggatgatgataaaagcaaattacttcgtgt

SEQ ID NO: 740904 - DNA, 33 bp, Homo sapien
ctaggatgatgataaaggcaaattacttcgtgt

SEQ ID NO: 740905 - DNA, 33 bp, Homo sapien
atgaaacaaaactgacaatttatcatactacct

SEQ ID NO: 740906 - DNA, 33 bp, Homo sapien
atgaaacaaaactgacgatttatcatactacct

SEQ ID NO: 740907 - DNA, 33 bp, Homo sapien
gtaaaatgacctacaaaccataagatagaaaat

SEQ ID NO: 740908 - DNA, 33 bp, Homo sapien
gtaaaatgacctacaatccataagatagaaaat

SEQ ID NO: 740909 - DNA, 33 bp, Homo sapien
gaactccaagacacaacggtaaaatgacctaca

SEQ ID NO: 740910 - DNA, 33 bp, Homo sapien
gaactccaagacacaatggtaaaatgacctaca

SEQ ID NO: 740911 - DNA, 33 bp, Homo sapien
ggagtcactcacttaaatggttcccttaagctg

SEQ ID NO: 740912 - DNA, 33 bp, Homo sapien
ggagtcactcacttaactggttcccttaagctg

SEQ ID NO: 740913 - DNA, 33 bp, Homo sapien
aaaccctttggtgtcaatatctaaagtggatgg

SEQ ID NO: 740914 - DNA, 33 bp, Homo sapien
aaaccctttggtgtcagtatctaaagtggatgg

SEQ ID NO: 740915 - DNA, 33 bp, Homo sapien; identical to SEQ ID NO: 740913

SEQ ID NO: 740916 - DNA, 33 bp, Homo sapien; identical to SEQ ID NO: 740914

SEQ ID NO: 740917 - DNA, 33 bp, Homo sapien
tttctatggatgagggacataatatttactaat

SEQ ID NO: 740918 - DNA, 33 bp, Homo sapien
tttctatggatgaggggcataatatttactaat

SEQ ID NO: 740919 - DNA, 33 bp, Homo sapien
tatatttttttcaatacgtggcaagagcatatt

SEQ ID NO: 740920 - DNA, 33 bp, Homo sapien
tatatttttttcaatatgtggcaagagcatatt

SEQ ID NO: 740921 - DNA, 33 bp, Homo sapien
caccattgcagccctacgaagccactcttagtt

SEQ ID NO: 740922 - DNA, 33 bp, Homo sapien
caccattgcagccctatgaagccactcttagtt

SEQ ID NO: 740923 - DNA, 33 bp, Homo sapien
aaggtaagagaattaacgctgaggtctgggtat

SEQ ID NO: 740924 - DNA, 33 bp, Homo sapien
aaggtaagagaattaatgctgaggtctgggtat

SEQ ID NO: 740925 - DNA, 33 bp, Homo sapien
tagatgacaaagcataggatcagattacaaatt

SEQ ID NO: 740926 - DNA, 33 bp, Homo sapien
tagatgacaaagcatatgatcagattacaaatt

SEQ ID NO: 740927 - DNA, 33 bp, Homo sapien
gaatcaggctgtactccgagccaggagagcttt

SEQ ID NO: 740928 - DNA, 33 bp, Homo sapien
gaatcaggctgtactctgagccaggagagcttt

SEQ ID NO: 740929 - DNA, 33 bp, Homo sapien
atacactctgactacacaagtaagccatttccc

SEQ ID NO: 740930 - DNA, 33 bp, Homo sapien
atacactctgactacagaagtaagccatttccc

SEQ ID NO: 740931 - DNA, 33 bp, Homo sapien
tggcatctctttggcaatctcctgcttatgatc

SEQ ID NO: 740932 - DNA, 33 bp, Homo sapien
tggcatctctttggcagtctcctgcttatgatc

SEQ ID NO: 740933 - DNA, 33 bp, Homo sapien
caccaggggctgtacacgacttctcatttattg

SEQ ID NO: 740934 - DNA, 33 bp, Homo sapien
caccaggggctgtacatgacttctcatttattg

SEQ ID NO: 740935 - DNA, 33 bp, Homo sapien
ctgaaagtcagtactcactctcaatgctaagga

SEQ ID NO: 740936 - DNA, 33 bp, Homo sapien
ctgaaagtcagtactctctctcaatgctaagga

SEQ ID NO: 740937 - DNA, 33 bp, Homo sapien
actgaaaacagaaaaccggtcaatttactacaa

SEQ ID NO: 740938 - DNA, 33 bp, Homo sapien
actgaaaacagaaaacgggtcaatttactacaa

SEQ ID NO: 740939 - DNA, 33 bp, Homo sapien
ctcactccatctgtaactgagaaaagctgtata

SEQ ID NO: 740940 - DNA, 33 bp, Homo sapien
ctcactccatctgtaattgagaaaagctgtata

SEQ ID NO: 740941 - DNA, 33 bp, Homo sapien
ttatgaattataaaagaaccagatgtcacagtt

SEQ ID NO: 740942 - DNA, 33 bp, Homo sapien
ttatgaattataaaaggaccagatgtcacagtt

SEQ ID NO: 740943 - DNA, 33 bp, Homo sapien
cttgcattttcaaaggacccctactgccttcat

SEQ ID NO: 740944 - DNA, 33 bp, Homo sapien
cttgcattttcaaaggccccctactgccttcat

SEQ ID NO: 740945 - DNA, 33 bp, Homo sapien
taaaatgatttctaaacgataagcacatggaag

SEQ ID NO: 740946 - DNA, 33 bp, Homo sapien
taaaatgatttctaaatgataagcacatggaag

SEQ ID NO: 740947 - DNA, 33 bp, Homo sapien
aagaacaaggatttacaacctggtagtaacctt

SEQ ID NO: 740948 - DNA, 33 bp, Homo sapien
aagaacaaggatttacgacctggtagtaacctt

SEQ ID NO: 740949 - DNA, 33 bp, Homo sapien
tgattacagtttgccacacccagaatcatctcc

SEQ ID NO: 740950 - DNA, 33 bp, Homo sapien
tgattacagtttgccatacccagaatcatctcc

SEQ ID NO: 740951 - DNA, 33 bp, Homo sapien
tgtcccaacctactaacacctttgcctgtgcca

SEQ ID NO: 740952 - DNA, 33 bp, Homo sapien
tgtcccaacctactaatacctttgcctgtgcca

SEQ ID NO: 740953 - DNA, 33 bp, Homo sapien
acccaagcattttccacgaaataatcaaagtct

SEQ ID NO: 740954 - DNA, 33 bp, Homo sapien
acccaagcattttccatgaaataatcaaagtct

SEQ ID NO: 740955 - DNA, 33 bp, Homo sapien
tgcaactaatgatgtcccaagtggtatttagaa

SEQ ID NO: 740956 - DNA, 33 bp, Homo sapien
tgcaactaatgatgtctcaagtggtatttagaa

SEQ ID NO: 740957 - DNA, 33 bp, Homo sapien
aatatgcattattttgcagtaagaaggacagaa

SEQ ID NO: 740958 - DNA, 33 bp, Homo sapien
aatatgcattattttggagtaagaaggacagaa

SEQ ID NO: 740959 - DNA, 33 bp, Homo sapien
atcaaagagaggaagaaatggcaattagaaaaa

SEQ ID NO: 740960 - DNA, 33 bp, Homo sapien
atcaaagagaggaagagatggcaattagaaaaa

SEQ ID NO: 740961 - DNA, 33 bp, Homo sapien
atgtgtaatagagtaaagaatgttcatatgtgg

SEQ ID NO: 740962 - DNA, 33 bp, Homo sapien
atgtgtaatagagtaaggaatgttcatatgtgg

SEQ ID NO: 740963 - DNA, 33 bp, Homo sapien
tggagcttttttgatcactcgttcctggtactt

SEQ ID NO: 740964 - DNA, 33 bp, Homo sapien
tggagcttttttgatcgctcgttcctggtactt

SEQ ID NO: 740965 - DNA, 33 bp, Homo sapien
aacatttcactttttcacctaaatgtgtacttt

SEQ ID NO: 740966 - DNA, 33 bp, Homo sapien
aacatttcactttttctcctaaatgtgtacttt

SEQ ID NO: 740967 - DNA, 33 bp, Homo sapien
ttggaatttgtttctgaaaattatgtgaagtaa

SEQ ID NO: 740968 - DNA, 33 bp, Homo sapien
ttggaatttgtttctggaaattatgtgaagtaa

SEQ ID NO: 740969 - DNA, 33 bp, Homo sapien
aggtattttgttaaccacaactactgctactgt

SEQ ID NO: 740970 - DNA, 33 bp, Homo sapien
aggtattttgttaaccgcaactactgctactgt

SEQ ID NO: 740971 - DNA, 33 bp, Homo sapien
cataatgggaaaagacagctactttgaaacaaa

SEQ ID NO: 740972 - DNA, 33 bp, Homo sapien
cataatgggaaaagaccgctactttgaaacaaa

SEQ ID NO: 740973 - DNA, 33 bp, Homo sapien
attcacatgaaaagcaaaaagatattgtgtgga

SEQ ID NO: 740974 - DNA, 33 bp, Homo sapien
attcacatgaaaagcacaaagatattgtgtgga

SEQ ID NO: 740975 - DNA, 33 bp, Homo sapien
cctacaaacagctcgcgcagtgttccacctttc

SEQ ID NO: 740976 - DNA, 33 bp, Homo sapien
cctacaaacagctcgctcagtgttccacctttc

SEQ ID NO: 740977 - DNA, 33 bp, Homo sapien
ccttgtcaggcattaacgttttgctttatgttt

SEQ ID NO: 740978 - DNA, 33 bp, Homo sapien
ccttgtcaggcattaaggttttgctttatgttt

SEQ ID NO: 740979 - DNA, 33 bp, Homo sapien
catggcctgagctagacccaatggtgcatctgt

SEQ ID NO: 740980 - DNA, 33 bp, Homo sapien
catggcctgagctagatccaatggtgcatctgt

SEQ ID NO: 740981 - DNA, 33 bp, Homo sapien
tcattctacaaggccaccattacattgatataa

SEQ ID NO: 740982 - DNA, 33 bp, Homo sapien
tcattctacaaggccagcattacattgatataa

SEQ ID NO: 740983 - DNA, 33 bp, Homo sapien
ggaatcatgagaaccaagagacttttaaagttg

SEQ ID NO: 740984 - DNA, 33 bp, Homo sapien
ggaatcatgagaaccatgagacttttaaagttg

SEQ ID NO: 740985 - DNA, 33 bp, Homo sapien
ggtatgttggcaaagactcatttacaaaagtac

SEQ ID NO: 740986 - DNA, 33 bp, Homo sapien
ggtatgttggcaaagattcatttacaaaagtac

SEQ ID NO: 740987 - DNA, 33 bp, Homo sapien
ttgtccagcttatccacactgtacacacaatac

SEQ ID NO: 740988 - DNA, 33 bp, Homo sapien
ttgtccagcttatccatactgtacacacaatac

SEQ ID NO: 740989 - DNA, 33 bp, Homo sapien
tgcagattacctgcaacatttatttgttgattt

SEQ ID NO: 740990 - DNA, 33 bp, Homo sapien
tgcagattacctgcaatatttatttgttgattt

SEQ ID NO: 740991 - DNA, 33 bp, Homo sapien
ataaacaaatcactggaaatgctgcacaggtac

SEQ ID NO: 740992 - DNA, 33 bp, Homo sapien
ataaacaaatcactgggaatgctgcacaggtac

SEQ ID NO: 740993 - DNA, 33 bp, Homo sapien
ttttccctctatactacgtgcacttggtaatta

SEQ ID NO: 740994 - DNA, 33 bp, Homo sapien
ttttccctctatactaggtgcacttggtaatta

SEQ ID NO: 740995 - DNA, 33 bp, Homo sapien
accaaaactagtgagtaaatggtgaaatgtgtt

SEQ ID NO: 740996 - DNA, 33 bp, Homo sapien
accaaaactagtgagtcaatggtgaaatgtgtt

SEQ ID NO: 740997 - DNA, 33 bp, Homo sapien
tttcatcctgttatgcaatcttcagtttatgag

SEQ ID NO: 740998 - DNA, 33 bp, Homo sapien
tttcatcctgttatgcgatcttcagtttatgag

SEQ ID NO: 740999 - DNA, 33 bp, Homo sapien
ttgggccaggcactaaaatcacttcacagagca

SEQ ID NO: 741000 - DNA, 33 bp, Homo sapien
ttgggccaggcactaagatcacttcacagagca

SEQ ID NO: 741001 - DNA, 33 bp, Homo sapien
aaagttaagaaaaaaaattcacagcaacttaat

SEQ ID NO: 741002 - DNA, 33 bp, Homo sapien
aaagttaagaaaaaaatttcacagcaacttaat

SEQ ID NO: 741003 - DNA, 33 bp, Homo sapien
ctcttttattactaaccagaatctgctccctga

SEQ ID NO: 741004 - DNA, 33 bp, Homo sapien
ctcttttattactaactagaatctgctccctga

SEQ ID NO: 741005 - DNA, 33 bp, Homo sapien
aattcctcaggcttaacagaaggcattactggg

SEQ ID NO: 741006 - DNA, 33 bp, Homo sapien
aattcctcaggcttaatagaaggcattactggg

SEQ ID NO: 741007 - DNA, 33 bp, Homo sapien
gcttttaatgagtttagaggcagctaaagaaaa

SEQ ID NO: 741008 - DNA, 33 bp, Homo sapien
gcttttaatgagtttataggcagctaaagaaaa

SEQ ID NO: 741009 - DNA, 33 bp, Homo sapien
gagtactgatgcaaatgaacacaatttataacc

SEQ ID NO: 741010 - DNA, 33 bp, Homo sapien
gagtactgatgcaaattaacacaatttataacc

SEQ ID NO: 741011 - DNA, 33 bp, Homo sapien
tgtaaattggcagttacaagtaatgacaaagag

SEQ ID NO: 741012 - DNA, 33 bp, Homo sapien
tgtaaattggcagttataagtaatgacaaagag

SEQ ID NO: 741013 - DNA, 33 bp, Homo sapien
gtctgaatctccctcaaatgtcagtagagtaca

SEQ ID NO: 741014 - DNA, 33 bp, Homo sapien
gtctgaatctccctcagatgtcagtagagtaca

SEQ ID NO: 741015 - DNA, 33 bp, Homo sapien
acaaccaggtccctgaaagttgctcctggacct

SEQ ID NO: 741016 - DNA, 33 bp, Homo sapien
acaaccaggtccctgatagttgctcctggacct

SEQ ID NO: 741017 - DNA, 33 bp, Homo sapien
aatattgggatatagcaagcagaaatctagagt

SEQ ID NO: 741018 - DNA, 33 bp, Homo sapien
aatattgggatatagctagcagaaatctagagt

SEQ ID NO: 741019 - DNA, 33 bp, Homo sapien
tatgtaagatgtaaggaaggactctatctgcag

SEQ ID NO: 741020 - DNA, 33 bp, Homo sapien
tatgtaagatgtaaggcaggactctatctgcag

SEQ ID NO: 741021 - DNA, 33 bp, Homo sapien
caaaggaaagacttacaagctatgagacagaag

SEQ ID NO: 741022 - DNA, 33 bp, Homo sapien
caaaggaaagacttacgagctatgagacagaag

SEQ ID NO: 741023 - DNA, 33 bp, Homo sapien; identical to SEQ ID NO: 741021

SEQ ID NO: 741024 - DNA, 33 bp, Homo sapien; identical to SEQ ID NO: 741022

SEQ ID NO: 741025 - DNA, 33 bp, Homo sapien
ttctgcaagcaacatcaaatttttcaagatctg

SEQ ID NO: 741026 - DNA, 33 bp, Homo sapien
ttctgcaagcaacatcgaatttttcaagatctg

SEQ ID NO: 741027 - DNA, 33 bp, Homo sapien
cagtttgtaaagccaaatgaacaaagatgagat

SEQ ID NO: 741028 - DNA, 33 bp, Homo sapien
cagtttgtaaagccaattgaacaaagatgagat

SEQ ID NO: 741029 - DNA, 33 bp, Homo sapien
ctcttatattccctcccgcgctggaagtggaaa

SEQ ID NO: 741030 - DNA, 33 bp, Homo sapien
ctcttatattccctccggcgctggaagtggaaa

SEQ ID NO: 741031 - DNA, 33 bp, Homo sapien
aaatctctgatgaaaagttgggttgtagatttg

SEQ ID NO: 741032 - DNA, 33 bp, Homo sapien
aaatctctgatgaaaatttgggttgtagatttg

SEQ ID NO: 741033 - DNA, 33 bp, Homo sapien
taaaacccaagaccaagtattgtggcaaaggca

SEQ ID NO: 741034 - DNA, 33 bp, Homo sapien
taaaacccaagaccaattattgtggcaaaggca

SEQ ID NO: 741035 - DNA, 33 bp, Homo sapien
attgggggtttctataccacgggaggaatgcac

SEQ ID NO: 741036 - DNA, 33 bp, Homo sapien
attgggggtttctatagcacgggaggaatgcac

SEQ ID NO: 741037 - DNA, 33 bp, Homo sapien
gcaagagggaaccgcactgaaagacatttaaaa

SEQ ID NO: 741038 - DNA, 33 bp, Homo sapien
gcaagagggaaccgcagtgaaagacatttaaaa

SEQ ID NO: 741039 - DNA, 33 bp, Homo sapien
aaggaagatatttgaccgattttgatgagaaag

SEQ ID NO: 741040 - DNA, 33 bp, Homo sapien
aaggaagatatttgactgattttgatgagaaag

SEQ ID NO: 741041 - DNA, 33 bp, Homo sapien
agatgctacgctatacagaaacactttaaaact

SEQ ID NO: 741042 - DNA, 33 bp, Homo sapien
agatgctacgctataccgaaacactttaaaact

SEQ ID NO: 741043 - DNA, 33 bp, Homo sapien
ggaagctgatgctgacaattttatgtggcacaa

SEQ ID NO: 741044 - DNA, 33 bp, Homo sapien
ggaagctgatgctgacgattttatgtggcacaa

SEQ ID NO: 741045 - DNA, 33 bp, Homo sapien
ttaaaaaacatagtccagaatcatactttgaga

SEQ ID NO: 741046 - DNA, 33 bp, Homo sapien
ttaaaaaacatagtccggaatcatactttgaga

SEQ ID NO: 741047 - DNA, 33 bp, Homo sapien
ctttagcataacgacacggttatattttataat

SEQ ID NO: 741048 - DNA, 33 bp, Homo sapien
ctttagcataacgacatggttatattttataat

SEQ ID NO: 741049 - DNA, 33 bp, Homo sapien
gaacacacaccattccacatcagttgaacaaat

SEQ ID NO: 741050 - DNA, 33 bp, Homo sapien
gaacacacaccattcctcatcagttgaacaaat

SEQ ID NO: 741051 - DNA, 33 bp, Homo sapien
tggatttggcggaggacattttactggttaccg

SEQ ID NO: 741052 - DNA, 33 bp, Homo sapien
tggatttggcggaggagattttactggttaccg

SEQ ID NO: 741053 - DNA, 33 bp, Homo sapien
gagaatacggcttctcagaaatattaatgcccc

SEQ ID NO: 741054 - DNA, 33 bp, Homo sapien
gagaatacggcttctcggaaatattaatgcccc

SEQ ID NO: 741055 - DNA, 33 bp, Homo sapien
caaatactcattattgaacagggaagatgatta

SEQ ID NO: 741056 - DNA, 33 bp, Homo sapien
caaatactcattattggacagggaagatgatta

SEQ ID NO: 741057 - DNA, 33 bp, Homo sapien
ctagggcaataaaagactctgatcaaagacttt

SEQ ID NO: 741058 - DNA, 33 bp, Homo sapien
ctagggcaataaaagattctgatcaaagacttt

SEQ ID NO: 741059 - DNA, 33 bp, Homo sapien
aactgaaagagaaaaacttttgttgagatctct

SEQ ID NO: 741060 - DNA, 33 bp, Homo sapien
aactgaaagagaaaaatttttgttgagatctct

SEQ ID NO: 741061 - DNA, 33 bp, Homo sapien
ctcatgtactagtcatcatattaagaacttgcc

SEQ ID NO: 741062 - DNA, 33 bp, Homo sapien
ctcatgtactagtcattatattaagaacttgcc

SEQ ID NO: 741063 - DNA, 33 bp, Homo sapien
ctacatcataagcaatcaaatcaaaaggatttt

SEQ ID NO: 741064 - DNA, 33 bp, Homo sapien
ctacatcataagcaatgaaatcaaaaggatttt

SEQ ID NO: 741065 - DNA, 33 bp, Homo sapien
tgaagaaggtggacaacaacctatgtaaatttt

SEQ ID NO: 741066 - DNA, 33 bp, Homo sapien
tgaagaaggtggacaataacctatgtaaatttt

SEQ ID NO: 741067 - DNA, 33 bp, Homo sapien
tattgacattggtatacgaagacccggaacatt

SEQ ID NO: 741068 - DNA, 33 bp, Homo sapien
tattgacattggtataggaagacccggaacatt

SEQ ID NO: 741069 - DNA, 33 bp, Homo sapien
ggaagggatattgccactaataggaatgaggat

SEQ ID NO: 741070 - DNA, 33 bp, Homo sapien
ggaagggatattgccagtaataggaatgaggat

SEQ ID NO: 741071 - DNA, 33 bp, Homo sapien
ccctgctccctgcagaaactctaggatggattc

SEQ ID NO: 741072 - DNA, 33 bp, Homo sapien
ccctgctccctgcagagactctaggatggattc

SEQ ID NO: 741073 - DNA, 33 bp, Homo sapien
caggccaggaaatacccagaatcagcagaagct

SEQ ID NO: 741074 - DNA, 33 bp, Homo sapien
caggccaggaaatacctagaatcagcagaagct

SEQ ID NO: 741075 - DNA, 33 bp, Homo sapien
gtgtcatgttaaagcactcagagtagcttcaag

SEQ ID NO: 741076 - DNA, 33 bp, Homo sapien
gtgtcatgttaaagcattcagagtagcttcaag

SEQ ID NO: 741077 - DNA, 33 bp, Homo sapien
cctcctaacccaattccagactgactgcttgct

SEQ ID NO: 741078 - DNA, 33 bp, Homo sapien
cctcctaacccaattcgagactgactgcttgct

SEQ ID NO: 741079 - DNA, 33 bp, Homo sapien
taggagggattttttgaagcatccatattccag

SEQ ID NO: 741080 - DNA, 33 bp, Homo sapien
taggagggattttttggagcatccatattccag

SEQ ID NO: 741081 - DNA, 33 bp, Homo sapien
attgctcatggactaccgcaaacattgtgcctg

SEQ ID NO: 741082 - DNA, 33 bp, Homo sapien
attgctcatggactactgcaaacattgtgcctg

SEQ ID NO: 741083 - DNA, 33 bp, Homo sapien
tgacttttcaattgggaatagtgccaaaagcat

SEQ ID NO: 741084 - DNA, 33 bp, Homo sapien
tgacttttcaattggggatagtgccaaaagcat

SEQ ID NO: 741085 - DNA, 33 bp, Homo sapien
atgcagccatcggaaagaatgacgtcatgtcct

SEQ ID NO: 741086 - DNA, 33 bp, Homo sapien
atgcagccatcggaaataatgacgtcatgtcct

SEQ ID NO: 741087 - DNA, 33 bp, Homo sapien
atcaagataaaaatacaaattatggaaaagcaa

SEQ ID NO: 741088 - DNA, 33 bp, Homo sapien
atcaagataaaaatacgaattatggaaaagcaa

SEQ ID NO: 741089 - DNA, 33 bp, Homo sapien
aaagatttaacaataaggcagatgtcaatgttt

SEQ ID NO: 741090 - DNA, 33 bp, Homo sapien
aaagatttaacaataatgcagatgtcaatgttt

SEQ ID NO: 741091 - DNA, 33 bp, Homo sapien
gtggagtttggtatagaaaattacatcagagcc

SEQ ID NO: 741092 - DNA, 33 bp, Homo sapien
gtggagtttggtatagcaaattacatcagagcc

SEQ ID NO: 741093 - DNA, 33 bp, Homo sapien
agaacattgaactgaaaggagccataagctgtg

SEQ ID NO: 741094 - DNA, 33 bp, Homo sapien
agaacattgaactgaagggagccataagctgtg

SEQ ID NO: 741095 - DNA, 33 bp, Homo sapien
acaggtttggaaaagccaacaggcataaatggt

SEQ ID NO: 741096 - DNA, 33 bp, Homo sapien
acaggtttggaaaagctaacaggcataaatggt

SEQ ID NO: 741097 - DNA, 33 bp, Homo sapien
tgggggtgtttgactccatggccctcttaacca

SEQ ID NO: 741098 - DNA, 33 bp, Homo sapien
tgggggtgtttgactctatggccctcttaacca

SEQ ID NO: 741099 - DNA, 33 bp, Homo sapien
agagattctgagcatacctggcaggataccctg

SEQ ID NO: 741100 - DNA, 33 bp, Homo sapien
agagattctgagcatatctggcaggataccctg

SEQ ID NO: 741101 - DNA, 33 bp, Homo sapien
attaaaatggagctgaggacatcttggttctca

SEQ ID NO: 741102 - DNA, 33 bp, Homo sapien
attaaaatggagctgatgacatcttggttctca

SEQ ID NO: 741103 - DNA, 33 bp, Homo sapien
aatttcttcacgtaaaaaaaaatgcatcaggat

SEQ ID NO: 741104 - DNA, 33 bp, Homo sapien
aatttcttcacgtaaataaaaatgcatcaggat

SEQ ID NO: 741105 - DNA, 33 bp, Homo sapien
ggtctatctagtccccaagagtccttttatgag

SEQ ID NO: 741106 - DNA, 33 bp, Homo sapien
ggtctatctagtccccgagagtccttttatgag

SEQ ID NO: 741107 - DNA, 33 bp, Homo sapien
aatttataccatagaaatagccgaaggagacta

SEQ ID NO: 741108 - DNA, 33 bp, Homo sapien
aatttataccatagaagtagccgaaggagacta

SEQ ID NO: 741109 - DNA, 33 bp, Homo sapien
caagaacatagacagacgatcatgctttcattt

SEQ ID NO: 741110 - DNA, 33 bp, Homo sapien
caagaacatagacagaggatcatgctttcattt

SEQ ID NO: 741111 - DNA, 33 bp, Homo sapien
atcataaacagcaaaacgtaccctgactagcac

SEQ ID NO: 741112 - DNA, 33 bp, Homo sapien
atcataaacagcaaaatgtaccctgactagcac

SEQ ID NO: 741113 - DNA, 33 bp, Homo sapien
gggtggtgtttgcataagaaggcgaatgaacaa

SEQ ID NO: 741114 - DNA, 33 bp, Homo sapien
gggtggtgtttgcataggaaggcgaatgaacaa

SEQ ID NO: 741115 - DNA, 33 bp, Homo sapien
agcttctccaagtataagacacaactatggttc

SEQ ID NO: 741116 - DNA, 33 bp, Homo sapien
agcttctccaagtataggacacaactatggttc

SEQ ID NO: 741117 - DNA, 33 bp, Homo sapien
actgctaactgatgaaagtcgtattccataaaa

SEQ ID NO: 741118 - DNA, 33 bp, Homo sapien
actgctaactgatgaaggtcgtattccataaaa

SEQ ID NO: 741119 - DNA, 33 bp, Homo sapien
ctcttcaaatttgcccacatctaactccaaaga

SEQ ID NO: 741120 - DNA, 33 bp, Homo sapien
ctcttcaaatttgcccgcatctaactccaaaga

SEQ ID NO: 741121 - DNA, 33 bp, Homo sapien
gaaaattgtcctgtaagtcaagacagcagagtg

SEQ ID NO: 741122 - DNA, 33 bp, Homo sapien
gaaaattgtcctgtaattcaagacagcagagtg

SEQ ID NO: 741123 - DNA, 33 bp, Homo sapien
aaaaagctgctttgaaccgcttgacgttttcta

SEQ ID NO: 741124 - DNA, 33 bp, Homo sapien
aaaaagctgctttgaatcgcttgacgttttcta

SEQ ID NO: 741125 - DNA, 33 bp, Homo sapien
atctctttttcagctccataatccatatgtaaa

SEQ ID NO: 741126 - DNA, 33 bp, Homo sapien
atctctttttcagctctataatccatatgtaaa

SEQ ID NO: 741127 - DNA, 33 bp, Homo sapien
atatacctaacatcaacagaaagtcaaggaatt

SEQ ID NO: 741128 - DNA, 33 bp, Homo sapien
atatacctaacatcaatagaaagtcaaggaatt

SEQ ID NO: 741129 - DNA, 33 bp, Homo sapien
atactttagagacttgcaaatttggcaatgctt

SEQ ID NO: 741130 - DNA, 33 bp, Homo sapien
atactttagagacttgtaaatttggcaatgctt

SEQ ID NO: 741131 - DNA, 33 bp, Homo sapien
agcactcaagggagccacgagagaatgaacgga

SEQ ID NO: 741132 - DNA, 33 bp, Homo sapien
agcactcaagggagccgcgagagaatgaacgga

SEQ ID NO: 741133 - DNA, 33 bp, Homo sapien
cactcgtttatggtcactcagtgaatacttatg

SEQ ID NO: 741134 - DNA, 33 bp, Homo sapien
cactcgtttatggtcattcagtgaatacttatg

SEQ ID NO: 741135 - DNA, 33 bp, Homo sapien
cttctaatctaagccaagttctcagcagtttta

SEQ ID NO: 741136 - DNA, 33 bp, Homo sapien
cttctaatctaagccaggttctcagcagtttta

SEQ ID NO: 741137 - DNA, 33 bp, Homo sapien
catatcaaggtaaccaggctttagtcactagta

SEQ ID NO: 741138 - DNA, 33 bp, Homo sapien
catatcaaggtaaccatgctttagtcactagta

SEQ ID NO: 741139 - DNA, 33 bp, Homo sapien
gatgctgccattctagacaaataaacgcaaaat

SEQ ID NO: 741140 - DNA, 33 bp, Homo sapien
gatgctgccattctaggcaaataaacgcaaaat

SEQ ID NO: 741141 - DNA, 33 bp, Homo sapien
gctgtgtaaaggtaaactgactctaccattcag

SEQ ID NO: 741142 - DNA, 33 bp, Homo sapien
gctgtgtaaaggtaaattgactctaccattcag

SEQ ID NO: 741143 - DNA, 33 bp, Homo sapien
ccctggcttccatctacactactccggatgaca

SEQ ID NO: 741144 - DNA, 33 bp, Homo sapien
ccctggcttccatctatactactccggatgaca

SEQ ID NO: 741145 - DNA, 33 bp, Homo sapien
atcctgtgtgtgaggaaaactttgtttttgttt

SEQ ID NO: 741146 - DNA, 33 bp, Homo sapien
atcctgtgtgtgaggataactttgtttttgttt

SEQ ID NO: 741147 - DNA, 33 bp, Homo sapien
ggtgatgaagataagcaccaaattagtgaaata

SEQ ID NO: 741148 - DNA, 33 bp, Homo sapien
ggtgatgaagataagcgccaaattagtgaaata

SEQ ID NO: 741149 - DNA, 33 bp, Homo sapien
ctcatatacaagtccacgagatcctaatgagta

SEQ ID NO: 741150 - DNA, 33 bp, Homo sapien
ctcatatacaagtccatgagatcctaatgagta

SEQ ID NO: 741151 - DNA, 33 bp, Homo sapien
acattgaagaccatcaagaaaagcctgtctaca

SEQ ID NO: 741152 - DNA, 33 bp, Homo sapien
acattgaagaccatcatgaaaagcctgtctaca

SEQ ID NO: 741153 - DNA, 33 bp, Homo sapien
ttaggcatacatacccaaatgttgaacttctct

SEQ ID NO: 741154 - DNA, 33 bp, Homo sapien
ttaggcatacatacccgaatgttgaacttctct

SEQ ID NO: 741155 - DNA, 33 bp, Homo sapien
cgtatctgtctctaagacccttgactacactgt

SEQ ID NO: 741156 - DNA, 33 bp, Homo sapien
cgtatctgtctctaaggcccttgactacactgt

SEQ ID NO: 741157 - DNA, 33 bp, Homo sapien
tcttcctctgcaataaaaaagaatttagaaaaa

SEQ ID NO: 741158 - DNA, 33 bp, Homo sapien
tcttcctctgcaataagaaagaatttagaaaaa

SEQ ID NO: 741159 - DNA, 33 bp, Homo sapien
tacttatccacagttaaacaagaggaggggata

SEQ ID NO: 741160 - DNA, 33 bp, Homo sapien
tacttatccacagttacacaagaggaggggata

SEQ ID NO: 741161 - DNA, 33 bp, Homo sapien
gtattgagttcattaaaggttattatcatcgtg

SEQ ID NO: 741162 - DNA, 33 bp, Homo sapien
gtattgagttcattaatggttattatcatcgtg

SEQ ID NO: 741163 - DNA, 33 bp, Homo sapien
taagcatccaggaaaaattgtcattctgtgtcc

SEQ ID NO: 741164 - DNA, 33 bp, Homo sapien
taagcatccaggaaaatttgtcattctgtgtcc

SEQ ID NO: 741165 - DNA, 33 bp, Homo sapien
ctttactgccttttaaatacttcacaaaatgga

SEQ ID NO: 741166 - DNA, 33 bp, Homo sapien
ctttactgccttttaagtacttcacaaaatgga

SEQ ID NO: 741167 - DNA, 33 bp, Homo sapien
ccattaatttcccatccactgaataaaggttac

SEQ ID NO: 741168 - DNA, 33 bp, Homo sapien
ccattaatttcccatcgactgaataaaggttac

SEQ ID NO: 741169 - DNA, 33 bp, Homo sapien
atttgcatcaatttgtcaaagtgtaattataaa

SEQ ID NO: 741170 - DNA, 33 bp, Homo sapien
atttgcatcaatttgttaaagtgtaattataaa

SEQ ID NO: 741171 - DNA, 33 bp, Homo sapien
agataagtcagcctgacggagggaggaaagagc

SEQ ID NO: 741172 - DNA, 33 bp, Homo sapien
agataagtcagcctgatggagggaggaaagagc

SEQ ID NO: 741173 - DNA, 33 bp, Homo sapien
tctgtcaggatcagacaatgcacggtaaacgtc

SEQ ID NO: 741174 - DNA, 33 bp, Homo sapien
tctgtcaggatcagacgatgcacggtaaacgtc

SEQ ID NO: 741175 - DNA, 33 bp, Homo sapien
atgcacggtaaacgtcaccagattatacacata

SEQ ID NO: 741176 - DNA, 33 bp, Homo sapien
atgcacggtaaacgtcgccagattatacacata

SEQ ID NO: 741177 - DNA, 33 bp, Homo sapien
atggcagccattagcaataaccatcctataaaa

SEQ ID NO: 741178 - DNA, 33 bp, Homo sapien
atggcagccattagcagtaaccatcctataaaa

SEQ ID NO: 741179 - DNA, 33 bp, Homo sapien
tttccatttctcgtcaaagtcattcaccttctc

SEQ ID NO: 741180 - DNA, 33 bp, Homo sapien
tttccatttctcgtcacagtcattcaccttctc

SEQ ID NO: 741181 - DNA, 33 bp, Homo sapien
acacatttaatccacaatgtactagccagctgg

SEQ ID NO: 741182 - DNA, 33 bp, Homo sapien
acacatttaatccacagtgtactagccagctgg

SEQ ID NO: 741183 - DNA, 33 bp, Homo sapien
aaagaacagatgaccacgtgaacctgaaagtta

SEQ ID NO: 741184 - DNA, 33 bp, Homo sapien
aaagaacagatgaccatgtgaacctgaaagtta

SEQ ID NO: 741185 - DNA, 33 bp, Homo sapien
agtggctggtacagagcacacagtaggcccata

SEQ ID NO: 741186 - DNA, 33 bp, Homo sapien
agtggctggtacagaggacacagtaggcccata

SEQ ID NO: 741187 - DNA, 33 bp, Homo sapien
gtgagaatggacaagtaaatagggcttaggcag

SEQ ID NO: 741188 - DNA, 33 bp, Homo sapien
gtgagaatggacaagtcaatagggcttaggcag

SEQ ID NO: 741189 - DNA, 33 bp, Homo sapien
aatattttcaacatcaatatactattagtaagt

SEQ ID NO: 741190 - DNA, 33 bp, Homo sapien
aatattttcaacatcagtatactattagtaagt

SEQ ID NO: 741191 - DNA, 33 bp, Homo sapien
tacatttgatatgtccaacacatctaatccatc

SEQ ID NO: 741192 - DNA, 33 bp, Homo sapien
tacatttgatatgtccgacacatctaatccatc

SEQ ID NO: 741193 - DNA, 33 bp, Homo sapien
ttgaaaacttgtgtgaacaaaattggcattctc

SEQ ID NO: 741194 - DNA, 33 bp, Homo sapien
ttgaaaacttgtgtgagcaaaattggcattctc

SEQ ID NO: 741195 - DNA, 33 bp, Homo sapien
actgccattcttggaactgaaatagcaccaagt

SEQ ID NO: 741196 - DNA, 33 bp, Homo sapien
actgccattcttggaagtgaaatagcaccaagt

SEQ ID NO: 741197 - DNA, 33 bp, Homo sapien
tggccttattttgaaacagggtcattgcaaatg

SEQ ID NO: 741198 - DNA, 33 bp, Homo sapien
tggccttattttgaaatagggtcattgcaaatg

SEQ ID NO: 741199 - DNA, 33 bp, Homo sapien
gggccttaaaagggaggatagcgaaatgtttga

SEQ ID NO: 741200 - DNA, 33 bp, Homo sapien
gggccttaaaagggagtatagcgaaatgtttga

SEQ ID NO: 741201 - DNA, 33 bp, Homo sapien
tcttcttagtacagcactcaggaaaacagcatg

SEQ ID NO: 741202 - DNA, 33 bp, Homo sapien
tcttcttagtacagcattcaggaaaacagcatg

SEQ ID NO: 741203 - DNA, 33 bp, Homo sapien
agtggaagtgtactccaaaagctccaagaagag

SEQ ID NO: 741204 - DNA, 33 bp, Homo sapien
agtggaagtgtactccgaaagctccaagaagag

SEQ ID NO: 741205 - DNA, 33 bp, Homo sapien
gaattaacatacaaaaagcataatgcaacaaaa

SEQ ID NO: 741206 - DNA, 33 bp, Homo sapien
gaattaacatacaaaaggcataatgcaacaaaa

SEQ ID NO: 741207 - DNA, 33 bp, Homo sapien
tatcagtactccactccaatttacgactgaata

SEQ ID NO: 741208 - DNA, 33 bp, Homo sapien
tatcagtactccactctaatttacgactgaata

SEQ ID NO: 741209 - DNA, 33 bp, Homo sapien
ctgtattttagatgtcaactttaagtaagactt

SEQ ID NO: 741210 - DNA, 33 bp, Homo sapien
ctgtattttagatgtcgactttaagtaagactt

SEQ ID NO: 741211 - DNA, 33 bp, Homo sapien
agaaagctcctttggccaagaagaatgggcaca

SEQ ID NO: 741212 - DNA, 33 bp, Homo sapien
agaaagctcctttggcgaagaagaatgggcaca

SEQ ID NO: 741213 - DNA, 33 bp, Homo sapien
gtcctatagaaaatgaaatgtcggttgggtgcg

SEQ ID NO: 741214 - DNA, 33 bp, Homo sapien
gtcctatagaaaatgagatgtcggttgggtgcg

SEQ ID NO: 741215 - DNA, 33 bp, Homo sapien
gattctggaggaaacagactcatcatttataaa

SEQ ID NO: 741216 - DNA, 33 bp, Homo sapien
gattctggaggaaacatactcatcatttataaa

SEQ ID NO: 741217 - DNA, 33 bp, Homo sapien
gaaagctcctttggtcaagaagaattagctaca

SEQ ID NO: 741218 - DNA, 33 bp, Homo sapien
gaaagctcctttggtcgagaagaattagctaca

SEQ ID NO: 741219 - DNA, 33 bp, Homo sapien
ttttatctcttttctccattgtagtgttggatc

SEQ ID NO: 741220 - DNA, 33 bp, Homo sapien
ttttatctcttttctctattgtagtgttggatc

SEQ ID NO: 741221 - DNA, 33 bp, Homo sapien
taaatagacagatagactcactgtgttacccag

SEQ ID NO: 741222 - DNA, 33 bp, Homo sapien
taaatagacagatagattcactgtgttacccag

SEQ ID NO: 741223 - DNA, 33 bp, Homo sapien
tcactatgggaagaaccgtcactgtgtggataa

SEQ ID NO: 741224 - DNA, 33 bp, Homo sapien
tcactatgggaagaactgtcactgtgtggataa

SEQ ID NO: 741225 - DNA, 33 bp, Homo sapien
tcaagagttaggccctcaataaaacacgtactt

SEQ ID NO: 741226 - DNA, 33 bp, Homo sapien
tcaagagttaggcccttaataaaacacgtactt

SEQ ID NO: 741227 - DNA, 33 bp, Homo sapien
ccaccagatagttcacgcttcatgacactgcgc

SEQ ID NO: 741228 - DNA, 33 bp, Homo sapien
ccaccagatagttcactcttcatgacactgcgc

SEQ ID NO: 741229 - DNA, 33 bp, Homo sapien
ctgggcaccccaaatcactctacttgggcagac

SEQ ID NO: 741230 - DNA, 33 bp, Homo sapien
ctgggcaccccaaatcgctctacttgggcagac

SEQ ID NO: 741231 - DNA, 33 bp, Homo sapien
atggaatctttgttcacctaatatttgaagcag

SEQ ID NO: 741232 - DNA, 33 bp, Homo sapien
atggaatctttgttcagctaatatttgaagcag

SEQ ID NO: 741233 - DNA, 33 bp, Homo sapien
ccttgattttaaaaaccgttcctggctgagggc

SEQ ID NO: 741234 - DNA, 33 bp, Homo sapien
ccttgattttaaaaactgttcctggctgagggc

SEQ ID NO: 741235 - DNA, 33 bp, Homo sapien
caccagtgaggcctgcaataagaccttttgcac

SEQ ID NO: 741236 - DNA, 33 bp, Homo sapien
caccagtgaggcctgcgataagaccttttgcac

SEQ ID NO: 741237 - DNA, 33 bp, Homo sapien
tttttgctaatgtatacagatccacctcatttt

SEQ ID NO: 741238 - DNA, 33 bp, Homo sapien
tttttgctaatgtatatagatccacctcatttt

SEQ ID NO: 741239 - DNA, 33 bp, Homo sapien
catgttactagagcaccaatagcagtggattca

SEQ ID NO: 741240 - DNA, 33 bp, Homo sapien
catgttactagagcacgaatagcagtggattca

SEQ ID NO: 741241 - DNA, 33 bp, Homo sapien
atttatgaaattcggaaattgctgttgggattg

SEQ ID NO: 741242 - DNA, 33 bp, Homo sapien
atttatgaaattcggagattgctgttgggattg

SEQ ID NO: 741243 - DNA, 33 bp, Homo sapien
cgctacccagtgggaaatctgagaactgcacct

SEQ ID NO: 741244 - DNA, 33 bp, Homo sapien
cgctacccagtgggaagtctgagaactgcacct

SEQ ID NO: 741245 - DNA, 33 bp, Homo sapien
tgtcaagttgtaacctgagattttatcctataa

SEQ ID NO: 741246 - DNA, 33 bp, Homo sapien
tgtcaagttgtaaccttagattttatcctataa

SEQ ID NO: 741247 - DNA, 33 bp, Homo sapien
ctgtttgaaattcctacagtttgctgctctaac

SEQ ID NO: 741248 - DNA, 33 bp, Homo sapien
ctgtttgaaattcctagagtttgctgctctaac

SEQ ID NO: 741249 - DNA, 33 bp, Homo sapien
ttctgttttcttgtaaccttatggctgggtaat

SEQ ID NO: 741250 - DNA, 33 bp, Homo sapien
ttctgttttcttgtaagcttatggctgggtaat

SEQ ID NO: 741251 - DNA, 33 bp, Homo sapien
tcagagccaaagaccacgtttaagagacagctc

SEQ ID NO: 741252 - DNA, 33 bp, Homo sapien
tcagagccaaagaccatgtttaagagacagctc

SEQ ID NO: 741253 - DNA, 33 bp, Homo sapien
ggagcagttttctacactgaagaacatccaaca

SEQ ID NO: 741254 - DNA, 33 bp, Homo sapien
ggagcagttttctacattgaagaacatccaaca

SEQ ID NO: 741255 - DNA, 33 bp, Homo sapien
tatagactgtcatactaaaccatgtgtcttaat

SEQ ID NO: 741256 - DNA, 33 bp, Homo sapien
tatagactgtcatactgaaccatgtgtcttaat

SEQ ID NO: 741257 - DNA, 33 bp, Homo sapien
caccacgcccagcctacgttttggttgtcttaa

SEQ ID NO: 741258 - DNA, 33 bp, Homo sapien
caccacgcccagcctatgttttggttgtcttaa

SEQ ID NO: 741259 - DNA, 33 bp, Homo sapien
tgtttagagcttctccaaggacttaaaatgaga

SEQ ID NO: 741260 - DNA, 33 bp, Homo sapien
tgtttagagcttctccgaggacttaaaatgaga

SEQ ID NO: 741261 - DNA, 33 bp, Homo sapien
tttgccattaaaagaaccaatgcaccaacctaa

SEQ ID NO: 741262 - DNA, 33 bp, Homo sapien
tttgccattaaaagaagcaatgcaccaacctaa

SEQ ID NO: 741263 - DNA, 33 bp, Homo sapien
tgcagctcatcaatgaaaggcaggcccagattt

SEQ ID NO: 741264 - DNA, 33 bp, Homo sapien
tgcagctcatcaatgagaggcaggcccagattt

SEQ ID NO: 741265 - DNA, 33 bp, Homo sapien
ttaataatgtagcacacggtctggaacatagtg

SEQ ID NO: 741266 - DNA, 33 bp, Homo sapien
ttaataatgtagcacatggtctggaacatagtg

SEQ ID NO: 741267 - DNA, 33 bp, Homo sapien
acaacaaatctataagccatctaggaattaatt

SEQ ID NO: 741268 - DNA, 33 bp, Homo sapien
acaacaaatctataaggcatctaggaattaatt

SEQ ID NO: 741269 - DNA, 33 bp, Homo sapien
acagcaaaacagcaacaagagtaagcattcttt

SEQ ID NO: 741270 - DNA, 33 bp, Homo sapien
acagcaaaacagcaacgagagtaagcattcttt

SEQ ID NO: 741271 - DNA, 33 bp, Homo sapien
atgtgcttctggtttcgactcaagatactcagt

SEQ ID NO: 741272 - DNA, 33 bp, Homo sapien
atgtgcttctggtttctactcaagatactcagt

SEQ ID NO: 741273 - DNA, 33 bp, Homo sapien
tattaaactctgagaccgaattccaatcaataa

SEQ ID NO: 741274 - DNA, 33 bp, Homo sapien
tattaaactctgagactgaattccaatcaataa

SEQ ID NO: 741275 - DNA, 33 bp, Homo sapien
ggaacaggtatttcagccaaacgtggacctcct

SEQ ID NO: 741276 - DNA, 33 bp, Homo sapien
ggaacaggtatttcagtcaaacgtggacctcct

SEQ ID NO: 741277 - DNA, 33 bp, Homo sapien
taatcgcaaacccagcaaatcatgcctgaaacc

SEQ ID NO: 741278 - DNA, 33 bp, Homo sapien
taatcgcaaacccagcgaatcatgcctgaaacc

SEQ ID NO: 741279 - DNA, 33 bp, Homo sapien
atttaaatcagctgtcaacattgaaaaattagg

SEQ ID NO: 741280 - DNA, 33 bp, Homo sapien
atttaaatcagctgtcgacattgaaaaattagg

SEQ ID NO: 741281 - DNA, 33 bp, Homo sapien
ctgcccttaagaagacaagcagaaaaaactggc

SEQ ID NO: 741282 - DNA, 33 bp, Homo sapien
ctgcccttaagaagacgagcagaaaaaactggc

SEQ ID NO: 741283 - DNA, 33 bp, Homo sapien
agcccctgattcattacctagccttctctctct

SEQ ID NO: 741284 - DNA, 33 bp, Homo sapien
agcccctgattcattatctagccttctctctct

SEQ ID NO: 741285 - DNA, 33 bp, Homo sapien
attttaaatctgaatcaaagcaagagattgctg

SEQ ID NO: 741286 - DNA, 33 bp, Homo sapien
attttaaatctgaatcgaagcaagagattgctg

SEQ ID NO: 741287 - DNA, 33 bp, Homo sapien
agactggagaacccacagattttggtacctgtt

SEQ ID NO: 741288 - DNA, 33 bp, Homo sapien
agactggagaacccacggattttggtacctgtt

SEQ ID NO: 741289 - DNA, 33 bp, Homo sapien
attatcgtcattttgcagatgagaaataaaggc

SEQ ID NO: 741290 - DNA, 33 bp, Homo sapien
attatcgtcattttgcggatgagaaataaaggc

SEQ ID NO: 741291 - DNA, 33 bp, Homo sapien
ggtcactaaccaaaaaataaacttctcaagggt

SEQ ID NO: 741292 - DNA, 33 bp, Homo sapien
ggtcactaaccaaaaagtaaacttctcaagggt

SEQ ID NO: 741293 - DNA, 33 bp, Homo sapien
tctgtcgcctatgctacagtatagtgctgcaat

SEQ ID NO: 741294 - DNA, 33 bp, Homo sapien
tctgtcgcctatgctagagtatagtgctgcaat

SEQ ID NO: 741295 - DNA, 33 bp, Homo sapien
tgcagcattcgtatcaacccaaataaggaggtg

SEQ ID NO: 741296 - DNA, 33 bp, Homo sapien
tgcagcattcgtatcatcccaaataaggaggtg

SEQ ID NO: 741297 - DNA, 33 bp, Homo sapien
gggtggttttatgtaaggtctcaagcagtgatc

SEQ ID NO: 741298 - DNA, 33 bp, Homo sapien
gggtggttttatgtaatgtctcaagcagtgatc

SEQ ID NO: 741299 - DNA, 33 bp, Homo sapien
ttggaacagactctcaatataatgcctataatg

SEQ ID NO: 741300 - DNA, 33 bp, Homo sapien
ttggaacagactctcagtataatgcctataatg

SEQ ID NO: 741301 - DNA, 33 bp, Homo sapien
ggctactaagtgataaaaagaacattaacaacc

SEQ ID NO: 741302 - DNA, 33 bp, Homo sapien
ggctactaagtgataagaagaacattaacaacc

SEQ ID NO: 741303 - DNA, 33 bp, Homo sapien
ttttctgaaatgaccactatatatctaaaagat

SEQ ID NO: 741304 - DNA, 33 bp, Homo sapien
ttttctgaaatgaccagtatatatctaaaagat

SEQ ID NO: 741305 - DNA, 33 bp, Homo sapien
tggctaacgacatgtaaacctttggacaagatt

SEQ ID NO: 741306 - DNA, 33 bp, Homo sapien
tggctaacgacatgtagacctttggacaagatt

SEQ ID NO: 741307 - DNA, 33 bp, Homo sapien
aagttctgtatttccacagagagagatagtatc

SEQ ID NO: 741308 - DNA, 33 bp, Homo sapien
aagttctgtatttccatagagagagatagtatc

SEQ ID NO: 741309 - DNA, 33 bp, Homo sapien
gaagcagaaaacacaaggtggcgtatgctgaga

SEQ ID NO: 741310 - DNA, 33 bp, Homo sapien
gaagcagaaaacacaatgtggcgtatgctgaga

SEQ ID NO: 741311 - DNA, 33 bp, Homo sapien
ctagcacattcgagaacaattcttagtcttcat

SEQ ID NO: 741312 - DNA, 33 bp, Homo sapien
ctagcacattcgagaataattcttagtcttcat

SEQ ID NO: 741313 - DNA, 33 bp, Homo sapien
tggtcagaaaggaatacgaaattgattaagttg

SEQ ID NO: 741314 - DNA, 33 bp, Homo sapien
tggtcagaaaggaatatgaaattgattaagttg

SEQ ID NO: 741315 - DNA, 33 bp, Homo sapien
tcttatttgtagcatacggtaagtaggtggaag

SEQ ID NO: 741316 - DNA, 33 bp, Homo sapien
tcttatttgtagcatatggtaagtaggtggaag

SEQ ID NO: 741317 - DNA, 33 bp, Homo sapien
tgatatgcctttattagctctaaaatgtgttgg

SEQ ID NO: 741318 - DNA, 33 bp, Homo sapien
tgatatgcctttattatctctaaaatgtgttgg

SEQ ID NO: 741319 - DNA, 33 bp, Homo sapien
tgactgataagccactcaaatttgtaaagaata

SEQ ID NO: 741320 - DNA, 33 bp, Homo sapien
tgactgataagccacttaaatttgtaaagaata

SEQ ID NO: 741321 - DNA, 33 bp, Homo sapien
gtacttcagtgtttacaaagtgtttcatctgcg

SEQ ID NO: 741322 - DNA, 33 bp, Homo sapien
gtacttcagtgtttacgaagtgtttcatctgcg

SEQ ID NO: 741323 - DNA, 33 bp, Homo sapien
tagcagcggagtgaacagcttttattaaataag

SEQ ID NO: 741324 - DNA, 33 bp, Homo sapien
tagcagcggagtgaacggcttttattaaataag

SEQ ID NO: 741325 - DNA, 33 bp, Homo sapien
aactgtagttattgcaacacacttaggaaggga

SEQ ID NO: 741326 - DNA, 33 bp, Homo sapien
aactgtagttattgcatcacacttaggaaggga

SEQ ID NO: 741327 - DNA, 33 bp, Homo sapien
aatcacttggtaacaccgcatagtggatcaaag

SEQ ID NO: 741328 - DNA, 33 bp, Homo sapien
aatcacttggtaacacggcatagtggatcaaag

SEQ ID NO: 741329 - DNA, 33 bp, Homo sapien
tgacaacctagtattaccattaaaatcatttaa

SEQ ID NO: 741330 - DNA, 33 bp, Homo sapien
tgacaacctagtattatcattaaaatcatttaa

SEQ ID NO: 741331 - DNA, 33 bp, Homo sapien
tctcatagaagtgtaaacatgcagtgtatgttt

SEQ ID NO: 741332 - DNA, 33 bp, Homo sapien
tctcatagaagtgtaatcatgcagtgtatgttt

SEQ ID NO: 741333 - DNA, 33 bp, Homo sapien
ttgatttttttcttcgacccaatggttatttaa

SEQ ID NO: 741334 - DNA, 33 bp, Homo sapien
ttgatttttttcttcggcccaatggttatttaa

SEQ ID NO: 741335 - DNA, 33 bp, Homo sapien
atggctggcaaggctcggagagatctgtagaag

SEQ ID NO: 741336 - DNA, 33 bp, Homo sapien
atggctggcaaggctctgagagatctgtagaag

SEQ ID NO: 741337 - DNA, 33 bp, Homo sapien
acaaacagacaaaataaataaggcaatgtcata

SEQ ID NO: 741338 - DNA, 33 bp, Homo sapien
acaaacagacaaaatagataaggcaatgtcata

SEQ ID NO: 741339 - DNA, 33 bp, Homo sapien
agaagagattaaaataagtgatcaatagacatt

SEQ ID NO: 741340 - DNA, 33 bp, Homo sapien
agaagagattaaaataggtgatcaatagacatt

SEQ ID NO: 741341 - DNA, 33 bp, Homo sapien
taggccctgtctatccacctccggcacacccat

SEQ ID NO: 741342 - DNA, 33 bp, Homo sapien
taggccctgtctatccgcctccggcacacccat

SEQ ID NO: 741343 - DNA, 33 bp, Homo sapien
cctgtcattgaaaccaagaaaggctcatgtcaa

SEQ ID NO: 741344 - DNA, 33 bp, Homo sapien
cctgtcattgaaaccaggaaaggctcatgtcaa

SEQ ID NO: 741345 - DNA, 33 bp, Homo sapien
gacctggcttctataccaccaggtgtcttgcac

SEQ ID NO: 741346 - DNA, 33 bp, Homo sapien
gacctggcttctatactaccaggtgtcttgcac

SEQ ID NO: 741347 - DNA, 33 bp, Homo sapien
agttttagtcctggtcacagagattccaccaat

SEQ ID NO: 741348 - DNA, 33 bp, Homo sapien
agttttagtcctggtcgcagagattccaccaat

SEQ ID NO: 741349 - DNA, 33 bp, Homo sapien
gcaagacttcaggagcaccgaatactgtttttc

SEQ ID NO: 741350 - DNA, 33 bp, Homo sapien
gcaagacttcaggagcgccgaatactgtttttc

SEQ ID NO: 741351 - DNA, 33 bp, Homo sapien; identical to SEQ ID NO: 741349

SEQ ID NO: 741352 - DNA, 33 bp, Homo sapien; identical to SEQ ID NO: 741350

SEQ ID NO: 741353 - DNA, 33 bp, Homo sapien
gctattgtgtcagaacagatttggattattttt

SEQ ID NO: 741354 - DNA, 33 bp, Homo sapien
gctattgtgtcagaacggatttggattattttt

SEQ ID NO: 741355 - DNA, 33 bp, Homo sapien
cactaaatataaaaccaggaattagaagctggc

SEQ ID NO: 741356 - DNA, 33 bp, Homo sapien
cactaaatataaaaccgggaattagaagctggc

SEQ ID NO: 741357 - DNA, 33 bp, Homo sapien
agcctaaattgtctaccgcatattctccctttg

SEQ ID NO: 741358 - DNA, 33 bp, Homo sapien
agcctaaattgtctactgcatattctccctttg

SEQ ID NO: 741359 - DNA, 33 bp, Homo sapien
gtccatgaatgaatggaatttggtaaaaaagag

SEQ ID NO: 741360 - DNA, 33 bp, Homo sapien
gtccatgaatgaatggcatttggtaaaaaagag

SEQ ID NO: 741361 - DNA, 33 bp, Homo sapien
tgtgcttacagttagacgacaaggtgaaaccag

SEQ ID NO: 741362 - DNA, 33 bp, Homo sapien
tgtgcttacagttagatgacaaggtgaaaccag

SEQ ID NO: 741363 - DNA, 33 bp, Homo sapien
cagctatggtgattaaatcatctcagttgctgt

SEQ ID NO: 741364 - DNA, 33 bp, Homo sapien
cagctatggtgattaagtcatctcagttgctgt

SEQ ID NO: 741365 - DNA, 33 bp, Homo sapien
tagaaaatggttcaggaaatgtttatgacaaaa

SEQ ID NO: 741366 - DNA, 33 bp, Homo sapien
tagaaaatggttcagggaatgtttatgacaaaa

SEQ ID NO: 741367 - DNA, 33 bp, Homo sapien
tgctagaggagatccaatggaaaatattgagaa

SEQ ID NO: 741368 - DNA, 33 bp, Homo sapien
tgctagaggagatccactggaaaatattgagaa

SEQ ID NO: 741369 - DNA, 33 bp, Homo sapien
aatatcaaatgtgcaacgtatgggtgctttgga

SEQ ID NO: 741370 - DNA, 33 bp, Homo sapien
aatatcaaatgtgcaatgtatgggtgctttgga

SEQ ID NO: 741371 - DNA, 33 bp, Homo sapien
ccttgtcaaggtttaagtactccaatatagaag

SEQ ID NO: 741372 - DNA, 33 bp, Homo sapien
ccttgtcaaggtttaattactccaatatagaag

SEQ ID NO: 741373 - DNA, 33 bp, Homo sapien
cttagccaggatatgaagactatgacctcttat

SEQ ID NO: 741374 - DNA, 33 bp, Homo sapien
cttagccaggatatgaggactatgacctcttat

SEQ ID NO: 741375 - DNA, 33 bp, Homo sapien
tccaggtgtgcagtcaagatctaactcagcacc

SEQ ID NO: 741376 - DNA, 33 bp, Homo sapien
tccaggtgtgcagtcaggatctaactcagcacc

SEQ ID NO: 741377 - DNA, 33 bp, Homo sapien
tgggaggtgatttgtacatgatggctgaatcct

SEQ ID NO: 741378 - DNA, 33 bp, Homo sapien
tgggaggtgatttgtagatgatggctgaatcct

SEQ ID NO: 741379 - DNA, 33 bp, Homo sapien
gggggcctttagcaaacgccggctctgccagtg

SEQ ID NO: 741380 - DNA, 33 bp, Homo sapien
gggggcctttagcaaatgccggctctgccagtg

SEQ ID NO: 741381 - DNA, 33 bp, Homo sapien
ttaaaaaacaattaaagatgcggtatgaaggat

SEQ ID NO: 741382 - DNA, 33 bp, Homo sapien
ttaaaaaacaattaaatatgcggtatgaaggat

SEQ ID NO: 741383 - DNA, 33 bp, Homo sapien
tccccgttagggcccaaacagaagatgatgcag

SEQ ID NO: 741384 - DNA, 33 bp, Homo sapien
tccccgttagggcccacacagaagatgatgcag

SEQ ID NO: 741385 - DNA, 33 bp, Homo sapien
aaaacgcagatgaaaagagttcctacttcttag

SEQ ID NO: 741386 - DNA, 33 bp, Homo sapien
aaaacgcagatgaaaatagttcctacttcttag

SEQ ID NO: 741387 - DNA, 33 bp, Homo sapien
cttgtgagatgcggaacagccacattgtttaaa

SEQ ID NO: 741388 - DNA, 33 bp, Homo sapien
cttgtgagatgcggaagagccacattgtttaaa

SEQ ID NO: 741389 - DNA, 33 bp, Homo sapien
aaagctggatgtaacaataagcccatactggaa

SEQ ID NO: 741390 - DNA, 33 bp, Homo sapien
aaagctggatgtaacagtaagcccatactggaa

SEQ ID NO: 741391 - DNA, 33 bp, Homo sapien
tcatatgcgagtgaaacggcaacatttatttgc

SEQ ID NO: 741392 - DNA, 33 bp, Homo sapien
tcatatgcgagtgaaatggcaacatttatttgc

SEQ ID NO: 741393 - DNA, 33 bp, Homo sapien
agtggagaacaccccaatcagtcccatcttact

SEQ ID NO: 741394 - DNA, 33 bp, Homo sapien
agtggagaacaccccagtcagtcccatcttact

SEQ ID NO: 741395 - DNA, 33 bp, Homo sapien
ataacagtacacagaaagggacctaaccgagtc

SEQ ID NO: 741396 - DNA, 33 bp, Homo sapien
ataacagtacacagaaggggacctaaccgagtc

SEQ ID NO: 741397 - DNA, 33 bp, Homo sapien
cacgtatgtgtccaagccactctctttgtgaat

SEQ ID NO: 741398 - DNA, 33 bp, Homo sapien
cacgtatgtgtccaaggcactctctttgtgaat

SEQ ID NO: 741399 - DNA, 33 bp, Homo sapien
caggggaagctgcagcaaagtttctggagcaaa

SEQ ID NO: 741400 - DNA, 33 bp, Homo sapien
caggggaagctgcagcgaagtttctggagcaaa

SEQ ID NO: 741401 - DNA, 33 bp, Homo sapien
taaaatgtacccaagaaacaggtgattaggaaa

SEQ ID NO: 741402 - DNA, 33 bp, Homo sapien
taaaatgtacccaagagacaggtgattaggaaa

SEQ ID NO: 741403 - DNA, 33 bp, Homo sapien
gcaaaataagatgccacgaggctgtcagtctgc

SEQ ID NO: 741404 - DNA, 33 bp, Homo sapien
gcaaaataagatgccatgaggctgtcagtctgc

SEQ ID NO: 741405 - DNA, 33 bp, Homo sapien
attctctttatgtgaacgcctgtatgagtaatt

SEQ ID NO: 741406 - DNA, 33 bp, Homo sapien
attctctttatgtgaatgcctgtatgagtaatt

SEQ ID NO: 741407 - DNA, 33 bp, Homo sapien
aagctataacaaaataccatagtcagagtagct

SEQ ID NO: 741408 - DNA, 33 bp, Homo sapien
aagctataacaaaatatcatagtcagagtagct

SEQ ID NO: 741409 - DNA, 33 bp, Homo sapien
agcagcatggaacttacagaagccagaccatga

SEQ ID NO: 741410 - DNA, 33 bp, Homo sapien
agcagcatggaacttatagaagccagaccatga

SEQ ID NO: 741411 - DNA, 33 bp, Homo sapien
tctgaaacagtcctccaaaatcagttcagcaga

SEQ ID NO: 741412 - DNA, 33 bp, Homo sapien
tctgaaacagtcctccgaaatcagttcagcaga

SEQ ID NO: 741413 - DNA, 33 bp, Homo sapien
gaaagagaaatgaagcccctttatgtggatggt

SEQ ID NO: 741414 - DNA, 33 bp, Homo sapien
gaaagagaaatgaagctcctttatgtggatggt

SEQ ID NO: 741415 - DNA, 33 bp, Homo sapien
gaaacctttatttcaagccaacagtagagtttt

SEQ ID NO: 741416 - DNA, 33 bp, Homo sapien
gaaacctttatttcaatccaacagtagagtttt

SEQ ID NO: 741417 - DNA, 33 bp, Homo sapien
tagtccctagttcctgccagcatttacctgtgc

SEQ ID NO: 741418 - DNA, 33 bp, Homo sapien
tagtccctagttcctgtcagcatttacctgtgc

SEQ ID NO: 741419 - DNA, 33 bp, Homo sapien
gaattgtgatataaccactagagtgactatccc

SEQ ID NO: 741420 - DNA, 33 bp, Homo sapien
gaattgtgatataaccgctagagtgactatccc

SEQ ID NO: 741421 - DNA, 33 bp, Homo sapien
acatatgagctcattacataactttgtcatata

SEQ ID NO: 741422 - DNA, 33 bp, Homo sapien
acatatgagctcattatataactttgtcatata

SEQ ID NO: 741423 - DNA, 33 bp, Homo sapien
tctggtctgaatccaacgtcacctaagatttag

SEQ ID NO: 741424 - DNA, 33 bp, Homo sapien
tctggtctgaatccaatgtcacctaagatttag

SEQ ID NO: 741425 - DNA, 33 bp, Homo sapien
ccattctcccgccagaaaaatatatgtgtatgt

SEQ ID NO: 741426 - DNA, 33 bp, Homo sapien
ccattctcccgccagataaatatatgtgtatgt

SEQ ID NO: 741427 - DNA, 33 bp, Homo sapien
gcacaaacctcaagggaccacacatttggtaga

SEQ ID NO: 741428 - DNA, 33 bp, Homo sapien
gcacaaacctcaaggggccacacatttggtaga

SEQ ID NO: 741429 - DNA, 33 bp, Homo sapien
cttgggagtcttaaaggcaataaacaattttag

SEQ ID NO: 741430 - DNA, 33 bp, Homo sapien
cttgggagtcttaaagtcaataaacaattttag

SEQ ID NO: 741431 - DNA, 33 bp, Homo sapien
actgtcgaaaacacaagaattgactttcctttg

SEQ ID NO: 741432 - DNA, 33 bp, Homo sapien
actgtcgaaaacacaataattgactttcctttg

SEQ ID NO: 741433 - DNA, 33 bp, Homo sapien
gggtaactgacgccacagtaagcaaaaccaaag

SEQ ID NO: 741434 - DNA, 33 bp, Homo sapien
gggtaactgacgccacggtaagcaaaaccaaag

SEQ ID NO: 741435 - DNA, 33 bp, Homo sapien
agactgatacctgaaaactgcattaggaaagga

SEQ ID NO: 741436 - DNA, 33 bp, Homo sapien
agactgatacctgaaagctgcattaggaaagga

SEQ ID NO: 741437 - DNA, 33 bp, Homo sapien
ggccctttcttacccaccatgccaacttaaaaa

SEQ ID NO: 741438 - DNA, 33 bp, Homo sapien
ggccctttcttacccatcatgccaacttaaaaa

SEQ ID NO: 741439 - DNA, 33 bp, Homo sapien
ggcatgataaaaatagaagggtaggagggaagg

SEQ ID NO: 741440 - DNA, 33 bp, Homo sapien
ggcatgataaaaataggagggtaggagggaagg

SEQ ID NO: 741441 - DNA, 33 bp, Homo sapien
ctgtcagctttgttctaaaatgtaccccaaatc

SEQ ID NO: 741442 - DNA, 33 bp, Homo sapien
ctgtcagctttgttctgaaatgtaccccaaatc

SEQ ID NO: 741443 - DNA, 33 bp, Homo sapien
tctgggtatctaatacacatctcaaacttagtg

SEQ ID NO: 741444 - DNA, 33 bp, Homo sapien
tctgggtatctaatacgcatctcaaacttagtg

SEQ ID NO: 741445 - DNA, 33 bp, Homo sapien
cattcctccttcttcaataaacagttccatgca

SEQ ID NO: 741446 - DNA, 33 bp, Homo sapien
cattcctccttcttcagtaaacagttccatgca

SEQ ID NO: 741447 - DNA, 33 bp, Homo sapien
taatataagcaagctgcactataattccattcc

SEQ ID NO: 741448 - DNA, 33 bp, Homo sapien
taatataagcaagctgtactataattccattcc

SEQ ID NO: 741449 - DNA, 33 bp, Homo sapien
gaacgaggacatcttacgactttgagagaggct

SEQ ID NO: 741450 - DNA, 33 bp, Homo sapien
gaacgaggacatcttatgactttgagagaggct

SEQ ID NO: 741451 - DNA, 33 bp, Homo sapien
gtattcttccacctaaaaatttcctctgtgcct

SEQ ID NO: 741452 - DNA, 33 bp, Homo sapien
gtattcttccacctaacaatttcctctgtgcct

SEQ ID NO: 741453 - DNA, 33 bp, Homo sapien
tggatacaaaaagtaacgctcttgccatcagca

SEQ ID NO: 741454 - DNA, 33 bp, Homo sapien
tggatacaaaaagtaatgctcttgccatcagca

SEQ ID NO: 741455 - DNA, 33 bp, Homo sapien
tgtatttagcaggcgacgaagagccagtgaaag

SEQ ID NO: 741456 - DNA, 33 bp, Homo sapien
tgtatttagcaggcgatgaagagccagtgaaag

SEQ ID NO: 741457 - DNA, 33 bp, Homo sapien
gtagagagcattttcaagagtatgatattaaaa

SEQ ID NO: 741458 - DNA, 33 bp, Homo sapien
gtagagagcattttcaggagtatgatattaaaa

SEQ ID NO: 741459 - DNA, 33 bp, Homo sapien
agtaggttgttctcatcaggcatagggaattgc

SEQ ID NO: 741460 - DNA, 33 bp, Homo sapien
agtaggttgttctcattaggcatagggaattgc

SEQ ID NO: 741461 - DNA, 33 bp, Homo sapien
tagggaattgcacataagtcttgattttggaat

SEQ ID NO: 741462 - DNA, 33 bp, Homo sapien
tagggaattgcacatatgtcttgattttggaat

SEQ ID NO: 741463 - DNA, 33 bp, Homo sapien
aaatcacaatcaagccaatttcttatattccaa

SEQ ID NO: 741464 - DNA, 33 bp, Homo sapien
aaatcacaatcaagcctatttcttatattccaa

SEQ ID NO: 741465 - DNA, 33 bp, Homo sapien
gtaagtttagcctgtaagccgacaaatctgttc

SEQ ID NO: 741466 - DNA, 33 bp, Homo sapien
gtaagtttagcctgtacgccgacaaatctgttc

SEQ ID NO: 741467 - DNA, 33 bp, Homo sapien
agccagaactttttacacatactggggagtcac

SEQ ID NO: 741468 - DNA, 33 bp, Homo sapien
agccagaactttttacgcatactggggagtcac

SEQ ID NO: 741469 - DNA, 33 bp, Homo sapien
ataccctgacaagcaaagccccaacctttaaaa

SEQ ID NO: 741470 - DNA, 33 bp, Homo sapien
ataccctgacaagcaaggccccaacctttaaaa

SEQ ID NO: 741471 - DNA, 33 bp, Homo sapien
tcctacaaacccacacagagctggttgccatgg

SEQ ID NO: 741472 - DNA, 33 bp, Homo sapien
tcctacaaacccacacggagctggttgccatgg

SEQ ID NO: 741473 - DNA, 33 bp, Homo sapien
tatccattcgagcacaatatttcattctgtttt

SEQ ID NO: 741474 - DNA, 33 bp, Homo sapien
tatccattcgagcacagtatttcattctgtttt

SEQ ID NO: 741475 - DNA, 33 bp, Homo sapien
ggagccatgtacaacacaacaaaggcagccata

SEQ ID NO: 741476 - DNA, 33 bp, Homo sapien
ggagccatgtacaacataacaaaggcagccata

SEQ ID NO: 741477 - DNA, 33 bp, Homo sapien
catttttgctttctgaccgtttgatgtacataa

SEQ ID NO: 741478 - DNA, 33 bp, Homo sapien
catttttgctttctgatcgtttgatgtacataa

SEQ ID NO: 741479 - DNA, 33 bp, Homo sapien
ctcaggattgattgtaagtaaaaatagactctg

SEQ ID NO: 741480 - DNA, 33 bp, Homo sapien
ctcaggattgattgtatgtaaaaatagactctg

SEQ ID NO: 741481 - DNA, 33 bp, Homo sapien
tgcttcttccacccaacccaagggatgtctctc

SEQ ID NO: 741482 - DNA, 33 bp, Homo sapien
tgcttcttccacccaatccaagggatgtctctc

SEQ ID NO: 741483 - DNA, 33 bp, Homo sapien
gtggtgggcagtatacaaggcaagctgtatggt

SEQ ID NO: 741484 - DNA, 33 bp, Homo sapien
gtggtgggcagtatacgaggcaagctgtatggt

SEQ ID NO: 741485 - DNA, 33 bp, Homo sapien
gcaaaatagtgaggccaaaatgattgaatctca

SEQ ID NO: 741486 - DNA, 33 bp, Homo sapien
gcaaaatagtgaggcccaaatgattgaatctca

SEQ ID NO: 741487 - DNA, 33 bp, Homo sapien
aatctgattcaactcagtaatgaactaaacaca

SEQ ID NO: 741488 - DNA, 33 bp, Homo sapien
aatctgattcaactcattaatgaactaaacaca

SEQ ID NO: 741489 - DNA, 33 bp, Homo sapien
gctttataaagacacaatatcagcaaaaagaac

SEQ ID NO: 741490 - DNA, 33 bp, Homo sapien
gctttataaagacacagtatcagcaaaaagaac

SEQ ID NO: 741491 - DNA, 33 bp, Homo sapien
catgctctgattggagacaggccaactttgcat

SEQ ID NO: 741492 - DNA, 33 bp, Homo sapien
catgctctgattggaggcaggccaactttgcat

SEQ ID NO: 741493 - DNA, 33 bp, Homo sapien
tattagataaaagcaaagacattgctcatacat

SEQ ID NO: 741494 - DNA, 33 bp, Homo sapien
tattagataaaagcaaggacattgctcatacat

SEQ ID NO: 741495 - DNA, 33 bp, Homo sapien
cttgggccaactcggaaagcttttcagaggcca

SEQ ID NO: 741496 - DNA, 33 bp, Homo sapien
cttgggccaactcggagagcttttcagaggcca

SEQ ID NO: 741497 - DNA, 33 bp, Homo sapien
aaaacaagggcgagacagtccctgcccataaag

SEQ ID NO: 741498 - DNA, 33 bp, Homo sapien
aaaacaagggcgagactgtccctgcccataaag

SEQ ID NO: 741499 - DNA, 33 bp, Homo sapien
ttcatttacaaaagacacaatttaaatgaacgt

SEQ ID NO: 741500 - DNA, 33 bp, Homo sapien
ttcatttacaaaagacgcaatttaaatgaacgt

SEQ ID NO: 741501 - DNA, 33 bp, Homo sapien
tataatatttatagaaactagaattctgccttg

SEQ ID NO: 741502 - DNA, 33 bp, Homo sapien
tataatatttatagaacctagaattctgccttg

SEQ ID NO: 741503 - DNA, 33 bp, Homo sapien
agaaaaagtgaaatgacggtaaggtctatggca

SEQ ID NO: 741504 - DNA, 33 bp, Homo sapien
agaaaaagtgaaatgatggtaaggtctatggca

SEQ ID NO: 741505 - DNA, 33 bp, Homo sapien
cctgtgtaaaaacaaccgatgtactggtgtatt

SEQ ID NO: 741506 - DNA, 33 bp, Homo sapien
cctgtgtaaaaacaactgatgtactggtgtatt

SEQ ID NO: 741507 - DNA, 33 bp, Homo sapien
aatgttaaaagaaggaaaggaacacatacccac

SEQ ID NO: 741508 - DNA, 33 bp, Homo sapien
aatgttaaaagaaggagaggaacacatacccac

SEQ ID NO: 741509 - DNA, 33 bp, Homo sapien
gcaggtgggatcagtaacatttttgtctcagat

SEQ ID NO: 741510 - DNA, 33 bp, Homo sapien
gcaggtgggatcagtagcatttttgtctcagat

SEQ ID NO: 741511 - DNA, 33 bp, Homo sapien
caaatatctctgttgacgaattttaagccaata

SEQ ID NO: 741512 - DNA, 33 bp, Homo sapien
caaatatctctgttgatgaattttaagccaata

SEQ ID NO: 741513 - DNA, 33 bp, Homo sapien
aatacacgattcattaaatgcttacaacctcct

SEQ ID NO: 741514 - DNA, 33 bp, Homo sapien
aatacacgattcattagatgcttacaacctcct

SEQ ID NO: 741515 - DNA, 33 bp, Homo sapien
agatatagtggaagtagcatgtaatatttcaga

SEQ ID NO: 741516 - DNA, 33 bp, Homo sapien
agatatagtggaagtatcatgtaatatttcaga

SEQ ID NO: 741517 - DNA, 33 bp, Homo sapien
ctatgtcaaaggacaactactgtttaaaagagg

SEQ ID NO: 741518 - DNA, 33 bp, Homo sapien
ctatgtcaaaggacaattactgtttaaaagagg

SEQ ID NO: 741519 - DNA, 33 bp, Homo sapien
aatgaatggtaaaagtaaagaccagaagcattt

SEQ ID NO: 741520 - DNA, 33 bp, Homo sapien
aatgaatggtaaaagtcaagaccagaagcattt

SEQ ID NO: 741521 - DNA, 33 bp, Homo sapien
ttggatcacaaaaaaacagacttttacatacct

SEQ ID NO: 741522 - DNA, 33 bp, Homo sapien
ttggatcacaaaaaaagagacttttacatacct

SEQ ID NO: 741523 - DNA, 33 bp, Homo sapien
aacactccctttttggaaaccaagacatttaaa

SEQ ID NO: 741524 - DNA, 33 bp, Homo sapien
aacactccctttttgggaaccaagacatttaaa

SEQ ID NO: 741525 - DNA, 33 bp, Homo sapien
tggcaaattcagagtcaaaaggaaagcacaaaa

SEQ ID NO: 741526 - DNA, 33 bp, Homo sapien
tggcaaattcagagtccaaaggaaagcacaaaa

SEQ ID NO: 741527 - DNA, 33 bp, Homo sapien
atggcatgtgtaccaaacaacattgctgtgtgg

SEQ ID NO: 741528 - DNA, 33 bp, Homo sapien
atggcatgtgtaccaatcaacattgctgtgtgg

SEQ ID NO: 741529 - DNA, 33 bp, Homo sapien
gtctgatgccatccagaagagtcttaattggag

SEQ ID NO: 741530 - DNA, 33 bp, Homo sapien
gtctgatgccatccagcagagtcttaattggag

SEQ ID NO: 741531 - DNA, 33 bp, Homo sapien
tatgattcactttgaaacgattgtgatagttca

SEQ ID NO: 741532 - DNA, 33 bp, Homo sapien
tatgattcactttgaagcgattgtgatagttca

SEQ ID NO: 741533 - DNA, 33 bp, Homo sapien
tcaagtgcctactctgcattgaatgcttgacag

SEQ ID NO: 741534 - DNA, 33 bp, Homo sapien
tcaagtgcctactctgtattgaatgcttgacag

SEQ ID NO: 741535 - DNA, 33 bp, Homo sapien
cacaacattggatcagaccaaattaatcaacgc

SEQ ID NO: 741536 - DNA, 33 bp, Homo sapien
cacaacattggatcaggccaaattaatcaacgc

SEQ ID NO: 741537 - DNA, 33 bp, Homo sapien
actatccacccattcacgtaagtgagaaaactg

SEQ ID NO: 741538 - DNA, 33 bp, Homo sapien
actatccacccattcatgtaagtgagaaaactg

SEQ ID NO: 741539 - DNA, 33 bp, Homo sapien
ataattgttagagttccattctagtaagcattg

SEQ ID NO: 741540 - DNA, 33 bp, Homo sapien
ataattgttagagttctattctagtaagcattg

SEQ ID NO: 741541 - DNA, 33 bp, Homo sapien
aacagatgctccaaagaaagaaaggtagagaag

SEQ ID NO: 741542 - DNA, 33 bp, Homo sapien
aacagatgctccaaaggaagaaaggtagagaag

SEQ ID NO: 741543 - DNA, 33 bp, Homo sapien
atagcagggttgtaaaaaaaaatacagctcaaa

SEQ ID NO: 741544 - DNA, 33 bp, Homo sapien
atagcagggttgtaaagaaaaatacagctcaaa

SEQ ID NO: 741545 - DNA, 33 bp, Homo sapien
aatctaatttacagcacggtgactacacttact

SEQ ID NO: 741546 - DNA, 33 bp, Homo sapien
aatctaatttacagcatggtgactacacttact

SEQ ID NO: 741547 - DNA, 33 bp, Homo sapien
atatgggggcctatcactcaatttaagaactag

SEQ ID NO: 741548 - DNA, 33 bp, Homo sapien
atatgggggcctatcagtcaatttaagaactag

SEQ ID NO: 741549 - DNA, 33 bp, Homo sapien
aatacaagagacttaaaatatgtgaaagaaaag

SEQ ID NO: 741550 - DNA, 33 bp, Homo sapien
aatacaagagacttaagatatgtgaaagaaaag

SEQ ID NO: 741551 - DNA, 33 bp, Homo sapien
ttgtactccagtaacacatggaaaaacaaaata

SEQ ID NO: 741552 - DNA, 33 bp, Homo sapien
ttgtactccagtaacatatggaaaaacaaaata

SEQ ID NO: 741553 - DNA, 33 bp, Homo sapien
agggtcagcattcttcaaaatgagttccagtaa

SEQ ID NO: 741554 - DNA, 33 bp, Homo sapien
agggtcagcattcttcgaaatgagttccagtaa

SEQ ID NO: 741555 - DNA, 33 bp, Homo sapien
tcctgttatcattctcagaactacttagataaa

SEQ ID NO: 741556 - DNA, 33 bp, Homo sapien
tcctgttatcattctcggaactacttagataaa

SEQ ID NO: 741557 - DNA, 33 bp, Homo sapien
catttgccttctctcacgcctgacctaggtctt

SEQ ID NO: 741558 - DNA, 33 bp, Homo sapien
catttgccttctctcatgcctgacctaggtctt

SEQ ID NO: 741559 - DNA, 33 bp, Homo sapien
atttttttctcctaaaatgcaagttaaacggtg

SEQ ID NO: 741560 - DNA, 33 bp, Homo sapien
atttttttctcctaaactgcaagttaaacggtg

SEQ ID NO: 741561 - DNA, 33 bp, Homo sapien
atgatgaaaaatcagaatccacagattgtaatt

SEQ ID NO: 741562 - DNA, 33 bp, Homo sapien
atgatgaaaaatcagagtccacagattgtaatt

SEQ ID NO: 741563 - DNA, 33 bp, Homo sapien
gaagaccctattagagaagctcagaaagggcct

SEQ ID NO: 741564 - DNA, 33 bp, Homo sapien
gaagaccctattagaggagctcagaaagggcct

SEQ ID NO: 741565 - DNA, 33 bp, Homo sapien
ttgaagtgaaccagaaataaggtgcattgatgg

SEQ ID NO: 741566 - DNA, 33 bp, Homo sapien
ttgaagtgaaccagaagtaaggtgcattgatgg

SEQ ID NO: 741567 - DNA, 33 bp, Homo sapien
ccataaccagaattcaaacctaaggcagacttg

SEQ ID NO: 741568 - DNA, 33 bp, Homo sapien
ccataaccagaattcagacctaaggcagacttg

SEQ ID NO: 741569 - DNA, 33 bp, Homo sapien
aacagctaaagtccaacagcaatggctagatgg

SEQ ID NO: 741570 - DNA, 33 bp, Homo sapien
aacagctaaagtccaagagcaatggctagatgg

SEQ ID NO: 741571 - DNA, 33 bp, Homo sapien
atttttagtagtttcaaataaagtcttgtttta

SEQ ID NO: 741572 - DNA, 33 bp, Homo sapien
atttttagtagtttcagataaagtcttgtttta

SEQ ID NO: 741573 - DNA, 33 bp, Homo sapien
taggaaatgaagtgaaattatgtctcttcactg

SEQ ID NO: 741574 - DNA, 33 bp, Homo sapien
taggaaatgaagtgaagttatgtctcttcactg

SEQ ID NO: 741575 - DNA, 33 bp, Homo sapien
atgtttacataacaacaatacaatgcctaggtt

SEQ ID NO: 741576 - DNA, 33 bp, Homo sapien
atgtttacataacaacgatacaatgcctaggtt

SEQ ID NO: 741577 - DNA, 33 bp, Homo sapien
gtctttgaaattgaaaacatatctttggtattg

SEQ ID NO: 741578 - DNA, 33 bp, Homo sapien
gtctttgaaattgaaagcatatctttggtattg

SEQ ID NO: 741579 - DNA, 33 bp, Homo sapien
ggttcttaggtcaagaatacaattttctgaaga

SEQ ID NO: 741580 - DNA, 33 bp, Homo sapien
ggttcttaggtcaagagtacaattttctgaaga

SEQ ID NO: 741581 - DNA, 33 bp, Homo sapien
gtaattctagttctaacgtcaggcatagctttg

SEQ ID NO: 741582 - DNA, 33 bp, Homo sapien
gtaattctagttctaatgtcaggcatagctttg

SEQ ID NO: 741583 - DNA, 33 bp, Homo sapien
atagatgtcaatgaacagtgaaatggacataag

SEQ ID NO: 741584 - DNA, 33 bp, Homo sapien
atagatgtcaatgaactgtgaaatggacataag

SEQ ID NO: 741585 - DNA, 33 bp, Homo sapien
ctcggttgaggttaagcagaaattgctaaaaaa

SEQ ID NO: 741586 - DNA, 33 bp, Homo sapien
ctcggttgaggttaagtagaaattgctaaaaaa

SEQ ID NO: 741587 - DNA, 33 bp, Homo sapien
tcttaactgctgtaaacgggaggtcaccatatc

SEQ ID NO: 741588 - DNA, 33 bp, Homo sapien
tcttaactgctgtaaatgggaggtcaccatatc

SEQ ID NO: 741589 - DNA, 33 bp, Homo sapien
agtatgtacctcataacttaagctagctcaaat

SEQ ID NO: 741590 - DNA, 33 bp, Homo sapien
agtatgtacctcataagttaagctagctcaaat

SEQ ID NO: 741591 - DNA, 33 bp, Homo sapien
gactttagactagagacgctgagtttcaagaaa

SEQ ID NO: 741592 - DNA, 33 bp, Homo sapien
gactttagactagagatgctgagtttcaagaaa

SEQ ID NO: 741593 - DNA, 33 bp, Homo sapien
attttaaatgatatacacttggagcaatgttaa

SEQ ID NO: 741594 - DNA, 33 bp, Homo sapien
attttaaatgatatacgcttggagcaatgttaa

SEQ ID NO: 741595 - DNA, 33 bp, Homo sapien
caggtttagaatgagaagttgaccacttttggt

SEQ ID NO: 741596 - DNA, 33 bp, Homo sapien
caggtttagaatgagaggttgaccacttttggt

SEQ ID NO: 741597 - DNA, 33 bp, Homo sapien
ttattttgtagcttaggagccgagaatattatg

SEQ ID NO: 741598 - DNA, 33 bp, Homo sapien
ttattttgtagcttagtagccgagaatattatg

SEQ ID NO: 741599 - DNA, 33 bp, Homo sapien
ccataaaattgcttaaaaatacctggcattcat

SEQ ID NO: 741600 - DNA, 33 bp, Homo sapien
ccataaaattgcttaagaatacctggcattcat

SEQ ID NO: 741601 - DNA, 33 bp, Homo sapien
tcttatgaagtcataacttacaaaagattatct

SEQ ID NO: 741602 - DNA, 33 bp, Homo sapien
tcttatgaagtcataatttacaaaagattatct

SEQ ID NO: 741603 - DNA, 33 bp, Homo sapien
tcaacataagaaatccaaaattgtattcacttt

SEQ ID NO: 741604 - DNA, 33 bp, Homo sapien
tcaacataagaaatccgaaattgtattcacttt

SEQ ID NO: 741605 - DNA, 33 bp, Homo sapien
agctactctaatgccacctatgtgcgaagtaca

SEQ ID NO: 741606 - DNA, 33 bp, Homo sapien
agctactctaatgccatctatgtgcgaagtaca

SEQ ID NO: 741607 - DNA, 33 bp, Homo sapien
tctggtagccagaaaaacaccaagttctcccca

SEQ ID NO: 741608 - DNA, 33 bp, Homo sapien
tctggtagccagaaaagcaccaagttctcccca

SEQ ID NO: 741609 - DNA, 33 bp, Homo sapien
atatcttaccaagttacggatattatgcttatc

SEQ ID NO: 741610 - DNA, 33 bp, Homo sapien
atatcttaccaagttatggatattatgcttatc

SEQ ID NO: 741611 - DNA, 33 bp, Homo sapien
gataatatctatgtcacacagttcttttgagga

SEQ ID NO: 741612 - DNA, 33 bp, Homo sapien
gataatatctatgtcatacagttcttttgagga

SEQ ID NO: 741613 - DNA, 33 bp, Homo sapien
ttcacctaataagaatcacagttttatattcat

SEQ ID NO: 741614 - DNA, 33 bp, Homo sapien
ttcacctaataagaatgacagttttatattcat

SEQ ID NO: 741615 - DNA, 33 bp, Homo sapien
aacctttgctctcatgaagtttacatactaaag

SEQ ID NO: 741616 - DNA, 33 bp, Homo sapien
aacctttgctctcatgcagtttacatactaaag

SEQ ID NO: 741617 - DNA, 33 bp, Homo sapien
ttacacaattttaatcaatccacaatcataaga

SEQ ID NO: 741618 - DNA, 33 bp, Homo sapien
ttacacaattttaatccatccacaatcataaga

SEQ ID NO: 741619 - DNA, 33 bp, Homo sapien
gaaatcagaataatcacggtactggcctcccag

SEQ ID NO: 741620 - DNA, 33 bp, Homo sapien
gaaatcagaataatcatggtactggcctcccag

SEQ ID NO: 741621 - DNA, 33 bp, Homo sapien
cctattggactcctgaatattacacaccatatt

SEQ ID NO: 741622 - DNA, 33 bp, Homo sapien
cctattggactcctgagtattacacaccatatt

SEQ ID NO: 741623 - DNA, 33 bp, Homo sapien
ttattttaccgatgaaacatgattcctaatcac

SEQ ID NO: 741624 - DNA, 33 bp, Homo sapien
ttattttaccgatgaagcatgattcctaatcac

SEQ ID NO: 741625 - DNA, 33 bp, Homo sapien
tctctcttctacttagaaacctattcaattcct

SEQ ID NO: 741626 - DNA, 33 bp, Homo sapien
tctctcttctacttaggaacctattcaattcct

SEQ ID NO: 741627 - DNA, 33 bp, Homo sapien
aatctgccagtgtgcacaatcttatgttggaga

SEQ ID NO: 741628 - DNA, 33 bp, Homo sapien
aatctgccagtgtgcataatcttatgttggaga

SEQ ID NO: 741629 - DNA, 33 bp, Homo sapien
gtttaatatttcttcaagctcaagaatgatatg

SEQ ID NO: 741630 - DNA, 33 bp, Homo sapien
gtttaatatttcttcaggctcaagaatgatatg

SEQ ID NO: 741631 - DNA, 33 bp, Homo sapien
gcctttgagattgatagactacatattgttgca

SEQ ID NO: 741632 - DNA, 33 bp, Homo sapien
gcctttgagattgatatactacatattgttgca

SEQ ID NO: 741633 - DNA, 33 bp, Homo sapien
gagccagagcttgtaacacctttgtcacattgt

SEQ ID NO: 741634 - DNA, 33 bp, Homo sapien
gagccagagcttgtaatacctttgtcacattgt

SEQ ID NO: 741635 - DNA, 33 bp, Homo sapien
gtatagtgtgtctctacaaatattacctaatac

SEQ ID NO: 741636 - DNA, 33 bp, Homo sapien
gtatagtgtgtctctataaatattacctaatac

SEQ ID NO: 741637 - DNA, 33 bp, Homo sapien
aatagtgacagcagacaaagttattcaaatgcc

SEQ ID NO: 741638 - DNA, 33 bp, Homo sapien
aatagtgacagcagacgaagttattcaaatgcc

SEQ ID NO: 741639 - DNA, 33 bp, Homo sapien
aagaccgagcaggctacgacatcattcactaag

SEQ ID NO: 741640 - DNA, 33 bp, Homo sapien
aagaccgagcaggctatgacatcattcactaag

SEQ ID NO: 741641 - DNA, 33 bp, Homo sapien
tgcagctgccactaatcacttttggatatagct

SEQ ID NO: 741642 - DNA, 33 bp, Homo sapien
tgcagctgccactaattacttttggatatagct

SEQ ID NO: 741643 - DNA, 33 bp, Homo sapien
tcaccagagtgaactacagcgccccaaggagga

SEQ ID NO: 741644 - DNA, 33 bp, Homo sapien
tcaccagagtgaactatagcgccccaaggagga

SEQ ID NO: 741645 - DNA, 33 bp, Homo sapien
atttcaggctttagtgaacagtatgtttgggtg

SEQ ID NO: 741646 - DNA, 33 bp, Homo sapien
atttcaggctttagtggacagtatgtttgggtg

SEQ ID NO: 741647 - DNA, 33 bp, Homo sapien
cagggtcgtatttctacgtgatgagaagtgcat

SEQ ID NO: 741648 - DNA, 33 bp, Homo sapien
cagggtcgtatttctaggtgatgagaagtgcat

SEQ ID NO: 741649 - DNA, 33 bp, Homo sapien
ataatttggagtataactggagcatggaagatt

SEQ ID NO: 741650 - DNA, 33 bp, Homo sapien
ataatttggagtataattggagcatggaagatt

SEQ ID NO: 741651 - DNA, 33 bp, Homo sapien
tacatggtttgagtgacgatggagcaatcatgt

SEQ ID NO: 741652 - DNA, 33 bp, Homo sapien
tacatggtttgagtgatgatggagcaatcatgt

SEQ ID NO: 741653 - DNA, 33 bp, Homo sapien
gcctggatgttattaacaaaatttggagtgtac

SEQ ID NO: 741654 - DNA, 33 bp, Homo sapien
gcctggatgttattaagaaaatttggagtgtac

SEQ ID NO: 741655 - DNA, 33 bp, Homo sapien
tgagtgcaagggaaaacggcagatgcttatgaa

SEQ ID NO: 741656 - DNA, 33 bp, Homo sapien
tgagtgcaagggaaaatggcagatgcttatgaa

SEQ ID NO: 741657 - DNA, 33 bp, Homo sapien
cccacagaattaaaaccatgtggacactggtga

SEQ ID NO: 741658 - DNA, 33 bp, Homo sapien
cccacagaattaaaactatgtggacactggtga

SEQ ID NO: 741659 - DNA, 33 bp, Homo sapien
actcactgagctttaccggtgtcttgaatcaaa

SEQ ID NO: 741660 - DNA, 33 bp, Homo sapien
actcactgagctttactggtgtcttgaatcaaa

SEQ ID NO: 741661 - DNA, 33 bp, Homo sapien
atgattaagctgaattaaaatcacaagataata

SEQ ID NO: 741662 - DNA, 33 bp, Homo sapien
atgattaagctgaatttaaatcacaagataata

SEQ ID NO: 741663 - DNA, 33 bp, Homo sapien
tctataactttgatgaggagacttattttgaaa

SEQ ID NO: 741664 - DNA, 33 bp, Homo sapien
tctataactttgatgatgagacttattttgaaa

SEQ ID NO: 741665 - DNA, 33 bp, Homo sapien
tctgacacattgtaaacagtgtttgttgaataa

SEQ ID NO: 741666 - DNA, 33 bp, Homo sapien
tctgacacattgtaaatagtgtttgttgaataa

SEQ ID NO: 741667 - DNA, 33 bp, Homo sapien
gataactgagcagcaaccgcagcttctcctgga

SEQ ID NO: 741668 - DNA, 33 bp, Homo sapien
gataactgagcagcaatcgcagcttctcctgga

SEQ ID NO: 741669 - DNA, 33 bp, Homo sapien
attttccttgctcaacaatctttaaaattcttt

SEQ ID NO: 741670 - DNA, 33 bp, Homo sapien
attttccttgctcaacgatctttaaaattcttt

SEQ ID NO: 741671 - DNA, 33 bp, Homo sapien
ttgatgctggtaaaacgacatgatctctaaaca

SEQ ID NO: 741672 - DNA, 33 bp, Homo sapien
ttgatgctggtaaaactacatgatctctaaaca

SEQ ID NO: 741673 - DNA, 33 bp, Homo sapien
tatgtgacaataagaaaaagattacagatccaa

SEQ ID NO: 741674 - DNA, 33 bp, Homo sapien
tatgtgacaataagaacaagattacagatccaa

SEQ ID NO: 741675 - DNA, 33 bp, Homo sapien
ctgttgctgtgccttacattttgattttagaat

SEQ ID NO: 741676 - DNA, 33 bp, Homo sapien
ctgttgctgtgccttatattttgattttagaat

SEQ ID NO: 741677 - DNA, 33 bp, Homo sapien
tatgtgcaaaggcagactattggcaactgtttc

SEQ ID NO: 741678 - DNA, 33 bp, Homo sapien
tatgtgcaaaggcagagtattggcaactgtttc

SEQ ID NO: 741679 - DNA, 33 bp, Homo sapien
attatttctggccttaacatgacctttaggttt

SEQ ID NO: 741680 - DNA, 33 bp, Homo sapien
attatttctggccttagcatgacctttaggttt

SEQ ID NO: 741681 - DNA, 33 bp, Homo sapien
ttattagtattcagcactaataccagtgggcac

SEQ ID NO: 741682 - DNA, 33 bp, Homo sapien
ttattagtattcagcattaataccagtgggcac

SEQ ID NO: 741683 - DNA, 33 bp, Homo sapien
atagttttgagcatcaaggaatacattttcaga

SEQ ID NO: 741684 - DNA, 33 bp, Homo sapien
atagttttgagcatcagggaatacattttcaga

SEQ ID NO: 741685 - DNA, 33 bp, Homo sapien
ttccatgctaaggagacaagtaatttttttaag

SEQ ID NO: 741686 - DNA, 33 bp, Homo sapien
ttccatgctaaggagataagtaatttttttaag

SEQ ID NO: 741687 - DNA, 33 bp, Homo sapien
tgttttgatgctgatcacataggacctttgcaa

SEQ ID NO: 741688 - DNA, 33 bp, Homo sapien
tgttttgatgctgatcgcataggacctttgcaa

SEQ ID NO: 741689 - DNA, 33 bp, Homo sapien
aaaatgtggtccagaagagctgtcatgtcagaa

SEQ ID NO: 741690 - DNA, 33 bp, Homo sapien
aaaatgtggtccagaatagctgtcatgtcagaa

SEQ ID NO: 741691 - DNA, 33 bp, Homo sapien
ccaactgacttcaacaagactcaaagcaagcac

SEQ ID NO: 741692 - DNA, 33 bp, Homo sapien
ccaactgacttcaacaggactcaaagcaagcac

SEQ ID NO: 741693 - DNA, 33 bp, Homo sapien
atcaaagcaaaagaaaatgccaagcaagaaatc

SEQ ID NO: 741694 - DNA, 33 bp, Homo sapien
atcaaagcaaaagaaagtgccaagcaagaaatc

SEQ ID NO: 741695 - DNA, 33 bp, Homo sapien
ttttttatgcactaaaaagatatgagttcttga

SEQ ID NO: 741696 - DNA, 33 bp, Homo sapien
ttttttatgcactaaatagatatgagttcttga

SEQ ID NO: 741697 - DNA, 33 bp, Homo sapien
tttaataactccaatgaatttgatgaaacacaa

SEQ ID NO: 741698 - DNA, 33 bp, Homo sapien
tttaataactccaatgtatttgatgaaacacaa

SEQ ID NO: 741699 - DNA, 33 bp, Homo sapien
atattgtttgcattcaatctgtaagggaatcag

SEQ ID NO: 741700 - DNA, 33 bp, Homo sapien
atattgtttgcattcattctgtaagggaatcag

SEQ ID NO: 741701 - DNA, 33 bp, Homo sapien
gggaattggcagccacaaacatattggtggtag

SEQ ID NO: 741702 - DNA, 33 bp, Homo sapien
gggaattggcagccacgaacatattggtggtag

SEQ ID NO: 741703 - DNA, 33 bp, Homo sapien
acagctatttggaaaacttaatgcaaattcatg

SEQ ID NO: 741704 - DNA, 33 bp, Homo sapien
acagctatttggaaaatttaatgcaaattcatg

SEQ ID NO: 741705 - DNA, 33 bp, Homo sapien
tggctaaaagttaaaacgtgttgattacaaagc

SEQ ID NO: 741706 - DNA, 33 bp, Homo sapien
tggctaaaagttaaaatgtgttgattacaaagc

SEQ ID NO: 741707 - DNA, 33 bp, Homo sapien
aaatcaagcagaaatcgctgaagtgccagataa

SEQ ID NO: 741708 - DNA, 33 bp, Homo sapien
aaatcaagcagaaatctctgaagtgccagataa

SEQ ID NO: 741709 - DNA, 33 bp, Homo sapien
tacagaccagtaacaaatggtgagattgaaaca

SEQ ID NO: 741710 - DNA, 33 bp, Homo sapien
tacagaccagtaacaagtggtgagattgaaaca

SEQ ID NO: 741711 - DNA, 33 bp, Homo sapien
gtcaatcacatttcaacggagagaatttcctag

SEQ ID NO: 741712 - DNA, 33 bp, Homo sapien
gtcaatcacatttcaatggagagaatttcctag

SEQ ID NO: 741713 - DNA, 33 bp, Homo sapien
cttttgggtaaacacaccatagatcatcatcat

SEQ ID NO: 741714 - DNA, 33 bp, Homo sapien
cttttgggtaaacacagcatagatcatcatcat

SEQ ID NO: 741715 - DNA, 33 bp, Homo sapien
actccagccttctctagcattcctgtctagcca

SEQ ID NO: 741716 - DNA, 33 bp, Homo sapien
actccagccttctctatcattcctgtctagcca

SEQ ID NO: 741717 - DNA, 33 bp, Homo sapien
aaaacaaaccacaaatcaaaaccagtttaacag

SEQ ID NO: 741718 - DNA, 33 bp, Homo sapien
aaaacaaaccacaaatgaaaaccagtttaacag

SEQ ID NO: 741719 - DNA, 33 bp, Homo sapien
ctacaaaaagaaaagactaatgtcagagaagta

SEQ ID NO: 741720 - DNA, 33 bp, Homo sapien
ctacaaaaagaaaagattaatgtcagagaagta

SEQ ID NO: 741721 - DNA, 33 bp, Homo sapien
acagtagtacaatatacgtcttcctcaagaaca

SEQ ID NO: 741722 - DNA, 33 bp, Homo sapien
acagtagtacaatatatgtcttcctcaagaaca

SEQ ID NO: 741723 - DNA, 33 bp, Homo sapien
tggaaagacctcctaccacatggagtatcaagt

SEQ ID NO: 741724 - DNA, 33 bp, Homo sapien
tggaaagacctcctactacatggagtatcaagt

SEQ ID NO: 741725 - DNA, 33 bp, Homo sapien
aagacttaactctataacaatcttgaccctatt

SEQ ID NO: 741726 - DNA, 33 bp, Homo sapien
aagacttaactctatatcaatcttgaccctatt

SEQ ID NO: 741727 - DNA, 33 bp, Homo sapien
agagagagtgtgtttaaaaagcatctgacattc

SEQ ID NO: 741728 - DNA, 33 bp, Homo sapien
agagagagtgtgtttacaaagcatctgacattc

SEQ ID NO: 741729 - DNA, 33 bp, Homo sapien
aaagttaccatccacgaatcttgataattcata

SEQ ID NO: 741730 - DNA, 33 bp, Homo sapien
aaagttaccatccacgtatcttgataattcata

SEQ ID NO: 741731 - DNA, 33 bp, Homo sapien
tataatggttccgaaacattgcttttatactga

SEQ ID NO: 741732 - DNA, 33 bp, Homo sapien
tataatggttccgaaatattgcttttatactga

SEQ ID NO: 741733 - DNA, 33 bp, Homo sapien
tgattcatttctctcacaacaaggatacccatt

SEQ ID NO: 741734 - DNA, 33 bp, Homo sapien
tgattcatttctctcagaacaaggatacccatt

SEQ ID NO: 741735 - DNA, 33 bp, Homo sapien
cacacagatactgaagaaaatagtagcagatac

SEQ ID NO: 741736 - DNA, 33 bp, Homo sapien
cacacagatactgaaggaaatagtagcagatac

SEQ ID NO: 741737 - DNA, 33 bp, Homo sapien
tacagagcttatgtgaagattaaggtgttcaaa

SEQ ID NO: 741738 - DNA, 33 bp, Homo sapien
tacagagcttatgtgaggattaaggtgttcaaa

SEQ ID NO: 741739 - DNA, 33 bp, Homo sapien
aaggacatcatcctaaatgatttaacacaggaa

SEQ ID NO: 741740 - DNA, 33 bp, Homo sapien
aaggacatcatcctaagtgatttaacacaggaa

SEQ ID NO: 741741 - DNA, 33 bp, Homo sapien
tattggaattcagaagccataatcagaaacacc

SEQ ID NO: 741742 - DNA, 33 bp, Homo sapien
tattggaattcagaagtcataatcagaaacacc

SEQ ID NO: 741743 - DNA, 33 bp, Homo sapien
gcaagagtaacttagaaaaaactgcaatggaac

SEQ ID NO: 741744 - DNA, 33 bp, Homo sapien
gcaagagtaacttagagaaaactgcaatggaac

SEQ ID NO: 741745 - DNA, 33 bp, Homo sapien
cacttgaaaacccagacaaagtcataattccta

SEQ ID NO: 741746 - DNA, 33 bp, Homo sapien
cacttgaaaacccagagaaagtcataattccta

SEQ ID NO: 741747 - DNA, 33 bp, Homo sapien
cttcgacaatttcaacaatatgaactgcatgta

SEQ ID NO: 741748 - DNA, 33 bp, Homo sapien
cttcgacaatttcaactatatgaactgcatgta

SEQ ID NO: 741749 - DNA, 33 bp, Homo sapien
ttactctcatcgaagaccattttggattatgaa

SEQ ID NO: 741750 - DNA, 33 bp, Homo sapien
ttactctcatcgaagatcattttggattatgaa

SEQ ID NO: 741751 - DNA, 33 bp, Homo sapien
ggcctagactgtctgacatagtaggtctgtaat

SEQ ID NO: 741752 - DNA, 33 bp, Homo sapien
ggcctagactgtctgatatagtaggtctgtaat

SEQ ID NO: 741753 - DNA, 33 bp, Homo sapien
ggggtcgtggagacaacctcattcagctaatgt

SEQ ID NO: 741754 - DNA, 33 bp, Homo sapien
ggggtcgtggagacaagctcattcagctaatgt

SEQ ID NO: 741755 - DNA, 33 bp, Homo sapien
ttccaagttattttacaaccccaagtgagtaag

SEQ ID NO: 741756 - DNA, 33 bp, Homo sapien
ttccaagttattttacgaccccaagtgagtaag

SEQ ID NO: 741757 - DNA, 33 bp, Homo sapien
taatacacaatctcaactgcttttttaaacata

SEQ ID NO: 741758 - DNA, 33 bp, Homo sapien
taatacacaatctcaattgcttttttaaacata

SEQ ID NO: 741759 - DNA, 33 bp, Homo sapien
cacagacatcactttgcagttgatttcttcaga

SEQ ID NO: 741760 - DNA, 33 bp, Homo sapien
cacagacatcactttgtagttgatttcttcaga

SEQ ID NO: 741761 - DNA, 33 bp, Homo sapien
tatgtctttaaatgtaaggacgagtttagaaga

SEQ ID NO: 741762 - DNA, 33 bp, Homo sapien
tatgtctttaaatgtatggacgagtttagaaga

SEQ ID NO: 741763 - DNA, 33 bp, Homo sapien
gacagggaagagggaaactaagagccaggtaaa

SEQ ID NO: 741764 - DNA, 33 bp, Homo sapien
gacagggaagagggaacctaagagccaggtaaa

SEQ ID NO: 741765 - DNA, 33 bp, Homo sapien
tgatgcagactgaaaactacaataagaataaaa

SEQ ID NO: 741766 - DNA, 33 bp, Homo sapien
tgatgcagactgaaaagtacaataagaataaaa

SEQ ID NO: 741767 - DNA, 33 bp, Homo sapien
cggcgtttctgctgaccactttatctgaaatta

SEQ ID NO: 741768 - DNA, 33 bp, Homo sapien
cggcgtttctgctgacgactttatctgaaatta

SEQ ID NO: 741769 - DNA, 33 bp, Homo sapien
gccgtaattaggagtcaaaaaacaatagatatt

SEQ ID NO: 741770 - DNA, 33 bp, Homo sapien
gccgtaattaggagtcgaaaaacaatagatatt

SEQ ID NO: 741771 - DNA, 33 bp, Homo sapien
gccactcgttggttgacggacacttagcatgat

SEQ ID NO: 741772 - DNA, 33 bp, Homo sapien
gccactcgttggttgatggacacttagcatgat

SEQ ID NO: 741773 - DNA, 33 bp, Homo sapien
gattaagttatgagagccctgcactcttgaagg

SEQ ID NO: 741774 - DNA, 33 bp, Homo sapien
gattaagttatgagaggcctgcactcttgaagg

SEQ ID NO: 741775 - DNA, 33 bp, Homo sapien
caaaggatgtgagaatgatgacagttgtaggta

SEQ ID NO: 741776 - DNA, 33 bp, Homo sapien
caaaggatgtgagaattatgacagttgtaggta

SEQ ID NO: 741777 - DNA, 33 bp, Homo sapien
atcatagcacaaaaaaataccaagagaaggatc

SEQ ID NO: 741778 - DNA, 33 bp, Homo sapien
atcatagcacaaaaaattaccaagagaaggatc

SEQ ID NO: 741779 - DNA, 33 bp, Homo sapien
tgcttgtataaattcaccactgatcttaggtta

SEQ ID NO: 741780 - DNA, 33 bp, Homo sapien
tgcttgtataaattcatcactgatcttaggtta

SEQ ID NO: 741781 - DNA, 33 bp, Homo sapien
tagagtactgacaacaatattatcgtttatgga

SEQ ID NO: 741782 - DNA, 33 bp, Homo sapien
tagagtactgacaacagtattatcgtttatgga

SEQ ID NO: 741783 - DNA, 33 bp, Homo sapien
ggatgttatatcatagcaccaagtggaggagaa

SEQ ID NO: 741784 - DNA, 33 bp, Homo sapien
ggatgttatatcatagtaccaagtggaggagaa

SEQ ID NO: 741785 - DNA, 33 bp, Homo sapien
tagagaaaaacagtgaaggtctccttggcaaca

SEQ ID NO: 741786 - DNA, 33 bp, Homo sapien
tagagaaaaacagtgacggtctccttggcaaca

SEQ ID NO: 741787 - DNA, 33 bp, Homo sapien
catcagagttaatgcaatgacaatctcgaattg

SEQ ID NO: 741788 - DNA, 33 bp, Homo sapien
catcagagttaatgcagtgacaatctcgaattg

SEQ ID NO: 741789 - DNA, 33 bp, Homo sapien
gaagttggatttattacaactatacaagactca

SEQ ID NO: 741790 - DNA, 33 bp, Homo sapien
gaagttggatttattataactatacaagactca

SEQ ID NO: 741791 - DNA, 33 bp, Homo sapien
tttgttttgtgtaaaaagtgaaataatgttact

SEQ ID NO: 741792 - DNA, 33 bp, Homo sapien
tttgttttgtgtaaaatgtgaaataatgttact

SEQ ID NO: 741793 - DNA, 33 bp, Homo sapien
ccaggataataactgacctgcaatagacaggta

SEQ ID NO: 741794 - DNA, 33 bp, Homo sapien
ccaggataataactgagctgcaatagacaggta

SEQ ID NO: 741795 - DNA, 33 bp, Homo sapien
atgtagcaactaataacgcttatctgactgttt

SEQ ID NO: 741796 - DNA, 33 bp, Homo sapien
atgtagcaactaataatgcttatctgactgttt

SEQ ID NO: 741797 - DNA, 33 bp, Homo sapien
catacgcagttcaaataaagttgtgaaaactta

SEQ ID NO: 741798 - DNA, 33 bp, Homo sapien
catacgcagttcaaatgaagttgtgaaaactta

SEQ ID NO: 741799 - DNA, 33 bp, Homo sapien
attactagaatttccactgaagcactattatag

SEQ ID NO: 741800 - DNA, 33 bp, Homo sapien
attactagaatttccattgaagcactattatag

SEQ ID NO: 741801 - DNA, 33 bp, Homo sapien
ctgttatcctgactcaactaggtctagcaagat

SEQ ID NO: 741802 - DNA, 33 bp, Homo sapien
ctgttatcctgactcatctaggtctagcaagat

SEQ ID NO: 741803 - DNA, 33 bp, Homo sapien
ttgttctcgtgaaaaacttattatagtagcact

SEQ ID NO: 741804 - DNA, 33 bp, Homo sapien
ttgttctcgtgaaaaatttattatagtagcact

SEQ ID NO: 741805 - DNA, 33 bp, Homo sapien
ttcaactgtcatcaatcaaatgtatacatcatg

SEQ ID NO: 741806 - DNA, 33 bp, Homo sapien
ttcaactgtcatcaattaaatgtatacatcatg

SEQ ID NO: 741807 - DNA, 33 bp, Homo sapien
gtgtcttcagatgacacccttttgtctgtatac

SEQ ID NO: 741808 - DNA, 33 bp, Homo sapien
gtgtcttcagatgacatccttttgtctgtatac

SEQ ID NO: 741809 - DNA, 33 bp, Homo sapien
aatgatctgagaagtaactttaatgaagtcaag

SEQ ID NO: 741810 - DNA, 33 bp, Homo sapien
aatgatctgagaagtacctttaatgaagtcaag

SEQ ID NO: 741811 - DNA, 33 bp, Homo sapien
aaaccaatatcaagtacgtgactcagctaggtt

SEQ ID NO: 741812 - DNA, 33 bp, Homo sapien
aaaccaatatcaagtatgtgactcagctaggtt

SEQ ID NO: 741813 - DNA, 33 bp, Homo sapien
ttttgtgatgttatcaatacaaatcctccaagt

SEQ ID NO: 741814 - DNA, 33 bp, Homo sapien
ttttgtgatgttatcagtacaaatcctccaagt

SEQ ID NO: 741815 - DNA, 33 bp, Homo sapien
cagagacagcaggctacagtgtaagcattcata

SEQ ID NO: 741816 - DNA, 33 bp, Homo sapien
cagagacagcaggctagagtgtaagcattcata

SEQ ID NO: 741817 - DNA, 33 bp, Homo sapien
ttttgttcagacattacagagtacaagttgaat

SEQ ID NO: 741818 - DNA, 33 bp, Homo sapien
ttttgttcagacattagagagtacaagttgaat

SEQ ID NO: 741819 - DNA, 33 bp, Homo sapien
aaaactgaaagaaagaagggttcactagcagct

SEQ ID NO: 741820 - DNA, 33 bp, Homo sapien
aaaactgaaagaaagaggggttcactagcagct

SEQ ID NO: 741821 - DNA, 33 bp, Homo sapien
cattacttttctacaactcttaattacctttga

SEQ ID NO: 741822 - DNA, 33 bp, Homo sapien
cattacttttctacaagtcttaattacctttga

SEQ ID NO: 741823 - DNA, 33 bp, Homo sapien
taccaccacaatgtcaaggaggaagctttttat

SEQ ID NO: 741824 - DNA, 33 bp, Homo sapien
taccaccacaatgtcagggaggaagctttttat

SEQ ID NO: 741825 - DNA, 33 bp, Homo sapien
ggatatacaaatgttacatttcaatgaagtaag

SEQ ID NO: 741826 - DNA, 33 bp, Homo sapien
ggatatacaaatgttatatttcaatgaagtaag

SEQ ID NO: 741827 - DNA, 33 bp, Homo sapien
tcatgtgagtctaatacgacattttctttggta

SEQ ID NO: 741828 - DNA, 33 bp, Homo sapien
tcatgtgagtctaataggacattttctttggta

SEQ ID NO: 741829 - DNA, 33 bp, Homo sapien
cagaaatccatagggcactagatgaggcaaaaa

SEQ ID NO: 741830 - DNA, 33 bp, Homo sapien
cagaaatccatagggctctagatgaggcaaaaa

SEQ ID NO: 741831 - DNA, 33 bp, Homo sapien
tgaatgaaaaatgtaaccacagacactaatcct

SEQ ID NO: 741832 - DNA, 33 bp, Homo sapien
tgaatgaaaaatgtaatcacagacactaatcct

SEQ ID NO: 741833 - DNA, 33 bp, Homo sapien
agcagaccaccttggaatcaaactgcaacactt

SEQ ID NO: 741834 - DNA, 33 bp, Homo sapien
agcagaccaccttggactcaaactgcaacactt

SEQ ID NO: 741835 - DNA, 33 bp, Homo sapien
tctgctgcactaaccaaatacaaggcatcatat

SEQ ID NO: 741836 - DNA, 33 bp, Homo sapien
tctgctgcactaaccagatacaaggcatcatat

SEQ ID NO: 741837 - DNA, 33 bp, Homo sapien
atttgaaataagactgcagactgtgttattcca

SEQ ID NO: 741838 - DNA, 33 bp, Homo sapien
atttgaaataagactgtagactgtgttattcca

SEQ ID NO: 741839 - DNA, 33 bp, Homo sapien
tccaaagggctggtaaaacactgtaattaggag

SEQ ID NO: 741840 - DNA, 33 bp, Homo sapien
tccaaagggctggtaagacactgtaattaggag

SEQ ID NO: 741841 - DNA, 33 bp, Homo sapien
atacagatacctactacatatgccaagtaattt

SEQ ID NO: 741842 - DNA, 33 bp, Homo sapien
atacagatacctactatatatgccaagtaattt

SEQ ID NO: 741843 - DNA, 33 bp, Homo sapien
aagaatggaggagcatcagcagttaggaagttg

SEQ ID NO: 741844 - DNA, 33 bp, Homo sapien
aagaatggaggagcatgagcagttaggaagttg

SEQ ID NO: 741845 - DNA, 33 bp, Homo sapien
ctttgcctgggggataaaagatgggccatttga

SEQ ID NO: 741846 - DNA, 33 bp, Homo sapien
ctttgcctgggggatacaagatgggccatttga

SEQ ID NO: 741847 - DNA, 33 bp, Homo sapien
aactagttgaatttaaactaactaagctgagat

SEQ ID NO: 741848 - DNA, 33 bp, Homo sapien
aactagttgaatttaagctaactaagctgagat

SEQ ID NO: 741849 - DNA, 33 bp, Homo sapien
gtttgtataattgtgccaaagctaaattcacca

SEQ ID NO: 741850 - DNA, 33 bp, Homo sapien
gtttgtataattgtgcgaaagctaaattcacca

SEQ ID NO: 741851 - DNA, 33 bp, Homo sapien
attaagaagcaatagacagaagtgtgtagggtt

SEQ ID NO: 741852 - DNA, 33 bp, Homo sapien
attaagaagcaatagatagaagtgtgtagggtt

SEQ ID NO: 741853 - DNA, 33 bp, Homo sapien
aaaatgcattattttaagaactaaaccaagtat

SEQ ID NO: 741854 - DNA, 33 bp, Homo sapien
aaaatgcattattttaggaactaaaccaagtat

SEQ ID NO: 741855 - DNA, 33 bp, Homo sapien
agttacatggactatacagtgggactgactggg

SEQ ID NO: 741856 - DNA, 33 bp, Homo sapien
agttacatggactatagagtgggactgactggg

SEQ ID NO: 741857 - DNA, 33 bp, Homo sapien
cagttctcatacgtccactaggcactgtcccag

SEQ ID NO: 741858 - DNA, 33 bp, Homo sapien
cagttctcatacgtccgctaggcactgtcccag

SEQ ID NO: 741859 - DNA, 33 bp, Homo sapien
aagcatgccttcctaacagttctccaaagtcgt

SEQ ID NO: 741860 - DNA, 33 bp, Homo sapien
aagcatgccttcctaatagttctccaaagtcgt

SEQ ID NO: 741861 - DNA, 33 bp, Homo sapien
atctttactggttaccacatgagctttttaaat

SEQ ID NO: 741862 - DNA, 33 bp, Homo sapien
atctttactggttaccgcatgagctttttaaat

SEQ ID NO: 741863 - DNA, 33 bp, Homo sapien
ttttatccatcatttacgtagaaaaatcagaac

SEQ ID NO: 741864 - DNA, 33 bp, Homo sapien
ttttatccatcatttatgtagaaaaatcagaac

SEQ ID NO: 741865 - DNA, 33 bp, Homo sapien
taattttacagcacacaaatgaagaattcctga

SEQ ID NO: 741866 - DNA, 33 bp, Homo sapien
taattttacagcacacgaatgaagaattcctga

SEQ ID NO: 741867 - DNA, 33 bp, Homo sapien
caccactgccggtgtaaaggatggtgtaaacca

SEQ ID NO: 741868 - DNA, 33 bp, Homo sapien
caccactgccggtgtagaggatggtgtaaacca

SEQ ID NO: 741869 - DNA, 33 bp, Homo sapien
actcatcaaagaactacggctgttaaagtcacc

SEQ ID NO: 741870 - DNA, 33 bp, Homo sapien
actcatcaaagaactatggctgttaaagtcacc

SEQ ID NO: 741871 - DNA, 33 bp, Homo sapien
tatgtctgttcttcagaatcacatagtatctta

SEQ ID NO: 741872 - DNA, 33 bp, Homo sapien
tatgtctgttcttcagtatcacatagtatctta

SEQ ID NO: 741873 - DNA, 33 bp, Homo sapien
caggcaaggaagattccctgagcatcctaattc

SEQ ID NO: 741874 - DNA, 33 bp, Homo sapien
caggcaaggaagattctctgagcatcctaattc

SEQ ID NO: 741875 - DNA, 33 bp, Homo sapien
ggcacttctccatttgaatttactagattaagg

SEQ ID NO: 741876 - DNA, 33 bp, Homo sapien
ggcacttctccatttggatttactagattaagg

SEQ ID NO: 741877 - DNA, 33 bp, Homo sapien
gttctgtgattaaaaccatagctcgtacatatg

SEQ ID NO: 741878 - DNA, 33 bp, Homo sapien
gttctgtgattaaaactatagctcgtacatatg

SEQ ID NO: 741879 - DNA, 33 bp, Homo sapien
aaatatgggatcacaccgagatgttctggtaat

SEQ ID NO: 741880 - DNA, 33 bp, Homo sapien
aaatatgggatcacactgagatgttctggtaat

SEQ ID NO: 741881 - DNA, 33 bp, Homo sapien
gaaattgaaaccttacaagccagctcaagaaaa

SEQ ID NO: 741882 - DNA, 33 bp, Homo sapien
gaaattgaaaccttacgagccagctcaagaaaa

SEQ ID NO: 741883 - DNA, 33 bp, Homo sapien
attttaggattccttacaactcaggtccagata

SEQ ID NO: 741884 - DNA, 33 bp, Homo sapien
attttaggattccttataactcaggtccagata

SEQ ID NO: 741885 - DNA, 33 bp, Homo sapien
ctaaatgactctgaacaattcctaacatctatc

SEQ ID NO: 741886 - DNA, 33 bp, Homo sapien
ctaaatgactctgaacgattcctaacatctatc

SEQ ID NO: 741887 - DNA, 33 bp, Homo sapien
aagtgcaaatcttaggccaattgttgtagtatg

SEQ ID NO: 741888 - DNA, 33 bp, Homo sapien
aagtgcaaatcttaggtcaattgttgtagtatg

SEQ ID NO: 741889 - DNA, 33 bp, Homo sapien
aactaaagccagttgaacttttttaatctcact

SEQ ID NO: 741890 - DNA, 33 bp, Homo sapien
aactaaagccagttgagcttttttaatctcact

SEQ ID NO: 741891 - DNA, 33 bp, Homo sapien
gttctgtccacaatccagcatcgaccctggctt

SEQ ID NO: 741892 - DNA, 33 bp, Homo sapien
gttctgtccacaatccggcatcgaccctggctt

SEQ ID NO: 741893 - DNA, 33 bp, Homo sapien
gctgcctaatactctcaagtgatttttatagca

SEQ ID NO: 741894 - DNA, 33 bp, Homo sapien
gctgcctaatactctccagtgatttttatagca

SEQ ID NO: 741895 - DNA, 33 bp, Homo sapien
aaagaggattgctttacaggattgctgtcccat

SEQ ID NO: 741896 - DNA, 33 bp, Homo sapien
aaagaggattgctttataggattgctgtcccat

SEQ ID NO: 741897 - DNA, 33 bp, Homo sapien
accagaaaagtgttcacacatacatagttagaa

SEQ ID NO: 741898 - DNA, 33 bp, Homo sapien
accagaaaagtgttcatacatacatagttagaa

SEQ ID NO: 741899 - DNA, 33 bp, Homo sapien
catatatcattgtatacgtttgaggattgagct

SEQ ID NO: 741900 - DNA, 33 bp, Homo sapien
catatatcattgtatatgtttgaggattgagct

SEQ ID NO: 741901 - DNA, 33 bp, Homo sapien
cataaaacatggatgacgtataagttgatattt

SEQ ID NO: 741902 - DNA, 33 bp, Homo sapien
cataaaacatggatgatgtataagttgatattt

SEQ ID NO: 741903 - DNA, 33 bp, Homo sapien
attttagaatcaataaactggttggtggttcat

SEQ ID NO: 741904 - DNA, 33 bp, Homo sapien
attttagaatcaataacctggttggtggttcat

SEQ ID NO: 741905 - DNA, 33 bp, Homo sapien
attcaatatagtccaaattaatgtaaacattta

SEQ ID NO: 741906 - DNA, 33 bp, Homo sapien
attcaatatagtccaagttaatgtaaacattta

SEQ ID NO: 741907 - DNA, 33 bp, Homo sapien
atccacaaagtcagagaaagacttttgcagttg

SEQ ID NO: 741908 - DNA, 33 bp, Homo sapien
atccacaaagtcagaggaagacttttgcagttg

SEQ ID NO: 741909 - DNA, 33 bp, Homo sapien
tgatcctggtagttacagagcacatattcattt

SEQ ID NO: 741910 - DNA, 33 bp, Homo sapien
tgatcctggtagttacggagcacatattcattt

SEQ ID NO: 741911 - DNA, 33 bp, Homo sapien
aattattttggggcgcagaaactcagaatttga

SEQ ID NO: 741912 - DNA, 33 bp, Homo sapien
aattattttggggcgcggaaactcagaatttga

SEQ ID NO: 741913 - DNA, 33 bp, Homo sapien
atgctgttgccaaatacagtacctctgtaggga

SEQ ID NO: 741914 - DNA, 33 bp, Homo sapien
atgctgttgccaaatatagtacctctgtaggga

SEQ ID NO: 741915 - DNA, 33 bp, Homo sapien
ctacggtatctggttacgctctttcaatcatct

SEQ ID NO: 741916 - DNA, 33 bp, Homo sapien
ctacggtatctggttatgctctttcaatcatct

SEQ ID NO: 741917 - DNA, 33 bp, Homo sapien
aatttgtttctatgtcgactccaaataaagtat

SEQ ID NO: 741918 - DNA, 33 bp, Homo sapien
aatttgtttctatgtctactccaaataaagtat

SEQ ID NO: 741919 - DNA, 33 bp, Homo sapien
gcaatgtgtctaggaaccactctcgctccagtt

SEQ ID NO: 741920 - DNA, 33 bp, Homo sapien
gcaatgtgtctaggaatcactctcgctccagtt

SEQ ID NO: 741921 - DNA, 33 bp, Homo sapien
acatgatgttcacaataatgtttttccttatct

SEQ ID NO: 741922 - DNA, 33 bp, Homo sapien
acatgatgttcacaatgatgtttttccttatct

SEQ ID NO: 741923 - DNA, 33 bp, Homo sapien
actttaggataaggatcaagagatttgtaagtc

SEQ ID NO: 741924 - DNA, 33 bp, Homo sapien
actttaggataaggattaagagatttgtaagtc

SEQ ID NO: 741925 - DNA, 33 bp, Homo sapien
gattatcagatttgatcaatagctaagcttcaa

SEQ ID NO: 741926 - DNA, 33 bp, Homo sapien
gattatcagatttgatgaatagctaagcttcaa

SEQ ID NO: 741927 - DNA, 33 bp, Homo sapien
taatcatgtttccaagaaagctacctataatat

SEQ ID NO: 741928 - DNA, 33 bp, Homo sapien
taatcatgtttccaaggaagctacctataatat

SEQ ID NO: 741929 - DNA, 33 bp, Homo sapien
ctggctttaggataccaacaatttatactttgc

SEQ ID NO: 741930 - DNA, 33 bp, Homo sapien
ctggctttaggataccgacaatttatactttgc

SEQ ID NO: 741931 - DNA, 33 bp, Homo sapien
agagctctggaaacaacgaaacttctgacactt

SEQ ID NO: 741932 - DNA, 33 bp, Homo sapien
agagctctggaaacaatgaaacttctgacactt

SEQ ID NO: 741933 - DNA, 33 bp, Homo sapien
ttctaaacagtctcagaaaatgtttccaaactt

SEQ ID NO: 741934 - DNA, 33 bp, Homo sapien
ttctaaacagtctcaggaaatgtttccaaactt

SEQ ID NO: 741935 - DNA, 33 bp, Homo sapien
ttatggcaacagtaaaaaaaaacctgacacaag

SEQ ID NO: 741936 - DNA, 33 bp, Homo sapien
ttatggcaacagtaaagaaaaacctgacacaag

SEQ ID NO: 741937 - DNA, 33 bp, Homo sapien
taggaacatagttagaatcagtcaataagtcaa

SEQ ID NO: 741938 - DNA, 33 bp, Homo sapien
taggaacatagttagagtcagtcaataagtcaa

SEQ ID NO: 741939 - DNA, 33 bp, Homo sapien
aatgattgccacaaacaaaaatatctaaaagta

SEQ ID NO: 741940 - DNA, 33 bp, Homo sapien
aatgattgccacaaacgaaaatatctaaaagta

SEQ ID NO: 741941 - DNA, 33 bp, Homo sapien
ctgtgtctgttcatagactatcagtggacactt

SEQ ID NO: 741942 - DNA, 33 bp, Homo sapien
ctgtgtctgttcatagtctatcagtggacactt

SEQ ID NO: 741943 - DNA, 33 bp, Homo sapien
gacttgtcagggaataaagacatttcaccatgg

SEQ ID NO: 741944 - DNA, 33 bp, Homo sapien
gacttgtcagggaatagagacatttcaccatgg

SEQ ID NO: 741945 - DNA, 33 bp, Homo sapien
ctgagtgttcctgagcaaaattcctgctaaact

SEQ ID NO: 741946 - DNA, 33 bp, Homo sapien
ctgagtgttcctgagccaaattcctgctaaact

SEQ ID NO: 741947 - DNA, 33 bp, Homo sapien
ggagcctgaatgtttcccttgtgactagatttt

SEQ ID NO: 741948 - DNA, 33 bp, Homo sapien
ggagcctgaatgtttctcttgtgactagatttt

SEQ ID NO: 741949 - DNA, 33 bp, Homo sapien
tccgggggagagtacaaatgatgaaaggtttta

SEQ ID NO: 741950 - DNA, 33 bp, Homo sapien
tccgggggagagtacacatgatgaaaggtttta

SEQ ID NO: 741951 - DNA, 33 bp, Homo sapien
acatactatgtttcagccaccaggactataaac

SEQ ID NO: 741952 - DNA, 33 bp, Homo sapien
acatactatgtttcaggcaccaggactataaac

SEQ ID NO: 741953 - DNA, 33 bp, Homo sapien
ctgggataggatcttacacaatgctgtttctta

SEQ ID NO: 741954 - DNA, 33 bp, Homo sapien
ctgggataggatcttatacaatgctgtttctta

SEQ ID NO: 741955 - DNA, 33 bp, Homo sapien
aacttctaagatatgaagaaaatttgctggtgt

SEQ ID NO: 741956 - DNA, 33 bp, Homo sapien
aacttctaagatatgaggaaaatttgctggtgt

SEQ ID NO: 741957 - DNA, 33 bp, Homo sapien
ctggaagactttagccacaggaggatgttggag

SEQ ID NO: 741958 - DNA, 33 bp, Homo sapien
ctggaagactttagccgcaggaggatgttggag

SEQ ID NO: 741959 - DNA, 33 bp, Homo sapien
gatggcacagatgttacacttcttaccattttg

SEQ ID NO: 741960 - DNA, 33 bp, Homo sapien
gatggcacagatgttatacttcttaccattttg

SEQ ID NO: 741961 - DNA, 33 bp, Homo sapien
attaatctgtcactaaatcgagctattcttgcc

SEQ ID NO: 741962 - DNA, 33 bp, Homo sapien
attaatctgtcactaactcgagctattcttgcc

SEQ ID NO: 741963 - DNA, 33 bp, Homo sapien
ggttatcctgataaccaaagacttggaaagaca

SEQ ID NO: 741964 - DNA, 33 bp, Homo sapien
ggttatcctgataaccgaagacttggaaagaca

SEQ ID NO: 741965 - DNA, 33 bp, Homo sapien
atgctttatctgtgtcacctaatttcttagaac

SEQ ID NO: 741966 - DNA, 33 bp, Homo sapien
atgctttatctgtgtcgcctaatttcttagaac

SEQ ID NO: 741967 - DNA, 33 bp, Homo sapien
attatattgattaaaaatgatagaatctgaacc

SEQ ID NO: 741968 - DNA, 33 bp, Homo sapien
attatattgattaaaagtgatagaatctgaacc

SEQ ID NO: 741969 - DNA, 33 bp, Homo sapien
tgacacctaaagcctagggtgcttaaattgatg

SEQ ID NO: 741970 - DNA, 33 bp, Homo sapien
tgacacctaaagcctatggtgcttaaattgatg

SEQ ID NO: 741971 - DNA, 33 bp, Homo sapien
tgtgcacatacaataaataacgggaaacaatat

SEQ ID NO: 741972 - DNA, 33 bp, Homo sapien
tgtgcacatacaataagtaacgggaaacaatat

SEQ ID NO: 741973 - DNA, 33 bp, Homo sapien
tttgtctgctaggcaactgagtcacctacttgg

SEQ ID NO: 741974 - DNA, 33 bp, Homo sapien
tttgtctgctaggcaattgagtcacctacttgg

SEQ ID NO: 741975 - DNA, 33 bp, Homo sapien
ttgttgatagtctacacggtcataacagtcagt

SEQ ID NO: 741976 - DNA, 33 bp, Homo sapien
ttgttgatagtctacatggtcataacagtcagt

SEQ ID NO: 741977 - DNA, 33 bp, Homo sapien
aagagaaaaatgaagaaatataagcaggagact

SEQ ID NO: 741978 - DNA, 33 bp, Homo sapien
aagagaaaaatgaagacatataagcaggagact

SEQ ID NO: 741979 - DNA, 33 bp, Homo sapien
attaaaggaagagctgacacctaatgataaaaa

SEQ ID NO: 741980 - DNA, 33 bp, Homo sapien
attaaaggaagagctggcacctaatgataaaaa

SEQ ID NO: 741981 - DNA, 33 bp, Homo sapien
gcaagtcataaacctgaaatgatgtatccagaa

SEQ ID NO: 741982 - DNA, 33 bp, Homo sapien
gcaagtcataaacctgtaatgatgtatccagaa

SEQ ID NO: 741983 - DNA, 33 bp, Homo sapien
atttcagtatggaagacgctttccctctgaggc

SEQ ID NO: 741984 - DNA, 33 bp, Homo sapien
atttcagtatggaagatgctttccctctgaggc

SEQ ID NO: 741985 - DNA, 33 bp, Homo sapien
aagctccattgtgaacacagaaaaaccaatttc

SEQ ID NO: 741986 - DNA, 33 bp, Homo sapien
aagctccattgtgaacgcagaaaaaccaatttc

SEQ ID NO: 741987 - DNA, 33 bp, Homo sapien
catggccaatacagctaaaaagcaagtacctag

SEQ ID NO: 741988 - DNA, 33 bp, Homo sapien
catggccaatacagctgaaaagcaagtacctag

SEQ ID NO: 741989 - DNA, 33 bp, Homo sapien
aataaaaacattacaaatacagaatgatggaag

SEQ ID NO: 741990 - DNA, 33 bp, Homo sapien
aataaaaacattacaagtacagaatgatggaag

SEQ ID NO: 741991 - DNA, 33 bp, Homo sapien
agacacagacatacacagagacaaagattacac

SEQ ID NO: 741992 - DNA, 33 bp, Homo sapien
agacacagacatacacggagacaaagattacac

SEQ ID NO: 741993 - DNA, 33 bp, Homo sapien
aactgcaataactaggccctaaattccttaact

SEQ ID NO: 741994 - DNA, 33 bp, Homo sapien
aactgcaataactaggtcctaaattccttaact

SEQ ID NO: 741995 - DNA, 33 bp, Homo sapien
aacaaaccatatatacaatggtggtcgcataca

SEQ ID NO: 741996 - DNA, 33 bp, Homo sapien
aacaaaccatatatacgatggtggtcgcataca

SEQ ID NO: 741997 - DNA, 33 bp, Homo sapien
aagtggaaggtgatgacattagtgatgctgact

SEQ ID NO: 741998 - DNA, 33 bp, Homo sapien
aagtggaaggtgatgatattagtgatgctgact

SEQ ID NO: 741999 - DNA, 33 bp, Homo sapien
acaattcaaagagcaaatggattagttttatgt

SEQ ID NO: 742000 - DNA, 33 bp, Homo sapien
acaattcaaagagcaagtggattagttttatgt

SEQ ID NO: 742001 - DNA, 33 bp, Homo sapien
tctctgtcaactacaaatgtatatggaaatgaa

SEQ ID NO: 742002 - DNA, 33 bp, Homo sapien
tctctgtcaactacaactgtatatggaaatgaa

SEQ ID NO: 742003 - DNA, 33 bp, Homo sapien
ataaccaaactcttctcagaacaacgacacagt

SEQ ID NO: 742004 - DNA, 33 bp, Homo sapien
ataaccaaactcttcttagaacaacgacacagt

SEQ ID NO: 742005 - DNA, 33 bp, Homo sapien
gcccacttattgctcacggctactacctctttt

SEQ ID NO: 742006 - DNA, 33 bp, Homo sapien
gcccacttattgctcatggctactacctctttt

SEQ ID NO: 742007 - DNA, 33 bp, Homo sapien
ggaagttattcagatacggttgataaaatccaa

SEQ ID NO: 742008 - DNA, 33 bp, Homo sapien
ggaagttattcagatatggttgataaaatccaa

SEQ ID NO: 742009 - DNA, 33 bp, Homo sapien
aaatcttttgccttccaagataagaatgaataa

SEQ ID NO: 742010 - DNA, 33 bp, Homo sapien
aaatcttttgccttccgagataagaatgaataa

SEQ ID NO: 742011 - DNA, 33 bp, Homo sapien
ttggaagcggaaatccaagagtcactactgaat

SEQ ID NO: 742012 - DNA, 33 bp, Homo sapien
ttggaagcggaaatccgagagtcactactgaat

SEQ ID NO: 742013 - DNA, 33 bp, Homo sapien
aaggcagtccaacaaaatatgcagcagcaatta

SEQ ID NO: 742014 - DNA, 33 bp, Homo sapien
aaggcagtccaacaaagtatgcagcagcaatta

SEQ ID NO: 742015 - DNA, 33 bp, Homo sapien
gagagtaatgaagtcacatcactgagaaggaat

SEQ ID NO: 742016 - DNA, 33 bp, Homo sapien
gagagtaatgaagtcatatcactgagaaggaat

SEQ ID NO: 742017 - DNA, 33 bp, Homo sapien
tatatatatatagtagaaaaagggccacagata

SEQ ID NO: 742018 - DNA, 33 bp, Homo sapien
tatatatatatagtaggaaaagggccacagata

SEQ ID NO: 742019 - DNA, 33 bp, Homo sapien
gtcatcttttctgtgacacaatgtatacacatg

SEQ ID NO: 742020 - DNA, 33 bp, Homo sapien
gtcatcttttctgtgagacaatgtatacacatg

SEQ ID NO: 742021 - DNA, 33 bp, Homo sapien
tatgggatgaggcttgaaaagagatgtgttcta

SEQ ID NO: 742022 - DNA, 33 bp, Homo sapien
tatgggatgaggcttggaaagagatgtgttcta

SEQ ID NO: 742023 - DNA, 33 bp, Homo sapien
ttttacatgggacataaaatgttctcttcacta

SEQ ID NO: 742024 - DNA, 33 bp, Homo sapien
ttttacatgggacatacaatgttctcttcacta

SEQ ID NO: 742025 - DNA, 33 bp, Homo sapien
taaggttcaatacaccacaggaccttctcagaa

SEQ ID NO: 742026 - DNA, 33 bp, Homo sapien
taaggttcaatacaccgcaggaccttctcagaa

SEQ ID NO: 742027 - DNA, 33 bp, Homo sapien
gttgcaattactaatccctatggtggccataaa

SEQ ID NO: 742028 - DNA, 33 bp, Homo sapien
gttgcaattactaatctctatggtggccataaa

SEQ ID NO: 742029 - DNA, 33 bp, Homo sapien
gagtatggtgaattgcccctctttaatttactg

SEQ ID NO: 742030 - DNA, 33 bp, Homo sapien
gagtatggtgaattgctcctctttaatttactg

SEQ ID NO: 742031 - DNA, 33 bp, Homo sapien
tccaatcagactgaaactgtatcacttcagcaa

SEQ ID NO: 742032 - DNA, 33 bp, Homo sapien
tccaatcagactgaaattgtatcacttcagcaa

SEQ ID NO: 742033 - DNA, 33 bp, Homo sapien
gataattccattctgtaaagagcaaactctact

SEQ ID NO: 742034 - DNA, 33 bp, Homo sapien
gataattccattctgtcaagagcaaactctact

SEQ ID NO: 742035 - DNA, 33 bp, Homo sapien
ctatgacccaatgataagggctacaaaggaagt

SEQ ID NO: 742036 - DNA, 33 bp, Homo sapien
ctatgacccaatgatacgggctacaaaggaagt

SEQ ID NO: 742037 - DNA, 33 bp, Homo sapien
cctttgagactcgagacaccaaagttagtggga

SEQ ID NO: 742038 - DNA, 33 bp, Homo sapien
cctttgagactcgagagaccaaagttagtggga

SEQ ID NO: 742039 - DNA, 33 bp, Homo sapien
aaggaaaacaggagtcaagccgaaacagctccc

SEQ ID NO: 742040 - DNA, 33 bp, Homo sapien
aaggaaaacaggagtcgagccgaaacagctccc

SEQ ID NO: 742041 - DNA, 33 bp, Homo sapien
aaagttgtaaatctgagacaatgtcctaagcag

SEQ ID NO: 742042 - DNA, 33 bp, Homo sapien
aaagttgtaaatctgatacaatgtcctaagcag

SEQ ID NO: 742043 - DNA, 33 bp, Homo sapien
tacactgcagttagagaaatacccacacacaga

SEQ ID NO: 742044 - DNA, 33 bp, Homo sapien
tacactgcagttagaggaatacccacacacaga

SEQ ID NO: 742045 - DNA, 33 bp, Homo sapien
tttctgattttagttacgtgcatattctctaat

SEQ ID NO: 742046 - DNA, 33 bp, Homo sapien
tttctgattttagttatgtgcatattctctaat

SEQ ID NO: 742047 - DNA, 33 bp, Homo sapien
agcatatttttggaccagattaggaccccttac

SEQ ID NO: 742048 - DNA, 33 bp, Homo sapien
agcatatttttggaccggattaggaccccttac

SEQ ID NO: 742049 - DNA, 33 bp, Homo sapien
caggtaacagaagatccgacaaaggagagaaga

SEQ ID NO: 742050 - DNA, 33 bp, Homo sapien
caggtaacagaagatctgacaaaggagagaaga

SEQ ID NO: 742051 - DNA, 33 bp, Homo sapien
ctgtatgtcccagttcacaaacccagatgagtt

SEQ ID NO: 742052 - DNA, 33 bp, Homo sapien
ctgtatgtcccagttcgcaaacccagatgagtt

SEQ ID NO: 742053 - DNA, 33 bp, Homo sapien
atgcacttctgtcacagtctgttttatgaggac

SEQ ID NO: 742054 - DNA, 33 bp, Homo sapien
atgcacttctgtcacattctgttttatgaggac

SEQ ID NO: 742055 - DNA, 33 bp, Homo sapien
tgggatgctgatagccaagtctgaagccctcag

SEQ ID NO: 742056 - DNA, 33 bp, Homo sapien
tgggatgctgatagccgagtctgaagccctcag

SEQ ID NO: 742057 - DNA, 33 bp, Homo sapien
aaaatcacagtcttgacagatgaaggttgaaat

SEQ ID NO: 742058 - DNA, 33 bp, Homo sapien
aaaatcacagtcttgatagatgaaggttgaaat

SEQ ID NO: 742059 - DNA, 33 bp, Homo sapien
aaaatccctaaagtccaaagttcttaatgttta

SEQ ID NO: 742060 - DNA, 33 bp, Homo sapien
aaaatccctaaagtccgaagttcttaatgttta

SEQ ID NO: 742061 - DNA, 33 bp, Homo sapien
ttttttccaggctctaccaggcaatggtttata

SEQ ID NO: 742062 - DNA, 33 bp, Homo sapien
ttttttccaggctctatcaggcaatggtttata

SEQ ID NO: 742063 - DNA, 33 bp, Homo sapien
catgagaataatgaacacagaatcagcaaacca

SEQ ID NO: 742064 - DNA, 33 bp, Homo sapien
catgagaataatgaacgcagaatcagcaaacca

SEQ ID NO: 742065 - DNA, 33 bp, Homo sapien
ttcagaaaaaagctgtaaattcaatataccatc

SEQ ID NO: 742066 - DNA, 33 bp, Homo sapien
ttcagaaaaaagctgtgaattcaatataccatc

SEQ ID NO: 742067 - DNA, 33 bp, Homo sapien
ctcccaaatatgccaagctcaaattactgaatg

SEQ ID NO: 742068 - DNA, 33 bp, Homo sapien
ctcccaaatatgccaatctcaaattactgaatg

SEQ ID NO: 742069 - DNA, 33 bp, Homo sapien
atctagaggtctattacaaaaacagtcaggaaa

SEQ ID NO: 742070 - DNA, 33 bp, Homo sapien
atctagaggtctattagaaaaacagtcaggaaa

SEQ ID NO: 742071 - DNA, 33 bp, Homo sapien
atactgctttatagacagaacttaatttttttt

SEQ ID NO: 742072 - DNA, 33 bp, Homo sapien
atactgctttatagacggaacttaatttttttt

SEQ ID NO: 742073 - DNA, 33 bp, Homo sapien
ttgaacaatatatgtagctcaacttctaaaagc

SEQ ID NO: 742074 - DNA, 33 bp, Homo sapien
ttgaacaatatatgtatctcaacttctaaaagc

SEQ ID NO: 742075 - DNA, 33 bp, Homo sapien
ttccctcagattacaacgccttaaatgatctgt

SEQ ID NO: 742076 - DNA, 33 bp, Homo sapien
ttccctcagattacaatgccttaaatgatctgt

SEQ ID NO: 742077 - DNA, 33 bp, Homo sapien
aggctttaaggcagaaacaaacaaggtgaattc

SEQ ID NO: 742078 - DNA, 33 bp, Homo sapien
aggctttaaggcagaagcaaacaaggtgaattc

SEQ ID NO: 742079 - DNA, 33 bp, Homo sapien
acacatggttttagacactgacagcacaataat

SEQ ID NO: 742080 - DNA, 33 bp, Homo sapien
acacatggttttagacgctgacagcacaataat

SEQ ID NO: 742081 - DNA, 33 bp, Homo sapien
gaacaaacaggaagcccgagagtaaaatcacga

SEQ ID NO: 742082 - DNA, 33 bp, Homo sapien
gaacaaacaggaagcctgagagtaaaatcacga

SEQ ID NO: 742083 - DNA, 33 bp, Homo sapien
agactacgctcctatacacatttgcacagtttg

SEQ ID NO: 742084 - DNA, 33 bp, Homo sapien
agactacgctcctatatacatttgcacagtttg

SEQ ID NO: 742085 - DNA, 33 bp, Homo sapien
ctaattactcttcttacggaatgaatcctacat

SEQ ID NO: 742086 - DNA, 33 bp, Homo sapien
ctaattactcttcttatggaatgaatcctacat

SEQ ID NO: 742087 - DNA, 33 bp, Homo sapien
gcaggatttataaacactgacatcacgccttgc

SEQ ID NO: 742088 - DNA, 33 bp, Homo sapien
gcaggatttataaacattgacatcacgccttgc

SEQ ID NO: 742089 - DNA, 33 bp, Homo sapien
gaacaaaatcatgccactattaatgacctgtgt

SEQ ID NO: 742090 - DNA, 33 bp, Homo sapien
gaacaaaatcatgccagtattaatgacctgtgt

SEQ ID NO: 742091 - DNA, 33 bp, Homo sapien
tacgtttaaccaataaccttggtcttcttgctt

SEQ ID NO: 742092 - DNA, 33 bp, Homo sapien
tacgtttaaccaataatcttggtcttcttgctt

SEQ ID NO: 742093 - DNA, 33 bp, Homo sapien
acataatagaagataacgatgataacaggtaga

SEQ ID NO: 742094 - DNA, 33 bp, Homo sapien
acataatagaagataatgatgataacaggtaga

SEQ ID NO: 742095 - DNA, 33 bp, Homo sapien
aggggtataaaacaggaagcccatttagaccct

SEQ ID NO: 742096 - DNA, 33 bp, Homo sapien
aggggtataaaacaggcagcccatttagaccct

SEQ ID NO: 742097 - DNA, 33 bp, Homo sapien
taagctgtggtccctccagaagcacgctagata

SEQ ID NO: 742098 - DNA, 33 bp, Homo sapien
taagctgtggtccctctagaagcacgctagata

SEQ ID NO: 742099 - DNA, 33 bp, Homo sapien
ccttcctctcttaacactacttgagttttctta

SEQ ID NO: 742100 - DNA, 33 bp, Homo sapien
ccttcctctcttaacagtacttgagttttctta

SEQ ID NO: 742101 - DNA, 33 bp, Homo sapien
tgatcatcatcaatgaagcaaataacaaccttt

SEQ ID NO: 742102 - DNA, 33 bp, Homo sapien
tgatcatcatcaatgaggcaaataacaaccttt

SEQ ID NO: 742103 - DNA, 33 bp, Homo sapien
atcctgaggctgtatcccagatatcctgaacca

SEQ ID NO: 742104 - DNA, 33 bp, Homo sapien
atcctgaggctgtatcgcagatatcctgaacca

SEQ ID NO: 742105 - DNA, 33 bp, Homo sapien
ttatttcttgaagacacaggctgtatctcatac

SEQ ID NO: 742106 - DNA, 33 bp, Homo sapien
ttatttcttgaagacataggctgtatctcatac

SEQ ID NO: 742107 - DNA, 33 bp, Homo sapien
tctagacctttctgcaacaactgagagatttaa

SEQ ID NO: 742108 - DNA, 33 bp, Homo sapien
tctagacctttctgcagcaactgagagatttaa

SEQ ID NO: 742109 - DNA, 33 bp, Homo sapien
aaattaatctacaaaaattactagaattcctat

SEQ ID NO: 742110 - DNA, 33 bp, Homo sapien
aaattaatctacaaaagttactagaattcctat

SEQ ID NO: 742111 - DNA, 33 bp, Homo sapien
agtaccaaagaatacaactaagcagggaagcag

SEQ ID NO: 742112 - DNA, 33 bp, Homo sapien
agtaccaaagaatacagctaagcagggaagcag

SEQ ID NO: 742113 - DNA, 33 bp, Homo sapien
tcaatttatactctcaacaggaatatattatct

SEQ ID NO: 742114 - DNA, 33 bp, Homo sapien
tcaatttatactctcaccaggaatatattatct

SEQ ID NO: 742115 - DNA, 33 bp, Homo sapien
agttgttgctaagttccctcatagctttaatat

SEQ ID NO: 742116 - DNA, 33 bp, Homo sapien
agttgttgctaagttctctcatagctttaatat

SEQ ID NO: 742117 - DNA, 33 bp, Homo sapien
aatctcaccggtgccaaatgaaaatataatacc

SEQ ID NO: 742118 - DNA, 33 bp, Homo sapien
aatctcaccggtgccagatgaaaatataatacc

SEQ ID NO: 742119 - DNA, 33 bp, Homo sapien
actgaagtacacaaaacttcctgatgctagccc

SEQ ID NO: 742120 - DNA, 33 bp, Homo sapien
actgaagtacacaaaagttcctgatgctagccc

SEQ ID NO: 742121 - DNA, 33 bp, Homo sapien
cctcatatatctggacaatcacatataattttc

SEQ ID NO: 742122 - DNA, 33 bp, Homo sapien
cctcatatatctggaccatcacatataattttc

SEQ ID NO: 742123 - DNA, 33 bp, Homo sapien
gagtcatgaaataattcaactggctgattcctt

SEQ ID NO: 742124 - DNA, 33 bp, Homo sapien
gagtcatgaaataatttaactggctgattcctt

SEQ ID NO: 742125 - DNA, 33 bp, Homo sapien
aactgcgaattttggccagtccttctgtgcttt

SEQ ID NO: 742126 - DNA, 33 bp, Homo sapien
aactgcgaattttggctagtccttctgtgcttt

SEQ ID NO: 742127 - DNA, 33 bp, Homo sapien
tttatcttccgttcagcatcgcttgtttctctc

SEQ ID NO: 742128 - DNA, 33 bp, Homo sapien
tttatcttccgttcagtatcgcttgtttctctc

SEQ ID NO: 742129 - DNA, 33 bp, Homo sapien
tgtcaccagatattgaaccatagccaggtttct

SEQ ID NO: 742130 - DNA, 33 bp, Homo sapien
tgtcaccagatattgatccatagccaggtttct

SEQ ID NO: 742131 - DNA, 33 bp, Homo sapien
aactgaaacactaagaataccttcaaatctcag

SEQ ID NO: 742132 - DNA, 33 bp, Homo sapien
aactgaaacactaagattaccttcaaatctcag

SEQ ID NO: 742133 - DNA, 33 bp, Homo sapien
gagctgttaaaagacacactgataaattcaatt

SEQ ID NO: 742134 - DNA, 33 bp, Homo sapien
gagctgttaaaagacagactgataaattcaatt

SEQ ID NO: 742135 - DNA, 33 bp, Homo sapien
cttaagtattgtgcaacgctgatgttcaaggta

SEQ ID NO: 742136 - DNA, 33 bp, Homo sapien
cttaagtattgtgcaatgctgatgttcaaggta

SEQ ID NO: 742137 - DNA, 33 bp, Homo sapien
cacaaaaattggagtacggtaaatttggacata

SEQ ID NO: 742138 - DNA, 33 bp, Homo sapien
cacaaaaattggagtatggtaaatttggacata

SEQ ID NO: 742139 - DNA, 33 bp, Homo sapien
tcccaaactctctcttaaaaatttaggaaacac

SEQ ID NO: 742140 - DNA, 33 bp, Homo sapien
tcccaaactctctcttgaaaatttaggaaacac

SEQ ID NO: 742141 - DNA, 33 bp, Homo sapien
ttttgtttgtatgcaacgtaaatggttatctac

SEQ ID NO: 742142 - DNA, 33 bp, Homo sapien
ttttgtttgtatgcaatgtaaatggttatctac

SEQ ID NO: 742143 - DNA, 33 bp, Homo sapien
ttttcattttgattacacatttttgataaccat

SEQ ID NO: 742144 - DNA, 33 bp, Homo sapien
ttttcattttgattacccatttttgataaccat

SEQ ID NO: 742145 - DNA, 33 bp, Homo sapien
atgtgagacaaatccacagtcgattgcttcctt

SEQ ID NO: 742146 - DNA, 33 bp, Homo sapien
atgtgagacaaatccatagtcgattgcttcctt

SEQ ID NO: 742147 - DNA, 33 bp, Homo sapien
ccaaagcacacaattacatatcgatgattatgg

SEQ ID NO: 742148 - DNA, 33 bp, Homo sapien
ccaaagcacacaattagatatcgatgattatgg

SEQ ID NO: 742149 - DNA, 33 bp, Homo sapien
aaaccaaaaatgaccaatgaaaccacaggaaaa

SEQ ID NO: 742150 - DNA, 33 bp, Homo sapien
aaaccaaaaatgaccagtgaaaccacaggaaaa

SEQ ID NO: 742151 - DNA, 33 bp, Homo sapien
ctgggcatgcccacaacgaaccggaggcgaaca

SEQ ID NO: 742152 - DNA, 33 bp, Homo sapien
ctgggcatgcccacaatgaaccggaggcgaaca

SEQ ID NO: 742153 - DNA, 33 bp, Homo sapien
aaaaaaaaaagcacacaaatcaccagaaccttt

SEQ ID NO: 742154 - DNA, 33 bp, Homo sapien
aaaaaaaaaagcacacgaatcaccagaaccttt

SEQ ID NO: 742155 - DNA, 33 bp, Homo sapien
gtagatcacagtgcaaaaaaagaaaacctgctt

SEQ ID NO: 742156 - DNA, 33 bp, Homo sapien
gtagatcacagtgcaagaaaagaaaacctgctt

SEQ ID NO: 742157 - DNA, 33 bp, Homo sapien
catttgtctgcctttgaaaacagaatatgcagt

SEQ ID NO: 742158 - DNA, 33 bp, Homo sapien
catttgtctgcctttgtaaacagaatatgcagt

SEQ ID NO: 742159 - DNA, 33 bp, Homo sapien
actgcatccttattaactatcctatcaagtaag

SEQ ID NO: 742160 - DNA, 33 bp, Homo sapien
actgcatccttattaagtatcctatcaagtaag

SEQ ID NO: 742161 - DNA, 33 bp, Homo sapien
ctgaggtgttgggggcacaatctctgctccatt

SEQ ID NO: 742162 - DNA, 33 bp, Homo sapien
ctgaggtgttgggggcccaatctctgctccatt

SEQ ID NO: 742163 - DNA, 33 bp, Homo sapien
tgggttctcaaaatgcagcagatctgtcacaac

SEQ ID NO: 742164 - DNA, 33 bp, Homo sapien
tgggttctcaaaatgcggcagatctgtcacaac

SEQ ID NO: 742165 - DNA, 33 bp, Homo sapien
gtttatcattaatttacaagtatctggcaagga

SEQ ID NO: 742166 - DNA, 33 bp, Homo sapien
gtttatcattaatttataagtatctggcaagga

SEQ ID NO: 742167 - DNA, 33 bp, Homo sapien
tgccagcctttgttataagatgccctcaaattg

SEQ ID NO: 742168 - DNA, 33 bp, Homo sapien
tgccagcctttgttatgagatgccctcaaattg

SEQ ID NO: 742169 - DNA, 33 bp, Homo sapien
ttctccatggtggagacgcaaagtagtgcactt

SEQ ID NO: 742170 - DNA, 33 bp, Homo sapien
ttctccatggtggagatgcaaagtagtgcactt

SEQ ID NO: 742171 - DNA, 33 bp, Homo sapien
agatgggttttggccagggaagtgacataatct

SEQ ID NO: 742172 - DNA, 33 bp, Homo sapien
agatgggttttggccatggaagtgacataatct

SEQ ID NO: 742173 - DNA, 33 bp, Homo sapien
acctccaaattgcaacaccaatatctgtgcgat

SEQ ID NO: 742174 - DNA, 33 bp, Homo sapien
acctccaaattgcaacgccaatatctgtgcgat

SEQ ID NO: 742175 - DNA, 33 bp, Homo sapien
catgagaagtcagagaactctattggatactgt

SEQ ID NO: 742176 - DNA, 33 bp, Homo sapien
catgagaagtcagagagctctattggatactgt

SEQ ID NO: 742177 - DNA, 33 bp, Homo sapien
tcccattatctcaggccatatgccaactctatt

SEQ ID NO: 742178 - DNA, 33 bp, Homo sapien
tcccattatctcaggctatatgccaactctatt

SEQ ID NO: 742179 - DNA, 33 bp, Homo sapien
acagttttctataccaactctctccacttgtct

SEQ ID NO: 742180 - DNA, 33 bp, Homo sapien
acagttttctataccatctctctccacttgtct

SEQ ID NO: 742181 - DNA, 33 bp, Homo sapien
taataagagaattgcaaattagaagcacgatgt

SEQ ID NO: 742182 - DNA, 33 bp, Homo sapien
taataagagaattgcatattagaagcacgatgt

SEQ ID NO: 742183 - DNA, 33 bp, Homo sapien
ctcgttcctagcctcaaaatagttttcatgtaa

SEQ ID NO: 742184 - DNA, 33 bp, Homo sapien
ctcgttcctagcctcacaatagttttcatgtaa

SEQ ID NO: 742185 - DNA, 33 bp, Homo sapien
actgaagggctcgttaactgcggaagggtaagg

SEQ ID NO: 742186 - DNA, 33 bp, Homo sapien
actgaagggctcgttagctgcggaagggtaagg

SEQ ID NO: 742187 - DNA, 33 bp, Homo sapien
aggtggccaggattcacaaaaccacatccctcc

SEQ ID NO: 742188 - DNA, 33 bp, Homo sapien
aggtggccaggattcataaaaccacatccctcc

SEQ ID NO: 742189 - DNA, 33 bp, Homo sapien
agaatttatacctttcaaacaatgcccttttta

SEQ ID NO: 742190 - DNA, 33 bp, Homo sapien
agaatttatacctttcgaacaatgcccttttta

SEQ ID NO: 742191 - DNA, 33 bp, Homo sapien
gtgaggacctacagaactctatgaggtaatcaa

SEQ ID NO: 742192 - DNA, 33 bp, Homo sapien
gtgaggacctacagaagtctatgaggtaatcaa

SEQ ID NO: 742193 - DNA, 33 bp, Homo sapien
taattatgtaaactgcaaaaatatctgtaaaat

SEQ ID NO: 742194 - DNA, 33 bp, Homo sapien
taattatgtaaactgcgaaaatatctgtaaaat

SEQ ID NO: 742195 - DNA, 33 bp, Homo sapien
cctgttatcctatttaacaaaggcactcaggaa

SEQ ID NO: 742196 - DNA, 33 bp, Homo sapien
cctgttatcctatttagcaaaggcactcaggaa

SEQ ID NO: 742197 - DNA, 33 bp, Homo sapien
caaagaaagtcataccagagaaatatatctagg

SEQ ID NO: 742198 - DNA, 33 bp, Homo sapien
caaagaaagtcataccggagaaatatatctagg

SEQ ID NO: 742199 - DNA, 33 bp, Homo sapien
tgtctgtggtgtacacaatttcagagagaatct

SEQ ID NO: 742200 - DNA, 33 bp, Homo sapien
tgtctgtggtgtacaccatttcagagagaatct

SEQ ID NO: 742201 - DNA, 33 bp, Homo sapien
ttatcagtgttagctgccaagataagccactga

SEQ ID NO: 742202 - DNA, 33 bp, Homo sapien
ttatcagtgttagctgtcaagataagccactga

SEQ ID NO: 742203 - DNA, 33 bp, Homo sapien
aagctcagactttgtgcagtgagaatattttgt

SEQ ID NO: 742204 - DNA, 33 bp, Homo sapien
aagctcagactttgtggagtgagaatattttgt

SEQ ID NO: 742205 - DNA, 33 bp, Homo sapien
agtagtatgtggtttacataaagtcggttgaac

SEQ ID NO: 742206 - DNA, 33 bp, Homo sapien
agtagtatgtggtttatataaagtcggttgaac

SEQ ID NO: 742207 - DNA, 33 bp, Homo sapien
ggagaatggataaaacagagaggaagaggaaga

SEQ ID NO: 742208 - DNA, 33 bp, Homo sapien
ggagaatggataaaacggagaggaagaggaaga

SEQ ID NO: 742209 - DNA, 33 bp, Homo sapien
gctgaatggaatctgacgtccagtaaaaaataa

SEQ ID NO: 742210 - DNA, 33 bp, Homo sapien
gctgaatggaatctgatgtccagtaaaaaataa

SEQ ID NO: 742211 - DNA, 33 bp, Homo sapien
gtagatccagcccttcccttgtctagcaaagaa

SEQ ID NO: 742212 - DNA, 33 bp, Homo sapien
gtagatccagcccttcgcttgtctagcaaagaa

SEQ ID NO: 742213 - DNA, 33 bp, Homo sapien
aatttttctccatcaaatctcaccaaggactct

SEQ ID NO: 742214 - DNA, 33 bp, Homo sapien
aatttttctccatcaagtctcaccaaggactct

SEQ ID NO: 742215 - DNA, 33 bp, Homo sapien
tttaggaggaaactgaaatattttttacaatcc

SEQ ID NO: 742216 - DNA, 33 bp, Homo sapien
tttaggaggaaactgagatattttttacaatcc

SEQ ID NO: 742217 - DNA, 33 bp, Homo sapien
tagaaatgaaataagaacattcacaagcaacct

SEQ ID NO: 742218 - DNA, 33 bp, Homo sapien
tagaaatgaaataagagcattcacaagcaacct

SEQ ID NO: 742219 - DNA, 33 bp, Homo sapien
agagatcatggaagaggccatttacaagaaaac

SEQ ID NO: 742220 - DNA, 33 bp, Homo sapien
agagatcatggaagagtccatttacaagaaaac

SEQ ID NO: 742221 - DNA, 33 bp, Homo sapien
catttacaagaaaactcacaaaaacaagattag

SEQ ID NO: 742222 - DNA, 33 bp, Homo sapien
catttacaagaaaactgacaaaaacaagattag

SEQ ID NO: 742223 - DNA, 33 bp, Homo sapien
gataatgcaaatgtgacacaagtccagcaaacc

SEQ ID NO: 742224 - DNA, 33 bp, Homo sapien
gataatgcaaatgtgatacaagtccagcaaacc

SEQ ID NO: 742225 - DNA, 33 bp, Homo sapien
gtacgtaatgatgacaaatgtctcagtttttag

SEQ ID NO: 742226 - DNA, 33 bp, Homo sapien
gtacgtaatgatgacagatgtctcagtttttag

SEQ ID NO: 742227 - DNA, 33 bp, Homo sapien
aaataagtgatttgtacggaagatagacatcaa

SEQ ID NO: 742228 - DNA, 33 bp, Homo sapien
aaataagtgatttgtatggaagatagacatcaa

SEQ ID NO: 742229 - DNA, 33 bp, Homo sapien
tgtagaaaatattgtacgtggttattagccttt

SEQ ID NO: 742230 - DNA, 33 bp, Homo sapien
tgtagaaaatattgtatgtggttattagccttt

SEQ ID NO: 742231 - DNA, 33 bp, Homo sapien
aaatttacaagcaaaccatataaagctccttca

SEQ ID NO: 742232 - DNA, 33 bp, Homo sapien
aaatttacaagcaaactatataaagctccttca

SEQ ID NO: 742233 - DNA, 33 bp, Homo sapien
cactacacaaaacataccaagacttcagtttga

SEQ ID NO: 742234 - DNA, 33 bp, Homo sapien
cactacacaaaacatagcaagacttcagtttga

SEQ ID NO: 742235 - DNA, 33 bp, Homo sapien
aggcaactatttgaaactgactctacatgaata

SEQ ID NO: 742236 - DNA, 33 bp, Homo sapien
aggcaactatttgaaattgactctacatgaata

SEQ ID NO: 742237 - DNA, 33 bp, Homo sapien
gaagagcgacaaaaaaacgcttccaaaagcaaa

SEQ ID NO: 742238 - DNA, 33 bp, Homo sapien
gaagagcgacaaaaaaccgcttccaaaagcaaa

SEQ ID NO: 742239 - DNA, 33 bp, Homo sapien
ttaaatttttctcttaactgtgcacggaagaca

SEQ ID NO: 742240 - DNA, 33 bp, Homo sapien
ttaaatttttctcttagctgtgcacggaagaca

SEQ ID NO: 742241 - DNA, 33 bp, Homo sapien
ggcatcaagatcaaggcaatggcagatttttta

SEQ ID NO: 742242 - DNA, 33 bp, Homo sapien
ggcatcaagatcaaggtaatggcagatttttta

SEQ ID NO: 742243 - DNA, 33 bp, Homo sapien
tgatcccaacagataactaaatgacactcttga

SEQ ID NO: 742244 - DNA, 33 bp, Homo sapien
tgatcccaacagataattaaatgacactcttga

SEQ ID NO: 742245 - DNA, 33 bp, Homo sapien
ttcctgttgtgactcaatagggtaaaatgatgc

SEQ ID NO: 742246 - DNA, 33 bp, Homo sapien
ttcctgttgtgactcagtagggtaaaatgatgc

SEQ ID NO: 742247 - DNA, 33 bp, Homo sapien
gcagagaggatgaaaccggattgtagggcgtga

SEQ ID NO: 742248 - DNA, 33 bp, Homo sapien
gcagagaggatgaaactggattgtagggcgtga

SEQ ID NO: 742249 - DNA, 33 bp, Homo sapien
tactaatattgtgaaaagaaatagaaaaacatg

SEQ ID NO: 742250 - DNA, 33 bp, Homo sapien
tactaatattgtgaaaggaaatagaaaaacatg

SEQ ID NO: 742251 - DNA, 33 bp, Homo sapien
tgaaattagatcctcacaccatatgcaaaaagc

SEQ ID NO: 742252 - DNA, 33 bp, Homo sapien
tgaaattagatcctcataccatatgcaaaaagc

SEQ ID NO: 742253 - DNA, 33 bp, Homo sapien
aaccctccttaagcaactgagattgtctcggca

SEQ ID NO: 742254 - DNA, 33 bp, Homo sapien
aaccctccttaagcaattgagattgtctcggca

SEQ ID NO: 742255 - DNA, 33 bp, Homo sapien
agttttgaaaacagaaatagttctcagagcagg

SEQ ID NO: 742256 - DNA, 33 bp, Homo sapien
agttttgaaaacagaagtagttctcagagcagg

SEQ ID NO: 742257 - DNA, 33 bp, Homo sapien
atgtcatctccaatgaatcaccctgtcctatgc

SEQ ID NO: 742258 - DNA, 33 bp, Homo sapien
atgtcatctccaatgagtcaccctgtcctatgc

SEQ ID NO: 742259 - DNA, 33 bp, Homo sapien
aattgaataggttcaaaaggttcaaacttccat

SEQ ID NO: 742260 - DNA, 33 bp, Homo sapien
aattgaataggttcaataggttcaaacttccat

SEQ ID NO: 742261 - DNA, 33 bp, Homo sapien
cagtttaatttaagagacctaacaggcagttca

SEQ ID NO: 742262 - DNA, 33 bp, Homo sapien
cagtttaatttaagaggcctaacaggcagttca

SEQ ID NO: 742263 - DNA, 33 bp, Homo sapien
atatattctgagaagtaaaatgcacctttctca

SEQ ID NO: 742264 - DNA, 33 bp, Homo sapien
atatattctgagaagtgaaatgcacctttctca

SEQ ID NO: 742265 - DNA, 33 bp, Homo sapien
ttttcacatttgtctgcagcccacttccacatg

SEQ ID NO: 742266 - DNA, 33 bp, Homo sapien
ttttcacatttgtctggagcccacttccacatg

SEQ ID NO: 742267 - DNA, 33 bp, Homo sapien
taacctcatcctcaataaatcagtctaactttg

SEQ ID NO: 742268 - DNA, 33 bp, Homo sapien
taacctcatcctcaatgaatcagtctaactttg

SEQ ID NO: 742269 - DNA, 33 bp, Homo sapien
tctttcattctgtacacagtggagaagaaaata

SEQ ID NO: 742270 - DNA, 33 bp, Homo sapien
tctttcattctgtacagagtggagaagaaaata

SEQ ID NO: 742271 - DNA, 33 bp, Homo sapien
ttcatttctcccatcacaagtaatgttaagcat

SEQ ID NO: 742272 - DNA, 33 bp, Homo sapien
ttcatttctcccatcataagtaatgttaagcat

SEQ ID NO: 742273 - DNA, 33 bp, Homo sapien
catttttggcaaaaccagagtaaaaatgaatac

SEQ ID NO: 742274 - DNA, 33 bp, Homo sapien
catttttggcaaaaccggagtaaaaatgaatac

SEQ ID NO: 742275 - DNA, 33 bp, Homo sapien
gaattaaactcagataccagctctgctattttc

SEQ ID NO: 742276 - DNA, 33 bp, Homo sapien
gaattaaactcagatatcagctctgctattttc

SEQ ID NO: 742277 - DNA, 33 bp, Homo sapien
aggtggagcatgaaaacgaaaaggatggcaaaa

SEQ ID NO: 742278 - DNA, 33 bp, Homo sapien
aggtggagcatgaaaatgaaaaggatggcaaaa

SEQ ID NO: 742279 - DNA, 33 bp, Homo sapien
attgagtatagtgagaatatagcgaggcctgga

SEQ ID NO: 742280 - DNA, 33 bp, Homo sapien
attgagtatagtgagagtatagcgaggcctgga

SEQ ID NO: 742281 - DNA, 33 bp, Homo sapien
ctcaggacactgtcacactgttttttttgtatt

SEQ ID NO: 742282 - DNA, 33 bp, Homo sapien
ctcaggacactgtcacgctgttttttttgtatt

SEQ ID NO: 742283 - DNA, 33 bp, Homo sapien
cacaaacttacacaaaagaagagctatatgttt

SEQ ID NO: 742284 - DNA, 33 bp, Homo sapien
cacaaacttacacaaaggaagagctatatgttt

SEQ ID NO: 742285 - DNA, 33 bp, Homo sapien
tttaaaagctgtcccacacgcatcctaaagaga

SEQ ID NO: 742286 - DNA, 33 bp, Homo sapien
tttaaaagctgtcccatacgcatcctaaagaga

SEQ ID NO: 742287 - DNA, 33 bp, Homo sapien
atcatgatttttgctacagtttacacatattta

SEQ ID NO: 742288 - DNA, 33 bp, Homo sapien
atcatgatttttgctatagtttacacatattta

SEQ ID NO: 742289 - DNA, 33 bp, Homo sapien
tctatgttaacatggcacttaaaaaatacagtg

SEQ ID NO: 742290 - DNA, 33 bp, Homo sapien
tctatgttaacatggcccttaaaaaatacagtg

SEQ ID NO: 742291 - DNA, 33 bp, Homo sapien
ctgggcctcttcaccaccatgtcagcattacct

SEQ ID NO: 742292 - DNA, 33 bp, Homo sapien
ctgggcctcttcaccatcatgtcagcattacct

SEQ ID NO: 742293 - DNA, 33 bp, Homo sapien
cagtcagtgttgtagaccttgtcacatagtagt

SEQ ID NO: 742294 - DNA, 33 bp, Homo sapien
cagtcagtgttgtagatcttgtcacatagtagt

SEQ ID NO: 742295 - DNA, 33 bp, Homo sapien
atatgaaaactgagcaaagttgttcacaatatt

SEQ ID NO: 742296 - DNA, 33 bp, Homo sapien
atatgaaaactgagcagagttgttcacaatatt

SEQ ID NO: 742297 - DNA, 33 bp, Homo sapien
ttattacaactcactgaactggactgctccatc

SEQ ID NO: 742298 - DNA, 33 bp, Homo sapien
ttattacaactcactggactggactgctccatc

SEQ ID NO: 742299 - DNA, 33 bp, Homo sapien
tgttttagactttggagagggtattaccgcgag

SEQ ID NO: 742300 - DNA, 33 bp, Homo sapien
tgttttagactttggatagggtattaccgcgag

SEQ ID NO: 742301 - DNA, 33 bp, Homo sapien
ctcactgtgtgcaagacgtaagtgatttgcttg

SEQ ID NO: 742302 - DNA, 33 bp, Homo sapien
ctcactgtgtgcaagatgtaagtgatttgcttg

SEQ ID NO: 742303 - DNA, 33 bp, Homo sapien
tcaggattaccagctacggaggggagctaccca

SEQ ID NO: 742304 - DNA, 33 bp, Homo sapien
tcaggattaccagctatggaggggagctaccca

SEQ ID NO: 742305 - DNA, 33 bp, Homo sapien
attaaattaatacactcaagaaacaaagactag

SEQ ID NO: 742306 - DNA, 33 bp, Homo sapien
attaaattaatacactgaagaaacaaagactag

SEQ ID NO: 742307 - DNA, 33 bp, Homo sapien
attacacttctattggccattgtattttgtgac

SEQ ID NO: 742308 - DNA, 33 bp, Homo sapien
attacacttctattggtcattgtattttgtgac

SEQ ID NO: 742309 - DNA, 33 bp, Homo sapien
ttctgattaaaaaagaagtagatgctgtttata

SEQ ID NO: 742310 - DNA, 33 bp, Homo sapien
ttctgattaaaaaagaggtagatgctgtttata

SEQ ID NO: 742311 - DNA, 33 bp, Homo sapien
tttcttcgtgctcctaagatagcaatgacaata

SEQ ID NO: 742312 - DNA, 33 bp, Homo sapien
tttcttcgtgctcctacgatagcaatgacaata

SEQ ID NO: 742313 - DNA, 33 bp, Homo sapien
caacagcacagctctgaagaagtcatacagggt

SEQ ID NO: 742314 - DNA, 33 bp, Homo sapien
caacagcacagctctgcagaagtcatacagggt

SEQ ID NO: 742315 - DNA, 33 bp, Homo sapien
aaattaatggacatacaattattagaatatgga

SEQ ID NO: 742316 - DNA, 33 bp, Homo sapien
aaattaatggacatacgattattagaatatgga

SEQ ID NO: 742317 - DNA, 33 bp, Homo sapien
gctttctgttctggcaaccctatgttctgtttg

SEQ ID NO: 742318 - DNA, 33 bp, Homo sapien
gctttctgttctggcacccctatgttctgtttg

SEQ ID NO: 742319 - DNA, 33 bp, Homo sapien
agccacgatgcaaaggaaagtcagataggcctc

SEQ ID NO: 742320 - DNA, 33 bp, Homo sapien
agccacgatgcaaagggaagtcagataggcctc

SEQ ID NO: 742321 - DNA, 33 bp, Homo sapien
agctgaagttgcagcccacaggtggaatttgtt

SEQ ID NO: 742322 - DNA, 33 bp, Homo sapien
agctgaagttgcagcctacaggtggaatttgtt

SEQ ID NO: 742323 - DNA, 33 bp, Homo sapien
aaaaaggtatggaaaagttgaggatcttgatag

SEQ ID NO: 742324 - DNA, 33 bp, Homo sapien
aaaaaggtatggaaaatttgaggatcttgatag

SEQ ID NO: 742325 - DNA, 33 bp, Homo sapien
ggagtgcctatttcaacgccatttcacagcgtg

SEQ ID NO: 742326 - DNA, 33 bp, Homo sapien
ggagtgcctatttcaatgccatttcacagcgtg

SEQ ID NO: 742327 - DNA, 33 bp, Homo sapien
aatactatgcagctgtaaaaaggaacaacatca

SEQ ID NO: 742328 - DNA, 33 bp, Homo sapien
aatactatgcagctgtgaaaaggaacaacatca

SEQ ID NO: 742329 - DNA, 33 bp, Homo sapien
attaagagaaatttagaaaaaggaattggcata

SEQ ID NO: 742330 - DNA, 33 bp, Homo sapien
attaagagaaatttaggaaaaggaattggcata

SEQ ID NO: 742331 - DNA, 33 bp, Homo sapien
gggttgagatttgttaaaattggaagccattca

SEQ ID NO: 742332 - DNA, 33 bp, Homo sapien
gggttgagatttgttacaattggaagccattca

SEQ ID NO: 742333 - DNA, 33 bp, Homo sapien
ttaaaatatctggtcacccaaagatagtactaa

SEQ ID NO: 742334 - DNA, 33 bp, Homo sapien
ttaaaatatctggtcatccaaagatagtactaa

SEQ ID NO: 742335 - DNA, 33 bp, Homo sapien
gcctcaggatggttcacacccaaagtctcaact

SEQ ID NO: 742336 - DNA, 33 bp, Homo sapien
gcctcaggatggttcatacccaaagtctcaact

SEQ ID NO: 742337 - DNA, 33 bp, Homo sapien
cattcctttgcacacccctttcatcaaggaaac

SEQ ID NO: 742338 - DNA, 33 bp, Homo sapien
cattcctttgcacaccgctttcatcaaggaaac

SEQ ID NO: 742339 - DNA, 33 bp, Homo sapien
gcatgctctgttttcaaaactgcacgttcaaac

SEQ ID NO: 742340 - DNA, 33 bp, Homo sapien
gcatgctctgttttcacaactgcacgttcaaac

SEQ ID NO: 742341 - DNA, 33 bp, Homo sapien
attacagaatcctatcaaccttgaattgtcaac

SEQ ID NO: 742342 - DNA, 33 bp, Homo sapien
attacagaatcctatcgaccttgaattgtcaac

SEQ ID NO: 742343 - DNA, 33 bp, Homo sapien
taacacatataaaggcaattaatgatcacgatg

SEQ ID NO: 742344 - DNA, 33 bp, Homo sapien
taacacatataaaggctattaatgatcacgatg

SEQ ID NO: 742345 - DNA, 33 bp, Homo sapien
acaaagacaatctctacattcaaactcctaccc

SEQ ID NO: 742346 - DNA, 33 bp, Homo sapien
acaaagacaatctctatattcaaactcctaccc

SEQ ID NO: 742347 - DNA, 33 bp, Homo sapien
gaagtgggcaaggccactgaaaatatggtcaag

SEQ ID NO: 742348 - DNA, 33 bp, Homo sapien
gaagtgggcaaggccattgaaaatatggtcaag

SEQ ID NO: 742349 - DNA, 33 bp, Homo sapien
gaaatagctgttgtagaaaaagggggaaggaag

SEQ ID NO: 742350 - DNA, 33 bp, Homo sapien
gaaatagctgttgtagtaaaagggggaaggaag

SEQ ID NO: 742351 - DNA, 33 bp, Homo sapien
ttattataggacaaacagagtatgaggtgttca

SEQ ID NO: 742352 - DNA, 33 bp, Homo sapien
ttattataggacaaacggagtatgaggtgttca

SEQ ID NO: 742353 - DNA, 33 bp, Homo sapien
tgcaacagaaatataaaccagattgctacatgg

SEQ ID NO: 742354 - DNA, 33 bp, Homo sapien
tgcaacagaaatataagccagattgctacatgg

SEQ ID NO: 742355 - DNA, 33 bp, Homo sapien
ttccctgtgattattcaaaggattctatcttct

SEQ ID NO: 742356 - DNA, 33 bp, Homo sapien
ttccctgtgattattcgaaggattctatcttct

SEQ ID NO: 742357 - DNA, 33 bp, Homo sapien
tgaattattccatttcactaaggtctgcagaaa

SEQ ID NO: 742358 - DNA, 33 bp, Homo sapien
tgaattattccatttcgctaaggtctgcagaaa

SEQ ID NO: 742359 - DNA, 33 bp, Homo sapien
aaatggaataattcagaatccagcaagcccagg

SEQ ID NO: 742360 - DNA, 33 bp, Homo sapien
aaatggaataattcagtatccagcaagcccagg

SEQ ID NO: 742361 - DNA, 33 bp, Homo sapien
ctctgtaatattcaagacattaaacaagaattc

SEQ ID NO: 742362 - DNA, 33 bp, Homo sapien
ctctgtaatattcaagtcattaaacaagaattc

SEQ ID NO: 742363 - DNA, 33 bp, Homo sapien
ttggatttctctatcacagttcaggagaccagc

SEQ ID NO: 742364 - DNA, 33 bp, Homo sapien
ttggatttctctatcagagttcaggagaccagc

SEQ ID NO: 742365 - DNA, 33 bp, Homo sapien
actgtaatgaaagacacgttttggctgggtttg

SEQ ID NO: 742366 - DNA, 33 bp, Homo sapien
actgtaatgaaagacaggttttggctgggtttg

SEQ ID NO: 742367 - DNA, 33 bp, Homo sapien
tactctatttggctgacaaaattatccatacag

SEQ ID NO: 742368 - DNA, 33 bp, Homo sapien
tactctatttggctgataaaattatccatacag

SEQ ID NO: 742369 - DNA, 33 bp, Homo sapien
cttctgtatcctactcaaagttttaaggaagta

SEQ ID NO: 742370 - DNA, 33 bp, Homo sapien
cttctgtatcctactcgaagttttaaggaagta

SEQ ID NO: 742371 - DNA, 33 bp, Homo sapien
ctaactctaatttatccactgcaattggtaata

SEQ ID NO: 742372 - DNA, 33 bp, Homo sapien
ctaactctaatttatctactgcaattggtaata

SEQ ID NO: 742373 - DNA, 33 bp, Homo sapien
ataaaaaattgctaaaagtgaactcaaagagac

SEQ ID NO: 742374 - DNA, 33 bp, Homo sapien
ataaaaaattgctaaatgtgaactcaaagagac

SEQ ID NO: 742375 - DNA, 33 bp, Homo sapien
gcagtcttattaccaaacattctgacaaatagt

SEQ ID NO: 742376 - DNA, 33 bp, Homo sapien
gcagtcttattaccaagcattctgacaaatagt

SEQ ID NO: 742377 - DNA, 33 bp, Homo sapien
gaacaaattacagagacgaaaggctgccttcaa

SEQ ID NO: 742378 - DNA, 33 bp, Homo sapien
gaacaaattacagagatgaaaggctgccttcaa

SEQ ID NO: 742379 - DNA, 33 bp, Homo sapien
aacagcaaggtagaaagtaaaaagccagtcttc

SEQ ID NO: 742380 - DNA, 33 bp, Homo sapien
aacagcaaggtagaaattaaaaagccagtcttc

SEQ ID NO: 742381 - DNA, 33 bp, Homo sapien
ggtatcacaatggatgaaaagtgattgtggcat

SEQ ID NO: 742382 - DNA, 33 bp, Homo sapien
ggtatcacaatggatggaaagtgattgtggcat

SEQ ID NO: 742383 - DNA, 33 bp, Homo sapien
agtttcttaagagggaggcaatgggtgttcaaa

SEQ ID NO: 742384 - DNA, 33 bp, Homo sapien
agtttcttaagagggatgcaatgggtgttcaaa

SEQ ID NO: 742385 - DNA, 33 bp, Homo sapien
gtgtaatttacaagaacacttaaagaactctca

SEQ ID NO: 742386 - DNA, 33 bp, Homo sapien
gtgtaatttacaagaagacttaaagaactctca

SEQ ID NO: 742387 - DNA, 33 bp, Homo sapien
ttccgtatgacctaatcacctgctgtcttttga

SEQ ID NO: 742388 - DNA, 33 bp, Homo sapien
ttccgtatgacctaattacctgctgtcttttga

SEQ ID NO: 742389 - DNA, 33 bp, Homo sapien
agatgcccatttagtaccacatcttgcctagta

SEQ ID NO: 742390 - DNA, 33 bp, Homo sapien
agatgcccatttagtagcacatcttgcctagta

SEQ ID NO: 742391 - DNA, 33 bp, Homo sapien
aaaaaaacagggaaacactaatactctcagcag

SEQ ID NO: 742392 - DNA, 33 bp, Homo sapien
aaaaaaacagggaaactctaatactctcagcag

SEQ ID NO: 742393 - DNA, 33 bp, Homo sapien
gcatttttcctcttaccggaatgttctttctcc

SEQ ID NO: 742394 - DNA, 33 bp, Homo sapien
gcatttttcctcttactggaatgttctttctcc

SEQ ID NO: 742395 - DNA, 33 bp, Homo sapien
tcttactcttcagaccaccaatgattagtgggg

SEQ ID NO: 742396 - DNA, 33 bp, Homo sapien
tcttactcttcagaccgccaatgattagtgggg

SEQ ID NO: 742397 - DNA, 33 bp, Homo sapien
atactatgtgttagaaactgtgctaagaggtct

SEQ ID NO: 742398 - DNA, 33 bp, Homo sapien
atactatgtgttagaagctgtgctaagaggtct

SEQ ID NO: 742399 - DNA, 33 bp, Homo sapien
cccacatgcaaggaagacatttcaaagcggtag

SEQ ID NO: 742400 - DNA, 33 bp, Homo sapien
cccacatgcaaggaaggcatttcaaagcggtag

SEQ ID NO: 742401 - DNA, 33 bp, Homo sapien
attaacatttgaacaaaagacctagaaatgtta

SEQ ID NO: 742402 - DNA, 33 bp, Homo sapien
attaacatttgaacaagagacctagaaatgtta

SEQ ID NO: 742403 - DNA, 33 bp, Homo sapien
gtgtaattacttgtgccgagagcatggaatggt

SEQ ID NO: 742404 - DNA, 33 bp, Homo sapien
gtgtaattacttgtgctgagagcatggaatggt

SEQ ID NO: 742405 - DNA, 33 bp, Homo sapien
attttcaagtagggaaagagttttcacaggaaa

SEQ ID NO: 742406 - DNA, 33 bp, Homo sapien
attttcaagtagggaaggagttttcacaggaaa

SEQ ID NO: 742407 - DNA, 33 bp, Homo sapien
gaattacatgaaggtacgaaatgacgtttaggg

SEQ ID NO: 742408 - DNA, 33 bp, Homo sapien
gaattacatgaaggtatgaaatgacgtttaggg

SEQ ID NO: 742409 - DNA, 33 bp, Homo sapien
tttcctttttactcaccctcttatcgcatggta

SEQ ID NO: 742410 - DNA, 33 bp, Homo sapien
tttcctttttactcactctcttatcgcatggta

SEQ ID NO: 742411 - DNA, 33 bp, Homo sapien
tgatagtcaatccccaatggagacattctttga

SEQ ID NO: 742412 - DNA, 33 bp, Homo sapien
tgatagtcaatccccagtggagacattctttga

SEQ ID NO: 742413 - DNA, 33 bp, Homo sapien
ttttgtgtagttgttaagactgttttttgagac

SEQ ID NO: 742414 - DNA, 33 bp, Homo sapien
ttttgtgtagttgttaggactgttttttgagac

SEQ ID NO: 742415 - DNA, 33 bp, Homo sapien
cccagtgcatatctaactattttttccaacaaa

SEQ ID NO: 742416 - DNA, 33 bp, Homo sapien
cccagtgcatatctaagtattttttccaacaaa

SEQ ID NO: 742417 - DNA, 33 bp, Homo sapien
cttcatgattatcctaaagaaccaggaagaaaa

SEQ ID NO: 742418 - DNA, 33 bp, Homo sapien
cttcatgattatcctagagaaccaggaagaaaa

SEQ ID NO: 742419 - DNA, 33 bp, Homo sapien
tttcttggattctttcaaatatcatgggctcca

SEQ ID NO: 742420 - DNA, 33 bp, Homo sapien
tttcttggattctttcgaatatcatgggctcca

SEQ ID NO: 742421 - DNA, 33 bp, Homo sapien
ttcagaaccttgtatacagcttaatgaaaccgg

SEQ ID NO: 742422 - DNA, 33 bp, Homo sapien
ttcagaaccttgtatagagcttaatgaaaccgg

SEQ ID NO: 742423 - DNA, 33 bp, Homo sapien
taatttattctttcacacttgccaaaatatagc

SEQ ID NO: 742424 - DNA, 33 bp, Homo sapien
taatttattctttcacgcttgccaaaatatagc

SEQ ID NO: 742425 - DNA, 33 bp, Homo sapien
gagccacagcgtctgaataaaggaagtttgagt

SEQ ID NO: 742426 - DNA, 33 bp, Homo sapien
gagccacagcgtctgagtaaaggaagtttgagt

SEQ ID NO: 742427 - DNA, 33 bp, Homo sapien
ctgtggctcgggtcaacatacatattagccaga

SEQ ID NO: 742428 - DNA, 33 bp, Homo sapien
ctgtggctcgggtcaagatacatattagccaga

SEQ ID NO: 742429 - DNA, 33 bp, Homo sapien
cctattaatgtaagccactgcaaattgggctgc

SEQ ID NO: 742430 - DNA, 33 bp, Homo sapien
cctattaatgtaagcccctgcaaattgggctgc

SEQ ID NO: 742431 - DNA, 33 bp, Homo sapien
ggctcctgtgtggatacgatgtgggacccaaga

SEQ ID NO: 742432 - DNA, 33 bp, Homo sapien
ggctcctgtgtggatatgatgtgggacccaaga

SEQ ID NO: 742433 - DNA, 33 bp, Homo sapien
ctccgtttgctgatatcaggtccaaaccaggaa

SEQ ID NO: 742434 - DNA, 33 bp, Homo sapien
ctccgtttgctgatattaggtccaaaccaggaa

SEQ ID NO: 742435 - DNA, 33 bp, Homo sapien
agtctaagcttgtttaaaaactccttgctataa

SEQ ID NO: 742436 - DNA, 33 bp, Homo sapien
agtctaagcttgtttagaaactccttgctataa

SEQ ID NO: 742437 - DNA, 33 bp, Homo sapien
gacatctgaaaggcgacgttgctgcctccccag

SEQ ID NO: 742438 - DNA, 33 bp, Homo sapien
gacatctgaaaggcgatgttgctgcctccccag

SEQ ID NO: 742439 - DNA, 33 bp, Homo sapien
tatacctcaaaattaaaccacacagtatatgca

SEQ ID NO: 742440 - DNA, 33 bp, Homo sapien
tatacctcaaaattaagccacacagtatatgca

SEQ ID NO: 742441 - DNA, 33 bp, Homo sapien
actctggtttgtgtcacgtagcggccccagcgg

SEQ ID NO: 742442 - DNA, 33 bp, Homo sapien
actctggtttgtgtcatgtagcggccccagcgg

SEQ ID NO: 742443 - DNA, 33 bp, Homo sapien
ttatgtgagcattaaaatgatatttcatgaacc

SEQ ID NO: 742444 - DNA, 33 bp, Homo sapien
ttatgtgagcattaaagtgatatttcatgaacc

SEQ ID NO: 742445 - DNA, 33 bp, Homo sapien
tgcctaacagaaggaagccctgtacaagagaga

SEQ ID NO: 742446 - DNA, 33 bp, Homo sapien
tgcctaacagaaggaatccctgtacaagagaga

SEQ ID NO: 742447 - DNA, 33 bp, Homo sapien
tagcacgtttgaggaacagcaaaggggacaatg

SEQ ID NO: 742448 - DNA, 33 bp, Homo sapien
tagcacgtttgaggaatagcaaaggggacaatg

SEQ ID NO: 742449 - DNA, 33 bp, Homo sapien
cttcctttctaaccagcaaagcatgcttgtgac

SEQ ID NO: 742450 - DNA, 33 bp, Homo sapien
cttcctttctaaccagtaaagcatgcttgtgac

SEQ ID NO: 742451 - DNA, 33 bp, Homo sapien
gttttaataagcaccgcagagggttttgagtaa

SEQ ID NO: 742452 - DNA, 33 bp, Homo sapien
gttttaataagcaccgtagagggttttgagtaa

SEQ ID NO: 742453 - DNA, 33 bp, Homo sapien
cactctgctttgatcccactcaggtcttagata

SEQ ID NO: 742454 - DNA, 33 bp, Homo sapien
cactctgctttgatcctactcaggtcttagata

SEQ ID NO: 742455 - DNA, 33 bp, Homo sapien
aaaattgacatgggacacaaccgaactcccagt

SEQ ID NO: 742456 - DNA, 33 bp, Homo sapien
aaaattgacatgggacgcaaccgaactcccagt

SEQ ID NO: 742457 - DNA, 33 bp, Homo sapien
tatgccactgataccacggggaaaccagaggcc

SEQ ID NO: 742458 - DNA, 33 bp, Homo sapien
tatgccactgataccatggggaaaccagaggcc

SEQ ID NO: 742459 - DNA, 33 bp, Homo sapien
taaatatgatatctcaatcctcaaaactaccaa

SEQ ID NO: 742460 - DNA, 33 bp, Homo sapien
taaatatgatatctcagtcctcaaaactaccaa

SEQ ID NO: 742461 - DNA, 33 bp, Homo sapien
gttgtttgaaattggacgtaaaaatagttgtct

SEQ ID NO: 742462 - DNA, 33 bp, Homo sapien
gttgtttgaaattggaggtaaaaatagttgtct

SEQ ID NO: 742463 - DNA, 33 bp, Homo sapien
agtagcaggggctaacagagaagaaaatccaat

SEQ ID NO: 742464 - DNA, 33 bp, Homo sapien
agtagcaggggctaacggagaagaaaatccaat

SEQ ID NO: 742465 - DNA, 33 bp, Homo sapien
gtggagtacatctaaccaaaagaaacgaatcct

SEQ ID NO: 742466 - DNA, 33 bp, Homo sapien
gtggagtacatctaacgaaaagaaacgaatcct

SEQ ID NO: 742467 - DNA, 33 bp, Homo sapien
agttcagaggcttttacacagaagaaccacatt

SEQ ID NO: 742468 - DNA, 33 bp, Homo sapien
agttcagaggcttttatacagaagaaccacatt

SEQ ID NO: 742469 - DNA, 33 bp, Homo sapien
ctcatattcagtacctcaggcagatgatttgaa

SEQ ID NO: 742470 - DNA, 33 bp, Homo sapien
ctcatattcagtacctgaggcagatgatttgaa

SEQ ID NO: 742471 - DNA, 33 bp, Homo sapien
atttagccaaactaacagtgactataggccctg

SEQ ID NO: 742472 - DNA, 33 bp, Homo sapien
atttagccaaactaacggtgactataggccctg

SEQ ID NO: 742473 - DNA, 33 bp, Homo sapien
aggcttctaccaaccaaagagtcagttagaaaa

SEQ ID NO: 742474 - DNA, 33 bp, Homo sapien
aggcttctaccaaccagagagtcagttagaaaa

SEQ ID NO: 742475 - DNA, 33 bp, Homo sapien
gtcacctagaatatcacgcctgctagaaaatga

SEQ ID NO: 742476 - DNA, 33 bp, Homo sapien
gtcacctagaatatcatgcctgctagaaaatga

SEQ ID NO: 742477 - DNA, 33 bp, Homo sapien
cgtatccaaaggagaacctacttctggcctaat

SEQ ID NO: 742478 - DNA, 33 bp, Homo sapien
cgtatccaaaggagaatctacttctggcctaat

SEQ ID NO: 742479 - DNA, 33 bp, Homo sapien
ctctaccgctctgccaaaattcttcatgatgtc

SEQ ID NO: 742480 - DNA, 33 bp, Homo sapien
ctctaccgctctgccacaattcttcatgatgtc

SEQ ID NO: 742481 - DNA, 33 bp, Homo sapien
agtcgttcaacaaatacctatttagtcccaaag

SEQ ID NO: 742482 - DNA, 33 bp, Homo sapien
agtcgttcaacaaatatctatttagtcccaaag

SEQ ID NO: 742483 - DNA, 33 bp, Homo sapien
attttaggctctatcaagttcctgctcacatct

SEQ ID NO: 742484 - DNA, 33 bp, Homo sapien
attttaggctctatcaggttcctgctcacatct

SEQ ID NO: 742485 - DNA, 33 bp, Homo sapien
ttagtctgcaagcatggcatatgtctccattta

SEQ ID NO: 742486 - DNA, 33 bp, Homo sapien
ttagtctgcaagcatgtcatatgtctccattta

SEQ ID NO: 742487 - DNA, 33 bp, Homo sapien
catgcttgcagactaacagaccgtataaagcca

SEQ ID NO: 742488 - DNA, 33 bp, Homo sapien
catgcttgcagactaatagaccgtataaagcca

SEQ ID NO: 742489 - DNA, 33 bp, Homo sapien
atgccagacccatgcaagaaagcccggtagtga

SEQ ID NO: 742490 - DNA, 33 bp, Homo sapien
atgccagacccatgcaggaaagcccggtagtga

SEQ ID NO: 742491 - DNA, 33 bp, Homo sapien
aggttgatttttaagaactctcaaactgtcaat

SEQ ID NO: 742492 - DNA, 33 bp, Homo sapien
aggttgatttttaagagctctcaaactgtcaat

SEQ ID NO: 742493 - DNA, 33 bp, Homo sapien
gttaggacggtgggttcaacaaaagtaggccat

SEQ ID NO: 742494 - DNA, 33 bp, Homo sapien
gttaggacggtgggttgaacaaaagtaggccat

SEQ ID NO: 742495 - DNA, 33 bp, Homo sapien
ctgggtttattccatacgttgtgcaatcagtgg

SEQ ID NO: 742496 - DNA, 33 bp, Homo sapien
ctgggtttattccatatgttgtgcaatcagtgg

SEQ ID NO: 742497 - DNA, 33 bp, Homo sapien
gctgtgcatcaggaatgaagggcaagttcagat

SEQ ID NO: 742498 - DNA, 33 bp, Homo sapien
gctgtgcatcaggaattaagggcaagttcagat

SEQ ID NO: 742499 - DNA, 33 bp, Homo sapien
ttgattaggtcaaatccctcatttcttcaggct

SEQ ID NO: 742500 - DNA, 33 bp, Homo sapien
ttgattaggtcaaatctctcatttcttcaggct

SEQ ID NO: 742501 - DNA, 33 bp, Homo sapien
tcatccccctcacaataaccgtgtggtggttaa

SEQ ID NO: 742502 - DNA, 33 bp, Homo sapien
tcatccccctcacaattaccgtgtggtggttaa

SEQ ID NO: 742503 - DNA, 33 bp, Homo sapien
agtagaggttgaaggacgggataatgttcaact

SEQ ID NO: 742504 - DNA, 33 bp, Homo sapien
agtagaggttgaaggatgggataatgttcaact

SEQ ID NO: 742505 - DNA, 33 bp, Homo sapien
aaacagtgtttgtggaagagtaaagttattttg

SEQ ID NO: 742506 - DNA, 33 bp, Homo sapien
aaacagtgtttgtggaggagtaaagttattttg

SEQ ID NO: 742507 - DNA, 33 bp, Homo sapien
tagcttattcatatcacattcatttaaacacct

SEQ ID NO: 742508 - DNA, 33 bp, Homo sapien
tagcttattcatatcatattcatttaaacacct

SEQ ID NO: 742509 - DNA, 33 bp, Homo sapien
cccatgatgtagtacccagcaaaaccctagaac

SEQ ID NO: 742510 - DNA, 33 bp, Homo sapien
cccatgatgtagtacctagcaaaaccctagaac

SEQ ID NO: 742511 - DNA, 33 bp, Homo sapien
tttgacgcacatatagaaagtttcagaaataag

SEQ ID NO: 742512 - DNA, 33 bp, Homo sapien
tttgacgcacatataggaagtttcagaaataag

SEQ ID NO: 742513 - DNA, 33 bp, Homo sapien
ctggagatggtgacagcacttggtatttgagca

SEQ ID NO: 742514 - DNA, 33 bp, Homo sapien
ctggagatggtgacaggacttggtatttgagca

SEQ ID NO: 742515 - DNA, 33 bp, Homo sapien
taatctgacctacaaaacaaatagggctaaaac

SEQ ID NO: 742516 - DNA, 33 bp, Homo sapien
taatctgacctacaaagcaaatagggctaaaac

SEQ ID NO: 742517 - DNA, 33 bp, Homo sapien
taatcagctgcataaaagggtagatcacttgcc

SEQ ID NO: 742518 - DNA, 33 bp, Homo sapien
taatcagctgcataaatgggtagatcacttgcc

SEQ ID NO: 742519 - DNA, 33 bp, Homo sapien
catatattatactgccggagaggcttcaaaaat

SEQ ID NO: 742520 - DNA, 33 bp, Homo sapien
catatattatactgcctgagaggcttcaaaaat

SEQ ID NO: 742521 - DNA, 33 bp, Homo sapien
ccaaggtgtttatgcaagagtgcgggtactaag

SEQ ID NO: 742522 - DNA, 33 bp, Homo sapien
ccaaggtgtttatgcaggagtgcgggtactaag

SEQ ID NO: 742523 - DNA, 33 bp, Homo sapien
atgtatggaatagttaccaggatcatttgaaag

SEQ ID NO: 742524 - DNA, 33 bp, Homo sapien
atgtatggaatagttatcaggatcatttgaaag

SEQ ID NO: 742525 - DNA, 33 bp, Homo sapien
ttgccacagattgtaaactctttcccaaagaac

SEQ ID NO: 742526 - DNA, 33 bp, Homo sapien
ttgccacagattgtaacctctttcccaaagaac

SEQ ID NO: 742527 - DNA, 33 bp, Homo sapien
gagacctttggaggaacatgtatttgcattatg

SEQ ID NO: 742528 - DNA, 33 bp, Homo sapien
gagacctttggaggaatatgtatttgcattatg

SEQ ID NO: 742529 - DNA, 33 bp, Homo sapien
cacacccagctctttaccacctgattccctcaa

SEQ ID NO: 742530 - DNA, 33 bp, Homo sapien
cacacccagctctttatcacctgattccctcaa

SEQ ID NO: 742531 - DNA, 33 bp, Homo sapien
ggcagagggaaggagactcgccttgagggaatc

SEQ ID NO: 742532 - DNA, 33 bp, Homo sapien
ggcagagggaaggagagtcgccttgagggaatc

SEQ ID NO: 742533 - DNA, 33 bp, Homo sapien
ctgagtagagctaacaggagactaagcctactc

SEQ ID NO: 742534 - DNA, 33 bp, Homo sapien
ctgagtagagctaacatgagactaagcctactc

SEQ ID NO: 742535 - DNA, 33 bp, Homo sapien
taagttactgctaaacggggctgggaggaggaa

SEQ ID NO: 742536 - DNA, 33 bp, Homo sapien
taagttactgctaaactgggctgggaggaggaa

SEQ ID NO: 742537 - DNA, 33 bp, Homo sapien
gtctcacctagctttaagaaaaatgagaggcta

SEQ ID NO: 742538 - DNA, 33 bp, Homo sapien
gtctcacctagctttatgaaaaatgagaggcta

SEQ ID NO: 742539 - DNA, 33 bp, Homo sapien
ggaatcaaaattaggaaaattactggactttgg

SEQ ID NO: 742540 - DNA, 33 bp, Homo sapien
ggaatcaaaattaggagaattactggactttgg

SEQ ID NO: 742541 - DNA, 33 bp, Homo sapien
cctgttcaacagtcacaaacctggtgtatacat

SEQ ID NO: 742542 - DNA, 33 bp, Homo sapien
cctgttcaacagtcacgaacctggtgtatacat

SEQ ID NO: 742543 - DNA, 33 bp, Homo sapien
aacaagttcaagtacaagctaaaagtcatgcca

SEQ ID NO: 742544 - DNA, 33 bp, Homo sapien
aacaagttcaagtacaggctaaaagtcatgcca

SEQ ID NO: 742545 - DNA, 33 bp, Homo sapien
attaaacatataattcactctacatcaacagca

SEQ ID NO: 742546 - DNA, 33 bp, Homo sapien
attaaacatataattcgctctacatcaacagca

SEQ ID NO: 742547 - DNA, 33 bp, Homo sapien
agattctagaatttagaccatgatattgactac

SEQ ID NO: 742548 - DNA, 33 bp, Homo sapien
agattctagaatttaggccatgatattgactac

SEQ ID NO: 742549 - DNA, 33 bp, Homo sapien
agtgcaaaacggtgtacgaagtgtgttgtcagc

SEQ ID NO: 742550 - DNA, 33 bp, Homo sapien
agtgcaaaacggtgtatgaagtgtgttgtcagc

SEQ ID NO: 742551 - DNA, 33 bp, Homo sapien
gaagtgtgttgtcagcagaagctaatttacacc

SEQ ID NO: 742552 - DNA, 33 bp, Homo sapien
gaagtgtgttgtcagcggaagctaatttacacc

SEQ ID NO: 742553 - DNA, 33 bp, Homo sapien
aaatatattaaccctgaaactaacatgcagcac

SEQ ID NO: 742554 - DNA, 33 bp, Homo sapien
aaatatattaaccctgcaactaacatgcagcac

SEQ ID NO: 742555 - DNA, 33 bp, Homo sapien
aattgttcttttcaccacaagagttatgtattc

SEQ ID NO: 742556 - DNA, 33 bp, Homo sapien
aattgttcttttcaccgcaagagttatgtattc

SEQ ID NO: 742557 - DNA, 33 bp, Homo sapien
gtattgaataggtcaaaaagcatttcctaagtc

SEQ ID NO: 742558 - DNA, 33 bp, Homo sapien
gtattgaataggtcaacaagcatttcctaagtc

SEQ ID NO: 742559 - DNA, 33 bp, Homo sapien
taggagatctccgtcagcttacctgtgagcact

SEQ ID NO: 742560 - DNA, 33 bp, Homo sapien
taggagatctccgtcatcttacctgtgagcact

SEQ ID NO: 742561 - DNA, 33 bp, Homo sapien
attggcaagacaaagactagacttttgtgttag

SEQ ID NO: 742562 - DNA, 33 bp, Homo sapien
attggcaagacaaagattagacttttgtgttag

SEQ ID NO: 742563 - DNA, 33 bp, Homo sapien
tgatgtagagtgaaaaacactaacttggaagta

SEQ ID NO: 742564 - DNA, 33 bp, Homo sapien
tgatgtagagtgaaaagcactaacttggaagta

SEQ ID NO: 742565 - DNA, 33 bp, Homo sapien
ctctgaaaacgagctccaattctttttcagaac

SEQ ID NO: 742566 - DNA, 33 bp, Homo sapien
ctctgaaaacgagctctaattctttttcagaac

SEQ ID NO: 742567 - DNA, 33 bp, Homo sapien
aagtgctgggactctaagcgtgaactaccttgc

SEQ ID NO: 742568 - DNA, 33 bp, Homo sapien
aagtgctgggactctaggcgtgaactaccttgc

SEQ ID NO: 742569 - DNA, 33 bp, Homo sapien
tttgagagggtgatagaccaacaattcattgtc

SEQ ID NO: 742570 - DNA, 33 bp, Homo sapien
tttgagagggtgataggccaacaattcattgtc

SEQ ID NO: 742571 - DNA, 33 bp, Homo sapien
gcagttgcccttgatgcacattttcaagtggta

SEQ ID NO: 742572 - DNA, 33 bp, Homo sapien
gcagttgcccttgatgtacattttcaagtggta

SEQ ID NO: 742573 - DNA, 33 bp, Homo sapien
tgtgttctaggtaccacctgaccgctctctgtc

SEQ ID NO: 742574 - DNA, 33 bp, Homo sapien
tgtgttctaggtaccatctgaccgctctctgtc

SEQ ID NO: 742575 - DNA, 33 bp, Homo sapien
aaaagccacatataaaaaggggaatcagaccca

SEQ ID NO: 742576 - DNA, 33 bp, Homo sapien
aaaagccacatataaagaggggaatcagaccca

SEQ ID NO: 742577 - DNA, 33 bp, Homo sapien
ccaaacctaaaagcacagtgaatgaaaggagga

SEQ ID NO: 742578 - DNA, 33 bp, Homo sapien
ccaaacctaaaagcacggtgaatgaaaggagga

SEQ ID NO: 742579 - DNA, 33 bp, Homo sapien
atacaaaaatctttggacagaaccagtattaca

SEQ ID NO: 742580 - DNA, 33 bp, Homo sapien
atacaaaaatctttggtcagaaccagtattaca

SEQ ID NO: 742581 - DNA, 33 bp, Homo sapien
ctatcattttgtgacactgagaacacgtgaggc

SEQ ID NO: 742582 - DNA, 33 bp, Homo sapien
ctatcattttgtgacattgagaacacgtgaggc

SEQ ID NO: 742583 - DNA, 33 bp, Homo sapien
ccgataaatgctaaataatgactatcgctttga

SEQ ID NO: 742584 - DNA, 33 bp, Homo sapien
ccgataaatgctaaatgatgactatcgctttga

SEQ ID NO: 742585 - DNA, 33 bp, Homo sapien
gtgtctagtgttccaccgatcctacatagtaat

SEQ ID NO: 742586 - DNA, 33 bp, Homo sapien
gtgtctagtgttccactgatcctacatagtaat

SEQ ID NO: 742587 - DNA, 33 bp, Homo sapien
gaaatgtgtctagaagcatagaatcacctagag

SEQ ID NO: 742588 - DNA, 33 bp, Homo sapien
gaaatgtgtctagaaggatagaatcacctagag

SEQ ID NO: 742589 - DNA, 33 bp, Homo sapien
aaaaaaatgcaattgacgttagctagttagttg

SEQ ID NO: 742590 - DNA, 33 bp, Homo sapien
aaaaaaatgcaattgatgttagctagttagttg

SEQ ID NO: 742591 - DNA, 33 bp, Homo sapien
gttacatataatcaaccaatttgttggtacttg

SEQ ID NO: 742592 - DNA, 33 bp, Homo sapien
gttacatataatcaactaatttgttggtacttg

SEQ ID NO: 742593 - DNA, 33 bp, Homo sapien
gggtcagtagtctccaatcatttaaactctctt

SEQ ID NO: 742594 - DNA, 33 bp, Homo sapien
gggtcagtagtctccagtcatttaaactctctt

SEQ ID NO: 742595 - DNA, 33 bp, Homo sapien
ctccaaagggtagagcaaagaaccagagagggt

SEQ ID NO: 742596 - DNA, 33 bp, Homo sapien
ctccaaagggtagagcgaagaaccagagagggt

SEQ ID NO: 742597 - DNA, 33 bp, Homo sapien
tggacataccagttaccgaagcccccaagacag

SEQ ID NO: 742598 - DNA, 33 bp, Homo sapien
tggacataccagttactgaagcccccaagacag

SEQ ID NO: 742599 - DNA, 33 bp, Homo sapien
catcacaagggagcataataatcaaggagccac

SEQ ID NO: 742600 - DNA, 33 bp, Homo sapien
catcacaagggagcatcataatcaaggagccac

SEQ ID NO: 742601 - DNA, 33 bp, Homo sapien
ccaccagcaggtcacaatgtaactagatctgta

SEQ ID NO: 742602 - DNA, 33 bp, Homo sapien
ccaccagcaggtcacagtgtaactagatctgta

SEQ ID NO: 742603 - DNA, 33 bp, Homo sapien
tgatactcaactgatagtacctgcaagatgcct

SEQ ID NO: 742604 - DNA, 33 bp, Homo sapien
tgatactcaactgatattacctgcaagatgcct

SEQ ID NO: 742605 - DNA, 33 bp, Homo sapien
tgaggacatggttataaggcctagcaaaacaga

SEQ ID NO: 742606 - DNA, 33 bp, Homo sapien
tgaggacatggttatatggcctagcaaaacaga

SEQ ID NO: 742607 - DNA, 33 bp, Homo sapien
ttaatgagtaaacgcaatgaaatgagatgaagt

SEQ ID NO: 742608 - DNA, 33 bp, Homo sapien
ttaatgagtaaacgcagtgaaatgagatgaagt

SEQ ID NO: 742609 - DNA, 33 bp, Homo sapien
gtttaagtgattaataagcttgagcaccgggtg

SEQ ID NO: 742610 - DNA, 33 bp, Homo sapien
gtttaagtgattaataggcttgagcaccgggtg

SEQ ID NO: 742611 - DNA, 33 bp, Homo sapien
acttatgtcttacttgccaaatttttctgaatg

SEQ ID NO: 742612 - DNA, 33 bp, Homo sapien
acttatgtcttacttggcaaatttttctgaatg

SEQ ID NO: 742613 - DNA, 33 bp, Homo sapien
tgattgtgccactgcaaaggcaacggaatgaga

SEQ ID NO: 742614 - DNA, 33 bp, Homo sapien
tgattgtgccactgcacaggcaacggaatgaga

SEQ ID NO: 742615 - DNA, 33 bp, Homo sapien
gcaaagtggaaaagaccggaatacgaaacataa

SEQ ID NO: 742616 - DNA, 33 bp, Homo sapien
gcaaagtggaaaagactggaatacgaaacataa

SEQ ID NO: 742617 - DNA, 33 bp, Homo sapien
tacagtagcattaaaaaccataacacttaggaa

SEQ ID NO: 742618 - DNA, 33 bp, Homo sapien
tacagtagcattaaaagccataacacttaggaa

SEQ ID NO: 742619 - DNA, 33 bp, Homo sapien
ccacaagaaagaaataagtttgctgagatttaa

SEQ ID NO: 742620 - DNA, 33 bp, Homo sapien
ccacaagaaagaaatatgtttgctgagatttaa

SEQ ID NO: 742621 - DNA, 33 bp, Homo sapien
aatagaaatggagacaagtggtcaaatgagatt

SEQ ID NO: 742622 - DNA, 33 bp, Homo sapien
aatagaaatggagacaggtggtcaaatgagatt

SEQ ID NO: 742623 - DNA, 33 bp, Homo sapien
gtactgagaagcagacaaactacaggccttgcc

SEQ ID NO: 742624 - DNA, 33 bp, Homo sapien
gtactgagaagcagacgaactacaggccttgcc

SEQ ID NO: 742625 - DNA, 33 bp, Homo sapien
cggggcttcagcggtacggccctagctgccctt

SEQ ID NO: 742626 - DNA, 33 bp, Homo sapien
cggggcttcagcggtatggccctagctgccctt

SEQ ID NO: 742627 - DNA, 33 bp, Homo sapien
tccctggggtgcaaccaaaagagacacatgaaa

SEQ ID NO: 742628 - DNA, 33 bp, Homo sapien
tccctggggtgcaaccgaaagagacacatgaaa

SEQ ID NO: 742629 - DNA, 33 bp, Homo sapien
ctgaaagcagctgatacaaaactgccaatgcag

SEQ ID NO: 742630 - DNA, 33 bp, Homo sapien
ctgaaagcagctgatataaaactgccaatgcag

SEQ ID NO: 742631 - DNA, 33 bp, Homo sapien
tcagatatgatgaaaagtctgtggtatttataa

SEQ ID NO: 742632 - DNA, 33 bp, Homo sapien
tcagatatgatgaaaattctgtggtatttataa

SEQ ID NO: 742633 - DNA, 33 bp, Homo sapien
acttatgatacaaaaagtaatcaaggacctcac

SEQ ID NO: 742634 - DNA, 33 bp, Homo sapien
acttatgatacaaaaattaatcaaggacctcac

SEQ ID NO: 742635 - DNA, 33 bp, Homo sapien
aggaattttctccttccattgtgggagccaaga

SEQ ID NO: 742636 - DNA, 33 bp, Homo sapien
aggaattttctccttcgattgtgggagccaaga

SEQ ID NO: 742637 - DNA, 33 bp, Homo sapien
ctactgccctgttatacgaaatttgaatctgca

SEQ ID NO: 742638 - DNA, 33 bp, Homo sapien
ctactgccctgttatatgaaatttgaatctgca

SEQ ID NO: 742639 - DNA, 33 bp, Homo sapien
agcaagaaccagtgtcaatacagctatgattaa

SEQ ID NO: 742640 - DNA, 33 bp, Homo sapien
agcaagaaccagtgtcgatacagctatgattaa

SEQ ID NO: 742641 - DNA, 33 bp, Homo sapien
ccactcataggttatacagggacccataaatat

SEQ ID NO: 742642 - DNA, 33 bp, Homo sapien
ccactcataggttatatagggacccataaatat

SEQ ID NO: 742643 - DNA, 33 bp, Homo sapien
tgttgagcagtgggaccggactttgcttataag

SEQ ID NO: 742644 - DNA, 33 bp, Homo sapien
tgttgagcagtgggactggactttgcttataag

SEQ ID NO: 742645 - DNA, 33 bp, Homo sapien
acccagaaatgctttacgatggaggacattaca

SEQ ID NO: 742646 - DNA, 33 bp, Homo sapien
acccagaaatgctttaggatggaggacattaca

SEQ ID NO: 742647 - DNA, 33 bp, Homo sapien
tgaccattaatgttgacggtcccctgtggcaga

SEQ ID NO: 742648 - DNA, 33 bp, Homo sapien
tgaccattaatgttgatggtcccctgtggcaga

SEQ ID NO: 742649 - DNA, 33 bp, Homo sapien
cttcattaagtcaacaaaagcatacaaagcatt

SEQ ID NO: 742650 - DNA, 33 bp, Homo sapien
cttcattaagtcaacagaagcatacaaagcatt

SEQ ID NO: 742651 - DNA, 33 bp, Homo sapien
agccgcatggttatacaggggcacggtggagaa

SEQ ID NO: 742652 - DNA, 33 bp, Homo sapien
agccgcatggttataccggggcacggtggagaa

SEQ ID NO: 742653 - DNA, 33 bp, Homo sapien
atcacagcaaacgcttcaagagttctcaacaat

SEQ ID NO: 742654 - DNA, 33 bp, Homo sapien
atcacagcaaacgctttaagagttctcaacaat

SEQ ID NO: 742655 - DNA, 33 bp, Homo sapien
ggaagctttcagcagcaataaagcttggatgtg

SEQ ID NO: 742656 - DNA, 33 bp, Homo sapien
ggaagctttcagcagcgataaagcttggatgtg

SEQ ID NO: 742657 - DNA, 33 bp, Homo sapien
tgacactagggaagataacccttcattgacatt

SEQ ID NO: 742658 - DNA, 33 bp, Homo sapien
tgacactagggaagatgacccttcattgacatt

SEQ ID NO: 742659 - DNA, 33 bp, Homo sapien
ctgacttttccagcacacctttgctcagaaaag

SEQ ID NO: 742660 - DNA, 33 bp, Homo sapien
ctgacttttccagcacgcctttgctcagaaaag

SEQ ID NO: 742661 - DNA, 33 bp, Homo sapien
tcttccaggcagagtaaaatatacccaaatggg

SEQ ID NO: 742662 - DNA, 33 bp, Homo sapien
tcttccaggcagagtagaatatacccaaatggg

SEQ ID NO: 742663 - DNA, 33 bp, Homo sapien
agtccaactaaatgtacccctaactcaacttgc

SEQ ID NO: 742664 - DNA, 33 bp, Homo sapien
agtccaactaaatgtatccctaactcaacttgc

SEQ ID NO: 742665 - DNA, 33 bp, Homo sapien
atgtgtgtgaatcaaacgctgctccctctgcct

SEQ ID NO: 742666 - DNA, 33 bp, Homo sapien
atgtgtgtgaatcaaatgctgctccctctgcct

SEQ ID NO: 742667 - DNA, 33 bp, Homo sapien
taagtgaaattactccagagaaaacaaacaagg

SEQ ID NO: 742668 - DNA, 33 bp, Homo sapien
taagtgaaattactccggagaaaacaaacaagg

SEQ ID NO: 742669 - DNA, 33 bp, Homo sapien
gaggaatcgaaataaaagcattacaaaccctct

SEQ ID NO: 742670 - DNA, 33 bp, Homo sapien
gaggaatcgaaataaaggcattacaaaccctct

SEQ ID NO: 742671 - DNA, 33 bp, Homo sapien
ggaccaatttagctgacctcttccttgactgag

SEQ ID NO: 742672 - DNA, 33 bp, Homo sapien
ggaccaatttagctgatctcttccttgactgag

SEQ ID NO: 742673 - DNA, 33 bp, Homo sapien
tatgaggaaactcttgcatgcgtgagaaggagg

SEQ ID NO: 742674 - DNA, 33 bp, Homo sapien
tatgaggaaactcttggatgcgtgagaaggagg

SEQ ID NO: 742675 - DNA, 33 bp, Homo sapien
cgcaaggcctaattgacagctagaacagtctga

SEQ ID NO: 742676 - DNA, 33 bp, Homo sapien
cgcaaggcctaattgatagctagaacagtctga

SEQ ID NO: 742677 - DNA, 33 bp, Homo sapien
gtcatagtgccagcaaagaccctctgaatttca

SEQ ID NO: 742678 - DNA, 33 bp, Homo sapien
gtcatagtgccagcaaggaccctctgaatttca

SEQ ID NO: 742679 - DNA, 33 bp, Homo sapien
tcagggctatcttgaaaccttaaaggtagtgtg

SEQ ID NO: 742680 - DNA, 33 bp, Homo sapien
tcagggctatcttgaatccttaaaggtagtgtg

SEQ ID NO: 742681 - DNA, 33 bp, Homo sapien
ctttgagtcccattcaatactattatagagtca

SEQ ID NO: 742682 - DNA, 33 bp, Homo sapien
ctttgagtcccattcagtactattatagagtca

SEQ ID NO: 742683 - DNA, 33 bp, Homo sapien
aaaaagttctagaaacagatagcagtgaatggt

SEQ ID NO: 742684 - DNA, 33 bp, Homo sapien
aaaaagttctagaaacggatagcagtgaatggt

SEQ ID NO: 742685 - DNA, 33 bp, Homo sapien
tttaatggaatccacacagggcagaatcagcag

SEQ ID NO: 742686 - DNA, 33 bp, Homo sapien
tttaatggaatccacatagggcagaatcagcag

SEQ ID NO: 742687 - DNA, 33 bp, Homo sapien
tgaaagcctgcttctacaaattcatctcttgtt

SEQ ID NO: 742688 - DNA, 33 bp, Homo sapien
tgaaagcctgcttctataaattcatctcttgtt

SEQ ID NO: 742689 - DNA, 33 bp, Homo sapien
gtcactgaagctttccagaaatgttttatttta

SEQ ID NO: 742690 - DNA, 33 bp, Homo sapien
gtcactgaagctttccggaaatgttttatttta

SEQ ID NO: 742691 - DNA, 33 bp, Homo sapien
caagctgggactctgaatagtaagaataactca

SEQ ID NO: 742692 - DNA, 33 bp, Homo sapien
caagctgggactctgagtagtaagaataactca

SEQ ID NO: 742693 - DNA, 33 bp, Homo sapien
ggggcgaaaattcctccatatgttgagaggaag

SEQ ID NO: 742694 - DNA, 33 bp, Homo sapien
ggggcgaaaattcctctatatgttgagaggaag

SEQ ID NO: 742695 - DNA, 33 bp, Homo sapien
ctccacgtgcactggactaaggtgataaaatag

SEQ ID NO: 742696 - DNA, 33 bp, Homo sapien
ctccacgtgcactggagtaaggtgataaaatag

SEQ ID NO: 742697 - DNA, 33 bp, Homo sapien
aagtcagagtaaataaacctgatgagtcaagtg

SEQ ID NO: 742698 - DNA, 33 bp, Homo sapien
aagtcagagtaaataatcctgatgagtcaagtg

SEQ ID NO: 742699 - DNA, 33 bp, Homo sapien
gatattttaaacaaccagattactttcaattcc

SEQ ID NO: 742700 - DNA, 33 bp, Homo sapien
gatattttaaacaaccggattactttcaattcc

SEQ ID NO: 742701 - DNA, 33 bp, Homo sapien
tctgtaaaattccaaacgacccacaatatggtt

SEQ ID NO: 742702 - DNA, 33 bp, Homo sapien
tctgtaaaattccaaatgacccacaatatggtt

SEQ ID NO: 742703 - DNA, 33 bp, Homo sapien
aaaattcattaattcaccccaacttgctaagtc

SEQ ID NO: 742704 - DNA, 33 bp, Homo sapien
aaaattcattaattcatcccaacttgctaagtc

SEQ ID NO: 742705 - DNA, 33 bp, Homo sapien
actaactttaatcaaaactaccagcactttgag

SEQ ID NO: 742706 - DNA, 33 bp, Homo sapien
actaactttaatcaaatctaccagcactttgag

SEQ ID NO: 742707 - DNA, 33 bp, Homo sapien
atagtccgttctggaaatgggcagttgagtgtc

SEQ ID NO: 742708 - DNA, 33 bp, Homo sapien
atagtccgttctggaagtgggcagttgagtgtc

SEQ ID NO: 742709 - DNA, 33 bp, Homo sapien
aactaatattcaaggcaatgagtgacacaaact

SEQ ID NO: 742710 - DNA, 33 bp, Homo sapien
aactaatattcaaggcgatgagtgacacaaact

SEQ ID NO: 742711 - DNA, 33 bp, Homo sapien
cagtattagacccccactagcaatctatgtaaa

SEQ ID NO: 742712 - DNA, 33 bp, Homo sapien
cagtattagacccccagtagcaatctatgtaaa

SEQ ID NO: 742713 - DNA, 33 bp, Homo sapien
tatcctgggggcgcaaaacacagcaaagaatca

SEQ ID NO: 742714 - DNA, 33 bp, Homo sapien
tatcctgggggcgcaacacacagcaaagaatca

SEQ ID NO: 742715 - DNA, 33 bp, Homo sapien
cgactatgcatggagaaacttttaggcagaacc

SEQ ID NO: 742716 - DNA, 33 bp, Homo sapien
cgactatgcatggagacacttttaggcagaacc

SEQ ID NO: 742717 - DNA, 33 bp, Homo sapien
ttggtgttctatgccacggttttggaaaaatgt

SEQ ID NO: 742718 - DNA, 33 bp, Homo sapien
ttggtgttctatgccatggttttggaaaaatgt

SEQ ID NO: 742719 - DNA, 33 bp, Homo sapien
ctgaattgaaaaatgcaataaactctgttctcg

SEQ ID NO: 742720 - DNA, 33 bp, Homo sapien
ctgaattgaaaaatgcgataaactctgttctcg

SEQ ID NO: 742721 - DNA, 33 bp, Homo sapien
caaagtagaagagagacgattgtatttaactga

SEQ ID NO: 742722 - DNA, 33 bp, Homo sapien
caaagtagaagagagatgattgtatttaactga

SEQ ID NO: 742723 - DNA, 33 bp, Homo sapien
tttatttattgagaagaaatcttgttctgtcgc

SEQ ID NO: 742724 - DNA, 33 bp, Homo sapien
tttatttattgagaaggaatcttgttctgtcgc

SEQ ID NO: 742725 - DNA, 33 bp, Homo sapien
ttgttttgcattgataccactgtttgaaaaagt

SEQ ID NO: 742726 - DNA, 33 bp, Homo sapien
ttgttttgcattgatatcactgtttgaaaaagt

SEQ ID NO: 742727 - DNA, 33 bp, Homo sapien
tttctaaagttaccaaaccttcctagcatgttg

SEQ ID NO: 742728 - DNA, 33 bp, Homo sapien
tttctaaagttaccaagccttcctagcatgttg

SEQ ID NO: 742729 - DNA, 33 bp, Homo sapien
atgtggttagacactcaaacttacaaggatgtg

SEQ ID NO: 742730 - DNA, 33 bp, Homo sapien
atgtggttagacactccaacttacaaggatgtg

SEQ ID NO: 742731 - DNA, 33 bp, Homo sapien
actgctgatacctgtcaatggcctaagaaatgt

SEQ ID NO: 742732 - DNA, 33 bp, Homo sapien
actgctgatacctgtctatggcctaagaaatgt

SEQ ID NO: 742733 - DNA, 33 bp, Homo sapien
atgcatctaaataggccagcttaaaaatacaca

SEQ ID NO: 742734 - DNA, 33 bp, Homo sapien
atgcatctaaataggcgagcttaaaaatacaca

SEQ ID NO: 742735 - DNA, 33 bp, Homo sapien
tatgatgtaaagttaaaaatactgaaatactgt

SEQ ID NO: 742736 - DNA, 33 bp, Homo sapien
tatgatgtaaagttaacaatactgaaatactgt

SEQ ID NO: 742737 - DNA, 33 bp, Homo sapien
aacactctactgtagaacctatttactgagtgc

SEQ ID NO: 742738 - DNA, 33 bp, Homo sapien
aacactctactgtagaccctatttactgagtgc

SEQ ID NO: 742739 - DNA, 33 bp, Homo sapien
cacgtataatgagatgccactgcaagagatcat

SEQ ID NO: 742740 - DNA, 33 bp, Homo sapien
cacgtataatgagatgtcactgcaagagatcat

SEQ ID NO: 742741 - DNA, 33 bp, Homo sapien
tgcttttttcctcacacgctaatctggaaccta

SEQ ID NO: 742742 - DNA, 33 bp, Homo sapien
tgcttttttcctcacatgctaatctggaaccta

SEQ ID NO: 742743 - DNA, 33 bp, Homo sapien
aacatgtgattggaaaatgctgagacgtttgga

SEQ ID NO: 742744 - DNA, 33 bp, Homo sapien
aacatgtgattggaaagtgctgagacgtttgga

SEQ ID NO: 742745 - DNA, 33 bp, Homo sapien
ccaaatctttagcacccgctgaataaattatcg

SEQ ID NO: 742746 - DNA, 33 bp, Homo sapien
ccaaatctttagcacctgctgaataaattatcg

SEQ ID NO: 742747 - DNA, 33 bp, Homo sapien
gtcctggcgctgttgaactttatgagatgacta

SEQ ID NO: 742748 - DNA, 33 bp, Homo sapien
gtcctggcgctgttgagctttatgagatgacta

SEQ ID NO: 742749 - DNA, 33 bp, Homo sapien
aacaatatctgtcgatcactgtgaagagtctga

SEQ ID NO: 742750 - DNA, 33 bp, Homo sapien
aacaatatctgtcgatgactgtgaagagtctga

SEQ ID NO: 742751 - DNA, 33 bp, Homo sapien
cctaatttatctagacaaagatgtgggtgaagt

SEQ ID NO: 742752 - DNA, 33 bp, Homo sapien
cctaatttatctagacgaagatgtgggtgaagt

SEQ ID NO: 742753 - DNA, 33 bp, Homo sapien
gtctcaaatgggacccgaagaagtctggattct

SEQ ID NO: 742754 - DNA, 33 bp, Homo sapien
gtctcaaatgggaccctaagaagtctggattct

SEQ ID NO: 742755 - DNA, 33 bp, Homo sapien
ccaggagtttacagagacaacaccctgtgaaat

SEQ ID NO: 742756 - DNA, 33 bp, Homo sapien
ccaggagtttacagaggcaacaccctgtgaaat

SEQ ID NO: 742757 - DNA, 33 bp, Homo sapien
atgggtaatgatgatgcacctaagaaatagctg

SEQ ID NO: 742758 - DNA, 33 bp, Homo sapien
atgggtaatgatgatgtacctaagaaatagctg

SEQ ID NO: 742759 - DNA, 33 bp, Homo sapien
agggtatagtgtaagaaaattagcacaaatctc

SEQ ID NO: 742760 - DNA, 33 bp, Homo sapien
agggtatagtgtaagacaattagcacaaatctc

SEQ ID NO: 742761 - DNA, 33 bp, Homo sapien
aaaaaagaaaaatgacccagctatatgccacct

SEQ ID NO: 742762 - DNA, 33 bp, Homo sapien
aaaaaagaaaaatgactcagctatatgccacct

SEQ ID NO: 742763 - DNA, 33 bp, Homo sapien
aagatcatgtctgcaaacaagaactatttgact

SEQ ID NO: 742764 - DNA, 33 bp, Homo sapien
aagatcatgtctgcaagcaagaactatttgact

SEQ ID NO: 742765 - DNA, 33 bp, Homo sapien
tatgggattctccaatgaggatggtccttgacc

SEQ ID NO: 742766 - DNA, 33 bp, Homo sapien
tatgggattctccaattaggatggtccttgacc

SEQ ID NO: 742767 - DNA, 33 bp, Homo sapien
gactaatttttcgatacagtattcctggttctg

SEQ ID NO: 742768 - DNA, 33 bp, Homo sapien
gactaatttttcgatatagtattcctggttctg

SEQ ID NO: 742769 - DNA, 33 bp, Homo sapien
gctctgtttacatctacacattttgaagatgaa

SEQ ID NO: 742770 - DNA, 33 bp, Homo sapien
gctctgtttacatctatacattttgaagatgaa

SEQ ID NO: 742771 - DNA, 33 bp, Homo sapien
gcagcagggagctaacaaatgttttaagcagtg

SEQ ID NO: 742772 - DNA, 33 bp, Homo sapien
gcagcagggagctaacgaatgttttaagcagtg

SEQ ID NO: 742773 - DNA, 33 bp, Homo sapien
ttttagccgatgtataaaatttcattacataaa

SEQ ID NO: 742774 - DNA, 33 bp, Homo sapien
ttttagccgatgtatacaatttcattacataaa

SEQ ID NO: 742775 - DNA, 33 bp, Homo sapien
ttacttctactcaatacgtaggcacttcttaaa

SEQ ID NO: 742776 - DNA, 33 bp, Homo sapien
ttacttctactcaatatgtaggcacttcttaaa

SEQ ID NO: 742777 - DNA, 33 bp, Homo sapien
acacaaacctagtcagcatagctaactacatac

SEQ ID NO: 742778 - DNA, 33 bp, Homo sapien
acacaaacctagtcagtatagctaactacatac

SEQ ID NO: 742779 - DNA, 33 bp, Homo sapien
ggaattccctgataccacctttgaaaactggga

SEQ ID NO: 742780 - DNA, 33 bp, Homo sapien
ggaattccctgataccgcctttgaaaactggga

SEQ ID NO: 742781 - DNA, 33 bp, Homo sapien
atgtgatagatagacaaggctatgaaacaacta

SEQ ID NO: 742782 - DNA, 33 bp, Homo sapien
atgtgatagatagacagggctatgaaacaacta

SEQ ID NO: 742783 - DNA, 33 bp, Homo sapien
tctgtgagatttgaaacatgactactaaggcac

SEQ ID NO: 742784 - DNA, 33 bp, Homo sapien
tctgtgagatttgaaagatgactactaaggcac

SEQ ID NO: 742785 - DNA, 33 bp, Homo sapien
ggagtgggacaaaaaaatgatctgctttatgaa

SEQ ID NO: 742786 - DNA, 33 bp, Homo sapien
ggagtgggacaaaaaactgatctgctttatgaa

SEQ ID NO: 742787 - DNA, 33 bp, Homo sapien
ctcaccaaagtaaactaacagcataaagatata

SEQ ID NO: 742788 - DNA, 33 bp, Homo sapien
ctcaccaaagtaaactgacagcataaagatata

SEQ ID NO: 742789 - DNA, 33 bp, Homo sapien
ggcagtcaatgccatacgaaaccttgtagacca

SEQ ID NO: 742790 - DNA, 33 bp, Homo sapien
ggcagtcaatgccatatgaaaccttgtagacca

SEQ ID NO: 742791 - DNA, 33 bp, Homo sapien
ataagtctgtgcaaccagaaccatttttccata

SEQ ID NO: 742792 - DNA, 33 bp, Homo sapien
ataagtctgtgcaaccggaaccatttttccata

SEQ ID NO: 742793 - DNA, 33 bp, Homo sapien
aggtggacatggagtaaatgtcagtagggctcc

SEQ ID NO: 742794 - DNA, 33 bp, Homo sapien
aggtggacatggagtagatgtcagtagggctcc

SEQ ID NO: 742795 - DNA, 33 bp, Homo sapien
atctgtggtcccaaaactgcttattgtcttgtg

SEQ ID NO: 742796 - DNA, 33 bp, Homo sapien
atctgtggtcccaaaattgcttattgtcttgtg

SEQ ID NO: 742797 - DNA, 33 bp, Homo sapien
gatccattagaggaacaattatctatggctaca

SEQ ID NO: 742798 - DNA, 33 bp, Homo sapien
gatccattagaggaaccattatctatggctaca

SEQ ID NO: 742799 - DNA, 33 bp, Homo sapien
ctagtttctgatcccactatgactgaaaatttt

SEQ ID NO: 742800 - DNA, 33 bp, Homo sapien
ctagtttctgatcccattatgactgaaaatttt

SEQ ID NO: 742801 - DNA, 33 bp, Homo sapien
tctggaaaatataaaacggttgccaaggtgttg

SEQ ID NO: 742802 - DNA, 33 bp, Homo sapien
tctggaaaatataaaatggttgccaaggtgttg

SEQ ID NO: 742803 - DNA, 33 bp, Homo sapien
caaactgtattgctaaatcttgaaaaattttat

SEQ ID NO: 742804 - DNA, 33 bp, Homo sapien
caaactgtattgctaagtcttgaaaaattttat

SEQ ID NO: 742805 - DNA, 33 bp, Homo sapien
agcaaaggcaattcaaagaaacaaatatagtct

SEQ ID NO: 742806 - DNA, 33 bp, Homo sapien
agcaaaggcaattcaaggaaacaaatatagtct

SEQ ID NO: 742807 - DNA, 33 bp, Homo sapien
tgagaaaggaaggttacagacttacacatatgc

SEQ ID NO: 742808 - DNA, 33 bp, Homo sapien
tgagaaaggaaggttatagacttacacatatgc

SEQ ID NO: 742809 - DNA, 33 bp, Homo sapien
cattatgctttattatcaattacaaagtatact

SEQ ID NO: 742810 - DNA, 33 bp, Homo sapien
cattatgctttattatgaattacaaagtatact

SEQ ID NO: 742811 - DNA, 33 bp, Homo sapien
ggtaaacaagtgacaacagagaaattccaaagt

SEQ ID NO: 742812 - DNA, 33 bp, Homo sapien
ggtaaacaagtgacaatagagaaattccaaagt

SEQ ID NO: 742813 - DNA, 33 bp, Homo sapien
ctgtgtgatcttagagaaacagcttagtatttt

SEQ ID NO: 742814 - DNA, 33 bp, Homo sapien
ctgtgtgatcttagaggaacagcttagtatttt

SEQ ID NO: 742815 - DNA, 33 bp, Homo sapien
aagaattagatatgtaggtacagaatcaatttc

SEQ ID NO: 742816 - DNA, 33 bp, Homo sapien
aagaattagatatgtatgtacagaatcaatttc

SEQ ID NO: 742817 - DNA, 33 bp, Homo sapien
ttgatatagattgcttcaaaaatcttgtgaaat

SEQ ID NO: 742818 - DNA, 33 bp, Homo sapien
ttgatatagattgctttaaaaatcttgtgaaat

SEQ ID NO: 742819 - DNA, 33 bp, Homo sapien
aagctgacaaacatcacgaatgctaactgcttg

SEQ ID NO: 742820 - DNA, 33 bp, Homo sapien
aagctgacaaacatcatgaatgctaactgcttg

SEQ ID NO: 742821 - DNA, 33 bp, Homo sapien
gtcaaatcatggaaacagaaatctaagattaca

SEQ ID NO: 742822 - DNA, 33 bp, Homo sapien
gtcaaatcatggaaacggaaatctaagattaca

SEQ ID NO: 742823 - DNA, 33 bp, Homo sapien
gattatgtatgccagaaaccatgactttaagtt

SEQ ID NO: 742824 - DNA, 33 bp, Homo sapien
gattatgtatgccagagaccatgactttaagtt

SEQ ID NO: 742825 - DNA, 33 bp, Homo sapien
aggcctgcctgtccaaattcttctgcctgtctg

SEQ ID NO: 742826 - DNA, 33 bp, Homo sapien
aggcctgcctgtccaacttcttctgcctgtctg

SEQ ID NO: 742827 - DNA, 33 bp, Homo sapien
aaatgtcagagtacaacagttgggtcatacagt

SEQ ID NO: 742828 - DNA, 33 bp, Homo sapien
aaatgtcagagtacaatagttgggtcatacagt

SEQ ID NO: 742829 - DNA, 33 bp, Homo sapien
actgcgcctggtctaacgtgacatattttgcta

SEQ ID NO: 742830 - DNA, 33 bp, Homo sapien
actgcgcctggtctaatgtgacatattttgcta

SEQ ID NO: 742831 - DNA, 33 bp, Homo sapien
ggactaccagcgcgggaaatgtagggaaggaag

SEQ ID NO: 742832 - DNA, 33 bp, Homo sapien
ggactaccagcgcgggcaatgtagggaaggaag

SEQ ID NO: 742833 - DNA, 33 bp, Homo sapien
atttcttagtgctgtgcagcctctagctaatgt

SEQ ID NO: 742834 - DNA, 33 bp, Homo sapien
atttcttagtgctgtgtagcctctagctaatgt

SEQ ID NO: 742835 - DNA, 33 bp, Homo sapien
ggcacagtgtaagaacaacaaatgtcaaactat

SEQ ID NO: 742836 - DNA, 33 bp, Homo sapien
ggcacagtgtaagaacgacaaatgtcaaactat

SEQ ID NO: 742837 - DNA, 33 bp, Homo sapien
gaaggcccaattagcaagtataaagttggaatg

SEQ ID NO: 742838 - DNA, 33 bp, Homo sapien
gaaggcccaattagcacgtataaagttggaatg

SEQ ID NO: 742839 - DNA, 33 bp, Homo sapien
gaatagaagccaccagaagtcatcttaatgaaa

SEQ ID NO: 742840 - DNA, 33 bp, Homo sapien
gaatagaagccaccaggagtcatcttaatgaaa

SEQ ID NO: 742841 - DNA, 33 bp, Homo sapien
ttgtcagtcattctccaaatcaaaatgcatcag

SEQ ID NO: 742842 - DNA, 33 bp, Homo sapien
ttgtcagtcattctccgaatcaaaatgcatcag

SEQ ID NO: 742843 - DNA, 33 bp, Homo sapien
ttaggggtttctgcaacaagcctgatgaagaac

SEQ ID NO: 742844 - DNA, 33 bp, Homo sapien
ttaggggtttctgcaataagcctgatgaagaac

SEQ ID NO: 742845 - DNA, 33 bp, Homo sapien
gttgcttgatggagtgcaccaagtaaaaaagat

SEQ ID NO: 742846 - DNA, 33 bp, Homo sapien
gttgcttgatggagtgtaccaagtaaaaaagat

SEQ ID NO: 742847 - DNA, 33 bp, Homo sapien
gctcaaaaacctaccaaggctcgtcagttcata

SEQ ID NO: 742848 - DNA, 33 bp, Homo sapien
gctcaaaaacctaccagggctcgtcagttcata

SEQ ID NO: 742849 - DNA, 33 bp, Homo sapien
gaatctttaaagcttacgtaaatgcatgatgac

SEQ ID NO: 742850 - DNA, 33 bp, Homo sapien
gaatctttaaagcttatgtaaatgcatgatgac

SEQ ID NO: 742851 - DNA, 33 bp, Homo sapien
gagaggaagactggttaaaacattaacaattat

SEQ ID NO: 742852 - DNA, 33 bp, Homo sapien
gagaggaagactggttgaaacattaacaattat

SEQ ID NO: 742853 - DNA, 33 bp, Homo sapien; identical to SEQ ID NO: 742851

SEQ ID NO: 742854 - DNA, 33 bp, Homo sapien; identical to SEQ ID NO: 742852

SEQ ID NO: 742855 - DNA, 33 bp, Homo sapien
ataaccagtttgtcaacgagtcactcttttttt

SEQ ID NO: 742856 - DNA, 33 bp, Homo sapien
ataaccagtttgtcaatgagtcactcttttttt

SEQ ID NO: 742857 - DNA, 33 bp, Homo sapien
atgcagtattcctaccactacaatgtaatcatc

SEQ ID NO: 742858 - DNA, 33 bp, Homo sapien
atgcagtattcctaccgctacaatgtaatcatc

SEQ ID NO: 742859 - DNA, 33 bp, Homo sapien
tactcatctctaggacaaccacaatacaggttc

SEQ ID NO: 742860 - DNA, 33 bp, Homo sapien
tactcatctctaggaccaccacaatacaggttc

SEQ ID NO: 742861 - DNA, 33 bp, Homo sapien
aaaaacactggaaacaaagaaaagatcctaaag

SEQ ID NO: 742862 - DNA, 33 bp, Homo sapien
aaaaacactggaaacagagaaaagatcctaaag

SEQ ID NO: 742863 - DNA, 33 bp, Homo sapien
tttgagaacctcgaaccgtgccatccttacatt

SEQ ID NO: 742864 - DNA, 33 bp, Homo sapien
tttgagaacctcgaactgtgccatccttacatt

SEQ ID NO: 742865 - DNA, 33 bp, Homo sapien
ggcttcacagacaggaataaacttagtgtcata

SEQ ID NO: 742866 - DNA, 33 bp, Homo sapien
ggcttcacagacaggagtaaacttagtgtcata

SEQ ID NO: 742867 - DNA, 33 bp, Homo sapien
aattatgaaatcttgcagagaagttattttctt

SEQ ID NO: 742868 - DNA, 33 bp, Homo sapien
aattatgaaatcttgcggagaagttattttctt

SEQ ID NO: 742869 - DNA, 33 bp, Homo sapien; identical to SEQ ID NO: 742867

SEQ ID NO: 742870 - DNA, 33 bp, Homo sapien; identical to SEQ ID NO: 742868

SEQ ID NO: 742871 - DNA, 33 bp, Homo sapien
gtgaaagatactgcgcaatgacttctctgaaaa

SEQ ID NO: 742872 - DNA, 33 bp, Homo sapien
gtgaaagatactgcgcgatgacttctctgaaaa

SEQ ID NO: 742873 - DNA, 33 bp, Homo sapien
ccaagggatgaattgacatttgttaagcagtag

SEQ ID NO: 742874 - DNA, 33 bp, Homo sapien
ccaagggatgaattgatatttgttaagcagtag

SEQ ID NO: 742875 - DNA, 33 bp, Homo sapien
ggcagaatatcttgaaagagagattgtttacag

SEQ ID NO: 742876 - DNA, 33 bp, Homo sapien
ggcagaatatcttgaaggagagattgtttacag

SEQ ID NO: 742877 - DNA, 33 bp, Homo sapien
tctcacaggttaagaacggtatcccacaagact

SEQ ID NO: 742878 - DNA, 33 bp, Homo sapien
tctcacaggttaagaatggtatcccacaagact

SEQ ID NO: 742879 - DNA, 33 bp, Homo sapien
gcaaacaaaaagacccagccccacagtgtccac

SEQ ID NO: 742880 - DNA, 33 bp, Homo sapien
gcaaacaaaaagacccggccccacagtgtccac

SEQ ID NO: 742881 - DNA, 33 bp, Homo sapien
aatgcgatagtattaagaggccgttaggaagtg

SEQ ID NO: 742882 - DNA, 33 bp, Homo sapien
aatgcgatagtattaataggccgttaggaagtg

SEQ ID NO: 742883 - DNA, 33 bp, Homo sapien
gtgagaatcttaatccagagccatctaaccaag

SEQ ID NO: 742884 - DNA, 33 bp, Homo sapien
gtgagaatcttaatccggagccatctaaccaag

SEQ ID NO: 742885 - DNA, 33 bp, Homo sapien
gcattgtccagggaccaaagtgactatctagga

SEQ ID NO: 742886 - DNA, 33 bp, Homo sapien
gcattgtccagggaccgaagtgactatctagga

SEQ ID NO: 742887 - DNA, 33 bp, Homo sapien
ccttagcttggaacacagtgcttttatttattt

SEQ ID NO: 742888 - DNA, 33 bp, Homo sapien
ccttagcttggaacacggtgcttttatttattt

SEQ ID NO: 742889 - DNA, 33 bp, Homo sapien
attgaacagttggctgaatacaaacattttacc

SEQ ID NO: 742890 - DNA, 33 bp, Homo sapien
attgaacagttggctgcatacaaacattttacc

SEQ ID NO: 742891 - DNA, 33 bp, Homo sapien
ggacttggaatccaagaaaagccatttaggttt

SEQ ID NO: 742892 - DNA, 33 bp, Homo sapien
ggacttggaatccaaggaaagccatttaggttt

SEQ ID NO: 742893 - DNA, 33 bp, Homo sapien
tggaatggctgcttacacgtcagtatcctgctg

SEQ ID NO: 742894 - DNA, 33 bp, Homo sapien
tggaatggctgcttactcgtcagtatcctgctg

SEQ ID NO: 742895 - DNA, 33 bp, Homo sapien
attgtctgggagaaaccggtgaatgggccacat

SEQ ID NO: 742896 - DNA, 33 bp, Homo sapien
attgtctgggagaaacgggtgaatgggccacat

SEQ ID NO: 742897 - DNA, 33 bp, Homo sapien
actttgtatatattgcacagaaagaacattcaa

SEQ ID NO: 742898 - DNA, 33 bp, Homo sapien
actttgtatatattgcgcagaaagaacattcaa

SEQ ID NO: 742899 - DNA, 33 bp, Homo sapien
aaactagcctggcagacctgtgatgtggcttgc

SEQ ID NO: 742900 - DNA, 33 bp, Homo sapien
aaactagcctggcagagctgtgatgtggcttgc

SEQ ID NO: 742901 - DNA, 33 bp, Homo sapien
aaagtttcccattggaataggctgtttaagctc

SEQ ID NO: 742902 - DNA, 33 bp, Homo sapien
aaagtttcccattggagtaggctgtttaagctc

SEQ ID NO: 742903 - DNA, 33 bp, Homo sapien
actgctatcgtagctacgacttaactacaacct

SEQ ID NO: 742904 - DNA, 33 bp, Homo sapien
actgctatcgtagctatgacttaactacaacct

SEQ ID NO: 742905 - DNA, 33 bp, Homo sapien
gactggttttcaatgacagtacttactggacaa

SEQ ID NO: 742906 - DNA, 33 bp, Homo sapien
gactggttttcaatgatagtacttactggacaa

SEQ ID NO: 742907 - DNA, 33 bp, Homo sapien
tcatgatgctgaagaacgaaggaaaagcaatat

SEQ ID NO: 742908 - DNA, 33 bp, Homo sapien
tcatgatgctgaagaatgaaggaaaagcaatat

SEQ ID NO: 742909 - DNA, 33 bp, Homo sapien
tcatctgctagccaaacaaagtggttaaaaatc

SEQ ID NO: 742910 - DNA, 33 bp, Homo sapien
tcatctgctagccaaataaagtggttaaaaatc

SEQ ID NO: 742911 - DNA, 33 bp, Homo sapien
aaaagtggcattaagccagataagcctggtcaa

SEQ ID NO: 742912 - DNA, 33 bp, Homo sapien
aaaagtggcattaagctagataagcctggtcaa

SEQ ID NO: 742913 - DNA, 33 bp, Homo sapien
tattcaacacatataaagtaccacggttgttat

SEQ ID NO: 742914 - DNA, 33 bp, Homo sapien
tattcaacacatataatgtaccacggttgttat

SEQ ID NO: 742915 - DNA, 33 bp, Homo sapien
tttgttgactaaaccaatatcttctttgacatg

SEQ ID NO: 742916 - DNA, 33 bp, Homo sapien
tttgttgactaaaccagtatcttctttgacatg

SEQ ID NO: 742917 - DNA, 33 bp, Homo sapien
tgctcttttcaacatccatgtcaggttggaaga

SEQ ID NO: 742918 - DNA, 33 bp, Homo sapien
tgctcttttcaacatctatgtcaggttggaaga

SEQ ID NO: 742919 - DNA, 33 bp, Homo sapien
ctgaagagttagactacgaccagataatgagca

SEQ ID NO: 742920 - DNA, 33 bp, Homo sapien
ctgaagagttagactaggaccagataatgagca

SEQ ID NO: 742921 - DNA, 33 bp, Homo sapien
atgcacaaagtgaccccagtagatatggagtta

SEQ ID NO: 742922 - DNA, 33 bp, Homo sapien
atgcacaaagtgaccctagtagatatggagtta

SEQ ID NO: 742923 - DNA, 33 bp, Homo sapien
ataaacttggggtgaacgttgatgcggccctaa

SEQ ID NO: 742924 - DNA, 33 bp, Homo sapien
ataaacttggggtgaatgttgatgcggccctaa

SEQ ID NO: 742925 - DNA, 33 bp, Homo sapien
tttttctttgcttcccagatattagcagggaag

SEQ ID NO: 742926 - DNA, 33 bp, Homo sapien
tttttctttgcttcccggatattagcagggaag

SEQ ID NO: 742927 - DNA, 33 bp, Homo sapien
cctacggtaatatctccgaaaccatgtggtctt

SEQ ID NO: 742928 - DNA, 33 bp, Homo sapien
cctacggtaatatctctgaaaccatgtggtctt

SEQ ID NO: 742929 - DNA, 33 bp, Homo sapien
ggcaactggcttgtcagagggaaccaagaggca

SEQ ID NO: 742930 - DNA, 33 bp, Homo sapien
ggcaactggcttgtcatagggaaccaagaggca

SEQ ID NO: 742931 - DNA, 33 bp, Homo sapien
tattgaaggcagtctaccttgatgaggattgca

SEQ ID NO: 742932 - DNA, 33 bp, Homo sapien
tattgaaggcagtctagcttgatgaggattgca

SEQ ID NO: 742933 - DNA, 33 bp, Homo sapien
aacttttctgcaacccaaaaacatacaatgcta

SEQ ID NO: 742934 - DNA, 33 bp, Homo sapien
aacttttctgcaacccgaaaacatacaatgcta

SEQ ID NO: 742935 - DNA, 33 bp, Homo sapien
tattgcttcatagagcgcaaaaatggattcagg

SEQ ID NO: 742936 - DNA, 33 bp, Homo sapien
tattgcttcatagagctcaaaaatggattcagg

SEQ ID NO: 742937 - DNA, 33 bp, Homo sapien
gaaggcatggctatagaattagaatgaaatgga

SEQ ID NO: 742938 - DNA, 33 bp, Homo sapien
gaaggcatggctataggattagaatgaaatgga

SEQ ID NO: 742939 - DNA, 33 bp, Homo sapien
gctcacagggtagaaaattctagtccttctcat

SEQ ID NO: 742940 - DNA, 33 bp, Homo sapien
gctcacagggtagaaacttctagtccttctcat

SEQ ID NO: 742941 - DNA, 33 bp, Homo sapien
taacactacacaattaataagtgcgtattgtac

SEQ ID NO: 742942 - DNA, 33 bp, Homo sapien
taacactacacaattagtaagtgcgtattgtac

SEQ ID NO: 742943 - DNA, 33 bp, Homo sapien
tccctaaaacggatcacaatgcacatcagaggg

SEQ ID NO: 742944 - DNA, 33 bp, Homo sapien
tccctaaaacggatcataatgcacatcagaggg

SEQ ID NO: 742945 - DNA, 33 bp, Homo sapien
accagcttaggttgaacatagactctaataagg

SEQ ID NO: 742946 - DNA, 33 bp, Homo sapien
accagcttaggttgaatatagactctaataagg

SEQ ID NO: 742947 - DNA, 33 bp, Homo sapien
ttcaaggtcctcaaaaatgttttgaaatggaga

SEQ ID NO: 742948 - DNA, 33 bp, Homo sapien
ttcaaggtcctcaaaagtgttttgaaatggaga

SEQ ID NO: 742949 - DNA, 33 bp, Homo sapien
gctaatgagactgaaagaaagttgttgtgggtt

SEQ ID NO: 742950 - DNA, 33 bp, Homo sapien
gctaatgagactgaaataaagttgttgtgggtt

SEQ ID NO: 742951 - DNA, 33 bp, Homo sapien
cagagcggccagtccaatctttctcttggggca

SEQ ID NO: 742952 - DNA, 33 bp, Homo sapien
cagagcggccagtccagtctttctcttggggca

SEQ ID NO: 742953 - DNA, 33 bp, Homo sapien
taaaattaaccactggcattttaaggccatttc

SEQ ID NO: 742954 - DNA, 33 bp, Homo sapien
taaaattaaccactggtattttaaggccatttc

SEQ ID NO: 742955 - DNA, 33 bp, Homo sapien
tcaggatcacctggtggatgaagtttccattcc

SEQ ID NO: 742956 - DNA, 33 bp, Homo sapien
tcaggatcacctggtgtatgaagtttccattcc

SEQ ID NO: 742957 - DNA, 33 bp, Homo sapien
attcatccaaaacagacatagtgccatccttca

SEQ ID NO: 742958 - DNA, 33 bp, Homo sapien
attcatccaaaacagatatagtgccatccttca

SEQ ID NO: 742959 - DNA, 33 bp, Homo sapien
tgctctagaagttagacctagagacagactgcc

SEQ ID NO: 742960 - DNA, 33 bp, Homo sapien
tgctctagaagttagagctagagacagactgcc

SEQ ID NO: 742961 - DNA, 33 bp, Homo sapien
acctgtctgctgcaaagaatttgtgattaaaaa

SEQ ID NO: 742962 - DNA, 33 bp, Homo sapien
acctgtctgctgcaaataatttgtgattaaaaa

SEQ ID NO: 742963 - DNA, 33 bp, Homo sapien
aagagactttccaaaaagcacatttctcttatt

SEQ ID NO: 742964 - DNA, 33 bp, Homo sapien
aagagactttccaaaaggcacatttctcttatt

SEQ ID NO: 742965 - DNA, 33 bp, Homo sapien
tagctcagtccttaaacatctctccttagtcta

SEQ ID NO: 742966 - DNA, 33 bp, Homo sapien
tagctcagtccttaaagatctctccttagtcta

SEQ ID NO: 742967 - DNA, 33 bp, Homo sapien
ggtagtcctgcctccccattttgtctctgcctg

SEQ ID NO: 742968 - DNA, 33 bp, Homo sapien
ggtagtcctgcctcccgattttgtctctgcctg

SEQ ID NO: 742969 - DNA, 33 bp, Homo sapien
tgtgatagttttaacaagtggggtctctagagg

SEQ ID NO: 742970 - DNA, 33 bp, Homo sapien
tgtgatagttttaacaggtggggtctctagagg

SEQ ID NO: 742971 - DNA, 33 bp, Homo sapien
ctgcacctatgattaccacccaggatatgagga

SEQ ID NO: 742972 - DNA, 33 bp, Homo sapien
ctgcacctatgattactacccaggatatgagga

SEQ ID NO: 742973 - DNA, 33 bp, Homo sapien
ccgttgtaagggctaacgatcaaggtgatttac

SEQ ID NO: 742974 - DNA, 33 bp, Homo sapien
ccgttgtaagggctaatgatcaaggtgatttac

SEQ ID NO: 742975 - DNA, 33 bp, Homo sapien
tctggatctgaaccgcaaagtttaacaactcta

SEQ ID NO: 742976 - DNA, 33 bp, Homo sapien
tctggatctgaaccgcgaagtttaacaactcta

SEQ ID NO: 742977 - DNA, 33 bp, Homo sapien
aatagactcaagtttaccattacagctcattgt

SEQ ID NO: 742978 - DNA, 33 bp, Homo sapien
aatagactcaagtttatcattacagctcattgt

SEQ ID NO: 742979 - DNA, 33 bp, Homo sapien
gtggcaggactttccaatgatatctggctgctg

SEQ ID NO: 742980 - DNA, 33 bp, Homo sapien
gtggcaggactttccagtgatatctggctgctg

SEQ ID NO: 742981 - DNA, 33 bp, Homo sapien
ctgtccatttcccggcaagggctgtccactatt

SEQ ID NO: 742982 - DNA, 33 bp, Homo sapien
ctgtccatttcccggccagggctgtccactatt

SEQ ID NO: 742983 - DNA, 33 bp, Homo sapien
ccaggcacactactgcagaaatggctagggctt

SEQ ID NO: 742984 - DNA, 33 bp, Homo sapien
ccaggcacactactgcggaaatggctagggctt

SEQ ID NO: 742985 - DNA, 33 bp, Homo sapien
tctagcaatctgggaacttagttttttgccagt

SEQ ID NO: 742986 - DNA, 33 bp, Homo sapien
tctagcaatctgggaatttagttttttgccagt

SEQ ID NO: 742987 - DNA, 33 bp, Homo sapien
ctaaagactcttctaacgctctgagtcaataat

SEQ ID NO: 742988 - DNA, 33 bp, Homo sapien
ctaaagactcttctaatgctctgagtcaataat

SEQ ID NO: 742989 - DNA, 33 bp, Homo sapien
ccacaaaccagactcaagaccaagaaagattcc

SEQ ID NO: 742990 - DNA, 33 bp, Homo sapien
ccacaaaccagactcaggaccaagaaagattcc

SEQ ID NO: 742991 - DNA, 33 bp, Homo sapien
ccttggacatctaagccattgccacagagaaat

SEQ ID NO: 742992 - DNA, 33 bp, Homo sapien
ccttggacatctaagctattgccacagagaaat

SEQ ID NO: 742993 - DNA, 33 bp, Homo sapien
tcagtcttatcacaaaaaagtagtttgaggaag

SEQ ID NO: 742994 - DNA, 33 bp, Homo sapien
tcagtcttatcacaaataagtagtttgaggaag

SEQ ID NO: 742995 - DNA, 33 bp, Homo sapien
aaatatgcaacttaaaacactttttcatgatgc

SEQ ID NO: 742996 - DNA, 33 bp, Homo sapien
aaatatgcaacttaaagcactttttcatgatgc

SEQ ID NO: 742997 - DNA, 33 bp, Homo sapien
agagctaggtggttggcacatctaattgtcaac

SEQ ID NO: 742998 - DNA, 33 bp, Homo sapien
agagctaggtggttggtacatctaattgtcaac

SEQ ID NO: 742999 - DNA, 33 bp, Homo sapien
tttagaaaacaggtcagaaatagctataggaga

SEQ ID NO: 743000 - DNA, 33 bp, Homo sapien
tttagaaaacaggtcataaatagctataggaga

SEQ ID NO: 743001 - DNA, 33 bp, Homo sapien
cctcctctggacttgaacaaattagtgattgag

SEQ ID NO: 743002 - DNA, 33 bp, Homo sapien
cctcctctggacttgagcaaattagtgattgag

SEQ ID NO: 743003 - DNA, 33 bp, Homo sapien
cattcagctctacatcaaaggtgtgggtaggca

SEQ ID NO: 743004 - DNA, 33 bp, Homo sapien
cattcagctctacatcgaaggtgtgggtaggca

SEQ ID NO: 743005 - DNA, 33 bp, Homo sapien
ttaccagctgtgtctacactatgtcaaaatgtc

SEQ ID NO: 743006 - DNA, 33 bp, Homo sapien
ttaccagctgtgtctatactatgtcaaaatgtc

SEQ ID NO: 743007 - DNA, 33 bp, Homo sapien
gcaataagatgtgtaccagttctccattgcctg

SEQ ID NO: 743008 - DNA, 33 bp, Homo sapien
gcaataagatgtgtactagttctccattgcctg

SEQ ID NO: 743009 - DNA, 33 bp, Homo sapien
gaacgtgaaacacttacgcatccaaaacactga

SEQ ID NO: 743010 - DNA, 33 bp, Homo sapien
gaacgtgaaacacttatgcatccaaaacactga

SEQ ID NO: 743011 - DNA, 33 bp, Homo sapien
tatagcatgaactacacagattctgcaaaccta

SEQ ID NO: 743012 - DNA, 33 bp, Homo sapien
tatagcatgaactacagagattctgcaaaccta

SEQ ID NO: 743013 - DNA, 33 bp, Homo sapien
caaagaagttttgatcagaagaagaaattaaag

SEQ ID NO: 743014 - DNA, 33 bp, Homo sapien
caaagaagttttgatcggaagaagaaattaaag

SEQ ID NO: 743015 - DNA, 33 bp, Homo sapien
gcctccgcattagtcacgtttaaccttgatgtt

SEQ ID NO: 743016 - DNA, 33 bp, Homo sapien
gcctccgcattagtcatgtttaaccttgatgtt

SEQ ID NO: 743017 - DNA, 33 bp, Homo sapien
tgctggacgaagaggcaccactgaggatcctaa

SEQ ID NO: 743018 - DNA, 33 bp, Homo sapien
tgctggacgaagaggcgccactgaggatcctaa

SEQ ID NO: 743019 - DNA, 33 bp, Homo sapien
ctagctctgacttccaaagccatacacacacac

SEQ ID NO: 743020 - DNA, 33 bp, Homo sapien
ctagctctgacttccatagccatacacacacac

SEQ ID NO: 743021 - DNA, 33 bp, Homo sapien
ctggtggcatgcataaacccaaaggtaggggtc

SEQ ID NO: 743022 - DNA, 33 bp, Homo sapien
ctggtggcatgcataagcccaaaggtaggggtc

SEQ ID NO: 743023 - DNA, 33 bp, Homo sapien
cccttgctcacttttgaataaaattgtttggtt

SEQ ID NO: 743024 - DNA, 33 bp, Homo sapien
cccttgctcacttttgtataaaattgtttggtt

SEQ ID NO: 743025 - DNA, 33 bp, Homo sapien
gattccatattttgacaatcgtaaacagtgctg

SEQ ID NO: 743026 - DNA, 33 bp, Homo sapien
gattccatattttgactatcgtaaacagtgctg

SEQ ID NO: 743027 - DNA, 33 bp, Homo sapien
ttaaaagaacatttaaaaaagcaaccacctatc

SEQ ID NO: 743028 - DNA, 33 bp, Homo sapien
ttaaaagaacatttaagaaagcaaccacctatc

SEQ ID NO: 743029 - DNA, 33 bp, Homo sapien
cctccttccatgcagaagtggaatctatttctc

SEQ ID NO: 743030 - DNA, 33 bp, Homo sapien
cctccttccatgcagaggtggaatctatttctc

SEQ ID NO: 743031 - DNA, 33 bp, Homo sapien
aaggttaaggttggaggagacgaaaatcaagag

SEQ ID NO: 743032 - DNA, 33 bp, Homo sapien
aaggttaaggttggagtagacgaaaatcaagag

SEQ ID NO: 743033 - DNA, 33 bp, Homo sapien
tctgctgtgcataacacgtgcaaagtattatat

SEQ ID NO: 743034 - DNA, 33 bp, Homo sapien
tctgctgtgcataacatgtgcaaagtattatat

SEQ ID NO: 743035 - DNA, 33 bp, Homo sapien
tcttagagttaggaaaccctgccaaacagagaa

SEQ ID NO: 743036 - DNA, 33 bp, Homo sapien
tcttagagttaggaaagcctgccaaacagagaa

SEQ ID NO: 743037 - DNA, 33 bp, Homo sapien
agacctggtataggaactaagcctttcttcttg

SEQ ID NO: 743038 - DNA, 33 bp, Homo sapien
agacctggtataggaagtaagcctttcttcttg

SEQ ID NO: 743039 - DNA, 33 bp, Homo sapien
tgtgcgatcaggcaccagagaaaggaggagaaa

SEQ ID NO: 743040 - DNA, 33 bp, Homo sapien
tgtgcgatcaggcaccggagaaaggaggagaaa

SEQ ID NO: 743041 - DNA, 33 bp, Homo sapien
ttgtaagcctacagaaacaagagctttatttat

SEQ ID NO: 743042 - DNA, 33 bp, Homo sapien
ttgtaagcctacagaaccaagagctttatttat

SEQ ID NO: 743043 - DNA, 33 bp, Homo sapien
gtgcgcatagagtgctcaatattgactaagcac

SEQ ID NO: 743044 - DNA, 33 bp, Homo sapien
gtgcgcatagagtgcttaatattgactaagcac

SEQ ID NO: 743045 - DNA, 33 bp, Homo sapien
ttttcactgaaagatcccctccagggtgcctga

SEQ ID NO: 743046 - DNA, 33 bp, Homo sapien
ttttcactgaaagatctcctccagggtgcctga

SEQ ID NO: 743047 - DNA, 33 bp, Homo sapien
ttccctataatgtgtcccttaactatacaaaaa

SEQ ID NO: 743048 - DNA, 33 bp, Homo sapien
ttccctataatgtgtctcttaactatacaaaaa

SEQ ID NO: 743049 - DNA, 33 bp, Homo sapien
ctgcagcataatgggacgttcccagtttttatg

SEQ ID NO: 743050 - DNA, 33 bp, Homo sapien
ctgcagcataatgggatgttcccagtttttatg

SEQ ID NO: 743051 - DNA, 33 bp, Homo sapien
tttacctgtaaccaaactctaaaggaatggctc

SEQ ID NO: 743052 - DNA, 33 bp, Homo sapien
tttacctgtaaccaaattctaaaggaatggctc

SEQ ID NO: 743053 - DNA, 33 bp, Homo sapien
ccagatactgattaccgactttctgcaatgtgc

SEQ ID NO: 743054 - DNA, 33 bp, Homo sapien
ccagatactgattacctactttctgcaatgtgc

SEQ ID NO: 743055 - DNA, 33 bp, Homo sapien
caaagacttttcctccaatctataagtacatat

SEQ ID NO: 743056 - DNA, 33 bp, Homo sapien
caaagacttttcctcccatctataagtacatat

SEQ ID NO: 743057 - DNA, 33 bp, Homo sapien
agtcaaagggtcagccaagttctttatttctaa

SEQ ID NO: 743058 - DNA, 33 bp, Homo sapien
agtcaaagggtcagccgagttctttatttctaa

SEQ ID NO: 743059 - DNA, 33 bp, Homo sapien
caccttcatgtggagacggaagacagcacagtg

SEQ ID NO: 743060 - DNA, 33 bp, Homo sapien
caccttcatgtggagagggaagacagcacagtg

SEQ ID NO: 743061 - DNA, 33 bp, Homo sapien
atttccttgcaagaaccacacttattccatata

SEQ ID NO: 743062 - DNA, 33 bp, Homo sapien
atttccttgcaagaactacacttattccatata

SEQ ID NO: 743063 - DNA, 33 bp, Homo sapien
agtggattgtcctaaaacacattctacgtagtt

SEQ ID NO: 743064 - DNA, 33 bp, Homo sapien
agtggattgtcctaaagcacattctacgtagtt

SEQ ID NO: 743065 - DNA, 33 bp, Homo sapien
caagccagctgtgggacataatctcctggtgtg

SEQ ID NO: 743066 - DNA, 33 bp, Homo sapien
caagccagctgtgggatataatctcctggtgtg

SEQ ID NO: 743067 - DNA, 33 bp, Homo sapien
cacagaattggaaaaaattaacgttcatatgga

SEQ ID NO: 743068 - DNA, 33 bp, Homo sapien
cacagaattggaaaaagttaacgttcatatgga

SEQ ID NO: 743069 - DNA, 33 bp, Homo sapien
ctggataagatggtcaataatacagagaaaaac

SEQ ID NO: 743070 - DNA, 33 bp, Homo sapien
ctggataagatggtcagtaatacagagaaaaac

SEQ ID NO: 743071 - DNA, 33 bp, Homo sapien
tgttacaagaagctgcaatataacaaacatatc

SEQ ID NO: 743072 - DNA, 33 bp, Homo sapien
tgttacaagaagctgccatataacaaacatatc

SEQ ID NO: 743073 - DNA, 33 bp, Homo sapien
cagggaaggtgatagaaacagagaaaatttaaa

SEQ ID NO: 743074 - DNA, 33 bp, Homo sapien
cagggaaggtgatagagacagagaaaatttaaa

SEQ ID NO: 743075 - DNA, 33 bp, Homo sapien
tgagtgctatttttccacttgaggatgtgactg

SEQ ID NO: 743076 - DNA, 33 bp, Homo sapien
tgagtgctatttttccccttgaggatgtgactg

SEQ ID NO: 743077 - DNA, 33 bp, Homo sapien
agatcaaaaatgcaaaatatgaattgtaaagaa

SEQ ID NO: 743078 - DNA, 33 bp, Homo sapien
agatcaaaaatgcaaagtatgaattgtaaagaa

SEQ ID NO: 743079 - DNA, 33 bp, Homo sapien
ccaaaaaagttcttaaatgaatgaagatagaga

SEQ ID NO: 743080 - DNA, 33 bp, Homo sapien
ccaaaaaagttcttaagtgaatgaagatagaga

SEQ ID NO: 743081 - DNA, 33 bp, Homo sapien
atactgtgagaaagtaccatttttctgcatata

SEQ ID NO: 743082 - DNA, 33 bp, Homo sapien
atactgtgagaaagtatcatttttctgcatata

SEQ ID NO: 743083 - DNA, 33 bp, Homo sapien
tgctagtaagtctttaagtggtctctatttttc

SEQ ID NO: 743084 - DNA, 33 bp, Homo sapien
tgctagtaagtctttatgtggtctctatttttc

SEQ ID NO: 743085 - DNA, 33 bp, Homo sapien
agacagatagctccacacagtcttaggtaaacc

SEQ ID NO: 743086 - DNA, 33 bp, Homo sapien
agacagatagctccacgcagtcttaggtaaacc

SEQ ID NO: 743087 - DNA, 33 bp, Homo sapien
attattcagcactggaaaaagatagccttcttt

SEQ ID NO: 743088 - DNA, 33 bp, Homo sapien
attattcagcactggataaagatagccttcttt

SEQ ID NO: 743089 - DNA, 33 bp, Homo sapien
tggaacctaagcctaacacaaacggcatagatt

SEQ ID NO: 743090 - DNA, 33 bp, Homo sapien
tggaacctaagcctaagacaaacggcatagatt

SEQ ID NO: 743091 - DNA, 33 bp, Homo sapien
tgatctcaacagggaaacccacacttcttcctt

SEQ ID NO: 743092 - DNA, 33 bp, Homo sapien
tgatctcaacagggaagcccacacttcttcctt

SEQ ID NO: 743093 - DNA, 33 bp, Homo sapien
gggaggggaagaagataagcattaaattgaata

SEQ ID NO: 743094 - DNA, 33 bp, Homo sapien
gggaggggaagaagatgagcattaaattgaata

SEQ ID NO: 743095 - DNA, 33 bp, Homo sapien
ttgtacaagctgaaaaaatattgactagccaac

SEQ ID NO: 743096 - DNA, 33 bp, Homo sapien
ttgtacaagctgaaaacatattgactagccaac

SEQ ID NO: 743097 - DNA, 33 bp, Homo sapien
ttagaagcttaatggcaataaagaagtcatttt

SEQ ID NO: 743098 - DNA, 33 bp, Homo sapien
ttagaagcttaatggcgataaagaagtcatttt

SEQ ID NO: 743099 - DNA, 33 bp, Homo sapien
cacacctacagcaacaacatcctgcctcaagat

SEQ ID NO: 743100 - DNA, 33 bp, Homo sapien
cacacctacagcaacaccatcctgcctcaagat

SEQ ID NO: 743101 - DNA, 33 bp, Homo sapien
gtgatttagatttcaacggagaattggcaggat

SEQ ID NO: 743102 - DNA, 33 bp, Homo sapien
gtgatttagatttcaatggagaattggcaggat

SEQ ID NO: 743103 - DNA, 33 bp, Homo sapien
cctagaaaagaaaagcacggctacattaataga

SEQ ID NO: 743104 - DNA, 33 bp, Homo sapien
cctagaaaagaaaagcgcggctacattaataga

SEQ ID NO: 743105 - DNA, 33 bp, Homo sapien
gaacaaaggcaaggaaatagaataatcattagg

SEQ ID NO: 743106 - DNA, 33 bp, Homo sapien
gaacaaaggcaaggaagtagaataatcattagg

SEQ ID NO: 743107 - DNA, 33 bp, Homo sapien
gcaaggaaaagcagtacggtacctgtcctacct

SEQ ID NO: 743108 - DNA, 33 bp, Homo sapien
gcaaggaaaagcagtatggtacctgtcctacct

SEQ ID NO: 743109 - DNA, 33 bp, Homo sapien
tgaagaacaatagaaaacttgtagaaccaatga

SEQ ID NO: 743110 - DNA, 33 bp, Homo sapien
tgaagaacaatagaaagcttgtagaaccaatga

SEQ ID NO: 743111 - DNA, 33 bp, Homo sapien
ttgagtaagacaagacaatgggcttgcgggaga

SEQ ID NO: 743112 - DNA, 33 bp, Homo sapien
ttgagtaagacaagacgatgggcttgcgggaga

SEQ ID NO: 743113 - DNA, 33 bp, Homo sapien
actcacaaggtcacggaatcaggagaaaaaggg

SEQ ID NO: 743114 - DNA, 33 bp, Homo sapien
actcacaaggtcacggcatcaggagaaaaaggg

SEQ ID NO: 743115 - DNA, 33 bp, Homo sapien
gaggaagtcacagaacagcacataggttgagag

SEQ ID NO: 743116 - DNA, 33 bp, Homo sapien
gaggaagtcacagaacggcacataggttgagag

SEQ ID NO: 743117 - DNA, 33 bp, Homo sapien
cttggcctctagtaacactatttgagcatttta

SEQ ID NO: 743118 - DNA, 33 bp, Homo sapien
cttggcctctagtaactctatttgagcatttta

SEQ ID NO: 743119 - DNA, 33 bp, Homo sapien
tgatgggcccattgagaattatgttgttgacta

SEQ ID NO: 743120 - DNA, 33 bp, Homo sapien
tgatgggcccattgaggattatgttgttgacta

SEQ ID NO: 743121 - DNA, 33 bp, Homo sapien
cacacttcttttaggaaaagcaccataatgagt

SEQ ID NO: 743122 - DNA, 33 bp, Homo sapien
cacacttcttttaggagaagcaccataatgagt

SEQ ID NO: 743123 - DNA, 33 bp, Homo sapien
ggatgtgtgctgaagaacaggagaaaccatgaa

SEQ ID NO: 743124 - DNA, 33 bp, Homo sapien
ggatgtgtgctgaagagcaggagaaaccatgaa

SEQ ID NO: 743125 - DNA, 33 bp, Homo sapien
agagctctaattgtgacagctaaatatcagtaa

SEQ ID NO: 743126 - DNA, 33 bp, Homo sapien
agagctctaattgtgatagctaaatatcagtaa

SEQ ID NO: 743127 - DNA, 33 bp, Homo sapien
atcaattttgagaaacactgatgcaggattaga

SEQ ID NO: 743128 - DNA, 33 bp, Homo sapien
atcaattttgagaaactctgatgcaggattaga

SEQ ID NO: 743129 - DNA, 33 bp, Homo sapien
ctttagcccatactaaaaactgatgctcaagta

SEQ ID NO: 743130 - DNA, 33 bp, Homo sapien
ctttagcccatactaacaactgatgctcaagta

SEQ ID NO: 743131 - DNA, 33 bp, Homo sapien
tcagccaaaaatttcaatctgcccagaaggatc

SEQ ID NO: 743132 - DNA, 33 bp, Homo sapien
tcagccaaaaatttcagtctgcccagaaggatc

SEQ ID NO: 743133 - DNA, 33 bp, Homo sapien
ttcccgacatccagccacttcttctctcttacg

SEQ ID NO: 743134 - DNA, 33 bp, Homo sapien
ttcccgacatccagccgcttcttctctcttacg

SEQ ID NO: 743135 - DNA, 33 bp, Homo sapien
tttctcacacttgccacctattctttttgaacc

SEQ ID NO: 743136 - DNA, 33 bp, Homo sapien
tttctcacacttgccatctattctttttgaacc

SEQ ID NO: 743137 - DNA, 33 bp, Homo sapien
tactatatttttaggacaaaatagctgtctctc

SEQ ID NO: 743138 - DNA, 33 bp, Homo sapien
tactatatttttaggagaaaatagctgtctctc

SEQ ID NO: 743139 - DNA, 33 bp, Homo sapien
tctcctttaagttagcagacattgtatagccac

SEQ ID NO: 743140 - DNA, 33 bp, Homo sapien
tctcctttaagttagcggacattgtatagccac

SEQ ID NO: 743141 - DNA, 33 bp, Homo sapien
tctcaaaaatgtctaacgagagggaggtgagaa

SEQ ID NO: 743142 - DNA, 33 bp, Homo sapien
tctcaaaaatgtctaatgagagggaggtgagaa

SEQ ID NO: 743143 - DNA, 33 bp, Homo sapien
accatgcctggctgtaacctcttatcaggaaga

SEQ ID NO: 743144 - DNA, 33 bp, Homo sapien
accatgcctggctgtatcctcttatcaggaaga

SEQ ID NO: 743145 - DNA, 33 bp, Homo sapien
tatttgtcacaagtagcattttgatgtgcaaat

SEQ ID NO: 743146 - DNA, 33 bp, Homo sapien
tatttgtcacaagtagtattttgatgtgcaaat

SEQ ID NO: 743147 - DNA, 33 bp, Homo sapien
tttaccgacctacataacagtttattaattctc

SEQ ID NO: 743148 - DNA, 33 bp, Homo sapien
tttaccgacctacatagcagtttattaattctc

SEQ ID NO: 743149 - DNA, 33 bp, Homo sapien
aaacaagccctgtggaaaattccttccatcaag

SEQ ID NO: 743150 - DNA, 33 bp, Homo sapien
aaacaagccctgtggagaattccttccatcaag

SEQ ID NO: 743151 - DNA, 33 bp, Homo sapien; identical to SEQ ID NO: 743149

SEQ ID NO: 743152 - DNA, 33 bp, Homo sapien; identical to SEQ ID NO: 743150

SEQ ID NO: 743153 - DNA, 33 bp, Homo sapien
ttctcatatggcataaatgaaatcaattcttcc

SEQ ID NO: 743154 - DNA, 33 bp, Homo sapien
ttctcatatggcataagtgaaatcaattcttcc

SEQ ID NO: 743155 - DNA, 33 bp, Homo sapien
acaataagaagcaagacagtagaaactcaacaa

SEQ ID NO: 743156 - DNA, 33 bp, Homo sapien
acaataagaagcaagagagtagaaactcaacaa

SEQ ID NO: 743157 - DNA, 33 bp, Homo sapien
tgtaaaatcaggcttaaaagaatcaaatacctt

SEQ ID NO: 743158 - DNA, 33 bp, Homo sapien
tgtaaaatcaggcttagaagaatcaaatacctt

SEQ ID NO: 743159 - DNA, 33 bp, Homo sapien
taaatatgcatatttaagattgtggcttaatgc

SEQ ID NO: 743160 - DNA, 33 bp, Homo sapien
taaatatgcatatttaggattgtggcttaatgc

SEQ ID NO: 743161 - DNA, 33 bp, Homo sapien
acacatgggcttgcaaactaattcacattgtct

SEQ ID NO: 743162 - DNA, 33 bp, Homo sapien
acacatgggcttgcaatctaattcacattgtct

SEQ ID NO: 743163 - DNA, 33 bp, Homo sapien
catacatactattatcaactcaacattagggtt

SEQ ID NO: 743164 - DNA, 33 bp, Homo sapien
catacatactattatcgactcaacattagggtt

SEQ ID NO: 743165 - DNA, 33 bp, Homo sapien
actggctcagccactgcagagagctagaccata

SEQ ID NO: 743166 - DNA, 33 bp, Homo sapien
actggctcagccactgtagagagctagaccata

SEQ ID NO: 743167 - DNA, 33 bp, Homo sapien
gctcactcatgttgcaaacaccaaagccaacac

SEQ ID NO: 743168 - DNA, 33 bp, Homo sapien
gctcactcatgttgcagacaccaaagccaacac

SEQ ID NO: 743169 - DNA, 33 bp, Homo sapien
acactagagagcaggcaagaggtaatgcagact

SEQ ID NO: 743170 - DNA, 33 bp, Homo sapien
acactagagagcaggccagaggtaatgcagact

SEQ ID NO: 743171 - DNA, 33 bp, Homo sapien
atagcagaagccttccaatagttaacaatacta

SEQ ID NO: 743172 - DNA, 33 bp, Homo sapien
atagcagaagccttcctatagttaacaatacta

SEQ ID NO: 743173 - DNA, 33 bp, Homo sapien
atttctagtcttgttgaagatgatagaggatat

SEQ ID NO: 743174 - DNA, 33 bp, Homo sapien
atttctagtcttgttgtagatgatagaggatat

SEQ ID NO: 743175 - DNA, 33 bp, Homo sapien
gtaggatttaaaataaatgcagactctgacttt

SEQ ID NO: 743176 - DNA, 33 bp, Homo sapien
gtaggatttaaaataattgcagactctgacttt

SEQ ID NO: 743177 - DNA, 33 bp, Homo sapien
cgaaatgcaaaattggcaaatgagtagaatcct

SEQ ID NO: 743178 - DNA, 33 bp, Homo sapien
cgaaatgcaaaattgggaaatgagtagaatcct

SEQ ID NO: 743179 - DNA, 33 bp, Homo sapien
aaagacaggcatcataggtatttagctcaaggt

SEQ ID NO: 743180 - DNA, 33 bp, Homo sapien
aaagacaggcatcatatgtatttagctcaaggt

SEQ ID NO: 743181 - DNA, 33 bp, Homo sapien
tagtgcaggtatcttacaacagagtattcccaa

SEQ ID NO: 743182 - DNA, 33 bp, Homo sapien
tagtgcaggtatcttataacagagtattcccaa

SEQ ID NO: 743183 - DNA, 33 bp, Homo sapien
gccatcttcaacctaccgatgagcatatcaaaa

SEQ ID NO: 743184 - DNA, 33 bp, Homo sapien
gccatcttcaacctactgatgagcatatcaaaa

SEQ ID NO: 743185 - DNA, 33 bp, Homo sapien
ttcatttccgtgacagcattcttgatttctaga

SEQ ID NO: 743186 - DNA, 33 bp, Homo sapien
ttcatttccgtgacaggattcttgatttctaga

SEQ ID NO: 743187 - DNA, 33 bp, Homo sapien
aatgtaagcagagagacggatattcttgtttta

SEQ ID NO: 743188 - DNA, 33 bp, Homo sapien
aatgtaagcagagagatggatattcttgtttta

SEQ ID NO: 743189 - DNA, 33 bp, Homo sapien
tactaacttattcatacgggaaacaggtttgca

SEQ ID NO: 743190 - DNA, 33 bp, Homo sapien
tactaacttattcatatgggaaacaggtttgca

SEQ ID NO: 743191 - DNA, 33 bp, Homo sapien
tctgatgcacaaatttaaaagcagctagcctat

SEQ ID NO: 743192 - DNA, 33 bp, Homo sapien
tctgatgcacaaatttcaaagcagctagcctat

SEQ ID NO: 743193 - DNA, 33 bp, Homo sapien
atgtgaagaaatacgaaaggactattaaatgct

SEQ ID NO: 743194 - DNA, 33 bp, Homo sapien
atgtgaagaaatacgagaggactattaaatgct

SEQ ID NO: 743195 - DNA, 33 bp, Homo sapien
ggaatggtgaggtaggccaactctttgttaagg

SEQ ID NO: 743196 - DNA, 33 bp, Homo sapien
ggaatggtgaggtaggtcaactctttgttaagg

SEQ ID NO: 743197 - DNA, 33 bp, Homo sapien
gacaggaccaaagggtaaagccatgatttttct

SEQ ID NO: 743198 - DNA, 33 bp, Homo sapien
gacaggaccaaagggtgaagccatgatttttct

SEQ ID NO: 743199 - DNA, 33 bp, Homo sapien
tagtttaataaggtccactttgtcaatatttgt

SEQ ID NO: 743200 - DNA, 33 bp, Homo sapien
tagtttaataaggtccgctttgtcaatatttgt

SEQ ID NO: 743201 - DNA, 33 bp, Homo sapien
atgctccagcaagtgaactgtaaaattaacaat

SEQ ID NO: 743202 - DNA, 33 bp, Homo sapien
atgctccagcaagtgacctgtaaaattaacaat

SEQ ID NO: 743203 - DNA, 33 bp, Homo sapien
gcaattttgccacgtgcaattcatgtactcctg

SEQ ID NO: 743204 - DNA, 33 bp, Homo sapien
gcaattttgccacgtgtaattcatgtactcctg

SEQ ID NO: 743205 - DNA, 33 bp, Homo sapien
cacacacacatacatgaacatagaatcactact

SEQ ID NO: 743206 - DNA, 33 bp, Homo sapien
cacacacacatacatgcacatagaatcactact

SEQ ID NO: 743207 - DNA, 33 bp, Homo sapien
acagagttagattcacacaaaaatggccatcca

SEQ ID NO: 743208 - DNA, 33 bp, Homo sapien
acagagttagattcacgcaaaaatggccatcca

SEQ ID NO: 743209 - DNA, 33 bp, Homo sapien
caaaaaaatctgaagaagtaggaatatgcaact

SEQ ID NO: 743210 - DNA, 33 bp, Homo sapien
caaaaaaatctgaagaggtaggaatatgcaact

SEQ ID NO: 743211 - DNA, 33 bp, Homo sapien
gctttggcaaagtacacggaaataacatcagtc

SEQ ID NO: 743212 - DNA, 33 bp, Homo sapien
gctttggcaaagtacatggaaataacatcagtc

SEQ ID NO: 743213 - DNA, 33 bp, Homo sapien
gaataaccatgctcagaccaggctttctgaagg

SEQ ID NO: 743214 - DNA, 33 bp, Homo sapien
gaataaccatgctcaggccaggctttctgaagg

SEQ ID NO: 743215 - DNA, 33 bp, Homo sapien
tagaaggacttgagtacaggcaatgtgttcaca

SEQ ID NO: 743216 - DNA, 33 bp, Homo sapien
tagaaggacttgagtataggcaatgtgttcaca

SEQ ID NO: 743217 - DNA, 33 bp, Homo sapien
atgaattattgggtgaagttttgtagaatagta

SEQ ID NO: 743218 - DNA, 33 bp, Homo sapien
atgaattattgggtgatgttttgtagaatagta

SEQ ID NO: 743219 - DNA, 33 bp, Homo sapien
cattaatacccaggaaatgactcaaaccacagt

SEQ ID NO: 743220 - DNA, 33 bp, Homo sapien
cattaatacccaggaagtgactcaaaccacagt

SEQ ID NO: 743221 - DNA, 33 bp, Homo sapien
cattttaacaaagaaaccaatagccaagtaaat

SEQ ID NO: 743222 - DNA, 33 bp, Homo sapien
cattttaacaaagaaagcaatagccaagtaaat

SEQ ID NO: 743223 - DNA, 33 bp, Homo sapien
ttctgggactttcaagaccaattcacaggagat

SEQ ID NO: 743224 - DNA, 33 bp, Homo sapien
ttctgggactttcaaggccaattcacaggagat

SEQ ID NO: 743225 - DNA, 33 bp, Homo sapien
agctattgcttgagaaaatatcacttgtgttta

SEQ ID NO: 743226 - DNA, 33 bp, Homo sapien
agctattgcttgagaagatatcacttgtgttta

SEQ ID NO: 743227 - DNA, 33 bp, Homo sapien
gctgatagaataaaccaactaaaaaccaattag

SEQ ID NO: 743228 - DNA, 33 bp, Homo sapien
gctgatagaataaaccgactaaaaaccaattag

SEQ ID NO: 743229 - DNA, 33 bp, Homo sapien
aacaacatagaggttaagagtcctggcaatcca

SEQ ID NO: 743230 - DNA, 33 bp, Homo sapien
aacaacatagaggttaggagtcctggcaatcca

SEQ ID NO: 743231 - DNA, 33 bp, Homo sapien
ttgaacaaccaaaaaactggctgctagtgttta

SEQ ID NO: 743232 - DNA, 33 bp, Homo sapien
ttgaacaaccaaaaaattggctgctagtgttta

SEQ ID NO: 743233 - DNA, 33 bp, Homo sapien
cacccaagcttggcctcaactttgttccaagat

SEQ ID NO: 743234 - DNA, 33 bp, Homo sapien
cacccaagcttggccttaactttgttccaagat

SEQ ID NO: 743235 - DNA, 33 bp, Homo sapien
tttgaattatatcatgaaaaaatagccttcaga

SEQ ID NO: 743236 - DNA, 33 bp, Homo sapien
tttgaattatatcatggaaaaatagccttcaga

SEQ ID NO: 743237 - DNA, 33 bp, Homo sapien
agaattaaactccaaaatgtcattattatgttc

SEQ ID NO: 743238 - DNA, 33 bp, Homo sapien
agaattaaactccaaagtgtcattattatgttc

SEQ ID NO: 743239 - DNA, 33 bp, Homo sapien
tactttctagatacaacggtagatggtagtaca

SEQ ID NO: 743240 - DNA, 33 bp, Homo sapien
tactttctagatacaatggtagatggtagtaca

SEQ ID NO: 743241 - DNA, 33 bp, Homo sapien
agatgactaaggcacactatcatttccaatttt

SEQ ID NO: 743242 - DNA, 33 bp, Homo sapien
agatgactaaggcacagtatcatttccaatttt

SEQ ID NO: 743243 - DNA, 33 bp, Homo sapien
cagaacatttgaggaacgcctttcacttgacct

SEQ ID NO: 743244 - DNA, 33 bp, Homo sapien
cagaacatttgaggaatgcctttcacttgacct

SEQ ID NO: 743245 - DNA, 33 bp, Homo sapien
ggctattatccatataagacgtggagtatattc

SEQ ID NO: 743246 - DNA, 33 bp, Homo sapien
ggctattatccatataggacgtggagtatattc

SEQ ID NO: 743247 - DNA, 33 bp, Homo sapien
aaatatgccattttctcaattctaatgtccgtc

SEQ ID NO: 743248 - DNA, 33 bp, Homo sapien
aaatatgccattttctgaattctaatgtccgtc

SEQ ID NO: 743249 - DNA, 33 bp, Homo sapien
tttgaaccaagaggaactggttgttaggaacca

SEQ ID NO: 743250 - DNA, 33 bp, Homo sapien
tttgaaccaagaggaattggttgttaggaacca

SEQ ID NO: 743251 - DNA, 33 bp, Homo sapien
aagtaaggaaagtataaactcaggtcatccaac

SEQ ID NO: 743252 - DNA, 33 bp, Homo sapien
aagtaaggaaagtatagactcaggtcatccaac

SEQ ID NO: 743253 - DNA, 33 bp, Homo sapien
ctaattaaaacaataacctgaaatgacctgatg

SEQ ID NO: 743254 - DNA, 33 bp, Homo sapien
ctaattaaaacaataatctgaaatgacctgatg

SEQ ID NO: 743255 - DNA, 33 bp, Homo sapien
tgcttgttaatgacataaagattggtgaggatt

SEQ ID NO: 743256 - DNA, 33 bp, Homo sapien
tgcttgttaatgacatgaagattggtgaggatt

SEQ ID NO: 743257 - DNA, 33 bp, Homo sapien
gtatatactgaacagaactatatacttatccat

SEQ ID NO: 743258 - DNA, 33 bp, Homo sapien
gtatatactgaacagagctatatacttatccat

SEQ ID NO: 743259 - DNA, 33 bp, Homo sapien
ccagtgccatcacagaagacaagatatgatcac

SEQ ID NO: 743260 - DNA, 33 bp, Homo sapien
ccagtgccatcacagaggacaagatatgatcac

SEQ ID NO: 743261 - DNA, 33 bp, Homo sapien
tgaccacttgctgttacacctgctttgtggcaa

SEQ ID NO: 743262 - DNA, 33 bp, Homo sapien
tgaccacttgctgttatacctgctttgtggcaa

SEQ ID NO: 743263 - DNA, 33 bp, Homo sapien
taaagcctgggggtatgacaaggaataaatgga

SEQ ID NO: 743264 - DNA, 33 bp, Homo sapien
taaagcctgggggtattacaaggaataaatgga

SEQ ID NO: 743265 - DNA, 33 bp, Homo sapien
aatcagctttgaactggatctaagtcatccttc

SEQ ID NO: 743266 - DNA, 33 bp, Homo sapien
aatcagctttgaactgtatctaagtcatccttc

SEQ ID NO: 743267 - DNA, 33 bp, Homo sapien
agaaaatgtgcttttacaatgtatggacaaaat

SEQ ID NO: 743268 - DNA, 33 bp, Homo sapien
agaaaatgtgcttttagaatgtatggacaaaat

SEQ ID NO: 743269 - DNA, 33 bp, Homo sapien
tgaaaggacaattgagaagacccagagaacgca

SEQ ID NO: 743270 - DNA, 33 bp, Homo sapien
tgaaaggacaattgaggagacccagagaacgca

SEQ ID NO: 743271 - DNA, 33 bp, Homo sapien
tgaacactgtgatttaaaagtgatatggatttc

SEQ ID NO: 743272 - DNA, 33 bp, Homo sapien
tgaacactgtgatttataagtgatatggatttc

SEQ ID NO: 743273 - DNA, 33 bp, Homo sapien
ttcaaatttaataatccgagaaagcgctgtgta

SEQ ID NO: 743274 - DNA, 33 bp, Homo sapien
ttcaaatttaataatctgagaaagcgctgtgta

SEQ ID NO: 743275 - DNA, 33 bp, Homo sapien
gtcccatctgtgaataagcctctgatagctcct

SEQ ID NO: 743276 - DNA, 33 bp, Homo sapien
gtcccatctgtgaataggcctctgatagctcct

SEQ ID NO: 743277 - DNA, 33 bp, Homo sapien
aaacagcacagtcaagcattggatggacaacac

SEQ ID NO: 743278 - DNA, 33 bp, Homo sapien
aaacagcacagtcaagtattggatggacaacac

SEQ ID NO: 743279 - DNA, 33 bp, Homo sapien
tcaatattttctcaggaattttaattgtaagta

SEQ ID NO: 743280 - DNA, 33 bp, Homo sapien
tcaatattttctcaggtattttaattgtaagta

SEQ ID NO: 743281 - DNA, 33 bp, Homo sapien
ccaactgacttgactaagaagtttcaaaatagt

SEQ ID NO: 743282 - DNA, 33 bp, Homo sapien
ccaactgacttgactaggaagtttcaaaatagt

SEQ ID NO: 743283 - DNA, 33 bp, Homo sapien
tttagcacatttgttaccatacccagggccatg

SEQ ID NO: 743284 - DNA, 33 bp, Homo sapien
tttagcacatttgttatcatacccagggccatg

SEQ ID NO: 743285 - DNA, 33 bp, Homo sapien
gaagcacataacataaacattcttactcagttt

SEQ ID NO: 743286 - DNA, 33 bp, Homo sapien
gaagcacataacataagcattcttactcagttt

SEQ ID NO: 743287 - DNA, 33 bp, Homo sapien
taattgctacaactaacgaagcacataacataa

SEQ ID NO: 743288 - DNA, 33 bp, Homo sapien
taattgctacaactaatgaagcacataacataa

SEQ ID NO: 743289 - DNA, 33 bp, Homo sapien
tacaatggttcagggaagagattacaatatagc

SEQ ID NO: 743290 - DNA, 33 bp, Homo sapien
tacaatggttcagggaggagattacaatatagc

SEQ ID NO: 743291 - DNA, 33 bp, Homo sapien
ttaaaatagaacaccaatatatgcgtatattca

SEQ ID NO: 743292 - DNA, 33 bp, Homo sapien
ttaaaatagaacaccagtatatgcgtatattca

SEQ ID NO: 743293 - DNA, 33 bp, Homo sapien
aacttcttggattttgcaggaagaatatatcat

SEQ ID NO: 743294 - DNA, 33 bp, Homo sapien
aacttcttggattttggaggaagaatatatcat

SEQ ID NO: 743295 - DNA, 33 bp, Homo sapien
ttataattctgctcaccattaatttctcaatat

SEQ ID NO: 743296 - DNA, 33 bp, Homo sapien
ttataattctgctcactattaatttctcaatat

SEQ ID NO: 743297 - DNA, 33 bp, Homo sapien
tctctcatcatccaacgggttagttagcctgga

SEQ ID NO: 743298 - DNA, 33 bp, Homo sapien
tctctcatcatccaactggttagttagcctgga

SEQ ID NO: 743299 - DNA, 33 bp, Homo sapien
cctggacttattctcacagtgtctgggcagcat

SEQ ID NO: 743300 - DNA, 33 bp, Homo sapien
cctggacttattctcatagtgtctgggcagcat

SEQ ID NO: 743301 - DNA, 33 bp, Homo sapien
gtctgggcagcattccaagatgatgaacaaaag

SEQ ID NO: 743302 - DNA, 33 bp, Homo sapien
gtctgggcagcattccgagatgatgaacaaaag

SEQ ID NO: 743303 - DNA, 33 bp, Homo sapien
tctgcttttgtggctcacttgaatcaggattgt

SEQ ID NO: 743304 - DNA, 33 bp, Homo sapien
tctgcttttgtggctcgcttgaatcaggattgt

SEQ ID NO: 743305 - DNA, 33 bp, Homo sapien
tactaatgcctttttgaaatttacaagttgcta

SEQ ID NO: 743306 - DNA, 33 bp, Homo sapien
tactaatgcctttttggaatttacaagttgcta

SEQ ID NO: 743307 - DNA, 33 bp, Homo sapien
tatcttcgactctttacggaatattgcatgtca

SEQ ID NO: 743308 - DNA, 33 bp, Homo sapien
tatcttcgactctttatggaatattgcatgtca

SEQ ID NO: 743309 - DNA, 33 bp, Homo sapien
agaacactagaaacaaacacaaatatcactacc

SEQ ID NO: 743310 - DNA, 33 bp, Homo sapien
agaacactagaaacaagcacaaatatcactacc

SEQ ID NO: 743311 - DNA, 33 bp, Homo sapien
cctctgtgttgagaaaatgaagacgccatgaga

SEQ ID NO: 743312 - DNA, 33 bp, Homo sapien
cctctgtgttgagaaagtgaagacgccatgaga

SEQ ID NO: 743313 - DNA, 33 bp, Homo sapien
tcaaaaactcagcaagaaaaattgaggatagca

SEQ ID NO: 743314 - DNA, 33 bp, Homo sapien
tcaaaaactcagcaaggaaaattgaggatagca

SEQ ID NO: 743315 - DNA, 33 bp, Homo sapien
ttactgtgtgctaacacgaggttactaacataa

SEQ ID NO: 743316 - DNA, 33 bp, Homo sapien
ttactgtgtgctaacatgaggttactaacataa

SEQ ID NO: 743317 - DNA, 33 bp, Homo sapien
aattctatgtattctacgtggttcaaattccaa

SEQ ID NO: 743318 - DNA, 33 bp, Homo sapien
aattctatgtattctatgtggttcaaattccaa

SEQ ID NO: 743319 - DNA, 33 bp, Homo sapien
atcatacaagtgccagaaacagacgttatgttt

SEQ ID NO: 743320 - DNA, 33 bp, Homo sapien
atcatacaagtgccaggaacagacgttatgttt

SEQ ID NO: 743321 - DNA, 33 bp, Homo sapien
cttctgtcaatgactaagtctggctggataaca

SEQ ID NO: 743322 - DNA, 33 bp, Homo sapien
cttctgtcaatgactatgtctggctggataaca

SEQ ID NO: 743323 - DNA, 33 bp, Homo sapien
ggaactgctagccacaatgagttatttgcttta

SEQ ID NO: 743324 - DNA, 33 bp, Homo sapien
ggaactgctagccacagtgagttatttgcttta

SEQ ID NO: 743325 - DNA, 33 bp, Homo sapien
ccaaacagaaagcataatagaatgtttcttcca

SEQ ID NO: 743326 - DNA, 33 bp, Homo sapien
ccaaacagaaagcatagtagaatgtttcttcca

SEQ ID NO: 743327 - DNA, 33 bp, Homo sapien
atgtgaaattttcagacgtgcctgcagacacta

SEQ ID NO: 743328 - DNA, 33 bp, Homo sapien
atgtgaaattttcagatgtgcctgcagacacta

SEQ ID NO: 743329 - DNA, 33 bp, Homo sapien
tagaacaatcagaaaaggtccctggtatgaaca

SEQ ID NO: 743330 - DNA, 33 bp, Homo sapien
tagaacaatcagaaaatgtccctggtatgaaca

SEQ ID NO: 743331 - DNA, 33 bp, Homo sapien
gcacttacgtgcacaaaccaagagggtgctatc

SEQ ID NO: 743332 - DNA, 33 bp, Homo sapien
gcacttacgtgcacaagccaagagggtgctatc

SEQ ID NO: 743333 - DNA, 33 bp, Homo sapien
aagagggtgctatcacactttttccctaggcca

SEQ ID NO: 743334 - DNA, 33 bp, Homo sapien
aagagggtgctatcacgctttttccctaggcca

SEQ ID NO: 743335 - DNA, 33 bp, Homo sapien
tctcttagatttgccaacaggtgaagagagatt

SEQ ID NO: 743336 - DNA, 33 bp, Homo sapien
tctcttagatttgccagcaggtgaagagagatt

SEQ ID NO: 743337 - DNA, 33 bp, Homo sapien
cactgggactaggtaagaatagagtcctggcaa

SEQ ID NO: 743338 - DNA, 33 bp, Homo sapien
cactgggactaggtaataatagagtcctggcaa

SEQ ID NO: 743339 - DNA, 33 bp, Homo sapien
attggtgtcatgcccaaactcaaagatagaaaa

SEQ ID NO: 743340 - DNA, 33 bp, Homo sapien
attggtgtcatgcccagactcaaagatagaaaa

SEQ ID NO: 743341 - DNA, 33 bp, Homo sapien
accatgctaatgaagacgaagcagggatggccc

SEQ ID NO: 743342 - DNA, 33 bp, Homo sapien
accatgctaatgaagatgaagcagggatggccc

SEQ ID NO: 743343 - DNA, 33 bp, Homo sapien
ttgcccagcctttacacagaataactcagctaa

SEQ ID NO: 743344 - DNA, 33 bp, Homo sapien
ttgcccagcctttacatagaataactcagctaa

SEQ ID NO: 743345 - DNA, 33 bp, Homo sapien
cagctaaccagtgcaacaaaagctctgctatga

SEQ ID NO: 743346 - DNA, 33 bp, Homo sapien
cagctaaccagtgcaataaaagctctgctatga

SEQ ID NO: 743347 - DNA, 33 bp, Homo sapien
acctaattccttaaaaatctctctctccccaca

SEQ ID NO: 743348 - DNA, 33 bp, Homo sapien
acctaattccttaaaagtctctctctccccaca

SEQ ID NO: 743349 - DNA, 33 bp, Homo sapien
aaaaaaatactagcgacgggcatggtagcttac

SEQ ID NO: 743350 - DNA, 33 bp, Homo sapien
aaaaaaatactagcgatgggcatggtagcttac

SEQ ID NO: 743351 - DNA, 33 bp, Homo sapien
tgtgatagatgcaaataatgtttaaaacattgc

SEQ ID NO: 743352 - DNA, 33 bp, Homo sapien
tgtgatagatgcaaattatgtttaaaacattgc

SEQ ID NO: 743353 - DNA, 33 bp, Homo sapien
aacaaagctaagttaccaagtctagaacctgaa

SEQ ID NO: 743354 - DNA, 33 bp, Homo sapien
aacaaagctaagttactaagtctagaacctgaa

SEQ ID NO: 743355 - DNA, 33 bp, Homo sapien
ttatgtggcattaagaagtaaataggagaagta

SEQ ID NO: 743356 - DNA, 33 bp, Homo sapien
ttatgtggcattaagacgtaaataggagaagta

SEQ ID NO: 743357 - DNA, 33 bp, Homo sapien
ttccaccaacaaattcaaccatctctagtcaac

SEQ ID NO: 743358 - DNA, 33 bp, Homo sapien
ttccaccaacaaattctaccatctctagtcaac

SEQ ID NO: 743359 - DNA, 33 bp, Homo sapien
aaaagcaattaaaggtaaaggacttacagacat

SEQ ID NO: 743360 - DNA, 33 bp, Homo sapien
aaaagcaattaaaggtgaaggacttacagacat

SEQ ID NO: 743361 - DNA, 33 bp, Homo sapien
ccattctaaaagtttagcagcaaagcagtagaa

SEQ ID NO: 743362 - DNA, 33 bp, Homo sapien
ccattctaaaagtttatcagcaaagcagtagaa

SEQ ID NO: 743363 - DNA, 33 bp, Homo sapien
tggatagagtttgttactaaaattcttgaatac

SEQ ID NO: 743364 - DNA, 33 bp, Homo sapien
tggatagagtttgttattaaaattcttgaatac

SEQ ID NO: 743365 - DNA, 33 bp, Homo sapien
aagcaagaaatacaagcagtgtttggatgacaa

SEQ ID NO: 743366 - DNA, 33 bp, Homo sapien
aagcaagaaatacaagtagtgtttggatgacaa

SEQ ID NO: 743367 - DNA, 33 bp, Homo sapien
tctgtcttcagttcgacgctggaattcctgggc

SEQ ID NO: 743368 - DNA, 33 bp, Homo sapien
tctgtcttcagttcgatgctggaattcctgggc

SEQ ID NO: 743369 - DNA, 33 bp, Homo sapien
aggaggccagtgaataagttaggcaggcagaaa

SEQ ID NO: 743370 - DNA, 33 bp, Homo sapien
aggaggccagtgaatacgttaggcaggcagaaa

SEQ ID NO: 743371 - DNA, 33 bp, Homo sapien
tgctacccactggctaagatatttttctctctt

SEQ ID NO: 743372 - DNA, 33 bp, Homo sapien
tgctacccactggctaggatatttttctctctt

SEQ ID NO: 743373 - DNA, 33 bp, Homo sapien
agttccaggaattaaacaggatactggagatga

SEQ ID NO: 743374 - DNA, 33 bp, Homo sapien
agttccaggaattaaataggatactggagatga

SEQ ID NO: 743375 - DNA, 33 bp, Homo sapien
cctcagaagaaaaggtaaaattacacgtggaat

SEQ ID NO: 743376 - DNA, 33 bp, Homo sapien
cctcagaagaaaaggtgaaattacacgtggaat

SEQ ID NO: 743377 - DNA, 33 bp, Homo sapien
gtgccattaaggacacagctgagggcaaataag

SEQ ID NO: 743378 - DNA, 33 bp, Homo sapien
gtgccattaaggacactgctgagggcaaataag

SEQ ID NO: 743379 - DNA, 33 bp, Homo sapien
catgttaatatctgcacaaaaaatctgtgttac

SEQ ID NO: 743380 - DNA, 33 bp, Homo sapien
catgttaatatctgcataaaaaatctgtgttac

SEQ ID NO: 743381 - DNA, 33 bp, Homo sapien
aaaatgtttgtgtaatcaacttccacaaactga

SEQ ID NO: 743382 - DNA, 33 bp, Homo sapien
aaaatgtttgtgtaatgaacttccacaaactga

SEQ ID NO: 743383 - DNA, 33 bp, Homo sapien
ctggaattggcacttacgatggatatggtttta

SEQ ID NO: 743384 - DNA, 33 bp, Homo sapien
ctggaattggcacttatgatggatatggtttta

SEQ ID NO: 743385 - DNA, 33 bp, Homo sapien
tattactgaagtctacactgaaagcaactagag

SEQ ID NO: 743386 - DNA, 33 bp, Homo sapien
tattactgaagtctacgctgaaagcaactagag

SEQ ID NO: 743387 - DNA, 33 bp, Homo sapien
attcgggtgattcttacggtgatacttggtaat

SEQ ID NO: 743388 - DNA, 33 bp, Homo sapien
attcgggtgattcttatggtgatacttggtaat

SEQ ID NO: 743389 - DNA, 33 bp, Homo sapien
aagcttgagagaactacaaaatcatgacaataa

SEQ ID NO: 743390 - DNA, 33 bp, Homo sapien
aagcttgagagaactataaaatcatgacaataa

SEQ ID NO: 743391 - DNA, 33 bp, Homo sapien
agtcatattcaggaaaagttctctgagaataag

SEQ ID NO: 743392 - DNA, 33 bp, Homo sapien
agtcatattcaggaaacgttctctgagaataag

SEQ ID NO: 743393 - DNA, 33 bp, Homo sapien
caaagcattttttttacggctactaggcagaat

SEQ ID NO: 743394 - DNA, 33 bp, Homo sapien
caaagcattttttttagggctactaggcagaat

SEQ ID NO: 743395 - DNA, 33 bp, Homo sapien
ttcactatgtgtttgccaagttgtgctttaaca

SEQ ID NO: 743396 - DNA, 33 bp, Homo sapien
ttcactatgtgtttgctaagttgtgctttaaca

SEQ ID NO: 743397 - DNA, 33 bp, Homo sapien
tgtagtctttactcacaaaaatcattcagtcta

SEQ ID NO: 743398 - DNA, 33 bp, Homo sapien
tgtagtctttactcacgaaaatcattcagtcta

SEQ ID NO: 743399 - DNA, 33 bp, Homo sapien
aaagtctcaaggcatacagatagaccaatataa

SEQ ID NO: 743400 - DNA, 33 bp, Homo sapien
aaagtctcaaggcatatagatagaccaatataa

SEQ ID NO: 743401 - DNA, 33 bp, Homo sapien
tagaacagtaaaggaaatggaatccagatttgg

SEQ ID NO: 743402 - DNA, 33 bp, Homo sapien
tagaacagtaaaggaagtggaatccagatttgg

SEQ ID NO: 743403 - DNA, 33 bp, Homo sapien
caaatattttgttaaactctcatcagatcttta

SEQ ID NO: 743404 - DNA, 33 bp, Homo sapien
caaatattttgttaaattctcatcagatcttta

SEQ ID NO: 743405 - DNA, 33 bp, Homo sapien
tatctctagtggaataactctaatagaatatta

SEQ ID NO: 743406 - DNA, 33 bp, Homo sapien
tatctctagtggaatatctctaatagaatatta

SEQ ID NO: 743407 - DNA, 33 bp, Homo sapien
cattttattttatatcactgtagcttcttttgt

SEQ ID NO: 743408 - DNA, 33 bp, Homo sapien
cattttattttatatcgctgtagcttcttttgt

SEQ ID NO: 743409 - DNA, 33 bp, Homo sapien
tgatttccttctgaataagtgatagtagagact

SEQ ID NO: 743410 - DNA, 33 bp, Homo sapien
tgatttccttctgaatgagtgatagtagagact

SEQ ID NO: 743411 - DNA, 33 bp, Homo sapien
tacagtaaacaaaacaacattttactggtacaa

SEQ ID NO: 743412 - DNA, 33 bp, Homo sapien
tacagtaaacaaaacagcattttactggtacaa

SEQ ID NO: 743413 - DNA, 33 bp, Homo sapien
tttatgatggacaagacgcgtgaagaatgatta

SEQ ID NO: 743414 - DNA, 33 bp, Homo sapien
tttatgatggacaagatgcgtgaagaatgatta

SEQ ID NO: 743415 - DNA, 33 bp, Homo sapien
atttgcctcagttttacaggagagggcaaggag

SEQ ID NO: 743416 - DNA, 33 bp, Homo sapien
atttgcctcagttttataggagagggcaaggag

SEQ ID NO: 743417 - DNA, 33 bp, Homo sapien
ccttgctcaaggaaaaagttttcaaccacagca

SEQ ID NO: 743418 - DNA, 33 bp, Homo sapien
ccttgctcaaggaaaatgttttcaaccacagca

SEQ ID NO: 743419 - DNA, 33 bp, Homo sapien
gaatattgctgtgtccactttatggctactgga

SEQ ID NO: 743420 - DNA, 33 bp, Homo sapien
gaatattgctgtgtccgctttatggctactgga

SEQ ID NO: 743421 - DNA, 33 bp, Homo sapien
ctaatggaaggacatactaacagctaatcttgc

SEQ ID NO: 743422 - DNA, 33 bp, Homo sapien
ctaatggaaggacatattaacagctaatcttgc

SEQ ID NO: 743423 - DNA, 33 bp, Homo sapien
tttggcacttcagttacgctactcaacttaatc

SEQ ID NO: 743424 - DNA, 33 bp, Homo sapien
tttggcacttcagttatgctactcaacttaatc

SEQ ID NO: 743425 - DNA, 33 bp, Homo sapien
atacgaaattctgtaaaattgaatcctgtgttc

SEQ ID NO: 743426 - DNA, 33 bp, Homo sapien
atacgaaattctgtaagattgaatcctgtgttc

SEQ ID NO: 743427 - DNA, 33 bp, Homo sapien
gatgaaattagtaaaaatggattttgctctctt

SEQ ID NO: 743428 - DNA, 33 bp, Homo sapien
gatgaaattagtaaaagtggattttgctctctt

SEQ ID NO: 743429 - DNA, 33 bp, Homo sapien
acattcttgtttctataaccttcaaattgctca

SEQ ID NO: 743430 - DNA, 33 bp, Homo sapien
acattcttgtttctatgaccttcaaattgctca

SEQ ID NO: 743431 - DNA, 33 bp, Homo sapien
actctgctcctaactgcatcagtgactttatta

SEQ ID NO: 743432 - DNA, 33 bp, Homo sapien
actctgctcctaactgtatcagtgactttatta

SEQ ID NO: 743433 - DNA, 33 bp, Homo sapien
agagggccagcttactaaagtcatttcattatt

SEQ ID NO: 743434 - DNA, 33 bp, Homo sapien
agagggccagcttactgaagtcatttcattatt

SEQ ID NO: 743435 - DNA, 33 bp, Homo sapien
cttaaaataagttttaaacattagcatagtgca

SEQ ID NO: 743436 - DNA, 33 bp, Homo sapien
cttaaaataagttttagacattagcatagtgca

SEQ ID NO: 743437 - DNA, 33 bp, Homo sapien
gatgctactgatatctgacatccagtgaataga

SEQ ID NO: 743438 - DNA, 33 bp, Homo sapien
gatgctactgatatcttacatccagtgaataga

SEQ ID NO: 743439 - DNA, 33 bp, Homo sapien
gattcaaaataaaaagccacataattgtctact

SEQ ID NO: 743440 - DNA, 33 bp, Homo sapien
gattcaaaataaaaaggcacataattgtctact

SEQ ID NO: 743441 - DNA, 33 bp, Homo sapien
cttatcattcacaccacaggttgctaaattgga

SEQ ID NO: 743442 - DNA, 33 bp, Homo sapien
cttatcattcacaccataggttgctaaattgga

SEQ ID NO: 743443 - DNA, 33 bp, Homo sapien
caatatgatcttaaagacaatatctccacataa

SEQ ID NO: 743444 - DNA, 33 bp, Homo sapien
caatatgatcttaaagccaatatctccacataa

SEQ ID NO: 743445 - DNA, 33 bp, Homo sapien
ttagaggagtaacatcaagatatcatatacaga

SEQ ID NO: 743446 - DNA, 33 bp, Homo sapien
ttagaggagtaacatccagatatcatatacaga

SEQ ID NO: 743447 - DNA, 33 bp, Homo sapien
ccttcagacattgcaccctaagattcagaattg

SEQ ID NO: 743448 - DNA, 33 bp, Homo sapien
ccttcagacattgcactctaagattcagaattg

SEQ ID NO: 743449 - DNA, 33 bp, Homo sapien
cattcaggaaatcttaagcctcaaaacagtttg

SEQ ID NO: 743450 - DNA, 33 bp, Homo sapien
cattcaggaaatcttacgcctcaaaacagtttg

SEQ ID NO: 743451 - DNA, 33 bp, Homo sapien
ccaagagttcagtgaaaggaagtcacatttctc

SEQ ID NO: 743452 - DNA, 33 bp, Homo sapien
ccaagagttcagtgaatggaagtcacatttctc

SEQ ID NO: 743453 - DNA, 33 bp, Homo sapien
gtaagcctgtacctgaaagaaccctgcatcaac

SEQ ID NO: 743454 - DNA, 33 bp, Homo sapien
gtaagcctgtacctgacagaaccctgcatcaac

SEQ ID NO: 743455 - DNA, 33 bp, Homo sapien
tggtaagaggcaaaaacaggttgaccccaggca

SEQ ID NO: 743456 - DNA, 33 bp, Homo sapien
tggtaagaggcaaaaataggttgaccccaggca

SEQ ID NO: 743457 - DNA, 33 bp, Homo sapien
gagtaggtctgatgataatacagttgcgaagat

SEQ ID NO: 743458 - DNA, 33 bp, Homo sapien
gagtaggtctgatgatgatacagttgcgaagat

SEQ ID NO: 743459 - DNA, 33 bp, Homo sapien
acaaaggtaatattaaagagagcaaagcttcat

SEQ ID NO: 743460 - DNA, 33 bp, Homo sapien
acaaaggtaatattaaggagagcaaagcttcat

SEQ ID NO: 743461 - DNA, 33 bp, Homo sapien
atttagtctaaactgcccaatggaaatcacatg

SEQ ID NO: 743462 - DNA, 33 bp, Homo sapien
atttagtctaaactgctcaatggaaatcacatg

SEQ ID NO: 743463 - DNA, 33 bp, Homo sapien
tggaatcttacagaaactcacaagaagtaacga

SEQ ID NO: 743464 - DNA, 33 bp, Homo sapien
tggaatcttacagaaagtcacaagaagtaacga

SEQ ID NO: 743465 - DNA, 33 bp, Homo sapien
gaaatgagaagaggtaaacaaattgtatccctt

SEQ ID NO: 743466 - DNA, 33 bp, Homo sapien
gaaatgagaagaggtagacaaattgtatccctt

SEQ ID NO: 743467 - DNA, 33 bp, Homo sapien
atgcccattacactcaacaagcaaagaaatatt

SEQ ID NO: 743468 - DNA, 33 bp, Homo sapien
atgcccattacactcagcaagcaaagaaatatt

SEQ ID NO: 743469 - DNA, 33 bp, Homo sapien
gccagtgaaaattctgcagttcaaaagctggag

SEQ ID NO: 743470 - DNA, 33 bp, Homo sapien
gccagtgaaaattctggagttcaaaagctggag

SEQ ID NO: 743471 - DNA, 33 bp, Homo sapien
tgctttgaggtatctaagagaaagatttattat

SEQ ID NO: 743472 - DNA, 33 bp, Homo sapien
tgctttgaggtatctaggagaaagatttattat

SEQ ID NO: 743473 - DNA, 33 bp, Homo sapien
tcttcagaattatacaatcttagccttctgggt

SEQ ID NO: 743474 - DNA, 33 bp, Homo sapien
tcttcagaattatacagtcttagccttctgggt

SEQ ID NO: 743475 - DNA, 33 bp, Homo sapien
ggatggatatatgaaactcaaagctgatggaga

SEQ ID NO: 743476 - DNA, 33 bp, Homo sapien
ggatggatatatgaaattcaaagctgatggaga

SEQ ID NO: 743477 - DNA, 33 bp, Homo sapien
gaattagtcatgcttacctgccctgtgccctta

SEQ ID NO: 743478 - DNA, 33 bp, Homo sapien
gaattagtcatgcttatctgccctgtgccctta

SEQ ID NO: 743479 - DNA, 33 bp, Homo sapien
gaaaagccaatgaacaaggaagactacttgagg

SEQ ID NO: 743480 - DNA, 33 bp, Homo sapien
gaaaagccaatgaacatggaagactacttgagg

SEQ ID NO: 743481 - DNA, 33 bp, Homo sapien
aggtgttttataatccccttatcgctgaacttc

SEQ ID NO: 743482 - DNA, 33 bp, Homo sapien
aggtgttttataatcctcttatcgctgaacttc

SEQ ID NO: 743483 - DNA, 33 bp, Homo sapien
aacgagtgttgctttaaatatcatatgataggt

SEQ ID NO: 743484 - DNA, 33 bp, Homo sapien
aacgagtgttgctttacatatcatatgataggt

SEQ ID NO: 743485 - DNA, 33 bp, Homo sapien
cctaagaatacagagacaggtaggaggtgtctg

SEQ ID NO: 743486 - DNA, 33 bp, Homo sapien
cctaagaatacagagataggtaggaggtgtctg

SEQ ID NO: 743487 - DNA, 33 bp, Homo sapien
gatacatctaccagcaatgatgaaactgaggca

SEQ ID NO: 743488 - DNA, 33 bp, Homo sapien
gatacatctaccagcattgatgaaactgaggca

SEQ ID NO: 743489 - DNA, 33 bp, Homo sapien
aaatatgaatcttccacgctactaaaatgaaaa

SEQ ID NO: 743490 - DNA, 33 bp, Homo sapien
aaatatgaatcttccatgctactaaaatgaaaa

SEQ ID NO: 743491 - DNA, 33 bp, Homo sapien
ggaaacaatacccacacgtgctctgtatttaag

SEQ ID NO: 743492 - DNA, 33 bp, Homo sapien
ggaaacaatacccacatgtgctctgtatttaag

SEQ ID NO: 743493 - DNA, 33 bp, Homo sapien
ctttctcaagccttgagcatctaaaaggtgctc

SEQ ID NO: 743494 - DNA, 33 bp, Homo sapien
ctttctcaagccttgatcatctaaaaggtgctc

SEQ ID NO: 743495 - DNA, 33 bp, Homo sapien
tcaggcttctgagaggccacccagatagcagtc

SEQ ID NO: 743496 - DNA, 33 bp, Homo sapien
tcaggcttctgagaggtcacccagatagcagtc

SEQ ID NO: 743497 - DNA, 33 bp, Homo sapien
ttcagcatctaccacaccttcacaatctggctt

SEQ ID NO: 743498 - DNA, 33 bp, Homo sapien
ttcagcatctaccacatcttcacaatctggctt

SEQ ID NO: 743499 - DNA, 33 bp, Homo sapien
ggcatatttgtgttcaatacagtaaaggaatca

SEQ ID NO: 743500 - DNA, 33 bp, Homo sapien
ggcatatttgtgttcagtacagtaaaggaatca

SEQ ID NO: 743501 - DNA, 33 bp, Homo sapien
gtaaagaatgggactaaacatactgctttacat

SEQ ID NO: 743502 - DNA, 33 bp, Homo sapien
gtaaagaatgggactagacatactgctttacat

SEQ ID NO: 743503 - DNA, 33 bp, Homo sapien
gaagtttcatctaaaaatagatcagaagtaatt

SEQ ID NO: 743504 - DNA, 33 bp, Homo sapien
gaagtttcatctaaaagtagatcagaagtaatt

SEQ ID NO: 743505 - DNA, 33 bp, Homo sapien
aaatttcaacagcaccagacaagaactaaagca

SEQ ID NO: 743506 - DNA, 33 bp, Homo sapien
aaatttcaacagcaccggacaagaactaaagca

SEQ ID NO: 743507 - DNA, 33 bp, Homo sapien
tctcaagtttaagaaacagcgtttagagttaca

SEQ ID NO: 743508 - DNA, 33 bp, Homo sapien
tctcaagtttaagaaatagcgtttagagttaca

SEQ ID NO: 743509 - DNA, 33 bp, Homo sapien
gagggtcaaaggattacagtagtgataatgcgt

SEQ ID NO: 743510 - DNA, 33 bp, Homo sapien
gagggtcaaaggattatagtagtgataatgcgt

SEQ ID NO: 743511 - DNA, 33 bp, Homo sapien
gagggtgtgaggataccgaaccagagctggagc

SEQ ID NO: 743512 - DNA, 33 bp, Homo sapien
gagggtgtgaggatactgaaccagagctggagc

SEQ ID NO: 743513 - DNA, 33 bp, Homo sapien
cacccaactgctgagaacttatctggaagctga

SEQ ID NO: 743514 - DNA, 33 bp, Homo sapien
cacccaactgctgagagcttatctggaagctga

SEQ ID NO: 743515 - DNA, 33 bp, Homo sapien
agatgatggcggtgaacaaactccatgtctaag

SEQ ID NO: 743516 - DNA, 33 bp, Homo sapien
agatgatggcggtgaataaactccatgtctaag

SEQ ID NO: 743517 - DNA, 33 bp, Homo sapien
ttgttggcaggattcacctccttacaactatag

SEQ ID NO: 743518 - DNA, 33 bp, Homo sapien
ttgttggcaggattcatctccttacaactatag

SEQ ID NO: 743519 - DNA, 33 bp, Homo sapien
ctgtaacaaaaattccccaatctgcttcatggg

SEQ ID NO: 743520 - DNA, 33 bp, Homo sapien
ctgtaacaaaaattcctcaatctgcttcatggg

SEQ ID NO: 743521 - DNA, 33 bp, Homo sapien
gactagctgtaaaggacatatattttgccctgt

SEQ ID NO: 743522 - DNA, 33 bp, Homo sapien
gactagctgtaaaggagatatattttgccctgt

SEQ ID NO: 743523 - DNA, 33 bp, Homo sapien
ttgattgctataatagacaaaactatgggtcca

SEQ ID NO: 743524 - DNA, 33 bp, Homo sapien
ttgattgctataataggcaaaactatgggtcca

SEQ ID NO: 743525 - DNA, 33 bp, Homo sapien
atagttctggccacgaaaataggatgctgatac

SEQ ID NO: 743526 - DNA, 33 bp, Homo sapien
atagttctggccacgagaataggatgctgatac

SEQ ID NO: 743527 - DNA, 33 bp, Homo sapien
caaaggaattcaggaaaaggaagactagtggtt

SEQ ID NO: 743528 - DNA, 33 bp, Homo sapien
caaaggaattcaggaagaggaagactagtggtt

SEQ ID NO: 743529 - DNA, 33 bp, Homo sapien
gagctcacatggtaaaggatgtctgccaccttc

SEQ ID NO: 743530 - DNA, 33 bp, Homo sapien
gagctcacatggtaaatgatgtctgccaccttc

SEQ ID NO: 743531 - DNA, 33 bp, Homo sapien
tttacaacacaaagcaatgatacatgtttgagg

SEQ ID NO: 743532 - DNA, 33 bp, Homo sapien
tttacaacacaaagcagtgatacatgtttgagg

SEQ ID NO: 743533 - DNA, 33 bp, Homo sapien
tagatgctgctttcaagtcaagagaaaatgtaa

SEQ ID NO: 743534 - DNA, 33 bp, Homo sapien
tagatgctgctttcaattcaagagaaaatgtaa

SEQ ID NO: 743535 - DNA, 33 bp, Homo sapien
gtaaatttgcataatagcaatgtgttatgtgac

SEQ ID NO: 743536 - DNA, 33 bp, Homo sapien
gtaaatttgcataatatcaatgtgttatgtgac

SEQ ID NO: 743537 - DNA, 33 bp, Homo sapien
ttcagtatgttctgaacacacaatggctaatat

SEQ ID NO: 743538 - DNA, 33 bp, Homo sapien
ttcagtatgttctgaatacacaatggctaatat

SEQ ID NO: 743539 - DNA, 33 bp, Homo sapien
tattccataatgctgacgtaggaattctgtaaa

SEQ ID NO: 743540 - DNA, 33 bp, Homo sapien
tattccataatgctgatgtaggaattctgtaaa

SEQ ID NO: 743541 - DNA, 33 bp, Homo sapien
agagagatggtaagtactaagttatgcctttag

SEQ ID NO: 743542 - DNA, 33 bp, Homo sapien
agagagatggtaagtattaagttatgcctttag

SEQ ID NO: 743543 - DNA, 33 bp, Homo sapien
tgatcagggtcagctacctacaagacagttcat

SEQ ID NO: 743544 - DNA, 33 bp, Homo sapien
tgatcagggtcagctatctacaagacagttcat

SEQ ID NO: 743545 - DNA, 33 bp, Homo sapien
gtaaatagtagtggcaaacttgaatttgtttct

SEQ ID NO: 743546 - DNA, 33 bp, Homo sapien
gtaaatagtagtggcacacttgaatttgtttct

SEQ ID NO: 743547 - DNA, 33 bp, Homo sapien
gtgtggaactctttgaaaatttgattaaagata

SEQ ID NO: 743548 - DNA, 33 bp, Homo sapien
gtgtggaactctttgagaatttgattaaagata

SEQ ID NO: 743549 - DNA, 33 bp, Homo sapien
gacatttgcttttcataatatgctgaggtgata

SEQ ID NO: 743550 - DNA, 33 bp, Homo sapien
gacatttgcttttcatgatatgctgaggtgata

SEQ ID NO: 743551 - DNA, 33 bp, Homo sapien
ccattccacagttctacaagatgacaggcagga

SEQ ID NO: 743552 - DNA, 33 bp, Homo sapien
ccattccacagttctataagatgacaggcagga

SEQ ID NO: 743553 - DNA, 33 bp, Homo sapien
ccagagaaagatcacacaaggattggtaaggca

SEQ ID NO: 743554 - DNA, 33 bp, Homo sapien
ccagagaaagatcacagaaggattggtaaggca

SEQ ID NO: 743555 - DNA, 33 bp, Homo sapien
tgaaggtagtaaataaacttaaatattgtgtac

SEQ ID NO: 743556 - DNA, 33 bp, Homo sapien
tgaaggtagtaaataaccttaaatattgtgtac

SEQ ID NO: 743557 - DNA, 33 bp, Homo sapien
agcttaacactcctacagaaaacggtcttcttc

SEQ ID NO: 743558 - DNA, 33 bp, Homo sapien
agcttaacactcctacggaaaacggtcttcttc

SEQ ID NO: 743559 - DNA, 33 bp, Homo sapien
aggagtctgtaaaggacactggtaaatgtacgt

SEQ ID NO: 743560 - DNA, 33 bp, Homo sapien
aggagtctgtaaaggatactggtaaatgtacgt

SEQ ID NO: 743561 - DNA, 33 bp, Homo sapien
tgctggagaatcaaaccaatagaagtcttaagg

SEQ ID NO: 743562 - DNA, 33 bp, Homo sapien
tgctggagaatcaaactaatagaagtcttaagg

SEQ ID NO: 743563 - DNA, 33 bp, Homo sapien
ttgattctccagcacaagtcctcctttgaacaa

SEQ ID NO: 743564 - DNA, 33 bp, Homo sapien
ttgattctccagcacaggtcctcctttgaacaa

SEQ ID NO: 743565 - DNA, 33 bp, Homo sapien
aagtgaaatgaaagaaagtcaaagctaggtaaa

SEQ ID NO: 743566 - DNA, 33 bp, Homo sapien
aagtgaaatgaaagaaggtcaaagctaggtaaa

SEQ ID NO: 743567 - DNA, 33 bp, Homo sapien
actctcaaaactccagcaaaccctcttttatct

SEQ ID NO: 743568 - DNA, 33 bp, Homo sapien
actctcaaaactccaggaaaccctcttttatct

SEQ ID NO: 743569 - DNA, 33 bp, Homo sapien
tgaaagtaaatatccccggccggcactacttca

SEQ ID NO: 743570 - DNA, 33 bp, Homo sapien
tgaaagtaaatatccctggccggcactacttca

SEQ ID NO: 743571 - DNA, 33 bp, Homo sapien
aaagaaaaatggtctaaaaagtgcacgatctaa

SEQ ID NO: 743572 - DNA, 33 bp, Homo sapien
aaagaaaaatggtctacaaagtgcacgatctaa

SEQ ID NO: 743573 - DNA, 33 bp, Homo sapien
gctttaacatagagaaacttggcttgaagttcc

SEQ ID NO: 743574 - DNA, 33 bp, Homo sapien
gctttaacatagagaatcttggcttgaagttcc

SEQ ID NO: 743575 - DNA, 33 bp, Homo sapien
attgcagaaatttggaacttcatagtctatagg

SEQ ID NO: 743576 - DNA, 33 bp, Homo sapien
attgcagaaatttggaccttcatagtctatagg

SEQ ID NO: 743577 - DNA, 33 bp, Homo sapien
cgttctaggacaaaaaatcaatacttccgctgc

SEQ ID NO: 743578 - DNA, 33 bp, Homo sapien
cgttctaggacaaaaactcaatacttccgctgc

SEQ ID NO: 743579 - DNA, 33 bp, Homo sapien
aaagttaaatgattcaagtgacaaagttgatac

SEQ ID NO: 743580 - DNA, 33 bp, Homo sapien
aaagttaaatgattcaggtgacaaagttgatac

SEQ ID NO: 743581 - DNA, 33 bp, Homo sapien
caataatctgtgataaatgaggctttctgaccc

SEQ ID NO: 743582 - DNA, 33 bp, Homo sapien
caataatctgtgataagtgaggctttctgaccc

SEQ ID NO: 743583 - DNA, 33 bp, Homo sapien
ataaacattgggtttcaagaattaaggtgttta

SEQ ID NO: 743584 - DNA, 33 bp, Homo sapien
ataaacattgggtttcgagaattaaggtgttta

SEQ ID NO: 743585 - DNA, 33 bp, Homo sapien
atatcatatctatctcaacaaatctacaatgta

SEQ ID NO: 743586 - DNA, 33 bp, Homo sapien
atatcatatctatctcgacaaatctacaatgta

SEQ ID NO: 743587 - DNA, 33 bp, Homo sapien
aaagacaattactgcaagattctagttatagtg

SEQ ID NO: 743588 - DNA, 33 bp, Homo sapien
aaagacaattactgcatgattctagttatagtg

SEQ ID NO: 743589 - DNA, 33 bp, Homo sapien
ttaatactgggaatacaatcatgaactaaaagc

SEQ ID NO: 743590 - DNA, 33 bp, Homo sapien
ttaatactgggaatacgatcatgaactaaaagc

SEQ ID NO: 743591 - DNA, 33 bp, Homo sapien
aactcttagagcgaaaaggctagaatactacag

SEQ ID NO: 743592 - DNA, 33 bp, Homo sapien
aactcttagagcgaaacggctagaatactacag

SEQ ID NO: 743593 - DNA, 33 bp, Homo sapien
catgcctgtgatttcaacattttgagaggccaa

SEQ ID NO: 743594 - DNA, 33 bp, Homo sapien
catgcctgtgatttcagcattttgagaggccaa

SEQ ID NO: 743595 - DNA, 33 bp, Homo sapien
ccactgctcctttagacggccagggttcttctg

SEQ ID NO: 743596 - DNA, 33 bp, Homo sapien
ccactgctcctttagatggccagggttcttctg

SEQ ID NO: 743597 - DNA, 33 bp, Homo sapien
agaacttgcatgaaaacgaatagattgatcaat

SEQ ID NO: 743598 - DNA, 33 bp, Homo sapien
agaacttgcatgaaaatgaatagattgatcaat

SEQ ID NO: 743599 - DNA, 33 bp, Homo sapien
aactatgtagtactgacgttagtattttattgg

SEQ ID NO: 743600 - DNA, 33 bp, Homo sapien
aactatgtagtactgatgttagtattttattgg

SEQ ID NO: 743601 - DNA, 33 bp, Homo sapien
ttatttttcaatcacaaagaggaagattaattg

SEQ ID NO: 743602 - DNA, 33 bp, Homo sapien
ttatttttcaatcacatagaggaagattaattg

SEQ ID NO: 743603 - DNA, 33 bp, Homo sapien
gtataactctaatggaacactaaacaatttaac

SEQ ID NO: 743604 - DNA, 33 bp, Homo sapien
gtataactctaatggagcactaaacaatttaac

SEQ ID NO: 743605 - DNA, 33 bp, Homo sapien
caacttaaaatttacactaggtagtatttaagc

SEQ ID NO: 743606 - DNA, 33 bp, Homo sapien
caacttaaaatttacagtaggtagtatttaagc

SEQ ID NO: 743607 - DNA, 33 bp, Homo sapien
tatttgagaaaaaatgaaaatgccataattatc

SEQ ID NO: 743608 - DNA, 33 bp, Homo sapien
tatttgagaaaaaatggaaatgccataattatc

SEQ ID NO: 743609 - DNA, 33 bp, Homo sapien
tgtgaataactttggaaaacgggatattaacaa

SEQ ID NO: 743610 - DNA, 33 bp, Homo sapien
tgtgaataactttggacaacgggatattaacaa

SEQ ID NO: 743611 - DNA, 33 bp, Homo sapien
aaggcattcttataatcagacattttgtttttg

SEQ ID NO: 743612 - DNA, 33 bp, Homo sapien
aaggcattcttataatgagacattttgtttttg

SEQ ID NO: 743613 - DNA, 33 bp, Homo sapien
tgcagactttttgtgcacttttgaatttcaaaa

SEQ ID NO: 743614 - DNA, 33 bp, Homo sapien
tgcagactttttgtgcgcttttgaatttcaaaa

SEQ ID NO: 743615 - DNA, 33 bp, Homo sapien
aaatattcctaactgaagttattgccaagcaat

SEQ ID NO: 743616 - DNA, 33 bp, Homo sapien
aaatattcctaactgaggttattgccaagcaat

SEQ ID NO: 743617 - DNA, 33 bp, Homo sapien
tgtcaggaggcatcctaaaccttggcaaaataa

SEQ ID NO: 743618 - DNA, 33 bp, Homo sapien
tgtcaggaggcatccttaaccttggcaaaataa

SEQ ID NO: 743619 - DNA, 33 bp, Homo sapien
cccccttgagatggtaataatctgttttcgtct

SEQ ID NO: 743620 - DNA, 33 bp, Homo sapien
cccccttgagatggtagtaatctgttttcgtct

SEQ ID NO: 743621 - DNA, 33 bp, Homo sapien
agttcaagacactcagaagactatgtggagagg

SEQ ID NO: 743622 - DNA, 33 bp, Homo sapien
agttcaagacactcaggagactatgtggagagg

SEQ ID NO: 743623 - DNA, 33 bp, Homo sapien
aaaatgtaagatctgacactagaaagttaatag

SEQ ID NO: 743624 - DNA, 33 bp, Homo sapien
aaaatgtaagatctgatactagaaagttaatag

SEQ ID NO: 743625 - DNA, 33 bp, Homo sapien
gctgtaaaactgccacacatttagggccataaa

SEQ ID NO: 743626 - DNA, 33 bp, Homo sapien
gctgtaaaactgccacgcatttagggccataaa

SEQ ID NO: 743627 - DNA, 33 bp, Homo sapien
tgtaattatcaaagacaaaaaaatgcagtgtgt

SEQ ID NO: 743628 - DNA, 33 bp, Homo sapien
tgtaattatcaaagaccaaaaaatgcagtgtgt

SEQ ID NO: 743629 - DNA, 33 bp, Homo sapien
cttgtacaagaccatagagatcagtattcgata

SEQ ID NO: 743630 - DNA, 33 bp, Homo sapien
cttgtacaagaccatatagatcagtattcgata

SEQ ID NO: 743631 - DNA, 33 bp, Homo sapien
cacagataattcagaaatctccaaatggctcat

SEQ ID NO: 743632 - DNA, 33 bp, Homo sapien
cacagataattcagaagtctccaaatggctcat

SEQ ID NO: 743633 - DNA, 33 bp, Homo sapien
ataggtcataggggcaagcaacccataatttag

SEQ ID NO: 743634 - DNA, 33 bp, Homo sapien
ataggtcataggggcaggcaacccataatttag

SEQ ID NO: 743635 - DNA, 33 bp, Homo sapien
atgatgtatgaggaaactcacaccttcatctgc

SEQ ID NO: 743636 - DNA, 33 bp, Homo sapien
atgatgtatgaggaaattcacaccttcatctgc

SEQ ID NO: 743637 - DNA, 33 bp, Homo sapien
ttagcatttcagaaaactttgttaaccccagac

SEQ ID NO: 743638 - DNA, 33 bp, Homo sapien
ttagcatttcagaaaattttgttaaccccagac

SEQ ID NO: 743639 - DNA, 33 bp, Homo sapien
tgtgtgaaaggtaatcaagagactcaagaccca

SEQ ID NO: 743640 - DNA, 33 bp, Homo sapien
tgtgtgaaaggtaatcgagagactcaagaccca

SEQ ID NO: 743641 - DNA, 33 bp, Homo sapien
ttttaagcactttgtacgtattagttcaattaa

SEQ ID NO: 743642 - DNA, 33 bp, Homo sapien
ttttaagcactttgtatgtattagttcaattaa

SEQ ID NO: 743643 - DNA, 33 bp, Homo sapien
acctggaataagaatcagaataccaaattttag

SEQ ID NO: 743644 - DNA, 33 bp, Homo sapien
acctggaataagaatctgaataccaaattttag

SEQ ID NO: 743645 - DNA, 33 bp, Homo sapien
aacttagctgctttgagatttatcttactaaag

SEQ ID NO: 743646 - DNA, 33 bp, Homo sapien
aacttagctgctttgatatttatcttactaaag

SEQ ID NO: 743647 - DNA, 33 bp, Homo sapien
aaagatataagctacactatagcctcacaagca

SEQ ID NO: 743648 - DNA, 33 bp, Homo sapien
aaagatataagctacagtatagcctcacaagca

SEQ ID NO: 743649 - DNA, 33 bp, Homo sapien
tatatcaatgcataggccatacagtttgggtct

SEQ ID NO: 743650 - DNA, 33 bp, Homo sapien
tatatcaatgcataggtcatacagtttgggtct

SEQ ID NO: 743651 - DNA, 33 bp, Homo sapien
aaaatggtataagaacaagggaccagttatcat

SEQ ID NO: 743652 - DNA, 33 bp, Homo sapien
aaaatggtataagaaccagggaccagttatcat

SEQ ID NO: 743653 - DNA, 33 bp, Homo sapien
caattaatcttgagctaaatcagcaatccttga

SEQ ID NO: 743654 - DNA, 33 bp, Homo sapien
caattaatcttgagctgaatcagcaatccttga

SEQ ID NO: 743655 - DNA, 33 bp, Homo sapien
ctcttgagagtatatccattcccacagctttgt

SEQ ID NO: 743656 - DNA, 33 bp, Homo sapien
ctcttgagagtatatctattcccacagctttgt

SEQ ID NO: 743657 - DNA, 33 bp, Homo sapien
actaatgcttcagacacgatgtttcccttaaca

SEQ ID NO: 743658 - DNA, 33 bp, Homo sapien
actaatgcttcagacaggatgtttcccttaaca

SEQ ID NO: 743659 - DNA, 33 bp, Homo sapien
ttccatccaatcacacaatttttccttgttttc

SEQ ID NO: 743660 - DNA, 33 bp, Homo sapien
ttccatccaatcacacgatttttccttgttttc

SEQ ID NO: 743661 - DNA, 33 bp, Homo sapien
gcagttgttttttatgaaattcatcagttgtgg

SEQ ID NO: 743662 - DNA, 33 bp, Homo sapien
gcagttgttttttatggaattcatcagttgtgg

SEQ ID NO: 743663 - DNA, 33 bp, Homo sapien
gtatctataaaactaactggctattggttctaa

SEQ ID NO: 743664 - DNA, 33 bp, Homo sapien
gtatctataaaactaattggctattggttctaa

SEQ ID NO: 743665 - DNA, 33 bp, Homo sapien
ttccatagaaagagaacgataatggacagaaca

SEQ ID NO: 743666 - DNA, 33 bp, Homo sapien
ttccatagaaagagaatgataatggacagaaca

SEQ ID NO: 743667 - DNA, 33 bp, Homo sapien
ctgaagtgtaagggacacgaggaacacagtgca

SEQ ID NO: 743668 - DNA, 33 bp, Homo sapien
ctgaagtgtaagggacgcgaggaacacagtgca

SEQ ID NO: 743669 - DNA, 33 bp, Homo sapien
taagaaaacacacccaaagaatctacagctaaa

SEQ ID NO: 743670 - DNA, 33 bp, Homo sapien
taagaaaacacacccagagaatctacagctaaa

SEQ ID NO: 743671 - DNA, 33 bp, Homo sapien
tggagaagcatcaaaaactcaaacaatctctac

SEQ ID NO: 743672 - DNA, 33 bp, Homo sapien
tggagaagcatcaaaacctcaaacaatctctac

SEQ ID NO: 743673 - DNA, 33 bp, Homo sapien
attttctaaaaaatgtaacacacgttatgtact

SEQ ID NO: 743674 - DNA, 33 bp, Homo sapien
attttctaaaaaatgtgacacacgttatgtact

SEQ ID NO: 743675 - DNA, 33 bp, Homo sapien
ttctaaaatcttttcaccccacagtggtaatat

SEQ ID NO: 743676 - DNA, 33 bp, Homo sapien
ttctaaaatcttttcatcccacagtggtaatat

SEQ ID NO: 743677 - DNA, 33 bp, Homo sapien
aagtggctaaaataaaatgagtaacaggtcaca

SEQ ID NO: 743678 - DNA, 33 bp, Homo sapien
aagtggctaaaataaattgagtaacaggtcaca

SEQ ID NO: 743679 - DNA, 33 bp, Homo sapien
taggtgactatgccaaaaagagtttgacatctg

SEQ ID NO: 743680 - DNA, 33 bp, Homo sapien
taggtgactatgccaagaagagtttgacatctg

SEQ ID NO: 743681 - DNA, 33 bp, Homo sapien
gttttcatttagttacaaaaaaagatgaagtca

SEQ ID NO: 743682 - DNA, 33 bp, Homo sapien
gttttcatttagttaccaaaaaagatgaagtca

SEQ ID NO: 743683 - DNA, 33 bp, Homo sapien
ttttgtgcaatactgcaataggtgaccatggag

SEQ ID NO: 743684 - DNA, 33 bp, Homo sapien
ttttgtgcaatactgcgataggtgaccatggag

SEQ ID NO: 743685 - DNA, 33 bp, Homo sapien
ccatgttagagaaggggacaagccattctgaac

SEQ ID NO: 743686 - DNA, 33 bp, Homo sapien
ccatgttagagaagggtacaagccattctgaac

SEQ ID NO: 743687 - DNA, 33 bp, Homo sapien
gacaaccaacagctaacgggtccccgtacctaa

SEQ ID NO: 743688 - DNA, 33 bp, Homo sapien
gacaaccaacagctaatgggtccccgtacctaa

SEQ ID NO: 743689 - DNA, 33 bp, Homo sapien
agagaacaaatgacatcaaatggccaaaatctt

SEQ ID NO: 743690 - DNA, 33 bp, Homo sapien
agagaacaaatgacatgaaatggccaaaatctt

SEQ ID NO: 743691 - DNA, 33 bp, Homo sapien
tcctaaggcaacaagaaggaagtagtcagcata

SEQ ID NO: 743692 - DNA, 33 bp, Homo sapien
tcctaaggcaacaagagggaagtagtcagcata

SEQ ID NO: 743693 - DNA, 33 bp, Homo sapien
gggcacaaaactggacagaagctgagatggatg

SEQ ID NO: 743694 - DNA, 33 bp, Homo sapien
gggcacaaaactggacggaagctgagatggatg

SEQ ID NO: 743695 - DNA, 33 bp, Homo sapien
ctgaatagaccaaatggaggaaagaatctcaga

SEQ ID NO: 743696 - DNA, 33 bp, Homo sapien
ctgaatagaccaaatgtaggaaagaatctcaga

SEQ ID NO: 743697 - DNA, 33 bp, Homo sapien
gtgaaataatacacaacgcctcccagctttgcg

SEQ ID NO: 743698 - DNA, 33 bp, Homo sapien
gtgaaataatacacaatgcctcccagctttgcg

SEQ ID NO: 743699 - DNA, 33 bp, Homo sapien
gcagttaaatcacagacatttttagagtggata

SEQ ID NO: 743700 - DNA, 33 bp, Homo sapien
gcagttaaatcacagagatttttagagtggata

SEQ ID NO: 743701 - DNA, 33 bp, Homo sapien
taagggctcgaatgaaagaagtagacatagcta

SEQ ID NO: 743702 - DNA, 33 bp, Homo sapien
taagggctcgaatgaaggaagtagacatagcta

SEQ ID NO: 743703 - DNA, 33 bp, Homo sapien
tcttcacagggacatgaaaaccagagtgtacta

SEQ ID NO: 743704 - DNA, 33 bp, Homo sapien
tcttcacagggacatggaaaccagagtgtacta

SEQ ID NO: 743705 - DNA, 33 bp, Homo sapien
tgaaaacatttccaaaaaacttcagcatcctgg

SEQ ID NO: 743706 - DNA, 33 bp, Homo sapien
tgaaaacatttccaaagaacttcagcatcctgg

SEQ ID NO: 743707 - DNA, 33 bp, Homo sapien
aataataataattggaaaatatggagtaatagc

SEQ ID NO: 743708 - DNA, 33 bp, Homo sapien
aataataataattggacaatatggagtaatagc

SEQ ID NO: 743709 - DNA, 33 bp, Homo sapien
gaactgggcttttggaataacggcactcctaca

SEQ ID NO: 743710 - DNA, 33 bp, Homo sapien
gaactgggcttttggagtaacggcactcctaca

SEQ ID NO: 743711 - DNA, 33 bp, Homo sapien
catttttacttaaaaactgcatatctatagaaa

SEQ ID NO: 743712 - DNA, 33 bp, Homo sapien
catttttacttaaaaagtgcatatctatagaaa

SEQ ID NO: 743713 - DNA, 33 bp, Homo sapien
tggtgaaaataatggactacagaggcaggttta

SEQ ID NO: 743714 - DNA, 33 bp, Homo sapien
tggtgaaaataatggattacagaggcaggttta

SEQ ID NO: 743715 - DNA, 33 bp, Homo sapien
gaaatgcagtcatacaccacaaaccattttgga

SEQ ID NO: 743716 - DNA, 33 bp, Homo sapien
gaaatgcagtcatacatcacaaaccattttgga

SEQ ID NO: 743717 - DNA, 33 bp, Homo sapien
cttccttgattagagaactattaccttgcattt

SEQ ID NO: 743718 - DNA, 33 bp, Homo sapien
cttccttgattagagagctattaccttgcattt

SEQ ID NO: 743719 - DNA, 33 bp, Homo sapien
ttctgtcagcttattacccaaaaagacaggtag

SEQ ID NO: 743720 - DNA, 33 bp, Homo sapien
ttctgtcagcttattatccaaaaagacaggtag

SEQ ID NO: 743721 - DNA, 33 bp, Homo sapien
cagagagtacagacaactgaaatatgcaaacta

SEQ ID NO: 743722 - DNA, 33 bp, Homo sapien
cagagagtacagacaattgaaatatgcaaacta

SEQ ID NO: 743723 - DNA, 33 bp, Homo sapien
actccaatcgctggcccgagactaaaatacctg

SEQ ID NO: 743724 - DNA, 33 bp, Homo sapien
actccaatcgctggcctgagactaaaatacctg

SEQ ID NO: 743725 - DNA, 33 bp, Homo sapien
gacaatgaaaagtgtccgaaaacccatcaaaat

SEQ ID NO: 743726 - DNA, 33 bp, Homo sapien
gacaatgaaaagtgtctgaaaacccatcaaaat

SEQ ID NO: 743727 - DNA, 33 bp, Homo sapien
catttagtactcatcacaccttttacaataaaa

SEQ ID NO: 743728 - DNA, 33 bp, Homo sapien
catttagtactcatcataccttttacaataaaa

SEQ ID NO: 743729 - DNA, 33 bp, Homo sapien
acctcaataaattctacggcacatcagtctgtg

SEQ ID NO: 743730 - DNA, 33 bp, Homo sapien
acctcaataaattctatggcacatcagtctgtg

SEQ ID NO: 743731 - DNA, 33 bp, Homo sapien
acttggcaaaaccagaagaaaacatggacccaa

SEQ ID NO: 743732 - DNA, 33 bp, Homo sapien
acttggcaaaaccagacgaaaacatggacccaa

SEQ ID NO: 743733 - DNA, 33 bp, Homo sapien
cccccaatatagagaaaagacagcaggttactc

SEQ ID NO: 743734 - DNA, 33 bp, Homo sapien
cccccaatatagagaagagacagcaggttactc

SEQ ID NO: 743735 - DNA, 33 bp, Homo sapien
tttccaaatgttacaagcccatcatctgttatg

SEQ ID NO: 743736 - DNA, 33 bp, Homo sapien
tttccaaatgttacaatcccatcatctgttatg

SEQ ID NO: 743737 - DNA, 33 bp, Homo sapien
aaaatgtatgtagtgcaagcctctaagttttaa

SEQ ID NO: 743738 - DNA, 33 bp, Homo sapien
aaaatgtatgtagtgcgagcctctaagttttaa

SEQ ID NO: 743739 - DNA, 33 bp, Homo sapien
tcattttaacttgaaaactgatggtagaagata

SEQ ID NO: 743740 - DNA, 33 bp, Homo sapien
tcattttaacttgaaacctgatggtagaagata

SEQ ID NO: 743741 - DNA, 33 bp, Homo sapien
aaaggaggactttgtaccttcttaggggaagag

SEQ ID NO: 743742 - DNA, 33 bp, Homo sapien
aaaggaggactttgtagcttcttaggggaagag

SEQ ID NO: 743743 - DNA, 33 bp, Homo sapien
cgtgtggcaggtcctaaatagaggagcaggaga

SEQ ID NO: 743744 - DNA, 33 bp, Homo sapien
cgtgtggcaggtcctagatagaggagcaggaga

SEQ ID NO: 743745 - DNA, 33 bp, Homo sapien
gttagagaggaaagccaacgatgtaagagccca

SEQ ID NO: 743746 - DNA, 33 bp, Homo sapien
gttagagaggaaagccgacgatgtaagagccca

SEQ ID NO: 743747 - DNA, 33 bp, Homo sapien
aagattcagtggcttaaaatagactgatagaat

SEQ ID NO: 743748 - DNA, 33 bp, Homo sapien
aagattcagtggcttacaatagactgatagaat

SEQ ID NO: 743749 - DNA, 33 bp, Homo sapien
ttctaccctcattgctcaacccaaaaccataaa

SEQ ID NO: 743750 - DNA, 33 bp, Homo sapien
ttctaccctcattgctgaacccaaaaccataaa

SEQ ID NO: 743751 - DNA, 33 bp, Homo sapien
agacctgcaggcatcaacatcctttgtctatta

SEQ ID NO: 743752 - DNA, 33 bp, Homo sapien
agacctgcaggcatcaccatcctttgtctatta

SEQ ID NO: 743753 - DNA, 33 bp, Homo sapien
aaaagcctaattcctaagcctaatctcagttca

SEQ ID NO: 743754 - DNA, 33 bp, Homo sapien
aaaagcctaattcctatgcctaatctcagttca

SEQ ID NO: 743755 - DNA, 33 bp, Homo sapien
aaatgttgatgactccagacaatgctgttgaga

SEQ ID NO: 743756 - DNA, 33 bp, Homo sapien
aaatgttgatgactccggacaatgctgttgaga

SEQ ID NO: 743757 - DNA, 33 bp, Homo sapien
ccatttggtatccttagcaagaacagatgaaag

SEQ ID NO: 743758 - DNA, 33 bp, Homo sapien
ccatttggtatccttatcaagaacagatgaaag

SEQ ID NO: 743759 - DNA, 33 bp, Homo sapien
attggtggaaatcaacaagctgaaaaaactaaa

SEQ ID NO: 743760 - DNA, 33 bp, Homo sapien
attggtggaaatcaaccagctgaaaaaactaaa

SEQ ID NO: 743761 - DNA, 33 bp, Homo sapien
atttctagtaaagttacaaagccactatgtaca

SEQ ID NO: 743762 - DNA, 33 bp, Homo sapien
atttctagtaaagttataaagccactatgtaca

SEQ ID NO: 743763 - DNA, 33 bp, Homo sapien
attcaatattgatgtgaacctaaaacttctcta

SEQ ID NO: 743764 - DNA, 33 bp, Homo sapien
attcaatattgatgtgcacctaaaacttctcta

SEQ ID NO: 743765 - DNA, 33 bp, Homo sapien
tgggcaaagggtatacaggaaatctctaaactt

SEQ ID NO: 743766 - DNA, 33 bp, Homo sapien
tgggcaaagggtatacgggaaatctctaaactt

SEQ ID NO: 743767 - DNA, 33 bp, Homo sapien
ctatctcatgttttgcacttcccaaaaaagata

SEQ ID NO: 743768 - DNA, 33 bp, Homo sapien
ctatctcatgttttgcgcttcccaaaaaagata

SEQ ID NO: 743769 - DNA, 33 bp, Homo sapien
catgccttattaatcaatacatcaactcttagg

SEQ ID NO: 743770 - DNA, 33 bp, Homo sapien
catgccttattaatcagtacatcaactcttagg

SEQ ID NO: 743771 - DNA, 33 bp, Homo sapien
taatctgaagtctagcagaggatttgagaatgg

SEQ ID NO: 743772 - DNA, 33 bp, Homo sapien
taatctgaagtctagcggaggatttgagaatgg

SEQ ID NO: 743773 - DNA, 33 bp, Homo sapien
gtttgcctacttttaaggagattatctgttttt

SEQ ID NO: 743774 - DNA, 33 bp, Homo sapien
gtttgcctacttttaatgagattatctgttttt

SEQ ID NO: 743775 - DNA, 33 bp, Homo sapien
atattagtttctagacacctgagaagcttaatg

SEQ ID NO: 743776 - DNA, 33 bp, Homo sapien
atattagtttctagactcctgagaagcttaatg

SEQ ID NO: 743777 - DNA, 33 bp, Homo sapien
tgaagccagccaccacagggaaatgattggaac

SEQ ID NO: 743778 - DNA, 33 bp, Homo sapien
tgaagccagccaccacggggaaatgattggaac

SEQ ID NO: 743779 - DNA, 33 bp, Homo sapien
agcaatgtagaaggccactctttctataagcag

SEQ ID NO: 743780 - DNA, 33 bp, Homo sapien
agcaatgtagaaggccgctctttctataagcag

SEQ ID NO: 743781 - DNA, 33 bp, Homo sapien
gtatgtgtgaagaaataaaatctcaattgcata

SEQ ID NO: 743782 - DNA, 33 bp, Homo sapien
gtatgtgtgaagaaatcaaatctcaattgcata

SEQ ID NO: 743783 - DNA, 33 bp, Homo sapien
aggagcaaagtagcaaagtttaagatgtcacat

SEQ ID NO: 743784 - DNA, 33 bp, Homo sapien
aggagcaaagtagcaatgtttaagatgtcacat

SEQ ID NO: 743785 - DNA, 33 bp, Homo sapien
caaatttctacctgcacaatgttgactattccc

SEQ ID NO: 743786 - DNA, 33 bp, Homo sapien
caaatttctacctgcagaatgttgactattccc

SEQ ID NO: 743787 - DNA, 33 bp, Homo sapien
ggactgctctgaagacaaacacttgggtatata

SEQ ID NO: 743788 - DNA, 33 bp, Homo sapien
ggactgctctgaagacgaacacttgggtatata

SEQ ID NO: 743789 - DNA, 33 bp, Homo sapien
agacatttatgaacaactggcagctggattaaa

SEQ ID NO: 743790 - DNA, 33 bp, Homo sapien
agacatttatgaacaattggcagctggattaaa

SEQ ID NO: 743791 - DNA, 33 bp, Homo sapien
ctgccatgatgaactcaaagactgggcttcaga

SEQ ID NO: 743792 - DNA, 33 bp, Homo sapien
ctgccatgatgaactcgaagactgggcttcaga

SEQ ID NO: 743793 - DNA, 33 bp, Homo sapien
agtggttctaaccacaaataaatgctacagaat

SEQ ID NO: 743794 - DNA, 33 bp, Homo sapien
agtggttctaaccacagataaatgctacagaat

SEQ ID NO: 743795 - DNA, 33 bp, Homo sapien
ctctatctccttattaaaaagcaacacatggac

SEQ ID NO: 743796 - DNA, 33 bp, Homo sapien
ctctatctccttattacaaagcaacacatggac

SEQ ID NO: 743797 - DNA, 33 bp, Homo sapien
aaggaagaggtgaaaactggcatgagaagatcc

SEQ ID NO: 743798 - DNA, 33 bp, Homo sapien
aaggaagaggtgaaaattggcatgagaagatcc

SEQ ID NO: 743799 - DNA, 33 bp, Homo sapien
attaatttttgcttaagctagaagagtttatgt

SEQ ID NO: 743800 - DNA, 33 bp, Homo sapien
attaatttttgcttaatctagaagagtttatgt

SEQ ID NO: 743801 - DNA, 33 bp, Homo sapien
tgagttgtatgatcaaatgcagaacttaacagg

SEQ ID NO: 743802 - DNA, 33 bp, Homo sapien
tgagttgtatgatcaagtgcagaacttaacagg

SEQ ID NO: 743803 - DNA, 33 bp, Homo sapien
atactgacaaacccaactgaaggacatttgaca

SEQ ID NO: 743804 - DNA, 33 bp, Homo sapien
atactgacaaacccaattgaaggacatttgaca

SEQ ID NO: 743805 - DNA, 33 bp, Homo sapien
taagccaatctgacacagctaaaggtcaaccaa

SEQ ID NO: 743806 - DNA, 33 bp, Homo sapien
taagccaatctgacacggctaaaggtcaaccaa

SEQ ID NO: 743807 - DNA, 33 bp, Homo sapien
actatgaataacctcgacactcctgaatttgga

SEQ ID NO: 743808 - DNA, 33 bp, Homo sapien
actatgaataacctcgtcactcctgaatttgga

SEQ ID NO: 743809 - DNA, 33 bp, Homo sapien
ctccttatccaggtaccaggtcacatatcagct

SEQ ID NO: 743810 - DNA, 33 bp, Homo sapien
ctccttatccaggtactaggtcacatatcagct

SEQ ID NO: 743811 - DNA, 33 bp, Homo sapien
ttaatagaccatgcaagtaaaacctcatcattt

SEQ ID NO: 743812 - DNA, 33 bp, Homo sapien
ttaatagaccatgcaattaaaacctcatcattt

SEQ ID NO: 743813 - DNA, 33 bp, Homo sapien
acagagaaaaatgtgaataaggaatcactatgc

SEQ ID NO: 743814 - DNA, 33 bp, Homo sapien
acagagaaaaatgtgactaaggaatcactatgc

SEQ ID NO: 743815 - DNA, 33 bp, Homo sapien
actcagaaatgttagaaagccctgaaattgcct

SEQ ID NO: 743816 - DNA, 33 bp, Homo sapien
actcagaaatgttagagagccctgaaattgcct

SEQ ID NO: 743817 - DNA, 33 bp, Homo sapien
gggataacaacactacaattggccaaaatatgc

SEQ ID NO: 743818 - DNA, 33 bp, Homo sapien
gggataacaacactacgattggccaaaatatgc

SEQ ID NO: 743819 - DNA, 33 bp, Homo sapien
tcttcatcatctgtaccaacaatctcttcttaa

SEQ ID NO: 743820 - DNA, 33 bp, Homo sapien
tcttcatcatctgtacgaacaatctcttcttaa

SEQ ID NO: 743821 - DNA, 33 bp, Homo sapien
cttgggccacatatagacaccttaactcacccc

SEQ ID NO: 743822 - DNA, 33 bp, Homo sapien
cttgggccacatataggcaccttaactcacccc

SEQ ID NO: 743823 - DNA, 33 bp, Homo sapien
gagaagaaacaaagccaagaatggaatacgatg

SEQ ID NO: 743824 - DNA, 33 bp, Homo sapien
gagaagaaacaaagccgagaatggaatacgatg

SEQ ID NO: 743825 - DNA, 33 bp, Homo sapien
actagatctttagactaacaacaggatccatgt

SEQ ID NO: 743826 - DNA, 33 bp, Homo sapien
actagatctttagacttacaacaggatccatgt

SEQ ID NO: 743827 - DNA, 33 bp, Homo sapien
gttttgtgctttgggcaagtggtgaaatattga

SEQ ID NO: 743828 - DNA, 33 bp, Homo sapien
gttttgtgctttgggccagtggtgaaatattga

SEQ ID NO: 743829 - DNA, 33 bp, Homo sapien
tcttttcactacttagaaaaagcaaaagattaa

SEQ ID NO: 743830 - DNA, 33 bp, Homo sapien
tcttttcactacttaggaaaagcaaaagattaa

SEQ ID NO: 743831 - DNA, 33 bp, Homo sapien
ctgtatgcaaatcaaaagcttacaaataataat

SEQ ID NO: 743832 - DNA, 33 bp, Homo sapien
ctgtatgcaaatcaaaggcttacaaataataat

SEQ ID NO: 743833 - DNA, 33 bp, Homo sapien
aatccactttcataaaatagcttgagtgagtct

SEQ ID NO: 743834 - DNA, 33 bp, Homo sapien
aatccactttcataaactagcttgagtgagtct

SEQ ID NO: 743835 - DNA, 33 bp, Homo sapien
accatatcttgagccacaaaacaagcctgtgca

SEQ ID NO: 743836 - DNA, 33 bp, Homo sapien
accatatcttgagccataaaacaagcctgtgca

SEQ ID NO: 743837 - DNA, 33 bp, Homo sapien
cctgatgagaccctgcaaacaaatgagcatgaa

SEQ ID NO: 743838 - DNA, 33 bp, Homo sapien
cctgatgagaccctgcgaacaaatgagcatgaa

SEQ ID NO: 743839 - DNA, 33 bp, Homo sapien
agcagaaaacacggtacgagatgaggtcagaga

SEQ ID NO: 743840 - DNA, 33 bp, Homo sapien
agcagaaaacacggtatgagatgaggtcagaga

SEQ ID NO: 743841 - DNA, 33 bp, Homo sapien
tgcaatatgtcacagcaatataattttcctgaa

SEQ ID NO: 743842 - DNA, 33 bp, Homo sapien
tgcaatatgtcacagccatataattttcctgaa

SEQ ID NO: 743843 - DNA, 33 bp, Homo sapien
tcagtccagataaagcgaacaacaaactatact

SEQ ID NO: 743844 - DNA, 33 bp, Homo sapien
tcagtccagataaagctaacaacaaactatact

SEQ ID NO: 743845 - DNA, 33 bp, Homo sapien
cttttacttaatgatcaatagctgttatgcatg

SEQ ID NO: 743846 - DNA, 33 bp, Homo sapien
cttttacttaatgatcgatagctgttatgcatg

SEQ ID NO: 743847 - DNA, 33 bp, Homo sapien
cactctgagtagcatgacaaaatttcactttgt

SEQ ID NO: 743848 - DNA, 33 bp, Homo sapien
cactctgagtagcatgtcaaaatttcactttgt

SEQ ID NO: 743849 - DNA, 33 bp, Homo sapien
taccatcatactttctcactcaacaattgagca

SEQ ID NO: 743850 - DNA, 33 bp, Homo sapien
taccatcatactttctgactcaacaattgagca

SEQ ID NO: 743851 - DNA, 33 bp, Homo sapien
atgcattggtagaagcaccattctgactatttt

SEQ ID NO: 743852 - DNA, 33 bp, Homo sapien
atgcattggtagaagcgccattctgactatttt

SEQ ID NO: 743853 - DNA, 33 bp, Homo sapien
agaacttagatgcaaactgcatagtgctgaaaa

SEQ ID NO: 743854 - DNA, 33 bp, Homo sapien
agaacttagatgcaaattgcatagtgctgaaaa

SEQ ID NO: 743855 - DNA, 33 bp, Homo sapien
cagttacatctctggagaggcatctagattagc

SEQ ID NO: 743856 - DNA, 33 bp, Homo sapien
cagttacatctctggataggcatctagattagc

SEQ ID NO: 743857 - DNA, 33 bp, Homo sapien
cagaagatgaaaaggcaatgtgacaatggaaac

SEQ ID NO: 743858 - DNA, 33 bp, Homo sapien
cagaagatgaaaaggccatgtgacaatggaaac

SEQ ID NO: 743859 - DNA, 33 bp, Homo sapien
gaagaatgtagtaaaacaaaactctgcaaagaa

SEQ ID NO: 743860 - DNA, 33 bp, Homo sapien
gaagaatgtagtaaaagaaaactctgcaaagaa

SEQ ID NO: 743861 - DNA, 33 bp, Homo sapien
tgctctttcatcacacagagtgatgcatgtagt

SEQ ID NO: 743862 - DNA, 33 bp, Homo sapien
tgctctttcatcacacggagtgatgcatgtagt

SEQ ID NO: 743863 - DNA, 33 bp, Homo sapien
cgatctcctccattgacgcattttctgctcttt

SEQ ID NO: 743864 - DNA, 33 bp, Homo sapien
cgatctcctccattgatgcattttctgctcttt

SEQ ID NO: 743865 - DNA, 33 bp, Homo sapien
tcctatggtttatctaccctgaagtgttggttt

SEQ ID NO: 743866 - DNA, 33 bp, Homo sapien
tcctatggtttatctatcctgaagtgttggttt

SEQ ID NO: 743867 - DNA, 33 bp, Homo sapien
tcatcaatccctcaaacagaatctccctcaagt

SEQ ID NO: 743868 - DNA, 33 bp, Homo sapien
tcatcaatccctcaaagagaatctccctcaagt

SEQ ID NO: 743869 - DNA, 33 bp, Homo sapien
agaggtgacttaatgaagaaatggagccagaat

SEQ ID NO: 743870 - DNA, 33 bp, Homo sapien
agaggtgacttaatgatgaaatggagccagaat

SEQ ID NO: 743871 - DNA, 33 bp, Homo sapien
ggaagtcaactgtcacaaccaaacttggacaac

SEQ ID NO: 743872 - DNA, 33 bp, Homo sapien
ggaagtcaactgtcacgaccaaacttggacaac

SEQ ID NO: 743873 - DNA, 33 bp, Homo sapien
taaccccgtgccttagcacttcttgctcatctt

SEQ ID NO: 743874 - DNA, 33 bp, Homo sapien
taaccccgtgccttagtacttcttgctcatctt

SEQ ID NO: 743875 - DNA, 33 bp, Homo sapien
tgcaaacaacttgaaacgtttgaaatgagatag

SEQ ID NO: 743876 - DNA, 33 bp, Homo sapien
tgcaaacaacttgaaatgtttgaaatgagatag

SEQ ID NO: 743877 - DNA, 33 bp, Homo sapien
gttaatgagtctaatacgggtaaaatcaaggtg

SEQ ID NO: 743878 - DNA, 33 bp, Homo sapien
gttaatgagtctaataggggtaaaatcaaggtg

SEQ ID NO: 743879 - DNA, 33 bp, Homo sapien
aattcctatagttgtacagcagacagaagtttc

SEQ ID NO: 743880 - DNA, 33 bp, Homo sapien
aattcctatagttgtatagcagacagaagtttc

SEQ ID NO: 743881 - DNA, 33 bp, Homo sapien
ataatgtcagatcccacaggtagaaagctcagt

SEQ ID NO: 743882 - DNA, 33 bp, Homo sapien
ataatgtcagatcccagaggtagaaagctcagt

SEQ ID NO: 743883 - DNA, 33 bp, Homo sapien
atttgctgtttattaaatggaagtggatcatca

SEQ ID NO: 743884 - DNA, 33 bp, Homo sapien
atttgctgtttattaagtggaagtggatcatca

SEQ ID NO: 743885 - DNA, 33 bp, Homo sapien
tataccttcaaaacaacccagagagtagggatg

SEQ ID NO: 743886 - DNA, 33 bp, Homo sapien
tataccttcaaaacaatccagagagtagggatg

SEQ ID NO: 743887 - DNA, 33 bp, Homo sapien
ttagtgcccttattgaaggaataaagagaccag

SEQ ID NO: 743888 - DNA, 33 bp, Homo sapien
ttagtgcccttattgagggaataaagagaccag

SEQ ID NO: 743889 - DNA, 33 bp, Homo sapien
agatgaagctattccacgtatagacaataacat

SEQ ID NO: 743890 - DNA, 33 bp, Homo sapien
agatgaagctattccaggtatagacaataacat

SEQ ID NO: 743891 - DNA, 33 bp, Homo sapien
gaccttctgcaaggaaactgactaatttaaata

SEQ ID NO: 743892 - DNA, 33 bp, Homo sapien
gaccttctgcaaggaacctgactaatttaaata

SEQ ID NO: 743893 - DNA, 33 bp, Homo sapien
tggatactgaagcaacactttccagggtttgtg

SEQ ID NO: 743894 - DNA, 33 bp, Homo sapien
tggatactgaagcaacgctttccagggtttgtg

SEQ ID NO: 743895 - DNA, 33 bp, Homo sapien
gctcagcatattcgaactgttttttcactctaa

SEQ ID NO: 743896 - DNA, 33 bp, Homo sapien
gctcagcatattcgaagtgttttttcactctaa

SEQ ID NO: 743897 - DNA, 33 bp, Homo sapien
gaaacaggtgagattacgagttcggtttggggc

SEQ ID NO: 743898 - DNA, 33 bp, Homo sapien
gaaacaggtgagattatgagttcggtttggggc

SEQ ID NO: 743899 - DNA, 33 bp, Homo sapien
atgcacaggatataaccacacattagcaggttg

SEQ ID NO: 743900 - DNA, 33 bp, Homo sapien
atgcacaggatataactacacattagcaggttg

SEQ ID NO: 743901 - DNA, 33 bp, Homo sapien
actgatcattgagaaaaaattgtaccatttgcc

SEQ ID NO: 743902 - DNA, 33 bp, Homo sapien
actgatcattgagaaagaattgtaccatttgcc

SEQ ID NO: 743903 - DNA, 33 bp, Homo sapien
ttaagcagggtgtaaacgtacagtataaattta

SEQ ID NO: 743904 - DNA, 33 bp, Homo sapien
ttaagcagggtgtaaatgtacagtataaattta

SEQ ID NO: 743905 - DNA, 33 bp, Homo sapien
gtgtaagggaatgtggaaacagatagactagaa

SEQ ID NO: 743906 - DNA, 33 bp, Homo sapien
gtgtaagggaatgtgggaacagatagactagaa

SEQ ID NO: 743907 - DNA, 33 bp, Homo sapien
gcatcttatccatttacctcctgtacccactaa

SEQ ID NO: 743908 - DNA, 33 bp, Homo sapien
gcatcttatccatttatctcctgtacccactaa

SEQ ID NO: 743909 - DNA, 33 bp, Homo sapien
tatttccaacagaatacagaaatggtgttcata

SEQ ID NO: 743910 - DNA, 33 bp, Homo sapien
tatttccaacagaatagagaaatggtgttcata

SEQ ID NO: 743911 - DNA, 33 bp, Homo sapien
agttgtacttgatccaaaggcttctactgggct

SEQ ID NO: 743912 - DNA, 33 bp, Homo sapien
agttgtacttgatccataggcttctactgggct

SEQ ID NO: 743913 - DNA, 33 bp, Homo sapien
gcataaaaaggatttccaatgagcacattttat

SEQ ID NO: 743914 - DNA, 33 bp, Homo sapien
gcataaaaaggatttctaatgagcacattttat

SEQ ID NO: 743915 - DNA, 33 bp, Homo sapien
agcttgcaaagtaagtcaaagtgtagttgcatt

SEQ ID NO: 743916 - DNA, 33 bp, Homo sapien
agcttgcaaagtaagttaaagtgtagttgcatt

SEQ ID NO: 743917 - DNA, 33 bp, Homo sapien
tatattttaccatgacaaccttctcagacagac

SEQ ID NO: 743918 - DNA, 33 bp, Homo sapien
tatattttaccatgacgaccttctcagacagac

SEQ ID NO: 743919 - DNA, 33 bp, Homo sapien
gaggattcactataacacaatccaccataatac

SEQ ID NO: 743920 - DNA, 33 bp, Homo sapien
gaggattcactataacgcaatccaccataatac

SEQ ID NO: 743921 - DNA, 33 bp, Homo sapien
aagtccacttctttggaaagctcggccagaaag

SEQ ID NO: 743922 - DNA, 33 bp, Homo sapien
aagtccacttctttggtaagctcggccagaaag

SEQ ID NO: 743923 - DNA, 33 bp, Homo sapien
aaaatactgatacctaactacctacaatatcac

SEQ ID NO: 743924 - DNA, 33 bp, Homo sapien
aaaatactgatacctagctacctacaatatcac

SEQ ID NO: 743925 - DNA, 33 bp, Homo sapien
acggcctctgtgtaaacacaattttctcagtat

SEQ ID NO: 743926 - DNA, 33 bp, Homo sapien
acggcctctgtgtaaatacaattttctcagtat

SEQ ID NO: 743927 - DNA, 33 bp, Homo sapien
gaaaagccacttccaacattatcctcaaagcca

SEQ ID NO: 743928 - DNA, 33 bp, Homo sapien
gaaaagccacttccaatattatcctcaaagcca

SEQ ID NO: 743929 - DNA, 33 bp, Homo sapien
tttccttatctactcaaccaggcaaaagaacct

SEQ ID NO: 743930 - DNA, 33 bp, Homo sapien
tttccttatctactcatccaggcaaaagaacct

SEQ ID NO: 743931 - DNA, 33 bp, Homo sapien
ttgacctcttaggaacgctccacaatctggcct

SEQ ID NO: 743932 - DNA, 33 bp, Homo sapien
ttgacctcttaggaactctccacaatctggcct

SEQ ID NO: 743933 - DNA, 33 bp, Homo sapien
aacaaacaaaaacatccaaaactgccagaagcc

SEQ ID NO: 743934 - DNA, 33 bp, Homo sapien
aacaaacaaaaacatctaaaactgccagaagcc

SEQ ID NO: 743935 - DNA, 33 bp, Homo sapien
aaactttaatacagtacatgaagcctcttctta

SEQ ID NO: 743936 - DNA, 33 bp, Homo sapien
aaactttaatacagtatatgaagcctcttctta

SEQ ID NO: 743937 - DNA, 33 bp, Homo sapien
agaatgattttcagataacgattctttcttttt

SEQ ID NO: 743938 - DNA, 33 bp, Homo sapien
agaatgattttcagatgacgattctttcttttt

SEQ ID NO: 743939 - DNA, 33 bp, Homo sapien
caggcttccacgccaaagttgctccttcctgat

SEQ ID NO: 743940 - DNA, 33 bp, Homo sapien
caggcttccacgccaaggttgctccttcctgat

SEQ ID NO: 743941 - DNA, 33 bp, Homo sapien
ttatatggcacaaaatgatctgttctttatttg

SEQ ID NO: 743942 - DNA, 33 bp, Homo sapien
ttatatggcacaaaattatctgttctttatttg

SEQ ID NO: 743943 - DNA, 33 bp, Homo sapien
atctcagtgttaaaaccgggacactcctgggca

SEQ ID NO: 743944 - DNA, 33 bp, Homo sapien
atctcagtgttaaaactgggacactcctgggca

SEQ ID NO: 743945 - DNA, 33 bp, Homo sapien
ggtgtgttgttattaaagccacattggttgtgt

SEQ ID NO: 743946 - DNA, 33 bp, Homo sapien
ggtgtgttgttattaaggccacattggttgtgt

SEQ ID NO: 743947 - DNA, 33 bp, Homo sapien
gactacagagttcttacgtgaatctgctcaaga

SEQ ID NO: 743948 - DNA, 33 bp, Homo sapien
gactacagagttcttatgtgaatctgctcaaga

SEQ ID NO: 743949 - DNA, 33 bp, Homo sapien
agtgtaactctaacctcaaaaaactagagtaga

SEQ ID NO: 743950 - DNA, 33 bp, Homo sapien
agtgtaactctaacctgaaaaaactagagtaga

SEQ ID NO: 743951 - DNA, 33 bp, Homo sapien
ctaactcacttagaaactctaacgttgttttta

SEQ ID NO: 743952 - DNA, 33 bp, Homo sapien
ctaactcacttagaaattctaacgttgttttta

SEQ ID NO: 743953 - DNA, 33 bp, Homo sapien
agaagtgatgctaaccagaactttagcatctgg

SEQ ID NO: 743954 - DNA, 33 bp, Homo sapien
agaagtgatgctaaccggaactttagcatctgg

SEQ ID NO: 743955 - DNA, 33 bp, Homo sapien
ctctttttttgcactgcagtatttttgtgagtt

SEQ ID NO: 743956 - DNA, 33 bp, Homo sapien
ctctttttttgcactgtagtatttttgtgagtt

SEQ ID NO: 743957 - DNA, 33 bp, Homo sapien
agtcaggctttccctacagttgtgctctctgct

SEQ ID NO: 743958 - DNA, 33 bp, Homo sapien
agtcaggctttccctagagttgtgctctctgct

SEQ ID NO: 743959 - DNA, 33 bp, Homo sapien
ttgcagctgttgtctcaactgaaggctgaggga

SEQ ID NO: 743960 - DNA, 33 bp, Homo sapien
ttgcagctgttgtctcgactgaaggctgaggga

SEQ ID NO: 743961 - DNA, 33 bp, Homo sapien
gccaacaaccatggagaaagcctggaagtggat

SEQ ID NO: 743962 - DNA, 33 bp, Homo sapien
gccaacaaccatggagcaagcctggaagtggat

SEQ ID NO: 743963 - DNA, 33 bp, Homo sapien
ctttgagagcatgaagcagggtcttctaaccta

SEQ ID NO: 743964 - DNA, 33 bp, Homo sapien
ctttgagagcatgaaggagggtcttctaaccta

SEQ ID NO: 743965 - DNA, 33 bp, Homo sapien
ctctaattgtcttcagcccccgatcccactgct

SEQ ID NO: 743966 - DNA, 33 bp, Homo sapien
ctctaattgtcttcagtccccgatcccactgct

SEQ ID NO: 743967 - DNA, 33 bp, Homo sapien
aagagggtagagactacaactgaatgagatgga

SEQ ID NO: 743968 - DNA, 33 bp, Homo sapien
aagagggtagagactagaactgaatgagatgga

SEQ ID NO: 743969 - DNA, 33 bp, Homo sapien
gaaatcaagtggcaaaaatcagatctgagggac

SEQ ID NO: 743970 - DNA, 33 bp, Homo sapien
gaaatcaagtggcaaatatcagatctgagggac

SEQ ID NO: 743971 - DNA, 33 bp, Homo sapien
aggaccacggatttcaactccaccctcattgcg

SEQ ID NO: 743972 - DNA, 33 bp, Homo sapien
aggaccacggatttcagctccaccctcattgcg

SEQ ID NO: 743973 - DNA, 33 bp, Homo sapien
tgttgtccactaaagacggcacagagttggttg

SEQ ID NO: 743974 - DNA, 33 bp, Homo sapien
tgttgtccactaaagatggcacagagttggttg

SEQ ID NO: 743975 - DNA, 33 bp, Homo sapien
tatatataagttctcaatagagctgtttcaacc

SEQ ID NO: 743976 - DNA, 33 bp, Homo sapien
tatatataagttctcagtagagctgtttcaacc

SEQ ID NO: 743977 - DNA, 33 bp, Homo sapien
ggcagtgatgacctcaagaagcataaaatctgt

SEQ ID NO: 743978 - DNA, 33 bp, Homo sapien
ggcagtgatgacctcacgaagcataaaatctgt

SEQ ID NO: 743979 - DNA, 33 bp, Homo sapien
actaaagtgcttttcaacctatgttaagcagac

SEQ ID NO: 743980 - DNA, 33 bp, Homo sapien
actaaagtgcttttcatcctatgttaagcagac

SEQ ID NO: 743981 - DNA, 33 bp, Homo sapien
cagatccaagtaaaccacactacatgctcatgt

SEQ ID NO: 743982 - DNA, 33 bp, Homo sapien
cagatccaagtaaaccgcactacatgctcatgt

SEQ ID NO: 743983 - DNA, 33 bp, Homo sapien
actggagttcccactcaaatgccactaaccctc

SEQ ID NO: 743984 - DNA, 33 bp, Homo sapien
actggagttcccactcgaatgccactaaccctc

SEQ ID NO: 743985 - DNA, 33 bp, Homo sapien
atggctgactgtcctccagctaatccatctggt

SEQ ID NO: 743986 - DNA, 33 bp, Homo sapien
atggctgactgtcctctagctaatccatctggt

SEQ ID NO: 743987 - DNA, 33 bp, Homo sapien
tggaatagacaagaaacctcagaaatgaaagta

SEQ ID NO: 743988 - DNA, 33 bp, Homo sapien
tggaatagacaagaaatctcagaaatgaaagta

SEQ ID NO: 743989 - DNA, 33 bp, Homo sapien
tctttgcaaatccatacgaaattagacacagta

SEQ ID NO: 743990 - DNA, 33 bp, Homo sapien
tctttgcaaatccatatgaaattagacacagta

SEQ ID NO: 743991 - DNA, 33 bp, Homo sapien
tttgtaaaatgcctgcgcaagtctttttgacca

SEQ ID NO: 743992 - DNA, 33 bp, Homo sapien
tttgtaaaatgcctgctcaagtctttttgacca

SEQ ID NO: 743993 - DNA, 33 bp, Homo sapien
caccagcagtgtatgacagttagacgctcgatc

SEQ ID NO: 743994 - DNA, 33 bp, Homo sapien
caccagcagtgtatgagagttagacgctcgatc

SEQ ID NO: 743995 - DNA, 33 bp, Homo sapien
attaattattctcccactctcctatattttcag

SEQ ID NO: 743996 - DNA, 33 bp, Homo sapien
attaattattctcccattctcctatattttcag

SEQ ID NO: 743997 - DNA, 33 bp, Homo sapien
tttaatagccctaaacaggaaacaatccatatg

SEQ ID NO: 743998 - DNA, 33 bp, Homo sapien
tttaatagccctaaacgggaaacaatccatatg

SEQ ID NO: 743999 - DNA, 33 bp, Homo sapien
gttagcacaatgaaaaagcaaggaagcaggtaa

SEQ ID NO: 744000 - DNA, 33 bp, Homo sapien
gttagcacaatgaaaaggcaaggaagcaggtaa

SEQ ID NO: 744001 - DNA, 33 bp, Homo sapien
agctgctggttatacaatattgcaaatacattg

SEQ ID NO: 744002 - DNA, 33 bp, Homo sapien
agctgctggttatacagtattgcaaatacattg

SEQ ID NO: 744003 - DNA, 33 bp, Homo sapien
tttttaatttgtggctaaaatctgaaaccactc

SEQ ID NO: 744004 - DNA, 33 bp, Homo sapien
tttttaatttgtggctcaaatctgaaaccactc

SEQ ID NO: 744005 - DNA, 33 bp, Homo sapien
gacctcttatcgaacccgctttatgttgctctg

SEQ ID NO: 744006 - DNA, 33 bp, Homo sapien
gacctcttatcgaacctgctttatgttgctctg

SEQ ID NO: 744007 - DNA, 33 bp, Homo sapien
ttgatgccttgattcccggaaggagctactgtt

SEQ ID NO: 744008 - DNA, 33 bp, Homo sapien
ttgatgccttgattcctggaaggagctactgtt

SEQ ID NO: 744009 - DNA, 33 bp, Homo sapien
tattttatggagaaaaacaggtgaatcgtgaat

SEQ ID NO: 744010 - DNA, 33 bp, Homo sapien
tattttatggagaaaaccaggtgaatcgtgaat

SEQ ID NO: 744011 - DNA, 33 bp, Homo sapien
aagccagctaccaattaaaaggaccagaaaatt

SEQ ID NO: 744012 - DNA, 33 bp, Homo sapien
aagccagctaccaattcaaaggaccagaaaatt

SEQ ID NO: 744013 - DNA, 33 bp, Homo sapien
tgaagcagagaaaaaaaacactggtgtctgatt

SEQ ID NO: 744014 - DNA, 33 bp, Homo sapien
tgaagcagagaaaaaacacactggtgtctgatt

SEQ ID NO: 744015 - DNA, 33 bp, Homo sapien
gatcaaagtaaagcaacaggaatgcaaaagagt

SEQ ID NO: 744016 - DNA, 33 bp, Homo sapien
gatcaaagtaaagcaataggaatgcaaaagagt

SEQ ID NO: 744017 - DNA, 33 bp, Homo sapien
ctcatcagtgattttcccaggctgttacctgtg

SEQ ID NO: 744018 - DNA, 33 bp, Homo sapien
ctcatcagtgattttctcaggctgttacctgtg

SEQ ID NO: 744019 - DNA, 33 bp, Homo sapien
gcctggcacaactagcaatccataaatcatcag

SEQ ID NO: 744020 - DNA, 33 bp, Homo sapien
gcctggcacaactagcgatccataaatcatcag

SEQ ID NO: 744021 - DNA, 33 bp, Homo sapien
tgatctgcttactatcccccatgccaaagcaag

SEQ ID NO: 744022 - DNA, 33 bp, Homo sapien
tgatctgcttactatctcccatgccaaagcaag

SEQ ID NO: 744023 - DNA, 33 bp, Homo sapien
gatgagaaaggttatgaagtgccacataaggta

SEQ ID NO: 744024 - DNA, 33 bp, Homo sapien
gatgagaaaggttatgtagtgccacataaggta

SEQ ID NO: 744025 - DNA, 33 bp, Homo sapien
attcaatacttatctacagccatgtgtcactta

SEQ ID NO: 744026 - DNA, 33 bp, Homo sapien
attcaatacttatctagagccatgtgtcactta

SEQ ID NO: 744027 - DNA, 33 bp, Homo sapien
tatgtaactccacttacaggaatagaaagtatc

SEQ ID NO: 744028 - DNA, 33 bp, Homo sapien
tatgtaactccacttataggaatagaaagtatc

SEQ ID NO: 744029 - DNA, 33 bp, Homo sapien
ataaaggcctcataaggattgaatttgtgacca

SEQ ID NO: 744030 - DNA, 33 bp, Homo sapien
ataaaggcctcataagtattgaatttgtgacca

SEQ ID NO: 744031 - DNA, 33 bp, Homo sapien
caccactgaattagataatcaataactgtaact

SEQ ID NO: 744032 - DNA, 33 bp, Homo sapien
caccactgaattagatgatcaataactgtaact

SEQ ID NO: 744033 - DNA, 33 bp, Homo sapien
gtcgtgctcccggggaagaaaagcgccaggctc

SEQ ID NO: 744034 - DNA, 33 bp, Homo sapien
gtcgtgctcccggggaggaaaagcgccaggctc

SEQ ID NO: 744035 - DNA, 33 bp, Homo sapien
ctgtctcctaccgcccagccgcggcaaacctga

SEQ ID NO: 744036 - DNA, 33 bp, Homo sapien
ctgtctcctaccgcccggccgcggcaaacctga

SEQ ID NO: 744037 - DNA, 33 bp, Homo sapien
gcattctttccttgaaaaaccaggtctttaaaa

SEQ ID NO: 744038 - DNA, 33 bp, Homo sapien
gcattctttccttgaagaaccaggtctttaaaa

SEQ ID NO: 744039 - DNA, 33 bp, Homo sapien
tctgtttacattttcaaccggaggcaaaccccg

SEQ ID NO: 744040 - DNA, 33 bp, Homo sapien
tctgtttacattttcacccggaggcaaaccccg

SEQ ID NO: 744041 - DNA, 33 bp, Homo sapien
cttgatgttctttcgagggttcttagcttgttc

SEQ ID NO: 744042 - DNA, 33 bp, Homo sapien
cttgatgttctttcgatggttcttagcttgttc

SEQ ID NO: 744043 - DNA, 33 bp, Homo sapien
caccctaccctggtacagaaaagaatgcagagc

SEQ ID NO: 744044 - DNA, 33 bp, Homo sapien
caccctaccctggtacggaaaagaatgcagagc

SEQ ID NO: 744045 - DNA, 33 bp, Homo sapien
agttttatactaaacaaattaacacacgtgaaa

SEQ ID NO: 744046 - DNA, 33 bp, Homo sapien
agttttatactaaacagattaacacacgtgaaa

SEQ ID NO: 744047 - DNA, 33 bp, Homo sapien
ctcagaaaagctgcataacttttccaaagtccc

SEQ ID NO: 744048 - DNA, 33 bp, Homo sapien
ctcagaaaagctgcatgacttttccaaagtccc

SEQ ID NO: 744049 - DNA, 33 bp, Homo sapien
gaaaatcacttagaaagtttatgtcacgagaac

SEQ ID NO: 744050 - DNA, 33 bp, Homo sapien
gaaaatcacttagaaattttatgtcacgagaac

SEQ ID NO: 744051 - DNA, 33 bp, Homo sapien
tttacacagagcagaacttccttaacgctaata

SEQ ID NO: 744052 - DNA, 33 bp, Homo sapien
tttacacagagcagaatttccttaacgctaata

SEQ ID NO: 744053 - DNA, 33 bp, Homo sapien
gtctttctttgaaggagagcagatcagaacttc

SEQ ID NO: 744054 - DNA, 33 bp, Homo sapien
gtctttctttgaaggatagcagatcagaacttc

SEQ ID NO: 744055 - DNA, 33 bp, Homo sapien
aatcatacacttcacaatcatggctttctataa

SEQ ID NO: 744056 - DNA, 33 bp, Homo sapien
aatcatacacttcacactcatggctttctataa

SEQ ID NO: 744057 - DNA, 33 bp, Homo sapien
cctgctttttattcaacagtacacaaatgcatt

SEQ ID NO: 744058 - DNA, 33 bp, Homo sapien
cctgctttttattcaatagtacacaaatgcatt

SEQ ID NO: 744059 - DNA, 33 bp, Homo sapien
tagctcatgttgaatcaccgcatgacacaattt

SEQ ID NO: 744060 - DNA, 33 bp, Homo sapien
tagctcatgttgaatcgccgcatgacacaattt

SEQ ID NO: 744061 - DNA, 33 bp, Homo sapien
tcactgtaacagggctaacttgcaaaaaatttt

SEQ ID NO: 744062 - DNA, 33 bp, Homo sapien
tcactgtaacagggctcacttgcaaaaaatttt

SEQ ID NO: 744063 - DNA, 33 bp, Homo sapien
atttcatatacttcaactggaagaacaactttt

SEQ ID NO: 744064 - DNA, 33 bp, Homo sapien
atttcatatacttcaattggaagaacaactttt

SEQ ID NO: 744065 - DNA, 33 bp, Homo sapien
ggcattatatcagcaacgtgtgtttctgctaca

SEQ ID NO: 744066 - DNA, 33 bp, Homo sapien
ggcattatatcagcaatgtgtgtttctgctaca

SEQ ID NO: 744067 - DNA, 33 bp, Homo sapien
aatattttcttctgcaatgaataatctggcatt

SEQ ID NO: 744068 - DNA, 33 bp, Homo sapien
aatattttcttctgcagtgaataatctggcatt

SEQ ID NO: 744069 - DNA, 33 bp, Homo sapien
tttcatgggtcatacaaggtcacataacaaaat

SEQ ID NO: 744070 - DNA, 33 bp, Homo sapien
tttcatgggtcatacagggtcacataacaaaat

SEQ ID NO: 744071 - DNA, 33 bp, Homo sapien
tttccttatggctgtccctgttttcttcttgag

SEQ ID NO: 744072 - DNA, 33 bp, Homo sapien
tttccttatggctgtctctgttttcttcttgag

SEQ ID NO: 744073 - DNA, 33 bp, Homo sapien
tcctaaggagtgttaacgttggcacttccactg

SEQ ID NO: 744074 - DNA, 33 bp, Homo sapien
tcctaaggagtgttaatgttggcacttccactg

SEQ ID NO: 744075 - DNA, 33 bp, Homo sapien
ctagctcattatttaactagtcttggtgcaaaa

SEQ ID NO: 744076 - DNA, 33 bp, Homo sapien
ctagctcattatttaattagtcttggtgcaaaa

SEQ ID NO: 744077 - DNA, 33 bp, Homo sapien
ctcaaatgtcagctagcacaattggccctccat

SEQ ID NO: 744078 - DNA, 33 bp, Homo sapien
ctcaaatgtcagctagtacaattggccctccat

SEQ ID NO: 744079 - DNA, 33 bp, Homo sapien
actgtatgcctgcatccctggtgtctgttttct

SEQ ID NO: 744080 - DNA, 33 bp, Homo sapien
actgtatgcctgcatctctggtgtctgttttct

SEQ ID NO: 744081 - DNA, 33 bp, Homo sapien
gctgagatttgttatccgagaaaatgaaggggt

SEQ ID NO: 744082 - DNA, 33 bp, Homo sapien
gctgagatttgttatctgagaaaatgaaggggt

SEQ ID NO: 744083 - DNA, 33 bp, Homo sapien
catatccaagctttgacgcattgaggattctac

SEQ ID NO: 744084 - DNA, 33 bp, Homo sapien
catatccaagctttgatgcattgaggattctac

SEQ ID NO: 744085 - DNA, 33 bp, Homo sapien
atttggtcttagatgtcaaaattattaatccaa

SEQ ID NO: 744086 - DNA, 33 bp, Homo sapien
atttggtcttagatgtgaaaattattaatccaa

SEQ ID NO: 744087 - DNA, 33 bp, Homo sapien
atgattagatgattaaagcagttttctacttca

SEQ ID NO: 744088 - DNA, 33 bp, Homo sapien
atgattagatgattaaggcagttttctacttca

SEQ ID NO: 744089 - DNA, 33 bp, Homo sapien
atttcaaattttctctaacactacacattcagg

SEQ ID NO: 744090 - DNA, 33 bp, Homo sapien
atttcaaattttctctcacactacacattcagg

SEQ ID NO: 744091 - DNA, 33 bp, Homo sapien
tgccaggcctgaaattaaaatctgcccctggca

SEQ ID NO: 744092 - DNA, 33 bp, Homo sapien
tgccaggcctgaaattcaaatctgcccctggca

SEQ ID NO: 744093 - DNA, 33 bp, Homo sapien
gctatgagttatttgacagcaggaattctgttc

SEQ ID NO: 744094 - DNA, 33 bp, Homo sapien
gctatgagttatttgagagcaggaattctgttc

SEQ ID NO: 744095 - DNA, 33 bp, Homo sapien
agtcagaccagcagctaaaaataatgtgaagag

SEQ ID NO: 744096 - DNA, 33 bp, Homo sapien
agtcagaccagcagctgaaaataatgtgaagag

SEQ ID NO: 744097 - DNA, 33 bp, Homo sapien
ttcacacttaacacaaaatgaagctgccaatga

SEQ ID NO: 744098 - DNA, 33 bp, Homo sapien
ttcacacttaacacaagatgaagctgccaatga

SEQ ID NO: 744099 - DNA, 33 bp, Homo sapien
tatcaaaagccttaaaatatgcatatgcttttt

SEQ ID NO: 744100 - DNA, 33 bp, Homo sapien
tatcaaaagccttaaagtatgcatatgcttttt

SEQ ID NO: 744101 - DNA, 33 bp, Homo sapien
atagtcttcaaaaacaagtaatcacatcacata

SEQ ID NO: 744102 - DNA, 33 bp, Homo sapien
atagtcttcaaaaacatgtaatcacatcacata

SEQ ID NO: 744103 - DNA, 33 bp, Homo sapien
aggatttagggattgactatatgcgtgagtgag

SEQ ID NO: 744104 - DNA, 33 bp, Homo sapien
aggatttagggattgattatatgcgtgagtgag

SEQ ID NO: 744105 - DNA, 33 bp, Homo sapien
tcattgatgacctttagctagctttgctgtgtc

SEQ ID NO: 744106 - DNA, 33 bp, Homo sapien
tcattgatgacctttatctagctttgctgtgtc

SEQ ID NO: 744107 - DNA, 33 bp, Homo sapien
tggaggccggagagcaggacctaaatttcctca

SEQ ID NO: 744108 - DNA, 33 bp, Homo sapien
tggaggccggagagcatgacctaaatttcctca

SEQ ID NO: 744109 - DNA, 33 bp, Homo sapien
acaggaagcatccaaactggggcagctacagtt

SEQ ID NO: 744110 - DNA, 33 bp, Homo sapien
acaggaagcatccaaattggggcagctacagtt

SEQ ID NO: 744111 - DNA, 33 bp, Homo sapien
ttaattgttggattcaaatatgtccatatggcc

SEQ ID NO: 744112 - DNA, 33 bp, Homo sapien
ttaattgttggattcatatatgtccatatggcc

SEQ ID NO: 744113 - DNA, 33 bp, Homo sapien
tttttcagtttcagtcaccatcatcccaatata

SEQ ID NO: 744114 - DNA, 33 bp, Homo sapien
tttttcagtttcagtcgccatcatcccaatata

SEQ ID NO: 744115 - DNA, 33 bp, Homo sapien
atatgagagaaaggctcaaaagttataatatac

SEQ ID NO: 744116 - DNA, 33 bp, Homo sapien
atatgagagaaaggctgaaaagttataatatac

SEQ ID NO: 744117 - DNA, 33 bp, Homo sapien
gatctttgctttgtcacatctctgagaccacga

SEQ ID NO: 744118 - DNA, 33 bp, Homo sapien
gatctttgctttgtcatatctctgagaccacga

SEQ ID NO: 744119 - DNA, 33 bp, Homo sapien
agataacttaggggtaaccttaattgtatgctt

SEQ ID NO: 744120 - DNA, 33 bp, Homo sapien
agataacttaggggtagccttaattgtatgctt

SEQ ID NO: 744121 - DNA, 33 bp, Homo sapien
ttgtcttaaagtaaaaattgatttagagtcatt

SEQ ID NO: 744122 - DNA, 33 bp, Homo sapien
ttgtcttaaagtaaaagttgatttagagtcatt

SEQ ID NO: 744123 - DNA, 33 bp, Homo sapien
ggtgatcagaattcaaacactataagaaccttg

SEQ ID NO: 744124 - DNA, 33 bp, Homo sapien
ggtgatcagaattcaagcactataagaaccttg

SEQ ID NO: 744125 - DNA, 33 bp, Homo sapien
aaggaaattgaattccaaagaagtgtaggcaga

SEQ ID NO: 744126 - DNA, 33 bp, Homo sapien
aaggaaattgaattcccaagaagtgtaggcaga

SEQ ID NO: 744127 - DNA, 33 bp, Homo sapien
aaatatctgtctgttcacagttccttatctgag

SEQ ID NO: 744128 - DNA, 33 bp, Homo sapien
aaatatctgtctgttcccagttccttatctgag

SEQ ID NO: 744129 - DNA, 33 bp, Homo sapien
cttcaaggaaaagtggaaaagataatctctaaa

SEQ ID NO: 744130 - DNA, 33 bp, Homo sapien
cttcaaggaaaagtgggaaagataatctctaaa

SEQ ID NO: 744131 - DNA, 33 bp, Homo sapien
gtgacagggaggtttacggcttgatgaaagctt

SEQ ID NO: 744132 - DNA, 33 bp, Homo sapien
gtgacagggaggtttatggcttgatgaaagctt

SEQ ID NO: 744133 - DNA, 33 bp, Homo sapien
ttttatcagggaagccgaacgtctatgactgag

SEQ ID NO: 744134 - DNA, 33 bp, Homo sapien
ttttatcagggaagcctaacgtctatgactgag

SEQ ID NO: 744135 - DNA, 33 bp, Homo sapien
aaattgaaatatgaacaatgagctaaagagaac

SEQ ID NO: 744136 - DNA, 33 bp, Homo sapien
aaattgaaatatgaacgatgagctaaagagaac

SEQ ID NO: 744137 - DNA, 33 bp, Homo sapien
ctatctggaagtttcaatacagtctttctcgat

SEQ ID NO: 744138 - DNA, 33 bp, Homo sapien
ctatctggaagtttcagtacagtctttctcgat

SEQ ID NO: 744139 - DNA, 33 bp, Homo sapien
tatttgtaagaaaggacgttagttcaggatatg

SEQ ID NO: 744140 - DNA, 33 bp, Homo sapien
tatttgtaagaaaggatgttagttcaggatatg

SEQ ID NO: 744141 - DNA, 33 bp, Homo sapien
ttaaccaagtgaggcacgttgttctgatctcag

SEQ ID NO: 744142 - DNA, 33 bp, Homo sapien
ttaaccaagtgaggcatgttgttctgatctcag

SEQ ID NO: 744143 - DNA, 33 bp, Homo sapien
gtcactacataggtcaatatgagaaaaccaaat

SEQ ID NO: 744144 - DNA, 33 bp, Homo sapien
gtcactacataggtcagtatgagaaaaccaaat

SEQ ID NO: 744145 - DNA, 33 bp, Homo sapien
agtgagtcactcaggaccttgatattgtttttt

SEQ ID NO: 744146 - DNA, 33 bp, Homo sapien
agtgagtcactcaggatcttgatattgtttttt

SEQ ID NO: 744147 - DNA, 33 bp, Homo sapien
gagccaggcaatttaactcttaggacttttatc

SEQ ID NO: 744148 - DNA, 33 bp, Homo sapien
gagccaggcaatttaattcttaggacttttatc

SEQ ID NO: 744149 - DNA, 33 bp, Homo sapien
atgtccactgggtacaagaacagagcttggata

SEQ ID NO: 744150 - DNA, 33 bp, Homo sapien
atgtccactgggtacatgaacagagcttggata

SEQ ID NO: 744151 - DNA, 33 bp, Homo sapien
aagaaattcataaaaacggtaaattcctgtagc

SEQ ID NO: 744152 - DNA, 33 bp, Homo sapien
aagaaattcataaaaatggtaaattcctgtagc

SEQ ID NO: 744153 - DNA, 33 bp, Homo sapien
taatgacagggtcgataaagtgaaaaaggaagt

SEQ ID NO: 744154 - DNA, 33 bp, Homo sapien
taatgacagggtcgatgaagtgaaaaaggaagt

SEQ ID NO: 744155 - DNA, 33 bp, Homo sapien
tcactcttcagatttcaccttgattaaaatttc

SEQ ID NO: 744156 - DNA, 33 bp, Homo sapien
tcactcttcagatttccccttgattaaaatttc

SEQ ID NO: 744157 - DNA, 33 bp, Homo sapien
tgctgatgtttatagaagtaaccgccatgatta

SEQ ID NO: 744158 - DNA, 33 bp, Homo sapien
tgctgatgtttatagacgtaaccgccatgatta

SEQ ID NO: 744159 - DNA, 33 bp, Homo sapien
cacctaaacaacacaaagattggggtgctgact

SEQ ID NO: 744160 - DNA, 33 bp, Homo sapien
cacctaaacaacacaaggattggggtgctgact

SEQ ID NO: 744161 - DNA, 33 bp, Homo sapien
cctttgctcacattgacattgatggaattgcga

SEQ ID NO: 744162 - DNA, 33 bp, Homo sapien
cctttgctcacattgatattgatggaattgcga

SEQ ID NO: 744163 - DNA, 33 bp, Homo sapien
taattctgaccccatagaaaccgtgtaatatta

SEQ ID NO: 744164 - DNA, 33 bp, Homo sapien
taattctgaccccatataaaccgtgtaatatta

SEQ ID NO: 744165 - DNA, 33 bp, Homo sapien
atgttgcagtttgccacataaatttttaaaaat

SEQ ID NO: 744166 - DNA, 33 bp, Homo sapien
atgttgcagtttgccatataaatttttaaaaat

SEQ ID NO: 744167 - DNA, 33 bp, Homo sapien
tactattttatgacacaaacattctgtagccaa

SEQ ID NO: 744168 - DNA, 33 bp, Homo sapien
tactattttatgacactaacattctgtagccaa

SEQ ID NO: 744169 - DNA, 33 bp, Homo sapien
ggctgatgtgggaagacgtgcaaaatgtatata

SEQ ID NO: 744170 - DNA, 33 bp, Homo sapien
ggctgatgtgggaagatgtgcaaaatgtatata

SEQ ID NO: 744171 - DNA, 33 bp, Homo sapien
gcgttaatctattaataaggcatccatccccat

SEQ ID NO: 744172 - DNA, 33 bp, Homo sapien
gcgttaatctattaatgaggcatccatccccat

SEQ ID NO: 744173 - DNA, 33 bp, Homo sapien
cttatccttcaagcaaccttttatcacatgaat

SEQ ID NO: 744174 - DNA, 33 bp, Homo sapien
cttatccttcaagcaatcttttatcacatgaat

SEQ ID NO: 744175 - DNA, 33 bp, Homo sapien
tttctaagttcgctgcacttataaattctatac

SEQ ID NO: 744176 - DNA, 33 bp, Homo sapien
tttctaagttcgctgcgcttataaattctatac

SEQ ID NO: 744177 - DNA, 33 bp, Homo sapien
tttgtggtgttggaaaccaaagacttcattaga

SEQ ID NO: 744178 - DNA, 33 bp, Homo sapien
tttgtggtgttggaaatcaaagacttcattaga

SEQ ID NO: 744179 - DNA, 33 bp, Homo sapien
tgatttgtcattatcacacactgtgcacagcct

SEQ ID NO: 744180 - DNA, 33 bp, Homo sapien
tgatttgtcattatcatacactgtgcacagcct

SEQ ID NO: 744181 - DNA, 33 bp, Homo sapien
ctataattaaatgccactactgtttctccacat

SEQ ID NO: 744182 - DNA, 33 bp, Homo sapien
ctataattaaatgccagtactgtttctccacat

SEQ ID NO: 744183 - DNA, 33 bp, Homo sapien
gccagctatttaagagactccattctgcctctt

SEQ ID NO: 744184 - DNA, 33 bp, Homo sapien
gccagctatttaagaggctccattctgcctctt

SEQ ID NO: 744185 - DNA, 33 bp, Homo sapien
taggaaacattccttaaaattactaggagcttg

SEQ ID NO: 744186 - DNA, 33 bp, Homo sapien
taggaaacattccttagaattactaggagcttg

SEQ ID NO: 744187 - DNA, 33 bp, Homo sapien
tgtctataataaacacagtatggttgaaagtat

SEQ ID NO: 744188 - DNA, 33 bp, Homo sapien
tgtctataataaacactgtatggttgaaagtat

SEQ ID NO: 744189 - DNA, 33 bp, Homo sapien
ctctgggaaaggtctacgataaacacgctgtca

SEQ ID NO: 744190 - DNA, 33 bp, Homo sapien
ctctgggaaaggtctatgataaacacgctgtca

SEQ ID NO: 744191 - DNA, 33 bp, Homo sapien
aaatgactttgcccaaactaacctggtgattct

SEQ ID NO: 744192 - DNA, 33 bp, Homo sapien
aaatgactttgcccaatctaacctggtgattct

SEQ ID NO: 744193 - DNA, 33 bp, Homo sapien
acctcatcagaccgaacggctaattgatttcaa

SEQ ID NO: 744194 - DNA, 33 bp, Homo sapien
acctcatcagaccgaatggctaattgatttcaa

SEQ ID NO: 744195 - DNA, 33 bp, Homo sapien
tctgaacaataatcttaaaaggcagcaataaaa

SEQ ID NO: 744196 - DNA, 33 bp, Homo sapien
tctgaacaataatcttgaaaggcagcaataaaa

SEQ ID NO: 744197 - DNA, 33 bp, Homo sapien
ttctcagatctttgaacagtgggcactttcttg

SEQ ID NO: 744198 - DNA, 33 bp, Homo sapien
ttctcagatctttgaatagtgggcactttcttg

SEQ ID NO: 744199 - DNA, 33 bp, Homo sapien
ctccactaggtgtttacgggttgactgggaaaa

SEQ ID NO: 744200 - DNA, 33 bp, Homo sapien
ctccactaggtgtttatgggttgactgggaaaa

SEQ ID NO: 744201 - DNA, 33 bp, Homo sapien
cacatggatggagatactaaatagctaagactt

SEQ ID NO: 744202 - DNA, 33 bp, Homo sapien
cacatggatggagatattaaatagctaagactt

SEQ ID NO: 744203 - DNA, 33 bp, Homo sapien
acccagtcgaaagaaaagtaagtcagcggttgt

SEQ ID NO: 744204 - DNA, 33 bp, Homo sapien
acccagtcgaaagaaaggtaagtcagcggttgt

SEQ ID NO: 744205 - DNA, 33 bp, Homo sapien
aggaaaggcattttgaacagaatatagttgcaa

SEQ ID NO: 744206 - DNA, 33 bp, Homo sapien
aggaaaggcattttgatcagaatatagttgcaa

SEQ ID NO: 744207 - DNA, 33 bp, Homo sapien
gcccacatcctacatccgagtaacagcccaggc

SEQ ID NO: 744208 - DNA, 33 bp, Homo sapien
gcccacatcctacatctgagtaacagcccaggc

SEQ ID NO: 744209 - DNA, 33 bp, Homo sapien
tagtctgcttattctcactgaagccattcagag

SEQ ID NO: 744210 - DNA, 33 bp, Homo sapien
tagtctgcttattctcgctgaagccattcagag

SEQ ID NO: 744211 - DNA, 33 bp, Homo sapien
tccagtcaagcggctaaactaaccatgtaactt

SEQ ID NO: 744212 - DNA, 33 bp, Homo sapien
tccagtcaagcggctacactaaccatgtaactt

SEQ ID NO: 744213 - DNA, 33 bp, Homo sapien
tcttgagtttcccacactcagttccttctgcta

SEQ ID NO: 744214 - DNA, 33 bp, Homo sapien
tcttgagtttcccacattcagttccttctgcta

SEQ ID NO: 744215 - DNA, 33 bp, Homo sapien
ctcatcacctgatgcaataccgtcaaaccctac

SEQ ID NO: 744216 - DNA, 33 bp, Homo sapien
ctcatcacctgatgcagtaccgtcaaaccctac

SEQ ID NO: 744217 - DNA, 33 bp, Homo sapien
tatttctacatcaaaactgagcaaggagaaaat

SEQ ID NO: 744218 - DNA, 33 bp, Homo sapien
tatttctacatcaaaattgagcaaggagaaaat

SEQ ID NO: 744219 - DNA, 33 bp, Homo sapien
ctctgtttaaaataagcaaatgtggattggtct

SEQ ID NO: 744220 - DNA, 33 bp, Homo sapien
ctctgtttaaaataagtaaatgtggattggtct

SEQ ID NO: 744221 - DNA, 33 bp, Homo sapien
ggatggaaaagaaggaatagttagctagggaat

SEQ ID NO: 744222 - DNA, 33 bp, Homo sapien
ggatggaaaagaaggactagttagctagggaat

SEQ ID NO: 744223 - DNA, 33 bp, Homo sapien
agagatgaaacctaacgcagcttctcctccctt

SEQ ID NO: 744224 - DNA, 33 bp, Homo sapien
agagatgaaacctaactcagcttctcctccctt

SEQ ID NO: 744225 - DNA, 33 bp, Homo sapien
cattcagttcaatcaaaggtgttaaagtgccta

SEQ ID NO: 744226 - DNA, 33 bp, Homo sapien
cattcagttcaatcaagggtgttaaagtgccta

SEQ ID NO: 744227 - DNA, 33 bp, Homo sapien
atctggtcagaaaaggacatgattcatttgact

SEQ ID NO: 744228 - DNA, 33 bp, Homo sapien
atctggtcagaaaagggcatgattcatttgact

SEQ ID NO: 744229 - DNA, 33 bp, Homo sapien
tgcaatcaactacgtccactggcttcggaattg

SEQ ID NO: 744230 - DNA, 33 bp, Homo sapien
tgcaatcaactacgtctactggcttcggaattg

SEQ ID NO: 744231 - DNA, 33 bp, Homo sapien
ctagattcaggtaggaaaaaaaacagccttgaa

SEQ ID NO: 744232 - DNA, 33 bp, Homo sapien
ctagattcaggtaggagaaaaaacagccttgaa

SEQ ID NO: 744233 - DNA, 33 bp, Homo sapien
tcggcagctcagtgaaactccattcttttcagt

SEQ ID NO: 744234 - DNA, 33 bp, Homo sapien
tcggcagctcagtgaagctccattcttttcagt

SEQ ID NO: 744235 - DNA, 33 bp, Homo sapien
agtatcatcttactaactcagtgttaccttaag

SEQ ID NO: 744236 - DNA, 33 bp, Homo sapien
agtatcatcttactaagtcagtgttaccttaag

SEQ ID NO: 744237 - DNA, 33 bp, Homo sapien
tttttctgttgctgtcaaaatggagctgtggct

SEQ ID NO: 744238 - DNA, 33 bp, Homo sapien
tttttctgttgctgtcgaaatggagctgtggct

SEQ ID NO: 744239 - DNA, 33 bp, Homo sapien
atttgccaccagtgccgcacagatttaaactgc

SEQ ID NO: 744240 - DNA, 33 bp, Homo sapien
atttgccaccagtgcctcacagatttaaactgc

SEQ ID NO: 744241 - DNA, 33 bp, Homo sapien
gtatttttatagccaacgttgcacaaacttgaa

SEQ ID NO: 744242 - DNA, 33 bp, Homo sapien
gtatttttatagccaatgttgcacaaacttgaa

SEQ ID NO: 744243 - DNA, 33 bp, Homo sapien
ggcctgaatactgaacaggggaaattatggaca

SEQ ID NO: 744244 - DNA, 33 bp, Homo sapien
ggcctgaatactgaacgggggaaattatggaca

SEQ ID NO: 744245 - DNA, 33 bp, Homo sapien
tctagattcttcttgagagtttgatatttgtgt

SEQ ID NO: 744246 - DNA, 33 bp, Homo sapien
tctagattcttcttgatagtttgatatttgtgt

SEQ ID NO: 744247 - DNA, 33 bp, Homo sapien
attttctttaaacagaataactggcttgtattc

SEQ ID NO: 744248 - DNA, 33 bp, Homo sapien
attttctttaaacagagtaactggcttgtattc

SEQ ID NO: 744249 - DNA, 33 bp, Homo sapien
gaaatgaagaaacagaagtgtattagaaaacaa

SEQ ID NO: 744250 - DNA, 33 bp, Homo sapien
gaaatgaagaaacagaggtgtattagaaaacaa

SEQ ID NO: 744251 - DNA, 33 bp, Homo sapien
taacgttataactgtacctcattttagtccagt

SEQ ID NO: 744252 - DNA, 33 bp, Homo sapien
taacgttataactgtatctcattttagtccagt

SEQ ID NO: 744253 - DNA, 33 bp, Homo sapien
cttttatgccttttgaccctttgctttacctta

SEQ ID NO: 744254 - DNA, 33 bp, Homo sapien
cttttatgccttttgatcctttgctttacctta

SEQ ID NO: 744255 - DNA, 33 bp, Homo sapien
atggactcataagttcaaggctatagatgtaaa

SEQ ID NO: 744256 - DNA, 33 bp, Homo sapien
atggactcataagttccaggctatagatgtaaa

SEQ ID NO: 744257 - DNA, 33 bp, Homo sapien
catagaggtgactaaggaaaaaaacttgaatat

SEQ ID NO: 744258 - DNA, 33 bp, Homo sapien
catagaggtgactaagtaaaaaaacttgaatat

SEQ ID NO: 744259 - DNA, 33 bp, Homo sapien
aggtttttctcagataaatccaactacgaataa

SEQ ID NO: 744260 - DNA, 33 bp, Homo sapien
aggtttttctcagatagatccaactacgaataa

SEQ ID NO: 744261 - DNA, 33 bp, Homo sapien
tttactagagtcatacactcaaatgtcatagtt

SEQ ID NO: 744262 - DNA, 33 bp, Homo sapien
tttactagagtcataccctcaaatgtcatagtt

SEQ ID NO: 744263 - DNA, 33 bp, Homo sapien
gtgaatcagagcatcaaaaagtccctgtgagtt

SEQ ID NO: 744264 - DNA, 33 bp, Homo sapien
gtgaatcagagcatcacaaagtccctgtgagtt

SEQ ID NO: 744265 - DNA, 33 bp, Homo sapien
gattccttctagagatcaggaggttactctgtt

SEQ ID NO: 744266 - DNA, 33 bp, Homo sapien
gattccttctagagatgaggaggttactctgtt

SEQ ID NO: 744267 - DNA, 33 bp, Homo sapien
caactttctgaagctacaaaattcaaattggat

SEQ ID NO: 744268 - DNA, 33 bp, Homo sapien
caactttctgaagctataaaattcaaattggat

SEQ ID NO: 744269 - DNA, 33 bp, Homo sapien
gttagctgattctgtaaattctcttgagcttct

SEQ ID NO: 744270 - DNA, 33 bp, Homo sapien
gttagctgattctgtagattctcttgagcttct

SEQ ID NO: 744271 - DNA, 33 bp, Homo sapien
gtgaacacgggatggggcaacataaaaattaga

SEQ ID NO: 744272 - DNA, 33 bp, Homo sapien
gtgaacacgggatgggtcaacataaaaattaga

SEQ ID NO: 744273 - DNA, 33 bp, Homo sapien
actctgaacagcattaactttatactgtcgttt

SEQ ID NO: 744274 - DNA, 33 bp, Homo sapien
actctgaacagcattacctttatactgtcgttt

SEQ ID NO: 744275 - DNA, 33 bp, Homo sapien
gcagcattgtttacaaagggaaatactcagggg

SEQ ID NO: 744276 - DNA, 33 bp, Homo sapien
gcagcattgtttacaaggggaaatactcagggg

SEQ ID NO: 744277 - DNA, 33 bp, Homo sapien
ggaataattgagggaccgccaaatttctaaccc

SEQ ID NO: 744278 - DNA, 33 bp, Homo sapien
ggaataattgagggactgccaaatttctaaccc

SEQ ID NO: 744279 - DNA, 33 bp, Homo sapien
ttatacagggagccaaaaagttcaactcttttt

SEQ ID NO: 744280 - DNA, 33 bp, Homo sapien
ttatacagggagccaagaagttcaactcttttt

SEQ ID NO: 744281 - DNA, 33 bp, Homo sapien
taactatacagaaatacggcctaatttggggaa

SEQ ID NO: 744282 - DNA, 33 bp, Homo sapien
taactatacagaaatatggcctaatttggggaa

SEQ ID NO: 744283 - DNA, 33 bp, Homo sapien
ttaaagctcacatatacattgcagtatgccttt

SEQ ID NO: 744284 - DNA, 33 bp, Homo sapien
ttaaagctcacatatatattgcagtatgccttt

SEQ ID NO: 744285 - DNA, 33 bp, Homo sapien
agtaggtaaaaacttacgggtaatgcttctctg

SEQ ID NO: 744286 - DNA, 33 bp, Homo sapien
agtaggtaaaaacttatgggtaatgcttctctg

SEQ ID NO: 744287 - DNA, 33 bp, Homo sapien
agaaggattagtaaggaagtaatgaagagaatg

SEQ ID NO: 744288 - DNA, 33 bp, Homo sapien
agaaggattagtaagggagtaatgaagagaatg

SEQ ID NO: 744289 - DNA, 33 bp, Homo sapien
tttcaaatacacctgaaaactgtggattaatta

SEQ ID NO: 744290 - DNA, 33 bp, Homo sapien
tttcaaatacacctgataactgtggattaatta

SEQ ID NO: 744291 - DNA, 33 bp, Homo sapien
gtgccctgtctggcaactaacacctaaactact

SEQ ID NO: 744292 - DNA, 33 bp, Homo sapien
gtgccctgtctggcaattaacacctaaactact

SEQ ID NO: 744293 - DNA, 33 bp, Homo sapien
ggctgactggttggataacggaaagaaaggaag

SEQ ID NO: 744294 - DNA, 33 bp, Homo sapien
ggctgactggttggatgacggaaagaaaggaag

SEQ ID NO: 744295 - DNA, 33 bp, Homo sapien
atggtcctaatatttgcaattcaatctcttttt

SEQ ID NO: 744296 - DNA, 33 bp, Homo sapien
atggtcctaatatttggaattcaatctcttttt

SEQ ID NO: 744297 - DNA, 33 bp, Homo sapien
tgttcccatctttacacccacgagtacccaacg

SEQ ID NO: 744298 - DNA, 33 bp, Homo sapien
tgttcccatctttacatccacgagtacccaacg

SEQ ID NO: 744299 - DNA, 33 bp, Homo sapien
agcagagagggagataaataagcattgaaaaat

SEQ ID NO: 744300 - DNA, 33 bp, Homo sapien
agcagagagggagatacataagcattgaaaaat

SEQ ID NO: 744301 - DNA, 33 bp, Homo sapien
atatttcaaactaggaacatctgtacatataaa

SEQ ID NO: 744302 - DNA, 33 bp, Homo sapien
atatttcaaactaggagcatctgtacatataaa

SEQ ID NO: 744303 - DNA, 33 bp, Homo sapien
atatattacttgcagaccaagcaaactttcctt

SEQ ID NO: 744304 - DNA, 33 bp, Homo sapien
atatattacttgcagatcaagcaaactttcctt

SEQ ID NO: 744305 - DNA, 33 bp, Homo sapien
agttggatcagctcaccgcctaaagagtttgca

SEQ ID NO: 744306 - DNA, 33 bp, Homo sapien
agttggatcagctcactgcctaaagagtttgca

SEQ ID NO: 744307 - DNA, 33 bp, Homo sapien
cttttatttttgcaaacagttgagggattttga

SEQ ID NO: 744308 - DNA, 33 bp, Homo sapien
cttttatttttgcaaagagttgagggattttga

SEQ ID NO: 744309 - DNA, 33 bp, Homo sapien
tctactcttggcaccaataaaggtagttctctt

SEQ ID NO: 744310 - DNA, 33 bp, Homo sapien
tctactcttggcaccagtaaaggtagttctctt

SEQ ID NO: 744311 - DNA, 33 bp, Homo sapien
gcccatggcctcagatcagtatcactgcaaggc

SEQ ID NO: 744312 - DNA, 33 bp, Homo sapien
gcccatggcctcagattagtatcactgcaaggc

SEQ ID NO: 744313 - DNA, 33 bp, Homo sapien
cttgtcatttctaaaactctcaagctacattcc

SEQ ID NO: 744314 - DNA, 33 bp, Homo sapien
cttgtcatttctaaaagtctcaagctacattcc

SEQ ID NO: 744315 - DNA, 33 bp, Homo sapien
agtcatagtcaagagacagtaaagtcagaagtt

SEQ ID NO: 744316 - DNA, 33 bp, Homo sapien
agtcatagtcaagagatagtaaagtcagaagtt

SEQ ID NO: 744317 - DNA, 33 bp, Homo sapien
tttgcaaacaaaaatacgagctgtacatattgg

SEQ ID NO: 744318 - DNA, 33 bp, Homo sapien
tttgcaaacaaaaatatgagctgtacatattgg

SEQ ID NO: 744319 - DNA, 33 bp, Homo sapien
atagtcatataaatacacagtccaagctttaag

SEQ ID NO: 744320 - DNA, 33 bp, Homo sapien
atagtcatataaatacgcagtccaagctttaag

SEQ ID NO: 744321 - DNA, 33 bp, Homo sapien
agacctgcttcctctacaggtcgtcacacacta

SEQ ID NO: 744322 - DNA, 33 bp, Homo sapien
agacctgcttcctctataggtcgtcacacacta

SEQ ID NO: 744323 - DNA, 33 bp, Homo sapien
ttcggaaatcagagtcacaaatcctctctcaag

SEQ ID NO: 744324 - DNA, 33 bp, Homo sapien
ttcggaaatcagagtcgcaaatcctctctcaag

SEQ ID NO: 744325 - DNA, 33 bp, Homo sapien
tctagcagaaagagaaaaagaacatggaggagg

SEQ ID NO: 744326 - DNA, 33 bp, Homo sapien
tctagcagaaagagaagaagaacatggaggagg

SEQ ID NO: 744327 - DNA, 33 bp, Homo sapien
gtggtccaaattaccaataagaaaatgttacat

SEQ ID NO: 744328 - DNA, 33 bp, Homo sapien
gtggtccaaattaccagtaagaaaatgttacat

SEQ ID NO: 744329 - DNA, 33 bp, Homo sapien
catcagttcctgatgtgaagctgaaaagtggcc

SEQ ID NO: 744330 - DNA, 33 bp, Homo sapien
catcagttcctgatgttaagctgaaaagtggcc

SEQ ID NO: 744331 - DNA, 33 bp, Homo sapien
tacctgctctgagctgaaaagtgccaatatcat

SEQ ID NO: 744332 - DNA, 33 bp, Homo sapien
tacctgctctgagctggaaagtgccaatatcat

SEQ ID NO: 744333 - DNA, 33 bp, Homo sapien
caaattgttggctcaacggaatgcttacttgtt

SEQ ID NO: 744334 - DNA, 33 bp, Homo sapien
caaattgttggctcaatggaatgcttacttgtt

SEQ ID NO: 744335 - DNA, 33 bp, Homo sapien
ccccccaaaattctgaaatctgaaatacttcta

SEQ ID NO: 744336 - DNA, 33 bp, Homo sapien
ccccccaaaattctgagatctgaaatacttcta

SEQ ID NO: 744337 - DNA, 33 bp, Homo sapien
tacacgcgcaatacaccctgaccaaagaaaagt

SEQ ID NO: 744338 - DNA, 33 bp, Homo sapien
tacacgcgcaatacacgctgaccaaagaaaagt

SEQ ID NO: 744339 - DNA, 33 bp, Homo sapien
ctcaatccttaatgcacccatctgttggtttcc

SEQ ID NO: 744340 - DNA, 33 bp, Homo sapien
ctcaatccttaatgcatccatctgttggtttcc

SEQ ID NO: 744341 - DNA, 33 bp, Homo sapien
acacttacattatagaagtgcatcctgaaaaaa

SEQ ID NO: 744342 - DNA, 33 bp, Homo sapien
acacttacattatagaggtgcatcctgaaaaaa

SEQ ID NO: 744343 - DNA, 33 bp, Homo sapien
gatgtccggaattgtaagtaaagtcacctagta

SEQ ID NO: 744344 - DNA, 33 bp, Homo sapien
gatgtccggaattgtacgtaaagtcacctagta

SEQ ID NO: 744345 - DNA, 33 bp, Homo sapien
cacaattatgctaatgaacatatccaaatatcc

SEQ ID NO: 744346 - DNA, 33 bp, Homo sapien
cacaattatgctaatgtacatatccaaatatcc

SEQ ID NO: 744347 - DNA, 33 bp, Homo sapien
gtcaatatagggttgccaaactttatgttttcc

SEQ ID NO: 744348 - DNA, 33 bp, Homo sapien
gtcaatatagggttgcgaaactttatgttttcc

SEQ ID NO: 744349 - DNA, 33 bp, Homo sapien
tttatctcaaatgtctaactgaagaaattgttt

SEQ ID NO: 744350 - DNA, 33 bp, Homo sapien
tttatctcaaatgtctcactgaagaaattgttt

SEQ ID NO: 744351 - DNA, 33 bp, Homo sapien
tctattaataaatgcacgtggtaaagatttaca

SEQ ID NO: 744352 - DNA, 33 bp, Homo sapien
tctattaataaatgcatgtggtaaagatttaca

SEQ ID NO: 744353 - DNA, 33 bp, Homo sapien
aacacttagcaaattacgcacctgaaatcttac

SEQ ID NO: 744354 - DNA, 33 bp, Homo sapien
aacacttagcaaattatgcacctgaaatcttac

SEQ ID NO: 744355 - DNA, 33 bp, Homo sapien
aactctgctatcataacccttctgtaaatctaa

SEQ ID NO: 744356 - DNA, 33 bp, Homo sapien
aactctgctatcataatccttctgtaaatctaa

SEQ ID NO: 744357 - DNA, 33 bp, Homo sapien
acagacagtttggaaaagctacataccatatga

SEQ ID NO: 744358 - DNA, 33 bp, Homo sapien
acagacagtttggaaaggctacataccatatga

SEQ ID NO: 744359 - DNA, 33 bp, Homo sapien
caggtaataaacatggcacccgataggtagttt

SEQ ID NO: 744360 - DNA, 33 bp, Homo sapien
caggtaataaacatggtacccgataggtagttt

SEQ ID NO: 744361 - DNA, 33 bp, Homo sapien
actgtgcttatgccaccgaaactcctccctaat

SEQ ID NO: 744362 - DNA, 33 bp, Homo sapien
actgtgcttatgccactgaaactcctccctaat

SEQ ID NO: 744363 - DNA, 33 bp, Homo sapien
tatcctatggctctgactatgaacccacactga

SEQ ID NO: 744364 - DNA, 33 bp, Homo sapien
tatcctatggctctgagtatgaacccacactga

SEQ ID NO: 744365 - DNA, 33 bp, Homo sapien
agagagtagagttacacggatcaagaaatgtat

SEQ ID NO: 744366 - DNA, 33 bp, Homo sapien
agagagtagagttacatggatcaagaaatgtat

SEQ ID NO: 744367 - DNA, 33 bp, Homo sapien
cttttatggttattgcactctatgtcattcttg

SEQ ID NO: 744368 - DNA, 33 bp, Homo sapien
cttttatggttattgcgctctatgtcattcttg

SEQ ID NO: 744369 - DNA, 33 bp, Homo sapien
agaaatctttgtctaacctcaggtcagggagat

SEQ ID NO: 744370 - DNA, 33 bp, Homo sapien
agaaatctttgtctaatctcaggtcagggagat

SEQ ID NO: 744371 - DNA, 33 bp, Homo sapien
tcttctggctcatgaactctgtttttgagggaa

SEQ ID NO: 744372 - DNA, 33 bp, Homo sapien
tcttctggctcatgaattctgtttttgagggaa

SEQ ID NO: 744373 - DNA, 33 bp, Homo sapien
agtccacaaactgtacaacaaattatcactctg

SEQ ID NO: 744374 - DNA, 33 bp, Homo sapien
agtccacaaactgtaccacaaattatcactctg

SEQ ID NO: 744375 - DNA, 33 bp, Homo sapien
cctggctgggtttccaaattttctggggtgttc

SEQ ID NO: 744376 - DNA, 33 bp, Homo sapien
cctggctgggtttccagattttctggggtgttc

SEQ ID NO: 744377 - DNA, 33 bp, Homo sapien
agcccctcacagtaaaaaaggccgactccaatt

SEQ ID NO: 744378 - DNA, 33 bp, Homo sapien
agcccctcacagtaaataaggccgactccaatt

SEQ ID NO: 744379 - DNA, 33 bp, Homo sapien
tgtgaaggcaatcataaacaccctgacttttgt

SEQ ID NO: 744380 - DNA, 33 bp, Homo sapien
tgtgaaggcaatcatatacaccctgacttttgt

SEQ ID NO: 744381 - DNA, 33 bp, Homo sapien
aaacctgtgcgatccacgttccaataataagat

SEQ ID NO: 744382 - DNA, 33 bp, Homo sapien
aaacctgtgcgatccatgttccaataataagat

SEQ ID NO: 744383 - DNA, 33 bp, Homo sapien
tccaaaaatatgttatcagctccttagtcaatt

SEQ ID NO: 744384 - DNA, 33 bp, Homo sapien
tccaaaaatatgttattagctccttagtcaatt

SEQ ID NO: 744385 - DNA, 33 bp, Homo sapien
ttatcaaataaaaagaagtcacaaagacacatg

SEQ ID NO: 744386 - DNA, 33 bp, Homo sapien
ttatcaaataaaaagaggtcacaaagacacatg

SEQ ID NO: 744387 - DNA, 33 bp, Homo sapien
gtgaactagactgttaccattaaggtttatctt

SEQ ID NO: 744388 - DNA, 33 bp, Homo sapien
gtgaactagactgttatcattaaggtttatctt

SEQ ID NO: 744389 - DNA, 33 bp, Homo sapien
agcacaaagacaggcaagttcttaaaatgtagg

SEQ ID NO: 744390 - DNA, 33 bp, Homo sapien
agcacaaagacaggcaggttcttaaaatgtagg

SEQ ID NO: 744391 - DNA, 33 bp, Homo sapien
tcagtgtaattgctccccttattaaaattcatc

SEQ ID NO: 744392 - DNA, 33 bp, Homo sapien
tcagtgtaattgctcctcttattaaaattcatc

SEQ ID NO: 744393 - DNA, 33 bp, Homo sapien
ctctggggataaccaccgtgctaacgatgacta

SEQ ID NO: 744394 - DNA, 33 bp, Homo sapien
ctctggggataaccactgtgctaacgatgacta

SEQ ID NO: 744395 - DNA, 33 bp, Homo sapien
atgtggatgactgtttgaaacaaaagcaagata

SEQ ID NO: 744396 - DNA, 33 bp, Homo sapien
atgtggatgactgttttaaacaaaagcaagata

SEQ ID NO: 744397 - DNA, 33 bp, Homo sapien
atttgaagaatgccaaatcaaatttctgagctc

SEQ ID NO: 744398 - DNA, 33 bp, Homo sapien
atttgaagaatgccaagtcaaatttctgagctc

SEQ ID NO: 744399 - DNA, 33 bp, Homo sapien
atgagaatttccaagaacggagacaataatgat

SEQ ID NO: 744400 - DNA, 33 bp, Homo sapien
atgagaatttccaagagcggagacaataatgat

SEQ ID NO: 744401 - DNA, 33 bp, Homo sapien
aatgtttccatatgctaaaaacaaaatttaaca

SEQ ID NO: 744402 - DNA, 33 bp, Homo sapien
aatgtttccatatgctgaaaacaaaatttaaca

SEQ ID NO: 744403 - DNA, 33 bp, Homo sapien
ttgtgtatgtttttctgaagcggtccatagctt

SEQ ID NO: 744404 - DNA, 33 bp, Homo sapien
ttgtgtatgtttttcttaagcggtccatagctt

SEQ ID NO: 744405 - DNA, 33 bp, Homo sapien
ggtcaagttataatcaaacctgccaggaaagat

SEQ ID NO: 744406 - DNA, 33 bp, Homo sapien
ggtcaagttataatcatacctgccaggaaagat

SEQ ID NO: 744407 - DNA, 33 bp, Homo sapien
gagaaaagaaatatcaatcgattccgaacagat

SEQ ID NO: 744408 - DNA, 33 bp, Homo sapien
gagaaaagaaatatcagtcgattccgaacagat

SEQ ID NO: 744409 - DNA, 33 bp, Homo sapien
ttgcacttccgtcaataatatatgagagttaca

SEQ ID NO: 744410 - DNA, 33 bp, Homo sapien
ttgcacttccgtcaattatatatgagagttaca

SEQ ID NO: 744411 - DNA, 33 bp, Homo sapien
aaaatatattattcgaggtttttaataagctat

SEQ ID NO: 744412 - DNA, 33 bp, Homo sapien
aaaatatattattcgatgtttttaataagctat

SEQ ID NO: 744413 - DNA, 33 bp, Homo sapien
tatgtgccattagaaaattacaaagcccttatg

SEQ ID NO: 744414 - DNA, 33 bp, Homo sapien
tatgtgccattagaaagttacaaagcccttatg

SEQ ID NO: 744415 - DNA, 33 bp, Homo sapien
tcaaaaagaatgccttaaagagtagaataaatg

SEQ ID NO: 744416 - DNA, 33 bp, Homo sapien
tcaaaaagaatgccttgaagagtagaataaatg

SEQ ID NO: 744417 - DNA, 33 bp, Homo sapien
aagtccaactttacaaacattatgtaagttaaa

SEQ ID NO: 744418 - DNA, 33 bp, Homo sapien
aagtccaactttacaaccattatgtaagttaaa

SEQ ID NO: 744419 - DNA, 33 bp, Homo sapien
gaagtatttcatggacacaatcatgtaaaagaa

SEQ ID NO: 744420 - DNA, 33 bp, Homo sapien
gaagtatttcatggacgcaatcatgtaaaagaa

SEQ ID NO: 744421 - DNA, 33 bp, Homo sapien
tctctgcgatagagccaaagctgttgatgaata

SEQ ID NO: 744422 - DNA, 33 bp, Homo sapien
tctctgcgatagagccgaagctgttgatgaata

SEQ ID NO: 744423 - DNA, 33 bp, Homo sapien
tcaaataatggaaagccctttgagtgaggctct

SEQ ID NO: 744424 - DNA, 33 bp, Homo sapien
tcaaataatggaaagctctttgagtgaggctct

SEQ ID NO: 744425 - DNA, 33 bp, Homo sapien
tccaagcattcttgcacattataatgacctagg

SEQ ID NO: 744426 - DNA, 33 bp, Homo sapien
tccaagcattcttgcatattataatgacctagg

SEQ ID NO: 744427 - DNA, 33 bp, Homo sapien
aatttataataggcaacgcttttaatgaaatta

SEQ ID NO: 744428 - DNA, 33 bp, Homo sapien
aatttataataggcaatgcttttaatgaaatta

SEQ ID NO: 744429 - DNA, 33 bp, Homo sapien
aactaaatacagcgcccctaggatgcaggtctt

SEQ ID NO: 744430 - DNA, 33 bp, Homo sapien
aactaaatacagcgcctctaggatgcaggtctt

SEQ ID NO: 744431 - DNA, 33 bp, Homo sapien
gtgttatgtgccactacgtgggagaggagtaaa

SEQ ID NO: 744432 - DNA, 33 bp, Homo sapien
gtgttatgtgccactatgtgggagaggagtaaa

SEQ ID NO: 744433 - DNA, 33 bp, Homo sapien
aaacaaatatatcagaagtttgctcctccaaag

SEQ ID NO: 744434 - DNA, 33 bp, Homo sapien
aaacaaatatatcagaggtttgctcctccaaag

SEQ ID NO: 744435 - DNA, 33 bp, Homo sapien
caaaacctaaatttcacgtgcaagtaaagtaac

SEQ ID NO: 744436 - DNA, 33 bp, Homo sapien
caaaacctaaatttcatgtgcaagtaaagtaac

SEQ ID NO: 744437 - DNA, 33 bp, Homo sapien
gatacagaagtatagaagaaaatcgatgtgtaa

SEQ ID NO: 744438 - DNA, 33 bp, Homo sapien
gatacagaagtatagatgaaaatcgatgtgtaa

SEQ ID NO: 744439 - DNA, 33 bp, Homo sapien
acctaatttgaatcataaggaagaatcagacaa

SEQ ID NO: 744440 - DNA, 33 bp, Homo sapien
acctaatttgaatcatgaggaagaatcagacaa

SEQ ID NO: 744441 - DNA, 33 bp, Homo sapien
agtactagaaagagtcaatttgtgatgaaggga

SEQ ID NO: 744442 - DNA, 33 bp, Homo sapien
agtactagaaagagtcgatttgtgatgaaggga

SEQ ID NO: 744443 - DNA, 33 bp, Homo sapien
taccaatttatcttgacctgaaccaataatact

SEQ ID NO: 744444 - DNA, 33 bp, Homo sapien
taccaatttatcttgatctgaaccaataatact

SEQ ID NO: 744445 - DNA, 33 bp, Homo sapien
tacatatatccttacacgttgttgcatatagaa

SEQ ID NO: 744446 - DNA, 33 bp, Homo sapien
tacatatatccttacatgttgttgcatatagaa

SEQ ID NO: 744447 - DNA, 33 bp, Homo sapien
acattgctgacagtgacaagaatcaagatccta

SEQ ID NO: 744448 - DNA, 33 bp, Homo sapien
acattgctgacagtgataagaatcaagatccta

SEQ ID NO: 744449 - DNA, 33 bp, Homo sapien
aaaaatctaactagaacgcatgcagtctaaaat

SEQ ID NO: 744450 - DNA, 33 bp, Homo sapien
aaaaatctaactagaaggcatgcagtctaaaat

SEQ ID NO: 744451 - DNA, 33 bp, Homo sapien
acaccctactgctataataattacatctatttt

SEQ ID NO: 744452 - DNA, 33 bp, Homo sapien
acaccctactgctatagtaattacatctatttt

SEQ ID NO: 744453 - DNA, 33 bp, Homo sapien
catgcatgacattgaaataaacattatggaggt

SEQ ID NO: 744454 - DNA, 33 bp, Homo sapien
catgcatgacattgaattaaacattatggaggt

SEQ ID NO: 744455 - DNA, 33 bp, Homo sapien
tttgatttttccaaaaccattcattgaacagac

SEQ ID NO: 744456 - DNA, 33 bp, Homo sapien
tttgatttttccaaaagcattcattgaacagac

SEQ ID NO: 744457 - DNA, 33 bp, Homo sapien
attacaagaggaacaaatgcgaatctatggtca

SEQ ID NO: 744458 - DNA, 33 bp, Homo sapien
attacaagaggaacaagtgcgaatctatggtca

SEQ ID NO: 744459 - DNA, 33 bp, Homo sapien
ataatcaagatttgcaaaagtaggcaaatggat

SEQ ID NO: 744460 - DNA, 33 bp, Homo sapien
ataatcaagatttgcagaagtaggcaaatggat

SEQ ID NO: 744461 - DNA, 33 bp, Homo sapien
aagtaaatatgaatgaacatggttgctaaatca

SEQ ID NO: 744462 - DNA, 33 bp, Homo sapien
aagtaaatatgaatgagcatggttgctaaatca

SEQ ID NO: 744463 - DNA, 33 bp, Homo sapien
tatctaaagacttaaaaccagtacaaaagaatg

SEQ ID NO: 744464 - DNA, 33 bp, Homo sapien
tatctaaagacttaaagccagtacaaaagaatg

SEQ ID NO: 744465 - DNA, 33 bp, Homo sapien
aatgtgggacatcccaaaatgagggcttacaag

SEQ ID NO: 744466 - DNA, 33 bp, Homo sapien
aatgtgggacatcccagaatgagggcttacaag

SEQ ID NO: 744467 - DNA, 33 bp, Homo sapien
tctgataaaaccaagaagttaggctttgattaa

SEQ ID NO: 744468 - DNA, 33 bp, Homo sapien
tctgataaaaccaagaggttaggctttgattaa

SEQ ID NO: 744469 - DNA, 33 bp, Homo sapien
cctgctggattaatgccatggaccatttcaatg

SEQ ID NO: 744470 - DNA, 33 bp, Homo sapien
cctgctggattaatgctatggaccatttcaatg

SEQ ID NO: 744471 - DNA, 33 bp, Homo sapien
ttcctatacatcaataaggtctactttagaaaa

SEQ ID NO: 744472 - DNA, 33 bp, Homo sapien
ttcctatacatcaatagggtctactttagaaaa

SEQ ID NO: 744473 - DNA, 33 bp, Homo sapien
agaatattatagcctacgggacaaatctgactc

SEQ ID NO: 744474 - DNA, 33 bp, Homo sapien
agaatattatagcctatgggacaaatctgactc

SEQ ID NO: 744475 - DNA, 33 bp, Homo sapien
accttattagcaggacaagattaggtggtaatt

SEQ ID NO: 744476 - DNA, 33 bp, Homo sapien
accttattagcaggaccagattaggtggtaatt

SEQ ID NO: 744477 - DNA, 33 bp, Homo sapien
ggcttggtagaagaacaaagcacatagcaccct

SEQ ID NO: 744478 - DNA, 33 bp, Homo sapien
ggcttggtagaagaacgaagcacatagcaccct

SEQ ID NO: 744479 - DNA, 33 bp, Homo sapien
ggaacttttgctaacgccagatcagttgatcac

SEQ ID NO: 744480 - DNA, 33 bp, Homo sapien
ggaacttttgctaacgtcagatcagttgatcac

SEQ ID NO: 744481 - DNA, 33 bp, Homo sapien
aactgtataagaattacgtaagccggggtatgg

SEQ ID NO: 744482 - DNA, 33 bp, Homo sapien
aactgtataagaattatgtaagccggggtatgg

SEQ ID NO: 744483 - DNA, 33 bp, Homo sapien
tgtcctgtgatttgctaaactcagtatttatga

SEQ ID NO: 744484 - DNA, 33 bp, Homo sapien
tgtcctgtgatttgctgaactcagtatttatga

SEQ ID NO: 744485 - DNA, 33 bp, Homo sapien
agcaaatcacaggacacatacaaatcaacaact

SEQ ID NO: 744486 - DNA, 33 bp, Homo sapien
agcaaatcacaggacatatacaaatcaacaact

SEQ ID NO: 744487 - DNA, 33 bp, Homo sapien
ctaacaatgtcaactcacatatattttgatcca

SEQ ID NO: 744488 - DNA, 33 bp, Homo sapien
ctaacaatgtcaactcgcatatattttgatcca

SEQ ID NO: 744489 - DNA, 33 bp, Homo sapien
aggcaactgctatcgacattccttgtcacagtt

SEQ ID NO: 744490 - DNA, 33 bp, Homo sapien
aggcaactgctatcgatattccttgtcacagtt

SEQ ID NO: 744491 - DNA, 33 bp, Homo sapien
atgtttcacaatgaaagaaccaatattaacacc

SEQ ID NO: 744492 - DNA, 33 bp, Homo sapien
atgtttcacaatgaaataaccaatattaacacc

SEQ ID NO: 744493 - DNA, 33 bp, Homo sapien
cagatagattagaacagtcaacatagtaaaggt

SEQ ID NO: 744494 - DNA, 33 bp, Homo sapien
cagatagattagaacattcaacatagtaaaggt

SEQ ID NO: 744495 - DNA, 33 bp, Homo sapien
tccatctttcttggtgaatacttttcaaaagga

SEQ ID NO: 744496 - DNA, 33 bp, Homo sapien
tccatctttcttggtgtatacttttcaaaagga

SEQ ID NO: 744497 - DNA, 33 bp, Homo sapien
caccgttcaacctagcaatcatattactgggta

SEQ ID NO: 744498 - DNA, 33 bp, Homo sapien
caccgttcaacctagccatcatattactgggta

SEQ ID NO: 744499 - DNA, 33 bp, Homo sapien
aatggtaaatatggagaaaatagagattaaaat

SEQ ID NO: 744500 - DNA, 33 bp, Homo sapien
aatggtaaatatggaggaaatagagattaaaat

SEQ ID NO: 744501 - DNA, 33 bp, Homo sapien
aagaacaaaaatccgaataggaagaaaggaaag

SEQ ID NO: 744502 - DNA, 33 bp, Homo sapien
aagaacaaaaatccgagtaggaagaaaggaaag

SEQ ID NO: 744503 - DNA, 33 bp, Homo sapien
tctgccatctcactccccaagctgttgatgtcc

SEQ ID NO: 744504 - DNA, 33 bp, Homo sapien
tctgccatctcactccgcaagctgttgatgtcc

SEQ ID NO: 744505 - DNA, 33 bp, Homo sapien
taagacctcgtctaaaacatatagtctgtcctg

SEQ ID NO: 744506 - DNA, 33 bp, Homo sapien
taagacctcgtctaaagcatatagtctgtcctg

SEQ ID NO: 744507 - DNA, 33 bp, Homo sapien
tgcttaagttgacagacggaacacattttaagg

SEQ ID NO: 744508 - DNA, 33 bp, Homo sapien
tgcttaagttgacagatggaacacattttaagg

SEQ ID NO: 744509 - DNA, 33 bp, Homo sapien
aaacacagatggaaacactgctgcatacaggtc

SEQ ID NO: 744510 - DNA, 33 bp, Homo sapien
aaacacagatggaaaccctgctgcatacaggtc

SEQ ID NO: 744511 - DNA, 33 bp, Homo sapien
acttttaggaatcatacggtttatttcctggaa

SEQ ID NO: 744512 - DNA, 33 bp, Homo sapien
acttttaggaatcatatggtttatttcctggaa

SEQ ID NO: 744513 - DNA, 33 bp, Homo sapien
ttccattttaacagccccatgagccttaattca

SEQ ID NO: 744514 - DNA, 33 bp, Homo sapien
ttccattttaacagccgcatgagccttaattca

SEQ ID NO: 744515 - DNA, 33 bp, Homo sapien
tataagacaaacacgacctaaattacattaagc

SEQ ID NO: 744516 - DNA, 33 bp, Homo sapien
tataagacaaacacgatctaaattacattaagc

SEQ ID NO: 744517 - DNA, 33 bp, Homo sapien
tgtacccaactgctccaaaaagacagcaaccat

SEQ ID NO: 744518 - DNA, 33 bp, Homo sapien
tgtacccaactgctccgaaaagacagcaaccat

SEQ ID NO: 744519 - DNA, 33 bp, Homo sapien
aagagctgcaattatgaaataacagacacaagt

SEQ ID NO: 744520 - DNA, 33 bp, Homo sapien
aagagctgcaattatggaataacagacacaagt

SEQ ID NO: 744521 - DNA, 33 bp, Homo sapien
aaagacactaaagaatcagcattacaaagaatt

SEQ ID NO: 744522 - DNA, 33 bp, Homo sapien
aaagacactaaagaatgagcattacaaagaatt

SEQ ID NO: 744523 - DNA, 33 bp, Homo sapien
tatatcatcagtgaaacgtaaattaatacaaca

SEQ ID NO: 744524 - DNA, 33 bp, Homo sapien
tatatcatcagtgaaatgtaaattaatacaaca

SEQ ID NO: 744525 - DNA, 33 bp, Homo sapien
ttagggatattttggccaacaatcaagggagta

SEQ ID NO: 744526 - DNA, 33 bp, Homo sapien
ttagggatattttggctaacaatcaagggagta

SEQ ID NO: 744527 - DNA, 33 bp, Homo sapien
cttttagaacaaaacagagggaaaccttcttga

SEQ ID NO: 744528 - DNA, 33 bp, Homo sapien
cttttagaacaaaacatagggaaaccttcttga

SEQ ID NO: 744529 - DNA, 33 bp, Homo sapien
acagtttctggtcttacgcatttgtctttcatc

SEQ ID NO: 744530 - DNA, 33 bp, Homo sapien
acagtttctggtcttaggcatttgtctttcatc

SEQ ID NO: 744531 - DNA, 33 bp, Homo sapien
acatattgcctgacagcatgaattagcaggctt

SEQ ID NO: 744532 - DNA, 33 bp, Homo sapien
acatattgcctgacagtatgaattagcaggctt

SEQ ID NO: 744533 - DNA, 33 bp, Homo sapien
actttgatcaaagcaaaccattcgattcagtta

SEQ ID NO: 744534 - DNA, 33 bp, Homo sapien
actttgatcaaagcaacccattcgattcagtta

SEQ ID NO: 744535 - DNA, 33 bp, Homo sapien
aaagaagttggttcaccgattgtattagttggt

SEQ ID NO: 744536 - DNA, 33 bp, Homo sapien
aaagaagttggttcactgattgtattagttggt

SEQ ID NO: 744537 - DNA, 33 bp, Homo sapien
cacctgctttttgagaaactatgcaccttttaa

SEQ ID NO: 744538 - DNA, 33 bp, Homo sapien
cacctgctttttgagacactatgcaccttttaa

SEQ ID NO: 744539 - DNA, 33 bp, Homo sapien
tatccaaaatcatttaaacatcctctaatccat

SEQ ID NO: 744540 - DNA, 33 bp, Homo sapien
tatccaaaatcatttatacatcctctaatccat

SEQ ID NO: 744541 - DNA, 33 bp, Homo sapien
agcccttttatttccaccaggtgtatctttcta

SEQ ID NO: 744542 - DNA, 33 bp, Homo sapien
agcccttttatttccatcaggtgtatctttcta

SEQ ID NO: 744543 - DNA, 33 bp, Homo sapien
ggaatgggtggtgtcaaggattcaagactattt

SEQ ID NO: 744544 - DNA, 33 bp, Homo sapien
ggaatgggtggtgtcagggattcaagactattt

SEQ ID NO: 744545 - DNA, 33 bp, Homo sapien
gtgtcttacacttcaacgtctaattgttttcca

SEQ ID NO: 744546 - DNA, 33 bp, Homo sapien
gtgtcttacacttcaatgtctaattgttttcca

SEQ ID NO: 744547 - DNA, 33 bp, Homo sapien
aacctctgatgttcaaacataaaatctcttaat

SEQ ID NO: 744548 - DNA, 33 bp, Homo sapien
aacctctgatgttcaaccataaaatctcttaat

SEQ ID NO: 744549 - DNA, 33 bp, Homo sapien
gtgtttggtgcaatacagtaaagcttgccgaac

SEQ ID NO: 744550 - DNA, 33 bp, Homo sapien
gtgtttggtgcaatacggtaaagcttgccgaac

SEQ ID NO: 744551 - DNA, 33 bp, Homo sapien
ctacatggtgtcattcacaactgagataaatgt

SEQ ID NO: 744552 - DNA, 33 bp, Homo sapien
ctacatggtgtcattcgcaactgagataaatgt

SEQ ID NO: 744553 - DNA, 33 bp, Homo sapien
gtaaagaaaacagtcaataatgaagttgagcat

SEQ ID NO: 744554 - DNA, 33 bp, Homo sapien
gtaaagaaaacagtcagtaatgaagttgagcat

SEQ ID NO: 744555 - DNA, 33 bp, Homo sapien
tctacattcatcctccaacaatgcattaaaatt

SEQ ID NO: 744556 - DNA, 33 bp, Homo sapien
tctacattcatcctcctacaatgcattaaaatt

SEQ ID NO: 744557 - DNA, 33 bp, Homo sapien
aactgatcttctggctaaataggaagcatggtg

SEQ ID NO: 744558 - DNA, 33 bp, Homo sapien
aactgatcttctggctgaataggaagcatggtg

SEQ ID NO: 744559 - DNA, 33 bp, Homo sapien
cttaatcttcgcctcagccagaaatgtggcaca

SEQ ID NO: 744560 - DNA, 33 bp, Homo sapien
cttaatcttcgcctcatccagaaatgtggcaca

SEQ ID NO: 744561 - DNA, 33 bp, Homo sapien
atatcaaccaaagcaaatattcaattgtgataa

SEQ ID NO: 744562 - DNA, 33 bp, Homo sapien
atatcaaccaaagcaagtattcaattgtgataa

SEQ ID NO: 744563 - DNA, 33 bp, Homo sapien
tcattctgtaatcaaacatccatgacttttaga

SEQ ID NO: 744564 - DNA, 33 bp, Homo sapien
tcattctgtaatcaaatatccatgacttttaga

SEQ ID NO: 744565 - DNA, 33 bp, Homo sapien
tcattctgtaatcaaacatccatgacttttaag

SEQ ID NO: 744566 - DNA, 33 bp, Homo sapien
tcattctgtaatcaaatatccatgacttttaag

SEQ ID NO: 744567 - DNA, 33 bp, Homo sapien
atgattatgttatagcaatcaatgcctacatta

SEQ ID NO: 744568 - DNA, 33 bp, Homo sapien
atgattatgttatagcgatcaatgcctacatta

SEQ ID NO: 744569 - DNA, 33 bp, Homo sapien
aacagcaaaatctttaactgacacatagaaata

SEQ ID NO: 744570 - DNA, 33 bp, Homo sapien
aacagcaaaatctttagctgacacatagaaata

SEQ ID NO: 744571 - DNA, 33 bp, Homo sapien
gacattatctgcctatgaaggagtgagttaatg

SEQ ID NO: 744572 - DNA, 33 bp, Homo sapien
gacattatctgcctattaaggagtgagttaatg

SEQ ID NO: 744573 - DNA, 33 bp, Homo sapien
ttgtgaggacataaaactaggataagcttgagc

SEQ ID NO: 744574 - DNA, 33 bp, Homo sapien
ttgtgaggacataaaattaggataagcttgagc

SEQ ID NO: 744575 - DNA, 33 bp, Homo sapien
tttttatcacacatacgatagctgaatcaaaga

SEQ ID NO: 744576 - DNA, 33 bp, Homo sapien
tttttatcacacatactatagctgaatcaaaga

SEQ ID NO: 744577 - DNA, 33 bp, Homo sapien
aatatagtaaagatacgccaaagctaatgtggt

SEQ ID NO: 744578 - DNA, 33 bp, Homo sapien
aatatagtaaagatactccaaagctaatgtggt

SEQ ID NO: 744579 - DNA, 33 bp, Homo sapien
tagaggctgtttgtaaaccctgccaaatttgca

SEQ ID NO: 744580 - DNA, 33 bp, Homo sapien
tagaggctgtttgtaagccctgccaaatttgca

SEQ ID NO: 744581 - DNA, 33 bp, Homo sapien
aaaatgacaatttagcgcaaagaaattagtttg

SEQ ID NO: 744582 - DNA, 33 bp, Homo sapien
aaaatgacaatttagctcaaagaaattagtttg

SEQ ID NO: 744583 - DNA, 33 bp, Homo sapien
tatagcaagagacaaccgaaatattcatcatat

SEQ ID NO: 744584 - DNA, 33 bp, Homo sapien
tatagcaagagacaactgaaatattcatcatat

SEQ ID NO: 744585 - DNA, 33 bp, Homo sapien
accacatcaccttcacagatggataatctcatt

SEQ ID NO: 744586 - DNA, 33 bp, Homo sapien
accacatcaccttcacggatggataatctcatt

SEQ ID NO: 744587 - DNA, 33 bp, Homo sapien
aaaatgaaagtagaaccggatgtggaagaggca

SEQ ID NO: 744588 - DNA, 33 bp, Homo sapien
aaaatgaaagtagaactggatgtggaagaggca

SEQ ID NO: 744589 - DNA, 33 bp, Homo sapien
atgtaaactattaaaaaagcccaattgaatcaa

SEQ ID NO: 744590 - DNA, 33 bp, Homo sapien
atgtaaactattaaaagagcccaattgaatcaa

SEQ ID NO: 744591 - DNA, 33 bp, Homo sapien
agcaaattaaataatgcaaacaaacggaggtat

SEQ ID NO: 744592 - DNA, 33 bp, Homo sapien
agcaaattaaataatggaaacaaacggaggtat

SEQ ID NO: 744593 - DNA, 33 bp, Homo sapien
gtctaactgacatcaacgcccatcaatttttcc

SEQ ID NO: 744594 - DNA, 33 bp, Homo sapien
gtctaactgacatcaatgcccatcaatttttcc

SEQ ID NO: 744595 - DNA, 33 bp, Homo sapien
tgcataggcagtaatacaagcccagtttacact

SEQ ID NO: 744596 - DNA, 33 bp, Homo sapien
tgcataggcagtaatataagcccagtttacact

SEQ ID NO: 744597 - DNA, 33 bp, Homo sapien
ccagaaagaattgacacaatgctagtgtggctg

SEQ ID NO: 744598 - DNA, 33 bp, Homo sapien
ccagaaagaattgacagaatgctagtgtggctg

SEQ ID NO: 744599 - DNA, 33 bp, Homo sapien
actatgcaaagctttaccagctacatcaaagaa

SEQ ID NO: 744600 - DNA, 33 bp, Homo sapien
actatgcaaagctttatcagctacatcaaagaa

SEQ ID NO: 744601 - DNA, 33 bp, Homo sapien
aaatggaagtttttcaccccacatttacaggtt

SEQ ID NO: 744602 - DNA, 33 bp, Homo sapien
aaatggaagtttttcatcccacatttacaggtt

SEQ ID NO: 744603 - DNA, 33 bp, Homo sapien
cataacaaatgtgacacgttaacacaagtacaa

SEQ ID NO: 744604 - DNA, 33 bp, Homo sapien
cataacaaatgtgacaggttaacacaagtacaa

SEQ ID NO: 744605 - DNA, 33 bp, Homo sapien
aggctaattagaaactcaaatgtatataatcat

SEQ ID NO: 744606 - DNA, 33 bp, Homo sapien
aggctaattagaaactgaaatgtatataatcat

SEQ ID NO: 744607 - DNA, 33 bp, Homo sapien
aattgattataatacaatacttgctgggaagat

SEQ ID NO: 744608 - DNA, 33 bp, Homo sapien
aattgattataatacagtacttgctgggaagat

SEQ ID NO: 744609 - DNA, 33 bp, Homo sapien
agcagttctaaccactcagtaaataggtggaag

SEQ ID NO: 744610 - DNA, 33 bp, Homo sapien
agcagttctaaccactgagtaaataggtggaag

SEQ ID NO: 744611 - DNA, 33 bp, Homo sapien
gcctatggtatttccaactcttcctaatctttg

SEQ ID NO: 744612 - DNA, 33 bp, Homo sapien
gcctatggtatttccacctcttcctaatctttg

SEQ ID NO: 744613 - DNA, 33 bp, Homo sapien
gaccacaagcagacaacagttttgccacatcag

SEQ ID NO: 744614 - DNA, 33 bp, Homo sapien
gaccacaagcagacaatagttttgccacatcag

SEQ ID NO: 744615 - DNA, 33 bp, Homo sapien
tctcttcctttccaacagctctctatgactttg

SEQ ID NO: 744616 - DNA, 33 bp, Homo sapien
tctcttcctttccaactgctctctatgactttg

SEQ ID NO: 744617 - DNA, 33 bp, Homo sapien
gcctttccaggtggaacgaaatataagtcttgc

SEQ ID NO: 744618 - DNA, 33 bp, Homo sapien
gcctttccaggtggaatgaaatataagtcttgc

SEQ ID NO: 744619 - DNA, 33 bp, Homo sapien
tatctatgacctggaaactctccttcactccct

SEQ ID NO: 744620 - DNA, 33 bp, Homo sapien
tatctatgacctggaagctctccttcactccct

SEQ ID NO: 744621 - DNA, 33 bp, Homo sapien
cttttatggttttgacaatcttggaaaacattg

SEQ ID NO: 744622 - DNA, 33 bp, Homo sapien
cttttatggttttgacgatcttggaaaacattg

SEQ ID NO: 744623 - DNA, 33 bp, Homo sapien
tggacagagacaccaacgatgtttgctcacaga

SEQ ID NO: 744624 - DNA, 33 bp, Homo sapien
tggacagagacaccaaggatgtttgctcacaga

SEQ ID NO: 744625 - DNA, 33 bp, Homo sapien
taagaagagaacaaacaatgcaagttataaact

SEQ ID NO: 744626 - DNA, 33 bp, Homo sapien
taagaagagaacaaaccatgcaagttataaact

SEQ ID NO: 744627 - DNA, 33 bp, Homo sapien
tgatctactgccctaaggtatgttttccaaagg

SEQ ID NO: 744628 - DNA, 33 bp, Homo sapien
tgatctactgccctaatgtatgttttccaaagg

SEQ ID NO: 744629 - DNA, 33 bp, Homo sapien
ggatgtccaacttgccaatggcctgttgtggga

SEQ ID NO: 744630 - DNA, 33 bp, Homo sapien
ggatgtccaacttgccgatggcctgttgtggga

SEQ ID NO: 744631 - DNA, 33 bp, Homo sapien
atggtataaaatatgcacccaaatttttcttct

SEQ ID NO: 744632 - DNA, 33 bp, Homo sapien
atggtataaaatatgcgcccaaatttttcttct

SEQ ID NO: 744633 - DNA, 33 bp, Homo sapien
gtggcattgttcaatccgattctaatatttgag

SEQ ID NO: 744634 - DNA, 33 bp, Homo sapien
gtggcattgttcaatctgattctaatatttgag

SEQ ID NO: 744635 - DNA, 33 bp, Homo sapien
tattgtaaaacttcaaagaaaagacagatgttc

SEQ ID NO: 744636 - DNA, 33 bp, Homo sapien
tattgtaaaacttcaaggaaaagacagatgttc

SEQ ID NO: 744637 - DNA, 33 bp, Homo sapien
aaaaagccggaaaatgacacaatctgaaaatgg

SEQ ID NO: 744638 - DNA, 33 bp, Homo sapien
aaaaagccggaaaatggcacaatctgaaaatgg

SEQ ID NO: 744639 - DNA, 33 bp, Homo sapien
aggtgggacaactgcggcattgattaagtatct

SEQ ID NO: 744640 - DNA, 33 bp, Homo sapien
aggtgggacaactgcgtcattgattaagtatct

SEQ ID NO: 744641 - DNA, 33 bp, Homo sapien
tttttactctatgcataaatgtaaacagagttc

SEQ ID NO: 744642 - DNA, 33 bp, Homo sapien
tttttactctatgcatgaatgtaaacagagttc

SEQ ID NO: 744643 - DNA, 33 bp, Homo sapien
actagagatacaaaaaagtcaaatagggacatg

SEQ ID NO: 744644 - DNA, 33 bp, Homo sapien
actagagatacaaaaatgtcaaatagggacatg

SEQ ID NO: 744645 - DNA, 33 bp, Homo sapien
aaaaaaaggaactaaccatagaaagtgatggag

SEQ ID NO: 744646 - DNA, 33 bp, Homo sapien
aaaaaaaggaactaactatagaaagtgatggag

SEQ ID NO: 744647 - DNA, 33 bp, Homo sapien
aataatcatgtcttccaaaagcacaatttcatt

SEQ ID NO: 744648 - DNA, 33 bp, Homo sapien
aataatcatgtcttccgaaagcacaatttcatt

SEQ ID NO: 744649 - DNA, 33 bp, Homo sapien
tggggccatccagaaacaaacaaaaacacctgc

SEQ ID NO: 744650 - DNA, 33 bp, Homo sapien
tggggccatccagaaagaaacaaaaacacctgc

SEQ ID NO: 744651 - DNA, 33 bp, Homo sapien
agtagcctccgatcacacaaggaaccctgtcct

SEQ ID NO: 744652 - DNA, 33 bp, Homo sapien
agtagcctccgatcacgcaaggaaccctgtcct

SEQ ID NO: 744653 - DNA, 33 bp, Homo sapien
ctgaatgtgaattgagcattaggcttgacccag

SEQ ID NO: 744654 - DNA, 33 bp, Homo sapien
ctgaatgtgaattgaggattaggcttgacccag

SEQ ID NO: 744655 - DNA, 33 bp, Homo sapien
cactgaggtaaccaacagtcattcctgtcagga

SEQ ID NO: 744656 - DNA, 33 bp, Homo sapien
cactgaggtaaccaacggtcattcctgtcagga

SEQ ID NO: 744657 - DNA, 33 bp, Homo sapien
gtggctcaggtctcacagacaggtgtaggaaga

SEQ ID NO: 744658 - DNA, 33 bp, Homo sapien
gtggctcaggtctcacggacaggtgtaggaaga

SEQ ID NO: 744659 - DNA, 33 bp, Homo sapien
agaaaagtcattaaatcaggtaaagaggccaaa

SEQ ID NO: 744660 - DNA, 33 bp, Homo sapien
agaaaagtcattaaatgaggtaaagaggccaaa

SEQ ID NO: 744661 - DNA, 33 bp, Homo sapien
aaccagtgtggatgaacgaaagaaaagtcatta

SEQ ID NO: 744662 - DNA, 33 bp, Homo sapien
aaccagtgtggatgaatgaaagaaaagtcatta

SEQ ID NO: 744663 - DNA, 33 bp, Homo sapien
tttctatccatagagtcaaaaattgcttcctat

SEQ ID NO: 744664 - DNA, 33 bp, Homo sapien
tttctatccatagagttaaaaattgcttcctat

SEQ ID NO: 744665 - DNA, 33 bp, Homo sapien
ctgaggtctgatagcacgataggaattaactcc

SEQ ID NO: 744666 - DNA, 33 bp, Homo sapien
ctgaggtctgatagcatgataggaattaactcc

SEQ ID NO: 744667 - DNA, 33 bp, Homo sapien
ctgtatttcaaactgcccatgaaataattttat

SEQ ID NO: 744668 - DNA, 33 bp, Homo sapien
ctgtatttcaaactgctcatgaaataattttat

SEQ ID NO: 744669 - DNA, 33 bp, Homo sapien
gaaagtataaaccatcacatacaagagaatccg

SEQ ID NO: 744670 - DNA, 33 bp, Homo sapien
gaaagtataaaccatcgcatacaagagaatccg

SEQ ID NO: 744671 - DNA, 33 bp, Homo sapien
tatatagagtcatgagaagtaaacaatgtgaca

SEQ ID NO: 744672 - DNA, 33 bp, Homo sapien
tatatagagtcatgagtagtaaacaatgtgaca

SEQ ID NO: 744673 - DNA, 33 bp, Homo sapien
tgacagtttagtcctacggaaatttattgacag

SEQ ID NO: 744674 - DNA, 33 bp, Homo sapien
tgacagtttagtcctatggaaatttattgacag

SEQ ID NO: 744675 - DNA, 33 bp, Homo sapien
acgtatattaaagttacattgcgattaacatag

SEQ ID NO: 744676 - DNA, 33 bp, Homo sapien
acgtatattaaagttatattgcgattaacatag

SEQ ID NO: 744677 - DNA, 33 bp, Homo sapien
aacgtggaatgaagcacatcaataggtgaagct

SEQ ID NO: 744678 - DNA, 33 bp, Homo sapien
aacgtggaatgaagcatatcaataggtgaagct

SEQ ID NO: 744679 - DNA, 33 bp, Homo sapien
atgtgcctcatatctgaaactcttcattatatc

SEQ ID NO: 744680 - DNA, 33 bp, Homo sapien
atgtgcctcatatctggaactcttcattatatc

SEQ ID NO: 744681 - DNA, 33 bp, Homo sapien
ttaaagagtagcaatccaatcatgtttcccact

SEQ ID NO: 744682 - DNA, 33 bp, Homo sapien
ttaaagagtagcaatctaatcatgtttcccact

SEQ ID NO: 744683 - DNA, 33 bp, Homo sapien
tgctctttaataggacaagagtttctcaaagag

SEQ ID NO: 744684 - DNA, 33 bp, Homo sapien
tgctctttaataggacgagagtttctcaaagag

SEQ ID NO: 744685 - DNA, 33 bp, Homo sapien
cacactatcttgtctacctaaattcctcatggt

SEQ ID NO: 744686 - DNA, 33 bp, Homo sapien
cacactatcttgtctatctaaattcctcatggt

SEQ ID NO: 744687 - DNA, 33 bp, Homo sapien
ttcattttggaaagtacaaccagaaaatggatg

SEQ ID NO: 744688 - DNA, 33 bp, Homo sapien
ttcattttggaaagtataaccagaaaatggatg

SEQ ID NO: 744689 - DNA, 33 bp, Homo sapien
tcccaaaaacatcgtaagaaaacatccaatatt

SEQ ID NO: 744690 - DNA, 33 bp, Homo sapien
tcccaaaaacatcgtatgaaaacatccaatatt

SEQ ID NO: 744691 - DNA, 33 bp, Homo sapien
aacataatgcattaaaagacaatatagctctat

SEQ ID NO: 744692 - DNA, 33 bp, Homo sapien
aacataatgcattaaaggacaatatagctctat

SEQ ID NO: 744693 - DNA, 33 bp, Homo sapien
ttggctcacggtaacactggtctcccaggttcc

SEQ ID NO: 744694 - DNA, 33 bp, Homo sapien
ttggctcacggtaacattggtctcccaggttcc

SEQ ID NO: 744695 - DNA, 33 bp, Homo sapien
ttctaattgctgcttgcatttttacatcttttt

SEQ ID NO: 744696 - DNA, 33 bp, Homo sapien
ttctaattgctgcttgtatttttacatcttttt

SEQ ID NO: 744697 - DNA, 33 bp, Homo sapien
ttcaacaccttgtcagccacagctgtagttttc

SEQ ID NO: 744698 - DNA, 33 bp, Homo sapien
ttcaacaccttgtcaggcacagctgtagttttc

SEQ ID NO: 744699 - DNA, 33 bp, Homo sapien
caccagaactaggataaagttagcagccggatc

SEQ ID NO: 744700 - DNA, 33 bp, Homo sapien
caccagaactaggatagagttagcagccggatc

SEQ ID NO: 744701 - DNA, 33 bp, Homo sapien
tttattacttactctacggcctattttggtaaa

SEQ ID NO: 744702 - DNA, 33 bp, Homo sapien
tttattacttactctatggcctattttggtaaa

SEQ ID NO: 744703 - DNA, 33 bp, Homo sapien
gtcacaaaaaggaaaacgatttgcactttcctt

SEQ ID NO: 744704 - DNA, 33 bp, Homo sapien
gtcacaaaaaggaaaatgatttgcactttcctt

SEQ ID NO: 744705 - DNA, 33 bp, Homo sapien
acctgtagtcttaggccatgtttaaaaagcaga

SEQ ID NO: 744706 - DNA, 33 bp, Homo sapien
acctgtagtcttaggcgatgtttaaaaagcaga

SEQ ID NO: 744707 - DNA, 33 bp, Homo sapien
agtacttgctaatcatcacacaaagcaacaagg

SEQ ID NO: 744708 - DNA, 33 bp, Homo sapien
agtacttgctaatcattacacaaagcaacaagg

SEQ ID NO: 744709 - DNA, 33 bp, Homo sapien
ggatgtagttagaccacaaaggacacagaaggc

SEQ ID NO: 744710 - DNA, 33 bp, Homo sapien
ggatgtagttagaccataaaggacacagaaggc

SEQ ID NO: 744711 - DNA, 33 bp, Homo sapien
cacttcgaataaagatcagaggacatttttaac

SEQ ID NO: 744712 - DNA, 33 bp, Homo sapien
cacttcgaataaagattagaggacatttttaac

SEQ ID NO: 744713 - DNA, 33 bp, Homo sapien
attactgagaaggcaacacatatactttatctg

SEQ ID NO: 744714 - DNA, 33 bp, Homo sapien
attactgagaaggcaatacatatactttatctg

SEQ ID NO: 744715 - DNA, 33 bp, Homo sapien
tccaaacctatgctggaaatcaacctatgcaac

SEQ ID NO: 744716 - DNA, 33 bp, Homo sapien
tccaaacctatgctggcaatcaacctatgcaac

SEQ ID NO: 744717 - DNA, 33 bp, Homo sapien
ttgcgagaggagccagaatgatactcaagagtc

SEQ ID NO: 744718 - DNA, 33 bp, Homo sapien
ttgcgagaggagccaggatgatactcaagagtc

SEQ ID NO: 744719 - DNA, 33 bp, Homo sapien
aacttgaagaccactacgttgggcccaccagaa

SEQ ID NO: 744720 - DNA, 33 bp, Homo sapien
aacttgaagaccactaggttgggcccaccagaa

SEQ ID NO: 744721 - DNA, 33 bp, Homo sapien
gcatcaagcagggtgaaatttaaacaggcacta

SEQ ID NO: 744722 - DNA, 33 bp, Homo sapien
gcatcaagcagggtgagatttaaacaggcacta

SEQ ID NO: 744723 - DNA, 33 bp, Homo sapien
acaaaacggaaattgccctaggcgtgcatgaga

SEQ ID NO: 744724 - DNA, 33 bp, Homo sapien
acaaaacggaaattgctctaggcgtgcatgaga

SEQ ID NO: 744725 - DNA, 33 bp, Homo sapien
gttatatttcacagaacaacttaggctatattg

SEQ ID NO: 744726 - DNA, 33 bp, Homo sapien
gttatatttcacagaagaacttaggctatattg

SEQ ID NO: 744727 - DNA, 33 bp, Homo sapien
agtttagttgccaagacaatcaacatgtgagat

SEQ ID NO: 744728 - DNA, 33 bp, Homo sapien
agtttagttgccaagagaatcaacatgtgagat

SEQ ID NO: 744729 - DNA, 33 bp, Homo sapien
agatgattacgaaatacggttttgatttgatgt

SEQ ID NO: 744730 - DNA, 33 bp, Homo sapien
agatgattacgaaatatggttttgatttgatgt

SEQ ID NO: 744731 - DNA, 33 bp, Homo sapien
gaattaaattttcgtgcagtgttgcaaaaaaaa

SEQ ID NO: 744732 - DNA, 33 bp, Homo sapien
gaattaaattttcgtgtagtgttgcaaaaaaaa

SEQ ID NO: 744733 - DNA, 33 bp, Homo sapien
tattgtatttgccccactctactcttagtcatt

SEQ ID NO: 744734 - DNA, 33 bp, Homo sapien
tattgtatttgccccattctactcttagtcatt

SEQ ID NO: 744735 - DNA, 33 bp, Homo sapien
aaaaacatcttcgcctaaagtcgtgtaatgagt

SEQ ID NO: 744736 - DNA, 33 bp, Homo sapien
aaaaacatcttcgcctgaagtcgtgtaatgagt

SEQ ID NO: 744737 - DNA, 33 bp, Homo sapien
tggagatgatggcttcacagtgcagaaatagta

SEQ ID NO: 744738 - DNA, 33 bp, Homo sapien
tggagatgatggcttcgcagtgcagaaatagta

SEQ ID NO: 744739 - DNA, 33 bp, Homo sapien
tagtgaaagacaataacagcaaaacattggcaa

SEQ ID NO: 744740 - DNA, 33 bp, Homo sapien
tagtgaaagacaataatagcaaaacattggcaa

SEQ ID NO: 744741 - DNA, 33 bp, Homo sapien
acatattccttcataacttagcagccacttatc

SEQ ID NO: 744742 - DNA, 33 bp, Homo sapien
acatattccttcataatttagcagccacttatc

SEQ ID NO: 744743 - DNA, 33 bp, Homo sapien
ccttttatttgcacacagagatttttaaaaatt

SEQ ID NO: 744744 - DNA, 33 bp, Homo sapien
ccttttatttgcacacggagatttttaaaaatt

SEQ ID NO: 744745 - DNA, 33 bp, Homo sapien
gattgtattgagtagaaatttttgagagctgta

SEQ ID NO: 744746 - DNA, 33 bp, Homo sapien
gattgtattgagtagacatttttgagagctgta

SEQ ID NO: 744747 - DNA, 33 bp, Homo sapien
agtttacagaggtctacatttgtcagggtgtgg

SEQ ID NO: 744748 - DNA, 33 bp, Homo sapien
agtttacagaggtctatatttgtcagggtgtgg

SEQ ID NO: 744749 - DNA, 33 bp, Homo sapien
gaggaagcatttgtaacagtgatcatgggataa

SEQ ID NO: 744750 - DNA, 33 bp, Homo sapien
gaggaagcatttgtaatagtgatcatgggataa

SEQ ID NO: 744751 - DNA, 33 bp, Homo sapien
tcacttactttcttcacccgtaaattgagaacg

SEQ ID NO: 744752 - DNA, 33 bp, Homo sapien
tcacttactttcttcatccgtaaattgagaacg

SEQ ID NO: 744753 - DNA, 33 bp, Homo sapien
taaggtcttggaaaaactgatagaaattcacca

SEQ ID NO: 744754 - DNA, 33 bp, Homo sapien
taaggtcttggaaaaattgatagaaattcacca

SEQ ID NO: 744755 - DNA, 33 bp, Homo sapien
tcatttaggaggaaaactcatacacaaaatatt

SEQ ID NO: 744756 - DNA, 33 bp, Homo sapien
tcatttaggaggaaaattcatacacaaaatatt

SEQ ID NO: 744757 - DNA, 33 bp, Homo sapien
tggtcaccaaagcagaacgatgtgggatcttac

SEQ ID NO: 744758 - DNA, 33 bp, Homo sapien
tggtcaccaaagcagaccgatgtgggatcttac

SEQ ID NO: 744759 - DNA, 33 bp, Homo sapien
cttgggcattagaatcccttactggagctgaat

SEQ ID NO: 744760 - DNA, 33 bp, Homo sapien
cttgggcattagaatctcttactggagctgaat

SEQ ID NO: 744761 - DNA, 33 bp, Homo sapien
agcatttctccttaaaactcataagtacaactt

SEQ ID NO: 744762 - DNA, 33 bp, Homo sapien
agcatttctccttaaacctcataagtacaactt

SEQ ID NO: 744763 - DNA, 33 bp, Homo sapien
accgcatctgtttgaaatagcagaccttctaga

SEQ ID NO: 744764 - DNA, 33 bp, Homo sapien
accgcatctgtttgaagtagcagaccttctaga

SEQ ID NO: 744765 - DNA, 33 bp, Homo sapien
aatgagcttgcatctacatctgtgtcctctgat

SEQ ID NO: 744766 - DNA, 33 bp, Homo sapien
aatgagcttgcatctatatctgtgtcctctgat

SEQ ID NO: 744767 - DNA, 33 bp, Homo sapien
ggaaggtaggaatcacagcttctttcattcttc

SEQ ID NO: 744768 - DNA, 33 bp, Homo sapien
ggaaggtaggaatcacggcttctttcattcttc

SEQ ID NO: 744769 - DNA, 33 bp, Homo sapien
ttaacaccatgtggcaaattacttatggtttta

SEQ ID NO: 744770 - DNA, 33 bp, Homo sapien
ttaacaccatgtggcatattacttatggtttta

SEQ ID NO: 744771 - DNA, 33 bp, Homo sapien
attctcttttatgtgaataataatctgcagaac

SEQ ID NO: 744772 - DNA, 33 bp, Homo sapien
attctcttttatgtgagtaataatctgcagaac

SEQ ID NO: 744773 - DNA, 33 bp, Homo sapien
gacagtttagcaagacaatagaatgcttggaac

SEQ ID NO: 744774 - DNA, 33 bp, Homo sapien
gacagtttagcaagaccatagaatgcttggaac

SEQ ID NO: 744775 - DNA, 33 bp, Homo sapien
aatatggtacactccaataagtaaatgtaaaat

SEQ ID NO: 744776 - DNA, 33 bp, Homo sapien
aatatggtacactccagtaagtaaatgtaaaat

SEQ ID NO: 744777 - DNA, 33 bp, Homo sapien
gaatagtcctattcgaatatttgtcctaggtat

SEQ ID NO: 744778 - DNA, 33 bp, Homo sapien
gaatagtcctattcgagtatttgtcctaggtat

SEQ ID NO: 744779 - DNA, 33 bp, Homo sapien
ttgtctgtacccttgaaagtgctggaaaacatc

SEQ ID NO: 744780 - DNA, 33 bp, Homo sapien
ttgtctgtacccttgacagtgctggaaaacatc

SEQ ID NO: 744781 - DNA, 33 bp, Homo sapien
ggtaaggtgacttggaatcaggggagtcataaa

SEQ ID NO: 744782 - DNA, 33 bp, Homo sapien
ggtaaggtgacttggagtcaggggagtcataaa

SEQ ID NO: 744783 - DNA, 33 bp, Homo sapien
aaaaaaacactagctcaaatttcctcaataatt

SEQ ID NO: 744784 - DNA, 33 bp, Homo sapien
aaaaaaacactagctcgaatttcctcaataatt

SEQ ID NO: 744785 - DNA, 33 bp, Homo sapien
gtgttgcatagaaaaaaagtagggctttgttcc

SEQ ID NO: 744786 - DNA, 33 bp, Homo sapien
gtgttgcatagaaaaagagtagggctttgttcc

SEQ ID NO: 744787 - DNA, 33 bp, Homo sapien
gcagaggacacctgaaaataatacttgcagctt

SEQ ID NO: 744788 - DNA, 33 bp, Homo sapien
gcagaggacacctgaagataatacttgcagctt

SEQ ID NO: 744789 - DNA, 33 bp, Homo sapien
caaaatcacagtttacactcttactgctgcctt

SEQ ID NO: 744790 - DNA, 33 bp, Homo sapien
caaaatcacagtttactctcttactgctgcctt

SEQ ID NO: 744791 - DNA, 33 bp, Homo sapien
gccccatctacccagcaattttgaggatagtta

SEQ ID NO: 744792 - DNA, 33 bp, Homo sapien
gccccatctacccagcgattttgaggatagtta

SEQ ID NO: 744793 - DNA, 33 bp, Homo sapien
acaatcctgaacacggcattttaaaactgatct

SEQ ID NO: 744794 - DNA, 33 bp, Homo sapien
acaatcctgaacacggtattttaaaactgatct

SEQ ID NO: 744795 - DNA, 33 bp, Homo sapien
gaaaacaaagtgtgtccataacagtgaacaccc

SEQ ID NO: 744796 - DNA, 33 bp, Homo sapien
gaaaacaaagtgtgtcgataacagtgaacaccc

SEQ ID NO: 744797 - DNA, 33 bp, Homo sapien
tggacttgagggaattcaaagtagttcagattg

SEQ ID NO: 744798 - DNA, 33 bp, Homo sapien
tggacttgagggaattgaaagtagttcagattg

SEQ ID NO: 744799 - DNA, 33 bp, Homo sapien
taggacccattcaaagacataagggattatcat

SEQ ID NO: 744800 - DNA, 33 bp, Homo sapien
taggacccattcaaaggcataagggattatcat

SEQ ID NO: 744801 - DNA, 33 bp, Homo sapien
gtttctgacaactttgaaggtcgtaccattaga

SEQ ID NO: 744802 - DNA, 33 bp, Homo sapien
gtttctgacaactttggaggtcgtaccattaga

SEQ ID NO: 744803 - DNA, 33 bp, Homo sapien
tttgcatattttgcaactctagatctttgcttt

SEQ ID NO: 744804 - DNA, 33 bp, Homo sapien
tttgcatattttgcaattctagatctttgcttt

SEQ ID NO: 744805 - DNA, 33 bp, Homo sapien
atagtataataaagacaaacttggtgatggcat

SEQ ID NO: 744806 - DNA, 33 bp, Homo sapien
atagtataataaagactaacttggtgatggcat

SEQ ID NO: 744807 - DNA, 33 bp, Homo sapien
aaatgaggacaaaaaaactatgaagcatattgg

SEQ ID NO: 744808 - DNA, 33 bp, Homo sapien
aaatgaggacaaaaaagctatgaagcatattgg

SEQ ID NO: 744809 - DNA, 33 bp, Homo sapien
tacaggtgtcattagacgaggaggaaagtttct

SEQ ID NO: 744810 - DNA, 33 bp, Homo sapien
tacaggtgtcattagaggaggaggaaagtttct

SEQ ID NO: 744811 - DNA, 33 bp, Homo sapien
ccagtgacaggaactccagtgaaatagaaattg

SEQ ID NO: 744812 - DNA, 33 bp, Homo sapien
ccagtgacaggaactctagtgaaatagaaattg

SEQ ID NO: 744813 - DNA, 33 bp, Homo sapien
aacacagagtaagagaaaggcaggaagatcaca

SEQ ID NO: 744814 - DNA, 33 bp, Homo sapien
aacacagagtaagagagaggcaggaagatcaca

SEQ ID NO: 744815 - DNA, 33 bp, Homo sapien
gctgtaatagagaaacaagaagttcagagtgaa

SEQ ID NO: 744816 - DNA, 33 bp, Homo sapien
gctgtaatagagaaacgagaagttcagagtgaa

SEQ ID NO: 744817 - DNA, 33 bp, Homo sapien
agggctgatgtaagaaaactatcacaaacagga

SEQ ID NO: 744818 - DNA, 33 bp, Homo sapien
agggctgatgtaagaagactatcacaaacagga

SEQ ID NO: 744819 - DNA, 33 bp, Homo sapien
tgaggataaaattaaacgagcagtcttgaaaag

SEQ ID NO: 744820 - DNA, 33 bp, Homo sapien
tgaggataaaattaaatgagcagtcttgaaaag

SEQ ID NO: 744821 - DNA, 33 bp, Homo sapien
tgttaggaacataatcaaggcagggacttacat

SEQ ID NO: 744822 - DNA, 33 bp, Homo sapien
tgttaggaacataatccaggcagggacttacat

SEQ ID NO: 744823 - DNA, 33 bp, Homo sapien
ttctgcaatattaacacggagtgactccacttt

SEQ ID NO: 744824 - DNA, 33 bp, Homo sapien
ttctgcaatattaacatggagtgactccacttt

SEQ ID NO: 744825 - DNA, 33 bp, Homo sapien
gtgttgactggctcacccttacataattgacaa

SEQ ID NO: 744826 - DNA, 33 bp, Homo sapien
gtgttgactggctcactcttacataattgacaa

SEQ ID NO: 744827 - DNA, 33 bp, Homo sapien
gcagttagctaagaccacttttaatgatagggc

SEQ ID NO: 744828 - DNA, 33 bp, Homo sapien
gcagttagctaagaccgcttttaatgatagggc

SEQ ID NO: 744829 - DNA, 33 bp, Homo sapien
tgatagggctagaatactattcacctcgtcttt

SEQ ID NO: 744830 - DNA, 33 bp, Homo sapien
tgatagggctagaatattattcacctcgtcttt

SEQ ID NO: 744831 - DNA, 33 bp, Homo sapien
cagagatctttcttcaactggaatcaagacaca

SEQ ID NO: 744832 - DNA, 33 bp, Homo sapien
cagagatctttcttcagctggaatcaagacaca

SEQ ID NO: 744833 - DNA, 33 bp, Homo sapien
taatttccttaacttaaaaatctaggccgggtg

SEQ ID NO: 744834 - DNA, 33 bp, Homo sapien
taatttccttaacttagaaatctaggccgggtg

SEQ ID NO: 744835 - DNA, 33 bp, Homo sapien
agaactcagctgtttcaaaggaaaacttacctg

SEQ ID NO: 744836 - DNA, 33 bp, Homo sapien
agaactcagctgtttccaaggaaaacttacctg

SEQ ID NO: 744837 - DNA, 33 bp, Homo sapien
ccaatgaacttaaagcagagttcctcatccttt

SEQ ID NO: 744838 - DNA, 33 bp, Homo sapien
ccaatgaacttaaagcggagttcctcatccttt

SEQ ID NO: 744839 - DNA, 33 bp, Homo sapien
tgaatttcacggactacagctaccagatgcgtt

SEQ ID NO: 744840 - DNA, 33 bp, Homo sapien
tgaatttcacggactatagctaccagatgcgtt

SEQ ID NO: 744841 - DNA, 33 bp, Homo sapien
gtagataatcttagcaaaattccacagtaggtt

SEQ ID NO: 744842 - DNA, 33 bp, Homo sapien
gtagataatcttagcagaattccacagtaggtt

SEQ ID NO: 744843 - DNA, 33 bp, Homo sapien
gaggcatggttgtaaggaatactgaagacaaat

SEQ ID NO: 744844 - DNA, 33 bp, Homo sapien
gaggcatggttgtaagtaatactgaagacaaat

SEQ ID NO: 744845 - DNA, 33 bp, Homo sapien
tgcccatcacttcgtcgctttgtagctcttaga

SEQ ID NO: 744846 - DNA, 33 bp, Homo sapien
tgcccatcacttcgtctctttgtagctcttaga

SEQ ID NO: 744847 - DNA, 33 bp, Homo sapien
agcgtgtgaggagataagaaaaacttcctttag

SEQ ID NO: 744848 - DNA, 33 bp, Homo sapien
agcgtgtgaggagataggaaaaacttcctttag

SEQ ID NO: 744849 - DNA, 33 bp, Homo sapien
ttcttcttttcactccacagttcctgcatttcc

SEQ ID NO: 744850 - DNA, 33 bp, Homo sapien
ttcttcttttcactcctcagttcctgcatttcc

SEQ ID NO: 744851 - DNA, 33 bp, Homo sapien
ttctaatgaagtcactaaaagattactctacat

SEQ ID NO: 744852 - DNA, 33 bp, Homo sapien
ttctaatgaagtcactgaaagattactctacat

SEQ ID NO: 744853 - DNA, 33 bp, Homo sapien
tcaaatctgtcactgacggagttgttatttgag

SEQ ID NO: 744854 - DNA, 33 bp, Homo sapien
tcaaatctgtcactgatggagttgttatttgag

SEQ ID NO: 744855 - DNA, 33 bp, Homo sapien
aagcaggtaatgaatcccaaaatagtgtttgca

SEQ ID NO: 744856 - DNA, 33 bp, Homo sapien
aagcaggtaatgaatctcaaaatagtgtttgca

SEQ ID NO: 744857 - DNA, 33 bp, Homo sapien
cactagtggttaagaactctgactataaaatca

SEQ ID NO: 744858 - DNA, 33 bp, Homo sapien
cactagtggttaagaattctgactataaaatca

SEQ ID NO: 744859 - DNA, 33 bp, Homo sapien
aaaaagagaattaaggccaccagatcagccaca

SEQ ID NO: 744860 - DNA, 33 bp, Homo sapien
aaaaagagaattaaggtcaccagatcagccaca

SEQ ID NO: 744861 - DNA, 33 bp, Homo sapien
cctggtgcagagggcacaagtcatttaccagtc

SEQ ID NO: 744862 - DNA, 33 bp, Homo sapien
cctggtgcagagggcagaagtcatttaccagtc

SEQ ID NO: 744863 - DNA, 33 bp, Homo sapien
agttttctcaactgtaaaaacaaggatgagtct

SEQ ID NO: 744864 - DNA, 33 bp, Homo sapien
agttttctcaactgtataaacaaggatgagtct

SEQ ID NO: 744865 - DNA, 33 bp, Homo sapien
gtgcgtgagctgtagacatattatattaccaca

SEQ ID NO: 744866 - DNA, 33 bp, Homo sapien
gtgcgtgagctgtagatatattatattaccaca

SEQ ID NO: 744867 - DNA, 33 bp, Homo sapien
ttaatatagcaacagcactttaagttagtattt

SEQ ID NO: 744868 - DNA, 33 bp, Homo sapien
ttaatatagcaacagcgctttaagttagtattt

SEQ ID NO: 744869 - DNA, 33 bp, Homo sapien
ttatagctatttaatcaccgatgtatttggatt

SEQ ID NO: 744870 - DNA, 33 bp, Homo sapien
ttatagctatttaatcgccgatgtatttggatt

SEQ ID NO: 744871 - DNA, 33 bp, Homo sapien
atacacctatagcactgaataaaaatactgctg

SEQ ID NO: 744872 - DNA, 33 bp, Homo sapien
atacacctatagcacttaataaaaatactgctg

SEQ ID NO: 744873 - DNA, 33 bp, Homo sapien
gtttttaataggccaactactacttcaattgct

SEQ ID NO: 744874 - DNA, 33 bp, Homo sapien
gtttttaataggccaattactacttcaattgct

SEQ ID NO: 744875 - DNA, 33 bp, Homo sapien
ctgtttaaaaacacgacctcacatctagtacag

SEQ ID NO: 744876 - DNA, 33 bp, Homo sapien
ctgtttaaaaacacgatctcacatctagtacag

SEQ ID NO: 744877 - DNA, 33 bp, Homo sapien
aattaagtttatctggaaactcctgaagagctg

SEQ ID NO: 744878 - DNA, 33 bp, Homo sapien
aattaagtttatctgggaactcctgaagagctg

SEQ ID NO: 744879 - DNA, 33 bp, Homo sapien
aagaataactggaatcaatagaactgctcttgt

SEQ ID NO: 744880 - DNA, 33 bp, Homo sapien
aagaataactggaatcgatagaactgctcttgt

SEQ ID NO: 744881 - DNA, 33 bp, Homo sapien
tttcaacccacaaaaaagtttcttctgtttagg

SEQ ID NO: 744882 - DNA, 33 bp, Homo sapien
tttcaacccacaaaaatgtttcttctgtttagg

SEQ ID NO: 744883 - DNA, 33 bp, Homo sapien
tcatttggtttcataccacaatttcttctaaag

SEQ ID NO: 744884 - DNA, 33 bp, Homo sapien
tcatttggtttcatactacaatttcttctaaag

SEQ ID NO: 744885 - DNA, 33 bp, Homo sapien
gagctaatcaactagaccttgctaccacagtct

SEQ ID NO: 744886 - DNA, 33 bp, Homo sapien
gagctaatcaactagatcttgctaccacagtct

SEQ ID NO: 744887 - DNA, 33 bp, Homo sapien
cctgtaaagagttccaagataaaagtatctact

SEQ ID NO: 744888 - DNA, 33 bp, Homo sapien
cctgtaaagagttccatgataaaagtatctact

SEQ ID NO: 744889 - DNA, 33 bp, Homo sapien
catggaatgggccaggaattcaaatgttcttca

SEQ ID NO: 744890 - DNA, 33 bp, Homo sapien
catggaatgggccagggattcaaatgttcttca

SEQ ID NO: 744891 - DNA, 33 bp, Homo sapien
ctacttcatggtgacaatagtgaatacagatga

SEQ ID NO: 744892 - DNA, 33 bp, Homo sapien
ctacttcatggtgacagtagtgaatacagatga

SEQ ID NO: 744893 - DNA, 33 bp, Homo sapien
atgataaagtttgagacagtaagatatccgcta

SEQ ID NO: 744894 - DNA, 33 bp, Homo sapien
atgataaagtttgagatagtaagatatccgcta

SEQ ID NO: 744895 - DNA, 33 bp, Homo sapien
tccaggaaaatatggtaaaactaggacagctct

SEQ ID NO: 744896 - DNA, 33 bp, Homo sapien
tccaggaaaatatggttaaactaggacagctct

SEQ ID NO: 744897 - DNA, 33 bp, Homo sapien
tgtgagtattcttccccggactaaggttgtagt

SEQ ID NO: 744898 - DNA, 33 bp, Homo sapien
tgtgagtattcttccctggactaaggttgtagt

SEQ ID NO: 744899 - DNA, 33 bp, Homo sapien
gcagtctttctgccacagtgcaccaattagccc

SEQ ID NO: 744900 - DNA, 33 bp, Homo sapien
gcagtctttctgccacggtgcaccaattagccc

SEQ ID NO: 744901 - DNA, 33 bp, Homo sapien
cttcttataaccataaaaagactcaggcttaaa

SEQ ID NO: 744902 - DNA, 33 bp, Homo sapien
cttcttataaccataacaagactcaggcttaaa

SEQ ID NO: 744903 - DNA, 33 bp, Homo sapien
ttgtatacctggtgaacgaaacaaaatggctgg

SEQ ID NO: 744904 - DNA, 33 bp, Homo sapien
ttgtatacctggtgaatgaaacaaaatggctgg

SEQ ID NO: 744905 - DNA, 33 bp, Homo sapien
gcttattagtcaaacaccatttttatcatagct

SEQ ID NO: 744906 - DNA, 33 bp, Homo sapien
gcttattagtcaaacatcatttttatcatagct

SEQ ID NO: 744907 - DNA, 33 bp, Homo sapien
acataaggtgcttaggaaaaaaagtgtaaccat

SEQ ID NO: 744908 - DNA, 33 bp, Homo sapien
acataaggtgcttagggaaaaaagtgtaaccat

SEQ ID NO: 744909 - DNA, 33 bp, Homo sapien
gaaataacctttagtcaacccaccaattacatt

SEQ ID NO: 744910 - DNA, 33 bp, Homo sapien
gaaataacctttagtcgacccaccaattacatt

SEQ ID NO: 744911 - DNA, 33 bp, Homo sapien
atatctctaatatgctatcgtgaacatctggtc

SEQ ID NO: 744912 - DNA, 33 bp, Homo sapien
atatctctaatatgctgtcgtgaacatctggtc

SEQ ID NO: 744913 - DNA, 33 bp, Homo sapien
ctaggttcgttaactacgagaatgctacaggct

SEQ ID NO: 744914 - DNA, 33 bp, Homo sapien
ctaggttcgttaactatgagaatgctacaggct

SEQ ID NO: 744915 - DNA, 33 bp, Homo sapien
attatctggacaactacccttttcaggaaagtg

SEQ ID NO: 744916 - DNA, 33 bp, Homo sapien
attatctggacaactatccttttcaggaaagtg

SEQ ID NO: 744917 - DNA, 33 bp, Homo sapien
ttattgtgcatcgttaagagcagaaccagatag

SEQ ID NO: 744918 - DNA, 33 bp, Homo sapien
ttattgtgcatcgttaggagcagaaccagatag

SEQ ID NO: 744919 - DNA, 33 bp, Homo sapien
aatgtttttaaactaccgcaacaggcctgagat

SEQ ID NO: 744920 - DNA, 33 bp, Homo sapien
aatgtttttaaactactgcaacaggcctgagat

SEQ ID NO: 744921 - DNA, 33 bp, Homo sapien
ataggaggggcatttcagaaacaaactctatgt

SEQ ID NO: 744922 - DNA, 33 bp, Homo sapien
ataggaggggcatttcggaaacaaactctatgt

SEQ ID NO: 744923 - DNA, 33 bp, Homo sapien
ctactgtttacatatgcatggattattagcatt

SEQ ID NO: 744924 - DNA, 33 bp, Homo sapien
ctactgtttacatatgtatggattattagcatt

SEQ ID NO: 744925 - DNA, 33 bp, Homo sapien
tgactatgacatttcacaaactgcaagagaatt

SEQ ID NO: 744926 - DNA, 33 bp, Homo sapien
tgactatgacatttcagaaactgcaagagaatt

SEQ ID NO: 744927 - DNA, 33 bp, Homo sapien
tggctaggtaacaatgaagcaattcaataaact

SEQ ID NO: 744928 - DNA, 33 bp, Homo sapien
tggctaggtaacaatggagcaattcaataaact

SEQ ID NO: 744929 - DNA, 33 bp, Homo sapien
tctgagctgctctgtccctcaattaagcatctc

SEQ ID NO: 744930 - DNA, 33 bp, Homo sapien
tctgagctgctctgtcgctcaattaagcatctc

SEQ ID NO: 744931 - DNA, 33 bp, Homo sapien
ggtagtgtcatttactaaggtctccaagtagga

SEQ ID NO: 744932 - DNA, 33 bp, Homo sapien
ggtagtgtcatttactgaggtctccaagtagga

SEQ ID NO: 744933 - DNA, 33 bp, Homo sapien
gtcttgcaataactaaaccagtggtcaaaggac

SEQ ID NO: 744934 - DNA, 33 bp, Homo sapien
gtcttgcaataactaatccagtggtcaaaggac

SEQ ID NO: 744935 - DNA, 33 bp, Homo sapien
aagtattgaggggggaagatataaagataaaag

SEQ ID NO: 744936 - DNA, 33 bp, Homo sapien
aagtattgaggggggaggatataaagataaaag

SEQ ID NO: 744937 - DNA, 33 bp, Homo sapien
cctcccccatctcccacgtctaatgtaaagcta

SEQ ID NO: 744938 - DNA, 33 bp, Homo sapien
cctcccccatctcccatgtctaatgtaaagcta

SEQ ID NO: 744939 - DNA, 33 bp, Homo sapien
gacagtgatagtgagaaaaaaatactggagaga

SEQ ID NO: 744940 - DNA, 33 bp, Homo sapien
gacagtgatagtgagagaaaaatactggagaga

SEQ ID NO: 744941 - DNA, 33 bp, Homo sapien
ttgcttacttatttaccatttcgtgtgatcttc

SEQ ID NO: 744942 - DNA, 33 bp, Homo sapien
ttgcttacttatttactatttcgtgtgatcttc

SEQ ID NO: 744943 - DNA, 33 bp, Homo sapien
ttttcatattttcggcaccagtttatatttatc

SEQ ID NO: 744944 - DNA, 33 bp, Homo sapien
ttttcatattttcggcgccagtttatatttatc

SEQ ID NO: 744945 - DNA, 33 bp, Homo sapien
cttgtaggctgcggtacatgacaacaaaaatga

SEQ ID NO: 744946 - DNA, 33 bp, Homo sapien
cttgtaggctgcggtagatgacaacaaaaatga

SEQ ID NO: 744947 - DNA, 33 bp, Homo sapien
aaaatatgcagaatctcaacacttcttaccacc

SEQ ID NO: 744948 - DNA, 33 bp, Homo sapien
aaaatatgcagaatctgaacacttcttaccacc

SEQ ID NO: 744949 - DNA, 33 bp, Homo sapien
ttactgaggatagaaaacacaccgagatcttgt

SEQ ID NO: 744950 - DNA, 33 bp, Homo sapien
ttactgaggatagaaagcacaccgagatcttgt

SEQ ID NO: 744951 - DNA, 33 bp, Homo sapien
caaattagcagtgttacggaaccaacctgtgtc

SEQ ID NO: 744952 - DNA, 33 bp, Homo sapien
caaattagcagtgttatggaaccaacctgtgtc

SEQ ID NO: 744953 - DNA, 33 bp, Homo sapien
gagatttctcaaagaacgaaaagctgcattacc

SEQ ID NO: 744954 - DNA, 33 bp, Homo sapien
gagatttctcaaagaatgaaaagctgcattacc

SEQ ID NO: 744955 - DNA, 33 bp, Homo sapien
cacccatggttaccacaggacagtcttgtgggg

SEQ ID NO: 744956 - DNA, 33 bp, Homo sapien
cacccatggttaccacgggacagtcttgtgggg

SEQ ID NO: 744957 - DNA, 33 bp, Homo sapien
tgttgtaaagctcttaacatagaacaaacaggt

SEQ ID NO: 744958 - DNA, 33 bp, Homo sapien
tgttgtaaagctcttagcatagaacaaacaggt

SEQ ID NO: 744959 - DNA, 33 bp, Homo sapien
ttttcagtttggtgcaatcttatatgtctattt

SEQ ID NO: 744960 - DNA, 33 bp, Homo sapien
ttttcagtttggtgcattcttatatgtctattt

SEQ ID NO: 744961 - DNA, 33 bp, Homo sapien
aaatagcttatatggcacaggtctgaaaaatac

SEQ ID NO: 744962 - DNA, 33 bp, Homo sapien
aaatagcttatatggcgcaggtctgaaaaatac

SEQ ID NO: 744963 - DNA, 33 bp, Homo sapien
tcaatatggtaagttacatggagaggatttctg

SEQ ID NO: 744964 - DNA, 33 bp, Homo sapien
tcaatatggtaagttatatggagaggatttctg

SEQ ID NO: 744965 - DNA, 33 bp, Homo sapien
aagttcacaaaccatcaaaagtagtcaacaact

SEQ ID NO: 744966 - DNA, 33 bp, Homo sapien
aagttcacaaaccatcgaaagtagtcaacaact

SEQ ID NO: 744967 - DNA, 33 bp, Homo sapien
gacaaactgtttctaaaatttatatcagaatgt

SEQ ID NO: 744968 - DNA, 33 bp, Homo sapien
gacaaactgtttctaagatttatatcagaatgt

SEQ ID NO: 744969 - DNA, 33 bp, Homo sapien
taaaactcacagaagacagcacatatgtaaatt

SEQ ID NO: 744970 - DNA, 33 bp, Homo sapien
taaaactcacagaagagagcacatatgtaaatt

SEQ ID NO: 744971 - DNA, 33 bp, Homo sapien
tgcaatacataaaaagacaacagttttctatat

SEQ ID NO: 744972 - DNA, 33 bp, Homo sapien
tgcaatacataaaaaggcaacagttttctatat

SEQ ID NO: 744973 - DNA, 33 bp, Homo sapien
ggagactctctctgcagcctgattcccatatgt

SEQ ID NO: 744974 - DNA, 33 bp, Homo sapien
ggagactctctctgcatcctgattcccatatgt

SEQ ID NO: 744975 - DNA, 33 bp, Homo sapien
ggcctgcaaggacttcaaattctaatggtagac

SEQ ID NO: 744976 - DNA, 33 bp, Homo sapien
ggcctgcaaggacttctaattctaatggtagac

SEQ ID NO: 744977 - DNA, 33 bp, Homo sapien
gatgtattacaagggaagttacaaaggatacgt

SEQ ID NO: 744978 - DNA, 33 bp, Homo sapien
gatgtattacaagggatgttacaaaggatacgt

SEQ ID NO: 744979 - DNA, 33 bp, Homo sapien
ttaataaagctaaaatatgtctcattccaaaca

SEQ ID NO: 744980 - DNA, 33 bp, Homo sapien
ttaataaagctaaaatgtgtctcattccaaaca

SEQ ID NO: 744981 - DNA, 33 bp, Homo sapien
aatctagagtgatgtccacttctctcattcctg

SEQ ID NO: 744982 - DNA, 33 bp, Homo sapien
aatctagagtgatgtcgacttctctcattcctg

SEQ ID NO: 744983 - DNA, 33 bp, Homo sapien
aggtcatcttagctacaacagaatctagagtga

SEQ ID NO: 744984 - DNA, 33 bp, Homo sapien
aggtcatcttagctaccacagaatctagagtga

SEQ ID NO: 744985 - DNA, 33 bp, Homo sapien
ttttgattgtataatacagtggacttgaaagaa

SEQ ID NO: 744986 - DNA, 33 bp, Homo sapien
ttttgattgtataatatagtggacttgaaagaa

SEQ ID NO: 744987 - DNA, 33 bp, Homo sapien
gcccgcctcagcttaacagattctggcaaaaga

SEQ ID NO: 744988 - DNA, 33 bp, Homo sapien
gcccgcctcagcttaatagattctggcaaaaga

SEQ ID NO: 744989 - DNA, 33 bp, Homo sapien
atgatatgtgaattacaactcaatacaactgta

SEQ ID NO: 744990 - DNA, 33 bp, Homo sapien
atgatatgtgaattacgactcaatacaactgta

SEQ ID NO: 744991 - DNA, 33 bp, Homo sapien
caggaaatagtgccagaacataacaatgcattt

SEQ ID NO: 744992 - DNA, 33 bp, Homo sapien
caggaaatagtgccagtacataacaatgcattt

SEQ ID NO: 744993 - DNA, 33 bp, Homo sapien
tgaatttaaagtaggcaagaagatgacccgaca

SEQ ID NO: 744994 - DNA, 33 bp, Homo sapien
tgaatttaaagtaggcgagaagatgacccgaca

SEQ ID NO: 744995 - DNA, 33 bp, Homo sapien
tggattctaatcccaaatctagcaaatcactta

SEQ ID NO: 744996 - DNA, 33 bp, Homo sapien
tggattctaatcccaagtctagcaaatcactta

SEQ ID NO: 744997 - DNA, 33 bp, Homo sapien
taaatcaaacacaaccacattggagtatctttt

SEQ ID NO: 744998 - DNA, 33 bp, Homo sapien
taaatcaaacacaaccgcattggagtatctttt

SEQ ID NO: 744999 - DNA, 33 bp, Homo sapien
gatctgattgactgagaaaatgaatatataaag

SEQ ID NO: 745000 - DNA, 33 bp, Homo sapien
gatctgattgactgaggaaatgaatatataaag

SEQ ID NO: 745001 - DNA, 33 bp, Homo sapien
caggtccttcacttatcaaatgagaactcagga

SEQ ID NO: 745002 - DNA, 33 bp, Homo sapien
caggtccttcacttatgaaatgagaactcagga

SEQ ID NO: 745003 - DNA, 33 bp, Homo sapien
tagatctcaacatgacaggcccggcagagcacc

SEQ ID NO: 745004 - DNA, 33 bp, Homo sapien
tagatctcaacatgacgggcccggcagagcacc

SEQ ID NO: 745005 - DNA, 33 bp, Homo sapien
tagatgcatcagaaacgataaggatcacagttg

SEQ ID NO: 745006 - DNA, 33 bp, Homo sapien
tagatgcatcagaaactataaggatcacagttg

SEQ ID NO: 745007 - DNA, 33 bp, Homo sapien
ttgtcatagcgcagaacttcagcaagtcatttt

SEQ ID NO: 745008 - DNA, 33 bp, Homo sapien
ttgtcatagcgcagaatttcagcaagtcatttt

SEQ ID NO: 745009 - DNA, 33 bp, Homo sapien
ctatcagaccaatttcaaatgtcatgcctttca

SEQ ID NO: 745010 - DNA, 33 bp, Homo sapien
ctatcagaccaatttcgaatgtcatgcctttca

SEQ ID NO: 745011 - DNA, 33 bp, Homo sapien
atggctggttgatggaatccacagaggtctgct

SEQ ID NO: 745012 - DNA, 33 bp, Homo sapien
atggctggttgatggattccacagaggtctgct

SEQ ID NO: 745013 - DNA, 33 bp, Homo sapien
gagaagtgagatagtcagaagccagatgtgaag

SEQ ID NO: 745014 - DNA, 33 bp, Homo sapien
gagaagtgagatagtccgaagccagatgtgaag

SEQ ID NO: 745015 - DNA, 33 bp, Homo sapien
ggtactcagtatactaccaagaacatagagatg

SEQ ID NO: 745016 - DNA, 33 bp, Homo sapien
ggtactcagtatactatcaagaacatagagatg

SEQ ID NO: 745017 - DNA, 33 bp, Homo sapien
agtacgtgaggtattcaacactttattataaaa

SEQ ID NO: 745018 - DNA, 33 bp, Homo sapien
agtacgtgaggtattcgacactttattataaaa

SEQ ID NO: 745019 - DNA, 33 bp, Homo sapien
ctctgagtaatacccacgatgataaagaaccat

SEQ ID NO: 745020 - DNA, 33 bp, Homo sapien
ctctgagtaatacccatgatgataaagaaccat

SEQ ID NO: 745021 - DNA, 33 bp, Homo sapien
gttacactaatgcctcactagcttccaatggac

SEQ ID NO: 745022 - DNA, 33 bp, Homo sapien
gttacactaatgcctctctagcttccaatggac

SEQ ID NO: 745023 - DNA, 33 bp, Homo sapien
tttatctccccttttccctccaatggtatctct

SEQ ID NO: 745024 - DNA, 33 bp, Homo sapien
tttatctccccttttcgctccaatggtatctct

SEQ ID NO: 745025 - DNA, 33 bp, Homo sapien
ccatagaaattgaacaacaacctgaaagtccag

SEQ ID NO: 745026 - DNA, 33 bp, Homo sapien
ccatagaaattgaacagcaacctgaaagtccag

SEQ ID NO: 745027 - DNA, 33 bp, Homo sapien
cttctggaacaaacaaataacatcaatcagaaa

SEQ ID NO: 745028 - DNA, 33 bp, Homo sapien
cttctggaacaaacaattaacatcaatcagaaa

SEQ ID NO: 745029 - DNA, 33 bp, Homo sapien
caatagaatacaagaacatatgacacctgtaaa

SEQ ID NO: 745030 - DNA, 33 bp, Homo sapien
caatagaatacaagaagatatgacacctgtaaa

SEQ ID NO: 745031 - DNA, 33 bp, Homo sapien
cagggtccataaatcccccattcagacaaagca

SEQ ID NO: 745032 - DNA, 33 bp, Homo sapien
cagggtccataaatcctccattcagacaaagca

SEQ ID NO: 745033 - DNA, 33 bp, Homo sapien
tttagtcataagtctgaaaatgatgaggtacat

SEQ ID NO: 745034 - DNA, 33 bp, Homo sapien
tttagtcataagtctggaaatgatgaggtacat

SEQ ID NO: 745035 - DNA, 33 bp, Homo sapien
atctcaactttgtttacggtggcctgacattga

SEQ ID NO: 745036 - DNA, 33 bp, Homo sapien
atctcaactttgtttatggtggcctgacattga

SEQ ID NO: 745037 - DNA, 33 bp, Homo sapien
gtgaaattctacatacacccttgcatatgcaaa

SEQ ID NO: 745038 - DNA, 33 bp, Homo sapien
gtgaaattctacatacgcccttgcatatgcaaa

SEQ ID NO: 745039 - DNA, 33 bp, Homo sapien
tgcagcatctggagccaagagaaactcaatatt

SEQ ID NO: 745040 - DNA, 33 bp, Homo sapien
tgcagcatctggagccgagagaaactcaatatt

SEQ ID NO: 745041 - DNA, 33 bp, Homo sapien
tggtatgccgatatacaggcaaggggaccggcg

SEQ ID NO: 745042 - DNA, 33 bp, Homo sapien
tggtatgccgatatacgggcaaggggaccggcg

SEQ ID NO: 745043 - DNA, 33 bp, Homo sapien
ctttcgctggaaggaaggggcttgttccaattc

SEQ ID NO: 745044 - DNA, 33 bp, Homo sapien
ctttcgctggaaggaatgggcttgttccaattc

SEQ ID NO: 745045 - DNA, 33 bp, Homo sapien
gtttctgttttgccagcatcgttggttatgtac

SEQ ID NO: 745046 - DNA, 33 bp, Homo sapien
gtttctgttttgccagtatcgttggttatgtac

SEQ ID NO: 745047 - DNA, 33 bp, Homo sapien
gctttgtctgaggtcaaaattaaaacattgaat

SEQ ID NO: 745048 - DNA, 33 bp, Homo sapien
gctttgtctgaggtcacaattaaaacattgaat

SEQ ID NO: 745049 - DNA, 33 bp, Homo sapien
ctctgttcgcataactcaaggtaacaacattta

SEQ ID NO: 745050 - DNA, 33 bp, Homo sapien
ctctgttcgcataacttaaggtaacaacattta

SEQ ID NO: 745051 - DNA, 33 bp, Homo sapien
tgcctgaatccacacagactttccctctgttcg

SEQ ID NO: 745052 - DNA, 33 bp, Homo sapien
tgcctgaatccacacatactttccctctgttcg

SEQ ID NO: 745053 - DNA, 33 bp, Homo sapien
tctattgcaatgcagaagggaaaggcaactcct

SEQ ID NO: 745054 - DNA, 33 bp, Homo sapien
tctattgcaatgcagaggggaaaggcaactcct

SEQ ID NO: 745055 - DNA, 33 bp, Homo sapien
aagaactgttttaaaacaagcagatgaatgtat

SEQ ID NO: 745056 - DNA, 33 bp, Homo sapien
aagaactgttttaaaataagcagatgaatgtat

SEQ ID NO: 745057 - DNA, 33 bp, Homo sapien
atatctgccctttgaacacttcattgcccagat

SEQ ID NO: 745058 - DNA, 33 bp, Homo sapien
atatctgccctttgaatacttcattgcccagat

SEQ ID NO: 745059 - DNA, 33 bp, Homo sapien
aatccttggtaaagaaatgaaactatgttaaag

SEQ ID NO: 745060 - DNA, 33 bp, Homo sapien
aatccttggtaaagaagtgaaactatgttaaag

SEQ ID NO: 745061 - DNA, 33 bp, Homo sapien
ggcagcgtatgacagaaaaatccttggtaaaga

SEQ ID NO: 745062 - DNA, 33 bp, Homo sapien
ggcagcgtatgacagagaaatccttggtaaaga

SEQ ID NO: 745063 - DNA, 33 bp, Homo sapien
gatgtctgactgaaaccgtgctgaagatcacac

SEQ ID NO: 745064 - DNA, 33 bp, Homo sapien
gatgtctgactgaaactgtgctgaagatcacac

SEQ ID NO: 745065 - DNA, 33 bp, Homo sapien
ctctacctacagacacccagaggcctttttttt

SEQ ID NO: 745066 - DNA, 33 bp, Homo sapien
ctctacctacagacactcagaggcctttttttt

SEQ ID NO: 745067 - DNA, 33 bp, Homo sapien
gcccataagggtatgaatagtaggatttgggtc

SEQ ID NO: 745068 - DNA, 33 bp, Homo sapien
gcccataagggtatgactagtaggatttgggtc

SEQ ID NO: 745069 - DNA, 33 bp, Homo sapien
gtgagcagaataaatgacactaagtgttggggc

SEQ ID NO: 745070 - DNA, 33 bp, Homo sapien
gtgagcagaataaatgtcactaagtgttggggc

SEQ ID NO: 745071 - DNA, 33 bp, Homo sapien
gtttcctgatttattaaacagatgggggtgaat

SEQ ID NO: 745072 - DNA, 33 bp, Homo sapien
gtttcctgatttattatacagatgggggtgaat

SEQ ID NO: 745073 - DNA, 33 bp, Homo sapien
acttcatggaaaaaaaacaggctatttcctgct

SEQ ID NO: 745074 - DNA, 33 bp, Homo sapien
acttcatggaaaaaaaccaggctatttcctgct

SEQ ID NO: 745075 - DNA, 33 bp, Homo sapien
cattgtgagttatttacgtgaaatgaatgcatg

SEQ ID NO: 745076 - DNA, 33 bp, Homo sapien
cattgtgagttatttatgtgaaatgaatgcatg

SEQ ID NO: 745077 - DNA, 33 bp, Homo sapien
tttactacagagtttaaagaattgaatgaggga

SEQ ID NO: 745078 - DNA, 33 bp, Homo sapien
tttactacagagtttagagaattgaatgaggga

SEQ ID NO: 745079 - DNA, 33 bp, Homo sapien
aattcttatgaagaccactaataactctctgct

SEQ ID NO: 745080 - DNA, 33 bp, Homo sapien
aattcttatgaagaccgctaataactctctgct

SEQ ID NO: 745081 - DNA, 33 bp, Homo sapien
cttcacacacctttagacatcatttggagattg

SEQ ID NO: 745082 - DNA, 33 bp, Homo sapien
cttcacacacctttaggcatcatttggagattg

SEQ ID NO: 745083 - DNA, 33 bp, Homo sapien
ttaaacatatcataagccaatcacatatttcat

SEQ ID NO: 745084 - DNA, 33 bp, Homo sapien
ttaaacatatcataaggcaatcacatatttcat

SEQ ID NO: 745085 - DNA, 33 bp, Homo sapien
tttttttttcttcagacagtgttgctctgttgc

SEQ ID NO: 745086 - DNA, 33 bp, Homo sapien
tttttttttcttcagatagtgttgctctgttgc

SEQ ID NO: 745087 - DNA, 33 bp, Homo sapien
ggaaaggaagagttagccaccgtcatgcagcca

SEQ ID NO: 745088 - DNA, 33 bp, Homo sapien
ggaaaggaagagttagtcaccgtcatgcagcca

SEQ ID NO: 745089 - DNA, 33 bp, Homo sapien
acccagaaccaagtaaagtatagtaaagattct

SEQ ID NO: 745090 - DNA, 33 bp, Homo sapien
acccagaaccaagtaaggtatagtaaagattct

SEQ ID NO: 745091 - DNA, 33 bp, Homo sapien
ttttgtatgttttccaccaaaggattgggtaca

SEQ ID NO: 745092 - DNA, 33 bp, Homo sapien
ttttgtatgttttccatcaaaggattgggtaca

SEQ ID NO: 745093 - DNA, 33 bp, Homo sapien
gtataaacaaacaggccagttactaagaaagtt

SEQ ID NO: 745094 - DNA, 33 bp, Homo sapien
gtataaacaaacaggctagttactaagaaagtt

SEQ ID NO: 745095 - DNA, 33 bp, Homo sapien
ttacaataatgtgtaacggatgctatctgtgta

SEQ ID NO: 745096 - DNA, 33 bp, Homo sapien
ttacaataatgtgtaagggatgctatctgtgta

SEQ ID NO: 745097 - DNA, 33 bp, Homo sapien
tgttttggataagtcccgactgtctgcatttta

SEQ ID NO: 745098 - DNA, 33 bp, Homo sapien
tgttttggataagtcctgactgtctgcatttta

SEQ ID NO: 745099 - DNA, 33 bp, Homo sapien
ttcagtactacaggtaaaaatcagaaatacata

SEQ ID NO: 745100 - DNA, 33 bp, Homo sapien
ttcagtactacaggtagaaatcagaaatacata

SEQ ID NO: 745101 - DNA, 33 bp, Homo sapien
gtagactaatggaacaagagcaaacagtaacac

SEQ ID NO: 745102 - DNA, 33 bp, Homo sapien
gtagactaatggaacacgagcaaacagtaacac

SEQ ID NO: 745103 - DNA, 33 bp, Homo sapien
tagtagagcagaaaatcacaagcttccatactt

SEQ ID NO: 745104 - DNA, 33 bp, Homo sapien
tagtagagcagaaaattacaagcttccatactt

SEQ ID NO: 745105 - DNA, 33 bp, Homo sapien
tcaaatgattactcccaaatttttccacctccc

SEQ ID NO: 745106 - DNA, 33 bp, Homo sapien
tcaaatgattactcccgaatttttccacctccc

SEQ ID NO: 745107 - DNA, 33 bp, Homo sapien
aagtttagtcgaataaaagtcaatgaactaact

SEQ ID NO: 745108 - DNA, 33 bp, Homo sapien
aagtttagtcgaataagagtcaatgaactaact

SEQ ID NO: 745109 - DNA, 33 bp, Homo sapien
tttagggagcacctttaaaaatcatgtatttgc

SEQ ID NO: 745110 - DNA, 33 bp, Homo sapien
tttagggagcacctttgaaaatcatgtatttgc

SEQ ID NO: 745111 - DNA, 33 bp, Homo sapien
ttttagaggactcttaggaggattaattggaaa

SEQ ID NO: 745112 - DNA, 33 bp, Homo sapien
ttttagaggactcttatgaggattaattggaaa

SEQ ID NO: 745113 - DNA, 33 bp, Homo sapien
atatatcttcaagacaatctggaccatgaagtg

SEQ ID NO: 745114 - DNA, 33 bp, Homo sapien
atatatcttcaagacagtctggaccatgaagtg

SEQ ID NO: 745115 - DNA, 33 bp, Homo sapien
ctttggttctcttgtaagactcttctgtaggtg

SEQ ID NO: 745116 - DNA, 33 bp, Homo sapien
ctttggttctcttgtacgactcttctgtaggtg

SEQ ID NO: 745117 - DNA, 33 bp, Homo sapien
ttttctaagcctaacgcattaacatttgagtta

SEQ ID NO: 745118 - DNA, 33 bp, Homo sapien
ttttctaagcctaacgtattaacatttgagtta

SEQ ID NO: 745119 - DNA, 33 bp, Homo sapien
tcagtaattgttccacagaaggcgcaaatgaaa

SEQ ID NO: 745120 - DNA, 33 bp, Homo sapien
tcagtaattgttccacggaaggcgcaaatgaaa

SEQ ID NO: 745121 - DNA, 33 bp, Homo sapien
ccagctagaaacactaaatgctcaattggctct

SEQ ID NO: 745122 - DNA, 33 bp, Homo sapien
ccagctagaaacactagatgctcaattggctct

SEQ ID NO: 745123 - DNA, 33 bp, Homo sapien
ttgaaaatgacgtttaccttagacccaacccag

SEQ ID NO: 745124 - DNA, 33 bp, Homo sapien
ttgaaaatgacgtttagcttagacccaacccag

SEQ ID NO: 745125 - DNA, 33 bp, Homo sapien
tcattctttgtgactacgagccatgcctaacag

SEQ ID NO: 745126 - DNA, 33 bp, Homo sapien
tcattctttgtgactatgagccatgcctaacag

SEQ ID NO: 745127 - DNA, 33 bp, Homo sapien
gtcataggttatgttacaggtaattttacgtat

SEQ ID NO: 745128 - DNA, 33 bp, Homo sapien
gtcataggttatgttataggtaattttacgtat

SEQ ID NO: 745129 - DNA, 33 bp, Homo sapien
ccattcatagtcagcaccttagttcaggccctg

SEQ ID NO: 745130 - DNA, 33 bp, Homo sapien
ccattcatagtcagcatcttagttcaggccctg

SEQ ID NO: 745131 - DNA, 33 bp, Homo sapien
ctgatacttacagaaaagtaccgcacagtaggt

SEQ ID NO: 745132 - DNA, 33 bp, Homo sapien
ctgatacttacagaaatgtaccgcacagtaggt

SEQ ID NO: 745133 - DNA, 33 bp, Homo sapien
tgcttatctcatagaaagttttgtgatcattta

SEQ ID NO: 745134 - DNA, 33 bp, Homo sapien
tgcttatctcatagaacgttttgtgatcattta

SEQ ID NO: 745135 - DNA, 33 bp, Homo sapien
tcaaaatcatggctgaaaaatcccaatgcctac

SEQ ID NO: 745136 - DNA, 33 bp, Homo sapien
tcaaaatcatggctgacaaatcccaatgcctac

SEQ ID NO: 745137 - DNA, 33 bp, Homo sapien
ctgaatgtagaaagtgcaaagaatgagaaagga

SEQ ID NO: 745138 - DNA, 33 bp, Homo sapien
ctgaatgtagaaagtggaaagaatgagaaagga

SEQ ID NO: 745139 - DNA, 33 bp, Homo sapien
cataaacttgttatgacaggcaaaagcttgcac

SEQ ID NO: 745140 - DNA, 33 bp, Homo sapien
cataaacttgttatgataggcaaaagcttgcac

SEQ ID NO: 745141 - DNA, 33 bp, Homo sapien
agactccaatgctagactacagtcccagtttca

SEQ ID NO: 745142 - DNA, 33 bp, Homo sapien
agactccaatgctagattacagtcccagtttca

SEQ ID NO: 745143 - DNA, 33 bp, Homo sapien
tgaatttcatgataacaagaactgaattttcat

SEQ ID NO: 745144 - DNA, 33 bp, Homo sapien
tgaatttcatgataacgagaactgaattttcat

SEQ ID NO: 745145 - DNA, 33 bp, Homo sapien
agtcttccgtctcctacacacgaatatttcatt

SEQ ID NO: 745146 - DNA, 33 bp, Homo sapien
agtcttccgtctcctatacacgaatatttcatt

SEQ ID NO: 745147 - DNA, 33 bp, Homo sapien
cattccttggaaaagcccatctagtcccacagc

SEQ ID NO: 745148 - DNA, 33 bp, Homo sapien
cattccttggaaaagcgcatctagtcccacagc

SEQ ID NO: 745149 - DNA, 33 bp, Homo sapien
gtttccaattaagaaggccaggtttttatgaag

SEQ ID NO: 745150 - DNA, 33 bp, Homo sapien
gtttccaattaagaagtccaggtttttatgaag

SEQ ID NO: 745151 - DNA, 33 bp, Homo sapien
tgattcaagtcaagaaattcttctgttttttta

SEQ ID NO: 745152 - DNA, 33 bp, Homo sapien
tgattcaagtcaagaatttcttctgttttttta

SEQ ID NO: 745153 - DNA, 33 bp, Homo sapien
atcatgccacagaaaagggtatgagaactcagg

SEQ ID NO: 745154 - DNA, 33 bp, Homo sapien
atcatgccacagaaaatggtatgagaactcagg

SEQ ID NO: 745155 - DNA, 33 bp, Homo sapien
agacataggacctagacagtggaaactgtggat

SEQ ID NO: 745156 - DNA, 33 bp, Homo sapien
agacataggacctagagagtggaaactgtggat

SEQ ID NO: 745157 - DNA, 33 bp, Homo sapien
ctgacattgacaaaaacctagtaccaaaaatcc

SEQ ID NO: 745158 - DNA, 33 bp, Homo sapien
ctgacattgacaaaaagctagtaccaaaaatcc

SEQ ID NO: 745159 - DNA, 33 bp, Homo sapien
caagcattttaacttcaccatacagctcagtgc

SEQ ID NO: 745160 - DNA, 33 bp, Homo sapien
caagcattttaacttcgccatacagctcagtgc

SEQ ID NO: 745161 - DNA, 33 bp, Homo sapien
tcagatctttaatgacagcagacgttttggaga

SEQ ID NO: 745162 - DNA, 33 bp, Homo sapien
tcagatctttaatgacggcagacgttttggaga

SEQ ID NO: 745163 - DNA, 33 bp, Homo sapien
ctttactgatccaaataacctgtagatgtctga

SEQ ID NO: 745164 - DNA, 33 bp, Homo sapien
ctttactgatccaaattacctgtagatgtctga

SEQ ID NO: 745165 - DNA, 33 bp, Homo sapien
tttcttaccagctttcaagtgttggcagaaggg

SEQ ID NO: 745166 - DNA, 33 bp, Homo sapien
tttcttaccagctttcgagtgttggcagaaggg

SEQ ID NO: 745167 - DNA, 33 bp, Homo sapien
aattctttaaaatgcgaattaaatcatgcctta

SEQ ID NO: 745168 - DNA, 33 bp, Homo sapien
aattctttaaaatgcgtattaaatcatgcctta

SEQ ID NO: 745169 - DNA, 33 bp, Homo sapien
actttgttagagtaaccggaactaagacattgg

SEQ ID NO: 745170 - DNA, 33 bp, Homo sapien
actttgttagagtaactggaactaagacattgg

SEQ ID NO: 745171 - DNA, 33 bp, Homo sapien
atcttcagaactatgaaacatttgcattgtttt

SEQ ID NO: 745172 - DNA, 33 bp, Homo sapien
atcttcagaactatgagacatttgcattgtttt

SEQ ID NO: 745173 - DNA, 33 bp, Homo sapien
gtttcctttggttgccagaacaaatgaccacaa

SEQ ID NO: 745174 - DNA, 33 bp, Homo sapien
gtttcctttggttgcccgaacaaatgaccacaa

SEQ ID NO: 745175 - DNA, 33 bp, Homo sapien
gtttgcaatgttacaaagaaatgtgtctgaata

SEQ ID NO: 745176 - DNA, 33 bp, Homo sapien
gtttgcaatgttacaaggaaatgtgtctgaata

SEQ ID NO: 745177 - DNA, 33 bp, Homo sapien
ttaaaataacgtctgcaaacaattgctttctaa

SEQ ID NO: 745178 - DNA, 33 bp, Homo sapien
ttaaaataacgtctgcgaacaattgctttctaa

SEQ ID NO: 745179 - DNA, 33 bp, Homo sapien
tagagtatatctgaacccaaatatgtcagtaat

SEQ ID NO: 745180 - DNA, 33 bp, Homo sapien
tagagtatatctgaactcaaatatgtcagtaat

SEQ ID NO: 745181 - DNA, 33 bp, Homo sapien
tcacagtggggaaaggaagaaatgtgaccttgt

SEQ ID NO: 745182 - DNA, 33 bp, Homo sapien
tcacagtggggaaagggagaaatgtgaccttgt

SEQ ID NO: 745183 - DNA, 33 bp, Homo sapien
attcctttgaactgtaaccttcgtgacttataa

SEQ ID NO: 745184 - DNA, 33 bp, Homo sapien
attcctttgaactgtagccttcgtgacttataa

SEQ ID NO: 745185 - DNA, 33 bp, Homo sapien
catataaaacatttgcaaaacatacaagattca

SEQ ID NO: 745186 - DNA, 33 bp, Homo sapien
catataaaacatttgcgaaacatacaagattca

SEQ ID NO: 745187 - DNA, 33 bp, Homo sapien
caacattttgtgtgacaaatctcttaatgttag

SEQ ID NO: 745188 - DNA, 33 bp, Homo sapien
caacattttgtgtgaccaatctcttaatgttag

SEQ ID NO: 745189 - DNA, 33 bp, Homo sapien
caaggttaattactcagtcattcagacagaaag

SEQ ID NO: 745190 - DNA, 33 bp, Homo sapien
caaggttaattactcattcattcagacagaaag

SEQ ID NO: 745191 - DNA, 33 bp, Homo sapien
aattctgttacttccacatcacaaaagatttta

SEQ ID NO: 745192 - DNA, 33 bp, Homo sapien
aattctgttacttccatatcacaaaagatttta

SEQ ID NO: 745193 - DNA, 33 bp, Homo sapien
ccatatgttggcaagaaagtaaaaaatactaag

SEQ ID NO: 745194 - DNA, 33 bp, Homo sapien
ccatatgttggcaagagagtaaaaaatactaag

SEQ ID NO: 745195 - DNA, 33 bp, Homo sapien
caaggcaaagtgagcaactcataggaaaataaa

SEQ ID NO: 745196 - DNA, 33 bp, Homo sapien
caaggcaaagtgagcacctcataggaaaataaa

SEQ ID NO: 745197 - DNA, 33 bp, Homo sapien
gtgtgtatgttatgacaattattactacataaa

SEQ ID NO: 745198 - DNA, 33 bp, Homo sapien
gtgtgtatgttatgacgattattactacataaa

SEQ ID NO: 745199 - DNA, 33 bp, Homo sapien
gcctgttgtttagacaccgtggaagtaatggta

SEQ ID NO: 745200 - DNA, 33 bp, Homo sapien
gcctgttgtttagacatcgtggaagtaatggta

SEQ ID NO: 745201 - DNA, 33 bp, Homo sapien
aaagcaagtctcacataaatttttccatgcata

SEQ ID NO: 745202 - DNA, 33 bp, Homo sapien
aaagcaagtctcacatcaatttttccatgcata

SEQ ID NO: 745203 - DNA, 33 bp, Homo sapien
tttgtagcctagtagcaataagcagtaccatgt

SEQ ID NO: 745204 - DNA, 33 bp, Homo sapien
tttgtagcctagtagcgataagcagtaccatgt

SEQ ID NO: 745205 - DNA, 33 bp, Homo sapien
aggatggattattagacatactagaaaggtcaa

SEQ ID NO: 745206 - DNA, 33 bp, Homo sapien
aggatggattattagagatactagaaaggtcaa

SEQ ID NO: 745207 - DNA, 33 bp, Homo sapien
tctaagtttgtgaacaaaaatatgtagcactta

SEQ ID NO: 745208 - DNA, 33 bp, Homo sapien
tctaagtttgtgaacagaaatatgtagcactta

SEQ ID NO: 745209 - DNA, 33 bp, Homo sapien
ttttccatgcattttaagtgtgactgaagaaac

SEQ ID NO: 745210 - DNA, 33 bp, Homo sapien
ttttccatgcattttatgtgtgactgaagaaac

SEQ ID NO: 745211 - DNA, 33 bp, Homo sapien
gatacagtgtcttctacctcctggtacctgaag

SEQ ID NO: 745212 - DNA, 33 bp, Homo sapien
gatacagtgtcttctatctcctggtacctgaag

SEQ ID NO: 745213 - DNA, 33 bp, Homo sapien
tttcaagcaatgagaacgtttgacagtagtttg

SEQ ID NO: 745214 - DNA, 33 bp, Homo sapien
tttcaagcaatgagaatgtttgacagtagtttg

SEQ ID NO: 745215 - DNA, 33 bp, Homo sapien
agagaccagtctcaaaagtaccaagaatgtgaa

SEQ ID NO: 745216 - DNA, 33 bp, Homo sapien
agagaccagtctcaaaggtaccaagaatgtgaa

SEQ ID NO: 745217 - DNA, 33 bp, Homo sapien
gcagtattcaaacagaaaaagaatgccttcttc

SEQ ID NO: 745218 - DNA, 33 bp, Homo sapien
gcagtattcaaacagagaaagaatgccttcttc

SEQ ID NO: 745219 - DNA, 33 bp, Homo sapien
agattgctgaaagttaaaagttttggtttagag

SEQ ID NO: 745220 - DNA, 33 bp, Homo sapien
agattgctgaaagttagaagttttggtttagag

SEQ ID NO: 745221 - DNA, 33 bp, Homo sapien
ataatagtctgtaaaacgaacaaagtccaagag

SEQ ID NO: 745222 - DNA, 33 bp, Homo sapien
ataatagtctgtaaaatgaacaaagtccaagag

SEQ ID NO: 745223 - DNA, 33 bp, Homo sapien
tataaataagcaccaagtaaaccaataggcata

SEQ ID NO: 745224 - DNA, 33 bp, Homo sapien
tataaataagcaccaattaaaccaataggcata

SEQ ID NO: 745225 - DNA, 33 bp, Homo sapien
ttgaactgagtatgtcaagaagtaattcaaata

SEQ ID NO: 745226 - DNA, 33 bp, Homo sapien
ttgaactgagtatgtcgagaagtaattcaaata

SEQ ID NO: 745227 - DNA, 33 bp, Homo sapien
atgccagtaccgtgatcagaattaatggatcat

SEQ ID NO: 745228 - DNA, 33 bp, Homo sapien
atgccagtaccgtgattagaattaatggatcat

SEQ ID NO: 745229 - DNA, 33 bp, Homo sapien
cttgtaatgacaaccacgtgtatttgttttctg

SEQ ID NO: 745230 - DNA, 33 bp, Homo sapien
cttgtaatgacaaccatgtgtatttgttttctg

SEQ ID NO: 745231 - DNA, 33 bp, Homo sapien
atatgtctaaaatttcaagttgattctatcact

SEQ ID NO: 745232 - DNA, 33 bp, Homo sapien
atatgtctaaaatttcgagttgattctatcact

SEQ ID NO: 745233 - DNA, 33 bp, Homo sapien
aaattatgtcttggataacctatgcagggaaga

SEQ ID NO: 745234 - DNA, 33 bp, Homo sapien
aaattatgtcttggatcacctatgcagggaaga

SEQ ID NO: 745235 - DNA, 33 bp, Homo sapien
atgaatttagacaaaacgaagactgagaattgc

SEQ ID NO: 745236 - DNA, 33 bp, Homo sapien
atgaatttagacaaaatgaagactgagaattgc

SEQ ID NO: 745237 - DNA, 33 bp, Homo sapien
caaggcttcttaagtccaaagggcaattctcag

SEQ ID NO: 745238 - DNA, 33 bp, Homo sapien
caaggcttcttaagtctaaagggcaattctcag

SEQ ID NO: 745239 - DNA, 33 bp, Homo sapien
aggaccaaataaaccacctgaaagtttgctgag

SEQ ID NO: 745240 - DNA, 33 bp, Homo sapien
aggaccaaataaaccagctgaaagtttgctgag

SEQ ID NO: 745241 - DNA, 33 bp, Homo sapien
tctttgactcgaggtgaaactatctcagacaca

SEQ ID NO: 745242 - DNA, 33 bp, Homo sapien
tctttgactcgaggtgcaactatctcagacaca

SEQ ID NO: 745243 - DNA, 33 bp, Homo sapien
atgtttcaaattatccgagttaacgtgactggc

SEQ ID NO: 745244 - DNA, 33 bp, Homo sapien
atgtttcaaattatcctagttaacgtgactggc

SEQ ID NO: 745245 - DNA, 33 bp, Homo sapien
acagttagtcaaataaaaatgccaaaattgata

SEQ ID NO: 745246 - DNA, 33 bp, Homo sapien
acagttagtcaaataacaatgccaaaattgata

SEQ ID NO: 745247 - DNA, 33 bp, Homo sapien
tcaacatttccaggcaaaggaggcctaccatgg

SEQ ID NO: 745248 - DNA, 33 bp, Homo sapien
tcaacatttccaggcagaggaggcctaccatgg

SEQ ID NO: 745249 - DNA, 33 bp, Homo sapien
tcctgtgtctttgaaacttgtatctcataaaat

SEQ ID NO: 745250 - DNA, 33 bp, Homo sapien
tcctgtgtctttgaaagttgtatctcataaaat

SEQ ID NO: 745251 - DNA, 33 bp, Homo sapien
gaattcttgatcctcaatatgtaacgtaatatt

SEQ ID NO: 745252 - DNA, 33 bp, Homo sapien
gaattcttgatcctcagtatgtaacgtaatatt

SEQ ID NO: 745253 - DNA, 33 bp, Homo sapien
gcctcttctgggacaccaacctgaaaatactcg

SEQ ID NO: 745254 - DNA, 33 bp, Homo sapien
gcctcttctgggacacgaacctgaaaatactcg

SEQ ID NO: 745255 - DNA, 33 bp, Homo sapien
atattctcatagatgcagaaaaaaaagcatatg

SEQ ID NO: 745256 - DNA, 33 bp, Homo sapien
atattctcatagatgcggaaaaaaaagcatatg

SEQ ID NO: 745257 - DNA, 33 bp, Homo sapien
ggaatgatgtctggaagttagggtcctgccagt

SEQ ID NO: 745258 - DNA, 33 bp, Homo sapien
ggaatgatgtctggaatttagggtcctgccagt

SEQ ID NO: 745259 - DNA, 33 bp, Homo sapien
attcagacactggggaaagaatggagtatgtgt

SEQ ID NO: 745260 - DNA, 33 bp, Homo sapien
attcagacactggggacagaatggagtatgtgt

SEQ ID NO: 745261 - DNA, 33 bp, Homo sapien
ttaataccttacaatgaactacataaactcaca

SEQ ID NO: 745262 - DNA, 33 bp, Homo sapien
ttaataccttacaatggactacataaactcaca

SEQ ID NO: 745263 - DNA, 33 bp, Homo sapien
ggggataagacaattacatagcacatctgaatc

SEQ ID NO: 745264 - DNA, 33 bp, Homo sapien
ggggataagacaattatatagcacatctgaatc

SEQ ID NO: 745265 - DNA, 33 bp, Homo sapien
gatttttaaaaactccaaatattaaagagcaat

SEQ ID NO: 745266 - DNA, 33 bp, Homo sapien
gatttttaaaaactccgaatattaaagagcaat

SEQ ID NO: 745267 - DNA, 33 bp, Homo sapien
gagggtacatactccacgcctggctttcagtct

SEQ ID NO: 745268 - DNA, 33 bp, Homo sapien
gagggtacatactccatgcctggctttcagtct

SEQ ID NO: 745269 - DNA, 33 bp, Homo sapien
aatttttagatgccacaaatgagtgagaacatg

SEQ ID NO: 745270 - DNA, 33 bp, Homo sapien
aatttttagatgccacgaatgagtgagaacatg

SEQ ID NO: 745271 - DNA, 33 bp, Homo sapien
tgcattggagctaatcacatcaatccaagaagt

SEQ ID NO: 745272 - DNA, 33 bp, Homo sapien
tgcattggagctaatcgcatcaatccaagaagt

SEQ ID NO: 745273 - DNA, 33 bp, Homo sapien
gtaacaaggcgtgttcaatcttcctgtgatggc

SEQ ID NO: 745274 - DNA, 33 bp, Homo sapien
gtaacaaggcgtgttcgatcttcctgtgatggc

SEQ ID NO: 745275 - DNA, 33 bp, Homo sapien
attctcttatttgcaactggttaaagaagtaaa

SEQ ID NO: 745276 - DNA, 33 bp, Homo sapien
attctcttatttgcaattggttaaagaagtaaa

SEQ ID NO: 745277 - DNA, 33 bp, Homo sapien
tgtcttgtgaccttgacgcttttagtgagagac

SEQ ID NO: 745278 - DNA, 33 bp, Homo sapien
tgtcttgtgaccttgatgcttttagtgagagac

SEQ ID NO: 745279 - DNA, 33 bp, Homo sapien
gctggccataacgaaactctcagcctgggcaac

SEQ ID NO: 745280 - DNA, 33 bp, Homo sapien
gctggccataacgaaattctcagcctgggcaac

SEQ ID NO: 745281 - DNA, 33 bp, Homo sapien
ctggtgagtatccgaacaagaccctgacttggg

SEQ ID NO: 745282 - DNA, 33 bp, Homo sapien
ctggtgagtatccgaataagaccctgacttggg

SEQ ID NO: 745283 - DNA, 33 bp, Homo sapien
ttgcaaagggtccccaatgaatctatgacaaat

SEQ ID NO: 745284 - DNA, 33 bp, Homo sapien
ttgcaaagggtccccagtgaatctatgacaaat

SEQ ID NO: 745285 - DNA, 33 bp, Homo sapien
aggtgacattttacagacgtgtaggaggaaaac

SEQ ID NO: 745286 - DNA, 33 bp, Homo sapien
aggtgacattttacaggcgtgtaggaggaaaac

SEQ ID NO: 745287 - DNA, 33 bp, Homo sapien
ttttataaatacgaaacgttggcactagctaat

SEQ ID NO: 745288 - DNA, 33 bp, Homo sapien
ttttataaatacgaaatgttggcactagctaat

SEQ ID NO: 745289 - DNA, 33 bp, Homo sapien
attgatgacctaaacaatcactgaaacttaata

SEQ ID NO: 745290 - DNA, 33 bp, Homo sapien
attgatgacctaaacagtcactgaaacttaata

SEQ ID NO: 745291 - DNA, 33 bp, Homo sapien
catgccactgctaacagatacctatgagataac

SEQ ID NO: 745292 - DNA, 33 bp, Homo sapien
catgccactgctaacatatacctatgagataac

SEQ ID NO: 745293 - DNA, 33 bp, Homo sapien
acatttattgctatcacaaacctccccaatatt

SEQ ID NO: 745294 - DNA, 33 bp, Homo sapien
acatttattgctatcataaacctccccaatatt

SEQ ID NO: 745295 - DNA, 33 bp, Homo sapien
gttttgtgcagaacaccatttagtccaggttcc

SEQ ID NO: 745296 - DNA, 33 bp, Homo sapien
gttttgtgcagaacactatttagtccaggttcc

SEQ ID NO: 745297 - DNA, 33 bp, Homo sapien
ttatttccaaaaatcactcaaaaagatggtagt

SEQ ID NO: 745298 - DNA, 33 bp, Homo sapien
ttatttccaaaaatcattcaaaaagatggtagt

SEQ ID NO: 745299 - DNA, 33 bp, Homo sapien
cccaaaacagtgcaaacatcctatctctgggaa

SEQ ID NO: 745300 - DNA, 33 bp, Homo sapien
cccaaaacagtgcaaagatcctatctctgggaa

SEQ ID NO: 745301 - DNA, 33 bp, Homo sapien
ggctctccagtcaaaaaatctggtttaaatcta

SEQ ID NO: 745302 - DNA, 33 bp, Homo sapien
ggctctccagtcaaaagatctggtttaaatcta

SEQ ID NO: 745303 - DNA, 33 bp, Homo sapien
tgcttgctgccctacaaataaacaccttccttt

SEQ ID NO: 745304 - DNA, 33 bp, Homo sapien
tgcttgctgccctacagataaacaccttccttt

SEQ ID NO: 745305 - DNA, 33 bp, Homo sapien
caaatgctaaaacagcactgattgtaacacatg

SEQ ID NO: 745306 - DNA, 33 bp, Homo sapien
caaatgctaaaacagcgctgattgtaacacatg

SEQ ID NO: 745307 - DNA, 33 bp, Homo sapien
tattattctctaaaacgctaatatggtctggct

SEQ ID NO: 745308 - DNA, 33 bp, Homo sapien
tattattctctaaaactctaatatggtctggct

SEQ ID NO: 745309 - DNA, 33 bp, Homo sapien
gaaaattttgattccaatgaaaggcttagggag

SEQ ID NO: 745310 - DNA, 33 bp, Homo sapien
gaaaattttgattccagtgaaaggcttagggag

SEQ ID NO: 745311 - DNA, 33 bp, Homo sapien
ttattgatgataattccaatgcttgatggtttt

SEQ ID NO: 745312 - DNA, 33 bp, Homo sapien
ttattgatgataattctaatgcttgatggtttt

SEQ ID NO: 745313 - DNA, 33 bp, Homo sapien
aagcttagaaaacctacaaatgtgaggtggatt

SEQ ID NO: 745314 - DNA, 33 bp, Homo sapien
aagcttagaaaacctataaatgtgaggtggatt

SEQ ID NO: 745315 - DNA, 33 bp, Homo sapien
gctttaactttaggtaactgacagcagtggaca

SEQ ID NO: 745316 - DNA, 33 bp, Homo sapien
gctttaactttaggtagctgacagcagtggaca

SEQ ID NO: 745317 - DNA, 33 bp, Homo sapien
gacctcttttctcagccctcatgaaccaacaac

SEQ ID NO: 745318 - DNA, 33 bp, Homo sapien
gacctcttttctcagctctcatgaaccaacaac

SEQ ID NO: 745319 - DNA, 33 bp, Homo sapien
tttcatgaatgatgaaactgagaccacaaaaca

SEQ ID NO: 745320 - DNA, 33 bp, Homo sapien
tttcatgaatgatgaacctgagaccacaaaaca

SEQ ID NO: 745321 - DNA, 33 bp, Homo sapien
aagacattcccaaggcaaaatttctacaaaatt

SEQ ID NO: 745322 - DNA, 33 bp, Homo sapien
aagacattcccaaggcgaaatttctacaaaatt

SEQ ID NO: 745323 - DNA, 33 bp, Homo sapien
gactttttctgttcccacttctgctttgtggca

SEQ ID NO: 745324 - DNA, 33 bp, Homo sapien
gactttttctgttcccgcttctgctttgtggca

SEQ ID NO: 745325 - DNA, 33 bp, Homo sapien
aactaactaggctgaactgtaaaagcagaagaa

SEQ ID NO: 745326 - DNA, 33 bp, Homo sapien
aactaactaggctgaagtgtaaaagcagaagaa

SEQ ID NO: 745327 - DNA, 33 bp, Homo sapien
tccatggatggacaagaaagacaaactttttag

SEQ ID NO: 745328 - DNA, 33 bp, Homo sapien
tccatggatggacaaggaagacaaactttttag

SEQ ID NO: 745329 - DNA, 33 bp, Homo sapien
tttggcaggtagaaagcctcaagattatcctac

SEQ ID NO: 745330 - DNA, 33 bp, Homo sapien
tttggcaggtagaaaggctcaagattatcctac

SEQ ID NO: 745331 - DNA, 33 bp, Homo sapien
ttaacattcatcaggcaataaacatcttttttc

SEQ ID NO: 745332 - DNA, 33 bp, Homo sapien
ttaacattcatcaggcgataaacatcttttttc

SEQ ID NO: 745333 - DNA, 33 bp, Homo sapien
ctcagaagattctgaacgaaaccttggtgggca

SEQ ID NO: 745334 - DNA, 33 bp, Homo sapien
ctcagaagattctgaatgaaaccttggtgggca

SEQ ID NO: 745335 - DNA, 33 bp, Homo sapien
ttccatacactgcaaacgaacaattagaaattc

SEQ ID NO: 745336 - DNA, 33 bp, Homo sapien
ttccatacactgcaaatgaacaattagaaattc

SEQ ID NO: 745337 - DNA, 33 bp, Homo sapien
tataacatggtgctccacaattagaagcacaga

SEQ ID NO: 745338 - DNA, 33 bp, Homo sapien
tataacatggtgctccgcaattagaagcacaga

SEQ ID NO: 745339 - DNA, 33 bp, Homo sapien
atttgacaaatattaccaaatcttgtcaatacc

SEQ ID NO: 745340 - DNA, 33 bp, Homo sapien
atttgacaaatattacgaaatcttgtcaatacc

SEQ ID NO: 745341 - DNA, 33 bp, Homo sapien
aggtttacaagcgtcccaattgtggtcagtgcc

SEQ ID NO: 745342 - DNA, 33 bp, Homo sapien
aggtttacaagcgtcctaattgtggtcagtgcc

SEQ ID NO: 745343 - DNA, 33 bp, Homo sapien
gggtcaagacactggacgtggtaccctagtaaa

SEQ ID NO: 745344 - DNA, 33 bp, Homo sapien
gggtcaagacactggatgtggtaccctagtaaa

SEQ ID NO: 745345 - DNA, 33 bp, Homo sapien
ggaacaaagatgggaaatgatggagagaattaa

SEQ ID NO: 745346 - DNA, 33 bp, Homo sapien
ggaacaaagatgggaagtgatggagagaattaa

SEQ ID NO: 745347 - DNA, 33 bp, Homo sapien
agtaggactatgtcacagccgtataaaggcatt

SEQ ID NO: 745348 - DNA, 33 bp, Homo sapien
agtaggactatgtcacggccgtataaaggcatt

SEQ ID NO: 745349 - DNA, 33 bp, Homo sapien
tccacgttctttaacaaaaaggtcactacaggc

SEQ ID NO: 745350 - DNA, 33 bp, Homo sapien
tccacgttctttaacagaaaggtcactacaggc

SEQ ID NO: 745351 - DNA, 33 bp, Homo sapien
ttaaagaacgtggatggatctcaaacagtcatg

SEQ ID NO: 745352 - DNA, 33 bp, Homo sapien
ttaaagaacgtggatgtatctcaaacagtcatg

SEQ ID NO: 745353 - DNA, 33 bp, Homo sapien
ctgctttttgtgataacaaacttagaccgtaag

SEQ ID NO: 745354 - DNA, 33 bp, Homo sapien
ctgctttttgtgataagaaacttagaccgtaag

SEQ ID NO: 745355 - DNA, 33 bp, Homo sapien
caaattttggagggaccgatggtggttgtagtg

SEQ ID NO: 745356 - DNA, 33 bp, Homo sapien
caaattttggagggactgatggtggttgtagtg

SEQ ID NO: 745357 - DNA, 33 bp, Homo sapien
gaaatcactgtcttccccacagtctatctgact

SEQ ID NO: 745358 - DNA, 33 bp, Homo sapien
gaaatcactgtcttcctcacagtctatctgact

SEQ ID NO: 745359 - DNA, 33 bp, Homo sapien
ttcctacctctttcctaaagctctcctagctcc

SEQ ID NO: 745360 - DNA, 33 bp, Homo sapien
ttcctacctctttcctgaagctctcctagctcc

SEQ ID NO: 745361 - DNA, 33 bp, Homo sapien
gcttagctcctaccgggaatgtcatcagagaaa

SEQ ID NO: 745362 - DNA, 33 bp, Homo sapien
gcttagctcctaccggtaatgtcatcagagaaa

SEQ ID NO: 745363 - DNA, 33 bp, Homo sapien
attttatccttggtagacctataaataaactga

SEQ ID NO: 745364 - DNA, 33 bp, Homo sapien
attttatccttggtaggcctataaataaactga

SEQ ID NO: 745365 - DNA, 33 bp, Homo sapien
ttgtcacattgggctgcaatagttactttgcat

SEQ ID NO: 745366 - DNA, 33 bp, Homo sapien
ttgtcacattgggctgtaatagttactttgcat

SEQ ID NO: 745367 - DNA, 33 bp, Homo sapien
ctatagtcgagagagggaggatgcaaagagaaa

SEQ ID NO: 745368 - DNA, 33 bp, Homo sapien
ctatagtcgagagaggtaggatgcaaagagaaa

SEQ ID NO: 745369 - DNA, 33 bp, Homo sapien
agaaaagcagatttaaaagtgatggacagggaa

SEQ ID NO: 745370 - DNA, 33 bp, Homo sapien
agaaaagcagatttaagagtgatggacagggaa

SEQ ID NO: 745371 - DNA, 33 bp, Homo sapien
tcagagaagctagcaacccaggggaaaaatgtc

SEQ ID NO: 745372 - DNA, 33 bp, Homo sapien
tcagagaagctagcaatccaggggaaaaatgtc

SEQ ID NO: 745373 - DNA, 33 bp, Homo sapien
gttcgtgcacaaggccgctgaatttccttttct

SEQ ID NO: 745374 - DNA, 33 bp, Homo sapien
gttcgtgcacaaggcctctgaatttccttttct

SEQ ID NO: 745375 - DNA, 33 bp, Homo sapien
aaaaaagaaagataggcattcatcaacaagatt

SEQ ID NO: 745376 - DNA, 33 bp, Homo sapien
aaaaaagaaagataggtattcatcaacaagatt

SEQ ID NO: 745377 - DNA, 33 bp, Homo sapien
aaacagcccttgtttccaccagcttgctaagtg

SEQ ID NO: 745378 - DNA, 33 bp, Homo sapien
aaacagcccttgtttctaccagcttgctaagtg

SEQ ID NO: 745379 - DNA, 33 bp, Homo sapien
caaggaaaggggaacccgagaagccagaatttg

SEQ ID NO: 745380 - DNA, 33 bp, Homo sapien
caaggaaaggggaacctgagaagccagaatttg

SEQ ID NO: 745381 - DNA, 33 bp, Homo sapien
tcattcgacattatgcaagttgaattccagggc

SEQ ID NO: 745382 - DNA, 33 bp, Homo sapien
tcattcgacattatgccagttgaattccagggc

SEQ ID NO: 745383 - DNA, 33 bp, Homo sapien
tagggctgggacgaaaatgatcaagtaccttac

SEQ ID NO: 745384 - DNA, 33 bp, Homo sapien
tagggctgggacgaaagtgatcaagtaccttac

SEQ ID NO: 745385 - DNA, 33 bp, Homo sapien
gacagtcctaagcatcccacaatgggctctaat

SEQ ID NO: 745386 - DNA, 33 bp, Homo sapien
gacagtcctaagcatctcacaatgggctctaat

SEQ ID NO: 745387 - DNA, 33 bp, Homo sapien
cccatatgttctccgaccaaaatgatctgtctt

SEQ ID NO: 745388 - DNA, 33 bp, Homo sapien
cccatatgttctccgatcaaaatgatctgtctt

SEQ ID NO: 745389 - DNA, 33 bp, Homo sapien
gaaccctgaactcacgaagcccaaatcctttat

SEQ ID NO: 745390 - DNA, 33 bp, Homo sapien
gaaccctgaactcacggagcccaaatcctttat

SEQ ID NO: 745391 - DNA, 33 bp, Homo sapien
cattgatgaacatctaccctacctacacacaag

SEQ ID NO: 745392 - DNA, 33 bp, Homo sapien
cattgatgaacatctatcctacctacacacaag

SEQ ID NO: 745393 - DNA, 33 bp, Homo sapien
aagcgaacagtgctacaaaacctgacggtgtgc

SEQ ID NO: 745394 - DNA, 33 bp, Homo sapien
aagcgaacagtgctacgaaacctgacggtgtgc

SEQ ID NO: 745395 - DNA, 33 bp, Homo sapien
aacttatttgttaaagcagtgacaggatttgag

SEQ ID NO: 745396 - DNA, 33 bp, Homo sapien
aacttatttgttaaaggagtgacaggatttgag

SEQ ID NO: 745397 - DNA, 33 bp, Homo sapien
agttgatgtcatctcacgaaactacttttttgc

SEQ ID NO: 745398 - DNA, 33 bp, Homo sapien
agttgatgtcatctcaggaaactacttttttgc

SEQ ID NO: 745399 - DNA, 33 bp, Homo sapien
cacagtttacattagcacttattcttggtgttg

SEQ ID NO: 745400 - DNA, 33 bp, Homo sapien
cacagtttacattagctcttattcttggtgttg

SEQ ID NO: 745401 - DNA, 33 bp, Homo sapien
tctcactacagtgattcaactgcaatggggagt

SEQ ID NO: 745402 - DNA, 33 bp, Homo sapien
tctcactacagtgatttaactgcaatggggagt

SEQ ID NO: 745403 - DNA, 33 bp, Homo sapien
tagcatcctgggtttacataattttatacatag

SEQ ID NO: 745404 - DNA, 33 bp, Homo sapien
tagcatcctgggtttagataattttatacatag

SEQ ID NO: 745405 - DNA, 33 bp, Homo sapien
cagctgggaaagagaactgtgagccaatcagaa

SEQ ID NO: 745406 - DNA, 33 bp, Homo sapien
cagctgggaaagagaattgtgagccaatcagaa

SEQ ID NO: 745407 - DNA, 33 bp, Homo sapien
agaaagaggctccccaaacaattctgatacaca

SEQ ID NO: 745408 - DNA, 33 bp, Homo sapien
agaaagaggctccccagacaattctgatacaca

SEQ ID NO: 745409 - DNA, 33 bp, Homo sapien
actgcttatttgactacacactggctactgtat

SEQ ID NO: 745410 - DNA, 33 bp, Homo sapien
actgcttatttgactagacactggctactgtat

SEQ ID NO: 745411 - DNA, 33 bp, Homo sapien
tcctctttggtcattaaatagaagaaactagtc

SEQ ID NO: 745412 - DNA, 33 bp, Homo sapien
tcctctttggtcattacatagaagaaactagtc

SEQ ID NO: 745413 - DNA, 33 bp, Homo sapien
tgctggatatgcacccaatgcagctagaggtgt

SEQ ID NO: 745414 - DNA, 33 bp, Homo sapien
tgctggatatgcacccgatgcagctagaggtgt

SEQ ID NO: 745415 - DNA, 33 bp, Homo sapien
caaaggaatattcacacatgaacagttttaaga

SEQ ID NO: 745416 - DNA, 33 bp, Homo sapien
caaaggaatattcacatatgaacagttttaaga

SEQ ID NO: 745417 - DNA, 33 bp, Homo sapien
aaatccagatcccagaaccttgagtaatcctca

SEQ ID NO: 745418 - DNA, 33 bp, Homo sapien
aaatccagatcccagacccttgagtaatcctca

SEQ ID NO: 745419 - DNA, 33 bp, Homo sapien
ttctgtagtggattaagtgctaataagaacata

SEQ ID NO: 745420 - DNA, 33 bp, Homo sapien
ttctgtagtggattaattgctaataagaacata

SEQ ID NO: 745421 - DNA, 33 bp, Homo sapien
agtcatatactccttacgtcaaatcaaacagca

SEQ ID NO: 745422 - DNA, 33 bp, Homo sapien
agtcatatactccttaggtcaaatcaaacagca

SEQ ID NO: 745423 - DNA, 33 bp, Homo sapien
cttttcaaaagagagacggtcaaaggcaggagc

SEQ ID NO: 745424 - DNA, 33 bp, Homo sapien
cttttcaaaagagagatggtcaaaggcaggagc

SEQ ID NO: 745425 - DNA, 33 bp, Homo sapien
ataagtagcaaagttgaaattttaatcaagtaa

SEQ ID NO: 745426 - DNA, 33 bp, Homo sapien
ataagtagcaaagttggaattttaatcaagtaa

SEQ ID NO: 745427 - DNA, 33 bp, Homo sapien
tattgcaggagcttacagagtaacaggctttag

SEQ ID NO: 745428 - DNA, 33 bp, Homo sapien
tattgcaggagcttacggagtaacaggctttag

SEQ ID NO: 745429 - DNA, 33 bp, Homo sapien
ttcacaatatagcaataactatttccccgtaag

SEQ ID NO: 745430 - DNA, 33 bp, Homo sapien
ttcacaatatagcaatgactatttccccgtaag

SEQ ID NO: 745431 - DNA, 33 bp, Homo sapien
tgaaaagccttcaatgacacttatgaatgtgtg

SEQ ID NO: 745432 - DNA, 33 bp, Homo sapien
tgaaaagccttcaatggcacttatgaatgtgtg

SEQ ID NO: 745433 - DNA, 33 bp, Homo sapien
acaataaaatgcagcaatatgtaattttcacag

SEQ ID NO: 745434 - DNA, 33 bp, Homo sapien
acaataaaatgcagcagtatgtaattttcacag

SEQ ID NO: 745435 - DNA, 33 bp, Homo sapien
ggcctgaaaatttacccgaggctatccgcctcc

SEQ ID NO: 745436 - DNA, 33 bp, Homo sapien
ggcctgaaaatttacctgaggctatccgcctcc

SEQ ID NO: 745437 - DNA, 33 bp, Homo sapien
attgttcagtgagttacagagggtacaagaaaa

SEQ ID NO: 745438 - DNA, 33 bp, Homo sapien
attgttcagtgagttatagagggtacaagaaaa

SEQ ID NO: 745439 - DNA, 33 bp, Homo sapien
tacaaatatgctttgacatttaatgactgactt

SEQ ID NO: 745440 - DNA, 33 bp, Homo sapien
tacaaatatgctttgagatttaatgactgactt

SEQ ID NO: 745441 - DNA, 33 bp, Homo sapien
ccttatttgttgttaacagttgccaattgtgat

SEQ ID NO: 745442 - DNA, 33 bp, Homo sapien
ccttatttgttgttaatagttgccaattgtgat

SEQ ID NO: 745443 - DNA, 33 bp, Homo sapien
agaatttgctgactcaaaaagaccatgagttat

SEQ ID NO: 745444 - DNA, 33 bp, Homo sapien
agaatttgctgactcagaaagaccatgagttat

SEQ ID NO: 745445 - DNA, 33 bp, Homo sapien
atttcaagaattgtcacgtgaacagtggaatac

SEQ ID NO: 745446 - DNA, 33 bp, Homo sapien
atttcaagaattgtcatgtgaacagtggaatac

SEQ ID NO: 745447 - DNA, 33 bp, Homo sapien
tgtatattcttgggcaaattaatagatttcttg

SEQ ID NO: 745448 - DNA, 33 bp, Homo sapien
tgtatattcttgggcagattaatagatttcttg

SEQ ID NO: 745449 - DNA, 33 bp, Homo sapien
gctgtgaggagagcaaatatcacattctgaaat

SEQ ID NO: 745450 - DNA, 33 bp, Homo sapien
gctgtgaggagagcaagtatcacattctgaaat

SEQ ID NO: 745451 - DNA, 33 bp, Homo sapien
tgtcatggtgtattaacaaatgaggattttcaa

SEQ ID NO: 745452 - DNA, 33 bp, Homo sapien
tgtcatggtgtattaataaatgaggattttcaa

SEQ ID NO: 745453 - DNA, 33 bp, Homo sapien
ccctgaagatggcacaataagtacattttggtg

SEQ ID NO: 745454 - DNA, 33 bp, Homo sapien
ccctgaagatggcacagtaagtacattttggtg

SEQ ID NO: 745455 - DNA, 33 bp, Homo sapien
ataagctcatctgttaccttctgcataatgtac

SEQ ID NO: 745456 - DNA, 33 bp, Homo sapien
ataagctcatctgttatcttctgcataatgtac

SEQ ID NO: 745457 - DNA, 33 bp, Homo sapien
aaataaaaatttgagacagaagacaatgaatgc

SEQ ID NO: 745458 - DNA, 33 bp, Homo sapien
aaataaaaatttgagatagaagacaatgaatgc

SEQ ID NO: 745459 - DNA, 33 bp, Homo sapien
aagccagttatcattacacacaagcagcctact

SEQ ID NO: 745460 - DNA, 33 bp, Homo sapien
aagccagttatcattatacacaagcagcctact

SEQ ID NO: 745461 - DNA, 33 bp, Homo sapien
cttcaatcaaagatcaactcttctgtggaatgc

SEQ ID NO: 745462 - DNA, 33 bp, Homo sapien
cttcaatcaaagatcatctcttctgtggaatgc

SEQ ID NO: 745463 - DNA, 33 bp, Homo sapien
cagtgaatgatgaacacagtcaagaggtgattt

SEQ ID NO: 745464 - DNA, 33 bp, Homo sapien
cagtgaatgatgaacatagtcaagaggtgattt

SEQ ID NO: 745465 - DNA, 33 bp, Homo sapien
aagtattagcaaaaacacataacctgccattgt

SEQ ID NO: 745466 - DNA, 33 bp, Homo sapien
aagtattagcaaaaacgcataacctgccattgt

SEQ ID NO: 745467 - DNA, 33 bp, Homo sapien
taaaattcacctcttacgaaatgtcacagggaa

SEQ ID NO: 745468 - DNA, 33 bp, Homo sapien
taaaattcacctcttatgaaatgtcacagggaa

SEQ ID NO: 745469 - DNA, 33 bp, Homo sapien
accaaaatagccagacacaaaagaatataattc

SEQ ID NO: 745470 - DNA, 33 bp, Homo sapien
accaaaatagccagacgcaaaagaatataattc

SEQ ID NO: 745471 - DNA, 33 bp, Homo sapien
gaagccttgagtgagcccttgaaaagtctccca

SEQ ID NO: 745472 - DNA, 33 bp, Homo sapien
gaagccttgagtgagcgcttgaaaagtctccca

SEQ ID NO: 745473 - DNA, 33 bp, Homo sapien
ctggacagcgttttgaacactaagtaagcgttc

SEQ ID NO: 745474 - DNA, 33 bp, Homo sapien
ctggacagcgttttgaccactaagtaagcgttc

SEQ ID NO: 745475 - DNA, 33 bp, Homo sapien
gattttgtcactgaaacgaactcctagaagact

SEQ ID NO: 745476 - DNA, 33 bp, Homo sapien
gattttgtcactgaaatgaactcctagaagact

SEQ ID NO: 745477 - DNA, 33 bp, Homo sapien
atattattggcattacaaattcacaagaaagta

SEQ ID NO: 745478 - DNA, 33 bp, Homo sapien
atattattggcattaccaattcacaagaaagta

SEQ ID NO: 745479 - DNA, 33 bp, Homo sapien
gatggtaagtaaagaaaccagtctacagagaaa

SEQ ID NO: 745480 - DNA, 33 bp, Homo sapien
gatggtaagtaaagaagccagtctacagagaaa

SEQ ID NO: 745481 - DNA, 33 bp, Homo sapien
ggctctcagcctactacatatatgaattaagat

SEQ ID NO: 745482 - DNA, 33 bp, Homo sapien
ggctctcagcctactatatatatgaattaagat

SEQ ID NO: 745483 - DNA, 33 bp, Homo sapien
ctgtctagctgccatacctgcgggttattaatt

SEQ ID NO: 745484 - DNA, 33 bp, Homo sapien
ctgtctagctgccatatctgcgggttattaatt

SEQ ID NO: 745485 - DNA, 33 bp, Homo sapien
ataatgttttcagaaacacaaactcatggaaat

SEQ ID NO: 745486 - DNA, 33 bp, Homo sapien
ataatgttttcagaaagacaaactcatggaaat

SEQ ID NO: 745487 - DNA, 33 bp, Homo sapien
ttaatagcctactaacagaaaaaacagcccagg

SEQ ID NO: 745488 - DNA, 33 bp, Homo sapien
ttaatagcctactaaccgaaaaaacagcccagg

SEQ ID NO: 745489 - DNA, 33 bp, Homo sapien
atgtcattggacagggacattactaagaagtac

SEQ ID NO: 745490 - DNA, 33 bp, Homo sapien
atgtcattggacaggggcattactaagaagtac

SEQ ID NO: 745491 - DNA, 33 bp, Homo sapien
caagaaaatctcgaaaactacttttcaaatata

SEQ ID NO: 745492 - DNA, 33 bp, Homo sapien
caagaaaatctcgaaatctacttttcaaatata

SEQ ID NO: 745493 - DNA, 33 bp, Homo sapien
gccatgttgacaatcacacctgctaaggcttag

SEQ ID NO: 745494 - DNA, 33 bp, Homo sapien
gccatgttgacaatcagacctgctaaggcttag

SEQ ID NO: 745495 - DNA, 33 bp, Homo sapien
gcttgtctttcatagcagaagtaatgccatgtt

SEQ ID NO: 745496 - DNA, 33 bp, Homo sapien
gcttgtctttcatagcggaagtaatgccatgtt

SEQ ID NO: 745497 - DNA, 33 bp, Homo sapien
aaaaatatacaatctacgattcagctactttaa

SEQ ID NO: 745498 - DNA, 33 bp, Homo sapien
aaaaatatacaatctatgattcagctactttaa

SEQ ID NO: 745499 - DNA, 33 bp, Homo sapien
tatagaacatctagggccataacacaagccaac

SEQ ID NO: 745500 - DNA, 33 bp, Homo sapien
tatagaacatctagggtcataacacaagccaac

SEQ ID NO: 745501 - DNA, 33 bp, Homo sapien
atctcagtaagtgttccatgtactcttaaagaa

SEQ ID NO: 745502 - DNA, 33 bp, Homo sapien
atctcagtaagtgttctatgtactcttaaagaa

SEQ ID NO: 745503 - DNA, 33 bp, Homo sapien
attataacatctggagacctattaagccgttat

SEQ ID NO: 745504 - DNA, 33 bp, Homo sapien
attataacatctggaggcctattaagccgttat

SEQ ID NO: 745505 - DNA, 33 bp, Homo sapien
gggtggcctaagattccccatgtcaccgtatgt

SEQ ID NO: 745506 - DNA, 33 bp, Homo sapien
gggtggcctaagattctccatgtcaccgtatgt

SEQ ID NO: 745507 - DNA, 33 bp, Homo sapien
gttacggatttcttcaaaaggaacagggagttg

SEQ ID NO: 745508 - DNA, 33 bp, Homo sapien
gttacggatttcttcacaaggaacagggagttg

SEQ ID NO: 745509 - DNA, 33 bp, Homo sapien
tctcagactctttcagaaatgcaactaagacac

SEQ ID NO: 745510 - DNA, 33 bp, Homo sapien
tctcagactctttcagcaatgcaactaagacac

SEQ ID NO: 745511 - DNA, 33 bp, Homo sapien
ctacatgcttctctgacggccctgcaaaattca

SEQ ID NO: 745512 - DNA, 33 bp, Homo sapien
ctacatgcttctctgatggccctgcaaaattca

SEQ ID NO: 745513 - DNA, 33 bp, Homo sapien
ccagcaggtagtcacacgaccctagaaactcat

SEQ ID NO: 745514 - DNA, 33 bp, Homo sapien
ccagcaggtagtcacatgaccctagaaactcat

SEQ ID NO: 745515 - DNA, 33 bp, Homo sapien
agaggcaaatgtcttcactgtttggacgtggtc

SEQ ID NO: 745516 - DNA, 33 bp, Homo sapien
agaggcaaatgtcttcgctgtttggacgtggtc

SEQ ID NO: 745517 - DNA, 33 bp, Homo sapien
tcctatctggctcatacatgggagacagtacag

SEQ ID NO: 745518 - DNA, 33 bp, Homo sapien
tcctatctggctcatagatgggagacagtacag

SEQ ID NO: 745519 - DNA, 33 bp, Homo sapien
attaggagactgctacaattgctatccaaataa

SEQ ID NO: 745520 - DNA, 33 bp, Homo sapien
attaggagactgctacgattgctatccaaataa

SEQ ID NO: 745521 - DNA, 33 bp, Homo sapien
tagccatccatccttaagaaacagacatattca

SEQ ID NO: 745522 - DNA, 33 bp, Homo sapien
tagccatccatccttaggaaacagacatattca

SEQ ID NO: 745523 - DNA, 33 bp, Homo sapien
agtggctggttaagagaagcagattggtggagg

SEQ ID NO: 745524 - DNA, 33 bp, Homo sapien
agtggctggttaagaggagcagattggtggagg

SEQ ID NO: 745525 - DNA, 33 bp, Homo sapien
agttggtgtctctatcactcgccgcagtcagcc

SEQ ID NO: 745526 - DNA, 33 bp, Homo sapien
agttggtgtctctatcgctcgccgcagtcagcc

SEQ ID NO: 745527 - DNA, 33 bp, Homo sapien
ggcagataatgtggccaattcttccacctgcaa

SEQ ID NO: 745528 - DNA, 33 bp, Homo sapien
ggcagataatgtggccgattcttccacctgcaa

SEQ ID NO: 745529 - DNA, 33 bp, Homo sapien
agtgtgtattagaagacgtttacaaataacctg

SEQ ID NO: 745530 - DNA, 33 bp, Homo sapien
agtgtgtattagaagatgtttacaaataacctg

SEQ ID NO: 745531 - DNA, 33 bp, Homo sapien
gctcacaacctcttggaaacttgttctatgcta

SEQ ID NO: 745532 - DNA, 33 bp, Homo sapien
gctcacaacctcttgggaacttgttctatgcta

SEQ ID NO: 745533 - DNA, 33 bp, Homo sapien
ggaataagaccgctaaaagaatgcaaatcaaaa

SEQ ID NO: 745534 - DNA, 33 bp, Homo sapien
ggaataagaccgctaagagaatgcaaatcaaaa

SEQ ID NO: 745535 - DNA, 33 bp, Homo sapien
tctcaaaaaattattccatgagtttgcggcgac

SEQ ID NO: 745536 - DNA, 33 bp, Homo sapien
tctcaaaaaattattcgatgagtttgcggcgac

SEQ ID NO: 745537 - DNA, 33 bp, Homo sapien
tatggactctggctaacgatgtgtctcaggttg

SEQ ID NO: 745538 - DNA, 33 bp, Homo sapien
tatggactctggctaatgatgtgtctcaggttg

SEQ ID NO: 745539 - DNA, 33 bp, Homo sapien
atttgcatttctttaacgatgtatgatgtggaa

SEQ ID NO: 745540 - DNA, 33 bp, Homo sapien
atttgcatttctttaatgatgtatgatgtggaa

SEQ ID NO: 745541 - DNA, 33 bp, Homo sapien
ttagcttattcacatcaaatgtaattattgata

SEQ ID NO: 745542 - DNA, 33 bp, Homo sapien
ttagcttattcacatcgaatgtaattattgata

SEQ ID NO: 745543 - DNA, 33 bp, Homo sapien
atgacatatggatattaaaaaaaaactgcatcc

SEQ ID NO: 745544 - DNA, 33 bp, Homo sapien
atgacatatggatatttaaaaaaaactgcatcc

SEQ ID NO: 745545 - DNA, 33 bp, Homo sapien
ctttctccttactcaccgattgatgcctaaaaa

SEQ ID NO: 745546 - DNA, 33 bp, Homo sapien
ctttctccttactcactgattgatgcctaaaaa

SEQ ID NO: 745547 - DNA, 33 bp, Homo sapien
tgcctctaaatctgaaaacttcacaacaaggga

SEQ ID NO: 745548 - DNA, 33 bp, Homo sapien
tgcctctaaatctgaacacttcacaacaaggga

SEQ ID NO: 745549 - DNA, 33 bp, Homo sapien
aggatgaagagtaacgaaacacataatacaatt

SEQ ID NO: 745550 - DNA, 33 bp, Homo sapien
aggatgaagagtaacgcaacacataatacaatt

SEQ ID NO: 745551 - DNA, 33 bp, Homo sapien
actagtgagagggaaacggtagatggagtcctg

SEQ ID NO: 745552 - DNA, 33 bp, Homo sapien
actagtgagagggaaatggtagatggagtcctg

SEQ ID NO: 745553 - DNA, 33 bp, Homo sapien
gtttaggggctaaccacggagaatgtactattc

SEQ ID NO: 745554 - DNA, 33 bp, Homo sapien
gtttaggggctaaccatggagaatgtactattc

SEQ ID NO: 745555 - DNA, 33 bp, Homo sapien
aaatccagaatagtcacatgatattgaaagaga

SEQ ID NO: 745556 - DNA, 33 bp, Homo sapien
aaatccagaatagtcagatgatattgaaagaga

SEQ ID NO: 745557 - DNA, 33 bp, Homo sapien
tattatattaatgccaacttcatagaataaagt

SEQ ID NO: 745558 - DNA, 33 bp, Homo sapien
tattatattaatgccagcttcatagaataaagt

SEQ ID NO: 745559 - DNA, 33 bp, Homo sapien
agtaaagctcaggatagaaaagctacacactaa

SEQ ID NO: 745560 - DNA, 33 bp, Homo sapien
agtaaagctcaggatataaaagctacacactaa

SEQ ID NO: 745561 - DNA, 33 bp, Homo sapien
tgtcgagaacattcacaatttatggaaggaggt

SEQ ID NO: 745562 - DNA, 33 bp, Homo sapien
tgtcgagaacattcacgatttatggaaggaggt

SEQ ID NO: 745563 - DNA, 33 bp, Homo sapien
caagtaagctaaagccacagcttctctaatgag

SEQ ID NO: 745564 - DNA, 33 bp, Homo sapien
caagtaagctaaagccgcagcttctctaatgag

SEQ ID NO: 745565 - DNA, 33 bp, Homo sapien
gtcaattttcccatacactgaatataagctttg

SEQ ID NO: 745566 - DNA, 33 bp, Homo sapien
gtcaattttcccatacgctgaatataagctttg

SEQ ID NO: 745567 - DNA, 33 bp, Homo sapien
caatggtgttccaagaaaaacaaagattcaagg

SEQ ID NO: 745568 - DNA, 33 bp, Homo sapien
caatggtgttccaagagaaacaaagattcaagg

SEQ ID NO: 745569 - DNA, 33 bp, Homo sapien
tactgttgtagtgataagaacacatttagtaaa

SEQ ID NO: 745570 - DNA, 33 bp, Homo sapien
tactgttgtagtgatacgaacacatttagtaaa

SEQ ID NO: 745571 - DNA, 33 bp, Homo sapien
tatgctgttaaaggccaggaaagcctgagactg

SEQ ID NO: 745572 - DNA, 33 bp, Homo sapien
tatgctgttaaaggccgggaaagcctgagactg

SEQ ID NO: 745573 - DNA, 33 bp, Homo sapien
tgaaaacacaatatgtaaatgatctggaaagca

SEQ ID NO: 745574 - DNA, 33 bp, Homo sapien
tgaaaacacaatatgtgaatgatctggaaagca

SEQ ID NO: 745575 - DNA, 33 bp, Homo sapien
aaaaattaaactcagaagaagtattgaatgggc

SEQ ID NO: 745576 - DNA, 33 bp, Homo sapien
aaaaattaaactcagaggaagtattgaatgggc

SEQ ID NO: 745577 - DNA, 33 bp, Homo sapien
ttttcagaattacgtacagttttccgctttctt

SEQ ID NO: 745578 - DNA, 33 bp, Homo sapien
ttttcagaattacgtagagttttccgctttctt

SEQ ID NO: 745579 - DNA, 33 bp, Homo sapien
actcttactcatcaccacaaatcacttattaat

SEQ ID NO: 745580 - DNA, 33 bp, Homo sapien
actcttactcatcaccgcaaatcacttattaat

SEQ ID NO: 745581 - DNA, 33 bp, Homo sapien
tcagaatttactcggagaactgacatttattgt

SEQ ID NO: 745582 - DNA, 33 bp, Homo sapien
tcagaatttactcggataactgacatttattgt

SEQ ID NO: 745583 - DNA, 33 bp, Homo sapien
acaccaaaattgaaaactgcactattataaacc

SEQ ID NO: 745584 - DNA, 33 bp, Homo sapien
acaccaaaattgaaaattgcactattataaacc

SEQ ID NO: 745585 - DNA, 33 bp, Homo sapien
tatctccccaaactgaacctcttcatcgaggct

SEQ ID NO: 745586 - DNA, 33 bp, Homo sapien
tatctccccaaactgaccctcttcatcgaggct

SEQ ID NO: 745587 - DNA, 33 bp, Homo sapien
ctagttttggcatggcagataataaataacaaa

SEQ ID NO: 745588 - DNA, 33 bp, Homo sapien
ctagttttggcatggcggataataaataacaaa

SEQ ID NO: 745589 - DNA, 33 bp, Homo sapien
caaagaaacaatgacaactctcaggaagagaaa

SEQ ID NO: 745590 - DNA, 33 bp, Homo sapien
caaagaaacaatgacatctctcaggaagagaaa

SEQ ID NO: 745591 - DNA, 33 bp, Homo sapien
gtacattgtgtatttggacaaggggttaatatt

SEQ ID NO: 745592 - DNA, 33 bp, Homo sapien
gtacattgtgtatttgtacaaggggttaatatt

SEQ ID NO: 745593 - DNA, 33 bp, Homo sapien
agagaggtaaacagaaatagcaaatcaacaatg

SEQ ID NO: 745594 - DNA, 33 bp, Homo sapien
agagaggtaaacagaattagcaaatcaacaatg

SEQ ID NO: 745595 - DNA, 33 bp, Homo sapien
tttaagtgttacaaatgatgcttctataaaaat

SEQ ID NO: 745596 - DNA, 33 bp, Homo sapien
tttaagtgttacaaattatgcttctataaaaat

SEQ ID NO: 745597 - DNA, 33 bp, Homo sapien
catgaacagacatgaaaaaaccttaaatgcata

SEQ ID NO: 745598 - DNA, 33 bp, Homo sapien
catgaacagacatgaagaaaccttaaatgcata

SEQ ID NO: 745599 - DNA, 33 bp, Homo sapien
agatacaacagcagacaatggaatattattcag

SEQ ID NO: 745600 - DNA, 33 bp, Homo sapien
agatacaacagcagacgatggaatattattcag

SEQ ID NO: 745601 - DNA, 33 bp, Homo sapien
taaacattcttctcacccacacgcagaacgtat

SEQ ID NO: 745602 - DNA, 33 bp, Homo sapien
taaacattcttctcactcacacgcagaacgtat

SEQ ID NO: 745603 - DNA, 33 bp, Homo sapien
aagattggtcatttagcatttgatgtattaatg

SEQ ID NO: 745604 - DNA, 33 bp, Homo sapien
aagattggtcatttagtatttgatgtattaatg

SEQ ID NO: 745605 - DNA, 33 bp, Homo sapien
cctcaacactaagtaacgtatttggacagtgag

SEQ ID NO: 745606 - DNA, 33 bp, Homo sapien
cctcaacactaagtaatgtatttggacagtgag

SEQ ID NO: 745607 - DNA, 33 bp, Homo sapien
cccaacagagttggaaatcaaaaaaggcttcct

SEQ ID NO: 745608 - DNA, 33 bp, Homo sapien
cccaacagagttggaagtcaaaaaaggcttcct

SEQ ID NO: 745609 - DNA, 33 bp, Homo sapien
aatttattctgaggacaagaacaatccatgcca

SEQ ID NO: 745610 - DNA, 33 bp, Homo sapien
aatttattctgaggacgagaacaatccatgcca

SEQ ID NO: 745611 - DNA, 33 bp, Homo sapien
agcacgatggagaaccacccgactacagacgga

SEQ ID NO: 745612 - DNA, 33 bp, Homo sapien
agcacgatggagaaccgcccgactacagacgga

SEQ ID NO: 745613 - DNA, 33 bp, Homo sapien
caaaaaatcacagcaaagggttctgacaatgtg

SEQ ID NO: 745614 - DNA, 33 bp, Homo sapien
caaaaaatcacagcaaggggttctgacaatgtg

SEQ ID NO: 745615 - DNA, 33 bp, Homo sapien
tgacaacttagttcagaagaaatctttcgtaag

SEQ ID NO: 745616 - DNA, 33 bp, Homo sapien
tgacaacttagttcagcagaaatctttcgtaag

SEQ ID NO: 745617 - DNA, 33 bp, Homo sapien
cttagacttttccaccagaattacagattgtct

SEQ ID NO: 745618 - DNA, 33 bp, Homo sapien
cttagacttttccaccggaattacagattgtct

SEQ ID NO: 745619 - DNA, 33 bp, Homo sapien
aaattcagtagcaaataaatgtcagttcttcat

SEQ ID NO: 745620 - DNA, 33 bp, Homo sapien
aaattcagtagcaaatgaatgtcagttcttcat

SEQ ID NO: 745621 - DNA, 33 bp, Homo sapien
gccatcagtgctagttcaaatgactaggataaa

SEQ ID NO: 745622 - DNA, 33 bp, Homo sapien
gccatcagtgctagttgaaatgactaggataaa

SEQ ID NO: 745623 - DNA, 33 bp, Homo sapien
cctccagagtctaccacataaaaaattattgcc

SEQ ID NO: 745624 - DNA, 33 bp, Homo sapien
cctccagagtctaccatataaaaaattattgcc

SEQ ID NO: 745625 - DNA, 33 bp, Homo sapien
aatgagcctggtagaactgtactaaaaacccat

SEQ ID NO: 745626 - DNA, 33 bp, Homo sapien
aatgagcctggtagaattgtactaaaaacccat

SEQ ID NO: 745627 - DNA, 33 bp, Homo sapien
tttattctgttgtctaacttctcaatgtttaat

SEQ ID NO: 745628 - DNA, 33 bp, Homo sapien
tttattctgttgtctagcttctcaatgtttaat

SEQ ID NO: 745629 - DNA, 33 bp, Homo sapien
acttggaaacaactcaaacgttcatctatggta

SEQ ID NO: 745630 - DNA, 33 bp, Homo sapien
acttggaaacaactcagacgttcatctatggta

SEQ ID NO: 745631 - DNA, 33 bp, Homo sapien
atgcatcgtatattaccatgagccattcactta

SEQ ID NO: 745632 - DNA, 33 bp, Homo sapien
atgcatcgtatattactatgagccattcactta

SEQ ID NO: 745633 - DNA, 33 bp, Homo sapien
acagcctaatgatgcacaaaaatagtgatatgt

SEQ ID NO: 745634 - DNA, 33 bp, Homo sapien
acagcctaatgatgcataaaaatagtgatatgt

SEQ ID NO: 745635 - DNA, 33 bp, Homo sapien
tattgattgccttaagaactgcaattaactaag

SEQ ID NO: 745636 - DNA, 33 bp, Homo sapien
tattgattgccttaagcactgcaattaactaag

SEQ ID NO: 745637 - DNA, 33 bp, Homo sapien
ggccttttataggagacgtaaattgctggatac

SEQ ID NO: 745638 - DNA, 33 bp, Homo sapien
ggccttttataggagatgtaaattgctggatac

SEQ ID NO: 745639 - DNA, 33 bp, Homo sapien
atcaattctgataataacctcaatatgtcatct

SEQ ID NO: 745640 - DNA, 33 bp, Homo sapien
atcaattctgataatagcctcaatatgtcatct

SEQ ID NO: 745641 - DNA, 33 bp, Homo sapien
gtaatgtctcttggacggccataatccttattc

SEQ ID NO: 745642 - DNA, 33 bp, Homo sapien
gtaatgtctcttggactgccataatccttattc

SEQ ID NO: 745643 - DNA, 33 bp, Homo sapien
atggaaaatgtgttgcactaagttgtccgagat

SEQ ID NO: 745644 - DNA, 33 bp, Homo sapien
atggaaaatgtgttgcgctaagttgtccgagat

SEQ ID NO: 745645 - DNA, 33 bp, Homo sapien
aggaagctattaatgacggtacgagtaaagaca

SEQ ID NO: 745646 - DNA, 33 bp, Homo sapien
aggaagctattaatgagggtacgagtaaagaca

SEQ ID NO: 745647 - DNA, 33 bp, Homo sapien
gccaaatgttgtcacaagagggatgctgctgct

SEQ ID NO: 745648 - DNA, 33 bp, Homo sapien
gccaaatgttgtcacaggagggatgctgctgct

SEQ ID NO: 745649 - DNA, 33 bp, Homo sapien
gttgatgaaacacttgcattggttgacaaaaaa

SEQ ID NO: 745650 - DNA, 33 bp, Homo sapien
gttgatgaaacacttgtattggttgacaaaaaa

SEQ ID NO: 745651 - DNA, 33 bp, Homo sapien
atattagtgcaggctacgcgtgacattacccca

SEQ ID NO: 745652 - DNA, 33 bp, Homo sapien
atattagtgcaggctatgcgtgacattacccca

SEQ ID NO: 745653 - DNA, 33 bp, Homo sapien
agtgaactggactgaccgctgtactggggggcg

SEQ ID NO: 745654 - DNA, 33 bp, Homo sapien
agtgaactggactgactgctgtactggggggcg

SEQ ID NO: 745655 - DNA, 33 bp, Homo sapien
attttgatacattcacagagcgagaaaaaagtt

SEQ ID NO: 745656 - DNA, 33 bp, Homo sapien
attttgatacattcacggagcgagaaaaaagtt

SEQ ID NO: 745657 - DNA, 33 bp, Homo sapien
aaaaagatacctactcacttaggcttatcatag

SEQ ID NO: 745658 - DNA, 33 bp, Homo sapien
aaaaagatacctactcgcttaggcttatcatag

SEQ ID NO: 745659 - DNA, 33 bp, Homo sapien
agttattcccctgtgaacagtggtagtggaaca

SEQ ID NO: 745660 - DNA, 33 bp, Homo sapien
agttattcccctgtgatcagtggtagtggaaca

SEQ ID NO: 745661 - DNA, 33 bp, Homo sapien
cttataaaacattccaatcttgtcaacattaaa

SEQ ID NO: 745662 - DNA, 33 bp, Homo sapien
cttataaaacattccagtcttgtcaacattaaa

SEQ ID NO: 745663 - DNA, 33 bp, Homo sapien
atattaaaaaataaatcacatgctgcaattgga

SEQ ID NO: 745664 - DNA, 33 bp, Homo sapien
atattaaaaaataaattacatgctgcaattgga

SEQ ID NO: 745665 - DNA, 33 bp, Homo sapien
caattacaaggcaaaaactgtgaccgtattatc

SEQ ID NO: 745666 - DNA, 33 bp, Homo sapien
caattacaaggcaaaatctgtgaccgtattatc

SEQ ID NO: 745667 - DNA, 33 bp, Homo sapien
tgagcagttttggatcaaatgacaatgaaattg

SEQ ID NO: 745668 - DNA, 33 bp, Homo sapien
tgagcagttttggatcgaatgacaatgaaattg

SEQ ID NO: 745669 - DNA, 33 bp, Homo sapien
tggagtctgtccagtaactaatctccttgcaga

SEQ ID NO: 745670 - DNA, 33 bp, Homo sapien
tggagtctgtccagtacctaatctccttgcaga

SEQ ID NO: 745671 - DNA, 33 bp, Homo sapien
tatggtccaatgtatacactaagtgaataactt

SEQ ID NO: 745672 - DNA, 33 bp, Homo sapien
tatggtccaatgtatatactaagtgaataactt

SEQ ID NO: 745673 - DNA, 33 bp, Homo sapien
tcaaaatgtgcataaaatacaggcataagttgt

SEQ ID NO: 745674 - DNA, 33 bp, Homo sapien
tcaaaatgtgcataaactacaggcataagttgt

SEQ ID NO: 745675 - DNA, 33 bp, Homo sapien
ctagcaatgtgtatcaatgacacctggactgta

SEQ ID NO: 745676 - DNA, 33 bp, Homo sapien
ctagcaatgtgtatcactgacacctggactgta

SEQ ID NO: 745677 - DNA, 33 bp, Homo sapien
caatgatctaacatttcaaaggtcaattgatgg

SEQ ID NO: 745678 - DNA, 33 bp, Homo sapien
caatgatctaacatttgaaaggtcaattgatgg

SEQ ID NO: 745679 - DNA, 33 bp, Homo sapien
tacttcttgaatcataccaatccattttcttct

SEQ ID NO: 745680 - DNA, 33 bp, Homo sapien
tacttcttgaatcatatcaatccattttcttct

SEQ ID NO: 745681 - DNA, 33 bp, Homo sapien
ttttgaaactgaatacaattaacagcatccaag

SEQ ID NO: 745682 - DNA, 33 bp, Homo sapien
ttttgaaactgaataccattaacagcatccaag

SEQ ID NO: 745683 - DNA, 33 bp, Homo sapien
caaaatcacttatttacgtaaggttgctagtga

SEQ ID NO: 745684 - DNA, 33 bp, Homo sapien
caaaatcacttatttatgtaaggttgctagtga

SEQ ID NO: 745685 - DNA, 33 bp, Homo sapien
ttatgctatgtgtaaacattttctgctcaaact

SEQ ID NO: 745686 - DNA, 33 bp, Homo sapien
ttatgctatgtgtaaatattttctgctcaaact

SEQ ID NO: 745687 - DNA, 33 bp, Homo sapien
gtagtagtgttatgaaagatgttaatattcaca

SEQ ID NO: 745688 - DNA, 33 bp, Homo sapien
gtagtagtgttatgaaggatgttaatattcaca

SEQ ID NO: 745689 - DNA, 33 bp, Homo sapien
ttctgtgtttatatcccaggaaaatacttgcag

SEQ ID NO: 745690 - DNA, 33 bp, Homo sapien
ttctgtgtttatatccgaggaaaatacttgcag

SEQ ID NO: 745691 - DNA, 33 bp, Homo sapien
tgtaccataatgattcactagcaaagactttat

SEQ ID NO: 745692 - DNA, 33 bp, Homo sapien
tgtaccataatgattctctagcaaagactttat

SEQ ID NO: 745693 - DNA, 33 bp, Homo sapien
gaaatgttactttcaacaacttacaggaccttg

SEQ ID NO: 745694 - DNA, 33 bp, Homo sapien
gaaatgttactttcaagaacttacaggaccttg

SEQ ID NO: 745695 - DNA, 33 bp, Homo sapien
attccaactttaatgccgaaacaataaacttta

SEQ ID NO: 745696 - DNA, 33 bp, Homo sapien
attccaactttaatgctgaaacaataaacttta

SEQ ID NO: 745697 - DNA, 33 bp, Homo sapien
atccagtatgtcaaaaatgtccaactcataaag

SEQ ID NO: 745698 - DNA, 33 bp, Homo sapien
atccagtatgtcaaaattgtccaactcataaag

SEQ ID NO: 745699 - DNA, 33 bp, Homo sapien
tgcataaccacagtacaatttgtaacaactcag

SEQ ID NO: 745700 - DNA, 33 bp, Homo sapien
tgcataaccacagtaccatttgtaacaactcag

SEQ ID NO: 745701 - DNA, 33 bp, Homo sapien
tgaattggaattaaaaaagtgctctaccactgg

SEQ ID NO: 745702 - DNA, 33 bp, Homo sapien
tgaattggaattaaaacagtgctctaccactgg

SEQ ID NO: 745703 - DNA, 33 bp, Homo sapien
actagttggctccaaactgagaaaactgtgcac

SEQ ID NO: 745704 - DNA, 33 bp, Homo sapien
actagttggctccaaattgagaaaactgtgcac

SEQ ID NO: 745705 - DNA, 33 bp, Homo sapien
aaacctgcttcttacaaactcaactgaaatcat

SEQ ID NO: 745706 - DNA, 33 bp, Homo sapien
aaacctgcttcttacatactcaactgaaatcat

SEQ ID NO: 745707 - DNA, 33 bp, Homo sapien
aagaacgctgacaataagtgctaggcagaaaat

SEQ ID NO: 745708 - DNA, 33 bp, Homo sapien
aagaacgctgacaataggtgctaggcagaaaat

SEQ ID NO: 745709 - DNA, 33 bp, Homo sapien
atgcagaaaactaagacacccatgaaggagaag

SEQ ID NO: 745710 - DNA, 33 bp, Homo sapien
atgcagaaaactaagagacccatgaaggagaag

SEQ ID NO: 745711 - DNA, 33 bp, Homo sapien
ttagttttctgcatcaacaagatacctagaata

SEQ ID NO: 745712 - DNA, 33 bp, Homo sapien
ttagttttctgcatcagcaagatacctagaata

SEQ ID NO: 745713 - DNA, 33 bp, Homo sapien
gcaccacggctcgtaaaagcagtaatttacatg

SEQ ID NO: 745714 - DNA, 33 bp, Homo sapien
gcaccacggctcgtaatagcagtaatttacatg

SEQ ID NO: 745715 - DNA, 33 bp, Homo sapien
gaaaatacatataagaccataattggtagtaaa

SEQ ID NO: 745716 - DNA, 33 bp, Homo sapien
gaaaatacatataagatcataattggtagtaaa

SEQ ID NO: 745717 - DNA, 33 bp, Homo sapien
cagtttcagatgcagacagtgacatgaaaatac

SEQ ID NO: 745718 - DNA, 33 bp, Homo sapien
cagtttcagatgcagagagtgacatgaaaatac

SEQ ID NO: 745719 - DNA, 33 bp, Homo sapien
gttgattctttgcatacggtataagtacttaac

SEQ ID NO: 745720 - DNA, 33 bp, Homo sapien
gttgattctttgcatatggtataagtacttaac

SEQ ID NO: 745721 - DNA, 33 bp, Homo sapien
tttgctttggtttaaacgctctgattataatta

SEQ ID NO: 745722 - DNA, 33 bp, Homo sapien
tttgctttggtttaaatgctctgattataatta

SEQ ID NO: 745723 - DNA, 33 bp, Homo sapien
taagtttttatattgcaccagacagattcataa

SEQ ID NO: 745724 - DNA, 33 bp, Homo sapien
taagtttttatattgcgccagacagattcataa

SEQ ID NO: 745725 - DNA, 33 bp, Homo sapien
tgtcatctatagcaaacacgataatctacattg

SEQ ID NO: 745726 - DNA, 33 bp, Homo sapien
tgtcatctatagcaaatacgataatctacattg

SEQ ID NO: 745727 - DNA, 33 bp, Homo sapien
ggtatccctaaatgaaagaactggatgcaaatt

SEQ ID NO: 745728 - DNA, 33 bp, Homo sapien
ggtatccctaaatgaaggaactggatgcaaatt

SEQ ID NO: 745729 - DNA, 33 bp, Homo sapien
aggaacaccaaaaatacggagaaaatatcttga

SEQ ID NO: 745730 - DNA, 33 bp, Homo sapien
aggaacaccaaaaatatggagaaaatatcttga

SEQ ID NO: 745731 - DNA, 33 bp, Homo sapien
agactcaccactagatgaggtcagttcttctca

SEQ ID NO: 745732 - DNA, 33 bp, Homo sapien
agactcaccactagattaggtcagttcttctca

SEQ ID NO: 745733 - DNA, 33 bp, Homo sapien
aaatatggttatcagacgtttatcttgtttaaa

SEQ ID NO: 745734 - DNA, 33 bp, Homo sapien
aaatatggttatcagatgtttatcttgtttaaa

SEQ ID NO: 745735 - DNA, 33 bp, Homo sapien
aattctggttaaacacaatcttctacatctgtg

SEQ ID NO: 745736 - DNA, 33 bp, Homo sapien
aattctggttaaacaccatcttctacatctgtg

SEQ ID NO: 745737 - DNA, 33 bp, Homo sapien
aatagaacagtctacaatgataccatcctgaac

SEQ ID NO: 745738 - DNA, 33 bp, Homo sapien
aatagaacagtctacagtgataccatcctgaac

SEQ ID NO: 745739 - DNA, 33 bp, Homo sapien
catatgaatattaggacgtatatgtttgttaaa

SEQ ID NO: 745740 - DNA, 33 bp, Homo sapien
catatgaatattaggatgtatatgtttgttaaa

SEQ ID NO: 745741 - DNA, 33 bp, Homo sapien
agttaagtttttgggaagtctaaagtgacacat

SEQ ID NO: 745742 - DNA, 33 bp, Homo sapien
agttaagtttttgggacgtctaaagtgacacat

SEQ ID NO: 745743 - DNA, 33 bp, Homo sapien
gactccctgcccagtccaaaattcatgtgtcac

SEQ ID NO: 745744 - DNA, 33 bp, Homo sapien
gactccctgcccagtctaaaattcatgtgtcac

SEQ ID NO: 745745 - DNA, 33 bp, Homo sapien
aacaacacggatgttaaggacattgactccctg

SEQ ID NO: 745746 - DNA, 33 bp, Homo sapien
aacaacacggatgttagggacattgactccctg

SEQ ID NO: 745747 - DNA, 33 bp, Homo sapien
cttctttttcatgaaggcctaaatacaagtttt

SEQ ID NO: 745748 - DNA, 33 bp, Homo sapien
cttctttttcatgaagtcctaaatacaagtttt

SEQ ID NO: 745749 - DNA, 33 bp, Homo sapien
ataaaaatgaagaggaagttagactgagataaa

SEQ ID NO: 745750 - DNA, 33 bp, Homo sapien
ataaaaatgaagaggaggttagactgagataaa

SEQ ID NO: 745751 - DNA, 33 bp, Homo sapien
ctcttttcaacttattcaagtgccgacaatgga

SEQ ID NO: 745752 - DNA, 33 bp, Homo sapien
ctcttttcaacttatttaagtgccgacaatgga

SEQ ID NO: 745753 - DNA, 33 bp, Homo sapien
gaggaacactaagatcagaataagcaaacaaaa

SEQ ID NO: 745754 - DNA, 33 bp, Homo sapien
gaggaacactaagatcggaataagcaaacaaaa

SEQ ID NO: 745755 - DNA, 33 bp, Homo sapien
tgtctgtaatcaaagaaagcgcaacagagaggc

SEQ ID NO: 745756 - DNA, 33 bp, Homo sapien
tgtctgtaatcaaagagagcgcaacagagaggc

SEQ ID NO: 745757 - DNA, 33 bp, Homo sapien
ctcaccatcaggcaataaacccaggtaacaaac

SEQ ID NO: 745758 - DNA, 33 bp, Homo sapien
ctcaccatcaggcaatcaacccaggtaacaaac

SEQ ID NO: 745759 - DNA, 33 bp, Homo sapien
gttggtgagttgaaaaatgccctaaagtaggaa

SEQ ID NO: 745760 - DNA, 33 bp, Homo sapien
gttggtgagttgaaaagtgccctaaagtaggaa

SEQ ID NO: 745761 - DNA, 33 bp, Homo sapien
tctgaaacaacctcgcactagtaatttctgctt

SEQ ID NO: 745762 - DNA, 33 bp, Homo sapien
tctgaaacaacctcgcgctagtaatttctgctt

SEQ ID NO: 745763 - DNA, 33 bp, Homo sapien
actaacagagaaaaaacatgaaggtctaaacat

SEQ ID NO: 745764 - DNA, 33 bp, Homo sapien
actaacagagaaaaaatatgaaggtctaaacat

SEQ ID NO: 745765 - DNA, 33 bp, Homo sapien
gaagaaactctgatacaaaaattatgccatcat

SEQ ID NO: 745766 - DNA, 33 bp, Homo sapien
gaagaaactctgatacgaaaattatgccatcat

SEQ ID NO: 745767 - DNA, 33 bp, Homo sapien
tttacattcctagtaccaaggtttcctgatatc

SEQ ID NO: 745768 - DNA, 33 bp, Homo sapien
tttacattcctagtactaaggtttcctgatatc

SEQ ID NO: 745769 - DNA, 33 bp, Homo sapien
attttttaaaaccccaaagcgacatcatatttc

SEQ ID NO: 745770 - DNA, 33 bp, Homo sapien
attttttaaaaccccacagcgacatcatatttc

SEQ ID NO: 745771 - DNA, 33 bp, Homo sapien
aaataacagtttcatacagtttgttcagctttt

SEQ ID NO: 745772 - DNA, 33 bp, Homo sapien
aaataacagtttcatatagtttgttcagctttt

SEQ ID NO: 745773 - DNA, 33 bp, Homo sapien
tggtttgaacattcacaatggctgaaagcagag

SEQ ID NO: 745774 - DNA, 33 bp, Homo sapien
tggtttgaacattcacgatggctgaaagcagag

SEQ ID NO: 745775 - DNA, 33 bp, Homo sapien
cctaaataatgatttcgaagagtacaacaacaa

SEQ ID NO: 745776 - DNA, 33 bp, Homo sapien
cctaaataatgatttctaagagtacaacaacaa

SEQ ID NO: 745777 - DNA, 33 bp, Homo sapien
tgccccagaacccagacataattcagcctgcat

SEQ ID NO: 745778 - DNA, 33 bp, Homo sapien
tgccccagaacccagagataattcagcctgcat

SEQ ID NO: 745779 - DNA, 33 bp, Homo sapien
atccccaggcagcacaactggagagagacactg

SEQ ID NO: 745780 - DNA, 33 bp, Homo sapien
atccccaggcagcacagctggagagagacactg

SEQ ID NO: 745781 - DNA, 33 bp, Homo sapien
atatacagaatatttccaaacagggaagctcac

SEQ ID NO: 745782 - DNA, 33 bp, Homo sapien
atatacagaatatttcgaaacagggaagctcac

SEQ ID NO: 745783 - DNA, 33 bp, Homo sapien
actactgtaaaactgaatacaaaggattgggaa

SEQ ID NO: 745784 - DNA, 33 bp, Homo sapien
actactgtaaaactgagtacaaaggattgggaa

SEQ ID NO: 745785 - DNA, 33 bp, Homo sapien
tagcaatgcagggaaaactatttggcttgtttc

SEQ ID NO: 745786 - DNA, 33 bp, Homo sapien
tagcaatgcagggaaatctatttggcttgtttc

SEQ ID NO: 745787 - DNA, 33 bp, Homo sapien
aagctgtggaaaacaaggttcagttaaatgaga

SEQ ID NO: 745788 - DNA, 33 bp, Homo sapien
aagctgtggaaaacaatgttcagttaaatgaga

SEQ ID NO: 745789 - DNA, 33 bp, Homo sapien
tttcaatacgtttagacattaggactaaagaga

SEQ ID NO: 745790 - DNA, 33 bp, Homo sapien
tttcaatacgtttagatattaggactaaagaga

SEQ ID NO: 745791 - DNA, 33 bp, Homo sapien
ttgcatttcactaaaaagtaatgatgttaaaca

SEQ ID NO: 745792 - DNA, 33 bp, Homo sapien
ttgcatttcactaaaatgtaatgatgttaaaca

SEQ ID NO: 745793 - DNA, 33 bp, Homo sapien
taatatcttgtaagaaaaaaactgagtccttgt

SEQ ID NO: 745794 - DNA, 33 bp, Homo sapien
taatatcttgtaagaagaaaactgagtccttgt

SEQ ID NO: 745795 - DNA, 33 bp, Homo sapien
ggatatgctggaagaaatcttgagtttttcact

SEQ ID NO: 745796 - DNA, 33 bp, Homo sapien
ggatatgctggaagaagtcttgagtttttcact

SEQ ID NO: 745797 - DNA, 33 bp, Homo sapien
tggggggcaacataacacaatcgtatgataaga

SEQ ID NO: 745798 - DNA, 33 bp, Homo sapien
tggggggcaacataacccaatcgtatgataaga

SEQ ID NO: 745799 - DNA, 33 bp, Homo sapien
tatgtaaattgtcagaaaatccaatgagtgcgt

SEQ ID NO: 745800 - DNA, 33 bp, Homo sapien
tatgtaaattgtcagataatccaatgagtgcgt

SEQ ID NO: 745801 - DNA, 33 bp, Homo sapien
gacctactgagtttacaaaattaattcagtgac

SEQ ID NO: 745802 - DNA, 33 bp, Homo sapien
gacctactgagtttacgaaattaattcagtgac

SEQ ID NO: 745803 - DNA, 33 bp, Homo sapien
ccatgttttaatcccaatctgctgcacacctat

SEQ ID NO: 745804 - DNA, 33 bp, Homo sapien
ccatgttttaatcccagtctgctgcacacctat

SEQ ID NO: 745805 - DNA, 33 bp, Homo sapien
gagtgctagaatgcaacagtaaactctacaaac

SEQ ID NO: 745806 - DNA, 33 bp, Homo sapien
gagtgctagaatgcaatagtaaactctacaaac

SEQ ID NO: 745807 - DNA, 33 bp, Homo sapien
agatggctaaccacaaacaactcactggcacaa

SEQ ID NO: 745808 - DNA, 33 bp, Homo sapien
agatggctaaccacaatcaactcactggcacaa

SEQ ID NO: 745809 - DNA, 33 bp, Homo sapien
ccagagaaggaagccaaagctgttcaccctctg

SEQ ID NO: 745810 - DNA, 33 bp, Homo sapien
ccagagaaggaagccatagctgttcaccctctg

SEQ ID NO: 745811 - DNA, 33 bp, Homo sapien
ctgagtacagaaacagaagccataactcggtta

SEQ ID NO: 745812 - DNA, 33 bp, Homo sapien
ctgagtacagaaacaggagccataactcggtta

SEQ ID NO: 745813 - DNA, 33 bp, Homo sapien
tacaccctatgacttacgcctctctgatacact

SEQ ID NO: 745814 - DNA, 33 bp, Homo sapien
tacaccctatgacttatgcctctctgatacact

SEQ ID NO: 745815 - DNA, 33 bp, Homo sapien
tgggtatcctctggaaacattaggtatgaccaa

SEQ ID NO: 745816 - DNA, 33 bp, Homo sapien
tgggtatcctctggaagcattaggtatgaccaa

SEQ ID NO: 745817 - DNA, 33 bp, Homo sapien
ctaggaatgaaatagacggcaactaaatatatt

SEQ ID NO: 745818 - DNA, 33 bp, Homo sapien
ctaggaatgaaatagatggcaactaaatatatt

SEQ ID NO: 745819 - DNA, 33 bp, Homo sapien
taattatgagacatgaccttagttctgatccat

SEQ ID NO: 745820 - DNA, 33 bp, Homo sapien
taattatgagacatgatcttagttctgatccat

SEQ ID NO: 745821 - DNA, 33 bp, Homo sapien
ctggtggtttctatcacatcgtaattaactctc

SEQ ID NO: 745822 - DNA, 33 bp, Homo sapien
ctggtggtttctatcagatcgtaattaactctc

SEQ ID NO: 745823 - DNA, 33 bp, Homo sapien
agctggaacagcttcaatctcaatcccatatga

SEQ ID NO: 745824 - DNA, 33 bp, Homo sapien
agctggaacagcttcagtctcaatcccatatga

SEQ ID NO: 745825 - DNA, 33 bp, Homo sapien
atcctgttctctctcacaatataatacaccata

SEQ ID NO: 745826 - DNA, 33 bp, Homo sapien
atcctgttctctctcataatataatacaccata

SEQ ID NO: 745827 - DNA, 33 bp, Homo sapien
tccataggtccaaacaaaatcatatggtgtatt

SEQ ID NO: 745828 - DNA, 33 bp, Homo sapien
tccataggtccaaacagaatcatatggtgtatt

SEQ ID NO: 745829 - DNA, 33 bp, Homo sapien
ggacctatggatcatgcagcatagagaactcaa

SEQ ID NO: 745830 - DNA, 33 bp, Homo sapien
ggacctatggatcatgtagcatagagaactcaa

SEQ ID NO: 745831 - DNA, 33 bp, Homo sapien
cctcatctcttcattaaaaaacatattgccggg

SEQ ID NO: 745832 - DNA, 33 bp, Homo sapien
cctcatctcttcattagaaaacatattgccggg

SEQ ID NO: 745833 - DNA, 33 bp, Homo sapien
tttccaagaaatatcacatggagagtgaattta

SEQ ID NO: 745834 - DNA, 33 bp, Homo sapien
tttccaagaaatatcatatggagagtgaattta

SEQ ID NO: 745835 - DNA, 33 bp, Homo sapien
actgtgtattttcaagaaactggtcttcaagcc

SEQ ID NO: 745836 - DNA, 33 bp, Homo sapien
actgtgtattttcaagcaactggtcttcaagcc

SEQ ID NO: 745837 - DNA, 33 bp, Homo sapien
tgactgactcttatgacgtggtgatttgtgagc

SEQ ID NO: 745838 - DNA, 33 bp, Homo sapien
tgactgactcttatgatgtggtgatttgtgagc

SEQ ID NO: 745839 - DNA, 33 bp, Homo sapien
gacacagtggcttctacggtctgcatgagcaaa

SEQ ID NO: 745840 - DNA, 33 bp, Homo sapien
gacacagtggcttctatggtctgcatgagcaaa

SEQ ID NO: 745841 - DNA, 33 bp, Homo sapien
attaattgttaatagaatcaatagtgcattttg

SEQ ID NO: 745842 - DNA, 33 bp, Homo sapien
attaattgttaatagagtcaatagtgcattttg

SEQ ID NO: 745843 - DNA, 33 bp, Homo sapien
tgtaattacagaaggtcaaaaagttgttcagac

SEQ ID NO: 745844 - DNA, 33 bp, Homo sapien
tgtaattacagaaggtgaaaaagttgttcagac

SEQ ID NO: 745845 - DNA, 33 bp, Homo sapien
gaacttcaaggacataagttgggaatgctacag

SEQ ID NO: 745846 - DNA, 33 bp, Homo sapien
gaacttcaaggacataggttgggaatgctacag

SEQ ID NO: 745847 - DNA, 33 bp, Homo sapien
aagcctaaggaatacaactcatctttagatcag

SEQ ID NO: 745848 - DNA, 33 bp, Homo sapien
aagcctaaggaatacatctcatctttagatcag

SEQ ID NO: 745849 - DNA, 33 bp, Homo sapien
gtattccttaggcttccaaccattaagccaatg

SEQ ID NO: 745850 - DNA, 33 bp, Homo sapien
gtattccttaggcttctaaccattaagccaatg

SEQ ID NO: 745851 - DNA, 33 bp, Homo sapien
ctaattgttgagcatccattctatttctgacac

SEQ ID NO: 745852 - DNA, 33 bp, Homo sapien
ctaattgttgagcatcgattctatttctgacac

SEQ ID NO: 745853 - DNA, 33 bp, Homo sapien
aatggatcttaaatgcactttactaggtgaaag

SEQ ID NO: 745854 - DNA, 33 bp, Homo sapien
aatggatcttaaatgccctttactaggtgaaag

SEQ ID NO: 745855 - DNA, 33 bp, Homo sapien
aaaatttggaaaaaaaagaatatcaagctctgt

SEQ ID NO: 745856 - DNA, 33 bp, Homo sapien
aaaatttggaaaaaaaggaatatcaagctctgt

SEQ ID NO: 745857 - DNA, 33 bp, Homo sapien
catcttggattgcttgcataaaacagtaaaatg

SEQ ID NO: 745858 - DNA, 33 bp, Homo sapien
catcttggattgcttgtataaaacagtaaaatg

SEQ ID NO: 745859 - DNA, 33 bp, Homo sapien
tgtattctccttttcaataactttccagatttg

SEQ ID NO: 745860 - DNA, 33 bp, Homo sapien
tgtattctccttttcagtaactttccagatttg

SEQ ID NO: 745861 - DNA, 33 bp, Homo sapien
ataaaatggtttctgacgaatatgcaaaatagt

SEQ ID NO: 745862 - DNA, 33 bp, Homo sapien
ataaaatggtttctgatgaatatgcaaaatagt

SEQ ID NO: 745863 - DNA, 33 bp, Homo sapien
tgctaaataaccaacaagcatgagtgagtcaga

SEQ ID NO: 745864 - DNA, 33 bp, Homo sapien
tgctaaataaccaacaggcatgagtgagtcaga

SEQ ID NO: 745865 - DNA, 33 bp, Homo sapien
tacagtagtaatgttcaactttttctcagaaca

SEQ ID NO: 745866 - DNA, 33 bp, Homo sapien
tacagtagtaatgttcgactttttctcagaaca

SEQ ID NO: 745867 - DNA, 33 bp, Homo sapien
ctttataccttgccaacaactgcatagcaaaat

SEQ ID NO: 745868 - DNA, 33 bp, Homo sapien
ctttataccttgccaataactgcatagcaaaat

SEQ ID NO: 745869 - DNA, 33 bp, Homo sapien
atatgagtagcagcatcagggcaaggataaacc

SEQ ID NO: 745870 - DNA, 33 bp, Homo sapien
atatgagtagcagcattagggcaaggataaacc

SEQ ID NO: 745871 - DNA, 33 bp, Homo sapien
tctcctgcccatgaaaaaacagggatgagtttg

SEQ ID NO: 745872 - DNA, 33 bp, Homo sapien
tctcctgcccatgaaagaacagggatgagtttg

SEQ ID NO: 745873 - DNA, 33 bp, Homo sapien
aaaatcttcagaggataagacttaaagagatca

SEQ ID NO: 745874 - DNA, 33 bp, Homo sapien
aaaatcttcagaggatgagacttaaagagatca

SEQ ID NO: 745875 - DNA, 33 bp, Homo sapien
ttctttggaagtgagacggtaaattatttctaa

SEQ ID NO: 745876 - DNA, 33 bp, Homo sapien
ttctttggaagtgagatggtaaattatttctaa

SEQ ID NO: 745877 - DNA, 33 bp, Homo sapien
aggtctttacccacaactcatttttctcagttg

SEQ ID NO: 745878 - DNA, 33 bp, Homo sapien
aggtctttacccacaagtcatttttctcagttg

SEQ ID NO: 745879 - DNA, 33 bp, Homo sapien
ttggtaaaattactcagtatgattctgtcatgg

SEQ ID NO: 745880 - DNA, 33 bp, Homo sapien
ttggtaaaattactcattatgattctgtcatgg

SEQ ID NO: 745881 - DNA, 33 bp, Homo sapien
agggtcataccattaaaagaatagcgaatacca

SEQ ID NO: 745882 - DNA, 33 bp, Homo sapien
agggtcataccattaagagaatagcgaatacca

SEQ ID NO: 745883 - DNA, 33 bp, Homo sapien
agactcttgcaaaggccgataaataaattgagc

SEQ ID NO: 745884 - DNA, 33 bp, Homo sapien
agactcttgcaaaggctgataaataaattgagc

SEQ ID NO: 745885 - DNA, 33 bp, Homo sapien
attctgtgccgactcaatacttgaaaaatacag

SEQ ID NO: 745886 - DNA, 33 bp, Homo sapien
attctgtgccgactcagtacttgaaaaatacag

SEQ ID NO: 745887 - DNA, 33 bp, Homo sapien
agagagaagtccttaactgagtttttttgctta

SEQ ID NO: 745888 - DNA, 33 bp, Homo sapien
agagagaagtccttaattgagtttttttgctta

SEQ ID NO: 745889 - DNA, 33 bp, Homo sapien
agcctctggttaccacaattaccttcataatat

SEQ ID NO: 745890 - DNA, 33 bp, Homo sapien
agcctctggttaccaccattaccttcataatat

SEQ ID NO: 745891 - DNA, 33 bp, Homo sapien
aggcacttaataccaaataaaaaggcacctatt

SEQ ID NO: 745892 - DNA, 33 bp, Homo sapien
aggcacttaataccaagtaaaaaggcacctatt

SEQ ID NO: 745893 - DNA, 33 bp, Homo sapien
atgtgatctgtaagctaaaactcaaatacttcc

SEQ ID NO: 745894 - DNA, 33 bp, Homo sapien
atgtgatctgtaagcttaaactcaaatacttcc

SEQ ID NO: 745895 - DNA, 33 bp, Homo sapien
cccagaaatatcctacactgactactattttta

SEQ ID NO: 745896 - DNA, 33 bp, Homo sapien
cccagaaatatcctacgctgactactattttta

SEQ ID NO: 745897 - DNA, 33 bp, Homo sapien
actgtcccataatttgcaattaccaccaactgt

SEQ ID NO: 745898 - DNA, 33 bp, Homo sapien
actgtcccataatttgtaattaccaccaactgt

SEQ ID NO: 745899 - DNA, 33 bp, Homo sapien
aagtagcttttcagtgccaaaatttcaaaatac

SEQ ID NO: 745900 - DNA, 33 bp, Homo sapien
aagtagcttttcagtgtcaaaatttcaaaatac

SEQ ID NO: 745901 - DNA, 33 bp, Homo sapien
cggaagcaagatcaatgaaacattatattacta

SEQ ID NO: 745902 - DNA, 33 bp, Homo sapien
cggaagcaagatcaattaaacattatattacta

SEQ ID NO: 745903 - DNA, 33 bp, Homo sapien
ccggagtacataaggcacaggaaaaataaaatg

SEQ ID NO: 745904 - DNA, 33 bp, Homo sapien
ccggagtacataaggcgcaggaaaaataaaatg

SEQ ID NO: 745905 - DNA, 33 bp, Homo sapien
gttgtaaatgatccataacaatttggcaccagt

SEQ ID NO: 745906 - DNA, 33 bp, Homo sapien
gttgtaaatgatccatgacaatttggcaccagt

SEQ ID NO: 745907 - DNA, 33 bp, Homo sapien
gatagctcgttgttcacattattggtatagaaa

SEQ ID NO: 745908 - DNA, 33 bp, Homo sapien
gatagctcgttgttcatattattggtatagaaa

SEQ ID NO: 745909 - DNA, 33 bp, Homo sapien
gtccacagctttaaaaggtcccaatactccatt

SEQ ID NO: 745910 - DNA, 33 bp, Homo sapien
gtccacagctttaaaatgtcccaatactccatt

SEQ ID NO: 745911 - DNA, 33 bp, Homo sapien
tgtgtgcttactgataccctgaatctataccaa

SEQ ID NO: 745912 - DNA, 33 bp, Homo sapien
tgtgtgcttactgatatcctgaatctataccaa

SEQ ID NO: 745913 - DNA, 33 bp, Homo sapien
ttctgaaccagagtaacgtgctaatgcatttct

SEQ ID NO: 745914 - DNA, 33 bp, Homo sapien
ttctgaaccagagtaatgtgctaatgcatttct

SEQ ID NO: 745915 - DNA, 33 bp, Homo sapien
tatgaactcagggtaactctaatttggtctcta

SEQ ID NO: 745916 - DNA, 33 bp, Homo sapien
tatgaactcagggtaattctaatttggtctcta

SEQ ID NO: 745917 - DNA, 33 bp, Homo sapien
tacccatcctcttatacgatttccttatgtggc

SEQ ID NO: 745918 - DNA, 33 bp, Homo sapien
tacccatcctcttatatgatttccttatgtggc

SEQ ID NO: 745919 - DNA, 33 bp, Homo sapien
gttcatgaggtgaaaaagcctcagtaggttgcc

SEQ ID NO: 745920 - DNA, 33 bp, Homo sapien
gttcatgaggtgaaaaggcctcagtaggttgcc

SEQ ID NO: 745921 - DNA, 33 bp, Homo sapien
tcttgcttctgtggaaagctctgaactgaattc

SEQ ID NO: 745922 - DNA, 33 bp, Homo sapien
tcttgcttctgtggaaggctctgaactgaattc

SEQ ID NO: 745923 - DNA, 33 bp, Homo sapien
aaagatctccctatgaacctatgaggtccctaa

SEQ ID NO: 745924 - DNA, 33 bp, Homo sapien
aaagatctccctatgatcctatgaggtccctaa

SEQ ID NO: 745925 - DNA, 33 bp, Homo sapien
gtttctctctgaaaacccccatctttctttctt

SEQ ID NO: 745926 - DNA, 33 bp, Homo sapien
gtttctctctgaaaacgcccatctttctttctt

SEQ ID NO: 745927 - DNA, 33 bp, Homo sapien
aagacacctaaatagaagatgccactaaaaata

SEQ ID NO: 745928 - DNA, 33 bp, Homo sapien
aagacacctaaatagatgatgccactaaaaata

SEQ ID NO: 745929 - DNA, 33 bp, Homo sapien
attatattctaatgaaaagtgagaaagtatatg

SEQ ID NO: 745930 - DNA, 33 bp, Homo sapien
attatattctaatgaacagtgagaaagtatatg

SEQ ID NO: 745931 - DNA, 33 bp, Homo sapien
aactgccctgtttacactgacttgagatttgct

SEQ ID NO: 745932 - DNA, 33 bp, Homo sapien
aactgccctgtttacattgacttgagatttgct

SEQ ID NO: 745933 - DNA, 33 bp, Homo sapien
acttatttgcacatgacagtaagttttaaacac

SEQ ID NO: 745934 - DNA, 33 bp, Homo sapien
acttatttgcacatgagagtaagttttaaacac

SEQ ID NO: 745935 - DNA, 33 bp, Homo sapien
taatgttgcatttaggccatattgctacagtaa

SEQ ID NO: 745936 - DNA, 33 bp, Homo sapien
taatgttgcatttaggtcatattgctacagtaa

SEQ ID NO: 745937 - DNA, 33 bp, Homo sapien
aaaatctctaacatatcaataccaacactgtat

SEQ ID NO: 745938 - DNA, 33 bp, Homo sapien
aaaatctctaacatatgaataccaacactgtat

SEQ ID NO: 745939 - DNA, 33 bp, Homo sapien
actaccactgctggtacacaattattctccatc

SEQ ID NO: 745940 - DNA, 33 bp, Homo sapien
actaccactgctggtatacaattattctccatc

SEQ ID NO: 745941 - DNA, 33 bp, Homo sapien
aaacagctgtagtaacagaaagttagcagagtg

SEQ ID NO: 745942 - DNA, 33 bp, Homo sapien
aaacagctgtagtaacggaaagttagcagagtg

SEQ ID NO: 745943 - DNA, 33 bp, Homo sapien
tatatattatctacaaaacactaaatcaatgtt

SEQ ID NO: 745944 - DNA, 33 bp, Homo sapien
tatatattatctacaagacactaaatcaatgtt

SEQ ID NO: 745945 - DNA, 33 bp, Homo sapien
caaaatcatagataacaggtaggaaaatataca

SEQ ID NO: 745946 - DNA, 33 bp, Homo sapien
caaaatcatagataactggtaggaaaatataca

SEQ ID NO: 745947 - DNA, 33 bp, Homo sapien
attgtctcaatagttaataaagacagagaaaat

SEQ ID NO: 745948 - DNA, 33 bp, Homo sapien
attgtctcaatagttagtaaagacagagaaaat

SEQ ID NO: 745949 - DNA, 33 bp, Homo sapien
gactcaaaccccatcaatctcatgacaaagccc

SEQ ID NO: 745950 - DNA, 33 bp, Homo sapien
gactcaaaccccatcagtctcatgacaaagccc

SEQ ID NO: 745951 - DNA, 33 bp, Homo sapien
tatgctggttttctcgcaggcttctgctgatac

SEQ ID NO: 745952 - DNA, 33 bp, Homo sapien
tatgctggttttctcgtaggcttctgctgatac

SEQ ID NO: 745953 - DNA, 33 bp, Homo sapien
aaggacagtgggaaaaatggatggaagtaacaa

SEQ ID NO: 745954 - DNA, 33 bp, Homo sapien
aaggacagtgggaaaagtggatggaagtaacaa

SEQ ID NO: 745955 - DNA, 33 bp, Homo sapien
tttatgtatggtacaaactattctaacattttc

SEQ ID NO: 745956 - DNA, 33 bp, Homo sapien
tttatgtatggtacaagctattctaacattttc

SEQ ID NO: 745957 - DNA, 33 bp, Homo sapien
tggctcacaatacaagacacttgaagactagag

SEQ ID NO: 745958 - DNA, 33 bp, Homo sapien
tggctcacaatacaaggcacttgaagactagag

SEQ ID NO: 745959 - DNA, 33 bp, Homo sapien
gtttatttttcaacaccgtctgatccatcttcc

SEQ ID NO: 745960 - DNA, 33 bp, Homo sapien
gtttatttttcaacactgtctgatccatcttcc

SEQ ID NO: 745961 - DNA, 33 bp, Homo sapien
aggatgtttcaggtgaagttctggagataatct

SEQ ID NO: 745962 - DNA, 33 bp, Homo sapien
aggatgtttcaggtgatgttctggagataatct

SEQ ID NO: 745963 - DNA, 33 bp, Homo sapien
tgcttctcttcctaaacagctgtggtttcttct

SEQ ID NO: 745964 - DNA, 33 bp, Homo sapien
tgcttctcttcctaaatagctgtggtttcttct

SEQ ID NO: 745965 - DNA, 33 bp, Homo sapien
tgtctttcattttctacgatctggtaggatgaa

SEQ ID NO: 745966 - DNA, 33 bp, Homo sapien
tgtctttcattttctatgatctggtaggatgaa

SEQ ID NO: 745967 - DNA, 33 bp, Homo sapien
tcatttgagccaaggaagtagagtctacagtgc

SEQ ID NO: 745968 - DNA, 33 bp, Homo sapien
tcatttgagccaaggaggtagagtctacagtgc

SEQ ID NO: 745969 - DNA, 33 bp, Homo sapien
ttttgaattaaactgacctggaatcccttaaac

SEQ ID NO: 745970 - DNA, 33 bp, Homo sapien
ttttgaattaaactgagctggaatcccttaaac

SEQ ID NO: 745971 - DNA, 33 bp, Homo sapien
aaatagtgatagttaaggaagccccagtatacc

SEQ ID NO: 745972 - DNA, 33 bp, Homo sapien
aaatagtgatagttaatgaagccccagtatacc

SEQ ID NO: 745973 - DNA, 33 bp, Homo sapien
tgttaaccaaacctacaatatcatcactctaat

SEQ ID NO: 745974 - DNA, 33 bp, Homo sapien
tgttaaccaaacctaccatatcatcactctaat

SEQ ID NO: 745975 - DNA, 33 bp, Homo sapien
tgtttattagttcagtgaatttatcatttggct

SEQ ID NO: 745976 - DNA, 33 bp, Homo sapien
tgtttattagttcagttaatttatcatttggct

SEQ ID NO: 745977 - DNA, 33 bp, Homo sapien
tatattttaaaaagcaatagtgatgaaggttga

SEQ ID NO: 745978 - DNA, 33 bp, Homo sapien
tatattttaaaaagcagtagtgatgaaggttga

SEQ ID NO: 745979 - DNA, 33 bp, Homo sapien
agtgactattttagagaccacctgtgagatcgt

SEQ ID NO: 745980 - DNA, 33 bp, Homo sapien
agtgactattttagagtccacctgtgagatcgt

SEQ ID NO: 745981 - DNA, 33 bp, Homo sapien
ttaaatcaagctactaccatctgttacttgaaa

SEQ ID NO: 745982 - DNA, 33 bp, Homo sapien
ttaaatcaagctactagcatctgttacttgaaa

SEQ ID NO: 745983 - DNA, 33 bp, Homo sapien
cagcattacagtttaaaatgcatccatgttcct

SEQ ID NO: 745984 - DNA, 33 bp, Homo sapien
cagcattacagtttaagatgcatccatgttcct

SEQ ID NO: 745985 - DNA, 33 bp, Homo sapien
ctgcaagtttcttgtaccaattcgaaccccgag

SEQ ID NO: 745986 - DNA, 33 bp, Homo sapien
ctgcaagtttcttgtatcaattcgaaccccgag

SEQ ID NO: 745987 - DNA, 33 bp, Homo sapien
caagctgtctgataaacctttgtgacattccta

SEQ ID NO: 745988 - DNA, 33 bp, Homo sapien
caagctgtctgataaatctttgtgacattccta

SEQ ID NO: 745989 - DNA, 33 bp, Homo sapien
aagaaataagtgaggaagaactcaagctgtctg

SEQ ID NO: 745990 - DNA, 33 bp, Homo sapien
aagaaataagtgaggatgaactcaagctgtctg

SEQ ID NO: 745991 - DNA, 33 bp, Homo sapien
aagaggaaatgtcttaaaacaaatattctcttc

SEQ ID NO: 745992 - DNA, 33 bp, Homo sapien
aagaggaaatgtcttacaacaaatattctcttc

SEQ ID NO: 745993 - DNA, 33 bp, Homo sapien
gttactgagggaaaaaatgaagagctggactca

SEQ ID NO: 745994 - DNA, 33 bp, Homo sapien
gttactgagggaaaaagtgaagagctggactca

SEQ ID NO: 745995 - DNA, 33 bp, Homo sapien
gatcattaggtcatcaacaaaaataaatcaatt

SEQ ID NO: 745996 - DNA, 33 bp, Homo sapien
gatcattaggtcatcagcaaaaataaatcaatt

SEQ ID NO: 745997 - DNA, 33 bp, Homo sapien
cagagttgtgactggacgaccattaagccccaa

SEQ ID NO: 745998 - DNA, 33 bp, Homo sapien
cagagttgtgactggatgaccattaagccccaa

SEQ ID NO: 745999 - DNA, 33 bp, Homo sapien
aatttcttaaattcaacgaaatgctgctctatt

SEQ ID NO: 746000 - DNA, 33 bp, Homo sapien
aatttcttaaattcaatgaaatgctgctctatt

SEQ ID NO: 746001 - DNA, 33 bp, Homo sapien
caggcttattttgggcagagagtatctggagta

SEQ ID NO: 746002 - DNA, 33 bp, Homo sapien
caggcttattttgggcggagagtatctggagta

SEQ ID NO: 746003 - DNA, 33 bp, Homo sapien
gttaattctttatacacctcagatatttagata

SEQ ID NO: 746004 - DNA, 33 bp, Homo sapien
gttaattctttatacagctcagatatttagata

SEQ ID NO: 746005 - DNA, 33 bp, Homo sapien
ctaagatactgagacaagggagatatagaggtg

SEQ ID NO: 746006 - DNA, 33 bp, Homo sapien
ctaagatactgagacaggggagatatagaggtg

SEQ ID NO: 746007 - DNA, 33 bp, Homo sapien
attgaggaaagtctcagaatttattgtcagtct

SEQ ID NO: 746008 - DNA, 33 bp, Homo sapien
attgaggaaagtctcataatttattgtcagtct

SEQ ID NO: 746009 - DNA, 33 bp, Homo sapien
cccatgacgtaattagaagtgagacctttggca

SEQ ID NO: 746010 - DNA, 33 bp, Homo sapien
cccatgacgtaattaggagtgagacctttggca

SEQ ID NO: 746011 - DNA, 33 bp, Homo sapien
ttattccttagctgcacatattttgctattagc

SEQ ID NO: 746012 - DNA, 33 bp, Homo sapien
ttattccttagctgcagatattttgctattagc

SEQ ID NO: 746013 - DNA, 33 bp, Homo sapien
tttttcataccaactcactctcaacatataaaa

SEQ ID NO: 746014 - DNA, 33 bp, Homo sapien
tttttcataccaactcgctctcaacatataaaa

SEQ ID NO: 746015 - DNA, 33 bp, Homo sapien
tgtcttatctgcaaaacggtcactttcaatgat

SEQ ID NO: 746016 - DNA, 33 bp, Homo sapien
tgtcttatctgcaaaatggtcactttcaatgat

SEQ ID NO: 746017 - DNA, 33 bp, Homo sapien
actgaattgacaggaaagtcactggaacataat

SEQ ID NO: 746018 - DNA, 33 bp, Homo sapien
actgaattgacaggaacgtcactggaacataat

SEQ ID NO: 746019 - DNA, 33 bp, Homo sapien
tgcataggcatttgaacgattatgttccagtga

SEQ ID NO: 746020 - DNA, 33 bp, Homo sapien
tgcataggcatttgaatgattatgttccagtga

SEQ ID NO: 746021 - DNA, 33 bp, Homo sapien
taataaaagaggctgacaaagttaataatggaa

SEQ ID NO: 746022 - DNA, 33 bp, Homo sapien
taataaaagaggctgagaaagttaataatggaa

SEQ ID NO: 746023 - DNA, 33 bp, Homo sapien
ccacataagacagaagactacctttcagctatt

SEQ ID NO: 746024 - DNA, 33 bp, Homo sapien
ccacataagacagaaggctacctttcagctatt

SEQ ID NO: 746025 - DNA, 33 bp, Homo sapien
tatctgttgctttatacgttggtgtacattttg

SEQ ID NO: 746026 - DNA, 33 bp, Homo sapien
tatctgttgctttatatgttggtgtacattttg

SEQ ID NO: 746027 - DNA, 33 bp, Homo sapien
tatatataaatgcccaacagataaatataaata

SEQ ID NO: 746028 - DNA, 33 bp, Homo sapien
tatatataaatgcccagcagataaatataaata

SEQ ID NO: 746029 - DNA, 33 bp, Homo sapien
ggcatggtgattaagacggcagagtctgcagac

SEQ ID NO: 746030 - DNA, 33 bp, Homo sapien
ggcatggtgattaagatggcagagtctgcagac

SEQ ID NO: 746031 - DNA, 33 bp, Homo sapien
aaattataggcaaactcaggccagtccttgcat

SEQ ID NO: 746032 - DNA, 33 bp, Homo sapien
aaattataggcaaacttaggccagtccttgcat

SEQ ID NO: 746033 - DNA, 33 bp, Homo sapien
gacacccattttataacctgtgatctatgagct

SEQ ID NO: 746034 - DNA, 33 bp, Homo sapien
gacacccattttataatctgtgatctatgagct

SEQ ID NO: 746035 - DNA, 33 bp, Homo sapien
tgggtctgtatttaccgaattattccatattga

SEQ ID NO: 746036 - DNA, 33 bp, Homo sapien
tgggtctgtatttacctaattattccatattga

SEQ ID NO: 746037 - DNA, 33 bp, Homo sapien
ttttctattctgtagaaagacgattctaggaca

SEQ ID NO: 746038 - DNA, 33 bp, Homo sapien
ttttctattctgtagagagacgattctaggaca

SEQ ID NO: 746039 - DNA, 33 bp, Homo sapien
atgtttgtcttcttcactctttttaacaatcac

SEQ ID NO: 746040 - DNA, 33 bp, Homo sapien
atgtttgtcttcttcattctttttaacaatcac

SEQ ID NO: 746041 - DNA, 33 bp, Homo sapien
gggtagccttaccgacaatgttctgtatgttta

SEQ ID NO: 746042 - DNA, 33 bp, Homo sapien
gggtagccttaccgaccatgttctgtatgttta

SEQ ID NO: 746043 - DNA, 33 bp, Homo sapien
ttcttagctttctgtaactgtgatttggtctgt

SEQ ID NO: 746044 - DNA, 33 bp, Homo sapien
ttcttagctttctgtatctgtgatttggtctgt

SEQ ID NO: 746045 - DNA, 33 bp, Homo sapien
aggatgttgggcagaacgtaacaaaagtgatac

SEQ ID NO: 746046 - DNA, 33 bp, Homo sapien
aggatgttgggcagaatgtaacaaaagtgatac

SEQ ID NO: 746047 - DNA, 33 bp, Homo sapien
aaatttaggatgtataacccattcatgattatt

SEQ ID NO: 746048 - DNA, 33 bp, Homo sapien
aaatttaggatgtatagcccattcatgattatt

SEQ ID NO: 746049 - DNA, 33 bp, Homo sapien
tatgctttgatgctggccaatctgtgaagttgt

SEQ ID NO: 746050 - DNA, 33 bp, Homo sapien
tatgctttgatgctggtcaatctgtgaagttgt

SEQ ID NO: 746051 - DNA, 33 bp, Homo sapien
agaaacttgcacaaaaacatttgcagcaacatt

SEQ ID NO: 746052 - DNA, 33 bp, Homo sapien
agaaacttgcacaaaatcatttgcagcaacatt

SEQ ID NO: 746053 - DNA, 33 bp, Homo sapien
tattttctcatcaggaacatttacaattagagc

SEQ ID NO: 746054 - DNA, 33 bp, Homo sapien
tattttctcatcaggatcatttacaattagagc

SEQ ID NO: 746055 - DNA, 33 bp, Homo sapien
acacacaaacttatacaggcatatgtctatatt

SEQ ID NO: 746056 - DNA, 33 bp, Homo sapien
acacacaaacttatacgggcatatgtctatatt

SEQ ID NO: 746057 - DNA, 33 bp, Homo sapien
agaaataaaataatccaaaaagtgatattccac

SEQ ID NO: 746058 - DNA, 33 bp, Homo sapien
agaaataaaataatccgaaaagtgatattccac

SEQ ID NO: 746059 - DNA, 33 bp, Homo sapien
tgcttaataaaactacaaccatagctggctttt

SEQ ID NO: 746060 - DNA, 33 bp, Homo sapien
tgcttaataaaactaccaccatagctggctttt

SEQ ID NO: 746061 - DNA, 33 bp, Homo sapien
gattccagtaatacaaacttgtccaagctgata

SEQ ID NO: 746062 - DNA, 33 bp, Homo sapien
gattccagtaatacaaccttgtccaagctgata

SEQ ID NO: 746063 - DNA, 33 bp, Homo sapien
tcacacagtgaatacaaggcaacataaggattg

SEQ ID NO: 746064 - DNA, 33 bp, Homo sapien
tcacacagtgaatacagggcaacataaggattg

SEQ ID NO: 746065 - DNA, 33 bp, Homo sapien
ctcgttcagctttgaccacaaatggatatgtgt

SEQ ID NO: 746066 - DNA, 33 bp, Homo sapien
ctcgttcagctttgactacaaatggatatgtgt

SEQ ID NO: 746067 - DNA, 33 bp, Homo sapien
tagatccttcagagcgaaagtgtaattgagaag

SEQ ID NO: 746068 - DNA, 33 bp, Homo sapien
tagatccttcagagcggaagtgtaattgagaag

SEQ ID NO: 746069 - DNA, 33 bp, Homo sapien
tgtgattggtaaagaccggaaataaagcagcag

SEQ ID NO: 746070 - DNA, 33 bp, Homo sapien
tgtgattggtaaagactggaaataaagcagcag

SEQ ID NO: 746071 - DNA, 33 bp, Homo sapien
ttcaacagaaactccacaccaatattcttacgt

SEQ ID NO: 746072 - DNA, 33 bp, Homo sapien
ttcaacagaaactccagaccaatattcttacgt

SEQ ID NO: 746073 - DNA, 33 bp, Homo sapien
aaatgacgttggtgaactgtggattgtagggaa

SEQ ID NO: 746074 - DNA, 33 bp, Homo sapien
aaatgacgttggtgaagtgtggattgtagggaa

SEQ ID NO: 746075 - DNA, 33 bp, Homo sapien
tagttgattagagtcagggcatttcttacatta

SEQ ID NO: 746076 - DNA, 33 bp, Homo sapien
tagttgattagagtcatggcatttcttacatta

SEQ ID NO: 746077 - DNA, 33 bp, Homo sapien
tctcttgtgtgccaggaacagatataagcacta

SEQ ID NO: 746078 - DNA, 33 bp, Homo sapien
tctcttgtgtgccagggacagatataagcacta

SEQ ID NO: 746079 - DNA, 33 bp, Homo sapien
actagagtatgagctccaggaatgcaagggttt

SEQ ID NO: 746080 - DNA, 33 bp, Homo sapien
actagagtatgagctcgaggaatgcaagggttt

SEQ ID NO: 746081 - DNA, 33 bp, Homo sapien
agtgactctatgaccacgtactgtattatacgg

SEQ ID NO: 746082 - DNA, 33 bp, Homo sapien
agtgactctatgaccatgtactgtattatacgg

SEQ ID NO: 746083 - DNA, 33 bp, Homo sapien
aagcattaatagtcaacaaaaaatgaaaaaaaa

SEQ ID NO: 746084 - DNA, 33 bp, Homo sapien
aagcattaatagtcaagaaaaaatgaaaaaaaa

SEQ ID NO: 746085 - DNA, 33 bp, Homo sapien
ctctgtgattttgaacagttactttatccttgc

SEQ ID NO: 746086 - DNA, 33 bp, Homo sapien
ctctgtgattttgaactgttactttatccttgc

SEQ ID NO: 746087 - DNA, 33 bp, Homo sapien
aagtggtttgcaaagagatgtggtactcattaa

SEQ ID NO: 746088 - DNA, 33 bp, Homo sapien
aagtggtttgcaaagatatgtggtactcattaa

SEQ ID NO: 746089 - DNA, 33 bp, Homo sapien
ttacattctttacttaccaccagttaggaaccc

SEQ ID NO: 746090 - DNA, 33 bp, Homo sapien
ttacattctttacttatcaccagttaggaaccc

SEQ ID NO: 746091 - DNA, 33 bp, Homo sapien
caagcactgctggctacagatcaaaatgaaaat

SEQ ID NO: 746092 - DNA, 33 bp, Homo sapien
caagcactgctggctatagatcaaaatgaaaat

SEQ ID NO: 746093 - DNA, 33 bp, Homo sapien
gataggtctctaagaaacattaggccctgagaa

SEQ ID NO: 746094 - DNA, 33 bp, Homo sapien
gataggtctctaagaaccattaggccctgagaa

SEQ ID NO: 746095 - DNA, 33 bp, Homo sapien
gcatacggacactgaacagtgagtagagtagga

SEQ ID NO: 746096 - DNA, 33 bp, Homo sapien
gcatacggacactgaagagtgagtagagtagga

SEQ ID NO: 746097 - DNA, 33 bp, Homo sapien
caaagcactcatgggcaataagcaagatagagt

SEQ ID NO: 746098 - DNA, 33 bp, Homo sapien
caaagcactcatgggccataagcaagatagagt

SEQ ID NO: 746099 - DNA, 33 bp, Homo sapien
gcaagtgtacagcaggaataaagaacactggtg

SEQ ID NO: 746100 - DNA, 33 bp, Homo sapien
gcaagtgtacagcagggataaagaacactggtg

SEQ ID NO: 746101 - DNA, 33 bp, Homo sapien
acctacatgtaatgggccaactcctggacagtc

SEQ ID NO: 746102 - DNA, 33 bp, Homo sapien
acctacatgtaatgggtcaactcctggacagtc

SEQ ID NO: 746103 - DNA, 33 bp, Homo sapien
gataaagtaacaaattaaagaccagaatgccat

SEQ ID NO: 746104 - DNA, 33 bp, Homo sapien
gataaagtaacaaattgaagaccagaatgccat

SEQ ID NO: 746105 - DNA, 33 bp, Homo sapien
tcctcagaaagatacacgagtaggtcatccaga

SEQ ID NO: 746106 - DNA, 33 bp, Homo sapien
tcctcagaaagatacatgagtaggtcatccaga

SEQ ID NO: 746107 - DNA, 33 bp, Homo sapien
tatttatttctgagggaatgcatactatattac

SEQ ID NO: 746108 - DNA, 33 bp, Homo sapien
tatttatttctgaggggatgcatactatattac

SEQ ID NO: 746109 - DNA, 33 bp, Homo sapien
aaaggtttgtccatgtcaatttattatgatgat

SEQ ID NO: 746110 - DNA, 33 bp, Homo sapien
aaaggtttgtccatgtgaatttattatgatgat

SEQ ID NO: 746111 - DNA, 33 bp, Homo sapien
tccacagtgggggatgccaccttacacaagaaa

SEQ ID NO: 746112 - DNA, 33 bp, Homo sapien
tccacagtgggggatgtcaccttacacaagaaa

SEQ ID NO: 746113 - DNA, 33 bp, Homo sapien
tcaaccacataagccactataccacgtaagtga

SEQ ID NO: 746114 - DNA, 33 bp, Homo sapien
tcaaccacataagccagtataccacgtaagtga

SEQ ID NO: 746115 - DNA, 33 bp, Homo sapien
cgcctagtacaccttaaaacttggtctctggag

SEQ ID NO: 746116 - DNA, 33 bp, Homo sapien
cgcctagtacaccttacaacttggtctctggag

SEQ ID NO: 746117 - DNA, 33 bp, Homo sapien
ataacagttttagaaacgcagaataacttctcc

SEQ ID NO: 746118 - DNA, 33 bp, Homo sapien
ataacagttttagaaaggcagaataacttctcc

SEQ ID NO: 746119 - DNA, 33 bp, Homo sapien
aatgttctagtagtacagattaagtcttcaatt

SEQ ID NO: 746120 - DNA, 33 bp, Homo sapien
aatgttctagtagtacggattaagtcttcaatt

SEQ ID NO: 746121 - DNA, 33 bp, Homo sapien
tctctgcagcatgtggccacttcactttctgct

SEQ ID NO: 746122 - DNA, 33 bp, Homo sapien
tctctgcagcatgtggtcacttcactttctgct

SEQ ID NO: 746123 - DNA, 33 bp, Homo sapien
ttaccacaatcaaagacgagcagatggagaata

SEQ ID NO: 746124 - DNA, 33 bp, Homo sapien
ttaccacaatcaaagatgagcagatggagaata

SEQ ID NO: 746125 - DNA, 33 bp, Homo sapien
ctagagtcagtagtagcaatttcagataaaaaa

SEQ ID NO: 746126 - DNA, 33 bp, Homo sapien
ctagagtcagtagtagtaatttcagataaaaaa

SEQ ID NO: 746127 - DNA, 33 bp, Homo sapien
ttggatccttagagagaaaaatgaactgaagtg

SEQ ID NO: 746128 - DNA, 33 bp, Homo sapien
ttggatccttagagagcaaaatgaactgaagtg

SEQ ID NO: 746129 - DNA, 33 bp, Homo sapien
gttatttagtttttgccaccatgaaattattga

SEQ ID NO: 746130 - DNA, 33 bp, Homo sapien
gttatttagtttttgctaccatgaaattattga

SEQ ID NO: 746131 - DNA, 33 bp, Homo sapien
caaagtctgtcacaaaaccacaattatgccatg

SEQ ID NO: 746132 - DNA, 33 bp, Homo sapien
caaagtctgtcacaaagccacaattatgccatg

SEQ ID NO: 746133 - DNA, 33 bp, Homo sapien
ctgttactcagaataacacatgaagatatctgt

SEQ ID NO: 746134 - DNA, 33 bp, Homo sapien
ctgttactcagaataagacatgaagatatctgt

SEQ ID NO: 746135 - DNA, 33 bp, Homo sapien
attgctgaggcaacaaagccaatccagagctat

SEQ ID NO: 746136 - DNA, 33 bp, Homo sapien
attgctgaggcaacaaggccaatccagagctat

SEQ ID NO: 746137 - DNA, 33 bp, Homo sapien
agttgacacatccagagaaatcagggaaatata

SEQ ID NO: 746138 - DNA, 33 bp, Homo sapien
agttgacacatccagataaatcagggaaatata

SEQ ID NO: 746139 - DNA, 33 bp, Homo sapien
tcagtttagtaaaagtcacttctcctgttagat

SEQ ID NO: 746140 - DNA, 33 bp, Homo sapien
tcagtttagtaaaagtgacttctcctgttagat

SEQ ID NO: 746141 - DNA, 33 bp, Homo sapien
tttttcaaagacaacacgaaagagaggcactga

SEQ ID NO: 746142 - DNA, 33 bp, Homo sapien
tttttcaaagacaacatgaaagagaggcactga

SEQ ID NO: 746143 - DNA, 33 bp, Homo sapien
aaatctcttttccttaaaaactattgagcctca

SEQ ID NO: 746144 - DNA, 33 bp, Homo sapien
aaatctcttttccttataaactattgagcctca

SEQ ID NO: 746145 - DNA, 33 bp, Homo sapien
tcaactctaataccaaagttcttatcctaacca

SEQ ID NO: 746146 - DNA, 33 bp, Homo sapien
tcaactctaataccaacgttcttatcctaacca

SEQ ID NO: 746147 - DNA, 33 bp, Homo sapien
ggcaccagcatctgaaattaaatgtgataacat

SEQ ID NO: 746148 - DNA, 33 bp, Homo sapien
ggcaccagcatctgaagttaaatgtgataacat

SEQ ID NO: 746149 - DNA, 33 bp, Homo sapien
tggaggctctatcagcaaattgtagcgcagact

SEQ ID NO: 746150 - DNA, 33 bp, Homo sapien
tggaggctctatcagcgaattgtagcgcagact

SEQ ID NO: 746151 - DNA, 33 bp, Homo sapien
ataattgctatctgtcgcaaactaggtccaatc

SEQ ID NO: 746152 - DNA, 33 bp, Homo sapien
ataattgctatctgtctcaaactaggtccaatc

SEQ ID NO: 746153 - DNA, 33 bp, Homo sapien
ccacttctcattcttacagattcaacttccata

SEQ ID NO: 746154 - DNA, 33 bp, Homo sapien
ccacttctcattcttatagattcaacttccata

SEQ ID NO: 746155 - DNA, 33 bp, Homo sapien
tgtcccattagtatcaactgtgtcctacaggac

SEQ ID NO: 746156 - DNA, 33 bp, Homo sapien
tgtcccattagtatcacctgtgtcctacaggac

SEQ ID NO: 746157 - DNA, 33 bp, Homo sapien
tttgatacttactagccatgtcacctaaactct

SEQ ID NO: 746158 - DNA, 33 bp, Homo sapien
tttgatacttactagctatgtcacctaaactct

SEQ ID NO: 746159 - DNA, 33 bp, Homo sapien
ggaaattatttcctggaaacttgctgctgtgag

SEQ ID NO: 746160 - DNA, 33 bp, Homo sapien
ggaaattatttcctggcaacttgctgctgtgag

SEQ ID NO: 746161 - DNA, 33 bp, Homo sapien
aattttagcatttagcaattaaacacttttggg

SEQ ID NO: 746162 - DNA, 33 bp, Homo sapien
aattttagcatttagctattaaacacttttggg

SEQ ID NO: 746163 - DNA, 33 bp, Homo sapien
ttgtgcctgagtattgaaaccctttatgattaa

SEQ ID NO: 746164 - DNA, 33 bp, Homo sapien
ttgtgcctgagtattgtaaccctttatgattaa

SEQ ID NO: 746165 - DNA, 33 bp, Homo sapien
aactaagtgaattgataaggttacagagtgagt

SEQ ID NO: 746166 - DNA, 33 bp, Homo sapien
aactaagtgaattgatgaggttacagagtgagt

SEQ ID NO: 746167 - DNA, 33 bp, Homo sapien
gtcattttgctctatcaatcaggaaatgagcat

SEQ ID NO: 746168 - DNA, 33 bp, Homo sapien
gtcattttgctctatcgatcaggaaatgagcat

SEQ ID NO: 746169 - DNA, 33 bp, Homo sapien
aacttgtattccttcacgttaatccattatcct

SEQ ID NO: 746170 - DNA, 33 bp, Homo sapien
aacttgtattccttcatgttaatccattatcct

SEQ ID NO: 746171 - DNA, 33 bp, Homo sapien
actttaatttgcagataaaatgtatgggagtga

SEQ ID NO: 746172 - DNA, 33 bp, Homo sapien
actttaatttgcagattaaatgtatgggagtga

SEQ ID NO: 746173 - DNA, 33 bp, Homo sapien
ctaagcatttaaagacaaagtattgtgatttaa

SEQ ID NO: 746174 - DNA, 33 bp, Homo sapien
ctaagcatttaaagactaagtattgtgatttaa

SEQ ID NO: 746175 - DNA, 33 bp, Homo sapien
gggatacagtgtcatcccagataagagactttg

SEQ ID NO: 746176 - DNA, 33 bp, Homo sapien
gggatacagtgtcatctcagataagagactttg

SEQ ID NO: 746177 - DNA, 33 bp, Homo sapien
ttatactttaattaaaaatggacacttcctttc

SEQ ID NO: 746178 - DNA, 33 bp, Homo sapien
ttatactttaattaaacatggacacttcctttc

SEQ ID NO: 746179 - DNA, 33 bp, Homo sapien
catctgaaccaggaagaactttataaattcagc

SEQ ID NO: 746180 - DNA, 33 bp, Homo sapien
catctgaaccaggaagtactttataaattcagc

SEQ ID NO: 746181 - DNA, 33 bp, Homo sapien
caaatagcacaagggacaatttgagggcattgt

SEQ ID NO: 746182 - DNA, 33 bp, Homo sapien
caaatagcacaagggagaatttgagggcattgt

SEQ ID NO: 746183 - DNA, 33 bp, Homo sapien
aggtcaaattgcattgaaagtttccacatgatc

SEQ ID NO: 746184 - DNA, 33 bp, Homo sapien
aggtcaaattgcattggaagtttccacatgatc

SEQ ID NO: 746185 - DNA, 33 bp, Homo sapien
tgataacaactaaaaagggtccaagaacaagtc

SEQ ID NO: 746186 - DNA, 33 bp, Homo sapien
tgataacaactaaaaatggtccaagaacaagtc

SEQ ID NO: 746187 - DNA, 33 bp, Homo sapien
atgtgctctcatctcaaatttccttcaaaattg

SEQ ID NO: 746188 - DNA, 33 bp, Homo sapien
atgtgctctcatctcatatttccttcaaaattg

SEQ ID NO: 746189 - DNA, 33 bp, Homo sapien
aatgaatatctgttaaaaagcactattaagcat

SEQ ID NO: 746190 - DNA, 33 bp, Homo sapien
aatgaatatctgttaagaagcactattaagcat

SEQ ID NO: 746191 - DNA, 33 bp, Homo sapien
tcaacatatgaataagaaaacggtaacacaaaa

SEQ ID NO: 746192 - DNA, 33 bp, Homo sapien
tcaacatatgaataaggaaacggtaacacaaaa

SEQ ID NO: 746193 - DNA, 33 bp, Homo sapien
cccaaaagctgaaggcagacaattcattgacta

SEQ ID NO: 746194 - DNA, 33 bp, Homo sapien
cccaaaagctgaaggcggacaattcattgacta

SEQ ID NO: 746195 - DNA, 33 bp, Homo sapien
cagtagccactctgaaagcagaaagaaaggcca

SEQ ID NO: 746196 - DNA, 33 bp, Homo sapien
cagtagccactctgaaggcagaaagaaaggcca

SEQ ID NO: 746197 - DNA, 33 bp, Homo sapien
gtccatcagcaaatgcgaggtataataaccaac

SEQ ID NO: 746198 - DNA, 33 bp, Homo sapien
gtccatcagcaaatgctaggtataataaccaac

SEQ ID NO: 746199 - DNA, 33 bp, Homo sapien
taatgagtaccatttacgagagacacgaacaat

SEQ ID NO: 746200 - DNA, 33 bp, Homo sapien
taatgagtaccatttatgagagacacgaacaat

SEQ ID NO: 746201 - DNA, 33 bp, Homo sapien
gaatgcttgagatgcgccctgcaagaggagtag

SEQ ID NO: 746202 - DNA, 33 bp, Homo sapien
gaatgcttgagatgcgtcctgcaagaggagtag

SEQ ID NO: 746203 - DNA, 33 bp, Homo sapien
tgaaaatgaaattagaaggaaaaacatctctaa

SEQ ID NO: 746204 - DNA, 33 bp, Homo sapien
tgaaaatgaaattagagggaaaaacatctctaa

SEQ ID NO: 746205 - DNA, 33 bp, Homo sapien
attgttcactaatgcaatctgagtggagaaggc

SEQ ID NO: 746206 - DNA, 33 bp, Homo sapien
attgttcactaatgcagtctgagtggagaaggc

SEQ ID NO: 746207 - DNA, 33 bp, Homo sapien
aaagagtagctaatagaaattccactaagactg

SEQ ID NO: 746208 - DNA, 33 bp, Homo sapien
aaagagtagctaatagcaattccactaagactg

SEQ ID NO: 746209 - DNA, 33 bp, Homo sapien
gaattgaacaataccaagataaaaaactgaatt

SEQ ID NO: 746210 - DNA, 33 bp, Homo sapien
gaattgaacaataccacgataaaaaactgaatt

SEQ ID NO: 746211 - DNA, 33 bp, Homo sapien
agcaaatgctgtcagaagtcttcaatatcctcc

SEQ ID NO: 746212 - DNA, 33 bp, Homo sapien
agcaaatgctgtcagaggtcttcaatatcctcc

SEQ ID NO: 746213 - DNA, 33 bp, Homo sapien
caacaaatcacattcactaatatcaacacacaa

SEQ ID NO: 746214 - DNA, 33 bp, Homo sapien
caacaaatcacattcattaatatcaacacacaa

SEQ ID NO: 746215 - DNA, 33 bp, Homo sapien
tacacatctactgtcacgtggtggtaactcagc

SEQ ID NO: 746216 - DNA, 33 bp, Homo sapien
tacacatctactgtcatgtggtggtaactcagc

SEQ ID NO: 746217 - DNA, 33 bp, Homo sapien
cttctactttatatgaaaaggacagtgctacag

SEQ ID NO: 746218 - DNA, 33 bp, Homo sapien
cttctactttatatgagaaggacagtgctacag

SEQ ID NO: 746219 - DNA, 33 bp, Homo sapien
gacagtgctacagacagagagcagtacattttc

SEQ ID NO: 746220 - DNA, 33 bp, Homo sapien
gacagtgctacagacatagagcagtacattttc

SEQ ID NO: 746221 - DNA, 33 bp, Homo sapien
gacacgcttccttttaagatacagatctattct

SEQ ID NO: 746222 - DNA, 33 bp, Homo sapien
gacacgcttccttttaggatacagatctattct

SEQ ID NO: 746223 - DNA, 33 bp, Homo sapien
atacagatctattctacctttgttccaaccaga

SEQ ID NO: 746224 - DNA, 33 bp, Homo sapien
atacagatctattctatctttgttccaaccaga

SEQ ID NO: 746225 - DNA, 33 bp, Homo sapien
tttgttatggcagcctaagaagacgaatacaat

SEQ ID NO: 746226 - DNA, 33 bp, Homo sapien
tttgttatggcagcctgagaagacgaatacaat

SEQ ID NO: 746227 - DNA, 33 bp, Homo sapien
atgaaggctcaacaaaataatcttgaaatttac

SEQ ID NO: 746228 - DNA, 33 bp, Homo sapien
atgaaggctcaacaaagtaatcttgaaatttac

SEQ ID NO: 746229 - DNA, 33 bp, Homo sapien
tggcaagtcaatgctcagagaaaccagcagtgg

SEQ ID NO: 746230 - DNA, 33 bp, Homo sapien
tggcaagtcaatgctcggagaaaccagcagtgg

SEQ ID NO: 746231 - DNA, 33 bp, Homo sapien
ttggctacatctactccaactttgaggaaacac

SEQ ID NO: 746232 - DNA, 33 bp, Homo sapien
ttggctacatctactctaactttgaggaaacac

SEQ ID NO: 746233 - DNA, 33 bp, Homo sapien
cccctttttgataaaccagcagatacaatgatt

SEQ ID NO: 746234 - DNA, 33 bp, Homo sapien
cccctttttgataaactagcagatacaatgatt

SEQ ID NO: 746235 - DNA, 33 bp, Homo sapien
gggtttatttctcaaaaccactgcccattttgt

SEQ ID NO: 746236 - DNA, 33 bp, Homo sapien
gggtttatttctcaaatccactgcccattttgt

SEQ ID NO: 746237 - DNA, 33 bp, Homo sapien
tggcatcagttctgcaggtttcaggcatatagt

SEQ ID NO: 746238 - DNA, 33 bp, Homo sapien
tggcatcagttctgcatgtttcaggcatatagt

SEQ ID NO: 746239 - DNA, 33 bp, Homo sapien
aatccaagcctttagaccagaagtaagaataag

SEQ ID NO: 746240 - DNA, 33 bp, Homo sapien
aatccaagcctttagatcagaagtaagaataag

SEQ ID NO: 746241 - DNA, 33 bp, Homo sapien
aaagggaaattattccacagtttgatagacaat

SEQ ID NO: 746242 - DNA, 33 bp, Homo sapien
aaagggaaattattccgcagtttgatagacaat

SEQ ID NO: 746243 - DNA, 33 bp, Homo sapien
agatggcattttaattcaatagaaatgaacgtg

SEQ ID NO: 746244 - DNA, 33 bp, Homo sapien
agatggcattttaattgaatagaaatgaacgtg

SEQ ID NO: 746245 - DNA, 33 bp, Homo sapien
actgccgataattttgcaacatcgttattcttg

SEQ ID NO: 746246 - DNA, 33 bp, Homo sapien
actgccgataattttgtaacatcgttattcttg

SEQ ID NO: 746247 - DNA, 33 bp, Homo sapien
attgctaatatgggcaaataaaatgatcatacc

SEQ ID NO: 746248 - DNA, 33 bp, Homo sapien
attgctaatatgggcagataaaatgatcatacc

SEQ ID NO: 746249 - DNA, 33 bp, Homo sapien
tcactacattacggagaaagttaatatttagtt

SEQ ID NO: 746250 - DNA, 33 bp, Homo sapien
tcactacattacggagcaagttaatatttagtt

SEQ ID NO: 746251 - DNA, 33 bp, Homo sapien
tagcatcaacatcaacaaaaagcacatcaacac

SEQ ID NO: 746252 - DNA, 33 bp, Homo sapien
tagcatcaacatcaacgaaaagcacatcaacac

SEQ ID NO: 746253 - DNA, 33 bp, Homo sapien
tgaatgaaattacccaacgtctttctactgact

SEQ ID NO: 746254 - DNA, 33 bp, Homo sapien
tgaatgaaattacccatcgtctttctactgact

SEQ ID NO: 746255 - DNA, 33 bp, Homo sapien
gtggctgtttcctaccaatcattttataccata

SEQ ID NO: 746256 - DNA, 33 bp, Homo sapien
gtggctgtttcctaccgatcattttataccata

SEQ ID NO: 746257 - DNA, 33 bp, Homo sapien
ccctgactaattcagaagaaaaatgactgttgt

SEQ ID NO: 746258 - DNA, 33 bp, Homo sapien
ccctgactaattcagatgaaaaatgactgttgt

SEQ ID NO: 746259 - DNA, 33 bp, Homo sapien
attccagaacttgactaaagagtgaacttataa

SEQ ID NO: 746260 - DNA, 33 bp, Homo sapien
attccagaacttgactgaagagtgaacttataa

SEQ ID NO: 746261 - DNA, 33 bp, Homo sapien
tcatgtgttcactggaatatcacttttaatatc

SEQ ID NO: 746262 - DNA, 33 bp, Homo sapien
tcatgtgttcactggagtatcacttttaatatc

SEQ ID NO: 746263 - DNA, 33 bp, Homo sapien
cggttgttgcttttcagaaaggaagaataaaac

SEQ ID NO: 746264 - DNA, 33 bp, Homo sapien
cggttgttgcttttcataaaggaagaataaaac

SEQ ID NO: 746265 - DNA, 33 bp, Homo sapien
agagatgaattgagccggcttaattggctgaaa

SEQ ID NO: 746266 - DNA, 33 bp, Homo sapien
agagatgaattgagcctgcttaattggctgaaa

SEQ ID NO: 746267 - DNA, 33 bp, Homo sapien
tcctagagaaaacaacgaagtggaattatggct

SEQ ID NO: 746268 - DNA, 33 bp, Homo sapien
tcctagagaaaacaactaagtggaattatggct

SEQ ID NO: 746269 - DNA, 33 bp, Homo sapien
agacgacggacaccccaacaacttgtcaaaaga

SEQ ID NO: 746270 - DNA, 33 bp, Homo sapien
agacgacggacaccccgacaacttgtcaaaaga

SEQ ID NO: 746271 - DNA, 33 bp, Homo sapien
ttgcctcaataaaagaatcagccttcttggcac

SEQ ID NO: 746272 - DNA, 33 bp, Homo sapien
ttgcctcaataaaagagtcagccttcttggcac

SEQ ID NO: 746273 - DNA, 33 bp, Homo sapien
tcttggagggagaatacggattattgataaatt

SEQ ID NO: 746274 - DNA, 33 bp, Homo sapien
tcttggagggagaatatggattattgataaatt

SEQ ID NO: 746275 - DNA, 33 bp, Homo sapien
ctcaactcagtcccaggatgatttttctaaaac

SEQ ID NO: 746276 - DNA, 33 bp, Homo sapien
ctcaactcagtcccagtatgatttttctaaaac

SEQ ID NO: 746277 - DNA, 33 bp, Homo sapien
gtaatggatgttatgagctaggaagtggttgaa

SEQ ID NO: 746278 - DNA, 33 bp, Homo sapien
gtaatggatgttatgatctaggaagtggttgaa

SEQ ID NO: 746279 - DNA, 33 bp, Homo sapien
accaaacaagcacatcacaaccagaaaggaaaa

SEQ ID NO: 746280 - DNA, 33 bp, Homo sapien
accaaacaagcacatcgcaaccagaaaggaaaa

SEQ ID NO: 746281 - DNA, 33 bp, Homo sapien
atttttataactaagcaatatgcaagaagcatg

SEQ ID NO: 746282 - DNA, 33 bp, Homo sapien
atttttataactaagcgatatgcaagaagcatg

SEQ ID NO: 746283 - DNA, 33 bp, Homo sapien
ctcatgcaaatttttagatggatgtaagttttc

SEQ ID NO: 746284 - DNA, 33 bp, Homo sapien
ctcatgcaaatttttatatggatgtaagttttc

SEQ ID NO: 746285 - DNA, 33 bp, Homo sapien
tcaaaagtgagattcacgtcattactgctgtca

SEQ ID NO: 746286 - DNA, 33 bp, Homo sapien
tcaaaagtgagattcatgtcattactgctgtca

SEQ ID NO: 746287 - DNA, 33 bp, Homo sapien
aagaactgacagaagacgctgcagtaagtagta

SEQ ID NO: 746288 - DNA, 33 bp, Homo sapien
aagaactgacagaagatgctgcagtaagtagta

SEQ ID NO: 746289 - DNA, 33 bp, Homo sapien
tatagtttgcaattaaacccattgtttctgtga

SEQ ID NO: 746290 - DNA, 33 bp, Homo sapien
tatagtttgcaattaaccccattgtttctgtga

SEQ ID NO: 746291 - DNA, 33 bp, Homo sapien
cccaaagccatcttgtcaagtagtggaagtcat

SEQ ID NO: 746292 - DNA, 33 bp, Homo sapien
cccaaagccatcttgttaagtagtggaagtcat

SEQ ID NO: 746293 - DNA, 33 bp, Homo sapien
tccaataacacatagcgaagttattcctaccaa

SEQ ID NO: 746294 - DNA, 33 bp, Homo sapien
tccaataacacatagctaagttattcctaccaa

SEQ ID NO: 746295 - DNA, 33 bp, Homo sapien
tccagtcagcttgttacctttgttattgttgtt

SEQ ID NO: 746296 - DNA, 33 bp, Homo sapien
tccagtcagcttgttatctttgttattgttgtt

SEQ ID NO: 746297 - DNA, 33 bp, Homo sapien
tttcatttccaggaatgagaggtagagagagaa

SEQ ID NO: 746298 - DNA, 33 bp, Homo sapien
tttcatttccaggaattagaggtagagagagaa

SEQ ID NO: 746299 - DNA, 33 bp, Homo sapien
tgtagtatgcaaaacagaatggtactggcacaa

SEQ ID NO: 746300 - DNA, 33 bp, Homo sapien
tgtagtatgcaaaacataatggtactggcacaa

SEQ ID NO: 746301 - DNA, 33 bp, Homo sapien
gtagaattacaagactcacccaatgcccactat

SEQ ID NO: 746302 - DNA, 33 bp, Homo sapien
gtagaattacaagacttacccaatgcccactat

SEQ ID NO: 746303 - DNA, 33 bp, Homo sapien
aagtttacctgcctgaacaaacttttagtgcag

SEQ ID NO: 746304 - DNA, 33 bp, Homo sapien
aagtttacctgcctgagcaaacttttagtgcag

SEQ ID NO: 746305 - DNA, 33 bp, Homo sapien
atgttaatgagaaaaacctagtagatagaattt

SEQ ID NO: 746306 - DNA, 33 bp, Homo sapien
atgttaatgagaaaaagctagtagatagaattt

SEQ ID NO: 746307 - DNA, 33 bp, Homo sapien
cagaagataatgagtgaatattaacaagaactt

SEQ ID NO: 746308 - DNA, 33 bp, Homo sapien
cagaagataatgagtggatattaacaagaactt

SEQ ID NO: 746309 - DNA, 33 bp, Homo sapien
atacatggaataaaatcaagttcaaaatgtgag

SEQ ID NO: 746310 - DNA, 33 bp, Homo sapien
atacatggaataaaatgaagttcaaaatgtgag

SEQ ID NO: 746311 - DNA, 33 bp, Homo sapien
agccccaactgatatacactaactccaaaacat

SEQ ID NO: 746312 - DNA, 33 bp, Homo sapien
agccccaactgatatatactaactccaaaacat

SEQ ID NO: 746313 - DNA, 33 bp, Homo sapien
acacaagatgatcggacatttgtgcggtggatt

SEQ ID NO: 746314 - DNA, 33 bp, Homo sapien
acacaagatgatcggatatttgtgcggtggatt

SEQ ID NO: 746315 - DNA, 33 bp, Homo sapien
caatgtgatccaaacaacttcaccaaaacaaaa

SEQ ID NO: 746316 - DNA, 33 bp, Homo sapien
caatgtgatccaaacagcttcaccaaaacaaaa

SEQ ID NO: 746317 - DNA, 33 bp, Homo sapien
gaaagcgtatgttagaagatatttcgggctgtg

SEQ ID NO: 746318 - DNA, 33 bp, Homo sapien
gaaagcgtatgttagaggatatttcgggctgtg

SEQ ID NO: 746319 - DNA, 33 bp, Homo sapien
aaatgattacgcaccacctgctatgtgttagga

SEQ ID NO: 746320 - DNA, 33 bp, Homo sapien
aaatgattacgcaccatctgctatgtgttagga

SEQ ID NO: 746321 - DNA, 33 bp, Homo sapien
atagcttttaaattgaacatgatgaaggaatct

SEQ ID NO: 746322 - DNA, 33 bp, Homo sapien
atagcttttaaattgatcatgatgaaggaatct

SEQ ID NO: 746323 - DNA, 33 bp, Homo sapien
aaaagatgccttcatacgttactagtgaaaata

SEQ ID NO: 746324 - DNA, 33 bp, Homo sapien
aaaagatgccttcatatgttactagtgaaaata

SEQ ID NO: 746325 - DNA, 33 bp, Homo sapien
ttcacttacccttcaaaaggatcataagttcga

SEQ ID NO: 746326 - DNA, 33 bp, Homo sapien
ttcacttacccttcaagaggatcataagttcga

SEQ ID NO: 746327 - DNA, 33 bp, Homo sapien
atcttcgtaaggtttccctcccatcctctggag

SEQ ID NO: 746328 - DNA, 33 bp, Homo sapien
atcttcgtaaggtttctctcccatcctctggag

SEQ ID NO: 746329 - DNA, 33 bp, Homo sapien
tagagagacaataagtcacatcctgaaggctaa

SEQ ID NO: 746330 - DNA, 33 bp, Homo sapien
tagagagacaataagttacatcctgaaggctaa

SEQ ID NO: 746331 - DNA, 33 bp, Homo sapien
gatggaaggaggataaatggagtgaagagataa

SEQ ID NO: 746332 - DNA, 33 bp, Homo sapien
gatggaaggaggataagtggagtgaagagataa

SEQ ID NO: 746333 - DNA, 33 bp, Homo sapien
gaattagaatggagcacatttgaagacatatga

SEQ ID NO: 746334 - DNA, 33 bp, Homo sapien
gaattagaatggagcatatttgaagacatatga

SEQ ID NO: 746335 - DNA, 33 bp, Homo sapien
cttcgttactgctgcaaggtcttctggtatagt

SEQ ID NO: 746336 - DNA, 33 bp, Homo sapien
cttcgttactgctgcagggtcttctggtatagt

SEQ ID NO: 746337 - DNA, 33 bp, Homo sapien
taattatacagggtggaaagaatgacatctgtc

SEQ ID NO: 746338 - DNA, 33 bp, Homo sapien
taattatacagggtgggaagaatgacatctgtc

SEQ ID NO: 746339 - DNA, 33 bp, Homo sapien
catggaggcaacaaaacgcctggcccaactgaa

SEQ ID NO: 746340 - DNA, 33 bp, Homo sapien
catggaggcaacaaaatgcctggcccaactgaa

SEQ ID NO: 746341 - DNA, 33 bp, Homo sapien
aaaaagctaatatacaaatcaatccagttgaag

SEQ ID NO: 746342 - DNA, 33 bp, Homo sapien
aaaaagctaatatacagatcaatccagttgaag

SEQ ID NO: 746343 - DNA, 33 bp, Homo sapien
ttataaaaaactaggagatcttgaggtgaaata

SEQ ID NO: 746344 - DNA, 33 bp, Homo sapien
ttataaaaaactaggatatcttgaggtgaaata

SEQ ID NO: 746345 - DNA, 33 bp, Homo sapien
ctttgttgtattctcacattttcctgtgccatt

SEQ ID NO: 746346 - DNA, 33 bp, Homo sapien
ctttgttgtattctcatattttcctgtgccatt

SEQ ID NO: 746347 - DNA, 33 bp, Homo sapien
cagactaggtgccttcaacaacaagaaatttat

SEQ ID NO: 746348 - DNA, 33 bp, Homo sapien
cagactaggtgccttcgacaacaagaaatttat

SEQ ID NO: 746349 - DNA, 33 bp, Homo sapien
ttgtgcagaggaaactaagcaatggagttcatg

SEQ ID NO: 746350 - DNA, 33 bp, Homo sapien
ttgtgcagaggaaactcagcaatggagttcatg

SEQ ID NO: 746351 - DNA, 33 bp, Homo sapien
acatggtgctataggaaatcagaattgaggcat

SEQ ID NO: 746352 - DNA, 33 bp, Homo sapien
acatggtgctataggagatcagaattgaggcat

SEQ ID NO: 746353 - DNA, 33 bp, Homo sapien
aaaaatatacattcaaatcctaaactctggtac

SEQ ID NO: 746354 - DNA, 33 bp, Homo sapien
aaaaatatacattcaagtcctaaactctggtac

SEQ ID NO: 746355 - DNA, 33 bp, Homo sapien
tgaagactacctcaccgggaataatacccgaaa

SEQ ID NO: 746356 - DNA, 33 bp, Homo sapien
tgaagactacctcacctggaataatacccgaaa

SEQ ID NO: 746357 - DNA, 33 bp, Homo sapien
ctgccaccagtatgctaaaatgagtagaagtaa

SEQ ID NO: 746358 - DNA, 33 bp, Homo sapien
ctgccaccagtatgctgaaatgagtagaagtaa

SEQ ID NO: 746359 - DNA, 33 bp, Homo sapien
tgagtagcttgtacagccctgataaaacacaac

SEQ ID NO: 746360 - DNA, 33 bp, Homo sapien
tgagtagcttgtacaggcctgataaaacacaac

SEQ ID NO: 746361 - DNA, 33 bp, Homo sapien
aattaactgctcctaacgaaaaataaataaata

SEQ ID NO: 746362 - DNA, 33 bp, Homo sapien
aattaactgctcctaatgaaaaataaataaata

SEQ ID NO: 746363 - DNA, 33 bp, Homo sapien
tcaggtacgtcaaagaaacatgatggacaaagg

SEQ ID NO: 746364 - DNA, 33 bp, Homo sapien
tcaggtacgtcaaagacacatgatggacaaagg

SEQ ID NO: 746365 - DNA, 33 bp, Homo sapien
agccccttaaacagagaactgtgattctgaaat

SEQ ID NO: 746366 - DNA, 33 bp, Homo sapien
agccccttaaacagaggactgtgattctgaaat

SEQ ID NO: 746367 - DNA, 33 bp, Homo sapien
atggtgcatccccaaagctctgtccctacacag

SEQ ID NO: 746368 - DNA, 33 bp, Homo sapien
atggtgcatccccaaatctctgtccctacacag

SEQ ID NO: 746369 - DNA, 33 bp, Homo sapien
cccagaggacaattacaatgccctttttgaact

SEQ ID NO: 746370 - DNA, 33 bp, Homo sapien
cccagaggacaattacgatgccctttttgaact

SEQ ID NO: 746371 - DNA, 33 bp, Homo sapien
ctgtgagatatacacaatattttccaacgagga

SEQ ID NO: 746372 - DNA, 33 bp, Homo sapien
ctgtgagatatacacactattttccaacgagga

SEQ ID NO: 746373 - DNA, 33 bp, Homo sapien
tgcattgattgtgatacgaagttagagagagtg

SEQ ID NO: 746374 - DNA, 33 bp, Homo sapien
tgcattgattgtgatatgaagttagagagagtg

SEQ ID NO: 746375 - DNA, 33 bp, Homo sapien
taactgatggacttcaaaaaaactacaaagtcc

SEQ ID NO: 746376 - DNA, 33 bp, Homo sapien
taactgatggacttcagaaaaactacaaagtcc

SEQ ID NO: 746377 - DNA, 33 bp, Homo sapien
agagggagttatgagacatttattacagatgat

SEQ ID NO: 746378 - DNA, 33 bp, Homo sapien
agagggagttatgagatatttattacagatgat

SEQ ID NO: 746379 - DNA, 33 bp, Homo sapien
aatcagttatttcctacgttttgctacacaatt

SEQ ID NO: 746380 - DNA, 33 bp, Homo sapien
aatcagttatttcctatgttttgctacacaatt

SEQ ID NO: 746381 - DNA, 33 bp, Homo sapien
agaatgtatgctggaaatagaaggaatataaat

SEQ ID NO: 746382 - DNA, 33 bp, Homo sapien
agaatgtatgctggaagtagaaggaatataaat

SEQ ID NO: 746383 - DNA, 33 bp, Homo sapien
aagaaattgatcccaaccttcatgaatgacttt

SEQ ID NO: 746384 - DNA, 33 bp, Homo sapien
aagaaattgatcccaagcttcatgaatgacttt

SEQ ID NO: 746385 - DNA, 33 bp, Homo sapien
acattaattagaggaaccactatctatacaact

SEQ ID NO: 746386 - DNA, 33 bp, Homo sapien
acattaattagaggaatcactatctatacaact

SEQ ID NO: 746387 - DNA, 33 bp, Homo sapien
taaatttaatcacatcacttttctttttgtcaa

SEQ ID NO: 746388 - DNA, 33 bp, Homo sapien
taaatttaatcacatcgcttttctttttgtcaa

SEQ ID NO: 746389 - DNA, 33 bp, Homo sapien
ttattgattctgaaaaagcaatatgaatttaaa

SEQ ID NO: 746390 - DNA, 33 bp, Homo sapien
ttattgattctgaaaatgcaatatgaatttaaa

SEQ ID NO: 746391 - DNA, 33 bp, Homo sapien
agacaaaaatagcaaaatgcaaatcaaatgttt

SEQ ID NO: 746392 - DNA, 33 bp, Homo sapien
agacaaaaatagcaaagtgcaaatcaaatgttt

SEQ ID NO: 746393 - DNA, 33 bp, Homo sapien
acttgttccaacattcgctctgggttcaaccta

SEQ ID NO: 746394 - DNA, 33 bp, Homo sapien
acttgttccaacattctctctgggttcaaccta

SEQ ID NO: 746395 - DNA, 33 bp, Homo sapien
tatccccaagtctccaagaaatgtagcttatgt

SEQ ID NO: 746396 - DNA, 33 bp, Homo sapien
tatccccaagtctccaggaaatgtagcttatgt

SEQ ID NO: 746397 - DNA, 33 bp, Homo sapien
tatttctgaaggagataaaaatttggtatgctg

SEQ ID NO: 746398 - DNA, 33 bp, Homo sapien
tatttctgaaggagatgaaaatttggtatgctg

SEQ ID NO: 746399 - DNA, 33 bp, Homo sapien
tctgcatttatttgtacacagtagactgaagta

SEQ ID NO: 746400 - DNA, 33 bp, Homo sapien
tctgcatttatttgtatacagtagactgaagta

SEQ ID NO: 746401 - DNA, 33 bp, Homo sapien
gtacttctccctttcaaacgctataggaggagg

SEQ ID NO: 746402 - DNA, 33 bp, Homo sapien
gtacttctccctttcagacgctataggaggagg

SEQ ID NO: 746403 - DNA, 33 bp, Homo sapien
cttaatattcagtgaactgtggctaatactgta

SEQ ID NO: 746404 - DNA, 33 bp, Homo sapien
cttaatattcagtgaattgtggctaatactgta

SEQ ID NO: 746405 - DNA, 33 bp, Homo sapien
cagaaatctaaagatacagcaaggaagtcacag

SEQ ID NO: 746406 - DNA, 33 bp, Homo sapien
cagaaatctaaagatatagcaaggaagtcacag

SEQ ID NO: 746407 - DNA, 33 bp, Homo sapien
tgcctatttcagtcccaacagatattgagtttc

SEQ ID NO: 746408 - DNA, 33 bp, Homo sapien
tgcctatttcagtcccgacagatattgagtttc

SEQ ID NO: 746409 - DNA, 33 bp, Homo sapien
cctcttccactatgtccataaaccctggataga

SEQ ID NO: 746410 - DNA, 33 bp, Homo sapien
cctcttccactatgtctataaaccctggataga

SEQ ID NO: 746411 - DNA, 33 bp, Homo sapien
catgaagcaaccatcaaaggatgaatcaggagg

SEQ ID NO: 746412 - DNA, 33 bp, Homo sapien
catgaagcaaccatcagaggatgaatcaggagg

SEQ ID NO: 746413 - DNA, 33 bp, Homo sapien
tcctaaaactacaaccacatcactgaagttttt

SEQ ID NO: 746414 - DNA, 33 bp, Homo sapien
tcctaaaactacaaccgcatcactgaagttttt

SEQ ID NO: 746415 - DNA, 33 bp, Homo sapien
gctttccttcaaagcaaaagacctgttttgtct

SEQ ID NO: 746416 - DNA, 33 bp, Homo sapien
gctttccttcaaagcagaagacctgttttgtct

SEQ ID NO: 746417 - DNA, 33 bp, Homo sapien
gatttctcccgcattacatatgaatgtattaaa

SEQ ID NO: 746418 - DNA, 33 bp, Homo sapien
gatttctcccgcattatatatgaatgtattaaa

SEQ ID NO: 746419 - DNA, 33 bp, Homo sapien
tttggtctctttgttacgttttggtaattctca

SEQ ID NO: 746420 - DNA, 33 bp, Homo sapien
tttggtctctttgttatgttttggtaattctca

SEQ ID NO: 746421 - DNA, 33 bp, Homo sapien
acttattattgtgagcagtaggtcttgaaagtg

SEQ ID NO: 746422 - DNA, 33 bp, Homo sapien
acttattattgtgagcggtaggtcttgaaagtg

SEQ ID NO: 746423 - DNA, 33 bp, Homo sapien
tccttcatataaggaacgttactaatcatcagg

SEQ ID NO: 746424 - DNA, 33 bp, Homo sapien
tccttcatataaggaatgttactaatcatcagg

SEQ ID NO: 746425 - DNA, 33 bp, Homo sapien
ctgtatgtaaaacacaatcgaagctatcaatat

SEQ ID NO: 746426 - DNA, 33 bp, Homo sapien
ctgtatgtaaaacacagtcgaagctatcaatat

SEQ ID NO: 746427 - DNA, 33 bp, Homo sapien
tttctttgcagtagccgctatggttttgaagca

SEQ ID NO: 746428 - DNA, 33 bp, Homo sapien
tttctttgcagtagcctctatggttttgaagca

SEQ ID NO: 746429 - DNA, 33 bp, Homo sapien
aattagatctgcaacactgacacatactgtaaa

SEQ ID NO: 746430 - DNA, 33 bp, Homo sapien
aattagatctgcaacattgacacatactgtaaa

SEQ ID NO: 746431 - DNA, 33 bp, Homo sapien
ccggacctcagaataaaagtgagatacatatgt

SEQ ID NO: 746432 - DNA, 33 bp, Homo sapien
ccggacctcagaataagagtgagatacatatgt

SEQ ID NO: 746433 - DNA, 33 bp, Homo sapien
tcaagattacttacaactgactatggaaatatc

SEQ ID NO: 746434 - DNA, 33 bp, Homo sapien
tcaagattacttacaattgactatggaaatatc

SEQ ID NO: 746435 - DNA, 33 bp, Homo sapien
gatactctgtgaaaaacgaatcgtctttcctta

SEQ ID NO: 746436 - DNA, 33 bp, Homo sapien
gatactctgtgaaaaatgaatcgtctttcctta

SEQ ID NO: 746437 - DNA, 33 bp, Homo sapien
tttgtactttgagtcaaatgaaataattgacca

SEQ ID NO: 746438 - DNA, 33 bp, Homo sapien
tttgtactttgagtcagatgaaataattgacca

SEQ ID NO: 746439 - DNA, 33 bp, Homo sapien
ttaacaaaggctgaatgatcactataccatcta

SEQ ID NO: 746440 - DNA, 33 bp, Homo sapien
ttaacaaaggctgaattatcactataccatcta

SEQ ID NO: 746441 - DNA, 33 bp, Homo sapien
attcacaactaaagccaccattgaatcccatcc

SEQ ID NO: 746442 - DNA, 33 bp, Homo sapien
attcacaactaaagccgccattgaatcccatcc

SEQ ID NO: 746443 - DNA, 33 bp, Homo sapien
gaaacaagcagcataggataaaaacaaaaacta

SEQ ID NO: 746444 - DNA, 33 bp, Homo sapien
gaaacaagcagcatagtataaaaacaaaaacta

SEQ ID NO: 746445 - DNA, 33 bp, Homo sapien
tcactccttatcagaaatcactgctcccttgaa

SEQ ID NO: 746446 - DNA, 33 bp, Homo sapien
tcactccttatcagaagtcactgctcccttgaa

SEQ ID NO: 746447 - DNA, 33 bp, Homo sapien
atagcataattcaacactggttctttttgtcat

SEQ ID NO: 746448 - DNA, 33 bp, Homo sapien
atagcataattcaacattggttctttttgtcat

SEQ ID NO: 746449 - DNA, 33 bp, Homo sapien
attctcttcaaagctacgccattgaaggtgatg

SEQ ID NO: 746450 - DNA, 33 bp, Homo sapien
attctcttcaaagctatgccattgaaggtgatg

SEQ ID NO: 746451 - DNA, 33 bp, Homo sapien
tctacagcataagtaccgaatgaaaataatttt

SEQ ID NO: 746452 - DNA, 33 bp, Homo sapien
tctacagcataagtactgaatgaaaataatttt

SEQ ID NO: 746453 - DNA, 33 bp, Homo sapien
gaaagggagtgaggtcccctgctgaagtagtcc

SEQ ID NO: 746454 - DNA, 33 bp, Homo sapien
gaaagggagtgaggtctcctgctgaagtagtcc

SEQ ID NO: 746455 - DNA, 33 bp, Homo sapien
ctccgtaattagctcaagattttcccttctcct

SEQ ID NO: 746456 - DNA, 33 bp, Homo sapien
ctccgtaattagctcacgattttcccttctcct

SEQ ID NO: 746457 - DNA, 33 bp, Homo sapien
cagctccaaatttccacgattattaagaaaaac

SEQ ID NO: 746458 - DNA, 33 bp, Homo sapien
cagctccaaatttccatgattattaagaaaaac

SEQ ID NO: 746459 - DNA, 33 bp, Homo sapien
gctaatgcagggacaccaaactgctgatatgag

SEQ ID NO: 746460 - DNA, 33 bp, Homo sapien
gctaatgcagggacacgaaactgctgatatgag

SEQ ID NO: 746461 - DNA, 33 bp, Homo sapien
ccctgagtagctctaagtggtatttggcaaagc

SEQ ID NO: 746462 - DNA, 33 bp, Homo sapien
ccctgagtagctctaattggtatttggcaaagc

SEQ ID NO: 746463 - DNA, 33 bp, Homo sapien
agagctactcaggggacacatttgtttctgcca

SEQ ID NO: 746464 - DNA, 33 bp, Homo sapien
agagctactcaggggatacatttgtttctgcca

SEQ ID NO: 746465 - DNA, 33 bp, Homo sapien
tctgcaacaacacggacagaattggaactatgt

SEQ ID NO: 746466 - DNA, 33 bp, Homo sapien
tctgcaacaacacggatagaattggaactatgt

SEQ ID NO: 746467 - DNA, 33 bp, Homo sapien
cacacattagttctccccagtgccatcactttg

SEQ ID NO: 746468 - DNA, 33 bp, Homo sapien
cacacattagttctcctcagtgccatcactttg

SEQ ID NO: 746469 - DNA, 33 bp, Homo sapien
atggctttccttctacacccgcctgtggagtct

SEQ ID NO: 746470 - DNA, 33 bp, Homo sapien
atggctttccttctactcccgcctgtggagtct

SEQ ID NO: 746471 - DNA, 33 bp, Homo sapien
cccacgtgtccaaatgaatattctgtctgacac

SEQ ID NO: 746472 - DNA, 33 bp, Homo sapien
cccacgtgtccaaatgtatattctgtctgacac

SEQ ID NO: 746473 - DNA, 33 bp, Homo sapien
taaaatggaattacacaaaaaaagtggaatgag

SEQ ID NO: 746474 - DNA, 33 bp, Homo sapien
taaaatggaattacacgaaaaaagtggaatgag

SEQ ID NO: 746475 - DNA, 33 bp, Homo sapien
aagttgtcatggtgatgaggaataaagctgtag

SEQ ID NO: 746476 - DNA, 33 bp, Homo sapien
aagttgtcatggtgattaggaataaagctgtag

SEQ ID NO: 746477 - DNA, 33 bp, Homo sapien
gacacagtcacaaagcacagactttaatgctta

SEQ ID NO: 746478 - DNA, 33 bp, Homo sapien
gacacagtcacaaagcgcagactttaatgctta

SEQ ID NO: 746479 - DNA, 33 bp, Homo sapien
ttttaggcatatattccataccacatagcgcac

SEQ ID NO: 746480 - DNA, 33 bp, Homo sapien
ttttaggcatatattctataccacatagcgcac

SEQ ID NO: 746481 - DNA, 33 bp, Homo sapien
aaggcttctgagattaaatgagaggaaagggga

SEQ ID NO: 746482 - DNA, 33 bp, Homo sapien
aaggcttctgagattagatgagaggaaagggga

SEQ ID NO: 746483 - DNA, 33 bp, Homo sapien
tgttttaaaatttttacactcacaggcagcagg

SEQ ID NO: 746484 - DNA, 33 bp, Homo sapien
tgttttaaaatttttatactcacaggcagcagg

SEQ ID NO: 746485 - DNA, 33 bp, Homo sapien
cttgcctcctaagcacagtaaaagcctaagcca

SEQ ID NO: 746486 - DNA, 33 bp, Homo sapien
cttgcctcctaagcacggtaaaagcctaagcca

SEQ ID NO: 746487 - DNA, 33 bp, Homo sapien
taaaaaacggtttgtaactagaatacaaaagca

SEQ ID NO: 746488 - DNA, 33 bp, Homo sapien
taaaaaacggtttgtagctagaatacaaaagca

SEQ ID NO: 746489 - DNA, 33 bp, Homo sapien
tcttgtctgattatacacctatgtgagaattca

SEQ ID NO: 746490 - DNA, 33 bp, Homo sapien
tcttgtctgattatacccctatgtgagaattca

SEQ ID NO: 746491 - DNA, 33 bp, Homo sapien
tatattgtcattttcacagtgattagtgactac

SEQ ID NO: 746492 - DNA, 33 bp, Homo sapien
tatattgtcattttcatagtgattagtgactac

SEQ ID NO: 746493 - DNA, 33 bp, Homo sapien
tgtggccaatatgaccggaataaatgtgaaatt

SEQ ID NO: 746494 - DNA, 33 bp, Homo sapien
tgtggccaatatgacctgaataaatgtgaaatt

SEQ ID NO: 746495 - DNA, 33 bp, Homo sapien
tgttgccattgtttcaaatcttgcatgactctt

SEQ ID NO: 746496 - DNA, 33 bp, Homo sapien
tgttgccattgtttcagatcttgcatgactctt

SEQ ID NO: 746497 - DNA, 33 bp, Homo sapien
gtcttcttcacttttacgttgatatgttctatt

SEQ ID NO: 746498 - DNA, 33 bp, Homo sapien
gtcttcttcacttttatgttgatatgttctatt

SEQ ID NO: 746499 - DNA, 33 bp, Homo sapien
atgagctatagtagacactacactacccattgg

SEQ ID NO: 746500 - DNA, 33 bp, Homo sapien
atgagctatagtagaccctacactacccattgg

SEQ ID NO: 746501 - DNA, 33 bp, Homo sapien
gatcttttctaaagcacggtctgcgtttctgtt

SEQ ID NO: 746502 - DNA, 33 bp, Homo sapien
gatcttttctaaagcatggtctgcgtttctgtt

SEQ ID NO: 746503 - DNA, 33 bp, Homo sapien
ttatgcctttcaactaaccaatattaaggctga

SEQ ID NO: 746504 - DNA, 33 bp, Homo sapien
ttatgcctttcaactacccaatattaaggctga

SEQ ID NO: 746505 - DNA, 33 bp, Homo sapien
tctgattattacagccaatctctaattgtttgt

SEQ ID NO: 746506 - DNA, 33 bp, Homo sapien
tctgattattacagccgatctctaattgtttgt

SEQ ID NO: 746507 - DNA, 33 bp, Homo sapien
aatataaacacgcatacagacaatagagcattt

SEQ ID NO: 746508 - DNA, 33 bp, Homo sapien
aatataaacacgcatatagacaatagagcattt

SEQ ID NO: 746509 - DNA, 33 bp, Homo sapien
gcaatagaatagaaacagaatgaaatccacaag

SEQ ID NO: 746510 - DNA, 33 bp, Homo sapien
gcaatagaatagaaacggaatgaaatccacaag

SEQ ID NO: 746511 - DNA, 33 bp, Homo sapien
agctattgccccgtgaagaaacagtatgatgct

SEQ ID NO: 746512 - DNA, 33 bp, Homo sapien
agctattgccccgtgacgaaacagtatgatgct

SEQ ID NO: 746513 - DNA, 33 bp, Homo sapien
tagacactgatgataacgttgaactctctttga

SEQ ID NO: 746514 - DNA, 33 bp, Homo sapien
tagacactgatgataatgttgaactctctttga

SEQ ID NO: 746515 - DNA, 33 bp, Homo sapien
tataaaaggcaaaatacatgtgaagagatacac

SEQ ID NO: 746516 - DNA, 33 bp, Homo sapien
tataaaaggcaaaatatatgtgaagagatacac

SEQ ID NO: 746517 - DNA, 33 bp, Homo sapien
agtttcagaatcttataaaatgacaggcaaata

SEQ ID NO: 746518 - DNA, 33 bp, Homo sapien
agtttcagaatcttatcaaatgacaggcaaata

SEQ ID NO: 746519 - DNA, 33 bp, Homo sapien
tccttgaatgaaggtcaagtaaataattgtgtt

SEQ ID NO: 746520 - DNA, 33 bp, Homo sapien
tccttgaatgaaggtcgagtaaataattgtgtt

SEQ ID NO: 746521 - DNA, 33 bp, Homo sapien
tttaacttcacttccaagtatgaggttagcatg

SEQ ID NO: 746522 - DNA, 33 bp, Homo sapien
tttaacttcacttccatgtatgaggttagcatg

SEQ ID NO: 746523 - DNA, 33 bp, Homo sapien
ataaagagcaaaaataagttctggaatacagtt

SEQ ID NO: 746524 - DNA, 33 bp, Homo sapien
ataaagagcaaaaatacgttctggaatacagtt

SEQ ID NO: 746525 - DNA, 33 bp, Homo sapien
gtttctcacattttgaacatttccgatgagcat

SEQ ID NO: 746526 - DNA, 33 bp, Homo sapien
gtttctcacattttgagcatttccgatgagcat

SEQ ID NO: 746527 - DNA, 33 bp, Homo sapien
tataagtgcaaattagccaagtgctactagttc

SEQ ID NO: 746528 - DNA, 33 bp, Homo sapien
tataagtgcaaattaggcaagtgctactagttc

SEQ ID NO: 746529 - DNA, 33 bp, Homo sapien
cattaagtaactaaaacgtatgtgaagacctaa

SEQ ID NO: 746530 - DNA, 33 bp, Homo sapien
cattaagtaactaaaatgtatgtgaagacctaa

SEQ ID NO: 746531 - DNA, 33 bp, Homo sapien
ctttatcttgcttatccctttcctgtcttgaat

SEQ ID NO: 746532 - DNA, 33 bp, Homo sapien
ctttatcttgcttatctctttcctgtcttgaat

SEQ ID NO: 746533 - DNA, 33 bp, Homo sapien
gtggcttggctgcaaaaaaaaaggtggaatatc

SEQ ID NO: 746534 - DNA, 33 bp, Homo sapien
gtggcttggctgcaaagaaaaaggtggaatatc

SEQ ID NO: 746535 - DNA, 33 bp, Homo sapien
tgtaggtcatgataaaacctgaataaaaagcaa

SEQ ID NO: 746536 - DNA, 33 bp, Homo sapien
tgtaggtcatgataaaccctgaataaaaagcaa

SEQ ID NO: 746537 - DNA, 33 bp, Homo sapien
atctcctggaactaaaacctctggctaactcta

SEQ ID NO: 746538 - DNA, 33 bp, Homo sapien
atctcctggaactaaatcctctggctaactcta

SEQ ID NO: 746539 - DNA, 33 bp, Homo sapien
ggataacatgaaagtacgtgaccaattaggaaa

SEQ ID NO: 746540 - DNA, 33 bp, Homo sapien
ggataacatgaaagtatgtgaccaattaggaaa

SEQ ID NO: 746541 - DNA, 33 bp, Homo sapien
tctctcataggaagataatagaagtgcttccat

SEQ ID NO: 746542 - DNA, 33 bp, Homo sapien
tctctcataggaagatgatagaagtgcttccat

SEQ ID NO: 746543 - DNA, 33 bp, Homo sapien
tttcatcaaagaaccaatgaaaacaggaatatc

SEQ ID NO: 746544 - DNA, 33 bp, Homo sapien
tttcatcaaagaaccagtgaaaacaggaatatc

SEQ ID NO: 746545 - DNA, 33 bp, Homo sapien
ctcctcataatactccaatggttgagaactttc

SEQ ID NO: 746546 - DNA, 33 bp, Homo sapien
ctcctcataatactccgatggttgagaactttc

SEQ ID NO: 746547 - DNA, 33 bp, Homo sapien
aggtattaattcctaaatagtattctgcatttt

SEQ ID NO: 746548 - DNA, 33 bp, Homo sapien
aggtattaattcctaagtagtattctgcatttt

SEQ ID NO: 746549 - DNA, 33 bp, Homo sapien
ctctttccagctgaaccctagtttgacagttat

SEQ ID NO: 746550 - DNA, 33 bp, Homo sapien
ctctttccagctgaacgctagtttgacagttat

SEQ ID NO: 746551 - DNA, 33 bp, Homo sapien
tctatgatgattcacaatgagaggcttttataa

SEQ ID NO: 746552 - DNA, 33 bp, Homo sapien
tctatgatgattcacagtgagaggcttttataa

SEQ ID NO: 746553 - DNA, 33 bp, Homo sapien
gatgttagatagctgaacaaaaacatgatgaat

SEQ ID NO: 746554 - DNA, 33 bp, Homo sapien
gatgttagatagctgagcaaaaacatgatgaat

SEQ ID NO: 746555 - DNA, 33 bp, Homo sapien
gccacttacacagtcccaggaggaagcctgtac

SEQ ID NO: 746556 - DNA, 33 bp, Homo sapien
gccacttacacagtcctaggaggaagcctgtac

SEQ ID NO: 746557 - DNA, 33 bp, Homo sapien
aaaccctctcagaataacacttattgtaagtag

SEQ ID NO: 746558 - DNA, 33 bp, Homo sapien
aaaccctctcagaatagcacttattgtaagtag

SEQ ID NO: 746559 - DNA, 33 bp, Homo sapien
ccatactatgcaggttgaaaataattcaatatc

SEQ ID NO: 746560 - DNA, 33 bp, Homo sapien
ccatactatgcaggtttaaaataattcaatatc

SEQ ID NO: 746561 - DNA, 33 bp, Homo sapien
atacttttgatgaaaactatgacacaaacctta

SEQ ID NO: 746562 - DNA, 33 bp, Homo sapien
atacttttgatgaaaattatgacacaaacctta

SEQ ID NO: 746563 - DNA, 33 bp, Homo sapien
aatgtctacagaaaaactgaatgtgtctgctat

SEQ ID NO: 746564 - DNA, 33 bp, Homo sapien
aatgtctacagaaaaattgaatgtgtctgctat

SEQ ID NO: 746565 - DNA, 33 bp, Homo sapien
aaggttctgttttacaacactacggtggggtcc

SEQ ID NO: 746566 - DNA, 33 bp, Homo sapien
aaggttctgttttacagcactacggtggggtcc

SEQ ID NO: 746567 - DNA, 33 bp, Homo sapien
ctatttatctggtgcacgtcatctttcacaact

SEQ ID NO: 746568 - DNA, 33 bp, Homo sapien
ctatttatctggtgcatgtcatctttcacaact

SEQ ID NO: 746569 - DNA, 33 bp, Homo sapien
gaagctattgcaatggacagatttatgaaaatg

SEQ ID NO: 746570 - DNA, 33 bp, Homo sapien
gaagctattgcaatgggcagatttatgaaaatg

SEQ ID NO: 746571 - DNA, 33 bp, Homo sapien
ttgtatggtcaatagaactcaagggccaactaa

SEQ ID NO: 746572 - DNA, 33 bp, Homo sapien
ttgtatggtcaatagagctcaagggccaactaa

SEQ ID NO: 746573 - DNA, 33 bp, Homo sapien
caattccagacccatacagaaatttggacttca

SEQ ID NO: 746574 - DNA, 33 bp, Homo sapien
caattccagacccatatagaaatttggacttca

SEQ ID NO: 746575 - DNA, 33 bp, Homo sapien
agttgacttagcaataaatcttggcaaatatct

SEQ ID NO: 746576 - DNA, 33 bp, Homo sapien
agttgacttagcaatacatcttggcaaatatct

SEQ ID NO: 746577 - DNA, 33 bp, Homo sapien
tatatgtttccaccaacactggctagaaatgtc

SEQ ID NO: 746578 - DNA, 33 bp, Homo sapien
tatatgtttccaccaagactggctagaaatgtc

SEQ ID NO: 746579 - DNA, 33 bp, Homo sapien
ctagacactgtaaggagatcataccacagggag

SEQ ID NO: 746580 - DNA, 33 bp, Homo sapien
ctagacactgtaaggatatcataccacagggag

SEQ ID NO: 746581 - DNA, 33 bp, Homo sapien
tgtggaatgaatgctacaggaaggaagtgggct

SEQ ID NO: 746582 - DNA, 33 bp, Homo sapien
tgtggaatgaatgctataggaaggaagtgggct

SEQ ID NO: 746583 - DNA, 33 bp, Homo sapien
atgtcacagaagctgccaaggatgctcttgcat

SEQ ID NO: 746584 - DNA, 33 bp, Homo sapien
atgtcacagaagctgcgaaggatgctcttgcat

SEQ ID NO: 746585 - DNA, 33 bp, Homo sapien
gtcataaatgtgaaatcaatcatgtaaagtaga

SEQ ID NO: 746586 - DNA, 33 bp, Homo sapien
gtcataaatgtgaaattaatcatgtaaagtaga

SEQ ID NO: 746587 - DNA, 33 bp, Homo sapien
ctctatccttccatcaggcacactttcctatta

SEQ ID NO: 746588 - DNA, 33 bp, Homo sapien
ctctatccttccatcatgcacactttcctatta

SEQ ID NO: 746589 - DNA, 33 bp, Homo sapien
tactgtttcatgaaaaatggttttagagctgac

SEQ ID NO: 746590 - DNA, 33 bp, Homo sapien
tactgtttcatgaaaagtggttttagagctgac

SEQ ID NO: 746591 - DNA, 33 bp, Homo sapien
gaatccaggatcaatacaacaccatatacttct

SEQ ID NO: 746592 - DNA, 33 bp, Homo sapien
gaatccaggatcaatataacaccatatacttct

SEQ ID NO: 746593 - DNA, 33 bp, Homo sapien
gcttagtgttgtctaactggatatcgtgagtgg

SEQ ID NO: 746594 - DNA, 33 bp, Homo sapien
gcttagtgttgtctaattggatatcgtgagtgg

SEQ ID NO: 746595 - DNA, 33 bp, Homo sapien
tttaaccttatagagcacttgtggaattaaatg

SEQ ID NO: 746596 - DNA, 33 bp, Homo sapien
tttaaccttatagagcgcttgtggaattaaatg

SEQ ID NO: 746597 - DNA, 33 bp, Homo sapien
cattgcaaggtgtttcaagtgagaacatgtcat

SEQ ID NO: 746598 - DNA, 33 bp, Homo sapien
cattgcaaggtgtttcgagtgagaacatgtcat

SEQ ID NO: 746599 - DNA, 33 bp, Homo sapien
ggagatactaagtgacacaacctgatgtttaga

SEQ ID NO: 746600 - DNA, 33 bp, Homo sapien
ggagatactaagtgacgcaacctgatgtttaga

SEQ ID NO: 746601 - DNA, 33 bp, Homo sapien
tggggatgccaaagataactgatttcctcataa

SEQ ID NO: 746602 - DNA, 33 bp, Homo sapien
tggggatgccaaagatgactgatttcctcataa

SEQ ID NO: 746603 - DNA, 33 bp, Homo sapien
tttgaaaatgattttcacaaaagaccacataga

SEQ ID NO: 746604 - DNA, 33 bp, Homo sapien
tttgaaaatgattttcgcaaaagaccacataga

SEQ ID NO: 746605 - DNA, 33 bp, Homo sapien
tgtacctatgggctcaccttatgcgagtgcttt

SEQ ID NO: 746606 - DNA, 33 bp, Homo sapien
tgtacctatgggctcatcttatgcgagtgcttt

SEQ ID NO: 746607 - DNA, 33 bp, Homo sapien
gttaagttttgggccactaatagctcaagtcac

SEQ ID NO: 746608 - DNA, 33 bp, Homo sapien
gttaagttttgggccattaatagctcaagtcac

SEQ ID NO: 746609 - DNA, 33 bp, Homo sapien
atggattggtttattacggttaaattgagcatg

SEQ ID NO: 746610 - DNA, 33 bp, Homo sapien
atggattggtttattatggttaaattgagcatg

SEQ ID NO: 746611 - DNA, 33 bp, Homo sapien
ttctcagtttgatagcaataagaggtaatacct

SEQ ID NO: 746612 - DNA, 33 bp, Homo sapien
ttctcagtttgatagccataagaggtaatacct

SEQ ID NO: 746613 - DNA, 33 bp, Homo sapien
aaagagacatctgagcaaacttcacctgggaga

SEQ ID NO: 746614 - DNA, 33 bp, Homo sapien
aaagagacatctgagcgaacttcacctgggaga

SEQ ID NO: 746615 - DNA, 33 bp, Homo sapien
cctgtaagtaattccaaatataatgtgcttttt

SEQ ID NO: 746616 - DNA, 33 bp, Homo sapien
cctgtaagtaattccagatataatgtgcttttt

SEQ ID NO: 746617 - DNA, 33 bp, Homo sapien
aaccatagctaatatacgtttctccaacccact

SEQ ID NO: 746618 - DNA, 33 bp, Homo sapien
aaccatagctaatatatgtttctccaacccact

SEQ ID NO: 746619 - DNA, 33 bp, Homo sapien
ctgagaaacagccaatcatgtagctaatggggc

SEQ ID NO: 746620 - DNA, 33 bp, Homo sapien
ctgagaaacagccaatgatgtagctaatggggc

SEQ ID NO: 746621 - DNA, 33 bp, Homo sapien
aactcaggtttaaacactcaacctaaacatatc

SEQ ID NO: 746622 - DNA, 33 bp, Homo sapien
aactcaggtttaaacattcaacctaaacatatc

SEQ ID NO: 746623 - DNA, 33 bp, Homo sapien
acactagaatgtctcaaagaaattaaaatattt

SEQ ID NO: 746624 - DNA, 33 bp, Homo sapien
acactagaatgtctcagagaaattaaaatattt

SEQ ID NO: 746625 - DNA, 33 bp, Homo sapien
gaaatatgaagctaaaataggaagcacagctag

SEQ ID NO: 746626 - DNA, 33 bp, Homo sapien
gaaatatgaagctaaagtaggaagcacagctag

SEQ ID NO: 746627 - DNA, 33 bp, Homo sapien
attttatttcaaaatagtatggtcttatcatca

SEQ ID NO: 746628 - DNA, 33 bp, Homo sapien
attttatttcaaaatattatggtcttatcatca

SEQ ID NO: 746629 - DNA, 33 bp, Homo sapien
agattttttaattcaactagtcactacgtttag

SEQ ID NO: 746630 - DNA, 33 bp, Homo sapien
agattttttaattcaagtagtcactacgtttag

SEQ ID NO: 746631 - DNA, 33 bp, Homo sapien
gtaaatacttgaatgaactgagagccaggaaat

SEQ ID NO: 746632 - DNA, 33 bp, Homo sapien
gtaaatacttgaatgagctgagagccaggaaat

SEQ ID NO: 746633 - DNA, 33 bp, Homo sapien
acataaacttaaccacaccattcatgatctctc

SEQ ID NO: 746634 - DNA, 33 bp, Homo sapien
acataaacttaaccacgccattcatgatctctc

SEQ ID NO: 746635 - DNA, 33 bp, Homo sapien
taatactaactagttcaataatgtctcattagt

SEQ ID NO: 746636 - DNA, 33 bp, Homo sapien
taatactaactagttcgataatgtctcattagt

SEQ ID NO: 746637 - DNA, 33 bp, Homo sapien
tgtgttcagcgctaaaaatctcatatgtccctt

SEQ ID NO: 746638 - DNA, 33 bp, Homo sapien
tgtgttcagcgctaaatatctcatatgtccctt

SEQ ID NO: 746639 - DNA, 33 bp, Homo sapien
aggaaaaatcttttcaaacagtgcgttatttac

SEQ ID NO: 746640 - DNA, 33 bp, Homo sapien
aggaaaaatcttttcatacagtgcgttatttac

SEQ ID NO: 746641 - DNA, 33 bp, Homo sapien
gcaatgtagaaactgacgtcaaaaaatataaaa

SEQ ID NO: 746642 - DNA, 33 bp, Homo sapien
gcaatgtagaaactgatgtcaaaaaatataaaa

SEQ ID NO: 746643 - DNA, 33 bp, Homo sapien
ctcatttaagactcacaataaccaagctttaca

SEQ ID NO: 746644 - DNA, 33 bp, Homo sapien
ctcatttaagactcaccataaccaagctttaca

SEQ ID NO: 746645 - DNA, 33 bp, Homo sapien
tctgccctctaagagcacattgtctatacatca

SEQ ID NO: 746646 - DNA, 33 bp, Homo sapien
tctgccctctaagagcgcattgtctatacatca

SEQ ID NO: 746647 - DNA, 33 bp, Homo sapien
ctggatttctagattaagaatgcaaaacagttt

SEQ ID NO: 746648 - DNA, 33 bp, Homo sapien
ctggatttctagattaggaatgcaaaacagttt

SEQ ID NO: 746649 - DNA, 33 bp, Homo sapien
ccatgctgatcctgcaaacatttggagaggggt

SEQ ID NO: 746650 - DNA, 33 bp, Homo sapien
ccatgctgatcctgcagacatttggagaggggt

SEQ ID NO: 746651 - DNA, 33 bp, Homo sapien
actgccacgatagctgaatttccacaatctctc

SEQ ID NO: 746652 - DNA, 33 bp, Homo sapien
actgccacgatagctggatttccacaatctctc

SEQ ID NO: 746653 - DNA, 33 bp, Homo sapien
ttctgctatcaggtaaagttggtgtattagctt

SEQ ID NO: 746654 - DNA, 33 bp, Homo sapien
ttctgctatcaggtaatgttggtgtattagctt

SEQ ID NO: 746655 - DNA, 33 bp, Homo sapien
aactatgcctggcaaaatgtgacatataggtct

SEQ ID NO: 746656 - DNA, 33 bp, Homo sapien
aactatgcctggcaaattgtgacatataggtct

SEQ ID NO: 746657 - DNA, 33 bp, Homo sapien
actgttcaaaacaatcaagaagcaaagaataaa

SEQ ID NO: 746658 - DNA, 33 bp, Homo sapien
actgttcaaaacaatcgagaagcaaagaataaa

SEQ ID NO: 746659 - DNA, 33 bp, Homo sapien
gctagaatgtgttaaaatcatactgagcaacat

SEQ ID NO: 746660 - DNA, 33 bp, Homo sapien
gctagaatgtgttaaattcatactgagcaacat

SEQ ID NO: 746661 - DNA, 33 bp, Homo sapien
agctcagaactttctacctgttgggacttattc

SEQ ID NO: 746662 - DNA, 33 bp, Homo sapien
agctcagaactttctatctgttgggacttattc

SEQ ID NO: 746663 - DNA, 33 bp, Homo sapien
acttattcacctcctcacttgttccttgtctgc

SEQ ID NO: 746664 - DNA, 33 bp, Homo sapien
acttattcacctcctcgcttgttccttgtctgc

SEQ ID NO: 746665 - DNA, 33 bp, Homo sapien
gaaacagtgtcctctaacaacttcacatttact

SEQ ID NO: 746666 - DNA, 33 bp, Homo sapien
gaaacagtgtcctctagcaacttcacatttact

SEQ ID NO: 746667 - DNA, 33 bp, Homo sapien
ttaattttctttgggcgaagcagaggtagaaat

SEQ ID NO: 746668 - DNA, 33 bp, Homo sapien
ttaattttctttgggctaagcagaggtagaaat

SEQ ID NO: 746669 - DNA, 33 bp, Homo sapien
ataatactgtgtaccacgcaatttcaaattgta

SEQ ID NO: 746670 - DNA, 33 bp, Homo sapien
ataatactgtgtaccatgcaatttcaaattgta

SEQ ID NO: 746671 - DNA, 33 bp, Homo sapien
ttttctgcattctaacaacagtgaaacaggtga

SEQ ID NO: 746672 - DNA, 33 bp, Homo sapien
ttttctgcattctaacgacagtgaaacaggtga

SEQ ID NO: 746673 - DNA, 33 bp, Homo sapien
ttaggtattatggttacagtaggcagacagtta

SEQ ID NO: 746674 - DNA, 33 bp, Homo sapien
ttaggtattatggttagagtaggcagacagtta

SEQ ID NO: 746675 - DNA, 33 bp, Homo sapien
catcttcatagggtcaacttgcttagatattga

SEQ ID NO: 746676 - DNA, 33 bp, Homo sapien
catcttcatagggtcagcttgcttagatattga

SEQ ID NO: 746677 - DNA, 33 bp, Homo sapien
caggctaaggaggagacgcactgaatgccatgg

SEQ ID NO: 746678 - DNA, 33 bp, Homo sapien
caggctaaggaggagatgcactgaatgccatgg

SEQ ID NO: 746679 - DNA, 33 bp, Homo sapien
ttatttagattttgcaaggtagaaacttaggtc

SEQ ID NO: 746680 - DNA, 33 bp, Homo sapien
ttatttagattttgcatggtagaaacttaggtc

SEQ ID NO: 746681 - DNA, 33 bp, Homo sapien
atcctggccattttagaagataattttatgaca

SEQ ID NO: 746682 - DNA, 33 bp, Homo sapien
atcctggccattttaggagataattttatgaca

SEQ ID NO: 746683 - DNA, 33 bp, Homo sapien
atctttaactctcttacgggtgaaaagaaggtt

SEQ ID NO: 746684 - DNA, 33 bp, Homo sapien
atctttaactctcttatgggtgaaaagaaggtt

SEQ ID NO: 746685 - DNA, 33 bp, Homo sapien
cttctgacagcactaaatgaagatttttcagat

SEQ ID NO: 746686 - DNA, 33 bp, Homo sapien
cttctgacagcactaagtgaagatttttcagat

SEQ ID NO: 746687 - DNA, 33 bp, Homo sapien
gaattactgatttagaagcatggaaggtaagga

SEQ ID NO: 746688 - DNA, 33 bp, Homo sapien
gaattactgatttagaggcatggaaggtaagga

SEQ ID NO: 746689 - DNA, 33 bp, Homo sapien
aaagttctgatatactaaatgagaaagcatcat

SEQ ID NO: 746690 - DNA, 33 bp, Homo sapien
aaagttctgatatactgaatgagaaagcatcat

SEQ ID NO: 746691 - DNA, 33 bp, Homo sapien
gatggtgccatggatacagttaacccttctcta

SEQ ID NO: 746692 - DNA, 33 bp, Homo sapien
gatggtgccatggatatagttaacccttctcta

SEQ ID NO: 746693 - DNA, 33 bp, Homo sapien
cagacaagatttttaaactgactaaattgcctt

SEQ ID NO: 746694 - DNA, 33 bp, Homo sapien
cagacaagatttttaagctgactaaattgcctt

SEQ ID NO: 746695 - DNA, 33 bp, Homo sapien
taggatactaagtctcaaccctaaatgttcaat

SEQ ID NO: 746696 - DNA, 33 bp, Homo sapien
taggatactaagtctcgaccctaaatgttcaat

SEQ ID NO: 746697 - DNA, 33 bp, Homo sapien
ttaactagttcgtataaaaaagacatcaagtaa

SEQ ID NO: 746698 - DNA, 33 bp, Homo sapien
ttaactagttcgtatacaaaagacatcaagtaa

SEQ ID NO: 746699 - DNA, 33 bp, Homo sapien
cctttactcattctaaaaggttgccccgggtcc

SEQ ID NO: 746700 - DNA, 33 bp, Homo sapien
cctttactcattctaagaggttgccccgggtcc

SEQ ID NO: 746701 - DNA, 33 bp, Homo sapien
ttctttgcctggatacaatttcagaacagagaa

SEQ ID NO: 746702 - DNA, 33 bp, Homo sapien
ttctttgcctggatacgatttcagaacagagaa

SEQ ID NO: 746703 - DNA, 33 bp, Homo sapien
attgctcttgttcgaacgcttctgacacaatca

SEQ ID NO: 746704 - DNA, 33 bp, Homo sapien
attgctcttgttcgaatgcttctgacacaatca

SEQ ID NO: 746705 - DNA, 33 bp, Homo sapien
taggactgaccctttgaactggacgtgtacttt

SEQ ID NO: 746706 - DNA, 33 bp, Homo sapien
taggactgaccctttggactggacgtgtacttt

SEQ ID NO: 746707 - DNA, 33 bp, Homo sapien
tccttgctaatactgaacagatccttttgtaga

SEQ ID NO: 746708 - DNA, 33 bp, Homo sapien
tccttgctaatactgagcagatccttttgtaga

SEQ ID NO: 746709 - DNA, 33 bp, Homo sapien
atattttacaattctacgcgtaattttagccat

SEQ ID NO: 746710 - DNA, 33 bp, Homo sapien
atattttacaattctatgcgtaattttagccat

SEQ ID NO: 746711 - DNA, 33 bp, Homo sapien
tcaacaagtggcaaaaacaacaagtggcagaat

SEQ ID NO: 746712 - DNA, 33 bp, Homo sapien
tcaacaagtggcaaaatcaacaagtggcagaat

SEQ ID NO: 746713 - DNA, 33 bp, Homo sapien
ctgtgccataaaccacactggaattgttaacag

SEQ ID NO: 746714 - DNA, 33 bp, Homo sapien
ctgtgccataaaccacgctggaattgttaacag

SEQ ID NO: 746715 - DNA, 33 bp, Homo sapien
gagagtggccaaaaacaatacttgtggtgattg

SEQ ID NO: 746716 - DNA, 33 bp, Homo sapien
gagagtggccaaaaactatacttgtggtgattg

SEQ ID NO: 746717 - DNA, 33 bp, Homo sapien
agtcattatctgtgacccaagaatggagttata

SEQ ID NO: 746718 - DNA, 33 bp, Homo sapien
agtcattatctgtgactcaagaatggagttata

SEQ ID NO: 746719 - DNA, 33 bp, Homo sapien
gtgcatatatttgagcaacagggatttctattg

SEQ ID NO: 746720 - DNA, 33 bp, Homo sapien
gtgcatatatttgagccacagggatttctattg

SEQ ID NO: 746721 - DNA, 33 bp, Homo sapien
aaccagctgaagacgaggctgaatagggcagtc

SEQ ID NO: 746722 - DNA, 33 bp, Homo sapien
aaccagctgaagacgatgctgaatagggcagtc

SEQ ID NO: 746723 - DNA, 33 bp, Homo sapien
caggaagggctggaaaacaaaggtcagtcatgt

SEQ ID NO: 746724 - DNA, 33 bp, Homo sapien
caggaagggctggaaaccaaaggtcagtcatgt

SEQ ID NO: 746725 - DNA, 33 bp, Homo sapien
ttgggtccttattgcagtaaacacacgtatgtt

SEQ ID NO: 746726 - DNA, 33 bp, Homo sapien
ttgggtccttattgcattaaacacacgtatgtt

SEQ ID NO: 746727 - DNA, 33 bp, Homo sapien
cccatctgattgcagaacatttccaagtaaatt

SEQ ID NO: 746728 - DNA, 33 bp, Homo sapien
cccatctgattgcagaccatttccaagtaaatt

SEQ ID NO: 746729 - DNA, 33 bp, Homo sapien
atattataaactccaaacaagcactcagacagt

SEQ ID NO: 746730 - DNA, 33 bp, Homo sapien
atattataaactccaagcaagcactcagacagt

SEQ ID NO: 746731 - DNA, 33 bp, Homo sapien
gtggcctgcagttgagaaccaatatgctttgtt

SEQ ID NO: 746732 - DNA, 33 bp, Homo sapien
gtggcctgcagttgagtaccaatatgctttgtt

SEQ ID NO: 746733 - DNA, 33 bp, Homo sapien
aattaatggaccctaaaaagagaatgcactgaa

SEQ ID NO: 746734 - DNA, 33 bp, Homo sapien
aattaatggaccctaagaagagaatgcactgaa

SEQ ID NO: 746735 - DNA, 33 bp, Homo sapien
tgaacttaggaaaaacccagtcatgcatcccac

SEQ ID NO: 746736 - DNA, 33 bp, Homo sapien
tgaacttaggaaaaacgcagtcatgcatcccac

SEQ ID NO: 746737 - DNA, 33 bp, Homo sapien
gctataataacccaacaattcctacaaactact

SEQ ID NO: 746738 - DNA, 33 bp, Homo sapien
gctataataacccaacgattcctacaaactact

SEQ ID NO: 746739 - DNA, 33 bp, Homo sapien
gactctgcagtgggtacgacaaacatcctcata

SEQ ID NO: 746740 - DNA, 33 bp, Homo sapien
gactctgcagtgggtatgacaaacatcctcata

SEQ ID NO: 746741 - DNA, 33 bp, Homo sapien
atgccactaccttaaacagcaagtaatatggac

SEQ ID NO: 746742 - DNA, 33 bp, Homo sapien
atgccactaccttaaatagcaagtaatatggac

SEQ ID NO: 746743 - DNA, 33 bp, Homo sapien
gctccatattgtcaacaaaagggaaaaagctga

SEQ ID NO: 746744 - DNA, 33 bp, Homo sapien
gctccatattgtcaacgaaagggaaaaagctga

SEQ ID NO: 746745 - DNA, 33 bp, Homo sapien
catccatgtttgaaaaatttatcctgccatctg

SEQ ID NO: 746746 - DNA, 33 bp, Homo sapien
catccatgtttgaaaattttatcctgccatctg

SEQ ID NO: 746747 - DNA, 33 bp, Homo sapien
gattcacttacttcccaccagatacctcctacc

SEQ ID NO: 746748 - DNA, 33 bp, Homo sapien
gattcacttacttcccgccagatacctcctacc

SEQ ID NO: 746749 - DNA, 33 bp, Homo sapien
agtactctcctgcacccgactgagtcactggtt

SEQ ID NO: 746750 - DNA, 33 bp, Homo sapien
agtactctcctgcacctgactgagtcactggtt

SEQ ID NO: 746751 - DNA, 33 bp, Homo sapien
gtatgctagtttctcccctcaaaatcccatcca

SEQ ID NO: 746752 - DNA, 33 bp, Homo sapien
gtatgctagtttctcctctcaaaatcccatcca

SEQ ID NO: 746753 - DNA, 33 bp, Homo sapien
tggagatattttagaacgaccatgtctccagta

SEQ ID NO: 746754 - DNA, 33 bp, Homo sapien
tggagatattttagaaggaccatgtctccagta

SEQ ID NO: 746755 - DNA, 33 bp, Homo sapien
gagaggtagaagaggcaaagtaaagatatctgc

SEQ ID NO: 746756 - DNA, 33 bp, Homo sapien
gagaggtagaagaggcgaagtaaagatatctgc

SEQ ID NO: 746757 - DNA, 33 bp, Homo sapien
gccaaggtacttctgaggtgaaaagtgaaagtt

SEQ ID NO: 746758 - DNA, 33 bp, Homo sapien
gccaaggtacttctgatgtgaaaagtgaaagtt

SEQ ID NO: 746759 - DNA, 33 bp, Homo sapien
cattctgtgatatctcaaaactgtaattgggca

SEQ ID NO: 746760 - DNA, 33 bp, Homo sapien
cattctgtgatatctcgaaactgtaattgggca

SEQ ID NO: 746761 - DNA, 33 bp, Homo sapien
aatgccattatgtgccagagatcttagctctta

SEQ ID NO: 746762 - DNA, 33 bp, Homo sapien
aatgccattatgtgccggagatcttagctctta

SEQ ID NO: 746763 - DNA, 33 bp, Homo sapien
tatttcattcctaccaatctttacagttctgta

SEQ ID NO: 746764 - DNA, 33 bp, Homo sapien
tatttcattcctaccagtctttacagttctgta

SEQ ID NO: 746765 - DNA, 33 bp, Homo sapien
aaaaacaatagtggcaacttaaacacacatgag

SEQ ID NO: 746766 - DNA, 33 bp, Homo sapien
aaaaacaatagtggcagcttaaacacacatgag

SEQ ID NO: 746767 - DNA, 33 bp, Homo sapien
gctgaaatgtggtaaaagtgtgtcgtatacaaa

SEQ ID NO: 746768 - DNA, 33 bp, Homo sapien
gctgaaatgtggtaaatgtgtgtcgtatacaaa

SEQ ID NO: 746769 - DNA, 33 bp, Homo sapien
atactgaaatcataacaaagccaatacaggtgg

SEQ ID NO: 746770 - DNA, 33 bp, Homo sapien
atactgaaatcataacgaagccaatacaggtgg

SEQ ID NO: 746771 - DNA, 33 bp, Homo sapien
gaagtacaagattggaagtaaattggaagattg

SEQ ID NO: 746772 - DNA, 33 bp, Homo sapien
gaagtacaagattggaggtaaattggaagattg

SEQ ID NO: 746773 - DNA, 33 bp, Homo sapien
aaagtcactcctaaaaacatatatcactcaatg

SEQ ID NO: 746774 - DNA, 33 bp, Homo sapien
aaagtcactcctaaaagcatatatcactcaatg

SEQ ID NO: 746775 - DNA, 33 bp, Homo sapien
gcactgaactcaaaaaagtaggtataaaacact

SEQ ID NO: 746776 - DNA, 33 bp, Homo sapien
gcactgaactcaaaaaggtaggtataaaacact

SEQ ID NO: 746777 - DNA, 33 bp, Homo sapien
ggagcagtgagggtaactctagatcactactgt

SEQ ID NO: 746778 - DNA, 33 bp, Homo sapien
ggagcagtgagggtaagtctagatcactactgt

SEQ ID NO: 746779 - DNA, 33 bp, Homo sapien
tgctaagatgtttctcactgtaagtcatttttg

SEQ ID NO: 746780 - DNA, 33 bp, Homo sapien
tgctaagatgtttctcgctgtaagtcatttttg

SEQ ID NO: 746781 - DNA, 33 bp, Homo sapien
ctctgtcaaaactcccacatcatatatacacat

SEQ ID NO: 746782 - DNA, 33 bp, Homo sapien
ctctgtcaaaactcccgcatcatatatacacat

SEQ ID NO: 746783 - DNA, 33 bp, Homo sapien
atgtgtcccgtaccataactactccttgtcgtg

SEQ ID NO: 746784 - DNA, 33 bp, Homo sapien
atgtgtcccgtaccatgactactccttgtcgtg

SEQ ID NO: 746785 - DNA, 33 bp, Homo sapien
cttatgaaggctcccacaccaggtaaaagtggt

SEQ ID NO: 746786 - DNA, 33 bp, Homo sapien
cttatgaaggctcccataccaggtaaaagtggt

SEQ ID NO: 746787 - DNA, 33 bp, Homo sapien
cctggtggagatgtccagactaatgtcactaat

SEQ ID NO: 746788 - DNA, 33 bp, Homo sapien
cctggtggagatgtccggactaatgtcactaat

SEQ ID NO: 746789 - DNA, 33 bp, Homo sapien
aataatgtcagatcaaataagtgatgttaatgc

SEQ ID NO: 746790 - DNA, 33 bp, Homo sapien
aataatgtcagatcaagtaagtgatgttaatgc

SEQ ID NO: 746791 - DNA, 33 bp, Homo sapien
aaaaagatagatagcaaccttatgtcttcaagg

SEQ ID NO: 746792 - DNA, 33 bp, Homo sapien
aaaaagatagatagcagccttatgtcttcaagg

SEQ ID NO: 746793 - DNA, 33 bp, Homo sapien
acataaaattcctacacctgcctataagcactc

SEQ ID NO: 746794 - DNA, 33 bp, Homo sapien
acataaaattcctacatctgcctataagcactc

SEQ ID NO: 746795 - DNA, 33 bp, Homo sapien
gcttgttatatcacccagattgtcacctcacgg

SEQ ID NO: 746796 - DNA, 33 bp, Homo sapien
gcttgttatatcacccggattgtcacctcacgg

SEQ ID NO: 746797 - DNA, 33 bp, Homo sapien
actctgtcatggtgagcagacaggacgatgact

SEQ ID NO: 746798 - DNA, 33 bp, Homo sapien
actctgtcatggtgagtagacaggacgatgact

SEQ ID NO: 746799 - DNA, 33 bp, Homo sapien
agatgcgtagcttgcacgtacagtttcttttct

SEQ ID NO: 746800 - DNA, 33 bp, Homo sapien
agatgcgtagcttgcatgtacagtttcttttct

SEQ ID NO: 746801 - DNA, 33 bp, Homo sapien
ggtctcggctggaatcaaacacctaaggacaca

SEQ ID NO: 746802 - DNA, 33 bp, Homo sapien
ggtctcggctggaatcgaacacctaaggacaca

SEQ ID NO: 746803 - DNA, 33 bp, Homo sapien
atgctctgctatgtgacgcttaagatactggga

SEQ ID NO: 746804 - DNA, 33 bp, Homo sapien
atgctctgctatgtgatgcttaagatactggga

SEQ ID NO: 746805 - DNA, 33 bp, Homo sapien
tgagaactgaaaagaacatggctgtcttagttt

SEQ ID NO: 746806 - DNA, 33 bp, Homo sapien
tgagaactgaaaagaatatggctgtcttagttt

SEQ ID NO: 746807 - DNA, 33 bp, Homo sapien
tcctacagctgcacataactgaattctgccggc

SEQ ID NO: 746808 - DNA, 33 bp, Homo sapien
tcctacagctgcacatgactgaattctgccggc

SEQ ID NO: 746809 - DNA, 33 bp, Homo sapien
gtcattgggcctctccacaatttagctttgtcc

SEQ ID NO: 746810 - DNA, 33 bp, Homo sapien
gtcattgggcctctccgcaatttagctttgtcc

SEQ ID NO: 746811 - DNA, 33 bp, Homo sapien
cctaccactcaaagaactaaatcagcttaaaac

SEQ ID NO: 746812 - DNA, 33 bp, Homo sapien
cctaccactcaaagaattaaatcagcttaaaac

SEQ ID NO: 746813 - DNA, 33 bp, Homo sapien
caggcgatattctcacccctttgtcacataatc

SEQ ID NO: 746814 - DNA, 33 bp, Homo sapien
caggcgatattctcactcctttgtcacataatc

SEQ ID NO: 746815 - DNA, 33 bp, Homo sapien
cgctggaatcacacttcaaaacctccttataga

SEQ ID NO: 746816 - DNA, 33 bp, Homo sapien
cgctggaatcacactttaaaacctccttataga

SEQ ID NO: 746817 - DNA, 33 bp, Homo sapien
atgtagtgaatgcccaatagttatttctattat

SEQ ID NO: 746818 - DNA, 33 bp, Homo sapien
atgtagtgaatgcccagtagttatttctattat

SEQ ID NO: 746819 - DNA, 33 bp, Homo sapien
ttatggtccgagaaatcaatcttgttctatgcc

SEQ ID NO: 746820 - DNA, 33 bp, Homo sapien
ttatggtccgagaaatgaatcttgttctatgcc

SEQ ID NO: 746821 - DNA, 33 bp, Homo sapien
taacctaagagccggcaccaatacacaaagtag

SEQ ID NO: 746822 - DNA, 33 bp, Homo sapien
taacctaagagccggcgccaatacacaaagtag

SEQ ID NO: 746823 - DNA, 33 bp, Homo sapien
aattcctgtttataataatgaggacacaaggtt

SEQ ID NO: 746824 - DNA, 33 bp, Homo sapien
aattcctgtttataatgatgaggacacaaggtt

SEQ ID NO: 746825 - DNA, 33 bp, Homo sapien
aaatgctctatgaaaccgtgaaaagacatgaag

SEQ ID NO: 746826 - DNA, 33 bp, Homo sapien
aaatgctctatgaaactgtgaaaagacatgaag

SEQ ID NO: 746827 - DNA, 33 bp, Homo sapien
ttccgcagccactggaatactactaagaacttt

SEQ ID NO: 746828 - DNA, 33 bp, Homo sapien
ttccgcagccactggactactactaagaacttt

SEQ ID NO: 746829 - DNA, 33 bp, Homo sapien
gtaccatgtccatttacgcatttacctactgaa

SEQ ID NO: 746830 - DNA, 33 bp, Homo sapien
gtaccatgtccatttatgcatttacctactgaa

SEQ ID NO: 746831 - DNA, 33 bp, Homo sapien
ctttcctgtggttcaaatgagagaatgaatcag

SEQ ID NO: 746832 - DNA, 33 bp, Homo sapien
ctttcctgtggttcaagtgagagaatgaatcag

SEQ ID NO: 746833 - DNA, 33 bp, Homo sapien
aaggcaaggtttgctgaaaataactatgtggtt

SEQ ID NO: 746834 - DNA, 33 bp, Homo sapien
aaggcaaggtttgctggaaataactatgtggtt

SEQ ID NO: 746835 - DNA, 33 bp, Homo sapien
tgtggaagaattttaaagcaattcacatacagg

SEQ ID NO: 746836 - DNA, 33 bp, Homo sapien
tgtggaagaattttaaggcaattcacatacagg

SEQ ID NO: 746837 - DNA, 33 bp, Homo sapien
acatatcagaaaatcaggtttaaatatctacac

SEQ ID NO: 746838 - DNA, 33 bp, Homo sapien
acatatcagaaaatcatgtttaaatatctacac

SEQ ID NO: 746839 - DNA, 33 bp, Homo sapien
aaaatttatctgaaatcatatctctagtgtccc

SEQ ID NO: 746840 - DNA, 33 bp, Homo sapien
aaaatttatctgaaatgatatctctagtgtccc

SEQ ID NO: 746841 - DNA, 33 bp, Homo sapien
atgtaggacaactcttcaaaatctattgttata

SEQ ID NO: 746842 - DNA, 33 bp, Homo sapien
atgtaggacaactctttaaaatctattgttata

SEQ ID NO: 746843 - DNA, 33 bp, Homo sapien
aattgcatttgtgttccagtcatgaatctttgc

SEQ ID NO: 746844 - DNA, 33 bp, Homo sapien
aattgcatttgtgttctagtcatgaatctttgc

SEQ ID NO: 746845 - DNA, 33 bp, Homo sapien
ggacccccaaataggacgctttgaatacacaaa

SEQ ID NO: 746846 - DNA, 33 bp, Homo sapien
ggacccccaaataggatgctttgaatacacaaa

SEQ ID NO: 746847 - DNA, 33 bp, Homo sapien
cataattaaaacaaaccgaggcagaggatttag

SEQ ID NO: 746848 - DNA, 33 bp, Homo sapien
cataattaaaacaaactgaggcagaggatttag

SEQ ID NO: 746849 - DNA, 33 bp, Homo sapien
ggttgacaagttgaaactgttgacaaggaaatc

SEQ ID NO: 746850 - DNA, 33 bp, Homo sapien
ggttgacaagttgaaattgttgacaaggaaatc

SEQ ID NO: 746851 - DNA, 33 bp, Homo sapien
tgcctctgcctcttatcagcctgaaactgacat

SEQ ID NO: 746852 - DNA, 33 bp, Homo sapien
tgcctctgcctcttattagcctgaaactgacat

SEQ ID NO: 746853 - DNA, 33 bp, Homo sapien
agagcttcgatttaataagaacaaacatgatat

SEQ ID NO: 746854 - DNA, 33 bp, Homo sapien
agagcttcgatttaatgagaacaaacatgatat

SEQ ID NO: 746855 - DNA, 33 bp, Homo sapien
cagatagtaccagacccgggttcaagttcttgt

SEQ ID NO: 746856 - DNA, 33 bp, Homo sapien
cagatagtaccagacctgggttcaagttcttgt

SEQ ID NO: 746857 - DNA, 33 bp, Homo sapien
tgctacttccattttggagtatcaagctctgta

SEQ ID NO: 746858 - DNA, 33 bp, Homo sapien
tgctacttccattttgtagtatcaagctctgta

SEQ ID NO: 746859 - DNA, 33 bp, Homo sapien
ttcttacaactttatcacattttaccaagaatt

SEQ ID NO: 746860 - DNA, 33 bp, Homo sapien
ttcttacaactttatctcattttaccaagaatt

SEQ ID NO: 746861 - DNA, 33 bp, Homo sapien
tgctagacttccattcaaaagggcagaaagctt

SEQ ID NO: 746862 - DNA, 33 bp, Homo sapien
tgctagacttccattcgaaagggcagaaagctt

SEQ ID NO: 746863 - DNA, 33 bp, Homo sapien
ccagcactctcaccccacttatcttctgttact

SEQ ID NO: 746864 - DNA, 33 bp, Homo sapien
ccagcactctcaccccgcttatcttctgttact

SEQ ID NO: 746865 - DNA, 33 bp, Homo sapien
taaaccaatgtgttataagaacagggttagcct

SEQ ID NO: 746866 - DNA, 33 bp, Homo sapien
taaaccaatgtgttattagaacagggttagcct

SEQ ID NO: 746867 - DNA, 33 bp, Homo sapien
atttcctgcttacacactagaacagcagctgta

SEQ ID NO: 746868 - DNA, 33 bp, Homo sapien
atttcctgcttacacattagaacagcagctgta

SEQ ID NO: 746869 - DNA, 33 bp, Homo sapien
tactttgattaccaacactactgaaaatatttg

SEQ ID NO: 746870 - DNA, 33 bp, Homo sapien
tactttgattaccaacgctactgaaaatatttg

SEQ ID NO: 746871 - DNA, 33 bp, Homo sapien
taaaagacttatacacaaaaacattattccaat

SEQ ID NO: 746872 - DNA, 33 bp, Homo sapien
taaaagacttatacacgaaaacattattccaat

SEQ ID NO: 746873 - DNA, 33 bp, Homo sapien
ctctgtatggttgcaccgctagtctcacggtgc

SEQ ID NO: 746874 - DNA, 33 bp, Homo sapien
ctctgtatggttgcactgctagtctcacggtgc

SEQ ID NO: 746875 - DNA, 33 bp, Homo sapien
aaagaggcagctgtcacgtttaaaggggaggag

SEQ ID NO: 746876 - DNA, 33 bp, Homo sapien
aaagaggcagctgtcatgtttaaaggggaggag

SEQ ID NO: 746877 - DNA, 33 bp, Homo sapien
aagattgtgagcataacactggtttacgtcagg

SEQ ID NO: 746878 - DNA, 33 bp, Homo sapien
aagattgtgagcataagactggtttacgtcagg

SEQ ID NO: 746879 - DNA, 33 bp, Homo sapien
ttatcctcattttataaccaaagaaataaaggc

SEQ ID NO: 746880 - DNA, 33 bp, Homo sapien
ttatcctcattttatacccaaagaaataaaggc

SEQ ID NO: 746881 - DNA, 33 bp, Homo sapien
cagttacagtgagtaccagatttccaatggaac

SEQ ID NO: 746882 - DNA, 33 bp, Homo sapien
cagttacagtgagtacgagatttccaatggaac

SEQ ID NO: 746883 - DNA, 33 bp, Homo sapien
ctgaatacaatgctcaaaactgttgcttcaatt

SEQ ID NO: 746884 - DNA, 33 bp, Homo sapien
ctgaatacaatgctcataactgttgcttcaatt

SEQ ID NO: 746885 - DNA, 33 bp, Homo sapien
ctgccaaggaagataacgtaagatgtaataaat

SEQ ID NO: 746886 - DNA, 33 bp, Homo sapien
ctgccaaggaagataatgtaagatgtaataaat

SEQ ID NO: 746887 - DNA, 33 bp, Homo sapien
gggacagggcctctaggcagggaacaatgagaa

SEQ ID NO: 746888 - DNA, 33 bp, Homo sapien
gggacagggcctctagtcagggaacaatgagaa

SEQ ID NO: 746889 - DNA, 33 bp, Homo sapien
atgtcttttggagagaactaattcacccataac

SEQ ID NO: 746890 - DNA, 33 bp, Homo sapien
atgtcttttggagagacctaattcacccataac

SEQ ID NO: 746891 - DNA, 33 bp, Homo sapien
agactacacccaaaaactggcatcttcaggagt

SEQ ID NO: 746892 - DNA, 33 bp, Homo sapien
agactacacccaaaaattggcatcttcaggagt

SEQ ID NO: 746893 - DNA, 33 bp, Homo sapien
cctagtgtctaacataacacccagacgaaagaa

SEQ ID NO: 746894 - DNA, 33 bp, Homo sapien
cctagtgtctaacatagcacccagacgaaagaa

SEQ ID NO: 746895 - DNA, 33 bp, Homo sapien
attgagtgagagtgaaatgaaattgagtaaggg

SEQ ID NO: 746896 - DNA, 33 bp, Homo sapien
attgagtgagagtgaagtgaaattgagtaaggg

SEQ ID NO: 746897 - DNA, 33 bp, Homo sapien
aactgagcctcctaaaacccagagtctcaaagt

SEQ ID NO: 746898 - DNA, 33 bp, Homo sapien
aactgagcctcctaaagcccagagtctcaaagt

SEQ ID NO: 746899 - DNA, 33 bp, Homo sapien
gagactgactgcagaaaaaagtagacagaccta

SEQ ID NO: 746900 - DNA, 33 bp, Homo sapien
gagactgactgcagaagaaagtagacagaccta

SEQ ID NO: 746901 - DNA, 33 bp, Homo sapien
gttgtgtaaattttccaaacaatgaaaggtgca

SEQ ID NO: 746902 - DNA, 33 bp, Homo sapien
gttgtgtaaattttccgaacaatgaaaggtgca

SEQ ID NO: 746903 - DNA, 33 bp, Homo sapien
tgtgttgaaaatcacacgaaggcaaggattctg

SEQ ID NO: 746904 - DNA, 33 bp, Homo sapien
tgtgttgaaaatcacatgaaggcaaggattctg

SEQ ID NO: 746905 - DNA, 33 bp, Homo sapien
cggaggaactgtcagaacaacagcagaagaaac

SEQ ID NO: 746906 - DNA, 33 bp, Homo sapien
cggaggaactgtcagagcaacagcagaagaaac

SEQ ID NO: 746907 - DNA, 33 bp, Homo sapien
tggatttgagagtcgacgagcgtattctgccgt

SEQ ID NO: 746908 - DNA, 33 bp, Homo sapien
tggatttgagagtcgatgagcgtattctgccgt

SEQ ID NO: 746909 - DNA, 33 bp, Homo sapien
tatcctgaagtcagatgagtggttctagtaaag

SEQ ID NO: 746910 - DNA, 33 bp, Homo sapien
tatcctgaagtcagattagtggttctagtaaag

SEQ ID NO: 746911 - DNA, 33 bp, Homo sapien
gtcaatgtcaggggcacaatgataggtgaggac

SEQ ID NO: 746912 - DNA, 33 bp, Homo sapien
gtcaatgtcaggggcagaatgataggtgaggac

SEQ ID NO: 746913 - DNA, 33 bp, Homo sapien
atgtatgttaatacacaattctgacaaagacgt

SEQ ID NO: 746914 - DNA, 33 bp, Homo sapien
atgtatgttaatacacgattctgacaaagacgt

SEQ ID NO: 746915 - DNA, 33 bp, Homo sapien
aaacaacgtaaaagcaagactattttcacattc

SEQ ID NO: 746916 - DNA, 33 bp, Homo sapien
aaacaacgtaaaagcaggactattttcacattc

SEQ ID NO: 746917 - DNA, 33 bp, Homo sapien
atctgtaataaaagccaattattgtagaaggca

SEQ ID NO: 746918 - DNA, 33 bp, Homo sapien
atctgtaataaaagcccattattgtagaaggca

SEQ ID NO: 746919 - DNA, 33 bp, Homo sapien
gagtattgagatctgcaataagttaaaaaccaa

SEQ ID NO: 746920 - DNA, 33 bp, Homo sapien
gagtattgagatctgcgataagttaaaaaccaa

SEQ ID NO: 746921 - DNA, 33 bp, Homo sapien
catgtcagcttaatcacaggaatttgtcatggt

SEQ ID NO: 746922 - DNA, 33 bp, Homo sapien
catgtcagcttaatcataggaatttgtcatggt

SEQ ID NO: 746923 - DNA, 33 bp, Homo sapien
ttaataaaatggttgaacttgtttcagaatctg

SEQ ID NO: 746924 - DNA, 33 bp, Homo sapien
ttaataaaatggttgatcttgtttcagaatctg

SEQ ID NO: 746925 - DNA, 33 bp, Homo sapien
tcaatatgctacttcacgcttcttaaatcagta

SEQ ID NO: 746926 - DNA, 33 bp, Homo sapien
tcaatatgctacttcatgcttcttaaatcagta

SEQ ID NO: 746927 - DNA, 33 bp, Homo sapien
acccctgctctagatacgagatagagagtccca

SEQ ID NO: 746928 - DNA, 33 bp, Homo sapien
acccctgctctagatatgagatagagagtccca

SEQ ID NO: 746929 - DNA, 33 bp, Homo sapien
tatgtcttgctcttgacctaatgctgagggaaa

SEQ ID NO: 746930 - DNA, 33 bp, Homo sapien
tatgtcttgctcttgatctaatgctgagggaaa

SEQ ID NO: 746931 - DNA, 33 bp, Homo sapien
accaaactggaaccacggacatccatgtaaaca

SEQ ID NO: 746932 - DNA, 33 bp, Homo sapien
accaaactggaaccactgacatccatgtaaaca

SEQ ID NO: 746933 - DNA, 33 bp, Homo sapien
atctcctgcctcttcaaagcaatacgttttcca

SEQ ID NO: 746934 - DNA, 33 bp, Homo sapien
atctcctgcctcttcacagcaatacgttttcca

SEQ ID NO: 746935 - DNA, 33 bp, Homo sapien
cacaaattacaggcaacttatgagagtgtgttt

SEQ ID NO: 746936 - DNA, 33 bp, Homo sapien
cacaaattacaggcaatttatgagagtgtgttt

SEQ ID NO: 746937 - DNA, 33 bp, Homo sapien
gtaaaggaactggatacggcaacttctggcaaa

SEQ ID NO: 746938 - DNA, 33 bp, Homo sapien
gtaaaggaactggatatggcaacttctggcaaa

SEQ ID NO: 746939 - DNA, 33 bp, Homo sapien
tccagtctgcaaggaacgagcaatactttgata

SEQ ID NO: 746940 - DNA, 33 bp, Homo sapien
tccagtctgcaaggaatgagcaatactttgata

SEQ ID NO: 746941 - DNA, 33 bp, Homo sapien
actgcagataatgagcaatgcaacagaaatgtc

SEQ ID NO: 746942 - DNA, 33 bp, Homo sapien
actgcagataatgagcgatgcaacagaaatgtc

SEQ ID NO: 746943 - DNA, 33 bp, Homo sapien
tcactctccctgtaacagaatttacccatgaaa

SEQ ID NO: 746944 - DNA, 33 bp, Homo sapien
tcactctccctgtaacggaatttacccatgaaa

SEQ ID NO: 746945 - DNA, 33 bp, Homo sapien
ctctttcaatttccacactagtcatttgagatt

SEQ ID NO: 746946 - DNA, 33 bp, Homo sapien
ctctttcaatttccactctagtcatttgagatt

SEQ ID NO: 746947 - DNA, 33 bp, Homo sapien
ttacagatgctctgtccagtagatgtgattatt

SEQ ID NO: 746948 - DNA, 33 bp, Homo sapien
ttacagatgctctgtctagtagatgtgattatt

SEQ ID NO: 746949 - DNA, 33 bp, Homo sapien
tgtgtacaggagctggaatttcatgagctattt

SEQ ID NO: 746950 - DNA, 33 bp, Homo sapien
tgtgtacaggagctgggatttcatgagctattt

SEQ ID NO: 746951 - DNA, 33 bp, Homo sapien
tgggttgtacttctccgctctttcaggaccatc

SEQ ID NO: 746952 - DNA, 33 bp, Homo sapien
tgggttgtacttctcctctctttcaggaccatc

SEQ ID NO: 746953 - DNA, 33 bp, Homo sapien
aatgtactttatacacggtctttactatggtgt

SEQ ID NO: 746954 - DNA, 33 bp, Homo sapien
aatgtactttatacactgtctttactatggtgt

SEQ ID NO: 746955 - DNA, 33 bp, Homo sapien
agataagatcggtatccaactgccattcaataa

SEQ ID NO: 746956 - DNA, 33 bp, Homo sapien
agataagatcggtatcgaactgccattcaataa

SEQ ID NO: 746957 - DNA, 33 bp, Homo sapien
gtcaagttcaggctgacgtatttggtcttgaaa

SEQ ID NO: 746958 - DNA, 33 bp, Homo sapien
gtcaagttcaggctgatgtatttggtcttgaaa

SEQ ID NO: 746959 - DNA, 33 bp, Homo sapien
caccagaggaagctgacaaattctgtttaaagc

SEQ ID NO: 746960 - DNA, 33 bp, Homo sapien
caccagaggaagctgataaattctgtttaaagc

SEQ ID NO: 746961 - DNA, 33 bp, Homo sapien
actggcagagaaacggcagctggtagagaaaag

SEQ ID NO: 746962 - DNA, 33 bp, Homo sapien
actggcagagaaacgggagctggtagagaaaag

SEQ ID NO: 746963 - DNA, 33 bp, Homo sapien
tatccatcctttacaccgtactgtagttgtgac

SEQ ID NO: 746964 - DNA, 33 bp, Homo sapien
tatccatcctttacactgtactgtagttgtgac

SEQ ID NO: 746965 - DNA, 33 bp, Homo sapien
ttctgagaaaccacgaactttcgtatccatcct

SEQ ID NO: 746966 - DNA, 33 bp, Homo sapien
ttctgagaaaccacgagctttcgtatccatcct

SEQ ID NO: 746967 - DNA, 33 bp, Homo sapien
gattccttgacccttaaaacaaatatttactga

SEQ ID NO: 746968 - DNA, 33 bp, Homo sapien
gattccttgacccttacaacaaatatttactga

SEQ ID NO: 746969 - DNA, 33 bp, Homo sapien
aagtgcttttacaaaacgtatgaactaactcct

SEQ ID NO: 746970 - DNA, 33 bp, Homo sapien
aagtgcttttacaaaatgtatgaactaactcct

SEQ ID NO: 746971 - DNA, 33 bp, Homo sapien
gactttcttctttgtaacagggaccatatctta

SEQ ID NO: 746972 - DNA, 33 bp, Homo sapien
gactttcttctttgtagcagggaccatatctta

SEQ ID NO: 746973 - DNA, 33 bp, Homo sapien
agggatgtaagcgtgagatctgagtataagatg

SEQ ID NO: 746974 - DNA, 33 bp, Homo sapien
agggatgtaagcgtgatatctgagtataagatg

SEQ ID NO: 746975 - DNA, 33 bp, Homo sapien
tggatccttttttccacgtgtatgcagcaagat

SEQ ID NO: 746976 - DNA, 33 bp, Homo sapien
tggatccttttttccaggtgtatgcagcaagat

SEQ ID NO: 746977 - DNA, 33 bp, Homo sapien
agatccagtctcaaacaaaacacatgcagaata

SEQ ID NO: 746978 - DNA, 33 bp, Homo sapien
agatccagtctcaaacgaaacacatgcagaata

SEQ ID NO: 746979 - DNA, 33 bp, Homo sapien
tatattcagagtagacaataaccacctccagct

SEQ ID NO: 746980 - DNA, 33 bp, Homo sapien
tatattcagagtagactataaccacctccagct

SEQ ID NO: 746981 - DNA, 33 bp, Homo sapien
gctctgtgtctgtttcgcctggcattttttgtt

SEQ ID NO: 746982 - DNA, 33 bp, Homo sapien
gctctgtgtctgtttctcctggcattttttgtt

SEQ ID NO: 746983 - DNA, 33 bp, Homo sapien
tgtaacagtgcattgaaatggaatcacttttcc

SEQ ID NO: 746984 - DNA, 33 bp, Homo sapien
tgtaacagtgcattgatatggaatcacttttcc

SEQ ID NO: 746985 - DNA, 33 bp, Homo sapien
ttctgatttttcaaaaaacaaactagtccacat

SEQ ID NO: 746986 - DNA, 33 bp, Homo sapien
ttctgatttttcaaaagacaaactagtccacat

SEQ ID NO: 746987 - DNA, 33 bp, Homo sapien
ctatttggtttagcaaactgtccaggggagaag

SEQ ID NO: 746988 - DNA, 33 bp, Homo sapien
ctatttggtttagcaagctgtccaggggagaag

SEQ ID NO: 746989 - DNA, 33 bp, Homo sapien
cccactggtgatcctgaaagatggtaaaaatga

SEQ ID NO: 746990 - DNA, 33 bp, Homo sapien
cccactggtgatcctggaagatggtaaaaatga

SEQ ID NO: 746991 - DNA, 33 bp, Homo sapien
atcttatttgtaatcacccacgcctataaccta

SEQ ID NO: 746992 - DNA, 33 bp, Homo sapien
atcttatttgtaatcatccacgcctataaccta

SEQ ID NO: 746993 - DNA, 33 bp, Homo sapien
gtttccttccccgatacgtagtgacagtggtct

SEQ ID NO: 746994 - DNA, 33 bp, Homo sapien
gtttccttccccgatatgtagtgacagtggtct

SEQ ID NO: 746995 - DNA, 33 bp, Homo sapien
atacacctctatatgaataatggaaatgcttac

SEQ ID NO: 746996 - DNA, 33 bp, Homo sapien
atacacctctatatgagtaatggaaatgcttac

SEQ ID NO: 746997 - DNA, 33 bp, Homo sapien
tgacagaaatagtgcaaccatatgctaaaatat

SEQ ID NO: 746998 - DNA, 33 bp, Homo sapien
tgacagaaatagtgcatccatatgctaaaatat

SEQ ID NO: 746999 - DNA, 33 bp, Homo sapien
attatatttaagtgcaaaagtggttcctccaac

SEQ ID NO: 747000 - DNA, 33 bp, Homo sapien
attatatttaagtgcagaagtggttcctccaac

SEQ ID NO: 747001 - DNA, 33 bp, Homo sapien
gtggtgctttcaaccaatatgcattaaatgtca

SEQ ID NO: 747002 - DNA, 33 bp, Homo sapien
gtggtgctttcaaccagtatgcattaaatgtca

SEQ ID NO: 747003 - DNA, 33 bp, Homo sapien
taattgctatgtaagcaaaagctattggtgttg

SEQ ID NO: 747004 - DNA, 33 bp, Homo sapien
taattgctatgtaagcgaaagctattggtgttg

SEQ ID NO: 747005 - DNA, 33 bp, Homo sapien
tagaagcctgacattacagaggaagctatagag

SEQ ID NO: 747006 - DNA, 33 bp, Homo sapien
tagaagcctgacattatagaggaagctatagag

SEQ ID NO: 747007 - DNA, 33 bp, Homo sapien
ttaatgtaaggaacaaatcacccatgtctttga

SEQ ID NO: 747008 - DNA, 33 bp, Homo sapien
ttaatgtaaggaacaagtcacccatgtctttga

SEQ ID NO: 747009 - DNA, 33 bp, Homo sapien
acattttgcagtgactcaagttttagatattgc

SEQ ID NO: 747010 - DNA, 33 bp, Homo sapien
acattttgcagtgactgaagttttagatattgc

SEQ ID NO: 747011 - DNA, 33 bp, Homo sapien
gggttttgtgaaaatcaagtagcaaagtgaaag

SEQ ID NO: 747012 - DNA, 33 bp, Homo sapien
gggttttgtgaaaatcgagtagcaaagtgaaag

SEQ ID NO: 747013 - DNA, 33 bp, Homo sapien
aatttttaaaagagcaataatgaccactaaaag

SEQ ID NO: 747014 - DNA, 33 bp, Homo sapien
aatttttaaaagagcagtaatgaccactaaaag

SEQ ID NO: 747015 - DNA, 33 bp, Homo sapien
ctgtggcttgcctctaacagggaatcaaacaat

SEQ ID NO: 747016 - DNA, 33 bp, Homo sapien
ctgtggcttgcctctatcagggaatcaaacaat

SEQ ID NO: 747017 - DNA, 33 bp, Homo sapien
gacagaggaaatgagtcaaagttgaatggggtt

SEQ ID NO: 747018 - DNA, 33 bp, Homo sapien
gacagaggaaatgagtgaaagttgaatggggtt

SEQ ID NO: 747019 - DNA, 33 bp, Homo sapien
ctgtggttcctccccaatgacaagcagttcatt

SEQ ID NO: 747020 - DNA, 33 bp, Homo sapien
ctgtggttcctccccagtgacaagcagttcatt

SEQ ID NO: 747021 - DNA, 33 bp, Homo sapien
cattatactaaaaggactaaatatgtctgtcat

SEQ ID NO: 747022 - DNA, 33 bp, Homo sapien
cattatactaaaaggattaaatatgtctgtcat

SEQ ID NO: 747023 - DNA, 33 bp, Homo sapien
aggtcaaggatgacaaagggatcatgtctttag

SEQ ID NO: 747024 - DNA, 33 bp, Homo sapien
aggtcaaggatgacaaggggatcatgtctttag

SEQ ID NO: 747025 - DNA, 33 bp, Homo sapien
aggattttatcaaccactgaatgtgggaatgaa

SEQ ID NO: 747026 - DNA, 33 bp, Homo sapien
aggattttatcaaccattgaatgtgggaatgaa

SEQ ID NO: 747027 - DNA, 33 bp, Homo sapien
taaaagccttcttttcgctttagtggtaccatc

SEQ ID NO: 747028 - DNA, 33 bp, Homo sapien
taaaagccttcttttctctttagtggtaccatc

SEQ ID NO: 747029 - DNA, 33 bp, Homo sapien
acagattcagcaaaaacaagagccaagcagtac

SEQ ID NO: 747030 - DNA, 33 bp, Homo sapien
acagattcagcaaaaataagagccaagcagtac

SEQ ID NO: 747031 - DNA, 33 bp, Homo sapien
tgattattaagtgagacgtaaaaggaaaatttc

SEQ ID NO: 747032 - DNA, 33 bp, Homo sapien
tgattattaagtgagaggtaaaaggaaaatttc

SEQ ID NO: 747033 - DNA, 33 bp, Homo sapien
tgtgaaaatgatcacacaggagtttgtatgttc

SEQ ID NO: 747034 - DNA, 33 bp, Homo sapien
tgtgaaaatgatcacataggagtttgtatgttc

SEQ ID NO: 747035 - DNA, 33 bp, Homo sapien
ttttagaccagctatcacaagttttataccaat

SEQ ID NO: 747036 - DNA, 33 bp, Homo sapien
ttttagaccagctatcgcaagttttataccaat

SEQ ID NO: 747037 - DNA, 33 bp, Homo sapien
ctagatatagagttaacgaattctgtggggacc

SEQ ID NO: 747038 - DNA, 33 bp, Homo sapien
ctagatatagagttaatgaattctgtggggacc

SEQ ID NO: 747039 - DNA, 33 bp, Homo sapien
aagtaacagaatagccacacaaaatgtagtgac

SEQ ID NO: 747040 - DNA, 33 bp, Homo sapien
aagtaacagaatagccgcacaaaatgtagtgac

SEQ ID NO: 747041 - DNA, 33 bp, Homo sapien
acaaccatatgccttagagttagggtgaatata

SEQ ID NO: 747042 - DNA, 33 bp, Homo sapien
acaaccatatgccttatagttagggtgaatata

SEQ ID NO: 747043 - DNA, 33 bp, Homo sapien
tgtggtttgatgtatagtacggagattcaataa

SEQ ID NO: 747044 - DNA, 33 bp, Homo sapien
tgtggtttgatgtatattacggagattcaataa

SEQ ID NO: 747045 - DNA, 33 bp, Homo sapien
aaatgtttatgttgaaatccaaactataaactg

SEQ ID NO: 747046 - DNA, 33 bp, Homo sapien
aaatgtttatgttgaattccaaactataaactg

SEQ ID NO: 747047 - DNA, 33 bp, Homo sapien
catgtctatcattccaactctttactgttagag

SEQ ID NO: 747048 - DNA, 33 bp, Homo sapien
catgtctatcattccatctctttactgttagag

SEQ ID NO: 747049 - DNA, 33 bp, Homo sapien
gcagttgaggtcataactaggaaattagaatta

SEQ ID NO: 747050 - DNA, 33 bp, Homo sapien
gcagttgaggtcataattaggaaattagaatta

SEQ ID NO: 747051 - DNA, 33 bp, Homo sapien
taaagtagtcctggaaatgtaagcctttcaaaa

SEQ ID NO: 747052 - DNA, 33 bp, Homo sapien
taaagtagtcctggaactgtaagcctttcaaaa

SEQ ID NO: 747053 - DNA, 33 bp, Homo sapien
acatattttaacaataagcttctaccaaagcag

SEQ ID NO: 747054 - DNA, 33 bp, Homo sapien
acatattttaacaatatgcttctaccaaagcag

SEQ ID NO: 747055 - DNA, 33 bp, Homo sapien
cctacctgcaggacacccgaaatcctagattag

SEQ ID NO: 747056 - DNA, 33 bp, Homo sapien
cctacctgcaggacactcgaaatcctagattag

SEQ ID NO: 747057 - DNA, 33 bp, Homo sapien
gatggggctacaaacaaatactgtaacaaagag

SEQ ID NO: 747058 - DNA, 33 bp, Homo sapien
gatggggctacaaacagatactgtaacaaagag

SEQ ID NO: 747059 - DNA, 33 bp, Homo sapien
cagagaagtagaagaacgaaaaggtgaaagatt

SEQ ID NO: 747060 - DNA, 33 bp, Homo sapien
cagagaagtagaagaaggaaaaggtgaaagatt

SEQ ID NO: 747061 - DNA, 33 bp, Homo sapien
tgttattagctgtagaaccaaccactgtatgat

SEQ ID NO: 747062 - DNA, 33 bp, Homo sapien
tgttattagctgtagagccaaccactgtatgat

SEQ ID NO: 747063 - DNA, 33 bp, Homo sapien
gaccggggtaagagacaattgtggaacattcca

SEQ ID NO: 747064 - DNA, 33 bp, Homo sapien
gaccggggtaagagaccattgtggaacattcca

SEQ ID NO: 747065 - DNA, 33 bp, Homo sapien
gccctttactcctcaaccagaaaaccaaactgc

SEQ ID NO: 747066 - DNA, 33 bp, Homo sapien
gccctttactcctcaatcagaaaaccaaactgc

SEQ ID NO: 747067 - DNA, 33 bp, Homo sapien
ccggaactgtccggaaactgccgcagtctctcg

SEQ ID NO: 747068 - DNA, 33 bp, Homo sapien
ccggaactgtccggaagctgccgcagtctctcg

SEQ ID NO: 747069 - DNA, 33 bp, Homo sapien
aagtgtactcagaagaataaatggtagaagagt

SEQ ID NO: 747070 - DNA, 33 bp, Homo sapien
aagtgtactcagaagactaaatggtagaagagt

SEQ ID NO: 747071 - DNA, 33 bp, Homo sapien
ccctaagagtcgaatacggcctaaaattagcct

SEQ ID NO: 747072 - DNA, 33 bp, Homo sapien
ccctaagagtcgaatatggcctaaaattagcct

SEQ ID NO: 747073 - DNA, 33 bp, Homo sapien
aaatgcaacaaccacactggaaaactgccaggt

SEQ ID NO: 747074 - DNA, 33 bp, Homo sapien
aaatgcaacaaccacattggaaaactgccaggt

SEQ ID NO: 747075 - DNA, 33 bp, Homo sapien
taaacctatttataagcacaacacgagaaatgc

SEQ ID NO: 747076 - DNA, 33 bp, Homo sapien
taaacctatttataagtacaacacgagaaatgc

SEQ ID NO: 747077 - DNA, 33 bp, Homo sapien
atgttagccttagataatacaatcacatcagtg

SEQ ID NO: 747078 - DNA, 33 bp, Homo sapien
atgttagccttagatagtacaatcacatcagtg

SEQ ID NO: 747079 - DNA, 33 bp, Homo sapien
ggtgatatacttccaaaggaactgaaatagtaa

SEQ ID NO: 747080 - DNA, 33 bp, Homo sapien
ggtgatatacttccaagggaactgaaatagtaa

SEQ ID NO: 747081 - DNA, 33 bp, Homo sapien
taacttttggaggaccacaatcatggttcagac

SEQ ID NO: 747082 - DNA, 33 bp, Homo sapien
taacttttggaggacctcaatcatggttcagac

SEQ ID NO: 747083 - DNA, 33 bp, Homo sapien
taaaggagtcagtttcaaaaattgagtctcatt

SEQ ID NO: 747084 - DNA, 33 bp, Homo sapien
taaaggagtcagtttcgaaaattgagtctcatt

SEQ ID NO: 747085 - DNA, 33 bp, Homo sapien
tgaacactctttttcaatctctcttgatagctc

SEQ ID NO: 747086 - DNA, 33 bp, Homo sapien
tgaacactctttttcagtctctcttgatagctc

SEQ ID NO: 747087 - DNA, 33 bp, Homo sapien
catccctaggtcattaagaaagattgctagaga

SEQ ID NO: 747088 - DNA, 33 bp, Homo sapien
catccctaggtcattaggaaagattgctagaga

SEQ ID NO: 747089 - DNA, 33 bp, Homo sapien
acatttgaaatgtctccatagttctggctcaaa

SEQ ID NO: 747090 - DNA, 33 bp, Homo sapien
acatttgaaatgtctctatagttctggctcaaa

SEQ ID NO: 747091 - DNA, 33 bp, Homo sapien
tgataagaagaggcttaaagaactgagcacaca

SEQ ID NO: 747092 - DNA, 33 bp, Homo sapien
tgataagaagaggcttcaagaactgagcacaca

SEQ ID NO: 747093 - DNA, 33 bp, Homo sapien
gcatccctgaatctaacttaatgctttccaaac

SEQ ID NO: 747094 - DNA, 33 bp, Homo sapien
gcatccctgaatctaagttaatgctttccaaac

SEQ ID NO: 747095 - DNA, 33 bp, Homo sapien
gctactgaattctttaaccctccattcccactg

SEQ ID NO: 747096 - DNA, 33 bp, Homo sapien
gctactgaattctttatccctccattcccactg

SEQ ID NO: 747097 - DNA, 33 bp, Homo sapien
gccagagcactttctgaattgttttgtgaggcc

SEQ ID NO: 747098 - DNA, 33 bp, Homo sapien
gccagagcactttctggattgttttgtgaggcc

SEQ ID NO: 747099 - DNA, 33 bp, Homo sapien
aagcaataacatgttacaggttctgcacatttt

SEQ ID NO: 747100 - DNA, 33 bp, Homo sapien
aagcaataacatgttagaggttctgcacatttt

SEQ ID NO: 747101 - DNA, 33 bp, Homo sapien
gctctgcctttgtagtaaatgggctattctcta

SEQ ID NO: 747102 - DNA, 33 bp, Homo sapien
gctctgcctttgtagtgaatgggctattctcta

SEQ ID NO: 747103 - DNA, 33 bp, Homo sapien
aacacaataggcaggcaaagcagaaatagagaa

SEQ ID NO: 747104 - DNA, 33 bp, Homo sapien
aacacaataggcaggcgaagcagaaatagagaa

SEQ ID NO: 747105 - DNA, 33 bp, Homo sapien
cctgaagcaaagacaaaactgtaacagacagtt

SEQ ID NO: 747106 - DNA, 33 bp, Homo sapien
cctgaagcaaagacaatactgtaacagacagtt

SEQ ID NO: 747107 - DNA, 33 bp, Homo sapien
ttcctctcatgcataaatctgcttgtaaccaat

SEQ ID NO: 747108 - DNA, 33 bp, Homo sapien
ttcctctcatgcataattctgcttgtaaccaat

SEQ ID NO: 747109 - DNA, 33 bp, Homo sapien
aggagaggccataccagatcagagagatgtgtt

SEQ ID NO: 747110 - DNA, 33 bp, Homo sapien
aggagaggccataccatatcagagagatgtgtt

SEQ ID NO: 747111 - DNA, 33 bp, Homo sapien
actgtttctacccagaccttaattcagctgttg

SEQ ID NO: 747112 - DNA, 33 bp, Homo sapien
actgtttctacccagagcttaattcagctgttg

SEQ ID NO: 747113 - DNA, 33 bp, Homo sapien
tgccaagagggtaagacgactttcttcaggtga

SEQ ID NO: 747114 - DNA, 33 bp, Homo sapien
tgccaagagggtaagatgactttcttcaggtga

SEQ ID NO: 747115 - DNA, 33 bp, Homo sapien
ctttattcaagaacaccgcaaagtctgctagaa

SEQ ID NO: 747116 - DNA, 33 bp, Homo sapien
ctttattcaagaacactgcaaagtctgctagaa

SEQ ID NO: 747117 - DNA, 33 bp, Homo sapien
gaagcattgatatacgcacatctattcccaggc

SEQ ID NO: 747118 - DNA, 33 bp, Homo sapien
gaagcattgatatacgtacatctattcccaggc

SEQ ID NO: 747119 - DNA, 33 bp, Homo sapien
acccacacgccactcaagcaactttccctatgt

SEQ ID NO: 747120 - DNA, 33 bp, Homo sapien
acccacacgccactcaggcaactttccctatgt

SEQ ID NO: 747121 - DNA, 33 bp, Homo sapien
aagaatagagagtcagaaaattgaaaataaata

SEQ ID NO: 747122 - DNA, 33 bp, Homo sapien
aagaatagagagtcaggaaattgaaaataaata

SEQ ID NO: 747123 - DNA, 33 bp, Homo sapien
caaacattagttcatacagaggtacagtgaaaa

SEQ ID NO: 747124 - DNA, 33 bp, Homo sapien
caaacattagttcatagagaggtacagtgaaaa

SEQ ID NO: 747125 - DNA, 33 bp, Homo sapien
ttgagttataagggaaaaatgatgatctcagtg

SEQ ID NO: 747126 - DNA, 33 bp, Homo sapien
ttgagttataagggaacaatgatgatctcagtg

SEQ ID NO: 747127 - DNA, 33 bp, Homo sapien
gctggaacccagtttaagtggcagttcattatg

SEQ ID NO: 747128 - DNA, 33 bp, Homo sapien
gctggaacccagtttaggtggcagttcattatg

SEQ ID NO: 747129 - DNA, 33 bp, Homo sapien
caactagacttccacaagaagacataaccaaca

SEQ ID NO: 747130 - DNA, 33 bp, Homo sapien
caactagacttccacatgaagacataaccaaca

SEQ ID NO: 747131 - DNA, 33 bp, Homo sapien
gttctcatcttgctggaattggatttaattttg

SEQ ID NO: 747132 - DNA, 33 bp, Homo sapien
gttctcatcttgctggcattggatttaattttg

SEQ ID NO: 747133 - DNA, 33 bp, Homo sapien
catcactcagaacaaacggtgatgatagcacag

SEQ ID NO: 747134 - DNA, 33 bp, Homo sapien
catcactcagaacaaatggtgatgatagcacag

SEQ ID NO: 747135 - DNA, 33 bp, Homo sapien
gaggtcaaaagctgtacagtgttaatgaacatg

SEQ ID NO: 747136 - DNA, 33 bp, Homo sapien
gaggtcaaaagctgtagagtgttaatgaacatg

SEQ ID NO: 747137 - DNA, 33 bp, Homo sapien
ggttagatatatgatacggtcagattaaaggtt

SEQ ID NO: 747138 - DNA, 33 bp, Homo sapien
ggttagatatatgatatggtcagattaaaggtt

SEQ ID NO: 747139 - DNA, 33 bp, Homo sapien
tgataggttactaaaaaacatgtggctggttct

SEQ ID NO: 747140 - DNA, 33 bp, Homo sapien
tgataggttactaaaagacatgtggctggttct

SEQ ID NO: 747141 - DNA, 33 bp, Homo sapien
actaggtatagcaaacaaatgcaagagagaggc

SEQ ID NO: 747142 - DNA, 33 bp, Homo sapien
actaggtatagcaaaccaatgcaagagagaggc

SEQ ID NO: 747143 - DNA, 33 bp, Homo sapien
aactcctactgaccacacttttccagctgagtc

SEQ ID NO: 747144 - DNA, 33 bp, Homo sapien
aactcctactgaccacgcttttccagctgagtc

SEQ ID NO: 747145 - DNA, 33 bp, Homo sapien
aatggtcttgaataccaagatgagctatgtgtg

SEQ ID NO: 747146 - DNA, 33 bp, Homo sapien
aatggtcttgaataccgagatgagctatgtgtg

SEQ ID NO: 747147 - DNA, 33 bp, Homo sapien
agtctctggcagctataagtctactttcaatgt

SEQ ID NO: 747148 - DNA, 33 bp, Homo sapien
agtctctggcagctatgagtctactttcaatgt

SEQ ID NO: 747149 - DNA, 33 bp, Homo sapien
actaacacattcttcagacagttatcaaccaaa

SEQ ID NO: 747150 - DNA, 33 bp, Homo sapien
actaacacattcttcatacagttatcaaccaaa

SEQ ID NO: 747151 - DNA, 33 bp, Homo sapien
atcacactgtggcatacagtttccttaggacaa

SEQ ID NO: 747152 - DNA, 33 bp, Homo sapien
atcacactgtggcatatagtttccttaggacaa

SEQ ID NO: 747153 - DNA, 33 bp, Homo sapien
attgccttggaaagtcaaattccaacagcagca

SEQ ID NO: 747154 - DNA, 33 bp, Homo sapien
attgccttggaaagtcgaattccaacagcagca

SEQ ID NO: 747155 - DNA, 33 bp, Homo sapien
tgtcttaacttcacccaacttcaggcatttata

SEQ ID NO: 747156 - DNA, 33 bp, Homo sapien
tgtcttaacttcacccgacttcaggcatttata

SEQ ID NO: 747157 - DNA, 33 bp, Homo sapien
ggtagtagggcaatggcattatggcagaaggtg

SEQ ID NO: 747158 - DNA, 33 bp, Homo sapien
ggtagtagggcaatggtattatggcagaaggtg

SEQ ID NO: 747159 - DNA, 33 bp, Homo sapien
gggctctcagcctttacgctgtgaaacaaagac

SEQ ID NO: 747160 - DNA, 33 bp, Homo sapien
gggctctcagcctttatgctgtgaaacaaagac

SEQ ID NO: 747161 - DNA, 33 bp, Homo sapien
acagaagccctttctaccttggaagtttgtgca

SEQ ID NO: 747162 - DNA, 33 bp, Homo sapien
acagaagccctttctagcttggaagtttgtgca

SEQ ID NO: 747163 - DNA, 33 bp, Homo sapien
gcttcaggttgtaaccacttttgatttcaacct

SEQ ID NO: 747164 - DNA, 33 bp, Homo sapien
gcttcaggttgtaaccgcttttgatttcaacct

SEQ ID NO: 747165 - DNA, 33 bp, Homo sapien
tgaaatttagattgggcaattttgtctggtgaa

SEQ ID NO: 747166 - DNA, 33 bp, Homo sapien
tgaaatttagattgggtaattttgtctggtgaa

SEQ ID NO: 747167 - DNA, 33 bp, Homo sapien
gggctttgtaactgacactagaggcctattgat

SEQ ID NO: 747168 - DNA, 33 bp, Homo sapien
gggctttgtaactgacgctagaggcctattgat

SEQ ID NO: 747169 - DNA, 33 bp, Homo sapien
tttagctgaagataagacaagtgcaagctaatg

SEQ ID NO: 747170 - DNA, 33 bp, Homo sapien
tttagctgaagataagccaagtgcaagctaatg

SEQ ID NO: 747171 - DNA, 33 bp, Homo sapien
gaatttttatgttaagactatgcacctctgaaa

SEQ ID NO: 747172 - DNA, 33 bp, Homo sapien
gaatttttatgttaaggctatgcacctctgaaa

SEQ ID NO: 747173 - DNA, 33 bp, Homo sapien
tagctacacaattttcaaagtattagaattcca

SEQ ID NO: 747174 - DNA, 33 bp, Homo sapien
tagctacacaattttcgaagtattagaattcca

SEQ ID NO: 747175 - DNA, 33 bp, Homo sapien
cggcattagagactaaaaagtaaacagtcaaac

SEQ ID NO: 747176 - DNA, 33 bp, Homo sapien
cggcattagagactaagaagtaaacagtcaaac

SEQ ID NO: 747177 - DNA, 33 bp, Homo sapien
gaaaattgtattttcagcccaacatagcttgca

SEQ ID NO: 747178 - DNA, 33 bp, Homo sapien
gaaaattgtattttcatcccaacatagcttgca

SEQ ID NO: 747179 - DNA, 33 bp, Homo sapien
ctttgacattcgcctacgtaccaatgatcccaa

SEQ ID NO: 747180 - DNA, 33 bp, Homo sapien
ctttgacattcgcctatgtaccaatgatcccaa

SEQ ID NO: 747181 - DNA, 33 bp, Homo sapien
tccgatgaagtattcacgacatcttgaagatga

SEQ ID NO: 747182 - DNA, 33 bp, Homo sapien
tccgatgaagtattcaggacatcttgaagatga

SEQ ID NO: 747183 - DNA, 33 bp, Homo sapien
atgaaatcagtcttcaatgaaatttataatagt

SEQ ID NO: 747184 - DNA, 33 bp, Homo sapien
atgaaatcagtcttcagtgaaatttataatagt

SEQ ID NO: 747185 - DNA, 33 bp, Homo sapien
tacctttgagcgcaaagtggattatactaagta

SEQ ID NO: 747186 - DNA, 33 bp, Homo sapien
tacctttgagcgcaaattggattatactaagta

SEQ ID NO: 747187 - DNA, 33 bp, Homo sapien
aagttagtttccgccaaattatctgtctatatg

SEQ ID NO: 747188 - DNA, 33 bp, Homo sapien
aagttagtttccgccagattatctgtctatatg

SEQ ID NO: 747189 - DNA, 33 bp, Homo sapien
tcctcttacgacacaaactgagctggtgccata

SEQ ID NO: 747190 - DNA, 33 bp, Homo sapien
tcctcttacgacacaagctgagctggtgccata

SEQ ID NO: 747191 - DNA, 33 bp, Homo sapien
acttcaagaatgtaaactgttcatacatacatt

SEQ ID NO: 747192 - DNA, 33 bp, Homo sapien
acttcaagaatgtaaagtgttcatacatacatt

SEQ ID NO: 747193 - DNA, 33 bp, Homo sapien
agcttggcaaaccacaatgaaaacttctaagcc

SEQ ID NO: 747194 - DNA, 33 bp, Homo sapien
agcttggcaaaccacagtgaaaacttctaagcc

SEQ ID NO: 747195 - DNA, 33 bp, Homo sapien
aaattgcttgattatacgacatttatggttcaa

SEQ ID NO: 747196 - DNA, 33 bp, Homo sapien
aaattgcttgattatatgacatttatggttcaa

SEQ ID NO: 747197 - DNA, 33 bp, Homo sapien
cattgcaactcatctacacctgtaactcttgtt

SEQ ID NO: 747198 - DNA, 33 bp, Homo sapien
cattgcaactcatctatacctgtaactcttgtt

SEQ ID NO: 747199 - DNA, 33 bp, Homo sapien
agtccttgtaacttccaattttatatctgattc

SEQ ID NO: 747200 - DNA, 33 bp, Homo sapien
agtccttgtaacttccgattttatatctgattc

SEQ ID NO: 747201 - DNA, 33 bp, Homo sapien
gacattctacaacatacctgaccagcgctcctc

SEQ ID NO: 747202 - DNA, 33 bp, Homo sapien
gacattctacaacatatctgaccagcgctcctc

SEQ ID NO: 747203 - DNA, 33 bp, Homo sapien
gaacgaaaggcaataacgaactaatcttctcaa

SEQ ID NO: 747204 - DNA, 33 bp, Homo sapien
gaacgaaaggcaataatgaactaatcttctcaa

SEQ ID NO: 747205 - DNA, 33 bp, Homo sapien
tattaggtgtaccagaatcagagaaattcagtg

SEQ ID NO: 747206 - DNA, 33 bp, Homo sapien
tattaggtgtaccagagtcagagaaattcagtg

SEQ ID NO: 747207 - DNA, 33 bp, Homo sapien
aagcaagtcgaatcctaaaagtaaatccttcac

SEQ ID NO: 747208 - DNA, 33 bp, Homo sapien
aagcaagtcgaatccttaaagtaaatccttcac

SEQ ID NO: 747209 - DNA, 33 bp, Homo sapien
tcaggaaacaaaaatccaactactcaccaaaaa

SEQ ID NO: 747210 - DNA, 33 bp, Homo sapien
tcaggaaacaaaaatctaactactcaccaaaaa

SEQ ID NO: 747211 - DNA, 33 bp, Homo sapien
cagtagtaacctttcacaaattttctgtacatt

SEQ ID NO: 747212 - DNA, 33 bp, Homo sapien
cagtagtaacctttcataaattttctgtacatt

SEQ ID NO: 747213 - DNA, 33 bp, Homo sapien
ctttttttccaacttaaaacaatgtgtatgtga

SEQ ID NO: 747214 - DNA, 33 bp, Homo sapien
ctttttttccaacttagaacaatgtgtatgtga

SEQ ID NO: 747215 - DNA, 33 bp, Homo sapien
acacttactaatatgcaatcaaactagtgtttc

SEQ ID NO: 747216 - DNA, 33 bp, Homo sapien
acacttactaatatgcgatcaaactagtgtttc

SEQ ID NO: 747217 - DNA, 33 bp, Homo sapien
cttttctccttgctataactctgcattcaataa

SEQ ID NO: 747218 - DNA, 33 bp, Homo sapien
cttttctccttgctattactctgcattcaataa

SEQ ID NO: 747219 - DNA, 33 bp, Homo sapien
gtggtagctgctataacagatataggtaagact

SEQ ID NO: 747220 - DNA, 33 bp, Homo sapien
gtggtagctgctataagagatataggtaagact

SEQ ID NO: 747221 - DNA, 33 bp, Homo sapien
taatcctcttcattaaaagttgctttgagcaga

SEQ ID NO: 747222 - DNA, 33 bp, Homo sapien
taatcctcttcattaacagttgctttgagcaga

SEQ ID NO: 747223 - DNA, 33 bp, Homo sapien
ttaactttgagtgaaagagttctcaagagtgga

SEQ ID NO: 747224 - DNA, 33 bp, Homo sapien
ttaactttgagtgaaatagttctcaagagtgga

SEQ ID NO: 747225 - DNA, 33 bp, Homo sapien
tgacccaattcccccaataaatcctctcatata

SEQ ID NO: 747226 - DNA, 33 bp, Homo sapien
tgacccaattcccccactaaatcctctcatata

SEQ ID NO: 747227 - DNA, 33 bp, Homo sapien
ttggctttactaatgcaaagttgtagggtatcc

SEQ ID NO: 747228 - DNA, 33 bp, Homo sapien
ttggctttactaatgcgaagttgtagggtatcc

SEQ ID NO: 747229 - DNA, 33 bp, Homo sapien
tagaacttcaagttcaatccatactgtgcactc

SEQ ID NO: 747230 - DNA, 33 bp, Homo sapien
tagaacttcaagttcagtccatactgtgcactc

SEQ ID NO: 747231 - DNA, 33 bp, Homo sapien
acaaataatatatttccaatccgggtttggctc

SEQ ID NO: 747232 - DNA, 33 bp, Homo sapien
acaaataatatatttctaatccgggtttggctc

SEQ ID NO: 747233 - DNA, 33 bp, Homo sapien
ccgcagccttcttccaacctagtcttgctccgc

SEQ ID NO: 747234 - DNA, 33 bp, Homo sapien
ccgcagccttcttccagcctagtcttgctccgc

SEQ ID NO: 747235 - DNA, 33 bp, Homo sapien
aattatctatttttcacgcaacacttagagcga

SEQ ID NO: 747236 - DNA, 33 bp, Homo sapien
aattatctatttttcatgcaacacttagagcga

SEQ ID NO: 747237 - DNA, 33 bp, Homo sapien
tagtggctaattaagaagggccaaccacaagac

SEQ ID NO: 747238 - DNA, 33 bp, Homo sapien
tagtggctaattaagatgggccaaccacaagac

SEQ ID NO: 747239 - DNA, 33 bp, Homo sapien
tttttaaagctcttgcaccctttcttcccagga

SEQ ID NO: 747240 - DNA, 33 bp, Homo sapien
tttttaaagctcttgcgccctttcttcccagga

SEQ ID NO: 747241 - DNA, 33 bp, Homo sapien
tctggctgttcttaaagtcccaggatactgcat

SEQ ID NO: 747242 - DNA, 33 bp, Homo sapien
tctggctgttcttaaattcccaggatactgcat

SEQ ID NO: 747243 - DNA, 33 bp, Homo sapien
cttgtacttaggaacactcttcaccctcaacct

SEQ ID NO: 747244 - DNA, 33 bp, Homo sapien
cttgtacttaggaacagtcttcaccctcaacct

SEQ ID NO: 747245 - DNA, 33 bp, Homo sapien
ttgtttcacaagtaaagtcctaagtgttcagct

SEQ ID NO: 747246 - DNA, 33 bp, Homo sapien
ttgtttcacaagtaaattcctaagtgttcagct

SEQ ID NO: 747247 - DNA, 33 bp, Homo sapien
ctcattatcagcataacgttttgccatatagga

SEQ ID NO: 747248 - DNA, 33 bp, Homo sapien
ctcattatcagcataatgttttgccatatagga

SEQ ID NO: 747249 - DNA, 33 bp, Homo sapien
agcgtgagaagagtggaaaaggaagttagtaag

SEQ ID NO: 747250 - DNA, 33 bp, Homo sapien
agcgtgagaagagtgggaaaggaagttagtaag

SEQ ID NO: 747251 - DNA, 33 bp, Homo sapien
gcataatagatcctcaatacagctttgttgtgt

SEQ ID NO: 747252 - DNA, 33 bp, Homo sapien
gcataatagatcctcagtacagctttgttgtgt

SEQ ID NO: 747253 - DNA, 33 bp, Homo sapien
tttggtgtgcattttcccttttgttcttctccc

SEQ ID NO: 747254 - DNA, 33 bp, Homo sapien
tttggtgtgcattttcgcttttgttcttctccc

SEQ ID NO: 747255 - DNA, 33 bp, Homo sapien
tgagattcagtgcacccctctcattcacagcct

SEQ ID NO: 747256 - DNA, 33 bp, Homo sapien
tgagattcagtgcacctctctcattcacagcct

SEQ ID NO: 747257 - DNA, 33 bp, Homo sapien
taatgtacattcttacacatgcatttttgtaca

SEQ ID NO: 747258 - DNA, 33 bp, Homo sapien
taatgtacattcttacgcatgcatttttgtaca

SEQ ID NO: 747259 - DNA, 33 bp, Homo sapien
ttccagactggtcatcaaaaacagacctttctt

SEQ ID NO: 747260 - DNA, 33 bp, Homo sapien
ttccagactggtcatccaaaacagacctttctt

SEQ ID NO: 747261 - DNA, 33 bp, Homo sapien
tggtaggttcttgaacagaggaataacatgaag

SEQ ID NO: 747262 - DNA, 33 bp, Homo sapien
tggtaggttcttgaacggaggaataacatgaag

SEQ ID NO: 747263 - DNA, 33 bp, Homo sapien
tctcagagctcttcatcactttctaattctaac

SEQ ID NO: 747264 - DNA, 33 bp, Homo sapien
tctcagagctcttcatgactttctaattctaac

SEQ ID NO: 747265 - DNA, 33 bp, Homo sapien
agccaggagttatttaagtatgtttgctctcaa

SEQ ID NO: 747266 - DNA, 33 bp, Homo sapien
agccaggagttatttaggtatgtttgctctcaa

SEQ ID NO: 747267 - DNA, 33 bp, Homo sapien
tggagcgcatcagaagaaatcatgttaatgtat

SEQ ID NO: 747268 - DNA, 33 bp, Homo sapien
tggagcgcatcagaaggaatcatgttaatgtat

SEQ ID NO: 747269 - DNA, 33 bp, Homo sapien
gtcaagtgccatactaaggatttttcgtataac

SEQ ID NO: 747270 - DNA, 33 bp, Homo sapien
gtcaagtgccatactagggatttttcgtataac

SEQ ID NO: 747271 - DNA, 33 bp, Homo sapien
gtttgtttacaacacaataataggtatacgcat

SEQ ID NO: 747272 - DNA, 33 bp, Homo sapien
gtttgtttacaacacagtaataggtatacgcat

SEQ ID NO: 747273 - DNA, 33 bp, Homo sapien
atataataacatgatacccagagctcaggggag

SEQ ID NO: 747274 - DNA, 33 bp, Homo sapien
atataataacatgatatccagagctcaggggag

SEQ ID NO: 747275 - DNA, 33 bp, Homo sapien
acatcgtgtttgaaagaagcttaccactaagaa

SEQ ID NO: 747276 - DNA, 33 bp, Homo sapien
acatcgtgtttgaaagcagcttaccactaagaa

SEQ ID NO: 747277 - DNA, 33 bp, Homo sapien
gggacttttattatcaaaccttccaatttaacc

SEQ ID NO: 747278 - DNA, 33 bp, Homo sapien
gggacttttattatcagaccttccaatttaacc

SEQ ID NO: 747279 - DNA, 33 bp, Homo sapien
acactcctcaacacaccctgttttatgtgagcc

SEQ ID NO: 747280 - DNA, 33 bp, Homo sapien
acactcctcaacacactctgttttatgtgagcc

SEQ ID NO: 747281 - DNA, 33 bp, Homo sapien
gtctccataggcactgaaaacttaccatgtttc

SEQ ID NO: 747282 - DNA, 33 bp, Homo sapien
gtctccataggcactggaaacttaccatgtttc

SEQ ID NO: 747283 - DNA, 33 bp, Homo sapien
tatgttggtgtgttaagtaccactgacagtcca

SEQ ID NO: 747284 - DNA, 33 bp, Homo sapien
tatgttggtgtgttaattaccactgacagtcca

SEQ ID NO: 747285 - DNA, 33 bp, Homo sapien
gatcagagtgtaataagtaagaacacaaaatct

SEQ ID NO: 747286 - DNA, 33 bp, Homo sapien
gatcagagtgtaataattaagaacacaaaatct

SEQ ID NO: 747287 - DNA, 33 bp, Homo sapien
tacattcacaagctaaccaatgatccatttcca

SEQ ID NO: 747288 - DNA, 33 bp, Homo sapien
tacattcacaagctaatcaatgatccatttcca

SEQ ID NO: 747289 - DNA, 33 bp, Homo sapien
gacacatagctaaagacggcctctctgtccctc

SEQ ID NO: 747290 - DNA, 33 bp, Homo sapien
gacacatagctaaagatggcctctctgtccctc

SEQ ID NO: 747291 - DNA, 33 bp, Homo sapien
gcattttttaagtttacccactctctcctttga

SEQ ID NO: 747292 - DNA, 33 bp, Homo sapien
gcattttttaagtttatccactctctcctttga

SEQ ID NO: 747293 - DNA, 33 bp, Homo sapien
aaatagctacaaattcacatgctttggcttttg

SEQ ID NO: 747294 - DNA, 33 bp, Homo sapien
aaatagctacaaattcgcatgctttggcttttg

SEQ ID NO: 747295 - DNA, 33 bp, Homo sapien
caccaactgtaaagaaacttttcgtggtctaac

SEQ ID NO: 747296 - DNA, 33 bp, Homo sapien
caccaactgtaaagaaccttttcgtggtctaac

SEQ ID NO: 747297 - DNA, 33 bp, Homo sapien
aatggggtttcagaaagcatatatctttgttct

SEQ ID NO: 747298 - DNA, 33 bp, Homo sapien
aatggggtttcagaaatcatatatctttgttct

SEQ ID NO: 747299 - DNA, 33 bp, Homo sapien
cacattaaggtattgaagtcttttgagaatgtc

SEQ ID NO: 747300 - DNA, 33 bp, Homo sapien
cacattaaggtattgatgtcttttgagaatgtc

SEQ ID NO: 747301 - DNA, 33 bp, Homo sapien
atatgatccagcttcacaaagagttgttcttag

SEQ ID NO: 747302 - DNA, 33 bp, Homo sapien
atatgatccagcttcataaagagttgttcttag

SEQ ID NO: 747303 - DNA, 33 bp, Homo sapien
ataggataggaaaacaaaacccacattcagtta

SEQ ID NO: 747304 - DNA, 33 bp, Homo sapien
ataggataggaaaacacaacccacattcagtta

SEQ ID NO: 747305 - DNA, 33 bp, Homo sapien
ttgaatacatggattacattcactctgtagcct

SEQ ID NO: 747306 - DNA, 33 bp, Homo sapien
ttgaatacatggattatattcactctgtagcct

SEQ ID NO: 747307 - DNA, 33 bp, Homo sapien
ctggccaaaaccttcaaaagccaagatggtgat

SEQ ID NO: 747308 - DNA, 33 bp, Homo sapien
ctggccaaaaccttcacaagccaagatggtgat

SEQ ID NO: 747309 - DNA, 33 bp, Homo sapien
ttggacgctgggcttcaccaaattacaaaaaga

SEQ ID NO: 747310 - DNA, 33 bp, Homo sapien
ttggacgctgggcttcgccaaattacaaaaaga

SEQ ID NO: 747311 - DNA, 33 bp, Homo sapien
agattgagatgagagacaaaacccatctgcttg

SEQ ID NO: 747312 - DNA, 33 bp, Homo sapien
agattgagatgagagataaaacccatctgcttg

SEQ ID NO: 747313 - DNA, 33 bp, Homo sapien
taaaaccatttgataaataaggactttgtttgt

SEQ ID NO: 747314 - DNA, 33 bp, Homo sapien
taaaaccatttgataagtaaggactttgtttgt

SEQ ID NO: 747315 - DNA, 33 bp, Homo sapien
ttaaatagggacaacaatagtatcttcctcaaa

SEQ ID NO: 747316 - DNA, 33 bp, Homo sapien
ttaaatagggacaacagtagtatcttcctcaaa

SEQ ID NO: 747317 - DNA, 33 bp, Homo sapien
tgagaaaaagacatgaacaagcctagattagat

SEQ ID NO: 747318 - DNA, 33 bp, Homo sapien
tgagaaaaagacatgagcaagcctagattagat

SEQ ID NO: 747319 - DNA, 33 bp, Homo sapien
ggtattgtcaccagaactggcagagtacagaag

SEQ ID NO: 747320 - DNA, 33 bp, Homo sapien
ggtattgtcaccagaattggcagagtacagaag

SEQ ID NO: 747321 - DNA, 33 bp, Homo sapien
gacaatgaattttacacacacaaagcaaataga

SEQ ID NO: 747322 - DNA, 33 bp, Homo sapien
gacaatgaattttacatacacaaagcaaataga

SEQ ID NO: 747323 - DNA, 33 bp, Homo sapien
ttccaaatgaagctcaaatcagacagagaaatg

SEQ ID NO: 747324 - DNA, 33 bp, Homo sapien
ttccaaatgaagctcagatcagacagagaaatg

SEQ ID NO: 747325 - DNA, 33 bp, Homo sapien
ttgcttatcaggaagacacatttagaaagacaa

SEQ ID NO: 747326 - DNA, 33 bp, Homo sapien
ttgcttatcaggaagagacatttagaaagacaa

SEQ ID NO: 747327 - DNA, 33 bp, Homo sapien
tcaaaaacaagcttcgaaacatctttatcactc

SEQ ID NO: 747328 - DNA, 33 bp, Homo sapien
tcaaaaacaagcttcgcaacatctttatcactc

SEQ ID NO: 747329 - DNA, 33 bp, Homo sapien
ggaaagggatcctcacagagaaccatgtcagcc

SEQ ID NO: 747330 - DNA, 33 bp, Homo sapien
ggaaagggatcctcaccgagaaccatgtcagcc

SEQ ID NO: 747331 - DNA, 33 bp, Homo sapien
tggatcttaattctgcactttatttcctcctcg

SEQ ID NO: 747332 - DNA, 33 bp, Homo sapien
tggatcttaattctgccctttatttcctcctcg

SEQ ID NO: 747333 - DNA, 33 bp, Homo sapien
ccggggaaaggagaaactgaatatacctgagtt

SEQ ID NO: 747334 - DNA, 33 bp, Homo sapien
ccggggaaaggagaaagtgaatatacctgagtt

SEQ ID NO: 747335 - DNA, 33 bp, Homo sapien
atgctattctgagaaacagctctgaaaaggctg

SEQ ID NO: 747336 - DNA, 33 bp, Homo sapien
atgctattctgagaaagagctctgaaaaggctg

SEQ ID NO: 747337 - DNA, 33 bp, Homo sapien
aggctcaaagagttcacgtttcttgcccaggat

SEQ ID NO: 747338 - DNA, 33 bp, Homo sapien
aggctcaaagagttcatgtttcttgcccaggat

SEQ ID NO: 747339 - DNA, 33 bp, Homo sapien
caaggatctagcaggaaagagaaaagcacacta

SEQ ID NO: 747340 - DNA, 33 bp, Homo sapien
caaggatctagcaggagagagaaaagcacacta

SEQ ID NO: 747341 - DNA, 33 bp, Homo sapien
ttcctattgttcctccaaatttctccataccgt

SEQ ID NO: 747342 - DNA, 33 bp, Homo sapien
ttcctattgttcctccgaatttctccataccgt

SEQ ID NO: 747343 - DNA, 33 bp, Homo sapien
tctgtagcagggaaacaaaagaaacccagctgt

SEQ ID NO: 747344 - DNA, 33 bp, Homo sapien
tctgtagcagggaaacgaaagaaacccagctgt

SEQ ID NO: 747345 - DNA, 33 bp, Homo sapien
ggctacagagaaaagagacatattaccgagtaa

SEQ ID NO: 747346 - DNA, 33 bp, Homo sapien
ggctacagagaaaagatacatattaccgagtaa

SEQ ID NO: 747347 - DNA, 33 bp, Homo sapien
ttgaccttggtaactacgtttgcctgtctccct

SEQ ID NO: 747348 - DNA, 33 bp, Homo sapien
ttgaccttggtaactatgtttgcctgtctccct

SEQ ID NO: 747349 - DNA, 33 bp, Homo sapien
ttcattagtcagcttaggccaatatcaccgtgc

SEQ ID NO: 747350 - DNA, 33 bp, Homo sapien
ttcattagtcagcttatgccaatatcaccgtgc

SEQ ID NO: 747351 - DNA, 33 bp, Homo sapien
ttcactagatttctggaataaattgattgacgt

SEQ ID NO: 747352 - DNA, 33 bp, Homo sapien
ttcactagatttctgggataaattgattgacgt

SEQ ID NO: 747353 - DNA, 33 bp, Homo sapien
agagacagaaaatgacggaagcaacatttaaag

SEQ ID NO: 747354 - DNA, 33 bp, Homo sapien
agagacagaaaatgactgaagcaacatttaaag

SEQ ID NO: 747355 - DNA, 33 bp, Homo sapien
ttaaatcttgtgaggcgccagtatactaagaat

SEQ ID NO: 747356 - DNA, 33 bp, Homo sapien
ttaaatcttgtgaggctccagtatactaagaat

SEQ ID NO: 747357 - DNA, 33 bp, Homo sapien
gatgatcagtggatgacgatttccataatcatt

SEQ ID NO: 747358 - DNA, 33 bp, Homo sapien
gatgatcagtggatgatgatttccataatcatt

SEQ ID NO: 747359 - DNA, 33 bp, Homo sapien
gtatcagctggagggaaaatcacaccaaatcac

SEQ ID NO: 747360 - DNA, 33 bp, Homo sapien
gtatcagctggagggacaatcacaccaaatcac

SEQ ID NO: 747361 - DNA, 33 bp, Homo sapien
atttgggctctctgcaatatacaaacaagtgag

SEQ ID NO: 747362 - DNA, 33 bp, Homo sapien
atttgggctctctgcagtatacaaacaagtgag

SEQ ID NO: 747363 - DNA, 33 bp, Homo sapien
tttgtaagtcttcatacaacctacctctccatt

SEQ ID NO: 747364 - DNA, 33 bp, Homo sapien
tttgtaagtcttcatataacctacctctccatt

SEQ ID NO: 747365 - DNA, 33 bp, Homo sapien
gcaaagtattttgaacagaattttgatgtcttt

SEQ ID NO: 747366 - DNA, 33 bp, Homo sapien
gcaaagtattttgaacggaattttgatgtcttt

SEQ ID NO: 747367 - DNA, 33 bp, Homo sapien
aatgctgactcatagaagaggtaaaactaaata

SEQ ID NO: 747368 - DNA, 33 bp, Homo sapien
aatgctgactcatagaggaggtaaaactaaata

SEQ ID NO: 747369 - DNA, 33 bp, Homo sapien
ctgctttgcttatacacaaccagtggccaagag

SEQ ID NO: 747370 - DNA, 33 bp, Homo sapien
ctgctttgcttatacataaccagtggccaagag

SEQ ID NO: 747371 - DNA, 33 bp, Homo sapien
agaagaaagagactcactgaaagtaattcacaa

SEQ ID NO: 747372 - DNA, 33 bp, Homo sapien
agaagaaagagactcagtgaaagtaattcacaa

SEQ ID NO: 747373 - DNA, 33 bp, Homo sapien
acaaagcattattccaagtcctgaaatatattc

SEQ ID NO: 747374 - DNA, 33 bp, Homo sapien
acaaagcattattccaggtcctgaaatatattc

SEQ ID NO: 747375 - DNA, 33 bp, Homo sapien
gggtaaaaaagcttatcactctgaccgaattgt

SEQ ID NO: 747376 - DNA, 33 bp, Homo sapien
gggtaaaaaagcttattactctgaccgaattgt

SEQ ID NO: 747377 - DNA, 33 bp, Homo sapien
gaaccttgcaactgaacacgcttccatttcttt

SEQ ID NO: 747378 - DNA, 33 bp, Homo sapien
gaaccttgcaactgaatacgcttccatttcttt

SEQ ID NO: 747379 - DNA, 33 bp, Homo sapien
ccgcgcctggccgagagtcaagattttaagacc

SEQ ID NO: 747380 - DNA, 33 bp, Homo sapien
ccgcgcctggccgagattcaagattttaagacc

SEQ ID NO: 747381 - DNA, 33 bp, Homo sapien
atgctgacttgcagcaaaccttctcaatgatca

SEQ ID NO: 747382 - DNA, 33 bp, Homo sapien
atgctgacttgcagcagaccttctcaatgatca

SEQ ID NO: 747383 - DNA, 33 bp, Homo sapien
tatattttttttggtacagaggtagaatatact

SEQ ID NO: 747384 - DNA, 33 bp, Homo sapien
tatattttttttggtatagaggtagaatatact

SEQ ID NO: 747385 - DNA, 33 bp, Homo sapien
taagaaaccagttcaacagctgatgcctttgac

SEQ ID NO: 747386 - DNA, 33 bp, Homo sapien
taagaaaccagttcaatagctgatgcctttgac

SEQ ID NO: 747387 - DNA, 33 bp, Homo sapien
gtttttgcagtaaatacggaagtggatatcaag

SEQ ID NO: 747388 - DNA, 33 bp, Homo sapien
gtttttgcagtaaatatggaagtggatatcaag

SEQ ID NO: 747389 - DNA, 33 bp, Homo sapien
tatacactgtattgggaagagtatttatgtaat

SEQ ID NO: 747390 - DNA, 33 bp, Homo sapien
tatacactgtattggggagagtatttatgtaat

SEQ ID NO: 747391 - DNA, 33 bp, Homo sapien
ttcttcattttggagacagtatccccggcgtat

SEQ ID NO: 747392 - DNA, 33 bp, Homo sapien
ttcttcattttggagagagtatccccggcgtat

SEQ ID NO: 747393 - DNA, 33 bp, Homo sapien
atctgataacatgacagctaaggctccttctag

SEQ ID NO: 747394 - DNA, 33 bp, Homo sapien
atctgataacatgacatctaaggctccttctag

SEQ ID NO: 747395 - DNA, 33 bp, Homo sapien
ggtgagtggagaataccgcttgatgagagaacc

SEQ ID NO: 747396 - DNA, 33 bp, Homo sapien
ggtgagtggagaatactgcttgatgagagaacc

SEQ ID NO: 747397 - DNA, 33 bp, Homo sapien
ggaattgctcatgaacagttacccatatataca

SEQ ID NO: 747398 - DNA, 33 bp, Homo sapien
ggaattgctcatgaacggttacccatatataca

SEQ ID NO: 747399 - DNA, 33 bp, Homo sapien
gttcttttctctttgcaactctgattttgagac

SEQ ID NO: 747400 - DNA, 33 bp, Homo sapien
gttcttttctctttgcgactctgattttgagac

SEQ ID NO: 747401 - DNA, 33 bp, Homo sapien
cacaataggtggtaaccgctatgattaatgtga

SEQ ID NO: 747402 - DNA, 33 bp, Homo sapien
cacaataggtggtaactgctatgattaatgtga

SEQ ID NO: 747403 - DNA, 33 bp, Homo sapien
ccaggctgtcctgctacatcgatggatacagca

SEQ ID NO: 747404 - DNA, 33 bp, Homo sapien
ccaggctgtcctgctagatcgatggatacagca

SEQ ID NO: 747405 - DNA, 33 bp, Homo sapien
tgagcttatatttccactcatggtttataaagc

SEQ ID NO: 747406 - DNA, 33 bp, Homo sapien
tgagcttatatttccagtcatggtttataaagc

SEQ ID NO: 747407 - DNA, 33 bp, Homo sapien
cagtatatcagcagacaggaaacatttatcatt

SEQ ID NO: 747408 - DNA, 33 bp, Homo sapien
cagtatatcagcagacgggaaacatttatcatt

SEQ ID NO: 747409 - DNA, 33 bp, Homo sapien
aaatgttacactaagaaccaaaacaggttagaa

SEQ ID NO: 747410 - DNA, 33 bp, Homo sapien
aaatgttacactaagacccaaaacaggttagaa

SEQ ID NO: 747411 - DNA, 33 bp, Homo sapien
gatttacactgatccactgagttccaggagtgt

SEQ ID NO: 747412 - DNA, 33 bp, Homo sapien
gatttacactgatccattgagttccaggagtgt

SEQ ID NO: 747413 - DNA, 33 bp, Homo sapien
gaagcagaaagacgaaagattaaatgcagagaa

SEQ ID NO: 747414 - DNA, 33 bp, Homo sapien
gaagcagaaagacgaaggattaaatgcagagaa

SEQ ID NO: 747415 - DNA, 33 bp, Homo sapien
gaattagtaaaggctcagagaatgaaataaata

SEQ ID NO: 747416 - DNA, 33 bp, Homo sapien
gaattagtaaaggctccgagaatgaaataaata

SEQ ID NO: 747417 - DNA, 33 bp, Homo sapien
ggatatgtgcaaagacaatgcttttcctcaact

SEQ ID NO: 747418 - DNA, 33 bp, Homo sapien
ggatatgtgcaaagaccatgcttttcctcaact

SEQ ID NO: 747419 - DNA, 33 bp, Homo sapien
ttggcctgggtcagaaataaaacaaaaactaaa

SEQ ID NO: 747420 - DNA, 33 bp, Homo sapien
ttggcctgggtcagaagtaaaacaaaaactaaa

SEQ ID NO: 747421 - DNA, 33 bp, Homo sapien
gtcacggatcaaaatacacctgagaaaaaataa

SEQ ID NO: 747422 - DNA, 33 bp, Homo sapien
gtcacggatcaaaatatacctgagaaaaaataa

SEQ ID NO: 747423 - DNA, 33 bp, Homo sapien
ggattatctcagcgacacattctatcagtcact

SEQ ID NO: 747424 - DNA, 33 bp, Homo sapien
ggattatctcagcgacccattctatcagtcact

SEQ ID NO: 747425 - DNA, 33 bp, Homo sapien
aaacttcctttattgcggcaagaacaggattta

SEQ ID NO: 747426 - DNA, 33 bp, Homo sapien
aaacttcctttattgctgcaagaacaggattta

SEQ ID NO: 747427 - DNA, 33 bp, Homo sapien
cttctgtgatgaagacccaacttcttagcatga

SEQ ID NO: 747428 - DNA, 33 bp, Homo sapien
cttctgtgatgaagactcaacttcttagcatga

SEQ ID NO: 747429 - DNA, 33 bp, Homo sapien
agttgtcaacaataacggaggattcaactatgt

SEQ ID NO: 747430 - DNA, 33 bp, Homo sapien
agttgtcaacaataactgaggattcaactatgt

SEQ ID NO: 747431 - DNA, 33 bp, Homo sapien
gagagattaactaagacgattttcttttgctat

SEQ ID NO: 747432 - DNA, 33 bp, Homo sapien
gagagattaactaagatgattttcttttgctat

SEQ ID NO: 747433 - DNA, 33 bp, Homo sapien
tagccttgcatatcacagtatccctttcatcta

SEQ ID NO: 747434 - DNA, 33 bp, Homo sapien
tagccttgcatatcactgtatccctttcatcta

SEQ ID NO: 747435 - DNA, 33 bp, Homo sapien
tcagtgtcgttacgtaggaatatgtcctatgct

SEQ ID NO: 747436 - DNA, 33 bp, Homo sapien
tcagtgtcgttacgtatgaatatgtcctatgct

SEQ ID NO: 747437 - DNA, 33 bp, Homo sapien
tgagcaaaatcacgcgaagtagaaaaaagtata

SEQ ID NO: 747438 - DNA, 33 bp, Homo sapien
tgagcaaaatcacgcgcagtagaaaaaagtata

SEQ ID NO: 747439 - DNA, 33 bp, Homo sapien
agatagtctatgctaactgagaggtgagttggc

SEQ ID NO: 747440 - DNA, 33 bp, Homo sapien
agatagtctatgctaattgagaggtgagttggc

SEQ ID NO: 747441 - DNA, 33 bp, Homo sapien
ctaaaagatgaaattcaaatccaactttctaga

SEQ ID NO: 747442 - DNA, 33 bp, Homo sapien
ctaaaagatgaaattcgaatccaactttctaga

SEQ ID NO: 747443 - DNA, 33 bp, Homo sapien
gtttctatattagctactaaagacgaactgctt

SEQ ID NO: 747444 - DNA, 33 bp, Homo sapien
gtttctatattagctattaaagacgaactgctt

SEQ ID NO: 747445 - DNA, 33 bp, Homo sapien
tatgtcctaaggtcacacagatattttaactaa

SEQ ID NO: 747446 - DNA, 33 bp, Homo sapien
tatgtcctaaggtcacgcagatattttaactaa

SEQ ID NO: 747447 - DNA, 33 bp, Homo sapien
tcaacagaatgtgggcactttgcattcctatgc

SEQ ID NO: 747448 - DNA, 33 bp, Homo sapien
tcaacagaatgtgggcgctttgcattcctatgc

SEQ ID NO: 747449 - DNA, 33 bp, Homo sapien
gaacaagacagtgaataaatcagatggactggg

SEQ ID NO: 747450 - DNA, 33 bp, Homo sapien
gaacaagacagtgaatcaatcagatggactggg

SEQ ID NO: 747451 - DNA, 33 bp, Homo sapien
ccagaggtgaaatgaacgatttggggcccagtg

SEQ ID NO: 747452 - DNA, 33 bp, Homo sapien
ccagaggtgaaatgaatgatttggggcccagtg

SEQ ID NO: 747453 - DNA, 33 bp, Homo sapien
aatcacgtatgtgcaacctcatctggtgaattt

SEQ ID NO: 747454 - DNA, 33 bp, Homo sapien
aatcacgtatgtgcaatctcatctggtgaattt

SEQ ID NO: 747455 - DNA, 33 bp, Homo sapien
tgagctattgagtatcaaaaattcagaggaaaa

SEQ ID NO: 747456 - DNA, 33 bp, Homo sapien
tgagctattgagtatcgaaaattcagaggaaaa

SEQ ID NO: 747457 - DNA, 33 bp, Homo sapien
attttctcccaatccagatcatcagactcagaa

SEQ ID NO: 747458 - DNA, 33 bp, Homo sapien
attttctcccaatccatatcatcagactcagaa

SEQ ID NO: 747459 - DNA, 33 bp, Homo sapien
tgtcaatgaatcaggaacatcagaactattttt

SEQ ID NO: 747460 - DNA, 33 bp, Homo sapien
tgtcaatgaatcaggagcatcagaactattttt

SEQ ID NO: 747461 - DNA, 33 bp, Homo sapien
gagagagactgaaaaactgtactgctcctgcca

SEQ ID NO: 747462 - DNA, 33 bp, Homo sapien
gagagagactgaaaaattgtactgctcctgcca

SEQ ID NO: 747463 - DNA, 33 bp, Homo sapien
aaatgattgattttcaagtagaagagtcttgac

SEQ ID NO: 747464 - DNA, 33 bp, Homo sapien
aaatgattgattttcaggtagaagagtcttgac

SEQ ID NO: 747465 - DNA, 33 bp, Homo sapien
gctaaaattgtttctgaatcacgtgtctgtgga

SEQ ID NO: 747466 - DNA, 33 bp, Homo sapien
gctaaaattgtttctggatcacgtgtctgtgga

SEQ ID NO: 747467 - DNA, 33 bp, Homo sapien
gacaatcaatcaatccactacataagggtgcca

SEQ ID NO: 747468 - DNA, 33 bp, Homo sapien
gacaatcaatcaatccgctacataagggtgcca

SEQ ID NO: 747469 - DNA, 33 bp, Homo sapien
ccgaagcccaacagtacgatttagagtaggagg

SEQ ID NO: 747470 - DNA, 33 bp, Homo sapien
ccgaagcccaacagtatgatttagagtaggagg

SEQ ID NO: 747471 - DNA, 33 bp, Homo sapien
aacgtgtctaggtgataaagttttgacaggaag

SEQ ID NO: 747472 - DNA, 33 bp, Homo sapien
aacgtgtctaggtgatgaagttttgacaggaag

SEQ ID NO: 747473 - DNA, 33 bp, Homo sapien
aagttaactgcagataataaagctggtataatt

SEQ ID NO: 747474 - DNA, 33 bp, Homo sapien
aagttaactgcagatactaaagctggtataatt

SEQ ID NO: 747475 - DNA, 33 bp, Homo sapien
tcaggcaagtctggctcagagtccagtaggttt

SEQ ID NO: 747476 - DNA, 33 bp, Homo sapien
tcaggcaagtctggcttagagtccagtaggttt

SEQ ID NO: 747477 - DNA, 33 bp, Homo sapien
ggaacttgcctgtataccactgttctcatgatg

SEQ ID NO: 747478 - DNA, 33 bp, Homo sapien
ggaacttgcctgtatatcactgttctcatgatg

SEQ ID NO: 747479 - DNA, 33 bp, Homo sapien
attgcttgcttgataactccatttttgaaaaag

SEQ ID NO: 747480 - DNA, 33 bp, Homo sapien
attgcttgcttgataagtccatttttgaaaaag

SEQ ID NO: 747481 - DNA, 33 bp, Homo sapien
ctaactatctatggtaaccctggaccaatgatt

SEQ ID NO: 747482 - DNA, 33 bp, Homo sapien
ctaactatctatggtagccctggaccaatgatt

SEQ ID NO: 747483 - DNA, 33 bp, Homo sapien
cagtgagaagcgtatacagtgtactcgaggtag

SEQ ID NO: 747484 - DNA, 33 bp, Homo sapien
cagtgagaagcgtatatagtgtactcgaggtag

SEQ ID NO: 747485 - DNA, 33 bp, Homo sapien
ttccatggtgtaaaccgggccttacgcgtggct

SEQ ID NO: 747486 - DNA, 33 bp, Homo sapien
ttccatggtgtaaacctggccttacgcgtggct

SEQ ID NO: 747487 - DNA, 33 bp, Homo sapien
caccatggaatacaaacgaatgtactggagaag

SEQ ID NO: 747488 - DNA, 33 bp, Homo sapien
caccatggaatacaaatgaatgtactggagaag

SEQ ID NO: 747489 - DNA, 33 bp, Homo sapien
gcaaaaaaataacttaccccttggctgttagat

SEQ ID NO: 747490 - DNA, 33 bp, Homo sapien
gcaaaaaaataacttatcccttggctgttagat

SEQ ID NO: 747491 - DNA, 33 bp, Homo sapien
ttttgagtcattaatactaactgtaatccatct

SEQ ID NO: 747492 - DNA, 33 bp, Homo sapien
ttttgagtcattaatagtaactgtaatccatct

SEQ ID NO: 747493 - DNA, 33 bp, Homo sapien
tattctgtgctcctaaccttttatttgattggg

SEQ ID NO: 747494 - DNA, 33 bp, Homo sapien
tattctgtgctcctaatcttttatttgattggg

SEQ ID NO: 747495 - DNA, 33 bp, Homo sapien
tatttacatacgatctaaccaaagtagtaatcc

SEQ ID NO: 747496 - DNA, 33 bp, Homo sapien
tatttacatacgatctgaccaaagtagtaatcc

SEQ ID NO: 747497 - DNA, 33 bp, Homo sapien
ccatcagacaataataaagcagtttccataagg

SEQ ID NO: 747498 - DNA, 33 bp, Homo sapien
ccatcagacaataatacagcagtttccataagg

SEQ ID NO: 747499 - DNA, 33 bp, Homo sapien
tagcattttgatacccagaccatgtgatactgt

SEQ ID NO: 747500 - DNA, 33 bp, Homo sapien
tagcattttgatacccggaccatgtgatactgt

SEQ ID NO: 747501 - DNA, 33 bp, Homo sapien
cttccagcgaatacataaaaaaccagtcaataa

SEQ ID NO: 747502 - DNA, 33 bp, Homo sapien
cttccagcgaatacatcaaaaaccagtcaataa

SEQ ID NO: 747503 - DNA, 33 bp, Homo sapien
gcatgcagaagaaagacccagtgcctttttatt

SEQ ID NO: 747504 - DNA, 33 bp, Homo sapien
gcatgcagaagaaagatccagtgcctttttatt

SEQ ID NO: 747505 - DNA, 33 bp, Homo sapien
atgtttcattgataaacaaggttctgaaaaatg

SEQ ID NO: 747506 - DNA, 33 bp, Homo sapien
atgtttcattgataaagaaggttctgaaaaatg

SEQ ID NO: 747507 - DNA, 33 bp, Homo sapien
ctggttctgctgaagactctagaagctccttta

SEQ ID NO: 747508 - DNA, 33 bp, Homo sapien
ctggttctgctgaagattctagaagctccttta

SEQ ID NO: 747509 - DNA, 33 bp, Homo sapien
gtatgttcctttcaaacgtgtagaaaatgttac

SEQ ID NO: 747510 - DNA, 33 bp, Homo sapien
gtatgttcctttcaaatgtgtagaaaatgttac

SEQ ID NO: 747511 - DNA, 33 bp, Homo sapien
ggatgtactttaaaaacaattccagctggttaa

SEQ ID NO: 747512 - DNA, 33 bp, Homo sapien
ggatgtactttaaaaataattccagctggttaa

SEQ ID NO: 747513 - DNA, 33 bp, Homo sapien
ccagatgaccatttgagataacttaaactgctg

SEQ ID NO: 747514 - DNA, 33 bp, Homo sapien
ccagatgaccatttgatataacttaaactgctg

SEQ ID NO: 747515 - DNA, 33 bp, Homo sapien
cgtgtgtgaacaacaacatccccaggaatttaa

SEQ ID NO: 747516 - DNA, 33 bp, Homo sapien
cgtgtgtgaacaacaatatccccaggaatttaa

SEQ ID NO: 747517 - DNA, 33 bp, Homo sapien
ttctcttctaacttgcaatcaggtttcaagttc

SEQ ID NO: 747518 - DNA, 33 bp, Homo sapien
ttctcttctaacttgccatcaggtttcaagttc

SEQ ID NO: 747519 - DNA, 33 bp, Homo sapien
ttggagaaatcaaccacgaaacaaatattttaa

SEQ ID NO: 747520 - DNA, 33 bp, Homo sapien
ttggagaaatcaaccatgaaacaaatattttaa

SEQ ID NO: 747521 - DNA, 33 bp, Homo sapien
cttccaaagactatgaagcctgtatcctcacac

SEQ ID NO: 747522 - DNA, 33 bp, Homo sapien
cttccaaagactatgacgcctgtatcctcacac

SEQ ID NO: 747523 - DNA, 33 bp, Homo sapien
atgtcagttattgttaccacaggcactaggtta

SEQ ID NO: 747524 - DNA, 33 bp, Homo sapien
atgtcagttattgttatcacaggcactaggtta

SEQ ID NO: 747525 - DNA, 33 bp, Homo sapien
cacagcagtgccccccacatttggacctggaat

SEQ ID NO: 747526 - DNA, 33 bp, Homo sapien
cacagcagtgccccccgcatttggacctggaat

SEQ ID NO: 747527 - DNA, 33 bp, Homo sapien
tcttgctagccacaaaacaatgaacaggtagta

SEQ ID NO: 747528 - DNA, 33 bp, Homo sapien
tcttgctagccacaaagcaatgaacaggtagta

SEQ ID NO: 747529 - DNA, 33 bp, Homo sapien
gaataaaaataccagaactgaaatcatgatgat

SEQ ID NO: 747530 - DNA, 33 bp, Homo sapien
gaataaaaataccagagctgaaatcatgatgat

SEQ ID NO: 747531 - DNA, 33 bp, Homo sapien
agatgtttaaattaatcagaggaagacatcaat

SEQ ID NO: 747532 - DNA, 33 bp, Homo sapien
agatgtttaaattaattagaggaagacatcaat

SEQ ID NO: 747533 - DNA, 33 bp, Homo sapien
ttcttgtggagagtttaaaaaaaagcatcttga

SEQ ID NO: 747534 - DNA, 33 bp, Homo sapien
ttcttgtggagagttttaaaaaaagcatcttga

SEQ ID NO: 747535 - DNA, 33 bp, Homo sapien
tgtactctgtgttcacaatgtgtattaacacat

SEQ ID NO: 747536 - DNA, 33 bp, Homo sapien
tgtactctgtgttcacgatgtgtattaacacat

SEQ ID NO: 747537 - DNA, 33 bp, Homo sapien
gaatcataaatcaaacagctttctaaaagattt

SEQ ID NO: 747538 - DNA, 33 bp, Homo sapien
gaatcataaatcaaactgctttctaaaagattt

SEQ ID NO: 747539 - DNA, 33 bp, Homo sapien
atattctcctaatcaacaggttcgccagggttc

SEQ ID NO: 747540 - DNA, 33 bp, Homo sapien
atattctcctaatcaagaggttcgccagggttc

SEQ ID NO: 747541 - DNA, 33 bp, Homo sapien
aagtttaaagaatgccccctgatagacagcttt

SEQ ID NO: 747542 - DNA, 33 bp, Homo sapien
aagtttaaagaatgcctcctgatagacagcttt

SEQ ID NO: 747543 - DNA, 33 bp, Homo sapien
ttttgtcatcgggcttcaagatttttttccaca

SEQ ID NO: 747544 - DNA, 33 bp, Homo sapien
ttttgtcatcgggcttgaagatttttttccaca

SEQ ID NO: 747545 - DNA, 33 bp, Homo sapien
aaatcccaactctgcaaggaatgaaatttcagc

SEQ ID NO: 747546 - DNA, 33 bp, Homo sapien
aaatcccaactctgcagggaatgaaatttcagc

SEQ ID NO: 747547 - DNA, 33 bp, Homo sapien
gacaggtaaaatgcacaaggcttgaccgttctt

SEQ ID NO: 747548 - DNA, 33 bp, Homo sapien
gacaggtaaaatgcacgaggcttgaccgttctt

SEQ ID NO: 747549 - DNA, 33 bp, Homo sapien
tgatgtagcatcctccagcatcatttagaaaag

SEQ ID NO: 747550 - DNA, 33 bp, Homo sapien
tgatgtagcatcctccggcatcatttagaaaag

SEQ ID NO: 747551 - DNA, 33 bp, Homo sapien
gggactctggaacactaagaggctctgctgatt

SEQ ID NO: 747552 - DNA, 33 bp, Homo sapien
gggactctggaacactgagaggctctgctgatt

SEQ ID NO: 747553 - DNA, 33 bp, Homo sapien
tccattcaaagccctgcattcctgtttctgcaa

SEQ ID NO: 747554 - DNA, 33 bp, Homo sapien
tccattcaaagccctgtattcctgtttctgcaa

SEQ ID NO: 747555 - DNA, 33 bp, Homo sapien
atgtgacttaacttcaaacttttaggtgtttca

SEQ ID NO: 747556 - DNA, 33 bp, Homo sapien
atgtgacttaacttcagacttttaggtgtttca

SEQ ID NO: 747557 - DNA, 33 bp, Homo sapien
gatgttggctgaaacactggatcattgtcttac

SEQ ID NO: 747558 - DNA, 33 bp, Homo sapien
gatgttggctgaaacattggatcattgtcttac

SEQ ID NO: 747559 - DNA, 33 bp, Homo sapien
ctttgggctgccttgcaatgaaatacagggtag

SEQ ID NO: 747560 - DNA, 33 bp, Homo sapien
ctttgggctgccttgcgatgaaatacagggtag

SEQ ID NO: 747561 - DNA, 33 bp, Homo sapien
atgctaattccccccaggaaagatggctttaca

SEQ ID NO: 747562 - DNA, 33 bp, Homo sapien
atgctaattccccccatgaaagatggctttaca

SEQ ID NO: 747563 - DNA, 33 bp, Homo sapien
gcttgaagacaagagaagggattgcacaccagg

SEQ ID NO: 747564 - DNA, 33 bp, Homo sapien
gcttgaagacaagagaggggattgcacaccagg

SEQ ID NO: 747565 - DNA, 33 bp, Homo sapien
accctctttactgtaaatgaattccacgtaagg

SEQ ID NO: 747566 - DNA, 33 bp, Homo sapien
accctctttactgtaagtgaattccacgtaagg

SEQ ID NO: 747567 - DNA, 33 bp, Homo sapien
ccatttgtgtttttcacggtcttttagatgaca

SEQ ID NO: 747568 - DNA, 33 bp, Homo sapien
ccatttgtgtttttcagggtcttttagatgaca

SEQ ID NO: 747569 - DNA, 33 bp, Homo sapien
acccaggggtgcatctcacgttgaacgtcacct

SEQ ID NO: 747570 - DNA, 33 bp, Homo sapien
acccaggggtgcatcttacgttgaacgtcacct

SEQ ID NO: 747571 - DNA, 33 bp, Homo sapien
tgacggcttgtgcctacctttggccttagggat

SEQ ID NO: 747572 - DNA, 33 bp, Homo sapien
tgacggcttgtgcctatctttggccttagggat

SEQ ID NO: 747573 - DNA, 33 bp, Homo sapien
ttgaatctttgagttacctggatgcatttctta

SEQ ID NO: 747574 - DNA, 33 bp, Homo sapien
ttgaatctttgagttatctggatgcatttctta

SEQ ID NO: 747575 - DNA, 33 bp, Homo sapien
ttactagtggtagttagaaaccacggcagagga

SEQ ID NO: 747576 - DNA, 33 bp, Homo sapien
ttactagtggtagttataaaccacggcagagga

SEQ ID NO: 747577 - DNA, 33 bp, Homo sapien
gaatggcctcaaacacactaggtaaaaaaacaa

SEQ ID NO: 747578 - DNA, 33 bp, Homo sapien
gaatggcctcaaacacgctaggtaaaaaaacaa

SEQ ID NO: 747579 - DNA, 33 bp, Homo sapien
catacagagcttctcaaaggaaataatgtaagc

SEQ ID NO: 747580 - DNA, 33 bp, Homo sapien
catacagagcttctcacaggaaataatgtaagc

SEQ ID NO: 747581 - DNA, 33 bp, Homo sapien
atttggttatgtttaactgctcaaaaccagtga

SEQ ID NO: 747582 - DNA, 33 bp, Homo sapien
atttggttatgtttaattgctcaaaaccagtga

SEQ ID NO: 747583 - DNA, 33 bp, Homo sapien
cacaagaaatgtgaacaaaactacaccagggca

SEQ ID NO: 747584 - DNA, 33 bp, Homo sapien
cacaagaaatgtgaacgaaactacaccagggca

SEQ ID NO: 747585 - DNA, 33 bp, Homo sapien
agagtgttgggaagaaacaaataaccaagtaat

SEQ ID NO: 747586 - DNA, 33 bp, Homo sapien
agagtgttgggaagaagcaaataaccaagtaat

SEQ ID NO: 747587 - DNA, 33 bp, Homo sapien
ctgcggtccagagaagaatctgcttcgcgcctc

SEQ ID NO: 747588 - DNA, 33 bp, Homo sapien
ctgcggtccagagaaggatctgcttcgcgcctc

SEQ ID NO: 747589 - DNA, 33 bp, Homo sapien
tagatgtcaatttaggacaagaaatgaaacttt

SEQ ID NO: 747590 - DNA, 33 bp, Homo sapien
tagatgtcaatttagggcaagaaatgaaacttt

SEQ ID NO: 747591 - DNA, 33 bp, Homo sapien
ttcacagattgagacggatgaggtttggagagg

SEQ ID NO: 747592 - DNA, 33 bp, Homo sapien
ttcacagattgagacgtatgaggtttggagagg

SEQ ID NO: 747593 - DNA, 33 bp, Homo sapien
cataatagtccgtgagaaaaaattgacatttgt

SEQ ID NO: 747594 - DNA, 33 bp, Homo sapien
cataatagtccgtgaggaaaaattgacatttgt

SEQ ID NO: 747595 - DNA, 33 bp, Homo sapien
agctgttcaaagagcaacatttccatcaccaac

SEQ ID NO: 747596 - DNA, 33 bp, Homo sapien
agctgttcaaagagcagcatttccatcaccaac

SEQ ID NO: 747597 - DNA, 33 bp, Homo sapien
tggtctctgaatcccaacattacctaagtatct

SEQ ID NO: 747598 - DNA, 33 bp, Homo sapien
tggtctctgaatcccagcattacctaagtatct

SEQ ID NO: 747599 - DNA, 33 bp, Homo sapien
atacatatgacaatgacaaacatatatttgaat

SEQ ID NO: 747600 - DNA, 33 bp, Homo sapien
atacatatgacaatgagaaacatatatttgaat

SEQ ID NO: 747601 - DNA, 33 bp, Homo sapien
tgccctctaaatttcaataccaatgacctatat

SEQ ID NO: 747602 - DNA, 33 bp, Homo sapien
tgccctctaaatttcagtaccaatgacctatat

SEQ ID NO: 747603 - DNA, 33 bp, Homo sapien
ctgcacatctcttgacactgagttactctccat

SEQ ID NO: 747604 - DNA, 33 bp, Homo sapien
ctgcacatctcttgacgctgagttactctccat

SEQ ID NO: 747605 - DNA, 33 bp, Homo sapien
gggatgaatgaaagaacgtgagccctgaccagt

SEQ ID NO: 747606 - DNA, 33 bp, Homo sapien
gggatgaatgaaagaatgtgagccctgaccagt

SEQ ID NO: 747607 - DNA, 33 bp, Homo sapien
gcccctccagaactcgccaggcagctgaaggag

SEQ ID NO: 747608 - DNA, 33 bp, Homo sapien
gcccctccagaactcggcaggcagctgaaggag

SEQ ID NO: 747609 - DNA, 33 bp, Homo sapien
tgaatggactatattacgatgagcttggaattg

SEQ ID NO: 747610 - DNA, 33 bp, Homo sapien
tgaatggactatattaggatgagcttggaattg

SEQ ID NO: 747611 - DNA, 33 bp, Homo sapien
catgataaactgggaaaaagctcagtgaataat

SEQ ID NO: 747612 - DNA, 33 bp, Homo sapien
catgataaactgggaagaagctcagtgaataat

SEQ ID NO: 747613 - DNA, 33 bp, Homo sapien
cctcttgtttggcaccagcgcatggagaaagct

SEQ ID NO: 747614 - DNA, 33 bp, Homo sapien
cctcttgtttggcacccgcgcatggagaaagct

SEQ ID NO: 747615 - DNA, 33 bp, Homo sapien
gacggaaaacacctatcagtcaattcccatgcc

SEQ ID NO: 747616 - DNA, 33 bp, Homo sapien
gacggaaaacacctattagtcaattcccatgcc

SEQ ID NO: 747617 - DNA, 33 bp, Homo sapien
gcctctggcagagccacacttagctgaatttga

SEQ ID NO: 747618 - DNA, 33 bp, Homo sapien
gcctctggcagagccatacttagctgaatttga

SEQ ID NO: 747619 - DNA, 33 bp, Homo sapien
gctccattgcttgttacggtagtagccccggta

SEQ ID NO: 747620 - DNA, 33 bp, Homo sapien
gctccattgcttgttatggtagtagccccggta

SEQ ID NO: 747621 - DNA, 33 bp, Homo sapien
ctggacagcccatcaaaatagaaattcaaataa

SEQ ID NO: 747622 - DNA, 33 bp, Homo sapien
ctggacagcccatcaacatagaaattcaaataa

SEQ ID NO: 747623 - DNA, 33 bp, Homo sapien
ccagattggatcgctcacgtggaggggacttga

SEQ ID NO: 747624 - DNA, 33 bp, Homo sapien
ccagattggatcgctcgcgtggaggggacttga

SEQ ID NO: 747625 - DNA, 33 bp, Homo sapien
acaaaggaaaagtgacaagagaggtaaggatca

SEQ ID NO: 747626 - DNA, 33 bp, Homo sapien
acaaaggaaaagtgacgagagaggtaaggatca

SEQ ID NO: 747627 - DNA, 33 bp, Homo sapien
tgatttgtcaaatagacattagctagaggaggg

SEQ ID NO: 747628 - DNA, 33 bp, Homo sapien
tgatttgtcaaatagatattagctagaggaggg

SEQ ID NO: 747629 - DNA, 33 bp, Homo sapien
aagacgacatgaaatgccaaagaatagataaaa

SEQ ID NO: 747630 - DNA, 33 bp, Homo sapien
aagacgacatgaaatggcaaagaatagataaaa

SEQ ID NO: 747631 - DNA, 33 bp, Homo sapien
ctttgcatgatatacaacgttattccaccaaca

SEQ ID NO: 747632 - DNA, 33 bp, Homo sapien
ctttgcatgatatacagcgttattccaccaaca

SEQ ID NO: 747633 - DNA, 33 bp, Homo sapien
ggtttcattcatggacacagggaatgcaggatg

SEQ ID NO: 747634 - DNA, 33 bp, Homo sapien
ggtttcattcatggacgcagggaatgcaggatg

SEQ ID NO: 747635 - DNA, 33 bp, Homo sapien
gagcctggctgaaaaccgaagtcatggaatagc

SEQ ID NO: 747636 - DNA, 33 bp, Homo sapien
gagcctggctgaaaactgaagtcatggaatagc

SEQ ID NO: 747637 - DNA, 33 bp, Homo sapien
catcatatctaatgcaactctctttggatgact

SEQ ID NO: 747638 - DNA, 33 bp, Homo sapien
catcatatctaatgcagctctctttggatgact

SEQ ID NO: 747639 - DNA, 33 bp, Homo sapien
tttgtcagtccttccaacattcctcacctatta

SEQ ID NO: 747640 - DNA, 33 bp, Homo sapien
tttgtcagtccttccagcattcctcacctatta

SEQ ID NO: 747641 - DNA, 33 bp, Homo sapien
ttggcttctcttcttacaaaatgtccagtctgg

SEQ ID NO: 747642 - DNA, 33 bp, Homo sapien
ttggcttctcttcttagaaaatgtccagtctgg

SEQ ID NO: 747643 - DNA, 33 bp, Homo sapien
atgatcacacctcattaaaaaaatctgaattaa

SEQ ID NO: 747644 - DNA, 33 bp, Homo sapien
atgatcacacctcatttaaaaaatctgaattaa

SEQ ID NO: 747645 - DNA, 33 bp, Homo sapien
atgtatggaaaaataaactaacccagtagcaaa

SEQ ID NO: 747646 - DNA, 33 bp, Homo sapien
atgtatggaaaaataagctaacccagtagcaaa

SEQ ID NO: 747647 - DNA, 33 bp, Homo sapien
gtattcagaggaagcacggctgtgtcaacacct

SEQ ID NO: 747648 - DNA, 33 bp, Homo sapien
gtattcagaggaagcatggctgtgtcaacacct

SEQ ID NO: 747649 - DNA, 33 bp, Homo sapien
atttgtttataattatcaatggacactgaatag

SEQ ID NO: 747650 - DNA, 33 bp, Homo sapien
atttgtttataattattaatggacactgaatag

SEQ ID NO: 747651 - DNA, 33 bp, Homo sapien
catgtttggttttggaccaagtgtgtacagatt

SEQ ID NO: 747652 - DNA, 33 bp, Homo sapien
catgtttggttttggatcaagtgtgtacagatt

SEQ ID NO: 747653 - DNA, 33 bp, Homo sapien
tgaagattctgttctgcaatgccaaaatttaat

SEQ ID NO: 747654 - DNA, 33 bp, Homo sapien
tgaagattctgttctgtaatgccaaaatttaat

SEQ ID NO: 747655 - DNA, 33 bp, Homo sapien
gagatttttagctggactaacaacattgtgttt

SEQ ID NO: 747656 - DNA, 33 bp, Homo sapien
gagatttttagctggattaacaacattgtgttt

SEQ ID NO: 747657 - DNA, 33 bp, Homo sapien
aatgaggtatgtctagaaaggtatagcaatata

SEQ ID NO: 747658 - DNA, 33 bp, Homo sapien
aatgaggtatgtctaggaaggtatagcaatata

SEQ ID NO: 747659 - DNA, 33 bp, Homo sapien
gcttaatagttacttaccatcggcttcacttta

SEQ ID NO: 747660 - DNA, 33 bp, Homo sapien
gcttaatagttacttatcatcggcttcacttta

SEQ ID NO: 747661 - DNA, 33 bp, Homo sapien
ccatatttagagataacacggtgtggtcgaaag

SEQ ID NO: 747662 - DNA, 33 bp, Homo sapien
ccatatttagagataatacggtgtggtcgaaag

SEQ ID NO: 747663 - DNA, 33 bp, Homo sapien
agtatggagtaggtgaacttggcgctgtatacg

SEQ ID NO: 747664 - DNA, 33 bp, Homo sapien
agtatggagtaggtgagcttggcgctgtatacg

SEQ ID NO: 747665 - DNA, 33 bp, Homo sapien
attatatatgtgaaagcaaaattctatgtaata

SEQ ID NO: 747666 - DNA, 33 bp, Homo sapien
attatatatgtgaaagtaaaattctatgtaata

SEQ ID NO: 747667 - DNA, 33 bp, Homo sapien
ctagctcgcctctagccctctagccttattttc

SEQ ID NO: 747668 - DNA, 33 bp, Homo sapien
ctagctcgcctctagctctctagccttattttc

SEQ ID NO: 747669 - DNA, 33 bp, Homo sapien
gtggtaaggacaaataaggaaatgtcattgatt

SEQ ID NO: 747670 - DNA, 33 bp, Homo sapien
gtggtaaggacaaatagggaaatgtcattgatt

SEQ ID NO: 747671 - DNA, 33 bp, Homo sapien
agacaatgctatagggaaagttcataggcagaa

SEQ ID NO: 747672 - DNA, 33 bp, Homo sapien
agacaatgctataggggaagttcataggcagaa

SEQ ID NO: 747673 - DNA, 33 bp, Homo sapien
aaattccttactacaactcccaaacgtggcaga

SEQ ID NO: 747674 - DNA, 33 bp, Homo sapien
aaattccttactacaattcccaaacgtggcaga

SEQ ID NO: 747675 - DNA, 33 bp, Homo sapien
cccagagcttggtttcaagaccactcttttctc

SEQ ID NO: 747676 - DNA, 33 bp, Homo sapien
cccagagcttggtttcgagaccactcttttctc

SEQ ID NO: 747677 - DNA, 33 bp, Homo sapien
agaatggaccagtgaaaaaggctgggtgagaag

SEQ ID NO: 747678 - DNA, 33 bp, Homo sapien
agaatggaccagtgaagaaggctgggtgagaag

SEQ ID NO: 747679 - DNA, 33 bp, Homo sapien
agagtgagaggaactacagcaaagtcagcaaaa

SEQ ID NO: 747680 - DNA, 33 bp, Homo sapien
agagtgagaggaactagagcaaagtcagcaaaa

SEQ ID NO: 747681 - DNA, 33 bp, Homo sapien
cagactaatgagagcacctcaccatgtttaaac

SEQ ID NO: 747682 - DNA, 33 bp, Homo sapien
cagactaatgagagcagctcaccatgtttaaac

SEQ ID NO: 747683 - DNA, 33 bp, Homo sapien
gattttgcatattatacagtgagtaccgatact

SEQ ID NO: 747684 - DNA, 33 bp, Homo sapien
gattttgcatattatatagtgagtaccgatact

SEQ ID NO: 747685 - DNA, 33 bp, Homo sapien
ccaaagtgaaagacaaccttttatattgcaaaa

SEQ ID NO: 747686 - DNA, 33 bp, Homo sapien
ccaaagtgaaagacaatcttttatattgcaaaa

SEQ ID NO: 747687 - DNA, 33 bp, Homo sapien
cttgctcattgattcaatagatgcttgcttaga

SEQ ID NO: 747688 - DNA, 33 bp, Homo sapien
cttgctcattgattcagtagatgcttgcttaga

SEQ ID NO: 747689 - DNA, 33 bp, Homo sapien
agccataattgtgccacaaactccagtctggat

SEQ ID NO: 747690 - DNA, 33 bp, Homo sapien
agccataattgtgccataaactccagtctggat

SEQ ID NO: 747691 - DNA, 33 bp, Homo sapien
agtaacccagaaactcacgattacctcagatgc

SEQ ID NO: 747692 - DNA, 33 bp, Homo sapien
agtaacccagaaactcgcgattacctcagatgc

SEQ ID NO: 747693 - DNA, 33 bp, Homo sapien
accctgaatcctggcaacattgcagtacacagg

SEQ ID NO: 747694 - DNA, 33 bp, Homo sapien
accctgaatcctggcagcattgcagtacacagg

SEQ ID NO: 747695 - DNA, 33 bp, Homo sapien
tcttctcctaccctaccattgtctcaaactctc

SEQ ID NO: 747696 - DNA, 33 bp, Homo sapien
tcttctcctaccctactattgtctcaaactctc

SEQ ID NO: 747697 - DNA, 33 bp, Homo sapien
tcatttagtgtgttgcgaaagctaatcaattta

SEQ ID NO: 747698 - DNA, 33 bp, Homo sapien
tcatttagtgtgttgctaaagctaatcaattta

SEQ ID NO: 747699 - DNA, 33 bp, Homo sapien
gcagtctcctgtgtaacggtttcttacttgatg

SEQ ID NO: 747700 - DNA, 33 bp, Homo sapien
gcagtctcctgtgtaatggtttcttacttgatg

SEQ ID NO: 747701 - DNA, 33 bp, Homo sapien
tgccagtttgttaaaaatgtccatagaagagat

SEQ ID NO: 747702 - DNA, 33 bp, Homo sapien
tgccagtttgttaaaattgtccatagaagagat

SEQ ID NO: 747703 - DNA, 33 bp, Homo sapien
ctgatacacagattgacaaaaaagttctggata

SEQ ID NO: 747704 - DNA, 33 bp, Homo sapien
ctgatacacagattgataaaaaagttctggata

SEQ ID NO: 747705 - DNA, 33 bp, Homo sapien
tttgcataaagaacaactgaatacccagggaaa

SEQ ID NO: 747706 - DNA, 33 bp, Homo sapien
tttgcataaagaacaattgaatacccagggaaa

SEQ ID NO: 747707 - DNA, 33 bp, Homo sapien
tggtcatggtgtgtggaaagaagcattggtttg

SEQ ID NO: 747708 - DNA, 33 bp, Homo sapien
tggtcatggtgtgtgggaagaagcattggtttg

SEQ ID NO: 747709 - DNA, 33 bp, Homo sapien
tcatttacattaaactaaaagtgacctgattaa

SEQ ID NO: 747710 - DNA, 33 bp, Homo sapien
tcatttacattaaacttaaagtgacctgattaa

SEQ ID NO: 747711 - DNA, 33 bp, Homo sapien
ttatatcgtatagggacaaaggcactactgcat

SEQ ID NO: 747712 - DNA, 33 bp, Homo sapien
ttatatcgtatagggagaaaggcactactgcat

SEQ ID NO: 747713 - DNA, 33 bp, Homo sapien
caaagtaataagcataaaacttaccatcataag

SEQ ID NO: 747714 - DNA, 33 bp, Homo sapien
caaagtaataagcatagaacttaccatcataag

SEQ ID NO: 747715 - DNA, 33 bp, Homo sapien
acgtgaatatctactacgtgagagacagtaagt

SEQ ID NO: 747716 - DNA, 33 bp, Homo sapien
acgtgaatatctactatgtgagagacagtaagt

SEQ ID NO: 747717 - DNA, 33 bp, Homo sapien
ataaagctaaaacacacatcccaggcttgcttt

SEQ ID NO: 747718 - DNA, 33 bp, Homo sapien
ataaagctaaaacacatatcccaggcttgcttt

SEQ ID NO: 747719 - DNA, 33 bp, Homo sapien
agttaactagttccccaaaatacagtgacttat

SEQ ID NO: 747720 - DNA, 33 bp, Homo sapien
agttaactagttccccgaaatacagtgacttat

SEQ ID NO: 747721 - DNA, 33 bp, Homo sapien
ccaaagaaaatggtaacatgactccaatgaaag

SEQ ID NO: 747722 - DNA, 33 bp, Homo sapien
ccaaagaaaatggtaagatgactccaatgaaag

SEQ ID NO: 747723 - DNA, 33 bp, Homo sapien
tcatatgcctgctaaaaaggctgtttaacaaca

SEQ ID NO: 747724 - DNA, 33 bp, Homo sapien
tcatatgcctgctaaagaggctgtttaacaaca

SEQ ID NO: 747725 - DNA, 33 bp, Homo sapien
acacagagaggtaaaaatgttcataaaatgcaa

SEQ ID NO: 747726 - DNA, 33 bp, Homo sapien
acacagagaggtaaaagtgttcataaaatgcaa

SEQ ID NO: 747727 - DNA, 33 bp, Homo sapien
caaaatggaatggcagacattttcagcatggta

SEQ ID NO: 747728 - DNA, 33 bp, Homo sapien
caaaatggaatggcaggcattttcagcatggta

SEQ ID NO: 747729 - DNA, 33 bp, Homo sapien
gtgacaccaacatatacgggttaaaaacaatgg

SEQ ID NO: 747730 - DNA, 33 bp, Homo sapien
gtgacaccaacatatatgggttaaaaacaatgg

SEQ ID NO: 747731 - DNA, 33 bp, Homo sapien
gagatacgaaagtcaactaaaatagtcttagga

SEQ ID NO: 747732 - DNA, 33 bp, Homo sapien
gagatacgaaagtcaattaaaatagtcttagga

SEQ ID NO: 747733 - DNA, 33 bp, Homo sapien
gattgaaccaaagtctaactgcatccaaagccc

SEQ ID NO: 747734 - DNA, 33 bp, Homo sapien
gattgaaccaaagtctgactgcatccaaagccc

SEQ ID NO: 747735 - DNA, 33 bp, Homo sapien
gtacagctgaatttcacgtaccaacaaattcat

SEQ ID NO: 747736 - DNA, 33 bp, Homo sapien
gtacagctgaatttcatgtaccaacaaattcat

SEQ ID NO: 747737 - DNA, 33 bp, Homo sapien
tttaaaacaagagtcacatgtaaagttacaatt

SEQ ID NO: 747738 - DNA, 33 bp, Homo sapien
tttaaaacaagagtcatatgtaaagttacaatt

SEQ ID NO: 747739 - DNA, 33 bp, Homo sapien
ttcaaccctctttaaccccctctacagtgactg

SEQ ID NO: 747740 - DNA, 33 bp, Homo sapien
ttcaaccctctttaactccctctacagtgactg

SEQ ID NO: 747741 - DNA, 33 bp, Homo sapien
aaaagccactgttttcaaggactccagctttac

SEQ ID NO: 747742 - DNA, 33 bp, Homo sapien
aaaagccactgttttcgaggactccagctttac

SEQ ID NO: 747743 - DNA, 33 bp, Homo sapien
gtggatctatgcttccaccttttctccccatat

SEQ ID NO: 747744 - DNA, 33 bp, Homo sapien
gtggatctatgcttccgccttttctccccatat

SEQ ID NO: 747745 - DNA, 33 bp, Homo sapien
gcacatctgtttacaacgtggctactaaatatt

SEQ ID NO: 747746 - DNA, 33 bp, Homo sapien
gcacatctgtttacaatgtggctactaaatatt

SEQ ID NO: 747747 - DNA, 33 bp, Homo sapien
aaaggaatgattcacactgctgaaaaagagcaa

SEQ ID NO: 747748 - DNA, 33 bp, Homo sapien
aaaggaatgattcacagtgctgaaaaagagcaa

SEQ ID NO: 747749 - DNA, 33 bp, Homo sapien
ggccatacaagggacaatgcaatacctctataa

SEQ ID NO: 747750 - DNA, 33 bp, Homo sapien
ggccatacaagggacagtgcaatacctctataa

SEQ ID NO: 747751 - DNA, 33 bp, Homo sapien
acactacaaaagttgcaaagaatattgagtttt

SEQ ID NO: 747752 - DNA, 33 bp, Homo sapien
acactacaaaagttgcgaagaatattgagtttt

SEQ ID NO: 747753 - DNA, 33 bp, Homo sapien
taggtatttgatgacacgaggaattttccagac

SEQ ID NO: 747754 - DNA, 33 bp, Homo sapien
taggtatttgatgacatgaggaattttccagac

SEQ ID NO: 747755 - DNA, 33 bp, Homo sapien
cccatgttctgagaaccgggctgatttcggtgt

SEQ ID NO: 747756 - DNA, 33 bp, Homo sapien
cccatgttctgagaactgggctgatttcggtgt

SEQ ID NO: 747757 - DNA, 33 bp, Homo sapien
ctgtcatctcaatggaagaaacagacaccgaaa

SEQ ID NO: 747758 - DNA, 33 bp, Homo sapien
ctgtcatctcaatggaggaaacagacaccgaaa

SEQ ID NO: 747759 - DNA, 33 bp, Homo sapien
aggatgtaatctgtaaactgagttgcagttgta

SEQ ID NO: 747760 - DNA, 33 bp, Homo sapien
aggatgtaatctgtaatctgagttgcagttgta

SEQ ID NO: 747761 - DNA, 33 bp, Homo sapien
tagactaacacttttacgtatgaaaaatataat

SEQ ID NO: 747762 - DNA, 33 bp, Homo sapien
tagactaacacttttatgtatgaaaaatataat

SEQ ID NO: 747763 - DNA, 33 bp, Homo sapien
aaggaataaaaaataaaggagatgtgttactaa

SEQ ID NO: 747764 - DNA, 33 bp, Homo sapien
aaggaataaaaaataagggagatgtgttactaa

SEQ ID NO: 747765 - DNA, 33 bp, Homo sapien
tgatttatcgcatatacagcccattaggaaaca

SEQ ID NO: 747766 - DNA, 33 bp, Homo sapien
tgatttatcgcatatatagcccattaggaaaca

SEQ ID NO: 747767 - DNA, 33 bp, Homo sapien
cagtatctcttgactgaaagccagatagacaat

SEQ ID NO: 747768 - DNA, 33 bp, Homo sapien
cagtatctcttgactgcaagccagatagacaat

SEQ ID NO: 747769 - DNA, 33 bp, Homo sapien
ccatgtgcacagtctcaaaaagagcagagagaa

SEQ ID NO: 747770 - DNA, 33 bp, Homo sapien
ccatgtgcacagtctccaaaagagcagagagaa

SEQ ID NO: 747771 - DNA, 33 bp, Homo sapien
tcctattatactttacacatcactcttgattct

SEQ ID NO: 747772 - DNA, 33 bp, Homo sapien
tcctattatactttacccatcactcttgattct

SEQ ID NO: 747773 - DNA, 33 bp, Homo sapien
agagcatattcactagcacattatcaggtctac

SEQ ID NO: 747774 - DNA, 33 bp, Homo sapien
agagcatattcactaggacattatcaggtctac

SEQ ID NO: 747775 - DNA, 33 bp, Homo sapien
tatattatacatatacagaacatctacatattt

SEQ ID NO: 747776 - DNA, 33 bp, Homo sapien
tatattatacatatacggaacatctacatattt

SEQ ID NO: 747777 - DNA, 33 bp, Homo sapien
gcgtacactctcatccaataggagaatgcatat

SEQ ID NO: 747778 - DNA, 33 bp, Homo sapien
gcgtacactctcatccgataggagaatgcatat

SEQ ID NO: 747779 - DNA, 33 bp, Homo sapien
gttccttatggcagcaataaccaccaaatgttg

SEQ ID NO: 747780 - DNA, 33 bp, Homo sapien
gttccttatggcagcagtaaccaccaaatgttg

SEQ ID NO: 747781 - DNA, 33 bp, Homo sapien
acattttcaacattcactattggtacggaggtg

SEQ ID NO: 747782 - DNA, 33 bp, Homo sapien
acattttcaacattcagtattggtacggaggtg

SEQ ID NO: 747783 - DNA, 33 bp, Homo sapien
atcaggaagaattctaagagaagaaagcctgat

SEQ ID NO: 747784 - DNA, 33 bp, Homo sapien
atcaggaagaattctaggagaagaaagcctgat

SEQ ID NO: 747785 - DNA, 33 bp, Homo sapien
agatggggtttctttaacatggtaactgtcatt

SEQ ID NO: 747786 - DNA, 33 bp, Homo sapien
agatggggtttctttagcatggtaactgtcatt

SEQ ID NO: 747787 - DNA, 33 bp, Homo sapien
ctaatgaatcacaatacggacataataattaca

SEQ ID NO: 747788 - DNA, 33 bp, Homo sapien
ctaatgaatcacaatagggacataataattaca

SEQ ID NO: 747789 - DNA, 33 bp, Homo sapien
gaatgagggacaataaaccacccaaatgagaag

SEQ ID NO: 747790 - DNA, 33 bp, Homo sapien
gaatgagggacaataagccacccaaatgagaag

SEQ ID NO: 747791 - DNA, 33 bp, Homo sapien
tcataatttacgaatcggaactcatcttttgtt

SEQ ID NO: 747792 - DNA, 33 bp, Homo sapien
tcataatttacgaatctgaactcatcttttgtt

SEQ ID NO: 747793 - DNA, 33 bp, Homo sapien
ctctcaggtacttccacaaacatcaggctaact

SEQ ID NO: 747794 - DNA, 33 bp, Homo sapien
ctctcaggtacttccataaacatcaggctaact

SEQ ID NO: 747795 - DNA, 33 bp, Homo sapien
tcgataagctaaaaagaaatgatgttgagggtg

SEQ ID NO: 747796 - DNA, 33 bp, Homo sapien
tcgataagctaaaaagcaatgatgttgagggtg

SEQ ID NO: 747797 - DNA, 33 bp, Homo sapien
gcagaataggaagtaaatatgtctcattttccc

SEQ ID NO: 747798 - DNA, 33 bp, Homo sapien
gcagaataggaagtaactatgtctcattttccc

SEQ ID NO: 747799 - DNA, 33 bp, Homo sapien
catgttttttggtcccccatgttccccttcttt

SEQ ID NO: 747800 - DNA, 33 bp, Homo sapien
catgttttttggtcccgcatgttccccttcttt

SEQ ID NO: 747801 - DNA, 33 bp, Homo sapien
gtcgtgtctttttgcactgattcagttactggg

SEQ ID NO: 747802 - DNA, 33 bp, Homo sapien
gtcgtgtctttttgcattgattcagttactggg

SEQ ID NO: 747803 - DNA, 33 bp, Homo sapien
tgttctgggtcattatcataaaaaggcagccag

SEQ ID NO: 747804 - DNA, 33 bp, Homo sapien
tgttctgggtcattattataaaaaggcagccag

SEQ ID NO: 747805 - DNA, 33 bp, Homo sapien
gggaaagaaagagagaccattaccctccttcaa

SEQ ID NO: 747806 - DNA, 33 bp, Homo sapien
gggaaagaaagagagatcattaccctccttcaa

SEQ ID NO: 747807 - DNA, 33 bp, Homo sapien
ttcccatttgtgaggacgtgggcaagtaaatga

SEQ ID NO: 747808 - DNA, 33 bp, Homo sapien
ttcccatttgtgaggatgtgggcaagtaaatga

SEQ ID NO: 747809 - DNA, 33 bp, Homo sapien
gtgtattcatcaggaaaagtgggacagaaagtt

SEQ ID NO: 747810 - DNA, 33 bp, Homo sapien
gtgtattcatcaggaagagtgggacagaaagtt

SEQ ID NO: 747811 - DNA, 33 bp, Homo sapien
ctgaatatgagcaggaactgttaaatatgggaa

SEQ ID NO: 747812 - DNA, 33 bp, Homo sapien
ctgaatatgagcaggagctgttaaatatgggaa

SEQ ID NO: 747813 - DNA, 33 bp, Homo sapien
cagtcttctccaaatggcagtgcttcccatatt

SEQ ID NO: 747814 - DNA, 33 bp, Homo sapien
cagtcttctccaaatgtcagtgcttcccatatt

SEQ ID NO: 747815 - DNA, 33 bp, Homo sapien
cctcaggacttgaatgcagaaggttgagagaga

SEQ ID NO: 747816 - DNA, 33 bp, Homo sapien
cctcaggacttgaatgtagaaggttgagagaga

SEQ ID NO: 747817 - DNA, 33 bp, Homo sapien
gctttcacctacacaaacatcaccttcctaatc

SEQ ID NO: 747818 - DNA, 33 bp, Homo sapien
gctttcacctacacaagcatcaccttcctaatc

SEQ ID NO: 747819 - DNA, 33 bp, Homo sapien
tcaactctgcagcaaacacttcaatgctactgt

SEQ ID NO: 747820 - DNA, 33 bp, Homo sapien
tcaactctgcagcaaatacttcaatgctactgt

SEQ ID NO: 747821 - DNA, 33 bp, Homo sapien
attttctgccatgaatcaaaggtagttgaactt

SEQ ID NO: 747822 - DNA, 33 bp, Homo sapien
attttctgccatgaattaaaggtagttgaactt

SEQ ID NO: 747823 - DNA, 33 bp, Homo sapien
aaatggttgtgagctacattttacttgcaagta

SEQ ID NO: 747824 - DNA, 33 bp, Homo sapien
aaatggttgtgagctatattttacttgcaagta

SEQ ID NO: 747825 - DNA, 33 bp, Homo sapien
ctgccaaccttctacacgtaacacttccaggag

SEQ ID NO: 747826 - DNA, 33 bp, Homo sapien
ctgccaaccttctacatgtaacacttccaggag

SEQ ID NO: 747827 - DNA, 33 bp, Homo sapien
catacatttcagtcccaactcacttgcttcatc

SEQ ID NO: 747828 - DNA, 33 bp, Homo sapien
catacatttcagtcccgactcacttgcttcatc

SEQ ID NO: 747829 - DNA, 33 bp, Homo sapien
agtggtgggtcactcacgtaaaaggcagcccat

SEQ ID NO: 747830 - DNA, 33 bp, Homo sapien
agtggtgggtcactcatgtaaaaggcagcccat

SEQ ID NO: 747831 - DNA, 33 bp, Homo sapien
tcctcacacactgtccacaacctaccagtcaag

SEQ ID NO: 747832 - DNA, 33 bp, Homo sapien
tcctcacacactgtccccaacctaccagtcaag

SEQ ID NO: 747833 - DNA, 33 bp, Homo sapien
ggtgatgcctctaacaaccccacagtcactggg

SEQ ID NO: 747834 - DNA, 33 bp, Homo sapien
ggtgatgcctctaacagccccacagtcactggg

SEQ ID NO: 747835 - DNA, 33 bp, Homo sapien
ctgaatacttcatcacaggtttagcaacccacc

SEQ ID NO: 747836 - DNA, 33 bp, Homo sapien
ctgaatacttcatcacgggtttagcaacccacc

SEQ ID NO: 747837 - DNA, 33 bp, Homo sapien
tccaggtcactgcttaaagatctgctgggggct

SEQ ID NO: 747838 - DNA, 33 bp, Homo sapien
tccaggtcactgcttacagatctgctgggggct

SEQ ID NO: 747839 - DNA, 33 bp, Homo sapien
ggttgattgaacttgaggattttcatgaagaat

SEQ ID NO: 747840 - DNA, 33 bp, Homo sapien
ggttgattgaacttgatgattttcatgaagaat

SEQ ID NO: 747841 - DNA, 33 bp, Homo sapien
caggatctaaccaacaaccacattgtgcattta

SEQ ID NO: 747842 - DNA, 33 bp, Homo sapien
caggatctaaccaacagccacattgtgcattta

SEQ ID NO: 747843 - DNA, 33 bp, Homo sapien
tgtcttcaattctcacacccagtgggcataata

SEQ ID NO: 747844 - DNA, 33 bp, Homo sapien
tgtcttcaattctcacgcccagtgggcataata

SEQ ID NO: 747845 - DNA, 33 bp, Homo sapien
ccaataagtatgagtacatgaggagaaagaagg

SEQ ID NO: 747846 - DNA, 33 bp, Homo sapien
ccaataagtatgagtagatgaggagaaagaagg

SEQ ID NO: 747847 - DNA, 33 bp, Homo sapien
cgaatgtctgatcctagagtttcacggcagaac

SEQ ID NO: 747848 - DNA, 33 bp, Homo sapien
cgaatgtctgatcctatagtttcacggcagaac

SEQ ID NO: 747849 - DNA, 33 bp, Homo sapien
ttaggggtgcaaatcaaaaaagcacagcataga

SEQ ID NO: 747850 - DNA, 33 bp, Homo sapien
ttaggggtgcaaatcagaaaagcacagcataga

SEQ ID NO: 747851 - DNA, 33 bp, Homo sapien
gcactagtggccttacaagaagaggaagagacg

SEQ ID NO: 747852 - DNA, 33 bp, Homo sapien
gcactagtggccttacgagaagaggaagagacg

SEQ ID NO: 747853 - DNA, 33 bp, Homo sapien
ctacactggaaggaaaccacttgtctgggctgc

SEQ ID NO: 747854 - DNA, 33 bp, Homo sapien
ctacactggaaggaaagcacttgtctgggctgc

SEQ ID NO: 747855 - DNA, 33 bp, Homo sapien
gaggaaagttaagagcacttgtgtggcttgaca

SEQ ID NO: 747856 - DNA, 33 bp, Homo sapien
gaggaaagttaagagcgcttgtgtggcttgaca

SEQ ID NO: 747857 - DNA, 33 bp, Homo sapien
gaattgagctcttcctaagaatgtactctttca

SEQ ID NO: 747858 - DNA, 33 bp, Homo sapien
gaattgagctcttcctgagaatgtactctttca

SEQ ID NO: 747859 - DNA, 33 bp, Homo sapien
tttttcttgctttagaaaaaagataaacagtct

SEQ ID NO: 747860 - DNA, 33 bp, Homo sapien
tttttcttgctttagagaaaagataaacagtct

SEQ ID NO: 747861 - DNA, 33 bp, Homo sapien
aacccaggagtttatccgaaacgtccagacatc

SEQ ID NO: 747862 - DNA, 33 bp, Homo sapien
aacccaggagtttatctgaaacgtccagacatc

SEQ ID NO: 747863 - DNA, 33 bp, Homo sapien
ggggcatggtaggagaccgataaatattggaca

SEQ ID NO: 747864 - DNA, 33 bp, Homo sapien
ggggcatggtaggagatcgataaatattggaca

SEQ ID NO: 747865 - DNA, 33 bp, Homo sapien
gcagtgatgcattgcaactttcattataacaaa

SEQ ID NO: 747866 - DNA, 33 bp, Homo sapien
gcagtgatgcattgcagctttcattataacaaa

SEQ ID NO: 747867 - DNA, 33 bp, Homo sapien
ttttatttttacgcacacattgcattttagctt

SEQ ID NO: 747868 - DNA, 33 bp, Homo sapien
ttttatttttacgcacgcattgcattttagctt

SEQ ID NO: 747869 - DNA, 33 bp, Homo sapien
catacatactacaaccagaataacaccatacac

SEQ ID NO: 747870 - DNA, 33 bp, Homo sapien
catacatactacaaccggaataacaccatacac

SEQ ID NO: 747871 - DNA, 33 bp, Homo sapien
gtgacgatttcacacaagcattggaaaagaaaa

SEQ ID NO: 747872 - DNA, 33 bp, Homo sapien
gtgacgatttcacacaggcattggaaaagaaaa

SEQ ID NO: 747873 - DNA, 33 bp, Homo sapien
gataaataagatcaaaagccgtagaacattatc

SEQ ID NO: 747874 - DNA, 33 bp, Homo sapien
gataaataagatcaaaggccgtagaacattatc

SEQ ID NO: 747875 - DNA, 33 bp, Homo sapien
ctgtatatcctgcatgaatgcatccttcctcat

SEQ ID NO: 747876 - DNA, 33 bp, Homo sapien
ctgtatatcctgcatgtatgcatccttcctcat

SEQ ID NO: 747877 - DNA, 33 bp, Homo sapien
gcataataaggacagtaaatctggaatgacagt

SEQ ID NO: 747878 - DNA, 33 bp, Homo sapien
gcataataaggacagtgaatctggaatgacagt

SEQ ID NO: 747879 - DNA, 33 bp, Homo sapien
ttcatttttttgtaggccaacactttctgcaag

SEQ ID NO: 747880 - DNA, 33 bp, Homo sapien
ttcatttttttgtaggtcaacactttctgcaag

SEQ ID NO: 747881 - DNA, 33 bp, Homo sapien
agggaaaggagattcaatcaatagagagactga

SEQ ID NO: 747882 - DNA, 33 bp, Homo sapien
agggaaaggagattcactcaatagagagactga

SEQ ID NO: 747883 - DNA, 33 bp, Homo sapien
caacctggcgggggaaattactgccaatcattg

SEQ ID NO: 747884 - DNA, 33 bp, Homo sapien
caacctggcgggggaagttactgccaatcattg

SEQ ID NO: 747885 - DNA, 33 bp, Homo sapien
gttcatagtatctccaatctgcatgcttcggat

SEQ ID NO: 747886 - DNA, 33 bp, Homo sapien
gttcatagtatctccagtctgcatgcttcggat

SEQ ID NO: 747887 - DNA, 33 bp, Homo sapien
tggaggagattggaagccttcagcaatggcctc

SEQ ID NO: 747888 - DNA, 33 bp, Homo sapien
tggaggagattggaaggcttcagcaatggcctc

SEQ ID NO: 747889 - DNA, 33 bp, Homo sapien
ggcctcagcactaagagctctctgaccttctct

SEQ ID NO: 747890 - DNA, 33 bp, Homo sapien
ggcctcagcactaagatctctctgaccttctct

SEQ ID NO: 747891 - DNA, 33 bp, Homo sapien
gatagctacactgtccccaaaatatcacacgca

SEQ ID NO: 747892 - DNA, 33 bp, Homo sapien
gatagctacactgtccgcaaaatatcacacgca

SEQ ID NO: 747893 - DNA, 33 bp, Homo sapien
ccaactttctgtcaccaaaaccagaagccaccc

SEQ ID NO: 747894 - DNA, 33 bp, Homo sapien
ccaactttctgtcaccgaaaccagaagccaccc

SEQ ID NO: 747895 - DNA, 33 bp, Homo sapien
gaggcttcaggagatacacgatcatggtggaag

SEQ ID NO: 747896 - DNA, 33 bp, Homo sapien
gaggcttcaggagatatacgatcatggtggaag

SEQ ID NO: 747897 - DNA, 33 bp, Homo sapien
atatctaagaccataacacgtttgctttaaagt

SEQ ID NO: 747898 - DNA, 33 bp, Homo sapien
atatctaagaccataatacgtttgctttaaagt

SEQ ID NO: 747899 - DNA, 33 bp, Homo sapien
aaatattaataggtcaaccttgccttctgtaga

SEQ ID NO: 747900 - DNA, 33 bp, Homo sapien
aaatattaataggtcacccttgccttctgtaga

SEQ ID NO: 747901 - DNA, 33 bp, Homo sapien
catgagatacaagacaactcctcaaattcagca

SEQ ID NO: 747902 - DNA, 33 bp, Homo sapien
catgagatacaagacagctcctcaaattcagca

SEQ ID NO: 747903 - DNA, 33 bp, Homo sapien
ttccttatccctgttacaggttgctgcactttt

SEQ ID NO: 747904 - DNA, 33 bp, Homo sapien
ttccttatccctgttataggttgctgcactttt

SEQ ID NO: 747905 - DNA, 33 bp, Homo sapien
acacaagatttgagaccactgcttcaaggggag

SEQ ID NO: 747906 - DNA, 33 bp, Homo sapien
acacaagatttgagactactgcttcaaggggag

SEQ ID NO: 747907 - DNA, 33 bp, Homo sapien
tactatcctcctaggcgccacaactgcagatag

SEQ ID NO: 747908 - DNA, 33 bp, Homo sapien
tactatcctcctaggctccacaactgcagatag

SEQ ID NO: 747909 - DNA, 33 bp, Homo sapien
ggttgggctcagaaccactctactgcctaacct

SEQ ID NO: 747910 - DNA, 33 bp, Homo sapien
ggttgggctcagaaccgctctactgcctaacct

SEQ ID NO: 747911 - DNA, 33 bp, Homo sapien
atctaacttgtgcccaaaatgtccctccttcct

SEQ ID NO: 747912 - DNA, 33 bp, Homo sapien
atctaacttgtgcccacaatgtccctccttcct

SEQ ID NO: 747913 - DNA, 33 bp, Homo sapien
ttctgtgtactctgaaatatacaaagatcagtg

SEQ ID NO: 747914 - DNA, 33 bp, Homo sapien
ttctgtgtactctgaagtatacaaagatcagtg

SEQ ID NO: 747915 - DNA, 33 bp, Homo sapien
gtgactactttagataaactcatgcattagtca

SEQ ID NO: 747916 - DNA, 33 bp, Homo sapien
gtgactactttagatagactcatgcattagtca

SEQ ID NO: 747917 - DNA, 33 bp, Homo sapien
ctatatttcagttgaactgtgagatctttggat

SEQ ID NO: 747918 - DNA, 33 bp, Homo sapien
ctatatttcagttgaattgtgagatctttggat

SEQ ID NO: 747919 - DNA, 33 bp, Homo sapien
gacaaagtgttcaaaaattacacattaatgtgc

SEQ ID NO: 747920 - DNA, 33 bp, Homo sapien
gacaaagtgttcaaaacttacacattaatgtgc

SEQ ID NO: 747921 - DNA, 33 bp, Homo sapien
gtacctatgtccataacataacatgaaatatat

SEQ ID NO: 747922 - DNA, 33 bp, Homo sapien
gtacctatgtccataatataacatgaaatatat

SEQ ID NO: 747923 - DNA, 33 bp, Homo sapien
tatttcaagttgtcatcaaaataattcagaggg

SEQ ID NO: 747924 - DNA, 33 bp, Homo sapien
tatttcaagttgtcatgaaaataattcagaggg

SEQ ID NO: 747925 - DNA, 33 bp, Homo sapien
gtttgagattagcttacgcaatgcggcaaaacc

SEQ ID NO: 747926 - DNA, 33 bp, Homo sapien
gtttgagattagcttaggcaatgcggcaaaacc

SEQ ID NO: 747927 - DNA, 33 bp, Homo sapien
atttttcaggagctgaaattctccgtgtacact

SEQ ID NO: 747928 - DNA, 33 bp, Homo sapien
atttttcaggagctgagattctccgtgtacact

SEQ ID NO: 747929 - DNA, 33 bp, Homo sapien
gcctgcagatgaatccaaagtttataggaagaa

SEQ ID NO: 747930 - DNA, 33 bp, Homo sapien
gcctgcagatgaatccgaagtttataggaagaa

SEQ ID NO: 747931 - DNA, 33 bp, Homo sapien
cataatcaagagcaaagatggaagtagatctat

SEQ ID NO: 747932 - DNA, 33 bp, Homo sapien
cataatcaagagcaaatatggaagtagatctat

SEQ ID NO: 747933 - DNA, 33 bp, Homo sapien
tgttcataaggtaagcagcacatggttctttcg

SEQ ID NO: 747934 - DNA, 33 bp, Homo sapien
tgttcataaggtaagcggcacatggttctttcg

SEQ ID NO: 747935 - DNA, 33 bp, Homo sapien
tcggtatttagggtgacctttactgttgctgtg

SEQ ID NO: 747936 - DNA, 33 bp, Homo sapien
tcggtatttagggtgatctttactgttgctgtg

SEQ ID NO: 747937 - DNA, 33 bp, Homo sapien
cttcctgttcccagaaacatttttatttgtatg

SEQ ID NO: 747938 - DNA, 33 bp, Homo sapien
cttcctgttcccagaagcatttttatttgtatg

SEQ ID NO: 747939 - DNA, 33 bp, Homo sapien
tggccaatcaattactcagaattcttaggacca

SEQ ID NO: 747940 - DNA, 33 bp, Homo sapien
tggccaatcaattactgagaattcttaggacca

SEQ ID NO: 747941 - DNA, 33 bp, Homo sapien
cttatttgtcatgagaactttaggcttatctgt

SEQ ID NO: 747942 - DNA, 33 bp, Homo sapien
cttatttgtcatgagatctttaggcttatctgt

SEQ ID NO: 747943 - DNA, 33 bp, Homo sapien
gaacttcctgaatcaaagtgtggactgtccaca

SEQ ID NO: 747944 - DNA, 33 bp, Homo sapien
gaacttcctgaatcaaggtgtggactgtccaca

SEQ ID NO: 747945 - DNA, 33 bp, Homo sapien
aacaagtgcctgcacactagctggggagccgaa

SEQ ID NO: 747946 - DNA, 33 bp, Homo sapien
aacaagtgcctgcacattagctggggagccgaa

SEQ ID NO: 747947 - DNA, 33 bp, Homo sapien
tttcagctgtgactaaataagaaataaccccca

SEQ ID NO: 747948 - DNA, 33 bp, Homo sapien
tttcagctgtgactaagtaagaaataaccccca

SEQ ID NO: 747949 - DNA, 33 bp, Homo sapien
ctgagatgaatgaagacgggaacaggaaagaaa

SEQ ID NO: 747950 - DNA, 33 bp, Homo sapien
ctgagatgaatgaagatgggaacaggaaagaaa

SEQ ID NO: 747951 - DNA, 33 bp, Homo sapien
tgttagacatactgttcggatctgccaaagtct

SEQ ID NO: 747952 - DNA, 33 bp, Homo sapien
tgttagacatactgtttggatctgccaaagtct

SEQ ID NO: 747953 - DNA, 33 bp, Homo sapien
aatacagcctgtaaaacgtgatgagaatctgac

SEQ ID NO: 747954 - DNA, 33 bp, Homo sapien
aatacagcctgtaaaatgtgatgagaatctgac

SEQ ID NO: 747955 - DNA, 33 bp, Homo sapien
gtatgtaactgaatacactgttgctatcattac

SEQ ID NO: 747956 - DNA, 33 bp, Homo sapien
gtatgtaactgaatacgctgttgctatcattac

SEQ ID NO: 747957 - DNA, 33 bp, Homo sapien
agtcggggcagggagtaaatgagaactctactt

SEQ ID NO: 747958 - DNA, 33 bp, Homo sapien
agtcggggcagggagtcaatgagaactctactt

SEQ ID NO: 747959 - DNA, 33 bp, Homo sapien
ctaggacatttcccataaccttccctgtcaagc

SEQ ID NO: 747960 - DNA, 33 bp, Homo sapien
ctaggacatttcccatgaccttccctgtcaagc

SEQ ID NO: 747961 - DNA, 33 bp, Homo sapien
ttttctagtgagctgacgatcagtgtcgagact

SEQ ID NO: 747962 - DNA, 33 bp, Homo sapien
ttttctagtgagctgaggatcagtgtcgagact

SEQ ID NO: 747963 - DNA, 33 bp, Homo sapien
gcattttctttaattaggaatgtgggcaataaa

SEQ ID NO: 747964 - DNA, 33 bp, Homo sapien
gcattttctttaattatgaatgtgggcaataaa

SEQ ID NO: 747965 - DNA, 33 bp, Homo sapien
tttcagacaagctctcaataaccctggagtaga

SEQ ID NO: 747966 - DNA, 33 bp, Homo sapien
tttcagacaagctctcgataaccctggagtaga

SEQ ID NO: 747967 - DNA, 33 bp, Homo sapien
atctcgtggttcagaactgcttggttgccgctt

SEQ ID NO: 747968 - DNA, 33 bp, Homo sapien
atctcgtggttcagaagtgcttggttgccgctt

SEQ ID NO: 747969 - DNA, 33 bp, Homo sapien
gaggagcaaggtggaccgacatccaatcaggct

SEQ ID NO: 747970 - DNA, 33 bp, Homo sapien
gaggagcaaggtggacggacatccaatcaggct

SEQ ID NO: 747971 - DNA, 33 bp, Homo sapien
ttctaaccttagagaaacaccggcaaacgactc

SEQ ID NO: 747972 - DNA, 33 bp, Homo sapien
ttctaaccttagagaaccaccggcaaacgactc

SEQ ID NO: 747973 - DNA, 33 bp, Homo sapien
gacccggataaagaaagacaattggtgggtcct

SEQ ID NO: 747974 - DNA, 33 bp, Homo sapien
gacccggataaagaaatacaattggtgggtcct

SEQ ID NO: 747975 - DNA, 33 bp, Homo sapien
tgtatgaatgaatggcactttctttctcatact

SEQ ID NO: 747976 - DNA, 33 bp, Homo sapien
tgtatgaatgaatggcgctttctttctcatact

SEQ ID NO: 747977 - DNA, 33 bp, Homo sapien
ccagagacactcatccagagagaacaagaaact

SEQ ID NO: 747978 - DNA, 33 bp, Homo sapien
ccagagacactcatccggagagaacaagaaact

SEQ ID NO: 747979 - DNA, 33 bp, Homo sapien
agtccttcagaactggaactttcagactcaatc

SEQ ID NO: 747980 - DNA, 33 bp, Homo sapien
agtccttcagaactgggactttcagactcaatc

SEQ ID NO: 747981 - DNA, 33 bp, Homo sapien
tttcactaattgcgcaggatatctaccgtaagt

SEQ ID NO: 747982 - DNA, 33 bp, Homo sapien
tttcactaattgcgcatgatatctaccgtaagt

SEQ ID NO: 747983 - DNA, 33 bp, Homo sapien
acaaaaagccatgcccacactgaacgatataca

SEQ ID NO: 747984 - DNA, 33 bp, Homo sapien
acaaaaagccatgcccgcactgaacgatataca

SEQ ID NO: 747985 - DNA, 33 bp, Homo sapien
gaaacgtgaccaataaactcccagaatctcaaa

SEQ ID NO: 747986 - DNA, 33 bp, Homo sapien
gaaacgtgaccaataagctcccagaatctcaaa

SEQ ID NO: 747987 - DNA, 33 bp, Homo sapien
accatagcacctacgggattgaaggtcattttc

SEQ ID NO: 747988 - DNA, 33 bp, Homo sapien
accatagcacctacggtattgaaggtcattttc

SEQ ID NO: 747989 - DNA, 33 bp, Homo sapien
caccatctgattggacaaatggtcaccgatgaa

SEQ ID NO: 747990 - DNA, 33 bp, Homo sapien
caccatctgattggacgaatggtcaccgatgaa

SEQ ID NO: 747991 - DNA, 33 bp, Homo sapien
ttctggctagaaaaacaataccttaaggatcct

SEQ ID NO: 747992 - DNA, 33 bp, Homo sapien
ttctggctagaaaaacgataccttaaggatcct

SEQ ID NO: 747993 - DNA, 33 bp, Homo sapien
gatcttatccttcggaagacatagatgagctgg

SEQ ID NO: 747994 - DNA, 33 bp, Homo sapien
gatcttatccttcggaggacatagatgagctgg

SEQ ID NO: 747995 - DNA, 33 bp, Homo sapien
gcttcagtctggttccaaagagcattgctgcaa

SEQ ID NO: 747996 - DNA, 33 bp, Homo sapien
gcttcagtctggttccgaagagcattgctgcaa

SEQ ID NO: 747997 - DNA, 33 bp, Homo sapien
tcttaggctgtatgtacaaaaggatctcttaga

SEQ ID NO: 747998 - DNA, 33 bp, Homo sapien
tcttaggctgtatgtataaaaggatctcttaga

SEQ ID NO: 747999 - DNA, 33 bp, Homo sapien
cagagaagggtacccaagtccaagcagtaggat

SEQ ID NO: 748000 - DNA, 33 bp, Homo sapien
cagagaagggtacccacgtccaagcagtaggat

SEQ ID NO: 748001 - DNA, 33 bp, Homo sapien
acatggctggaaaatcagagttggctgttggct

SEQ ID NO: 748002 - DNA, 33 bp, Homo sapien
acatggctggaaaatcggagttggctgttggct

SEQ ID NO: 748003 - DNA, 33 bp, Homo sapien
tgggatggcttgctacgccgcaacagataaccg

SEQ ID NO: 748004 - DNA, 33 bp, Homo sapien
tgggatggcttgctactccgcaacagataaccg

SEQ ID NO: 748005 - DNA, 33 bp, Homo sapien
gcaacagataaccgtaacaccagggttccagca

SEQ ID NO: 748006 - DNA, 33 bp, Homo sapien
gcaacagataaccgtagcaccagggttccagca

SEQ ID NO: 748007 - DNA, 33 bp, Homo sapien
cccagacctcctgacccgatgcaattctctccc

SEQ ID NO: 748008 - DNA, 33 bp, Homo sapien
cccagacctcctgaccggatgcaattctctccc

SEQ ID NO: 748009 - DNA, 33 bp, Homo sapien
aatgacgggaaggccaactgttcatagtgacgc

SEQ ID NO: 748010 - DNA, 33 bp, Homo sapien
aatgacgggaaggccagctgttcatagtgacgc

SEQ ID NO: 748011 - DNA, 33 bp, Homo sapien
ggaccgagacttgttcactgctgaatcccggtg

SEQ ID NO: 748012 - DNA, 33 bp, Homo sapien
ggaccgagacttgttcgctgctgaatcccggtg

SEQ ID NO: 748013 - DNA, 33 bp, Homo sapien
gctgtaacactcaccgcaaaggtctgcagcttc

SEQ ID NO: 748014 - DNA, 33 bp, Homo sapien
gctgtaacactcaccgtaaaggtctgcagcttc

SEQ ID NO: 748015 - DNA, 33 bp, Homo sapien
ttgagaaatcaagtagaatgaagataggtagta

SEQ ID NO: 748016 - DNA, 33 bp, Homo sapien
ttgagaaatcaagtaggatgaagataggtagta

SEQ ID NO: 748017 - DNA, 33 bp, Homo sapien
ttgcacaagtactccacctttcagactctatcg

SEQ ID NO: 748018 - DNA, 33 bp, Homo sapien
ttgcacaagtactccatctttcagactctatcg

SEQ ID NO: 748019 - DNA, 33 bp, Homo sapien
agccgttgagacctccaataagttcttgccatg

SEQ ID NO: 748020 - DNA, 33 bp, Homo sapien
agccgttgagacctcccataagttcttgccatg

SEQ ID NO: 748021 - DNA, 33 bp, Homo sapien
tgctgctgacgacacacgagcagagtcgaaagc

SEQ ID NO: 748022 - DNA, 33 bp, Homo sapien
tgctgctgacgacacaggagcagagtcgaaagc

SEQ ID NO: 748023 - DNA, 33 bp, Homo sapien
actccagttttccaacagcgagagcttatttac

SEQ ID NO: 748024 - DNA, 33 bp, Homo sapien
actccagttttccaacggcgagagcttatttac

SEQ ID NO: 748025 - DNA, 33 bp, Homo sapien
taggttcgagatttcaatccaggtttgtctaac

SEQ ID NO: 748026 - DNA, 33 bp, Homo sapien
taggttcgagatttcagtccaggtttgtctaac

SEQ ID NO: 748027 - DNA, 33 bp, Homo sapien
aaaaaaatagcgccccagaagagcctcgtcctg

SEQ ID NO: 748028 - DNA, 33 bp, Homo sapien
aaaaaaatagcgccccggaagagcctcgtcctg

SEQ ID NO: 748029 - DNA, 33 bp, Homo sapien
atattaatacgtggctaagattaatgacagcaa

SEQ ID NO: 748030 - DNA, 33 bp, Homo sapien
atattaatacgtggctcagattaatgacagcaa

SEQ ID NO: 748031 - DNA, 33 bp, Homo sapien
gatacagggcaaaagcaacaggaaaagatgtat

SEQ ID NO: 748032 - DNA, 33 bp, Homo sapien
gatacagggcaaaagccacaggaaaagatgtat

SEQ ID NO: 748033 - DNA, 33 bp, Homo sapien
ccttttgagtgagaaacgttagacagcatgatt

SEQ ID NO: 748034 - DNA, 33 bp, Homo sapien
ccttttgagtgagaaatgttagacagcatgatt

SEQ ID NO: 748035 - DNA, 33 bp, Homo sapien
cagctgggtttagacacggttagacagggccaa

SEQ ID NO: 748036 - DNA, 33 bp, Homo sapien
cagctgggtttagacagggttagacagggccaa

SEQ ID NO: 748037 - DNA, 33 bp, Homo sapien
caatatagattttaggaagccaccatcaattga

SEQ ID NO: 748038 - DNA, 33 bp, Homo sapien
caatatagattttagggagccaccatcaattga

SEQ ID NO: 748039 - DNA, 33 bp, Homo sapien
taagtatgtagtgaagaaccttgagattttcag

SEQ ID NO: 748040 - DNA, 33 bp, Homo sapien
taagtatgtagtgaagtaccttgagattttcag

SEQ ID NO: 748041 - DNA, 33 bp, Homo sapien
tctgcccactcagggacagataggatgagttta

SEQ ID NO: 748042 - DNA, 33 bp, Homo sapien
tctgcccactcagggatagataggatgagttta

SEQ ID NO: 748043 - DNA, 33 bp, Homo sapien
acctagctattactcaactggaaaaaagccaga

SEQ ID NO: 748044 - DNA, 33 bp, Homo sapien
acctagctattactcagctggaaaaaagccaga

SEQ ID NO: 748045 - DNA, 33 bp, Homo sapien
acaaaggttcaaactacgcaggtccatttatat

SEQ ID NO: 748046 - DNA, 33 bp, Homo sapien
acaaaggttcaaactatgcaggtccatttatat

SEQ ID NO: 748047 - DNA, 33 bp, Homo sapien
gccgtcccaaaactcagatttctggagtccctt

SEQ ID NO: 748048 - DNA, 33 bp, Homo sapien
gccgtcccaaaactcatatttctggagtccctt

SEQ ID NO: 748049 - DNA, 33 bp, Homo sapien
agtctggctgaagagtaaaaaccaacatatgga

SEQ ID NO: 748050 - DNA, 33 bp, Homo sapien
agtctggctgaagagtgaaaaccaacatatgga

SEQ ID NO: 748051 - DNA, 33 bp, Homo sapien
ctggtgatggatatgcaaactagcttgatttaa

SEQ ID NO: 748052 - DNA, 33 bp, Homo sapien
ctggtgatggatatgcgaactagcttgatttaa

SEQ ID NO: 748053 - DNA, 33 bp, Homo sapien
tgtcttctgtatctgacgaccttcacccccatc

SEQ ID NO: 748054 - DNA, 33 bp, Homo sapien
tgtcttctgtatctgatgaccttcacccccatc

SEQ ID NO: 748055 - DNA, 33 bp, Homo sapien
gggctcactggaaccgaatgcttgaagggcagc

SEQ ID NO: 748056 - DNA, 33 bp, Homo sapien
gggctcactggaaccgcatgcttgaagggcagc

SEQ ID NO: 748057 - DNA, 33 bp, Homo sapien
tgtccagccgcatacagcaattctattcacatt

SEQ ID NO: 748058 - DNA, 33 bp, Homo sapien
tgtccagccgcatacatcaattctattcacatt

SEQ ID NO: 748059 - DNA, 33 bp, Homo sapien
gttatagtctaaggagcacatatttggatgatg

SEQ ID NO: 748060 - DNA, 33 bp, Homo sapien
gttatagtctaaggagtacatatttggatgatg

SEQ ID NO: 748061 - DNA, 33 bp, Homo sapien
actcctctttccccaacgcacatgagcgtgtga

SEQ ID NO: 748062 - DNA, 33 bp, Homo sapien
actcctctttccccaatgcacatgagcgtgtga

SEQ ID NO: 748063 - DNA, 33 bp, Homo sapien
gtcctttaccttcctcaaaatatggctcaggag

SEQ ID NO: 748064 - DNA, 33 bp, Homo sapien
gtcctttaccttcctccaaatatggctcaggag

SEQ ID NO: 748065 - DNA, 33 bp, Homo sapien
gcgtctatgccgggacagggaaaagagatggaa

SEQ ID NO: 748066 - DNA, 33 bp, Homo sapien
gcgtctatgccgggaccgggaaaagagatggaa

SEQ ID NO: 748067 - DNA, 33 bp, Homo sapien
gatttggttcaactaaaatattggcttgaggtt

SEQ ID NO: 748068 - DNA, 33 bp, Homo sapien
gatttggttcaactaagatattggcttgaggtt

SEQ ID NO: 748069 - DNA, 33 bp, Homo sapien
ccataatgacagtatacgagtttgtgacttgga

SEQ ID NO: 748070 - DNA, 33 bp, Homo sapien
ccataatgacagtataggagtttgtgacttgga

SEQ ID NO: 748071 - DNA, 33 bp, Homo sapien
tcatttgtgtacttgcacatttacacttatgta

SEQ ID NO: 748072 - DNA, 33 bp, Homo sapien
tcatttgtgtacttgcgcatttacacttatgta

SEQ ID NO: 748073 - DNA, 33 bp, Homo sapien
ttgtcaagtgttcacactgagaaaagctctgta

SEQ ID NO: 748074 - DNA, 33 bp, Homo sapien
ttgtcaagtgttcacattgagaaaagctctgta

SEQ ID NO: 748075 - DNA, 33 bp, Homo sapien
aacagtactagttggcactctgaagcatttaag

SEQ ID NO: 748076 - DNA, 33 bp, Homo sapien
aacagtactagttggcgctctgaagcatttaag

SEQ ID NO: 748077 - DNA, 33 bp, Homo sapien
tacaatgtatgatcgcactgacttctcaaatca

SEQ ID NO: 748078 - DNA, 33 bp, Homo sapien
tacaatgtatgatcgcgctgacttctcaaatca

SEQ ID NO: 748079 - DNA, 33 bp, Homo sapien
ccttggtcattcaaccaaagataaatttcaact

SEQ ID NO: 748080 - DNA, 33 bp, Homo sapien
ccttggtcattcaaccgaagataaatttcaact

SEQ ID NO: 748081 - DNA, 33 bp, Homo sapien
ctaagatctatttgaaactgtattccttatatg

SEQ ID NO: 748082 - DNA, 33 bp, Homo sapien
ctaagatctatttgaagctgtattccttatatg

SEQ ID NO: 748083 - DNA, 33 bp, Homo sapien
ggtaacctcctgcagcagatcattttcagaggt

SEQ ID NO: 748084 - DNA, 33 bp, Homo sapien
ggtaacctcctgcagcggatcattttcagaggt

SEQ ID NO: 748085 - DNA, 33 bp, Homo sapien
tgtaatgactcttcaccgagcagcattaccttc

SEQ ID NO: 748086 - DNA, 33 bp, Homo sapien
tgtaatgactcttcactgagcagcattaccttc

SEQ ID NO: 748087 - DNA, 33 bp, Homo sapien
ccccgcttaactcttcaaggttcctttaagcca

SEQ ID NO: 748088 - DNA, 33 bp, Homo sapien
ccccgcttaactcttccaggttcctttaagcca

SEQ ID NO: 748089 - DNA, 33 bp, Homo sapien
tccaatgaagtgaacagagagagaaatgaagac

SEQ ID NO: 748090 - DNA, 33 bp, Homo sapien
tccaatgaagtgaacatagagagaaatgaagac

SEQ ID NO: 748091 - DNA, 33 bp, Homo sapien
aaggtctggcaagatccgacacctctgtgatct

SEQ ID NO: 748092 - DNA, 33 bp, Homo sapien
aaggtctggcaagatctgacacctctgtgatct

SEQ ID NO: 748093 - DNA, 33 bp, Homo sapien
cagagaaaaagccaagactgtgcaatgaatggc

SEQ ID NO: 748094 - DNA, 33 bp, Homo sapien
cagagaaaaagccaagtctgtgcaatgaatggc

SEQ ID NO: 748095 - DNA, 33 bp, Homo sapien
tcctctacctttgtaccctgacagtccaggatc

SEQ ID NO: 748096 - DNA, 33 bp, Homo sapien
tcctctacctttgtactctgacagtccaggatc

SEQ ID NO: 748097 - DNA, 33 bp, Homo sapien
agctatcaatgactaaagcatttttaaagcatg

SEQ ID NO: 748098 - DNA, 33 bp, Homo sapien
agctatcaatgactaaggcatttttaaagcatg

SEQ ID NO: 748099 - DNA, 33 bp, Homo sapien
tgagtgtttggggaaggctactgcagaatgaac

SEQ ID NO: 748100 - DNA, 33 bp, Homo sapien
tgagtgtttggggaagtctactgcagaatgaac

SEQ ID NO: 748101 - DNA, 33 bp, Homo sapien
atggtgtacttttcctcactcttcctagtcagg

SEQ ID NO: 748102 - DNA, 33 bp, Homo sapien
atggtgtacttttccttactcttcctagtcagg

SEQ ID NO: 748103 - DNA, 33 bp, Homo sapien
ttcaataataacccaaacttaattgtgtcataa

SEQ ID NO: 748104 - DNA, 33 bp, Homo sapien
ttcaataataacccaaccttaattgtgtcataa

SEQ ID NO: 748105 - DNA, 33 bp, Homo sapien
gtaaccaatcgctgcccggaattatgtactcat

SEQ ID NO: 748106 - DNA, 33 bp, Homo sapien
gtaaccaatcgctgcctggaattatgtactcat

SEQ ID NO: 748107 - DNA, 33 bp, Homo sapien
agagcaagtttacaaggccgtctttccccagca

SEQ ID NO: 748108 - DNA, 33 bp, Homo sapien
agagcaagtttacaagtccgtctttccccagca

SEQ ID NO: 748109 - DNA, 33 bp, Homo sapien
gtgggacagatgggacaacatggggtttgagct

SEQ ID NO: 748110 - DNA, 33 bp, Homo sapien
gtgggacagatgggacgacatggggtttgagct

SEQ ID NO: 748111 - DNA, 33 bp, Homo sapien
tgttgtaagaattaaacacctttccatgccccg

SEQ ID NO: 748112 - DNA, 33 bp, Homo sapien
tgttgtaagaattaaagacctttccatgccccg

SEQ ID NO: 748113 - DNA, 33 bp, Homo sapien
aagaaggcatagcccacgctgttatttaataat

SEQ ID NO: 748114 - DNA, 33 bp, Homo sapien
aagaaggcatagcccatgctgttatttaataat

SEQ ID NO: 748115 - DNA, 33 bp, Homo sapien
aagcatgtgacaaaaaacaaaacttgtcaccca

SEQ ID NO: 748116 - DNA, 33 bp, Homo sapien
aagcatgtgacaaaaaccaaaacttgtcaccca

SEQ ID NO: 748117 - DNA, 33 bp, Homo sapien
agggtgcttgctcaccaaaagtacagtgatagt

SEQ ID NO: 748118 - DNA, 33 bp, Homo sapien
agggtgcttgctcaccgaaagtacagtgatagt

SEQ ID NO: 748119 - DNA, 33 bp, Homo sapien
ttgagaagattaaataagtcatgttatatgtaa

SEQ ID NO: 748120 - DNA, 33 bp, Homo sapien
ttgagaagattaaataggtcatgttatatgtaa

SEQ ID NO: 748121 - DNA, 33 bp, Homo sapien
aaccagatgcacctaacggatcctgattgtaat

SEQ ID NO: 748122 - DNA, 33 bp, Homo sapien
aaccagatgcacctaatggatcctgattgtaat

SEQ ID NO: 748123 - DNA, 33 bp, Homo sapien
ctaacagagataagcaaacaactaggagccaaa

SEQ ID NO: 748124 - DNA, 33 bp, Homo sapien
ctaacagagataagcatacaactaggagccaaa

SEQ ID NO: 748125 - DNA, 33 bp, Homo sapien
agaatatcaataaacacgcagaaattataaaaa

SEQ ID NO: 748126 - DNA, 33 bp, Homo sapien
agaatatcaataaacaggcagaaattataaaaa

SEQ ID NO: 748127 - DNA, 33 bp, Homo sapien
cccggggtccgagtccaagacagctaactgcaa

SEQ ID NO: 748128 - DNA, 33 bp, Homo sapien
cccggggtccgagtccgagacagctaactgcaa

SEQ ID NO: 748129 - DNA, 33 bp, Homo sapien
agcaggggcacagcgaggagcaaggcaccgtgg

SEQ ID NO: 748130 - DNA, 33 bp, Homo sapien
agcaggggcacagcgatgagcaaggcaccgtgg

SEQ ID NO: 748131 - DNA, 33 bp, Homo sapien
caattcactacaagtgccaagagctagaataga

SEQ ID NO: 748132 - DNA, 33 bp, Homo sapien
caattcactacaagtgtcaagagctagaataga

SEQ ID NO: 748133 - DNA, 33 bp, Homo sapien
tattaaaaataaagagccagcttccaaaaagta

SEQ ID NO: 748134 - DNA, 33 bp, Homo sapien
tattaaaaataaagaggcagcttccaaaaagta

SEQ ID NO: 748135 - DNA, 33 bp, Homo sapien
cacagtggagtgggacacatggaagctttgagt

SEQ ID NO: 748136 - DNA, 33 bp, Homo sapien
cacagtggagtgggacgcatggaagctttgagt

SEQ ID NO: 748137 - DNA, 33 bp, Homo sapien
acagacaagtgatgagaacatttcggttttgta

SEQ ID NO: 748138 - DNA, 33 bp, Homo sapien
acagacaagtgatgaggacatttcggttttgta

SEQ ID NO: 748139 - DNA, 33 bp, Homo sapien
gtgtaggcagatgcaaaatcaggagggtgaagg

SEQ ID NO: 748140 - DNA, 33 bp, Homo sapien
gtgtaggcagatgcaagatcaggagggtgaagg

SEQ ID NO: 748141 - DNA, 33 bp, Homo sapien
atctctccaaatactacaatctctccaaatact

SEQ ID NO: 748142 - DNA, 33 bp, Homo sapien
atctctccaaatactataatctctccaaatact

SEQ ID NO: 748143 - DNA, 33 bp, Homo sapien
gtattaatgaatgtagaagaactgacatttaga

SEQ ID NO: 748144 - DNA, 33 bp, Homo sapien
gtattaatgaatgtaggagaactgacatttaga

SEQ ID NO: 748145 - DNA, 33 bp, Homo sapien
gacctgcaacttatacacctttattgttcacct

SEQ ID NO: 748146 - DNA, 33 bp, Homo sapien
gacctgcaacttatacgcctttattgttcacct

SEQ ID NO: 748147 - DNA, 33 bp, Homo sapien
gaggactaaacaaggtaacacttacacaggtac

SEQ ID NO: 748148 - DNA, 33 bp, Homo sapien
gaggactaaacaaggtgacacttacacaggtac

SEQ ID NO: 748149 - DNA, 33 bp, Homo sapien
gtgttatcatgagctgccaatcatgtagtgaac

SEQ ID NO: 748150 - DNA, 33 bp, Homo sapien
gtgttatcatgagctgtcaatcatgtagtgaac

SEQ ID NO: 748151 - DNA, 33 bp, Homo sapien
ataaatcaacagaagagaataccaggaatatgg

SEQ ID NO: 748152 - DNA, 33 bp, Homo sapien
ataaatcaacagaagataataccaggaatatgg

SEQ ID NO: 748153 - DNA, 33 bp, Homo sapien
tgtggcgcaaggtgaacgtgagtctgtagggta

SEQ ID NO: 748154 - DNA, 33 bp, Homo sapien
tgtggcgcaaggtgaatgtgagtctgtagggta

SEQ ID NO: 748155 - DNA, 33 bp, Homo sapien
attaataaaatctatccaaagagtcagctcctt

SEQ ID NO: 748156 - DNA, 33 bp, Homo sapien
attaataaaatctatcgaaagagtcagctcctt

SEQ ID NO: 748157 - DNA, 33 bp, Homo sapien
agtcttctattccgtaggtagcaaggagctgac

SEQ ID NO: 748158 - DNA, 33 bp, Homo sapien
agtcttctattccgtatgtagcaaggagctgac

SEQ ID NO: 748159 - DNA, 33 bp, Homo sapien
gtctaatttgaaactcaaagataagccaagttg

SEQ ID NO: 748160 - DNA, 33 bp, Homo sapien
gtctaatttgaaactcgaagataagccaagttg

SEQ ID NO: 748161 - DNA, 33 bp, Homo sapien
ctgtggtgtggccaaccgaccactttttatgaa

SEQ ID NO: 748162 - DNA, 33 bp, Homo sapien
ctgtggtgtggccaactgaccactttttatgaa

SEQ ID NO: 748163 - DNA, 33 bp, Homo sapien
tctttgaatccacagcacctagcacagtgctca

SEQ ID NO: 748164 - DNA, 33 bp, Homo sapien
tctttgaatccacagcgcctagcacagtgctca

SEQ ID NO: 748165 - DNA, 33 bp, Homo sapien
cacaactaacttttgcccaaaatacagatgcaa

SEQ ID NO: 748166 - DNA, 33 bp, Homo sapien
cacaactaacttttgctcaaaatacagatgcaa

SEQ ID NO: 748167 - DNA, 33 bp, Homo sapien
gacaaataataaatgcacaacctaaaaattgat

SEQ ID NO: 748168 - DNA, 33 bp, Homo sapien
gacaaataataaatgcgcaacctaaaaattgat

SEQ ID NO: 748169 - DNA, 33 bp, Homo sapien
cttaatcataatagcaacctggtaagtgaggtc

SEQ ID NO: 748170 - DNA, 33 bp, Homo sapien
cttaatcataatagcatcctggtaagtgaggtc

SEQ ID NO: 748171 - DNA, 33 bp, Homo sapien
tctgacattaaaagaaactgaagaaatgcaagt

SEQ ID NO: 748172 - DNA, 33 bp, Homo sapien
tctgacattaaaagaagctgaagaaatgcaagt

SEQ ID NO: 748173 - DNA, 33 bp, Homo sapien
tttctttctactctgtgaaatgtgttatgtgga

SEQ ID NO: 748174 - DNA, 33 bp, Homo sapien
tttctttctactctgttaaatgtgttatgtgga

SEQ ID NO: 748175 - DNA, 33 bp, Homo sapien
aatatctttctgatacaattagacagttttatc

SEQ ID NO: 748176 - DNA, 33 bp, Homo sapien
aatatctttctgataccattagacagttttatc

SEQ ID NO: 748177 - DNA, 33 bp, Homo sapien
taaccagtgcccccaagaattttgaagaaaaga

SEQ ID NO: 748178 - DNA, 33 bp, Homo sapien
taaccagtgcccccaataattttgaagaaaaga

SEQ ID NO: 748179 - DNA, 33 bp, Homo sapien
cttcacaaggactctgaaagttaagtactggtg

SEQ ID NO: 748180 - DNA, 33 bp, Homo sapien
cttcacaaggactctggaagttaagtactggtg

SEQ ID NO: 748181 - DNA, 33 bp, Homo sapien
acgtgttgcttcttgcactctaaataaagacta

SEQ ID NO: 748182 - DNA, 33 bp, Homo sapien
acgtgttgcttcttgcgctctaaataaagacta

SEQ ID NO: 748183 - DNA, 33 bp, Homo sapien
gaggacatgatggaaccgtatttgcaacatacc

SEQ ID NO: 748184 - DNA, 33 bp, Homo sapien
gaggacatgatggaactgtatttgcaacatacc

SEQ ID NO: 748185 - DNA, 33 bp, Homo sapien
taccctgcttgtaaagaactgttgccgtaaagg

SEQ ID NO: 748186 - DNA, 33 bp, Homo sapien
taccctgcttgtaaaggactgttgccgtaaagg

SEQ ID NO: 748187 - DNA, 33 bp, Homo sapien
ctaagttagccatatgaacctgaaagtcacctg

SEQ ID NO: 748188 - DNA, 33 bp, Homo sapien
ctaagttagccatatggacctgaaagtcacctg

SEQ ID NO: 748189 - DNA, 33 bp, Homo sapien
tgctttgatgggctagaagagaaatggtttgct

SEQ ID NO: 748190 - DNA, 33 bp, Homo sapien
tgctttgatgggctaggagagaaatggtttgct

SEQ ID NO: 748191 - DNA, 33 bp, Homo sapien
cttgaaaatcactgaccgcactgtggtataaag

SEQ ID NO: 748192 - DNA, 33 bp, Homo sapien
cttgaaaatcactgactgcactgtggtataaag

SEQ ID NO: 748193 - DNA, 33 bp, Homo sapien
ttcctcggggacaaaacgagaagcagggagacc

SEQ ID NO: 748194 - DNA, 33 bp, Homo sapien
ttcctcggggacaaaaggagaagcagggagacc

SEQ ID NO: 748195 - DNA, 33 bp, Homo sapien
agtgttgccaaacacaatggtcttggaggaagg

SEQ ID NO: 748196 - DNA, 33 bp, Homo sapien
agtgttgccaaacacagtggtcttggaggaagg

SEQ ID NO: 748197 - DNA, 33 bp, Homo sapien
tcacttggcaaagctcagaccaatagtaatctt

SEQ ID NO: 748198 - DNA, 33 bp, Homo sapien
tcacttggcaaagctccgaccaatagtaatctt

SEQ ID NO: 748199 - DNA, 33 bp, Homo sapien
atccactatatcaacagtcatatccaaacatca

SEQ ID NO: 748200 - DNA, 33 bp, Homo sapien
atccactatatcaacattcatatccaaacatca

SEQ ID NO: 748201 - DNA, 33 bp, Homo sapien
ttagggttagtcaataacgccgagcctcggagg

SEQ ID NO: 748202 - DNA, 33 bp, Homo sapien
ttagggttagtcaatagcgccgagcctcggagg

SEQ ID NO: 748203 - DNA, 33 bp, Homo sapien
gcttagactccagtaagaaaatatcgcaaagtg

SEQ ID NO: 748204 - DNA, 33 bp, Homo sapien
gcttagactccagtaataaaatatcgcaaagtg

SEQ ID NO: 748205 - DNA, 33 bp, Homo sapien
cctacaatttcaagtcacctatttaaactgaca

SEQ ID NO: 748206 - DNA, 33 bp, Homo sapien
cctacaatttcaagtctcctatttaaactgaca

SEQ ID NO: 748207 - DNA, 33 bp, Homo sapien
ctgtagtgaccatctgcaggttttaaggtttgt

SEQ ID NO: 748208 - DNA, 33 bp, Homo sapien
ctgtagtgaccatctggaggttttaaggtttgt

SEQ ID NO: 748209 - DNA, 33 bp, Homo sapien
aaggcctaccataaataaggtcaccctgtctga

SEQ ID NO: 748210 - DNA, 33 bp, Homo sapien
aaggcctaccataaatgaggtcaccctgtctga

SEQ ID NO: 748211 - DNA, 33 bp, Homo sapien
ctggtgctgtggtataagcgtgttcatcttgtg

SEQ ID NO: 748212 - DNA, 33 bp, Homo sapien
ctggtgctgtggtataggcgtgttcatcttgtg

SEQ ID NO: 748213 - DNA, 33 bp, Homo sapien
ctctgcatgtgacaccaggaattgtgatgggta

SEQ ID NO: 748214 - DNA, 33 bp, Homo sapien
ctctgcatgtgacaccgggaattgtgatgggta

SEQ ID NO: 748215 - DNA, 33 bp, Homo sapien
tgaattgctaaatgccactgaatggtctacttt

SEQ ID NO: 748216 - DNA, 33 bp, Homo sapien
tgaattgctaaatgccgctgaatggtctacttt

SEQ ID NO: 748217 - DNA, 33 bp, Homo sapien
tccttaaaaccgtcaacgtaccatcaaaaacaa

SEQ ID NO: 748218 - DNA, 33 bp, Homo sapien
tccttaaaaccgtcaatgtaccatcaaaaacaa

SEQ ID NO: 748219 - DNA, 33 bp, Homo sapien
tttcctctcttttcagaaattacattaatggca

SEQ ID NO: 748220 - DNA, 33 bp, Homo sapien
tttcctctcttttcaggaattacattaatggca

SEQ ID NO: 748221 - DNA, 33 bp, Homo sapien
gcctggtaattatcaaccaaatttccatttcct

SEQ ID NO: 748222 - DNA, 33 bp, Homo sapien
gcctggtaattatcaatcaaatttccatttcct

SEQ ID NO: 748223 - DNA, 33 bp, Homo sapien
gggtaggtttgtaccacgtgcaagttctactcc

SEQ ID NO: 748224 - DNA, 33 bp, Homo sapien
gggtaggtttgtaccaggtgcaagttctactcc

SEQ ID NO: 748225 - DNA, 33 bp, Homo sapien
gttattaatcaatgtacgtcctttgactccttc

SEQ ID NO: 748226 - DNA, 33 bp, Homo sapien
gttattaatcaatgtatgtcctttgactccttc

SEQ ID NO: 748227 - DNA, 33 bp, Homo sapien
acagtcactcacatacccatggcaacaaaaggc

SEQ ID NO: 748228 - DNA, 33 bp, Homo sapien
acagtcactcacatactcatggcaacaaaaggc

SEQ ID NO: 748229 - DNA, 33 bp, Homo sapien
gtaggagtaagaattcactgattaaaatgcaga

SEQ ID NO: 748230 - DNA, 33 bp, Homo sapien
gtaggagtaagaattcgctgattaaaatgcaga

SEQ ID NO: 748231 - DNA, 33 bp, Homo sapien
aaccatcctcagtggaaggtctatgctagtgtt

SEQ ID NO: 748232 - DNA, 33 bp, Homo sapien
aaccatcctcagtggagggtctatgctagtgtt

SEQ ID NO: 748233 - DNA, 33 bp, Homo sapien
agtcttttcaaacacaatgctttatggcagaag

SEQ ID NO: 748234 - DNA, 33 bp, Homo sapien
agtcttttcaaacacagtgctttatggcagaag

SEQ ID NO: 748235 - DNA, 33 bp, Homo sapien
aaattcaatctagcaaacaaattaacacagatc

SEQ ID NO: 748236 - DNA, 33 bp, Homo sapien
aaattcaatctagcaatcaaattaacacagatc

SEQ ID NO: 748237 - DNA, 33 bp, Homo sapien
aactaagatgcatgacagggaaaatgtcatctt

SEQ ID NO: 748238 - DNA, 33 bp, Homo sapien
aactaagatgcatgactgggaaaatgtcatctt

SEQ ID NO: 748239 - DNA, 33 bp, Homo sapien
agcaggatgacaaatacagaagcaaggatgggt

SEQ ID NO: 748240 - DNA, 33 bp, Homo sapien
agcaggatgacaaatatagaagcaaggatgggt

SEQ ID NO: 748241 - DNA, 33 bp, Homo sapien
aaatgacatataactgaacaaatggaaagctag

SEQ ID NO: 748242 - DNA, 33 bp, Homo sapien
aaatgacatataactgcacaaatggaaagctag

SEQ ID NO: 748243 - DNA, 33 bp, Homo sapien
aagaataatgtatttacaatgtgcatggtcttg

SEQ ID NO: 748244 - DNA, 33 bp, Homo sapien
aagaataatgtatttataatgtgcatggtcttg

SEQ ID NO: 748245 - DNA, 33 bp, Homo sapien
aatatattcaaaccacaatttgtccttgtcata

SEQ ID NO: 748246 - DNA, 33 bp, Homo sapien
aatatattcaaaccacgatttgtccttgtcata

SEQ ID NO: 748247 - DNA, 33 bp, Homo sapien
ggtcatttgatttaacagatggatccctgccaa

SEQ ID NO: 748248 - DNA, 33 bp, Homo sapien
ggtcatttgatttaacggatggatccctgccaa

SEQ ID NO: 748249 - DNA, 33 bp, Homo sapien
gatgattgagacaaaggcctggtctagaaatta

SEQ ID NO: 748250 - DNA, 33 bp, Homo sapien
gatgattgagacaaagtcctggtctagaaatta

SEQ ID NO: 748251 - DNA, 33 bp, Homo sapien
ggccctggcaagtgtcaaacaaactgtatttac

SEQ ID NO: 748252 - DNA, 33 bp, Homo sapien
ggccctggcaagtgtcgaacaaactgtatttac

SEQ ID NO: 748253 - DNA, 33 bp, Homo sapien
tgaagcggcaaataataaacatggaccactcag

SEQ ID NO: 748254 - DNA, 33 bp, Homo sapien
tgaagcggcaaataatgaacatggaccactcag

SEQ ID NO: 748255 - DNA, 33 bp, Homo sapien
ccattaacataacttacagcacctatgtccatg

SEQ ID NO: 748256 - DNA, 33 bp, Homo sapien
ccattaacataacttatagcacctatgtccatg

SEQ ID NO: 748257 - DNA, 33 bp, Homo sapien
ctgagccaggcgagaaagcacacctaggtcagt

SEQ ID NO: 748258 - DNA, 33 bp, Homo sapien
ctgagccaggcgagaaggcacacctaggtcagt

SEQ ID NO: 748259 - DNA, 33 bp, Homo sapien
gacacctaaacagatgccatactgtgtgaacag

SEQ ID NO: 748260 - DNA, 33 bp, Homo sapien
gacacctaaacagatggcatactgtgtgaacag

SEQ ID NO: 748261 - DNA, 33 bp, Homo sapien
cctttcacaaaagacacgtgtataatccctgaa

SEQ ID NO: 748262 - DNA, 33 bp, Homo sapien
cctttcacaaaagacatgtgtataatccctgaa

SEQ ID NO: 748263 - DNA, 33 bp, Homo sapien
ccttgctctccctgaacccaacatatcaagcag

SEQ ID NO: 748264 - DNA, 33 bp, Homo sapien
ccttgctctccctgaatccaacatatcaagcag

SEQ ID NO: 748265 - DNA, 33 bp, Homo sapien
tgcagataagagaaacacatcctttttggtgtt

SEQ ID NO: 748266 - DNA, 33 bp, Homo sapien
tgcagataagagaaacgcatcctttttggtgtt

SEQ ID NO: 748267 - DNA, 33 bp, Homo sapien
atacagttcacctgagaaatttgcccttgcctc

SEQ ID NO: 748268 - DNA, 33 bp, Homo sapien
atacagttcacctgagtaatttgcccttgcctc

SEQ ID NO: 748269 - DNA, 33 bp, Homo sapien
tacatgtaaaattctacagtacaggtagaggca

SEQ ID NO: 748270 - DNA, 33 bp, Homo sapien
tacatgtaaaattctatagtacaggtagaggca

SEQ ID NO: 748271 - DNA, 33 bp, Homo sapien
cagtgcatttttccacagattacagacaaaaag

SEQ ID NO: 748272 - DNA, 33 bp, Homo sapien
cagtgcatttttccacggattacagacaaaaag

SEQ ID NO: 748273 - DNA, 33 bp, Homo sapien
gggggtgtttgtgtacgacgtcagtgcattttt

SEQ ID NO: 748274 - DNA, 33 bp, Homo sapien
gggggtgtttgtgtactacgtcagtgcattttt

SEQ ID NO: 748275 - DNA, 33 bp, Homo sapien
tttacctacacactcaccctttctattactctt

SEQ ID NO: 748276 - DNA, 33 bp, Homo sapien
tttacctacacactcagcctttctattactctt

SEQ ID NO: 748277 - DNA, 33 bp, Homo sapien
gcacacctgtctcgcaacacataaaatgcagcg

SEQ ID NO: 748278 - DNA, 33 bp, Homo sapien
gcacacctgtctcgcatcacataaaatgcagcg

SEQ ID NO: 748279 - DNA, 33 bp, Homo sapien
ctttggtcaggaaaaccgtgtggtgcagaaagt

SEQ ID NO: 748280 - DNA, 33 bp, Homo sapien
ctttggtcaggaaaactgtgtggtgcagaaagt

SEQ ID NO: 748281 - DNA, 33 bp, Homo sapien
aggagctggtttcctcacatttggatcacagca

SEQ ID NO: 748282 - DNA, 33 bp, Homo sapien
aggagctggtttcctcgcatttggatcacagca

SEQ ID NO: 748283 - DNA, 33 bp, Homo sapien
gtcaagtccaatggcccaactaaggtaggaggc

SEQ ID NO: 748284 - DNA, 33 bp, Homo sapien
gtcaagtccaatggcctaactaaggtaggaggc

SEQ ID NO: 748285 - DNA, 33 bp, Homo sapien
gggtgggacccagtgaagaagaccttgttgctc

SEQ ID NO: 748286 - DNA, 33 bp, Homo sapien
gggtgggacccagtgaggaagaccttgttgctc

SEQ ID NO: 748287 - DNA, 33 bp, Homo sapien
aaagttttgcttgttaaaatcaaggtgacatca

SEQ ID NO: 748288 - DNA, 33 bp, Homo sapien
aaagttttgcttgttacaatcaaggtgacatca

SEQ ID NO: 748289 - DNA, 33 bp, Homo sapien
ccattttccaaaccacagcttggtcttcaaaca

SEQ ID NO: 748290 - DNA, 33 bp, Homo sapien
ccattttccaaaccacggcttggtcttcaaaca

SEQ ID NO: 748291 - DNA, 33 bp, Homo sapien
atgatttgagatttggaatggatgttcacacac

SEQ ID NO: 748292 - DNA, 33 bp, Homo sapien
atgatttgagatttggcatggatgttcacacac

SEQ ID NO: 748293 - DNA, 33 bp, Homo sapien
gctattctgttccaaacgtcataggttttatca

SEQ ID NO: 748294 - DNA, 33 bp, Homo sapien
gctattctgttccaaatgtcataggttttatca

SEQ ID NO: 748295 - DNA, 33 bp, Homo sapien
cctcgtttctgtataacactgcatttgaagggt

SEQ ID NO: 748296 - DNA, 33 bp, Homo sapien
cctcgtttctgtataatactgcatttgaagggt

SEQ ID NO: 748297 - DNA, 33 bp, Homo sapien
gaggaaagactgtccacgaaggaggccttttcc

SEQ ID NO: 748298 - DNA, 33 bp, Homo sapien
gaggaaagactgtccatgaaggaggccttttcc

SEQ ID NO: 748299 - DNA, 33 bp, Homo sapien
tcctgaggtcaggaaccaaagaagagcctctga

SEQ ID NO: 748300 - DNA, 33 bp, Homo sapien
tcctgaggtcaggaacgaaagaagagcctctga

SEQ ID NO: 748301 - DNA, 33 bp, Homo sapien
tctgcaatccacaagaagctccttataattttc

SEQ ID NO: 748302 - DNA, 33 bp, Homo sapien
tctgcaatccacaagaggctccttataattttc

SEQ ID NO: 748303 - DNA, 33 bp, Homo sapien
caacaccacaattgcaagtggttttcaggtatg

SEQ ID NO: 748304 - DNA, 33 bp, Homo sapien
caacaccacaattgcaggtggttttcaggtatg

SEQ ID NO: 748305 - DNA, 33 bp, Homo sapien
agttatacaggaaaatcaaggaagaagtgtaca

SEQ ID NO: 748306 - DNA, 33 bp, Homo sapien
agttatacaggaaaatgaaggaagaagtgtaca

SEQ ID NO: 748307 - DNA, 33 bp, Homo sapien
taatgccgggaattgacagagaatgatggaacc

SEQ ID NO: 748308 - DNA, 33 bp, Homo sapien
taatgccgggaattgatagagaatgatggaacc

SEQ ID NO: 748309 - DNA, 33 bp, Homo sapien
ttgattgagctggtaaagtccctgattagttca

SEQ ID NO: 748310 - DNA, 33 bp, Homo sapien
ttgattgagctggtaacgtccctgattagttca

SEQ ID NO: 748311 - DNA, 33 bp, Homo sapien
ggttgtcagttacaccaaaacagataactgatc

SEQ ID NO: 748312 - DNA, 33 bp, Homo sapien
ggttgtcagttacaccgaaacagataactgatc

SEQ ID NO: 748313 - DNA, 33 bp, Homo sapien
acgcttacaatattcaagtttaacctactccat

SEQ ID NO: 748314 - DNA, 33 bp, Homo sapien
acgcttacaatattcatgtttaacctactccat

SEQ ID NO: 748315 - DNA, 33 bp, Homo sapien
aagctggttcagaagccacgtggggagacgatg

SEQ ID NO: 748316 - DNA, 33 bp, Homo sapien
aagctggttcagaagctacgtggggagacgatg

SEQ ID NO: 748317 - DNA, 33 bp, Homo sapien
ttgcattttatgtgacagaggaggtactgattt

SEQ ID NO: 748318 - DNA, 33 bp, Homo sapien
ttgcattttatgtgacggaggaggtactgattt

SEQ ID NO: 748319 - DNA, 33 bp, Homo sapien
caatgtcttctctgagcaagcactggtccccaa

SEQ ID NO: 748320 - DNA, 33 bp, Homo sapien
caatgtcttctctgagtaagcactggtccccaa

SEQ ID NO: 748321 - DNA, 33 bp, Homo sapien
tagtgacaaaaacctcaagcttgggtgtcctga

SEQ ID NO: 748322 - DNA, 33 bp, Homo sapien
tagtgacaaaaacctcgagcttgggtgtcctga

SEQ ID NO: 748323 - DNA, 33 bp, Homo sapien
aagctgtctccctcctcaaagcgatatacacat

SEQ ID NO: 748324 - DNA, 33 bp, Homo sapien
aagctgtctccctccttaaagcgatatacacat

SEQ ID NO: 748325 - DNA, 33 bp, Homo sapien
aatagagtgtgtcaaaaacgtgcaattgatgaa

SEQ ID NO: 748326 - DNA, 33 bp, Homo sapien
aatagagtgtgtcaaagacgtgcaattgatgaa

SEQ ID NO: 748327 - DNA, 33 bp, Homo sapien
ttgcccaaactatccacgatcacaatgttctat

SEQ ID NO: 748328 - DNA, 33 bp, Homo sapien
ttgcccaaactatccatgatcacaatgttctat

SEQ ID NO: 748329 - DNA, 33 bp, Homo sapien
acaaattagcccataaagtggcctgatattttt

SEQ ID NO: 748330 - DNA, 33 bp, Homo sapien
acaaattagcccataacgtggcctgatattttt

SEQ ID NO: 748331 - DNA, 33 bp, Homo sapien
cttcctgtcttcctacactctcttgcaccaaat

SEQ ID NO: 748332 - DNA, 33 bp, Homo sapien
cttcctgtcttcctactctctcttgcaccaaat

SEQ ID NO: 748333 - DNA, 33 bp, Homo sapien
ttcttactagatatcaagttctggggtaaaaca

SEQ ID NO: 748334 - DNA, 33 bp, Homo sapien
ttcttactagatatcatgttctggggtaaaaca

SEQ ID NO: 748335 - DNA, 33 bp, Homo sapien
aaccggaagtgtttgaaaattgcaaacaaatgt

SEQ ID NO: 748336 - DNA, 33 bp, Homo sapien
aaccggaagtgtttgagaattgcaaacaaatgt

SEQ ID NO: 748337 - DNA, 33 bp, Homo sapien
gggagaataactttacaaaaagatccacggtaa

SEQ ID NO: 748338 - DNA, 33 bp, Homo sapien
gggagaataactttacgaaaagatccacggtaa

SEQ ID NO: 748339 - DNA, 33 bp, Homo sapien
tggaaaagcagagctacaaattaccatgcaggc

SEQ ID NO: 748340 - DNA, 33 bp, Homo sapien
tggaaaagcagagctagaaattaccatgcaggc

SEQ ID NO: 748341 - DNA, 33 bp, Homo sapien
atcttgacaaatggtaccactctgtcatttaag

SEQ ID NO: 748342 - DNA, 33 bp, Homo sapien
atcttgacaaatggtatcactctgtcatttaag

SEQ ID NO: 748343 - DNA, 33 bp, Homo sapien
tctggtagttgttccacggttctgggatacttt

SEQ ID NO: 748344 - DNA, 33 bp, Homo sapien
tctggtagttgttccatggttctgggatacttt

SEQ ID NO: 748345 - DNA, 33 bp, Homo sapien
tgggaaactaagaagggaagaatgcctagaaac

SEQ ID NO: 748346 - DNA, 33 bp, Homo sapien
tgggaaactaagaaggtaagaatgcctagaaac

SEQ ID NO: 748347 - DNA, 33 bp, Homo sapien
tcataaggagctctcaacttagatccttcacat

SEQ ID NO: 748348 - DNA, 33 bp, Homo sapien
tcataaggagctctcagcttagatccttcacat

SEQ ID NO: 748349 - DNA, 33 bp, Homo sapien
ggaattaaagttgccagaggattatcctggatt

SEQ ID NO: 748350 - DNA, 33 bp, Homo sapien
ggaattaaagttgccataggattatcctggatt

SEQ ID NO: 748351 - DNA, 33 bp, Homo sapien
agaagtctcacatccaactgagattcagactct

SEQ ID NO: 748352 - DNA, 33 bp, Homo sapien
agaagtctcacatccagctgagattcagactct

SEQ ID NO: 748353 - DNA, 33 bp, Homo sapien
caataacacaaagcaacaggagaggcaagattc

SEQ ID NO: 748354 - DNA, 33 bp, Homo sapien
caataacacaaagcaataggagaggcaagattc

SEQ ID NO: 748355 - DNA, 33 bp, Homo sapien
ataactttgttctggaatcacccttgttagata

SEQ ID NO: 748356 - DNA, 33 bp, Homo sapien
ataactttgttctggagtcacccttgttagata

SEQ ID NO: 748357 - DNA, 33 bp, Homo sapien
atttgaccctgtgatgcatttatcaaaatatgg

SEQ ID NO: 748358 - DNA, 33 bp, Homo sapien
atttgaccctgtgatgtatttatcaaaatatgg

SEQ ID NO: 748359 - DNA, 33 bp, Homo sapien
gaagtgaagggtagccaaaactgtagagtcaca

SEQ ID NO: 748360 - DNA, 33 bp, Homo sapien
gaagtgaagggtagccgaaactgtagagtcaca

SEQ ID NO: 748361 - DNA, 33 bp, Homo sapien
gcctgttaagtgttccagattgctgaaatagcc

SEQ ID NO: 748362 - DNA, 33 bp, Homo sapien
gcctgttaagtgttccggattgctgaaatagcc

SEQ ID NO: 748363 - DNA, 33 bp, Homo sapien
aattcttcttcacttaagtcttagctgcccagt

SEQ ID NO: 748364 - DNA, 33 bp, Homo sapien
aattcttcttcacttaggtcttagctgcccagt

SEQ ID NO: 748365 - DNA, 33 bp, Homo sapien
acacagagatctcagacggcttcaaacaagcct

SEQ ID NO: 748366 - DNA, 33 bp, Homo sapien
acacagagatctcagatggcttcaaacaagcct

SEQ ID NO: 748367 - DNA, 33 bp, Homo sapien
catgagctggtaaactcagtctgtttgcaatga

SEQ ID NO: 748368 - DNA, 33 bp, Homo sapien
catgagctggtaaacttagtctgtttgcaatga

SEQ ID NO: 748369 - DNA, 33 bp, Homo sapien
aaatagcataattgtcaaactacaaggtattta

SEQ ID NO: 748370 - DNA, 33 bp, Homo sapien
aaatagcataattgtccaactacaaggtattta

SEQ ID NO: 748371 - DNA, 33 bp, Homo sapien
ctgaggtgattaagaacgtatgacccggctggg

SEQ ID NO: 748372 - DNA, 33 bp, Homo sapien
ctgaggtgattaagaatgtatgacccggctggg

SEQ ID NO: 748373 - DNA, 33 bp, Homo sapien
agccctacctatctcacctatctaatctattgc

SEQ ID NO: 748374 - DNA, 33 bp, Homo sapien
agccctacctatctcatctatctaatctattgc

SEQ ID NO: 748375 - DNA, 33 bp, Homo sapien
tcacacaggttaagaaagtcagcctacatctga

SEQ ID NO: 748376 - DNA, 33 bp, Homo sapien
tcacacaggttaagaatgtcagcctacatctga

SEQ ID NO: 748377 - DNA, 33 bp, Homo sapien
tgagtaatgtagtccacatttgagtggccatgt

SEQ ID NO: 748378 - DNA, 33 bp, Homo sapien
tgagtaatgtagtccatatttgagtggccatgt

SEQ ID NO: 748379 - DNA, 33 bp, Homo sapien
gacaatgtaactggaaagttttagctaaagttc

SEQ ID NO: 748380 - DNA, 33 bp, Homo sapien
gacaatgtaactggaaggttttagctaaagttc

SEQ ID NO: 748381 - DNA, 33 bp, Homo sapien; identical to SEQ ID NO: 748379

SEQ ID NO: 748382 - DNA, 33 bp, Homo sapien; identical to SEQ ID NO: 748380

SEQ ID NO: 748383 - DNA, 33 bp, Homo sapien
gctgtacacagaagcacctattgacaaaaaggg

SEQ ID NO: 748384 - DNA, 33 bp, Homo sapien
gctgtacacagaagcatctattgacaaaaaggg

SEQ ID NO: 748385 - DNA, 33 bp, Homo sapien
cgagcaacatggtgaaattaatgggccctggtg

SEQ ID NO: 748386 - DNA, 33 bp, Homo sapien
cgagcaacatggtgaagttaatgggccctggtg

SEQ ID NO: 748387 - DNA, 33 bp, Homo sapien; identical to SEQ ID NO: 748385

SEQ ID NO: 748388 - DNA, 33 bp, Homo sapien; identical to SEQ ID NO: 748386

SEQ ID NO: 748389 - DNA, 33 bp, Homo sapien
agggatggtgagtgaacagtggcaagggaggtt

SEQ ID NO: 748390 - DNA, 33 bp, Homo sapien
agggatggtgagtgaatagtggcaagggaggtt

SEQ ID NO: 748391 - DNA, 33 bp, Homo sapien
agcctctggactattacgtgcaagtggaatcct

SEQ ID NO: 748392 - DNA, 33 bp, Homo sapien
agcctctggactattatgtgcaagtggaatcct

SEQ ID NO: 748393 - DNA, 33 bp, Homo sapien
cctacacagaagacggaaaagctgtgctcctgc

SEQ ID NO: 748394 - DNA, 33 bp, Homo sapien
cctacacagaagacgggaaagctgtgctcctgc

SEQ ID NO: 748395 - DNA, 33 bp, Homo sapien
gagagctgctgtttacgggatatggagcttctg

SEQ ID NO: 748396 - DNA, 33 bp, Homo sapien
gagagctgctgtttactggatatggagcttctg

SEQ ID NO: 748397 - DNA, 33 bp, Homo sapien
ggctttgcttaaatataaaaacctaatctctct

SEQ ID NO: 748398 - DNA, 33 bp, Homo sapien
ggctttgcttaaatatgaaaacctaatctctct

SEQ ID NO: 748399 - DNA, 33 bp, Homo sapien
aacaaatgaaaaaacacccacatcaggttggcc

SEQ ID NO: 748400 - DNA, 33 bp, Homo sapien
aacaaatgaaaaaacatccacatcaggttggcc

SEQ ID NO: 748401 - DNA, 33 bp, Homo sapien
tgccattcccagtggaactcttgtctattttat

SEQ ID NO: 748402 - DNA, 33 bp, Homo sapien
tgccattcccagtggagctcttgtctattttat

SEQ ID NO: 748403 - DNA, 33 bp, Homo sapien
ctataggctactaaaccggccagataatattac

SEQ ID NO: 748404 - DNA, 33 bp, Homo sapien
ctataggctactaaactggccagataatattac

SEQ ID NO: 748405 - DNA, 33 bp, Homo sapien
aggctgtattagtgacaagttggttactctctg

SEQ ID NO: 748406 - DNA, 33 bp, Homo sapien
aggctgtattagtgacgagttggttactctctg

SEQ ID NO: 748407 - DNA, 33 bp, Homo sapien
ggagcataaggatgaaatggttgtttcatggtt

SEQ ID NO: 748408 - DNA, 33 bp, Homo sapien
ggagcataaggatgaagtggttgtttcatggtt

SEQ ID NO: 748409 - DNA, 33 bp, Homo sapien
aaaatcatgtggaagaatatttagtctctgata

SEQ ID NO: 748410 - DNA, 33 bp, Homo sapien
aaaatcatgtggaagagtatttagtctctgata

SEQ ID NO: 748411 - DNA, 33 bp, Homo sapien
aattgctgagtcaaaacgtcatgaatcccagga

SEQ ID NO: 748412 - DNA, 33 bp, Homo sapien
aattgctgagtcaaaatgtcatgaatcccagga

SEQ ID NO: 748413 - DNA, 33 bp, Homo sapien
gtttataaagcagatacggggaaactgaccaaa

SEQ ID NO: 748414 - DNA, 33 bp, Homo sapien
gtttataaagcagatatggggaaactgaccaaa

SEQ ID NO: 748415 - DNA, 33 bp, Homo sapien
tgaacttgctattaaacgcatacgtgcacacac

SEQ ID NO: 748416 - DNA, 33 bp, Homo sapien
tgaacttgctattaaatgcatacgtgcacacac

SEQ ID NO: 748417 - DNA, 33 bp, Homo sapien
caactctagaaatccaagatctaagtcctaaag

SEQ ID NO: 748418 - DNA, 33 bp, Homo sapien
caactctagaaatccaggatctaagtcctaaag

SEQ ID NO: 748419 - DNA, 33 bp, Homo sapien
tggactaagggcctcaatctcttgctggctgtt

SEQ ID NO: 748420 - DNA, 33 bp, Homo sapien
tggactaagggcctcagtctcttgctggctgtt

SEQ ID NO: 748421 - DNA, 33 bp, Homo sapien
gtcagagaccagaacaccagggaagcagggctg

SEQ ID NO: 748422 - DNA, 33 bp, Homo sapien
gtcagagaccagaacagcagggaagcagggctg

SEQ ID NO: 748423 - DNA, 33 bp, Homo sapien
caaaggaactccatcacgaaaaacaggcaaatg

SEQ ID NO: 748424 - DNA, 33 bp, Homo sapien
caaaggaactccatcatgaaaaacaggcaaatg

SEQ ID NO: 748425 - DNA, 33 bp, Homo sapien
cagacaatgaaaacaacggaaagaaccaaaggc

SEQ ID NO: 748426 - DNA, 33 bp, Homo sapien
cagacaatgaaaacaatggaaagaaccaaaggc

SEQ ID NO: 748427 - DNA, 33 bp, Homo sapien
tggtatccagatcatagcccagaaaacagactg

SEQ ID NO: 748428 - DNA, 33 bp, Homo sapien
tggtatccagatcatatcccagaaaacagactg

SEQ ID NO: 748429 - DNA, 33 bp, Homo sapien
tgggatcgctagccacaagccgccgggaaacaa

SEQ ID NO: 748430 - DNA, 33 bp, Homo sapien
tgggatcgctagccacgagccgccgggaaacaa

SEQ ID NO: 748431 - DNA, 33 bp, Homo sapien
ttgatttacagaagagcctctatctaaagtgag

SEQ ID NO: 748432 - DNA, 33 bp, Homo sapien
ttgatttacagaagagtctctatctaaagtgag

SEQ ID NO: 748433 - DNA, 33 bp, Homo sapien
gacagctggacttcacaagcaggtcagggaact

SEQ ID NO: 748434 - DNA, 33 bp, Homo sapien
gacagctggacttcactagcaggtcagggaact

SEQ ID NO: 748435 - DNA, 33 bp, Homo sapien
tgatttatctccatgccatatgtcccccaacaa

SEQ ID NO: 748436 - DNA, 33 bp, Homo sapien
tgatttatctccatgctatatgtcccccaacaa

SEQ ID NO: 748437 - DNA, 33 bp, Homo sapien
tgaaactgaaagcatcactgcaaaaacaccctc

SEQ ID NO: 748438 - DNA, 33 bp, Homo sapien
tgaaactgaaagcatctctgcaaaaacaccctc

SEQ ID NO: 748439 - DNA, 33 bp, Homo sapien
ttatagacctctatacaatgtatgaactctatg

SEQ ID NO: 748440 - DNA, 33 bp, Homo sapien
ttatagacctctatacgatgtatgaactctatg

SEQ ID NO: 748441 - DNA, 33 bp, Homo sapien
gcaacactagcgatcaaattttaacacgagatt

SEQ ID NO: 748442 - DNA, 33 bp, Homo sapien
gcaacactagcgatcacattttaacacgagatt

SEQ ID NO: 748443 - DNA, 33 bp, Homo sapien
tgttgctccccttcaaatccatgacattcatct

SEQ ID NO: 748444 - DNA, 33 bp, Homo sapien
tgttgctccccttcaagtccatgacattcatct

SEQ ID NO: 748445 - DNA, 33 bp, Homo sapien
ttcctttcgagctttaaatgttaatattggggg

SEQ ID NO: 748446 - DNA, 33 bp, Homo sapien
ttcctttcgagctttagatgttaatattggggg

SEQ ID NO: 748447 - DNA, 33 bp, Homo sapien
aactttgggaaagccaaattaactgattccttt

SEQ ID NO: 748448 - DNA, 33 bp, Homo sapien
aactttgggaaagccagattaactgattccttt

SEQ ID NO: 748449 - DNA, 33 bp, Homo sapien
gattttagcaaaagaacgatagggtcagtttgg

SEQ ID NO: 748450 - DNA, 33 bp, Homo sapien
gattttagcaaaagaatgatagggtcagtttgg

SEQ ID NO: 748451 - DNA, 33 bp, Homo sapien
accgctgtggtctgcaactctgacaagccccta

SEQ ID NO: 748452 - DNA, 33 bp, Homo sapien
accgctgtggtctgcatctctgacaagccccta

SEQ ID NO: 748453 - DNA, 33 bp, Homo sapien
accatctccacaactgcagaagccattcaggtc

SEQ ID NO: 748454 - DNA, 33 bp, Homo sapien
accatctccacaactgtagaagccattcaggtc

SEQ ID NO: 748455 - DNA, 33 bp, Homo sapien
tgcttcaggaaccaaaagcagaaggtaacagaa

SEQ ID NO: 748456 - DNA, 33 bp, Homo sapien
tgcttcaggaaccaaacgcagaaggtaacagaa

SEQ ID NO: 748457 - DNA, 33 bp, Homo sapien
ataccatcctggtgcacggaggacgaataaacc

SEQ ID NO: 748458 - DNA, 33 bp, Homo sapien
ataccatcctggtgcatggaggacgaataaacc

SEQ ID NO: 748459 - DNA, 33 bp, Homo sapien
tgcatccccatcagcaatgcacaccggttccag

SEQ ID NO: 748460 - DNA, 33 bp, Homo sapien
tgcatccccatcagcagtgcacaccggttccag

SEQ ID NO: 748461 - DNA, 33 bp, Homo sapien
atttggtgatgacctgaagataaacatttggaa

SEQ ID NO: 748462 - DNA, 33 bp, Homo sapien
atttggtgatgacctggagataaacatttggaa

SEQ ID NO: 748463 - DNA, 33 bp, Homo sapien
gcataaggaaatcaatcaaggtgtgaagacaat

SEQ ID NO: 748464 - DNA, 33 bp, Homo sapien
gcataaggaaatcaatgaaggtgtgaagacaat

SEQ ID NO: 748465 - DNA, 33 bp, Homo sapien
catcaaatctcactgaactcattatagccaaag

SEQ ID NO: 748466 - DNA, 33 bp, Homo sapien
catcaaatctcactgatctcattatagccaaag

SEQ ID NO: 748467 - DNA, 33 bp, Homo sapien
aatatatgcaaataaacgaaactgcggtgaaat

SEQ ID NO: 748468 - DNA, 33 bp, Homo sapien
aatatatgcaaataaatgaaactgcggtgaaat

SEQ ID NO: 748469 - DNA, 33 bp, Homo sapien
agttaaattttttgcgacaatagaacagcaatg

SEQ ID NO: 748470 - DNA, 33 bp, Homo sapien
agttaaattttttgcggcaatagaacagcaatg

SEQ ID NO: 748471 - DNA, 33 bp, Homo sapien
ccatgttttctgctataaaaatgtaagagacct

SEQ ID NO: 748472 - DNA, 33 bp, Homo sapien
ccatgttttctgctatgaaaatgtaagagacct

SEQ ID NO: 748473 - DNA, 33 bp, Homo sapien
gaacataccaggaataaagactaggaaacaggg

SEQ ID NO: 748474 - DNA, 33 bp, Homo sapien
gaacataccaggaatagagactaggaaacaggg

SEQ ID NO: 748475 - DNA, 33 bp, Homo sapien
gaattgctttgggaaacgtacactttctaaatt

SEQ ID NO: 748476 - DNA, 33 bp, Homo sapien
gaattgctttgggaaatgtacactttctaaatt

SEQ ID NO: 748477 - DNA, 33 bp, Homo sapien
gcagaaataatgcgtgcaaagcaatctgcaccg

SEQ ID NO: 748478 - DNA, 33 bp, Homo sapien
gcagaaataatgcgtggaaagcaatctgcaccg

SEQ ID NO: 748479 - DNA, 33 bp, Homo sapien
cagctatcctagctccaagtttcgcctttcttc

SEQ ID NO: 748480 - DNA, 33 bp, Homo sapien
cagctatcctagctccgagtttcgcctttcttc

SEQ ID NO: 748481 - DNA, 33 bp, Homo sapien
atgactgcagaaggagaattgcagctggatttc

SEQ ID NO: 748482 - DNA, 33 bp, Homo sapien
atgactgcagaaggaggattgcagctggatttc

SEQ ID NO: 748483 - DNA, 33 bp, Homo sapien
gaccactttaaattcacgctgtctgatgggagg

SEQ ID NO: 748484 - DNA, 33 bp, Homo sapien
gaccactttaaattcatgctgtctgatgggagg

SEQ ID NO: 748485 - DNA, 33 bp, Homo sapien
agaatcagaatcaagcaaaagaggaaacccctt

SEQ ID NO: 748486 - DNA, 33 bp, Homo sapien
agaatcagaatcaagcgaaagaggaaacccctt

SEQ ID NO: 748487 - DNA, 33 bp, Homo sapien
gagatcaggtcacaaacggcaaatagtggtcca

SEQ ID NO: 748488 - DNA, 33 bp, Homo sapien
gagatcaggtcacaaatggcaaatagtggtcca

SEQ ID NO: 748489 - DNA, 33 bp, Homo sapien
taaagctagttgagatcaagtatatgttcaaaa

SEQ ID NO: 748490 - DNA, 33 bp, Homo sapien
taaagctagttgagattaagtatatgttcaaaa

SEQ ID NO: 748491 - DNA, 33 bp, Homo sapien
ggtgtgaagggatccaccatgtgtaagcttttg

SEQ ID NO: 748492 - DNA, 33 bp, Homo sapien
ggtgtgaagggatccagcatgtgtaagcttttg

SEQ ID NO: 748493 - DNA, 33 bp, Homo sapien
cctctgtagtctgggcaaagcaggatatgccat

SEQ ID NO: 748494 - DNA, 33 bp, Homo sapien
cctctgtagtctgggcgaagcaggatatgccat

SEQ ID NO: 748495 - DNA, 33 bp, Homo sapien
gtatgaggtttctccacgcaccaagcaattcta

SEQ ID NO: 748496 - DNA, 33 bp, Homo sapien
gtatgaggtttctccatgcaccaagcaattcta

SEQ ID NO: 748497 - DNA, 33 bp, Homo sapien
aaacagtagaaactctcaacagaaaccacttgc

SEQ ID NO: 748498 - DNA, 33 bp, Homo sapien
aaacagtagaaactcttaacagaaaccacttgc

SEQ ID NO: 748499 - DNA, 33 bp, Homo sapien
ccaagctggatagacacagaaatgaaaagaagg

SEQ ID NO: 748500 - DNA, 33 bp, Homo sapien
ccaagctggatagacagagaaatgaaaagaagg

SEQ ID NO: 748501 - DNA, 33 bp, Homo sapien
gactgcatgatgcactcagatttcaaaatgcta

SEQ ID NO: 748502 - DNA, 33 bp, Homo sapien
gactgcatgatgcacttagatttcaaaatgcta

SEQ ID NO: 748503 - DNA, 33 bp, Homo sapien
gctgtagtagatctaacgtgggccagtacctat

SEQ ID NO: 748504 - DNA, 33 bp, Homo sapien
gctgtagtagatctaaggtgggccagtacctat

SEQ ID NO: 748505 - DNA, 33 bp, Homo sapien
tcatagcatcaatttaaaagggaaacagccata

SEQ ID NO: 748506 - DNA, 33 bp, Homo sapien
tcatagcatcaatttacaagggaaacagccata

SEQ ID NO: 748507 - DNA, 33 bp, Homo sapien
tggagttcccaaggaggcagttctcagcacttg

SEQ ID NO: 748508 - DNA, 33 bp, Homo sapien
tggagttcccaaggagtcagttctcagcacttg

SEQ ID NO: 748509 - DNA, 33 bp, Homo sapien
ggagctgccgaaggccccatcttttatagtcac

SEQ ID NO: 748510 - DNA, 33 bp, Homo sapien
ggagctgccgaaggcctcatcttttatagtcac

SEQ ID NO: 748511 - DNA, 33 bp, Homo sapien
atatacactgccctaccgatccccttcctattt

SEQ ID NO: 748512 - DNA, 33 bp, Homo sapien
atatacactgccctactgatccccttcctattt

SEQ ID NO: 748513 - DNA, 33 bp, Homo sapien
ggaaatttttagcacaagtaactgcttaaaaaa

SEQ ID NO: 748514 - DNA, 33 bp, Homo sapien
ggaaatttttagcacatgtaactgcttaaaaaa

SEQ ID NO: 748515 - DNA, 33 bp, Homo sapien
aaacaaagtcagtccaaaggagaaacacatagt

SEQ ID NO: 748516 - DNA, 33 bp, Homo sapien
aaacaaagtcagtccagaggagaaacacatagt

SEQ ID NO: 748517 - DNA, 33 bp, Homo sapien
cagaacaacataagcaaaactatagagataaga

SEQ ID NO: 748518 - DNA, 33 bp, Homo sapien
cagaacaacataagcagaactatagagataaga

SEQ ID NO: 748519 - DNA, 33 bp, Homo sapien
accatgcattctcttcccttattgtctggggtc

SEQ ID NO: 748520 - DNA, 33 bp, Homo sapien
accatgcattctcttctcttattgtctggggtc

SEQ ID NO: 748521 - DNA, 33 bp, Homo sapien
agctaattttcctgaaaacttaacattgcagct

SEQ ID NO: 748522 - DNA, 33 bp, Homo sapien
agctaattttcctgaagacttaacattgcagct

SEQ ID NO: 748523 - DNA, 33 bp, Homo sapien
caaaggacaacaaagcaatataaacctaaactg

SEQ ID NO: 748524 - DNA, 33 bp, Homo sapien
caaaggacaacaaagccatataaacctaaactg

SEQ ID NO: 748525 - DNA, 33 bp, Homo sapien
aggttttgctttattaccagaatatcatctccg

SEQ ID NO: 748526 - DNA, 33 bp, Homo sapien
aggttttgctttattagcagaatatcatctccg

SEQ ID NO: 748527 - DNA, 33 bp, Homo sapien
tatttttctgtataaacgtcacatacttcaaca

SEQ ID NO: 748528 - DNA, 33 bp, Homo sapien
tatttttctgtataaatgtcacatacttcaaca

SEQ ID NO: 748529 - DNA, 33 bp, Homo sapien
ggtcatctgtttacaccacgaatcattcatctg

SEQ ID NO: 748530 - DNA, 33 bp, Homo sapien
ggtcatctgtttacacgacgaatcattcatctg

SEQ ID NO: 748531 - DNA, 33 bp, Homo sapien
cacttttgactgtgaaacgcaattgattggtgc

SEQ ID NO: 748532 - DNA, 33 bp, Homo sapien
cacttttgactgtgaagcgcaattgattggtgc

SEQ ID NO: 748533 - DNA, 33 bp, Homo sapien
ggtgggcggcagatacaacaggtggtcacttta

SEQ ID NO: 748534 - DNA, 33 bp, Homo sapien
ggtgggcggcagatacgacaggtggtcacttta

SEQ ID NO: 748535 - DNA, 33 bp, Homo sapien
tcttttgcttgttttcaaatcgcatcctctccc

SEQ ID NO: 748536 - DNA, 33 bp, Homo sapien
tcttttgcttgttttcgaatcgcatcctctccc

SEQ ID NO: 748537 - DNA, 33 bp, Homo sapien
agtgttggtgagaatacggaacagtagaaaaat

SEQ ID NO: 748538 - DNA, 33 bp, Homo sapien
agtgttggtgagaatatggaacagtagaaaaat

SEQ ID NO: 748539 - DNA, 33 bp, Homo sapien
tgattatccatcctcaacttcattagtaatcag

SEQ ID NO: 748540 - DNA, 33 bp, Homo sapien
tgattatccatcctcaccttcattagtaatcag

SEQ ID NO: 748541 - DNA, 33 bp, Homo sapien
atgcacacagcaggaaacaccgaggttgtgaat

SEQ ID NO: 748542 - DNA, 33 bp, Homo sapien
atgcacacagcaggaagcaccgaggttgtgaat

SEQ ID NO: 748543 - DNA, 33 bp, Homo sapien
ataactaagatggcaacgttcagcctgaaaaaa

SEQ ID NO: 748544 - DNA, 33 bp, Homo sapien
ataactaagatggcaatgttcagcctgaaaaaa

SEQ ID NO: 748545 - DNA, 33 bp, Homo sapien
tgtgcaacttgttaagaagcccatctctagaac

SEQ ID NO: 748546 - DNA, 33 bp, Homo sapien
tgtgcaacttgttaagcagcccatctctagaac

SEQ ID NO: 748547 - DNA, 33 bp, Homo sapien
ttaactgtaaaatctaagtagtgggtatatgaa

SEQ ID NO: 748548 - DNA, 33 bp, Homo sapien
ttaactgtaaaatctaggtagtgggtatatgaa

SEQ ID NO: 748549 - DNA, 33 bp, Homo sapien
tccttttgtcatgagacatcttcccttttttct

SEQ ID NO: 748550 - DNA, 33 bp, Homo sapien
tccttttgtcatgagatatcttcccttttttct

SEQ ID NO: 748551 - DNA, 33 bp, Homo sapien
catcagaaaccatggcaaccagaagacaacaga

SEQ ID NO: 748552 - DNA, 33 bp, Homo sapien
catcagaaaccatggcgaccagaagacaacaga

SEQ ID NO: 748553 - DNA, 33 bp, Homo sapien
ctctgaactacactctcaatcaacttgacctca

SEQ ID NO: 748554 - DNA, 33 bp, Homo sapien
ctctgaactacactctgaatcaacttgacctca

SEQ ID NO: 748555 - DNA, 33 bp, Homo sapien
gccttcccactagacaatgaaccctttgaagga

SEQ ID NO: 748556 - DNA, 33 bp, Homo sapien
gccttcccactagacagtgaaccctttgaagga

SEQ ID NO: 748557 - DNA, 33 bp, Homo sapien
ctattaacctagagaacaccaaagaagttcact

SEQ ID NO: 748558 - DNA, 33 bp, Homo sapien
ctattaacctagagaataccaaagaagttcact

SEQ ID NO: 748559 - DNA, 33 bp, Homo sapien
ggcatttagagaaatacggccaatgtgcaaaac

SEQ ID NO: 748560 - DNA, 33 bp, Homo sapien
ggcatttagagaaatatggccaatgtgcaaaac

SEQ ID NO: 748561 - DNA, 33 bp, Homo sapien
tcgcccatcttagcagcaggagcttgagctctg

SEQ ID NO: 748562 - DNA, 33 bp, Homo sapien
tcgcccatcttagcagtaggagcttgagctctg

SEQ ID NO: 748563 - DNA, 33 bp, Homo sapien
ggtctggagttgataaaatttctcagcttttgt

SEQ ID NO: 748564 - DNA, 33 bp, Homo sapien
ggtctggagttgataacatttctcagcttttgt

SEQ ID NO: 748565 - DNA, 33 bp, Homo sapien
aagggagagggaagaagcgggttctaggagcta

SEQ ID NO: 748566 - DNA, 33 bp, Homo sapien
aagggagagggaagaatcgggttctaggagcta

SEQ ID NO: 748567 - DNA, 33 bp, Homo sapien
ttcatgggtgtatcagcatattgaactctaaac

SEQ ID NO: 748568 - DNA, 33 bp, Homo sapien
ttcatgggtgtatcagtatattgaactctaaac

SEQ ID NO: 748569 - DNA, 33 bp, Homo sapien
ggatttatctgtttccccagcatgcatttcccc

SEQ ID NO: 748570 - DNA, 33 bp, Homo sapien
ggatttatctgtttccgcagcatgcatttcccc

SEQ ID NO: 748571 - DNA, 33 bp, Homo sapien
gtgagagccctacctacgattctgacccagaag

SEQ ID NO: 748572 - DNA, 33 bp, Homo sapien
gtgagagccctacctatgattctgacccagaag

SEQ ID NO: 748573 - DNA, 33 bp, Homo sapien
tattcctgtgtactcaataattagtaactgctg

SEQ ID NO: 748574 - DNA, 33 bp, Homo sapien
tattcctgtgtactcagtaattagtaactgctg

SEQ ID NO: 748575 - DNA, 33 bp, Homo sapien
tctacagcaggttctacgaagaaagttgctgcg

SEQ ID NO: 748576 - DNA, 33 bp, Homo sapien
tctacagcaggttctatgaagaaagttgctgcg

SEQ ID NO: 748577 - DNA, 33 bp, Homo sapien
ttgtgagagggagagaggaaggtaagggagaga

SEQ ID NO: 748578 - DNA, 33 bp, Homo sapien
ttgtgagagggagagatgaaggtaagggagaga

SEQ ID NO: 748579 - DNA, 33 bp, Homo sapien
agacagcacttgaaccacttccttctcttctgc

SEQ ID NO: 748580 - DNA, 33 bp, Homo sapien
agacagcacttgaaccgcttccttctcttctgc

SEQ ID NO: 748581 - DNA, 33 bp, Homo sapien
aaccagagggaaagccgcatacctttcagaaag

SEQ ID NO: 748582 - DNA, 33 bp, Homo sapien
aaccagagggaaagcctcatacctttcagaaag

SEQ ID NO: 748583 - DNA, 33 bp, Homo sapien
tatgtgcaagaactcccaatgatggataaggcg

SEQ ID NO: 748584 - DNA, 33 bp, Homo sapien
tatgtgcaagaactcctaatgatggataaggcg

SEQ ID NO: 748585 - DNA, 33 bp, Homo sapien
gagacctagcttttccacacttctttttggtgt

SEQ ID NO: 748586 - DNA, 33 bp, Homo sapien
gagacctagcttttccgcacttctttttggtgt

SEQ ID NO: 748587 - DNA, 33 bp, Homo sapien
gagtcagcaggctttaggagtcttttattcctc

SEQ ID NO: 748588 - DNA, 33 bp, Homo sapien
gagtcagcaggctttatgagtcttttattcctc

SEQ ID NO: 748589 - DNA, 33 bp, Homo sapien
acagcatggtttacaactcaaaagtcacactcc

SEQ ID NO: 748590 - DNA, 33 bp, Homo sapien
acagcatggtttacaattcaaaagtcacactcc

SEQ ID NO: 748591 - DNA, 33 bp, Homo sapien
tcctcatatggaaaacagaagtgacagtacctt

SEQ ID NO: 748592 - DNA, 33 bp, Homo sapien
tcctcatatggaaaaccgaagtgacagtacctt

SEQ ID NO: 748593 - DNA, 33 bp, Homo sapien
cggactgtcagaaaccaaaatcctggtacccgt

SEQ ID NO: 748594 - DNA, 33 bp, Homo sapien
cggactgtcagaaaccgaaatcctggtacccgt

SEQ ID NO: 748595 - DNA, 33 bp, Homo sapien
agtggctcctaacaaaatcataactaagcccat

SEQ ID NO: 748596 - DNA, 33 bp, Homo sapien
agtggctcctaacaaactcataactaagcccat

SEQ ID NO: 748597 - DNA, 33 bp, Homo sapien
gatgggcatctgcaagccagagtggccgggcac

SEQ ID NO: 748598 - DNA, 33 bp, Homo sapien
gatgggcatctgcaagtcagagtggccgggcac

SEQ ID NO: 748599 - DNA, 33 bp, Homo sapien
gagtcttttttcggtcactcctgcccttgttac

SEQ ID NO: 748600 - DNA, 33 bp, Homo sapien
gagtcttttttcggtcgctcctgcccttgttac

SEQ ID NO: 748601 - DNA, 33 bp, Homo sapien
caggaatgccttcagggatatttctccaccctc

SEQ ID NO: 748602 - DNA, 33 bp, Homo sapien
caggaatgccttcaggtatatttctccaccctc

SEQ ID NO: 748603 - DNA, 33 bp, Homo sapien
ctgcaggttaagagtcaagggtctggaaccaga

SEQ ID NO: 748604 - DNA, 33 bp, Homo sapien
ctgcaggttaagagtcgagggtctggaaccaga

SEQ ID NO: 748605 - DNA, 33 bp, Homo sapien
caactctttgaggcaaacactactactcttagt

SEQ ID NO: 748606 - DNA, 33 bp, Homo sapien
caactctttgaggcaagcactactactcttagt

SEQ ID NO: 748607 - DNA, 33 bp, Homo sapien
ccaggggaatgagaagaagttctattggaagta

SEQ ID NO: 748608 - DNA, 33 bp, Homo sapien
ccaggggaatgagaagcagttctattggaagta

SEQ ID NO: 748609 - DNA, 33 bp, Homo sapien
gggatgcagtaagaaccagctattgatggatta

SEQ ID NO: 748610 - DNA, 33 bp, Homo sapien
gggatgcagtaagaacgagctattgatggatta

SEQ ID NO: 748611 - DNA, 33 bp, Homo sapien
tcacctaagatcatgaactaataataagtgacg

SEQ ID NO: 748612 - DNA, 33 bp, Homo sapien
tcacctaagatcatgagctaataataagtgacg

SEQ ID NO: 748613 - DNA, 33 bp, Homo sapien
gcccagaacagtcaagacaactgacatctgcta

SEQ ID NO: 748614 - DNA, 33 bp, Homo sapien
gcccagaacagtcaagtcaactgacatctgcta

SEQ ID NO: 748615 - DNA, 33 bp, Homo sapien
tgttgggacttaaagacggagagataatactta

SEQ ID NO: 748616 - DNA, 33 bp, Homo sapien
tgttgggacttaaagatggagagataatactta

SEQ ID NO: 748617 - DNA, 33 bp, Homo sapien
taggtttttgcacataataaacttcacacatca

SEQ ID NO: 748618 - DNA, 33 bp, Homo sapien
taggtttttgcacatagtaaacttcacacatca

SEQ ID NO: 748619 - DNA, 33 bp, Homo sapien
ctggccatgactgccaatgaggggccttgagtc

SEQ ID NO: 748620 - DNA, 33 bp, Homo sapien
ctggccatgactgccagtgaggggccttgagtc

SEQ ID NO: 748621 - DNA, 33 bp, Homo sapien
atacattgtgaccaaagtggcctatttcaagag

SEQ ID NO: 748622 - DNA, 33 bp, Homo sapien
atacattgtgaccaaattggcctatttcaagag

SEQ ID NO: 748623 - DNA, 33 bp, Homo sapien
cgatttagcccagtgaaacgatttcagatacct

SEQ ID NO: 748624 - DNA, 33 bp, Homo sapien
cgatttagcccagtgagacgatttcagatacct

SEQ ID NO: 748625 - DNA, 33 bp, Homo sapien
ggtcaagtcaggagaaaaaaccagagcagttaa

SEQ ID NO: 748626 - DNA, 33 bp, Homo sapien
ggtcaagtcaggagaacaaaccagagcagttaa

SEQ ID NO: 748627 - DNA, 33 bp, Homo sapien
aatctgtaatcttggccgactacagatcataat

SEQ ID NO: 748628 - DNA, 33 bp, Homo sapien
aatctgtaatcttggctgactacagatcataat

SEQ ID NO: 748629 - DNA, 33 bp, Homo sapien
cccaatcactaggtaccaaaagtgcaattacta

SEQ ID NO: 748630 - DNA, 33 bp, Homo sapien
cccaatcactaggtacgaaaagtgcaattacta

SEQ ID NO: 748631 - DNA, 33 bp, Homo sapien
ccatagaaccatgaaaaaacacccactccaaaa

SEQ ID NO: 748632 - DNA, 33 bp, Homo sapien
ccatagaaccatgaaacaacacccactccaaaa

SEQ ID NO: 748633 - DNA, 33 bp, Homo sapien
agaaccatgaactggaagcttgaacaacagaag

SEQ ID NO: 748634 - DNA, 33 bp, Homo sapien
agaaccatgaactggaggcttgaacaacagaag

SEQ ID NO: 748635 - DNA, 33 bp, Homo sapien
ggggaggcttcttaaaccaaggtggagtttaaa

SEQ ID NO: 748636 - DNA, 33 bp, Homo sapien
ggggaggcttcttaaagcaaggtggagtttaaa

SEQ ID NO: 748637 - DNA, 33 bp, Homo sapien
tgcagccacaacattcaaagatttcattctgtt

SEQ ID NO: 748638 - DNA, 33 bp, Homo sapien
tgcagccacaacattcgaagatttcattctgtt

SEQ ID NO: 748639 - DNA, 33 bp, Homo sapien
gctcttggcaaaggcccctccatgtgttcccca

SEQ ID NO: 748640 - DNA, 33 bp, Homo sapien
gctcttggcaaaggcctctccatgtgttcccca

SEQ ID NO: 748641 - DNA, 33 bp, Homo sapien
actcttgacttgtgtcaaattctggtgtgtcta

SEQ ID NO: 748642 - DNA, 33 bp, Homo sapien
actcttgacttgtgtcgaattctggtgtgtcta

SEQ ID NO: 748643 - DNA, 33 bp, Homo sapien
ccctgagccatggctcacctgagactcaccttc

SEQ ID NO: 748644 - DNA, 33 bp, Homo sapien
ccctgagccatggctcgcctgagactcaccttc

SEQ ID NO: 748645 - DNA, 33 bp, Homo sapien
agatattaactcaggcaaaattagatgcacccc

SEQ ID NO: 748646 - DNA, 33 bp, Homo sapien
agatattaactcaggcgaaattagatgcacccc

SEQ ID NO: 748647 - DNA, 33 bp, Homo sapien
ggacaaggacacattccctgccaaatctccttc

SEQ ID NO: 748648 - DNA, 33 bp, Homo sapien
ggacaaggacacattctctgccaaatctccttc

SEQ ID NO: 748649 - DNA, 33 bp, Homo sapien
ctctgtcccatcttccacataccctggcttcct

SEQ ID NO: 748650 - DNA, 33 bp, Homo sapien
ctctgtcccatcttcctcataccctggcttcct

SEQ ID NO: 748651 - DNA, 33 bp, Homo sapien
atgtagtcagctctgaacttaataaatgccatc

SEQ ID NO: 748652 - DNA, 33 bp, Homo sapien
atgtagtcagctctgaccttaataaatgccatc

SEQ ID NO: 748653 - DNA, 33 bp, Homo sapien
ctcagcaaactcattccaggtatctattattca

SEQ ID NO: 748654 - DNA, 33 bp, Homo sapien
ctcagcaaactcattcgaggtatctattattca

SEQ ID NO: 748655 - DNA, 33 bp, Homo sapien
gttaaaacttgaagaaatgtgcaccaaaaagag

SEQ ID NO: 748656 - DNA, 33 bp, Homo sapien
gttaaaacttgaagaactgtgcaccaaaaagag

SEQ ID NO: 748657 - DNA, 33 bp, Homo sapien
caaactgtgcattgaagatccgtttgtagcaca

SEQ ID NO: 748658 - DNA, 33 bp, Homo sapien
caaactgtgcattgaatatccgtttgtagcaca

SEQ ID NO: 748659 - DNA, 33 bp, Homo sapien
cctggggaccagtcccagctttgagaggagcga

SEQ ID NO: 748660 - DNA, 33 bp, Homo sapien
cctggggaccagtcccggctttgagaggagcga

SEQ ID NO: 748661 - DNA, 33 bp, Homo sapien
ccacacacacatgtgccctgtccacttgtgcat

SEQ ID NO: 748662 - DNA, 33 bp, Homo sapien
ccacacacacatgtgctctgtccacttgtgcat

SEQ ID NO: 748663 - DNA, 33 bp, Homo sapien
atactatcatgacctgaagcgtaaagaccagaa

SEQ ID NO: 748664 - DNA, 33 bp, Homo sapien
atactatcatgacctgcagcgtaaagaccagaa

SEQ ID NO: 748665 - DNA, 33 bp, Homo sapien
ctcgcctgtgctgcacactaattttagagcctc

SEQ ID NO: 748666 - DNA, 33 bp, Homo sapien
ctcgcctgtgctgcacgctaattttagagcctc

SEQ ID NO: 748667 - DNA, 33 bp, Homo sapien
cagttttccctggacaatatggtgccaatcaca

SEQ ID NO: 748668 - DNA, 33 bp, Homo sapien
cagttttccctggacagtatggtgccaatcaca

SEQ ID NO: 748669 - DNA, 33 bp, Homo sapien
actgtcagtgaaagacaagatgggagcatcagt

SEQ ID NO: 748670 - DNA, 33 bp, Homo sapien
actgtcagtgaaagacgagatgggagcatcagt

SEQ ID NO: 748671 - DNA, 33 bp, Homo sapien
gagctgaattcataagcaccaaaaacagaaagg

SEQ ID NO: 748672 - DNA, 33 bp, Homo sapien
gagctgaattcataagtaccaaaaacagaaagg

SEQ ID NO: 748673 - DNA, 33 bp, Homo sapien
tacagcatcctacacacgacaatataagtaaca

SEQ ID NO: 748674 - DNA, 33 bp, Homo sapien
tacagcatcctacacatgacaatataagtaaca

SEQ ID NO: 748675 - DNA, 33 bp, Homo sapien
aatccccaaatctctcaccaagttggactgagc

SEQ ID NO: 748676 - DNA, 33 bp, Homo sapien
aatccccaaatctctcgccaagttggactgagc

SEQ ID NO: 748677 - DNA, 33 bp, Homo sapien
cagactgtctagcatcacatgagttggttgtaa

SEQ ID NO: 748678 - DNA, 33 bp, Homo sapien
cagactgtctagcatcgcatgagttggttgtaa

SEQ ID NO: 748679 - DNA, 33 bp, Homo sapien
ctgctcctctgctcagaatactccagaatctac

SEQ ID NO: 748680 - DNA, 33 bp, Homo sapien
ctgctcctctgctcaggatactccagaatctac

SEQ ID NO: 748681 - DNA, 33 bp, Homo sapien
tcacttgagaaaaccaaaaaggctaacggcaca

SEQ ID NO: 748682 - DNA, 33 bp, Homo sapien
tcacttgagaaaaccagaaaggctaacggcaca

SEQ ID NO: 748683 - DNA, 33 bp, Homo sapien
ataccctgtcttcaacaaacaaaagagcaacga

SEQ ID NO: 748684 - DNA, 33 bp, Homo sapien
ataccctgtcttcaaccaacaaaagagcaacga

SEQ ID NO: 748685 - DNA, 33 bp, Homo sapien
gttcttggggacaggaagtcaacgtatccttcc

SEQ ID NO: 748686 - DNA, 33 bp, Homo sapien
gttcttggggacaggacgtcaacgtatccttcc

SEQ ID NO: 748687 - DNA, 33 bp, Homo sapien
caggttcacacaaaaaattaagcatcaccccaa

SEQ ID NO: 748688 - DNA, 33 bp, Homo sapien
caggttcacacaaaaagttaagcatcaccccaa

SEQ ID NO: 748689 - DNA, 33 bp, Homo sapien
acaacaacagcaataacagctacaacaataaaa

SEQ ID NO: 748690 - DNA, 33 bp, Homo sapien
acaacaacagcaataagagctacaacaataaaa

SEQ ID NO: 748691 - DNA, 33 bp, Homo sapien
cacagacaccgctgcactgagtcatctcagcaa

SEQ ID NO: 748692 - DNA, 33 bp, Homo sapien
cacagacaccgctgcattgagtcatctcagcaa

SEQ ID NO: 748693 - DNA, 33 bp, Homo sapien
agacactgaggccaccagaaagggcagagcatg

SEQ ID NO: 748694 - DNA, 33 bp, Homo sapien
agacactgaggccaccggaaagggcagagcatg

SEQ ID NO: 748695 - DNA, 33 bp, Homo sapien
gcttcaaacttccagacggcgagggaatacagc

SEQ ID NO: 748696 - DNA, 33 bp, Homo sapien
gcttcaaacttccagatggcgagggaatacagc

SEQ ID NO: 748697 - DNA, 33 bp, Homo sapien
ggatggaaaatgccccccaatacagtaagccaa

SEQ ID NO: 748698 - DNA, 33 bp, Homo sapien
ggatggaaaatgcccctcaatacagtaagccaa

SEQ ID NO: 748699 - DNA, 33 bp, Homo sapien
tagagaaggtgaaagcacatgaatcatttgaca

SEQ ID NO: 748700 - DNA, 33 bp, Homo sapien
tagagaaggtgaaagcgcatgaatcatttgaca

SEQ ID NO: 748701 - DNA, 33 bp, Homo sapien
tctcctcgctttgggcacttttaggagaaatgc

SEQ ID NO: 748702 - DNA, 33 bp, Homo sapien
tctcctcgctttgggcgcttttaggagaaatgc

SEQ ID NO: 748703 - DNA, 33 bp, Homo sapien
gtgggataggcacaacagtcccattcacctggt

SEQ ID NO: 748704 - DNA, 33 bp, Homo sapien
gtgggataggcacaactgtcccattcacctggt

SEQ ID NO: 748705 - DNA, 33 bp, Homo sapien
gagggtttcagtcttcccatatcctcagccaat

SEQ ID NO: 748706 - DNA, 33 bp, Homo sapien
gagggtttcagtcttctcatatcctcagccaat

SEQ ID NO: 748707 - DNA, 33 bp, Homo sapien
ggagatcttttgagctaaacttttcattttaca

SEQ ID NO: 748708 - DNA, 33 bp, Homo sapien
ggagatcttttgagctgaacttttcattttaca

SEQ ID NO: 748709 - DNA, 33 bp, Homo sapien
atcagtgaactcaagcagaattgaggaagatgg

SEQ ID NO: 748710 - DNA, 33 bp, Homo sapien
atcagtgaactcaagcggaattgaggaagatgg

SEQ ID NO: 748711 - DNA, 33 bp, Homo sapien
aaagtactcgaggaataaaatggtcaatactga

SEQ ID NO: 748712 - DNA, 33 bp, Homo sapien
aaagtactcgaggaatgaaatggtcaatactga

SEQ ID NO: 748713 - DNA, 33 bp, Homo sapien
aatacttaagccttgaactaccctataaaatcc

SEQ ID NO: 748714 - DNA, 33 bp, Homo sapien
aatacttaagccttgatctaccctataaaatcc

SEQ ID NO: 748715 - DNA, 33 bp, Homo sapien
ataagtgagataccagccaataaagagaaaatt

SEQ ID NO: 748716 - DNA, 33 bp, Homo sapien
ataagtgagataccaggcaataaagagaaaatt

SEQ ID NO: 748717 - DNA, 33 bp, Homo sapien
aatcacatagaagctaagttccagtttgtttgc

SEQ ID NO: 748718 - DNA, 33 bp, Homo sapien
aatcacatagaagctatgttccagtttgtttgc

SEQ ID NO: 748719 - DNA, 33 bp, Homo sapien
atccagggcattgtaaaatctcagtcgcagcca

SEQ ID NO: 748720 - DNA, 33 bp, Homo sapien
atccagggcattgtaagatctcagtcgcagcca

SEQ ID NO: 748721 - DNA, 33 bp, Homo sapien
gtctgattccatataacagcttttcctaaatga

SEQ ID NO: 748722 - DNA, 33 bp, Homo sapien
gtctgattccatataagagcttttcctaaatga

SEQ ID NO: 748723 - DNA, 33 bp, Homo sapien
tttgattttagatataacgaatgttgattttgg

SEQ ID NO: 748724 - DNA, 33 bp, Homo sapien
tttgattttagatataccgaatgttgattttgg

SEQ ID NO: 748725 - DNA, 33 bp, Homo sapien
tttggaattagacctaccttggaatcacagctt

SEQ ID NO: 748726 - DNA, 33 bp, Homo sapien
tttggaattagacctagcttggaatcacagctt

SEQ ID NO: 748727 - DNA, 33 bp, Homo sapien
agaaattaaatacctcaatgaatatcacacaaa

SEQ ID NO: 748728 - DNA, 33 bp, Homo sapien
agaaattaaatacctcgatgaatatcacacaaa

SEQ ID NO: 748729 - DNA, 33 bp, Homo sapien
tacgaagacaaaaatacctgcttcacacagttt

SEQ ID NO: 748730 - DNA, 33 bp, Homo sapien
tacgaagacaaaaatatctgcttcacacagttt

SEQ ID NO: 748731 - DNA, 33 bp, Homo sapien
taattattttagcacaatgcctgaaatgtagca

SEQ ID NO: 748732 - DNA, 33 bp, Homo sapien
taattattttagcacagtgcctgaaatgtagca

SEQ ID NO: 748733 - DNA, 33 bp, Homo sapien
gaatccaggaaaaacaaccaacatagagcttgt

SEQ ID NO: 748734 - DNA, 33 bp, Homo sapien
gaatccaggaaaaacacccaacatagagcttgt

SEQ ID NO: 748735 - DNA, 33 bp, Homo sapien
tactcatgtacccctacaatcattttgaaaaca

SEQ ID NO: 748736 - DNA, 33 bp, Homo sapien
tactcatgtacccctagaatcattttgaaaaca

SEQ ID NO: 748737 - DNA, 33 bp, Homo sapien
tcttttaagtatcaccaataatgcaaataaaca

SEQ ID NO: 748738 - DNA, 33 bp, Homo sapien
tcttttaagtatcacccataatgcaaataaaca

SEQ ID NO: 748739 - DNA, 33 bp, Homo sapien
taaatatatttcatacggcataccattgccaag

SEQ ID NO: 748740 - DNA, 33 bp, Homo sapien
taaatatatttcatactgcataccattgccaag

SEQ ID NO: 748741 - DNA, 33 bp, Homo sapien
agaagcacagtaaacaaatgcaccaaatcatgt

SEQ ID NO: 748742 - DNA, 33 bp, Homo sapien
agaagcacagtaaacagatgcaccaaatcatgt

SEQ ID NO: 748743 - DNA, 33 bp, Homo sapien
tctttttatagctgaacatgaaagtacttcact

SEQ ID NO: 748744 - DNA, 33 bp, Homo sapien
tctttttatagctgaatatgaaagtacttcact

SEQ ID NO: 748745 - DNA, 33 bp, Homo sapien
atggagtaacttgtgaatatgacatgacacgta

SEQ ID NO: 748746 - DNA, 33 bp, Homo sapien
atggagtaacttgtgagtatgacatgacacgta

SEQ ID NO: 748747 - DNA, 33 bp, Homo sapien
tatcatacaacacaacaaagctaatgtttatgc

SEQ ID NO: 748748 - DNA, 33 bp, Homo sapien
tatcatacaacacaacgaagctaatgtttatgc

SEQ ID NO: 748749 - DNA, 33 bp, Homo sapien
ttctagcctacagtaacgctggataagatagat

SEQ ID NO: 748750 - DNA, 33 bp, Homo sapien
ttctagcctacagtaatgctggataagatagat

SEQ ID NO: 748751 - DNA, 33 bp, Homo sapien
gaggaggaagacctgacacaatgaatgaacagt

SEQ ID NO: 748752 - DNA, 33 bp, Homo sapien
gaggaggaagacctgatacaatgaatgaacagt

SEQ ID NO: 748753 - DNA, 33 bp, Homo sapien
cccctatcctctaaggacatctagtctgctttc

SEQ ID NO: 748754 - DNA, 33 bp, Homo sapien
cccctatcctctaagggcatctagtctgctttc

SEQ ID NO: 748755 - DNA, 33 bp, Homo sapien
cctagcagcctaagaacgaagccaacaccaggg

SEQ ID NO: 748756 - DNA, 33 bp, Homo sapien
cctagcagcctaagaatgaagccaacaccaggg

SEQ ID NO: 748757 - DNA, 33 bp, Homo sapien
aaaatcctggataatcactgatgactctgaaca

SEQ ID NO: 748758 - DNA, 33 bp, Homo sapien
aaaatcctggataatctctgatgactctgaaca

SEQ ID NO: 748759 - DNA, 33 bp, Homo sapien
tatataaaacaaaaagcccaaatgacagcacac

SEQ ID NO: 748760 - DNA, 33 bp, Homo sapien
tatataaaacaaaaagtccaaatgacagcacac

SEQ ID NO: 748761 - DNA, 33 bp, Homo sapien
caaatactcattgctaaagtaacctgaatttct

SEQ ID NO: 748762 - DNA, 33 bp, Homo sapien
caaatactcattgctacagtaacctgaatttct

SEQ ID NO: 748763 - DNA, 33 bp, Homo sapien
gactggcctagttctccacacaatgaggtaagg

SEQ ID NO: 748764 - DNA, 33 bp, Homo sapien
gactggcctagttctctacacaatgaggtaagg

SEQ ID NO: 748765 - DNA, 33 bp, Homo sapien
tagagctgaacatacaaaaatgcaggcaaagtc

SEQ ID NO: 748766 - DNA, 33 bp, Homo sapien
tagagctgaacatacacaaatgcaggcaaagtc

SEQ ID NO: 748767 - DNA, 33 bp, Homo sapien
gtttgactaaattggcaagtagagaacgaatag

SEQ ID NO: 748768 - DNA, 33 bp, Homo sapien
gtttgactaaattggctagtagagaacgaatag

SEQ ID NO: 748769 - DNA, 33 bp, Homo sapien
ctgcagttgattattccccattaacttgctggg

SEQ ID NO: 748770 - DNA, 33 bp, Homo sapien
ctgcagttgattattctccattaacttgctggg

SEQ ID NO: 748771 - DNA, 33 bp, Homo sapien
atccccttattattaccatgacaaaagcatatt

SEQ ID NO: 748772 - DNA, 33 bp, Homo sapien
atccccttattattactatgacaaaagcatatt

SEQ ID NO: 748773 - DNA, 33 bp, Homo sapien
agggactaagaaacttcaaaggccacctacacc

SEQ ID NO: 748774 - DNA, 33 bp, Homo sapien
agggactaagaaacttgaaaggccacctacacc

SEQ ID NO: 748775 - DNA, 33 bp, Homo sapien
cttttttccaaggcccaccgtatggctgttcca

SEQ ID NO: 748776 - DNA, 33 bp, Homo sapien
cttttttccaaggcccgccgtatggctgttcca

SEQ ID NO: 748777 - DNA, 33 bp, Homo sapien
tgatcatgaaagtccacgcctgggtctcttaga

SEQ ID NO: 748778 - DNA, 33 bp, Homo sapien
tgatcatgaaagtccatgcctgggtctcttaga

SEQ ID NO: 748779 - DNA, 33 bp, Homo sapien
taggactgaggcagagcaccttaggacagaaaa

SEQ ID NO: 748780 - DNA, 33 bp, Homo sapien
taggactgaggcagaggaccttaggacagaaaa

SEQ ID NO: 748781 - DNA, 33 bp, Homo sapien
tgggctatgcctagaacctgtagttgatgataa

SEQ ID NO: 748782 - DNA, 33 bp, Homo sapien
tgggctatgcctagaagctgtagttgatgataa

SEQ ID NO: 748783 - DNA, 33 bp, Homo sapien
caacagggatgtgtccaaagaaatgtgtcatta

SEQ ID NO: 748784 - DNA, 33 bp, Homo sapien
caacagggatgtgtccgaagaaatgtgtcatta

SEQ ID NO: 748785 - DNA, 33 bp, Homo sapien
tgacaagcttagtctgacaaaggatgaaagtca

SEQ ID NO: 748786 - DNA, 33 bp, Homo sapien
tgacaagcttagtctgccaaaggatgaaagtca

SEQ ID NO: 748787 - DNA, 33 bp, Homo sapien
tttagttccaaaaaaactcaaaatgtgaggctg

SEQ ID NO: 748788 - DNA, 33 bp, Homo sapien
tttagttccaaaaaaattcaaaatgtgaggctg

SEQ ID NO: 748789 - DNA, 33 bp, Homo sapien
ctgagtgataatgatacagtagtaaacaaaacc

SEQ ID NO: 748790 - DNA, 33 bp, Homo sapien
ctgagtgataatgatatagtagtaaacaaaacc

SEQ ID NO: 748791 - DNA, 33 bp, Homo sapien
ttctctactgccatgacggatctaacagcactc

SEQ ID NO: 748792 - DNA, 33 bp, Homo sapien
ttctctactgccatgagggatctaacagcactc

SEQ ID NO: 748793 - DNA, 33 bp, Homo sapien
attgtatggcccattagcaaacagaacgcattc

SEQ ID NO: 748794 - DNA, 33 bp, Homo sapien
attgtatggcccattatcaaacagaacgcattc

SEQ ID NO: 748795 - DNA, 33 bp, Homo sapien
tttaagtgagagagaactgaactggttttaatg

SEQ ID NO: 748796 - DNA, 33 bp, Homo sapien
tttaagtgagagagaattgaactggttttaatg

SEQ ID NO: 748797 - DNA, 33 bp, Homo sapien
tctctgtcctaacgtaacatagcgtcctgattt

SEQ ID NO: 748798 - DNA, 33 bp, Homo sapien
tctctgtcctaacgtagcatagcgtcctgattt

SEQ ID NO: 748799 - DNA, 33 bp, Homo sapien
attacaataatgaaaacttggaactaagataaa

SEQ ID NO: 748800 - DNA, 33 bp, Homo sapien
attacaataatgaaaagttggaactaagataaa

SEQ ID NO: 748801 - DNA, 33 bp, Homo sapien
ctaaacaagcctctgacgggcaactaaaacttt

SEQ ID NO: 748802 - DNA, 33 bp, Homo sapien
ctaaacaagcctctgatgggcaactaaaacttt

SEQ ID NO: 748803 - DNA, 33 bp, Homo sapien
acagcagaggaggggaaaccactgatgctaagg

SEQ ID NO: 748804 - DNA, 33 bp, Homo sapien
acagcagaggaggggagaccactgatgctaagg

SEQ ID NO: 748805 - DNA, 33 bp, Homo sapien
tccttctaagcatgaacagatgaatattaccgt

SEQ ID NO: 748806 - DNA, 33 bp, Homo sapien
tccttctaagcatgaatagatgaatattaccgt

SEQ ID NO: 748807 - DNA, 33 bp, Homo sapien
caagatgggtcaagtcacccagcacaagtgttg

SEQ ID NO: 748808 - DNA, 33 bp, Homo sapien
caagatgggtcaagtcgcccagcacaagtgttg

SEQ ID NO: 748809 - DNA, 33 bp, Homo sapien
gtaactgacactcatcagacgaatccatttcaa

SEQ ID NO: 748810 - DNA, 33 bp, Homo sapien
gtaactgacactcatcggacgaatccatttcaa

SEQ ID NO: 748811 - DNA, 33 bp, Homo sapien
ttcttcttctacctgacagtgttctcacagcag

SEQ ID NO: 748812 - DNA, 33 bp, Homo sapien
ttcttcttctacctgatagtgttctcacagcag

SEQ ID NO: 748813 - DNA, 33 bp, Homo sapien
ctggttctagtttgaccatttaaattatgacct

SEQ ID NO: 748814 - DNA, 33 bp, Homo sapien
ctggttctagtttgacgatttaaattatgacct

SEQ ID NO: 748815 - DNA, 33 bp, Homo sapien
agtgtgctagataagacgctaaaagaccttgat

SEQ ID NO: 748816 - DNA, 33 bp, Homo sapien
agtgtgctagataagaggctaaaagaccttgat

SEQ ID NO: 748817 - DNA, 33 bp, Homo sapien
gtaaaagattaattacagagccactataaaact

SEQ ID NO: 748818 - DNA, 33 bp, Homo sapien
gtaaaagattaattactgagccactataaaact

SEQ ID NO: 748819 - DNA, 33 bp, Homo sapien
ttcacagggcatcggacggagtacctagacagg

SEQ ID NO: 748820 - DNA, 33 bp, Homo sapien
ttcacagggcatcggatggagtacctagacagg

SEQ ID NO: 748821 - DNA, 33 bp, Homo sapien
gaagagatggaagatgaaaaatatatgtagaca

SEQ ID NO: 748822 - DNA, 33 bp, Homo sapien
gaagagatggaagatggaaaatatatgtagaca

SEQ ID NO: 748823 - DNA, 33 bp, Homo sapien
cgaatgaatgaatgaaagctcgggtacaacagg

SEQ ID NO: 748824 - DNA, 33 bp, Homo sapien
cgaatgaatgaatgaaggctcgggtacaacagg

SEQ ID NO: 748825 - DNA, 33 bp, Homo sapien
agcggagagcttattccctttcttgtcgcctat

SEQ ID NO: 748826 - DNA, 33 bp, Homo sapien
agcggagagcttattctctttcttgtcgcctat

SEQ ID NO: 748827 - DNA, 33 bp, Homo sapien
aagtttagaaagcaaaggaatggtaactgactt

SEQ ID NO: 748828 - DNA, 33 bp, Homo sapien
aagtttagaaagcaaatgaatggtaactgactt

SEQ ID NO: 748829 - DNA, 33 bp, Homo sapien
tcctggctaaccggacagaggacacatcagtgt

SEQ ID NO: 748830 - DNA, 33 bp, Homo sapien
tcctggctaaccggacggaggacacatcagtgt

SEQ ID NO: 748831 - DNA, 33 bp, Homo sapien
gacagaaagtagaatgaaagttaccaggggcta

SEQ ID NO: 748832 - DNA, 33 bp, Homo sapien
gacagaaagtagaatggaagttaccaggggcta

SEQ ID NO: 748833 - DNA, 33 bp, Homo sapien
atttataaagggaagacggtgaaaaattcatga

SEQ ID NO: 748834 - DNA, 33 bp, Homo sapien
atttataaagggaagatggtgaaaaattcatga

SEQ ID NO: 748835 - DNA, 33 bp, Homo sapien
ttacacattgcctagtaaaacagagccaaaaaa

SEQ ID NO: 748836 - DNA, 33 bp, Homo sapien
ttacacattgcctagtgaaacagagccaaaaaa

SEQ ID NO: 748837 - DNA, 33 bp, Homo sapien
ttaaactaagccaggtaaaaactcgtttttgaa

SEQ ID NO: 748838 - DNA, 33 bp, Homo sapien
ttaaactaagccaggtgaaaactcgtttttgaa

SEQ ID NO: 748839 - DNA, 33 bp, Homo sapien
tagaaaacacaagtgaaagactctttttatgaa

SEQ ID NO: 748840 - DNA, 33 bp, Homo sapien
tagaaaacacaagtgagagactctttttatgaa

SEQ ID NO: 748841 - DNA, 33 bp, Homo sapien
gttactgtgaatttcaatccttcgaggtcttca

SEQ ID NO: 748842 - DNA, 33 bp, Homo sapien
gttactgtgaatttcagtccttcgaggtcttca

SEQ ID NO: 748843 - DNA, 33 bp, Homo sapien
ttcaccccaaggaaacagcagattggtggattg

SEQ ID NO: 748844 - DNA, 33 bp, Homo sapien
ttcaccccaaggaaacggcagattggtggattg

SEQ ID NO: 748845 - DNA, 33 bp, Homo sapien
aaatctgtagagactaacaagaagaggccagat

SEQ ID NO: 748846 - DNA, 33 bp, Homo sapien
aaatctgtagagactaccaagaagaggccagat

SEQ ID NO: 748847 - DNA, 33 bp, Homo sapien
tcaaactaggtgaagaagtgagatccaatttta

SEQ ID NO: 748848 - DNA, 33 bp, Homo sapien
tcaaactaggtgaagacgtgagatccaatttta

SEQ ID NO: 748849 - DNA, 33 bp, Homo sapien
aaatgttacatttgcaaagctccttctcacacg

SEQ ID NO: 748850 - DNA, 33 bp, Homo sapien
aaatgttacatttgcagagctccttctcacacg

SEQ ID NO: 748851 - DNA, 33 bp, Homo sapien
cagtgatattccaaaaatgagatgaatctggga

SEQ ID NO: 748852 - DNA, 33 bp, Homo sapien
cagtgatattccaaaagtgagatgaatctggga

SEQ ID NO: 748853 - DNA, 33 bp, Homo sapien
atattcatctactccacctgtattttcacaaga

SEQ ID NO: 748854 - DNA, 33 bp, Homo sapien
atattcatctactccatctgtattttcacaaga

SEQ ID NO: 748855 - DNA, 33 bp, Homo sapien
gaattgctggatcttacggtgagtctgtgaggt

SEQ ID NO: 748856 - DNA, 33 bp, Homo sapien
gaattgctggatcttatggtgagtctgtgaggt

SEQ ID NO: 748857 - DNA, 33 bp, Homo sapien
accattgcttagagaaactgtcatcactcctgc

SEQ ID NO: 748858 - DNA, 33 bp, Homo sapien
accattgcttagagaagctgtcatcactcctgc

SEQ ID NO: 748859 - DNA, 33 bp, Homo sapien
ccaagatccaagactacgcaattgttccatgac

SEQ ID NO: 748860 - DNA, 33 bp, Homo sapien
ccaagatccaagactatgcaattgttccatgac

SEQ ID NO: 748861 - DNA, 33 bp, Homo sapien
tgttggaatctcagccacattcccattctcaga

SEQ ID NO: 748862 - DNA, 33 bp, Homo sapien
tgttggaatctcagccgcattcccattctcaga

SEQ ID NO: 748863 - DNA, 33 bp, Homo sapien
cagtgctgtgcggcatcactgaacactgacctc

SEQ ID NO: 748864 - DNA, 33 bp, Homo sapien
cagtgctgtgcggcattactgaacactgacctc

SEQ ID NO: 748865 - DNA, 33 bp, Homo sapien
tcctagtcatcagcacagcatcacccactgcta

SEQ ID NO: 748866 - DNA, 33 bp, Homo sapien
tcctagtcatcagcacggcatcacccactgcta

SEQ ID NO: 748867 - DNA, 33 bp, Homo sapien
atacttgcactctggtaaagaacactgatatct

SEQ ID NO: 748868 - DNA, 33 bp, Homo sapien
atacttgcactctggtgaagaacactgatatct

SEQ ID NO: 748869 - DNA, 33 bp, Homo sapien
gacattgaaacattcaatcaacagtgtttgcca

SEQ ID NO: 748870 - DNA, 33 bp, Homo sapien
gacattgaaacattcagtcaacagtgtttgcca

SEQ ID NO: 748871 - DNA, 33 bp, Homo sapien
gatatggaaaagggtcaaaacacatagagcaag

SEQ ID NO: 748872 - DNA, 33 bp, Homo sapien
gatatggaaaagggtccaaacacatagagcaag

SEQ ID NO: 748873 - DNA, 33 bp, Homo sapien
tctcccttgaaggccaagtcccagaattgcata

SEQ ID NO: 748874 - DNA, 33 bp, Homo sapien
tctcccttgaaggccatgtcccagaattgcata

SEQ ID NO: 748875 - DNA, 33 bp, Homo sapien
atttcatgttgaaaaccgtgcgccggggatccc

SEQ ID NO: 748876 - DNA, 33 bp, Homo sapien
atttcatgttgaaaactgtgcgccggggatccc

SEQ ID NO: 748877 - DNA, 33 bp, Homo sapien
attgaattgaaaggaacattagttactgaaata

SEQ ID NO: 748878 - DNA, 33 bp, Homo sapien
attgaattgaaaggaatattagttactgaaata

SEQ ID NO: 748879 - DNA, 33 bp, Homo sapien
tgagttctctgtttgtaaatatcagttagaaaa

SEQ ID NO: 748880 - DNA, 33 bp, Homo sapien
tgagttctctgtttgttaatatcagttagaaaa

SEQ ID NO: 748881 - DNA, 33 bp, Homo sapien
ttcagtcatctttaaagaactatcacagaaatt

SEQ ID NO: 748882 - DNA, 33 bp, Homo sapien
ttcagtcatctttaaataactatcacagaaatt

SEQ ID NO: 748883 - DNA, 33 bp, Homo sapien
ttttttatatggaaaaggagctagagcaaaaat

SEQ ID NO: 748884 - DNA, 33 bp, Homo sapien
ttttttatatggaaaatgagctagagcaaaaat

SEQ ID NO: 748885 - DNA, 33 bp, Homo sapien
gttctggtcctggcagaaccttgtctcattctc

SEQ ID NO: 748886 - DNA, 33 bp, Homo sapien
gttctggtcctggcagtaccttgtctcattctc

SEQ ID NO: 748887 - DNA, 33 bp, Homo sapien
tgcacacaacacaggcaaggtagtaatatttag

SEQ ID NO: 748888 - DNA, 33 bp, Homo sapien
tgcacacaacacaggcgaggtagtaatatttag

SEQ ID NO: 748889 - DNA, 33 bp, Homo sapien
tttgaaacgtaacttgaaagggctttgaaatgc

SEQ ID NO: 748890 - DNA, 33 bp, Homo sapien
tttgaaacgtaacttggaagggctttgaaatgc

SEQ ID NO: 748891 - DNA, 33 bp, Homo sapien
tgcataatgtatacacacacttggtacagcgta

SEQ ID NO: 748892 - DNA, 33 bp, Homo sapien
tgcataatgtatacacgcacttggtacagcgta

SEQ ID NO: 748893 - DNA, 33 bp, Homo sapien
gatatgcatctttctaaccttggtgtgattttt

SEQ ID NO: 748894 - DNA, 33 bp, Homo sapien
gatatgcatctttctagccttggtgtgattttt

SEQ ID NO: 748895 - DNA, 33 bp, Homo sapien
atgaagagctgactcacaacgaagtcaagtggc

SEQ ID NO: 748896 - DNA, 33 bp, Homo sapien
atgaagagctgactcataacgaagtcaagtggc

SEQ ID NO: 748897 - DNA, 33 bp, Homo sapien
gctgtgcacagactccacaaaggacggattgtc

SEQ ID NO: 748898 - DNA, 33 bp, Homo sapien
gctgtgcacagactcctcaaaggacggattgtc

SEQ ID NO: 748899 - DNA, 33 bp, Homo sapien
tgctctaaatgcattacctcttcttatccttcc

SEQ ID NO: 748900 - DNA, 33 bp, Homo sapien
tgctctaaatgcattatctcttcttatccttcc

SEQ ID NO: 748901 - DNA, 33 bp, Homo sapien
tacagagcatcccttcactatgtttagcctctt

SEQ ID NO: 748902 - DNA, 33 bp, Homo sapien
tacagagcatcccttcgctatgtttagcctctt

SEQ ID NO: 748903 - DNA, 33 bp, Homo sapien
caatctggactacctcaaaaatagggaaaactg

SEQ ID NO: 748904 - DNA, 33 bp, Homo sapien
caatctggactacctcgaaaatagggaaaactg

SEQ ID NO: 748905 - DNA, 33 bp, Homo sapien
atctacttgccactcacgaagtaagaaaaaaat

SEQ ID NO: 748906 - DNA, 33 bp, Homo sapien
atctacttgccactcatgaagtaagaaaaaaat

SEQ ID NO: 748907 - DNA, 33 bp, Homo sapien
agttccttcatgtgtaaaatataggcatggata

SEQ ID NO: 748908 - DNA, 33 bp, Homo sapien
agttccttcatgtgtataatataggcatggata

SEQ ID NO: 748909 - DNA, 33 bp, Homo sapien
cacaggggaacttgcccgactgtcatgtagaag

SEQ ID NO: 748910 - DNA, 33 bp, Homo sapien
cacaggggaacttgcctgactgtcatgtagaag

SEQ ID NO: 748911 - DNA, 33 bp, Homo sapien
catgttatccttatggcactgtgtgatcagata

SEQ ID NO: 748912 - DNA, 33 bp, Homo sapien
catgttatccttatggtactgtgtgatcagata

SEQ ID NO: 748913 - DNA, 33 bp, Homo sapien
gtttataaacagcactaactcaaactgccagat

SEQ ID NO: 748914 - DNA, 33 bp, Homo sapien
gtttataaacagcactgactcaaactgccagat

SEQ ID NO: 748915 - DNA, 33 bp, Homo sapien
aatgatttagggccaacatgatttttagagagc

SEQ ID NO: 748916 - DNA, 33 bp, Homo sapien
aatgatttagggccaatatgatttttagagagc

SEQ ID NO: 748917 - DNA, 33 bp, Homo sapien
tggattttgtagtgaccatctatttcctgtgtc

SEQ ID NO: 748918 - DNA, 33 bp, Homo sapien
tggattttgtagtgacgatctatttcctgtgtc

SEQ ID NO: 748919 - DNA, 33 bp, Homo sapien
tggtcatgtgacttaacattggtccagcacctt

SEQ ID NO: 748920 - DNA, 33 bp, Homo sapien
tggtcatgtgacttaatattggtccagcacctt

SEQ ID NO: 748921 - DNA, 33 bp, Homo sapien
tatcatcgactcccccactagacagcaaagcat

SEQ ID NO: 748922 - DNA, 33 bp, Homo sapien
tatcatcgactcccccgctagacagcaaagcat

SEQ ID NO: 748923 - DNA, 33 bp, Homo sapien
ttcttaagactcaatcaaaggtaaagatctgct

SEQ ID NO: 748924 - DNA, 33 bp, Homo sapien
ttcttaagactcaatcgaaggtaaagatctgct

SEQ ID NO: 748925 - DNA, 33 bp, Homo sapien
ctctgaaacgtggagcacctttccaagatccaa

SEQ ID NO: 748926 - DNA, 33 bp, Homo sapien
ctctgaaacgtggagcgcctttccaagatccaa

SEQ ID NO: 748927 - DNA, 33 bp, Homo sapien
taaagtgttttctagacagtttcatgttatttt

SEQ ID NO: 748928 - DNA, 33 bp, Homo sapien
taaagtgttttctagagagtttcatgttatttt

SEQ ID NO: 748929 - DNA, 33 bp, Homo sapien
gacagcctagattcaaggtcagatgaagggcac

SEQ ID NO: 748930 - DNA, 33 bp, Homo sapien
gacagcctagattcaatgtcagatgaagggcac

SEQ ID NO: 748931 - DNA, 33 bp, Homo sapien
tctgagtcagggaacactgagtgaaagcaaagc

SEQ ID NO: 748932 - DNA, 33 bp, Homo sapien
tctgagtcagggaacattgagtgaaagcaaagc

SEQ ID NO: 748933 - DNA, 33 bp, Homo sapien
cagcggaaggtgcaatcaacacagattttactc

SEQ ID NO: 748934 - DNA, 33 bp, Homo sapien
cagcggaaggtgcaatgaacacagattttactc

SEQ ID NO: 748935 - DNA, 33 bp, Homo sapien
cactgtcaaaatgccaaaagaaaagggcagtga

SEQ ID NO: 748936 - DNA, 33 bp, Homo sapien
cactgtcaaaatgccagaagaaaagggcagtga

SEQ ID NO: 748937 - DNA, 33 bp, Homo sapien
gtcttaagaaattactaaaagatacgactcaat

SEQ ID NO: 748938 - DNA, 33 bp, Homo sapien
gtcttaagaaattactgaaagatacgactcaat

SEQ ID NO: 748939 - DNA, 33 bp, Homo sapien
aattattttctcacgaacctcatggaaatagat

SEQ ID NO: 748940 - DNA, 33 bp, Homo sapien
aattattttctcacgaccctcatggaaatagat

SEQ ID NO: 748941 - DNA, 33 bp, Homo sapien
aaataatatgttggaaatgataccagtgcaagg

SEQ ID NO: 748942 - DNA, 33 bp, Homo sapien
aaataatatgttggaagtgataccagtgcaagg

SEQ ID NO: 748943 - DNA, 33 bp, Homo sapien
aaattctgaaagtctacgtgtttgttggtgcat

SEQ ID NO: 748944 - DNA, 33 bp, Homo sapien
aaattctgaaagtctatgtgtttgttggtgcat

SEQ ID NO: 748945 - DNA, 33 bp, Homo sapien
tcctaggaagcaaactcaccgtgttgggctctc

SEQ ID NO: 748946 - DNA, 33 bp, Homo sapien
tcctaggaagcaaacttaccgtgttgggctctc

SEQ ID NO: 748947 - DNA, 33 bp, Homo sapien
tacactgtagactagaataatatgctgatttag

SEQ ID NO: 748948 - DNA, 33 bp, Homo sapien
tacactgtagactagagtaatatgctgatttag

SEQ ID NO: 748949 - DNA, 33 bp, Homo sapien
ttacaatattcttggacgaggacctggggaaga

SEQ ID NO: 748950 - DNA, 33 bp, Homo sapien
ttacaatattcttggatgaggacctggggaaga

SEQ ID NO: 748951 - DNA, 33 bp, Homo sapien
tgtcgggattatgagcaaatttaagcctatggt

SEQ ID NO: 748952 - DNA, 33 bp, Homo sapien
tgtcgggattatgagcgaatttaagcctatggt

SEQ ID NO: 748953 - DNA, 33 bp, Homo sapien
ctcctttttcacctaaattagcaaaatgtccaa

SEQ ID NO: 748954 - DNA, 33 bp, Homo sapien
ctcctttttcacctaatttagcaaaatgtccaa

SEQ ID NO: 748955 - DNA, 33 bp, Homo sapien
tacagcacgttagccacaaacaatttccatctg

SEQ ID NO: 748956 - DNA, 33 bp, Homo sapien
tacagcacgttagccataaacaatttccatctg

SEQ ID NO: 748957 - DNA, 33 bp, Homo sapien
cttgttgctacttccaacctctatgagaatttt

SEQ ID NO: 748958 - DNA, 33 bp, Homo sapien
cttgttgctacttccagcctctatgagaatttt

SEQ ID NO: 748959 - DNA, 33 bp, Homo sapien
aaaagcaaaagaggtcccagatttttacaaatg

SEQ ID NO: 748960 - DNA, 33 bp, Homo sapien
aaaagcaaaagaggtctcagatttttacaaatg

SEQ ID NO: 748961 - DNA, 33 bp, Homo sapien
tacattttccaaacacgaaggcagtcaatttga

SEQ ID NO: 748962 - DNA, 33 bp, Homo sapien
tacattttccaaacactaaggcagtcaatttga

SEQ ID NO: 748963 - DNA, 33 bp, Homo sapien
aattgtgatgttggtacaaagcaagtggcctta

SEQ ID NO: 748964 - DNA, 33 bp, Homo sapien
aattgtgatgttggtataaagcaagtggcctta

SEQ ID NO: 748965 - DNA, 33 bp, Homo sapien
ttaatttcccaggacacggaataactcttaaaa

SEQ ID NO: 748966 - DNA, 33 bp, Homo sapien
ttaatttcccaggacatggaataactcttaaaa

SEQ ID NO: 748967 - DNA, 33 bp, Homo sapien
atgttgtggaacatatcacagagacaagggtat

SEQ ID NO: 748968 - DNA, 33 bp, Homo sapien
atgttgtggaacatattacagagacaagggtat

SEQ ID NO: 748969 - DNA, 33 bp, Homo sapien
ttcactcatgcaaatccgagcactgtccaaagg

SEQ ID NO: 748970 - DNA, 33 bp, Homo sapien
ttcactcatgcaaatctgagcactgtccaaagg

SEQ ID NO: 748971 - DNA, 33 bp, Homo sapien
gtgagaatcactgaggcaagagcaagcaactcc

SEQ ID NO: 748972 - DNA, 33 bp, Homo sapien
gtgagaatcactgagggaagagcaagcaactcc

SEQ ID NO: 748973 - DNA, 33 bp, Homo sapien
tttcactctgtagctgacaataccttgatctgg

SEQ ID NO: 748974 - DNA, 33 bp, Homo sapien
tttcactctgtagctgtcaataccttgatctgg

SEQ ID NO: 748975 - DNA, 33 bp, Homo sapien
ttagactgaacatctccaggtttttctactata

SEQ ID NO: 748976 - DNA, 33 bp, Homo sapien
ttagactgaacatctctaggtttttctactata

SEQ ID NO: 748977 - DNA, 33 bp, Homo sapien
ctgagatctctttctactgtggatgaaggaaga

SEQ ID NO: 748978 - DNA, 33 bp, Homo sapien
ctgagatctctttctattgtggatgaaggaaga

SEQ ID NO: 748979 - DNA, 33 bp, Homo sapien
tctaacaagatcctaaatgatgacgttaatgtt

SEQ ID NO: 748980 - DNA, 33 bp, Homo sapien
tctaacaagatcctaagtgatgacgttaatgtt

SEQ ID NO: 748981 - DNA, 33 bp, Homo sapien
cctgcagtcctttgaaaagtgagttgtgctata

SEQ ID NO: 748982 - DNA, 33 bp, Homo sapien
cctgcagtcctttgaagagtgagttgtgctata

SEQ ID NO: 748983 - DNA, 33 bp, Homo sapien
aacaaaaggttaaaggaccagtatcattgaaag

SEQ ID NO: 748984 - DNA, 33 bp, Homo sapien
aacaaaaggttaaaggcccagtatcattgaaag

SEQ ID NO: 748985 - DNA, 33 bp, Homo sapien
tctagaaaactgttgaaagtgcagggtttggaa

SEQ ID NO: 748986 - DNA, 33 bp, Homo sapien
tctagaaaactgttgacagtgcagggtttggaa

SEQ ID NO: 748987 - DNA, 33 bp, Homo sapien
ttcttttacagagaccaagcctgtggttgaaag

SEQ ID NO: 748988 - DNA, 33 bp, Homo sapien
ttcttttacagagaccgagcctgtggttgaaag

SEQ ID NO: 748989 - DNA, 33 bp, Homo sapien
gaagaagatagtgaaactggtttgagactttct

SEQ ID NO: 748990 - DNA, 33 bp, Homo sapien
gaagaagatagtgaaattggtttgagactttct

SEQ ID NO: 748991 - DNA, 33 bp, Homo sapien
tagtctgctcaaacagcaaatattggttttaaa

SEQ ID NO: 748992 - DNA, 33 bp, Homo sapien
tagtctgctcaaacagtaaatattggttttaaa

SEQ ID NO: 748993 - DNA, 33 bp, Homo sapien
tatacacagagtgatacaggatgaaatttaatc

SEQ ID NO: 748994 - DNA, 33 bp, Homo sapien
tatacacagagtgatagaggatgaaatttaatc

SEQ ID NO: 748995 - DNA, 33 bp, Homo sapien
atagtctatagccaccaagtgaggaagtcttga

SEQ ID NO: 748996 - DNA, 33 bp, Homo sapien
atagtctatagccaccgagtgaggaagtcttga

SEQ ID NO: 748997 - DNA, 33 bp, Homo sapien
gctactgaggatatgcaaatgtactgcaagaca

SEQ ID NO: 748998 - DNA, 33 bp, Homo sapien
gctactgaggatatgcgaatgtactgcaagaca

SEQ ID NO: 748999 - DNA, 33 bp, Homo sapien
gaaggacaaagaaacaacatagaaataaacacc

SEQ ID NO: 749000 - DNA, 33 bp, Homo sapien
gaaggacaaagaaacatcatagaaataaacacc

SEQ ID NO: 749001 - DNA, 33 bp, Homo sapien
gttattttgcaaggaaagggagaacactgctct

SEQ ID NO: 749002 - DNA, 33 bp, Homo sapien
gttattttgcaaggaaggggagaacactgctct

SEQ ID NO: 749003 - DNA, 33 bp, Homo sapien
agatattctacagacaggtttagaggaaattag

SEQ ID NO: 749004 - DNA, 33 bp, Homo sapien
agatattctacagacatgtttagaggaaattag

SEQ ID NO: 749005 - DNA, 33 bp, Homo sapien
attattttgcagcaacagtgagtaggtgcatgg

SEQ ID NO: 749006 - DNA, 33 bp, Homo sapien
attattttgcagcaacggtgagtaggtgcatgg

SEQ ID NO: 749007 - DNA, 33 bp, Homo sapien
agcaataccatttgcagtagcactgaaaaaata

SEQ ID NO: 749008 - DNA, 33 bp, Homo sapien
agcaataccatttgcattagcactgaaaaaata

SEQ ID NO: 749009 - DNA, 33 bp, Homo sapien
acaacttgtttgtaaaattgttagactctcgac

SEQ ID NO: 749010 - DNA, 33 bp, Homo sapien
acaacttgtttgtaaagttgttagactctcgac

SEQ ID NO: 749011 - DNA, 33 bp, Homo sapien
acagagctatcattgcagcaaaattttccaagg

SEQ ID NO: 749012 - DNA, 33 bp, Homo sapien
acagagctatcattgcggcaaaattttccaagg

SEQ ID NO: 749013 - DNA, 33 bp, Homo sapien
tagaaaatgctttcccaaatggtttttcagaga

SEQ ID NO: 749014 - DNA, 33 bp, Homo sapien
tagaaaatgctttcccgaatggtttttcagaga

SEQ ID NO: 749015 - DNA, 33 bp, Homo sapien
gcattttctaaaagcaaagtaagaaaggtctat

SEQ ID NO: 749016 - DNA, 33 bp, Homo sapien
gcattttctaaaagcacagtaagaaaggtctat

SEQ ID NO: 749017 - DNA, 33 bp, Homo sapien
aaaacagaaatctgccaacaaaacagactgttt

SEQ ID NO: 749018 - DNA, 33 bp, Homo sapien
aaaacagaaatctgccgacaaaacagactgttt

SEQ ID NO: 749019 - DNA, 33 bp, Homo sapien
ttctctccagttgataataataatggcacactt

SEQ ID NO: 749020 - DNA, 33 bp, Homo sapien
ttctctccagttgatagtaataatggcacactt

SEQ ID NO: 749021 - DNA, 33 bp, Homo sapien
ccaactgtccacaaaccggtttcaaatggcatg

SEQ ID NO: 749022 - DNA, 33 bp, Homo sapien
ccaactgtccacaaactggtttcaaatggcatg

SEQ ID NO: 749023 - DNA, 33 bp, Homo sapien
gaagtttagagcatacaatggcccaataagttt

SEQ ID NO: 749024 - DNA, 33 bp, Homo sapien
gaagtttagagcatacgatggcccaataagttt

SEQ ID NO: 749025 - DNA, 33 bp, Homo sapien
tcatgaaaagaagagacgcagggctcagagctc

SEQ ID NO: 749026 - DNA, 33 bp, Homo sapien
tcatgaaaagaagagatgcagggctcagagctc

SEQ ID NO: 749027 - DNA, 33 bp, Homo sapien
tagactctccataccaaaaaaggccacaagaaa

SEQ ID NO: 749028 - DNA, 33 bp, Homo sapien
tagactctccataccagaaaaggccacaagaaa

SEQ ID NO: 749029 - DNA, 33 bp, Homo sapien
gtcttttcattttctcacactgctgaataaata

SEQ ID NO: 749030 - DNA, 33 bp, Homo sapien
gtcttttcattttctcgcactgctgaataaata

SEQ ID NO: 749031 - DNA, 33 bp, Homo sapien
aatgttacgcttttgaactgtcattggcaatgc

SEQ ID NO: 749032 - DNA, 33 bp, Homo sapien
aatgttacgcttttgagctgtcattggcaatgc

SEQ ID NO: 749033 - DNA, 33 bp, Homo sapien
gtcttcctcatccggacctaggaaaggttaact

SEQ ID NO: 749034 - DNA, 33 bp, Homo sapien
gtcttcctcatccggatctaggaaaggttaact

SEQ ID NO: 749035 - DNA, 33 bp, Homo sapien
agcaaaaggatcaaacacagaagaaaatgttgg

SEQ ID NO: 749036 - DNA, 33 bp, Homo sapien
agcaaaaggatcaaacgcagaagaaaatgttgg

SEQ ID NO: 749037 - DNA, 33 bp, Homo sapien
ggatcaatagagtagaagtttggatggtaggga

SEQ ID NO: 749038 - DNA, 33 bp, Homo sapien
ggatcaatagagtagaggtttggatggtaggga

SEQ ID NO: 749039 - DNA, 33 bp, Homo sapien
caattgagattgcaaaagttagatatgtgcaaa

SEQ ID NO: 749040 - DNA, 33 bp, Homo sapien
caattgagattgcaaatgttagatatgtgcaaa

SEQ ID NO: 749041 - DNA, 33 bp, Homo sapien
cttgttggttgaagtcaaaccatggaatagagg

SEQ ID NO: 749042 - DNA, 33 bp, Homo sapien
cttgttggttgaagtcgaaccatggaatagagg

SEQ ID NO: 749043 - DNA, 33 bp, Homo sapien
aggaaaaagctaactacgagggtagcctgggga

SEQ ID NO: 749044 - DNA, 33 bp, Homo sapien
aggaaaaagctaactatgagggtagcctgggga

SEQ ID NO: 749045 - DNA, 33 bp, Homo sapien
agaaagataacaaggacatgtaagtaaatggtc

SEQ ID NO: 749046 - DNA, 33 bp, Homo sapien
agaaagataacaaggatatgtaagtaaatggtc

SEQ ID NO: 749047 - DNA, 33 bp, Homo sapien
tgcgaagagaagtaaacataaagccttcacaag

SEQ ID NO: 749048 - DNA, 33 bp, Homo sapien
tgcgaagagaagtaaatataaagccttcacaag

SEQ ID NO: 749049 - DNA, 33 bp, Homo sapien
gttctgcatacctttccagcattgcttcttata

SEQ ID NO: 749050 - DNA, 33 bp, Homo sapien
gttctgcatacctttctagcattgcttcttata

SEQ ID NO: 749051 - DNA, 33 bp, Homo sapien
taataatagatgcacaacatgatcactggccaa

SEQ ID NO: 749052 - DNA, 33 bp, Homo sapien
taataatagatgcacatcatgatcactggccaa

SEQ ID NO: 749053 - DNA, 33 bp, Homo sapien
aagttctgagagaaaaggatttccaatttggaa

SEQ ID NO: 749054 - DNA, 33 bp, Homo sapien
aagttctgagagaaaatgatttccaatttggaa

SEQ ID NO: 749055 - DNA, 33 bp, Homo sapien
ctgttggtttctgtccgacccggtgagatactt

SEQ ID NO: 749056 - DNA, 33 bp, Homo sapien
ctgttggtttctgtcctacccggtgagatactt

SEQ ID NO: 749057 - DNA, 33 bp, Homo sapien
ttttctgcatgattgaaaacaagactgcttaca

SEQ ID NO: 749058 - DNA, 33 bp, Homo sapien
ttttctgcatgattgagaacaagactgcttaca

SEQ ID NO: 749059 - DNA, 33 bp, Homo sapien
tctgttgtgaacctcaaacattctcttcatatt

SEQ ID NO: 749060 - DNA, 33 bp, Homo sapien
tctgttgtgaacctcagacattctcttcatatt

SEQ ID NO: 749061 - DNA, 33 bp, Homo sapien
gatgaggaacacataaatcatagagcaggcatc

SEQ ID NO: 749062 - DNA, 33 bp, Homo sapien
gatgaggaacacataagtcatagagcaggcatc

SEQ ID NO: 749063 - DNA, 33 bp, Homo sapien
aagacgatgtcctaaccagatgggaggaacgtg

SEQ ID NO: 749064 - DNA, 33 bp, Homo sapien
aagacgatgtcctaacgagatgggaggaacgtg

SEQ ID NO: 749065 - DNA, 33 bp, Homo sapien
tctgtcccttttagtacggcaagcgattgcaga

SEQ ID NO: 749066 - DNA, 33 bp, Homo sapien
tctgtcccttttagtagggcaagcgattgcaga

SEQ ID NO: 749067 - DNA, 33 bp, Homo sapien
actctgttaaaagcaccgtctgtcccttttagt

SEQ ID NO: 749068 - DNA, 33 bp, Homo sapien
actctgttaaaagcactgtctgtcccttttagt

SEQ ID NO: 749069 - DNA, 33 bp, Homo sapien
tttgatcagttggttgaattcacatgaatattt

SEQ ID NO: 749070 - DNA, 33 bp, Homo sapien
tttgatcagttggttggattcacatgaatattt

SEQ ID NO: 749071 - DNA, 33 bp, Homo sapien
accctaattggaaataaagaacagagcactcag

SEQ ID NO: 749072 - DNA, 33 bp, Homo sapien
accctaattggaaatacagaacagagcactcag

SEQ ID NO: 749073 - DNA, 33 bp, Homo sapien
aggaaatatcaagaacagttactattgcaaagt

SEQ ID NO: 749074 - DNA, 33 bp, Homo sapien
aggaaatatcaagaacggttactattgcaaagt

SEQ ID NO: 749075 - DNA, 33 bp, Homo sapien
gcgatccccagtgtaacgtacttcactgatgtt

SEQ ID NO: 749076 - DNA, 33 bp, Homo sapien
gcgatccccagtgtaatgtacttcactgatgtt

SEQ ID NO: 749077 - DNA, 33 bp, Homo sapien
aggtccactgccttgcactgctcattttcaatt

SEQ ID NO: 749078 - DNA, 33 bp, Homo sapien
aggtccactgccttgcgctgctcattttcaatt

SEQ ID NO: 749079 - DNA, 33 bp, Homo sapien
ttcgcttgaacaaagaacacttgtcatttttaa

SEQ ID NO: 749080 - DNA, 33 bp, Homo sapien
ttcgcttgaacaaagatcacttgtcatttttaa

SEQ ID NO: 749081 - DNA, 33 bp, Homo sapien
ctattatcaatgcaaacgtattcctcactttct

SEQ ID NO: 749082 - DNA, 33 bp, Homo sapien
ctattatcaatgcaaatgtattcctcactttct

SEQ ID NO: 749083 - DNA, 33 bp, Homo sapien
acagcatagaaaacaacttattatgagagtcaa

SEQ ID NO: 749084 - DNA, 33 bp, Homo sapien
acagcatagaaaacaatttattatgagagtcaa

SEQ ID NO: 749085 - DNA, 33 bp, Homo sapien
tgcattattagcgaaaaaaaacacatcatctca

SEQ ID NO: 749086 - DNA, 33 bp, Homo sapien
tgcattattagcgaaataaaacacatcatctca

SEQ ID NO: 749087 - DNA, 33 bp, Homo sapien
atttgccacacacttcactgatgaaatgtctgg

SEQ ID NO: 749088 - DNA, 33 bp, Homo sapien
atttgccacacacttccctgatgaaatgtctgg

SEQ ID NO: 749089 - DNA, 33 bp, Homo sapien
cacttacttggatgacagctagcctttcctttt

SEQ ID NO: 749090 - DNA, 33 bp, Homo sapien
cacttacttggatgactgctagcctttcctttt

SEQ ID NO: 749091 - DNA, 33 bp, Homo sapien
aaggactcgtgcattacaggaagggggagaaat

SEQ ID NO: 749092 - DNA, 33 bp, Homo sapien
aaggactcgtgcattagaggaagggggagaaat

SEQ ID NO: 749093 - DNA, 33 bp, Homo sapien
aggagatggcgttggcaaaatcacttggtccca

SEQ ID NO: 749094 - DNA, 33 bp, Homo sapien
aggagatggcgttggcgaaatcacttggtccca

SEQ ID NO: 749095 - DNA, 33 bp, Homo sapien
gaggggaggagttttcaatgccacttagtttac

SEQ ID NO: 749096 - DNA, 33 bp, Homo sapien
gaggggaggagttttcgatgccacttagtttac

SEQ ID NO: 749097 - DNA, 33 bp, Homo sapien
tattctctctcttcccaatccagcttatttcac

SEQ ID NO: 749098 - DNA, 33 bp, Homo sapien
tattctctctcttcccgatccagcttatttcac

SEQ ID NO: 749099 - DNA, 33 bp, Homo sapien
cgagccgttatttatcagaaatgcaaaaacttg

SEQ ID NO: 749100 - DNA, 33 bp, Homo sapien
cgagccgttatttatcggaaatgcaaaaacttg

SEQ ID NO: 749101 - DNA, 33 bp, Homo sapien
cattctcagaaacagaactactggagatgaaat

SEQ ID NO: 749102 - DNA, 33 bp, Homo sapien
cattctcagaaacagagctactggagatgaaat

SEQ ID NO: 749103 - DNA, 33 bp, Homo sapien
taagaacaattttaaactgatcaaaggcagtgt

SEQ ID NO: 749104 - DNA, 33 bp, Homo sapien
taagaacaattttaaagtgatcaaaggcagtgt

SEQ ID NO: 749105 - DNA, 33 bp, Homo sapien
acagccgaggaaactaaagaacagagagaagtc

SEQ ID NO: 749106 - DNA, 33 bp, Homo sapien
acagccgaggaaactatagaacagagagaagtc

SEQ ID NO: 749107 - DNA, 33 bp, Homo sapien
tgaccatgttgctatgaaaagatgtgttttgga

SEQ ID NO: 749108 - DNA, 33 bp, Homo sapien
tgaccatgttgctatggaaagatgtgttttgga

SEQ ID NO: 749109 - DNA, 33 bp, Homo sapien
gacccataattgcaaacgtgataagccattctt

SEQ ID NO: 749110 - DNA, 33 bp, Homo sapien
gacccataattgcaaaggtgataagccattctt

SEQ ID NO: 749111 - DNA, 33 bp, Homo sapien
gaaaaagggaattaagaacagacacctctgaga

SEQ ID NO: 749112 - DNA, 33 bp, Homo sapien
gaaaaagggaattaagtacagacacctctgaga

SEQ ID NO: 749113 - DNA, 33 bp, Homo sapien
caattgatattctgacgcacacaaacttactat

SEQ ID NO: 749114 - DNA, 33 bp, Homo sapien
caattgatattctgactcacacaaacttactat

SEQ ID NO: 749115 - DNA, 33 bp, Homo sapien
aaaatggaaattatgagagagcctagaaggaaa

SEQ ID NO: 749116 - DNA, 33 bp, Homo sapien
aaaatggaaattatgatagagcctagaaggaaa

SEQ ID NO: 749117 - DNA, 33 bp, Homo sapien
ggcatggcctatgaataaaagtatctcctccgt

SEQ ID NO: 749118 - DNA, 33 bp, Homo sapien
ggcatggcctatgaatgaaagtatctcctccgt

SEQ ID NO: 749119 - DNA, 33 bp, Homo sapien
gagatgccaacagcaaagatttccaatagtcca

SEQ ID NO: 749120 - DNA, 33 bp, Homo sapien
gagatgccaacagcaaggatttccaatagtcca

SEQ ID NO: 749121 - DNA, 33 bp, Homo sapien
tctgtgttcatccaacaagaaagatatggttcg

SEQ ID NO: 749122 - DNA, 33 bp, Homo sapien
tctgtgttcatccaacgagaaagatatggttcg

SEQ ID NO: 749123 - DNA, 33 bp, Homo sapien
ttaaaagagacattgacgctgtgctctgagacg

SEQ ID NO: 749124 - DNA, 33 bp, Homo sapien
ttaaaagagacattgatgctgtgctctgagacg

SEQ ID NO: 749125 - DNA, 33 bp, Homo sapien
cagctagtataaaaaaatcgtttgtgattcctc

SEQ ID NO: 749126 - DNA, 33 bp, Homo sapien
cagctagtataaaaaattcgtttgtgattcctc

SEQ ID NO: 749127 - DNA, 33 bp, Homo sapien
tgttgtatccaaaaaaagatgaaaaatacttag

SEQ ID NO: 749128 - DNA, 33 bp, Homo sapien
tgttgtatccaaaaaaggatgaaaaatacttag

SEQ ID NO: 749129 - DNA, 33 bp, Homo sapien
caagcttccatactgcactcttggagaagaagg

SEQ ID NO: 749130 - DNA, 33 bp, Homo sapien
caagcttccatactgccctcttggagaagaagg

SEQ ID NO: 749131 - DNA, 33 bp, Homo sapien
tagaacaacctgagtaacaaaatacatcatgtg

SEQ ID NO: 749132 - DNA, 33 bp, Homo sapien
tagaacaacctgagtatcaaaatacatcatgtg

SEQ ID NO: 749133 - DNA, 33 bp, Homo sapien
acagcagctttcaaaaatttctattcctagttg

SEQ ID NO: 749134 - DNA, 33 bp, Homo sapien
acagcagctttcaaaattttctattcctagttg

SEQ ID NO: 749135 - DNA, 33 bp, Homo sapien
tgtgctctagctgttacctttctgagaaatgcc

SEQ ID NO: 749136 - DNA, 33 bp, Homo sapien
tgtgctctagctgttagctttctgagaaatgcc

SEQ ID NO: 749137 - DNA, 33 bp, Homo sapien
atgcacacttggttacaacactgcaagttacag

SEQ ID NO: 749138 - DNA, 33 bp, Homo sapien
atgcacacttggttacgacactgcaagttacag

SEQ ID NO: 749139 - DNA, 33 bp, Homo sapien
gcatgattcaattagcaatgtttacattttaca

SEQ ID NO: 749140 - DNA, 33 bp, Homo sapien
gcatgattcaattagcgatgtttacattttaca

SEQ ID NO: 749141 - DNA, 33 bp, Homo sapien
aaaccttcacagtgtcacaatgcctggagacct

SEQ ID NO: 749142 - DNA, 33 bp, Homo sapien
aaaccttcacagtgtcgcaatgcctggagacct

SEQ ID NO: 749143 - DNA, 33 bp, Homo sapien
tcatttctgagcaatacatgcctggtatctagc

SEQ ID NO: 749144 - DNA, 33 bp, Homo sapien
tcatttctgagcaatatatgcctggtatctagc

SEQ ID NO: 749145 - DNA, 33 bp, Homo sapien
cctggccccataaccaaataggcacataaaatc

SEQ ID NO: 749146 - DNA, 33 bp, Homo sapien
cctggccccataaccagataggcacataaaatc

SEQ ID NO: 749147 - DNA, 33 bp, Homo sapien
atgacaacatcattaacagggtgataaggcaaa

SEQ ID NO: 749148 - DNA, 33 bp, Homo sapien
atgacaacatcattaagagggtgataaggcaaa

SEQ ID NO: 749149 - DNA, 33 bp, Homo sapien
tctctgaaatagccaacaatcttctgaaatgat

SEQ ID NO: 749150 - DNA, 33 bp, Homo sapien
tctctgaaatagccaataatcttctgaaatgat

SEQ ID NO: 749151 - DNA, 33 bp, Homo sapien
ttttcctatgttgtgaagaattttgtatgatca

SEQ ID NO: 749152 - DNA, 33 bp, Homo sapien
ttttcctatgttgtgaggaattttgtatgatca

SEQ ID NO: 749153 - DNA, 33 bp, Homo sapien
taataaacagctgtgaaaaataagggaaaatat

SEQ ID NO: 749154 - DNA, 33 bp, Homo sapien
taataaacagctgtgagaaataagggaaaatat

SEQ ID NO: 749155 - DNA, 33 bp, Homo sapien
gatacagtcgttgttcccaagaatcttgtcttt

SEQ ID NO: 749156 - DNA, 33 bp, Homo sapien
gatacagtcgttgttctcaagaatcttgtcttt

SEQ ID NO: 749157 - DNA, 33 bp, Homo sapien
ggactggaaaatgctacattagagtttagaggc

SEQ ID NO: 749158 - DNA, 33 bp, Homo sapien
ggactggaaaatgctagattagagtttagaggc

SEQ ID NO: 749159 - DNA, 33 bp, Homo sapien
atagcccgaatcctggaagattaacattctcca

SEQ ID NO: 749160 - DNA, 33 bp, Homo sapien
atagcccgaatcctgggagattaacattctcca

SEQ ID NO: 749161 - DNA, 33 bp, Homo sapien
ggaggactaatttcaacagcatgggtttgtaat

SEQ ID NO: 749162 - DNA, 33 bp, Homo sapien
ggaggactaatttcaatagcatgggtttgtaat

SEQ ID NO: 749163 - DNA, 33 bp, Homo sapien
tatgggtgagaagcaaacattcaattcacgcac

SEQ ID NO: 749164 - DNA, 33 bp, Homo sapien
tatgggtgagaagcaaccattcaattcacgcac

SEQ ID NO: 749165 - DNA, 33 bp, Homo sapien
aaatctattggagttacgtccttgtggtgaagt

SEQ ID NO: 749166 - DNA, 33 bp, Homo sapien
aaatctattggagttatgtccttgtggtgaagt

SEQ ID NO: 749167 - DNA, 33 bp, Homo sapien
tctcattagcgcaatcaaatctctagggtacta

SEQ ID NO: 749168 - DNA, 33 bp, Homo sapien
tctcattagcgcaatccaatctctagggtacta

SEQ ID NO: 749169 - DNA, 33 bp, Homo sapien
tattcttgtgttggaaagactgcaaaaatagca

SEQ ID NO: 749170 - DNA, 33 bp, Homo sapien
tattcttgtgttggaaggactgcaaaaatagca

SEQ ID NO: 749171 - DNA, 33 bp, Homo sapien
taactgacacgtgttcactgaattttaatttga

SEQ ID NO: 749172 - DNA, 33 bp, Homo sapien
taactgacacgtgttccctgaattttaatttga

SEQ ID NO: 749173 - DNA, 33 bp, Homo sapien
aagaaaatattagccaaactaaattcaacaaca

SEQ ID NO: 749174 - DNA, 33 bp, Homo sapien
aagaaaatattagccagactaaattcaacaaca

SEQ ID NO: 749175 - DNA, 33 bp, Homo sapien
ctctcagttatactacacctttctgcacaaaac

SEQ ID NO: 749176 - DNA, 33 bp, Homo sapien
ctctcagttatactacgcctttctgcacaaaac

SEQ ID NO: 749177 - DNA, 33 bp, Homo sapien
attttgtaatgattgagctggatgcaatttgtc

SEQ ID NO: 749178 - DNA, 33 bp, Homo sapien
attttgtaatgattgatctggatgcaatttgtc

SEQ ID NO: 749179 - DNA, 33 bp, Homo sapien
aattaaatcaccagtaaacgtgaacctggcaca

SEQ ID NO: 749180 - DNA, 33 bp, Homo sapien
aattaaatcaccagtacacgtgaacctggcaca

SEQ ID NO: 749181 - DNA, 33 bp, Homo sapien
ccctgggtaagtgcagaaaatccttccagcaac

SEQ ID NO: 749182 - DNA, 33 bp, Homo sapien
ccctgggtaagtgcagcaaatccttccagcaac

SEQ ID NO: 749183 - DNA, 33 bp, Homo sapien
atatgtcataagagtgcagtatccagagtatat

SEQ ID NO: 749184 - DNA, 33 bp, Homo sapien
atatgtcataagagtgtagtatccagagtatat

SEQ ID NO: 749185 - DNA, 33 bp, Homo sapien
tgaaaagggtttcaagacaatggaataactgaa

SEQ ID NO: 749186 - DNA, 33 bp, Homo sapien
tgaaaagggtttcaaggcaatggaataactgaa

SEQ ID NO: 749187 - DNA, 33 bp, Homo sapien
ttaatcttcccaacaacgttacaaattcgggac

SEQ ID NO: 749188 - DNA, 33 bp, Homo sapien
ttaatcttcccaacaatgttacaaattcgggac

SEQ ID NO: 749189 - DNA, 33 bp, Homo sapien
atagtagaaagttacgacaatgggattcaaata

SEQ ID NO: 749190 - DNA, 33 bp, Homo sapien
atagtagaaagttacggcaatgggattcaaata

SEQ ID NO: 749191 - DNA, 33 bp, Homo sapien
tagtttgcaaacacaacggaatgtggcgtttgg

SEQ ID NO: 749192 - DNA, 33 bp, Homo sapien
tagtttgcaaacacaatggaatgtggcgtttgg

SEQ ID NO: 749193 - DNA, 33 bp, Homo sapien
actgtgctggaacctcaaccacttactttcagt

SEQ ID NO: 749194 - DNA, 33 bp, Homo sapien
actgtgctggaacctcgaccacttactttcagt

SEQ ID NO: 749195 - DNA, 33 bp, Homo sapien
ttataaacaaatttagaagatgtgacatagggt

SEQ ID NO: 749196 - DNA, 33 bp, Homo sapien
ttataaacaaatttagcagatgtgacatagggt

SEQ ID NO: 749197 - DNA, 33 bp, Homo sapien
aagcacttgctcgttcgcaaaagcagatgaact

SEQ ID NO: 749198 - DNA, 33 bp, Homo sapien
aagcacttgctcgttctcaaaagcagatgaact

SEQ ID NO: 749199 - DNA, 33 bp, Homo sapien
cttttgccagtaaagacccttgaaatgattcaa

SEQ ID NO: 749200 - DNA, 33 bp, Homo sapien
cttttgccagtaaagatccttgaaatgattcaa

SEQ ID NO: 749201 - DNA, 33 bp, Homo sapien
agatcacacccagtgcaaccaaatctgagtgac

SEQ ID NO: 749202 - DNA, 33 bp, Homo sapien
agatcacacccagtgcgaccaaatctgagtgac

SEQ ID NO: 749203 - DNA, 33 bp, Homo sapien
gtggattgcccagtacacgcattaaaaagagca

SEQ ID NO: 749204 - DNA, 33 bp, Homo sapien
gtggattgcccagtacgcgcattaaaaagagca

SEQ ID NO: 749205 - DNA, 33 bp, Homo sapien
ctgctgtctacgaacaccctattcccatccatc

SEQ ID NO: 749206 - DNA, 33 bp, Homo sapien
ctgctgtctacgaacatcctattcccatccatc

SEQ ID NO: 749207 - DNA, 33 bp, Homo sapien
atccagtaagtagaaaaagagggcactgtcctg

SEQ ID NO: 749208 - DNA, 33 bp, Homo sapien
atccagtaagtagaaatagagggcactgtcctg

SEQ ID NO: 749209 - DNA, 33 bp, Homo sapien
ttgaaggagggtaagacagccttgtagtaccac

SEQ ID NO: 749210 - DNA, 33 bp, Homo sapien
ttgaaggagggtaagagagccttgtagtaccac

SEQ ID NO: 749211 - DNA, 33 bp, Homo sapien
tacacacccctaagaacgtagccctccttgtgt

SEQ ID NO: 749212 - DNA, 33 bp, Homo sapien
tacacacccctaagaatgtagccctccttgtgt

SEQ ID NO: 749213 - DNA, 33 bp, Homo sapien
cctgccacggccactcaccacgaacagacgcag

SEQ ID NO: 749214 - DNA, 33 bp, Homo sapien
cctgccacggccactcgccacgaacagacgcag

SEQ ID NO: 749215 - DNA, 33 bp, Homo sapien
ctttttgtttggccaacgctgaaagtgacctaa

SEQ ID NO: 749216 - DNA, 33 bp, Homo sapien
ctttttgtttggccaatgctgaaagtgacctaa

SEQ ID NO: 749217 - DNA, 33 bp, Homo sapien
tatataggcagatataccagaaaataaccaagt

SEQ ID NO: 749218 - DNA, 33 bp, Homo sapien
tatataggcagatatagcagaaaataaccaagt

SEQ ID NO: 749219 - DNA, 33 bp, Homo sapien
ctctgtagtatggatgcagtctatggtgatttt

SEQ ID NO: 749220 - DNA, 33 bp, Homo sapien
ctctgtagtatggatgtagtctatggtgatttt

SEQ ID NO: 749221 - DNA, 33 bp, Homo sapien
ggtcaatgcaaaaaaaccgaaggagcagatttc

SEQ ID NO: 749222 - DNA, 33 bp, Homo sapien
ggtcaatgcaaaaaaatcgaaggagcagatttc

SEQ ID NO: 749223 - DNA, 33 bp, Homo sapien
aagcaacaataagacaccactacatacctatta

SEQ ID NO: 749224 - DNA, 33 bp, Homo sapien
aagcaacaataagacatcactacatacctatta

SEQ ID NO: 749225 - DNA, 33 bp, Homo sapien
tggttataacattagacagagttctcataagat

SEQ ID NO: 749226 - DNA, 33 bp, Homo sapien
tggttataacattagatagagttctcataagat

SEQ ID NO: 749227 - DNA, 33 bp, Homo sapien
taaacctccagcaaaacagacaaagacaaaaag

SEQ ID NO: 749228 - DNA, 33 bp, Homo sapien
taaacctccagcaaaatagacaaagacaaaaag

SEQ ID NO: 749229 - DNA, 33 bp, Homo sapien
tgcagatcagctacaccgggtaggcagaggaat

SEQ ID NO: 749230 - DNA, 33 bp, Homo sapien
tgcagatcagctacactgggtaggcagaggaat

SEQ ID NO: 749231 - DNA, 33 bp, Homo sapien
aagtaacttcttccacacttagtagaatccgaa

SEQ ID NO: 749232 - DNA, 33 bp, Homo sapien
aagtaacttcttccacgcttagtagaatccgaa

SEQ ID NO: 749233 - DNA, 33 bp, Homo sapien
cctctaaggccggatcaagactttaaaataatg

SEQ ID NO: 749234 - DNA, 33 bp, Homo sapien
cctctaaggccggatccagactttaaaataatg

SEQ ID NO: 749235 - DNA, 33 bp, Homo sapien
cacacacagtgcagaaagcaatcgtgcacagct

SEQ ID NO: 749236 - DNA, 33 bp, Homo sapien
cacacacagtgcagaaggcaatcgtgcacagct

SEQ ID NO: 749237 - DNA, 33 bp, Homo sapien
gtgtgaaagtttacaagttcttcctgttttgat

SEQ ID NO: 749238 - DNA, 33 bp, Homo sapien
gtgtgaaagtttacaatttcttcctgttttgat

SEQ ID NO: 749239 - DNA, 33 bp, Homo sapien
gggttgtaaccttagaacattgcctgctatcca

SEQ ID NO: 749240 - DNA, 33 bp, Homo sapien
gggttgtaaccttagagcattgcctgctatcca

SEQ ID NO: 749241 - DNA, 33 bp, Homo sapien
gatgggaagctggcccccatagagctttgtttc

SEQ ID NO: 749242 - DNA, 33 bp, Homo sapien
gatgggaagctggcccgcatagagctttgtttc

SEQ ID NO: 749243 - DNA, 33 bp, Homo sapien
gagaccactgcctcatcagagttaggatggaat

SEQ ID NO: 749244 - DNA, 33 bp, Homo sapien
gagaccactgcctcatgagagttaggatggaat

SEQ ID NO: 749245 - DNA, 33 bp, Homo sapien
ggccttagcataggtcaagggttctgtgggagg

SEQ ID NO: 749246 - DNA, 33 bp, Homo sapien
ggccttagcataggtcgagggttctgtgggagg

SEQ ID NO: 749247 - DNA, 33 bp, Homo sapien
tagtacagtacatcaaaattgtataaatacccc

SEQ ID NO: 749248 - DNA, 33 bp, Homo sapien
tagtacagtacatcaagattgtataaatacccc

SEQ ID NO: 749249 - DNA, 33 bp, Homo sapien
tttgctcaacctaatagcaaagcagttaggtat

SEQ ID NO: 749250 - DNA, 33 bp, Homo sapien
tttgctcaacctaatatcaaagcagttaggtat

SEQ ID NO: 749251 - DNA, 33 bp, Homo sapien
tagctcccttatgaaactctcctaacattaccc

SEQ ID NO: 749252 - DNA, 33 bp, Homo sapien
tagctcccttatgaaattctcctaacattaccc

SEQ ID NO: 749253 - DNA, 33 bp, Homo sapien
atctgtaactacagtcaccagtttgccgccagg

SEQ ID NO: 749254 - DNA, 33 bp, Homo sapien
atctgtaactacagtcgccagtttgccgccagg

SEQ ID NO: 749255 - DNA, 33 bp, Homo sapien
catggagagattcctcacctgtcaacttaggat

SEQ ID NO: 749256 - DNA, 33 bp, Homo sapien
catggagagattcctcgcctgtcaacttaggat

SEQ ID NO: 749257 - DNA, 33 bp, Homo sapien
agcacaccccggacccccaatttgcaagatcca

SEQ ID NO: 749258 - DNA, 33 bp, Homo sapien
agcacaccccggaccctcaatttgcaagatcca

SEQ ID NO: 749259 - DNA, 33 bp, Homo sapien
agttattactgatcaaacgatcggccaagaaaa

SEQ ID NO: 749260 - DNA, 33 bp, Homo sapien
agttattactgatcaatcgatcggccaagaaaa

SEQ ID NO: 749261 - DNA, 33 bp, Homo sapien
aaaatgttgaagttaacgagaaaagcaatgggg

SEQ ID NO: 749262 - DNA, 33 bp, Homo sapien
aaaatgttgaagttaatgagaaaagcaatgggg

SEQ ID NO: 749263 - DNA, 33 bp, Homo sapien
ttggtaaattgttaaaagtgtgtggtattttta

SEQ ID NO: 749264 - DNA, 33 bp, Homo sapien
ttggtaaattgttaaaggtgtgtggtattttta

SEQ ID NO: 749265 - DNA, 33 bp, Homo sapien
gccaatctgattgataagaagctcaaagacaag

SEQ ID NO: 749266 - DNA, 33 bp, Homo sapien
gccaatctgattgataggaagctcaaagacaag

SEQ ID NO: 749267 - DNA, 33 bp, Homo sapien
ccaaacacaagccaaaaaagagtggcttaattt

SEQ ID NO: 749268 - DNA, 33 bp, Homo sapien
ccaaacacaagccaaacaagagtggcttaattt

SEQ ID NO: 749269 - DNA, 33 bp, Homo sapien
catcattttaacagacactcagcggagactggt

SEQ ID NO: 749270 - DNA, 33 bp, Homo sapien
catcattttaacagaccctcagcggagactggt

SEQ ID NO: 749271 - DNA, 33 bp, Homo sapien
acatctgcataccaaacggagaggtcttccacc

SEQ ID NO: 749272 - DNA, 33 bp, Homo sapien
acatctgcataccaaatggagaggtcttccacc

SEQ ID NO: 749273 - DNA, 33 bp, Homo sapien
tacttggctcttagaacactggtcttaggcttc

SEQ ID NO: 749274 - DNA, 33 bp, Homo sapien
tacttggctcttagaatactggtcttaggcttc

SEQ ID NO: 749275 - DNA, 33 bp, Homo sapien
gccacaatatagtgaactggtagtgtcagagtc

SEQ ID NO: 749276 - DNA, 33 bp, Homo sapien
gccacaatatagtgaattggtagtgtcagagtc

SEQ ID NO: 749277 - DNA, 33 bp, Homo sapien
gctatctgaaatgttcaattgtgggaagtggaa

SEQ ID NO: 749278 - DNA, 33 bp, Homo sapien
gctatctgaaatgttcgattgtgggaagtggaa

SEQ ID NO: 749279 - DNA, 33 bp, Homo sapien
tttcctacaccatagacgaggctaagagtaggc

SEQ ID NO: 749280 - DNA, 33 bp, Homo sapien
tttcctacaccatagatgaggctaagagtaggc

SEQ ID NO: 749281 - DNA, 33 bp, Homo sapien
gtgatacatatgaagcaaatgtgatatgtggtc

SEQ ID NO: 749282 - DNA, 33 bp, Homo sapien
gtgatacatatgaagccaatgtgatatgtggtc

SEQ ID NO: 749283 - DNA, 33 bp, Homo sapien
tccccttttcatattgaagccctcaaaatcctc

SEQ ID NO: 749284 - DNA, 33 bp, Homo sapien
tccccttttcatattgtagccctcaaaatcctc

SEQ ID NO: 749285 - DNA, 33 bp, Homo sapien
gaagacagagatgtaaatagtggttcacttatc

SEQ ID NO: 749286 - DNA, 33 bp, Homo sapien
gaagacagagatgtaagtagtggttcacttatc

SEQ ID NO: 749287 - DNA, 33 bp, Homo sapien
catacaggaatacaacagctatacaagaaagaa

SEQ ID NO: 749288 - DNA, 33 bp, Homo sapien
catacaggaatacaacggctatacaagaaagaa

SEQ ID NO: 749289 - DNA, 33 bp, Homo sapien
ctggtgtttcagtaacaattttcctactgtttt

SEQ ID NO: 749290 - DNA, 33 bp, Homo sapien
ctggtgtttcagtaaccattttcctactgtttt

SEQ ID NO: 749291 - DNA, 33 bp, Homo sapien
gaagagagaattaatgacatgagaaaactgtga

SEQ ID NO: 749292 - DNA, 33 bp, Homo sapien
gaagagagaattaatggcatgagaaaactgtga

SEQ ID NO: 749293 - DNA, 33 bp, Homo sapien
cattcagatgactcataacacagacccttagta

SEQ ID NO: 749294 - DNA, 33 bp, Homo sapien
cattcagatgactcattacacagacccttagta

SEQ ID NO: 749295 - DNA, 33 bp, Homo sapien
agcattcagactctaccaaggccaagtaggaag

SEQ ID NO: 749296 - DNA, 33 bp, Homo sapien
agcattcagactctactaaggccaagtaggaag

SEQ ID NO: 749297 - DNA, 33 bp, Homo sapien
tctgttattgaaatgagaatgatagtaatcatg

SEQ ID NO: 749298 - DNA, 33 bp, Homo sapien
tctgttattgaaatgataatgatagtaatcatg

SEQ ID NO: 749299 - DNA, 33 bp, Homo sapien
tataaaaataaatagaaaaatgcacagccacat

SEQ ID NO: 749300 - DNA, 33 bp, Homo sapien
tataaaaataaatagataaatgcacagccacat

SEQ ID NO: 749301 - DNA, 33 bp, Homo sapien
tctggagacactttccacatgtttatttctcca

SEQ ID NO: 749302 - DNA, 33 bp, Homo sapien
tctggagacactttccgcatgtttatttctcca

SEQ ID NO: 749303 - DNA, 33 bp, Homo sapien
gattcctcaaatgacccaaactagccatttaga

SEQ ID NO: 749304 - DNA, 33 bp, Homo sapien
gattcctcaaatgacctaaactagccatttaga

SEQ ID NO: 749305 - DNA, 33 bp, Homo sapien
aagttcgaaatgttagcccacctgccaagtagg

SEQ ID NO: 749306 - DNA, 33 bp, Homo sapien
aagttcgaaatgttaggccacctgccaagtagg

SEQ ID NO: 749307 - DNA, 33 bp, Homo sapien
acagcctgaaaacacaaaatttccttaggaata

SEQ ID NO: 749308 - DNA, 33 bp, Homo sapien
acagcctgaaaacacagaatttccttaggaata

SEQ ID NO: 749309 - DNA, 33 bp, Homo sapien
aatcacactgacaaacagcgccatccaaactgt

SEQ ID NO: 749310 - DNA, 33 bp, Homo sapien
aatcacactgacaaacggcgccatccaaactgt

SEQ ID NO: 749311 - DNA, 33 bp, Homo sapien
gtctaaaaatattgcaaagtatgtttattgtaa

SEQ ID NO: 749312 - DNA, 33 bp, Homo sapien
gtctaaaaatattgcagagtatgtttattgtaa

SEQ ID NO: 749313 - DNA, 33 bp, Homo sapien
acctcccacaaaagaaagaaagtcaagtgagat

SEQ ID NO: 749314 - DNA, 33 bp, Homo sapien
acctcccacaaaagaatgaaagtcaagtgagat

SEQ ID NO: 749315 - DNA, 33 bp, Homo sapien
tttctgtctagttctgaagttctgtacagtttc

SEQ ID NO: 749316 - DNA, 33 bp, Homo sapien
tttctgtctagttctgcagttctgtacagtttc

SEQ ID NO: 749317 - DNA, 33 bp, Homo sapien
agaaaaagtaggaaaacctcaaaatctaggaaa

SEQ ID NO: 749318 - DNA, 33 bp, Homo sapien
agaaaaagtaggaaaatctcaaaatctaggaaa

SEQ ID NO: 749319 - DNA, 33 bp, Homo sapien
ggaaatgagtgagcaccgctgtgttccagtaaa

SEQ ID NO: 749320 - DNA, 33 bp, Homo sapien
ggaaatgagtgagcactgctgtgttccagtaaa

SEQ ID NO: 749321 - DNA, 33 bp, Homo sapien
tagtaatttgtttgatgaattagactaagcagt

SEQ ID NO: 749322 - DNA, 33 bp, Homo sapien
tagtaatttgtttgattaattagactaagcagt

SEQ ID NO: 749323 - DNA, 33 bp, Homo sapien
cctctttaacagtagaccttatccacaaaagcc

SEQ ID NO: 749324 - DNA, 33 bp, Homo sapien
cctctttaacagtagagcttatccacaaaagcc

SEQ ID NO: 749325 - DNA, 33 bp, Homo sapien
aatgatctgccaaccaaaccctaagaaagctta

SEQ ID NO: 749326 - DNA, 33 bp, Homo sapien
aatgatctgccaaccagaccctaagaaagctta

SEQ ID NO: 749327 - DNA, 33 bp, Homo sapien
tcatctacaaatgcaaactaccagatagagcaa

SEQ ID NO: 749328 - DNA, 33 bp, Homo sapien
tcatctacaaatgcaacctaccagatagagcaa

SEQ ID NO: 749329 - DNA, 33 bp, Homo sapien
taattaaatcaatatactaatctcaacatctgg

SEQ ID NO: 749330 - DNA, 33 bp, Homo sapien
taattaaatcaatatagtaatctcaacatctgg

SEQ ID NO: 749331 - DNA, 33 bp, Homo sapien
gatctcttaatatccacaggaaaattaacacac

SEQ ID NO: 749332 - DNA, 33 bp, Homo sapien
gatctcttaatatccagaggaaaattaacacac

SEQ ID NO: 749333 - DNA, 33 bp, Homo sapien
gagagggccatgtgaaaaattatttggaaagtc

SEQ ID NO: 749334 - DNA, 33 bp, Homo sapien
gagagggccatgtgaacaattatttggaaagtc

SEQ ID NO: 749335 - DNA, 33 bp, Homo sapien
ctgatgagggtgagaacgggtacgtgacataca

SEQ ID NO: 749336 - DNA, 33 bp, Homo sapien
ctgatgagggtgagaatgggtacgtgacataca

SEQ ID NO: 749337 - DNA, 33 bp, Homo sapien
ccttcacatgatcaacaaccggttccaatttaa

SEQ ID NO: 749338 - DNA, 33 bp, Homo sapien
ccttcacatgatcaaccaccggttccaatttaa

SEQ ID NO: 749339 - DNA, 33 bp, Homo sapien
tacactgactcacctaaaactctggcattacaa

SEQ ID NO: 749340 - DNA, 33 bp, Homo sapien
tacactgactcacctacaactctggcattacaa

SEQ ID NO: 749341 - DNA, 33 bp, Homo sapien
agaaaagcaaggtctaaattgaaatgctgatca

SEQ ID NO: 749342 - DNA, 33 bp, Homo sapien
agaaaagcaaggtctacattgaaatgctgatca

SEQ ID NO: 749343 - DNA, 33 bp, Homo sapien
ttctgtcttagttttacggctgctgttcagtgg

SEQ ID NO: 749344 - DNA, 33 bp, Homo sapien
ttctgtcttagttttatggctgctgttcagtgg

SEQ ID NO: 749345 - DNA, 33 bp, Homo sapien
ttgttcatagcacagcaaaacatattttaaaca

SEQ ID NO: 749346 - DNA, 33 bp, Homo sapien
ttgttcatagcacagcgaaacatattttaaaca

SEQ ID NO: 749347 - DNA, 33 bp, Homo sapien
ctcttcccccactggtcaaagtttgcctcactt

SEQ ID NO: 749348 - DNA, 33 bp, Homo sapien
ctcttcccccactggtgaaagtttgcctcactt

SEQ ID NO: 749349 - DNA, 33 bp, Homo sapien
aactcaggctagatgaataactgctgattgaca

SEQ ID NO: 749350 - DNA, 33 bp, Homo sapien
aactcaggctagatgagtaactgctgattgaca

SEQ ID NO: 749351 - DNA, 33 bp, Homo sapien
tagcagtttatggaaaagtgaactcataaacag

SEQ ID NO: 749352 - DNA, 33 bp, Homo sapien
tagcagtttatggaaacgtgaactcataaacag

SEQ ID NO: 749353 - DNA, 33 bp, Homo sapien
tctaatacctgatgacctaatctttttattgct

SEQ ID NO: 749354 - DNA, 33 bp, Homo sapien
tctaatacctgatgacgtaatctttttattgct

SEQ ID NO: 749355 - DNA, 33 bp, Homo sapien
tcccagatgaaggagccctgcctttggaaacgt

SEQ ID NO: 749356 - DNA, 33 bp, Homo sapien
tcccagatgaaggagctctgcctttggaaacgt

SEQ ID NO: 749357 - DNA, 33 bp, Homo sapien
agcaaaatgctattaccattgcactgggaattc

SEQ ID NO: 749358 - DNA, 33 bp, Homo sapien
agcaaaatgctattactattgcactgggaattc

SEQ ID NO: 749359 - DNA, 33 bp, Homo sapien
tttattttagtgtccaagttcttgacaactggc

SEQ ID NO: 749360 - DNA, 33 bp, Homo sapien
tttattttagtgtccacgttcttgacaactggc

SEQ ID NO: 749361 - DNA, 33 bp, Homo sapien
tagaatgccaactgggaagacttgggttcacct

SEQ ID NO: 749362 - DNA, 33 bp, Homo sapien
tagaatgccaactgggcagacttgggttcacct

SEQ ID NO: 749363 - DNA, 33 bp, Homo sapien
gttgatgatcctgttagacattttttatttatt

SEQ ID NO: 749364 - DNA, 33 bp, Homo sapien
gttgatgatcctgttatacattttttatttatt

SEQ ID NO: 749365 - DNA, 33 bp, Homo sapien
acagcatttaagccaaaagtcgacctgggtgtg

SEQ ID NO: 749366 - DNA, 33 bp, Homo sapien
acagcatttaagccaacagtcgacctgggtgtg

SEQ ID NO: 749367 - DNA, 33 bp, Homo sapien
aaacaaagtcaaaagcaagagtcctgggaggta

SEQ ID NO: 749368 - DNA, 33 bp, Homo sapien
aaacaaagtcaaaagccagagtcctgggaggta

SEQ ID NO: 749369 - DNA, 33 bp, Homo sapien
gctgtttaatgaagcccacatacttctataacg

SEQ ID NO: 749370 - DNA, 33 bp, Homo sapien
gctgtttaatgaagcctacatacttctataacg

SEQ ID NO: 749371 - DNA, 33 bp, Homo sapien
aggagccacaggtgagacacatttagtatgtga

SEQ ID NO: 749372 - DNA, 33 bp, Homo sapien
aggagccacaggtgagtcacatttagtatgtga

SEQ ID NO: 749373 - DNA, 33 bp, Homo sapien
ctgcagccgtactgccactcacttagggatggc

SEQ ID NO: 749374 - DNA, 33 bp, Homo sapien
ctgcagccgtactgccgctcacttagggatggc

SEQ ID NO: 749375 - DNA, 33 bp, Homo sapien
ccagagtagagggttcaatgatcacacttcaac

SEQ ID NO: 749376 - DNA, 33 bp, Homo sapien
ccagagtagagggttcgatgatcacacttcaac

SEQ ID NO: 749377 - DNA, 33 bp, Homo sapien
tttatttgtcatcagacgctatccaggatatag

SEQ ID NO: 749378 - DNA, 33 bp, Homo sapien
tttatttgtcatcagatgctatccaggatatag

SEQ ID NO: 749379 - DNA, 33 bp, Homo sapien
aaattgaagtgttaagaattatgaaagagccaa

SEQ ID NO: 749380 - DNA, 33 bp, Homo sapien
aaattgaagtgttaaggattatgaaagagccaa

SEQ ID NO: 749381 - DNA, 33 bp, Homo sapien
cgttttagaaattaaaaaactcagtgaacagat

SEQ ID NO: 749382 - DNA, 33 bp, Homo sapien
cgttttagaaattaaacaactcagtgaacagat

SEQ ID NO: 749383 - DNA, 33 bp, Homo sapien
gggaagagagagccaacgcaaggacacattact

SEQ ID NO: 749384 - DNA, 33 bp, Homo sapien
gggaagagagagccaatgcaaggacacattact

SEQ ID NO: 749385 - DNA, 33 bp, Homo sapien
caatgattgtaatggtaaatgttctgtgaaatt

SEQ ID NO: 749386 - DNA, 33 bp, Homo sapien
caatgattgtaatggtgaatgttctgtgaaatt

SEQ ID NO: 749387 - DNA, 33 bp, Homo sapien
ctttcttctccctcaaactcatttcttcagagc

SEQ ID NO: 749388 - DNA, 33 bp, Homo sapien
ctttcttctccctcaagctcatttcttcagagc

SEQ ID NO: 749389 - DNA, 33 bp, Homo sapien
ggacctgtattttcgaaactttcttggtgccct

SEQ ID NO: 749390 - DNA, 33 bp, Homo sapien
ggacctgtattttcgagactttcttggtgccct

SEQ ID NO: 749391 - DNA, 33 bp, Homo sapien
aaaatcgtacgaagaactgaaaaattgacttga

SEQ ID NO: 749392 - DNA, 33 bp, Homo sapien
aaaatcgtacgaagaattgaaaaattgacttga

SEQ ID NO: 749393 - DNA, 33 bp, Homo sapien
gctggagaataagagcagaataaggcaagtcac

SEQ ID NO: 749394 - DNA, 33 bp, Homo sapien
gctggagaataagagcggaataaggcaagtcac

SEQ ID NO: 749395 - DNA, 33 bp, Homo sapien
cgctgccaattccagaggagaaagcggaaatag

SEQ ID NO: 749396 - DNA, 33 bp, Homo sapien
cgctgccaattccagatgagaaagcggaaatag

SEQ ID NO: 749397 - DNA, 33 bp, Homo sapien
tgatttattaaatcaacgtatgctatatgatca

SEQ ID NO: 749398 - DNA, 33 bp, Homo sapien
tgatttattaaatcaaggtatgctatatgatca

SEQ ID NO: 749399 - DNA, 33 bp, Homo sapien
tttttctcatttgtcaaaaagaagtaaccaaat

SEQ ID NO: 749400 - DNA, 33 bp, Homo sapien
tttttctcatttgtcagaaagaagtaaccaaat

SEQ ID NO: 749401 - DNA, 33 bp, Homo sapien
gcaaaaacagtggcaacagtacgattgacgtga

SEQ ID NO: 749402 - DNA, 33 bp, Homo sapien
gcaaaaacagtggcaagagtacgattgacgtga

SEQ ID NO: 749403 - DNA, 33 bp, Homo sapien
gctggggtgagcccaacaacgtgtagcaagttc

SEQ ID NO: 749404 - DNA, 33 bp, Homo sapien
gctggggtgagcccaagaacgtgtagcaagttc

SEQ ID NO: 749405 - DNA, 33 bp, Homo sapien
ctctggtgaagatggacgaaatgacataaatgg

SEQ ID NO: 749406 - DNA, 33 bp, Homo sapien
ctctggtgaagatggatgaaatgacataaatgg

SEQ ID NO: 749407 - DNA, 33 bp, Homo sapien
acatccacgcttgtaaatatcacgctgatgctg

SEQ ID NO: 749408 - DNA, 33 bp, Homo sapien
acatccacgcttgtaagtatcacgctgatgctg

SEQ ID NO: 749409 - DNA, 33 bp, Homo sapien
aaatctagaaagctgacgattaaaaacagaaaa

SEQ ID NO: 749410 - DNA, 33 bp, Homo sapien
aaatctagaaagctgatgattaaaaacagaaaa

SEQ ID NO: 749411 - DNA, 33 bp, Homo sapien
aagatgcgggttcaaacgaatgtctaagatgga

SEQ ID NO: 749412 - DNA, 33 bp, Homo sapien
aagatgcgggttcaaaggaatgtctaagatgga

SEQ ID NO: 749413 - DNA, 33 bp, Homo sapien
atcttgactacattcacaattctctttttccct

SEQ ID NO: 749414 - DNA, 33 bp, Homo sapien
atcttgactacattcagaattctctttttccct

SEQ ID NO: 749415 - DNA, 33 bp, Homo sapien
gataattatccagttacgcaaatagtatattct

SEQ ID NO: 749416 - DNA, 33 bp, Homo sapien
gataattatccagttatgcaaatagtatattct

SEQ ID NO: 749417 - DNA, 33 bp, Homo sapien
tcaattacacggcataaaatgttcatttattta

SEQ ID NO: 749418 - DNA, 33 bp, Homo sapien
tcaattacacggcatacaatgttcatttattta

SEQ ID NO: 749419 - DNA, 33 bp, Homo sapien
tatcagcaattggctaagattctataaaatata

SEQ ID NO: 749420 - DNA, 33 bp, Homo sapien
tatcagcaattggctacgattctataaaatata

SEQ ID NO: 749421 - DNA, 33 bp, Homo sapien
agccataactgtaaaacgcacagaatattctac

SEQ ID NO: 749422 - DNA, 33 bp, Homo sapien
agccataactgtaaaatgcacagaatattctac

SEQ ID NO: 749423 - DNA, 33 bp, Homo sapien
ggtatgttctccttgacgtgtgagtacctcgaa

SEQ ID NO: 749424 - DNA, 33 bp, Homo sapien
ggtatgttctccttgatgtgtgagtacctcgaa

SEQ ID NO: 749425 - DNA, 33 bp, Homo sapien
tttgaggtctgaattcaccagataatcacgttc

SEQ ID NO: 749426 - DNA, 33 bp, Homo sapien
tttgaggtctgaattccccagataatcacgttc

SEQ ID NO: 749427 - DNA, 33 bp, Homo sapien
tgagacatctagaggacagtgttatattttgca

SEQ ID NO: 749428 - DNA, 33 bp, Homo sapien
tgagacatctagaggatagtgttatattttgca

SEQ ID NO: 749429 - DNA, 33 bp, Homo sapien
tcagatctgccttgcactgatggcatgaacata

SEQ ID NO: 749430 - DNA, 33 bp, Homo sapien
tcagatctgccttgcattgatggcatgaacata

SEQ ID NO: 749431 - DNA, 33 bp, Homo sapien
ctgttgtttactcaaacccactgtcctgctgaa

SEQ ID NO: 749432 - DNA, 33 bp, Homo sapien
ctgttgtttactcaaatccactgtcctgctgaa

SEQ ID NO: 749433 - DNA, 33 bp, Homo sapien
tagttttgttcagacaaaaatttaagaattata

SEQ ID NO: 749434 - DNA, 33 bp, Homo sapien
tagttttgttcagacagaaatttaagaattata

SEQ ID NO: 749435 - DNA, 33 bp, Homo sapien
acttcataacatcatccagcttctcaaggaatg

SEQ ID NO: 749436 - DNA, 33 bp, Homo sapien
acttcataacatcatcgagcttctcaaggaatg

SEQ ID NO: 749437 - DNA, 33 bp, Homo sapien
gcacatgcaaagttacagagcatgaaacgaaca

SEQ ID NO: 749438 - DNA, 33 bp, Homo sapien
gcacatgcaaagttacggagcatgaaacgaaca

SEQ ID NO: 749439 - DNA, 33 bp, Homo sapien
tccccaggtctgatttaactcacctttctccct

SEQ ID NO: 749440 - DNA, 33 bp, Homo sapien
tccccaggtctgatttgactcacctttctccct

SEQ ID NO: 749441 - DNA, 33 bp, Homo sapien
tggaccaatggataaaattgcttacagccttga

SEQ ID NO: 749442 - DNA, 33 bp, Homo sapien
tggaccaatggataaatttgcttacagccttga

SEQ ID NO: 749443 - DNA, 33 bp, Homo sapien
atgaaagatgtcagtacagtgcatttaagtact

SEQ ID NO: 749444 - DNA, 33 bp, Homo sapien
atgaaagatgtcagtatagtgcatttaagtact

SEQ ID NO: 749445 - DNA, 33 bp, Homo sapien
ggttacaaacctctacagcacgttaccgtactg

SEQ ID NO: 749446 - DNA, 33 bp, Homo sapien
ggttacaaacctctacggcacgttaccgtactg

SEQ ID NO: 749447 - DNA, 33 bp, Homo sapien
gtaccaaaaaatgatggataagccaagttcctt

SEQ ID NO: 749448 - DNA, 33 bp, Homo sapien
gtaccaaaaaatgatgtataagccaagttcctt

SEQ ID NO: 749449 - DNA, 33 bp, Homo sapien
gttgcttagaactaaagctaactcaggttctct

SEQ ID NO: 749450 - DNA, 33 bp, Homo sapien
gttgcttagaactaaatctaactcaggttctct

SEQ ID NO: 749451 - DNA, 33 bp, Homo sapien
cttgtgccttgtaggagatttagctgcatggct

SEQ ID NO: 749452 - DNA, 33 bp, Homo sapien
cttgtgccttgtaggatatttagctgcatggct

SEQ ID NO: 749453 - DNA, 33 bp, Homo sapien
caaaattcacatcttaacttggaccagggtttc

SEQ ID NO: 749454 - DNA, 33 bp, Homo sapien
caaaattcacatcttatcttggaccagggtttc

SEQ ID NO: 749455 - DNA, 33 bp, Homo sapien
catgacttgagatatgacagaaatctggagatt

SEQ ID NO: 749456 - DNA, 33 bp, Homo sapien
catgacttgagatatggcagaaatctggagatt

SEQ ID NO: 749457 - DNA, 33 bp, Homo sapien
aaggatcagaagggtcacaaaaacagtcttatt

SEQ ID NO: 749458 - DNA, 33 bp, Homo sapien
aaggatcagaagggtcgcaaaaacagtcttatt

SEQ ID NO: 749459 - DNA, 33 bp, Homo sapien
taagtgagtttgaaaacatcttccccaagtcaa

SEQ ID NO: 749460 - DNA, 33 bp, Homo sapien
taagtgagtttgaaaatatcttccccaagtcaa

SEQ ID NO: 749461 - DNA, 33 bp, Homo sapien
ggatgggaacctagagaagacgaatgtaactca

SEQ ID NO: 749462 - DNA, 33 bp, Homo sapien
ggatgggaacctagagcagacgaatgtaactca

SEQ ID NO: 749463 - DNA, 33 bp, Homo sapien
ctactcaaattttaaccagtaatggatttttgt

SEQ ID NO: 749464 - DNA, 33 bp, Homo sapien
ctactcaaattttaacgagtaatggatttttgt

SEQ ID NO: 749465 - DNA, 33 bp, Homo sapien
tctgtttgttgttgaactgtggtgctttaaata

SEQ ID NO: 749466 - DNA, 33 bp, Homo sapien
tctgtttgttgttgaattgtggtgctttaaata

SEQ ID NO: 749467 - DNA, 33 bp, Homo sapien
cattaataaccacaaactgtgcaccagatgcta

SEQ ID NO: 749468 - DNA, 33 bp, Homo sapien
cattaataaccacaaattgtgcaccagatgcta

SEQ ID NO: 749469 - DNA, 33 bp, Homo sapien
tgatatgcattcaacaaatggtacctattatca

SEQ ID NO: 749470 - DNA, 33 bp, Homo sapien
tgatatgcattcaacacatggtacctattatca

SEQ ID NO: 749471 - DNA, 33 bp, Homo sapien
gtaacaaaaaatacgacgtactgaaagaagtca

SEQ ID NO: 749472 - DNA, 33 bp, Homo sapien
gtaacaaaaaatacgatgtactgaaagaagtca

SEQ ID NO: 749473 - DNA, 33 bp, Homo sapien
caatgttgttaaatgaccgtactactcaaagca

SEQ ID NO: 749474 - DNA, 33 bp, Homo sapien
caatgttgttaaatgagcgtactactcaaagca

SEQ ID NO: 749475 - DNA, 33 bp, Homo sapien
accatactatcgtctccaagaagcctttcttgt

SEQ ID NO: 749476 - DNA, 33 bp, Homo sapien
accatactatcgtctctaagaagcctttcttgt

SEQ ID NO: 749477 - DNA, 33 bp, Homo sapien
cagatacatttttatacacttcaatgatccagc

SEQ ID NO: 749478 - DNA, 33 bp, Homo sapien
cagatacatttttatatacttcaatgatccagc

SEQ ID NO: 749479 - DNA, 33 bp, Homo sapien
atttgaagataattgtcaatcaatgcaaagatt

SEQ ID NO: 749480 - DNA, 33 bp, Homo sapien
atttgaagataattgtgaatcaatgcaaagatt

SEQ ID NO: 749481 - DNA, 33 bp, Homo sapien
acagccatttcaccaaaggcgatgaatacgatt

SEQ ID NO: 749482 - DNA, 33 bp, Homo sapien
acagccatttcaccaagggcgatgaatacgatt

SEQ ID NO: 749483 - DNA, 33 bp, Homo sapien
tatagctgtgtttaacaggaaaaatatagcagt

SEQ ID NO: 749484 - DNA, 33 bp, Homo sapien
tatagctgtgtttaacgggaaaaatatagcagt

SEQ ID NO: 749485 - DNA, 33 bp, Homo sapien
agaaatattagccaacactgtgctccttgtata

SEQ ID NO: 749486 - DNA, 33 bp, Homo sapien
agaaatattagccaacgctgtgctccttgtata

SEQ ID NO: 749487 - DNA, 33 bp, Homo sapien
ttgtcatctgtgatacagaaggcaagccgggtc

SEQ ID NO: 749488 - DNA, 33 bp, Homo sapien
ttgtcatctgtgatactgaaggcaagccgggtc

SEQ ID NO: 749489 - DNA, 33 bp, Homo sapien
aacaaggttgtgaaaaaagtgaaaatctgccaa

SEQ ID NO: 749490 - DNA, 33 bp, Homo sapien
aacaaggttgtgaaaagagtgaaaatctgccaa

SEQ ID NO: 749491 - DNA, 33 bp, Homo sapien
caaaacctcacacaaagttctaaactagtagag

SEQ ID NO: 749492 - DNA, 33 bp, Homo sapien
caaaacctcacacaaatttctaaactagtagag

SEQ ID NO: 749493 - DNA, 33 bp, Homo sapien
atttcagcaaagggtgcaatccaggactctact

SEQ ID NO: 749494 - DNA, 33 bp, Homo sapien
atttcagcaaagggtgtaatccaggactctact

SEQ ID NO: 749495 - DNA, 33 bp, Homo sapien
aaatatagaaaacttaaaattctgctgctacgt

SEQ ID NO: 749496 - DNA, 33 bp, Homo sapien
aaatatagaaaacttacaattctgctgctacgt

SEQ ID NO: 749497 - DNA, 33 bp, Homo sapien
ctattgcagtctctccggagaattacttctgca

SEQ ID NO: 749498 - DNA, 33 bp, Homo sapien
ctattgcagtctctcctgagaattacttctgca

SEQ ID NO: 749499 - DNA, 33 bp, Homo sapien
gaagtgcatattcagaaaaaattccctttgctc

SEQ ID NO: 749500 - DNA, 33 bp, Homo sapien
gaagtgcatattcagacaaaattccctttgctc

SEQ ID NO: 749501 - DNA, 33 bp, Homo sapien
tgcagaaacaagcttaaagtacagtgatgcctc

SEQ ID NO: 749502 - DNA, 33 bp, Homo sapien
tgcagaaacaagcttagagtacagtgatgcctc

SEQ ID NO: 749503 - DNA, 33 bp, Homo sapien
attgttgcaaaagccacaattttgttcttcttt

SEQ ID NO: 749504 - DNA, 33 bp, Homo sapien
attgttgcaaaagccataattttgttcttcttt

SEQ ID NO: 749505 - DNA, 33 bp, Homo sapien
gtcggtttttcatgtgcatatagtgcttgatac

SEQ ID NO: 749506 - DNA, 33 bp, Homo sapien
gtcggtttttcatgtggatatagtgcttgatac

SEQ ID NO: 749507 - DNA, 33 bp, Homo sapien
cacactgtgggcttcaaaacaaaactaagtttg

SEQ ID NO: 749508 - DNA, 33 bp, Homo sapien
cacactgtgggcttcagaacaaaactaagtttg

SEQ ID NO: 749509 - DNA, 33 bp, Homo sapien
ccatgcctaactcatagtaagagctaagcaggg

SEQ ID NO: 749510 - DNA, 33 bp, Homo sapien
ccatgcctaactcatattaagagctaagcaggg

SEQ ID NO: 749511 - DNA, 33 bp, Homo sapien
ataaatgcgcatgtgaagagaattggatcaatt

SEQ ID NO: 749512 - DNA, 33 bp, Homo sapien
ataaatgcgcatgtgaggagaattggatcaatt

SEQ ID NO: 749513 - DNA, 33 bp, Homo sapien
tcaactagactgcaaactctttaaaggatggac

SEQ ID NO: 749514 - DNA, 33 bp, Homo sapien
tcaactagactgcaaattctttaaaggatggac

SEQ ID NO: 749515 - DNA, 33 bp, Homo sapien
tttatgtcctaaatcaaaggtagacacactttc

SEQ ID NO: 749516 - DNA, 33 bp, Homo sapien
tttatgtcctaaatcagaggtagacacactttc

SEQ ID NO: 749517 - DNA, 33 bp, Homo sapien
aggactgggcatcattcaaaaagcagtggactc

SEQ ID NO: 749518 - DNA, 33 bp, Homo sapien
aggactgggcatcattgaaaaagcagtggactc

SEQ ID NO: 749519 - DNA, 33 bp, Homo sapien
acgaagctcaaagggacagaacttagcattgcc

SEQ ID NO: 749520 - DNA, 33 bp, Homo sapien
acgaagctcaaagggatagaacttagcattgcc

SEQ ID NO: 749521 - DNA, 33 bp, Homo sapien
atttcacatttataacactcttcatccaacctc

SEQ ID NO: 749522 - DNA, 33 bp, Homo sapien
atttcacatttataaccctcttcatccaacctc

SEQ ID NO: 749523 - DNA, 33 bp, Homo sapien
atttcctactgctgtcaattagactgtgcattc

SEQ ID NO: 749524 - DNA, 33 bp, Homo sapien
atttcctactgctgtccattagactgtgcattc

SEQ ID NO: 749525 - DNA, 33 bp, Homo sapien
accccatcgcaagagaataacaggcatgaccca

SEQ ID NO: 749526 - DNA, 33 bp, Homo sapien
accccatcgcaagagactaacaggcatgaccca

SEQ ID NO: 749527 - DNA, 33 bp, Homo sapien
ttctttccaataccataatactatgccatatta

SEQ ID NO: 749528 - DNA, 33 bp, Homo sapien
ttctttccaataccatgatactatgccatatta

SEQ ID NO: 749529 - DNA, 33 bp, Homo sapien
tcagaaaagacatccccggcgccatggttgtca

SEQ ID NO: 749530 - DNA, 33 bp, Homo sapien
tcagaaaagacatccctggcgccatggttgtca

SEQ ID NO: 749531 - DNA, 33 bp, Homo sapien
ggtattaagaggtgggaaatttgagaggtgagt

SEQ ID NO: 749532 - DNA, 33 bp, Homo sapien
ggtattaagaggtggggaatttgagaggtgagt

SEQ ID NO: 749533 - DNA, 33 bp, Homo sapien
gttacagccgccagaacgcattaagacaaatag

SEQ ID NO: 749534 - DNA, 33 bp, Homo sapien
gttacagccgccagaatgcattaagacaaatag

SEQ ID NO: 749535 - DNA, 33 bp, Homo sapien
ttaatgctgaaagggtcaaagttgtcaagttcc

SEQ ID NO: 749536 - DNA, 33 bp, Homo sapien
ttaatgctgaaagggttaaagttgtcaagttcc

SEQ ID NO: 749537 - DNA, 33 bp, Homo sapien
atactgtcacctattaagactcaagaaagtttg

SEQ ID NO: 749538 - DNA, 33 bp, Homo sapien
atactgtcacctattatgactcaagaaagtttg

SEQ ID NO: 749539 - DNA, 33 bp, Homo sapien
ataggttaacaagggcacattttctgttttcat

SEQ ID NO: 749540 - DNA, 33 bp, Homo sapien
ataggttaacaagggcgcattttctgttttcat

SEQ ID NO: 749541 - DNA, 33 bp, Homo sapien
atatgagctgctattaagtttgttccctttcag

SEQ ID NO: 749542 - DNA, 33 bp, Homo sapien
atatgagctgctattaggtttgttccctttcag

SEQ ID NO: 749543 - DNA, 33 bp, Homo sapien
cctggttagagcaaccaaccatgccagtctaac

SEQ ID NO: 749544 - DNA, 33 bp, Homo sapien
cctggttagagcaaccgaccatgccagtctaac

SEQ ID NO: 749545 - DNA, 33 bp, Homo sapien
gctttgctaagtaataaggataccagtatgaat

SEQ ID NO: 749546 - DNA, 33 bp, Homo sapien
gctttgctaagtaatagggataccagtatgaat

SEQ ID NO: 749547 - DNA, 33 bp, Homo sapien
cagttatagaatgggaaatcactacatatatta

SEQ ID NO: 749548 - DNA, 33 bp, Homo sapien
cagttatagaatgggagatcactacatatatta

SEQ ID NO: 749549 - DNA, 33 bp, Homo sapien
tcattttgatgactggaaaaagagatgggagta

SEQ ID NO: 749550 - DNA, 33 bp, Homo sapien
tcattttgatgactgggaaaagagatgggagta

SEQ ID NO: 749551 - DNA, 33 bp, Homo sapien
ttcttggcacaacataaaacagaaggaatttgg

SEQ ID NO: 749552 - DNA, 33 bp, Homo sapien
ttcttggcacaacatacaacagaaggaatttgg

SEQ ID NO: 749553 - DNA, 33 bp, Homo sapien
cacgtagctagtcatcactttattagattttgc

SEQ ID NO: 749554 - DNA, 33 bp, Homo sapien
cacgtagctagtcatctctttattagattttgc

SEQ ID NO: 749555 - DNA, 33 bp, Homo sapien
aaactccttatgctacactatttttattgtggt

SEQ ID NO: 749556 - DNA, 33 bp, Homo sapien
aaactccttatgctacgctatttttattgtggt

SEQ ID NO: 749557 - DNA, 33 bp, Homo sapien
aatcagtacccacctaaaccacagttctcagtc

SEQ ID NO: 749558 - DNA, 33 bp, Homo sapien
aatcagtacccacctacaccacagttctcagtc

SEQ ID NO: 749559 - DNA, 33 bp, Homo sapien
tttggcccgtatgtcacggtttgataacatcac

SEQ ID NO: 749560 - DNA, 33 bp, Homo sapien
tttggcccgtatgtcatggtttgataacatcac

SEQ ID NO: 749561 - DNA, 33 bp, Homo sapien
gtagggactgaatggacgagtgcttggtggggg

SEQ ID NO: 749562 - DNA, 33 bp, Homo sapien
gtagggactgaatggatgagtgcttggtggggg

SEQ ID NO: 749563 - DNA, 33 bp, Homo sapien
ataaggcagctattgtaaatgtaaccaaactac

SEQ ID NO: 749564 - DNA, 33 bp, Homo sapien
ataaggcagctattgtgaatgtaaccaaactac

SEQ ID NO: 749565 - DNA, 33 bp, Homo sapien
tgccttatgtgagacaccgttctctccccattt

SEQ ID NO: 749566 - DNA, 33 bp, Homo sapien
tgccttatgtgagacatcgttctctccccattt

SEQ ID NO: 749567 - DNA, 33 bp, Homo sapien
ttcttgaaagtcagaaaaatctaaagcaaaata

SEQ ID NO: 749568 - DNA, 33 bp, Homo sapien
ttcttgaaagtcagaacaatctaaagcaaaata

SEQ ID NO: 749569 - DNA, 33 bp, Homo sapien
ccatttatcagattaccacttatgttgaacaat

SEQ ID NO: 749570 - DNA, 33 bp, Homo sapien
ccatttatcagattactacttatgttgaacaat

SEQ ID NO: 749571 - DNA, 33 bp, Homo sapien
attcaactctcttggcaaaaaaacgacgccttt

SEQ ID NO: 749572 - DNA, 33 bp, Homo sapien
attcaactctcttggcgaaaaaacgacgccttt

SEQ ID NO: 749573 - DNA, 33 bp, Homo sapien
gtctggataaatattacagtgctttcaatagaa

SEQ ID NO: 749574 - DNA, 33 bp, Homo sapien
gtctggataaatattatagtgctttcaatagaa

SEQ ID NO: 749575 - DNA, 33 bp, Homo sapien
tttaattttttgatcaatctggaatggattttt

SEQ ID NO: 749576 - DNA, 33 bp, Homo sapien
tttaattttttgatcagtctggaatggattttt

SEQ ID NO: 749577 - DNA, 33 bp, Homo sapien
tttatatattctggacactgacttttatcacta

SEQ ID NO: 749578 - DNA, 33 bp, Homo sapien
tttatatattctggaccctgacttttatcacta

SEQ ID NO: 749579 - DNA, 33 bp, Homo sapien
tggaagccacaaaaaacagttgggcaaggcttg

SEQ ID NO: 749580 - DNA, 33 bp, Homo sapien
tggaagccacaaaaaagagttgggcaaggcttg

SEQ ID NO: 749581 - DNA, 33 bp, Homo sapien
ataaacaatggaaaaaagcccaactgttgtttt

SEQ ID NO: 749582 - DNA, 33 bp, Homo sapien
ataaacaatggaaaaaggcccaactgttgtttt

SEQ ID NO: 749583 - DNA, 33 bp, Homo sapien
agcatctggaatcacaatggcaatcttcccaaa

SEQ ID NO: 749584 - DNA, 33 bp, Homo sapien
agcatctggaatcacactggcaatcttcccaaa

SEQ ID NO: 749585 - DNA, 33 bp, Homo sapien
gttatatgtagtcatcaacaccacgcatcacta

SEQ ID NO: 749586 - DNA, 33 bp, Homo sapien
gttatatgtagtcatccacaccacgcatcacta

SEQ ID NO: 749587 - DNA, 33 bp, Homo sapien
gcgacattacggatgccatcttaggaggctcca

SEQ ID NO: 749588 - DNA, 33 bp, Homo sapien
gcgacattacggatgctatcttaggaggctcca

SEQ ID NO: 749589 - DNA, 33 bp, Homo sapien
atgaatggagggtgtaagggcaggtgaaataat

SEQ ID NO: 749590 - DNA, 33 bp, Homo sapien
atgaatggagggtgtaggggcaggtgaaataat

SEQ ID NO: 749591 - DNA, 33 bp, Homo sapien
ttgtaccagtgatcaaattaggtcagctctaca

SEQ ID NO: 749592 - DNA, 33 bp, Homo sapien
ttgtaccagtgatcaagttaggtcagctctaca

SEQ ID NO: 749593 - DNA, 33 bp, Homo sapien
aaaacgcagctcaagacagaacaacatcagcaa

SEQ ID NO: 749594 - DNA, 33 bp, Homo sapien
aaaacgcagctcaagagagaacaacatcagcaa

SEQ ID NO: 749595 - DNA, 33 bp, Homo sapien
ggcagtatcatgacacaaaacaaagaacaatgg

SEQ ID NO: 749596 - DNA, 33 bp, Homo sapien
ggcagtatcatgacacgaaacaaagaacaatgg

SEQ ID NO: 749597 - DNA, 33 bp, Homo sapien
acacacagtgcagagcaatgagtatagtagtat

SEQ ID NO: 749598 - DNA, 33 bp, Homo sapien
acacacagtgcagagccatgagtatagtagtat

SEQ ID NO: 749599 - DNA, 33 bp, Homo sapien
cattcaaatcctctacacagtaagtgctcactt

SEQ ID NO: 749600 - DNA, 33 bp, Homo sapien
cattcaaatcctctacgcagtaagtgctcactt

SEQ ID NO: 749601 - DNA, 33 bp, Homo sapien
cttactgtggtaaaaccaggccaaagtgtacag

SEQ ID NO: 749602 - DNA, 33 bp, Homo sapien
cttactgtggtaaaactaggccaaagtgtacag

SEQ ID NO: 749603 - DNA, 33 bp, Homo sapien
aattctcagttgataacgtaattagacataacc

SEQ ID NO: 749604 - DNA, 33 bp, Homo sapien
aattctcagttgataatgtaattagacataacc

SEQ ID NO: 749605 - DNA, 33 bp, Homo sapien
ttgttcattaacttcaactgttccaggtaaaag

SEQ ID NO: 749606 - DNA, 33 bp, Homo sapien
ttgttcattaacttcacctgttccaggtaaaag

SEQ ID NO: 749607 - DNA, 33 bp, Homo sapien
tctgtggagagataataagcattgtgtgaatat

SEQ ID NO: 749608 - DNA, 33 bp, Homo sapien
tctgtggagagataatcagcattgtgtgaatat

SEQ ID NO: 749609 - DNA, 33 bp, Homo sapien
tacagaacttggactcaaggtggaagtttaagg

SEQ ID NO: 749610 - DNA, 33 bp, Homo sapien
tacagaacttggactcgaggtggaagtttaagg

SEQ ID NO: 749611 - DNA, 33 bp, Homo sapien
ctgtaccgccattgtacataggaaataactagc

SEQ ID NO: 749612 - DNA, 33 bp, Homo sapien
ctgtaccgccattgtatataggaaataactagc

SEQ ID NO: 749613 - DNA, 33 bp, Homo sapien
tagattagccatattacaacatagggattgcat

SEQ ID NO: 749614 - DNA, 33 bp, Homo sapien
tagattagccatattataacatagggattgcat

SEQ ID NO: 749615 - DNA, 33 bp, Homo sapien
tctaactaaccaagaaacatttattgataacct

SEQ ID NO: 749616 - DNA, 33 bp, Homo sapien
tctaactaaccaagaagcatttattgataacct

SEQ ID NO: 749617 - DNA, 33 bp, Homo sapien
tgattagtatacagtacgcttttgatgagaagg

SEQ ID NO: 749618 - DNA, 33 bp, Homo sapien
tgattagtatacagtatgcttttgatgagaagg

SEQ ID NO: 749619 - DNA, 33 bp, Homo sapien
ttgtcagacagtaacaataagacatttttaaat

SEQ ID NO: 749620 - DNA, 33 bp, Homo sapien
ttgtcagacagtaacagtaagacatttttaaat

SEQ ID NO: 749621 - DNA, 33 bp, Homo sapien
tgtgtgttaactgaaccaactaggaggaaaatg

SEQ ID NO: 749622 - DNA, 33 bp, Homo sapien
tgtgtgttaactgaactaactaggaggaaaatg

SEQ ID NO: 749623 - DNA, 33 bp, Homo sapien
ttcatgtagcaggcataacagacttcgattcta

SEQ ID NO: 749624 - DNA, 33 bp, Homo sapien
ttcatgtagcaggcatgacagacttcgattcta

SEQ ID NO: 749625 - DNA, 33 bp, Homo sapien
tgtatcacatcagcaacggagcgttctctcaaa

SEQ ID NO: 749626 - DNA, 33 bp, Homo sapien
tgtatcacatcagcaatggagcgttctctcaaa

SEQ ID NO: 749627 - DNA, 33 bp, Homo sapien
tttataaaacgtcaccactgagctggtgcttcc

SEQ ID NO: 749628 - DNA, 33 bp, Homo sapien
tttataaaacgtcaccgctgagctggtgcttcc

SEQ ID NO: 749629 - DNA, 33 bp, Homo sapien
acaaacagaaaccgaacagtaatatagtgaact

SEQ ID NO: 749630 - DNA, 33 bp, Homo sapien
acaaacagaaaccgaagagtaatatagtgaact

SEQ ID NO: 749631 - DNA, 33 bp, Homo sapien
gttccattgttgtgcacagttttagttctgttt

SEQ ID NO: 749632 - DNA, 33 bp, Homo sapien
gttccattgttgtgcatagttttagttctgttt

SEQ ID NO: 749633 - DNA, 33 bp, Homo sapien
atggcggttgtagtaaaggttccatgcagaagt

SEQ ID NO: 749634 - DNA, 33 bp, Homo sapien
atggcggttgtagtaagggttccatgcagaagt

SEQ ID NO: 749635 - DNA, 33 bp, Homo sapien
gcacaatgctggactggattcagcttttctttt

SEQ ID NO: 749636 - DNA, 33 bp, Homo sapien
gcacaatgctggactgtattcagcttttctttt

SEQ ID NO: 749637 - DNA, 33 bp, Homo sapien
acaaaattaatatataagcaaatgttagaaaga

SEQ ID NO: 749638 - DNA, 33 bp, Homo sapien
acaaaattaatatataggcaaatgttagaaaga

SEQ ID NO: 749639 - DNA, 33 bp, Homo sapien
tctttcttcttgctcacaagtggaaacttctcc

SEQ ID NO: 749640 - DNA, 33 bp, Homo sapien
tctttcttcttgctcataagtggaaacttctcc

SEQ ID NO: 749641 - DNA, 33 bp, Homo sapien
aaagaacagaactcacaggataggaacttcaaa

SEQ ID NO: 749642 - DNA, 33 bp, Homo sapien
aaagaacagaactcacgggataggaacttcaaa

SEQ ID NO: 749643 - DNA, 33 bp, Homo sapien
atattagatgtagttacgctccacttgtctttc

SEQ ID NO: 749644 - DNA, 33 bp, Homo sapien
atattagatgtagttatgctccacttgtctttc

SEQ ID NO: 749645 - DNA, 33 bp, Homo sapien
gttctgtgctactccaaatagctccaaagacag

SEQ ID NO: 749646 - DNA, 33 bp, Homo sapien
gttctgtgctactccagatagctccaaagacag

SEQ ID NO: 749647 - DNA, 33 bp, Homo sapien
ctttgacaacataccaagtatccatttatacat

SEQ ID NO: 749648 - DNA, 33 bp, Homo sapien
ctttgacaacataccacgtatccatttatacat

SEQ ID NO: 749649 - DNA, 33 bp, Homo sapien
tgaccatagccttatcggacttgtgaaaagggc

SEQ ID NO: 749650 - DNA, 33 bp, Homo sapien
tgaccatagccttatctgacttgtgaaaagggc

SEQ ID NO: 749651 - DNA, 33 bp, Homo sapien
ggatttatacaaataacctacactccatagttt

SEQ ID NO: 749652 - DNA, 33 bp, Homo sapien
ggatttatacaaataatctacactccatagttt

SEQ ID NO: 749653 - DNA, 33 bp, Homo sapien
aatccttctcaaccagacatacactaaccatct

SEQ ID NO: 749654 - DNA, 33 bp, Homo sapien
aatccttctcaaccaggcatacactaaccatct

SEQ ID NO: 749655 - DNA, 33 bp, Homo sapien
accctgtagtctacacagcctaaaaatataaca

SEQ ID NO: 749656 - DNA, 33 bp, Homo sapien
accctgtagtctacacggcctaaaaatataaca

SEQ ID NO: 749657 - DNA, 33 bp, Homo sapien
tgaagatggagctaacagagtgtaataatggaa

SEQ ID NO: 749658 - DNA, 33 bp, Homo sapien
tgaagatggagctaacggagtgtaataatggaa

SEQ ID NO: 749659 - DNA, 33 bp, Homo sapien
gagatagagcatagtgaataaaagcatggacac

SEQ ID NO: 749660 - DNA, 33 bp, Homo sapien
gagatagagcatagtggataaaagcatggacac

SEQ ID NO: 749661 - DNA, 33 bp, Homo sapien
gaggttagttatgtgacattggttctctcctct

SEQ ID NO: 749662 - DNA, 33 bp, Homo sapien
gaggttagttatgtgatattggttctctcctct

SEQ ID NO: 749663 - DNA, 33 bp, Homo sapien
attccttgaaacttgcaccccatcccactagaa

SEQ ID NO: 749664 - DNA, 33 bp, Homo sapien
attccttgaaacttgcgccccatcccactagaa

SEQ ID NO: 749665 - DNA, 33 bp, Homo sapien
gctctcaactcaagggaaaatgactcagctttg

SEQ ID NO: 749666 - DNA, 33 bp, Homo sapien
gctctcaactcaagggcaaatgactcagctttg

SEQ ID NO: 749667 - DNA, 33 bp, Homo sapien
tagcagttttataagcacataattgacatacca

SEQ ID NO: 749668 - DNA, 33 bp, Homo sapien
tagcagttttataagcgcataattgacatacca

SEQ ID NO: 749669 - DNA, 33 bp, Homo sapien
gtatgtatctgctttacgggcaatccccttact

SEQ ID NO: 749670 - DNA, 33 bp, Homo sapien
gtatgtatctgctttatgggcaatccccttact

SEQ ID NO: 749671 - DNA, 33 bp, Homo sapien
aagtaatttttgcccaagagttaacaggaggaa

SEQ ID NO: 749672 - DNA, 33 bp, Homo sapien
aagtaatttttgcccaggagttaacaggaggaa

SEQ ID NO: 749673 - DNA, 33 bp, Homo sapien
tcaacataagattttacaatccaaatgagagag

SEQ ID NO: 749674 - DNA, 33 bp, Homo sapien
tcaacataagattttagaatccaaatgagagag

SEQ ID NO: 749675 - DNA, 33 bp, Homo sapien
attttttcgtgtacacaaggtcatttcagcaaa

SEQ ID NO: 749676 - DNA, 33 bp, Homo sapien
attttttcgtgtacacgaggtcatttcagcaaa

SEQ ID NO: 749677 - DNA, 33 bp, Homo sapien
ccagaaataaactcacatatacggaaatgtatt

SEQ ID NO: 749678 - DNA, 33 bp, Homo sapien
ccagaaataaactcacgtatacggaaatgtatt

SEQ ID NO: 749679 - DNA, 33 bp, Homo sapien
gacatatcgaaacagcaacgttcggctatgttt

SEQ ID NO: 749680 - DNA, 33 bp, Homo sapien
gacatatcgaaacagcgacgttcggctatgttt

SEQ ID NO: 749681 - DNA, 33 bp, Homo sapien
ggaagacaaacatggaagatcctgaaataaata

SEQ ID NO: 749682 - DNA, 33 bp, Homo sapien
ggaagacaaacatggaggatcctgaaataaata

SEQ ID NO: 749683 - DNA, 33 bp, Homo sapien
atatgttatttaacccagatcaccaagttgaat

SEQ ID NO: 749684 - DNA, 33 bp, Homo sapien
atatgttatttaacccggatcaccaagttgaat

SEQ ID NO: 749685 - DNA, 33 bp, Homo sapien
attcatctagtcattccactgagctgatgtgtg

SEQ ID NO: 749686 - DNA, 33 bp, Homo sapien
attcatctagtcattctactgagctgatgtgtg

SEQ ID NO: 749687 - DNA, 33 bp, Homo sapien
gggatcctatttgaacactgcattttgtcactg

SEQ ID NO: 749688 - DNA, 33 bp, Homo sapien
gggatcctatttgaacgctgcattttgtcactg

SEQ ID NO: 749689 - DNA, 33 bp, Homo sapien
gaaagagaaaatgtgaagttatcttattgaaag

SEQ ID NO: 749690 - DNA, 33 bp, Homo sapien
gaaagagaaaatgtgatgttatcttattgaaag

SEQ ID NO: 749691 - DNA, 33 bp, Homo sapien
ttgcactaaatattaaacaccaaaggattctag

SEQ ID NO: 749692 - DNA, 33 bp, Homo sapien
ttgcactaaatattaatcaccaaaggattctag

SEQ ID NO: 749693 - DNA, 33 bp, Homo sapien
cagccagttttctcttaaaatcaggaagagaag

SEQ ID NO: 749694 - DNA, 33 bp, Homo sapien
cagccagttttctcttgaaatcaggaagagaag

SEQ ID NO: 749695 - DNA, 33 bp, Homo sapien
tttcctccttttgggccatttactgtttatgtg

SEQ ID NO: 749696 - DNA, 33 bp, Homo sapien
tttcctccttttgggctatttactgtttatgtg

SEQ ID NO: 749697 - DNA, 33 bp, Homo sapien
aaaatgagttacaaaaattctcaaacatggttt

SEQ ID NO: 749698 - DNA, 33 bp, Homo sapien
aaaatgagttacaaaagttctcaaacatggttt

SEQ ID NO: 749699 - DNA, 33 bp, Homo sapien
ccagactatgtaaaagactcctacagctctatt

SEQ ID NO: 749700 - DNA, 33 bp, Homo sapien
ccagactatgtaaaaggctcctacagctctatt

SEQ ID NO: 749701 - DNA, 33 bp, Homo sapien
atcttataggggcacaaagtagattaaattaat

SEQ ID NO: 749702 - DNA, 33 bp, Homo sapien
atcttataggggcacagagtagattaaattaat

SEQ ID NO: 749703 - DNA, 33 bp, Homo sapien
atgtgtgtatcctaacccatgtatatacataca

SEQ ID NO: 749704 - DNA, 33 bp, Homo sapien
atgtgtgtatcctaacgcatgtatatacataca

SEQ ID NO: 749705 - DNA, 33 bp, Homo sapien
aaaaaaaaaaatccacaagtctacactgatata

SEQ ID NO: 749706 - DNA, 33 bp, Homo sapien
aaaaaaaaaaatccacgagtctacactgatata

SEQ ID NO: 749707 - DNA, 33 bp, Homo sapien
aaaccattgcaaaggaagatccacatctatatg

SEQ ID NO: 749708 - DNA, 33 bp, Homo sapien
aaaccattgcaaaggaggatccacatctatatg

SEQ ID NO: 749709 - DNA, 33 bp, Homo sapien
ccctatagtttccccactgagttgttttagaac

SEQ ID NO: 749710 - DNA, 33 bp, Homo sapien
ccctatagtttccccattgagttgttttagaac

SEQ ID NO: 749711 - DNA, 33 bp, Homo sapien
tctgctggtgtgtatacaaaatgtgcaacttct

SEQ ID NO: 749712 - DNA, 33 bp, Homo sapien
tctgctggtgtgtatataaaatgtgcaacttct

SEQ ID NO: 749713 - DNA, 33 bp, Homo sapien
gaaatattcagggagcaacatagtactttgtgc

SEQ ID NO: 749714 - DNA, 33 bp, Homo sapien
gaaatattcagggagcgacatagtactttgtgc

SEQ ID NO: 749715 - DNA, 33 bp, Homo sapien
gatacaaagacccagaaaacaaatatattcatc

SEQ ID NO: 749716 - DNA, 33 bp, Homo sapien
gatacaaagacccagataacaaatatattcatc

SEQ ID NO: 749717 - DNA, 33 bp, Homo sapien
aagttattggtaagagaaacttgaaggaaattt

SEQ ID NO: 749718 - DNA, 33 bp, Homo sapien
aagttattggtaagagtaacttgaaggaaattt

SEQ ID NO: 749719 - DNA, 33 bp, Homo sapien
gtagtgatgagaaaaaacgcagagaaagagaga

SEQ ID NO: 749720 - DNA, 33 bp, Homo sapien
gtagtgatgagaaaaaccgcagagaaagagaga

SEQ ID NO: 749721 - DNA, 33 bp, Homo sapien
agcaggtaaatcctggaacctcagaatgtcagg

SEQ ID NO: 749722 - DNA, 33 bp, Homo sapien
agcaggtaaatcctgggacctcagaatgtcagg

SEQ ID NO: 749723 - DNA, 33 bp, Homo sapien
tcaagcagagggtttccaccaaatgtcacaagc

SEQ ID NO: 749724 - DNA, 33 bp, Homo sapien
tcaagcagagggtttctaccaaatgtcacaagc

SEQ ID NO: 749725 - DNA, 33 bp, Homo sapien
tttctcctgtccttcagaaagaaagatcaccct

SEQ ID NO: 749726 - DNA, 33 bp, Homo sapien
tttctcctgtccttcataaagaaagatcaccct

SEQ ID NO: 749727 - DNA, 33 bp, Homo sapien
ttcggcattgctctacacactttacatacctta

SEQ ID NO: 749728 - DNA, 33 bp, Homo sapien
ttcggcattgctctacgcactttacatacctta

SEQ ID NO: 749729 - DNA, 33 bp, Homo sapien
cactatgcctagtacacagcatgtatttaataa

SEQ ID NO: 749730 - DNA, 33 bp, Homo sapien
cactatgcctagtacagagcatgtatttaataa

SEQ ID NO: 749731 - DNA, 33 bp, Homo sapien
ccatttcctgagttcaataaaaagctgtgtgat

SEQ ID NO: 749732 - DNA, 33 bp, Homo sapien
ccatttcctgagttcagtaaaaagctgtgtgat

SEQ ID NO: 749733 - DNA, 33 bp, Homo sapien
acagagctcttatagacacttccaaacagtgaa

SEQ ID NO: 749734 - DNA, 33 bp, Homo sapien
acagagctcttatagatacttccaaacagtgaa

SEQ ID NO: 749735 - DNA, 33 bp, Homo sapien
gagctctgttatggaccgcagattttggttccc

SEQ ID NO: 749736 - DNA, 33 bp, Homo sapien
gagctctgttatggacggcagattttggttccc

SEQ ID NO: 749737 - DNA, 33 bp, Homo sapien
tctgtcagtggcaactaaaacgaggattgagtc

SEQ ID NO: 749738 - DNA, 33 bp, Homo sapien
tctgtcagtggcaactgaaacgaggattgagtc

SEQ ID NO: 749739 - DNA, 33 bp, Homo sapien
gaggtatttgacgataagacactggtaggagtt

SEQ ID NO: 749740 - DNA, 33 bp, Homo sapien
gaggtatttgacgatatgacactggtaggagtt

SEQ ID NO: 749741 - DNA, 33 bp, Homo sapien
taggaatgatgggcaactgatgcaatggttact

SEQ ID NO: 749742 - DNA, 33 bp, Homo sapien
taggaatgatgggcaagtgatgcaatggttact

SEQ ID NO: 749743 - DNA, 33 bp, Homo sapien
ttttatcaaacggccaatagtaaccattgcatc

SEQ ID NO: 749744 - DNA, 33 bp, Homo sapien
ttttatcaaacggccagtagtaaccattgcatc

SEQ ID NO: 749745 - DNA, 33 bp, Homo sapien
aaagacaattacacacaccaaagtaatgatcct

SEQ ID NO: 749746 - DNA, 33 bp, Homo sapien
aaagacaattacacacgccaaagtaatgatcct

SEQ ID NO: 749747 - DNA, 33 bp, Homo sapien
atccatgctgtaaacaaacagactctggaccta

SEQ ID NO: 749748 - DNA, 33 bp, Homo sapien
atccatgctgtaaacacacagactctggaccta

SEQ ID NO: 749749 - DNA, 33 bp, Homo sapien
attccagtacaaagtacgtaacacattttcaat

SEQ ID NO: 749750 - DNA, 33 bp, Homo sapien
attccagtacaaagtatgtaacacattttcaat

SEQ ID NO: 749751 - DNA, 33 bp, Homo sapien
gcaaacattattcaggaccagctatgtgttagg

SEQ ID NO: 749752 - DNA, 33 bp, Homo sapien
gcaaacattattcagggccagctatgtgttagg

SEQ ID NO: 749753 - DNA, 33 bp, Homo sapien
gtctttgtatgtgatcagagttttttctgtaac

SEQ ID NO: 749754 - DNA, 33 bp, Homo sapien
gtctttgtatgtgatcggagttttttctgtaac

SEQ ID NO: 749755 - DNA, 33 bp, Homo sapien
tgtcttttcatggctcactagtgcatttcttta

SEQ ID NO: 749756 - DNA, 33 bp, Homo sapien
tgtcttttcatggctcgctagtgcatttcttta

SEQ ID NO: 749757 - DNA, 33 bp, Homo sapien
aatccatcatcaggacagtacaaattaaaacaa

SEQ ID NO: 749758 - DNA, 33 bp, Homo sapien
aatccatcatcaggaccgtacaaattaaaacaa

SEQ ID NO: 749759 - DNA, 33 bp, Homo sapien
cttacagttttgctaaattaaatgacagatgct

SEQ ID NO: 749760 - DNA, 33 bp, Homo sapien
cttacagttttgctaagttaaatgacagatgct

SEQ ID NO: 749761 - DNA, 33 bp, Homo sapien
cagtattttgaattacaggcccttacagatcaa

SEQ ID NO: 749762 - DNA, 33 bp, Homo sapien
cagtattttgaattacgggcccttacagatcaa

SEQ ID NO: 749763 - DNA, 33 bp, Homo sapien
atgcaagatgtaaaaccggcgagagtggtacct

SEQ ID NO: 749764 - DNA, 33 bp, Homo sapien
atgcaagatgtaaaactggcgagagtggtacct

SEQ ID NO: 749765 - DNA, 33 bp, Homo sapien
tttgagaagagctgcaaaagaagaaaaatccat

SEQ ID NO: 749766 - DNA, 33 bp, Homo sapien
tttgagaagagctgcacaagaagaaaaatccat

SEQ ID NO: 749767 - DNA, 33 bp, Homo sapien
tgttacctattatacaatgactttatttttaaa

SEQ ID NO: 749768 - DNA, 33 bp, Homo sapien
tgttacctattatacagtgactttatttttaaa

SEQ ID NO: 749769 - DNA, 33 bp, Homo sapien
ttctgaagagtacttacgaagacacattttgtg

SEQ ID NO: 749770 - DNA, 33 bp, Homo sapien
ttctgaagagtacttatgaagacacattttgtg

SEQ ID NO: 749771 - DNA, 33 bp, Homo sapien
tgtttattgttgttgaaactgaaataaaacatg

SEQ ID NO: 749772 - DNA, 33 bp, Homo sapien
tgtttattgttgttgacactgaaataaaacatg

SEQ ID NO: 749773 - DNA, 33 bp, Homo sapien
gacacggctaatattgacaataaattttaaaaa

SEQ ID NO: 749774 - DNA, 33 bp, Homo sapien
gacacggctaatattgccaataaattttaaaaa

SEQ ID NO: 749775 - DNA, 33 bp, Homo sapien
gtgataaaatggggaactaccttacatttaaag

SEQ ID NO: 749776 - DNA, 33 bp, Homo sapien
gtgataaaatggggaattaccttacatttaaag

SEQ ID NO: 749777 - DNA, 33 bp, Homo sapien
tgacactttcatttaaaggcttctatttcaagt

SEQ ID NO: 749778 - DNA, 33 bp, Homo sapien
tgacactttcatttaagggcttctatttcaagt

SEQ ID NO: 749779 - DNA, 33 bp, Homo sapien
taaagaagacttcagcacgtttcctgactttac

SEQ ID NO: 749780 - DNA, 33 bp, Homo sapien
taaagaagacttcagcgcgtttcctgactttac

SEQ ID NO: 749781 - DNA, 33 bp, Homo sapien
attcactgcaataagcaaatgccccgaatctct

SEQ ID NO: 749782 - DNA, 33 bp, Homo sapien
attcactgcaataagcgaatgccccgaatctct

SEQ ID NO: 749783 - DNA, 33 bp, Homo sapien
ggttggtgaaaagagacaaatggacagagagtt

SEQ ID NO: 749784 - DNA, 33 bp, Homo sapien
ggttggtgaaaagagataaatggacagagagtt

SEQ ID NO: 749785 - DNA, 33 bp, Homo sapien
taacagctgcttttcaatcctgatacgtatttc

SEQ ID NO: 749786 - DNA, 33 bp, Homo sapien
taacagctgcttttcattcctgatacgtatttc

SEQ ID NO: 749787 - DNA, 33 bp, Homo sapien
ggatacattaattcaaagtatagtagcacttga

SEQ ID NO: 749788 - DNA, 33 bp, Homo sapien
ggatacattaattcaaggtatagtagcacttga

SEQ ID NO: 749789 - DNA, 33 bp, Homo sapien
gaggaaaatttgatcacggcaccatatattttc

SEQ ID NO: 749790 - DNA, 33 bp, Homo sapien
gaggaaaatttgatcatggcaccatatattttc

SEQ ID NO: 749791 - DNA, 33 bp, Homo sapien
tagacctggaccttaaacttccttgcaccattt

SEQ ID NO: 749792 - DNA, 33 bp, Homo sapien
tagacctggaccttaagcttccttgcaccattt

SEQ ID NO: 749793 - DNA, 33 bp, Homo sapien
gatggattattcttgacgtcctcaccttgacat

SEQ ID NO: 749794 - DNA, 33 bp, Homo sapien
gatggattattcttgatgtcctcaccttgacat

SEQ ID NO: 749795 - DNA, 33 bp, Homo sapien
aacgtcattgctgttaaatgtttaaggaaatga

SEQ ID NO: 749796 - DNA, 33 bp, Homo sapien
aacgtcattgctgttagatgtttaaggaaatga

SEQ ID NO: 749797 - DNA, 33 bp, Homo sapien
ctgtgcacatatcgcacggtataaaacaactga

SEQ ID NO: 749798 - DNA, 33 bp, Homo sapien
ctgtgcacatatcgcagggtataaaacaactga

SEQ ID NO: 749799 - DNA, 33 bp, Homo sapien
ctcctgtatttcaccacagctacaatatacatt

SEQ ID NO: 749800 - DNA, 33 bp, Homo sapien
ctcctgtatttcaccatagctacaatatacatt

SEQ ID NO: 749801 - DNA, 33 bp, Homo sapien
aaaaatccaactgctcaccaactaatgaataaa

SEQ ID NO: 749802 - DNA, 33 bp, Homo sapien
aaaaatccaactgctcgccaactaatgaataaa

SEQ ID NO: 749803 - DNA, 33 bp, Homo sapien
ggaattgtatctcaataaagctgttatttaaaa

SEQ ID NO: 749804 - DNA, 33 bp, Homo sapien
ggaattgtatctcaatgaagctgttatttaaaa

SEQ ID NO: 749805 - DNA, 33 bp, Homo sapien
acagtttaaggcattcaaaaattagaagagcaa

SEQ ID NO: 749806 - DNA, 33 bp, Homo sapien
acagtttaaggcattccaaaattagaagagcaa

SEQ ID NO: 749807 - DNA, 33 bp, Homo sapien
ttcaatggattggaaaatatgcgaaaatataaa

SEQ ID NO: 749808 - DNA, 33 bp, Homo sapien
ttcaatggattggaaattatgcgaaaatataaa

SEQ ID NO: 749809 - DNA, 33 bp, Homo sapien
ctgtagattcagttcaaacgactattctgtcca

SEQ ID NO: 749810 - DNA, 33 bp, Homo sapien
ctgtagattcagttcagacgactattctgtcca

SEQ ID NO: 749811 - DNA, 33 bp, Homo sapien
atctacagtgagtcacgatcctgctactgcact

SEQ ID NO: 749812 - DNA, 33 bp, Homo sapien
atctacagtgagtcactatcctgctactgcact

SEQ ID NO: 749813 - DNA, 33 bp, Homo sapien
ctcttcccatctgaaacgcccccgcagggtgtg

SEQ ID NO: 749814 - DNA, 33 bp, Homo sapien
ctcttcccatctgaaaggcccccgcagggtgtg

SEQ ID NO: 749815 - DNA, 33 bp, Homo sapien
agccgtgttagtcagtcaagcccagactcaaag

SEQ ID NO: 749816 - DNA, 33 bp, Homo sapien
agccgtgttagtcagtgaagcccagactcaaag

SEQ ID NO: 749817 - DNA, 33 bp, Homo sapien
gtcctgcctcgctccaatgatgatctatagaat

SEQ ID NO: 749818 - DNA, 33 bp, Homo sapien
gtcctgcctcgctccagtgatgatctatagaat

SEQ ID NO: 749819 - DNA, 33 bp, Homo sapien
aaaaaatttctaagacaactcatgaaatctgaa

SEQ ID NO: 749820 - DNA, 33 bp, Homo sapien
aaaaaatttctaagaccactcatgaaatctgaa

SEQ ID NO: 749821 - DNA, 33 bp, Homo sapien
tgatgctcattcctccaagtgcgggttgaagca

SEQ ID NO: 749822 - DNA, 33 bp, Homo sapien
tgatgctcattcctccgagtgcgggttgaagca

SEQ ID NO: 749823 - DNA, 33 bp, Homo sapien
tttaagatcctctctccaaacacagccgcattc

SEQ ID NO: 749824 - DNA, 33 bp, Homo sapien
tttaagatcctctctctaaacacagccgcattc

SEQ ID NO: 749825 - DNA, 33 bp, Homo sapien
cctgagcgaactaatacaccttatacctttctt

SEQ ID NO: 749826 - DNA, 33 bp, Homo sapien
cctgagcgaactaatataccttatacctttctt

SEQ ID NO: 749827 - DNA, 33 bp, Homo sapien
tgtataaggagacagaatactatgcagaaatta

SEQ ID NO: 749828 - DNA, 33 bp, Homo sapien
tgtataaggagacagactactatgcagaaatta

SEQ ID NO: 749829 - DNA, 33 bp, Homo sapien
ggaactttatctccaacgcctgcaaaagtacct

SEQ ID NO: 749830 - DNA, 33 bp, Homo sapien
ggaactttatctccaatgcctgcaaaagtacct

SEQ ID NO: 749831 - DNA, 33 bp, Homo sapien
acaggaaatatgtacaagatgttcccatttgaa

SEQ ID NO: 749832 - DNA, 33 bp, Homo sapien
acaggaaatatgtacaggatgttcccatttgaa

SEQ ID NO: 749833 - DNA, 33 bp, Homo sapien
tcctacaagatgcaaaagtacaaaaggtgttgc

SEQ ID NO: 749834 - DNA, 33 bp, Homo sapien
tcctacaagatgcaaaggtacaaaaggtgttgc

SEQ ID NO: 749835 - DNA, 33 bp, Homo sapien
ataattttggtgatcaacaggaaagctttttat

SEQ ID NO: 749836 - DNA, 33 bp, Homo sapien
ataattttggtgatcaccaggaaagctttttat

SEQ ID NO: 749837 - DNA, 33 bp, Homo sapien
ttgttacagtgaaaaactgacagctaaaatgca

SEQ ID NO: 749838 - DNA, 33 bp, Homo sapien
ttgttacagtgaaaaattgacagctaaaatgca

SEQ ID NO: 749839 - DNA, 33 bp, Homo sapien
gaattgggatatttagaattttagatcctgctg

SEQ ID NO: 749840 - DNA, 33 bp, Homo sapien
gaattgggatatttagtattttagatcctgctg

SEQ ID NO: 749841 - DNA, 33 bp, Homo sapien
acagttttgtttgtaacatttccactcatagaa

SEQ ID NO: 749842 - DNA, 33 bp, Homo sapien
acagttttgtttgtaatatttccactcatagaa

SEQ ID NO: 749843 - DNA, 33 bp, Homo sapien
tactgcagttgacatacagaacgtccaggctgc

SEQ ID NO: 749844 - DNA, 33 bp, Homo sapien
tactgcagttgacatatagaacgtccaggctgc

SEQ ID NO: 749845 - DNA, 33 bp, Homo sapien
cccagaatgtcctatcaatggaatcctacagtg

SEQ ID NO: 749846 - DNA, 33 bp, Homo sapien
cccagaatgtcctatcgatggaatcctacagtg

SEQ ID NO: 749847 - DNA, 33 bp, Homo sapien
ggttgttgaatagtaacgaagaaatgcttctgc

SEQ ID NO: 749848 - DNA, 33 bp, Homo sapien
ggttgttgaatagtaatgaagaaatgcttctgc

SEQ ID NO: 749849 - DNA, 33 bp, Homo sapien
taaactggatataacaatgacccctaatttata

SEQ ID NO: 749850 - DNA, 33 bp, Homo sapien
taaactggatataacagtgacccctaatttata

SEQ ID NO: 749851 - DNA, 33 bp, Homo sapien
ggctttattgttgaaactgactataatggaaca

SEQ ID NO: 749852 - DNA, 33 bp, Homo sapien
ggctttattgttgaaattgactataatggaaca

SEQ ID NO: 749853 - DNA, 33 bp, Homo sapien
tagctttgacacagaacttaacctagaaagaaa

SEQ ID NO: 749854 - DNA, 33 bp, Homo sapien
tagctttgacacagaatttaacctagaaagaaa

SEQ ID NO: 749855 - DNA, 33 bp, Homo sapien
gactgagagcgggtacaccactaacttcgtgga

SEQ ID NO: 749856 - DNA, 33 bp, Homo sapien
gactgagagcgggtacgccactaacttcgtgga

SEQ ID NO: 749857 - DNA, 33 bp, Homo sapien
tccagtgggtcgtggtcaatagtatgaaaagca

SEQ ID NO: 749858 - DNA, 33 bp, Homo sapien
tccagtgggtcgtggtgaatagtatgaaaagca

SEQ ID NO: 749859 - DNA, 33 bp, Homo sapien
tcccaactagtccaccacctcatcaacaaataa

SEQ ID NO: 749860 - DNA, 33 bp, Homo sapien
tcccaactagtccaccgcctcatcaacaaataa

SEQ ID NO: 749861 - DNA, 33 bp, Homo sapien
tgtcataacaacatagcaacaggtcacccgcgt

SEQ ID NO: 749862 - DNA, 33 bp, Homo sapien
tgtcataacaacataggaacaggtcacccgcgt

SEQ ID NO: 749863 - DNA, 33 bp, Homo sapien
aaccgacagtcacatacggggcctccttttatt

SEQ ID NO: 749864 - DNA, 33 bp, Homo sapien
aaccgacagtcacatatggggcctccttttatt

SEQ ID NO: 749865 - DNA, 33 bp, Homo sapien
tgaatgtagatttttgcataagaaatgtaataa

SEQ ID NO: 749866 - DNA, 33 bp, Homo sapien
tgaatgtagatttttggataagaaatgtaataa

SEQ ID NO: 749867 - DNA, 33 bp, Homo sapien
atacaggataatttcaacacttatcaaacctcc

SEQ ID NO: 749868 - DNA, 33 bp, Homo sapien
atacaggataatttcaccacttatcaaacctcc

SEQ ID NO: 749869 - DNA, 33 bp, Homo sapien
tgactgtttctccctcccactttctttctgtgt

SEQ ID NO: 749870 - DNA, 33 bp, Homo sapien
tgactgtttctccctctcactttctttctgtgt

SEQ ID NO: 749871 - DNA, 33 bp, Homo sapien
agtgtgaattggtgcaatgactttcaaaatcaa

SEQ ID NO: 749872 - DNA, 33 bp, Homo sapien
agtgtgaattggtgcagtgactttcaaaatcaa

SEQ ID NO: 749873 - DNA, 33 bp, Homo sapien
aaaaaatgtcctagaaactggcagcagcgcttg

SEQ ID NO: 749874 - DNA, 33 bp, Homo sapien
aaaaaatgtcctagaagctggcagcagcgcttg

SEQ ID NO: 749875 - DNA, 33 bp, Homo sapien
cacaatcccacctttcccaaactaccttatgtt

SEQ ID NO: 749876 - DNA, 33 bp, Homo sapien
cacaatcccacctttcgcaaactaccttatgtt

SEQ ID NO: 749877 - DNA, 33 bp, Homo sapien
tttttagtttgtgaaagaataagctgcttcaat

SEQ ID NO: 749878 - DNA, 33 bp, Homo sapien
tttttagtttgtgaaataataagctgcttcaat

SEQ ID NO: 749879 - DNA, 33 bp, Homo sapien
atttaatttggaacatgaggtgtctgaagtacc

SEQ ID NO: 749880 - DNA, 33 bp, Homo sapien
atttaatttggaacattaggtgtctgaagtacc

SEQ ID NO: 749881 - DNA, 33 bp, Homo sapien
ttccaaaaattctcaaatctgtatctcaatccc

SEQ ID NO: 749882 - DNA, 33 bp, Homo sapien
ttccaaaaattctcaattctgtatctcaatccc

SEQ ID NO: 749883 - DNA, 33 bp, Homo sapien
tattgaacagcaaacactaagtattgttctcac

SEQ ID NO: 749884 - DNA, 33 bp, Homo sapien
tattgaacagcaaacattaagtattgttctcac

SEQ ID NO: 749885 - DNA, 33 bp, Homo sapien
atacagaccttcgaagacatattcaatatcacc

SEQ ID NO: 749886 - DNA, 33 bp, Homo sapien
atacagaccttcgaaggcatattcaatatcacc

SEQ ID NO: 749887 - DNA, 33 bp, Homo sapien
atgcagtgtctgaatgcatttaatcaaatagaa

SEQ ID NO: 749888 - DNA, 33 bp, Homo sapien
atgcagtgtctgaatgtatttaatcaaatagaa

SEQ ID NO: 749889 - DNA, 33 bp, Homo sapien
tttgattggtggaatacagaagctggtttggat

SEQ ID NO: 749890 - DNA, 33 bp, Homo sapien
tttgattggtggaatagagaagctggtttggat

SEQ ID NO: 749891 - DNA, 33 bp, Homo sapien
tggatacagtataagcactacatagtatttaca

SEQ ID NO: 749892 - DNA, 33 bp, Homo sapien
tggatacagtataagcgctacatagtatttaca

SEQ ID NO: 749893 - DNA, 33 bp, Homo sapien
gccaagtttagcacaacctcaaatttctgctct

SEQ ID NO: 749894 - DNA, 33 bp, Homo sapien
gccaagtttagcacaatctcaaatttctgctct

SEQ ID NO: 749895 - DNA, 33 bp, Homo sapien
tagtacacaccatatcactttgggaaattccag

SEQ ID NO: 749896 - DNA, 33 bp, Homo sapien
tagtacacaccatatcgctttgggaaattccag

SEQ ID NO: 749897 - DNA, 33 bp, Homo sapien
caatactcctctgtaactgatctgagccatatg

SEQ ID NO: 749898 - DNA, 33 bp, Homo sapien
caatactcctctgtaattgatctgagccatatg

SEQ ID NO: 749899 - DNA, 33 bp, Homo sapien
gaaaacagtcacagaactgaaaagacacctggg

SEQ ID NO: 749900 - DNA, 33 bp, Homo sapien
gaaaacagtcacagaattgaaaagacacctggg

SEQ ID NO: 749901 - DNA, 33 bp, Homo sapien
gaatcctacagtctaacttactgaaatgttcta

SEQ ID NO: 749902 - DNA, 33 bp, Homo sapien
gaatcctacagtctaagttactgaaatgttcta

SEQ ID NO: 749903 - DNA, 33 bp, Homo sapien
aaagagccaccacttcaacatctattatcctgt

SEQ ID NO: 749904 - DNA, 33 bp, Homo sapien
aaagagccaccacttctacatctattatcctgt

SEQ ID NO: 749905 - DNA, 33 bp, Homo sapien
catttacatttagagacctggggctagatatgt

SEQ ID NO: 749906 - DNA, 33 bp, Homo sapien
catttacatttagagatctggggctagatatgt

SEQ ID NO: 749907 - DNA, 33 bp, Homo sapien
gcattcggaagagaggaaaatgcaacatgaaca

SEQ ID NO: 749908 - DNA, 33 bp, Homo sapien
gcattcggaagagaggcaaatgcaacatgaaca

SEQ ID NO: 749909 - DNA, 33 bp, Homo sapien
tttagtgaaaattactcacgaatggcaacaaga

SEQ ID NO: 749910 - DNA, 33 bp, Homo sapien
tttagtgaaaattacttacgaatggcaacaaga

SEQ ID NO: 749911 - DNA, 33 bp, Homo sapien
gaatctgcatttgaagaagggtcatatgcataa

SEQ ID NO: 749912 - DNA, 33 bp, Homo sapien
gaatctgcatttgaaggagggtcatatgcataa

SEQ ID NO: 749913 - DNA, 33 bp, Homo sapien
cacttagttaaggctaaaacaacctaattgcac

SEQ ID NO: 749914 - DNA, 33 bp, Homo sapien
cacttagttaaggctagaacaacctaattgcac

SEQ ID NO: 749915 - DNA, 33 bp, Homo sapien
catgttgactcatgtgaataatcccaacatttt

SEQ ID NO: 749916 - DNA, 33 bp, Homo sapien
catgttgactcatgtgtataatcccaacatttt

SEQ ID NO: 749917 - DNA, 33 bp, Homo sapien
tctaatcaccgcttgaactcttaaaacatcgat

SEQ ID NO: 749918 - DNA, 33 bp, Homo sapien
tctaatcaccgcttgagctcttaaaacatcgat

SEQ ID NO: 749919 - DNA, 33 bp, Homo sapien
tttcaacaggcacattgaataccttcacccaga

SEQ ID NO: 749920 - DNA, 33 bp, Homo sapien
tttcaacaggcacatttaataccttcacccaga

SEQ ID NO: 749921 - DNA, 33 bp, Homo sapien
acagatcaagaattataaactccattttgcagc

SEQ ID NO: 749922 - DNA, 33 bp, Homo sapien
acagatcaagaattattaactccattttgcagc

SEQ ID NO: 749923 - DNA, 33 bp, Homo sapien
taacacaattaggatgcaagttatctttatgga

SEQ ID NO: 749924 - DNA, 33 bp, Homo sapien
taacacaattaggatggaagttatctttatgga

SEQ ID NO: 749925 - DNA, 33 bp, Homo sapien
gcctttactgacatcacagagtccttgattcct

SEQ ID NO: 749926 - DNA, 33 bp, Homo sapien
gcctttactgacatcagagagtccttgattcct

SEQ ID NO: 749927 - DNA, 33 bp, Homo sapien
gtcggctacctggtaacggcgctaagcaggtag

SEQ ID NO: 749928 - DNA, 33 bp, Homo sapien
gtcggctacctggtaatggcgctaagcaggtag

SEQ ID NO: 749929 - DNA, 33 bp, Homo sapien
ttttcagtaagtggatcaatttgacacgggaat

SEQ ID NO: 749930 - DNA, 33 bp, Homo sapien
ttttcagtaagtggattaatttgacacgggaat

SEQ ID NO: 749931 - DNA, 33 bp, Homo sapien
caataattcttcagaaaagcacacattatgaag

SEQ ID NO: 749932 - DNA, 33 bp, Homo sapien
caataattcttcagaagagcacacattatgaag

SEQ ID NO: 749933 - DNA, 33 bp, Homo sapien
ctcaaagctccgtacacgcctctctgacttcag

SEQ ID NO: 749934 - DNA, 33 bp, Homo sapien
ctcaaagctccgtacatgcctctctgacttcag

SEQ ID NO: 749935 - DNA, 33 bp, Homo sapien
gtcctgcttttcctagacccctaaggtactttg

SEQ ID NO: 749936 - DNA, 33 bp, Homo sapien
gtcctgcttttcctagccccctaaggtactttg

SEQ ID NO: 749937 - DNA, 33 bp, Homo sapien
ttcttctgggttgaaacgcactcaaaaactaat

SEQ ID NO: 749938 - DNA, 33 bp, Homo sapien
ttcttctgggttgaaaggcactcaaaaactaat

SEQ ID NO: 749939 - DNA, 33 bp, Homo sapien
cctagcttctgtgttaccatttgtgacttttcc

SEQ ID NO: 749940 - DNA, 33 bp, Homo sapien
cctagcttctgtgttatcatttgtgacttttcc

SEQ ID NO: 749941 - DNA, 33 bp, Homo sapien
gatttaaacaaaaagcaaatctaagcgaaccta

SEQ ID NO: 749942 - DNA, 33 bp, Homo sapien
gatttaaacaaaaagcgaatctaagcgaaccta

SEQ ID NO: 749943 - DNA, 33 bp, Homo sapien
gaaggtagacaaaacaagaaagtggttagtctt

SEQ ID NO: 749944 - DNA, 33 bp, Homo sapien
gaaggtagacaaaacaggaaagtggttagtctt

SEQ ID NO: 749945 - DNA, 33 bp, Homo sapien
ctctatctgtgattgacctttacttatttcttg

SEQ ID NO: 749946 - DNA, 33 bp, Homo sapien
ctctatctgtgattgatctttacttatttcttg

SEQ ID NO: 749947 - DNA, 33 bp, Homo sapien
tctctagctatttttcgaattctagacttacgt

SEQ ID NO: 749948 - DNA, 33 bp, Homo sapien
tctctagctatttttctaattctagacttacgt

SEQ ID NO: 749949 - DNA, 33 bp, Homo sapien
aggaagtggtgctctacggatatgcaggaggga

SEQ ID NO: 749950 - DNA, 33 bp, Homo sapien
aggaagtggtgctctatggatatgcaggaggga

SEQ ID NO: 749951 - DNA, 33 bp, Homo sapien
acgaccatttattagcccattctatgaaagcaa

SEQ ID NO: 749952 - DNA, 33 bp, Homo sapien
acgaccatttattagctcattctatgaaagcaa

SEQ ID NO: 749953 - DNA, 33 bp, Homo sapien
acataggtaacaaaaacgtatgcataatggtgc

SEQ ID NO: 749954 - DNA, 33 bp, Homo sapien
acataggtaacaaaaatgtatgcataatggtgc

SEQ ID NO: 749955 - DNA, 33 bp, Homo sapien
tattttcaagtatgtccatctttcctttcacag

SEQ ID NO: 749956 - DNA, 33 bp, Homo sapien
tattttcaagtatgtcgatctttcctttcacag

SEQ ID NO: 749957 - DNA, 33 bp, Homo sapien
tggagctgaattctgccaacaatctaaatgagc

SEQ ID NO: 749958 - DNA, 33 bp, Homo sapien
tggagctgaattctgcgaacaatctaaatgagc

SEQ ID NO: 749959 - DNA, 33 bp, Homo sapien
tactaacatttactgactagacatttagtggga

SEQ ID NO: 749960 - DNA, 33 bp, Homo sapien
tactaacatttactgattagacatttagtggga

SEQ ID NO: 749961 - DNA, 33 bp, Homo sapien
aaattcattatttcaccgaattcctctcatctg

SEQ ID NO: 749962 - DNA, 33 bp, Homo sapien
aaattcattatttcactgaattcctctcatctg

SEQ ID NO: 749963 - DNA, 33 bp, Homo sapien
taagtttatgttgtaacgaaggatgcaaacagt

SEQ ID NO: 749964 - DNA, 33 bp, Homo sapien
taagtttatgttgtaatgaaggatgcaaacagt

SEQ ID NO: 749965 - DNA, 33 bp, Homo sapien
catcctactcttcacaacttctgaaaatgtttt

SEQ ID NO: 749966 - DNA, 33 bp, Homo sapien
catcctactcttcacatcttctgaaaatgtttt

SEQ ID NO: 749967 - DNA, 33 bp, Homo sapien
tggctttgattccagacgtttgtacagactcag

SEQ ID NO: 749968 - DNA, 33 bp, Homo sapien
tggctttgattccagatgtttgtacagactcag

SEQ ID NO: 749969 - DNA, 33 bp, Homo sapien
ttacaatatagtaaagcaaataggcttgaatgg

SEQ ID NO: 749970 - DNA, 33 bp, Homo sapien
ttacaatatagtaaagtaaataggcttgaatgg

SEQ ID NO: 749971 - DNA, 33 bp, Homo sapien
gggtgtgagaaactcaagtcctgatgtcatggt

SEQ ID NO: 749972 - DNA, 33 bp, Homo sapien
gggtgtgagaaactcaggtcctgatgtcatggt

SEQ ID NO: 749973 - DNA, 33 bp, Homo sapien
ccccacccaggcaaaaatagatacaaaagaaga

SEQ ID NO: 749974 - DNA, 33 bp, Homo sapien
ccccacccaggcaaaagtagatacaaaagaaga

SEQ ID NO: 749975 - DNA, 33 bp, Homo sapien
ttttgaatgagtattacaggtcaaggacttttc

SEQ ID NO: 749976 - DNA, 33 bp, Homo sapien
ttttgaatgagtattataggtcaaggacttttc

SEQ ID NO: 749977 - DNA, 33 bp, Homo sapien
aagcaataactacataaaatgagcacaataatt

SEQ ID NO: 749978 - DNA, 33 bp, Homo sapien
aagcaataactacatacaatgagcacaataatt

SEQ ID NO: 749979 - DNA, 33 bp, Homo sapien
gtggtcatgctttcgacgtgctgtcctggtgcg

SEQ ID NO: 749980 - DNA, 33 bp, Homo sapien
gtggtcatgctttcgatgtgctgtcctggtgcg

SEQ ID NO: 749981 - DNA, 33 bp, Homo sapien
gaatacgccagaattaagtctgggcacagtggc

SEQ ID NO: 749982 - DNA, 33 bp, Homo sapien
gaatacgccagaattacgtctgggcacagtggc

SEQ ID NO: 749983 - DNA, 33 bp, Homo sapien
atcttgcttcaccttccgagaaatgctcgccct

SEQ ID NO: 749984 - DNA, 33 bp, Homo sapien
atcttgcttcaccttctgagaaatgctcgccct

SEQ ID NO: 749985 - DNA, 33 bp, Homo sapien
agctactacttgcttcctggacttgccatttac

SEQ ID NO: 749986 - DNA, 33 bp, Homo sapien
agctactacttgcttcgtggacttgccatttac

SEQ ID NO: 749987 - DNA, 33 bp, Homo sapien
gtcaatcccactgtaccccgtgcagagaaagtg

SEQ ID NO: 749988 - DNA, 33 bp, Homo sapien
gtcaatcccactgtactccgtgcagagaaagtg

SEQ ID NO: 749989 - DNA, 33 bp, Homo sapien
agaaatgtgtactcctaaactgcagataaaaag

SEQ ID NO: 749990 - DNA, 33 bp, Homo sapien
agaaatgtgtactcctcaactgcagataaaaag

SEQ ID NO: 749991 - DNA, 33 bp, Homo sapien
gtatagcctatgttaaaacttgtcctaatagac

SEQ ID NO: 749992 - DNA, 33 bp, Homo sapien
gtatagcctatgttaagacttgtcctaatagac

SEQ ID NO: 749993 - DNA, 33 bp, Homo sapien
ctttaaatcagtgttgcaccacagcatgtgacc

SEQ ID NO: 749994 - DNA, 33 bp, Homo sapien
ctttaaatcagtgttgtaccacagcatgtgacc

SEQ ID NO: 749995 - DNA, 33 bp, Homo sapien
tcaaacaatattaaccaagttgcctgaagtcca

SEQ ID NO: 749996 - DNA, 33 bp, Homo sapien
tcaaacaatattaacctagttgcctgaagtcca

SEQ ID NO: 749997 - DNA, 33 bp, Homo sapien
gtgtggttaatatgcaacagaaagcaggtgtgt

SEQ ID NO: 749998 - DNA, 33 bp, Homo sapien
gtgtggttaatatgcaccagaaagcaggtgtgt

SEQ ID NO: 749999 - DNA, 33 bp, Homo sapien
atccatacgtgtcataacttccctgcaagacaa

SEQ ID NO: 750000 - DNA, 33 bp, Homo sapien
atccatacgtgtcatagcttccctgcaagacaa

SEQ ID NO: 750001 - DNA, 33 bp, Homo sapien
tgttttccttcagtgcgcgtggttctcagcagg

SEQ ID NO: 750002 - DNA, 33 bp, Homo sapien
tgttttccttcagtgctcgtggttctcagcagg

SEQ ID NO: 750003 - DNA, 33 bp, Homo sapien
atcacgctggacataccgagtcttcctcttttt

SEQ ID NO: 750004 - DNA, 33 bp, Homo sapien
atcacgctggacatactgagtcttcctcttttt

SEQ ID NO: 750005 - DNA, 33 bp, Homo sapien
aattaatttccacttgaactaagccaacgtaaa

SEQ ID NO: 750006 - DNA, 33 bp, Homo sapien
aattaatttccacttgtactaagccaacgtaaa

SEQ ID NO: 750007 - DNA, 33 bp, Homo sapien
gctgtattttgcgtcccgcatgactttagaatt

SEQ ID NO: 750008 - DNA, 33 bp, Homo sapien
gctgtattttgcgtcctgcatgactttagaatt

SEQ ID NO: 750009 - DNA, 33 bp, Homo sapien
tgaatctatacattaaatgcaaccccaatcaaa

SEQ ID NO: 750010 - DNA, 33 bp, Homo sapien
tgaatctatacattaagtgcaaccccaatcaaa

SEQ ID NO: 750011 - DNA, 33 bp, Homo sapien
aaaatactgaaccatacagctttcatgggattt

SEQ ID NO: 750012 - DNA, 33 bp, Homo sapien
aaaatactgaaccatatagctttcatgggattt

SEQ ID NO: 750013 - DNA, 33 bp, Homo sapien
tgacttgcttctaatcaatagaatttggtgaat

SEQ ID NO: 750014 - DNA, 33 bp, Homo sapien
tgacttgcttctaatcgatagaatttggtgaat

SEQ ID NO: 750015 - DNA, 33 bp, Homo sapien
aagtttcttgtttctcaatgccgcctttaaagt

SEQ ID NO: 750016 - DNA, 33 bp, Homo sapien
aagtttcttgtttctcgatgccgcctttaaagt

SEQ ID NO: 750017 - DNA, 33 bp, Homo sapien
tgtttcagagtcgaagaatttgaagaacatgat

SEQ ID NO: 750018 - DNA, 33 bp, Homo sapien
tgtttcagagtcgaaggatttgaagaacatgat

SEQ ID NO: 750019 - DNA, 33 bp, Homo sapien
aatttcctcaaagttaaagacagtgtctataat

SEQ ID NO: 750020 - DNA, 33 bp, Homo sapien
aatttcctcaaagttagagacagtgtctataat

SEQ ID NO: 750021 - DNA, 33 bp, Homo sapien
gtaggaacatagaacgccagagcttaaaggtcc

SEQ ID NO: 750022 - DNA, 33 bp, Homo sapien
gtaggaacatagaacgtcagagcttaaaggtcc

SEQ ID NO: 750023 - DNA, 33 bp, Homo sapien
cctcttctagccataaacaaccacgaatgtact

SEQ ID NO: 750024 - DNA, 33 bp, Homo sapien
cctcttctagccataagcaaccacgaatgtact

SEQ ID NO: 750025 - DNA, 33 bp, Homo sapien
aagaatagcctttacaactcttgagtacactca

SEQ ID NO: 750026 - DNA, 33 bp, Homo sapien
aagaatagcctttacagctcttgagtacactca

SEQ ID NO: 750027 - DNA, 33 bp, Homo sapien
attgtaatgcatagtcagaaaactcttatagtt

SEQ ID NO: 750028 - DNA, 33 bp, Homo sapien
attgtaatgcatagtctgaaaactcttatagtt

SEQ ID NO: 750029 - DNA, 33 bp, Homo sapien
cagttctaaagtcaacacagctttcaaagtcac

SEQ ID NO: 750030 - DNA, 33 bp, Homo sapien
cagttctaaagtcaacgcagctttcaaagtcac

SEQ ID NO: 750031 - DNA, 33 bp, Homo sapien
caggaagttcttagcaaagaaagtaagtggcaa

SEQ ID NO: 750032 - DNA, 33 bp, Homo sapien
caggaagttcttagcagagaaagtaagtggcaa

SEQ ID NO: 750033 - DNA, 33 bp, Homo sapien
tgatgcacagagtttaaaagagaagattgggtg

SEQ ID NO: 750034 - DNA, 33 bp, Homo sapien
tgatgcacagagtttagaagagaagattgggtg

SEQ ID NO: 750035 - DNA, 33 bp, Homo sapien
taattactgtctatgaaattaaggtgtgtgaat

SEQ ID NO: 750036 - DNA, 33 bp, Homo sapien
taattactgtctatgagattaaggtgtgtgaat

SEQ ID NO: 750037 - DNA, 33 bp, Homo sapien
agattcttaggacaataattactcaatagccca

SEQ ID NO: 750038 - DNA, 33 bp, Homo sapien
agattcttaggacaatgattactcaatagccca

SEQ ID NO: 750039 - DNA, 33 bp, Homo sapien
aacacagtctaacatacgtataatcaaaagctc

SEQ ID NO: 750040 - DNA, 33 bp, Homo sapien
aacacagtctaacatatgtataatcaaaagctc

SEQ ID NO: 750041 - DNA, 33 bp, Homo sapien
atcgttattctagaaaacctggtaccaccttgc

SEQ ID NO: 750042 - DNA, 33 bp, Homo sapien
atcgttattctagaaaccctggtaccaccttgc

SEQ ID NO: 750043 - DNA, 33 bp, Homo sapien
aagacagtgggacccacggaagaagcagagcct

SEQ ID NO: 750044 - DNA, 33 bp, Homo sapien
aagacagtgggacccatggaagaagcagagcct

SEQ ID NO: 750045 - DNA, 33 bp, Homo sapien
cttgtgaccttggaaaccccatgacctgctctc

SEQ ID NO: 750046 - DNA, 33 bp, Homo sapien
cttgtgaccttggaaatcccatgacctgctctc

SEQ ID NO: 750047 - DNA, 33 bp, Homo sapien
ttagattcatgacacacaatatcttaactacca

SEQ ID NO: 750048 - DNA, 33 bp, Homo sapien
ttagattcatgacacagaatatcttaactacca

SEQ ID NO: 750049 - DNA, 33 bp, Homo sapien
atgggtcatttctccacgaagatgtaacagtgc

SEQ ID NO: 750050 - DNA, 33 bp, Homo sapien
atgggtcatttctccatgaagatgtaacagtgc

SEQ ID NO: 750051 - DNA, 33 bp, Homo sapien
ggtttcagttttagcactccctacacattttct

SEQ ID NO: 750052 - DNA, 33 bp, Homo sapien
ggtttcagttttagcattccctacacattttct

SEQ ID NO: 750053 - DNA, 33 bp, Homo sapien
ggccagactgcttctccagatttctcctcactg

SEQ ID NO: 750054 - DNA, 33 bp, Homo sapien
ggccagactgcttctctagatttctcctcactg

SEQ ID NO: 750055 - DNA, 33 bp, Homo sapien
tcccaagtgcagagacaatcctcactgcccttc

SEQ ID NO: 750056 - DNA, 33 bp, Homo sapien
tcccaagtgcagagacgatcctcactgcccttc

SEQ ID NO: 750057 - DNA, 33 bp, Homo sapien
acggaaatcttacttacgaaatgggaagttaag

SEQ ID NO: 750058 - DNA, 33 bp, Homo sapien
acggaaatcttacttaggaaatgggaagttaag

SEQ ID NO: 750059 - DNA, 33 bp, Homo sapien
gttagaaatagcaagcaacctgcaggtgggaaa

SEQ ID NO: 750060 - DNA, 33 bp, Homo sapien
gttagaaatagcaagcgacctgcaggtgggaaa

SEQ ID NO: 750061 - DNA, 33 bp, Homo sapien
acaggcattagcatcaaaggtgatttcaatctg

SEQ ID NO: 750062 - DNA, 33 bp, Homo sapien
acaggcattagcatcagaggtgatttcaatctg

SEQ ID NO: 750063 - DNA, 33 bp, Homo sapien
aggtgtctgtggtgaaccaaagcataggaaatg

SEQ ID NO: 750064 - DNA, 33 bp, Homo sapien
aggtgtctgtggtgaatcaaagcataggaaatg

SEQ ID NO: 750065 - DNA, 33 bp, Homo sapien
atggctgagtaaggaacacactgagcagttagt

SEQ ID NO: 750066 - DNA, 33 bp, Homo sapien
atggctgagtaaggaatacactgagcagttagt

SEQ ID NO: 750067 - DNA, 33 bp, Homo sapien
aactttctgttctaaactctgcggtgtgcaagg

SEQ ID NO: 750068 - DNA, 33 bp, Homo sapien
aactttctgttctaaattctgcggtgtgcaagg

SEQ ID NO: 750069 - DNA, 33 bp, Homo sapien
ctataatttcaatactaaaaagctcttcaaatc

SEQ ID NO: 750070 - DNA, 33 bp, Homo sapien
ctataatttcaatactgaaaagctcttcaaatc

SEQ ID NO: 750071 - DNA, 33 bp, Homo sapien
taaggatatgaagacaaaagaggtcaccggtac

SEQ ID NO: 750072 - DNA, 33 bp, Homo sapien
taaggatatgaagacagaagaggtcaccggtac

SEQ ID NO: 750073 - DNA, 33 bp, Homo sapien
taaaataaatgaattaagttggttcctcactgt

SEQ ID NO: 750074 - DNA, 33 bp, Homo sapien
taaaataaatgaattaggttggttcctcactgt

SEQ ID NO: 750075 - DNA, 33 bp, Homo sapien
tggacagtccaaggagcagaaaaatggtgagca

SEQ ID NO: 750076 - DNA, 33 bp, Homo sapien
tggacagtccaaggaggagaaaaatggtgagca

SEQ ID NO: 750077 - DNA, 33 bp, Homo sapien
tgtattggatggtagacgagagagaaagaacag

SEQ ID NO: 750078 - DNA, 33 bp, Homo sapien
tgtattggatggtagatgagagagaaagaacag

SEQ ID NO: 750079 - DNA, 33 bp, Homo sapien
tcggtaacttgaggaaatatgaagatcaaatga

SEQ ID NO: 750080 - DNA, 33 bp, Homo sapien
tcggtaacttgaggaagtatgaagatcaaatga

SEQ ID NO: 750081 - DNA, 33 bp, Homo sapien
gttactgtgtattctacgtctccctcacacaga

SEQ ID NO: 750082 - DNA, 33 bp, Homo sapien
gttactgtgtattctaggtctccctcacacaga

SEQ ID NO: 750083 - DNA, 33 bp, Homo sapien
gtatccatcactcgaaaaatgcacactgtaccc

SEQ ID NO: 750084 - DNA, 33 bp, Homo sapien
gtatccatcactcgaacaatgcacactgtaccc

SEQ ID NO: 750085 - DNA, 33 bp, Homo sapien
tccaattttaaatggaatagtggagatcctaag

SEQ ID NO: 750086 - DNA, 33 bp, Homo sapien
tccaattttaaatggagtagtggagatcctaag

SEQ ID NO: 750087 - DNA, 33 bp, Homo sapien
gtaatacatagaaatacgagttctggtagcatt

SEQ ID NO: 750088 - DNA, 33 bp, Homo sapien
gtaatacatagaaatatgagttctggtagcatt

SEQ ID NO: 750089 - DNA, 33 bp, Homo sapien
aaagagatcgaaagtcaagggaaaatagaatta

SEQ ID NO: 750090 - DNA, 33 bp, Homo sapien
aaagagatcgaaagtcgagggaaaatagaatta

SEQ ID NO: 750091 - DNA, 33 bp, Homo sapien
tctgcccatgtcgaccgctcaaagtgttgggat

SEQ ID NO: 750092 - DNA, 33 bp, Homo sapien
tctgcccatgtcgacctctcaaagtgttgggat

SEQ ID NO: 750093 - DNA, 33 bp, Homo sapien
tttgtggttcattcaacggtttgagtgtcagct

SEQ ID NO: 750094 - DNA, 33 bp, Homo sapien
tttgtggttcattcaagggtttgagtgtcagct

SEQ ID NO: 750095 - DNA, 33 bp, Homo sapien
aggtgtgaaattcacaacagatttccaagactt

SEQ ID NO: 750096 - DNA, 33 bp, Homo sapien
aggtgtgaaattcacaccagatttccaagactt

SEQ ID NO: 750097 - DNA, 33 bp, Homo sapien
atgcagatattgatttcaaagtgaggttggtgc

SEQ ID NO: 750098 - DNA, 33 bp, Homo sapien
atgcagatattgattttaaagtgaggttggtgc

SEQ ID NO: 750099 - DNA, 33 bp, Homo sapien
ctgctctgctccacaaaataatcaaggaattca

SEQ ID NO: 750100 - DNA, 33 bp, Homo sapien
ctgctctgctccacaacataatcaaggaattca

SEQ ID NO: 750101 - DNA, 33 bp, Homo sapien
cacttttgaaagtaaacgtccagagaaaaacat

SEQ ID NO: 750102 - DNA, 33 bp, Homo sapien
cacttttgaaagtaaatgtccagagaaaaacat

SEQ ID NO: 750103 - DNA, 33 bp, Homo sapien
aaagatagaggtaaaacgtgagagaaacaaaga

SEQ ID NO: 750104 - DNA, 33 bp, Homo sapien
aaagatagaggtaaaatgtgagagaaacaaaga

SEQ ID NO: 750105 - DNA, 33 bp, Homo sapien
caactgatcgtaacatcagtagagttaaaacgt

SEQ ID NO: 750106 - DNA, 33 bp, Homo sapien
caactgatcgtaacatgagtagagttaaaacgt

SEQ ID NO: 750107 - DNA, 33 bp, Homo sapien
ttggcttaaccagtaacaaaaactagccttatc

SEQ ID NO: 750108 - DNA, 33 bp, Homo sapien
ttggcttaaccagtaataaaaactagccttatc

SEQ ID NO: 750109 - DNA, 33 bp, Homo sapien
ctcacttccaataggacgaatttaggtattggt

SEQ ID NO: 750110 - DNA, 33 bp, Homo sapien
ctcacttccaataggatgaatttaggtattggt

SEQ ID NO: 750111 - DNA, 33 bp, Homo sapien
tcccagagttccctaacatgaggttctttgctt

SEQ ID NO: 750112 - DNA, 33 bp, Homo sapien
tcccagagttccctaatatgaggttctttgctt

SEQ ID NO: 750113 - DNA, 33 bp, Homo sapien
tctgcattaaaaaaataaaagctcaatcatgct

SEQ ID NO: 750114 - DNA, 33 bp, Homo sapien
tctgcattaaaaaaatgaaagctcaatcatgct

SEQ ID NO: 750115 - DNA, 33 bp, Homo sapien
ttcatatttggaccagcaatacatcatttcagt

SEQ ID NO: 750116 - DNA, 33 bp, Homo sapien
ttcatatttggaccaggaatacatcatttcagt

SEQ ID NO: 750117 - DNA, 33 bp, Homo sapien
ccagaatcacgtgccaaataagcctttcgttgt

SEQ ID NO: 750118 - DNA, 33 bp, Homo sapien
ccagaatcacgtgccagataagcctttcgttgt

SEQ ID NO: 750119 - DNA, 33 bp, Homo sapien
tggaatcaattcttaaatgtgtgatttctaagt

SEQ ID NO: 750120 - DNA, 33 bp, Homo sapien
tggaatcaattcttaagtgtgtgatttctaagt

SEQ ID NO: 750121 - DNA, 33 bp, Homo sapien
ctaagtggaagggtaaatgcatacataattctg

SEQ ID NO: 750122 - DNA, 33 bp, Homo sapien
ctaagtggaagggtaagtgcatacataattctg

SEQ ID NO: 750123 - DNA, 33 bp, Homo sapien
gtgtggactaagacaactcttcttctttcaatg

SEQ ID NO: 750124 - DNA, 33 bp, Homo sapien
gtgtggactaagacaattcttcttctttcaatg

SEQ ID NO: 750125 - DNA, 33 bp, Homo sapien
agtgtctatcaatgaaagtataaataaagaaaa

SEQ ID NO: 750126 - DNA, 33 bp, Homo sapien
agtgtctatcaatgaatgtataaataaagaaaa

SEQ ID NO: 750127 - DNA, 33 bp, Homo sapien
taacaaccctcaaaaaattaggcatggaatgaa

SEQ ID NO: 750128 - DNA, 33 bp, Homo sapien
taacaaccctcaaaaagttaggcatggaatgaa

SEQ ID NO: 750129 - DNA, 33 bp, Homo sapien
atttgaaaaagtgttgaaaagaggctgaaacca

SEQ ID NO: 750130 - DNA, 33 bp, Homo sapien
atttgaaaaagtgttggaaagaggctgaaacca

SEQ ID NO: 750131 - DNA, 33 bp, Homo sapien
aaaaacagcatagccaagtattcctccaaatta

SEQ ID NO: 750132 - DNA, 33 bp, Homo sapien
aaaaacagcatagccaggtattcctccaaatta

SEQ ID NO: 750133 - DNA, 33 bp, Homo sapien
gaaccatggctttaaagatctcactcgattttc

SEQ ID NO: 750134 - DNA, 33 bp, Homo sapien
gaaccatggctttaaatatctcactcgattttc

SEQ ID NO: 750135 - DNA, 33 bp, Homo sapien
tcttcatgaaatattacctgaagatgttcctca

SEQ ID NO: 750136 - DNA, 33 bp, Homo sapien
tcttcatgaaatattatctgaagatgttcctca

SEQ ID NO: 750137 - DNA, 33 bp, Homo sapien
gggagctacaatgcaaattgaggttttggtggg

SEQ ID NO: 750138 - DNA, 33 bp, Homo sapien
gggagctacaatgcaagttgaggttttggtggg

SEQ ID NO: 750139 - DNA, 33 bp, Homo sapien
actaaaagtgactaaaagcagcaatctacataa

SEQ ID NO: 750140 - DNA, 33 bp, Homo sapien
actaaaagtgactaaaggcagcaatctacataa

SEQ ID NO: 750141 - DNA, 33 bp, Homo sapien
aaacttctgacccaccaaaatcaaatctatgta

SEQ ID NO: 750142 - DNA, 33 bp, Homo sapien
aaacttctgacccaccgaaatcaaatctatgta

SEQ ID NO: 750143 - DNA, 33 bp, Homo sapien
acatcatggcttagaaaaaaacagcctatgtta

SEQ ID NO: 750144 - DNA, 33 bp, Homo sapien
acatcatggcttagaataaaacagcctatgtta

SEQ ID NO: 750145 - DNA, 33 bp, Homo sapien
tatgttaaaagctactaaaaacaggctggacat

SEQ ID NO: 750146 - DNA, 33 bp, Homo sapien
tatgttaaaagctactgaaaacaggctggacat

SEQ ID NO: 750147 - DNA, 33 bp, Homo sapien
ttgagccttttaagaaccgccttaaatatcaca

SEQ ID NO: 750148 - DNA, 33 bp, Homo sapien
ttgagccttttaagaatcgccttaaatatcaca

SEQ ID NO: 750149 - DNA, 33 bp, Homo sapien
tctctccaaagcaaaaacaacgaagtggctgga

SEQ ID NO: 750150 - DNA, 33 bp, Homo sapien
tctctccaaagcaaaagcaacgaagtggctgga

SEQ ID NO: 750151 - DNA, 33 bp, Homo sapien
aggtaggctgctaggcaatgtttcccttgaaat

SEQ ID NO: 750152 - DNA, 33 bp, Homo sapien
aggtaggctgctaggcgatgtttcccttgaaat

SEQ ID NO: 750153 - DNA, 33 bp, Homo sapien
ccaacccagataactacgagagatgataataaa

SEQ ID NO: 750154 - DNA, 33 bp, Homo sapien
ccaacccagataactatgagagatgataataaa

SEQ ID NO: 750155 - DNA, 33 bp, Homo sapien
tgcttacagtggcctcgaagacagtccgggagc

SEQ ID NO: 750156 - DNA, 33 bp, Homo sapien
tgcttacagtggcctctaagacagtccgggagc

SEQ ID NO: 750157 - DNA, 33 bp, Homo sapien
aaaagaaaagctgcaaacaagcagaagttagtt

SEQ ID NO: 750158 - DNA, 33 bp, Homo sapien
aaaagaaaagctgcaagcaagcagaagttagtt

SEQ ID NO: 750159 - DNA, 33 bp, Homo sapien
ttttttggaaataaagacagctttaaaaattat

SEQ ID NO: 750160 - DNA, 33 bp, Homo sapien
ttttttggaaataaaggcagctttaaaaattat

SEQ ID NO: 750161 - DNA, 33 bp, Homo sapien; identical to SEQ ID NO: 750159

SEQ ID NO: 750162 - DNA, 33 bp, Homo sapien; identical to SEQ ID NO: 750160

SEQ ID NO: 750163 - DNA, 33 bp, Homo sapien
ttagcacataattacaatcacttacttatcagg

SEQ ID NO: 750164 - DNA, 33 bp, Homo sapien
ttagcacataattacagtcacttacttatcagg

SEQ ID NO: 750165 - DNA, 33 bp, Homo sapien
ctagaatcaggcaataactcattctacaaaata

SEQ ID NO: 750166 - DNA, 33 bp, Homo sapien
ctagaatcaggcaatacctcattctacaaaata

SEQ ID NO: 750167 - DNA, 33 bp, Homo sapien
tgtacccattggtcaaaggagaaaattacaaca

SEQ ID NO: 750168 - DNA, 33 bp, Homo sapien
tgtacccattggtcaacggagaaaattacaaca

SEQ ID NO: 750169 - DNA, 33 bp, Homo sapien
tatggttgcaacatacaggaaaccatttgctgt

SEQ ID NO: 750170 - DNA, 33 bp, Homo sapien
tatggttgcaacatacgggaaaccatttgctgt

SEQ ID NO: 750171 - DNA, 33 bp, Homo sapien
ccaccctatggaccgacacaaacaagggtagaa

SEQ ID NO: 750172 - DNA, 33 bp, Homo sapien
ccaccctatggaccgatacaaacaagggtagaa

SEQ ID NO: 750173 - DNA, 33 bp, Homo sapien
aaagtgtcattatttacaagcctgaaagcaaag

SEQ ID NO: 750174 - DNA, 33 bp, Homo sapien
aaagtgtcattatttataagcctgaaagcaaag

SEQ ID NO: 750175 - DNA, 33 bp, Homo sapien
caaattctatgtgttgaaatatcttctccatgt

SEQ ID NO: 750176 - DNA, 33 bp, Homo sapien
caaattctatgtgttggaatatcttctccatgt

SEQ ID NO: 750177 - DNA, 33 bp, Homo sapien
cctgcttcccaactccaatacacgctgcacatc

SEQ ID NO: 750178 - DNA, 33 bp, Homo sapien
cctgcttcccaactccgatacacgctgcacatc

SEQ ID NO: 750179 - DNA, 33 bp, Homo sapien
agacaagctgtccaacaaagagtggagcttggc

SEQ ID NO: 750180 - DNA, 33 bp, Homo sapien
agacaagctgtccaaccaagagtggagcttggc

SEQ ID NO: 750181 - DNA, 33 bp, Homo sapien
gaatgtcaaataaagaaagtaaattgtgccatg

SEQ ID NO: 750182 - DNA, 33 bp, Homo sapien
gaatgtcaaataaagacagtaaattgtgccatg

SEQ ID NO: 750183 - DNA, 33 bp, Homo sapien
ctactgtcatgaaaacacaaccaatgaatagct

SEQ ID NO: 750184 - DNA, 33 bp, Homo sapien
ctactgtcatgaaaactcaaccaatgaatagct

SEQ ID NO: 750185 - DNA, 33 bp, Homo sapien
aagggaaggacatcaggagtagggcaaaaacct

SEQ ID NO: 750186 - DNA, 33 bp, Homo sapien
aagggaaggacatcagtagtagggcaaaaacct

SEQ ID NO: 750187 - DNA, 33 bp, Homo sapien
gccttttagtaggagcagagttgattgtcttga

SEQ ID NO: 750188 - DNA, 33 bp, Homo sapien
gccttttagtaggagcggagttgattgtcttga

SEQ ID NO: 750189 - DNA, 33 bp, Homo sapien
cacttttccattaccaccttctggacttgtttt

SEQ ID NO: 750190 - DNA, 33 bp, Homo sapien
cacttttccattaccatcttctggacttgtttt

SEQ ID NO: 750191 - DNA, 33 bp, Homo sapien
atttgaacacagggcaatcattagaaaaaattt

SEQ ID NO: 750192 - DNA, 33 bp, Homo sapien
atttgaacacagggcattcattagaaaaaattt

SEQ ID NO: 750193 - DNA, 33 bp, Homo sapien
ctcctaccttgaagcaatcttatttcagctcag

SEQ ID NO: 750194 - DNA, 33 bp, Homo sapien
ctcctaccttgaagcattcttatttcagctcag

SEQ ID NO: 750195 - DNA, 33 bp, Homo sapien
aatgtgttcctgaatacagtttaaggtgatgga

SEQ ID NO: 750196 - DNA, 33 bp, Homo sapien
aatgtgttcctgaatagagtttaaggtgatgga

SEQ ID NO: 750197 - DNA, 33 bp, Homo sapien
actctcaccagcaacacggtagagttttagcgc

SEQ ID NO: 750198 - DNA, 33 bp, Homo sapien
actctcaccagcaacatggtagagttttagcgc

SEQ ID NO: 750199 - DNA, 33 bp, Homo sapien
ttctaatccttagctacgattcccttatttgcc

SEQ ID NO: 750200 - DNA, 33 bp, Homo sapien
ttctaatccttagctatgattcccttatttgcc

SEQ ID NO: 750201 - DNA, 33 bp, Homo sapien
tatatatagtacctcaataagtgcttcaaaaat

SEQ ID NO: 750202 - DNA, 33 bp, Homo sapien
tatatatagtacctcagtaagtgcttcaaaaat

SEQ ID NO: 750203 - DNA, 33 bp, Homo sapien
ctcaatgggcaaaatacggtgtatgtcctatca

SEQ ID NO: 750204 - DNA, 33 bp, Homo sapien
ctcaatgggcaaaatatggtgtatgtcctatca

SEQ ID NO: 750205 - DNA, 33 bp, Homo sapien
aagttaggtttggagacaccaataactaccctt

SEQ ID NO: 750206 - DNA, 33 bp, Homo sapien
aagttaggtttggagataccaataactaccctt

SEQ ID NO: 750207 - DNA, 33 bp, Homo sapien
aatggtaaaagaaatgaatcatcaggtagacaa

SEQ ID NO: 750208 - DNA, 33 bp, Homo sapien
aatggtaaaagaaatggatcatcaggtagacaa

SEQ ID NO: 750209 - DNA, 33 bp, Homo sapien
gattataggatcataaaaccctgaaaaatgcaa

SEQ ID NO: 750210 - DNA, 33 bp, Homo sapien
gattataggatcataataccctgaaaaatgcaa

SEQ ID NO: 750211 - DNA, 33 bp, Homo sapien
gaaagatgaagccaaaaagactaggagaatcag

SEQ ID NO: 750212 - DNA, 33 bp, Homo sapien
gaaagatgaagccaaagagactaggagaatcag

SEQ ID NO: 750213 - DNA, 33 bp, Homo sapien
tcaattagaattgtccactatttacattcaaag

SEQ ID NO: 750214 - DNA, 33 bp, Homo sapien
tcaattagaattgtccgctatttacattcaaag

SEQ ID NO: 750215 - DNA, 33 bp, Homo sapien
aaagtatccagtcagaataaggtggttgtttaa

SEQ ID NO: 750216 - DNA, 33 bp, Homo sapien
aaagtatccagtcagagtaaggtggttgtttaa

SEQ ID NO: 750217 - DNA, 33 bp, Homo sapien
agacaatgttcaaaaacacgtggtctctgactt

SEQ ID NO: 750218 - DNA, 33 bp, Homo sapien
agacaatgttcaaaaatacgtggtctctgactt

SEQ ID NO: 750219 - DNA, 33 bp, Homo sapien
ttgtatttgtttcaagccatttggaagctggag

SEQ ID NO: 750220 - DNA, 33 bp, Homo sapien
ttgtatttgtttcaagtcatttggaagctggag

SEQ ID NO: 750221 - DNA, 33 bp, Homo sapien
aatcttttagaagcagcagtaagttgttttcaa

SEQ ID NO: 750222 - DNA, 33 bp, Homo sapien
aatcttttagaagcagtagtaagttgttttcaa

SEQ ID NO: 750223 - DNA, 33 bp, Homo sapien
aggagaaattctacatcagggacttcaatttat

SEQ ID NO: 750224 - DNA, 33 bp, Homo sapien
aggagaaattctacattagggacttcaatttat

SEQ ID NO: 750225 - DNA, 33 bp, Homo sapien
actgcagcggcagagactatcttactacaagcc

SEQ ID NO: 750226 - DNA, 33 bp, Homo sapien
actgcagcggcagagattatcttactacaagcc

SEQ ID NO: 750227 - DNA, 33 bp, Homo sapien
tgactgatattcactccctccctcctctaacgt

SEQ ID NO: 750228 - DNA, 33 bp, Homo sapien
tgactgatattcactctctccctcctctaacgt

SEQ ID NO: 750229 - DNA, 33 bp, Homo sapien
caacaaaaccatagcaatataaaaccaattaat

SEQ ID NO: 750230 - DNA, 33 bp, Homo sapien
caacaaaaccatagcagtataaaaccaattaat

SEQ ID NO: 750231 - DNA, 33 bp, Homo sapien
ttaattttgatgatgcaaacttttaaaattttt

SEQ ID NO: 750232 - DNA, 33 bp, Homo sapien
ttaattttgatgatgctaacttttaaaattttt

SEQ ID NO: 750233 - DNA, 33 bp, Homo sapien
aaattatgacagtgaaagaggtctgcactaatc

SEQ ID NO: 750234 - DNA, 33 bp, Homo sapien
aaattatgacagtgaaggaggtctgcactaatc

SEQ ID NO: 750235 - DNA, 33 bp, Homo sapien
aaccaggtgaaagcaaagatccatttagtcaaa

SEQ ID NO: 750236 - DNA, 33 bp, Homo sapien
aaccaggtgaaagcaatgatccatttagtcaaa

SEQ ID NO: 750237 - DNA, 33 bp, Homo sapien
aaatgattctttctacaatttttgtcctgtttt

SEQ ID NO: 750238 - DNA, 33 bp, Homo sapien
aaatgattctttctactatttttgtcctgtttt

SEQ ID NO: 750239 - DNA, 33 bp, Homo sapien
ttattgctttattgaaattagccctcagattac

SEQ ID NO: 750240 - DNA, 33 bp, Homo sapien
ttattgctttattgaagttagccctcagattac

SEQ ID NO: 750241 - DNA, 33 bp, Homo sapien
agtcttttgaatgttacgtttgaagggttttgt

SEQ ID NO: 750242 - DNA, 33 bp, Homo sapien
agtcttttgaatgttatgtttgaagggttttgt

SEQ ID NO: 750243 - DNA, 33 bp, Homo sapien
aggagagaagctcaacagaagaagaagaagttt

SEQ ID NO: 750244 - DNA, 33 bp, Homo sapien
aggagagaagctcaacggaagaagaagaagttt

SEQ ID NO: 750245 - DNA, 33 bp, Homo sapien
ctcaagcaataaaaggccaagaaatcattagag

SEQ ID NO: 750246 - DNA, 33 bp, Homo sapien
ctcaagcaataaaagggcaagaaatcattagag

SEQ ID NO: 750247 - DNA, 33 bp, Homo sapien
aggaaaggaatggctacgtcctggccaggcacc

SEQ ID NO: 750248 - DNA, 33 bp, Homo sapien
aggaaaggaatggctatgtcctggccaggcacc

SEQ ID NO: 750249 - DNA, 33 bp, Homo sapien
ctgtaacttgcctgtaacctggacagtgcagca

SEQ ID NO: 750250 - DNA, 33 bp, Homo sapien
ctgtaacttgcctgtatcctggacagtgcagca

SEQ ID NO: 750251 - DNA, 33 bp, Homo sapien
ggctcactcagattcaaaggaagggaacataat

SEQ ID NO: 750252 - DNA, 33 bp, Homo sapien
ggctcactcagattcagaggaagggaacataat

SEQ ID NO: 750253 - DNA, 33 bp, Homo sapien
agcttgtggaaaagagaaacgtgggagccagag

SEQ ID NO: 750254 - DNA, 33 bp, Homo sapien
agcttgtggaaaagaggaacgtgggagccagag

SEQ ID NO: 750255 - DNA, 33 bp, Homo sapien
aagccatccaaggttacacggcctctgaaatgg

SEQ ID NO: 750256 - DNA, 33 bp, Homo sapien
aagccatccaaggttagacggcctctgaaatgg

SEQ ID NO: 750257 - DNA, 33 bp, Homo sapien
attccaatcaataccaatctaaatgtaacaagt

SEQ ID NO: 750258 - DNA, 33 bp, Homo sapien
attccaatcaataccagtctaaatgtaacaagt

SEQ ID NO: 750259 - DNA, 33 bp, Homo sapien
tgactgaatatagagaacagtgaggaaaagaga

SEQ ID NO: 750260 - DNA, 33 bp, Homo sapien
tgactgaatatagagaccagtgaggaaaagaga

SEQ ID NO: 750261 - DNA, 33 bp, Homo sapien
ttagttaactgagatacagacaagaggaaatga

SEQ ID NO: 750262 - DNA, 33 bp, Homo sapien
ttagttaactgagatatagacaagaggaaatga

SEQ ID NO: 750263 - DNA, 33 bp, Homo sapien
gggagagaattcctaacgagaggtcgtcagcat

SEQ ID NO: 750264 - DNA, 33 bp, Homo sapien
gggagagaattcctaatgagaggtcgtcagcat

SEQ ID NO: 750265 - DNA, 33 bp, Homo sapien
ctttagagaattaaccagaaatgagaattagaa

SEQ ID NO: 750266 - DNA, 33 bp, Homo sapien
ctttagagaattaaccggaaatgagaattagaa

SEQ ID NO: 750267 - DNA, 33 bp, Homo sapien
gtttcaaatgggaaaacgagtctcaatgttgca

SEQ ID NO: 750268 - DNA, 33 bp, Homo sapien
gtttcaaatgggaaaatgagtctcaatgttgca

SEQ ID NO: 750269 - DNA, 33 bp, Homo sapien
tgagccaagaaaaaaaattgttctctgacagga

SEQ ID NO: 750270 - DNA, 33 bp, Homo sapien
tgagccaagaaaaaaagttgttctctgacagga

SEQ ID NO: 750271 - DNA, 33 bp, Homo sapien
ctagttctatcgattacagtcctgtcattatga

SEQ ID NO: 750272 - DNA, 33 bp, Homo sapien
ctagttctatcgattagagtcctgtcattatga

SEQ ID NO: 750273 - DNA, 33 bp, Homo sapien
agggaagactaatataccgggagtgctgtgatc

SEQ ID NO: 750274 - DNA, 33 bp, Homo sapien
agggaagactaatatatcgggagtgctgtgatc

SEQ ID NO: 750275 - DNA, 33 bp, Homo sapien
gaaatatgcaacacaccaggaaaaaattagaga

SEQ ID NO: 750276 - DNA, 33 bp, Homo sapien
gaaatatgcaacacacgaggaaaaaattagaga

SEQ ID NO: 750277 - DNA, 33 bp, Homo sapien
tctatccatttcagcaccaattggttcctagat

SEQ ID NO: 750278 - DNA, 33 bp, Homo sapien
tctatccatttcagcatcaattggttcctagat

SEQ ID NO: 750279 - DNA, 33 bp, Homo sapien
tgctgaaatggatagaagtagcacgagtgaaaa

SEQ ID NO: 750280 - DNA, 33 bp, Homo sapien
tgctgaaatggatagaggtagcacgagtgaaaa

SEQ ID NO: 750281 - DNA, 33 bp, Homo sapien
ccttgacctgctgaacacaaagggatttttcac

SEQ ID NO: 750282 - DNA, 33 bp, Homo sapien
ccttgacctgctgaacgcaaagggatttttcac

SEQ ID NO: 750283 - DNA, 33 bp, Homo sapien
gcatctagcagtacaaatagtagtttgggctgg

SEQ ID NO: 750284 - DNA, 33 bp, Homo sapien
gcatctagcagtacaagtagtagtttgggctgg

SEQ ID NO: 750285 - DNA, 33 bp, Homo sapien
ccaatgatattaaccaggtcaacttcgttcatt

SEQ ID NO: 750286 - DNA, 33 bp, Homo sapien
ccaatgatattaaccatgtcaacttcgttcatt

SEQ ID NO: 750287 - DNA, 33 bp, Homo sapien
cctcccacttccagcactgaataaacatgaagg

SEQ ID NO: 750288 - DNA, 33 bp, Homo sapien
cctcccacttccagcattgaataaacatgaagg

SEQ ID NO: 750289 - DNA, 33 bp, Homo sapien
attgtattctaaaatacggagccaagctaggtg

SEQ ID NO: 750290 - DNA, 33 bp, Homo sapien
attgtattctaaaatatggagccaagctaggtg

SEQ ID NO: 750291 - DNA, 33 bp, Homo sapien
agaacaaacacatgtaccaattccttaaagaat

SEQ ID NO: 750292 - DNA, 33 bp, Homo sapien
agaacaaacacatgtatcaattccttaaagaat

SEQ ID NO: 750293 - DNA, 33 bp, Homo sapien
gtttagcagctcctcaaaaaactgaaacagaac

SEQ ID NO: 750294 - DNA, 33 bp, Homo sapien
gtttagcagctcctcagaaaactgaaacagaac

SEQ ID NO: 750295 - DNA, 33 bp, Homo sapien
gtatcagtgcatttcacggtcacaaaatctacc

SEQ ID NO: 750296 - DNA, 33 bp, Homo sapien
gtatcagtgcatttcatggtcacaaaatctacc

SEQ ID NO: 750297 - DNA, 33 bp, Homo sapien
atcccttatgacaactaacatcaaaatgtgatt

SEQ ID NO: 750298 - DNA, 33 bp, Homo sapien
atcccttatgacaactgacatcaaaatgtgatt

SEQ ID NO: 750299 - DNA, 33 bp, Homo sapien
aagctgtggaatttgagaatttcagaaatatca

SEQ ID NO: 750300 - DNA, 33 bp, Homo sapien
aagctgtggaatttgataatttcagaaatatca

SEQ ID NO: 750301 - DNA, 33 bp, Homo sapien
tacaataacagaccttaaaggaactgggaacta

SEQ ID NO: 750302 - DNA, 33 bp, Homo sapien
tacaataacagaccttgaaggaactgggaacta

SEQ ID NO: 750303 - DNA, 33 bp, Homo sapien
gcagacgtgatgttaaaaaaagaagggtgtcct

SEQ ID NO: 750304 - DNA, 33 bp, Homo sapien
gcagacgtgatgttaagaaaagaagggtgtcct

SEQ ID NO: 750305 - DNA, 33 bp, Homo sapien
ctttatggcaaaattccctggaaaattatctgc

SEQ ID NO: 750306 - DNA, 33 bp, Homo sapien
ctttatggcaaaattctctggaaaattatctgc

SEQ ID NO: 750307 - DNA, 33 bp, Homo sapien
caaattaatatttttcaactgtccattatagta

SEQ ID NO: 750308 - DNA, 33 bp, Homo sapien
caaattaatatttttccactgtccattatagta

SEQ ID NO: 750309 - DNA, 33 bp, Homo sapien
atacagttgctacgaacgtttgtgcacagggct

SEQ ID NO: 750310 - DNA, 33 bp, Homo sapien
atacagttgctacgaatgtttgtgcacagggct

SEQ ID NO: 750311 - DNA, 33 bp, Homo sapien
aagaacagctgacagcaaaacggcacaggtgaa

SEQ ID NO: 750312 - DNA, 33 bp, Homo sapien
aagaacagctgacagcgaaacggcacaggtgaa

SEQ ID NO: 750313 - DNA, 33 bp, Homo sapien
gggtggtggagagccacgtcaggccgaatctca

SEQ ID NO: 750314 - DNA, 33 bp, Homo sapien
gggtggtggagagccatgtcaggccgaatctca

SEQ ID NO: 750315 - DNA, 33 bp, Homo sapien
cctcttcaatccactaaatgttcttccctatct

SEQ ID NO: 750316 - DNA, 33 bp, Homo sapien
cctcttcaatccactacatgttcttccctatct

SEQ ID NO: 750317 - DNA, 33 bp, Homo sapien
tccgtattatacagccaacacttcttcattcag

SEQ ID NO: 750318 - DNA, 33 bp, Homo sapien
tccgtattatacagccgacacttcttcattcag

SEQ ID NO: 750319 - DNA, 33 bp, Homo sapien
tgtgtgcagggcaaaccgcttattttcatatat

SEQ ID NO: 750320 - DNA, 33 bp, Homo sapien
tgtgtgcagggcaaactgcttattttcatatat

SEQ ID NO: 750321 - DNA, 33 bp, Homo sapien
gacactaccattataaactgggtgaccttggga

SEQ ID NO: 750322 - DNA, 33 bp, Homo sapien
gacactaccattataagctgggtgaccttggga

SEQ ID NO: 750323 - DNA, 33 bp, Homo sapien
cccagtgtttctatccacctggtcatttccttg

SEQ ID NO: 750324 - DNA, 33 bp, Homo sapien
cccagtgtttctatccgcctggtcatttccttg

SEQ ID NO: 750325 - DNA, 33 bp, Homo sapien
ttcttctcctatggatcagcaagagttccaacg

SEQ ID NO: 750326 - DNA, 33 bp, Homo sapien
ttcttctcctatggatgagcaagagttccaacg

SEQ ID NO: 750327 - DNA, 33 bp, Homo sapien
gttttgaaatgtgagacggatatgagatttggg

SEQ ID NO: 750328 - DNA, 33 bp, Homo sapien
gttttgaaatgtgagatggatatgagatttggg

SEQ ID NO: 750329 - DNA, 33 bp, Homo sapien
tgagggaggaaggaaagctaagaaacacttata

SEQ ID NO: 750330 - DNA, 33 bp, Homo sapien
tgagggaggaaggaaatctaagaaacacttata

SEQ ID NO: 750331 - DNA, 33 bp, Homo sapien
ggaccacctcaaacaaaaaagttgcaaacaaaa

SEQ ID NO: 750332 - DNA, 33 bp, Homo sapien
ggaccacctcaaacaacaaagttgcaaacaaaa

SEQ ID NO: 750333 - DNA, 33 bp, Homo sapien
gtttgcaacatacttacataggaactagataag

SEQ ID NO: 750334 - DNA, 33 bp, Homo sapien
gtttgcaacatacttagataggaactagataag

SEQ ID NO: 750335 - DNA, 33 bp, Homo sapien
gacagtcagagaagcaacagattaaaaggattc

SEQ ID NO: 750336 - DNA, 33 bp, Homo sapien
gacagtcagagaagcagcagattaaaaggattc

SEQ ID NO: 750337 - DNA, 33 bp, Homo sapien
ccctattgtcctcaaaaagctgacatggaatac

SEQ ID NO: 750338 - DNA, 33 bp, Homo sapien
ccctattgtcctcaaagagctgacatggaatac

SEQ ID NO: 750339 - DNA, 33 bp, Homo sapien
atgctggtgtgaacaaacctactgcgttgccat

SEQ ID NO: 750340 - DNA, 33 bp, Homo sapien
atgctggtgtgaacaagcctactgcgttgccat

SEQ ID NO: 750341 - DNA, 33 bp, Homo sapien
ggatctgatgtaatgcacacaattgtcttttac

SEQ ID NO: 750342 - DNA, 33 bp, Homo sapien
ggatctgatgtaatgcgcacaattgtcttttac

SEQ ID NO: 750343 - DNA, 33 bp, Homo sapien
gtctaattgggtctcaaagtcctaattacctcc

SEQ ID NO: 750344 - DNA, 33 bp, Homo sapien
gtctaattgggtctcagagtcctaattacctcc

SEQ ID NO: 750345 - DNA, 33 bp, Homo sapien
agccacagtgaccccacgcctctaacagccgat

SEQ ID NO: 750346 - DNA, 33 bp, Homo sapien
agccacagtgaccccatgcctctaacagccgat

SEQ ID NO: 750347 - DNA, 33 bp, Homo sapien
aaaggatctacaaagcaaaagggccaaaattta

SEQ ID NO: 750348 - DNA, 33 bp, Homo sapien
aaaggatctacaaagcgaaagggccaaaattta

SEQ ID NO: 750349 - DNA, 33 bp, Homo sapien
tgtgagtggaatctggaaacctagcaggatcac

SEQ ID NO: 750350 - DNA, 33 bp, Homo sapien
tgtgagtggaatctgggaacctagcaggatcac

SEQ ID NO: 750351 - DNA, 33 bp, Homo sapien
taagcccacataataaaaaaatgcagtcatgat

SEQ ID NO: 750352 - DNA, 33 bp, Homo sapien
taagcccacataataacaaaatgcagtcatgat

SEQ ID NO: 750353 - DNA, 33 bp, Homo sapien
cacttcataaacgcacaacttcaagggaatccc

SEQ ID NO: 750354 - DNA, 33 bp, Homo sapien
cacttcataaacgcacgacttcaagggaatccc

SEQ ID NO: 750355 - DNA, 33 bp, Homo sapien
ttttcatcttggaaaactgaaatgctacactca

SEQ ID NO: 750356 - DNA, 33 bp, Homo sapien
ttttcatcttggaaaattgaaatgctacactca

SEQ ID NO: 750357 - DNA, 33 bp, Homo sapien
ttattcacaatagccacgagctggaaagaatcc

SEQ ID NO: 750358 - DNA, 33 bp, Homo sapien
ttattcacaatagccatgagctggaaagaatcc

SEQ ID NO: 750359 - DNA, 33 bp, Homo sapien
ctgtgatagggatgacagcattctccaatttgc

SEQ ID NO: 750360 - DNA, 33 bp, Homo sapien
ctgtgatagggatgacggcattctccaatttgc

SEQ ID NO: 750361 - DNA, 33 bp, Homo sapien
cgggttccaatcaaaacttcttttcactaaaac

SEQ ID NO: 750362 - DNA, 33 bp, Homo sapien
cgggttccaatcaaaagttcttttcactaaaac

SEQ ID NO: 750363 - DNA, 33 bp, Homo sapien
tttctgtgtctaaaacgcttaccagatatgact

SEQ ID NO: 750364 - DNA, 33 bp, Homo sapien
tttctgtgtctaaaactcttaccagatatgact

SEQ ID NO: 750365 - DNA, 33 bp, Homo sapien
cccatgtgaatgcacaaggatgctcgaggagaa

SEQ ID NO: 750366 - DNA, 33 bp, Homo sapien
cccatgtgaatgcacagggatgctcgaggagaa

SEQ ID NO: 750367 - DNA, 33 bp, Homo sapien
gaagctggacaccggacggagcaaagtgtggac

SEQ ID NO: 750368 - DNA, 33 bp, Homo sapien
gaagctggacaccggatggagcaaagtgtggac

SEQ ID NO: 750369 - DNA, 33 bp, Homo sapien
agaaccaccgatggtgacaaaaaaacgaggctc

SEQ ID NO: 750370 - DNA, 33 bp, Homo sapien
agaaccaccgatggtggcaaaaaaacgaggctc

SEQ ID NO: 750371 - DNA, 33 bp, Homo sapien
aactgagcggaaatgaaattggaatctgaagct

SEQ ID NO: 750372 - DNA, 33 bp, Homo sapien
aactgagcggaaatgagattggaatctgaagct

SEQ ID NO: 750373 - DNA, 33 bp, Homo sapien
ttcccccttttccacacagcagaaccaactggg

SEQ ID NO: 750374 - DNA, 33 bp, Homo sapien
ttcccccttttccacagagcagaaccaactggg

SEQ ID NO: 750375 - DNA, 33 bp, Homo sapien
gccagaattcttgtgccgattttttctcttctg

SEQ ID NO: 750376 - DNA, 33 bp, Homo sapien
gccagaattcttgtgctgattttttctcttctg

SEQ ID NO: 750377 - DNA, 33 bp, Homo sapien
tttcctatcacacttacggccaaatcacatttc

SEQ ID NO: 750378 - DNA, 33 bp, Homo sapien
tttcctatcacacttagggccaaatcacatttc

SEQ ID NO: 750379 - DNA, 33 bp, Homo sapien
atcaatccatcactacccttgaaaaggtcatgg

SEQ ID NO: 750380 - DNA, 33 bp, Homo sapien
atcaatccatcactacgcttgaaaaggtcatgg

SEQ ID NO: 750381 - DNA, 33 bp, Homo sapien
tgtaatgaaatctgcgacatgtgctaaaaccaa

SEQ ID NO: 750382 - DNA, 33 bp, Homo sapien
tgtaatgaaatctgcgccatgtgctaaaaccaa

SEQ ID NO: 750383 - DNA, 33 bp, Homo sapien
ccaagagagacatcagacattcagaatagactc

SEQ ID NO: 750384 - DNA, 33 bp, Homo sapien
ccaagagagacatcaggcattcagaatagactc

SEQ ID NO: 750385 - DNA, 33 bp, Homo sapien
tattaatggagaaaaaaatgaagtccctgatta

SEQ ID NO: 750386 - DNA, 33 bp, Homo sapien
tattaatggagaaaaacatgaagtccctgatta

SEQ ID NO: 750387 - DNA, 33 bp, Homo sapien
tgggatcaaatgtaacacaaaatcatcggaact

SEQ ID NO: 750388 - DNA, 33 bp, Homo sapien
tgggatcaaatgtaacgcaaaatcatcggaact

SEQ ID NO: 750389 - DNA, 33 bp, Homo sapien
gggtgctagccaggacaatatacttgagaatct

SEQ ID NO: 750390 - DNA, 33 bp, Homo sapien
gggtgctagccaggacgatatacttgagaatct

SEQ ID NO: 750391 - DNA, 33 bp, Homo sapien
ttggggacagggttacaaagcacagacacttgt

SEQ ID NO: 750392 - DNA, 33 bp, Homo sapien
ttggggacagggttacgaagcacagacacttgt

SEQ ID NO: 750393 - DNA, 33 bp, Homo sapien
cttaggtgattttgccactgtgtgaacatcata

SEQ ID NO: 750394 - DNA, 33 bp, Homo sapien
cttaggtgattttgccgctgtgtgaacatcata

SEQ ID NO: 750395 - DNA, 33 bp, Homo sapien
tatagagaaaaaacaacgttccataatcaagaa

SEQ ID NO: 750396 - DNA, 33 bp, Homo sapien
tatagagaaaaaacaaggttccataatcaagaa

SEQ ID NO: 750397 - DNA, 33 bp, Homo sapien
aaatgactagttaaacacacaatgaaatgtaat

SEQ ID NO: 750398 - DNA, 33 bp, Homo sapien
aaatgactagttaaacgcacaatgaaatgtaat

SEQ ID NO: 750399 - DNA, 33 bp, Homo sapien
cagggacttacacaaaaatctgttgaatgaatg

SEQ ID NO: 750400 - DNA, 33 bp, Homo sapien
cagggacttacacaaatatctgttgaatgaatg

SEQ ID NO: 750401 - DNA, 33 bp, Homo sapien
cacatctactagtcaggactatcatgacccaat

SEQ ID NO: 750402 - DNA, 33 bp, Homo sapien
cacatctactagtcagtactatcatgacccaat

SEQ ID NO: 750403 - DNA, 33 bp, Homo sapien
aaagttccttccatgccaaacttctctagaaac

SEQ ID NO: 750404 - DNA, 33 bp, Homo sapien
aaagttccttccatgcgaaacttctctagaaac

SEQ ID NO: 750405 - DNA, 33 bp, Homo sapien
gacctcaaaacaaataaacagcttccatactga

SEQ ID NO: 750406 - DNA, 33 bp, Homo sapien
gacctcaaaacaaatacacagcttccatactga

SEQ ID NO: 750407 - DNA, 33 bp, Homo sapien
aggaagaaaatttcaacaagccggccacataga

SEQ ID NO: 750408 - DNA, 33 bp, Homo sapien
aggaagaaaatttcaagaagccggccacataga

SEQ ID NO: 750409 - DNA, 33 bp, Homo sapien
ttttgttgttgttgctcagataataatgcccat

SEQ ID NO: 750410 - DNA, 33 bp, Homo sapien
ttttgttgttgttgctgagataataatgcccat

SEQ ID NO: 750411 - DNA, 33 bp, Homo sapien
aatagcctggacattaagattttttaaagaagc

SEQ ID NO: 750412 - DNA, 33 bp, Homo sapien
aatagcctggacattaggattttttaaagaagc

SEQ ID NO: 750413 - DNA, 33 bp, Homo sapien
gaaaagtcacctctctcaataaaggcaactgtt

SEQ ID NO: 750414 - DNA, 33 bp, Homo sapien
gaaaagtcacctctcttaataaaggcaactgtt

SEQ ID NO: 750415 - DNA, 33 bp, Homo sapien
gatgccatcgtgtataaaccaaacaagaaccag

SEQ ID NO: 750416 - DNA, 33 bp, Homo sapien
gatgccatcgtgtatacaccaaacaagaaccag

SEQ ID NO: 750417 - DNA, 33 bp, Homo sapien
tcataaagaataagcacgaatggaaacaacaac

SEQ ID NO: 750418 - DNA, 33 bp, Homo sapien
tcataaagaataagcatgaatggaaacaacaac

SEQ ID NO: 750419 - DNA, 33 bp, Homo sapien
taaatatgtgaaataacgggaagaccaaagagg

SEQ ID NO: 750420 - DNA, 33 bp, Homo sapien
taaatatgtgaaataatgggaagaccaaagagg

SEQ ID NO: 750421 - DNA, 33 bp, Homo sapien
tgatttttcttctctccgaatcatttaaacaca

SEQ ID NO: 750422 - DNA, 33 bp, Homo sapien
tgatttttcttctctctgaatcatttaaacaca

SEQ ID NO: 750423 - DNA, 33 bp, Homo sapien
gagatacccaaccaaaactcaggaagtgattgc

SEQ ID NO: 750424 - DNA, 33 bp, Homo sapien
gagatacccaaccaaagctcaggaagtgattgc

SEQ ID NO: 750425 - DNA, 33 bp, Homo sapien
atccctgaccaaattcgctagaagggttgctgt

SEQ ID NO: 750426 - DNA, 33 bp, Homo sapien
atccctgaccaaattctctagaagggttgctgt

SEQ ID NO: 750427 - DNA, 33 bp, Homo sapien
aatagcatcttagtcacataaaagagttggtcc

SEQ ID NO: 750428 - DNA, 33 bp, Homo sapien
aatagcatcttagtcatataaaagagttggtcc

SEQ ID NO: 750429 - DNA, 33 bp, Homo sapien
ttttgctcatttaatcaactgttcattagcatt

SEQ ID NO: 750430 - DNA, 33 bp, Homo sapien
ttttgctcatttaatcgactgttcattagcatt

SEQ ID NO: 750431 - DNA, 33 bp, Homo sapien
aatatataattttcaccaaaccatacagcacac

SEQ ID NO: 750432 - DNA, 33 bp, Homo sapien
aatatataattttcactaaaccatacagcacac

SEQ ID NO: 750433 - DNA, 33 bp, Homo sapien
catctttacataggacaatttttatggaagaat

SEQ ID NO: 750434 - DNA, 33 bp, Homo sapien
catctttacataggacgatttttatggaagaat

SEQ ID NO: 750435 - DNA, 33 bp, Homo sapien
tacgctgaatactacacaactgcatatcaggga

SEQ ID NO: 750436 - DNA, 33 bp, Homo sapien
tacgctgaatactacagaactgcatatcaggga

SEQ ID NO: 750437 - DNA, 33 bp, Homo sapien
cttaataacatcgtggcaggtgaaagacgtcag

SEQ ID NO: 750438 - DNA, 33 bp, Homo sapien
cttaataacatcgtggtaggtgaaagacgtcag

SEQ ID NO: 750439 - DNA, 33 bp, Homo sapien
atatctctctaataaacggcaaatggagaagga

SEQ ID NO: 750440 - DNA, 33 bp, Homo sapien
atatctctctaataaagggcaaatggagaagga

SEQ ID NO: 750441 - DNA, 33 bp, Homo sapien
gcctattaactcaaacccagcaaggattttatt

SEQ ID NO: 750442 - DNA, 33 bp, Homo sapien
gcctattaactcaaactcagcaaggattttatt

SEQ ID NO: 750443 - DNA, 33 bp, Homo sapien
gactgcattctcaccccacaaatggtgatgtgg

SEQ ID NO: 750444 - DNA, 33 bp, Homo sapien
gactgcattctcacccgacaaatggtgatgtgg

SEQ ID NO: 750445 - DNA, 33 bp, Homo sapien
actgaagtattttaacaaagagaatgatgtgtc

SEQ ID NO: 750446 - DNA, 33 bp, Homo sapien
actgaagtattttaacgaagagaatgatgtgtc

SEQ ID NO: 750447 - DNA, 33 bp, Homo sapien
acttttaaatacgaccagagatacaaggaaatc

SEQ ID NO: 750448 - DNA, 33 bp, Homo sapien
acttttaaatacgaccggagatacaaggaaatc

SEQ ID NO: 750449 - DNA, 33 bp, Homo sapien
ttctctggatgacagaatagtcttttccacatt

SEQ ID NO: 750450 - DNA, 33 bp, Homo sapien
ttctctggatgacagagtagtcttttccacatt

SEQ ID NO: 750451 - DNA, 33 bp, Homo sapien
ggcggatacagagcaaaggtgatgtaaacacac

SEQ ID NO: 750452 - DNA, 33 bp, Homo sapien
ggcggatacagagcaagggtgatgtaaacacac

SEQ ID NO: 750453 - DNA, 33 bp, Homo sapien
ccaagttctatctttcaagtgtacacagatacg

SEQ ID NO: 750454 - DNA, 33 bp, Homo sapien
ccaagttctatctttcgagtgtacacagatacg

SEQ ID NO: 750455 - DNA, 33 bp, Homo sapien
acttgtgttacccagaatccaagtctctcattt

SEQ ID NO: 750456 - DNA, 33 bp, Homo sapien
acttgtgttacccagagtccaagtctctcattt

SEQ ID NO: 750457 - DNA, 33 bp, Homo sapien
tggcaccttgctgctcacgctggaagcttgtta

SEQ ID NO: 750458 - DNA, 33 bp, Homo sapien
tggcaccttgctgctcgcgctggaagcttgtta

SEQ ID NO: 750459 - DNA, 33 bp, Homo sapien
gccggtctcttatagcccgctcctcagtgcccg

SEQ ID NO: 750460 - DNA, 33 bp, Homo sapien
gccggtctcttatagctcgctcctcagtgcccg

SEQ ID NO: 750461 - DNA, 33 bp, Homo sapien
aagctgagagtggagcagactttgagaaacact

SEQ ID NO: 750462 - DNA, 33 bp, Homo sapien
aagctgagagtggagccgactttgagaaacact

SEQ ID NO: 750463 - DNA, 33 bp, Homo sapien
tcaggacagtagagacaaagctagatagttttt

SEQ ID NO: 750464 - DNA, 33 bp, Homo sapien
tcaggacagtagagaccaagctagatagttttt

SEQ ID NO: 750465 - DNA, 33 bp, Homo sapien
ttttttttctttcagcactttcaagatgtcacc

SEQ ID NO: 750466 - DNA, 33 bp, Homo sapien
ttttttttctttcagcgctttcaagatgtcacc

SEQ ID NO: 750467 - DNA, 33 bp, Homo sapien
tggtattgagaagagacgaacagtcctaccacc

SEQ ID NO: 750468 - DNA, 33 bp, Homo sapien
tggtattgagaagagaggaacagtcctaccacc

SEQ ID NO: 750469 - DNA, 33 bp, Homo sapien
ggctgtgtggacacaacacaaaaatgcagactt

SEQ ID NO: 750470 - DNA, 33 bp, Homo sapien
ggctgtgtggacacaatacaaaaatgcagactt

SEQ ID NO: 750471 - DNA, 33 bp, Homo sapien
gcattaagtcagaaacaatgggcgaggtaaggt

SEQ ID NO: 750472 - DNA, 33 bp, Homo sapien
gcattaagtcagaaacgatgggcgaggtaaggt

SEQ ID NO: 750473 - DNA, 33 bp, Homo sapien
ataatttatgaccacaaagtactattattatgg

SEQ ID NO: 750474 - DNA, 33 bp, Homo sapien
ataatttatgaccacagagtactattattatgg

SEQ ID NO: 750475 - DNA, 33 bp, Homo sapien
tgctgcaggatcatacaccagggaatgcatacg

SEQ ID NO: 750476 - DNA, 33 bp, Homo sapien
tgctgcaggatcatacgccagggaatgcatacg

SEQ ID NO: 750477 - DNA, 33 bp, Homo sapien
gactggaagtcagaaacgttagaagttaataca

SEQ ID NO: 750478 - DNA, 33 bp, Homo sapien
gactggaagtcagaaatgttagaagttaataca

SEQ ID NO: 750479 - DNA, 33 bp, Homo sapien
cattatcactgagaacacagcaacatgcaatga

SEQ ID NO: 750480 - DNA, 33 bp, Homo sapien
cattatcactgagaacgcagcaacatgcaatga

SEQ ID NO: 750481 - DNA, 33 bp, Homo sapien
atttgcaaagaacttaaagacccctgtgatgtg

SEQ ID NO: 750482 - DNA, 33 bp, Homo sapien
atttgcaaagaacttagagacccctgtgatgtg

SEQ ID NO: 750483 - DNA, 33 bp, Homo sapien
acaatcctctgagttaagtgttatggctctcaa

SEQ ID NO: 750484 - DNA, 33 bp, Homo sapien
acaatcctctgagttaggtgttatggctctcaa

SEQ ID NO: 750485 - DNA, 33 bp, Homo sapien
acaaatattagatgaaatgatacaggtaagaag

SEQ ID NO: 750486 - DNA, 33 bp, Homo sapien
acaaatattagatgaactgatacaggtaagaag

SEQ ID NO: 750487 - DNA, 33 bp, Homo sapien
ctgaagaaccacataccagaagaaattttgtac

SEQ ID NO: 750488 - DNA, 33 bp, Homo sapien
ctgaagaaccacatactagaagaaattttgtac

SEQ ID NO: 750489 - DNA, 33 bp, Homo sapien
tcttctgcagcgtccacacttctctcagccttt

SEQ ID NO: 750490 - DNA, 33 bp, Homo sapien
tcttctgcagcgtccatacttctctcagccttt

SEQ ID NO: 750491 - DNA, 33 bp, Homo sapien
tcccctggcatggaggccactctctggctggct

SEQ ID NO: 750492 - DNA, 33 bp, Homo sapien
tcccctggcatggaggtcactctctggctggct

SEQ ID NO: 750493 - DNA, 33 bp, Homo sapien
tgggatgctaacctaaccaatcaaggaatgttt

SEQ ID NO: 750494 - DNA, 33 bp, Homo sapien
tgggatgctaacctaatcaatcaaggaatgttt

SEQ ID NO: 750495 - DNA, 33 bp, Homo sapien
attaaattagaaaatagattgcttggcatttag

SEQ ID NO: 750496 - DNA, 33 bp, Homo sapien
attaaattagaaaatatattgcttggcatttag

SEQ ID NO: 750497 - DNA, 33 bp, Homo sapien
atccacaatgcaaaacaatgtggaaggacaaag

SEQ ID NO: 750498 - DNA, 33 bp, Homo sapien
atccacaatgcaaaaccatgtggaaggacaaag

SEQ ID NO: 750499 - DNA, 33 bp, Homo sapien
tggagcgactcgactcagaggacaggagggtgt

SEQ ID NO: 750500 - DNA, 33 bp, Homo sapien
tggagcgactcgactcggaggacaggagggtgt

SEQ ID NO: 750501 - DNA, 33 bp, Homo sapien
agctggccacaaattacaactggagaatatttg

SEQ ID NO: 750502 - DNA, 33 bp, Homo sapien
agctggccacaaattataactggagaatatttg

SEQ ID NO: 750503 - DNA, 33 bp, Homo sapien
aacctctgcctgtttacccaactacaaagctaa

SEQ ID NO: 750504 - DNA, 33 bp, Homo sapien
aacctctgcctgtttatccaactacaaagctaa

SEQ ID NO: 750505 - DNA, 33 bp, Homo sapien
gcacaatagtaactaaaccaatccattctcagc

SEQ ID NO: 750506 - DNA, 33 bp, Homo sapien
gcacaatagtaactaacccaatccattctcagc

SEQ ID NO: 750507 - DNA, 33 bp, Homo sapien
cttaatcctatcaaccaaggaggatgtatgtcg

SEQ ID NO: 750508 - DNA, 33 bp, Homo sapien
cttaatcctatcaaccgaggaggatgtatgtcg

SEQ ID NO: 750509 - DNA, 33 bp, Homo sapien; identical to SEQ ID NO: 750507

SEQ ID NO: 750510 - DNA, 33 bp, Homo sapien; identical to SEQ ID NO: 750508

SEQ ID NO: 750511 - DNA, 33 bp, Homo sapien
gaaaaacaacaccacgaaaaagtgggccaagga

SEQ ID NO: 750512 - DNA, 33 bp, Homo sapien
gaaaaacaacaccacgcaaaagtgggccaagga

SEQ ID NO: 750513 - DNA, 33 bp, Homo sapien
gagggctgagagcagacgtaggtgttgacgtga

SEQ ID NO: 750514 - DNA, 33 bp, Homo sapien
gagggctgagagcagatgtaggtgttgacgtga

SEQ ID NO: 750515 - DNA, 33 bp, Homo sapien
cagcaggacttgtggacgtagacccacctctct

SEQ ID NO: 750516 - DNA, 33 bp, Homo sapien
cagcaggacttgtggatgtagacccacctctct

SEQ ID NO: 750517 - DNA, 33 bp, Homo sapien
aaaatgccaagcggaaatcagtggccaatgatc

SEQ ID NO: 750518 - DNA, 33 bp, Homo sapien
aaaatgccaagcggaagtcagtggccaatgatc

SEQ ID NO: 750519 - DNA, 33 bp, Homo sapien
cggtctcagagctacaagggaggtactcacaca

SEQ ID NO: 750520 - DNA, 33 bp, Homo sapien
cggtctcagagctacaggggaggtactcacaca

SEQ ID NO: 750521 - DNA, 33 bp, Homo sapien
gggctgtatcaggggccatagtcactcatgttt

SEQ ID NO: 750522 - DNA, 33 bp, Homo sapien
gggctgtatcaggggctatagtcactcatgttt

SEQ ID NO: 750523 - DNA, 33 bp, Homo sapien
aataaggccctttttacgcaatagtaccctttt

SEQ ID NO: 750524 - DNA, 33 bp, Homo sapien
aataaggccctttttatgcaatagtaccctttt

SEQ ID NO: 750525 - DNA, 33 bp, Homo sapien
tataatgtgaagttcaccagcataactatgttt

SEQ ID NO: 750526 - DNA, 33 bp, Homo sapien
tataatgtgaagttcatcagcataactatgttt

SEQ ID NO: 750527 - DNA, 33 bp, Homo sapien
accagaatttaagctcaaacttcacgcaagggg

SEQ ID NO: 750528 - DNA, 33 bp, Homo sapien
accagaatttaagctcgaacttcacgcaagggg

SEQ ID NO: 750529 - DNA, 33 bp, Homo sapien
cacaggcttagtgtgaagattcgagatgggggc

SEQ ID NO: 750530 - DNA, 33 bp, Homo sapien
cacaggcttagtgtgaggattcgagatgggggc

SEQ ID NO: 750531 - DNA, 33 bp, Homo sapien
agcccgctcgcattgcaatttgctcaaaagaaa

SEQ ID NO: 750532 - DNA, 33 bp, Homo sapien
agcccgctcgcattgcgatttgctcaaaagaaa

SEQ ID NO: 750533 - DNA, 33 bp, Homo sapien
aagaagggagctaagacaagtgaaggaaaggcc

SEQ ID NO: 750534 - DNA, 33 bp, Homo sapien
aagaagggagctaagagaagtgaaggaaaggcc

SEQ ID NO: 750535 - DNA, 33 bp, Homo sapien
tttctgcatttagaccaatctcgggttgggaag

SEQ ID NO: 750536 - DNA, 33 bp, Homo sapien
tttctgcatttagaccgatctcgggttgggaag

SEQ ID NO: 750537 - DNA, 33 bp, Homo sapien
ataaaggttagccaaacttgaaaataaatattt

SEQ ID NO: 750538 - DNA, 33 bp, Homo sapien
ataaaggttagccaaagttgaaaataaatattt

SEQ ID NO: 750539 - DNA, 33 bp, Homo sapien
cgctgctcggaacgagccattccaacaagacac

SEQ ID NO: 750540 - DNA, 33 bp, Homo sapien
cgctgctcggaacgagtcattccaacaagacac

SEQ ID NO: 750541 - DNA, 33 bp, Homo sapien
aacaagacacagaggcaaactggccacagggct

SEQ ID NO: 750542 - DNA, 33 bp, Homo sapien
aacaagacacagaggcgaactggccacagggct

SEQ ID NO: 750543 - DNA, 33 bp, Homo sapien
catcatctgcacccctaagctaagcaatcattt

SEQ ID NO: 750544 - DNA, 33 bp, Homo sapien
catcatctgcacccctgagctaagcaatcattt

SEQ ID NO: 750545 - DNA, 33 bp, Homo sapien
ttttctcacatataaactcttcaaaacttgcac

SEQ ID NO: 750546 - DNA, 33 bp, Homo sapien
ttttctcacatataaattcttcaaaacttgcac

SEQ ID NO: 750547 - DNA, 33 bp, Homo sapien
agtagaaagtaaatccacagacatccctctggg

SEQ ID NO: 750548 - DNA, 33 bp, Homo sapien
agtagaaagtaaatccgcagacatccctctggg

SEQ ID NO: 750549 - DNA, 33 bp, Homo sapien
gccagctatgctctgacggccaagcgtggtggt

SEQ ID NO: 750550 - DNA, 33 bp, Homo sapien
gccagctatgctctgatggccaagcgtggtggt

SEQ ID NO: 750551 - DNA, 33 bp, Homo sapien
gtgccgaaaaccggaacgggaagcctcagcacc

SEQ ID NO: 750552 - DNA, 33 bp, Homo sapien
gtgccgaaaaccggaatgggaagcctcagcacc

SEQ ID NO: 750553 - DNA, 33 bp, Homo sapien
actagggaaactctcaatagatcaattcctgat

SEQ ID NO: 750554 - DNA, 33 bp, Homo sapien
actagggaaactctcagtagatcaattcctgat

SEQ ID NO: 750555 - DNA, 33 bp, Homo sapien
gatgtgcttcagggaaaagaaaaatgaagagca

SEQ ID NO: 750556 - DNA, 33 bp, Homo sapien
gatgtgcttcagggaagagaaaaatgaagagca

SEQ ID NO: 750557 - DNA, 33 bp, Homo sapien
tgctctgatccggaacaagagcgtctgtctcgt

SEQ ID NO: 750558 - DNA, 33 bp, Homo sapien
tgctctgatccggaacgagagcgtctgtctcgt

SEQ ID NO: 750559 - DNA, 33 bp, Homo sapien
caaaaggcactcaacactgaatcaggagatctg

SEQ ID NO: 750560 - DNA, 33 bp, Homo sapien
caaaaggcactcaacattgaatcaggagatctg

SEQ ID NO: 750561 - DNA, 33 bp, Homo sapien
aactttctgacatagacgcaagaagtcacacac

SEQ ID NO: 750562 - DNA, 33 bp, Homo sapien
aactttctgacatagatgcaagaagtcacacac

SEQ ID NO: 750563 - DNA, 33 bp, Homo sapien
cactcaacatacaagaacagagcaagcaggcca

SEQ ID NO: 750564 - DNA, 33 bp, Homo sapien
cactcaacatacaagagcagagcaagcaggcca

SEQ ID NO: 750565 - DNA, 33 bp, Homo sapien
ggagcaccacagctaacgagaagacctgcctgc

SEQ ID NO: 750566 - DNA, 33 bp, Homo sapien
ggagcaccacagctaatgagaagacctgcctgc

SEQ ID NO: 750567 - DNA, 33 bp, Homo sapien
aattatccaaacagtgacaaggacagtaataat

SEQ ID NO: 750568 - DNA, 33 bp, Homo sapien
aattatccaaacagtggcaaggacagtaataat

SEQ ID NO: 750569 - DNA, 33 bp, Homo sapien
gcacttaccaaggacacctgcagcaggctgtga

SEQ ID NO: 750570 - DNA, 33 bp, Homo sapien
gcacttaccaaggacagctgcagcaggctgtga

SEQ ID NO: 750571 - DNA, 33 bp, Homo sapien
ctcttatgtgctctcaactatacttcaagatta

SEQ ID NO: 750572 - DNA, 33 bp, Homo sapien
ctcttatgtgctctcacctatacttcaagatta

SEQ ID NO: 750573 - DNA, 33 bp, Homo sapien
gcgatctgtgccttaaagacattttcctgctgc

SEQ ID NO: 750574 - DNA, 33 bp, Homo sapien
gcgatctgtgccttaaggacattttcctgctgc

SEQ ID NO: 750575 - DNA, 33 bp, Homo sapien
actatgattttgtgacacaatttggaagttctt

SEQ ID NO: 750576 - DNA, 33 bp, Homo sapien
actatgattttgtgacccaatttggaagttctt

SEQ ID NO: 750577 - DNA, 33 bp, Homo sapien
caatgaaaaggctgaaactctgtgaaatacttg

SEQ ID NO: 750578 - DNA, 33 bp, Homo sapien
caatgaaaaggctgaacctctgtgaaatacttg

SEQ ID NO: 750579 - DNA, 33 bp, Homo sapien
caactttatgaagagaacattagaaaccacttg

SEQ ID NO: 750580 - DNA, 33 bp, Homo sapien
caactttatgaagagaccattagaaaccacttg

SEQ ID NO: 750581 - DNA, 33 bp, Homo sapien
ttctacaaaaagtaaacgagtgtagtggtgcac

SEQ ID NO: 750582 - DNA, 33 bp, Homo sapien
ttctacaaaaagtaaatgagtgtagtggtgcac

SEQ ID NO: 750583 - DNA, 33 bp, Homo sapien
gtgcatgtccagccgcaatgactgtggacggcc

SEQ ID NO: 750584 - DNA, 33 bp, Homo sapien
gtgcatgtccagccgcgatgactgtggacggcc

SEQ ID NO: 750585 - DNA, 33 bp, Homo sapien
ccacacttcactaaccagctacttctccaaaga

SEQ ID NO: 750586 - DNA, 33 bp, Homo sapien
ccacacttcactaaccggctacttctccaaaga

SEQ ID NO: 750587 - DNA, 33 bp, Homo sapien
tgggagtgcgaagaacaaagaacacagggctgc

SEQ ID NO: 750588 - DNA, 33 bp, Homo sapien
tgggagtgcgaagaacgaagaacacagggctgc

SEQ ID NO: 750589 - DNA, 33 bp, Homo sapien
tggttccagtgcttcccattttttcgtgttcct

SEQ ID NO: 750590 - DNA, 33 bp, Homo sapien
tggttccagtgcttcctattttttcgtgttcct

SEQ ID NO: 750591 - DNA, 33 bp, Homo sapien
agacgtatttgtcacactaaataaggagaggaa

SEQ ID NO: 750592 - DNA, 33 bp, Homo sapien
agacgtatttgtcacattaaataaggagaggaa

SEQ ID NO: 750593 - DNA, 33 bp, Homo sapien
cgagaggaagcgtttccatcactccacgagctt

SEQ ID NO: 750594 - DNA, 33 bp, Homo sapien
cgagaggaagcgtttctatcactccacgagctt

SEQ ID NO: 750595 - DNA, 33 bp, Homo sapien
ccctaaatccataaacagccttgagccggcaca

SEQ ID NO: 750596 - DNA, 33 bp, Homo sapien
ccctaaatccataaaccgccttgagccggcaca

SEQ ID NO: 750597 - DNA, 33 bp, Homo sapien
aggctgcagaagaccagctcgtgacaggaatgc

SEQ ID NO: 750598 - DNA, 33 bp, Homo sapien
aggctgcagaagaccatctcgtgacaggaatgc

SEQ ID NO: 750599 - DNA, 33 bp, Homo sapien
tgagcgagagctgcgacgggttcaaaggctgca

SEQ ID NO: 750600 - DNA, 33 bp, Homo sapien
tgagcgagagctgcgatgggttcaaaggctgca

SEQ ID NO: 750601 - DNA, 33 bp, Homo sapien
tcaccaaaacatctaacgcaactattttcagac

SEQ ID NO: 750602 - DNA, 33 bp, Homo sapien
tcaccaaaacatctaatgcaactattttcagac

SEQ ID NO: 750603 - DNA, 33 bp, Homo sapien
ggttatcactacaaaccgtaaagtctgaaaata

SEQ ID NO: 750604 - DNA, 33 bp, Homo sapien
ggttatcactacaaactgtaaagtctgaaaata

SEQ ID NO: 750605 - DNA, 33 bp, Homo sapien
ctgttgatttttcataccgaattgcatcaatcc

SEQ ID NO: 750606 - DNA, 33 bp, Homo sapien
ctgttgatttttcatatcgaattgcatcaatcc

SEQ ID NO: 750607 - DNA, 33 bp, Homo sapien
taaaagaccatatttacagatctgagggggaaa

SEQ ID NO: 750608 - DNA, 33 bp, Homo sapien
taaaagaccatatttatagatctgagggggaaa

SEQ ID NO: 750609 - DNA, 33 bp, Homo sapien
taagaaaatactaaaaatgatagtcaatacatt

SEQ ID NO: 750610 - DNA, 33 bp, Homo sapien
taagaaaatactaaaagtgatagtcaatacatt

SEQ ID NO: 750611 - DNA, 33 bp, Homo sapien
ttaataaaacggataacctgctagcaagactca

SEQ ID NO: 750612 - DNA, 33 bp, Homo sapien
ttaataaaacggataatctgctagcaagactca

SEQ ID NO: 750613 - DNA, 33 bp, Homo sapien
cttaaaatgactgtttcaaaagtatgtatgtag

SEQ ID NO: 750614 - DNA, 33 bp, Homo sapien
cttaaaatgactgttttaaaagtatgtatgtag

SEQ ID NO: 750615 - DNA, 33 bp, Homo sapien
attaaaaagtcatgatcaaaggggcttaccaca

SEQ ID NO: 750616 - DNA, 33 bp, Homo sapien
attaaaaagtcatgattaaaggggcttaccaca

SEQ ID NO: 750617 - DNA, 33 bp, Homo sapien
cgcctagagcgatgtcactctgtggtaggagac

SEQ ID NO: 750618 - DNA, 33 bp, Homo sapien
cgcctagagcgatgtccctctgtggtaggagac

SEQ ID NO: 750619 - DNA, 33 bp, Homo sapien
catctgagcgtagacacacagatctgagcttgg

SEQ ID NO: 750620 - DNA, 33 bp, Homo sapien
catctgagcgtagacagacagatctgagcttgg

SEQ ID NO: 750621 - DNA, 33 bp, Homo sapien
taaccagcacactcttaaaaggaaataaagtga

SEQ ID NO: 750622 - DNA, 33 bp, Homo sapien
taaccagcacactctttaaaggaaataaagtga

SEQ ID NO: 750623 - DNA, 33 bp, Homo sapien
taagtgaagtgacaaaacctcgtactaggatac

SEQ ID NO: 750624 - DNA, 33 bp, Homo sapien
taagtgaagtgacaaagcctcgtactaggatac

SEQ ID NO: 750625 - DNA, 33 bp, Homo sapien
tgctatgttccgtaaacacgttctcagagtaac

SEQ ID NO: 750626 - DNA, 33 bp, Homo sapien
tgctatgttccgtaaatacgttctcagagtaac

SEQ ID NO: 750627 - DNA, 33 bp, Homo sapien
aggtgcctgagggtcacgccaattacctggtca

SEQ ID NO: 750628 - DNA, 33 bp, Homo sapien
aggtgcctgagggtcatgccaattacctggtca

SEQ ID NO: 750629 - DNA, 33 bp, Homo sapien
tagaaaagcagtgtgacgtagcaaagatgcacg

SEQ ID NO: 750630 - DNA, 33 bp, Homo sapien
tagaaaagcagtgtgatgtagcaaagatgcacg

SEQ ID NO: 750631 - DNA, 33 bp, Homo sapien
tgacagtcaccagtcaagaggagttcttaaaga

SEQ ID NO: 750632 - DNA, 33 bp, Homo sapien
tgacagtcaccagtcaggaggagttcttaaaga

SEQ ID NO: 750633 - DNA, 33 bp, Homo sapien
tattcgctggttatccagatcagaagggacggt

SEQ ID NO: 750634 - DNA, 33 bp, Homo sapien
tattcgctggttatccggatcagaagggacggt

SEQ ID NO: 750635 - DNA, 33 bp, Homo sapien
ggctgagttctcagacaggtgagggcggcaggt

SEQ ID NO: 750636 - DNA, 33 bp, Homo sapien
ggctgagttctcagaccggtgagggcggcaggt

SEQ ID NO: 750637 - DNA, 33 bp, Homo sapien
ttgggaagtatcctgaaaacattcctgtcctgt

SEQ ID NO: 750638 - DNA, 33 bp, Homo sapien
ttgggaagtatcctgagaacattcctgtcctgt

SEQ ID NO: 750639 - DNA, 33 bp, Homo sapien
ttcctggcgactccacactcacaaattgcctgc

SEQ ID NO: 750640 - DNA, 33 bp, Homo sapien
ttcctggcgactccacgctcacaaattgcctgc

SEQ ID NO: 750641 - DNA, 33 bp, Homo sapien
gttcacagtcttaataactgcatgagaaaatga

SEQ ID NO: 750642 - DNA, 33 bp, Homo sapien
gttcacagtcttaatagctgcatgagaaaatga

SEQ ID NO: 750643 - DNA, 33 bp, Homo sapien
cttgaagggtcaccgcactctcatggatcatgt

SEQ ID NO: 750644 - DNA, 33 bp, Homo sapien
cttgaagggtcaccgcgctctcatggatcatgt

SEQ ID NO: 750645 - DNA, 33 bp, Homo sapien
ctttagtcatcctagcgattcctcactagcgtt

SEQ ID NO: 750646 - DNA, 33 bp, Homo sapien
ctttagtcatcctagctattcctcactagcgtt

SEQ ID NO: 750647 - DNA, 33 bp, Homo sapien
cagctttaaaaagtcacgttgcacttgtttgtt

SEQ ID NO: 750648 - DNA, 33 bp, Homo sapien
cagctttaaaaagtcatgttgcacttgtttgtt

SEQ ID NO: 750649 - DNA, 33 bp, Homo sapien
ccccagatgccaaggacaactggaaaacttgga

SEQ ID NO: 750650 - DNA, 33 bp, Homo sapien
ccccagatgccaaggataactggaaaacttgga

SEQ ID NO: 750651 - DNA, 33 bp, Homo sapien
gtccttaaatcccataagtctgctttggccaaa

SEQ ID NO: 750652 - DNA, 33 bp, Homo sapien
gtccttaaatcccataggtctgctttggccaaa

SEQ ID NO: 750653 - DNA, 33 bp, Homo sapien
aaacgtttgacggatcaaataactgatatgaca

SEQ ID NO: 750654 - DNA, 33 bp, Homo sapien
aaacgtttgacggatcgaataactgatatgaca

SEQ ID NO: 750655 - DNA, 33 bp, Homo sapien
actgttagaggaagaaatgttttgaatgaccct

SEQ ID NO: 750656 - DNA, 33 bp, Homo sapien
actgttagaggaagaagtgttttgaatgaccct

SEQ ID NO: 750657 - DNA, 33 bp, Homo sapien
gtgtcagtttctactccatatccaacaccaaga

SEQ ID NO: 750658 - DNA, 33 bp, Homo sapien
gtgtcagtttctactctatatccaacaccaaga

SEQ ID NO: 750659 - DNA, 33 bp, Homo sapien
taaccctctgcttacacctgtatacggtacact

SEQ ID NO: 750660 - DNA, 33 bp, Homo sapien
taaccctctgcttacatctgtatacggtacact

SEQ ID NO: 750661 - DNA, 33 bp, Homo sapien
cacatcaccatcaagacaccgcaggccagtcct

SEQ ID NO: 750662 - DNA, 33 bp, Homo sapien
cacatcaccatcaagataccgcaggccagtcct

SEQ ID NO: 750663 - DNA, 33 bp, Homo sapien
aactaacgatcaaaacaatttttctctgacctt

SEQ ID NO: 750664 - DNA, 33 bp, Homo sapien
aactaacgatcaaaacgatttttctctgacctt

SEQ ID NO: 750665 - DNA, 33 bp, Homo sapien
aaacagactaagacacacgtaagtacctgggtg

SEQ ID NO: 750666 - DNA, 33 bp, Homo sapien
aaacagactaagacacgcgtaagtacctgggtg

SEQ ID NO: 750667 - DNA, 33 bp, Homo sapien
tgcacgtcggtcatcacggggtgaacacgcgaa

SEQ ID NO: 750668 - DNA, 33 bp, Homo sapien
tgcacgtcggtcatcatggggtgaacacgcgaa

SEQ ID NO: 750669 - DNA, 33 bp, Homo sapien
aaagtgaccaaatacaagatcaacttaccagcg

SEQ ID NO: 750670 - DNA, 33 bp, Homo sapien
aaagtgaccaaatacacgatcaacttaccagcg

SEQ ID NO: 750671 - DNA, 33 bp, Homo sapien
ggatcttggttaccagaaaaagaatatagctgg

SEQ ID NO: 750672 - DNA, 33 bp, Homo sapien
ggatcttggttaccagtaaaagaatatagctgg

SEQ ID NO: 750673 - DNA, 33 bp, Homo sapien
tttggaaaactgtttcactgggctagtatctca

SEQ ID NO: 750674 - DNA, 33 bp, Homo sapien
tttggaaaactgtttcgctgggctagtatctca

SEQ ID NO: 750675 - DNA, 33 bp, Homo sapien
gacacctcgggatcacacactccccagggtctg

SEQ ID NO: 750676 - DNA, 33 bp, Homo sapien
gacacctcgggatcacgcactccccagggtctg

SEQ ID NO: 750677 - DNA, 33 bp, Homo sapien; identical to SEQ ID NO: 750675

SEQ ID NO: 750678 - DNA, 33 bp, Homo sapien; identical to SEQ ID NO: 750676

SEQ ID NO: 750679 - DNA, 33 bp, Homo sapien
aggtgtgctgtgcccaaaaactgggaaagtgga

SEQ ID NO: 750680 - DNA, 33 bp, Homo sapien
aggtgtgctgtgcccagaaactgggaaagtgga

SEQ ID NO: 750681 - DNA, 33 bp, Homo sapien
aggacgccatgtgagacgaccaggatagaagtg

SEQ ID NO: 750682 - DNA, 33 bp, Homo sapien
aggacgccatgtgagatgaccaggatagaagtg

SEQ ID NO: 750683 - DNA, 33 bp, Homo sapien
aaagcctcatatgacaaatccacagccaacatc

SEQ ID NO: 750684 - DNA, 33 bp, Homo sapien
aaagcctcatatgacagatccacagccaacatc

SEQ ID NO: 750685 - DNA, 33 bp, Homo sapien
tcaatattgttaaaaactatcatactgttcaaa

SEQ ID NO: 750686 - DNA, 33 bp, Homo sapien
tcaatattgttaaaaattatcatactgttcaaa

SEQ ID NO: 750687 - DNA, 33 bp, Homo sapien
caaagcaaaattttgcacgtttctggtctctaa

SEQ ID NO: 750688 - DNA, 33 bp, Homo sapien
caaagcaaaattttgcgcgtttctggtctctaa

SEQ ID NO: 750689 - DNA, 33 bp, Homo sapien
gtggttccctggtggcaaatgatgttgagcacc

SEQ ID NO: 750690 - DNA, 33 bp, Homo sapien
gtggttccctggtggcgaatgatgttgagcacc

SEQ ID NO: 750691 - DNA, 33 bp, Homo sapien
ctgttttagcagaaatgacaaggtggtcctaaa

SEQ ID NO: 750692 - DNA, 33 bp, Homo sapien
ctgttttagcagaaattacaaggtggtcctaaa

SEQ ID NO: 750693 - DNA, 33 bp, Homo sapien
ggccggaatgtgactgaaatgtcagaagtagga

SEQ ID NO: 750694 - DNA, 33 bp, Homo sapien
ggccggaatgtgactgcaatgtcagaagtagga

SEQ ID NO: 750695 - DNA, 33 bp, Homo sapien
caagtagctgggatcgcagatgtatgccactac

SEQ ID NO: 750696 - DNA, 33 bp, Homo sapien
caagtagctgggatcgtagatgtatgccactac

SEQ ID NO: 750697 - DNA, 33 bp, Homo sapien
cccaggcctggagaaaaggagcagagagacagg

SEQ ID NO: 750698 - DNA, 33 bp, Homo sapien
cccaggcctggagaaatggagcagagagacagg

SEQ ID NO: 750699 - DNA, 33 bp, Homo sapien
aagcctggcactcaaacgtccgcctaacctggg

SEQ ID NO: 750700 - DNA, 33 bp, Homo sapien
aagcctggcactcaaatgtccgcctaacctggg

SEQ ID NO: 750701 - DNA, 33 bp, Homo sapien
tacacccctagcgtaactgtgattcagatgagg

SEQ ID NO: 750702 - DNA, 33 bp, Homo sapien
tacacccctagcgtaagtgtgattcagatgagg

SEQ ID NO: 750703 - DNA, 33 bp, Homo sapien
acctgcgtcttgtttggaggtggctgtctgggg

SEQ ID NO: 750704 - DNA, 33 bp, Homo sapien
acctgcgtcttgtttgtaggtggctgtctgggg

SEQ ID NO: 750705 - DNA, 33 bp, Homo sapien
agagccgagtggcaacagaaaatggctctccag

SEQ ID NO: 750706 - DNA, 33 bp, Homo sapien
agagccgagtggcaacggaaaatggctctccag

SEQ ID NO: 750707 - DNA, 33 bp, Homo sapien
acggaggaccagagaggatggcgtcgcagagca

SEQ ID NO: 750708 - DNA, 33 bp, Homo sapien
acggaggaccagagagtatggcgtcgcagagca

SEQ ID NO: 750709 - DNA, 33 bp, Homo sapien
aacagaatagaggactcagaaataaagacacaa

SEQ ID NO: 750710 - DNA, 33 bp, Homo sapien
aacagaatagaggactgagaaataaagacacaa

SEQ ID NO: 750711 - DNA, 33 bp, Homo sapien
agtgcacaaaatgtgtaaacaagagtacatttt

SEQ ID NO: 750712 - DNA, 33 bp, Homo sapien
agtgcacaaaatgtgtgaacaagagtacatttt

SEQ ID NO: 750713 - DNA, 33 bp, Homo sapien
ccttggtggttcctgcagcaaaagtccacagta

SEQ ID NO: 750714 - DNA, 33 bp, Homo sapien
ccttggtggttcctgcggcaaaagtccacagta

SEQ ID NO: 750715 - DNA, 33 bp, Homo sapien
atccaggcaaccttgaagtaccattactcagaa

SEQ ID NO: 750716 - DNA, 33 bp, Homo sapien
atccaggcaaccttgatgtaccattactcagaa

SEQ ID NO: 750717 - DNA, 33 bp, Homo sapien
ttccatctgaaaatgcacgtgacttcactgaca

SEQ ID NO: 750718 - DNA, 33 bp, Homo sapien
ttccatctgaaaatgcgcgtgacttcactgaca

SEQ ID NO: 750719 - DNA, 33 bp, Homo sapien
ggatgattggaaaaagaaatacatccaaattag

SEQ ID NO: 750720 - DNA, 33 bp, Homo sapien
ggatgattggaaaaagtaatacatccaaattag

SEQ ID NO: 750721 - DNA, 33 bp, Homo sapien
ataaacacagcttccaatcacaagacacagagc

SEQ ID NO: 750722 - DNA, 33 bp, Homo sapien
ataaacacagcttccagtcacaagacacagagc

SEQ ID NO: 750723 - DNA, 33 bp, Homo sapien
tggagatatccacagaaacgtcgggataggact

SEQ ID NO: 750724 - DNA, 33 bp, Homo sapien
tggagatatccacagagacgtcgggataggact

SEQ ID NO: 750725 - DNA, 33 bp, Homo sapien
cgccctgcaaatacacacgtcctttctatgaca

SEQ ID NO: 750726 - DNA, 33 bp, Homo sapien
cgccctgcaaatacacgcgtcctttctatgaca

SEQ ID NO: 750727 - DNA, 33 bp, Homo sapien
cagcagagaccacgctaaaaagacagggctccc

SEQ ID NO: 750728 - DNA, 33 bp, Homo sapien
cagcagagaccacgctgaaaagacagggctccc

SEQ ID NO: 750729 - DNA, 33 bp, Homo sapien
tgcaagccacgtgaaccacaacctcccaacaca

SEQ ID NO: 750730 - DNA, 33 bp, Homo sapien
tgcaagccacgtgaacgacaacctcccaacaca

SEQ ID NO: 750731 - DNA, 33 bp, Homo sapien
ttttcaacgcagtgcaaactcagttaaagtgct

SEQ ID NO: 750732 - DNA, 33 bp, Homo sapien
ttttcaacgcagtgcacactcagttaaagtgct

SEQ ID NO: 750733 - DNA, 33 bp, Homo sapien
ctaatttgtatggttgcagttaagtgagagttg

SEQ ID NO: 750734 - DNA, 33 bp, Homo sapien
ctaatttgtatggttggagttaagtgagagttg

SEQ ID NO: 750735 - DNA, 33 bp, Homo sapien
agtggctctccttgctcaagcttgcgatggcct

SEQ ID NO: 750736 - DNA, 33 bp, Homo sapien
agtggctctccttgctgaagcttgcgatggcct

SEQ ID NO: 750737 - DNA, 33 bp, Homo sapien
ccatttcatttacaccacttctgaaaccacact

SEQ ID NO: 750738 - DNA, 33 bp, Homo sapien
ccatttcatttacaccgcttctgaaaccacact

SEQ ID NO: 750739 - DNA, 33 bp, Homo sapien
ctgaactctgcttctaccttgaacctctgtgat

SEQ ID NO: 750740 - DNA, 33 bp, Homo sapien
ctgaactctgcttctatcttgaacctctgtgat

SEQ ID NO: 750741 - DNA, 33 bp, Homo sapien
atgacaggggaaatcagtgagaccacactttta

SEQ ID NO: 750742 - DNA, 33 bp, Homo sapien
atgacaggggaaatcattgagaccacactttta

SEQ ID NO: 750743 - DNA, 33 bp, Homo sapien
caggcactgaaatgtacgttggcgactttttaa

SEQ ID NO: 750744 - DNA, 33 bp, Homo sapien
caggcactgaaatgtatgttggcgactttttaa

SEQ ID NO: 750745 - DNA, 33 bp, Homo sapien
gctttcctgtctcaccacagtgggggaccctat

SEQ ID NO: 750746 - DNA, 33 bp, Homo sapien
gctttcctgtctcaccgcagtgggggaccctat

SEQ ID NO: 750747 - DNA, 33 bp, Homo sapien
tctccaacagatgggcaatttcaagttgctctg

SEQ ID NO: 750748 - DNA, 33 bp, Homo sapien
tctccaacagatgggcgatttcaagttgctctg

SEQ ID NO: 750749 - DNA, 33 bp, Homo sapien
ccgtgctcaacttcaacgattgcgggagcaacg

SEQ ID NO: 750750 - DNA, 33 bp, Homo sapien
ccgtgctcaacttcaatgattgcgggagcaacg

SEQ ID NO: 750751 - DNA, 33 bp, Homo sapien
ttctagctggtgtagacgctgcacacaggatgc

SEQ ID NO: 750752 - DNA, 33 bp, Homo sapien
ttctagctggtgtagaggctgcacacaggatgc

SEQ ID NO: 750753 - DNA, 33 bp, Homo sapien
gacgggttggataccacgtatgtagtttctgtg

SEQ ID NO: 750754 - DNA, 33 bp, Homo sapien
gacgggttggataccatgtatgtagtttctgtg

SEQ ID NO: 750755 - DNA, 33 bp, Homo sapien
gtcgatgtccttaccaaagagaaacagcggaaa

SEQ ID NO: 750756 - DNA, 33 bp, Homo sapien
gtcgatgtccttaccagagagaaacagcggaaa

SEQ ID NO: 750757 - DNA, 33 bp, Homo sapien
gaggccccacggacgccatccaggctcacgccc

SEQ ID NO: 750758 - DNA, 33 bp, Homo sapien
gaggccccacggacgctatccaggctcacgccc

SEQ ID NO: 750759 - DNA, 33 bp, Homo sapien
gtgttaattaaagccgaagaacgacgtagaccc

SEQ ID NO: 750760 - DNA, 33 bp, Homo sapien
gtgttaattaaagccgcagaacgacgtagaccc

SEQ ID NO: 750761 - DNA, 33 bp, Homo sapien
ataacgttattcatacaactattagcaccaata

SEQ ID NO: 750762 - DNA, 33 bp, Homo sapien
ataacgttattcatacgactattagcaccaata

SEQ ID NO: 750763 - DNA, 33 bp, Homo sapien
gcgaggcttcagctaacgcaggagccgacaggc

SEQ ID NO: 750764 - DNA, 33 bp, Homo sapien
gcgaggcttcagctaatgcaggagccgacaggc

SEQ ID NO: 750765 - DNA, 33 bp, Homo sapien
gaaaaacaattcagagacagcttagaaggaact

SEQ ID NO: 750766 - DNA, 33 bp, Homo sapien
gaaaaacaattcagagtcagcttagaaggaact

SEQ ID NO: 750767 - DNA, 33 bp, Homo sapien
gggtggcctttgtaaagcacagaaagcgaccca

SEQ ID NO: 750768 - DNA, 33 bp, Homo sapien
gggtggcctttgtaaatcacagaaagcgaccca

SEQ ID NO: 750769 - DNA, 33 bp, Homo sapien
tatacacagtgcaagcacatggctcacacgtgg

SEQ ID NO: 750770 - DNA, 33 bp, Homo sapien
tatacacagtgcaagcgcatggctcacacgtgg

SEQ ID NO: 750771 - DNA, 33 bp, Homo sapien
tcgtgatgcaagccaaatatttaaggtttcaat

SEQ ID NO: 750772 - DNA, 33 bp, Homo sapien
tcgtgatgcaagccaagtatttaaggtttcaat

SEQ ID NO: 750773 - DNA, 33 bp, Homo sapien
ccctgtgtgtccctgccaatacaggcgctgagc

SEQ ID NO: 750774 - DNA, 33 bp, Homo sapien
ccctgtgtgtccctgcgaatacaggcgctgagc

SEQ ID NO: 750775 - DNA, 33 bp, Homo sapien
ggtactgggtattggacggcttcctgaccacaa

SEQ ID NO: 750776 - DNA, 33 bp, Homo sapien
ggtactgggtattggatggcttcctgaccacaa

SEQ ID NO: 750777 - DNA, 33 bp, Homo sapien
taaaccctgaatgggacgtttgtctttccagga

SEQ ID NO: 750778 - DNA, 33 bp, Homo sapien
taaaccctgaatgggatgtttgtctttccagga

SEQ ID NO: 750779 - DNA, 33 bp, Homo sapien
tggcatttcccaagaccggagcttcccgacatc

SEQ ID NO: 750780 - DNA, 33 bp, Homo sapien
tggcatttcccaagactggagcttcccgacatc

SEQ ID NO: 750781 - DNA, 33 bp, Homo sapien
tgagagtagtatctcaatcacagctcattgtgg

SEQ ID NO: 750782 - DNA, 33 bp, Homo sapien
tgagagtagtatctcagtcacagctcattgtgg

SEQ ID NO: 750783 - DNA, 33 bp, Homo sapien
gtattgagcactttacaatatgtattcacagat

SEQ ID NO: 750784 - DNA, 33 bp, Homo sapien
gtattgagcactttactatatgtattcacagat

SEQ ID NO: 750785 - DNA, 33 bp, Homo sapien
aacctggattcttacaacctttctctcctgcgg

SEQ ID NO: 750786 - DNA, 33 bp, Homo sapien
aacctggattcttacatcctttctctcctgcgg

SEQ ID NO: 750787 - DNA, 33 bp, Homo sapien
gcttcactgttttctccatttagcaagataaac

SEQ ID NO: 750788 - DNA, 33 bp, Homo sapien
gcttcactgttttctctatttagcaagataaac

SEQ ID NO: 750789 - DNA, 33 bp, Homo sapien
ctctgggttatttccgcaaagatccacgtttgg

SEQ ID NO: 750790 - DNA, 33 bp, Homo sapien
ctctgggttatttccgtaaagatccacgtttgg

SEQ ID NO: 750791 - DNA, 33 bp, Homo sapien
tttactgctaggttatcaggagagccagtgctt

SEQ ID NO: 750792 - DNA, 33 bp, Homo sapien
tttactgctaggttattaggagagccagtgctt

SEQ ID NO: 750793 - DNA, 33 bp, Homo sapien
gacagttgcaggatgacgtgagttccctgaaag

SEQ ID NO: 750794 - DNA, 33 bp, Homo sapien
gacagttgcaggatgatgtgagttccctgaaag

SEQ ID NO: 750795 - DNA, 33 bp, Homo sapien
actcttagtaaactgacaacagaaggaggagcc

SEQ ID NO: 750796 - DNA, 33 bp, Homo sapien
actcttagtaaactgagaacagaaggaggagcc

SEQ ID NO: 750797 - DNA, 33 bp, Homo sapien
tacaaaaagtaattgcactgttattgtcaaacc

SEQ ID NO: 750798 - DNA, 33 bp, Homo sapien
tacaaaaagtaattgcgctgttattgtcaaacc

SEQ ID NO: 750799 - DNA, 33 bp, Homo sapien
taaaatgtatgttgctaagaaaaacaaagtgga

SEQ ID NO: 750800 - DNA, 33 bp, Homo sapien
taaaatgtatgttgctgagaaaaacaaagtgga

SEQ ID NO: 750801 - DNA, 33 bp, Homo sapien
gcaaacactctgaggccgccagacttgcacagg

SEQ ID NO: 750802 - DNA, 33 bp, Homo sapien
gcaaacactctgaggctgccagacttgcacagg

SEQ ID NO: 750803 - DNA, 33 bp, Homo sapien
gcactgtccagttctaaaaggttccaatcagca

SEQ ID NO: 750804 - DNA, 33 bp, Homo sapien
gcactgtccagttctagaaggttccaatcagca

SEQ ID NO: 750805 - DNA, 33 bp, Homo sapien
ttgggttccgcgccacacagcgctacgacgact

SEQ ID NO: 750806 - DNA, 33 bp, Homo sapien
ttgggttccgcgccacgcagcgctacgacgact

SEQ ID NO: 750807 - DNA, 33 bp, Homo sapien
ttcgggtagcagaacgcacagaaagcttagcga

SEQ ID NO: 750808 - DNA, 33 bp, Homo sapien
ttcgggtagcagaacgtacagaaagcttagcga

SEQ ID NO: 750809 - DNA, 33 bp, Homo sapien
tcaggttgaatgggccaccctgcccgacacaca

SEQ ID NO: 750810 - DNA, 33 bp, Homo sapien
tcaggttgaatgggccgccctgcccgacacaca

SEQ ID NO: 750811 - DNA, 33 bp, Homo sapien
cccattatcactgtgaagcaaccttttttattc

SEQ ID NO: 750812 - DNA, 33 bp, Homo sapien
cccattatcactgtgaggcaaccttttttattc

SEQ ID NO: 750813 - DNA, 33 bp, Homo sapien
tatggttgggtttagcgctgtcctcagatgtgt

SEQ ID NO: 750814 - DNA, 33 bp, Homo sapien
tatggttgggtttagctctgtcctcagatgtgt

SEQ ID NO: 750815 - DNA, 33 bp, Homo sapien
tctaggtatttttcagaatcccgctctatctcc

SEQ ID NO: 750816 - DNA, 33 bp, Homo sapien
tctaggtatttttcaggatcccgctctatctcc

SEQ ID NO: 750817 - DNA, 33 bp, Homo sapien
ctttctgctgctcccaatggaaaccacatggtt

SEQ ID NO: 750818 - DNA, 33 bp, Homo sapien
ctttctgctgctcccagtggaaaccacatggtt

SEQ ID NO: 750819 - DNA, 33 bp, Homo sapien
gagaatacagggtaagaactcttcttgcttgag

SEQ ID NO: 750820 - DNA, 33 bp, Homo sapien
gagaatacagggtaaggactcttcttgcttgag

SEQ ID NO: 750821 - DNA, 33 bp, Homo sapien
gtcctgtcgttgacccagacgagaaaaacaggc

SEQ ID NO: 750822 - DNA, 33 bp, Homo sapien
gtcctgtcgttgacccggacgagaaaaacaggc

SEQ ID NO: 750823 - DNA, 33 bp, Homo sapien
gccatttctctcgaagactccgggtttttcctg

SEQ ID NO: 750824 - DNA, 33 bp, Homo sapien
gccatttctctcgaagtctccgggtttttcctg

SEQ ID NO: 750825 - DNA, 33 bp, Homo sapien
agaacctcatacacacaaacgacacgtctacca

SEQ ID NO: 750826 - DNA, 33 bp, Homo sapien
agaacctcatacacaccaacgacacgtctacca

SEQ ID NO: 750827 - DNA, 33 bp, Homo sapien
accttaatgaaagaaaaccttgatgattcagag

SEQ ID NO: 750828 - DNA, 33 bp, Homo sapien
accttaatgaaagaaagccttgatgattcagag

SEQ ID NO: 750829 - DNA, 33 bp, Homo sapien
cctgttgctaagagacacttgcagcctactgca

SEQ ID NO: 750830 - DNA, 33 bp, Homo sapien
cctgttgctaagagacgcttgcagcctactgca

SEQ ID NO: 750831 - DNA, 33 bp, Homo sapien
tgacaagccatgacaaaactcagtacaaacacc

SEQ ID NO: 750832 - DNA, 33 bp, Homo sapien
tgacaagccatgacaacactcagtacaaacacc

SEQ ID NO: 750833 - DNA, 33 bp, Homo sapien
cctttggatttctgcactcctgaatgttatttg

SEQ ID NO: 750834 - DNA, 33 bp, Homo sapien
cctttggatttctgcagtcctgaatgttatttg

SEQ ID NO: 750835 - DNA, 33 bp, Homo sapien
agacaacttcagagtccatcatggtgtgaagca

SEQ ID NO: 750836 - DNA, 33 bp, Homo sapien
agacaacttcagagtctatcatggtgtgaagca

SEQ ID NO: 750837 - DNA, 33 bp, Homo sapien
tctgcagatgagtcaccgcgggcctctgtcagg

SEQ ID NO: 750838 - DNA, 33 bp, Homo sapien
tctgcagatgagtcactgcgggcctctgtcagg

SEQ ID NO: 750839 - DNA, 33 bp, Homo sapien
ccatcttactctttgcacagggggcaaaatcac

SEQ ID NO: 750840 - DNA, 33 bp, Homo sapien
ccatcttactctttgcgcagggggcaaaatcac

SEQ ID NO: 750841 - DNA, 33 bp, Homo sapien
ctctcctcttgcaaggacacagctcttacagga

SEQ ID NO: 750842 - DNA, 33 bp, Homo sapien
ctctcctcttgcaaggtcacagctcttacagga

SEQ ID NO: 750843 - DNA, 33 bp, Homo sapien
aatggggacatcctaccgcctatcgactgccca

SEQ ID NO: 750844 - DNA, 33 bp, Homo sapien
aatggggacatcctactgcctatcgactgccca

SEQ ID NO: 750845 - DNA, 33 bp, Homo sapien
ctctgacggattacacactacatcttgagaaaa

SEQ ID NO: 750846 - DNA, 33 bp, Homo sapien
ctctgacggattacacgctacatcttgagaaaa

SEQ ID NO: 750847 - DNA, 33 bp, Homo sapien
agaatagggaatgaaaactcgctttttttgtgg

SEQ ID NO: 750848 - DNA, 33 bp, Homo sapien
agaatagggaatgaaagctcgctttttttgtgg

SEQ ID NO: 750849 - DNA, 33 bp, Homo sapien
gggtggtggtgaattacatggctcagtgtgaaa

SEQ ID NO: 750850 - DNA, 33 bp, Homo sapien
gggtggtggtgaattatatggctcagtgtgaaa

SEQ ID NO: 750851 - DNA, 33 bp, Homo sapien
tctcagggcctttaataacatctcatcattact

SEQ ID NO: 750852 - DNA, 33 bp, Homo sapien
tctcagggcctttaatgacatctcatcattact

SEQ ID NO: 750853 - DNA, 33 bp, Homo sapien
gttcctagcaaagctcaagtcctgtagattgca

SEQ ID NO: 750854 - DNA, 33 bp, Homo sapien
gttcctagcaaagctcgagtcctgtagattgca

SEQ ID NO: 750855 - DNA, 33 bp, Homo sapien
tacaccctcggaagccaaaaccacaaagcagga

SEQ ID NO: 750856 - DNA, 33 bp, Homo sapien
tacaccctcggaagccgaaaccacaaagcagga

SEQ ID NO: 750857 - DNA, 33 bp, Homo sapien
aaaggaagaaggtgaactctaaagtggagacgt

SEQ ID NO: 750858 - DNA, 33 bp, Homo sapien
aaaggaagaaggtgaattctaaagtggagacgt

SEQ ID NO: 750859 - DNA, 33 bp, Homo sapien
gatcagactgtcacccagcattaactaaacctt

SEQ ID NO: 750860 - DNA, 33 bp, Homo sapien
gatcagactgtcacccggcattaactaaacctt

SEQ ID NO: 750861 - DNA, 33 bp, Homo sapien
tgagtttctaaaggagaagctaaaaataaagac

SEQ ID NO: 750862 - DNA, 33 bp, Homo sapien
tgagtttctaaaggaggagctaaaaataaagac

SEQ ID NO: 750863 - DNA, 33 bp, Homo sapien
aatgattgatttgtagaagtttgagtgaggcat

SEQ ID NO: 750864 - DNA, 33 bp, Homo sapien
aatgattgatttgtaggagtttgagtgaggcat

SEQ ID NO: 750865 - DNA, 33 bp, Homo sapien
tggtatggatcacagccaccatgccatacgtgg

SEQ ID NO: 750866 - DNA, 33 bp, Homo sapien
tggtatggatcacagctaccatgccatacgtgg

SEQ ID NO: 750867 - DNA, 33 bp, Homo sapien
ttatggcttatgaaacacctgcacgtaggcctg

SEQ ID NO: 750868 - DNA, 33 bp, Homo sapien
ttatggcttatgaaacgcctgcacgtaggcctg

SEQ ID NO: 750869 - DNA, 33 bp, Homo sapien
ccacacaaacagtaatcatacgaaagttggggt

SEQ ID NO: 750870 - DNA, 33 bp, Homo sapien
ccacacaaacagtaatgatacgaaagttggggt

SEQ ID NO: 750871 - DNA, 33 bp, Homo sapien
gacaaatctacagttacagttgagatttcagta

SEQ ID NO: 750872 - DNA, 33 bp, Homo sapien
gacaaatctacagttatagttgagatttcagta

SEQ ID NO: 750873 - DNA, 33 bp, Homo sapien
cacagtgacctaacataacctctctgacattta

SEQ ID NO: 750874 - DNA, 33 bp, Homo sapien
cacagtgacctaacatgacctctctgacattta

SEQ ID NO: 750875 - DNA, 33 bp, Homo sapien
gctgtctttggttggaaagttgcataaatgtca

SEQ ID NO: 750876 - DNA, 33 bp, Homo sapien
gctgtctttggttggagagttgcataaatgtca

SEQ ID NO: 750877 - DNA, 33 bp, Homo sapien
cctgggtaaccctagacgacctttgatggccct

SEQ ID NO: 750878 - DNA, 33 bp, Homo sapien
cctgggtaaccctagatgacctttgatggccct

SEQ ID NO: 750879 - DNA, 33 bp, Homo sapien
agaaggttctgtagccaacagggtagtgggttt

SEQ ID NO: 750880 - DNA, 33 bp, Homo sapien
agaaggttctgtagccgacagggtagtgggttt

SEQ ID NO: 750881 - DNA, 33 bp, Homo sapien
tcttagaagattgtaaaattgctctctggaagt

SEQ ID NO: 750882 - DNA, 33 bp, Homo sapien
tcttagaagattgtaagattgctctctggaagt

SEQ ID NO: 750883 - DNA, 33 bp, Homo sapien
gagggctccaccctgaggaatgggaccagtgcc

SEQ ID NO: 750884 - DNA, 33 bp, Homo sapien
gagggctccaccctgatgaatgggaccagtgcc

SEQ ID NO: 750885 - DNA, 33 bp, Homo sapien
cactgagtgatcacacacatgtaacctgcactc

SEQ ID NO: 750886 - DNA, 33 bp, Homo sapien
cactgagtgatcacacgcatgtaacctgcactc

SEQ ID NO: 750887 - DNA, 33 bp, Homo sapien
gcaaccacaatgataacaaagccgacttggcat

SEQ ID NO: 750888 - DNA, 33 bp, Homo sapien
gcaaccacaatgataataaagccgacttggcat

SEQ ID NO: 750889 - DNA, 33 bp, Homo sapien
tccgagacttgtgcaccgaaaacctagaatcca

SEQ ID NO: 750890 - DNA, 33 bp, Homo sapien
tccgagacttgtgcactgaaaacctagaatcca

SEQ ID NO: 750891 - DNA, 33 bp, Homo sapien
gatgagtgtggatcaacaacaaagagctgaccc

SEQ ID NO: 750892 - DNA, 33 bp, Homo sapien
gatgagtgtggatcaataacaaagagctgaccc

SEQ ID NO: 750893 - DNA, 33 bp, Homo sapien
agagtgtaacaggtgaactcggtcttttacctc

SEQ ID NO: 750894 - DNA, 33 bp, Homo sapien
agagtgtaacaggtgagctcggtcttttacctc

SEQ ID NO: 750895 - DNA, 33 bp, Homo sapien
gttccaaaccttttacagactcagtaggactaa

SEQ ID NO: 750896 - DNA, 33 bp, Homo sapien
gttccaaaccttttactgactcagtaggactaa

SEQ ID NO: 750897 - DNA, 33 bp, Homo sapien
aaatgttgaggtcatccagttcatcctgcctgg

SEQ ID NO: 750898 - DNA, 33 bp, Homo sapien
aaatgttgaggtcatcgagttcatcctgcctgg

SEQ ID NO: 750899 - DNA, 33 bp, Homo sapien
actggtgaagaaagcacggcttaggagctgccc

SEQ ID NO: 750900 - DNA, 33 bp, Homo sapien
actggtgaagaaagcatggcttaggagctgccc

SEQ ID NO: 750901 - DNA, 33 bp, Homo sapien
gagaacccacttggtgaaatgtccttccaagat

SEQ ID NO: 750902 - DNA, 33 bp, Homo sapien
gagaacccacttggtggaatgtccttccaagat

SEQ ID NO: 750903 - DNA, 33 bp, Homo sapien
cagtcatgcatcttccaaacgtcaaagagggtg

SEQ ID NO: 750904 - DNA, 33 bp, Homo sapien
cagtcatgcatcttcccaacgtcaaagagggtg

SEQ ID NO: 750905 - DNA, 33 bp, Homo sapien
ctcacagaggggcttacgcccatttctgacagc

SEQ ID NO: 750906 - DNA, 33 bp, Homo sapien
ctcacagaggggcttatgcccatttctgacagc

SEQ ID NO: 750907 - DNA, 33 bp, Homo sapien
gggcatcctggtgtaacctcgtgtctgcatcaa

SEQ ID NO: 750908 - DNA, 33 bp, Homo sapien
gggcatcctggtgtaagctcgtgtctgcatcaa

SEQ ID NO: 750909 - DNA, 33 bp, Homo sapien
ttgacacgcagcagacagccacggtgtgtgaga

SEQ ID NO: 750910 - DNA, 33 bp, Homo sapien
ttgacacgcagcagacggccacggtgtgtgaga

SEQ ID NO: 750911 - DNA, 33 bp, Homo sapien
acttaacccagtggccaagtgagccgtggcttc

SEQ ID NO: 750912 - DNA, 33 bp, Homo sapien
acttaacccagtggccgagtgagccgtggcttc

SEQ ID NO: 750913 - DNA, 33 bp, Homo sapien
aatctgctacttcaaaatcagtttcctcctgat

SEQ ID NO: 750914 - DNA, 33 bp, Homo sapien
aatctgctacttcaaattcagtttcctcctgat

SEQ ID NO: 750915 - DNA, 33 bp, Homo sapien
catctcatgcacgtgtaaagtgtcccgtgacag

SEQ ID NO: 750916 - DNA, 33 bp, Homo sapien
catctcatgcacgtgtgaagtgtcccgtgacag

SEQ ID NO: 750917 - DNA, 33 bp, Homo sapien
tggctgtagagcctaaagcattcactgcctggc

SEQ ID NO: 750918 - DNA, 33 bp, Homo sapien
tggctgtagagcctaatgcattcactgcctggc

SEQ ID NO: 750919 - DNA, 33 bp, Homo sapien
tatgtggacatgagaaagcatacgccaccctag

SEQ ID NO: 750920 - DNA, 33 bp, Homo sapien
tatgtggacatgagaatgcatacgccaccctag

SEQ ID NO: 750921 - DNA, 33 bp, Homo sapien
tttgtctgaagtctgacgctgagttacttcaac

SEQ ID NO: 750922 - DNA, 33 bp, Homo sapien
tttgtctgaagtctgaggctgagttacttcaac

SEQ ID NO: 750923 - DNA, 33 bp, Homo sapien
ggtctcttcttgctggaatatggggcttcagtg

SEQ ID NO: 750924 - DNA, 33 bp, Homo sapien
ggtctcttcttgctgggatatggggcttcagtg

SEQ ID NO: 750925 - DNA, 33 bp, Homo sapien
tggcacagatgcgtgccgacaatataagataaa

SEQ ID NO: 750926 - DNA, 33 bp, Homo sapien
tggcacagatgcgtgctgacaatataagataaa

SEQ ID NO: 750927 - DNA, 33 bp, Homo sapien
caactctggttccgagcagcagagactttagaa

SEQ ID NO: 750928 - DNA, 33 bp, Homo sapien
caactctggttccgaggagcagagactttagaa

SEQ ID NO: 750929 - DNA, 33 bp, Homo sapien
ttccaaataaggtcgcagccacaggtgctgtgg

SEQ ID NO: 750930 - DNA, 33 bp, Homo sapien
ttccaaataaggtcgcggccacaggtgctgtgg

SEQ ID NO: 750931 - DNA, 33 bp, Homo sapien
aagctttagtaatcaggatagtgtgatgttggc

SEQ ID NO: 750932 - DNA, 33 bp, Homo sapien
aagctttagtaatcagtatagtgtgatgttggc

SEQ ID NO: 750933 - DNA, 33 bp, Homo sapien
cttgcttgagcaaaccaggaagtcatcttgagt

SEQ ID NO: 750934 - DNA, 33 bp, Homo sapien
cttgcttgagcaaaccgggaagtcatcttgagt

SEQ ID NO: 750935 - DNA, 33 bp, Homo sapien
acaaatcaatctgtaacaggcaagaagatctac

SEQ ID NO: 750936 - DNA, 33 bp, Homo sapien
acaaatcaatctgtaataggcaagaagatctac

SEQ ID NO: 750937 - DNA, 33 bp, Homo sapien
ggaggggcagataaacagcgcgatcggaggggt

SEQ ID NO: 750938 - DNA, 33 bp, Homo sapien
ggaggggcagataaacggcgcgatcggaggggt

SEQ ID NO: 750939 - DNA, 33 bp, Homo sapien
aggggctggttcttctaaagcaggagcagctga

SEQ ID NO: 750940 - DNA, 33 bp, Homo sapien
aggggctggttcttctgaagcaggagcagctga

SEQ ID NO: 750941 - DNA, 33 bp, Homo sapien
gccgccactgtgcagcgctttctgctggacgtg

SEQ ID NO: 750942 - DNA, 33 bp, Homo sapien
gccgccactgtgcagctctttctgctggacgtg

SEQ ID NO: 750943 - DNA, 33 bp, Homo sapien
gtgacatagaagggccaacttcttgaaatgctg

SEQ ID NO: 750944 - DNA, 33 bp, Homo sapien
gtgacatagaagggccgacttcttgaaatgctg

SEQ ID NO: 750945 - DNA, 33 bp, Homo sapien
tgtgcattgctacatccaagaacaagccacttt

SEQ ID NO: 750946 - DNA, 33 bp, Homo sapien
tgtgcattgctacatctaagaacaagccacttt

SEQ ID NO: 750947 - DNA, 33 bp, Homo sapien
cttgctcgatttgtcacgaccctttcacgtgga

SEQ ID NO: 750948 - DNA, 33 bp, Homo sapien
cttgctcgatttgtcatgaccctttcacgtgga

SEQ ID NO: 750949 - DNA, 33 bp, Homo sapien
agccggtgactatgcaagacatccgattgtgca

SEQ ID NO: 750950 - DNA, 33 bp, Homo sapien
agccggtgactatgcaggacatccgattgtgca

SEQ ID NO: 750951 - DNA, 33 bp, Homo sapien
atctgtgtcacaagtaagttcaagggaaggtac

SEQ ID NO: 750952 - DNA, 33 bp, Homo sapien
atctgtgtcacaagtaggttcaagggaaggtac

SEQ ID NO: 750953 - DNA, 33 bp, Homo sapien; identical to SEQ ID NO: 750951

SEQ ID NO: 750954 - DNA, 33 bp, Homo sapien; identical to SEQ ID NO: 750952

SEQ ID NO: 750955 - DNA, 33 bp, Homo sapien
cactgtggcgtttgtaaatgtggggaaaagaga

SEQ ID NO: 750956 - DNA, 33 bp, Homo sapien
cactgtggcgtttgtagatgtggggaaaagaga

SEQ ID NO: 750957 - DNA, 33 bp, Homo sapien
ttaggtatgctgggaactaggcgtcagcttttg

SEQ ID NO: 750958 - DNA, 33 bp, Homo sapien
ttaggtatgctgggaagtaggcgtcagcttttg

SEQ ID NO: 750959 - DNA, 33 bp, Homo sapien
ttatctgcaacacgcaaaagttcagtcctctgg

SEQ ID NO: 750960 - DNA, 33 bp, Homo sapien
ttatctgcaacacgcagaagttcagtcctctgg

SEQ ID NO: 750961 - DNA, 33 bp, Homo sapien
agatatttgaatggagaatcaaagaaggtataa

SEQ ID NO: 750962 - DNA, 33 bp, Homo sapien
agatatttgaatggaggatcaaagaaggtataa

SEQ ID NO: 750963 - DNA, 33 bp, Homo sapien
acccgttggccctaaacgcatggcaagaggcag

SEQ ID NO: 750964 - DNA, 33 bp, Homo sapien
acccgttggccctaaatgcatggcaagaggcag

SEQ ID NO: 750965 - DNA, 33 bp, Homo sapien
aaacagacagtttttacaaattagagtctgtag

SEQ ID NO: 750966 - DNA, 33 bp, Homo sapien
aaacagacagtttttataaattagagtctgtag

SEQ ID NO: 750967 - DNA, 33 bp, Homo sapien
caaaaatgattgcctgaaaaaaatacaagcaac

SEQ ID NO: 750968 - DNA, 33 bp, Homo sapien
caaaaatgattgcctggaaaaaatacaagcaac

SEQ ID NO: 750969 - DNA, 33 bp, Homo sapien
gattacagttggatgacgtttaggacacaggct

SEQ ID NO: 750970 - DNA, 33 bp, Homo sapien
gattacagttggatgatgtttaggacacaggct

SEQ ID NO: 750971 - DNA, 33 bp, Homo sapien
aatctgttatttcctaaatcctcctgggaaagt

SEQ ID NO: 750972 - DNA, 33 bp, Homo sapien
aatctgttatttcctatatcctcctgggaaagt

SEQ ID NO: 750973 - DNA, 33 bp, Homo sapien
aagggctaagagaaaacgaggcagataaaacat

SEQ ID NO: 750974 - DNA, 33 bp, Homo sapien
aagggctaagagaaaatgaggcagataaaacat

SEQ ID NO: 750975 - DNA, 33 bp, Homo sapien
tgaagaaatgatgtgcagaaatttttagagaca

SEQ ID NO: 750976 - DNA, 33 bp, Homo sapien
tgaagaaatgatgtgcggaaatttttagagaca

SEQ ID NO: 750977 - DNA, 33 bp, Homo sapien
aggctttatagagttggagatagattagccttc

SEQ ID NO: 750978 - DNA, 33 bp, Homo sapien
aggctttatagagttgtagatagattagccttc

SEQ ID NO: 750979 - DNA, 33 bp, Homo sapien
ggaattccaacctgaaatgctgatttaaaaaaa

SEQ ID NO: 750980 - DNA, 33 bp, Homo sapien
ggaattccaacctgaagtgctgatttaaaaaaa

SEQ ID NO: 750981 - DNA, 33 bp, Homo sapien
gatacataccagatgaactttatgcaagaatat

SEQ ID NO: 750982 - DNA, 33 bp, Homo sapien
gatacataccagatgacctttatgcaagaatat

SEQ ID NO: 750983 - DNA, 33 bp, Homo sapien
tgggtgtactctgggacgttgctaagagtgaca

SEQ ID NO: 750984 - DNA, 33 bp, Homo sapien
tgggtgtactctgggatgttgctaagagtgaca

SEQ ID NO: 750985 - DNA, 33 bp, Homo sapien
ccaagagaagcttcccaggcatcaaggccagaa

SEQ ID NO: 750986 - DNA, 33 bp, Homo sapien
ccaagagaagcttcccgggcatcaaggccagaa

SEQ ID NO: 750987 - DNA, 33 bp, Homo sapien
atctccactgaggtctcacaatgcttcgctgtg

SEQ ID NO: 750988 - DNA, 33 bp, Homo sapien
atctccactgaggtcttacaatgcttcgctgtg

SEQ ID NO: 750989 - DNA, 33 bp, Homo sapien
acccagtcctgcatcaaggtcagagtgagggga

SEQ ID NO: 750990 - DNA, 33 bp, Homo sapien
acccagtcctgcatcagggtcagagtgagggga

SEQ ID NO: 750991 - DNA, 33 bp, Homo sapien
tcgtggagaggttcagaagccatgccctgctca

SEQ ID NO: 750992 - DNA, 33 bp, Homo sapien
tcgtggagaggttcagcagccatgccctgctca

SEQ ID NO: 750993 - DNA, 33 bp, Homo sapien
tgctcacagctcttaaacctgagtgttacgaat

SEQ ID NO: 750994 - DNA, 33 bp, Homo sapien
tgctcacagctcttaagcctgagtgttacgaat

SEQ ID NO: 750995 - DNA, 33 bp, Homo sapien
tatgtgcattctaaaactctataaaatattaga

SEQ ID NO: 750996 - DNA, 33 bp, Homo sapien
tatgtgcattctaaaagtctataaaatattaga

SEQ ID NO: 750997 - DNA, 33 bp, Homo sapien
cccaaagcaggattgacagaaagaaaagtatcc

SEQ ID NO: 750998 - DNA, 33 bp, Homo sapien
cccaaagcaggattgatagaaagaaaagtatcc

SEQ ID NO: 750999 - DNA, 33 bp, Homo sapien
tttctgcatatcagagaagccatctcactcctg

SEQ ID NO: 751000 - DNA, 33 bp, Homo sapien
tttctgcatatcagaggagccatctcactcctg

SEQ ID NO: 751001 - DNA, 33 bp, Homo sapien
ccccacacaaaggaaccgactcagatctgcaac

SEQ ID NO: 751002 - DNA, 33 bp, Homo sapien
ccccacacaaaggaactgactcagatctgcaac

SEQ ID NO: 751003 - DNA, 33 bp, Homo sapien
ttgtgtggagcccttcacttatctaatggtgga

SEQ ID NO: 751004 - DNA, 33 bp, Homo sapien
ttgtgtggagcccttcgcttatctaatggtgga

SEQ ID NO: 751005 - DNA, 33 bp, Homo sapien
cggatcctgactctcacgttcaatagagacctg

SEQ ID NO: 751006 - DNA, 33 bp, Homo sapien
cggatcctgactctcatgttcaatagagacctg

SEQ ID NO: 751007 - DNA, 33 bp, Homo sapien
gtattcgatttggatacgttaacttggaaatcc

SEQ ID NO: 751008 - DNA, 33 bp, Homo sapien
gtattcgatttggatatgttaacttggaaatcc

SEQ ID NO: 751009 - DNA, 33 bp, Homo sapien
ctctgctctttaattacagaaccaccaaagaca

SEQ ID NO: 751010 - DNA, 33 bp, Homo sapien
ctctgctctttaattatagaaccaccaaagaca

SEQ ID NO: 751011 - DNA, 33 bp, Homo sapien
ctgtgctcatatgtaaataaatccctcattgct

SEQ ID NO: 751012 - DNA, 33 bp, Homo sapien
ctgtgctcatatgtaagtaaatccctcattgct

SEQ ID NO: 751013 - DNA, 33 bp, Homo sapien
ggccttcaacagtcacaccaacgtcctccgcca

SEQ ID NO: 751014 - DNA, 33 bp, Homo sapien
ggccttcaacagtcacgccaacgtcctccgcca

SEQ ID NO: 751015 - DNA, 33 bp, Homo sapien
gaatgggaactgtcataaaagtcactaaggcag

SEQ ID NO: 751016 - DNA, 33 bp, Homo sapien
gaatgggaactgtcatgaaagtcactaaggcag

SEQ ID NO: 751017 - DNA, 33 bp, Homo sapien
aggctctgcagtgggcaacttggttccgtcctt

SEQ ID NO: 751018 - DNA, 33 bp, Homo sapien
aggctctgcagtgggcgacttggttccgtcctt

SEQ ID NO: 751019 - DNA, 33 bp, Homo sapien
atgcaacaagaagaaaatgagcaacccaattaa

SEQ ID NO: 751020 - DNA, 33 bp, Homo sapien
atgcaacaagaagaaactgagcaacccaattaa

SEQ ID NO: 751021 - DNA, 33 bp, Homo sapien
acaaaggacaagttggcagacgagacagaggac

SEQ ID NO: 751022 - DNA, 33 bp, Homo sapien
acaaaggacaagttgggagacgagacagaggac

SEQ ID NO: 751023 - DNA, 33 bp, Homo sapien
cagttagagttgtgaaaagcagaaactactgaa

SEQ ID NO: 751024 - DNA, 33 bp, Homo sapien
cagttagagttgtgaagagcagaaactactgaa

SEQ ID NO: 751025 - DNA, 33 bp, Homo sapien
gcacccagaattaatgccaggggtcagtgactt

SEQ ID NO: 751026 - DNA, 33 bp, Homo sapien
gcacccagaattaatgtcaggggtcagtgactt

SEQ ID NO: 751027 - DNA, 33 bp, Homo sapien
agtcccacacttaaaaatcgattgtgaaggcat

SEQ ID NO: 751028 - DNA, 33 bp, Homo sapien
agtcccacacttaaaactcgattgtgaaggcat

SEQ ID NO: 751029 - DNA, 33 bp, Homo sapien
ttggtctatgaaggacactaaccctttatcata

SEQ ID NO: 751030 - DNA, 33 bp, Homo sapien
ttggtctatgaaggacgctaaccctttatcata

SEQ ID NO: 751031 - DNA, 33 bp, Homo sapien
ctgcagaaatagcatacgttggtttgaaatgaa

SEQ ID NO: 751032 - DNA, 33 bp, Homo sapien
ctgcagaaatagcatatgttggtttgaaatgaa

SEQ ID NO: 751033 - DNA, 33 bp, Homo sapien
gactgacttatgaaagaatgcatcaggcatgag

SEQ ID NO: 751034 - DNA, 33 bp, Homo sapien
gactgacttatgaaaggatgcatcaggcatgag

SEQ ID NO: 751035 - DNA, 33 bp, Homo sapien
gggctcagcaaccgagccgtaggagagacggag

SEQ ID NO: 751036 - DNA, 33 bp, Homo sapien
gggctcagcaaccgagtcgtaggagagacggag

SEQ ID NO: 751037 - DNA, 33 bp, Homo sapien
caaagcatcggctccacgacgctggcattttct

SEQ ID NO: 751038 - DNA, 33 bp, Homo sapien
caaagcatcggctccatgacgctggcattttct

SEQ ID NO: 751039 - DNA, 33 bp, Homo sapien
ggccagtctcttgtgacccataacctgtcctgc

SEQ ID NO: 751040 - DNA, 33 bp, Homo sapien
ggccagtctcttgtgatccataacctgtcctgc

SEQ ID NO: 751041 - DNA, 33 bp, Homo sapien
gaccaggtcttccaagcatgcactaatgagctg

SEQ ID NO: 751042 - DNA, 33 bp, Homo sapien
gaccaggtcttccaagtatgcactaatgagctg

SEQ ID NO: 751043 - DNA, 33 bp, Homo sapien
gaagatttagagaagacgccatagtctctcctt

SEQ ID NO: 751044 - DNA, 33 bp, Homo sapien
gaagatttagagaagatgccatagtctctcctt

SEQ ID NO: 751045 - DNA, 33 bp, Homo sapien
gagaacagacaggtggaagtgaaatgtgaggtt

SEQ ID NO: 751046 - DNA, 33 bp, Homo sapien
gagaacagacaggtgggagtgaaatgtgaggtt

SEQ ID NO: 751047 - DNA, 33 bp, Homo sapien
tacaaccgtgtgcaaaatacgtttccatttaag

SEQ ID NO: 751048 - DNA, 33 bp, Homo sapien
tacaaccgtgtgcaaagtacgtttccatttaag

SEQ ID NO: 751049 - DNA, 33 bp, Homo sapien
gaccaggtctaactgacggaccacccacctggc

SEQ ID NO: 751050 - DNA, 33 bp, Homo sapien
gaccaggtctaactgatggaccacccacctggc

SEQ ID NO: 751051 - DNA, 33 bp, Homo sapien
agctcactgtggggcaatgcaagccacgctgtg

SEQ ID NO: 751052 - DNA, 33 bp, Homo sapien
agctcactgtggggcagtgcaagccacgctgtg

SEQ ID NO: 751053 - DNA, 33 bp, Homo sapien
ttggaagtgggtcctgcagttaatgccacacag

SEQ ID NO: 751054 - DNA, 33 bp, Homo sapien
ttggaagtgggtcctgtagttaatgccacacag

SEQ ID NO: 751055 - DNA, 33 bp, Homo sapien
cctcacaaaatcgtgaacaatgtaaaatggctg

SEQ ID NO: 751056 - DNA, 33 bp, Homo sapien
cctcacaaaatcgtgagcaatgtaaaatggctg

SEQ ID NO: 751057 - DNA, 33 bp, Homo sapien
gccacctagattctacacttagctcgcttatcc

SEQ ID NO: 751058 - DNA, 33 bp, Homo sapien
gccacctagattctacccttagctcgcttatcc

SEQ ID NO: 751059 - DNA, 33 bp, Homo sapien
gggcaggagccacacaaagatactttccactgt

SEQ ID NO: 751060 - DNA, 33 bp, Homo sapien
gggcaggagccacacagagatactttccactgt

SEQ ID NO: 751061 - DNA, 33 bp, Homo sapien
cattatcgcaacaaaacagcacgccaggtagac

SEQ ID NO: 751062 - DNA, 33 bp, Homo sapien
cattatcgcaacaaaatagcacgccaggtagac

SEQ ID NO: 751063 - DNA, 33 bp, Homo sapien
attcgtgctgatggtacatgaatttgtgtgtgg

SEQ ID NO: 751064 - DNA, 33 bp, Homo sapien
attcgtgctgatggtatatgaatttgtgtgtgg

SEQ ID NO: 751065 - DNA, 33 bp, Homo sapien
aagaatgcagactgtcaatctcggttccaggct

SEQ ID NO: 751066 - DNA, 33 bp, Homo sapien
aagaatgcagactgtcgatctcggttccaggct

SEQ ID NO: 751067 - DNA, 33 bp, Homo sapien
cttgggatctgagaacacgaatgcttgctttgt

SEQ ID NO: 751068 - DNA, 33 bp, Homo sapien
cttgggatctgagaacgcgaatgcttgctttgt

SEQ ID NO: 751069 - DNA, 33 bp, Homo sapien
ttgtcactggcttttgaagaaaagacaacttgg

SEQ ID NO: 751070 - DNA, 33 bp, Homo sapien
ttgtcactggcttttgtagaaaagacaacttgg

SEQ ID NO: 751071 - DNA, 33 bp, Homo sapien
aggatgctgctcccacaattttcatttgcttct

SEQ ID NO: 751072 - DNA, 33 bp, Homo sapien
aggatgctgctcccactattttcatttgcttct

SEQ ID NO: 751073 - DNA, 33 bp, Homo sapien
tgtcaaaaacatggacactatcaacgtgcttca

SEQ ID NO: 751074 - DNA, 33 bp, Homo sapien
tgtcaaaaacatggacgctatcaacgtgcttca

SEQ ID NO: 751075 - DNA, 33 bp, Homo sapien
gggcagaatgacgccccccacatgcatatgttt

SEQ ID NO: 751076 - DNA, 33 bp, Homo sapien
gggcagaatgacgccctccacatgcatatgttt

SEQ ID NO: 751077 - DNA, 33 bp, Homo sapien
cgttgaccccgcatccaaaatggcacaggcggc

SEQ ID NO: 751078 - DNA, 33 bp, Homo sapien
cgttgaccccgcatccgaaatggcacaggcggc

SEQ ID NO: 751079 - DNA, 33 bp, Homo sapien
agcacttatagctgccaaacagaattcatcaac

SEQ ID NO: 751080 - DNA, 33 bp, Homo sapien
agcacttatagctgccgaacagaattcatcaac

SEQ ID NO: 751081 - DNA, 33 bp, Homo sapien
attaatgcactagagcaatgctactgttttgtg

SEQ ID NO: 751082 - DNA, 33 bp, Homo sapien
attaatgcactagagcgatgctactgttttgtg

SEQ ID NO: 751083 - DNA, 33 bp, Homo sapien
tgggctatttcagaccaaactaaacagcacagg

SEQ ID NO: 751084 - DNA, 33 bp, Homo sapien
tgggctatttcagaccgaactaaacagcacagg

SEQ ID NO: 751085 - DNA, 33 bp, Homo sapien
agagctgcaagctttggaaataagaggttgctt

SEQ ID NO: 751086 - DNA, 33 bp, Homo sapien
agagctgcaagctttgtaaataagaggttgctt

SEQ ID NO: 751087 - DNA, 33 bp, Homo sapien
atgtttggaacaagaaccaattcgtttgttcct

SEQ ID NO: 751088 - DNA, 33 bp, Homo sapien
atgtttggaacaagaatcaattcgtttgttcct

SEQ ID NO: 751089 - DNA, 33 bp, Homo sapien
ctccagcgccaagaccacaaatcctgggaagca

SEQ ID NO: 751090 - DNA, 33 bp, Homo sapien
ctccagcgccaagaccgcaaatcctgggaagca

SEQ ID NO: 751091 - DNA, 33 bp, Homo sapien
tcaggactaaggagccaatcgatgccgatcgat

SEQ ID NO: 751092 - DNA, 33 bp, Homo sapien
tcaggactaaggagccgatcgatgccgatcgat

SEQ ID NO: 751093 - DNA, 33 bp, Homo sapien
ctgctgctcagcatccaatggtgcccaggacag

SEQ ID NO: 751094 - DNA, 33 bp, Homo sapien
ctgctgctcagcatcccatggtgcccaggacag

SEQ ID NO: 751095 - DNA, 33 bp, Homo sapien
tcgtgacatctacagacatttatggtcatcgcc

SEQ ID NO: 751096 - DNA, 33 bp, Homo sapien
tcgtgacatctacagagatttatggtcatcgcc

SEQ ID NO: 751097 - DNA, 33 bp, Homo sapien
gctctgaagagttacagaaaacatcccgggtca

SEQ ID NO: 751098 - DNA, 33 bp, Homo sapien
gctctgaagagttacataaaacatcccgggtca

SEQ ID NO: 751099 - DNA, 33 bp, Homo sapien
gtttcccagacatcaacatgctttctaaataga

SEQ ID NO: 751100 - DNA, 33 bp, Homo sapien
gtttcccagacatcaatatgctttctaaataga

SEQ ID NO: 751101 - DNA, 33 bp, Homo sapien
gtgtccgtggtcacaacgaaacagagaccactg

SEQ ID NO: 751102 - DNA, 33 bp, Homo sapien
gtgtccgtggtcacaatgaaacagagaccactg

SEQ ID NO: 751103 - DNA, 33 bp, Homo sapien
gacttgcttgcctgtgaaaccgactctgtagtg

SEQ ID NO: 751104 - DNA, 33 bp, Homo sapien
gacttgcttgcctgtggaaccgactctgtagtg

SEQ ID NO: 751105 - DNA, 33 bp, Homo sapien
gggccccagaagtcctaaatgtgcggcagcttt

SEQ ID NO: 751106 - DNA, 33 bp, Homo sapien
gggccccagaagtcctcaatgtgcggcagcttt

SEQ ID NO: 751107 - DNA, 33 bp, Homo sapien
aacaggcaccgggagccatgttaggaccacgcc

SEQ ID NO: 751108 - DNA, 33 bp, Homo sapien
aacaggcaccgggagctatgttaggaccacgcc

SEQ ID NO: 751109 - DNA, 33 bp, Homo sapien
agagactactgaagaacatttttccaatgaggt

SEQ ID NO: 751110 - DNA, 33 bp, Homo sapien
agagactactgaagaatatttttccaatgaggt

SEQ ID NO: 751111 - DNA, 33 bp, Homo sapien
caagcaaagtttagcacgagtctgggtcagcag

SEQ ID NO: 751112 - DNA, 33 bp, Homo sapien
caagcaaagtttagcatgagtctgggtcagcag

SEQ ID NO: 751113 - DNA, 33 bp, Homo sapien
tcccttaaaaatgagaaagtaagtcagcgttgt

SEQ ID NO: 751114 - DNA, 33 bp, Homo sapien
tcccttaaaaatgagacagtaagtcagcgttgt

SEQ ID NO: 751115 - DNA, 33 bp, Homo sapien
ccttccctgggtcatacggggttctgtttcctc

SEQ ID NO: 751116 - DNA, 33 bp, Homo sapien
ccttccctgggtcatatggggttctgtttcctc

SEQ ID NO: 751117 - DNA, 33 bp, Homo sapien
tctgctgaggttttgcagatggtttccagaatg

SEQ ID NO: 751118 - DNA, 33 bp, Homo sapien
tctgctgaggttttgccgatggtttccagaatg

SEQ ID NO: 751119 - DNA, 33 bp, Homo sapien
tgcgcctctacaaacaccacatccgcattggcc

SEQ ID NO: 751120 - DNA, 33 bp, Homo sapien
tgcgcctctacaaacatcacatccgcattggcc

SEQ ID NO: 751121 - DNA, 33 bp, Homo sapien
gacgagtgaaatgagcaactgaggcttaagtct

SEQ ID NO: 751122 - DNA, 33 bp, Homo sapien
gacgagtgaaatgagcgactgaggcttaagtct

SEQ ID NO: 751123 - DNA, 33 bp, Homo sapien
cattattggaatgctaagcataaaaggattaag

SEQ ID NO: 751124 - DNA, 33 bp, Homo sapien
cattattggaatgctaggcataaaaggattaag

SEQ ID NO: 751125 - DNA, 33 bp, Homo sapien
agaaccaactcacacacgcttcccatccaaccc

SEQ ID NO: 751126 - DNA, 33 bp, Homo sapien
agaaccaactcacacatgcttcccatccaaccc

SEQ ID NO: 751127 - DNA, 33 bp, Homo sapien
gccagaagcaaagacacgactcaaaacaacaac

SEQ ID NO: 751128 - DNA, 33 bp, Homo sapien
gccagaagcaaagacaggactcaaaacaacaac

SEQ ID NO: 751129 - DNA, 33 bp, Homo sapien
aacgtagtccccccaacgcaaatacgtgttcca

SEQ ID NO: 751130 - DNA, 33 bp, Homo sapien
aacgtagtccccccaatgcaaatacgtgttcca

SEQ ID NO: 751131 - DNA, 33 bp, Homo sapien
cattcttgtcatacagcctgaagggaccaagac

SEQ ID NO: 751132 - DNA, 33 bp, Homo sapien
cattcttgtcatacaggctgaagggaccaagac

SEQ ID NO: 751133 - DNA, 33 bp, Homo sapien
aggccaaaaggacttacggtctaacatccagga

SEQ ID NO: 751134 - DNA, 33 bp, Homo sapien
aggccaaaaggacttatggtctaacatccagga

SEQ ID NO: 751135 - DNA, 33 bp, Homo sapien
atccgtgtttgtagaaaaaacagaagagcctgc

SEQ ID NO: 751136 - DNA, 33 bp, Homo sapien
atccgtgtttgtagaagaaacagaagagcctgc

SEQ ID NO: 751137 - DNA, 33 bp, Homo sapien
aatagtgatgacagacaagaagcaggggaccca

SEQ ID NO: 751138 - DNA, 33 bp, Homo sapien
aatagtgatgacagacgagaagcaggggaccca

SEQ ID NO: 751139 - DNA, 33 bp, Homo sapien
caaatgcatagcagaccatgcacgtaagcagac

SEQ ID NO: 751140 - DNA, 33 bp, Homo sapien
caaatgcatagcagacgatgcacgtaagcagac

SEQ ID NO: 751141 - DNA, 33 bp, Homo sapien
aaatcagcattcatgcactgtcttagattgtag

SEQ ID NO: 751142 - DNA, 33 bp, Homo sapien
aaatcagcattcatgcgctgtcttagattgtag

SEQ ID NO: 751143 - DNA, 33 bp, Homo sapien
gcaactcttccaagatcataaccaaagcctgtt

SEQ ID NO: 751144 - DNA, 33 bp, Homo sapien
gcaactcttccaagatgataaccaaagcctgtt

SEQ ID NO: 751145 - DNA, 33 bp, Homo sapien
cattaccagtgtttccaagtcatcatttttaac

SEQ ID NO: 751146 - DNA, 33 bp, Homo sapien
cattaccagtgtttccgagtcatcatttttaac

SEQ ID NO: 751147 - DNA, 33 bp, Homo sapien
tgtccataaacatggcaaaaacttagaagctgc

SEQ ID NO: 751148 - DNA, 33 bp, Homo sapien
tgtccataaacatggcgaaaacttagaagctgc

SEQ ID NO: 751149 - DNA, 33 bp, Homo sapien
ctacctccagcttaaacaatctgttctttttac

SEQ ID NO: 751150 - DNA, 33 bp, Homo sapien
ctacctccagcttaaataatctgttctttttac

SEQ ID NO: 751151 - DNA, 33 bp, Homo sapien
ttgatctctcagcttgaagtacatggtgggttc

SEQ ID NO: 751152 - DNA, 33 bp, Homo sapien
ttgatctctcagcttggagtacatggtgggttc

SEQ ID NO: 751153 - DNA, 33 bp, Homo sapien
aagcttatcttggggacagtggttgatctctca

SEQ ID NO: 751154 - DNA, 33 bp, Homo sapien
aagcttatcttggggatagtggttgatctctca

SEQ ID NO: 751155 - DNA, 33 bp, Homo sapien
agccaggacgatggggccaaataaacctgggga

SEQ ID NO: 751156 - DNA, 33 bp, Homo sapien
agccaggacgatggggtcaaataaacctgggga

SEQ ID NO: 751157 - DNA, 33 bp, Homo sapien
tctctcaacagaacccaatgtgtatcacacaca

SEQ ID NO: 751158 - DNA, 33 bp, Homo sapien
tctctcaacagaacccgatgtgtatcacacaca

SEQ ID NO: 751159 - DNA, 33 bp, Homo sapien
ctataatgctattacaataaacaggtgggggat

SEQ ID NO: 751160 - DNA, 33 bp, Homo sapien
ctataatgctattacagtaaacaggtgggggat

SEQ ID NO: 751161 - DNA, 33 bp, Homo sapien
gaatttcttaacccagaagtgaggactgtcaaa

SEQ ID NO: 751162 - DNA, 33 bp, Homo sapien
gaatttcttaacccaggagtgaggactgtcaaa

SEQ ID NO: 751163 - DNA, 33 bp, Homo sapien
gtgtccactggcaatacctgcttctatggggag

SEQ ID NO: 751164 - DNA, 33 bp, Homo sapien
gtgtccactggcaatagctgcttctatggggag

SEQ ID NO: 751165 - DNA, 33 bp, Homo sapien
ctgcaagtgcacgggacctttggaaaaatcttg

SEQ ID NO: 751166 - DNA, 33 bp, Homo sapien
ctgcaagtgcacgggatctttggaaaaatcttg

SEQ ID NO: 751167 - DNA, 33 bp, Homo sapien
ccagatgtatccttgacgtaaaaactttatctg

SEQ ID NO: 751168 - DNA, 33 bp, Homo sapien
ccagatgtatccttgatgtaaaaactttatctg

SEQ ID NO: 751169 - DNA, 33 bp, Homo sapien
tgtttagacatgccaaattggaacaccgagacc

SEQ ID NO: 751170 - DNA, 33 bp, Homo sapien
tgtttagacatgccaagttggaacaccgagacc

SEQ ID NO: 751171 - DNA, 33 bp, Homo sapien
attgtgttactttcacaagagactgtattcatc

SEQ ID NO: 751172 - DNA, 33 bp, Homo sapien
attgtgttactttcaccagagactgtattcatc

SEQ ID NO: 751173 - DNA, 33 bp, Homo sapien
tccacaatcttaatcacaagcaagaacatcgtg

SEQ ID NO: 751174 - DNA, 33 bp, Homo sapien
tccacaatcttaatcagaagcaagaacatcgtg

SEQ ID NO: 751175 - DNA, 33 bp, Homo sapien
tggcatttgtctttgcgaagagaagtccggcat

SEQ ID NO: 751176 - DNA, 33 bp, Homo sapien
tggcatttgtctttgctaagagaagtccggcat

SEQ ID NO: 751177 - DNA, 33 bp, Homo sapien
caaactgagtattaccacttgccctattttact

SEQ ID NO: 751178 - DNA, 33 bp, Homo sapien
caaactgagtattaccgcttgccctattttact

SEQ ID NO: 751179 - DNA, 33 bp, Homo sapien
tttatgaaaataaaaaaatctcagcttctaaat

SEQ ID NO: 751180 - DNA, 33 bp, Homo sapien
tttatgaaaataaaaatatctcagcttctaaat

SEQ ID NO: 751181 - DNA, 33 bp, Homo sapien
agtgagggacagtaaggcaggttttcagtttca

SEQ ID NO: 751182 - DNA, 33 bp, Homo sapien
agtgagggacagtaagtcaggttttcagtttca

SEQ ID NO: 751183 - DNA, 33 bp, Homo sapien
cattgaccatatgatcacagtaccttaaggaaa

SEQ ID NO: 751184 - DNA, 33 bp, Homo sapien
cattgaccatatgatcgcagtaccttaaggaaa

SEQ ID NO: 751185 - DNA, 33 bp, Homo sapien
ttacttaagccacaaaactgaatgagatctgac

SEQ ID NO: 751186 - DNA, 33 bp, Homo sapien
ttacttaagccacaaacctgaatgagatctgac

SEQ ID NO: 751187 - DNA, 33 bp, Homo sapien
ctggattctagggtaacagtgtcatggggcaaa

SEQ ID NO: 751188 - DNA, 33 bp, Homo sapien
ctggattctagggtaagagtgtcatggggcaaa

SEQ ID NO: 751189 - DNA, 33 bp, Homo sapien
ctccaggctgtgggtcaagatcatatttgcccc

SEQ ID NO: 751190 - DNA, 33 bp, Homo sapien
ctccaggctgtgggtccagatcatatttgcccc

SEQ ID NO: 751191 - DNA, 33 bp, Homo sapien
agggctatgaagtaataaggaaacatggtatct

SEQ ID NO: 751192 - DNA, 33 bp, Homo sapien
agggctatgaagtaatgaggaaacatggtatct

SEQ ID NO: 751193 - DNA, 33 bp, Homo sapien
cctggacttttaaaaacgagatgctctggtgac

SEQ ID NO: 751194 - DNA, 33 bp, Homo sapien
cctggacttttaaaaatgagatgctctggtgac

SEQ ID NO: 751195 - DNA, 33 bp, Homo sapien
actatcttgcaatcgcacagttagattctagct

SEQ ID NO: 751196 - DNA, 33 bp, Homo sapien
actatcttgcaatcgcgcagttagattctagct

SEQ ID NO: 751197 - DNA, 33 bp, Homo sapien
atccaccgtcggtttgcaccgtgcacctggaaa

SEQ ID NO: 751198 - DNA, 33 bp, Homo sapien
atccaccgtcggtttgtaccgtgcacctggaaa

SEQ ID NO: 751199 - DNA, 33 bp, Homo sapien
gaacacaacagacctaaaattctcatgaatgta

SEQ ID NO: 751200 - DNA, 33 bp, Homo sapien
gaacacaacagacctacaattctcatgaatgta

SEQ ID NO: 751201 - DNA, 33 bp, Homo sapien
ttttaacagttatctacctaatctggttaaaag

SEQ ID NO: 751202 - DNA, 33 bp, Homo sapien
ttttaacagttatctagctaatctggttaaaag

SEQ ID NO: 751203 - DNA, 33 bp, Homo sapien
gatattttacccgtcaggcacgttcgtgcttga

SEQ ID NO: 751204 - DNA, 33 bp, Homo sapien
gatattttacccgtcatgcacgttcgtgcttga

SEQ ID NO: 751205 - DNA, 33 bp, Homo sapien
ctgcattttaataaacccactgtctccacccag

SEQ ID NO: 751206 - DNA, 33 bp, Homo sapien
ctgcattttaataaactcactgtctccacccag

SEQ ID NO: 751207 - DNA, 33 bp, Homo sapien
gctagttttaccacaaaatatagcaccaggagt

SEQ ID NO: 751208 - DNA, 33 bp, Homo sapien
gctagttttaccacaagatatagcaccaggagt

SEQ ID NO: 751209 - DNA, 33 bp, Homo sapien
aacctagaaattctggcagaaatgggtgcacag

SEQ ID NO: 751210 - DNA, 33 bp, Homo sapien
aacctagaaattctggtagaaatgggtgcacag

SEQ ID NO: 751211 - DNA, 33 bp, Homo sapien
atgccccttcatgccacgtttcttgaggagctc

SEQ ID NO: 751212 - DNA, 33 bp, Homo sapien
atgccccttcatgccatgtttcttgaggagctc

SEQ ID NO: 751213 - DNA, 33 bp, Homo sapien
tctcaggaacgagaccaatgttggaaaattgtc

SEQ ID NO: 751214 - DNA, 33 bp, Homo sapien
tctcaggaacgagaccgatgttggaaaattgtc

SEQ ID NO: 751215 - DNA, 33 bp, Homo sapien
ccccagtccagctggcaaatcagactaacttcc

SEQ ID NO: 751216 - DNA, 33 bp, Homo sapien
ccccagtccagctggcgaatcagactaacttcc

SEQ ID NO: 751217 - DNA, 33 bp, Homo sapien
ccccagtaccaaagaccgcacgcactcctcatt

SEQ ID NO: 751218 - DNA, 33 bp, Homo sapien
ccccagtaccaaagactgcacgcactcctcatt

SEQ ID NO: 751219 - DNA, 33 bp, Homo sapien
tgatgtggtcctaacaagaaatgggagaacttt

SEQ ID NO: 751220 - DNA, 33 bp, Homo sapien
tgatgtggtcctaacaggaaatgggagaacttt

SEQ ID NO: 751221 - DNA, 33 bp, Homo sapien
ccccaaattcagatacaggcgccctggactgcg

SEQ ID NO: 751222 - DNA, 33 bp, Homo sapien
ccccaaattcagatacgggcgccctggactgcg

SEQ ID NO: 751223 - DNA, 33 bp, Homo sapien
gaaggggctgcggagcaagagaaaagcgtcagc

SEQ ID NO: 751224 - DNA, 33 bp, Homo sapien
gaaggggctgcggagcgagagaaaagcgtcagc

SEQ ID NO: 751225 - DNA, 33 bp, Homo sapien
cccttgttttgagtgacgcccacaaggtaggtg

SEQ ID NO: 751226 - DNA, 33 bp, Homo sapien
cccttgttttgagtgatgcccacaaggtaggtg

SEQ ID NO: 751227 - DNA, 33 bp, Homo sapien
ctgctgctgctctgaaatcaataacacttaacc

SEQ ID NO: 751228 - DNA, 33 bp, Homo sapien
ctgctgctgctctgaagtcaataacacttaacc

SEQ ID NO: 751229 - DNA, 33 bp, Homo sapien
gttcttatattccatgccatcaaaatgctcttc

SEQ ID NO: 751230 - DNA, 33 bp, Homo sapien
gttcttatattccatgtcatcaaaatgctcttc

SEQ ID NO: 751231 - DNA, 33 bp, Homo sapien
gcagcagggcttagacagctgacgttgccatcc

SEQ ID NO: 751232 - DNA, 33 bp, Homo sapien
gcagcagggcttagaccgctgacgttgccatcc

SEQ ID NO: 751233 - DNA, 33 bp, Homo sapien
accaagctcaaacggacggagtgatggactcag

SEQ ID NO: 751234 - DNA, 33 bp, Homo sapien
accaagctcaaacggatggagtgatggactcag

SEQ ID NO: 751235 - DNA, 33 bp, Homo sapien
gtgtgcctatcatataaactgagaaggtgtgag

SEQ ID NO: 751236 - DNA, 33 bp, Homo sapien
gtgtgcctatcatatacactgagaaggtgtgag

SEQ ID NO: 751237 - DNA, 33 bp, Homo sapien
ggaggaacacagcccccgacaactgtgggcagc

SEQ ID NO: 751238 - DNA, 33 bp, Homo sapien
ggaggaacacagcccctgacaactgtgggcagc

SEQ ID NO: 751239 - DNA, 33 bp, Homo sapien
ttgttttaagttgccaagttgtgataatttgtt

SEQ ID NO: 751240 - DNA, 33 bp, Homo sapien
ttgttttaagttgccaggttgtgataatttgtt

SEQ ID NO: 751241 - DNA, 33 bp, Homo sapien
aatctgttctgaactccagggaaagcttcagtg

SEQ ID NO: 751242 - DNA, 33 bp, Homo sapien
aatctgttctgaactcgagggaaagcttcagtg

SEQ ID NO: 751243 - DNA, 33 bp, Homo sapien
ccaataacagaaaaaaatgtctggaaatagaga

SEQ ID NO: 751244 - DNA, 33 bp, Homo sapien
ccaataacagaaaaaattgtctggaaatagaga

SEQ ID NO: 751245 - DNA, 33 bp, Homo sapien
tgattgagtatagaccagaatatgaaatgttat

SEQ ID NO: 751246 - DNA, 33 bp, Homo sapien
tgattgagtatagaccggaatatgaaatgttat

SEQ ID NO: 751247 - DNA, 33 bp, Homo sapien
cggaccgaggtatgtgccaaccttgaagagtca

SEQ ID NO: 751248 - DNA, 33 bp, Homo sapien
cggaccgaggtatgtgtcaaccttgaagagtca

SEQ ID NO: 751249 - DNA, 33 bp, Homo sapien
tgctcacccagatgcacggacacagagctccac

SEQ ID NO: 751250 - DNA, 33 bp, Homo sapien
tgctcacccagatgcatggacacagagctccac

SEQ ID NO: 751251 - DNA, 33 bp, Homo sapien
atcttgaatgtgcaggacaactgccagagacac

SEQ ID NO: 751252 - DNA, 33 bp, Homo sapien
atcttgaatgtgcagggcaactgccagagacac

SEQ ID NO: 751253 - DNA, 33 bp, Homo sapien
ctatttaacttaaatgaaaggcttcggccccaa

SEQ ID NO: 751254 - DNA, 33 bp, Homo sapien
ctatttaacttaaatggaaggcttcggccccaa

SEQ ID NO: 751255 - DNA, 33 bp, Homo sapien
atggaggacaccagcaagaaccctgtttatgga

SEQ ID NO: 751256 - DNA, 33 bp, Homo sapien
atggaggacaccagcaggaaccctgtttatgga

SEQ ID NO: 751257 - DNA, 33 bp, Homo sapien
caaatagtttgcctaaaatgcatcgttctatac

SEQ ID NO: 751258 - DNA, 33 bp, Homo sapien
caaatagtttgcctaacatgcatcgttctatac

SEQ ID NO: 751259 - DNA, 33 bp, Homo sapien
taacagctgcctatgaagggtattatttggggt

SEQ ID NO: 751260 - DNA, 33 bp, Homo sapien
taacagctgcctatgatgggtattatttggggt

SEQ ID NO: 751261 - DNA, 33 bp, Homo sapien
attgaaaacccaacagaaacacaggattctcta

SEQ ID NO: 751262 - DNA, 33 bp, Homo sapien
attgaaaacccaacaggaacacaggattctcta

SEQ ID NO: 751263 - DNA, 33 bp, Homo sapien
cacaactaccattggacctggcagtctcattac

SEQ ID NO: 751264 - DNA, 33 bp, Homo sapien
cacaactaccattggatctggcagtctcattac

SEQ ID NO: 751265 - DNA, 33 bp, Homo sapien
tatgagaatctgaaaaacaaggactcagtcact

SEQ ID NO: 751266 - DNA, 33 bp, Homo sapien
tatgagaatctgaaaagcaaggactcagtcact

SEQ ID NO: 751267 - DNA, 33 bp, Homo sapien
tcttgcttcctgttcccagtgactgagtccttg

SEQ ID NO: 751268 - DNA, 33 bp, Homo sapien
tcttgcttcctgttcctagtgactgagtccttg

SEQ ID NO: 751269 - DNA, 33 bp, Homo sapien
ccatgaggctgcactacggcttttctagaatcc

SEQ ID NO: 751270 - DNA, 33 bp, Homo sapien
ccatgaggctgcactatggcttttctagaatcc

SEQ ID NO: 751271 - DNA, 33 bp, Homo sapien
tgaaagcctgttccacaaagtctgagaccaaaa

SEQ ID NO: 751272 - DNA, 33 bp, Homo sapien
tgaaagcctgttccacgaagtctgagaccaaaa

SEQ ID NO: 751273 - DNA, 33 bp, Homo sapien
cattaaagagaaggccagataaaagttctgtgg

SEQ ID NO: 751274 - DNA, 33 bp, Homo sapien
cattaaagagaaggccggataaaagttctgtgg

SEQ ID NO: 751275 - DNA, 33 bp, Homo sapien
gcaaggtggccactggaagcctagattccttgc

SEQ ID NO: 751276 - DNA, 33 bp, Homo sapien
gcaaggtggccactgggagcctagattccttgc

SEQ ID NO: 751277 - DNA, 33 bp, Homo sapien
ggcactgagagttatacattcatgcgcacccta

SEQ ID NO: 751278 - DNA, 33 bp, Homo sapien
ggcactgagagttatatattcatgcgcacccta

SEQ ID NO: 751279 - DNA, 33 bp, Homo sapien
cattcttagtgtgcaaaagcttttataacaggc

SEQ ID NO: 751280 - DNA, 33 bp, Homo sapien
cattcttagtgtgcaagagcttttataacaggc

SEQ ID NO: 751281 - DNA, 33 bp, Homo sapien
gaacacactcagctccacctctcctcagaaggc

SEQ ID NO: 751282 - DNA, 33 bp, Homo sapien
gaacacactcagctccgcctctcctcagaaggc

SEQ ID NO: 751283 - DNA, 33 bp, Homo sapien
tgggagtaaggatgaccggtaaatcaatgtgtg

SEQ ID NO: 751284 - DNA, 33 bp, Homo sapien
tgggagtaaggatgactggtaaatcaatgtgtg

SEQ ID NO: 751285 - DNA, 33 bp, Homo sapien
ttgtcattaccgcacaagagaaaaaacgccatc

SEQ ID NO: 751286 - DNA, 33 bp, Homo sapien
ttgtcattaccgcacaggagaaaaaacgccatc

SEQ ID NO: 751287 - DNA, 33 bp, Homo sapien
aatgggaatctatcatcaccttggaataaatac

SEQ ID NO: 751288 - DNA, 33 bp, Homo sapien
aatgggaatctatcattaccttggaataaatac

SEQ ID NO: 751289 - DNA, 33 bp, Homo sapien
ggtaggacattgcttaacttcagtgaatccaca

SEQ ID NO: 751290 - DNA, 33 bp, Homo sapien
ggtaggacattgcttagcttcagtgaatccaca

SEQ ID NO: 751291 - DNA, 33 bp, Homo sapien
gtgcgtgtaaaactggcccaatctgaataggct

SEQ ID NO: 751292 - DNA, 33 bp, Homo sapien
gtgcgtgtaaaactggtccaatctgaataggct

SEQ ID NO: 751293 - DNA, 33 bp, Homo sapien
gagctgagtgtccaggacctatccagtgaccaa

SEQ ID NO: 751294 - DNA, 33 bp, Homo sapien
gagctgagtgtccaggtcctatccagtgaccaa

SEQ ID NO: 751295 - DNA, 33 bp, Homo sapien
caaggactccttagacaagacattcatgaggct

SEQ ID NO: 751296 - DNA, 33 bp, Homo sapien
caaggactccttagaccagacattcatgaggct

SEQ ID NO: 751297 - DNA, 33 bp, Homo sapien
agagaatgcccactcaagtataaacacacatgc

SEQ ID NO: 751298 - DNA, 33 bp, Homo sapien
agagaatgcccactcaggtataaacacacatgc

SEQ ID NO: 751299 - DNA, 33 bp, Homo sapien
ctggagaccaggacccagcaatctctgaaggct

SEQ ID NO: 751300 - DNA, 33 bp, Homo sapien
ctggagaccaggacccggcaatctctgaaggct

SEQ ID NO: 751301 - DNA, 33 bp, Homo sapien
agaagtaaaatgaaaactagcgtgcagagatga

SEQ ID NO: 751302 - DNA, 33 bp, Homo sapien
agaagtaaaatgaaaagtagcgtgcagagatga

SEQ ID NO: 751303 - DNA, 33 bp, Homo sapien
ggaagtcctcaggaaacgaaatgtgctaataca

SEQ ID NO: 751304 - DNA, 33 bp, Homo sapien
ggaagtcctcaggaaatgaaatgtgctaataca

SEQ ID NO: 751305 - DNA, 33 bp, Homo sapien
ctatgaagatgagaccaacacgctgtaaatttg

SEQ ID NO: 751306 - DNA, 33 bp, Homo sapien
ctatgaagatgagaccgacacgctgtaaatttg

SEQ ID NO: 751307 - DNA, 33 bp, Homo sapien
tctccaacaagacacactctgtgcattccgaag

SEQ ID NO: 751308 - DNA, 33 bp, Homo sapien
tctccaacaagacacattctgtgcattccgaag

SEQ ID NO: 751309 - DNA, 33 bp, Homo sapien
aaacgccaatgccaaaaatatgctctcaaaggg

SEQ ID NO: 751310 - DNA, 33 bp, Homo sapien
aaacgccaatgccaaacatatgctctcaaaggg

SEQ ID NO: 751311 - DNA, 33 bp, Homo sapien
tcacgattccctaaaccattgattgtggaacat

SEQ ID NO: 751312 - DNA, 33 bp, Homo sapien
tcacgattccctaaactattgattgtggaacat

SEQ ID NO: 751313 - DNA, 33 bp, Homo sapien
tcctaatgtccatcacaagtgcagagcaggctt

SEQ ID NO: 751314 - DNA, 33 bp, Homo sapien
tcctaatgtccatcacgagtgcagagcaggctt

SEQ ID NO: 751315 - DNA, 33 bp, Homo sapien
gagccacagagatcacaggaaaaatgagttccc

SEQ ID NO: 751316 - DNA, 33 bp, Homo sapien
gagccacagagatcacgggaaaaatgagttccc

SEQ ID NO: 751317 - DNA, 33 bp, Homo sapien
gagctgctggtgccaaatcagttggtagctgga

SEQ ID NO: 751318 - DNA, 33 bp, Homo sapien
gagctgctggtgccaagtcagttggtagctgga

SEQ ID NO: 751319 - DNA, 33 bp, Homo sapien
cacacaaccgccggaaatgcagcatcttctcgc

SEQ ID NO: 751320 - DNA, 33 bp, Homo sapien
cacacaaccgccggaagtgcagcatcttctcgc

SEQ ID NO: 751321 - DNA, 33 bp, Homo sapien
cttcctaataaactcacgatttcgttatctgac

SEQ ID NO: 751322 - DNA, 33 bp, Homo sapien
cttcctaataaactcatgatttcgttatctgac

SEQ ID NO: 751323 - DNA, 33 bp, Homo sapien
cagagaaatgcacatcaaaaccataatgagata

SEQ ID NO: 751324 - DNA, 33 bp, Homo sapien
cagagaaatgcacatcgaaaccataatgagata

SEQ ID NO: 751325 - DNA, 33 bp, Homo sapien
aaacattgtctaaagaaaccggacatgacaaaa

SEQ ID NO: 751326 - DNA, 33 bp, Homo sapien
aaacattgtctaaagacaccggacatgacaaaa

SEQ ID NO: 751327 - DNA, 33 bp, Homo sapien
aagttttcatggacgacatcctgaaatatgttt

SEQ ID NO: 751328 - DNA, 33 bp, Homo sapien
aagttttcatggacgatatcctgaaatatgttt

SEQ ID NO: 751329 - DNA, 33 bp, Homo sapien
tagtgtgtgctgctgacatggagacaaagagaa

SEQ ID NO: 751330 - DNA, 33 bp, Homo sapien
tagtgtgtgctgctgagatggagacaaagagaa

SEQ ID NO: 751331 - DNA, 33 bp, Homo sapien
gctgcatggaaattggacatccctggtcaccct

SEQ ID NO: 751332 - DNA, 33 bp, Homo sapien
gctgcatggaaattgggcatccctggtcaccct

SEQ ID NO: 751333 - DNA, 33 bp, Homo sapien
attgtataagccagaaaacttggagagtgaaag

SEQ ID NO: 751334 - DNA, 33 bp, Homo sapien
attgtataagccagaatacttggagagtgaaag

SEQ ID NO: 751335 - DNA, 33 bp, Homo sapien
cttagcattaaatctcaactagaagaacaaggt

SEQ ID NO: 751336 - DNA, 33 bp, Homo sapien
cttagcattaaatctccactagaagaacaaggt

SEQ ID NO: 751337 - DNA, 33 bp, Homo sapien
gtgcagaggctctcaaatcacatcagggattct

SEQ ID NO: 751338 - DNA, 33 bp, Homo sapien
gtgcagaggctctcaattcacatcagggattct

SEQ ID NO: 751339 - DNA, 33 bp, Homo sapien
agcttcaagacactgaactggcaattatttttt

SEQ ID NO: 751340 - DNA, 33 bp, Homo sapien
agcttcaagacactgagctggcaattatttttt

SEQ ID NO: 751341 - DNA, 33 bp, Homo sapien
aggtcatctgtctacacggaatggtgtccttgc

SEQ ID NO: 751342 - DNA, 33 bp, Homo sapien
aggtcatctgtctacatggaatggtgtccttgc

SEQ ID NO: 751343 - DNA, 33 bp, Homo sapien
aaagattctttctcccaacttttcattttcatt

SEQ ID NO: 751344 - DNA, 33 bp, Homo sapien
aaagattctttctcccgacttttcattttcatt

SEQ ID NO: 751345 - DNA, 33 bp, Homo sapien
cagaaaggaccttcccaatggaaaatgtgtctt

SEQ ID NO: 751346 - DNA, 33 bp, Homo sapien
cagaaaggaccttcccgatggaaaatgtgtctt

SEQ ID NO: 751347 - DNA, 33 bp, Homo sapien
gacctcaggagccttcacctcggtctcctcctc

SEQ ID NO: 751348 - DNA, 33 bp, Homo sapien
gacctcaggagccttcgcctcggtctcctcctc

SEQ ID NO: 751349 - DNA, 33 bp, Homo sapien
tcttccgctactcttaaggattctgaaaaatca

SEQ ID NO: 751350 - DNA, 33 bp, Homo sapien
tcttccgctactcttagggattctgaaaaatca

SEQ ID NO: 751351 - DNA, 33 bp, Homo sapien
tggaatcatccggtacacaacctttccagattg

SEQ ID NO: 751352 - DNA, 33 bp, Homo sapien
tggaatcatccggtacgcaacctttccagattg

SEQ ID NO: 751353 - DNA, 33 bp, Homo sapien
cctccatgtggccagcaagtgcctcccaattcc

SEQ ID NO: 751354 - DNA, 33 bp, Homo sapien
cctccatgtggccagcgagtgcctcccaattcc

SEQ ID NO: 751355 - DNA, 33 bp, Homo sapien
cctgacctcagtgctacgccctttcattttgac

SEQ ID NO: 751356 - DNA, 33 bp, Homo sapien
cctgacctcagtgctatgccctttcattttgac

SEQ ID NO: 751357 - DNA, 33 bp, Homo sapien
ggaaccatggatgaccaggatccacgtgtgttt

SEQ ID NO: 751358 - DNA, 33 bp, Homo sapien
ggaaccatggatgaccgggatccacgtgtgttt

SEQ ID NO: 751359 - DNA, 33 bp, Homo sapien
ttgctgacggcccccacgttgacagcatgctca

SEQ ID NO: 751360 - DNA, 33 bp, Homo sapien
ttgctgacggcccccatgttgacagcatgctca

SEQ ID NO: 751361 - DNA, 33 bp, Homo sapien
ctgcccgtgtcacaggaaaatgacctccagtga

SEQ ID NO: 751362 - DNA, 33 bp, Homo sapien
ctgcccgtgtcacagggaaatgacctccagtga

SEQ ID NO: 751363 - DNA, 33 bp, Homo sapien
ttttcaaaattcaaaacacaatgagtaacatct

SEQ ID NO: 751364 - DNA, 33 bp, Homo sapien
ttttcaaaattcaaaatacaatgagtaacatct

SEQ ID NO: 751365 - DNA, 33 bp, Homo sapien
gtgtggtgcgttagaagctaggccttgagctac

SEQ ID NO: 751366 - DNA, 33 bp, Homo sapien
gtgtggtgcgttagaatctaggccttgagctac

SEQ ID NO: 751367 - DNA, 33 bp, Homo sapien
aatgaggagaacgtaaagaggtgtggggagctt

SEQ ID NO: 751368 - DNA, 33 bp, Homo sapien
aatgaggagaacgtaaggaggtgtggggagctt

SEQ ID NO: 751369 - DNA, 33 bp, Homo sapien
ctgaaacaacttccacacacagtgtatgatttc

SEQ ID NO: 751370 - DNA, 33 bp, Homo sapien
ctgaaacaacttccacgcacagtgtatgatttc

SEQ ID NO: 751371 - DNA, 33 bp, Homo sapien
taatagtggctacaccaatctacattcccacat

SEQ ID NO: 751372 - DNA, 33 bp, Homo sapien
taatagtggctacaccgatctacattcccacat

SEQ ID NO: 751373 - DNA, 33 bp, Homo sapien
tttgttaaattaccctcagcttcactataaccc

SEQ ID NO: 751374 - DNA, 33 bp, Homo sapien
tttgttaaattaccctgagcttcactataaccc

SEQ ID NO: 751375 - DNA, 33 bp, Homo sapien
aaaactgcaaattcacagctttatccaatggag

SEQ ID NO: 751376 - DNA, 33 bp, Homo sapien
aaaactgcaaattcacggctttatccaatggag

SEQ ID NO: 751377 - DNA, 33 bp, Homo sapien
ccaaagttactttacacactgacaatgactgaa

SEQ ID NO: 751378 - DNA, 33 bp, Homo sapien
ccaaagttactttacatactgacaatgactgaa

SEQ ID NO: 751379 - DNA, 33 bp, Homo sapien
tgctttcattttctgccgagattttaaaggatt

SEQ ID NO: 751380 - DNA, 33 bp, Homo sapien
tgctttcattttctgctgagattttaaaggatt

SEQ ID NO: 751381 - DNA, 33 bp, Homo sapien
aaagctgctcattgtaaacacacagagcccatg

SEQ ID NO: 751382 - DNA, 33 bp, Homo sapien
aaagctgctcattgtagacacacagagcccatg

SEQ ID NO: 751383 - DNA, 33 bp, Homo sapien
agggcattttgaggacacccttctcttcaagtc

SEQ ID NO: 751384 - DNA, 33 bp, Homo sapien
agggcattttgaggacgcccttctcttcaagtc

SEQ ID NO: 751385 - DNA, 33 bp, Homo sapien
gctgcctttatgcctacgctggttctcctgagc

SEQ ID NO: 751386 - DNA, 33 bp, Homo sapien
gctgcctttatgcctatgctggttctcctgagc

SEQ ID NO: 751387 - DNA, 33 bp, Homo sapien
aacctactcctaagccaactgaaatatagccgc

SEQ ID NO: 751388 - DNA, 33 bp, Homo sapien
aacctactcctaagccgactgaaatatagccgc

SEQ ID NO: 751389 - DNA, 33 bp, Homo sapien
cagcactgccgacttgaatgctgcggtcttcct

SEQ ID NO: 751390 - DNA, 33 bp, Homo sapien
cagcactgccgacttggatgctgcggtcttcct

SEQ ID NO: 751391 - DNA, 33 bp, Homo sapien
cataagacaaaatccaatgactaattctgttaa

SEQ ID NO: 751392 - DNA, 33 bp, Homo sapien
cataagacaaaatccagtgactaattctgttaa

SEQ ID NO: 751393 - DNA, 33 bp, Homo sapien
agactaacatttgcaaagcatattactgttctc

SEQ ID NO: 751394 - DNA, 33 bp, Homo sapien
agactaacatttgcaaggcatattactgttctc

SEQ ID NO: 751395 - DNA, 33 bp, Homo sapien
tcagttacatgggaacaaaatggtctaaaccag

SEQ ID NO: 751396 - DNA, 33 bp, Homo sapien
tcagttacatgggaacgaaatggtctaaaccag

SEQ ID NO: 751397 - DNA, 33 bp, Homo sapien
ctcagcagccggaaacacatcccagtgagggtg

SEQ ID NO: 751398 - DNA, 33 bp, Homo sapien
ctcagcagccggaaacgcatcccagtgagggtg

SEQ ID NO: 751399 - DNA, 33 bp, Homo sapien
cccattctcagctcaactgaacctcaagtcctt

SEQ ID NO: 751400 - DNA, 33 bp, Homo sapien
cccattctcagctcaattgaacctcaagtcctt

SEQ ID NO: 751401 - DNA, 33 bp, Homo sapien
gtctgggactcggcccaccatgttcacagcagc

SEQ ID NO: 751402 - DNA, 33 bp, Homo sapien
gtctgggactcggcccgccatgttcacagcagc

SEQ ID NO: 751403 - DNA, 33 bp, Homo sapien
tgagaagtggtgtgtaaagacgctgcttgagtt

SEQ ID NO: 751404 - DNA, 33 bp, Homo sapien
tgagaagtggtgtgtagagacgctgcttgagtt

SEQ ID NO: 751405 - DNA, 33 bp, Homo sapien
ggcccaccaggccttcaagtacagaagaaacat

SEQ ID NO: 751406 - DNA, 33 bp, Homo sapien
ggcccaccaggccttccagtacagaagaaacat

SEQ ID NO: 751407 - DNA, 33 bp, Homo sapien
tggacaccctgcttccaagtttgcgctttgaat

SEQ ID NO: 751408 - DNA, 33 bp, Homo sapien
tggacaccctgcttccgagtttgcgctttgaat

SEQ ID NO: 751409 - DNA, 33 bp, Homo sapien
caaaggggtgaagacaataaatgatcccaaaac

SEQ ID NO: 751410 - DNA, 33 bp, Homo sapien
caaaggggtgaagacagtaaatgatcccaaaac

SEQ ID NO: 751411 - DNA, 33 bp, Homo sapien
ggctcggtgctatcggaccattaaattgctcta

SEQ ID NO: 751412 - DNA, 33 bp, Homo sapien
ggctcggtgctatcgggccattaaattgctcta

SEQ ID NO: 751413 - DNA, 33 bp, Homo sapien
tgacgacctttcctgcaaactctgcaagacttc

SEQ ID NO: 751414 - DNA, 33 bp, Homo sapien
tgacgacctttcctgcgaactctgcaagacttc

SEQ ID NO: 751415 - DNA, 33 bp, Homo sapien
ttgcatactatctgaaataatgacatacacttt

SEQ ID NO: 751416 - DNA, 33 bp, Homo sapien
ttgcatactatctgaagtaatgacatacacttt

SEQ ID NO: 751417 - DNA, 33 bp, Homo sapien
acagggagatcaggcaagaggaggtttgaggcc

SEQ ID NO: 751418 - DNA, 33 bp, Homo sapien
acagggagatcaggcaggaggaggtttgaggcc

SEQ ID NO: 751419 - DNA, 33 bp, Homo sapien
ctaaacaatacttaccagacattctaccaggtc

SEQ ID NO: 751420 - DNA, 33 bp, Homo sapien
ctaaacaatacttacccgacattctaccaggtc

SEQ ID NO: 751421 - DNA, 33 bp, Homo sapien
ctcattattgcctggaatatcatgaataaactg

SEQ ID NO: 751422 - DNA, 33 bp, Homo sapien
ctcattattgcctggactatcatgaataaactg

SEQ ID NO: 751423 - DNA, 33 bp, Homo sapien
ccagactttgtacgagacatagtatacagtttt

SEQ ID NO: 751424 - DNA, 33 bp, Homo sapien
ccagactttgtacgagtcatagtatacagtttt

SEQ ID NO: 751425 - DNA, 33 bp, Homo sapien
ccactgagtttcctaaaaaaaaactgctgaaag

SEQ ID NO: 751426 - DNA, 33 bp, Homo sapien
ccactgagtttcctaagaaaaaactgctgaaag

SEQ ID NO: 751427 - DNA, 33 bp, Homo sapien
ctcatctgggctcttacggtgaagttaggaggt

SEQ ID NO: 751428 - DNA, 33 bp, Homo sapien
ctcatctgggctcttatggtgaagttaggaggt

SEQ ID NO: 751429 - DNA, 33 bp, Homo sapien
atcataaggacttgtaaaactgttaaggatgta

SEQ ID NO: 751430 - DNA, 33 bp, Homo sapien
atcataaggacttgtagaactgttaaggatgta

SEQ ID NO: 751431 - DNA, 33 bp, Homo sapien
acccactgtacttgtacgagcctggcctcttag

SEQ ID NO: 751432 - DNA, 33 bp, Homo sapien
acccactgtacttgtatgagcctggcctcttag

SEQ ID NO: 751433 - DNA, 33 bp, Homo sapien
gtagccatgctatctcaagagacatcaaatcat

SEQ ID NO: 751434 - DNA, 33 bp, Homo sapien
gtagccatgctatctcgagagacatcaaatcat

SEQ ID NO: 751435 - DNA, 33 bp, Homo sapien
gatagctgaaatctcacagagtgggacgatcta

SEQ ID NO: 751436 - DNA, 33 bp, Homo sapien
gatagctgaaatctcatagagtgggacgatcta

SEQ ID NO: 751437 - DNA, 33 bp, Homo sapien
ggacgatctaatgagaacacctgcgttgctgag

SEQ ID NO: 751438 - DNA, 33 bp, Homo sapien
ggacgatctaatgagagcacctgcgttgctgag

SEQ ID NO: 751439 - DNA, 33 bp, Homo sapien
ccatttatgtataacaactctgtgagatgcgtg

SEQ ID NO: 751440 - DNA, 33 bp, Homo sapien
ccatttatgtataacagctctgtgagatgcgtg

SEQ ID NO: 751441 - DNA, 33 bp, Homo sapien
cccggccctgaacagaagagttgcacagcaatt

SEQ ID NO: 751442 - DNA, 33 bp, Homo sapien
cccggccctgaacagaggagttgcacagcaatt

SEQ ID NO: 751443 - DNA, 33 bp, Homo sapien
caagcttctctttcaactaccagaataggtccc

SEQ ID NO: 751444 - DNA, 33 bp, Homo sapien
caagcttctctttcaattaccagaataggtccc

SEQ ID NO: 751445 - DNA, 33 bp, Homo sapien
aaccttagaagcactaacaattttgcttttttt

SEQ ID NO: 751446 - DNA, 33 bp, Homo sapien
aaccttagaagcactaccaattttgcttttttt

SEQ ID NO: 751447 - DNA, 33 bp, Homo sapien
gaaattctggatacaaacctttggtcatacata

SEQ ID NO: 751448 - DNA, 33 bp, Homo sapien
gaaattctggatacaaccctttggtcatacata

SEQ ID NO: 751449 - DNA, 33 bp, Homo sapien
ggaataaatgaggaccaaagagtaaaatggtag

SEQ ID NO: 751450 - DNA, 33 bp, Homo sapien
ggaataaatgaggaccgaagagtaaaatggtag

SEQ ID NO: 751451 - DNA, 33 bp, Homo sapien
tgtaaaaatggacagacgagatgagacagtggt

SEQ ID NO: 751452 - DNA, 33 bp, Homo sapien
tgtaaaaatggacagatgagatgagacagtggt

SEQ ID NO: 751453 - DNA, 33 bp, Homo sapien
ttattgcagctttagaggagataatacaaatct

SEQ ID NO: 751454 - DNA, 33 bp, Homo sapien
ttattgcagctttagatgagataatacaaatct

SEQ ID NO: 751455 - DNA, 33 bp, Homo sapien
caaatgattccctgtggagaaagtgacaaattc

SEQ ID NO: 751456 - DNA, 33 bp, Homo sapien
caaatgattccctgtgtagaaagtgacaaattc

SEQ ID NO: 751457 - DNA, 33 bp, Homo sapien
gaactgtgctaagtgcacactatgcttttgatc

SEQ ID NO: 751458 - DNA, 33 bp, Homo sapien
gaactgtgctaagtgcgcactatgcttttgatc

SEQ ID NO: 751459 - DNA, 33 bp, Homo sapien
tcctgttgttctataaccttctagaagatcaaa

SEQ ID NO: 751460 - DNA, 33 bp, Homo sapien
tcctgttgttctataagcttctagaagatcaaa

SEQ ID NO: 751461 - DNA, 33 bp, Homo sapien
tttcccaggatgtccaaacttcagagttaactt

SEQ ID NO: 751462 - DNA, 33 bp, Homo sapien
tttcccaggatgtccagacttcagagttaactt

SEQ ID NO: 751463 - DNA, 33 bp, Homo sapien
cttttccttcggtgtacatccatgaatacaacc

SEQ ID NO: 751464 - DNA, 33 bp, Homo sapien
cttttccttcggtgtatatccatgaatacaacc

SEQ ID NO: 751465 - DNA, 33 bp, Homo sapien
tatttaatgttatacaacccatgtttgctttat

SEQ ID NO: 751466 - DNA, 33 bp, Homo sapien
tatttaatgttatacatcccatgtttgctttat

SEQ ID NO: 751467 - DNA, 33 bp, Homo sapien
cacacatattcagttcactgtgaaatccgtcca

SEQ ID NO: 751468 - DNA, 33 bp, Homo sapien
cacacatattcagttcgctgtgaaatccgtcca

SEQ ID NO: 751469 - DNA, 33 bp, Homo sapien
atgtcacagactcctagctcgggacaatgctca

SEQ ID NO: 751470 - DNA, 33 bp, Homo sapien
atgtcacagactcctatctcgggacaatgctca

SEQ ID NO: 751471 - DNA, 33 bp, Homo sapien
tataattaaacagttaagatcgtaacaaatcat

SEQ ID NO: 751472 - DNA, 33 bp, Homo sapien
tataattaaacagttatgatcgtaacaaatcat

SEQ ID NO: 751473 - DNA, 33 bp, Homo sapien
tcatgtgtaacaatgaaaggctgctcaaagggt

SEQ ID NO: 751474 - DNA, 33 bp, Homo sapien
tcatgtgtaacaatgacaggctgctcaaagggt

SEQ ID NO: 751475 - DNA, 33 bp, Homo sapien
aaaaggataccagaaacgaggctactgtggaat

SEQ ID NO: 751476 - DNA, 33 bp, Homo sapien
aaaaggataccagaaatgaggctactgtggaat

SEQ ID NO: 751477 - DNA, 33 bp, Homo sapien
tcatattttcaatacgaaacatacgtcaccatt

SEQ ID NO: 751478 - DNA, 33 bp, Homo sapien
tcatattttcaatacggaacatacgtcaccatt

SEQ ID NO: 751479 - DNA, 33 bp, Homo sapien
taggggcactttggggacattttggtttggcat

SEQ ID NO: 751480 - DNA, 33 bp, Homo sapien
taggggcactttgggggcattttggtttggcat

SEQ ID NO: 751481 - DNA, 33 bp, Homo sapien
ggcttctaataggataagcgacttcttcaccac

SEQ ID NO: 751482 - DNA, 33 bp, Homo sapien
ggcttctaataggataggcgacttcttcaccac

SEQ ID NO: 751483 - DNA, 33 bp, Homo sapien
ttctttctttctaagacgcacgcctgggccacc

SEQ ID NO: 751484 - DNA, 33 bp, Homo sapien
ttctttctttctaagatgcacgcctgggccacc

SEQ ID NO: 751485 - DNA, 33 bp, Homo sapien
atgcacaaaaatgaaaatcaccccaattccatc

SEQ ID NO: 751486 - DNA, 33 bp, Homo sapien
atgcacaaaaatgaaactcaccccaattccatc

SEQ ID NO: 751487 - DNA, 33 bp, Homo sapien
accctggagagccttcactgggaattgaaaatg

SEQ ID NO: 751488 - DNA, 33 bp, Homo sapien
accctggagagccttcgctgggaattgaaaatg

SEQ ID NO: 751489 - DNA, 33 bp, Homo sapien
gccctaagtgttaaaagattgcagaaacattat

SEQ ID NO: 751490 - DNA, 33 bp, Homo sapien
gccctaagtgttaaaatattgcagaaacattat

SEQ ID NO: 751491 - DNA, 33 bp, Homo sapien
ttacgttttaaaacaaatcaccaaaagagaaca

SEQ ID NO: 751492 - DNA, 33 bp, Homo sapien
ttacgttttaaaacaagtcaccaaaagagaaca

SEQ ID NO: 751493 - DNA, 33 bp, Homo sapien
agtgttaaaatacagggagttctaagccttaca

SEQ ID NO: 751494 - DNA, 33 bp, Homo sapien
agtgttaaaatacaggtagttctaagccttaca

SEQ ID NO: 751495 - DNA, 33 bp, Homo sapien
aagtccctagtaaaagacataataaatgcaaat

SEQ ID NO: 751496 - DNA, 33 bp, Homo sapien
aagtccctagtaaaaggcataataaatgcaaat

SEQ ID NO: 751497 - DNA, 33 bp, Homo sapien
cctggccaaaacagacaggctatcaccccatat

SEQ ID NO: 751498 - DNA, 33 bp, Homo sapien
cctggccaaaacagactggctatcaccccatat

SEQ ID NO: 751499 - DNA, 33 bp, Homo sapien
tcatactttgctggacacctggattcttctacc

SEQ ID NO: 751500 - DNA, 33 bp, Homo sapien
tcatactttgctggactcctggattcttctacc

SEQ ID NO: 751501 - DNA, 33 bp, Homo sapien
tgagctctcttagtggcattcagcaaatggtca

SEQ ID NO: 751502 - DNA, 33 bp, Homo sapien
tgagctctcttagtgggattcagcaaatggtca

SEQ ID NO: 751503 - DNA, 33 bp, Homo sapien
ctacaaaggcagagtacagtcttgtgaaggctg

SEQ ID NO: 751504 - DNA, 33 bp, Homo sapien
ctacaaaggcagagtagagtcttgtgaaggctg

SEQ ID NO: 751505 - DNA, 33 bp, Homo sapien
tttgtaacccaaagaaatccataaatcacagag

SEQ ID NO: 751506 - DNA, 33 bp, Homo sapien
tttgtaacccaaagaagtccataaatcacagag

SEQ ID NO: 751507 - DNA, 33 bp, Homo sapien
gaaataacactcttgtgcagtaagcgttcagta

SEQ ID NO: 751508 - DNA, 33 bp, Homo sapien
gaaataacactcttgttcagtaagcgttcagta

SEQ ID NO: 751509 - DNA, 33 bp, Homo sapien
ccctgtggccatgtcccagaagccctgcctcct

SEQ ID NO: 751510 - DNA, 33 bp, Homo sapien
ccctgtggccatgtcctagaagccctgcctcct

SEQ ID NO: 751511 - DNA, 33 bp, Homo sapien
ttactcacaataaactcaatgaggatcacataa

SEQ ID NO: 751512 - DNA, 33 bp, Homo sapien
ttactcacaataaacttaatgaggatcacataa

SEQ ID NO: 751513 - DNA, 33 bp, Homo sapien
atattcaactttttaagatgccaggccttttgt

SEQ ID NO: 751514 - DNA, 33 bp, Homo sapien
atattcaactttttaatatgccaggccttttgt

SEQ ID NO: 751515 - DNA, 33 bp, Homo sapien
caaaaaaatctgtggccatcttgaatccaccac

SEQ ID NO: 751516 - DNA, 33 bp, Homo sapien
caaaaaaatctgtggctatcttgaatccaccac

SEQ ID NO: 751517 - DNA, 33 bp, Homo sapien
tgtattctttccaggcagcagttgttatggaca

SEQ ID NO: 751518 - DNA, 33 bp, Homo sapien
tgtattctttccaggcggcagttgttatggaca

SEQ ID NO: 751519 - DNA, 33 bp, Homo sapien
ccttgaagatccttgccgactaccctaagcatg

SEQ ID NO: 751520 - DNA, 33 bp, Homo sapien
ccttgaagatccttgctgactaccctaagcatg

SEQ ID NO: 751521 - DNA, 33 bp, Homo sapien
agacatgaagaaagtcaaaagtgaaggctgagc

SEQ ID NO: 751522 - DNA, 33 bp, Homo sapien
agacatgaagaaagtccaaagtgaaggctgagc

SEQ ID NO: 751523 - DNA, 33 bp, Homo sapien
tgaagtctttgggccacgtctgtaatgatctga

SEQ ID NO: 751524 - DNA, 33 bp, Homo sapien
tgaagtctttgggccaggtctgtaatgatctga

SEQ ID NO: 751525 - DNA, 33 bp, Homo sapien
tctcggcagtaccagccgctgactctctgtccc

SEQ ID NO: 751526 - DNA, 33 bp, Homo sapien
tctcggcagtaccagctgctgactctctgtccc

SEQ ID NO: 751527 - DNA, 33 bp, Homo sapien
agaagtccaggctcagcaaaggtgtctgtcctg

SEQ ID NO: 751528 - DNA, 33 bp, Homo sapien
agaagtccaggctcagtaaaggtgtctgtcctg

SEQ ID NO: 751529 - DNA, 33 bp, Homo sapien
ccctgttctatccagaaggagtcttcgccacaa

SEQ ID NO: 751530 - DNA, 33 bp, Homo sapien
ccctgttctatccagagggagtcttcgccacaa

SEQ ID NO: 751531 - DNA, 33 bp, Homo sapien
gaacaggaaacagatgccaccttgagctgcctg

SEQ ID NO: 751532 - DNA, 33 bp, Homo sapien
gaacaggaaacagatgtcaccttgagctgcctg

SEQ ID NO: 751533 - DNA, 33 bp, Homo sapien
ccattccaacttcctcacagcgcctggtgaagg

SEQ ID NO: 751534 - DNA, 33 bp, Homo sapien
ccattccaacttcctcgcagcgcctggtgaagg

SEQ ID NO: 751535 - DNA, 33 bp, Homo sapien
ggaaacatttaaagaaaagcgatcaactccaag

SEQ ID NO: 751536 - DNA, 33 bp, Homo sapien
ggaaacatttaaagaagagcgatcaactccaag

SEQ ID NO: 751537 - DNA, 33 bp, Homo sapien
ctaaactagacagagcaagaatagaaataggat

SEQ ID NO: 751538 - DNA, 33 bp, Homo sapien
ctaaactagacagagcgagaatagaaataggat

SEQ ID NO: 751539 - DNA, 33 bp, Homo sapien
ttcctgatgggagaccaccgaccccagagtggt

SEQ ID NO: 751540 - DNA, 33 bp, Homo sapien
ttcctgatgggagaccgccgaccccagagtggt

SEQ ID NO: 751541 - DNA, 33 bp, Homo sapien
ctttccaacttaggaaactcgtcattcttcagc

SEQ ID NO: 751542 - DNA, 33 bp, Homo sapien
ctttccaacttaggaacctcgtcattcttcagc

SEQ ID NO: 751543 - DNA, 33 bp, Homo sapien
agaaatcaggctagtacgttagaataggtttaa

SEQ ID NO: 751544 - DNA, 33 bp, Homo sapien
agaaatcaggctagtatgttagaataggtttaa

SEQ ID NO: 751545 - DNA, 33 bp, Homo sapien
cagaatcctccatttacatttgcgtgttactga

SEQ ID NO: 751546 - DNA, 33 bp, Homo sapien
cagaatcctccatttatatttgcgtgttactga

SEQ ID NO: 751547 - DNA, 33 bp, Homo sapien
ctacatggactctggcaattttttaaagcatat

SEQ ID NO: 751548 - DNA, 33 bp, Homo sapien
ctacatggactctggcgattttttaaagcatat

SEQ ID NO: 751549 - DNA, 33 bp, Homo sapien
tgaatccttggaagaacgcatagccacccgctt

SEQ ID NO: 751550 - DNA, 33 bp, Homo sapien
tgaatccttggaagaatgcatagccacccgctt

SEQ ID NO: 751551 - DNA, 33 bp, Homo sapien
taggaggtcttccttacacctttctgctgcctc

SEQ ID NO: 751552 - DNA, 33 bp, Homo sapien
taggaggtcttccttatacctttctgctgcctc

SEQ ID NO: 751553 - DNA, 33 bp, Homo sapien
gcaagtcaaacgccacaaattcccaaaaagggc

SEQ ID NO: 751554 - DNA, 33 bp, Homo sapien
gcaagtcaaacgccacgaattcccaaaaagggc

SEQ ID NO: 751555 - DNA, 33 bp, Homo sapien
tgttagcatggccaaacgatctgtttttaatgt

SEQ ID NO: 751556 - DNA, 33 bp, Homo sapien
tgttagcatggccaaatgatctgtttttaatgt

SEQ ID NO: 751557 - DNA, 33 bp, Homo sapien
tctatgtatatttcgaaaaagtgggtaatatac

SEQ ID NO: 751558 - DNA, 33 bp, Homo sapien
tctatgtatatttcgacaaagtgggtaatatac

SEQ ID NO: 751559 - DNA, 33 bp, Homo sapien
agactacctgttttagaatttcgccaagatttc

SEQ ID NO: 751560 - DNA, 33 bp, Homo sapien
agactacctgttttagtatttcgccaagatttc

SEQ ID NO: 751561 - DNA, 33 bp, Homo sapien
ttggctttgagcatgcaatgaaatcaagatcga

SEQ ID NO: 751562 - DNA, 33 bp, Homo sapien
ttggctttgagcatgcgatgaaatcaagatcga

SEQ ID NO: 751563 - DNA, 33 bp, Homo sapien
ttctgtagtgatttaacggcaagaggagtgcag

SEQ ID NO: 751564 - DNA, 33 bp, Homo sapien
ttctgtagtgatttaatggcaagaggagtgcag

SEQ ID NO: 751565 - DNA, 33 bp, Homo sapien
tcaagtaaacaaacaaccgtatgacttttatcc

SEQ ID NO: 751566 - DNA, 33 bp, Homo sapien
tcaagtaaacaaacaatcgtatgacttttatcc

SEQ ID NO: 751567 - DNA, 33 bp, Homo sapien
atgaaggatcttttgccaaatccataacccaag

SEQ ID NO: 751568 - DNA, 33 bp, Homo sapien
atgaaggatcttttgctaaatccataacccaag

SEQ ID NO: 751569 - DNA, 33 bp, Homo sapien
gtgcagagcaccatgaagatcaaacctgcattc

SEQ ID NO: 751570 - DNA, 33 bp, Homo sapien
gtgcagagcaccatgaggatcaaacctgcattc

SEQ ID NO: 751571 - DNA, 33 bp, Homo sapien
ctgagcatacagcccaaccacgggcatgacact

SEQ ID NO: 751572 - DNA, 33 bp, Homo sapien
ctgagcatacagcccagccacgggcatgacact

SEQ ID NO: 751573 - DNA, 33 bp, Homo sapien
aaaattatctctaaaaggcaagttagatggtgc

SEQ ID NO: 751574 - DNA, 33 bp, Homo sapien
aaaattatctctaaaatgcaagttagatggtgc

SEQ ID NO: 751575 - DNA, 33 bp, Homo sapien
caggtcagattgagagaagctgtaccaaggaac

SEQ ID NO: 751576 - DNA, 33 bp, Homo sapien
caggtcagattgagaggagctgtaccaaggaac

SEQ ID NO: 751577 - DNA, 33 bp, Homo sapien
aaagccccttgcatgacggcacaggatctcata

SEQ ID NO: 751578 - DNA, 33 bp, Homo sapien
aaagccccttgcatgatggcacaggatctcata

SEQ ID NO: 751579 - DNA, 33 bp, Homo sapien
ccatggtgcacctaaaaagaaacgctgtagagt

SEQ ID NO: 751580 - DNA, 33 bp, Homo sapien
ccatggtgcacctaaacagaaacgctgtagagt

SEQ ID NO: 751581 - DNA, 33 bp, Homo sapien
tgaagagcttccaaatcatcttaagaaagacag

SEQ ID NO: 751582 - DNA, 33 bp, Homo sapien
tgaagagcttccaaatgatcttaagaaagacag

SEQ ID NO: 751583 - DNA, 33 bp, Homo sapien
gggctgcttttccacaaccagagaaggtttgga

SEQ ID NO: 751584 - DNA, 33 bp, Homo sapien
gggctgcttttccacagccagagaaggtttgga

SEQ ID NO: 751585 - DNA, 33 bp, Homo sapien
tcttcaaagacaagacacccagattgcgggatg

SEQ ID NO: 751586 - DNA, 33 bp, Homo sapien
tcttcaaagacaagacgcccagattgcgggatg

SEQ ID NO: 751587 - DNA, 33 bp, Homo sapien
gttctgagtctttcaacgacactcccattacac

SEQ ID NO: 751588 - DNA, 33 bp, Homo sapien
gttctgagtctttcaaggacactcccattacac

SEQ ID NO: 751589 - DNA, 33 bp, Homo sapien
tttgacatcttggtgacatttagccctctggaa

SEQ ID NO: 751590 - DNA, 33 bp, Homo sapien
tttgacatcttggtgatatttagccctctggaa

SEQ ID NO: 751591 - DNA, 33 bp, Homo sapien
cccctgctggtgcataaacatctgaggtttgct

SEQ ID NO: 751592 - DNA, 33 bp, Homo sapien
cccctgctggtgcatagacatctgaggtttgct

SEQ ID NO: 751593 - DNA, 33 bp, Homo sapien
atatttctaaatgtaaagtaatcatgcaaataa

SEQ ID NO: 751594 - DNA, 33 bp, Homo sapien
atatttctaaatgtaaggtaatcatgcaaataa

SEQ ID NO: 751595 - DNA, 33 bp, Homo sapien
gctcaccttcctctcaatactcagaccctccat

SEQ ID NO: 751596 - DNA, 33 bp, Homo sapien
gctcaccttcctctcagtactcagaccctccat

SEQ ID NO: 751597 - DNA, 33 bp, Homo sapien
cctcagccagcaggacacttagggacctttttt

SEQ ID NO: 751598 - DNA, 33 bp, Homo sapien
cctcagccagcaggacgcttagggacctttttt

SEQ ID NO: 751599 - DNA, 33 bp, Homo sapien
acgcacagagggcatcacacagatgggggcagg

SEQ ID NO: 751600 - DNA, 33 bp, Homo sapien
acgcacagagggcatcgcacagatgggggcagg

SEQ ID NO: 751601 - DNA, 33 bp, Homo sapien
atactgaggggtaaaagtaaccagagctgactc

SEQ ID NO: 751602 - DNA, 33 bp, Homo sapien
atactgaggggtaaaattaaccagagctgactc

SEQ ID NO: 751603 - DNA, 33 bp, Homo sapien
cgtcccatttattctacagggcttgtgaattcc

SEQ ID NO: 751604 - DNA, 33 bp, Homo sapien
cgtcccatttattctatagggcttgtgaattcc

SEQ ID NO: 751605 - DNA, 33 bp, Homo sapien
tgttgacatttgaaaccgaatgtatagggtgca

SEQ ID NO: 751606 - DNA, 33 bp, Homo sapien
tgttgacatttgaaactgaatgtatagggtgca

SEQ ID NO: 751607 - DNA, 33 bp, Homo sapien
gaagaaaacgaagagaagacagcagaggcagac

SEQ ID NO: 751608 - DNA, 33 bp, Homo sapien
gaagaaaacgaagagaggacagcagaggcagac

SEQ ID NO: 751609 - DNA, 33 bp, Homo sapien
tgccgctttgttttagaagatgaagaattcttt

SEQ ID NO: 751610 - DNA, 33 bp, Homo sapien
tgccgctttgttttaggagatgaagaattcttt

SEQ ID NO: 751611 - DNA, 33 bp, Homo sapien
attcactgagttgtcacgcaaatgccgtcatca

SEQ ID NO: 751612 - DNA, 33 bp, Homo sapien
attcactgagttgtcatgcaaatgccgtcatca

SEQ ID NO: 751613 - DNA, 33 bp, Homo sapien
tgcatttttctctaaacccataacttctctaac

SEQ ID NO: 751614 - DNA, 33 bp, Homo sapien
tgcatttttctctaaatccataacttctctaac

SEQ ID NO: 751615 - DNA, 33 bp, Homo sapien
aggcagaccctggacacgtttctgtgcccgctg

SEQ ID NO: 751616 - DNA, 33 bp, Homo sapien
aggcagaccctggacatgtttctgtgcccgctg

SEQ ID NO: 751617 - DNA, 33 bp, Homo sapien
aggcctgtgaccgggaaggggctgagtccaagc

SEQ ID NO: 751618 - DNA, 33 bp, Homo sapien
aggcctgtgaccgggagggggctgagtccaagc

SEQ ID NO: 751619 - DNA, 33 bp, Homo sapien
aactcctcaaataaaagtgcccttcatgataat

SEQ ID NO: 751620 - DNA, 33 bp, Homo sapien
aactcctcaaataaaattgcccttcatgataat

SEQ ID NO: 751621 - DNA, 33 bp, Homo sapien
gctatcacggctactaataggtggtataatatc

SEQ ID NO: 751622 - DNA, 33 bp, Homo sapien
gctatcacggctactattaggtggtataatatc

SEQ ID NO: 751623 - DNA, 33 bp, Homo sapien
aggtcttcaagggatcaatatggcacgagagca

SEQ ID NO: 751624 - DNA, 33 bp, Homo sapien
aggtcttcaagggatcgatatggcacgagagca

SEQ ID NO: 751625 - DNA, 33 bp, Homo sapien
gcacggaacatttcacaaggatgaacgtcagtt

SEQ ID NO: 751626 - DNA, 33 bp, Homo sapien
gcacggaacatttcacgaggatgaacgtcagtt

SEQ ID NO: 751627 - DNA, 33 bp, Homo sapien
aaaaaatttgcatacaaaagtgttgaattggag

SEQ ID NO: 751628 - DNA, 33 bp, Homo sapien
aaaaaatttgcatacagaagtgttgaattggag

SEQ ID NO: 751629 - DNA, 33 bp, Homo sapien
tctatgaaaaatcccaaggcatctacaaaacat

SEQ ID NO: 751630 - DNA, 33 bp, Homo sapien
tctatgaaaaatcccagggcatctacaaaacat

SEQ ID NO: 751631 - DNA, 33 bp, Homo sapien
aatatgatgcacaaaacctctacctggaaaatt

SEQ ID NO: 751632 - DNA, 33 bp, Homo sapien
aatatgatgcacaaaatctctacctggaaaatt

SEQ ID NO: 751633 - DNA, 33 bp, Homo sapien
aagttttactttgacactgatggaacctgggta

SEQ ID NO: 751634 - DNA, 33 bp, Homo sapien
aagttttactttgacattgatggaacctgggta

SEQ ID NO: 751635 - DNA, 33 bp, Homo sapien
atgtgtacagcctaaacgttccagttaaaagtg

SEQ ID NO: 751636 - DNA, 33 bp, Homo sapien
atgtgtacagcctaaatgttccagttaaaagtg

SEQ ID NO: 751637 - DNA, 33 bp, Homo sapien
tccagagaggaaggaaatgatcccacaaagagt

SEQ ID NO: 751638 - DNA, 33 bp, Homo sapien
tccagagaggaaggaagtgatcccacaaagagt

SEQ ID NO: 751639 - DNA, 33 bp, Homo sapien
actaggttatggcatacagtttagtgggcaggg

SEQ ID NO: 751640 - DNA, 33 bp, Homo sapien
actaggttatggcatagagtttagtgggcaggg

SEQ ID NO: 751641 - DNA, 33 bp, Homo sapien
tatctgtgtgagtcctaaatccaatggcagtca

SEQ ID NO: 751642 - DNA, 33 bp, Homo sapien
tatctgtgtgagtcctgaatccaatggcagtca

SEQ ID NO: 751643 - DNA, 33 bp, Homo sapien
aatcaccacattgaaaattatgccttaataatg

SEQ ID NO: 751644 - DNA, 33 bp, Homo sapien
aatcaccacattgaaagttatgccttaataatg

SEQ ID NO: 751645 - DNA, 33 bp, Homo sapien
tgctaagtgaatgttcaactttgtaagaaactt

SEQ ID NO: 751646 - DNA, 33 bp, Homo sapien
tgctaagtgaatgttcgactttgtaagaaactt

SEQ ID NO: 751647 - DNA, 33 bp, Homo sapien
ttggcaagtatttcaaaatgtcatttataaaca

SEQ ID NO: 751648 - DNA, 33 bp, Homo sapien
ttggcaagtatttcaacatgtcatttataaaca

SEQ ID NO: 751649 - DNA, 33 bp, Homo sapien
atatatactggcacacaaactgttttgggcatt

SEQ ID NO: 751650 - DNA, 33 bp, Homo sapien
atatatactggcacaccaactgttttgggcatt

SEQ ID NO: 751651 - DNA, 33 bp, Homo sapien
aaaggaattcttgcaacgacagtcttgtagaac

SEQ ID NO: 751652 - DNA, 33 bp, Homo sapien
aaaggaattcttgcaatgacagtcttgtagaac

SEQ ID NO: 751653 - DNA, 33 bp, Homo sapien
tcttcattagccagaaaaactatgctttatttg

SEQ ID NO: 751654 - DNA, 33 bp, Homo sapien
tcttcattagccagaataactatgctttatttg

SEQ ID NO: 751655 - DNA, 33 bp, Homo sapien
tgatgtattggagtataaatcctcagaaatatc

SEQ ID NO: 751656 - DNA, 33 bp, Homo sapien
tgatgtattggagtatcaatcctcagaaatatc

SEQ ID NO: 751657 - DNA, 33 bp, Homo sapien
ctttgtgttctgaactaagcagataacaagagc

SEQ ID NO: 751658 - DNA, 33 bp, Homo sapien
ctttgtgttctgaactcagcagataacaagagc

SEQ ID NO: 751659 - DNA, 33 bp, Homo sapien
atcatgaaaagcaatgcagtcttacattgctca

SEQ ID NO: 751660 - DNA, 33 bp, Homo sapien
atcatgaaaagcaatggagtcttacattgctca

SEQ ID NO: 751661 - DNA, 33 bp, Homo sapien
agcttgtctcagagtgaaaaggattattacctc

SEQ ID NO: 751662 - DNA, 33 bp, Homo sapien
agcttgtctcagagtggaaaggattattacctc

SEQ ID NO: 751663 - DNA, 33 bp, Homo sapien
ttcttcggctttaatgaagaccttgattccgaa

SEQ ID NO: 751664 - DNA, 33 bp, Homo sapien
ttcttcggctttaatggagaccttgattccgaa

SEQ ID NO: 751665 - DNA, 33 bp, Homo sapien
gatggctctcagcagacggaaaatgcatccact

SEQ ID NO: 751666 - DNA, 33 bp, Homo sapien
gatggctctcagcagatggaaaatgcatccact

SEQ ID NO: 751667 - DNA, 33 bp, Homo sapien
aagtctggcaaaatgcaaaggactaggactgat

SEQ ID NO: 751668 - DNA, 33 bp, Homo sapien
aagtctggcaaaatgcgaaggactaggactgat

SEQ ID NO: 751669 - DNA, 33 bp, Homo sapien
cttgaactctggacaacgaaggaagcctttgga

SEQ ID NO: 751670 - DNA, 33 bp, Homo sapien
cttgaactctggacaatgaaggaagcctttgga

SEQ ID NO: 751671 - DNA, 33 bp, Homo sapien
tttagccttccttgccaaaagttacttagcgag

SEQ ID NO: 751672 - DNA, 33 bp, Homo sapien
tttagccttccttgccgaaagttacttagcgag

SEQ ID NO: 751673 - DNA, 33 bp, Homo sapien
atgtaaacagtcaccaagattagcaagcgtaag

SEQ ID NO: 751674 - DNA, 33 bp, Homo sapien
atgtaaacagtcaccaggattagcaagcgtaag

SEQ ID NO: 751675 - DNA, 33 bp, Homo sapien
ttctctacacttttaactaccaatcaataatac

SEQ ID NO: 751676 - DNA, 33 bp, Homo sapien
ttctctacacttttaattaccaatcaataatac

SEQ ID NO: 751677 - DNA, 33 bp, Homo sapien
tcatctccacttacccaggacttgcagaatgaa

SEQ ID NO: 751678 - DNA, 33 bp, Homo sapien
tcatctccacttaccctggacttgcagaatgaa

SEQ ID NO: 751679 - DNA, 33 bp, Homo sapien
gcagggaccacctagaagctcacagtcactgtg

SEQ ID NO: 751680 - DNA, 33 bp, Homo sapien
gcagggaccacctagacgctcacagtcactgtg

SEQ ID NO: 751681 - DNA, 33 bp, Homo sapien
tgcaacaggtgccccccataccaggctcccagg

SEQ ID NO: 751682 - DNA, 33 bp, Homo sapien
tgcaacaggtgccccctataccaggctcccagg

SEQ ID NO: 751683 - DNA, 33 bp, Homo sapien
tggctttctatcaaggacaatgttggttgcgca

SEQ ID NO: 751684 - DNA, 33 bp, Homo sapien
tggctttctatcaagggcaatgttggttgcgca

SEQ ID NO: 751685 - DNA, 33 bp, Homo sapien
atcaactatcacagcgacattgtaaacctgagt

SEQ ID NO: 751686 - DNA, 33 bp, Homo sapien
atcaactatcacagcggcattgtaaacctgagt

SEQ ID NO: 751687 - DNA, 33 bp, Homo sapien
acatgtgttctaaatggaattattcaataggca

SEQ ID NO: 751688 - DNA, 33 bp, Homo sapien
acatgtgttctaaatgtaattattcaataggca

SEQ ID NO: 751689 - DNA, 33 bp, Homo sapien
tgctttagttgttgaaagtgtaattaaagaagt

SEQ ID NO: 751690 - DNA, 33 bp, Homo sapien
tgctttagttgttgaatgtgtaattaaagaagt

SEQ ID NO: 751691 - DNA, 33 bp, Homo sapien
tcttagtacatcaggcgcagggaatatgagaaa

SEQ ID NO: 751692 - DNA, 33 bp, Homo sapien
tcttagtacatcaggctcagggaatatgagaaa

SEQ ID NO: 751693 - DNA, 33 bp, Homo sapien
tttctgcacagtcctacgtttgctaatgaatta

SEQ ID NO: 751694 - DNA, 33 bp, Homo sapien
tttctgcacagtcctaggtttgctaatgaatta

SEQ ID NO: 751695 - DNA, 33 bp, Homo sapien
gcctgcacagccaagaactttccttccaatggg

SEQ ID NO: 751696 - DNA, 33 bp, Homo sapien
gcctgcacagccaagagctttccttccaatggg

SEQ ID NO: 751697 - DNA, 33 bp, Homo sapien
ttctttttttgcataacgtttgtgtgttacttg

SEQ ID NO: 751698 - DNA, 33 bp, Homo sapien
ttctttttttgcataatgtttgtgtgttacttg

SEQ ID NO: 751699 - DNA, 33 bp, Homo sapien
tcggggaacacaaaacacacagggaagtcaccc

SEQ ID NO: 751700 - DNA, 33 bp, Homo sapien
tcggggaacacaaaacgcacagggaagtcaccc

SEQ ID NO: 751701 - DNA, 33 bp, Homo sapien
tatttgcagaatctaacagaaacaattggatgg

SEQ ID NO: 751702 - DNA, 33 bp, Homo sapien
tatttgcagaatctaagagaaacaattggatgg

SEQ ID NO: 751703 - DNA, 33 bp, Homo sapien
atttcttatgttcttacctgagactgctttaca

SEQ ID NO: 751704 - DNA, 33 bp, Homo sapien
atttcttatgttcttatctgagactgctttaca

SEQ ID NO: 751705 - DNA, 33 bp, Homo sapien
ctacgcttttggaagacatctaggaaggaaacc

SEQ ID NO: 751706 - DNA, 33 bp, Homo sapien
ctacgcttttggaagatatctaggaaggaaacc

SEQ ID NO: 751707 - DNA, 33 bp, Homo sapien
aagatatgaagcagtacgggttttattctgttt

SEQ ID NO: 751708 - DNA, 33 bp, Homo sapien
aagatatgaagcagtatgggttttattctgttt

SEQ ID NO: 751709 - DNA, 33 bp, Homo sapien
agagagatctcaaaaccgcaaaggtgatcataa

SEQ ID NO: 751710 - DNA, 33 bp, Homo sapien
agagagatctcaaaactgcaaaggtgatcataa

SEQ ID NO: 751711 - DNA, 33 bp, Homo sapien
gatgctggcttcacgaggctctggaaggagctc

SEQ ID NO: 751712 - DNA, 33 bp, Homo sapien
gatgctggcttcacgatgctctggaaggagctc

SEQ ID NO: 751713 - DNA, 33 bp, Homo sapien
cagaaagtgcccagtccactagagccagtgtaa

SEQ ID NO: 751714 - DNA, 33 bp, Homo sapien
cagaaagtgcccagtctactagagccagtgtaa

SEQ ID NO: 751715 - DNA, 33 bp, Homo sapien
ccactcatcactaataaaagccacttagatctt

SEQ ID NO: 751716 - DNA, 33 bp, Homo sapien
ccactcatcactaatagaagccacttagatctt

SEQ ID NO: 751717 - DNA, 33 bp, Homo sapien
gaccagggctagcacacattgaccataaagagc

SEQ ID NO: 751718 - DNA, 33 bp, Homo sapien
gaccagggctagcacatattgaccataaagagc

SEQ ID NO: 751719 - DNA, 33 bp, Homo sapien
gccagctgagcttcagaaactctgacgtttgga

SEQ ID NO: 751720 - DNA, 33 bp, Homo sapien
gccagctgagcttcaggaactctgacgtttgga

SEQ ID NO: 751721 - DNA, 33 bp, Homo sapien
acctaggaaaggtgaacgggtgcaagcatcaac

SEQ ID NO: 751722 - DNA, 33 bp, Homo sapien
acctaggaaaggtgaatgggtgcaagcatcaac

SEQ ID NO: 751723 - DNA, 33 bp, Homo sapien
atgggtctgcctgtgacggatccagggtcccaa

SEQ ID NO: 751724 - DNA, 33 bp, Homo sapien
atgggtctgcctgtgagggatccagggtcccaa

SEQ ID NO: 751725 - DNA, 33 bp, Homo sapien
ttataatttcaatggacattgccaagttgccca

SEQ ID NO: 751726 - DNA, 33 bp, Homo sapien
ttataatttcaatggatattgccaagttgccca

SEQ ID NO: 751727 - DNA, 33 bp, Homo sapien
caatttagcatcacaaaaagtgaacactgaagg

SEQ ID NO: 751728 - DNA, 33 bp, Homo sapien
caatttagcatcacaataagtgaacactgaagg

SEQ ID NO: 751729 - DNA, 33 bp, Homo sapien
atcaactccctcactcactgtgatacgcctgcc

SEQ ID NO: 751730 - DNA, 33 bp, Homo sapien
atcaactccctcactctctgtgatacgcctgcc

SEQ ID NO: 751731 - DNA, 33 bp, Homo sapien
tccctggcgccttcagcagaaactgtttgcgat

SEQ ID NO: 751732 - DNA, 33 bp, Homo sapien
tccctggcgccttcagtagaaactgtttgcgat

SEQ ID NO: 751733 - DNA, 33 bp, Homo sapien
ccttctcacatgggaacaagaataatgaagtta

SEQ ID NO: 751734 - DNA, 33 bp, Homo sapien
ccttctcacatgggaataagaataatgaagtta

SEQ ID NO: 751735 - DNA, 33 bp, Homo sapien
ttgcacacctttgtgaatacagttggcccatga

SEQ ID NO: 751736 - DNA, 33 bp, Homo sapien
ttgcacacctttgtgactacagttggcccatga

SEQ ID NO: 751737 - DNA, 33 bp, Homo sapien
ttttcaacctactcaacatgagacgatgagaat

SEQ ID NO: 751738 - DNA, 33 bp, Homo sapien
ttttcaacctactcaatatgagacgatgagaat

SEQ ID NO: 751739 - DNA, 33 bp, Homo sapien
acgatgagaatgaaaacgtttatcatgatccac

SEQ ID NO: 751740 - DNA, 33 bp, Homo sapien
acgatgagaatgaaaatgtttatcatgatccac

SEQ ID NO: 751741 - DNA, 33 bp, Homo sapien
tcttttgagctatttacctgggcttggtataag

SEQ ID NO: 751742 - DNA, 33 bp, Homo sapien
tcttttgagctatttatctgggcttggtataag

SEQ ID NO: 751743 - DNA, 33 bp, Homo sapien
tcaagaacacaggatacgcattcttttctaaca

SEQ ID NO: 751744 - DNA, 33 bp, Homo sapien
tcaagaacacaggatatgcattcttttctaaca

SEQ ID NO: 751745 - DNA, 33 bp, Homo sapien
atagtaaggatttagaagattagatgattttca

SEQ ID NO: 751746 - DNA, 33 bp, Homo sapien
atagtaaggatttagatgattagatgattttca

SEQ ID NO: 751747 - DNA, 33 bp, Homo sapien
ctagagaaggtcccttaaacagtcggcttcgaa

SEQ ID NO: 751748 - DNA, 33 bp, Homo sapien
ctagagaaggtcccttgaacagtcggcttcgaa

SEQ ID NO: 751749 - DNA, 33 bp, Homo sapien
aagccaaaaaattggacgtccctgttctagatg

SEQ ID NO: 751750 - DNA, 33 bp, Homo sapien
aagccaaaaaattggatgtccctgttctagatg

SEQ ID NO: 751751 - DNA, 33 bp, Homo sapien
accccagaatctttgcacctcactatgtggtcc

SEQ ID NO: 751752 - DNA, 33 bp, Homo sapien
accccagaatctttgcgcctcactatgtggtcc

SEQ ID NO: 751753 - DNA, 33 bp, Homo sapien
acagaatgaagggtaaaaattatatgatcatct

SEQ ID NO: 751754 - DNA, 33 bp, Homo sapien
acagaatgaagggtaagaattatatgatcatct

SEQ ID NO: 751755 - DNA, 33 bp, Homo sapien
tttttttgtctgattacgtcatttcaaaaagtt

SEQ ID NO: 751756 - DNA, 33 bp, Homo sapien
tttttttgtctgattatgtcatttcaaaaagtt

SEQ ID NO: 751757 - DNA, 33 bp, Homo sapien
aataaagttgtgtgggaaaaaggtggcagaagg

SEQ ID NO: 751758 - DNA, 33 bp, Homo sapien
aataaagttgtgtggggaaaaggtggcagaagg

SEQ ID NO: 751759 - DNA, 33 bp, Homo sapien
gtgccaaatagtctggcaaaaaaattgaaaatg

SEQ ID NO: 751760 - DNA, 33 bp, Homo sapien
gtgccaaatagtctgggaaaaaaattgaaaatg

SEQ ID NO: 751761 - DNA, 33 bp, Homo sapien
aaaaagcacatgtctcaaaccattgcttctgtg

SEQ ID NO: 751762 - DNA, 33 bp, Homo sapien
aaaaagcacatgtctcgaaccattgcttctgtg

SEQ ID NO: 751763 - DNA, 33 bp, Homo sapien
tagagaaataaatgccacttgttgtggtgaaat

SEQ ID NO: 751764 - DNA, 33 bp, Homo sapien
tagagaaataaatgccccttgttgtggtgaaat

SEQ ID NO: 751765 - DNA, 33 bp, Homo sapien
cagcttgcaggaagcaacaagtttcatgtagag

SEQ ID NO: 751766 - DNA, 33 bp, Homo sapien
cagcttgcaggaagcagcaagtttcatgtagag

SEQ ID NO: 751767 - DNA, 33 bp, Homo sapien
cccagtcagactccaaacaatgtcgtggccagg

SEQ ID NO: 751768 - DNA, 33 bp, Homo sapien
cccagtcagactccaaccaatgtcgtggccagg

SEQ ID NO: 751769 - DNA, 33 bp, Homo sapien
attctataaattgataaaaaggcaaacaagcat

SEQ ID NO: 751770 - DNA, 33 bp, Homo sapien
attctataaattgatagaaaggcaaacaagcat

SEQ ID NO: 751771 - DNA, 33 bp, Homo sapien
aagaaagcaacaaagaagcgtatataagtcagt

SEQ ID NO: 751772 - DNA, 33 bp, Homo sapien
aagaaagcaacaaagaggcgtatataagtcagt

SEQ ID NO: 751773 - DNA, 33 bp, Homo sapien
gtgttcattatatgtcagaagtcacacagaaac

SEQ ID NO: 751774 - DNA, 33 bp, Homo sapien
gtgttcattatatgtcggaagtcacacagaaac

SEQ ID NO: 751775 - DNA, 33 bp, Homo sapien
tgattgacccaacgaccagaggctgtttccgga

SEQ ID NO: 751776 - DNA, 33 bp, Homo sapien
tgattgacccaacgactagaggctgtttccgga

SEQ ID NO: 751777 - DNA, 33 bp, Homo sapien
ctccacaccgtgacccagaattgtccgactcat

SEQ ID NO: 751778 - DNA, 33 bp, Homo sapien
ctccacaccgtgacccggaattgtccgactcat

SEQ ID NO: 751779 - DNA, 33 bp, Homo sapien
ggtgaacaggcaccttgaagcaaggaggactgt

SEQ ID NO: 751780 - DNA, 33 bp, Homo sapien
ggtgaacaggcacctttaagcaaggaggactgt

SEQ ID NO: 751781 - DNA, 33 bp, Homo sapien
gattttagtgttgtaaagctttcattgtcctca

SEQ ID NO: 751782 - DNA, 33 bp, Homo sapien
gattttagtgttgtaaggctttcattgtcctca

SEQ ID NO: 751783 - DNA, 33 bp, Homo sapien
tgttcagacattctaacttacttcattagttca

SEQ ID NO: 751784 - DNA, 33 bp, Homo sapien
tgttcagacattctaatttacttcattagttca

SEQ ID NO: 751785 - DNA, 33 bp, Homo sapien
agggccttcgaatgtcgaggtgtcaaggagaga

SEQ ID NO: 751786 - DNA, 33 bp, Homo sapien
agggccttcgaatgtctaggtgtcaaggagaga

SEQ ID NO: 751787 - DNA, 33 bp, Homo sapien
acaggcattggcagaaagaaccagccaatctga

SEQ ID NO: 751788 - DNA, 33 bp, Homo sapien
acaggcattggcagaaggaaccagccaatctga

SEQ ID NO: 751789 - DNA, 33 bp, Homo sapien
actgagtgattatatgaagaggcaaatgccact

SEQ ID NO: 751790 - DNA, 33 bp, Homo sapien
actgagtgattatatggagaggcaaatgccact

SEQ ID NO: 751791 - DNA, 33 bp, Homo sapien
acactctcatgccagaagtaataaaaaatgttc

SEQ ID NO: 751792 - DNA, 33 bp, Homo sapien
acactctcatgccagaggtaataaaaaatgttc

SEQ ID NO: 751793 - DNA, 33 bp, Homo sapien
gtttagaaaactccaacctcacaacataactca

SEQ ID NO: 751794 - DNA, 33 bp, Homo sapien
gtttagaaaactccaagctcacaacataactca

SEQ ID NO: 751795 - DNA, 33 bp, Homo sapien
tgcagcaggaattccaagtttaaatgcactgca

SEQ ID NO: 751796 - DNA, 33 bp, Homo sapien
tgcagcaggaattccatgtttaaatgcactgca

SEQ ID NO: 751797 - DNA, 33 bp, Homo sapien
ggcttctgagggagaaattcccaagactacact

SEQ ID NO: 751798 - DNA, 33 bp, Homo sapien
ggcttctgagggagaagttcccaagactacact

SEQ ID NO: 751799 - DNA, 33 bp, Homo sapien
cggtgaggagcaaattaaaataaacctgatagc

SEQ ID NO: 751800 - DNA, 33 bp, Homo sapien
cggtgaggagcaaattgaaataaacctgatagc

SEQ ID NO: 751801 - DNA, 33 bp, Homo sapien
ggtgcagtactccaacagtcagccgggctccca

SEQ ID NO: 751802 - DNA, 33 bp, Homo sapien
ggtgcagtactccaacggtcagccgggctccca

SEQ ID NO: 751803 - DNA, 33 bp, Homo sapien
cacattcctcagatgcaagaacgtagcaagtgt

SEQ ID NO: 751804 - DNA, 33 bp, Homo sapien
cacattcctcagatgcgagaacgtagcaagtgt

SEQ ID NO: 751805 - DNA, 33 bp, Homo sapien
gagcagcgatcggacaaggttatgtaagaatct

SEQ ID NO: 751806 - DNA, 33 bp, Homo sapien
gagcagcgatcggacatggttatgtaagaatct

SEQ ID NO: 751807 - DNA, 33 bp, Homo sapien
tttcacacaggatcccactctatgcatggccag

SEQ ID NO: 751808 - DNA, 33 bp, Homo sapien
tttcacacaggatcccgctctatgcatggccag

SEQ ID NO: 751809 - DNA, 33 bp, Homo sapien
cagacacaggatacaaagacttatccctcaggg

SEQ ID NO: 751810 - DNA, 33 bp, Homo sapien
cagacacaggatacaaggacttatccctcaggg

SEQ ID NO: 751811 - DNA, 33 bp, Homo sapien
cttggaaccacaatgaacgtgtggctttgtcag

SEQ ID NO: 751812 - DNA, 33 bp, Homo sapien
cttggaaccacaatgagcgtgtggctttgtcag

SEQ ID NO: 751813 - DNA, 33 bp, Homo sapien
agattttgagtgtatacgccaaattagaaaaaa

SEQ ID NO: 751814 - DNA, 33 bp, Homo sapien
agattttgagtgtatatgccaaattagaaaaaa

SEQ ID NO: 751815 - DNA, 33 bp, Homo sapien
tacgacctccgagaccaacagttgtactggggt

SEQ ID NO: 751816 - DNA, 33 bp, Homo sapien
tacgacctccgagacctacagttgtactggggt

SEQ ID NO: 751817 - DNA, 33 bp, Homo sapien
cgttttctaaaagtgacgattgtctgagaaaac

SEQ ID NO: 751818 - DNA, 33 bp, Homo sapien
cgttttctaaaagtgatgattgtctgagaaaac

SEQ ID NO: 751819 - DNA, 33 bp, Homo sapien
acagctttcaggatccccatttcccaggaatca

SEQ ID NO: 751820 - DNA, 33 bp, Homo sapien
acagctttcaggatcctcatttcccaggaatca

SEQ ID NO: 751821 - DNA, 33 bp, Homo sapien
ctgatgaggctgcttaaaagtgatcattcagat

SEQ ID NO: 751822 - DNA, 33 bp, Homo sapien
ctgatgaggctgcttataagtgatcattcagat

SEQ ID NO: 751823 - DNA, 33 bp, Homo sapien
aggactggcccacaccactgttgacacacgttg

SEQ ID NO: 751824 - DNA, 33 bp, Homo sapien
aggactggcccacaccgctgttgacacacgttg

SEQ ID NO: 751825 - DNA, 33 bp, Homo sapien
atgctttttaaaggcacgatttctgtttcttct

SEQ ID NO: 751826 - DNA, 33 bp, Homo sapien
atgctttttaaaggcatgatttctgtttcttct

SEQ ID NO: 751827 - DNA, 33 bp, Homo sapien
gaccccagtcaaaccacgagtaaaccttaaata

SEQ ID NO: 751828 - DNA, 33 bp, Homo sapien
gaccccagtcaaaccatgagtaaaccttaaata

SEQ ID NO: 751829 - DNA, 33 bp, Homo sapien
tcactccgttcacccacgcacagtgaccaccgg

SEQ ID NO: 751830 - DNA, 33 bp, Homo sapien
tcactccgttcacccatgcacagtgaccaccgg

SEQ ID NO: 751831 - DNA, 33 bp, Homo sapien
cgggcctatgctttggacaaatgaacgtgatca

SEQ ID NO: 751832 - DNA, 33 bp, Homo sapien
cgggcctatgctttgggcaaatgaacgtgatca

SEQ ID NO: 751833 - DNA, 33 bp, Homo sapien
ggccaggaggcaacaccgcactcaaagtggggt

SEQ ID NO: 751834 - DNA, 33 bp, Homo sapien
ggccaggaggcaacactgcactcaaagtggggt

SEQ ID NO: 751835 - DNA, 33 bp, Homo sapien
tgatttatttcctgtaccttttcccacaatata

SEQ ID NO: 751836 - DNA, 33 bp, Homo sapien
tgatttatttcctgtagcttttcccacaatata

SEQ ID NO: 751837 - DNA, 33 bp, Homo sapien
aaacctctttgtttcacaattaccaagtctcgg

SEQ ID NO: 751838 - DNA, 33 bp, Homo sapien
aaacctctttgtttcataattaccaagtctcgg

SEQ ID NO: 751839 - DNA, 33 bp, Homo sapien
gatagaaacaaaataaaaagtctgaaggaaacc

SEQ ID NO: 751840 - DNA, 33 bp, Homo sapien
gatagaaacaaaataagaagtctgaaggaaacc

SEQ ID NO: 751841 - DNA, 33 bp, Homo sapien
gatccactgcactgagaacacagctccatttcc

SEQ ID NO: 751842 - DNA, 33 bp, Homo sapien
gatccactgcactgaggacacagctccatttcc

SEQ ID NO: 751843 - DNA, 33 bp, Homo sapien
tggatcgagggtctcacggtgttcatccatcca

SEQ ID NO: 751844 - DNA, 33 bp, Homo sapien
tggatcgagggtctcatggtgttcatccatcca

SEQ ID NO: 751845 - DNA, 33 bp, Homo sapien
ctgggaatgtgtagaagcagcgtttgctcttct

SEQ ID NO: 751846 - DNA, 33 bp, Homo sapien
ctgggaatgtgtagaatcagcgtttgctcttct

SEQ ID NO: 751847 - DNA, 33 bp, Homo sapien
ggtaaatgtaactaccactaacagaacacaaaa

SEQ ID NO: 751848 - DNA, 33 bp, Homo sapien
ggtaaatgtaactaccgctaacagaacacaaaa

SEQ ID NO: 751849 - DNA, 33 bp, Homo sapien
agttacaatgccaagacgctcgtggtctaccag

SEQ ID NO: 751850 - DNA, 33 bp, Homo sapien
agttacaatgccaagatgctcgtggtctaccag

SEQ ID NO: 751851 - DNA, 33 bp, Homo sapien
atagatgacaggacataaaaaaaagacaaatgt

SEQ ID NO: 751852 - DNA, 33 bp, Homo sapien
atagatgacaggacattaaaaaaagacaaatgt

SEQ ID NO: 751853 - DNA, 33 bp, Homo sapien
cccaagtcacatttctcaagtttcatattttta

SEQ ID NO: 751854 - DNA, 33 bp, Homo sapien
cccaagtcacatttctgaagtttcatattttta

SEQ ID NO: 751855 - DNA, 33 bp, Homo sapien
ccttgactgcactttgcaatcattaggcagctt

SEQ ID NO: 751856 - DNA, 33 bp, Homo sapien
ccttgactgcactttgtaatcattaggcagctt

SEQ ID NO: 751857 - DNA, 33 bp, Homo sapien
attctgactggtcttagatgctatctcattgtg

SEQ ID NO: 751858 - DNA, 33 bp, Homo sapien
attctgactggtcttatatgctatctcattgtg

SEQ ID NO: 751859 - DNA, 33 bp, Homo sapien
acctacagaatgagagaccatttttgcaaacta

SEQ ID NO: 751860 - DNA, 33 bp, Homo sapien
acctacagaatgagaggccatttttgcaaacta

SEQ ID NO: 751861 - DNA, 33 bp, Homo sapien
ctgggacatgcgattcacgtcgtaggcaaaggc

SEQ ID NO: 751862 - DNA, 33 bp, Homo sapien
ctgggacatgcgattcgcgtcgtaggcaaaggc

SEQ ID NO: 751863 - DNA, 33 bp, Homo sapien
ttattcttcacaatcacctttcaaccatcctga

SEQ ID NO: 751864 - DNA, 33 bp, Homo sapien
ttattcttcacaatcatctttcaaccatcctga

SEQ ID NO: 751865 - DNA, 33 bp, Homo sapien
atgggatgtaataatcagaaatatgtagttgat

SEQ ID NO: 751866 - DNA, 33 bp, Homo sapien
atgggatgtaataatcggaaatatgtagttgat

SEQ ID NO: 751867 - DNA, 33 bp, Homo sapien
taggtactctttctctaacaaagacctatttat

SEQ ID NO: 751868 - DNA, 33 bp, Homo sapien
taggtactctttctctgacaaagacctatttat

SEQ ID NO: 751869 - DNA, 33 bp, Homo sapien
aaatttattgattcccaatcatgagggtgtgca

SEQ ID NO: 751870 - DNA, 33 bp, Homo sapien
aaatttattgattcccgatcatgagggtgtgca

SEQ ID NO: 751871 - DNA, 33 bp, Homo sapien
tgtccgaagaaggaaacgcaagggtgaagaggc

SEQ ID NO: 751872 - DNA, 33 bp, Homo sapien
tgtccgaagaaggaaatgcaagggtgaagaggc

SEQ ID NO: 751873 - DNA, 33 bp, Homo sapien
ctcagcagatgctgggaagtgcgtgaattcatg

SEQ ID NO: 751874 - DNA, 33 bp, Homo sapien
ctcagcagatgctgggtagtgcgtgaattcatg

SEQ ID NO: 751875 - DNA, 33 bp, Homo sapien
agaatggaggctatgaaatgtaaaatctgaaaa

SEQ ID NO: 751876 - DNA, 33 bp, Homo sapien
agaatggaggctatgagatgtaaaatctgaaaa

SEQ ID NO: 751877 - DNA, 33 bp, Homo sapien
tggagaacggcattgacagaggcactgatgcct

SEQ ID NO: 751878 - DNA, 33 bp, Homo sapien
tggagaacggcattgagagaggcactgatgcct

SEQ ID NO: 751879 - DNA, 33 bp, Homo sapien
tcaagctgaaaaaggaggctcatctttgattct

SEQ ID NO: 751880 - DNA, 33 bp, Homo sapien
tcaagctgaaaaaggatgctcatctttgattct

SEQ ID NO: 751881 - DNA, 33 bp, Homo sapien
tgaaaatttgccaagaaaatcaattttagctgc

SEQ ID NO: 751882 - DNA, 33 bp, Homo sapien
tgaaaatttgccaagagaatcaattttagctgc

SEQ ID NO: 751883 - DNA, 33 bp, Homo sapien
aatgatgacgaagtcaagaacttaacccatcca

SEQ ID NO: 751884 - DNA, 33 bp, Homo sapien
aatgatgacgaagtcaggaacttaacccatcca

SEQ ID NO: 751885 - DNA, 33 bp, Homo sapien
aaattcaacacgactcagagtacaaaacccctc

SEQ ID NO: 751886 - DNA, 33 bp, Homo sapien
aaattcaacacgactcggagtacaaaacccctc

SEQ ID NO: 751887 - DNA, 33 bp, Homo sapien
aaggagacctctaccactgaaactcagacagac

SEQ ID NO: 751888 - DNA, 33 bp, Homo sapien
aaggagacctctaccattgaaactcagacagac

SEQ ID NO: 751889 - DNA, 33 bp, Homo sapien
ctccttgaaattgccaactcttaaatgcaggct

SEQ ID NO: 751890 - DNA, 33 bp, Homo sapien
ctccttgaaattgccacctcttaaatgcaggct

SEQ ID NO: 751891 - DNA, 33 bp, Homo sapien
atgctgtctaaagaacaaccaggctggactgag

SEQ ID NO: 751892 - DNA, 33 bp, Homo sapien
atgctgtctaaagaaccaccaggctggactgag

SEQ ID NO: 751893 - DNA, 33 bp, Homo sapien
aactctgtcttccactaaaacaaccagatccct

SEQ ID NO: 751894 - DNA, 33 bp, Homo sapien
aactctgtcttccactcaaacaaccagatccct

SEQ ID NO: 751895 - DNA, 33 bp, Homo sapien
ctgtttctgagggacaataattaatgagctttc

SEQ ID NO: 751896 - DNA, 33 bp, Homo sapien
ctgtttctgagggacagtaattaatgagctttc

SEQ ID NO: 751897 - DNA, 33 bp, Homo sapien
catacctgagttttaccacttttatgtaattgg

SEQ ID NO: 751898 - DNA, 33 bp, Homo sapien
catacctgagttttacgacttttatgtaattgg

SEQ ID NO: 751899 - DNA, 33 bp, Homo sapien
gaattatatgcccacaatgaaggacaaagggat

SEQ ID NO: 751900 - DNA, 33 bp, Homo sapien
gaattatatgcccacagtgaaggacaaagggat

SEQ ID NO: 751901 - DNA, 33 bp, Homo sapien
cagaagttttcacctcaactgcatatgcagcaa

SEQ ID NO: 751902 - DNA, 33 bp, Homo sapien
cagaagttttcacctccactgcatatgcagcaa

SEQ ID NO: 751903 - DNA, 33 bp, Homo sapien
tcagcaatggaaagacaaacacggttgggaact

SEQ ID NO: 751904 - DNA, 33 bp, Homo sapien
tcagcaatggaaagacgaacacggttgggaact

SEQ ID NO: 751905 - DNA, 33 bp, Homo sapien
tttccattgctgatacagattctccaaaatgta

SEQ ID NO: 751906 - DNA, 33 bp, Homo sapien
tttccattgctgataccgattctccaaaatgta

SEQ ID NO: 751907 - DNA, 33 bp, Homo sapien
atcagcgggcataggcaaaagtggaacccagct

SEQ ID NO: 751908 - DNA, 33 bp, Homo sapien
atcagcgggcataggcgaaagtggaacccagct

SEQ ID NO: 751909 - DNA, 33 bp, Homo sapien
ggattttcccttggaccagtgtggaaggcagtg

SEQ ID NO: 751910 - DNA, 33 bp, Homo sapien
ggattttcccttggactagtgtggaaggcagtg

SEQ ID NO: 751911 - DNA, 33 bp, Homo sapien
acatccttagtagacaaatcggtgagatgcagt

SEQ ID NO: 751912 - DNA, 33 bp, Homo sapien
acatccttagtagacacatcggtgagatgcagt

SEQ ID NO: 751913 - DNA, 33 bp, Homo sapien
gaagcaattttcaagacaccgtccagaatgagt

SEQ ID NO: 751914 - DNA, 33 bp, Homo sapien
gaagcaattttcaagataccgtccagaatgagt

SEQ ID NO: 751915 - DNA, 33 bp, Homo sapien
agacattatatccacaacaaagggaaatgagtg

SEQ ID NO: 751916 - DNA, 33 bp, Homo sapien
agacattatatccacagcaaagggaaatgagtg

SEQ ID NO: 751917 - DNA, 33 bp, Homo sapien
tctttgcaaagcctaaaagcggaaagcgccctt

SEQ ID NO: 751918 - DNA, 33 bp, Homo sapien
tctttgcaaagcctaagagcggaaagcgccctt

SEQ ID NO: 751919 - DNA, 33 bp, Homo sapien
atttcccatatcttcacctcaaaattctggggg

SEQ ID NO: 751920 - DNA, 33 bp, Homo sapien
atttcccatatcttcatctcaaaattctggggg

SEQ ID NO: 751921 - DNA, 33 bp, Homo sapien
atcctcggctgaaagtaaacattgtcaccagag

SEQ ID NO: 751922 - DNA, 33 bp, Homo sapien
atcctcggctgaaagtgaacattgtcaccagag

SEQ ID NO: 751923 - DNA, 33 bp, Homo sapien
gtaatttgtgataaagcaaaggcaggagaattg

SEQ ID NO: 751924 - DNA, 33 bp, Homo sapien
gtaatttgtgataaaggaaaggcaggagaattg

SEQ ID NO: 751925 - DNA, 33 bp, Homo sapien
tccatcttcaccaaacaacatctggattgggta

SEQ ID NO: 751926 - DNA, 33 bp, Homo sapien
tccatcttcaccaaacgacatctggattgggta

SEQ ID NO: 751927 - DNA, 33 bp, Homo sapien
aattttgcctttctcacgtctttctaccaggaa

SEQ ID NO: 751928 - DNA, 33 bp, Homo sapien
aattttgcctttctcatgtctttctaccaggaa

SEQ ID NO: 751929 - DNA, 33 bp, Homo sapien
tgagtttgaagaaaaacgtgtcctgattcttca

SEQ ID NO: 751930 - DNA, 33 bp, Homo sapien
tgagtttgaagaaaaatgtgtcctgattcttca

SEQ ID NO: 751931 - DNA, 33 bp, Homo sapien
ctctgtccattgtgacacttcaacatttcataa

SEQ ID NO: 751932 - DNA, 33 bp, Homo sapien
ctctgtccattgtgacgcttcaacatttcataa

SEQ ID NO: 751933 - DNA, 33 bp, Homo sapien
tgcgtgattcagagaaacaacgtaagacagagg

SEQ ID NO: 751934 - DNA, 33 bp, Homo sapien
tgcgtgattcagagaagcaacgtaagacagagg

SEQ ID NO: 751935 - DNA, 33 bp, Homo sapien
aactctgcagggcaaaatccaggagacagtgtc

SEQ ID NO: 751936 - DNA, 33 bp, Homo sapien
aactctgcagggcaaagtccaggagacagtgtc

SEQ ID NO: 751937 - DNA, 33 bp, Homo sapien
agtcatgtgactggcacctgcattcttgagcat

SEQ ID NO: 751938 - DNA, 33 bp, Homo sapien
agtcatgtgactggcatctgcattcttgagcat

SEQ ID NO: 751939 - DNA, 33 bp, Homo sapien
aaatctctcattctgacgcgtatttttgaacgg

SEQ ID NO: 751940 - DNA, 33 bp, Homo sapien
aaatctctcattctgatgcgtatttttgaacgg

SEQ ID NO: 751941 - DNA, 33 bp, Homo sapien
tgaggtatcaaaactacgaattgaactagcttg

SEQ ID NO: 751942 - DNA, 33 bp, Homo sapien
tgaggtatcaaaactatgaattgaactagcttg

SEQ ID NO: 751943 - DNA, 33 bp, Homo sapien
cttgtgtggatgatataagacacaaaacgccaa

SEQ ID NO: 751944 - DNA, 33 bp, Homo sapien
cttgtgtggatgatatgagacacaaaacgccaa

SEQ ID NO: 751945 - DNA, 33 bp, Homo sapien
caggggctttaaatcacggccaaagagcagcct

SEQ ID NO: 751946 - DNA, 33 bp, Homo sapien
caggggctttaaatcatggccaaagagcagcct

SEQ ID NO: 751947 - DNA, 33 bp, Homo sapien
agagcgacaaagtgcaactaaaagcaattaagt

SEQ ID NO: 751948 - DNA, 33 bp, Homo sapien
agagcgacaaagtgcacctaaaagcaattaagt

SEQ ID NO: 751949 - DNA, 33 bp, Homo sapien
ccaagccaagtcgacacacaaaactagacatca

SEQ ID NO: 751950 - DNA, 33 bp, Homo sapien
ccaagccaagtcgacatacaaaactagacatca

SEQ ID NO: 751951 - DNA, 33 bp, Homo sapien
caatctgctttacctcaagtcaattgaggtaaa

SEQ ID NO: 751952 - DNA, 33 bp, Homo sapien
caatctgctttacctccagtcaattgaggtaaa

SEQ ID NO: 751953 - DNA, 33 bp, Homo sapien
agaagaagaaattccaagtcaagactgcagcac

SEQ ID NO: 751954 - DNA, 33 bp, Homo sapien
agaagaagaaattccacgtcaagactgcagcac

SEQ ID NO: 751955 - DNA, 33 bp, Homo sapien
gaaagggctgtcatcacgctggaagctcggtaa

SEQ ID NO: 751956 - DNA, 33 bp, Homo sapien
gaaagggctgtcatcatgctggaagctcggtaa

SEQ ID NO: 751957 - DNA, 33 bp, Homo sapien
gttgtccacacccccaaaaagtgcagcctggct

SEQ ID NO: 751958 - DNA, 33 bp, Homo sapien
gttgtccacacccccagaaagtgcagcctggct

SEQ ID NO: 751959 - DNA, 33 bp, Homo sapien
agactctgccactcatcaaacaataggaaaccc

SEQ ID NO: 751960 - DNA, 33 bp, Homo sapien
agactctgccactcatgaaacaataggaaaccc

SEQ ID NO: 751961 - DNA, 33 bp, Homo sapien
gtgcctctgctgacataagagggaagaggacac

SEQ ID NO: 751962 - DNA, 33 bp, Homo sapien
gtgcctctgctgacattagagggaagaggacac

SEQ ID NO: 751963 - DNA, 33 bp, Homo sapien
aacagtgaatgaagtgaaatgctgcaaagcgtt

SEQ ID NO: 751964 - DNA, 33 bp, Homo sapien
aacagtgaatgaagtgcaatgctgcaaagcgtt

SEQ ID NO: 751965 - DNA, 33 bp, Homo sapien
tccccgatgcagttagcattgttttacctggaa

SEQ ID NO: 751966 - DNA, 33 bp, Homo sapien
tccccgatgcagttagtattgttttacctggaa

SEQ ID NO: 751967 - DNA, 33 bp, Homo sapien
ctggaatgacacattagctccatgttagagatg

SEQ ID NO: 751968 - DNA, 33 bp, Homo sapien
ctggaatgacacattatctccatgttagagatg

SEQ ID NO: 751969 - DNA, 33 bp, Homo sapien
cacagccgtccaccccaaggattttcagaccca

SEQ ID NO: 751970 - DNA, 33 bp, Homo sapien
cacagccgtccaccccgaggattttcagaccca

SEQ ID NO: 751971 - DNA, 33 bp, Homo sapien
acaagatgtttgtagaataaaatgtgctaaaaa

SEQ ID NO: 751972 - DNA, 33 bp, Homo sapien
acaagatgtttgtagagtaaaatgtgctaaaaa

SEQ ID NO: 751973 - DNA, 33 bp, Homo sapien
ctgtgtttttaacaaacatgagtaaggctgctg

SEQ ID NO: 751974 - DNA, 33 bp, Homo sapien
ctgtgtttttaacaaatatgagtaaggctgctg

SEQ ID NO: 751975 - DNA, 33 bp, Homo sapien
ttattaaaatgaagaccgagtccaaggtcgggg

SEQ ID NO: 751976 - DNA, 33 bp, Homo sapien
ttattaaaatgaagactgagtccaaggtcgggg

SEQ ID NO: 751977 - DNA, 33 bp, Homo sapien
aaggctcaggacagcaagacttccctttatgga

SEQ ID NO: 751978 - DNA, 33 bp, Homo sapien
aaggctcaggacagcatgacttccctttatgga

SEQ ID NO: 751979 - DNA, 33 bp, Homo sapien
acaaatatttgcagaaagaagctcaattaaaac

SEQ ID NO: 751980 - DNA, 33 bp, Homo sapien
acaaatatttgcagaatgaagctcaattaaaac

SEQ ID NO: 751981 - DNA, 33 bp, Homo sapien
ataaaatagaaaaaagaagccatctgatttttt

SEQ ID NO: 751982 - DNA, 33 bp, Homo sapien
ataaaatagaaaaaagtagccatctgatttttt

SEQ ID NO: 751983 - DNA, 33 bp, Homo sapien
catctgattttttaaacggagattcaaacagct

SEQ ID NO: 751984 - DNA, 33 bp, Homo sapien
catctgattttttaaatggagattcaaacagct

SEQ ID NO: 751985 - DNA, 33 bp, Homo sapien
gctttgcctgtcatgaagctctggactcagcgt

SEQ ID NO: 751986 - DNA, 33 bp, Homo sapien
gctttgcctgtcatgaggctctggactcagcgt

SEQ ID NO: 751987 - DNA, 33 bp, Homo sapien
tatttcactttgaaaaccttttggcattttgaa

SEQ ID NO: 751988 - DNA, 33 bp, Homo sapien
tatttcactttgaaaatcttttggcattttgaa

SEQ ID NO: 751989 - DNA, 33 bp, Homo sapien
tctgcaatgacattctaaatgacttgagtgaag

SEQ ID NO: 751990 - DNA, 33 bp, Homo sapien
tctgcaatgacattctgaatgacttgagtgaag

SEQ ID NO: 751991 - DNA, 33 bp, Homo sapien
agcagcacttctcaaacctgtaaatgacatatc

SEQ ID NO: 751992 - DNA, 33 bp, Homo sapien
agcagcacttctcaaatctgtaaatgacatatc

SEQ ID NO: 751993 - DNA, 33 bp, Homo sapien
ctttcaacttaataacggtccacaatccaaaaa

SEQ ID NO: 751994 - DNA, 33 bp, Homo sapien
ctttcaacttaataactgtccacaatccaaaaa

SEQ ID NO: 751995 - DNA, 33 bp, Homo sapien
tggctagaaaagtagacccggattggacttgcc

SEQ ID NO: 751996 - DNA, 33 bp, Homo sapien
tggctagaaaagtagatccggattggacttgcc

SEQ ID NO: 751997 - DNA, 33 bp, Homo sapien
ggggctcctggacagaccttttccttgatttac

SEQ ID NO: 751998 - DNA, 33 bp, Homo sapien
ggggctcctggacagagcttttccttgatttac

SEQ ID NO: 751999 - DNA, 33 bp, Homo sapien
agtttgcaggttttctcaccctagatgtcttga

SEQ ID NO: 752000 - DNA, 33 bp, Homo sapien
agtttgcaggttttcttaccctagatgtcttga

SEQ ID NO: 752001 - DNA, 33 bp, Homo sapien
gaagctaggcttttgacgctatgtgtttttttt

SEQ ID NO: 752002 - DNA, 33 bp, Homo sapien
gaagctaggcttttgatgctatgtgtttttttt

SEQ ID NO: 752003 - DNA, 33 bp, Homo sapien
aagcagaatccattcaatccatagttacggcct

SEQ ID NO: 752004 - DNA, 33 bp, Homo sapien
aagcagaatccattcagtccatagttacggcct

SEQ ID NO: 752005 - DNA, 33 bp, Homo sapien
aagcagtaaaacagtacagggagagggaactca

SEQ ID NO: 752006 - DNA, 33 bp, Homo sapien
aagcagtaaaacagtagagggagagggaactca

SEQ ID NO: 752007 - DNA, 33 bp, Homo sapien
cttagaaagtgcacaaaaaagtccatgctcaag

SEQ ID NO: 752008 - DNA, 33 bp, Homo sapien
cttagaaagtgcacaacaaagtccatgctcaag

SEQ ID NO: 752009 - DNA, 33 bp, Homo sapien
ttaattttaccttaaaaatgctgaactcttatt

SEQ ID NO: 752010 - DNA, 33 bp, Homo sapien
ttaattttaccttaaacatgctgaactcttatt

SEQ ID NO: 752011 - DNA, 33 bp, Homo sapien
gctgcagatgcctgctgagaacctggtgcccca

SEQ ID NO: 752012 - DNA, 33 bp, Homo sapien
gctgcagatgcctgcttagaacctggtgcccca

SEQ ID NO: 752013 - DNA, 33 bp, Homo sapien
actgttcctggatcgacacgctgtgaccaggca

SEQ ID NO: 752014 - DNA, 33 bp, Homo sapien
actgttcctggatcgatacgctgtgaccaggca

SEQ ID NO: 752015 - DNA, 33 bp, Homo sapien
ataagcagcaaataaccgattcaaaatataaga

SEQ ID NO: 752016 - DNA, 33 bp, Homo sapien
ataagcagcaaataactgattcaaaatataaga

SEQ ID NO: 752017 - DNA, 33 bp, Homo sapien
tgctttgtcttcctgacaatttgtcctctttat

SEQ ID NO: 752018 - DNA, 33 bp, Homo sapien
tgctttgtcttcctgataatttgtcctctttat

SEQ ID NO: 752019 - DNA, 33 bp, Homo sapien
gtcttttgccgcaaaacagaagaaactggaggc

SEQ ID NO: 752020 - DNA, 33 bp, Homo sapien
gtcttttgccgcaaaatagaagaaactggaggc

SEQ ID NO: 752021 - DNA, 33 bp, Homo sapien
agtaaagtgaaaaacaaccgtacctggaatact

SEQ ID NO: 752022 - DNA, 33 bp, Homo sapien
agtaaagtgaaaaacagccgtacctggaatact

SEQ ID NO: 752023 - DNA, 33 bp, Homo sapien
tgctagtaggaagggacataagtacagcacttt

SEQ ID NO: 752024 - DNA, 33 bp, Homo sapien
tgctagtaggaagggagataagtacagcacttt

SEQ ID NO: 752025 - DNA, 33 bp, Homo sapien
cgggattctgaagtaaccagcggcactgcaagc

SEQ ID NO: 752026 - DNA, 33 bp, Homo sapien
cgggattctgaagtaatcagcggcactgcaagc

SEQ ID NO: 752027 - DNA, 33 bp, Homo sapien
tcacccttgtcctgggaatctgccggaatgtga

SEQ ID NO: 752028 - DNA, 33 bp, Homo sapien
tcacccttgtcctgggcatctgccggaatgtga

SEQ ID NO: 752029 - DNA, 33 bp, Homo sapien
tttcggcagcctcccccagctgatcatcatgta

SEQ ID NO: 752030 - DNA, 33 bp, Homo sapien
tttcggcagcctcccctagctgatcatcatgta

SEQ ID NO: 752031 - DNA, 33 bp, Homo sapien
ttccttgttaaggctacgtaaattttgtatgtg

SEQ ID NO: 752032 - DNA, 33 bp, Homo sapien
ttccttgttaaggctatgtaaattttgtatgtg

SEQ ID NO: 752033 - DNA, 33 bp, Homo sapien
actcctgaagcgtggcaagcatgaaaacatggt

SEQ ID NO: 752034 - DNA, 33 bp, Homo sapien
actcctgaagcgtggcgagcatgaaaacatggt

SEQ ID NO: 752035 - DNA, 33 bp, Homo sapien
gacctactttctttaaaacatgtaatgggttgt

SEQ ID NO: 752036 - DNA, 33 bp, Homo sapien
gacctactttctttaagacatgtaatgggttgt

SEQ ID NO: 752037 - DNA, 33 bp, Homo sapien
atcaatgtggctaaaaggcaacgctccgatttc

SEQ ID NO: 752038 - DNA, 33 bp, Homo sapien
atcaatgtggctaaaatgcaacgctccgatttc

SEQ ID NO: 752039 - DNA, 33 bp, Homo sapien
cttttttgagaactgacgcgatttgtgcatgaa

SEQ ID NO: 752040 - DNA, 33 bp, Homo sapien
cttttttgagaactgatgcgatttgtgcatgaa

SEQ ID NO: 752041 - DNA, 33 bp, Homo sapien
tcaggtctctggagcactaaattcctcttcttc

SEQ ID NO: 752042 - DNA, 33 bp, Homo sapien
tcaggtctctggagcagtaaattcctcttcttc

SEQ ID NO: 752043 - DNA, 33 bp, Homo sapien
tgtttcaagagatactaaagaggaaagagctaa

SEQ ID NO: 752044 - DNA, 33 bp, Homo sapien
tgtttcaagagatactgaagaggaaagagctaa

SEQ ID NO: 752045 - DNA, 33 bp, Homo sapien
ggtatgaaagaatgacaggaaaatgatggatga

SEQ ID NO: 752046 - DNA, 33 bp, Homo sapien
ggtatgaaagaatgacgggaaaatgatggatga

SEQ ID NO: 752047 - DNA, 33 bp, Homo sapien
ggtagtctgaccatgaacccttgaggaaggtgg

SEQ ID NO: 752048 - DNA, 33 bp, Homo sapien
ggtagtctgaccatgagcccttgaggaaggtgg

SEQ ID NO: 752049 - DNA, 33 bp, Homo sapien
aaatatgacaaaaggagtaatttacctcctgac

SEQ ID NO: 752050 - DNA, 33 bp, Homo sapien
aaatatgacaaaaggattaatttacctcctgac

SEQ ID NO: 752051 - DNA, 33 bp, Homo sapien
cgttaatttgaatgacaagaagctgctgctgga

SEQ ID NO: 752052 - DNA, 33 bp, Homo sapien
cgttaatttgaatgacgagaagctgctgctgga

SEQ ID NO: 752053 - DNA, 33 bp, Homo sapien
acctctggatctacaaactgcgtctaaaaggac

SEQ ID NO: 752054 - DNA, 33 bp, Homo sapien
acctctggatctacaagctgcgtctaaaaggac

SEQ ID NO: 752055 - DNA, 33 bp, Homo sapien
agacaaagaagtatcaccagagcccaggagctg

SEQ ID NO: 752056 - DNA, 33 bp, Homo sapien
agacaaagaagtatcagcagagcccaggagctg

SEQ ID NO: 752057 - DNA, 33 bp, Homo sapien
ctttctgtcttttgtacgattaagtattcccac

SEQ ID NO: 752058 - DNA, 33 bp, Homo sapien
ctttctgtcttttgtatgattaagtattcccac

SEQ ID NO: 752059 - DNA, 33 bp, Homo sapien
cttgctatgctatcaaatactacctcttattcc

SEQ ID NO: 752060 - DNA, 33 bp, Homo sapien
cttgctatgctatcaagtactacctcttattcc

SEQ ID NO: 752061 - DNA, 33 bp, Homo sapien
ggtggcatgggttttgcatccacggctgcgggg

SEQ ID NO: 752062 - DNA, 33 bp, Homo sapien
ggtggcatgggttttgtatccacggctgcgggg

SEQ ID NO: 752063 - DNA, 33 bp, Homo sapien
tcagtggcttttatcaactgcagggcaaaattg

SEQ ID NO: 752064 - DNA, 33 bp, Homo sapien
tcagtggcttttatcacctgcagggcaaaattg

SEQ ID NO: 752065 - DNA, 33 bp, Homo sapien
gctcctgagtttatcacaagttgcccttgaagt

SEQ ID NO: 752066 - DNA, 33 bp, Homo sapien
gctcctgagtttatcataagttgcccttgaagt

SEQ ID NO: 752067 - DNA, 33 bp, Homo sapien
catggcagggtacatcaccataactcacaaagg

SEQ ID NO: 752068 - DNA, 33 bp, Homo sapien
catggcagggtacatcgccataactcacaaagg

SEQ ID NO: 752069 - DNA, 33 bp, Homo sapien
tcacaaagggtaaagaccatgaggctagttgag

SEQ ID NO: 752070 - DNA, 33 bp, Homo sapien
tcacaaagggtaaagagcatgaggctagttgag

SEQ ID NO: 752071 - DNA, 33 bp, Homo sapien
ccttctcagattttcccacaaaagttcaagaac

SEQ ID NO: 752072 - DNA, 33 bp, Homo sapien
ccttctcagattttcctacaaaagttcaagaac

SEQ ID NO: 752073 - DNA, 33 bp, Homo sapien
ggcccagagggaacacgggcatggagaatagca

SEQ ID NO: 752074 - DNA, 33 bp, Homo sapien
ggcccagagggaacactggcatggagaatagca

SEQ ID NO: 752075 - DNA, 33 bp, Homo sapien
tgcacatctagccatgcattcaaacagctttct

SEQ ID NO: 752076 - DNA, 33 bp, Homo sapien
tgcacatctagccatgtattcaaacagctttct

SEQ ID NO: 752077 - DNA, 33 bp, Homo sapien
gtagacactttccccaatgctgtctgcaagctt

SEQ ID NO: 752078 - DNA, 33 bp, Homo sapien
gtagacactttccccagtgctgtctgcaagctt

SEQ ID NO: 752079 - DNA, 33 bp, Homo sapien
gggatgcttggggaaccggccatctcgttcaca

SEQ ID NO: 752080 - DNA, 33 bp, Homo sapien
gggatgcttggggaactggccatctcgttcaca

SEQ ID NO: 752081 - DNA, 33 bp, Homo sapien
cgggttaccaaaatgccgatcttctgccagtga

SEQ ID NO: 752082 - DNA, 33 bp, Homo sapien
cgggttaccaaaatgcggatcttctgccagtga

SEQ ID NO: 752083 - DNA, 33 bp, Homo sapien
caaacagcgttttgccacctaccagccttttga

SEQ ID NO: 752084 - DNA, 33 bp, Homo sapien
caaacagcgttttgccgcctaccagccttttga

SEQ ID NO: 752085 - DNA, 33 bp, Homo sapien
agttctttgctttcacagtacattctttgtctt

SEQ ID NO: 752086 - DNA, 33 bp, Homo sapien
agttctttgctttcacggtacattctttgtctt

SEQ ID NO: 752087 - DNA, 33 bp, Homo sapien
ctgcagtcagctagaacgccagtgtcaacagtc

SEQ ID NO: 752088 - DNA, 33 bp, Homo sapien
ctgcagtcagctagaatgccagtgtcaacagtc

SEQ ID NO: 752089 - DNA, 33 bp, Homo sapien
gacatcacatatggaccggagggggcctgtcat

SEQ ID NO: 752090 - DNA, 33 bp, Homo sapien
gacatcacatatggactggagggggcctgtcat

SEQ ID NO: 752091 - DNA, 33 bp, Homo sapien
gcaagccttacaagaaaacagaattgcttaaat

SEQ ID NO: 752092 - DNA, 33 bp, Homo sapien
gcaagccttacaagaagacagaattgcttaaat

SEQ ID NO: 752093 - DNA, 33 bp, Homo sapien
gagttcaatggccaacaaacggagaaagggcga

SEQ ID NO: 752094 - DNA, 33 bp, Homo sapien
gagttcaatggccaacgaacggagaaagggcga

SEQ ID NO: 752095 - DNA, 33 bp, Homo sapien
tcttcttaggcatcaacattaggtccctgtgga

SEQ ID NO: 752096 - DNA, 33 bp, Homo sapien
tcttcttaggcatcaatattaggtccctgtgga

SEQ ID NO: 752097 - DNA, 33 bp, Homo sapien
gtagggccagatcataagacagagggtgcggtt

SEQ ID NO: 752098 - DNA, 33 bp, Homo sapien
gtagggccagatcataggacagagggtgcggtt

SEQ ID NO: 752099 - DNA, 33 bp, Homo sapien
tttatgctgggttgaaagtagctggtatagggc

SEQ ID NO: 752100 - DNA, 33 bp, Homo sapien
tttatgctgggttgaaggtagctggtatagggc

SEQ ID NO: 752101 - DNA, 33 bp, Homo sapien
tgcttcttcacttacccctggcttagaatgcag

SEQ ID NO: 752102 - DNA, 33 bp, Homo sapien
tgcttcttcacttacctctggcttagaatgcag

SEQ ID NO: 752103 - DNA, 33 bp, Homo sapien
tcaaaaaataagacccaactccatattgtctgg

SEQ ID NO: 752104 - DNA, 33 bp, Homo sapien
tcaaaaaataagaccccactccatattgtctgg

SEQ ID NO: 752105 - DNA, 33 bp, Homo sapien
caggacctaaaacatccgacaaatacccgtggt

SEQ ID NO: 752106 - DNA, 33 bp, Homo sapien
caggacctaaaacatctgacaaatacccgtggt

SEQ ID NO: 752107 - DNA, 33 bp, Homo sapien
taaaacaaggcacccactgctgaaaaagagagc

SEQ ID NO: 752108 - DNA, 33 bp, Homo sapien
taaaacaaggcacccattgctgaaaaagagagc

SEQ ID NO: 752109 - DNA, 33 bp, Homo sapien
agggctgtcttccataagtccagtggtcatctc

SEQ ID NO: 752110 - DNA, 33 bp, Homo sapien
agggctgtcttccataggtccagtggtcatctc

SEQ ID NO: 752111 - DNA, 33 bp, Homo sapien
tgattttggagggctgaaaagactctcttaata

SEQ ID NO: 752112 - DNA, 33 bp, Homo sapien
tgattttggagggctgcaaagactctcttaata

SEQ ID NO: 752113 - DNA, 33 bp, Homo sapien
ccccagacctgccagaaagggctccagaagtgg

SEQ ID NO: 752114 - DNA, 33 bp, Homo sapien
ccccagacctgccagagagggctccagaagtgg

SEQ ID NO: 752115 - DNA, 33 bp, Homo sapien
ctgcaacaacagaatactaatgcactgtcatga

SEQ ID NO: 752116 - DNA, 33 bp, Homo sapien
ctgcaacaacagaatagtaatgcactgtcatga

SEQ ID NO: 752117 - DNA, 33 bp, Homo sapien
gaggtgacatcggacaccaagtttttcaaatgg

SEQ ID NO: 752118 - DNA, 33 bp, Homo sapien
gaggtgacatcggacagcaagtttttcaaatgg

SEQ ID NO: 752119 - DNA, 33 bp, Homo sapien
cttaagcatggctgaacgtccagagaacatttc

SEQ ID NO: 752120 - DNA, 33 bp, Homo sapien
cttaagcatggctgaatgtccagagaacatttc

SEQ ID NO: 752121 - DNA, 33 bp, Homo sapien
agtgagcttcaataaaaatttaaaaacagtctc

SEQ ID NO: 752122 - DNA, 33 bp, Homo sapien
agtgagcttcaataaacatttaaaaacagtctc

SEQ ID NO: 752123 - DNA, 33 bp, Homo sapien
gtttttgcttgaaaaagtcactgtgccgcaccc

SEQ ID NO: 752124 - DNA, 33 bp, Homo sapien
gtttttgcttgaaaaattcactgtgccgcaccc

SEQ ID NO: 752125 - DNA, 33 bp, Homo sapien
ggtgaagtttccaaagcagaatttgcacattgc

SEQ ID NO: 752126 - DNA, 33 bp, Homo sapien
ggtgaagtttccaaagtagaatttgcacattgc

SEQ ID NO: 752127 - DNA, 33 bp, Homo sapien
tggggcgccagagcacaatggagtcgacaccgg

SEQ ID NO: 752128 - DNA, 33 bp, Homo sapien
tggggcgccagagcacgatggagtcgacaccgg

SEQ ID NO: 752129 - DNA, 33 bp, Homo sapien
ggtgtttgttcctgacactctgaccccactctt

SEQ ID NO: 752130 - DNA, 33 bp, Homo sapien
ggtgtttgttcctgacgctctgaccccactctt

SEQ ID NO: 752131 - DNA, 33 bp, Homo sapien
ctgtcccaatacctgacgatgtctccatcctgg

SEQ ID NO: 752132 - DNA, 33 bp, Homo sapien
ctgtcccaatacctgatgatgtctccatcctgg

SEQ ID NO: 752133 - DNA, 33 bp, Homo sapien
tgttgaggaggtaaaaatccgagtccacaatgt

SEQ ID NO: 752134 - DNA, 33 bp, Homo sapien
tgttgaggaggtaaaagtccgagtccacaatgt

SEQ ID NO: 752135 - DNA, 33 bp, Homo sapien
ctgacaaatgggaggaaaatttgagacagtctg

SEQ ID NO: 752136 - DNA, 33 bp, Homo sapien
ctgacaaatgggaggagaatttgagacagtctg

SEQ ID NO: 752137 - DNA, 33 bp, Homo sapien
ctgcaacatacaactcaagtctctgttacagcc

SEQ ID NO: 752138 - DNA, 33 bp, Homo sapien
ctgcaacatacaactcgagtctctgttacagcc

SEQ ID NO: 752139 - DNA, 33 bp, Homo sapien
gagaaccatctaaccaagtgcccaccatgtgtt

SEQ ID NO: 752140 - DNA, 33 bp, Homo sapien
gagaaccatctaaccacgtgcccaccatgtgtt

SEQ ID NO: 752141 - DNA, 33 bp, Homo sapien
ggtaatgaaatctagcaatggagcatagcttga

SEQ ID NO: 752142 - DNA, 33 bp, Homo sapien
ggtaatgaaatctagcgatggagcatagcttga

SEQ ID NO: 752143 - DNA, 33 bp, Homo sapien
tttttccttcttttgcccatcatctatgttttc

SEQ ID NO: 752144 - DNA, 33 bp, Homo sapien
tttttccttcttttgctcatcatctatgttttc

SEQ ID NO: 752145 - DNA, 33 bp, Homo sapien
ttctagactccattgactcaagggcaaaaagtc

SEQ ID NO: 752146 - DNA, 33 bp, Homo sapien
ttctagactccattgattcaagggcaaaaagtc

SEQ ID NO: 752147 - DNA, 33 bp, Homo sapien
ctacacattatctgaacagggggtgattgtagt

SEQ ID NO: 752148 - DNA, 33 bp, Homo sapien
ctacacattatctgaatagggggtgattgtagt

SEQ ID NO: 752149 - DNA, 33 bp, Homo sapien
ataattataggctaaacacggttaataaaacat

SEQ ID NO: 752150 - DNA, 33 bp, Homo sapien
ataattataggctaaatacggttaataaaacat

SEQ ID NO: 752151 - DNA, 33 bp, Homo sapien
tcgattcatgaatttgcagttattagtaaatca

SEQ ID NO: 752152 - DNA, 33 bp, Homo sapien
tcgattcatgaatttgtagttattagtaaatca

SEQ ID NO: 752153 - DNA, 33 bp, Homo sapien
cagagctgaggtcaaacctttcaacagaagttt

SEQ ID NO: 752154 - DNA, 33 bp, Homo sapien
cagagctgaggtcaaatctttcaacagaagttt

SEQ ID NO: 752155 - DNA, 33 bp, Homo sapien
gaatacaggactggaacggatttcactgaggga

SEQ ID NO: 752156 - DNA, 33 bp, Homo sapien
gaatacaggactggaatggatttcactgaggga

SEQ ID NO: 752157 - DNA, 33 bp, Homo sapien
catgatgagtaaggaaagccgtgttcagacttt

SEQ ID NO: 752158 - DNA, 33 bp, Homo sapien
catgatgagtaaggaacgccgtgttcagacttt

SEQ ID NO: 752159 - DNA, 33 bp, Homo sapien
tgaccaacctctctcaactgtgcatatctctct

SEQ ID NO: 752160 - DNA, 33 bp, Homo sapien
tgaccaacctctctcacctgtgcatatctctct

SEQ ID NO: 752161 - DNA, 33 bp, Homo sapien
atgctatatcccctggcactacacattgcaggc

SEQ ID NO: 752162 - DNA, 33 bp, Homo sapien
atgctatatcccctggtactacacattgcaggc

SEQ ID NO: 752163 - DNA, 33 bp, Homo sapien
ccctaaactgctaaaaaaattgctgattctgtg

SEQ ID NO: 752164 - DNA, 33 bp, Homo sapien
ccctaaactgctaaaagaattgctgattctgtg

SEQ ID NO: 752165 - DNA, 33 bp, Homo sapien
cctgtgaagttgctgacgcgactcaatttaatg

SEQ ID NO: 752166 - DNA, 33 bp, Homo sapien
cctgtgaagttgctgatgcgactcaatttaatg

SEQ ID NO: 752167 - DNA, 33 bp, Homo sapien
agcctcaggtttccacaagcaggaagtggacag

SEQ ID NO: 752168 - DNA, 33 bp, Homo sapien
agcctcaggtttccaccagcaggaagtggacag

SEQ ID NO: 752169 - DNA, 33 bp, Homo sapien
cgagactctgaggttgaaaaaggtcattaagac

SEQ ID NO: 752170 - DNA, 33 bp, Homo sapien
cgagactctgaggttggaaaaggtcattaagac

SEQ ID NO: 752171 - DNA, 33 bp, Homo sapien
gggagagaaaattaataaccacacaagtaagca

SEQ ID NO: 752172 - DNA, 33 bp, Homo sapien
gggagagaaaattaattaccacacaagtaagca

SEQ ID NO: 752173 - DNA, 33 bp, Homo sapien
atagagggcaggagacacagaggggttccataa

SEQ ID NO: 752174 - DNA, 33 bp, Homo sapien
atagagggcaggagacgcagaggggttccataa

SEQ ID NO: 752175 - DNA, 33 bp, Homo sapien
tctgaaaatcttcagtaaccacaatagagcaaa

SEQ ID NO: 752176 - DNA, 33 bp, Homo sapien
tctgaaaatcttcagtcaccacaatagagcaaa

SEQ ID NO: 752177 - DNA, 33 bp, Homo sapien
ggactgtcccaagcaccaaggctatctgcagtt

SEQ ID NO: 752178 - DNA, 33 bp, Homo sapien
ggactgtcccaagcacgaaggctatctgcagtt

SEQ ID NO: 752179 - DNA, 33 bp, Homo sapien
gtttgctggccatagcaatgaggagctgaaact

SEQ ID NO: 752180 - DNA, 33 bp, Homo sapien
gtttgctggccatagcgatgaggagctgaaact

SEQ ID NO: 752181 - DNA, 33 bp, Homo sapien
ttaaccttctttccaactcaaatttctcattaa

SEQ ID NO: 752182 - DNA, 33 bp, Homo sapien
ttaaccttctttccaagtcaaatttctcattaa

SEQ ID NO: 752183 - DNA, 33 bp, Homo sapien
ggcctggatctcgtataaccaacacatcattcc

SEQ ID NO: 752184 - DNA, 33 bp, Homo sapien
ggcctggatctcgtatgaccaacacatcattcc

SEQ ID NO: 752185 - DNA, 33 bp, Homo sapien
catgagcaagtgcatcacctgtccaaagaggag

SEQ ID NO: 752186 - DNA, 33 bp, Homo sapien
catgagcaagtgcatcgcctgtccaaagaggag

SEQ ID NO: 752187 - DNA, 33 bp, Homo sapien
ttagggcaagaatgtgaagaatgaaagcaccgt

SEQ ID NO: 752188 - DNA, 33 bp, Homo sapien
ttagggcaagaatgtggagaatgaaagcaccgt

SEQ ID NO: 752189 - DNA, 33 bp, Homo sapien
tccccatcctattcaaatgacgattggtggtgt

SEQ ID NO: 752190 - DNA, 33 bp, Homo sapien
tccccatcctattcaagtgacgattggtggtgt

SEQ ID NO: 752191 - DNA, 33 bp, Homo sapien
agctaactaggccaaagctaataaggatcatga

SEQ ID NO: 752192 - DNA, 33 bp, Homo sapien
agctaactaggccaaatctaataaggatcatga

SEQ ID NO: 752193 - DNA, 33 bp, Homo sapien
catgacctaacttgagaccctttaggattcaat

SEQ ID NO: 752194 - DNA, 33 bp, Homo sapien
catgacctaacttgaggccctttaggattcaat

SEQ ID NO: 752195 - DNA, 33 bp, Homo sapien
gtttacatacgtttgcaaatacttgaattacta

SEQ ID NO: 752196 - DNA, 33 bp, Homo sapien
gtttacatacgtttgctaatacttgaattacta

SEQ ID NO: 752197 - DNA, 33 bp, Homo sapien
caaccacctgatcttgcacaaagctgacaacaa

SEQ ID NO: 752198 - DNA, 33 bp, Homo sapien
caaccacctgatcttgtacaaagctgacaacaa

SEQ ID NO: 752199 - DNA, 33 bp, Homo sapien
gagcacaaccattataaacccagatccgctgtg

SEQ ID NO: 752200 - DNA, 33 bp, Homo sapien
gagcacaaccattatatacccagatccgctgtg

SEQ ID NO: 752201 - DNA, 33 bp, Homo sapien
agtgatactgaaatacactttgcggggcagggc

SEQ ID NO: 752202 - DNA, 33 bp, Homo sapien
agtgatactgaaatacgctttgcggggcagggc

SEQ ID NO: 752203 - DNA, 33 bp, Homo sapien
taaaagagcactaaaacgtgttcagtgctgtgc

SEQ ID NO: 752204 - DNA, 33 bp, Homo sapien
taaaagagcactaaaatgtgttcagtgctgtgc

SEQ ID NO: 752205 - DNA, 33 bp, Homo sapien
cctccggacagtgcggccacgggctgtcctctg

SEQ ID NO: 752206 - DNA, 33 bp, Homo sapien
cctccggacagtgcggtcacgggctgtcctctg

SEQ ID NO: 752207 - DNA, 33 bp, Homo sapien
gtacggcttcggaaagcactggttctctgagga

SEQ ID NO: 752208 - DNA, 33 bp, Homo sapien
gtacggcttcggaaagtactggttctctgagga

SEQ ID NO: 752209 - DNA, 33 bp, Homo sapien
gaaaataagtgaaaggacactaccaattcctcc

SEQ ID NO: 752210 - DNA, 33 bp, Homo sapien
gaaaataagtgaaagggcactaccaattcctcc

SEQ ID NO: 752211 - DNA, 33 bp, Homo sapien
cctcattgcgttgtaacggcaattcatacgttg

SEQ ID NO: 752212 - DNA, 33 bp, Homo sapien
cctcattgcgttgtaatggcaattcatacgttg

SEQ ID NO: 752213 - DNA, 33 bp, Homo sapien
catgcaggcaggataaatatttcctctttaaaa

SEQ ID NO: 752214 - DNA, 33 bp, Homo sapien
catgcaggcaggataagtatttcctctttaaaa

SEQ ID NO: 752215 - DNA, 33 bp, Homo sapien
taaacagcctaacaggaaagagatgcctaatgg

SEQ ID NO: 752216 - DNA, 33 bp, Homo sapien
taaacagcctaacagggaagagatgcctaatgg

SEQ ID NO: 752217 - DNA, 33 bp, Homo sapien
gcttgattcaagggaaacctctgcatcaggcac

SEQ ID NO: 752218 - DNA, 33 bp, Homo sapien
gcttgattcaagggaagcctctgcatcaggcac

SEQ ID NO: 752219 - DNA, 33 bp, Homo sapien
acaacgatgcagtcagaatcaaaacttgctgaa

SEQ ID NO: 752220 - DNA, 33 bp, Homo sapien
acaacgatgcagtcaggatcaaaacttgctgaa

SEQ ID NO: 752221 - DNA, 33 bp, Homo sapien
ctttgctcctggtcaccgccttgttcttcatac

SEQ ID NO: 752222 - DNA, 33 bp, Homo sapien
ctttgctcctggtcactgccttgttcttcatac

SEQ ID NO: 752223 - DNA, 33 bp, Homo sapien
gtctgctaaaagctcagagaattgacttgccta

SEQ ID NO: 752224 - DNA, 33 bp, Homo sapien
gtctgctaaaagctcatagaattgacttgccta

SEQ ID NO: 752225 - DNA, 33 bp, Homo sapien
agcctgcttaggcccaagatgattcattttcag

SEQ ID NO: 752226 - DNA, 33 bp, Homo sapien
agcctgcttaggcccaggatgattcattttcag

SEQ ID NO: 752227 - DNA, 33 bp, Homo sapien
ccaagctgagggaagacgattaacgctagcctc

SEQ ID NO: 752228 - DNA, 33 bp, Homo sapien
ccaagctgagggaagatgattaacgctagcctc

SEQ ID NO: 752229 - DNA, 33 bp, Homo sapien
catgcctgtgatgccacaataggacattatatg

SEQ ID NO: 752230 - DNA, 33 bp, Homo sapien
catgcctgtgatgccagaataggacattatatg

SEQ ID NO: 752231 - DNA, 33 bp, Homo sapien
aagcaatttcagaggacagaaaggagctagccc

SEQ ID NO: 752232 - DNA, 33 bp, Homo sapien
aagcaatttcagaggatagaaaggagctagccc

SEQ ID NO: 752233 - DNA, 33 bp, Homo sapien
ggcagggagaatgacgcagagaagaacttaaca

SEQ ID NO: 752234 - DNA, 33 bp, Homo sapien
ggcagggagaatgacggagagaagaacttaaca

SEQ ID NO: 752235 - DNA, 33 bp, Homo sapien
cccagtacgtggtccacgggtcagaaattatgt

SEQ ID NO: 752236 - DNA, 33 bp, Homo sapien
cccagtacgtggtccatgggtcagaaattatgt

SEQ ID NO: 752237 - DNA, 33 bp, Homo sapien
acggcgttctctcttccaaatctgagctgtctc

SEQ ID NO: 752238 - DNA, 33 bp, Homo sapien
acggcgttctctcttctaaatctgagctgtctc

SEQ ID NO: 752239 - DNA, 33 bp, Homo sapien
ctctctataaatataacgggcaaggtagagaag

SEQ ID NO: 752240 - DNA, 33 bp, Homo sapien
ctctctataaatataatgggcaaggtagagaag

SEQ ID NO: 752241 - DNA, 33 bp, Homo sapien
tgtgctgtttttgtcaaacgttttaattctaca

SEQ ID NO: 752242 - DNA, 33 bp, Homo sapien
tgtgctgtttttgtcacacgttttaattctaca

SEQ ID NO: 752243 - DNA, 33 bp, Homo sapien
cacttctcaccattcacataaattaactagaag

SEQ ID NO: 752244 - DNA, 33 bp, Homo sapien
cacttctcaccattcatataaattaactagaag

SEQ ID NO: 752245 - DNA, 33 bp, Homo sapien
cataaaaagaaagtgaaagcctagatacaaagt

SEQ ID NO: 752246 - DNA, 33 bp, Homo sapien
cataaaaagaaagtgatagcctagatacaaagt

SEQ ID NO: 752247 - DNA, 33 bp, Homo sapien
ggggaaattcagctaaacaaaccactctacaaa

SEQ ID NO: 752248 - DNA, 33 bp, Homo sapien
ggggaaattcagctaatcaaaccactctacaaa

SEQ ID NO: 752249 - DNA, 33 bp, Homo sapien
atggcttgtgtcactaaaggcgaatgtctgtgt

SEQ ID NO: 752250 - DNA, 33 bp, Homo sapien
atggcttgtgtcactagaggcgaatgtctgtgt

SEQ ID NO: 752251 - DNA, 33 bp, Homo sapien
gattgaggaatctacaactaaatgctgacgcca

SEQ ID NO: 752252 - DNA, 33 bp, Homo sapien
gattgaggaatctacacctaaatgctgacgcca

SEQ ID NO: 752253 - DNA, 33 bp, Homo sapien
aggctcctcaaaaagcgaaatacagaattactg

SEQ ID NO: 752254 - DNA, 33 bp, Homo sapien
aggctcctcaaaaagctaaatacagaattactg

SEQ ID NO: 752255 - DNA, 33 bp, Homo sapien
agtgtatagcctccaccgtctaagtctggccag

SEQ ID NO: 752256 - DNA, 33 bp, Homo sapien
agtgtatagcctccactgtctaagtctggccag

SEQ ID NO: 752257 - DNA, 33 bp, Homo sapien
ctgagatatttctgcactgacgatgcatctcat

SEQ ID NO: 752258 - DNA, 33 bp, Homo sapien
ctgagatatttctgcattgacgatgcatctcat

SEQ ID NO: 752259 - DNA, 33 bp, Homo sapien
gatcatagtcctaatacacctgtagttcaatat

SEQ ID NO: 752260 - DNA, 33 bp, Homo sapien
gatcatagtcctaatatacctgtagttcaatat

SEQ ID NO: 752261 - DNA, 33 bp, Homo sapien
tctcaattttatagacagagaaacattttggac

SEQ ID NO: 752262 - DNA, 33 bp, Homo sapien
tctcaattttatagacggagaaacattttggac

SEQ ID NO: 752263 - DNA, 33 bp, Homo sapien
acatttacaactcaataatgagacataaaaccc

SEQ ID NO: 752264 - DNA, 33 bp, Homo sapien
acatttacaactcaattatgagacataaaaccc

SEQ ID NO: 752265 - DNA, 33 bp, Homo sapien
aaaccctctgcgatgacgagaattttctatatc

SEQ ID NO: 752266 - DNA, 33 bp, Homo sapien
aaaccctctgcgatgatgagaattttctatatc

SEQ ID NO: 752267 - DNA, 33 bp, Homo sapien
ggctgcctctcaagcaagagttattttatttga

SEQ ID NO: 752268 - DNA, 33 bp, Homo sapien
ggctgcctctcaagcaggagttattttatttga

SEQ ID NO: 752269 - DNA, 33 bp, Homo sapien
ataaaaggataacagacgaggcaacaaattgcc

SEQ ID NO: 752270 - DNA, 33 bp, Homo sapien
ataaaaggataacagatgaggcaacaaattgcc

SEQ ID NO: 752271 - DNA, 33 bp, Homo sapien
tggtaaaacattactaggcttttgagttcactt

SEQ ID NO: 752272 - DNA, 33 bp, Homo sapien
tggtaaaacattactatgcttttgagttcactt

SEQ ID NO: 752273 - DNA, 33 bp, Homo sapien
aggaggtcaaggcgaaacctctcagctcagggg

SEQ ID NO: 752274 - DNA, 33 bp, Homo sapien
aggaggtcaaggcgaatcctctcagctcagggg

SEQ ID NO: 752275 - DNA, 33 bp, Homo sapien
gaaaagccggtccaaggagtcctgtgacctctc

SEQ ID NO: 752276 - DNA, 33 bp, Homo sapien
gaaaagccggtccaagtagtcctgtgacctctc

SEQ ID NO: 752277 - DNA, 33 bp, Homo sapien
ggtacatctctgagcacaggagggtgataccac

SEQ ID NO: 752278 - DNA, 33 bp, Homo sapien
ggtacatctctgagcataggagggtgataccac

SEQ ID NO: 752279 - DNA, 33 bp, Homo sapien
actggttcttgtgctgaacttatgaagactaca

SEQ ID NO: 752280 - DNA, 33 bp, Homo sapien
actggttcttgtgctggacttatgaagactaca

SEQ ID NO: 752281 - DNA, 33 bp, Homo sapien
agttgctcacagtagacggggtaagtgcctagg

SEQ ID NO: 752282 - DNA, 33 bp, Homo sapien
agttgctcacagtagatggggtaagtgcctagg

SEQ ID NO: 752283 - DNA, 33 bp, Homo sapien
tccaaggattggaacaccatacggctgagctca

SEQ ID NO: 752284 - DNA, 33 bp, Homo sapien
tccaaggattggaacagcatacggctgagctca

SEQ ID NO: 752285 - DNA, 33 bp, Homo sapien
gaaggaaatcaatggcccccgactaaaaaccgg

SEQ ID NO: 752286 - DNA, 33 bp, Homo sapien
gaaggaaatcaatggctcccgactaaaaaccgg

SEQ ID NO: 752287 - DNA, 33 bp, Homo sapien
ctctggcatcctttagacaacctggaagctaag

SEQ ID NO: 752288 - DNA, 33 bp, Homo sapien
ctctggcatcctttaggcaacctggaagctaag

SEQ ID NO: 752289 - DNA, 33 bp, Homo sapien
ggtgggtgtttccataccatactggcatcattg

SEQ ID NO: 752290 - DNA, 33 bp, Homo sapien
ggtgggtgtttccatagcatactggcatcattg

SEQ ID NO: 752291 - DNA, 33 bp, Homo sapien
cagtgtggaagtctgacagtaaaaaactacaaa

SEQ ID NO: 752292 - DNA, 33 bp, Homo sapien
cagtgtggaagtctgagagtaaaaaactacaaa

SEQ ID NO: 752293 - DNA, 33 bp, Homo sapien
tactgggtatacactcaaagaaaagtaaatctt

SEQ ID NO: 752294 - DNA, 33 bp, Homo sapien
tactgggtatacactccaagaaaagtaaatctt

SEQ ID NO: 752295 - DNA, 33 bp, Homo sapien
tacataactaaatgtaggccatggtcctttgct

SEQ ID NO: 752296 - DNA, 33 bp, Homo sapien
tacataactaaatgtatgccatggtcctttgct

SEQ ID NO: 752297 - DNA, 33 bp, Homo sapien
ccatgaaaacaaagaacttattagctggacttc

SEQ ID NO: 752298 - DNA, 33 bp, Homo sapien
ccatgaaaacaaagaatttattagctggacttc

SEQ ID NO: 752299 - DNA, 33 bp, Homo sapien
gttggcttcttacatgcattagctcagagaagt

SEQ ID NO: 752300 - DNA, 33 bp, Homo sapien
gttggcttcttacatgtattagctcagagaagt

SEQ ID NO: 752301 - DNA, 33 bp, Homo sapien
ccacattttctctatccctttgcctggcaatgg

SEQ ID NO: 752302 - DNA, 33 bp, Homo sapien
ccacattttctctatctctttgcctggcaatgg

SEQ ID NO: 752303 - DNA, 33 bp, Homo sapien
taccgcggtggccgaacagccaagttgaggctc

SEQ ID NO: 752304 - DNA, 33 bp, Homo sapien
taccgcggtggccgaagagccaagttgaggctc

SEQ ID NO: 752305 - DNA, 33 bp, Homo sapien
ttctccatgtgctcaccaatattgagtatttaa

SEQ ID NO: 752306 - DNA, 33 bp, Homo sapien
ttctccatgtgctcacgaatattgagtatttaa

SEQ ID NO: 752307 - DNA, 33 bp, Homo sapien
gtggcaccttcctctgcaaatcgttaaatatgg

SEQ ID NO: 752308 - DNA, 33 bp, Homo sapien
gtggcaccttcctctgtaaatcgttaaatatgg

SEQ ID NO: 752309 - DNA, 33 bp, Homo sapien
ggaggatatgtgccaacggcaaagaaacttgga

SEQ ID NO: 752310 - DNA, 33 bp, Homo sapien
ggaggatatgtgccaatggcaaagaaacttgga

SEQ ID NO: 752311 - DNA, 33 bp, Homo sapien
ggccaacttgggtcagaataagcaggagggaaa

SEQ ID NO: 752312 - DNA, 33 bp, Homo sapien
ggccaacttgggtcaggataagcaggagggaaa

SEQ ID NO: 752313 - DNA, 33 bp, Homo sapien
agccattcaacaagcaagcagacaatgcggtat

SEQ ID NO: 752314 - DNA, 33 bp, Homo sapien
agccattcaacaagcaggcagacaatgcggtat

SEQ ID NO: 752315 - DNA, 33 bp, Homo sapien
taagcaaaggcataaaggattcctaattgttga

SEQ ID NO: 752316 - DNA, 33 bp, Homo sapien
taagcaaaggcataaatgattcctaattgttga

SEQ ID NO: 752317 - DNA, 33 bp, Homo sapien
ttaacgttcttccctccatgatgattgtaagtc

SEQ ID NO: 752318 - DNA, 33 bp, Homo sapien
ttaacgttcttccctctatgatgattgtaagtc

SEQ ID NO: 752319 - DNA, 33 bp, Homo sapien
tataaagtacaatgacactcctcctgagttata

SEQ ID NO: 752320 - DNA, 33 bp, Homo sapien
tataaagtacaatgacgctcctcctgagttata

SEQ ID NO: 752321 - DNA, 33 bp, Homo sapien
ctttagtagcccgtcaagtgaatatgcttgggt

SEQ ID NO: 752322 - DNA, 33 bp, Homo sapien
ctttagtagcccgtcatgtgaatatgcttgggt

SEQ ID NO: 752323 - DNA, 33 bp, Homo sapien
cgtgtgtgcccaagtcactttggaaattaatat

SEQ ID NO: 752324 - DNA, 33 bp, Homo sapien
cgtgtgtgcccaagtcgctttggaaattaatat

SEQ ID NO: 752325 - DNA, 33 bp, Homo sapien
ccccgggggcactcaacggagacaaggcctcgg

SEQ ID NO: 752326 - DNA, 33 bp, Homo sapien
ccccgggggcactcaatggagacaaggcctcgg

SEQ ID NO: 752327 - DNA, 33 bp, Homo sapien
ctctcatttggtgaacaaggctgcggacccttg

SEQ ID NO: 752328 - DNA, 33 bp, Homo sapien
ctctcatttggtgaacgaggctgcggacccttg

SEQ ID NO: 752329 - DNA, 33 bp, Homo sapien
attcatggatagcctaaaatttgctcagcatct

SEQ ID NO: 752330 - DNA, 33 bp, Homo sapien
attcatggatagcctacaatttgctcagcatct

SEQ ID NO: 752331 - DNA, 33 bp, Homo sapien
atctccagggaagtcacaacaaacaacatattt

SEQ ID NO: 752332 - DNA, 33 bp, Homo sapien
atctccagggaagtcagaacaaacaacatattt

SEQ ID NO: 752333 - DNA, 33 bp, Homo sapien
cctaggtcattctttacaggcagatgcacctgc

SEQ ID NO: 752334 - DNA, 33 bp, Homo sapien
cctaggtcattctttataggcagatgcacctgc

SEQ ID NO: 752335 - DNA, 33 bp, Homo sapien
aggagccctgatgagacataagtcacaaaacca

SEQ ID NO: 752336 - DNA, 33 bp, Homo sapien
aggagccctgatgagagataagtcacaaaacca

SEQ ID NO: 752337 - DNA, 33 bp, Homo sapien
gggaaagtctcctatcccaaatgtctttgtctc

SEQ ID NO: 752338 - DNA, 33 bp, Homo sapien
gggaaagtctcctatctcaaatgtctttgtctc

SEQ ID NO: 752339 - DNA, 33 bp, Homo sapien
ttaggtatggagcccaatattgatccagaatca

SEQ ID NO: 752340 - DNA, 33 bp, Homo sapien
ttaggtatggagcccagtattgatccagaatca

SEQ ID NO: 752341 - DNA, 33 bp, Homo sapien
ttcttgcaaagggccaagtaaggaaaatactgc

SEQ ID NO: 752342 - DNA, 33 bp, Homo sapien
ttcttgcaaagggccaggtaaggaaaatactgc

SEQ ID NO: 752343 - DNA, 33 bp, Homo sapien
tttagtgtgtggggaacgtgagacctccagatt

SEQ ID NO: 752344 - DNA, 33 bp, Homo sapien
tttagtgtgtggggaatgtgagacctccagatt

SEQ ID NO: 752345 - DNA, 33 bp, Homo sapien
tgaatatgacacttcaagagaaaaaagaagtac

SEQ ID NO: 752346 - DNA, 33 bp, Homo sapien
tgaatatgacacttcatgagaaaaaagaagtac

SEQ ID NO: 752347 - DNA, 33 bp, Homo sapien
accatatgcatctcaacgtgaattaaaaccagc

SEQ ID NO: 752348 - DNA, 33 bp, Homo sapien
accatatgcatctcaatgtgaattaaaaccagc

SEQ ID NO: 752349 - DNA, 33 bp, Homo sapien
caccacagctggttcacgggaaagcttcctcct

SEQ ID NO: 752350 - DNA, 33 bp, Homo sapien
caccacagctggttcatgggaaagcttcctcct

SEQ ID NO: 752351 - DNA, 33 bp, Homo sapien
aggcattcctgaacagaaatttgacttgacaca

SEQ ID NO: 752352 - DNA, 33 bp, Homo sapien
aggcattcctgaacagcaatttgacttgacaca

SEQ ID NO: 752353 - DNA, 33 bp, Homo sapien
gaattcaggatggaaacagtcctgactgcagag

SEQ ID NO: 752354 - DNA, 33 bp, Homo sapien
gaattcaggatggaaatagtcctgactgcagag

SEQ ID NO: 752355 - DNA, 33 bp, Homo sapien
caattcctttattgatcagcttcccggccttgc

SEQ ID NO: 752356 - DNA, 33 bp, Homo sapien
caattcctttattgattagcttcccggccttgc

SEQ ID NO: 752357 - DNA, 33 bp, Homo sapien
agaacgtatctctggcaatacacagatcctagc

SEQ ID NO: 752358 - DNA, 33 bp, Homo sapien
agaacgtatctctggcgatacacagatcctagc

SEQ ID NO: 752359 - DNA, 33 bp, Homo sapien
tgtccgcatagccatgaacaattgcttctgcac

SEQ ID NO: 752360 - DNA, 33 bp, Homo sapien
tgtccgcatagccatgcacaattgcttctgcac

SEQ ID NO: 752361 - DNA, 33 bp, Homo sapien
ttttaaattgcacaagaactttgtaaatatgtg

SEQ ID NO: 752362 - DNA, 33 bp, Homo sapien
ttttaaattgcacaaggactttgtaaatatgtg

SEQ ID NO: 752363 - DNA, 33 bp, Homo sapien
atttggatgttctcaacagattcctacaagagg

SEQ ID NO: 752364 - DNA, 33 bp, Homo sapien
atttggatgttctcaatagattcctacaagagg

SEQ ID NO: 752365 - DNA, 33 bp, Homo sapien
agcagagccaaggggagcgaagaagacagaggg

SEQ ID NO: 752366 - DNA, 33 bp, Homo sapien
agcagagccaaggggatcgaagaagacagaggg

SEQ ID NO: 752367 - DNA, 33 bp, Homo sapien
ggtttcacggggcgacaatttcaccttttgagc

SEQ ID NO: 752368 - DNA, 33 bp, Homo sapien
ggtttcacggggcgacgatttcaccttttgagc

SEQ ID NO: 752369 - DNA, 33 bp, Homo sapien
ttaacaggcacacaaaaatgtaatgtgagtaga

SEQ ID NO: 752370 - DNA, 33 bp, Homo sapien
ttaacaggcacacaaagatgtaatgtgagtaga

SEQ ID NO: 752371 - DNA, 33 bp, Homo sapien
cttttcacgtaactgaccctcacaagaagcaca

SEQ ID NO: 752372 - DNA, 33 bp, Homo sapien
cttttcacgtaactgagcctcacaagaagcaca

SEQ ID NO: 752373 - DNA, 33 bp, Homo sapien
gcctagcttgtgtaaaataccttaacgaagcaa

SEQ ID NO: 752374 - DNA, 33 bp, Homo sapien
gcctagcttgtgtaaattaccttaacgaagcaa

SEQ ID NO: 752375 - DNA, 33 bp, Homo sapien
attcctgatggtaagaaaaaatcagaagagctg

SEQ ID NO: 752376 - DNA, 33 bp, Homo sapien
attcctgatggtaagagaaaatcagaagagctg

SEQ ID NO: 752377 - DNA, 33 bp, Homo sapien
aagacaaagtcagaaaacaggtatgtgcctgcc

SEQ ID NO: 752378 - DNA, 33 bp, Homo sapien
aagacaaagtcagaaagcaggtatgtgcctgcc

SEQ ID NO: 752379 - DNA, 33 bp, Homo sapien
ctcaggttacatcagcccagaagacaaagtcag

SEQ ID NO: 752380 - DNA, 33 bp, Homo sapien
ctcaggttacatcagctcagaagacaaagtcag

SEQ ID NO: 752381 - DNA, 33 bp, Homo sapien
ttaattcctgacacaaatgctatcttcttcaat

SEQ ID NO: 752382 - DNA, 33 bp, Homo sapien
ttaattcctgacacaagtgctatcttcttcaat

SEQ ID NO: 752383 - DNA, 33 bp, Homo sapien
cataagatcacacagcaatagaaaggtggctcc

SEQ ID NO: 752384 - DNA, 33 bp, Homo sapien
cataagatcacacagcgatagaaaggtggctcc

SEQ ID NO: 752385 - DNA, 33 bp, Homo sapien
gtaagacgcataaaaaaaaagagtagaatagtg

SEQ ID NO: 752386 - DNA, 33 bp, Homo sapien
gtaagacgcataaaaacaaagagtagaatagtg

SEQ ID NO: 752387 - DNA, 33 bp, Homo sapien
tgttggttgcaaagtgaaatctccttgctgttt

SEQ ID NO: 752388 - DNA, 33 bp, Homo sapien
tgttggttgcaaagtggaatctccttgctgttt

SEQ ID NO: 752389 - DNA, 33 bp, Homo sapien
ttatggcctctaccacagcttatttttgtctcc

SEQ ID NO: 752390 - DNA, 33 bp, Homo sapien
ttatggcctctaccactgcttatttttgtctcc

SEQ ID NO: 752391 - DNA, 33 bp, Homo sapien
aaagcttgtttgtgaaactaccagagggcatca

SEQ ID NO: 752392 - DNA, 33 bp, Homo sapien
aaagcttgtttgtgaacctaccagagggcatca

SEQ ID NO: 752393 - DNA, 33 bp, Homo sapien
ctttagaccacagaaccggaaaggagcaaagct

SEQ ID NO: 752394 - DNA, 33 bp, Homo sapien
ctttagaccacagaactggaaaggagcaaagct

SEQ ID NO: 752395 - DNA, 33 bp, Homo sapien
gcaccattaaacttgaggttttcataccaggtt

SEQ ID NO: 752396 - DNA, 33 bp, Homo sapien
gcaccattaaacttgatgttttcataccaggtt

SEQ ID NO: 752397 - DNA, 33 bp, Homo sapien
ttctcagagtcccacaagagcccaggaacattg

SEQ ID NO: 752398 - DNA, 33 bp, Homo sapien
ttctcagagtcccacaggagcccaggaacattg

SEQ ID NO: 752399 - DNA, 33 bp, Homo sapien
ggaatccaactagttacaagagtcttgcaggca

SEQ ID NO: 752400 - DNA, 33 bp, Homo sapien
ggaatccaactagttataagagtcttgcaggca

SEQ ID NO: 752401 - DNA, 33 bp, Homo sapien
ttctgtcaaactcttacgcagtctatttgctta

SEQ ID NO: 752402 - DNA, 33 bp, Homo sapien
ttctgtcaaactcttatgcagtctatttgctta

SEQ ID NO: 752403 - DNA, 33 bp, Homo sapien
ctgcatgttgacgtgactaaggaaccaacgctg

SEQ ID NO: 752404 - DNA, 33 bp, Homo sapien
ctgcatgttgacgtgattaaggaaccaacgctg

SEQ ID NO: 752405 - DNA, 33 bp, Homo sapien
aagtcaagtcaaacacagaatgtgctccttcat

SEQ ID NO: 752406 - DNA, 33 bp, Homo sapien
aagtcaagtcaaacactgaatgtgctccttcat

SEQ ID NO: 752407 - DNA, 33 bp, Homo sapien
catcatgttgaacacaatctcatgggttagaga

SEQ ID NO: 752408 - DNA, 33 bp, Homo sapien
catcatgttgaacacactctcatgggttagaga

SEQ ID NO: 752409 - DNA, 33 bp, Homo sapien
caatattccaatagacccttgatcctgcaatag

SEQ ID NO: 752410 - DNA, 33 bp, Homo sapien
caatattccaatagactcttgatcctgcaatag

SEQ ID NO: 752411 - DNA, 33 bp, Homo sapien
gcgtacatttctaaaactgtaagagactctact

SEQ ID NO: 752412 - DNA, 33 bp, Homo sapien
gcgtacatttctaaaattgtaagagactctact

SEQ ID NO: 752413 - DNA, 33 bp, Homo sapien
aagtcacctgtgcacccggagaagggctaattt

SEQ ID NO: 752414 - DNA, 33 bp, Homo sapien
aagtcacctgtgcacctggagaagggctaattt

SEQ ID NO: 752415 - DNA, 33 bp, Homo sapien
gctgtagaaagtaaggaaagactcacgacacag

SEQ ID NO: 752416 - DNA, 33 bp, Homo sapien
gctgtagaaagtaagggaagactcacgacacag

SEQ ID NO: 752417 - DNA, 33 bp, Homo sapien
cctaagcatgaatggacgggggattttgattct

SEQ ID NO: 752418 - DNA, 33 bp, Homo sapien
cctaagcatgaatggatgggggattttgattct

SEQ ID NO: 752419 - DNA, 33 bp, Homo sapien
gtgttgcaaaggtaagacctcgagagcttcacg

SEQ ID NO: 752420 - DNA, 33 bp, Homo sapien
gtgttgcaaaggtaaggcctcgagagcttcacg

SEQ ID NO: 752421 - DNA, 33 bp, Homo sapien
tctctgccttttttcccgagctaccaagagaat

SEQ ID NO: 752422 - DNA, 33 bp, Homo sapien
tctctgccttttttcctgagctaccaagagaat

SEQ ID NO: 752423 - DNA, 33 bp, Homo sapien
ctcacaacaggcatccagctactattcgcatag

SEQ ID NO: 752424 - DNA, 33 bp, Homo sapien
ctcacaacaggcatcctgctactattcgcatag

SEQ ID NO: 752425 - DNA, 33 bp, Homo sapien
gattgtgaaaggagacagattagaaaatatcac

SEQ ID NO: 752426 - DNA, 33 bp, Homo sapien
gattgtgaaaggagacggattagaaaatatcac

SEQ ID NO: 752427 - DNA, 33 bp, Homo sapien
ttcagttataaattacaaacattcagctttatt

SEQ ID NO: 752428 - DNA, 33 bp, Homo sapien
ttcagttataaattacgaacattcagctttatt

SEQ ID NO: 752429 - DNA, 33 bp, Homo sapien
aaacactcctagagacaattttaccatctaaaa

SEQ ID NO: 752430 - DNA, 33 bp, Homo sapien
aaacactcctagagacgattttaccatctaaaa

SEQ ID NO: 752431 - DNA, 33 bp, Homo sapien
aattccaaccgtaacactatgaatgtctgctgt

SEQ ID NO: 752432 - DNA, 33 bp, Homo sapien
aattccaaccgtaacagtatgaatgtctgctgt

SEQ ID NO: 752433 - DNA, 33 bp, Homo sapien
tgttctaatacaatacaacagatgcccctatgc

SEQ ID NO: 752434 - DNA, 33 bp, Homo sapien
tgttctaatacaatacgacagatgcccctatgc

SEQ ID NO: 752435 - DNA, 33 bp, Homo sapien
ctagaccggataaacaagagtgcggcaaagcct

SEQ ID NO: 752436 - DNA, 33 bp, Homo sapien
ctagaccggataaacaggagtgcggcaaagcct

SEQ ID NO: 752437 - DNA, 33 bp, Homo sapien
tatggagtcacgcctgcaggatggtgatcccat

SEQ ID NO: 752438 - DNA, 33 bp, Homo sapien
tatggagtcacgcctgtaggatggtgatcccat

SEQ ID NO: 752439 - DNA, 33 bp, Homo sapien
cctggactgtctttcagccaaaacaggctatac

SEQ ID NO: 752440 - DNA, 33 bp, Homo sapien
cctggactgtctttcatccaaaacaggctatac

SEQ ID NO: 752441 - DNA, 33 bp, Homo sapien
tgcaagcacaaaacaaggctaccattctctttc

SEQ ID NO: 752442 - DNA, 33 bp, Homo sapien
tgcaagcacaaaacaatgctaccattctctttc

SEQ ID NO: 752443 - DNA, 33 bp, Homo sapien
tgtggggacaagtgtaagagggacaagtagcat

SEQ ID NO: 752444 - DNA, 33 bp, Homo sapien
tgtggggacaagtgtatgagggacaagtagcat

SEQ ID NO: 752445 - DNA, 33 bp, Homo sapien
tcagtcactactgatacgtttacctcctgacaa

SEQ ID NO: 752446 - DNA, 33 bp, Homo sapien
tcagtcactactgatatgtttacctcctgacaa

SEQ ID NO: 752447 - DNA, 33 bp, Homo sapien
attttccaggttgaaaagaatagcattgttctg

SEQ ID NO: 752448 - DNA, 33 bp, Homo sapien
attttccaggttgaaaggaatagcattgttctg

SEQ ID NO: 752449 - DNA, 33 bp, Homo sapien
tcctgcagtcaggaataagtttttcccgcctct

SEQ ID NO: 752450 - DNA, 33 bp, Homo sapien
tcctgcagtcaggaatgagtttttcccgcctct

SEQ ID NO: 752451 - DNA, 33 bp, Homo sapien
tcctgctttcgaattccaattgagcaatacact

SEQ ID NO: 752452 - DNA, 33 bp, Homo sapien
tcctgctttcgaattctaattgagcaatacact

SEQ ID NO: 752453 - DNA, 33 bp, Homo sapien
tttccaactcacagaaagtttctcacaaagatc

SEQ ID NO: 752454 - DNA, 33 bp, Homo sapien
tttccaactcacagaaggtttctcacaaagatc

SEQ ID NO: 752455 - DNA, 33 bp, Homo sapien
cttatctccatgagtaaaacaaagtaatggggc

SEQ ID NO: 752456 - DNA, 33 bp, Homo sapien
cttatctccatgagtagaacaaagtaatggggc

SEQ ID NO: 752457 - DNA, 33 bp, Homo sapien
tttttaatcctggggacggtaagagggtccacc

SEQ ID NO: 752458 - DNA, 33 bp, Homo sapien
tttttaatcctggggatggtaagagggtccacc

SEQ ID NO: 752459 - DNA, 33 bp, Homo sapien
ttaagcacctattatgcaggcagagcttcagac

SEQ ID NO: 752460 - DNA, 33 bp, Homo sapien
ttaagcacctattatggaggcagagcttcagac

SEQ ID NO: 752461 - DNA, 33 bp, Homo sapien
aagtttaatatgggcccacagtagacttgtaaa

SEQ ID NO: 752462 - DNA, 33 bp, Homo sapien
aagtttaatatgggcctacagtagacttgtaaa

SEQ ID NO: 752463 - DNA, 33 bp, Homo sapien
atgaatggttgccagcaattcaagggagaaagg

SEQ ID NO: 752464 - DNA, 33 bp, Homo sapien
atgaatggttgccagcgattcaagggagaaagg

SEQ ID NO: 752465 - DNA, 33 bp, Homo sapien
gggctttgggtgacaacgatgcactgatgtgtc

SEQ ID NO: 752466 - DNA, 33 bp, Homo sapien
gggctttgggtgacaatgatgcactgatgtgtc

SEQ ID NO: 752467 - DNA, 33 bp, Homo sapien
tgaatgcgggatggtacgatgagctgggagaat

SEQ ID NO: 752468 - DNA, 33 bp, Homo sapien
tgaatgcgggatggtatgatgagctgggagaat

SEQ ID NO: 752469 - DNA, 33 bp, Homo sapien
ggtcctatactttctgaaaaagtccaccatgca

SEQ ID NO: 752470 - DNA, 33 bp, Homo sapien
ggtcctatactttctgcaaaagtccaccatgca

SEQ ID NO: 752471 - DNA, 33 bp, Homo sapien
ccacatgaacaaaagccctttcaggttcttcaa

SEQ ID NO: 752472 - DNA, 33 bp, Homo sapien
ccacatgaacaaaagctctttcaggttcttcaa

SEQ ID NO: 752473 - DNA, 33 bp, Homo sapien
acttacgatgcagaaacgggtcctttcctctcc

SEQ ID NO: 752474 - DNA, 33 bp, Homo sapien
acttacgatgcagaaatgggtcctttcctctcc

SEQ ID NO: 752475 - DNA, 33 bp, Homo sapien
gctaagatgtacagaacgagaaaaataaagaca

SEQ ID NO: 752476 - DNA, 33 bp, Homo sapien
gctaagatgtacagaatgagaaaaataaagaca

SEQ ID NO: 752477 - DNA, 33 bp, Homo sapien
gagggagtaggcatccaacgagagccttcttgc

SEQ ID NO: 752478 - DNA, 33 bp, Homo sapien
gagggagtaggcatccgacgagagccttcttgc

SEQ ID NO: 752479 - DNA, 33 bp, Homo sapien
ttctgagatttaaatacgtagacacagagagag

SEQ ID NO: 752480 - DNA, 33 bp, Homo sapien
ttctgagatttaaatatgtagacacagagagag

SEQ ID NO: 752481 - DNA, 33 bp, Homo sapien
tataatcacctagtcaagaagggaaatttgggg

SEQ ID NO: 752482 - DNA, 33 bp, Homo sapien
tataatcacctagtcaggaagggaaatttgggg

SEQ ID NO: 752483 - DNA, 33 bp, Homo sapien
tgcacaggaaggctagacacatcagattgaagt

SEQ ID NO: 752484 - DNA, 33 bp, Homo sapien
tgcacaggaaggctaggcacatcagattgaagt

SEQ ID NO: 752485 - DNA, 33 bp, Homo sapien
catgttcagttgtacaagaagacagcagagttc

SEQ ID NO: 752486 - DNA, 33 bp, Homo sapien
catgttcagttgtacaggaagacagcagagttc

SEQ ID NO: 752487 - DNA, 33 bp, Homo sapien
acggcttcttttcagacgcagctaagcctttgc

SEQ ID NO: 752488 - DNA, 33 bp, Homo sapien
acggcttcttttcagatgcagctaagcctttgc

SEQ ID NO: 752489 - DNA, 33 bp, Homo sapien
tttcaatgaggtccaacgtctcagcagaagaaa

SEQ ID NO: 752490 - DNA, 33 bp, Homo sapien
tttcaatgaggtccaatgtctcagcagaagaaa

SEQ ID NO: 752491 - DNA, 33 bp, Homo sapien
gctctcatcctactaccctcattgtgcttttcc

SEQ ID NO: 752492 - DNA, 33 bp, Homo sapien
gctctcatcctactactctcattgtgcttttcc

SEQ ID NO: 752493 - DNA, 33 bp, Homo sapien
tcttgataaaagaagacaatcgaatgatgatct

SEQ ID NO: 752494 - DNA, 33 bp, Homo sapien
tcttgataaaagaagagaatcgaatgatgatct

SEQ ID NO: 752495 - DNA, 33 bp, Homo sapien
ttattaattttgaatgaacaggattaaataatc

SEQ ID NO: 752496 - DNA, 33 bp, Homo sapien
ttattaattttgaatggacaggattaaataatc

SEQ ID NO: 752497 - DNA, 33 bp, Homo sapien
gcttataagatgttcaacctcagatgtcattaa

SEQ ID NO: 752498 - DNA, 33 bp, Homo sapien
gcttataagatgttcagcctcagatgtcattaa

SEQ ID NO: 752499 - DNA, 33 bp, Homo sapien
gcagatgaggctccgaccgcactcctggcgctg

SEQ ID NO: 752500 - DNA, 33 bp, Homo sapien
gcagatgaggctccgatcgcactcctggcgctg

SEQ ID NO: 752501 - DNA, 33 bp, Homo sapien
aagacctagggtagtacaaggaatggttgggag

SEQ ID NO: 752502 - DNA, 33 bp, Homo sapien
aagacctagggtagtataaggaatggttgggag

SEQ ID NO: 752503 - DNA, 33 bp, Homo sapien
ggtgtgatggcacttacacctctagcatacatg

SEQ ID NO: 752504 - DNA, 33 bp, Homo sapien
ggtgtgatggcacttatacctctagcatacatg

SEQ ID NO: 752505 - DNA, 33 bp, Homo sapien
ttccaaattctccaacagaagagtctcctattc

SEQ ID NO: 752506 - DNA, 33 bp, Homo sapien
ttccaaattctccaaccgaagagtctcctattc

SEQ ID NO: 752507 - DNA, 33 bp, Homo sapien
gcaattcaagtacctaagtcttcagcaaaggtg

SEQ ID NO: 752508 - DNA, 33 bp, Homo sapien
gcaattcaagtacctacgtcttcagcaaaggtg

SEQ ID NO: 752509 - DNA, 33 bp, Homo sapien
tccaagtcataactcacggattttaattgagga

SEQ ID NO: 752510 - DNA, 33 bp, Homo sapien
tccaagtcataactcatggattttaattgagga

SEQ ID NO: 752511 - DNA, 33 bp, Homo sapien
agatggatggtcatacaggtgaagtcatcctgt

SEQ ID NO: 752512 - DNA, 33 bp, Homo sapien
agatggatggtcatacgggtgaagtcatcctgt

SEQ ID NO: 752513 - DNA, 33 bp, Homo sapien
ctctgaaagcagagtacaccaatcaatgtgcat

SEQ ID NO: 752514 - DNA, 33 bp, Homo sapien
ctctgaaagcagagtagaccaatcaatgtgcat

SEQ ID NO: 752515 - DNA, 33 bp, Homo sapien
cactgaggttacaagacgtggtcaagctccctg

SEQ ID NO: 752516 - DNA, 33 bp, Homo sapien
cactgaggttacaagatgtggtcaagctccctg

SEQ ID NO: 752517 - DNA, 33 bp, Homo sapien
tactgtaaaaatatgaggtagtgtttttgcaga

SEQ ID NO: 752518 - DNA, 33 bp, Homo sapien
tactgtaaaaatatgatgtagtgtttttgcaga

SEQ ID NO: 752519 - DNA, 33 bp, Homo sapien
gaaaaggctgctgataaacttcagattgtccga

SEQ ID NO: 752520 - DNA, 33 bp, Homo sapien
gaaaaggctgctgatacacttcagattgtccga

SEQ ID NO: 752521 - DNA, 33 bp, Homo sapien
gcaatttgagtgaaataaagttgtactgtgata

SEQ ID NO: 752522 - DNA, 33 bp, Homo sapien
gcaatttgagtgaaatgaagttgtactgtgata

SEQ ID NO: 752523 - DNA, 33 bp, Homo sapien
ctcaaaatttcacccacagatacaactattcta

SEQ ID NO: 752524 - DNA, 33 bp, Homo sapien
ctcaaaatttcacccagagatacaactattcta

SEQ ID NO: 752525 - DNA, 33 bp, Homo sapien
caatgaaagattcataatagagtaaacaagtgt

SEQ ID NO: 752526 - DNA, 33 bp, Homo sapien
caatgaaagattcatattagagtaaacaagtgt

SEQ ID NO: 752527 - DNA, 33 bp, Homo sapien
attcccagggcagcaaactacttaggcatgtga

SEQ ID NO: 752528 - DNA, 33 bp, Homo sapien
attcccagggcagcaacctacttaggcatgtga

SEQ ID NO: 752529 - DNA, 33 bp, Homo sapien
aactgtggctcagttacgtggttcagggaagcc

SEQ ID NO: 752530 - DNA, 33 bp, Homo sapien
aactgtggctcagttatgtggttcagggaagcc

SEQ ID NO: 752531 - DNA, 33 bp, Homo sapien
atagggtctgatgcaacgtaatgtgctttctgc

SEQ ID NO: 752532 - DNA, 33 bp, Homo sapien
atagggtctgatgcaatgtaatgtgctttctgc

SEQ ID NO: 752533 - DNA, 33 bp, Homo sapien
ctctttgacctcatgacgccatgtgttttctca

SEQ ID NO: 752534 - DNA, 33 bp, Homo sapien
ctctttgacctcatgatgccatgtgttttctca

SEQ ID NO: 752535 - DNA, 33 bp, Homo sapien
actgggcacaataatgcatgacgaaaatcagaa

SEQ ID NO: 752536 - DNA, 33 bp, Homo sapien
actgggcacaataatgtatgacgaaaatcagaa

SEQ ID NO: 752537 - DNA, 33 bp, Homo sapien
atgacgaaaatcagaacgaccacatagttgctg

SEQ ID NO: 752538 - DNA, 33 bp, Homo sapien
atgacgaaaatcagaatgaccacatagttgctg

SEQ ID NO: 752539 - DNA, 33 bp, Homo sapien
tgtgattttcgagtcaaggaatttcaaaatttc

SEQ ID NO: 752540 - DNA, 33 bp, Homo sapien
tgtgattttcgagtcagggaatttcaaaatttc

SEQ ID NO: 752541 - DNA, 33 bp, Homo sapien
aagaggacaattgctaaaacactgagagagcct

SEQ ID NO: 752542 - DNA, 33 bp, Homo sapien
aagaggacaattgctagaacactgagagagcct

SEQ ID NO: 752543 - DNA, 33 bp, Homo sapien
gaacaacgcatcctgaagactttatttaaaaac

SEQ ID NO: 752544 - DNA, 33 bp, Homo sapien
gaacaacgcatcctgaggactttatttaaaaac

SEQ ID NO: 752545 - DNA, 33 bp, Homo sapien
ggacaagacagaaggaagccctccaaatctggg

SEQ ID NO: 752546 - DNA, 33 bp, Homo sapien
ggacaagacagaaggacgccctccaaatctggg

SEQ ID NO: 752547 - DNA, 33 bp, Homo sapien
gagatttaaagtcaaacggaccctatcagtcgt

SEQ ID NO: 752548 - DNA, 33 bp, Homo sapien
gagatttaaagtcaaatggaccctatcagtcgt

SEQ ID NO: 752549 - DNA, 33 bp, Homo sapien
ttacaatgagctacaaataatctttctttaaga

SEQ ID NO: 752550 - DNA, 33 bp, Homo sapien
ttacaatgagctacaagtaatctttctttaaga

SEQ ID NO: 752551 - DNA, 33 bp, Homo sapien
aagtcagaaaggataccgatatgcccaatgcca

SEQ ID NO: 752552 - DNA, 33 bp, Homo sapien
aagtcagaaaggatactgatatgcccaatgcca

SEQ ID NO: 752553 - DNA, 33 bp, Homo sapien
agcacagatatggcaaaccagcctgaactgaag

SEQ ID NO: 752554 - DNA, 33 bp, Homo sapien
agcacagatatggcaagccagcctgaactgaag

SEQ ID NO: 752555 - DNA, 33 bp, Homo sapien
caagagtggtaaaaacacattttgggacaaata

SEQ ID NO: 752556 - DNA, 33 bp, Homo sapien
caagagtggtaaaaacgcattttgggacaaata

SEQ ID NO: 752557 - DNA, 33 bp, Homo sapien
gcctggatgcttacaactcctgagaagtgagtc

SEQ ID NO: 752558 - DNA, 33 bp, Homo sapien
gcctggatgcttacaattcctgagaagtgagtc

SEQ ID NO: 752559 - DNA, 33 bp, Homo sapien
gcagaatctacacacaagatctctggtaaacac

SEQ ID NO: 752560 - DNA, 33 bp, Homo sapien
gcagaatctacacacaggatctctggtaaacac

SEQ ID NO: 752561 - DNA, 33 bp, Homo sapien
ttgtcccaatcttgtacctatgaaagtaaagcc

SEQ ID NO: 752562 - DNA, 33 bp, Homo sapien
ttgtcccaatcttgtatctatgaaagtaaagcc

SEQ ID NO: 752563 - DNA, 33 bp, Homo sapien
aggttttatgctttaccgagaagagcctattcc

SEQ ID NO: 752564 - DNA, 33 bp, Homo sapien
aggttttatgctttactgagaagagcctattcc

SEQ ID NO: 752565 - DNA, 33 bp, Homo sapien
atctctgaacaagaccactgaagctgagagctg

SEQ ID NO: 752566 - DNA, 33 bp, Homo sapien
atctctgaacaagaccgctgaagctgagagctg

SEQ ID NO: 752567 - DNA, 33 bp, Homo sapien
agtggaattttcatccccagtcttgaaggtgga

SEQ ID NO: 752568 - DNA, 33 bp, Homo sapien
agtggaattttcatccgcagtcttgaaggtgga

SEQ ID NO: 752569 - DNA, 33 bp, Homo sapien
ttgatggcagatacaacactagccttgtgcact

SEQ ID NO: 752570 - DNA, 33 bp, Homo sapien
ttgatggcagatacaatactagccttgtgcact

SEQ ID NO: 752571 - DNA, 33 bp, Homo sapien
cagaggatggggccagacattttcttggtacct

SEQ ID NO: 752572 - DNA, 33 bp, Homo sapien
cagaggatggggccaggcattttcttggtacct

SEQ ID NO: 752573 - DNA, 33 bp, Homo sapien
attccaatacacatcaggtccgggtcatggagt

SEQ ID NO: 752574 - DNA, 33 bp, Homo sapien
attccaatacacatcatgtccgggtcatggagt

SEQ ID NO: 752575 - DNA, 33 bp, Homo sapien
aaacctgcttttaaagaactaacagaagctgcc

SEQ ID NO: 752576 - DNA, 33 bp, Homo sapien
aaacctgcttttaaaggactaacagaagctgcc

SEQ ID NO: 752577 - DNA, 33 bp, Homo sapien
tgagcatccaagctccacttatatttggtcgtg

SEQ ID NO: 752578 - DNA, 33 bp, Homo sapien
tgagcatccaagctccgcttatatttggtcgtg

SEQ ID NO: 752579 - DNA, 33 bp, Homo sapien
aagacccttgtgaaacccttagccaagtgttac

SEQ ID NO: 752580 - DNA, 33 bp, Homo sapien
aagacccttgtgaaactcttagccaagtgttac

SEQ ID NO: 752581 - DNA, 33 bp, Homo sapien
tttcatagtgcacaccagatatgtgcccaaacc

SEQ ID NO: 752582 - DNA, 33 bp, Homo sapien
tttcatagtgcacacctgatatgtgcccaaacc

SEQ ID NO: 752583 - DNA, 33 bp, Homo sapien
actccagccttgcacacctggtcttttcccaca

SEQ ID NO: 752584 - DNA, 33 bp, Homo sapien
actccagccttgcacatctggtcttttcccaca

SEQ ID NO: 752585 - DNA, 33 bp, Homo sapien
tcaagtagaaatggagcaaggctgcctgcctca

SEQ ID NO: 752586 - DNA, 33 bp, Homo sapien
tcaagtagaaatggagtaaggctgcctgcctca

SEQ ID NO: 752587 - DNA, 33 bp, Homo sapien
cagggaagacaatggtgacagacgttagaggat

SEQ ID NO: 752588 - DNA, 33 bp, Homo sapien
cagggaagacaatggttacagacgttagaggat

SEQ ID NO: 752589 - DNA, 33 bp, Homo sapien
tcacagagattgatcaataactgaggatgccaa

SEQ ID NO: 752590 - DNA, 33 bp, Homo sapien
tcacagagattgatcattaactgaggatgccaa

SEQ ID NO: 752591 - DNA, 33 bp, Homo sapien
tgaattatagatgtaactagcaatttagtttct

SEQ ID NO: 752592 - DNA, 33 bp, Homo sapien
tgaattatagatgtaattagcaatttagtttct

SEQ ID NO: 752593 - DNA, 33 bp, Homo sapien
tgttattgcaaaataaagagatgcacctggatt

SEQ ID NO: 752594 - DNA, 33 bp, Homo sapien
tgttattgcaaaataaggagatgcacctggatt

SEQ ID NO: 752595 - DNA, 33 bp, Homo sapien
ttgctatttcaggggaactttgataagctgtaa

SEQ ID NO: 752596 - DNA, 33 bp, Homo sapien
ttgctatttcaggggacctttgataagctgtaa

SEQ ID NO: 752597 - DNA, 33 bp, Homo sapien
gcattgatctagtttacatttacaatgtgttaa

SEQ ID NO: 752598 - DNA, 33 bp, Homo sapien
gcattgatctagtttatatttacaatgtgttaa

SEQ ID NO: 752599 - DNA, 33 bp, Homo sapien
gatgttgctgaaaaaacgcgtagatggttctgc

SEQ ID NO: 752600 - DNA, 33 bp, Homo sapien
gatgttgctgaaaaaatgcgtagatggttctgc

SEQ ID NO: 752601 - DNA, 33 bp, Homo sapien
ttttagaatgagctccaaagttacaaaaaatga

SEQ ID NO: 752602 - DNA, 33 bp, Homo sapien
ttttagaatgagctccgaagttacaaaaaatga

SEQ ID NO: 752603 - DNA, 33 bp, Homo sapien
caaaaaatgacaaaaaatgagaagcatgtttat

SEQ ID NO: 752604 - DNA, 33 bp, Homo sapien
caaaaaatgacaaaaagtgagaagcatgtttat

SEQ ID NO: 752605 - DNA, 33 bp, Homo sapien
gcagacatgatgtcaccagccttgtgtgagtgc

SEQ ID NO: 752606 - DNA, 33 bp, Homo sapien
gcagacatgatgtcactagccttgtgtgagtgc

SEQ ID NO: 752607 - DNA, 33 bp, Homo sapien
cttttacaggtaataaagcataattcctatcac

SEQ ID NO: 752608 - DNA, 33 bp, Homo sapien
cttttacaggtaataaggcataattcctatcac

SEQ ID NO: 752609 - DNA, 33 bp, Homo sapien
ttagggtaaagcaatcaccaagccaatgtcttt

SEQ ID NO: 752610 - DNA, 33 bp, Homo sapien
ttagggtaaagcaatcgccaagccaatgtcttt

SEQ ID NO: 752611 - DNA, 33 bp, Homo sapien
cttatagactccccaacagttgttagtcacaga

SEQ ID NO: 752612 - DNA, 33 bp, Homo sapien
cttatagactccccaatagttgttagtcacaga

SEQ ID NO: 752613 - DNA, 33 bp, Homo sapien
tttagtttaggttataaaggtgtgcatttgcca

SEQ ID NO: 752614 - DNA, 33 bp, Homo sapien
tttagtttaggttatacaggtgtgcatttgcca

SEQ ID NO: 752615 - DNA, 33 bp, Homo sapien
ctatgtcaggcaaaaaacagtctaaattaaaaa

SEQ ID NO: 752616 - DNA, 33 bp, Homo sapien
ctatgtcaggcaaaaagcagtctaaattaaaaa

SEQ ID NO: 752617 - DNA, 33 bp, Homo sapien
gagaacctaagatatcactttttaaggtattac

SEQ ID NO: 752618 - DNA, 33 bp, Homo sapien
gagaacctaagatatcgctttttaaggtattac

SEQ ID NO: 752619 - DNA, 33 bp, Homo sapien
agaaatgtgtaaaatgcactacctccaattaag

SEQ ID NO: 752620 - DNA, 33 bp, Homo sapien
agaaatgtgtaaaatggactacctccaattaag

SEQ ID NO: 752621 - DNA, 33 bp, Homo sapien
tactcattatatccaacatttgctgtctagttg

SEQ ID NO: 752622 - DNA, 33 bp, Homo sapien
tactcattatatccaatatttgctgtctagttg

SEQ ID NO: 752623 - DNA, 33 bp, Homo sapien
agtgtcttaagaaaaaaagatgcattaaaattt

SEQ ID NO: 752624 - DNA, 33 bp, Homo sapien
agtgtcttaagaaaaagagatgcattaaaattt

SEQ ID NO: 752625 - DNA, 33 bp, Homo sapien
gatggctacataagaaagacagtgcccacatca

SEQ ID NO: 752626 - DNA, 33 bp, Homo sapien
gatggctacataagaatgacagtgcccacatca

SEQ ID NO: 752627 - DNA, 33 bp, Homo sapien
aagcatgattacaagacgttcaggatcttcaac

SEQ ID NO: 752628 - DNA, 33 bp, Homo sapien
aagcatgattacaagatgttcaggatcttcaac

SEQ ID NO: 752629 - DNA, 33 bp, Homo sapien
agaaactggactcagcaaagagatactcctgtc

SEQ ID NO: 752630 - DNA, 33 bp, Homo sapien
agaaactggactcagccaagagatactcctgtc

SEQ ID NO: 752631 - DNA, 33 bp, Homo sapien
tccagtttctgttttacgtgggcctcatgcact

SEQ ID NO: 752632 - DNA, 33 bp, Homo sapien
tccagtttctgttttaggtgggcctcatgcact

SEQ ID NO: 752633 - DNA, 33 bp, Homo sapien
agtggagaggtatttgaaaataaacatccattc

SEQ ID NO: 752634 - DNA, 33 bp, Homo sapien
agtggagaggtatttggaaataaacatccattc

SEQ ID NO: 752635 - DNA, 33 bp, Homo sapien
aggttatggtgcctaaatcatttggtcaaatac

SEQ ID NO: 752636 - DNA, 33 bp, Homo sapien
aggttatggtgcctaagtcatttggtcaaatac

SEQ ID NO: 752637 - DNA, 33 bp, Homo sapien
agtccctccatcagccaaatggtttatgttcac

SEQ ID NO: 752638 - DNA, 33 bp, Homo sapien
agtccctccatcagccgaatggtttatgttcac

SEQ ID NO: 752639 - DNA, 33 bp, Homo sapien
ttgtgtttgagccaccagaatcttgctagtcca

SEQ ID NO: 752640 - DNA, 33 bp, Homo sapien
ttgtgtttgagccaccggaatcttgctagtcca

SEQ ID NO: 752641 - DNA, 33 bp, Homo sapien
atagatgccgggaatagagatgggattatccca

SEQ ID NO: 752642 - DNA, 33 bp, Homo sapien
atagatgccgggaatatagatgggattatccca

SEQ ID NO: 752643 - DNA, 33 bp, Homo sapien
tactgagacagggagacggataagaaggtgaaa

SEQ ID NO: 752644 - DNA, 33 bp, Homo sapien
tactgagacagggagatggataagaaggtgaaa

SEQ ID NO: 752645 - DNA, 33 bp, Homo sapien
agtcagatggagcaaactggttttatttattta

SEQ ID NO: 752646 - DNA, 33 bp, Homo sapien
agtcagatggagcaaattggttttatttattta

SEQ ID NO: 752647 - DNA, 33 bp, Homo sapien
gccgcgtgtaggcaacaagttaacaattaagtg

SEQ ID NO: 752648 - DNA, 33 bp, Homo sapien
gccgcgtgtaggcaacgagttaacaattaagtg

SEQ ID NO: 752649 - DNA, 33 bp, Homo sapien
atgatgacattggccactgatgtttaactcagc

SEQ ID NO: 752650 - DNA, 33 bp, Homo sapien
atgatgacattggccattgatgtttaactcagc

SEQ ID NO: 752651 - DNA, 33 bp, Homo sapien
gaaaatcagcctggaaaagatccaatcacctgc

SEQ ID NO: 752652 - DNA, 33 bp, Homo sapien
gaaaatcagcctggaacagatccaatcacctgc

SEQ ID NO: 752653 - DNA, 33 bp, Homo sapien
caaggaagatgagatacatatgactcctgattt

SEQ ID NO: 752654 - DNA, 33 bp, Homo sapien
caaggaagatgagatatatatgactcctgattt

SEQ ID NO: 752655 - DNA, 33 bp, Homo sapien
gacaggtagaaacaaacatttttgcagcatttc

SEQ ID NO: 752656 - DNA, 33 bp, Homo sapien
gacaggtagaaacaaagatttttgcagcatttc

SEQ ID NO: 752657 - DNA, 33 bp, Homo sapien
taataaatagctacagaagattagatgttgact

SEQ ID NO: 752658 - DNA, 33 bp, Homo sapien
taataaatagctacagcagattagatgttgact

SEQ ID NO: 752659 - DNA, 33 bp, Homo sapien
gagtgactgagctggaacctttcaaatgtatat

SEQ ID NO: 752660 - DNA, 33 bp, Homo sapien
gagtgactgagctggagcctttcaaatgtatat

SEQ ID NO: 752661 - DNA, 33 bp, Homo sapien
ttcactatgcttttgaacctcaggggtagaaat

SEQ ID NO: 752662 - DNA, 33 bp, Homo sapien
ttcactatgcttttgatcctcaggggtagaaat

SEQ ID NO: 752663 - DNA, 33 bp, Homo sapien
tgtattttggagactacaatgagtcacacagcc

SEQ ID NO: 752664 - DNA, 33 bp, Homo sapien
tgtattttggagactataatgagtcacacagcc

SEQ ID NO: 752665 - DNA, 33 bp, Homo sapien
gatattttgttttgcaccaatagccaactaaca

SEQ ID NO: 752666 - DNA, 33 bp, Homo sapien
gatattttgttttgcagcaatagccaactaaca

SEQ ID NO: 752667 - DNA, 33 bp, Homo sapien
gtttcatgtggaattaaggaaacgtctgacctg

SEQ ID NO: 752668 - DNA, 33 bp, Homo sapien
gtttcatgtggaattagggaaacgtctgacctg

SEQ ID NO: 752669 - DNA, 33 bp, Homo sapien
gtctttggagaaggtaacctgtgaactaacgct

SEQ ID NO: 752670 - DNA, 33 bp, Homo sapien
gtctttggagaaggtaccctgtgaactaacgct

SEQ ID NO: 752671 - DNA, 33 bp, Homo sapien
tttaatcattcgatcaccagtttcacacatgga

SEQ ID NO: 752672 - DNA, 33 bp, Homo sapien
tttaatcattcgatcatcagtttcacacatgga

SEQ ID NO: 752673 - DNA, 33 bp, Homo sapien
taagtccagaaattcaaatttaagcacacttct

SEQ ID NO: 752674 - DNA, 33 bp, Homo sapien
taagtccagaaattcagatttaagcacacttct

SEQ ID NO: 752675 - DNA, 33 bp, Homo sapien
tcatcattttattccactcatttgtttgagtgt

SEQ ID NO: 752676 - DNA, 33 bp, Homo sapien
tcatcattttattccattcatttgtttgagtgt

SEQ ID NO: 752677 - DNA, 33 bp, Homo sapien
agattatagcctttaagaacacagacacttata

SEQ ID NO: 752678 - DNA, 33 bp, Homo sapien
agattatagcctttaataacacagacacttata

SEQ ID NO: 752679 - DNA, 33 bp, Homo sapien
acaaaccagtgagtgagaaccatcctggatgcc

SEQ ID NO: 752680 - DNA, 33 bp, Homo sapien
acaaaccagtgagtgataaccatcctggatgcc

SEQ ID NO: 752681 - DNA, 33 bp, Homo sapien
aaatgagactcgttccaacgcttgctgctgttc

SEQ ID NO: 752682 - DNA, 33 bp, Homo sapien
aaatgagactcgttcccacgcttgctgctgttc

SEQ ID NO: 752683 - DNA, 33 bp, Homo sapien
aaacttttatccctcaaggagaagagtttccat

SEQ ID NO: 752684 - DNA, 33 bp, Homo sapien
aaacttttatccctcacggagaagagtttccat

SEQ ID NO: 752685 - DNA, 33 bp, Homo sapien
gcctctcaaatgtttgaagactgggggatctac

SEQ ID NO: 752686 - DNA, 33 bp, Homo sapien
gcctctcaaatgtttggagactgggggatctac

SEQ ID NO: 752687 - DNA, 33 bp, Homo sapien
atttctgtataattaaatcataactccactctt

SEQ ID NO: 752688 - DNA, 33 bp, Homo sapien
atttctgtataattaagtcataactccactctt

SEQ ID NO: 752689 - DNA, 33 bp, Homo sapien
agctgagtccacacccagagtatctccaaaacc

SEQ ID NO: 752690 - DNA, 33 bp, Homo sapien
agctgagtccacacccggagtatctccaaaacc

SEQ ID NO: 752691 - DNA, 33 bp, Homo sapien
ctgtccttcaccctgaaccttcaagaaatgggc

SEQ ID NO: 752692 - DNA, 33 bp, Homo sapien
ctgtccttcaccctgagccttcaagaaatgggc

SEQ ID NO: 752693 - DNA, 33 bp, Homo sapien
gacattggtctagaaaacctcatccagccggct

SEQ ID NO: 752694 - DNA, 33 bp, Homo sapien
gacattggtctagaaagcctcatccagccggct

SEQ ID NO: 752695 - DNA, 33 bp, Homo sapien
ggacatgacgtccatacgcaccagacggaggtg

SEQ ID NO: 752696 - DNA, 33 bp, Homo sapien
ggacatgacgtccatatgcaccagacggaggtg

SEQ ID NO: 752697 - DNA, 33 bp, Homo sapien
acaggtatttacaccaacgagcaactctatagg

SEQ ID NO: 752698 - DNA, 33 bp, Homo sapien
acaggtatttacaccagcgagcaactctatagg

SEQ ID NO: 752699 - DNA, 33 bp, Homo sapien
ggtgctgagtgcttaactaccttcatttacatc

SEQ ID NO: 752700 - DNA, 33 bp, Homo sapien
ggtgctgagtgcttaagtaccttcatttacatc

SEQ ID NO: 752701 - DNA, 33 bp, Homo sapien
atggagactcatgaagaactagctacattaact

SEQ ID NO: 752702 - DNA, 33 bp, Homo sapien
atggagactcatgaaggactagctacattaact

SEQ ID NO: 752703 - DNA, 33 bp, Homo sapien
gagacaggatctttagcaatgtagttaagttaa

SEQ ID NO: 752704 - DNA, 33 bp, Homo sapien
gagacaggatctttaggaatgtagttaagttaa

SEQ ID NO: 752705 - DNA, 33 bp, Homo sapien
atattcaacactgacaaagtaaaatagctgaga

SEQ ID NO: 752706 - DNA, 33 bp, Homo sapien
atattcaacactgacagagtaaaatagctgaga

SEQ ID NO: 752707 - DNA, 33 bp, Homo sapien
cagtgctggaagcgtcaccagctcagtgatcat

SEQ ID NO: 752708 - DNA, 33 bp, Homo sapien
cagtgctggaagcgtcgccagctcagtgatcat

SEQ ID NO: 752709 - DNA, 33 bp, Homo sapien
taacccttggaagctacggatctatctaatagg

SEQ ID NO: 752710 - DNA, 33 bp, Homo sapien
taacccttggaagctatggatctatctaatagg

SEQ ID NO: 752711 - DNA, 33 bp, Homo sapien
aagtggtgggttcagagaatattgcagctttag

SEQ ID NO: 752712 - DNA, 33 bp, Homo sapien
aagtggtgggttcagataatattgcagctttag

SEQ ID NO: 752713 - DNA, 33 bp, Homo sapien
cctcccacctcagaccactgaatggtaattttt

SEQ ID NO: 752714 - DNA, 33 bp, Homo sapien
cctcccacctcagaccgctgaatggtaattttt

SEQ ID NO: 752715 - DNA, 33 bp, Homo sapien
atatctaggactgagccgaagaaacttttcaag

SEQ ID NO: 752716 - DNA, 33 bp, Homo sapien
atatctaggactgagctgaagaaacttttcaag

SEQ ID NO: 752717 - DNA, 33 bp, Homo sapien
cataattctaaaacgactatgaaactgtgctct

SEQ ID NO: 752718 - DNA, 33 bp, Homo sapien
cataattctaaaacgattatgaaactgtgctct

SEQ ID NO: 752719 - DNA, 33 bp, Homo sapien
tcattattacaattcaggttgtctctcatgttt

SEQ ID NO: 752720 - DNA, 33 bp, Homo sapien
tcattattacaattcatgttgtctctcatgttt

SEQ ID NO: 752721 - DNA, 33 bp, Homo sapien
atatgcattctttaaaagcagctgttcctattc

SEQ ID NO: 752722 - DNA, 33 bp, Homo sapien
atatgcattctttaaacgcagctgttcctattc

SEQ ID NO: 752723 - DNA, 33 bp, Homo sapien
gaggcttagacctcacaaattatatgtccagtg

SEQ ID NO: 752724 - DNA, 33 bp, Homo sapien
gaggcttagacctcacgaattatatgtccagtg

SEQ ID NO: 752725 - DNA, 33 bp, Homo sapien
tcagcagttcggaggaaaaaactgttgagaagc

SEQ ID NO: 752726 - DNA, 33 bp, Homo sapien
tcagcagttcggaggagaaaactgttgagaagc

SEQ ID NO: 752727 - DNA, 33 bp, Homo sapien
ttaatgagatataggccagcactgaataacttt

SEQ ID NO: 752728 - DNA, 33 bp, Homo sapien
ttaatgagatataggctagcactgaataacttt

SEQ ID NO: 752729 - DNA, 33 bp, Homo sapien
cttttgttgaccatcacactgaagccttaactc

SEQ ID NO: 752730 - DNA, 33 bp, Homo sapien
cttttgttgaccatcagactgaagccttaactc

SEQ ID NO: 752731 - DNA, 33 bp, Homo sapien
attttctgggtccaagacaaaatcttaaaggtg

SEQ ID NO: 752732 - DNA, 33 bp, Homo sapien
attttctgggtccaaggcaaaatcttaaaggtg

SEQ ID NO: 752733 - DNA, 33 bp, Homo sapien
caagtggtccagctgaacaccaaacttaataat

SEQ ID NO: 752734 - DNA, 33 bp, Homo sapien
caagtggtccagctgagcaccaaacttaataat

SEQ ID NO: 752735 - DNA, 33 bp, Homo sapien
gaagaggcactgtgacaaagagacttcacccat

SEQ ID NO: 752736 - DNA, 33 bp, Homo sapien
gaagaggcactgtgacgaagagacttcacccat

SEQ ID NO: 752737 - DNA, 33 bp, Homo sapien
agcagtgggattgcagcccataccattgttcca

SEQ ID NO: 752738 - DNA, 33 bp, Homo sapien
agcagtgggattgcagtccataccattgttcca

SEQ ID NO: 752739 - DNA, 33 bp, Homo sapien
cagttttgaaggtgcacagcaacaattttgtgt

SEQ ID NO: 752740 - DNA, 33 bp, Homo sapien
cagttttgaaggtgcatagcaacaattttgtgt

SEQ ID NO: 752741 - DNA, 33 bp, Homo sapien
aaacataggatggcaaacactcaacatcctcac

SEQ ID NO: 752742 - DNA, 33 bp, Homo sapien
aaacataggatggcaagcactcaacatcctcac

SEQ ID NO: 752743 - DNA, 33 bp, Homo sapien
actgcaagggagaaaacgtggctagaatcttgt

SEQ ID NO: 752744 - DNA, 33 bp, Homo sapien
actgcaagggagaaaatgtggctagaatcttgt

SEQ ID NO: 752745 - DNA, 33 bp, Homo sapien
tgaaggcaccgaaagccaagcacagttggctcc

SEQ ID NO: 752746 - DNA, 33 bp, Homo sapien
tgaaggcaccgaaagctaagcacagttggctcc

SEQ ID NO: 752747 - DNA, 33 bp, Homo sapien
cagtgctctgctgacaatgcatctaaccatatc

SEQ ID NO: 752748 - DNA, 33 bp, Homo sapien
cagtgctctgctgacagtgcatctaaccatatc

SEQ ID NO: 752749 - DNA, 33 bp, Homo sapien
gattttggtagaaaaactgtaatgctgctgtaa

SEQ ID NO: 752750 - DNA, 33 bp, Homo sapien
gattttggtagaaaaagtgtaatgctgctgtaa

SEQ ID NO: 752751 - DNA, 33 bp, Homo sapien
tgaacatcccttccaccgtcactgcagaacagt

SEQ ID NO: 752752 - DNA, 33 bp, Homo sapien
tgaacatcccttccactgtcactgcagaacagt

SEQ ID NO: 752753 - DNA, 33 bp, Homo sapien
tcatttacctgccaggaagtactctgaagatag

SEQ ID NO: 752754 - DNA, 33 bp, Homo sapien
tcatttacctgccaggcagtactctgaagatag

SEQ ID NO: 752755 - DNA, 33 bp, Homo sapien
ccactgagtatgagtacgaaaaaagtctgtcac

SEQ ID NO: 752756 - DNA, 33 bp, Homo sapien
ccactgagtatgagtatgaaaaaagtctgtcac

SEQ ID NO: 752757 - DNA, 33 bp, Homo sapien
agcatccagaaagaataaggttgcacagacact

SEQ ID NO: 752758 - DNA, 33 bp, Homo sapien
agcatccagaaagaatgaggttgcacagacact

SEQ ID NO: 752759 - DNA, 33 bp, Homo sapien
gaggaaatctatctaaaataaactatgatctgc

SEQ ID NO: 752760 - DNA, 33 bp, Homo sapien
gaggaaatctatctaacataaactatgatctgc

SEQ ID NO: 752761 - DNA, 33 bp, Homo sapien
atgatgttaaaacgataaaatatgcgatttcag

SEQ ID NO: 752762 - DNA, 33 bp, Homo sapien
atgatgttaaaacgatcaaatatgcgatttcag

SEQ ID NO: 752763 - DNA, 33 bp, Homo sapien
catgacacggattgaacagttgatttaatttgc

SEQ ID NO: 752764 - DNA, 33 bp, Homo sapien
catgacacggattgaagagttgatttaatttgc

SEQ ID NO: 752765 - DNA, 33 bp, Homo sapien
tattctgaggttttgagtaagcataaatttggg

SEQ ID NO: 752766 - DNA, 33 bp, Homo sapien
tattctgaggttttgattaagcataaatttggg

SEQ ID NO: 752767 - DNA, 33 bp, Homo sapien
aatttgtttcaaagaacagagtttatttctagt

SEQ ID NO: 752768 - DNA, 33 bp, Homo sapien
aatttgtttcaaagaagagagtttatttctagt

SEQ ID NO: 752769 - DNA, 33 bp, Homo sapien
tttcctagaactcggaagtaagttcctgacccc

SEQ ID NO: 752770 - DNA, 33 bp, Homo sapien
tttcctagaactcggacgtaagttcctgacccc

SEQ ID NO: 752771 - DNA, 33 bp, Homo sapien
actcttttagtttccacgtatgagtaagaacat

SEQ ID NO: 752772 - DNA, 33 bp, Homo sapien
actcttttagtttccatgtatgagtaagaacat

SEQ ID NO: 752773 - DNA, 33 bp, Homo sapien
tgaaacagcatgaaacaaccacatatgtcattc

SEQ ID NO: 752774 - DNA, 33 bp, Homo sapien
tgaaacagcatgaaacgaccacatatgtcattc

SEQ ID NO: 752775 - DNA, 33 bp, Homo sapien
agaatttacaccaagaaatgtctttttctctca

SEQ ID NO: 752776 - DNA, 33 bp, Homo sapien
agaatttacaccaagagatgtctttttctctca

SEQ ID NO: 752777 - DNA, 33 bp, Homo sapien
aagattattgattgtcaagtacatcaaggctgc

SEQ ID NO: 752778 - DNA, 33 bp, Homo sapien
aagattattgattgtcgagtacatcaaggctgc

SEQ ID NO: 752779 - DNA, 33 bp, Homo sapien
caaaagccgctattaaattaagaatgagtttct

SEQ ID NO: 752780 - DNA, 33 bp, Homo sapien
caaaagccgctattaacttaagaatgagtttct

SEQ ID NO: 752781 - DNA, 33 bp, Homo sapien
aataccaaacacacaagtgaaaagggaacgctg

SEQ ID NO: 752782 - DNA, 33 bp, Homo sapien
aataccaaacacacaattgaaaagggaacgctg

SEQ ID NO: 752783 - DNA, 33 bp, Homo sapien
agagttgatcgtccgaaaagggcatcaatcccc

SEQ ID NO: 752784 - DNA, 33 bp, Homo sapien
agagttgatcgtccgagaagggcatcaatcccc

SEQ ID NO: 752785 - DNA, 33 bp, Homo sapien
agagttcctgcttccacatttggctgaaagatt

SEQ ID NO: 752786 - DNA, 33 bp, Homo sapien
agagttcctgcttccatatttggctgaaagatt

SEQ ID NO: 752787 - DNA, 33 bp, Homo sapien
tctaactgtacatggacgacagtaatgtctaac

SEQ ID NO: 752788 - DNA, 33 bp, Homo sapien
tctaactgtacatggatgacagtaatgtctaac

SEQ ID NO: 752789 - DNA, 33 bp, Homo sapien
tttaggatcttaacaacgcagttaattactttt

SEQ ID NO: 752790 - DNA, 33 bp, Homo sapien
tttaggatcttaacaatgcagttaattactttt

SEQ ID NO: 752791 - DNA, 33 bp, Homo sapien
taaacacaggtgaaaaaaataataactgccgtt

SEQ ID NO: 752792 - DNA, 33 bp, Homo sapien
taaacacaggtgaaaacaataataactgccgtt

SEQ ID NO: 752793 - DNA, 33 bp, Homo sapien
tgggcataggctgaaaatgtggtagcgagcacc

SEQ ID NO: 752794 - DNA, 33 bp, Homo sapien
tgggcataggctgaaagtgtggtagcgagcacc

SEQ ID NO: 752795 - DNA, 33 bp, Homo sapien
cgccacccacttcgtcactcaagacaataatcg

SEQ ID NO: 752796 - DNA, 33 bp, Homo sapien
cgccacccacttcgtcgctcaagacaataatcg

SEQ ID NO: 752797 - DNA, 33 bp, Homo sapien
gcctttcttggctataaagattcaaggtaaaca

SEQ ID NO: 752798 - DNA, 33 bp, Homo sapien
gcctttcttggctatagagattcaaggtaaaca

SEQ ID NO: 752799 - DNA, 33 bp, Homo sapien
tggtgtttaaacatgacgtgcttcagtttgaga

SEQ ID NO: 752800 - DNA, 33 bp, Homo sapien
tggtgtttaaacatgaggtgcttcagtttgaga

SEQ ID NO: 752801 - DNA, 33 bp, Homo sapien
ttgcagcctaaaataacgaacatctgttatctt

SEQ ID NO: 752802 - DNA, 33 bp, Homo sapien
ttgcagcctaaaataatgaacatctgttatctt

SEQ ID NO: 752803 - DNA, 33 bp, Homo sapien
ctgctgagatggccaccatttccagtgttgcca

SEQ ID NO: 752804 - DNA, 33 bp, Homo sapien
ctgctgagatggccactatttccagtgttgcca

SEQ ID NO: 752805 - DNA, 33 bp, Homo sapien
acattatgagtgatctaaagttgaaatctcagt

SEQ ID NO: 752806 - DNA, 33 bp, Homo sapien
acattatgagtgatctgaagttgaaatctcagt

SEQ ID NO: 752807 - DNA, 33 bp, Homo sapien
attctttgcagaagaaaaaactggtatagataa

SEQ ID NO: 752808 - DNA, 33 bp, Homo sapien
attctttgcagaagaagaaactggtatagataa

SEQ ID NO: 752809 - DNA, 33 bp, Homo sapien
tgaaaatcaaaactacactgagatataatccca

SEQ ID NO: 752810 - DNA, 33 bp, Homo sapien
tgaaaatcaaaactacgctgagatataatccca

SEQ ID NO: 752811 - DNA, 33 bp, Homo sapien
ggaagaaatctaataaccatgttaaaagtgggc

SEQ ID NO: 752812 - DNA, 33 bp, Homo sapien
ggaagaaatctaataatcatgttaaaagtgggc

SEQ ID NO: 752813 - DNA, 33 bp, Homo sapien
cgtcacctccaatgataagttttcagatccaaa

SEQ ID NO: 752814 - DNA, 33 bp, Homo sapien
cgtcacctccaatgatgagttttcagatccaaa

SEQ ID NO: 752815 - DNA, 33 bp, Homo sapien
catagatagcattatcagaattgtgaacccatt

SEQ ID NO: 752816 - DNA, 33 bp, Homo sapien
catagatagcattatcggaattgtgaacccatt

SEQ ID NO: 752817 - DNA, 33 bp, Homo sapien
ctctaccctcaaactaagatctacttcactggc

SEQ ID NO: 752818 - DNA, 33 bp, Homo sapien
ctctaccctcaaactaggatctacttcactggc

SEQ ID NO: 752819 - DNA, 33 bp, Homo sapien
agggccttagcaggagaatatccaggagtgcag

SEQ ID NO: 752820 - DNA, 33 bp, Homo sapien
agggccttagcaggagtatatccaggagtgcag

SEQ ID NO: 752821 - DNA, 33 bp, Homo sapien
tttgacaattctgtcactattttcattgccttt

SEQ ID NO: 752822 - DNA, 33 bp, Homo sapien
tttgacaattctgtcagtattttcattgccttt

SEQ ID NO: 752823 - DNA, 33 bp, Homo sapien
ttgagttaaaacatcacgaaccctattttgtta

SEQ ID NO: 752824 - DNA, 33 bp, Homo sapien
ttgagttaaaacatcatgaaccctattttgtta

SEQ ID NO: 752825 - DNA, 33 bp, Homo sapien
aaatgccttgggatagaacttttttcttggaac

SEQ ID NO: 752826 - DNA, 33 bp, Homo sapien
aaatgccttgggataggacttttttcttggaac

SEQ ID NO: 752827 - DNA, 33 bp, Homo sapien
tccatcttaagttgtccctggagctgtgtcttg

SEQ ID NO: 752828 - DNA, 33 bp, Homo sapien
tccatcttaagttgtctctggagctgtgtcttg

SEQ ID NO: 752829 - DNA, 33 bp, Homo sapien
cctgtaaacctttctaagtcagttccattacca

SEQ ID NO: 752830 - DNA, 33 bp, Homo sapien
cctgtaaacctttctaggtcagttccattacca

SEQ ID NO: 752831 - DNA, 33 bp, Homo sapien
tggaccaccagatccaggccgcaatagcaaaac

SEQ ID NO: 752832 - DNA, 33 bp, Homo sapien
tggaccaccagatccatgccgcaatagcaaaac

SEQ ID NO: 752833 - DNA, 33 bp, Homo sapien
ctctttgtgatgtgcaataaagaacgtgtgttt

SEQ ID NO: 752834 - DNA, 33 bp, Homo sapien
ctctttgtgatgtgcagtaaagaacgtgtgttt

SEQ ID NO: 752835 - DNA, 33 bp, Homo sapien
tataaaaggaagaaaactttgcccggagaggag

SEQ ID NO: 752836 - DNA, 33 bp, Homo sapien
tataaaaggaagaaaagtttgcccggagaggag

SEQ ID NO: 752837 - DNA, 33 bp, Homo sapien
tgaatcctggtccttcaatctggcgtcatttta

SEQ ID NO: 752838 - DNA, 33 bp, Homo sapien
tgaatcctggtccttccatctggcgtcatttta

SEQ ID NO: 752839 - DNA, 33 bp, Homo sapien
cactaaatccagtcatgagagtcgcccagcgct

SEQ ID NO: 752840 - DNA, 33 bp, Homo sapien
cactaaatccagtcattagagtcgcccagcgct

SEQ ID NO: 752841 - DNA, 33 bp, Homo sapien
tgcatccgcagttatgaaatgtcctccaatgtt

SEQ ID NO: 752842 - DNA, 33 bp, Homo sapien
tgcatccgcagttatgcaatgtcctccaatgtt

SEQ ID NO: 752843 - DNA, 33 bp, Homo sapien
ggttgagatttggctacgagagctagaatgtct

SEQ ID NO: 752844 - DNA, 33 bp, Homo sapien
ggttgagatttggctatgagagctagaatgtct

SEQ ID NO: 752845 - DNA, 33 bp, Homo sapien
gagatgtaagcatgaagatgaatttagagaaat

SEQ ID NO: 752846 - DNA, 33 bp, Homo sapien
gagatgtaagcatgaatatgaatttagagaaat

SEQ ID NO: 752847 - DNA, 33 bp, Homo sapien
ccaaaaataggcagcaaaaaagaggttggtagt

SEQ ID NO: 752848 - DNA, 33 bp, Homo sapien
ccaaaaataggcagcataaaagaggttggtagt

SEQ ID NO: 752849 - DNA, 33 bp, Homo sapien
gctctgactcctgtcccgcaaagtttcttgttc

SEQ ID NO: 752850 - DNA, 33 bp, Homo sapien
gctctgactcctgtcctgcaaagtttcttgttc

SEQ ID NO: 752851 - DNA, 33 bp, Homo sapien
ttctctgtgcctcttcacctgccccaacttagt

SEQ ID NO: 752852 - DNA, 33 bp, Homo sapien
ttctctgtgcctcttcgcctgccccaacttagt

SEQ ID NO: 752853 - DNA, 33 bp, Homo sapien
gataatctgtagatagaatttgagagattagga

SEQ ID NO: 752854 - DNA, 33 bp, Homo sapien
gataatctgtagatagcatttgagagattagga

SEQ ID NO: 752855 - DNA, 33 bp, Homo sapien
tgaaggattacggtagaacagtattgagttctt

SEQ ID NO: 752856 - DNA, 33 bp, Homo sapien
tgaaggattacggtaggacagtattgagttctt

SEQ ID NO: 752857 - DNA, 33 bp, Homo sapien
aaaagcatgggttaaaatctgcagtacatcttt

SEQ ID NO: 752858 - DNA, 33 bp, Homo sapien
aaaagcatgggttaaactctgcagtacatcttt

SEQ ID NO: 752859 - DNA, 33 bp, Homo sapien
tgctgatagttacagaaaagaaaaatggcatca

SEQ ID NO: 752860 - DNA, 33 bp, Homo sapien
tgctgatagttacagagaagaaaaatggcatca

SEQ ID NO: 752861 - DNA, 33 bp, Homo sapien
tagcttttttgatctacgcagtacgatgttgtt

SEQ ID NO: 752862 - DNA, 33 bp, Homo sapien
tagcttttttgatctatgcagtacgatgttgtt

SEQ ID NO: 752863 - DNA, 33 bp, Homo sapien
gtgcatatttcctgcacgatcaaaggcatataa

SEQ ID NO: 752864 - DNA, 33 bp, Homo sapien
gtgcatatttcctgcatgatcaaaggcatataa

SEQ ID NO: 752865 - DNA, 33 bp, Homo sapien
gcactgttcatcacagacatatgaattctgggt

SEQ ID NO: 752866 - DNA, 33 bp, Homo sapien
gcactgttcatcacaggcatatgaattctgggt

SEQ ID NO: 752867 - DNA, 33 bp, Homo sapien
tcattagcagtgtatcaccgattaaatggataa

SEQ ID NO: 752868 - DNA, 33 bp, Homo sapien
tcattagcagtgtatcgccgattaaatggataa

SEQ ID NO: 752869 - DNA, 33 bp, Homo sapien
gatggaaagcatctaaactgaactcgtaatgag

SEQ ID NO: 752870 - DNA, 33 bp, Homo sapien
gatggaaagcatctaagctgaactcgtaatgag

SEQ ID NO: 752871 - DNA, 33 bp, Homo sapien
acacctttatctccaacctcagggatccacaca

SEQ ID NO: 752872 - DNA, 33 bp, Homo sapien
acacctttatctccaatctcagggatccacaca

SEQ ID NO: 752873 - DNA, 33 bp, Homo sapien
actgatccttcagctacggtgtgtggatccctg

SEQ ID NO: 752874 - DNA, 33 bp, Homo sapien
actgatccttcagctatggtgtgtggatccctg

SEQ ID NO: 752875 - DNA, 33 bp, Homo sapien
actcaatttccaaatcactattctctatgttaa

SEQ ID NO: 752876 - DNA, 33 bp, Homo sapien
actcaatttccaaatcgctattctctatgttaa

SEQ ID NO: 752877 - DNA, 33 bp, Homo sapien
gcagctcatatagtcaaccagagtgcactgaga

SEQ ID NO: 752878 - DNA, 33 bp, Homo sapien
gcagctcatatagtcacccagagtgcactgaga

SEQ ID NO: 752879 - DNA, 33 bp, Homo sapien
gtcaacactgaaggacaactttctgagaaggtc

SEQ ID NO: 752880 - DNA, 33 bp, Homo sapien
gtcaacactgaaggacgactttctgagaaggtc

SEQ ID NO: 752881 - DNA, 33 bp, Homo sapien
accactgccaaagataatacggcaagaaaacac

SEQ ID NO: 752882 - DNA, 33 bp, Homo sapien
accactgccaaagatagtacggcaagaaaacac

SEQ ID NO: 752883 - DNA, 33 bp, Homo sapien
tgggccaggagcagcaataggagaagcagtgcc

SEQ ID NO: 752884 - DNA, 33 bp, Homo sapien
tgggccaggagcagcagtaggagaagcagtgcc

SEQ ID NO: 752885 - DNA, 33 bp, Homo sapien
atagaactgcctttaaatccttagagactgtgt

SEQ ID NO: 752886 - DNA, 33 bp, Homo sapien
atagaactgcctttaagtccttagagactgtgt

SEQ ID NO: 752887 - DNA, 33 bp, Homo sapien
ttagacttgtctgcaactgatcataaagtcacc

SEQ ID NO: 752888 - DNA, 33 bp, Homo sapien
ttagacttgtctgcaattgatcataaagtcacc

SEQ ID NO: 752889 - DNA, 33 bp, Homo sapien
caaagcacctgcctgacagaataataaacatgc

SEQ ID NO: 752890 - DNA, 33 bp, Homo sapien
caaagcacctgcctgagagaataataaacatgc

SEQ ID NO: 752891 - DNA, 33 bp, Homo sapien
ctcaaactcctagagtcaagcgatctacccacc

SEQ ID NO: 752892 - DNA, 33 bp, Homo sapien
ctcaaactcctagagtgaagcgatctacccacc

SEQ ID NO: 752893 - DNA, 33 bp, Homo sapien
gctccctgctgtatcacctggtagctacacaac

SEQ ID NO: 752894 - DNA, 33 bp, Homo sapien
gctccctgctgtatcatctggtagctacacaac

SEQ ID NO: 752895 - DNA, 33 bp, Homo sapien
catattcatgaggctacgctaccttcagactaa

SEQ ID NO: 752896 - DNA, 33 bp, Homo sapien
catattcatgaggctatgctaccttcagactaa

SEQ ID NO: 752897 - DNA, 33 bp, Homo sapien
ggctccatgttgttgacgtgatacgatgcaggc

SEQ ID NO: 752898 - DNA, 33 bp, Homo sapien
ggctccatgttgttgatgtgatacgatgcaggc

SEQ ID NO: 752899 - DNA, 33 bp, Homo sapien
gttcagtaagtacagcacagagattagtatgac

SEQ ID NO: 752900 - DNA, 33 bp, Homo sapien
gttcagtaagtacagcgcagagattagtatgac

SEQ ID NO: 752901 - DNA, 33 bp, Homo sapien
ccacctacaatgtcccaagtgtggccacgtagc

SEQ ID NO: 752902 - DNA, 33 bp, Homo sapien
ccacctacaatgtcccgagtgtggccacgtagc

SEQ ID NO: 752903 - DNA, 33 bp, Homo sapien
gactagttacagaagccgagtccgcagtggaga

SEQ ID NO: 752904 - DNA, 33 bp, Homo sapien
gactagttacagaagctgagtccgcagtggaga

SEQ ID NO: 752905 - DNA, 33 bp, Homo sapien
agctgacctggtagaaaccctaaacacagcaag

SEQ ID NO: 752906 - DNA, 33 bp, Homo sapien
agctgacctggtagaagccctaaacacagcaag

SEQ ID NO: 752907 - DNA, 33 bp, Homo sapien
gatttgaaagctagcaagtgaagacagaactca

SEQ ID NO: 752908 - DNA, 33 bp, Homo sapien
gatttgaaagctagcatgtgaagacagaactca

SEQ ID NO: 752909 - DNA, 33 bp, Homo sapien
ttgtgtgatttcaagacaaaaaacaggtataaa

SEQ ID NO: 752910 - DNA, 33 bp, Homo sapien
ttgtgtgatttcaagataaaaaacaggtataaa

SEQ ID NO: 752911 - DNA, 33 bp, Homo sapien
aatgtgatagttcatgaaaaaatagcctgaagc

SEQ ID NO: 752912 - DNA, 33 bp, Homo sapien
aatgtgatagttcatgcaaaaatagcctgaagc

SEQ ID NO: 752913 - DNA, 33 bp, Homo sapien
atgggtatgagaaccacaagtagtaagccgtgg

SEQ ID NO: 752914 - DNA, 33 bp, Homo sapien
atgggtatgagaaccataagtagtaagccgtgg

SEQ ID NO: 752915 - DNA, 33 bp, Homo sapien
acattgaaaccctgaacaagttgagccatccta

SEQ ID NO: 752916 - DNA, 33 bp, Homo sapien
acattgaaaccctgaataagttgagccatccta

SEQ ID NO: 752917 - DNA, 33 bp, Homo sapien
ctttttataatctttacgcagaagattgaaaag

SEQ ID NO: 752918 - DNA, 33 bp, Homo sapien
ctttttataatctttatgcagaagattgaaaag

SEQ ID NO: 752919 - DNA, 33 bp, Homo sapien
agagcgtgatgaaaaactctgatgaatgaatga

SEQ ID NO: 752920 - DNA, 33 bp, Homo sapien
agagcgtgatgaaaaattctgatgaatgaatga

SEQ ID NO: 752921 - DNA, 33 bp, Homo sapien
caggggcttctcctcccacgaagtcttcaggga

SEQ ID NO: 752922 - DNA, 33 bp, Homo sapien
caggggcttctcctcctacgaagtcttcaggga

SEQ ID NO: 752923 - DNA, 33 bp, Homo sapien
acttgctatttcctcaaaggtatgtcttttgtg

SEQ ID NO: 752924 - DNA, 33 bp, Homo sapien
acttgctatttcctcacaggtatgtcttttgtg

SEQ ID NO: 752925 - DNA, 33 bp, Homo sapien
aagtctatacgaaaggacagaaagacaaagaaa

SEQ ID NO: 752926 - DNA, 33 bp, Homo sapien
aagtctatacgaaaggccagaaagacaaagaaa

SEQ ID NO: 752927 - DNA, 33 bp, Homo sapien
aacccaaatgtattcacgtgtttactgaagact

SEQ ID NO: 752928 - DNA, 33 bp, Homo sapien
aacccaaatgtattcatgtgtttactgaagact

SEQ ID NO: 752929 - DNA, 33 bp, Homo sapien
tgtaaatgacttctacaattttagctcctgtgg

SEQ ID NO: 752930 - DNA, 33 bp, Homo sapien
tgtaaatgacttctaccattttagctcctgtgg

SEQ ID NO: 752931 - DNA, 33 bp, Homo sapien
agaaatgttataaagacagctttcacaaaccgg

SEQ ID NO: 752932 - DNA, 33 bp, Homo sapien
agaaatgttataaagagagctttcacaaaccgg

SEQ ID NO: 752933 - DNA, 33 bp, Homo sapien
cttcaaatatgtgcagccaattttatgtcaaat

SEQ ID NO: 752934 - DNA, 33 bp, Homo sapien
cttcaaatatgtgcagtcaattttatgtcaaat

SEQ ID NO: 752935 - DNA, 33 bp, Homo sapien
aagtgtaggtgataagcactggacattgtgttg

SEQ ID NO: 752936 - DNA, 33 bp, Homo sapien
aagtgtaggtgataaggactggacattgtgttg

SEQ ID NO: 752937 - DNA, 33 bp, Homo sapien
ataagagaatgattccaattagatcacccctag

SEQ ID NO: 752938 - DNA, 33 bp, Homo sapien
ataagagaatgattccgattagatcacccctag

SEQ ID NO: 752939 - DNA, 33 bp, Homo sapien
aatctgtgttacaggcccttaaaaaagctggaa

SEQ ID NO: 752940 - DNA, 33 bp, Homo sapien
aatctgtgttacaggcgcttaaaaaagctggaa

SEQ ID NO: 752941 - DNA, 33 bp, Homo sapien
cctgcctctgatagccagatgagtgcacatcca

SEQ ID NO: 752942 - DNA, 33 bp, Homo sapien
cctgcctctgatagccggatgagtgcacatcca

SEQ ID NO: 752943 - DNA, 33 bp, Homo sapien
tgtgacttggagaaatcagatagcatccaggag

SEQ ID NO: 752944 - DNA, 33 bp, Homo sapien
tgtgacttggagaaattagatagcatccaggag

SEQ ID NO: 752945 - DNA, 33 bp, Homo sapien
tcctccagtctgcaccactggatctgctatctc

SEQ ID NO: 752946 - DNA, 33 bp, Homo sapien
tcctccagtctgcaccgctggatctgctatctc

SEQ ID NO: 752947 - DNA, 33 bp, Homo sapien
gtatcttttagaacaacagcaatacacactctc

SEQ ID NO: 752948 - DNA, 33 bp, Homo sapien
gtatcttttagaacaagagcaatacacactctc

SEQ ID NO: 752949 - DNA, 33 bp, Homo sapien
aataaagtgtaaacgaagcttgtctctttttta

SEQ ID NO: 752950 - DNA, 33 bp, Homo sapien
aataaagtgtaaacgaggcttgtctctttttta

SEQ ID NO: 752951 - DNA, 33 bp, Homo sapien
ttctgcctccctaaaagcttcctgtagtcagtc

SEQ ID NO: 752952 - DNA, 33 bp, Homo sapien
ttctgcctccctaaaatcttcctgtagtcagtc

SEQ ID NO: 752953 - DNA, 33 bp, Homo sapien
attggaggagcatgggaacattttaaatggtgg

SEQ ID NO: 752954 - DNA, 33 bp, Homo sapien
attggaggagcatggggacattttaaatggtgg

SEQ ID NO: 752955 - DNA, 33 bp, Homo sapien
tgtgcttacctggttccccttcagtctgtctca

SEQ ID NO: 752956 - DNA, 33 bp, Homo sapien
tgtgcttacctggttctccttcagtctgtctca

SEQ ID NO: 752957 - DNA, 33 bp, Homo sapien
ttgaaatatatgccaacacactaaactctgtgt

SEQ ID NO: 752958 - DNA, 33 bp, Homo sapien
ttgaaatatatgccaagacactaaactctgtgt

SEQ ID NO: 752959 - DNA, 33 bp, Homo sapien
gtctgcctgacccagtcaaacaccagagacctc

SEQ ID NO: 752960 - DNA, 33 bp, Homo sapien
gtctgcctgacccagtgaaacaccagagacctc

SEQ ID NO: 752961 - DNA, 33 bp, Homo sapien
tttgtggatctagaatcagagagaaaactaacc

SEQ ID NO: 752962 - DNA, 33 bp, Homo sapien
tttgtggatctagaatgagagagaaaactaacc

SEQ ID NO: 752963 - DNA, 33 bp, Homo sapien
atgtgttgtctactcactattttacagcttctg

SEQ ID NO: 752964 - DNA, 33 bp, Homo sapien
atgtgttgtctactcagtattttacagcttctg

SEQ ID NO: 752965 - DNA, 33 bp, Homo sapien
acacatagaggctttaaagggcacatgatacat

SEQ ID NO: 752966 - DNA, 33 bp, Homo sapien
acacatagaggctttagagggcacatgatacat

SEQ ID NO: 752967 - DNA, 33 bp, Homo sapien
aattcattgctcaaaacttgccggtctacagga

SEQ ID NO: 752968 - DNA, 33 bp, Homo sapien
aattcattgctcaaaagttgccggtctacagga

SEQ ID NO: 752969 - DNA, 33 bp, Homo sapien
gggaaagataacaacacgtgacagtgaatcaac

SEQ ID NO: 752970 - DNA, 33 bp, Homo sapien
gggaaagataacaacatgtgacagtgaatcaac

SEQ ID NO: 752971 - DNA, 33 bp, Homo sapien
tggcatcagtgtactcactcacaggccccagca

SEQ ID NO: 752972 - DNA, 33 bp, Homo sapien
tggcatcagtgtactcgctcacaggccccagca

SEQ ID NO: 752973 - DNA, 33 bp, Homo sapien
cattgccttttgtaaaagaaagaatgtcactct

SEQ ID NO: 752974 - DNA, 33 bp, Homo sapien
cattgccttttgtaaaggaaagaatgtcactct

SEQ ID NO: 752975 - DNA, 33 bp, Homo sapien
ggctaatattgcaatacgtaatttggaaagagg

SEQ ID NO: 752976 - DNA, 33 bp, Homo sapien
ggctaatattgcaataggtaatttggaaagagg

SEQ ID NO: 752977 - DNA, 33 bp, Homo sapien
ttctaatgatcagttacgttgagcttttttgca

SEQ ID NO: 752978 - DNA, 33 bp, Homo sapien
ttctaatgatcagttatgttgagcttttttgca

SEQ ID NO: 752979 - DNA, 33 bp, Homo sapien
ccctagtggaagaatccaaacacatgaccctga

SEQ ID NO: 752980 - DNA, 33 bp, Homo sapien
ccctagtggaagaatctaaacacatgaccctga

SEQ ID NO: 752981 - DNA, 33 bp, Homo sapien
attaaccctgctgggaaggcacttaccaaagct

SEQ ID NO: 752982 - DNA, 33 bp, Homo sapien
attaaccctgctgggatggcacttaccaaagct

SEQ ID NO: 752983 - DNA, 33 bp, Homo sapien
tggcaaacagactacaatggaccttttaaattc

SEQ ID NO: 752984 - DNA, 33 bp, Homo sapien
tggcaaacagactacagtggaccttttaaattc

SEQ ID NO: 752985 - DNA, 33 bp, Homo sapien
aaggtgaaagaagagaaaacagtggtgagtaac

SEQ ID NO: 752986 - DNA, 33 bp, Homo sapien
aaggtgaaagaagagagaacagtggtgagtaac

SEQ ID NO: 752987 - DNA, 33 bp, Homo sapien
tagtattctatgtatacgctatgtgtgtgtata

SEQ ID NO: 752988 - DNA, 33 bp, Homo sapien
tagtattctatgtatatgctatgtgtgtgtata

SEQ ID NO: 752989 - DNA, 33 bp, Homo sapien
gatgaacaatgcaagaaaaaagtacccaaagct

SEQ ID NO: 752990 - DNA, 33 bp, Homo sapien
gatgaacaatgcaagagaaaagtacccaaagct

SEQ ID NO: 752991 - DNA, 33 bp, Homo sapien
cagaaaaccgcaatgcaatgttgcctccctgac

SEQ ID NO: 752992 - DNA, 33 bp, Homo sapien
cagaaaaccgcaatgccatgttgcctccctgac

SEQ ID NO: 752993 - DNA, 33 bp, Homo sapien
cacttacaagaagacacgaaagctatgcaaggc

SEQ ID NO: 752994 - DNA, 33 bp, Homo sapien
cacttacaagaagacatgaaagctatgcaaggc

SEQ ID NO: 752995 - DNA, 33 bp, Homo sapien
tcagcagttattacaactctgtctgcaacaggg

SEQ ID NO: 752996 - DNA, 33 bp, Homo sapien
tcagcagttattacaattctgtctgcaacaggg

SEQ ID NO: 752997 - DNA, 33 bp, Homo sapien
attccgtgatttaataaaagtgctacttgtcag

SEQ ID NO: 752998 - DNA, 33 bp, Homo sapien
attccgtgatttaatagaagtgctacttgtcag

SEQ ID NO: 752999 - DNA, 33 bp, Homo sapien
gtggtctattaacaaacgtacccaaagtgagat

SEQ ID NO: 753000 - DNA, 33 bp, Homo sapien
gtggtctattaacaaatgtacccaaagtgagat

SEQ ID NO: 753001 - DNA, 33 bp, Homo sapien
tattattgacttaagaacaacaggaagatataa

SEQ ID NO: 753002 - DNA, 33 bp, Homo sapien
tattattgacttaagaccaacaggaagatataa

SEQ ID NO: 753003 - DNA, 33 bp, Homo sapien
tgctgggacatcaaaaacctggtctctgtcctg

SEQ ID NO: 753004 - DNA, 33 bp, Homo sapien
tgctgggacatcaaaagcctggtctctgtcctg

SEQ ID NO: 753005 - DNA, 33 bp, Homo sapien
aaaaaattcagaatggaacaagcacccactgct

SEQ ID NO: 753006 - DNA, 33 bp, Homo sapien
aaaaaattcagaatggcacaagcacccactgct

SEQ ID NO: 753007 - DNA, 33 bp, Homo sapien
tggcctgccttcactaataagtggtgccaactg

SEQ ID NO: 753008 - DNA, 33 bp, Homo sapien
tggcctgccttcactagtaagtggtgccaactg

SEQ ID NO: 753009 - DNA, 33 bp, Homo sapien
gaagccgaggaactacccagtgtgtctcaggac

SEQ ID NO: 753010 - DNA, 33 bp, Homo sapien
gaagccgaggaactactcagtgtgtctcaggac

SEQ ID NO: 753011 - DNA, 33 bp, Homo sapien
ttgccagaaacatccccccttcatttgttgggg

SEQ ID NO: 753012 - DNA, 33 bp, Homo sapien
ttgccagaaacatcccgccttcatttgttgggg

SEQ ID NO: 753013 - DNA, 33 bp, Homo sapien
gcatttccccaatacaaagtggtcagtaatgtt

SEQ ID NO: 753014 - DNA, 33 bp, Homo sapien
gcatttccccaatacagagtggtcagtaatgtt

SEQ ID NO: 753015 - DNA, 33 bp, Homo sapien
ccctgcaaataggaagacctgcttgtatgtaag

SEQ ID NO: 753016 - DNA, 33 bp, Homo sapien
ccctgcaaataggaagtcctgcttgtatgtaag

SEQ ID NO: 753017 - DNA, 33 bp, Homo sapien
gaaggcattggtgaacaaggggtatataacaaa

SEQ ID NO: 753018 - DNA, 33 bp, Homo sapien
gaaggcattggtgaacgaggggtatataacaaa

SEQ ID NO: 753019 - DNA, 33 bp, Homo sapien
cccagtttctcccaataaggacatcttacatta

SEQ ID NO: 753020 - DNA, 33 bp, Homo sapien
cccagtttctcccaatgaggacatcttacatta

SEQ ID NO: 753021 - DNA, 33 bp, Homo sapien
taagcccaggaaggtaccatccacattggttgt

SEQ ID NO: 753022 - DNA, 33 bp, Homo sapien
taagcccaggaaggtatcatccacattggttgt

SEQ ID NO: 753023 - DNA, 33 bp, Homo sapien
tcttattctgtctttaactatactcactccatt

SEQ ID NO: 753024 - DNA, 33 bp, Homo sapien
tcttattctgtctttacctatactcactccatt

SEQ ID NO: 753025 - DNA, 33 bp, Homo sapien
aggcgtatttctactgaaaagcagagtcatttt

SEQ ID NO: 753026 - DNA, 33 bp, Homo sapien
aggcgtatttctactggaaagcagagtcatttt

SEQ ID NO: 753027 - DNA, 33 bp, Homo sapien
cccatgcatctgataccgggactgccagactta

SEQ ID NO: 753028 - DNA, 33 bp, Homo sapien
cccatgcatctgatactgggactgccagactta

SEQ ID NO: 753029 - DNA, 33 bp, Homo sapien
gaggccaggactttgaaagcccagttgagctca

SEQ ID NO: 753030 - DNA, 33 bp, Homo sapien
gaggccaggactttgagagcccagttgagctca

SEQ ID NO: 753031 - DNA, 33 bp, Homo sapien
ttctccaaatacttgacgaaaaggcgtaatttt

SEQ ID NO: 753032 - DNA, 33 bp, Homo sapien
ttctccaaatacttgatgaaaaggcgtaatttt

SEQ ID NO: 753033 - DNA, 33 bp, Homo sapien
ttggatgaagggttacaatcaccgactagcgct

SEQ ID NO: 753034 - DNA, 33 bp, Homo sapien
ttggatgaagggttacgatcaccgactagcgct

SEQ ID NO: 753035 - DNA, 33 bp, Homo sapien
cagtgtcccacggataaggtggctgggccttgt

SEQ ID NO: 753036 - DNA, 33 bp, Homo sapien
cagtgtcccacggatagggtggctgggccttgt

SEQ ID NO: 753037 - DNA, 33 bp, Homo sapien
tcagtgcatgattctcactcacattactgtgcc

SEQ ID NO: 753038 - DNA, 33 bp, Homo sapien
tcagtgcatgattctcgctcacattactgtgcc

SEQ ID NO: 753039 - DNA, 33 bp, Homo sapien
aacaaatacacgaatcactttaatttgatgccc

SEQ ID NO: 753040 - DNA, 33 bp, Homo sapien
aacaaatacacgaatcgctttaatttgatgccc

SEQ ID NO: 753041 - DNA, 33 bp, Homo sapien
gtcataaacagcacggccataagcaacacatcc

SEQ ID NO: 753042 - DNA, 33 bp, Homo sapien
gtcataaacagcacggtcataagcaacacatcc

SEQ ID NO: 753043 - DNA, 33 bp, Homo sapien
taaagccatcttcagcaagggctgaactgaacc

SEQ ID NO: 753044 - DNA, 33 bp, Homo sapien
taaagccatcttcagcgagggctgaactgaacc

SEQ ID NO: 753045 - DNA, 33 bp, Homo sapien
agcgcctgatacggcaaccagaaggacaacctc

SEQ ID NO: 753046 - DNA, 33 bp, Homo sapien
agcgcctgatacggcagccagaaggacaacctc

SEQ ID NO: 753047 - DNA, 33 bp, Homo sapien
tgctgaagcacctcacgcaggatttccggcctc

SEQ ID NO: 753048 - DNA, 33 bp, Homo sapien
tgctgaagcacctcactcaggatttccggcctc

SEQ ID NO: 753049 - DNA, 33 bp, Homo sapien
tttcagggagagcccacggcacggaatgtgtgt

SEQ ID NO: 753050 - DNA, 33 bp, Homo sapien
tttcagggagagcccatggcacggaatgtgtgt

SEQ ID NO: 753051 - DNA, 33 bp, Homo sapien
ggcccgatggcctgagaagcttatccttgcctt

SEQ ID NO: 753052 - DNA, 33 bp, Homo sapien
ggcccgatggcctgaggagcttatccttgcctt

SEQ ID NO: 753053 - DNA, 33 bp, Homo sapien
taaatacacaactaaacataaaatcatagggat

SEQ ID NO: 753054 - DNA, 33 bp, Homo sapien
taaatacacaactaaatataaaatcatagggat

SEQ ID NO: 753055 - DNA, 33 bp, Homo sapien
tcctgaaaacaagcaaaaagagtcgaggccaca

SEQ ID NO: 753056 - DNA, 33 bp, Homo sapien
tcctgaaaacaagcaagaagagtcgaggccaca

SEQ ID NO: 753057 - DNA, 33 bp, Homo sapien
cagaattggatgagatcagaatccatttggaag

SEQ ID NO: 753058 - DNA, 33 bp, Homo sapien
cagaattggatgagattagaatccatttggaag

SEQ ID NO: 753059 - DNA, 33 bp, Homo sapien
tcttcactgtggaaggaaagggtacacacttct

SEQ ID NO: 753060 - DNA, 33 bp, Homo sapien
tcttcactgtggaagggaagggtacacacttct

SEQ ID NO: 753061 - DNA, 33 bp, Homo sapien
attagggctgcccttgaagtttttcaccttctg

SEQ ID NO: 753062 - DNA, 33 bp, Homo sapien
attagggctgcccttggagtttttcaccttctg

SEQ ID NO: 753063 - DNA, 33 bp, Homo sapien
ataaaaattgccagccaagtggaatccagaatc

SEQ ID NO: 753064 - DNA, 33 bp, Homo sapien
ataaaaattgccagcccagtggaatccagaatc

SEQ ID NO: 753065 - DNA, 33 bp, Homo sapien
ggggaatgcatattcagaaaataattcactatt

SEQ ID NO: 753066 - DNA, 33 bp, Homo sapien
ggggaatgcatattcataaaataattcactatt

SEQ ID NO: 753067 - DNA, 33 bp, Homo sapien
cagcatctgtaactgacagcgggggattgtgac

SEQ ID NO: 753068 - DNA, 33 bp, Homo sapien
cagcatctgtaactgatagcgggggattgtgac

SEQ ID NO: 753069 - DNA, 33 bp, Homo sapien
tctgtgtgaatcaatcagaaagctgtaagtaga

SEQ ID NO: 753070 - DNA, 33 bp, Homo sapien
tctgtgtgaatcaatccgaaagctgtaagtaga

SEQ ID NO: 753071 - DNA, 33 bp, Homo sapien
tattgattttctgtccacataatctctcaatgg

SEQ ID NO: 753072 - DNA, 33 bp, Homo sapien
tattgattttctgtccgcataatctctcaatgg

SEQ ID NO: 753073 - DNA, 33 bp, Homo sapien
ttcccactctgtgaaacgcacttttgcttcaat

SEQ ID NO: 753074 - DNA, 33 bp, Homo sapien
ttcccactctgtgaaatgcacttttgcttcaat

SEQ ID NO: 753075 - DNA, 33 bp, Homo sapien
cttgtgcactttaaaaacaatacacagttctaa

SEQ ID NO: 753076 - DNA, 33 bp, Homo sapien
cttgtgcactttaaaagcaatacacagttctaa

SEQ ID NO: 753077 - DNA, 33 bp, Homo sapien
gctaggtttacctcccaactaactttgacaatt

SEQ ID NO: 753078 - DNA, 33 bp, Homo sapien
gctaggtttacctccccactaactttgacaatt

SEQ ID NO: 753079 - DNA, 33 bp, Homo sapien
aggtgttggagaaatacggctttttccctacgc

SEQ ID NO: 753080 - DNA, 33 bp, Homo sapien
aggtgttggagaaatatggctttttccctacgc

SEQ ID NO: 753081 - DNA, 33 bp, Homo sapien
gagtcctgtagaaaacacagagatgaagtcctc

SEQ ID NO: 753082 - DNA, 33 bp, Homo sapien
gagtcctgtagaaaacgcagagatgaagtcctc

SEQ ID NO: 753083 - DNA, 33 bp, Homo sapien
caaagttcaatagcaaaggtgattccagtgcaa

SEQ ID NO: 753084 - DNA, 33 bp, Homo sapien
caaagttcaatagcaagggtgattccagtgcaa

SEQ ID NO: 753085 - DNA, 33 bp, Homo sapien
gccaacacttgctatccattgcctttttgacaa

SEQ ID NO: 753086 - DNA, 33 bp, Homo sapien
gccaacacttgctatctattgcctttttgacaa

SEQ ID NO: 753087 - DNA, 33 bp, Homo sapien
catctatctgaagagggattattacccaaaata

SEQ ID NO: 753088 - DNA, 33 bp, Homo sapien
catctatctgaagaggtattattacccaaaata

SEQ ID NO: 753089 - DNA, 33 bp, Homo sapien
tatggggaagttgaagccgggatgtatataagg

SEQ ID NO: 753090 - DNA, 33 bp, Homo sapien
tatggggaagttgaaggcgggatgtatataagg

SEQ ID NO: 753091 - DNA, 33 bp, Homo sapien
tctctgtattatggcaagttgttaatgtaacag

SEQ ID NO: 753092 - DNA, 33 bp, Homo sapien
tctctgtattatggcacgttgttaatgtaacag

SEQ ID NO: 753093 - DNA, 33 bp, Homo sapien
ctcctgagggtctaacgcagtatttcctactgt

SEQ ID NO: 753094 - DNA, 33 bp, Homo sapien
ctcctgagggtctaactcagtatttcctactgt

SEQ ID NO: 753095 - DNA, 33 bp, Homo sapien
tgcctgcatctgctcaaaagttcacacctaagg

SEQ ID NO: 753096 - DNA, 33 bp, Homo sapien
tgcctgcatctgctcagaagttcacacctaagg

SEQ ID NO: 753097 - DNA, 33 bp, Homo sapien
tttgttatcttggaacacttgaaaccctcctta

SEQ ID NO: 753098 - DNA, 33 bp, Homo sapien
tttgttatcttggaacgcttgaaaccctcctta

SEQ ID NO: 753099 - DNA, 33 bp, Homo sapien
cctccattcagctgcccaggttagaggtaagtt

SEQ ID NO: 753100 - DNA, 33 bp, Homo sapien
cctccattcagctgcctaggttagaggtaagtt

SEQ ID NO: 753101 - DNA, 33 bp, Homo sapien
agtatcacagtcatgacaattagctgtacagct

SEQ ID NO: 753102 - DNA, 33 bp, Homo sapien
agtatcacagtcatgataattagctgtacagct

SEQ ID NO: 753103 - DNA, 33 bp, Homo sapien
ttccctttggataataataggtttgtgatatta

SEQ ID NO: 753104 - DNA, 33 bp, Homo sapien
ttccctttggataatagtaggtttgtgatatta

SEQ ID NO: 753105 - DNA, 33 bp, Homo sapien
agagtgcctaccgaccaatagagtgacctggct

SEQ ID NO: 753106 - DNA, 33 bp, Homo sapien
agagtgcctaccgaccgatagagtgacctggct

SEQ ID NO: 753107 - DNA, 33 bp, Homo sapien
tctctcacaaaggaaacgtagtggacagcagtg

SEQ ID NO: 753108 - DNA, 33 bp, Homo sapien
tctctcacaaaggaaatgtagtggacagcagtg

SEQ ID NO: 753109 - DNA, 33 bp, Homo sapien
cagcaaacatagaagaagttggctgttccatct

SEQ ID NO: 753110 - DNA, 33 bp, Homo sapien
cagcaaacatagaagaggttggctgttccatct

SEQ ID NO: 753111 - DNA, 33 bp, Homo sapien
gacggacagggctgaacgaaaaaatgggatatt

SEQ ID NO: 753112 - DNA, 33 bp, Homo sapien
gacggacagggctgaatgaaaaaatgggatatt

SEQ ID NO: 753113 - DNA, 33 bp, Homo sapien
gtaagagcataagatcatttttcagtagttcct

SEQ ID NO: 753114 - DNA, 33 bp, Homo sapien
gtaagagcataagatcgtttttcagtagttcct

SEQ ID NO: 753115 - DNA, 33 bp, Homo sapien
gtttctccgtcacatgacaacaagtcttacttc

SEQ ID NO: 753116 - DNA, 33 bp, Homo sapien
gtttctccgtcacatggcaacaagtcttacttc

SEQ ID NO: 753117 - DNA, 33 bp, Homo sapien
agtcacaaaaagttggcaagataatcaaaagcc

SEQ ID NO: 753118 - DNA, 33 bp, Homo sapien
agtcacaaaaagttggtaagataatcaaaagcc

SEQ ID NO: 753119 - DNA, 33 bp, Homo sapien
aaagccagaacaaacaatgtcctaagtgaaatg

SEQ ID NO: 753120 - DNA, 33 bp, Homo sapien
aaagccagaacaaacagtgtcctaagtgaaatg

SEQ ID NO: 753121 - DNA, 33 bp, Homo sapien
gcatcctgaggacaacacatatggcagattcag

SEQ ID NO: 753122 - DNA, 33 bp, Homo sapien
gcatcctgaggacaacgcatatggcagattcag

SEQ ID NO: 753123 - DNA, 33 bp, Homo sapien
cttgaggaagtcatagaaacaactatatattgc

SEQ ID NO: 753124 - DNA, 33 bp, Homo sapien
cttgaggaagtcataggaacaactatatattgc

SEQ ID NO: 753125 - DNA, 33 bp, Homo sapien
gtatatgagaaatagacgctgaacaaatgaatg

SEQ ID NO: 753126 - DNA, 33 bp, Homo sapien
gtatatgagaaatagatgctgaacaaatgaatg

SEQ ID NO: 753127 - DNA, 33 bp, Homo sapien
gctactacaataaactcaggtcaggtgctcatt

SEQ ID NO: 753128 - DNA, 33 bp, Homo sapien
gctactacaataaactgaggtcaggtgctcatt

SEQ ID NO: 753129 - DNA, 33 bp, Homo sapien
ttgtactcactaagaaaaggaatccatagatca

SEQ ID NO: 753130 - DNA, 33 bp, Homo sapien
ttgtactcactaagaagaggaatccatagatca

SEQ ID NO: 753131 - DNA, 33 bp, Homo sapien
gggtacacaatggggaaacaactggagttcctg

SEQ ID NO: 753132 - DNA, 33 bp, Homo sapien
gggtacacaatggggatacaactggagttcctg

SEQ ID NO: 753133 - DNA, 33 bp, Homo sapien
tatatgccaaagatagaaccaagtccaacagct

SEQ ID NO: 753134 - DNA, 33 bp, Homo sapien
tatatgccaaagataggaccaagtccaacagct

SEQ ID NO: 753135 - DNA, 33 bp, Homo sapien
ctggtatctgttctcaacattccaacccagaag

SEQ ID NO: 753136 - DNA, 33 bp, Homo sapien
ctggtatctgttctcaccattccaacccagaag

SEQ ID NO: 753137 - DNA, 33 bp, Homo sapien
aagaatgtcaatatgaacttttcacgacacttt

SEQ ID NO: 753138 - DNA, 33 bp, Homo sapien
aagaatgtcaatatgatcttttcacgacacttt

SEQ ID NO: 753139 - DNA, 33 bp, Homo sapien
ccccctaacacagagacggagaagtcaacaggt

SEQ ID NO: 753140 - DNA, 33 bp, Homo sapien
ccccctaacacagagagggagaagtcaacaggt

SEQ ID NO: 753141 - DNA, 33 bp, Homo sapien
ggtggcttaaatatgaagttgggactctggatg

SEQ ID NO: 753142 - DNA, 33 bp, Homo sapien
ggtggcttaaatatgatgttgggactctggatg

SEQ ID NO: 753143 - DNA, 33 bp, Homo sapien
atttttatgagagataaccaaattacttgacag

SEQ ID NO: 753144 - DNA, 33 bp, Homo sapien
atttttatgagagatagccaaattacttgacag

SEQ ID NO: 753145 - DNA, 33 bp, Homo sapien
tattgacaggtttcacagaggaaaagacataca

SEQ ID NO: 753146 - DNA, 33 bp, Homo sapien
tattgacaggtttcaccgaggaaaagacataca

SEQ ID NO: 753147 - DNA, 33 bp, Homo sapien
agatatgaaaatttgactatggcactgacaagc

SEQ ID NO: 753148 - DNA, 33 bp, Homo sapien
agatatgaaaatttgagtatggcactgacaagc

SEQ ID NO: 753149 - DNA, 33 bp, Homo sapien
cagaacagaaggactcaatttccctggctgccg

SEQ ID NO: 753150 - DNA, 33 bp, Homo sapien
cagaacagaaggactccatttccctggctgccg

SEQ ID NO: 753151 - DNA, 33 bp, Homo sapien
tagcatgtcctcctggaaaaacttagcagagga

SEQ ID NO: 753152 - DNA, 33 bp, Homo sapien
tagcatgtcctcctgggaaaacttagcagagga

SEQ ID NO: 753153 - DNA, 33 bp, Homo sapien
atgctgtgtaagcaaaaagaaactaggttcctt

SEQ ID NO: 753154 - DNA, 33 bp, Homo sapien
atgctgtgtaagcaaagagaaactaggttcctt

SEQ ID NO: 753155 - DNA, 33 bp, Homo sapien
attaagcagaataaaacgacagaaagagagaca

SEQ ID NO: 753156 - DNA, 33 bp, Homo sapien
attaagcagaataaaaggacagaaagagagaca

SEQ ID NO: 753157 - DNA, 33 bp, Homo sapien
acacaatcaagtcttacgtagccacgacaaagg

SEQ ID NO: 753158 - DNA, 33 bp, Homo sapien
acacaatcaagtcttatgtagccacgacaaagg

SEQ ID NO: 753159 - DNA, 33 bp, Homo sapien
gagaatgcttggatgcaaaatggggagagttgt

SEQ ID NO: 753160 - DNA, 33 bp, Homo sapien
gagaatgcttggatgcgaaatggggagagttgt

SEQ ID NO: 753161 - DNA, 33 bp, Homo sapien
aatccttggcaaagagcatatatgtgagcaggg

SEQ ID NO: 753162 - DNA, 33 bp, Homo sapien
aatccttggcaaagagtatatatgtgagcaggg

SEQ ID NO: 753163 - DNA, 33 bp, Homo sapien
cttatgctaaaattccaccccatttcctttctc

SEQ ID NO: 753164 - DNA, 33 bp, Homo sapien
cttatgctaaaattccgccccatttcctttctc

SEQ ID NO: 753165 - DNA, 33 bp, Homo sapien
cttaaagcttcaattccatcgtcacctcttctg

SEQ ID NO: 753166 - DNA, 33 bp, Homo sapien
cttaaagcttcaattctatcgtcacctcttctg

SEQ ID NO: 753167 - DNA, 33 bp, Homo sapien
acttatttaggcatacaagagaccgtcagagtg

SEQ ID NO: 753168 - DNA, 33 bp, Homo sapien
acttatttaggcatactagagaccgtcagagtg

SEQ ID NO: 753169 - DNA, 33 bp, Homo sapien
agagttgttggctatacattacaaatcagttct

SEQ ID NO: 753170 - DNA, 33 bp, Homo sapien
agagttgttggctatatattacaaatcagttct

SEQ ID NO: 753171 - DNA, 33 bp, Homo sapien
agcaaaattctacttaagaaatgtaatcaataa

SEQ ID NO: 753172 - DNA, 33 bp, Homo sapien
agcaaaattctacttacgaaatgtaatcaataa

SEQ ID NO: 753173 - DNA, 33 bp, Homo sapien
ctagatcaggtttccaagtttagccccgtgtta

SEQ ID NO: 753174 - DNA, 33 bp, Homo sapien
ctagatcaggtttccaggtttagccccgtgtta

SEQ ID NO: 753175 - DNA, 33 bp, Homo sapien
gctacgggaggcttgacgagaaaaataagagaa

SEQ ID NO: 753176 - DNA, 33 bp, Homo sapien
gctacgggaggcttgatgagaaaaataagagaa

SEQ ID NO: 753177 - DNA, 33 bp, Homo sapien
tgatgccacggacatcaaagcagatgataggag

SEQ ID NO: 753178 - DNA, 33 bp, Homo sapien
tgatgccacggacatccaagcagatgataggag

SEQ ID NO: 753179 - DNA, 33 bp, Homo sapien
acctttaacttctttaaccttctgctcctatca

SEQ ID NO: 753180 - DNA, 33 bp, Homo sapien
acctttaacttctttagccttctgctcctatca

SEQ ID NO: 753181 - DNA, 33 bp, Homo sapien
tctctccccagaaagaagtcaacactgtggaga

SEQ ID NO: 753182 - DNA, 33 bp, Homo sapien
tctctccccagaaagatgtcaacactgtggaga

SEQ ID NO: 753183 - DNA, 33 bp, Homo sapien
atgatcatgcactaagaattatttaactgcaga

SEQ ID NO: 753184 - DNA, 33 bp, Homo sapien
atgatcatgcactaaggattatttaactgcaga

SEQ ID NO: 753185 - DNA, 33 bp, Homo sapien
agatgtaaatgcataacgttgtagttaatttac

SEQ ID NO: 753186 - DNA, 33 bp, Homo sapien
agatgtaaatgcataatgttgtagttaatttac

SEQ ID NO: 753187 - DNA, 33 bp, Homo sapien
ttctgctccaagaaacccaccttgctcggtcca

SEQ ID NO: 753188 - DNA, 33 bp, Homo sapien
ttctgctccaagaaactcaccttgctcggtcca

SEQ ID NO: 753189 - DNA, 33 bp, Homo sapien
aaaattcactttcagaagtaggttaggaaagca

SEQ ID NO: 753190 - DNA, 33 bp, Homo sapien
aaaattcactttcagaggtaggttaggaaagca

SEQ ID NO: 753191 - DNA, 33 bp, Homo sapien
taacaagcctctttacagaaagaccaggagctc

SEQ ID NO: 753192 - DNA, 33 bp, Homo sapien
taacaagcctctttacggaaagaccaggagctc

SEQ ID NO: 753193 - DNA, 33 bp, Homo sapien
atacaggtagccaaccaaaaaggtgagagccct

SEQ ID NO: 753194 - DNA, 33 bp, Homo sapien
atacaggtagccaaccgaaaaggtgagagccct

SEQ ID NO: 753195 - DNA, 33 bp, Homo sapien
cttaaaaccaaaacaaataagcacatgtgataa

SEQ ID NO: 753196 - DNA, 33 bp, Homo sapien
cttaaaaccaaaacaagtaagcacatgtgataa

SEQ ID NO: 753197 - DNA, 33 bp, Homo sapien
aaaggatatgcttacaatattacaaatgacagt

SEQ ID NO: 753198 - DNA, 33 bp, Homo sapien
aaaggatatgcttacactattacaaatgacagt

SEQ ID NO: 753199 - DNA, 33 bp, Homo sapien
gcatctgaaagcatcacagtatggaggagggag

SEQ ID NO: 753200 - DNA, 33 bp, Homo sapien
gcatctgaaagcatcatagtatggaggagggag

SEQ ID NO: 753201 - DNA, 33 bp, Homo sapien
ttctccagtcaatacgaacttctgggttgatag

SEQ ID NO: 753202 - DNA, 33 bp, Homo sapien
ttctccagtcaatacgcacttctgggttgatag

SEQ ID NO: 753203 - DNA, 33 bp, Homo sapien
agtgtgatgagaaaaaacatagattgagttcct

SEQ ID NO: 753204 - DNA, 33 bp, Homo sapien
agtgtgatgagaaaaagcatagattgagttcct

SEQ ID NO: 753205 - DNA, 33 bp, Homo sapien
agatggccggtaaataggagctggatgttgtgc

SEQ ID NO: 753206 - DNA, 33 bp, Homo sapien
agatggccggtaaatatgagctggatgttgtgc

SEQ ID NO: 753207 - DNA, 33 bp, Homo sapien
ttttaaggctaatttacaggaaagctatgtatt

SEQ ID NO: 753208 - DNA, 33 bp, Homo sapien
ttttaaggctaatttataggaaagctatgtatt

SEQ ID NO: 753209 - DNA, 33 bp, Homo sapien
agtttttaactgtgtcaacttgaatggattaag

SEQ ID NO: 753210 - DNA, 33 bp, Homo sapien
agtttttaactgtgtcgacttgaatggattaag

SEQ ID NO: 753211 - DNA, 33 bp, Homo sapien
ttctgatgttcgacagcaggagaaaaggaacat

SEQ ID NO: 753212 - DNA, 33 bp, Homo sapien
ttctgatgttcgacaggaggagaaaaggaacat

SEQ ID NO: 753213 - DNA, 33 bp, Homo sapien
cctccacaaatctgcaagcactttctttattgg

SEQ ID NO: 753214 - DNA, 33 bp, Homo sapien
cctccacaaatctgcaggcactttctttattgg

SEQ ID NO: 753215 - DNA, 33 bp, Homo sapien
ttattggtctagaggcaaagaggtttagaggga

SEQ ID NO: 753216 - DNA, 33 bp, Homo sapien
ttattggtctagaggcgaagaggtttagaggga

SEQ ID NO: 753217 - DNA, 33 bp, Homo sapien
gaacagaatcaggactcaagcagatgccagata

SEQ ID NO: 753218 - DNA, 33 bp, Homo sapien
gaacagaatcaggactgaagcagatgccagata

SEQ ID NO: 753219 - DNA, 33 bp, Homo sapien
cttattactcagtgggaaagacaacattgaaca

SEQ ID NO: 753220 - DNA, 33 bp, Homo sapien
cttattactcagtggggaagacaacattgaaca

SEQ ID NO: 753221 - DNA, 33 bp, Homo sapien
aaattggggaagaaatgagtttagataccagat

SEQ ID NO: 753222 - DNA, 33 bp, Homo sapien
aaattggggaagaaattagtttagataccagat

SEQ ID NO: 753223 - DNA, 33 bp, Homo sapien
ccctttcatgttacaccggacacaattagaagt

SEQ ID NO: 753224 - DNA, 33 bp, Homo sapien
ccctttcatgttacactggacacaattagaagt

SEQ ID NO: 753225 - DNA, 33 bp, Homo sapien
aatgtgtaagcagattatcatcatcagaatgaa

SEQ ID NO: 753226 - DNA, 33 bp, Homo sapien
aatgtgtaagcagattgtcatcatcagaatgaa

SEQ ID NO: 753227 - DNA, 33 bp, Homo sapien
tagtacctatttcttcaacttatcttcaagcta

SEQ ID NO: 753228 - DNA, 33 bp, Homo sapien
tagtacctatttcttcgacttatcttcaagcta

SEQ ID NO: 753229 - DNA, 33 bp, Homo sapien
cacgttgcagcacataccagtactttatccttt

SEQ ID NO: 753230 - DNA, 33 bp, Homo sapien
cacgttgcagcacatatcagtactttatccttt

SEQ ID NO: 753231 - DNA, 33 bp, Homo sapien
tgaaaattcctcaaaacgttaagtgtagagttt

SEQ ID NO: 753232 - DNA, 33 bp, Homo sapien
tgaaaattcctcaaaatgttaagtgtagagttt

SEQ ID NO: 753233 - DNA, 33 bp, Homo sapien
atctctaagtaataaacccacttcatgtaactt

SEQ ID NO: 753234 - DNA, 33 bp, Homo sapien
atctctaagtaataaagccacttcatgtaactt

SEQ ID NO: 753235 - DNA, 33 bp, Homo sapien
ttttaaattagtagcaaaatcagtgctaatttt

SEQ ID NO: 753236 - DNA, 33 bp, Homo sapien
ttttaaattagtagcagaatcagtgctaatttt

SEQ ID NO: 753237 - DNA, 33 bp, Homo sapien
agtcctagagagtggacggtctccttagttcag

SEQ ID NO: 753238 - DNA, 33 bp, Homo sapien
agtcctagagagtggatggtctccttagttcag

SEQ ID NO: 753239 - DNA, 33 bp, Homo sapien
aaaatatgtcctgtaaacttgattgataactct

SEQ ID NO: 753240 - DNA, 33 bp, Homo sapien
aaaatatgtcctgtaatcttgattgataactct

SEQ ID NO: 753241 - DNA, 33 bp, Homo sapien
gatttataaaccagataaccctctactgacaac

SEQ ID NO: 753242 - DNA, 33 bp, Homo sapien
gatttataaaccagatcaccctctactgacaac

SEQ ID NO: 753243 - DNA, 33 bp, Homo sapien
acaggtacaggatctcagaatcttaagttttgg

SEQ ID NO: 753244 - DNA, 33 bp, Homo sapien
acaggtacaggatctcggaatcttaagttttgg

SEQ ID NO: 753245 - DNA, 33 bp, Homo sapien
atctcagcaggagagagagcagggccgtcttaa

SEQ ID NO: 753246 - DNA, 33 bp, Homo sapien
atctcagcaggagagatagcagggccgtcttaa

SEQ ID NO: 753247 - DNA, 33 bp, Homo sapien
ctcttaagcagacgccacagtggaccttgaaaa

SEQ ID NO: 753248 - DNA, 33 bp, Homo sapien
ctcttaagcagacgccgcagtggaccttgaaaa

SEQ ID NO: 753249 - DNA, 33 bp, Homo sapien
tcacctgctaaagaacacaaggcttgcccccgt

SEQ ID NO: 753250 - DNA, 33 bp, Homo sapien
tcacctgctaaagaacgcaaggcttgcccccgt

SEQ ID NO: 753251 - DNA, 33 bp, Homo sapien
atggcatataagctaacgcgtgtattttacgta

SEQ ID NO: 753252 - DNA, 33 bp, Homo sapien
atggcatataagctaatgcgtgtattttacgta

SEQ ID NO: 753253 - DNA, 33 bp, Homo sapien
ctttcttccccagcaaggagtcgtggcaatgaa

SEQ ID NO: 753254 - DNA, 33 bp, Homo sapien
ctttcttccccagcaatgagtcgtggcaatgaa

SEQ ID NO: 753255 - DNA, 33 bp, Homo sapien
gaccacgttcaaaacacgggacagaggaatcgg

SEQ ID NO: 753256 - DNA, 33 bp, Homo sapien
gaccacgttcaaaacatgggacagaggaatcgg

SEQ ID NO: 753257 - DNA, 33 bp, Homo sapien
ccacaaataattgctaaaaattgttcattctac

SEQ ID NO: 753258 - DNA, 33 bp, Homo sapien
ccacaaataattgctagaaattgttcattctac

SEQ ID NO: 753259 - DNA, 33 bp, Homo sapien
atctcaactgcttatcaaacgttcactggctaa

SEQ ID NO: 753260 - DNA, 33 bp, Homo sapien
atctcaactgcttatcgaacgttcactggctaa

SEQ ID NO: 753261 - DNA, 33 bp, Homo sapien
tgttaaatcacttgacacaggacatgtggtttg

SEQ ID NO: 753262 - DNA, 33 bp, Homo sapien
tgttaaatcacttgacgcaggacatgtggtttg

SEQ ID NO: 753263 - DNA, 33 bp, Homo sapien
aataggcttaaatagccaagttgcattatcact

SEQ ID NO: 753264 - DNA, 33 bp, Homo sapien
aataggcttaaatagctaagttgcattatcact

SEQ ID NO: 753265 - DNA, 33 bp, Homo sapien
ttctgcacacagttaacatatttgttttatagc

SEQ ID NO: 753266 - DNA, 33 bp, Homo sapien
ttctgcacacagttaatatatttgttttatagc

SEQ ID NO: 753267 - DNA, 33 bp, Homo sapien
cctgtgtggtctcttgcaataccgacagctctc

SEQ ID NO: 753268 - DNA, 33 bp, Homo sapien
cctgtgtggtctcttgtaataccgacagctctc

SEQ ID NO: 753269 - DNA, 33 bp, Homo sapien
actcaacacagctctacaaggtagctttaatat

SEQ ID NO: 753270 - DNA, 33 bp, Homo sapien
actcaacacagctctataaggtagctttaatat

SEQ ID NO: 753271 - DNA, 33 bp, Homo sapien
aatgtcagcccaccatgagttgcagtagctgtt

SEQ ID NO: 753272 - DNA, 33 bp, Homo sapien
aatgtcagcccaccattagttgcagtagctgtt

SEQ ID NO: 753273 - DNA, 33 bp, Homo sapien
tgcacctgtgcttatacatttatgactctgaaa

SEQ ID NO: 753274 - DNA, 33 bp, Homo sapien
tgcacctgtgcttatatatttatgactctgaaa

SEQ ID NO: 753275 - DNA, 33 bp, Homo sapien
tctttgtttcagcaccactcaagctatctgcct

SEQ ID NO: 753276 - DNA, 33 bp, Homo sapien
tctttgtttcagcaccgctcaagctatctgcct

SEQ ID NO: 753277 - DNA, 33 bp, Homo sapien
ggaagtttctggaggactatatttttctctaat

SEQ ID NO: 753278 - DNA, 33 bp, Homo sapien
ggaagtttctggaggattatatttttctctaat

SEQ ID NO: 753279 - DNA, 33 bp, Homo sapien
agaatgttcaccaagacagatcataggctaagc

SEQ ID NO: 753280 - DNA, 33 bp, Homo sapien
agaatgttcaccaagatagatcataggctaagc

SEQ ID NO: 753281 - DNA, 33 bp, Homo sapien
gcccttaagcgagaaacgaaaggtgcagtgccc

SEQ ID NO: 753282 - DNA, 33 bp, Homo sapien
gcccttaagcgagaaaggaaaggtgcagtgccc

SEQ ID NO: 753283 - DNA, 33 bp, Homo sapien
tctccaaacagacaaccggccagctctatttgc

SEQ ID NO: 753284 - DNA, 33 bp, Homo sapien
tctccaaacagacaactggccagctctatttgc

SEQ ID NO: 753285 - DNA, 33 bp, Homo sapien
ctggccattaacacaacacacttatcacaatgg

SEQ ID NO: 753286 - DNA, 33 bp, Homo sapien
ctggccattaacacaatacacttatcacaatgg

SEQ ID NO: 753287 - DNA, 33 bp, Homo sapien
gttttaaaaatacctacgcaagaggagcaaaga

SEQ ID NO: 753288 - DNA, 33 bp, Homo sapien
gttttaaaaatacctatgcaagaggagcaaaga

SEQ ID NO: 753289 - DNA, 33 bp, Homo sapien
gaaattagcgatgatacaaactaccagaatgag

SEQ ID NO: 753290 - DNA, 33 bp, Homo sapien
gaaattagcgatgatagaaactaccagaatgag

SEQ ID NO: 753291 - DNA, 33 bp, Homo sapien
aagcaggaaaaaaagcactgagtcatcaaatgg

SEQ ID NO: 753292 - DNA, 33 bp, Homo sapien
aagcaggaaaaaaagccctgagtcatcaaatgg

SEQ ID NO: 753293 - DNA, 33 bp, Homo sapien
tacagtgttacccttcaaaaatgtaggaagctt

SEQ ID NO: 753294 - DNA, 33 bp, Homo sapien
tacagtgttacccttccaaaatgtaggaagctt

SEQ ID NO: 753295 - DNA, 33 bp, Homo sapien
ttggaagacttttctgaaaaactcaccataacc

SEQ ID NO: 753296 - DNA, 33 bp, Homo sapien
ttggaagacttttctggaaaactcaccataacc

SEQ ID NO: 753297 - DNA, 33 bp, Homo sapien
acagctggaaaatttcccccacctcttgcttca

SEQ ID NO: 753298 - DNA, 33 bp, Homo sapien
acagctggaaaatttctcccacctcttgcttca

SEQ ID NO: 753299 - DNA, 33 bp, Homo sapien
agacctgtgggtacaaatgacctgcacagcgaa

SEQ ID NO: 753300 - DNA, 33 bp, Homo sapien
agacctgtgggtacaagtgacctgcacagcgaa

SEQ ID NO: 753301 - DNA, 33 bp, Homo sapien
ggcaaagggaaatgcaacccatctggatatagg

SEQ ID NO: 753302 - DNA, 33 bp, Homo sapien
ggcaaagggaaatgcagcccatctggatatagg

SEQ ID NO: 753303 - DNA, 33 bp, Homo sapien
aagaaaaatcacagaaactatttgaatgccaga

SEQ ID NO: 753304 - DNA, 33 bp, Homo sapien
aagaaaaatcacagaatctatttgaatgccaga

SEQ ID NO: 753305 - DNA, 33 bp, Homo sapien
atgaagatgttttatgaacctactttccacttg

SEQ ID NO: 753306 - DNA, 33 bp, Homo sapien
atgaagatgttttatggacctactttccacttg

SEQ ID NO: 753307 - DNA, 33 bp, Homo sapien
ggaaaaggagcaggcacggaatcatcaattgag

SEQ ID NO: 753308 - DNA, 33 bp, Homo sapien
ggaaaaggagcaggcagggaatcatcaattgag

SEQ ID NO: 753309 - DNA, 33 bp, Homo sapien
taagaatgtccacttacagtcacaagaatttcc

SEQ ID NO: 753310 - DNA, 33 bp, Homo sapien
taagaatgtccacttatagtcacaagaatttcc

SEQ ID NO: 753311 - DNA, 33 bp, Homo sapien
tgtatttgtgctttaactggttgcaggctggca

SEQ ID NO: 753312 - DNA, 33 bp, Homo sapien
tgtatttgtgctttaattggttgcaggctggca

SEQ ID NO: 753313 - DNA, 33 bp, Homo sapien
tggtttccccacttcacagcactggtaactcgg

SEQ ID NO: 753314 - DNA, 33 bp, Homo sapien
tggtttccccacttcatagcactggtaactcgg

SEQ ID NO: 753315 - DNA, 33 bp, Homo sapien
tgagtgtcaagtaggacgtccctttgggcagta

SEQ ID NO: 753316 - DNA, 33 bp, Homo sapien
tgagtgtcaagtaggatgtccctttgggcagta

SEQ ID NO: 753317 - DNA, 33 bp, Homo sapien
cagaccactccatagaaagaattccagtgcagg

SEQ ID NO: 753318 - DNA, 33 bp, Homo sapien
cagaccactccatagagagaattccagtgcagg

SEQ ID NO: 753319 - DNA, 33 bp, Homo sapien
gataatagataatagcacttatgatgatgataa

SEQ ID NO: 753320 - DNA, 33 bp, Homo sapien
gataatagataatagcgcttatgatgatgataa

SEQ ID NO: 753321 - DNA, 33 bp, Homo sapien
gcacagcctatcttaacgttcaccccttcttgg

SEQ ID NO: 753322 - DNA, 33 bp, Homo sapien
gcacagcctatcttaatgttcaccccttcttgg

SEQ ID NO: 753323 - DNA, 33 bp, Homo sapien
aaaagagctagaaaaccgtgacaccatcagagc

SEQ ID NO: 753324 - DNA, 33 bp, Homo sapien
aaaagagctagaaaactgtgacaccatcagagc

SEQ ID NO: 753325 - DNA, 33 bp, Homo sapien
tataatatatgaaacactccatggctccccatt

SEQ ID NO: 753326 - DNA, 33 bp, Homo sapien
tataatatatgaaacagtccatggctccccatt

SEQ ID NO: 753327 - DNA, 33 bp, Homo sapien
gatgactggttggcaaagaacagggcccagcac

SEQ ID NO: 753328 - DNA, 33 bp, Homo sapien
gatgactggttggcaaggaacagggcccagcac

SEQ ID NO: 753329 - DNA, 33 bp, Homo sapien
ctagtctggtttttcacgtgggaacggacagcc

SEQ ID NO: 753330 - DNA, 33 bp, Homo sapien
ctagtctggtttttcatgtgggaacggacagcc

SEQ ID NO: 753331 - DNA, 33 bp, Homo sapien
gcaatctgtctaataactcattctacctactgt

SEQ ID NO: 753332 - DNA, 33 bp, Homo sapien
gcaatctgtctaataattcattctacctactgt

SEQ ID NO: 753333 - DNA, 33 bp, Homo sapien
caacaataaagagatgacagttggaaaaatctg

SEQ ID NO: 753334 - DNA, 33 bp, Homo sapien
caacaataaagagatgtcagttggaaaaatctg

SEQ ID NO: 753335 - DNA, 33 bp, Homo sapien
cgacacaaacctacacaaggcattgataagtat

SEQ ID NO: 753336 - DNA, 33 bp, Homo sapien
cgacacaaacctacacgaggcattgataagtat

SEQ ID NO: 753337 - DNA, 33 bp, Homo sapien
gcaatatccctaatgccgaacagtctttagtca

SEQ ID NO: 753338 - DNA, 33 bp, Homo sapien
gcaatatccctaatgctgaacagtctttagtca

SEQ ID NO: 753339 - DNA, 33 bp, Homo sapien
acagccttcgctcaacagtctacccaggatttc

SEQ ID NO: 753340 - DNA, 33 bp, Homo sapien
acagccttcgctcaacggtctacccaggatttc

SEQ ID NO: 753341 - DNA, 33 bp, Homo sapien
ttaaggcctttaaaccaagcaccatgatcgttt

SEQ ID NO: 753342 - DNA, 33 bp, Homo sapien
ttaaggcctttaaaccgagcaccatgatcgttt

SEQ ID NO: 753343 - DNA, 33 bp, Homo sapien
cacacagggctctccacggtggctagctgttgt

SEQ ID NO: 753344 - DNA, 33 bp, Homo sapien
cacacagggctctccatggtggctagctgttgt

SEQ ID NO: 753345 - DNA, 33 bp, Homo sapien
tggcacgatcaacgtaagacttcaccttgggtg

SEQ ID NO: 753346 - DNA, 33 bp, Homo sapien
tggcacgatcaacgtaggacttcaccttgggtg

SEQ ID NO: 753347 - DNA, 33 bp, Homo sapien
taatattccgtctttaaagaagtttcctcctgc

SEQ ID NO: 753348 - DNA, 33 bp, Homo sapien
taatattccgtctttagagaagtttcctcctgc

SEQ ID NO: 753349 - DNA, 33 bp, Homo sapien
agcacatggttggccaatgagggttacctttgg

SEQ ID NO: 753350 - DNA, 33 bp, Homo sapien
agcacatggttggccagtgagggttacctttgg

SEQ ID NO: 753351 - DNA, 33 bp, Homo sapien
ttgccacggtggaaaaccaaattcattctctga

SEQ ID NO: 753352 - DNA, 33 bp, Homo sapien
ttgccacggtggaaaatcaaattcattctctga

SEQ ID NO: 753353 - DNA, 33 bp, Homo sapien
aaatattttgaatggagaaagatggtgatatac

SEQ ID NO: 753354 - DNA, 33 bp, Homo sapien
aaatattttgaatggataaagatggtgatatac

SEQ ID NO: 753355 - DNA, 33 bp, Homo sapien
aggcacagccattcaacattggaagtttcatca

SEQ ID NO: 753356 - DNA, 33 bp, Homo sapien
aggcacagccattcaatattggaagtttcatca

SEQ ID NO: 753357 - DNA, 33 bp, Homo sapien
aaatatcaaaagtacacgtaggctgtgtgaacc

SEQ ID NO: 753358 - DNA, 33 bp, Homo sapien
aaatatcaaaagtacatgtaggctgtgtgaacc

SEQ ID NO: 753359 - DNA, 33 bp, Homo sapien
ggtaagtcaccagaagcacggaacataaagaag

SEQ ID NO: 753360 - DNA, 33 bp, Homo sapien
ggtaagtcaccagaagtacggaacataaagaag

SEQ ID NO: 753361 - DNA, 33 bp, Homo sapien
ccattgtgccactcctaaaatgctccagccttc

SEQ ID NO: 753362 - DNA, 33 bp, Homo sapien
ccattgtgccactcctgaaatgctccagccttc

SEQ ID NO: 753363 - DNA, 33 bp, Homo sapien
gttccacgttacacaacagacttgaaatcaatg

SEQ ID NO: 753364 - DNA, 33 bp, Homo sapien
gttccacgttacacaatagacttgaaatcaatg

SEQ ID NO: 753365 - DNA, 33 bp, Homo sapien
tgcagagtaatgtaaacagtatttgtgtgcctg

SEQ ID NO: 753366 - DNA, 33 bp, Homo sapien
tgcagagtaatgtaaatagtatttgtgtgcctg

SEQ ID NO: 753367 - DNA, 33 bp, Homo sapien
ctttagctattgtgcaaagaactgaagacttcc

SEQ ID NO: 753368 - DNA, 33 bp, Homo sapien
ctttagctattgtgcagagaactgaagacttcc

SEQ ID NO: 753369 - DNA, 33 bp, Homo sapien
tccacacgccaatccaatcccacacgttgggct

SEQ ID NO: 753370 - DNA, 33 bp, Homo sapien
tccacacgccaatccagtcccacacgttgggct

SEQ ID NO: 753371 - DNA, 33 bp, Homo sapien
tccgttacgatgtttacaccgggtgggaccaca

SEQ ID NO: 753372 - DNA, 33 bp, Homo sapien
tccgttacgatgtttataccgggtgggaccaca

SEQ ID NO: 753373 - DNA, 33 bp, Homo sapien
gttagttatggttgaaatctgaatggagattaa

SEQ ID NO: 753374 - DNA, 33 bp, Homo sapien
gttagttatggttgaattctgaatggagattaa

SEQ ID NO: 753375 - DNA, 33 bp, Homo sapien
tcagatatgagatatacgtgtcaacttgcttgc

SEQ ID NO: 753376 - DNA, 33 bp, Homo sapien
tcagatatgagatatatgtgtcaacttgcttgc

SEQ ID NO: 753377 - DNA, 33 bp, Homo sapien
gtccccacacttcggacataaactgctagtgac

SEQ ID NO: 753378 - DNA, 33 bp, Homo sapien
gtccccacacttcggagataaactgctagtgac

SEQ ID NO: 753379 - DNA, 33 bp, Homo sapien
ttatatgcaatattacacacacatttgatatta

SEQ ID NO: 753380 - DNA, 33 bp, Homo sapien
ttatatgcaatattacgcacacatttgatatta

SEQ ID NO: 753381 - DNA, 33 bp, Homo sapien
ggaaacacttatttgcacttgtagggaaggaca

SEQ ID NO: 753382 - DNA, 33 bp, Homo sapien
ggaaacacttatttgcgcttgtagggaaggaca

SEQ ID NO: 753383 - DNA, 33 bp, Homo sapien
gtggagggaaggggccaacccaaaaatgcacca

SEQ ID NO: 753384 - DNA, 33 bp, Homo sapien
gtggagggaaggggccgacccaaaaatgcacca

SEQ ID NO: 753385 - DNA, 33 bp, Homo sapien
atgcagatgctgccagaaagtctcccagagcct

SEQ ID NO: 753386 - DNA, 33 bp, Homo sapien
atgcagatgctgccaggaagtctcccagagcct

SEQ ID NO: 753387 - DNA, 33 bp, Homo sapien
ctgtccatctgtggtcaccaacagtcatgggtt

SEQ ID NO: 753388 - DNA, 33 bp, Homo sapien
ctgtccatctgtggtcgccaacagtcatgggtt

SEQ ID NO: 753389 - DNA, 33 bp, Homo sapien
cagcacattattccaactgtagttaaatcattc

SEQ ID NO: 753390 - DNA, 33 bp, Homo sapien
cagcacattattccaattgtagttaaatcattc

SEQ ID NO: 753391 - DNA, 33 bp, Homo sapien
agaaactggcggccaaagtcaaaggagcgagac

SEQ ID NO: 753392 - DNA, 33 bp, Homo sapien
agaaactggcggccaaggtcaaaggagcgagac

SEQ ID NO: 753393 - DNA, 33 bp, Homo sapien
tttatcttatttttcacgtgccacgcctcttac

SEQ ID NO: 753394 - DNA, 33 bp, Homo sapien
tttatcttatttttcatgtgccacgcctcttac

SEQ ID NO: 753395 - DNA, 33 bp, Homo sapien
ctacaggtacctgaacaactcctattacaaaat

SEQ ID NO: 753396 - DNA, 33 bp, Homo sapien
ctacaggtacctgaacgactcctattacaaaat

SEQ ID NO: 753397 - DNA, 33 bp, Homo sapien
ttatgtaccagcaccaaatttgcaaggggacaa

SEQ ID NO: 753398 - DNA, 33 bp, Homo sapien
ttatgtaccagcaccagatttgcaaggggacaa

SEQ ID NO: 753399 - DNA, 33 bp, Homo sapien
ttcaagttctagcagacggtcaactcagtaaat

SEQ ID NO: 753400 - DNA, 33 bp, Homo sapien
ttcaagttctagcagatggtcaactcagtaaat

SEQ ID NO: 753401 - DNA, 33 bp, Homo sapien
ccgcccttcaatacacagggaaatgtacatcct

SEQ ID NO: 753402 - DNA, 33 bp, Homo sapien
ccgcccttcaatacacggggaaatgtacatcct

SEQ ID NO: 753403 - DNA, 33 bp, Homo sapien
tgttgcagagaagagagattcacttgagaacct

SEQ ID NO: 753404 - DNA, 33 bp, Homo sapien
tgttgcagagaagagatattcacttgagaacct

SEQ ID NO: 753405 - DNA, 33 bp, Homo sapien; identical to SEQ ID NO: 753403

SEQ ID NO: 753406 - DNA, 33 bp, Homo sapien; identical to SEQ ID NO: 753404

SEQ ID NO: 753407 - DNA, 33 bp, Homo sapien
acataaacagctttaacgacctcttcacctaga

SEQ ID NO: 753408 - DNA, 33 bp, Homo sapien
acataaacagctttaatgacctcttcacctaga

SEQ ID NO: 753409 - DNA, 33 bp, Homo sapien
gtccccgcgatttcgcaatgaatggatgcttcc

SEQ ID NO: 753410 - DNA, 33 bp, Homo sapien
gtccccgcgatttcgcgatgaatggatgcttcc

SEQ ID NO: 753411 - DNA, 33 bp, Homo sapien
tttggaaatcacatagaaattttgggtaggtat

SEQ ID NO: 753412 - DNA, 33 bp, Homo sapien
tttggaaatcacatagcaattttgggtaggtat

SEQ ID NO: 753413 - DNA, 33 bp, Homo sapien
tttccttacaacaccacgtgaaggcagaattct

SEQ ID NO: 753414 - DNA, 33 bp, Homo sapien
tttccttacaacaccatgtgaaggcagaattct

SEQ ID NO: 753415 - DNA, 33 bp, Homo sapien
tagtgaggctcacagcaagttaggtagatggga

SEQ ID NO: 753416 - DNA, 33 bp, Homo sapien
tagtgaggctcacagcgagttaggtagatggga

SEQ ID NO: 753417 - DNA, 33 bp, Homo sapien
ggcattttggaggctacgatgattaacttcatg

SEQ ID NO: 753418 - DNA, 33 bp, Homo sapien
ggcattttggaggctatgatgattaacttcatg

SEQ ID NO: 753419 - DNA, 33 bp, Homo sapien
gaggcataagcacagaatataggatacttgtgt

SEQ ID NO: 753420 - DNA, 33 bp, Homo sapien
gaggcataagcacagagtataggatacttgtgt

SEQ ID NO: 753421 - DNA, 33 bp, Homo sapien
caggttggatacttgaagacctgaaagaaataa

SEQ ID NO: 753422 - DNA, 33 bp, Homo sapien
caggttggatacttgaggacctgaaagaaataa

SEQ ID NO: 753423 - DNA, 33 bp, Homo sapien
ccagctcaggggtttacattctcagttcaaggt

SEQ ID NO: 753424 - DNA, 33 bp, Homo sapien
ccagctcaggggtttatattctcagttcaaggt

SEQ ID NO: 753425 - DNA, 33 bp, Homo sapien
attttctttctttgaacgcttcagtttggtcat

SEQ ID NO: 753426 - DNA, 33 bp, Homo sapien
attttctttctttgaatgcttcagtttggtcat

SEQ ID NO: 753427 - DNA, 33 bp, Homo sapien
acctctacagtgtgtccctaccagcaagaaggc

SEQ ID NO: 753428 - DNA, 33 bp, Homo sapien
acctctacagtgtgtctctaccagcaagaaggc

SEQ ID NO: 753429 - DNA, 33 bp, Homo sapien
cattcccagttcaggacgacaacttcccacccc

SEQ ID NO: 753430 - DNA, 33 bp, Homo sapien
cattcccagttcaggatgacaacttcccacccc

SEQ ID NO: 753431 - DNA, 33 bp, Homo sapien
ccaggacaccagggacaaggctgtgatccagga

SEQ ID NO: 753432 - DNA, 33 bp, Homo sapien
ccaggacaccagggaccaggctgtgatccagga

SEQ ID NO: 753433 - DNA, 33 bp, Homo sapien
tctaaaacttttctaccctggcttacaagactc

SEQ ID NO: 753434 - DNA, 33 bp, Homo sapien
tctaaaacttttctactctggcttacaagactc

SEQ ID NO: 753435 - DNA, 33 bp, Homo sapien
atcaataccaagtggccccttgttcactatagt

SEQ ID NO: 753436 - DNA, 33 bp, Homo sapien
atcaataccaagtggctccttgttcactatagt

SEQ ID NO: 753437 - DNA, 33 bp, Homo sapien
agaagtgtcaaacaaacacgggaaaagcccctt

SEQ ID NO: 753438 - DNA, 33 bp, Homo sapien
agaagtgtcaaacaaatacgggaaaagcccctt

SEQ ID NO: 753439 - DNA, 33 bp, Homo sapien
ctccttggtctttacccagatgagttgaaactt

SEQ ID NO: 753440 - DNA, 33 bp, Homo sapien
ctccttggtctttaccgagatgagttgaaactt

SEQ ID NO: 753441 - DNA, 33 bp, Homo sapien
ccagtgaggttaaaaaccaaaagctgcagcaat

SEQ ID NO: 753442 - DNA, 33 bp, Homo sapien
ccagtgaggttaaaaagcaaaagctgcagcaat

SEQ ID NO: 753443 - DNA, 33 bp, Homo sapien
tgatgtttaggagacacggtctgggtgttgggg

SEQ ID NO: 753444 - DNA, 33 bp, Homo sapien
tgatgtttaggagacatggtctgggtgttgggg

SEQ ID NO: 753445 - DNA, 33 bp, Homo sapien
gaacagagcggcatacaaattgggtctgcagtt

SEQ ID NO: 753446 - DNA, 33 bp, Homo sapien
gaacagagcggcatacgaattgggtctgcagtt

SEQ ID NO: 753447 - DNA, 33 bp, Homo sapien
ctccctgcacctgacacgtgattaagttctacc

SEQ ID NO: 753448 - DNA, 33 bp, Homo sapien
ctccctgcacctgacatgtgattaagttctacc

SEQ ID NO: 753449 - DNA, 33 bp, Homo sapien
cagcctcgctttcctcccagctcccactgaaat

SEQ ID NO: 753450 - DNA, 33 bp, Homo sapien
cagcctcgctttcctcgcagctcccactgaaat

SEQ ID NO: 753451 - DNA, 33 bp, Homo sapien
ggggcactgattaaaacaaagctctggaatata

SEQ ID NO: 753452 - DNA, 33 bp, Homo sapien
ggggcactgattaaaataaagctctggaatata

SEQ ID NO: 753453 - DNA, 33 bp, Homo sapien
aaagtgatttgaagccagagagtaaacatgttg

SEQ ID NO: 753454 - DNA, 33 bp, Homo sapien
aaagtgatttgaagccggagagtaaacatgttg

SEQ ID NO: 753455 - DNA, 33 bp, Homo sapien
aattgatgcatttaaccgtaagaaaaatgaact

SEQ ID NO: 753456 - DNA, 33 bp, Homo sapien
aattgatgcatttaactgtaagaaaaatgaact

SEQ ID NO: 753457 - DNA, 33 bp, Homo sapien
agaacaccttgaacctcacttcttccatagcag

SEQ ID NO: 753458 - DNA, 33 bp, Homo sapien
agaacaccttgaaccttacttcttccatagcag

SEQ ID NO: 753459 - DNA, 33 bp, Homo sapien
gctcattaaatggctaccgaacaagtggtgact

SEQ ID NO: 753460 - DNA, 33 bp, Homo sapien
gctcattaaatggctatcgaacaagtggtgact

SEQ ID NO: 753461 - DNA, 33 bp, Homo sapien
ggagaaaactgaataaggattacgctctaacag

SEQ ID NO: 753462 - DNA, 33 bp, Homo sapien
ggagaaaactgaataatgattacgctctaacag

SEQ ID NO: 753463 - DNA, 33 bp, Homo sapien
gagataagttaccaaacaagagtgtaggagaac

SEQ ID NO: 753464 - DNA, 33 bp, Homo sapien
gagataagttaccaaataagagtgtaggagaac

SEQ ID NO: 753465 - DNA, 33 bp, Homo sapien
actggatggcctcagacaagggcttaatctttc

SEQ ID NO: 753466 - DNA, 33 bp, Homo sapien
actggatggcctcagagaagggcttaatctttc

SEQ ID NO: 753467 - DNA, 33 bp, Homo sapien
tacaggcagacccttccaataaacactaattag

SEQ ID NO: 753468 - DNA, 33 bp, Homo sapien
tacaggcagacccttctaataaacactaattag

SEQ ID NO: 753469 - DNA, 33 bp, Homo sapien
aatgaaatccgtgatgcacagtgagatgccagg

SEQ ID NO: 753470 - DNA, 33 bp, Homo sapien
aatgaaatccgtgatgtacagtgagatgccagg

SEQ ID NO: 753471 - DNA, 33 bp, Homo sapien
tcatctgcaccctcacaaccgtcagctcccagc

SEQ ID NO: 753472 - DNA, 33 bp, Homo sapien
tcatctgcaccctcacgaccgtcagctcccagc

SEQ ID NO: 753473 - DNA, 33 bp, Homo sapien
ggctccccactgccgacaggccccgcgaaaggt

SEQ ID NO: 753474 - DNA, 33 bp, Homo sapien
ggctccccactgccgataggccccgcgaaaggt

SEQ ID NO: 753475 - DNA, 33 bp, Homo sapien
cctgtagcttgtcccagtctggatgtggttctc

SEQ ID NO: 753476 - DNA, 33 bp, Homo sapien
cctgtagcttgtcccattctggatgtggttctc

SEQ ID NO: 753477 - DNA, 33 bp, Homo sapien
gggacaactttccacaccattttctgaagaatt

SEQ ID NO: 753478 - DNA, 33 bp, Homo sapien
gggacaactttccacatcattttctgaagaatt

SEQ ID NO: 753479 - DNA, 33 bp, Homo sapien
ggataactaaaagacaatgcataaaagagtatt

SEQ ID NO: 753480 - DNA, 33 bp, Homo sapien
ggataactaaaagacagtgcataaaagagtatt

SEQ ID NO: 753481 - DNA, 33 bp, Homo sapien
aggttctatccttgaacgtctttctttctctat

SEQ ID NO: 753482 - DNA, 33 bp, Homo sapien
aggttctatccttgaatgtctttctttctctat

SEQ ID NO: 753483 - DNA, 33 bp, Homo sapien
gtctcttggttttaaacaccctagatttgctgt

SEQ ID NO: 753484 - DNA, 33 bp, Homo sapien
gtctcttggttttaaataccctagatttgctgt

SEQ ID NO: 753485 - DNA, 33 bp, Homo sapien
gagggtgagagaaagcactgagcaatcactcca

SEQ ID NO: 753486 - DNA, 33 bp, Homo sapien
gagggtgagagaaagccctgagcaatcactcca

SEQ ID NO: 753487 - DNA, 33 bp, Homo sapien
actgcagggtaatgtcacaatgtcacaaaggcc

SEQ ID NO: 753488 - DNA, 33 bp, Homo sapien
actgcagggtaatgtcgcaatgtcacaaaggcc

SEQ ID NO: 753489 - DNA, 33 bp, Homo sapien
tggatagtcaatcttcacacttggaaaaacgaa

SEQ ID NO: 753490 - DNA, 33 bp, Homo sapien
tggatagtcaatcttcgcacttggaaaaacgaa

SEQ ID NO: 753491 - DNA, 33 bp, Homo sapien
acctcatctgtcacagaagtagagaaaaaaaaa

SEQ ID NO: 753492 - DNA, 33 bp, Homo sapien
acctcatctgtcacaggagtagagaaaaaaaaa

SEQ ID NO: 753493 - DNA, 33 bp, Homo sapien
cttctgtcagagaagacgttctagccacactta

SEQ ID NO: 753494 - DNA, 33 bp, Homo sapien
cttctgtcagagaagatgttctagccacactta

SEQ ID NO: 753495 - DNA, 33 bp, Homo sapien
ttcttttctgtactgactcaaaaaaacagaact

SEQ ID NO: 753496 - DNA, 33 bp, Homo sapien
ttcttttctgtactgattcaaaaaaacagaact

SEQ ID NO: 753497 - DNA, 33 bp, Homo sapien
gtgtgagtgggttgcacgttcaagatcacaggc

SEQ ID NO: 753498 - DNA, 33 bp, Homo sapien
gtgtgagtgggttgcatgttcaagatcacaggc

SEQ ID NO: 753499 - DNA, 33 bp, Homo sapien
tgaccagatggctgagaataaagatgttaagaa

SEQ ID NO: 753500 - DNA, 33 bp, Homo sapien
tgaccagatggctgagcataaagatgttaagaa

SEQ ID NO: 753501 - DNA, 33 bp, Homo sapien
cattaacatcattctgaaacgggtaggttgctt

SEQ ID NO: 753502 - DNA, 33 bp, Homo sapien
cattaacatcattctggaacgggtaggttgctt

SEQ ID NO: 753503 - DNA, 33 bp, Homo sapien
gcctcaagtcctgggaagcacttactattatta

SEQ ID NO: 753504 - DNA, 33 bp, Homo sapien
gcctcaagtcctgggatgcacttactattatta

SEQ ID NO: 753505 - DNA, 33 bp, Homo sapien
catatgatggctttaccaaaagaactgtcccaa

SEQ ID NO: 753506 - DNA, 33 bp, Homo sapien
catatgatggctttacgaaaagaactgtcccaa

SEQ ID NO: 753507 - DNA, 33 bp, Homo sapien
tatctgcctcccttcaagttgtagtctctggag

SEQ ID NO: 753508 - DNA, 33 bp, Homo sapien
tatctgcctcccttcaggttgtagtctctggag

SEQ ID NO: 753509 - DNA, 33 bp, Homo sapien
ctcaatgtgaacaagaagaaaatctgagaaaat

SEQ ID NO: 753510 - DNA, 33 bp, Homo sapien
ctcaatgtgaacaagacgaaaatctgagaaaat

SEQ ID NO: 753511 - DNA, 33 bp, Homo sapien
gatgtgagaagtaatccagacctataaggagag

SEQ ID NO: 753512 - DNA, 33 bp, Homo sapien
gatgtgagaagtaatcgagacctataaggagag

SEQ ID NO: 753513 - DNA, 33 bp, Homo sapien
atatacagagggaaaacttatccagggagtttg

SEQ ID NO: 753514 - DNA, 33 bp, Homo sapien
atatacagagggaaaatttatccagggagtttg

SEQ ID NO: 753515 - DNA, 33 bp, Homo sapien
taggctacagggaacaatgtatcactcctgggc

SEQ ID NO: 753516 - DNA, 33 bp, Homo sapien
taggctacagggaacagtgtatcactcctgggc

SEQ ID NO: 753517 - DNA, 33 bp, Homo sapien
atcatggcataaattccaaatcatgctcttttt

SEQ ID NO: 753518 - DNA, 33 bp, Homo sapien
atcatggcataaattctaaatcatgctcttttt

SEQ ID NO: 753519 - DNA, 33 bp, Homo sapien
tgttgattctgaatatcacccttgtagacgctt

SEQ ID NO: 753520 - DNA, 33 bp, Homo sapien
tgttgattctgaatattacccttgtagacgctt

SEQ ID NO: 753521 - DNA, 33 bp, Homo sapien
ttacttgacttttatacatctgtgtcctggtct

SEQ ID NO: 753522 - DNA, 33 bp, Homo sapien
ttacttgacttttatatatctgtgtcctggtct

SEQ ID NO: 753523 - DNA, 33 bp, Homo sapien
ctattaagactccataaccttttcctcctggaa

SEQ ID NO: 753524 - DNA, 33 bp, Homo sapien
ctattaagactccatagccttttcctcctggaa

SEQ ID NO: 753525 - DNA, 33 bp, Homo sapien
gaggggcacaaatgacgcagcaggagtgggagt

SEQ ID NO: 753526 - DNA, 33 bp, Homo sapien
gaggggcacaaatgactcagcaggagtgggagt

SEQ ID NO: 753527 - DNA, 33 bp, Homo sapien
ctccatctctcctgcaagctactgtggttgacg

SEQ ID NO: 753528 - DNA, 33 bp, Homo sapien
ctccatctctcctgcaggctactgtggttgacg

SEQ ID NO: 753529 - DNA, 33 bp, Homo sapien
agagagaaatgacatcacttttaatttccatca

SEQ ID NO: 753530 - DNA, 33 bp, Homo sapien
agagagaaatgacatcgcttttaatttccatca

SEQ ID NO: 753531 - DNA, 33 bp, Homo sapien
gagtaagaatgaagtacaacatagattagcttt

SEQ ID NO: 753532 - DNA, 33 bp, Homo sapien
gagtaagaatgaagtataacatagattagcttt

SEQ ID NO: 753533 - DNA, 33 bp, Homo sapien
cagagccttctaaaaacagcaggtaagcatgct

SEQ ID NO: 753534 - DNA, 33 bp, Homo sapien
cagagccttctaaaaagagcaggtaagcatgct

SEQ ID NO: 753535 - DNA, 33 bp, Homo sapien
tggctcggcagaggtcccttctcaccttctgga

SEQ ID NO: 753536 - DNA, 33 bp, Homo sapien
tggctcggcagaggtctcttctcaccttctgga

SEQ ID NO: 753537 - DNA, 33 bp, Homo sapien
aggtgcctctatcctgaagcgtgaatgaaaata

SEQ ID NO: 753538 - DNA, 33 bp, Homo sapien
aggtgcctctatcctggagcgtgaatgaaaata

SEQ ID NO: 753539 - DNA, 33 bp, Homo sapien
attttttgcccactgacggtggctccttaactg

SEQ ID NO: 753540 - DNA, 33 bp, Homo sapien
attttttgcccactgatggtggctccttaactg

SEQ ID NO: 753541 - DNA, 33 bp, Homo sapien
ggaatagccttgagcaccttgaatactgcaaac

SEQ ID NO: 753542 - DNA, 33 bp, Homo sapien
ggaatagccttgagcatcttgaatactgcaaac

SEQ ID NO: 753543 - DNA, 33 bp, Homo sapien
atgagtagaatgaggcacaggaaataggagcgc

SEQ ID NO: 753544 - DNA, 33 bp, Homo sapien
atgagtagaatgaggcgcaggaaataggagcgc

SEQ ID NO: 753545 - DNA, 33 bp, Homo sapien
tatggtcttcccaaccaactctcatgtcatcgt

SEQ ID NO: 753546 - DNA, 33 bp, Homo sapien
tatggtcttcccaaccgactctcatgtcatcgt

SEQ ID NO: 753547 - DNA, 33 bp, Homo sapien
taaatcaccatgtcaacattttcttcttttaaa

SEQ ID NO: 753548 - DNA, 33 bp, Homo sapien
taaatcaccatgtcaagattttcttcttttaaa

SEQ ID NO: 753549 - DNA, 33 bp, Homo sapien
gaactgtaaatcagcaaatatttctaggttgtg

SEQ ID NO: 753550 - DNA, 33 bp, Homo sapien
gaactgtaaatcagcacatatttctaggttgtg

SEQ ID NO: 753551 - DNA, 33 bp, Homo sapien
tgagggatgaaaagaactaaaggacataacatc

SEQ ID NO: 753552 - DNA, 33 bp, Homo sapien
tgagggatgaaaagaattaaaggacataacatc

SEQ ID NO: 753553 - DNA, 33 bp, Homo sapien
taccagcttataaatcacctcacaaaggaagct

SEQ ID NO: 753554 - DNA, 33 bp, Homo sapien
taccagcttataaatcgcctcacaaaggaagct

SEQ ID NO: 753555 - DNA, 33 bp, Homo sapien
tacattggacataaccaaaaattttagaacttg

SEQ ID NO: 753556 - DNA, 33 bp, Homo sapien
tacattggacataacccaaaattttagaacttg

SEQ ID NO: 753557 - DNA, 33 bp, Homo sapien
ggacaaaagacttgaccggcaattttgccaaac

SEQ ID NO: 753558 - DNA, 33 bp, Homo sapien
ggacaaaagacttgactggcaattttgccaaac

SEQ ID NO: 753559 - DNA, 33 bp, Homo sapien
gttatctaatttctgaaggtttggcaaaattgc

SEQ ID NO: 753560 - DNA, 33 bp, Homo sapien
gttatctaatttctgatggtttggcaaaattgc

SEQ ID NO: 753561 - DNA, 33 bp, Homo sapien
gaatgttagcaaaccaaattcaattataaataa

SEQ ID NO: 753562 - DNA, 33 bp, Homo sapien
gaatgttagcaaaccagattcaattataaataa

SEQ ID NO: 753563 - DNA, 33 bp, Homo sapien
aatctgtatttgataagctttgaatctctgtcc

SEQ ID NO: 753564 - DNA, 33 bp, Homo sapien
aatctgtatttgataatctttgaatctctgtcc

SEQ ID NO: 753565 - DNA, 33 bp, Homo sapien
cacattgggctgaaacaactgctgagccacatt

SEQ ID NO: 753566 - DNA, 33 bp, Homo sapien
cacattgggctgaaaccactgctgagccacatt

SEQ ID NO: 753567 - DNA, 33 bp, Homo sapien
aaggtcagaggtttcacatttttctcttggcct

SEQ ID NO: 753568 - DNA, 33 bp, Homo sapien
aaggtcagaggtttcagatttttctcttggcct

SEQ ID NO: 753569 - DNA, 33 bp, Homo sapien
aagaacttgtcatcaaagcttacaaggagcatt

SEQ ID NO: 753570 - DNA, 33 bp, Homo sapien
aagaacttgtcatcaatgcttacaaggagcatt

SEQ ID NO: 753571 - DNA, 33 bp, Homo sapien
caaccgatctggtttacaggtcttgtcaataga

SEQ ID NO: 753572 - DNA, 33 bp, Homo sapien
caaccgatctggtttataggtcttgtcaataga

SEQ ID NO: 753573 - DNA, 33 bp, Homo sapien
agccacatacagtgcacaagagtaaaagaaata

SEQ ID NO: 753574 - DNA, 33 bp, Homo sapien
agccacatacagtgcagaagagtaaaagaaata

SEQ ID NO: 753575 - DNA, 33 bp, Homo sapien
tggttcacagatatgaagtacaaaagactgacc

SEQ ID NO: 753576 - DNA, 33 bp, Homo sapien
tggttcacagatatgaggtacaaaagactgacc

SEQ ID NO: 753577 - DNA, 33 bp, Homo sapien
gaaccattggtgatggaccatataacttcctag

SEQ ID NO: 753578 - DNA, 33 bp, Homo sapien
gaaccattggtgatgggccatataacttcctag

SEQ ID NO: 753579 - DNA, 33 bp, Homo sapien
ttgatggagaaaaccaacagaaataaagagctc

SEQ ID NO: 753580 - DNA, 33 bp, Homo sapien
ttgatggagaaaaccagcagaaataaagagctc

SEQ ID NO: 753581 - DNA, 33 bp, Homo sapien
ggctcggctgacttaaaagagtacctgctctta

SEQ ID NO: 753582 - DNA, 33 bp, Homo sapien
ggctcggctgacttaatagagtacctgctctta

SEQ ID NO: 753583 - DNA, 33 bp, Homo sapien
attgattacatccaaccacggccagaatccagc

SEQ ID NO: 753584 - DNA, 33 bp, Homo sapien
attgattacatccaactacggccagaatccagc

SEQ ID NO: 753585 - DNA, 33 bp, Homo sapien
acctaatgcctgaaccagaggatacaacccttg

SEQ ID NO: 753586 - DNA, 33 bp, Homo sapien
acctaatgcctgaacccgaggatacaacccttg

SEQ ID NO: 753587 - DNA, 33 bp, Homo sapien
atggcaataccagtgggaaggggttgaaagagt

SEQ ID NO: 753588 - DNA, 33 bp, Homo sapien
atggcaataccagtggtaaggggttgaaagagt

SEQ ID NO: 753589 - DNA, 33 bp, Homo sapien
agactaggaagctaaaattagagaatactttct

SEQ ID NO: 753590 - DNA, 33 bp, Homo sapien
agactaggaagctaaacttagagaatactttct

SEQ ID NO: 753591 - DNA, 33 bp, Homo sapien
acatggctacaagtacaaatgattatgtttttc

SEQ ID NO: 753592 - DNA, 33 bp, Homo sapien
acatggctacaagtactaatgattatgtttttc

SEQ ID NO: 753593 - DNA, 33 bp, Homo sapien
catcaaagagatcaagcagagcctctgagggca

SEQ ID NO: 753594 - DNA, 33 bp, Homo sapien
catcaaagagatcaagtagagcctctgagggca

SEQ ID NO: 753595 - DNA, 33 bp, Homo sapien
cactgctgtgagtcacgcagattcccaggtggt

SEQ ID NO: 753596 - DNA, 33 bp, Homo sapien
cactgctgtgagtcactcagattcccaggtggt

SEQ ID NO: 753597 - DNA, 33 bp, Homo sapien
tttactggttcaacagactccttgattttctct

SEQ ID NO: 753598 - DNA, 33 bp, Homo sapien
tttactggttcaacagcctccttgattttctct

SEQ ID NO: 753599 - DNA, 33 bp, Homo sapien
tagattttacagtttacgaattgctttcctgac

SEQ ID NO: 753600 - DNA, 33 bp, Homo sapien
tagattttacagtttatgaattgctttcctgac

SEQ ID NO: 753601 - DNA, 33 bp, Homo sapien
agcttttacagcgaagactattttgggaatttg

SEQ ID NO: 753602 - DNA, 33 bp, Homo sapien
agcttttacagcgaaggctattttgggaatttg

SEQ ID NO: 753603 - DNA, 33 bp, Homo sapien
aggataatctaaatccacagtctacttccctcc

SEQ ID NO: 753604 - DNA, 33 bp, Homo sapien
aggataatctaaatccgcagtctacttccctcc

SEQ ID NO: 753605 - DNA, 33 bp, Homo sapien
atcccggattggccgtcaccccatgcaaagagc

SEQ ID NO: 753606 - DNA, 33 bp, Homo sapien
atcccggattggccgttaccccatgcaaagagc

SEQ ID NO: 753607 - DNA, 33 bp, Homo sapien
tctttgaagtgcatgaagcatttggctaaaatt

SEQ ID NO: 753608 - DNA, 33 bp, Homo sapien
tctttgaagtgcatgaggcatttggctaaaatt

SEQ ID NO: 753609 - DNA, 33 bp, Homo sapien
ctaatcttatccaaaaacacccttacagaaaca

SEQ ID NO: 753610 - DNA, 33 bp, Homo sapien
ctaatcttatccaaaatcacccttacagaaaca

SEQ ID NO: 753611 - DNA, 33 bp, Homo sapien
tctttgaaattcttcaatatagcctacctatca

SEQ ID NO: 753612 - DNA, 33 bp, Homo sapien
tctttgaaattcttcactatagcctacctatca

SEQ ID NO: 753613 - DNA, 33 bp, Homo sapien
tattaggacctctggccaaattcagcagtagag

SEQ ID NO: 753614 - DNA, 33 bp, Homo sapien
tattaggacctctggcgaaattcagcagtagag

SEQ ID NO: 753615 - DNA, 33 bp, Homo sapien
agctttatttctgttgaacaatgaactctggga

SEQ ID NO: 753616 - DNA, 33 bp, Homo sapien
agctttatttctgttggacaatgaactctggga

SEQ ID NO: 753617 - DNA, 33 bp, Homo sapien
aatttagaaattggcacattgtattgtaagcat

SEQ ID NO: 753618 - DNA, 33 bp, Homo sapien
aatttagaaattggcatattgtattgtaagcat

SEQ ID NO: 753619 - DNA, 33 bp, Homo sapien
caggaatattagaggaatacagaggggacttcc

SEQ ID NO: 753620 - DNA, 33 bp, Homo sapien
caggaatattagaggactacagaggggacttcc

SEQ ID NO: 753621 - DNA, 33 bp, Homo sapien
gagttgggttaggagaacaggcaaaatctatgg

SEQ ID NO: 753622 - DNA, 33 bp, Homo sapien
gagttgggttaggagaccaggcaaaatctatgg

SEQ ID NO: 753623 - DNA, 33 bp, Homo sapien
taggcccaattgccaaaaaattgtttcaacatc

SEQ ID NO: 753624 - DNA, 33 bp, Homo sapien
taggcccaattgccaagaaattgtttcaacatc

SEQ ID NO: 753625 - DNA, 33 bp, Homo sapien
aatttggcaacatgaacggaaagacttaaaaac

SEQ ID NO: 753626 - DNA, 33 bp, Homo sapien
aatttggcaacatgaatggaaagacttaaaaac

SEQ ID NO: 753627 - DNA, 33 bp, Homo sapien
caaatgaggctagcatcaataatagtgcattaa

SEQ ID NO: 753628 - DNA, 33 bp, Homo sapien
caaatgaggctagcattaataatagtgcattaa

SEQ ID NO: 753629 - DNA, 33 bp, Homo sapien
acagtaagttgggagacattttcttcttcagat

SEQ ID NO: 753630 - DNA, 33 bp, Homo sapien
acagtaagttgggagatattttcttcttcagat

SEQ ID NO: 753631 - DNA, 33 bp, Homo sapien
atgctgtagacttctgaaaaccctttgtgaatg

SEQ ID NO: 753632 - DNA, 33 bp, Homo sapien
atgctgtagacttctgcaaaccctttgtgaatg

SEQ ID NO: 753633 - DNA, 33 bp, Homo sapien
gaagaacttcctaacccgatgacttccaagccc

SEQ ID NO: 753634 - DNA, 33 bp, Homo sapien
gaagaacttcctaacctgatgacttccaagccc

SEQ ID NO: 753635 - DNA, 33 bp, Homo sapien
tcacttaaaccatttccagtttttgtctatttt

SEQ ID NO: 753636 - DNA, 33 bp, Homo sapien
tcacttaaaccatttcgagtttttgtctatttt

SEQ ID NO: 753637 - DNA, 33 bp, Homo sapien
aattgctgagagtagactataattgttctcacc

SEQ ID NO: 753638 - DNA, 33 bp, Homo sapien
aattgctgagagtagattataattgttctcacc

SEQ ID NO: 753639 - DNA, 33 bp, Homo sapien
gaagcaaacaatatcactgaagaagagaaagtg

SEQ ID NO: 753640 - DNA, 33 bp, Homo sapien
gaagcaaacaatatcattgaagaagagaaagtg

SEQ ID NO: 753641 - DNA, 33 bp, Homo sapien
tggttcagagtccatcaagtctcagattcccca

SEQ ID NO: 753642 - DNA, 33 bp, Homo sapien
tggttcagagtccatcgagtctcagattcccca

SEQ ID NO: 753643 - DNA, 33 bp, Homo sapien
ctgtctcactgtactcagacaaatcggtaacct

SEQ ID NO: 753644 - DNA, 33 bp, Homo sapien
ctgtctcactgtactctgacaaatcggtaacct

SEQ ID NO: 753645 - DNA, 33 bp, Homo sapien
cgagtgggaagaatacacaggaaatcaggagtt

SEQ ID NO: 753646 - DNA, 33 bp, Homo sapien
cgagtgggaagaatacgcaggaaatcaggagtt

SEQ ID NO: 753647 - DNA, 33 bp, Homo sapien
gagactaggatatcgaaaccacagtgatcataa

SEQ ID NO: 753648 - DNA, 33 bp, Homo sapien
gagactaggatatcgagaccacagtgatcataa

SEQ ID NO: 753649 - DNA, 33 bp, Homo sapien
ttttttttaaggtagagtcatccaaatatagat

SEQ ID NO: 753650 - DNA, 33 bp, Homo sapien
ttttttttaaggtagattcatccaaatatagat

SEQ ID NO: 753651 - DNA, 33 bp, Homo sapien
gtaggttggttgctcaagtttaggtttctctgg

SEQ ID NO: 753652 - DNA, 33 bp, Homo sapien
gtaggttggttgctcaggtttaggtttctctgg

SEQ ID NO: 753653 - DNA, 33 bp, Homo sapien
gaatctcagatcatcaagttctatttaactcaa

SEQ ID NO: 753654 - DNA, 33 bp, Homo sapien
gaatctcagatcatcaggttctatttaactcaa

SEQ ID NO: 753655 - DNA, 33 bp, Homo sapien
ttccaatgcagttaaacggctcatactttcaga

SEQ ID NO: 753656 - DNA, 33 bp, Homo sapien
ttccaatgcagttaaatggctcatactttcaga

SEQ ID NO: 753657 - DNA, 33 bp, Homo sapien
ctgggtggtgaaaggacggtctgcagaagaaaa

SEQ ID NO: 753658 - DNA, 33 bp, Homo sapien
ctgggtggtgaaaggatggtctgcagaagaaaa

SEQ ID NO: 753659 - DNA, 33 bp, Homo sapien
aggattccgaatattccacatacagaaggtgca

SEQ ID NO: 753660 - DNA, 33 bp, Homo sapien
aggattccgaatattcgacatacagaaggtgca

SEQ ID NO: 753661 - DNA, 33 bp, Homo sapien
attatctgaaggtagacacagggacttttgaga

SEQ ID NO: 753662 - DNA, 33 bp, Homo sapien
attatctgaaggtagatacagggacttttgaga

SEQ ID NO: 753663 - DNA, 33 bp, Homo sapien
tgtttgcaagccttacgattgcctgtcagaggg

SEQ ID NO: 753664 - DNA, 33 bp, Homo sapien
tgtttgcaagccttactattgcctgtcagaggg

SEQ ID NO: 753665 - DNA, 33 bp, Homo sapien
ctgggtaacaggtgcacagaaagatctttcagg

SEQ ID NO: 753666 - DNA, 33 bp, Homo sapien
ctgggtaacaggtgcatagaaagatctttcagg

SEQ ID NO: 753667 - DNA, 33 bp, Homo sapien
gtaaactcttcctccaacagagataaatctgcc

SEQ ID NO: 753668 - DNA, 33 bp, Homo sapien
gtaaactcttcctccatcagagataaatctgcc

SEQ ID NO: 753669 - DNA, 33 bp, Homo sapien
tcagggagtgtttttccctaactgattcctgag

SEQ ID NO: 753670 - DNA, 33 bp, Homo sapien
tcagggagtgtttttctctaactgattcctgag

SEQ ID NO: 753671 - DNA, 33 bp, Homo sapien
ttcagctcattatttaagaggcaaggaatggga

SEQ ID NO: 753672 - DNA, 33 bp, Homo sapien
ttcagctcattatttaggaggcaaggaatggga

SEQ ID NO: 753673 - DNA, 33 bp, Homo sapien
gatgagagttaggtcccgcatgtgaggattcag

SEQ ID NO: 753674 - DNA, 33 bp, Homo sapien
gatgagagttaggtcctgcatgtgaggattcag

SEQ ID NO: 753675 - DNA, 33 bp, Homo sapien
ggaagtctgagctccaaaaactcactaaagaaa

SEQ ID NO: 753676 - DNA, 33 bp, Homo sapien
ggaagtctgagctccacaaactcactaaagaaa

SEQ ID NO: 753677 - DNA, 33 bp, Homo sapien
atacatgttgagtaaaggatgctagtaaggggt

SEQ ID NO: 753678 - DNA, 33 bp, Homo sapien
atacatgttgagtaaatgatgctagtaaggggt

SEQ ID NO: 753679 - DNA, 33 bp, Homo sapien
taatcaaatatgcatcactactttcttagtcac

SEQ ID NO: 753680 - DNA, 33 bp, Homo sapien
taatcaaatatgcatctctactttcttagtcac

SEQ ID NO: 753681 - DNA, 33 bp, Homo sapien
tatgggccaaagaacccgaaaaaaagatgctgc

SEQ ID NO: 753682 - DNA, 33 bp, Homo sapien
tatgggccaaagaacctgaaaaaaagatgctgc

SEQ ID NO: 753683 - DNA, 33 bp, Homo sapien
ggcaaagagatggaaaaaattggggtttggagg

SEQ ID NO: 753684 - DNA, 33 bp, Homo sapien
ggcaaagagatggaaagaattggggtttggagg

SEQ ID NO: 753685 - DNA, 33 bp, Homo sapien
gttcttgttttgacagaaggggatattgaaacc

SEQ ID NO: 753686 - DNA, 33 bp, Homo sapien
gttcttgttttgacagtaggggatattgaaacc

SEQ ID NO: 753687 - DNA, 33 bp, Homo sapien
tgttttgttatcacgcccggatcaatagcacaa

SEQ ID NO: 753688 - DNA, 33 bp, Homo sapien
tgttttgttatcacgcgcggatcaatagcacaa

SEQ ID NO: 753689 - DNA, 33 bp, Homo sapien
agcgcacagaactatcactggcaccaacaggtg

SEQ ID NO: 753690 - DNA, 33 bp, Homo sapien
agcgcacagaactatcgctggcaccaacaggtg

SEQ ID NO: 753691 - DNA, 33 bp, Homo sapien
tggtgatgagacctcacagagctgcgtggcttc

SEQ ID NO: 753692 - DNA, 33 bp, Homo sapien
tggtgatgagacctcatagagctgcgtggcttc

SEQ ID NO: 753693 - DNA, 33 bp, Homo sapien
aaggctgggcccaggcaaatgcattattttgtt

SEQ ID NO: 753694 - DNA, 33 bp, Homo sapien
aaggctgggcccaggcgaatgcattattttgtt

SEQ ID NO: 753695 - DNA, 33 bp, Homo sapien
caggagtccatattgcaaatccatatccctgtg

SEQ ID NO: 753696 - DNA, 33 bp, Homo sapien
caggagtccatattgccaatccatatccctgtg

SEQ ID NO: 753697 - DNA, 33 bp, Homo sapien
atgaaactcagaggtaagcatcagtgtggacaa

SEQ ID NO: 753698 - DNA, 33 bp, Homo sapien
atgaaactcagaggtaggcatcagtgtggacaa

SEQ ID NO: 753699 - DNA, 33 bp, Homo sapien
ttatagcttggacccaatgattgtcacctgaaa

SEQ ID NO: 753700 - DNA, 33 bp, Homo sapien
ttatagcttggacccagtgattgtcacctgaaa

SEQ ID NO: 753701 - DNA, 33 bp, Homo sapien
gcacgtggaacataaacctaacatgtatagaaa

SEQ ID NO: 753702 - DNA, 33 bp, Homo sapien
gcacgtggaacataaagctaacatgtatagaaa

SEQ ID NO: 753703 - DNA, 33 bp, Homo sapien
ctcagctgacaaggggaacacaaatttgctgcc

SEQ ID NO: 753704 - DNA, 33 bp, Homo sapien
ctcagctgacaagggggacacaaatttgctgcc

SEQ ID NO: 753705 - DNA, 33 bp, Homo sapien
cagctgtggaggcagcaatatcgctgaagaagt

SEQ ID NO: 753706 - DNA, 33 bp, Homo sapien
cagctgtggaggcagccatatcgctgaagaagt

SEQ ID NO: 753707 - DNA, 33 bp, Homo sapien
atgaaaaatcccatgacgctgaattcgacagcc

SEQ ID NO: 753708 - DNA, 33 bp, Homo sapien
atgaaaaatcccatgatgctgaattcgacagcc

SEQ ID NO: 753709 - DNA, 33 bp, Homo sapien
caggccctgtgcttacacaaccgtttctgctga

SEQ ID NO: 753710 - DNA, 33 bp, Homo sapien
caggccctgtgcttacgcaaccgtttctgctga

SEQ ID NO: 753711 - DNA, 33 bp, Homo sapien
gggtagtttctccccacactattctcatgatag

SEQ ID NO: 753712 - DNA, 33 bp, Homo sapien
gggtagtttctccccatactattctcatgatag

SEQ ID NO: 753713 - DNA, 33 bp, Homo sapien
atccatgtggccaactaaggacttttattatct

SEQ ID NO: 753714 - DNA, 33 bp, Homo sapien
atccatgtggccaactgaggacttttattatct

SEQ ID NO: 753715 - DNA, 33 bp, Homo sapien
ggcaaaagctcaataactcacgaatcatcactc

SEQ ID NO: 753716 - DNA, 33 bp, Homo sapien
ggcaaaagctcaataattcacgaatcatcactc

SEQ ID NO: 753717 - DNA, 33 bp, Homo sapien
atctaaagaatgacacactgcaggttttagtca

SEQ ID NO: 753718 - DNA, 33 bp, Homo sapien
atctaaagaatgacacgctgcaggttttagtca

SEQ ID NO: 753719 - DNA, 33 bp, Homo sapien
agtcattatgaaaaatcagagtagagcactaaa

SEQ ID NO: 753720 - DNA, 33 bp, Homo sapien
agtcattatgaaaaattagagtagagcactaaa

SEQ ID NO: 753721 - DNA, 33 bp, Homo sapien
gagcttcctggaccctaagaactgctgggacgg

SEQ ID NO: 753722 - DNA, 33 bp, Homo sapien
gagcttcctggaccctgagaactgctgggacgg

SEQ ID NO: 753723 - DNA, 33 bp, Homo sapien
ttgctggtgatcaacaaggccctcaaggagcca

SEQ ID NO: 753724 - DNA, 33 bp, Homo sapien
ttgctggtgatcaacagggccctcaaggagcca

SEQ ID NO: 753725 - DNA, 33 bp, Homo sapien
gttctcttctcagctcaataaagccccagctgt

SEQ ID NO: 753726 - DNA, 33 bp, Homo sapien
gttctcttctcagctcgataaagccccagctgt

SEQ ID NO: 753727 - DNA, 33 bp, Homo sapien
gaggggagatgaaccaagtgaagagagagagag

SEQ ID NO: 753728 - DNA, 33 bp, Homo sapien
gaggggagatgaaccaggtgaagagagagagag

SEQ ID NO: 753729 - DNA, 33 bp, Homo sapien
caggtaatttgaaatccctttatgctttgtgca

SEQ ID NO: 753730 - DNA, 33 bp, Homo sapien
caggtaatttgaaatctctttatgctttgtgca

SEQ ID NO: 753731 - DNA, 33 bp, Homo sapien
agtatagatttaggaaaagcgtacaatctgctg

SEQ ID NO: 753732 - DNA, 33 bp, Homo sapien
agtatagatttaggaagagcgtacaatctgctg

SEQ ID NO: 753733 - DNA, 33 bp, Homo sapien
agctggcaattttaagacattagaagttcaaca

SEQ ID NO: 753734 - DNA, 33 bp, Homo sapien
agctggcaattttaaggcattagaagttcaaca

SEQ ID NO: 753735 - DNA, 33 bp, Homo sapien
atccaacaaagaagcaaagaaaaggcaaattcc

SEQ ID NO: 753736 - DNA, 33 bp, Homo sapien
atccaacaaagaagcagagaaaaggcaaattcc

SEQ ID NO: 753737 - DNA, 33 bp, Homo sapien
taagccctacaggaaaccacagctgtagcagca

SEQ ID NO: 753738 - DNA, 33 bp, Homo sapien
taagccctacaggaaatcacagctgtagcagca

SEQ ID NO: 753739 - DNA, 33 bp, Homo sapien
gcagatggaaagataacgtaagacaccttcctg

SEQ ID NO: 753740 - DNA, 33 bp, Homo sapien
gcagatggaaagataatgtaagacaccttcctg

SEQ ID NO: 753741 - DNA, 33 bp, Homo sapien
cctataagaaagcatcaaaaggggctccctgaa

SEQ ID NO: 753742 - DNA, 33 bp, Homo sapien
cctataagaaagcatcgaaaggggctccctgaa

SEQ ID NO: 753743 - DNA, 33 bp, Homo sapien
gaggcaggatccacaaagctgcagaaacaccag

SEQ ID NO: 753744 - DNA, 33 bp, Homo sapien
gaggcaggatccacaaggctgcagaaacaccag

SEQ ID NO: 753745 - DNA, 33 bp, Homo sapien
gactgctgagaaactacgaagttgcttaagttg

SEQ ID NO: 753746 - DNA, 33 bp, Homo sapien
gactgctgagaaactatgaagttgcttaagttg

SEQ ID NO: 753747 - DNA, 33 bp, Homo sapien
gttataaaggctataacatcactaggctatagg

SEQ ID NO: 753748 - DNA, 33 bp, Homo sapien
gttataaaggctataatatcactaggctatagg

SEQ ID NO: 753749 - DNA, 33 bp, Homo sapien
cagagtatatctcaggaaagcttcacttttgat

SEQ ID NO: 753750 - DNA, 33 bp, Homo sapien
cagagtatatctcaggtaagcttcacttttgat

SEQ ID NO: 753751 - DNA, 33 bp, Homo sapien
ggctttaatcgatctcaagttgattcgtgtata

SEQ ID NO: 753752 - DNA, 33 bp, Homo sapien
ggctttaatcgatctcgagttgattcgtgtata

SEQ ID NO: 753753 - DNA, 33 bp, Homo sapien
gtaaattgaagatacaagtgtactcaggtccac

SEQ ID NO: 753754 - DNA, 33 bp, Homo sapien
gtaaattgaagatacaggtgtactcaggtccac

SEQ ID NO: 753755 - DNA, 33 bp, Homo sapien
gttttaagaacacattcaagtatcctccatatc

SEQ ID NO: 753756 - DNA, 33 bp, Homo sapien
gttttaagaacacattgaagtatcctccatatc

SEQ ID NO: 753757 - DNA, 33 bp, Homo sapien
tgtaacagtttttacactctctatgcactttta

SEQ ID NO: 753758 - DNA, 33 bp, Homo sapien
tgtaacagtttttacattctctatgcactttta

SEQ ID NO: 753759 - DNA, 33 bp, Homo sapien
ggtggaaatggagcaaaaatcaatgtcagaaat

SEQ ID NO: 753760 - DNA, 33 bp, Homo sapien
ggtggaaatggagcaagaatcaatgtcagaaat

SEQ ID NO: 753761 - DNA, 33 bp, Homo sapien
tgtggaaaactctggtcacatctctcctcatcc

SEQ ID NO: 753762 - DNA, 33 bp, Homo sapien
tgtggaaaactctggtgacatctctcctcatcc

SEQ ID NO: 753763 - DNA, 33 bp, Homo sapien
tgtcctgataatagacactaccggcattttagc

SEQ ID NO: 753764 - DNA, 33 bp, Homo sapien
tgtcctgataatagacgctaccggcattttagc

SEQ ID NO: 753765 - DNA, 33 bp, Homo sapien
cttgcattcctaaaaccaaaacaccatgctatg

SEQ ID NO: 753766 - DNA, 33 bp, Homo sapien
cttgcattcctaaaactaaaacaccatgctatg

SEQ ID NO: 753767 - DNA, 33 bp, Homo sapien
aaatagagcccagtataaacagagagagtggac

SEQ ID NO: 753768 - DNA, 33 bp, Homo sapien
aaatagagcccagtatgaacagagagagtggac

SEQ ID NO: 753769 - DNA, 33 bp, Homo sapien
tatgcaaagttgcataatagttttggattgtag

SEQ ID NO: 753770 - DNA, 33 bp, Homo sapien
tatgcaaagttgcatattagttttggattgtag

SEQ ID NO: 753771 - DNA, 33 bp, Homo sapien
actctttctcattctaactgtctttggttatca

SEQ ID NO: 753772 - DNA, 33 bp, Homo sapien
actctttctcattctatctgtctttggttatca

SEQ ID NO: 753773 - DNA, 33 bp, Homo sapien
ctggcccgacacaaacccattacttgctgttag

SEQ ID NO: 753774 - DNA, 33 bp, Homo sapien
ctggcccgacacaaactcattacttgctgttag

SEQ ID NO: 753775 - DNA, 33 bp, Homo sapien
aagactgagcattttaagggagcaaaaggattc

SEQ ID NO: 753776 - DNA, 33 bp, Homo sapien
aagactgagcattttaggggagcaaaaggattc

SEQ ID NO: 753777 - DNA, 33 bp, Homo sapien
aagtaaattgaacctgcaattccatgctggtat

SEQ ID NO: 753778 - DNA, 33 bp, Homo sapien
aagtaaattgaacctgtaattccatgctggtat

SEQ ID NO: 753779 - DNA, 33 bp, Homo sapien
actcagtgattacataagctgtgctcaatattc

SEQ ID NO: 753780 - DNA, 33 bp, Homo sapien
actcagtgattacatatgctgtgctcaatattc

SEQ ID NO: 753781 - DNA, 33 bp, Homo sapien
gtgactttcagtctctcacaggcggcagaaatt

SEQ ID NO: 753782 - DNA, 33 bp, Homo sapien
gtgactttcagtctcttacaggcggcagaaatt

SEQ ID NO: 753783 - DNA, 33 bp, Homo sapien
tgacttaggagtcggcactggaagacacagctc

SEQ ID NO: 753784 - DNA, 33 bp, Homo sapien
tgacttaggagtcggcgctggaagacacagctc

SEQ ID NO: 753785 - DNA, 33 bp, Homo sapien
aacttgtgggaaaataagtttcaagttgagctg

SEQ ID NO: 753786 - DNA, 33 bp, Homo sapien
aacttgtgggaaaatacgtttcaagttgagctg

SEQ ID NO: 753787 - DNA, 33 bp, Homo sapien
ttctgctttgatattcacatgtaggctctattt

SEQ ID NO: 753788 - DNA, 33 bp, Homo sapien
ttctgctttgatattcccatgtaggctctattt

SEQ ID NO: 753789 - DNA, 33 bp, Homo sapien
agccacttatcctgctaaaaattccttctttat

SEQ ID NO: 753790 - DNA, 33 bp, Homo sapien
agccacttatcctgctgaaaattccttctttat

SEQ ID NO: 753791 - DNA, 33 bp, Homo sapien
ggggtggagggatagagaattcaaacatggtgg

SEQ ID NO: 753792 - DNA, 33 bp, Homo sapien
ggggtggagggatagataattcaaacatggtgg

SEQ ID NO: 753793 - DNA, 33 bp, Homo sapien
ctcaagatcagaccaaatcaggtaggaagctgg

SEQ ID NO: 753794 - DNA, 33 bp, Homo sapien
ctcaagatcagaccaagtcaggtaggaagctgg

SEQ ID NO: 753795 - DNA, 33 bp, Homo sapien
ctaacgaaagagaaagacacatggccaaagaat

SEQ ID NO: 753796 - DNA, 33 bp, Homo sapien
ctaacgaaagagaaaggcacatggccaaagaat

SEQ ID NO: 753797 - DNA, 33 bp, Homo sapien
ggattgtctgctatcacgcaagcgtcaataaaa

SEQ ID NO: 753798 - DNA, 33 bp, Homo sapien
ggattgtctgctatcaggcaagcgtcaataaaa

SEQ ID NO: 753799 - DNA, 33 bp, Homo sapien
tcatcttgtccaatgcaatgtgtcatttttggg

SEQ ID NO: 753800 - DNA, 33 bp, Homo sapien
tcatcttgtccaatgctatgtgtcatttttggg

SEQ ID NO: 753801 - DNA, 33 bp, Homo sapien
acatggaacacaaacaatgcaagttggagaagc

SEQ ID NO: 753802 - DNA, 33 bp, Homo sapien
acatggaacacaaacattgcaagttggagaagc

SEQ ID NO: 753803 - DNA, 33 bp, Homo sapien
caggcattcgatttcacgattaacttaaaccgg

SEQ ID NO: 753804 - DNA, 33 bp, Homo sapien
caggcattcgatttcatgattaacttaaaccgg

SEQ ID NO: 753805 - DNA, 33 bp, Homo sapien
gaactaccgaatgatgaaaaatgcctccatagt

SEQ ID NO: 753806 - DNA, 33 bp, Homo sapien
gaactaccgaatgatggaaaatgcctccatagt

SEQ ID NO: 753807 - DNA, 33 bp, Homo sapien
ctcctacttaaaaacacattcaaggctggattc

SEQ ID NO: 753808 - DNA, 33 bp, Homo sapien
ctcctacttaaaaacatattcaaggctggattc

SEQ ID NO: 753809 - DNA, 33 bp, Homo sapien
tgcatatatagccccccactctcggatttagaa

SEQ ID NO: 753810 - DNA, 33 bp, Homo sapien
tgcatatatagccccctactctcggatttagaa

SEQ ID NO: 753811 - DNA, 33 bp, Homo sapien
ataaaacacacaacgacctttttctttttcact

SEQ ID NO: 753812 - DNA, 33 bp, Homo sapien
ataaaacacacaacgatctttttctttttcact

SEQ ID NO: 753813 - DNA, 33 bp, Homo sapien
gtattccatatgacagacaggataaaaggatgc

SEQ ID NO: 753814 - DNA, 33 bp, Homo sapien
gtattccatatgacagtcaggataaaaggatgc

SEQ ID NO: 753815 - DNA, 33 bp, Homo sapien
actatcttttgaatacaagcagagtatttttgg

SEQ ID NO: 753816 - DNA, 33 bp, Homo sapien
actatcttttgaatacgagcagagtatttttgg

SEQ ID NO: 753817 - DNA, 33 bp, Homo sapien
aattagaggctaaagcaaagttgcaaagttaca

SEQ ID NO: 753818 - DNA, 33 bp, Homo sapien
aattagaggctaaagcgaagttgcaaagttaca

SEQ ID NO: 753819 - DNA, 33 bp, Homo sapien
ttttctccttttgggaacttctgcgtcttgtat

SEQ ID NO: 753820 - DNA, 33 bp, Homo sapien
ttttctccttttgggatcttctgcgtcttgtat

SEQ ID NO: 753821 - DNA, 33 bp, Homo sapien
tctcacactgaaaccaataatctatctgaatat

SEQ ID NO: 753822 - DNA, 33 bp, Homo sapien
tctcacactgaaaccagtaatctatctgaatat

SEQ ID NO: 753823 - DNA, 33 bp, Homo sapien
agtgaggcattataaacaggcctggaactgtgc

SEQ ID NO: 753824 - DNA, 33 bp, Homo sapien
agtgaggcattataaataggcctggaactgtgc

SEQ ID NO: 753825 - DNA, 33 bp, Homo sapien
ggtggagcagctgaaaatgtgtcttacagagat

SEQ ID NO: 753826 - DNA, 33 bp, Homo sapien
ggtggagcagctgaaagtgtgtcttacagagat

SEQ ID NO: 753827 - DNA, 33 bp, Homo sapien
ttacctatccagtgaccagtcttctagaatctt

SEQ ID NO: 753828 - DNA, 33 bp, Homo sapien
ttacctatccagtgacgagtcttctagaatctt

SEQ ID NO: 753829 - DNA, 33 bp, Homo sapien
gagtgctctgacttcactagttccccaaaggca

SEQ ID NO: 753830 - DNA, 33 bp, Homo sapien
gagtgctctgacttcattagttccccaaaggca

SEQ ID NO: 753831 - DNA, 33 bp, Homo sapien
actgcatgcccaatgacgagtgctataaggaaa

SEQ ID NO: 753832 - DNA, 33 bp, Homo sapien
actgcatgcccaatgatgagtgctataaggaaa

SEQ ID NO: 753833 - DNA, 33 bp, Homo sapien
gggaaaactggaagataaattcaggaagctatg

SEQ ID NO: 753834 - DNA, 33 bp, Homo sapien
gggaaaactggaagatgaattcaggaagctatg

SEQ ID NO: 753835 - DNA, 33 bp, Homo sapien
aaactgccttttcaaacgtgcagattctgtcta

SEQ ID NO: 753836 - DNA, 33 bp, Homo sapien
aaactgccttttcaaatgtgcagattctgtcta

SEQ ID NO: 753837 - DNA, 33 bp, Homo sapien
ttatgaaagcggacaaatatgtttaaaaatatg

SEQ ID NO: 753838 - DNA, 33 bp, Homo sapien
ttatgaaagcggacaagtatgtttaaaaatatg

SEQ ID NO: 753839 - DNA, 33 bp, Homo sapien
agatgcatagattccacaataaccttttcattt

SEQ ID NO: 753840 - DNA, 33 bp, Homo sapien
agatgcatagattccataataaccttttcattt

SEQ ID NO: 753841 - DNA, 33 bp, Homo sapien
tcctgtgtcacagcaaaactggaaaaagacagc

SEQ ID NO: 753842 - DNA, 33 bp, Homo sapien
tcctgtgtcacagcaacactggaaaaagacagc

SEQ ID NO: 753843 - DNA, 33 bp, Homo sapien
agcagagatacaggctaaagaacatgtctccag

SEQ ID NO: 753844 - DNA, 33 bp, Homo sapien
agcagagatacaggctgaagaacatgtctccag

SEQ ID NO: 753845 - DNA, 33 bp, Homo sapien
attcatgaaggaagtcagaatggataaagattt

SEQ ID NO: 753846 - DNA, 33 bp, Homo sapien
attcatgaaggaagtcggaatggataaagattt

SEQ ID NO: 753847 - DNA, 33 bp, Homo sapien
cactcctgaggccagcaaccaggtctgaacccg

SEQ ID NO: 753848 - DNA, 33 bp, Homo sapien
cactcctgaggccagcgaccaggtctgaacccg

SEQ ID NO: 753849 - DNA, 33 bp, Homo sapien
gacttaatttcctcatcaatgtaatgaaaaaat

SEQ ID NO: 753850 - DNA, 33 bp, Homo sapien
gacttaatttcctcatgaatgtaatgaaaaaat

SEQ ID NO: 753851 - DNA, 33 bp, Homo sapien
gggtatagagaaaatacgcattcactggccttc

SEQ ID NO: 753852 - DNA, 33 bp, Homo sapien
gggtatagagaaaatatgcattcactggccttc

SEQ ID NO: 753853 - DNA, 33 bp, Homo sapien
tggttagaagcagaaccccaatgaggctcagtc

SEQ ID NO: 753854 - DNA, 33 bp, Homo sapien
tggttagaagcagaactccaatgaggctcagtc

SEQ ID NO: 753855 - DNA, 33 bp, Homo sapien
gcaaatgccttgaggtaaaactctttggtgaat

SEQ ID NO: 753856 - DNA, 33 bp, Homo sapien
gcaaatgccttgaggtgaaactctttggtgaat

SEQ ID NO: 753857 - DNA, 33 bp, Homo sapien
gatatagaactataaacgtaccatgatctaaat

SEQ ID NO: 753858 - DNA, 33 bp, Homo sapien
gatatagaactataaatgtaccatgatctaaat

SEQ ID NO: 753859 - DNA, 33 bp, Homo sapien
tggagcttcttgaggcaatcaaaataagattac

SEQ ID NO: 753860 - DNA, 33 bp, Homo sapien
tggagcttcttgaggccatcaaaataagattac

SEQ ID NO: 753861 - DNA, 33 bp, Homo sapien
cagactaaggctcttccaataggccacaaagta

SEQ ID NO: 753862 - DNA, 33 bp, Homo sapien
cagactaaggctcttctaataggccacaaagta

SEQ ID NO: 753863 - DNA, 33 bp, Homo sapien
gaaattcagcaatgtccacgaggtcacaccgca

SEQ ID NO: 753864 - DNA, 33 bp, Homo sapien
gaaattcagcaatgtctacgaggtcacaccgca

SEQ ID NO: 753865 - DNA, 33 bp, Homo sapien
actaggtcacgaataacatgggaaagttctcgc

SEQ ID NO: 753866 - DNA, 33 bp, Homo sapien
actaggtcacgaataatatgggaaagttctcgc

SEQ ID NO: 753867 - DNA, 33 bp, Homo sapien
agcttattcactggcagactccacctaacacag

SEQ ID NO: 753868 - DNA, 33 bp, Homo sapien
agcttattcactggcatactccacctaacacag

SEQ ID NO: 753869 - DNA, 33 bp, Homo sapien
gggagagtcaaggagggattctctcccagaccc

SEQ ID NO: 753870 - DNA, 33 bp, Homo sapien
gggagagtcaaggaggtattctctcccagaccc

SEQ ID NO: 753871 - DNA, 33 bp, Homo sapien
ataatgatagtgcatcccttactgaattgaaag

SEQ ID NO: 753872 - DNA, 33 bp, Homo sapien
ataatgatagtgcatctcttactgaattgaaag

SEQ ID NO: 753873 - DNA, 33 bp, Homo sapien
attgtgtctctagaacccacagtctcacccaca

SEQ ID NO: 753874 - DNA, 33 bp, Homo sapien
attgtgtctctagaactcacagtctcacccaca

SEQ ID NO: 753875 - DNA, 33 bp, Homo sapien
tagtgattattattacggatttttccattgtta

SEQ ID NO: 753876 - DNA, 33 bp, Homo sapien
tagtgattattattactgatttttccattgtta

SEQ ID NO: 753877 - DNA, 33 bp, Homo sapien
ggttctgttagccacaaaaaggttcactttgac

SEQ ID NO: 753878 - DNA, 33 bp, Homo sapien
ggttctgttagccacagaaaggttcactttgac

SEQ ID NO: 753879 - DNA, 33 bp, Homo sapien
aatgttcatcccaaacaccatttaccagccctg

SEQ ID NO: 753880 - DNA, 33 bp, Homo sapien
aatgttcatcccaaacgccatttaccagccctg

SEQ ID NO: 753881 - DNA, 33 bp, Homo sapien
attgtcatgtggaaaccagatgtgcattgcgtc

SEQ ID NO: 753882 - DNA, 33 bp, Homo sapien
attgtcatgtggaaacgagatgtgcattgcgtc

SEQ ID NO: 753883 - DNA, 33 bp, Homo sapien
gagactgtaactttcacggttccaccttggttt

SEQ ID NO: 753884 - DNA, 33 bp, Homo sapien
gagactgtaactttcatggttccaccttggttt

SEQ ID NO: 753885 - DNA, 33 bp, Homo sapien
gtctcgattactgaaacaggttgtcttaataat

SEQ ID NO: 753886 - DNA, 33 bp, Homo sapien
gtctcgattactgaaataggttgtcttaataat

SEQ ID NO: 753887 - DNA, 33 bp, Homo sapien
ccttctcctcccatgtaaagtgaagttgaacag

SEQ ID NO: 753888 - DNA, 33 bp, Homo sapien
ccttctcctcccatgtgaagtgaagttgaacag

SEQ ID NO: 753889 - DNA, 33 bp, Homo sapien
tttacagatacagtgcaatggtctacctgttgt

SEQ ID NO: 753890 - DNA, 33 bp, Homo sapien
tttacagatacagtgccatggtctacctgttgt

SEQ ID NO: 753891 - DNA, 33 bp, Homo sapien
tgagcaagatgaaccactgggccatgaaagaaa

SEQ ID NO: 753892 - DNA, 33 bp, Homo sapien
tgagcaagatgaaccagtgggccatgaaagaaa

SEQ ID NO: 753893 - DNA, 33 bp, Homo sapien
ggcattgctagtatacactgaattttagatctg

SEQ ID NO: 753894 - DNA, 33 bp, Homo sapien
ggcattgctagtatacgctgaattttagatctg

SEQ ID NO: 753895 - DNA, 33 bp, Homo sapien
ttgaaacaaaaagaaacgctgctgcatttacct

SEQ ID NO: 753896 - DNA, 33 bp, Homo sapien
ttgaaacaaaaagaaaggctgctgcatttacct

SEQ ID NO: 753897 - DNA, 33 bp, Homo sapien
taggtaggaaccgttagagctgtaggccatgtg

SEQ ID NO: 753898 - DNA, 33 bp, Homo sapien
taggtaggaaccgttatagctgtaggccatgtg

SEQ ID NO: 753899 - DNA, 33 bp, Homo sapien
gtgagcttggtgaccacagtgacaaagagggtg

SEQ ID NO: 753900 - DNA, 33 bp, Homo sapien
gtgagcttggtgaccatagtgacaaagagggtg

SEQ ID NO: 753901 - DNA, 33 bp, Homo sapien
cctcatcagaacagggaatagagaggtgagctt

SEQ ID NO: 753902 - DNA, 33 bp, Homo sapien
cctcatcagaacaggggatagagaggtgagctt

SEQ ID NO: 753903 - DNA, 33 bp, Homo sapien
tctaaggctgcagggaaagcaaaggctgccaag

SEQ ID NO: 753904 - DNA, 33 bp, Homo sapien
tctaaggctgcagggagagcaaaggctgccaag

SEQ ID NO: 753905 - DNA, 33 bp, Homo sapien
gcccatcacagaaacaacatgtctcacccagcc

SEQ ID NO: 753906 - DNA, 33 bp, Homo sapien
gcccatcacagaaacaccatgtctcacccagcc

SEQ ID NO: 753907 - DNA, 33 bp, Homo sapien
tcatgacttacatgacagcctcacacatttccc

SEQ ID NO: 753908 - DNA, 33 bp, Homo sapien
tcatgacttacatgacggcctcacacatttccc

SEQ ID NO: 753909 - DNA, 33 bp, Homo sapien
gtcatatatgaaattccataaatgtgtcatata

SEQ ID NO: 753910 - DNA, 33 bp, Homo sapien
gtcatatatgaaattctataaatgtgtcatata

SEQ ID NO: 753911 - DNA, 33 bp, Homo sapien
ctgtttttccatgtcacaattgtctcatcattt

SEQ ID NO: 753912 - DNA, 33 bp, Homo sapien
ctgtttttccatgtcataattgtctcatcattt

SEQ ID NO: 753913 - DNA, 33 bp, Homo sapien
acaatttcatcgttaaaacatttctctctgctt

SEQ ID NO: 753914 - DNA, 33 bp, Homo sapien
acaatttcatcgttaagacatttctctctgctt

SEQ ID NO: 753915 - DNA, 33 bp, Homo sapien
ctcctgctggggtgaaaaaagggtcatagttct

SEQ ID NO: 753916 - DNA, 33 bp, Homo sapien
ctcctgctggggtgaagaaagggtcatagttct

SEQ ID NO: 753917 - DNA, 33 bp, Homo sapien
aaggcatttagcacagaacctggtatagaataa

SEQ ID NO: 753918 - DNA, 33 bp, Homo sapien
aaggcatttagcacagtacctggtatagaataa

SEQ ID NO: 753919 - DNA, 33 bp, Homo sapien
aacattccaaagttcacgcatctgccaagaggg

SEQ ID NO: 753920 - DNA, 33 bp, Homo sapien
aacattccaaagttcatgcatctgccaagaggg

SEQ ID NO: 753921 - DNA, 33 bp, Homo sapien
tccattacacccatgaagtacaaccaccaccta

SEQ ID NO: 753922 - DNA, 33 bp, Homo sapien
tccattacacccatgaggtacaaccaccaccta

SEQ ID NO: 753923 - DNA, 33 bp, Homo sapien
cctgtaatatcgtcaaccgtggatgttgcaaac

SEQ ID NO: 753924 - DNA, 33 bp, Homo sapien
cctgtaatatcgtcaatcgtggatgttgcaaac

SEQ ID NO: 753925 - DNA, 33 bp, Homo sapien
ctgcctgtacatgtccacacggttgcaatcaag

SEQ ID NO: 753926 - DNA, 33 bp, Homo sapien
ctgcctgtacatgtccgcacggttgcaatcaag

SEQ ID NO: 753927 - DNA, 33 bp, Homo sapien
aacttagcatcatcaaataaatcatcttttttt

SEQ ID NO: 753928 - DNA, 33 bp, Homo sapien
aacttagcatcatcaagtaaatcatcttttttt

SEQ ID NO: 753929 - DNA, 33 bp, Homo sapien
tgtttattggaaatcaatctcttcagggaaaaa

SEQ ID NO: 753930 - DNA, 33 bp, Homo sapien
tgtttattggaaatcagtctcttcagggaaaaa

SEQ ID NO: 753931 - DNA, 33 bp, Homo sapien
gtttcttttgtgtgaaataacttccagaatcca

SEQ ID NO: 753932 - DNA, 33 bp, Homo sapien
gtttcttttgtgtgaagtaacttccagaatcca

SEQ ID NO: 753933 - DNA, 33 bp, Homo sapien
aaaacgcttccataacacgggctggatggaatg

SEQ ID NO: 753934 - DNA, 33 bp, Homo sapien
aaaacgcttccataacgcgggctggatggaatg

SEQ ID NO: 753935 - DNA, 33 bp, Homo sapien
acatcaatacaacataacttgaccgtgtacagt

SEQ ID NO: 753936 - DNA, 33 bp, Homo sapien
acatcaatacaacataccttgaccgtgtacagt

SEQ ID NO: 753937 - DNA, 33 bp, Homo sapien
tttattttcaacaagacgccaaggtaattccat

SEQ ID NO: 753938 - DNA, 33 bp, Homo sapien
tttattttcaacaagatgccaaggtaattccat

SEQ ID NO: 753939 - DNA, 33 bp, Homo sapien
gagttaatttgctaaccatatgcatcatgcata

SEQ ID NO: 753940 - DNA, 33 bp, Homo sapien
gagttaatttgctaactatatgcatcatgcata

SEQ ID NO: 753941 - DNA, 33 bp, Homo sapien
tgtgtataggttctacaaaaacactacatcatt

SEQ ID NO: 753942 - DNA, 33 bp, Homo sapien
tgtgtataggttctacgaaaacactacatcatt

SEQ ID NO: 753943 - DNA, 33 bp, Homo sapien
aagcatcttattggtagcctgctcagcaccttt

SEQ ID NO: 753944 - DNA, 33 bp, Homo sapien
aagcatcttattggtatcctgctcagcaccttt

SEQ ID NO: 753945 - DNA, 33 bp, Homo sapien
cagggcaaagtcacccaacagaattattctatt

SEQ ID NO: 753946 - DNA, 33 bp, Homo sapien
cagggcaaagtcacccgacagaattattctatt

SEQ ID NO: 753947 - DNA, 33 bp, Homo sapien
cctcccttctggtgtcactggcaattcttggca

SEQ ID NO: 753948 - DNA, 33 bp, Homo sapien
cctcccttctggtgtcgctggcaattcttggca

SEQ ID NO: 753949 - DNA, 33 bp, Homo sapien
ccaatgaacttacctgaatttttatatcaaact

SEQ ID NO: 753950 - DNA, 33 bp, Homo sapien
ccaatgaacttacctggatttttatatcaaact

SEQ ID NO: 753951 - DNA, 33 bp, Homo sapien
gcaacatggcaggaaaatcttggaccaccctta

SEQ ID NO: 753952 - DNA, 33 bp, Homo sapien
gcaacatggcaggaaagtcttggaccaccctta

SEQ ID NO: 753953 - DNA, 33 bp, Homo sapien
attaaatcctttgaaccgtctgtgagtttcagg

SEQ ID NO: 753954 - DNA, 33 bp, Homo sapien
attaaatcctttgaactgtctgtgagtttcagg

SEQ ID NO: 753955 - DNA, 33 bp, Homo sapien
attttcagctgtgtcacaaaatttgagtatatg

SEQ ID NO: 753956 - DNA, 33 bp, Homo sapien
attttcagctgtgtcataaaatttgagtatatg

SEQ ID NO: 753957 - DNA, 33 bp, Homo sapien
ggaagaagctgtgaaacgtaagctctaaccatg

SEQ ID NO: 753958 - DNA, 33 bp, Homo sapien
ggaagaagctgtgaaatgtaagctctaaccatg

SEQ ID NO: 753959 - DNA, 33 bp, Homo sapien
agagcccaagagcccacaagccattgagacaca

SEQ ID NO: 753960 - DNA, 33 bp, Homo sapien
agagcccaagagcccataagccattgagacaca

SEQ ID NO: 753961 - DNA, 33 bp, Homo sapien
aaggttgaaaggacatcatgacgactcagggct

SEQ ID NO: 753962 - DNA, 33 bp, Homo sapien
aaggttgaaaggacatgatgacgactcagggct

SEQ ID NO: 753963 - DNA, 33 bp, Homo sapien
accccttgcttaagtaaaaggcaactcttttga

SEQ ID NO: 753964 - DNA, 33 bp, Homo sapien
accccttgcttaagtagaaggcaactcttttga

SEQ ID NO: 753965 - DNA, 33 bp, Homo sapien
atccaagcattctcaacggaagtaaggaggcaa

SEQ ID NO: 753966 - DNA, 33 bp, Homo sapien
atccaagcattctcaatggaagtaaggaggcaa

SEQ ID NO: 753967 - DNA, 33 bp, Homo sapien
gagcattggaaccctaacagttgctggcgggat

SEQ ID NO: 753968 - DNA, 33 bp, Homo sapien
gagcattggaaccctagcagttgctggcgggat

SEQ ID NO: 753969 - DNA, 33 bp, Homo sapien
cagcccagtcgtgaaacctgtgagacctggaga

SEQ ID NO: 753970 - DNA, 33 bp, Homo sapien
cagcccagtcgtgaaatctgtgagacctggaga

SEQ ID NO: 753971 - DNA, 33 bp, Homo sapien
tccttctgttttaaaagatttgaggcttgaagt

SEQ ID NO: 753972 - DNA, 33 bp, Homo sapien
tccttctgttttaaaatatttgaggcttgaagt

SEQ ID NO: 753973 - DNA, 33 bp, Homo sapien
cagccctcattgggcaagaagaaaacaaaggga

SEQ ID NO: 753974 - DNA, 33 bp, Homo sapien
cagccctcattgggcatgaagaaaacaaaggga

SEQ ID NO: 753975 - DNA, 33 bp, Homo sapien
gaaataagggaatgcacgaaaatcaacccaaat

SEQ ID NO: 753976 - DNA, 33 bp, Homo sapien
gaaataagggaatgcatgaaaatcaacccaaat

SEQ ID NO: 753977 - DNA, 33 bp, Homo sapien
tctccaagaagtgtccagattaccttggccagc

SEQ ID NO: 753978 - DNA, 33 bp, Homo sapien
tctccaagaagtgtccggattaccttggccagc

SEQ ID NO: 753979 - DNA, 33 bp, Homo sapien
gatgtgtgtgaaatgacagttgctttttatgtt

SEQ ID NO: 753980 - DNA, 33 bp, Homo sapien
gatgtgtgtgaaatgatagttgctttttatgtt

SEQ ID NO: 753981 - DNA, 33 bp, Homo sapien
aagatacacttagtataactgagctagactggg

SEQ ID NO: 753982 - DNA, 33 bp, Homo sapien
aagatacacttagtattactgagctagactggg

SEQ ID NO: 753983 - DNA, 33 bp, Homo sapien
ctgttctgtctggtcacaaagcagagacgggat

SEQ ID NO: 753984 - DNA, 33 bp, Homo sapien
ctgttctgtctggtcagaaagcagagacgggat

SEQ ID NO: 753985 - DNA, 33 bp, Homo sapien
gcttgaaacttcagtaagaaaggcacagtcatg

SEQ ID NO: 753986 - DNA, 33 bp, Homo sapien
gcttgaaacttcagtaggaaaggcacagtcatg

SEQ ID NO: 753987 - DNA, 33 bp, Homo sapien
gatgatgtaatatggccatggaccctgctaagg

SEQ ID NO: 753988 - DNA, 33 bp, Homo sapien
gatgatgtaatatggctatggaccctgctaagg

SEQ ID NO: 753989 - DNA, 33 bp, Homo sapien
tcacagccacactggaagtaaaaatacatgaat

SEQ ID NO: 753990 - DNA, 33 bp, Homo sapien
tcacagccacactggatgtaaaaatacatgaat

SEQ ID NO: 753991 - DNA, 33 bp, Homo sapien
tgaaaggcttcacataactattgtttgacttac

SEQ ID NO: 753992 - DNA, 33 bp, Homo sapien
tgaaaggcttcacatagctattgtttgacttac

SEQ ID NO: 753993 - DNA, 33 bp, Homo sapien
tcgacttggaaccttgaaagttattgttccaca

SEQ ID NO: 753994 - DNA, 33 bp, Homo sapien
tcgacttggaaccttgcaagttattgttccaca

SEQ ID NO: 753995 - DNA, 33 bp, Homo sapien
gagaagcctgagtgtcacccggaaatgatgggc

SEQ ID NO: 753996 - DNA, 33 bp, Homo sapien
gagaagcctgagtgtcgcccggaaatgatgggc

SEQ ID NO: 753997 - DNA, 33 bp, Homo sapien
ctttcattcatcaataaggccacaggaatctta

SEQ ID NO: 753998 - DNA, 33 bp, Homo sapien
ctttcattcatcaatagggccacaggaatctta

SEQ ID NO: 753999 - DNA, 33 bp, Homo sapien
ctcctgatggcaagtgaatgccgggtggtgtag

SEQ ID NO: 754000 - DNA, 33 bp, Homo sapien
ctcctgatggcaagtggatgccgggtggtgtag

SEQ ID NO: 754001 - DNA, 33 bp, Homo sapien
agagctaaatattgagaacgcatgaacacaaag

SEQ ID NO: 754002 - DNA, 33 bp, Homo sapien
agagctaaatattgagtacgcatgaacacaaag

SEQ ID NO: 754003 - DNA, 33 bp, Homo sapien
caaggacatggaaacacatggagtgaggttaaa

SEQ ID NO: 754004 - DNA, 33 bp, Homo sapien
caaggacatggaaacatatggagtgaggttaaa

SEQ ID NO: 754005 - DNA, 33 bp, Homo sapien
aaccaatctttgggcccgatgtaaatccgacac

SEQ ID NO: 754006 - DNA, 33 bp, Homo sapien
aaccaatctttgggcctgatgtaaatccgacac

SEQ ID NO: 754007 - DNA, 33 bp, Homo sapien
caggggatggacacaaaaaatgtatggagttgc

SEQ ID NO: 754008 - DNA, 33 bp, Homo sapien
caggggatggacacaacaaatgtatggagttgc

SEQ ID NO: 754009 - DNA, 33 bp, Homo sapien
cctaactgacctcacaacatcagaccagcgccc

SEQ ID NO: 754010 - DNA, 33 bp, Homo sapien
cctaactgacctcacagcatcagaccagcgccc

SEQ ID NO: 754011 - DNA, 33 bp, Homo sapien
taatggctagagcgtcaacaggtgctcaacgga

SEQ ID NO: 754012 - DNA, 33 bp, Homo sapien
taatggctagagcgtcgacaggtgctcaacgga

SEQ ID NO: 754013 - DNA, 33 bp, Homo sapien
ctgagagcctcaaatcacagaaatttatgttcg

SEQ ID NO: 754014 - DNA, 33 bp, Homo sapien
ctgagagcctcaaatcgcagaaatttatgttcg

SEQ ID NO: 754015 - DNA, 33 bp, Homo sapien
ctggagccaagacttacgtgtgggactggtgct

SEQ ID NO: 754016 - DNA, 33 bp, Homo sapien
ctggagccaagacttatgtgtgggactggtgct

SEQ ID NO: 754017 - DNA, 33 bp, Homo sapien
atggctggagccaaaaaagatgtgattggagca

SEQ ID NO: 754018 - DNA, 33 bp, Homo sapien
atggctggagccaaaacagatgtgattggagca

SEQ ID NO: 754019 - DNA, 33 bp, Homo sapien
actgggcttctttctaggtgatttcctgagggt

SEQ ID NO: 754020 - DNA, 33 bp, Homo sapien
actgggcttctttctatgtgatttcctgagggt

SEQ ID NO: 754021 - DNA, 33 bp, Homo sapien
atttacagtcagcacaaaagtctttggaatact

SEQ ID NO: 754022 - DNA, 33 bp, Homo sapien
atttacagtcagcacagaagtctttggaatact

SEQ ID NO: 754023 - DNA, 33 bp, Homo sapien
gattgacccatcttcaaacccagatttcctaag

SEQ ID NO: 754024 - DNA, 33 bp, Homo sapien
gattgacccatcttcagacccagatttcctaag

SEQ ID NO: 754025 - DNA, 33 bp, Homo sapien
tatggtcccatttagaagcaaaagctgaaaaaa

SEQ ID NO: 754026 - DNA, 33 bp, Homo sapien
tatggtcccatttagatgcaaaagctgaaaaaa

SEQ ID NO: 754027 - DNA, 33 bp, Homo sapien
gctgtagtgatgatcaataaatgttaacaaatg

SEQ ID NO: 754028 - DNA, 33 bp, Homo sapien
gctgtagtgatgatcagtaaatgttaacaaatg

SEQ ID NO: 754029 - DNA, 33 bp, Homo sapien
aaatgagtaaaaagcaaccctgtgctgtgttaa

SEQ ID NO: 754030 - DNA, 33 bp, Homo sapien
aaatgagtaaaaagcagccctgtgctgtgttaa

SEQ ID NO: 754031 - DNA, 33 bp, Homo sapien
tcattgcatgggcctaacctagttcagcatgac

SEQ ID NO: 754032 - DNA, 33 bp, Homo sapien
tcattgcatgggcctaccctagttcagcatgac

SEQ ID NO: 754033 - DNA, 33 bp, Homo sapien
gtgtgcaaagaaattcccagatcaagtcacaaa

SEQ ID NO: 754034 - DNA, 33 bp, Homo sapien
gtgtgcaaagaaattctcagatcaagtcacaaa

SEQ ID NO: 754035 - DNA, 33 bp, Homo sapien
ttaaaaaatcgaagtaagaaactgtatgtgttt

SEQ ID NO: 754036 - DNA, 33 bp, Homo sapien
ttaaaaaatcgaagtatgaaactgtatgtgttt

SEQ ID NO: 754037 - DNA, 33 bp, Homo sapien
tcaggacatccaggaacgcaacctctgatggtg

SEQ ID NO: 754038 - DNA, 33 bp, Homo sapien
tcaggacatccaggaatgcaacctctgatggtg

SEQ ID NO: 754039 - DNA, 33 bp, Homo sapien
ccctcgtccatagaaactctgggttcagtggag

SEQ ID NO: 754040 - DNA, 33 bp, Homo sapien
ccctcgtccatagaaattctgggttcagtggag

SEQ ID NO: 754041 - DNA, 33 bp, Homo sapien
tgtaattatctgttcaataactgccttctcacc

SEQ ID NO: 754042 - DNA, 33 bp, Homo sapien
tgtaattatctgttcagtaactgccttctcacc

SEQ ID NO: 754043 - DNA, 33 bp, Homo sapien
gtgagcacaagtcaacagagatttggctcactc

SEQ ID NO: 754044 - DNA, 33 bp, Homo sapien
gtgagcacaagtcaacggagatttggctcactc

SEQ ID NO: 754045 - DNA, 33 bp, Homo sapien
atattcccaaaatggaagtgtctctaacctcag

SEQ ID NO: 754046 - DNA, 33 bp, Homo sapien
atattcccaaaatggacgtgtctctaacctcag

SEQ ID NO: 754047 - DNA, 33 bp, Homo sapien
acgtgtttctttccaaatgtggctgaagctata

SEQ ID NO: 754048 - DNA, 33 bp, Homo sapien
acgtgtttctttccaagtgtggctgaagctata

SEQ ID NO: 754049 - DNA, 33 bp, Homo sapien
agctctctgtcaccgacgtcacttaagggcttt

SEQ ID NO: 754050 - DNA, 33 bp, Homo sapien
agctctctgtcaccgatgtcacttaagggcttt

SEQ ID NO: 754051 - DNA, 33 bp, Homo sapien
gaaagatacatgggaactctgtgctacctttga

SEQ ID NO: 754052 - DNA, 33 bp, Homo sapien
gaaagatacatgggaattctgtgctacctttga

SEQ ID NO: 754053 - DNA, 33 bp, Homo sapien
aagaagagaagaagtgaaattaatagacagaca

SEQ ID NO: 754054 - DNA, 33 bp, Homo sapien
aagaagagaagaagtgcaattaatagacagaca

SEQ ID NO: 754055 - DNA, 33 bp, Homo sapien
gctgaatcatgtctaccggtggatgtggagtgt

SEQ ID NO: 754056 - DNA, 33 bp, Homo sapien
gctgaatcatgtctactggtggatgtggagtgt

SEQ ID NO: 754057 - DNA, 33 bp, Homo sapien
gcactttaaagtgtacagcctaagaaattattt

SEQ ID NO: 754058 - DNA, 33 bp, Homo sapien
gcactttaaagtgtacggcctaagaaattattt

SEQ ID NO: 754059 - DNA, 33 bp, Homo sapien
gacttaccactatggaagttaaccttgaacact

SEQ ID NO: 754060 - DNA, 33 bp, Homo sapien
gacttaccactatggatgttaaccttgaacact

SEQ ID NO: 754061 - DNA, 33 bp, Homo sapien
tcaaatataaattgcactaataagctcaaacac

SEQ ID NO: 754062 - DNA, 33 bp, Homo sapien
tcaaatataaattgcattaataagctcaaacac

SEQ ID NO: 754063 - DNA, 33 bp, Homo sapien
tttggtccattagaaacaaaataacccatccat

SEQ ID NO: 754064 - DNA, 33 bp, Homo sapien
tttggtccattagaaagaaaataacccatccat

SEQ ID NO: 754065 - DNA, 33 bp, Homo sapien
tgtttccacactgtgcactctaatcctccatct

SEQ ID NO: 754066 - DNA, 33 bp, Homo sapien
tgtttccacactgtgcgctctaatcctccatct

SEQ ID NO: 754067 - DNA, 33 bp, Homo sapien
ttagatttgcccatcaacaaaaatcttcccaga

SEQ ID NO: 754068 - DNA, 33 bp, Homo sapien
ttagatttgcccatcagcaaaaatcttcccaga

SEQ ID NO: 754069 - DNA, 33 bp, Homo sapien
atatatcataaatcagaacaaattgagaactat

SEQ ID NO: 754070 - DNA, 33 bp, Homo sapien
atatatcataaatcaggacaaattgagaactat

SEQ ID NO: 754071 - DNA, 33 bp, Homo sapien
aagcggtggatttggccatttgatgtaccctac

SEQ ID NO: 754072 - DNA, 33 bp, Homo sapien
aagcggtggatttggctatttgatgtaccctac

SEQ ID NO: 754073 - DNA, 33 bp, Homo sapien
ccgtccttcttggctaagagttttcagttcata

SEQ ID NO: 754074 - DNA, 33 bp, Homo sapien
ccgtccttcttggctaggagttttcagttcata

SEQ ID NO: 754075 - DNA, 33 bp, Homo sapien
cgtgataaagatttgagacagtttgcagaaaga

SEQ ID NO: 754076 - DNA, 33 bp, Homo sapien
cgtgataaagatttgatacagtttgcagaaaga

SEQ ID NO: 754077 - DNA, 33 bp, Homo sapien
gctggaaagtggggaccgatcggcgaagacgtg

SEQ ID NO: 754078 - DNA, 33 bp, Homo sapien
gctggaaagtggggactgatcggcgaagacgtg

SEQ ID NO: 754079 - DNA, 33 bp, Homo sapien
ctttttctcacctctcaaaaggtagggaatgca

SEQ ID NO: 754080 - DNA, 33 bp, Homo sapien
ctttttctcacctctcgaaaggtagggaatgca

SEQ ID NO: 754081 - DNA, 33 bp, Homo sapien
tcccaagatttccaaccctgggtaaagactgtc

SEQ ID NO: 754082 - DNA, 33 bp, Homo sapien
tcccaagatttccaacgctgggtaaagactgtc

SEQ ID NO: 754083 - DNA, 33 bp, Homo sapien
catcctcctagctcaaccaacttcagcactgca

SEQ ID NO: 754084 - DNA, 33 bp, Homo sapien
catcctcctagctcaatcaacttcagcactgca

SEQ ID NO: 754085 - DNA, 33 bp, Homo sapien
gcacagcccacatgcaagagttagcaccacccg

SEQ ID NO: 754086 - DNA, 33 bp, Homo sapien
gcacagcccacatgcacgagttagcaccacccg

SEQ ID NO: 754087 - DNA, 33 bp, Homo sapien
aattaacaggccatcacgactgacctggtaccc

SEQ ID NO: 754088 - DNA, 33 bp, Homo sapien
aattaacaggccatcatgactgacctggtaccc

SEQ ID NO: 754089 - DNA, 33 bp, Homo sapien
gttgtgtctagttgaaacttgttcatcttcatt

SEQ ID NO: 754090 - DNA, 33 bp, Homo sapien
gttgtgtctagttgaagcttgttcatcttcatt

SEQ ID NO: 754091 - DNA, 33 bp, Homo sapien
taactgtctcctgcgacgttcagatcctcaggg

SEQ ID NO: 754092 - DNA, 33 bp, Homo sapien
taactgtctcctgcgatgttcagatcctcaggg

SEQ ID NO: 754093 - DNA, 33 bp, Homo sapien
taacactgctgtttcgcacacttgtttttcatg

SEQ ID NO: 754094 - DNA, 33 bp, Homo sapien
taacactgctgtttcgtacacttgtttttcatg

SEQ ID NO: 754095 - DNA, 33 bp, Homo sapien
ttaactggctacatcaacaaaaacttgagttcc

SEQ ID NO: 754096 - DNA, 33 bp, Homo sapien
ttaactggctacatcagcaaaaacttgagttcc

SEQ ID NO: 754097 - DNA, 33 bp, Homo sapien
ctaaaaacaccataaactcaaaaggcaaaaaag

SEQ ID NO: 754098 - DNA, 33 bp, Homo sapien
ctaaaaacaccataaattcaaaaggcaaaaaag

SEQ ID NO: 754099 - DNA, 33 bp, Homo sapien
attaaaaagcgacataactccctcacaaggaat

SEQ ID NO: 754100 - DNA, 33 bp, Homo sapien
attaaaaagcgacatacctccctcacaaggaat

SEQ ID NO: 754101 - DNA, 33 bp, Homo sapien
cagaaggtatggaagaagactttaaagcagaga

SEQ ID NO: 754102 - DNA, 33 bp, Homo sapien
cagaaggtatggaagaggactttaaagcagaga

SEQ ID NO: 754103 - DNA, 33 bp, Homo sapien
tatatacaactgagcacgtgcatttatacattt

SEQ ID NO: 754104 - DNA, 33 bp, Homo sapien
tatatacaactgagcatgtgcatttatacattt

SEQ ID NO: 754105 - DNA, 33 bp, Homo sapien
aatgcatttgacgacaaggtaccgacccagact

SEQ ID NO: 754106 - DNA, 33 bp, Homo sapien
aatgcatttgacgacagggtaccgacccagact

SEQ ID NO: 754107 - DNA, 33 bp, Homo sapien
cacagctctgggatgaagacgacgttattgtga

SEQ ID NO: 754108 - DNA, 33 bp, Homo sapien
cacagctctgggatgaggacgacgttattgtga

SEQ ID NO: 754109 - DNA, 33 bp, Homo sapien
agaattgcttggccacaaaattctcaaaggact

SEQ ID NO: 754110 - DNA, 33 bp, Homo sapien
agaattgcttggccacgaaattctcaaaggact

SEQ ID NO: 754111 - DNA, 33 bp, Homo sapien
ctgtcatcccgtttccaccccgaggcatcctgt

SEQ ID NO: 754112 - DNA, 33 bp, Homo sapien
ctgtcatcccgtttccgccccgaggcatcctgt

SEQ ID NO: 754113 - DNA, 33 bp, Homo sapien
agacttttagatccacagcggagagcaagagat

SEQ ID NO: 754114 - DNA, 33 bp, Homo sapien
agacttttagatccacggcggagagcaagagat

SEQ ID NO: 754115 - DNA, 33 bp, Homo sapien
aaataatcagatggaacagccaaaagatcggtt

SEQ ID NO: 754116 - DNA, 33 bp, Homo sapien
aaataatcagatggaatagccaaaagatcggtt

SEQ ID NO: 754117 - DNA, 33 bp, Homo sapien
acataatacaggtgaacaatcttgtttaattaa

SEQ ID NO: 754118 - DNA, 33 bp, Homo sapien
acataatacaggtgaataatcttgtttaattaa

SEQ ID NO: 754119 - DNA, 33 bp, Homo sapien
ttgcatcctaaattccccaagtcaagatggaga

SEQ ID NO: 754120 - DNA, 33 bp, Homo sapien
ttgcatcctaaattccgcaagtcaagatggaga

SEQ ID NO: 754121 - DNA, 33 bp, Homo sapien
gactccacctggcagaactaaggacactttgaa

SEQ ID NO: 754122 - DNA, 33 bp, Homo sapien
gactccacctggcagagctaaggacactttgaa

SEQ ID NO: 754123 - DNA, 33 bp, Homo sapien
acgcggcaaagtatcacggactgggagcttaaa

SEQ ID NO: 754124 - DNA, 33 bp, Homo sapien
acgcggcaaagtatcatggactgggagcttaaa

SEQ ID NO: 754125 - DNA, 33 bp, Homo sapien
gtctgcgtacaaacagaaaatgcgacccatctt

SEQ ID NO: 754126 - DNA, 33 bp, Homo sapien
gtctgcgtacaaacaggaaatgcgacccatctt

SEQ ID NO: 754127 - DNA, 33 bp, Homo sapien
tctcctatctaatccaatctagggtattctagt

SEQ ID NO: 754128 - DNA, 33 bp, Homo sapien
tctcctatctaatccagtctagggtattctagt

SEQ ID NO: 754129 - DNA, 33 bp, Homo sapien
cctagagattcttcaggagacatctctacattc

SEQ ID NO: 754130 - DNA, 33 bp, Homo sapien
cctagagattcttcagtagacatctctacattc

SEQ ID NO: 754131 - DNA, 33 bp, Homo sapien
ttatcaagattatatcacaaaatggaaatattc

SEQ ID NO: 754132 - DNA, 33 bp, Homo sapien
ttatcaagattatatcgcaaaatggaaatattc

SEQ ID NO: 754133 - DNA, 33 bp, Homo sapien
aactctttgtagcagtaacagcaactgatccca

SEQ ID NO: 754134 - DNA, 33 bp, Homo sapien
aactctttgtagcagtgacagcaactgatccca

SEQ ID NO: 754135 - DNA, 33 bp, Homo sapien
aaagtgtagacattaccggaaacatttctgcca

SEQ ID NO: 754136 - DNA, 33 bp, Homo sapien
aaagtgtagacattactggaaacatttctgcca

SEQ ID NO: 754137 - DNA, 33 bp, Homo sapien
agcctcctgctgctgacgggactgtaacctggg

SEQ ID NO: 754138 - DNA, 33 bp, Homo sapien
agcctcctgctgctgatgggactgtaacctggg

SEQ ID NO: 754139 - DNA, 33 bp, Homo sapien
cccgatctcactggcaaagcatatctcatcttt

SEQ ID NO: 754140 - DNA, 33 bp, Homo sapien
cccgatctcactggcatagcatatctcatcttt

SEQ ID NO: 754141 - DNA, 33 bp, Homo sapien
aatgggctatgctgcaagagataaccaatgctg

SEQ ID NO: 754142 - DNA, 33 bp, Homo sapien
aatgggctatgctgcaggagataaccaatgctg

SEQ ID NO: 754143 - DNA, 33 bp, Homo sapien
tatttttgaggaactgaatttgttagagagcgt

SEQ ID NO: 754144 - DNA, 33 bp, Homo sapien
tatttttgaggaactggatttgttagagagcgt

SEQ ID NO: 754145 - DNA, 33 bp, Homo sapien
ccagtgacgcagaaaaactcagtaccgtaagag

SEQ ID NO: 754146 - DNA, 33 bp, Homo sapien
ccagtgacgcagaaaacctcagtaccgtaagag

SEQ ID NO: 754147 - DNA, 33 bp, Homo sapien
gaagcacagatgtaaactgcacaatgccatgca

SEQ ID NO: 754148 - DNA, 33 bp, Homo sapien
gaagcacagatgtaaattgcacaatgccatgca

SEQ ID NO: 754149 - DNA, 33 bp, Homo sapien
tgttcaccacgtcaggcaggtagcgtgtgccga

SEQ ID NO: 754150 - DNA, 33 bp, Homo sapien
tgttcaccacgtcagggaggtagcgtgtgccga

SEQ ID NO: 754151 - DNA, 33 bp, Homo sapien
gaagtggcttcacaaaatagatgactagaacat

SEQ ID NO: 754152 - DNA, 33 bp, Homo sapien
gaagtggcttcacaaagtagatgactagaacat

SEQ ID NO: 754153 - DNA, 33 bp, Homo sapien
gagaaattctgttcgcaaaggttcctgaacagc

SEQ ID NO: 754154 - DNA, 33 bp, Homo sapien
gagaaattctgttcgcgaaggttcctgaacagc

SEQ ID NO: 754155 - DNA, 33 bp, Homo sapien
cactgcccatgtgacaatatcttgggaagccct

SEQ ID NO: 754156 - DNA, 33 bp, Homo sapien
cactgcccatgtgacagtatcttgggaagccct

SEQ ID NO: 754157 - DNA, 33 bp, Homo sapien
catgtgccaatactcccgcaaagacttgctgtt

SEQ ID NO: 754158 - DNA, 33 bp, Homo sapien
catgtgccaatactcctgcaaagacttgctgtt

SEQ ID NO: 754159 - DNA, 33 bp, Homo sapien
tgtttctaaaatccaccactcagaaaaaccagg

SEQ ID NO: 754160 - DNA, 33 bp, Homo sapien
tgtttctaaaatccactactcagaaaaaccagg

SEQ ID NO: 754161 - DNA, 33 bp, Homo sapien
atcaaccaataactaactggccatctctccact

SEQ ID NO: 754162 - DNA, 33 bp, Homo sapien
atcaaccaataactaattggccatctctccact

SEQ ID NO: 754163 - DNA, 33 bp, Homo sapien
aggggctgtaccttaaccttctgcatgccctgc

SEQ ID NO: 754164 - DNA, 33 bp, Homo sapien
aggggctgtaccttaatcttctgcatgccctgc

SEQ ID NO: 754165 - DNA, 33 bp, Homo sapien
gtcctactgtggacaaacccctcaaagtctctg

SEQ ID NO: 754166 - DNA, 33 bp, Homo sapien
gtcctactgtggacaagcccctcaaagtctctg

SEQ ID NO: 754167 - DNA, 33 bp, Homo sapien
caccagtgactgcccaaggtctagaggtacaaa

SEQ ID NO: 754168 - DNA, 33 bp, Homo sapien
caccagtgactgcccagggtctagaggtacaaa

SEQ ID NO: 754169 - DNA, 33 bp, Homo sapien
agttcgcagtgactcaaggtatacagatcagca

SEQ ID NO: 754170 - DNA, 33 bp, Homo sapien
agttcgcagtgactcacggtatacagatcagca

SEQ ID NO: 754171 - DNA, 33 bp, Homo sapien
attggcacgaaaattagaagtcatatgctttgc

SEQ ID NO: 754172 - DNA, 33 bp, Homo sapien
attggcacgaaaattataagtcatatgctttgc

SEQ ID NO: 754173 - DNA, 33 bp, Homo sapien
aagtaagaaatcctcacgcatatggaaagtttg

SEQ ID NO: 754174 - DNA, 33 bp, Homo sapien
aagtaagaaatcctcaggcatatggaaagtttg

SEQ ID NO: 754175 - DNA, 33 bp, Homo sapien
aatccaataatctgccacctacgaaggaggaat

SEQ ID NO: 754176 - DNA, 33 bp, Homo sapien
aatccaataatctgccgcctacgaaggaggaat

SEQ ID NO: 754177 - DNA, 33 bp, Homo sapien
cctggctgggaacagacgtcttcaggggcaatt

SEQ ID NO: 754178 - DNA, 33 bp, Homo sapien
cctggctgggaacagatgtcttcaggggcaatt

SEQ ID NO: 754179 - DNA, 33 bp, Homo sapien
ttttatgttgacataacctgttgtcagaagtgg

SEQ ID NO: 754180 - DNA, 33 bp, Homo sapien
ttttatgttgacataatctgttgtcagaagtgg

SEQ ID NO: 754181 - DNA, 33 bp, Homo sapien
aactttctttcaaaacaacatggggcaactcct

SEQ ID NO: 754182 - DNA, 33 bp, Homo sapien
aactttctttcaaaacgacatggggcaactcct

SEQ ID NO: 754183 - DNA, 33 bp, Homo sapien
tagtgccagggaagcaacgggggttctcacgta

SEQ ID NO: 754184 - DNA, 33 bp, Homo sapien
tagtgccagggaagcagcgggggttctcacgta

SEQ ID NO: 754185 - DNA, 33 bp, Homo sapien
gtttatctgaaattcaactttgactgggcagtc

SEQ ID NO: 754186 - DNA, 33 bp, Homo sapien
gtttatctgaaattcagctttgactgggcagtc

SEQ ID NO: 754187 - DNA, 33 bp, Homo sapien
caggaggtacaggcataatgaagggtggcacgg

SEQ ID NO: 754188 - DNA, 33 bp, Homo sapien
caggaggtacaggcatgatgaagggtggcacgg

SEQ ID NO: 754189 - DNA, 33 bp, Homo sapien
ttcatttaaaaataccccagctgatgccagcac

SEQ ID NO: 754190 - DNA, 33 bp, Homo sapien
ttcatttaaaaatacctcagctgatgccagcac

SEQ ID NO: 754191 - DNA, 33 bp, Homo sapien
cctcagagctggggccagaccatttggggcata

SEQ ID NO: 754192 - DNA, 33 bp, Homo sapien
cctcagagctggggccggaccatttggggcata

SEQ ID NO: 754193 - DNA, 33 bp, Homo sapien
catcaggagggatgaacatcttgaatggaatag

SEQ ID NO: 754194 - DNA, 33 bp, Homo sapien
catcaggagggatgaatatcttgaatggaatag

SEQ ID NO: 754195 - DNA, 33 bp, Homo sapien
ccatcactggctcaccaaacacgcagaggaagc

SEQ ID NO: 754196 - DNA, 33 bp, Homo sapien
ccatcactggctcaccgaacacgcagaggaagc

SEQ ID NO: 754197 - DNA, 33 bp, Homo sapien
catgtcctttcatttccagcattttatctaagt

SEQ ID NO: 754198 - DNA, 33 bp, Homo sapien
catgtcctttcatttctagcattttatctaagt

SEQ ID NO: 754199 - DNA, 33 bp, Homo sapien
ctagttggtacctgtcaataagagtagagattg

SEQ ID NO: 754200 - DNA, 33 bp, Homo sapien
ctagttggtacctgtcgataagagtagagattg

SEQ ID NO: 754201 - DNA, 33 bp, Homo sapien
aatacccacacaaaaaagcattagcaggtggac

SEQ ID NO: 754202 - DNA, 33 bp, Homo sapien
aatacccacacaaaaaggcattagcaggtggac

SEQ ID NO: 754203 - DNA, 33 bp, Homo sapien
tacttgtaggatgagcaaatgattatatattgt

SEQ ID NO: 754204 - DNA, 33 bp, Homo sapien
tacttgtaggatgagcgaatgattatatattgt

SEQ ID NO: 754205 - DNA, 33 bp, Homo sapien
aggaagatgagtttgaggtaaggaactcggccg

SEQ ID NO: 754206 - DNA, 33 bp, Homo sapien
aggaagatgagtttgatgtaaggaactcggccg

SEQ ID NO: 754207 - DNA, 33 bp, Homo sapien
tatgtcagttcttttgaagtttcactgtgacag

SEQ ID NO: 754208 - DNA, 33 bp, Homo sapien
tatgtcagttcttttgcagtttcactgtgacag

SEQ ID NO: 754209 - DNA, 33 bp, Homo sapien
atgcaaaaattccttcacatgcattggcctggg

SEQ ID NO: 754210 - DNA, 33 bp, Homo sapien
atgcaaaaattccttcgcatgcattggcctggg

SEQ ID NO: 754211 - DNA, 33 bp, Homo sapien
tttgttcgtagctgcaatagggaaggaaaactt

SEQ ID NO: 754212 - DNA, 33 bp, Homo sapien
tttgttcgtagctgcagtagggaaggaaaactt

SEQ ID NO: 754213 - DNA, 33 bp, Homo sapien
ggggagaaggcattccacctccgctgtgagtat

SEQ ID NO: 754214 - DNA, 33 bp, Homo sapien
ggggagaaggcattccgcctccgctgtgagtat

SEQ ID NO: 754215 - DNA, 33 bp, Homo sapien
ggcccagagttctgaaagtgcaattggatgatg

SEQ ID NO: 754216 - DNA, 33 bp, Homo sapien
ggcccagagttctgaacgtgcaattggatgatg

SEQ ID NO: 754217 - DNA, 33 bp, Homo sapien
attatccattggttatgaatgttatcacttctg

SEQ ID NO: 754218 - DNA, 33 bp, Homo sapien
attatccattggttattaatgttatcacttctg

SEQ ID NO: 754219 - DNA, 33 bp, Homo sapien
tccctgtctatttgtgaagcaccagtcatggag

SEQ ID NO: 754220 - DNA, 33 bp, Homo sapien
tccctgtctatttgtgcagcaccagtcatggag

SEQ ID NO: 754221 - DNA, 33 bp, Homo sapien
cctggcaacatgagagaatcacctgctttttca

SEQ ID NO: 754222 - DNA, 33 bp, Homo sapien
cctggcaacatgagagcatcacctgctttttca

SEQ ID NO: 754223 - DNA, 33 bp, Homo sapien
aggtgtggcagctaacagccatgccaggcattc

SEQ ID NO: 754224 - DNA, 33 bp, Homo sapien
aggtgtggcagctaaccgccatgccaggcattc

SEQ ID NO: 754225 - DNA, 33 bp, Homo sapien
acaggaagtgaacacaaaaggaaggaaataagt

SEQ ID NO: 754226 - DNA, 33 bp, Homo sapien
acaggaagtgaacacagaaggaaggaaataagt

SEQ ID NO: 754227 - DNA, 33 bp, Homo sapien
cagttccaggcttcacaactgggttatacacag

SEQ ID NO: 754228 - DNA, 33 bp, Homo sapien
cagttccaggcttcacgactgggttatacacag

SEQ ID NO: 754229 - DNA, 33 bp, Homo sapien
catttgatttatgcagcccgtcagaaaagagac

SEQ ID NO: 754230 - DNA, 33 bp, Homo sapien
catttgatttatgcagtccgtcagaaaagagac

SEQ ID NO: 754231 - DNA, 33 bp, Homo sapien
acaagcatgctatcacagggcctgagtataatt

SEQ ID NO: 754232 - DNA, 33 bp, Homo sapien
acaagcatgctatcacggggcctgagtataatt

SEQ ID NO: 754233 - DNA, 33 bp, Homo sapien
tatggaaatggcactgccactggacttgaaacg

SEQ ID NO: 754234 - DNA, 33 bp, Homo sapien
tatggaaatggcactgtcactggacttgaaacg

SEQ ID NO: 754235 - DNA, 33 bp, Homo sapien
gcaaaagactctcccccacagctgggtcttaca

SEQ ID NO: 754236 - DNA, 33 bp, Homo sapien
gcaaaagactctccccgacagctgggtcttaca

SEQ ID NO: 754237 - DNA, 33 bp, Homo sapien
tccatcctttccaccccggcaaccttcaagggc

SEQ ID NO: 754238 - DNA, 33 bp, Homo sapien
tccatcctttccaccctggcaaccttcaagggc

SEQ ID NO: 754239 - DNA, 33 bp, Homo sapien
aggaatttatccaacacatcttttggtaagtgt

SEQ ID NO: 754240 - DNA, 33 bp, Homo sapien
aggaatttatccaacatatcttttggtaagtgt

SEQ ID NO: 754241 - DNA, 33 bp, Homo sapien
aacagaaaaagatcaacagagaaagaggtaaaa

SEQ ID NO: 754242 - DNA, 33 bp, Homo sapien
aacagaaaaagatcaagagagaaagaggtaaaa

SEQ ID NO: 754243 - DNA, 33 bp, Homo sapien
tgttaggtaacatccaatgatatcatggaaaga

SEQ ID NO: 754244 - DNA, 33 bp, Homo sapien
tgttaggtaacatccagtgatatcatggaaaga

SEQ ID NO: 754245 - DNA, 33 bp, Homo sapien
gatgcctcaccctgataactcgatttaacttgg

SEQ ID NO: 754246 - DNA, 33 bp, Homo sapien
gatgcctcaccctgatgactcgatttaacttgg

SEQ ID NO: 754247 - DNA, 33 bp, Homo sapien
atatagggtctaactgcagtacatttaaatgtt

SEQ ID NO: 754248 - DNA, 33 bp, Homo sapien
atatagggtctaactgtagtacatttaaatgtt

SEQ ID NO: 754249 - DNA, 33 bp, Homo sapien
tcctggcacatgtgtacgggacaaatgttcgtg

SEQ ID NO: 754250 - DNA, 33 bp, Homo sapien
tcctggcacatgtgtatgggacaaatgttcgtg

SEQ ID NO: 754251 - DNA, 33 bp, Homo sapien
agaaatatatgctttacaggccacaggctgctc

SEQ ID NO: 754252 - DNA, 33 bp, Homo sapien
agaaatatatgctttataggccacaggctgctc

SEQ ID NO: 754253 - DNA, 33 bp, Homo sapien
taatcacaagttgtgaatatcagttcgttctta

SEQ ID NO: 754254 - DNA, 33 bp, Homo sapien
taatcacaagttgtgagtatcagttcgttctta

SEQ ID NO: 754255 - DNA, 33 bp, Homo sapien
actgtcctccaaacgacgtaatcacaagttgtg

SEQ ID NO: 754256 - DNA, 33 bp, Homo sapien
actgtcctccaaacgatgtaatcacaagttgtg

SEQ ID NO: 754257 - DNA, 33 bp, Homo sapien
ctgttgaactaagtgaataagaaactgacatag

SEQ ID NO: 754258 - DNA, 33 bp, Homo sapien
ctgttgaactaagtgagtaagaaactgacatag

SEQ ID NO: 754259 - DNA, 33 bp, Homo sapien
acctagtatgaatgaacgcaaagtatctaatac

SEQ ID NO: 754260 - DNA, 33 bp, Homo sapien
acctagtatgaatgaatgcaaagtatctaatac

SEQ ID NO: 754261 - DNA, 33 bp, Homo sapien
cacaaggtatcttaacactgatggaatgttatt

SEQ ID NO: 754262 - DNA, 33 bp, Homo sapien
cacaaggtatcttaacgctgatggaatgttatt

SEQ ID NO: 754263 - DNA, 33 bp, Homo sapien
cagtttaacgttggaacgtacagcctcagacgg

SEQ ID NO: 754264 - DNA, 33 bp, Homo sapien
cagtttaacgttggaatgtacagcctcagacgg

SEQ ID NO: 754265 - DNA, 33 bp, Homo sapien
tattcaagttactcacacgtgaatgctttgaaa

SEQ ID NO: 754266 - DNA, 33 bp, Homo sapien
tattcaagttactcactcgtgaatgctttgaaa

SEQ ID NO: 754267 - DNA, 33 bp, Homo sapien
gtttacatattgttaacgtttgctcattttaag

SEQ ID NO: 754268 - DNA, 33 bp, Homo sapien
gtttacatattgttaatgtttgctcattttaag

SEQ ID NO: 754269 - DNA, 33 bp, Homo sapien
agtatctgtgctagtagctggtctcactggttt

SEQ ID NO: 754270 - DNA, 33 bp, Homo sapien
agtatctgtgctagtatctggtctcactggttt

SEQ ID NO: 754271 - DNA, 33 bp, Homo sapien
catcaaacactgtccacgggcttcacagatgag

SEQ ID NO: 754272 - DNA, 33 bp, Homo sapien
catcaaacactgtccaggggcttcacagatgag

SEQ ID NO: 754273 - DNA, 33 bp, Homo sapien
acagtgaagactagagaaaaagttgcaaaaagc

SEQ ID NO: 754274 - DNA, 33 bp, Homo sapien
acagtgaagactagaggaaaagttgcaaaaagc

SEQ ID NO: 754275 - DNA, 33 bp, Homo sapien
aggcagaccaaggccaaaatcgcacctttatta

SEQ ID NO: 754276 - DNA, 33 bp, Homo sapien
aggcagaccaaggccagaatcgcacctttatta

SEQ ID NO: 754277 - DNA, 33 bp, Homo sapien
aaaggagcaaaattaaacacctagagtacttaa

SEQ ID NO: 754278 - DNA, 33 bp, Homo sapien
aaaggagcaaaattaaccacctagagtacttaa

SEQ ID NO: 754279 - DNA, 33 bp, Homo sapien
aaagtctcctatgacaagcagttgggttttccg

SEQ ID NO: 754280 - DNA, 33 bp, Homo sapien
aaagtctcctatgacacgcagttgggttttccg

SEQ ID NO: 754281 - DNA, 33 bp, Homo sapien
ctaaactccatcttaaaaagaagtcatagcgtt

SEQ ID NO: 754282 - DNA, 33 bp, Homo sapien
ctaaactccatcttaagaagaagtcatagcgtt

SEQ ID NO: 754283 - DNA, 33 bp, Homo sapien
tgggtctgttcctttcacctagcctttccttct

SEQ ID NO: 754284 - DNA, 33 bp, Homo sapien
tgggtctgttcctttcgcctagcctttccttct

SEQ ID NO: 754285 - DNA, 33 bp, Homo sapien
gaaagatgacgtccagacgctttgagagtcaaa

SEQ ID NO: 754286 - DNA, 33 bp, Homo sapien
gaaagatgacgtccagtcgctttgagagtcaaa

SEQ ID NO: 754287 - DNA, 33 bp, Homo sapien
gagaaaatcaggcgaaattaataaacaagcaaa

SEQ ID NO: 754288 - DNA, 33 bp, Homo sapien
gagaaaatcaggcgaacttaataaacaagcaaa

SEQ ID NO: 754289 - DNA, 33 bp, Homo sapien
gaaagctgtgcatcaacggtgagttaatcaaca

SEQ ID NO: 754290 - DNA, 33 bp, Homo sapien
gaaagctgtgcatcaatggtgagttaatcaaca

SEQ ID NO: 754291 - DNA, 33 bp, Homo sapien
aagcaatgaataagaacaacgaatcccagcaat

SEQ ID NO: 754292 - DNA, 33 bp, Homo sapien
aagcaatgaataagaataacgaatcccagcaat

SEQ ID NO: 754293 - DNA, 33 bp, Homo sapien
cttcatactgatttacagcaaagcacgtgttgg

SEQ ID NO: 754294 - DNA, 33 bp, Homo sapien
cttcatactgatttacggcaaagcacgtgttgg

SEQ ID NO: 754295 - DNA, 33 bp, Homo sapien
catcaccagtgacattcaatactttttcacagt

SEQ ID NO: 754296 - DNA, 33 bp, Homo sapien
catcaccagtgacattgaatactttttcacagt

SEQ ID NO: 754297 - DNA, 33 bp, Homo sapien
tttacggtttattagccataatcatcttgcaat

SEQ ID NO: 754298 - DNA, 33 bp, Homo sapien
tttacggtttattagctataatcatcttgcaat

SEQ ID NO: 754299 - DNA, 33 bp, Homo sapien
acttttgtttctagcaatataatggaatagata

SEQ ID NO: 754300 - DNA, 33 bp, Homo sapien
acttttgtttctagcagtataatggaatagata

SEQ ID NO: 754301 - DNA, 33 bp, Homo sapien
tcctgccgtctctgggaatgccctttcttttgg

SEQ ID NO: 754302 - DNA, 33 bp, Homo sapien
tcctgccgtctctggggatgccctttcttttgg

SEQ ID NO: 754303 - DNA, 33 bp, Homo sapien
gaggcttatttgaatacgtaactgcagccaact

SEQ ID NO: 754304 - DNA, 33 bp, Homo sapien
gaggcttatttgaatatgtaactgcagccaact

SEQ ID NO: 754305 - DNA, 33 bp, Homo sapien
aaaaatggtaataatacagtcaaagaacaaatt

SEQ ID NO: 754306 - DNA, 33 bp, Homo sapien
aaaaatggtaataatatagtcaaagaacaaatt

SEQ ID NO: 754307 - DNA, 33 bp, Homo sapien
gggacacagaacatacaaaagtaaacgtggccg

SEQ ID NO: 754308 - DNA, 33 bp, Homo sapien
gggacacagaacatacgaaagtaaacgtggccg

SEQ ID NO: 754309 - DNA, 33 bp, Homo sapien
gtcaatcacagcaagaagtgcaaagagtgatgg

SEQ ID NO: 754310 - DNA, 33 bp, Homo sapien
gtcaatcacagcaagaggtgcaaagagtgatgg

SEQ ID NO: 754311 - DNA, 33 bp, Homo sapien
tttctagactgattgcaccaacattcccttcat

SEQ ID NO: 754312 - DNA, 33 bp, Homo sapien
tttctagactgattgcgccaacattcccttcat

SEQ ID NO: 754313 - DNA, 33 bp, Homo sapien
tgcagcaacccacttcagaacaccaatttccat

SEQ ID NO: 754314 - DNA, 33 bp, Homo sapien
tgcagcaacccacttcggaacaccaatttccat

SEQ ID NO: 754315 - DNA, 33 bp, Homo sapien
gaactccaccaaaagacccccggcaagagatga

SEQ ID NO: 754316 - DNA, 33 bp, Homo sapien
gaactccaccaaaagatccccggcaagagatga

SEQ ID NO: 754317 - DNA, 33 bp, Homo sapien
ttcttttccaatttgcaagtactgtatgcaaag

SEQ ID NO: 754318 - DNA, 33 bp, Homo sapien
ttcttttccaatttgccagtactgtatgcaaag

SEQ ID NO: 754319 - DNA, 33 bp, Homo sapien
aaacgtagattcttacagattagatgacttatt

SEQ ID NO: 754320 - DNA, 33 bp, Homo sapien
aaacgtagattcttacggattagatgacttatt

SEQ ID NO: 754321 - DNA, 33 bp, Homo sapien
gcatgtaaaggccttaacagaaagctgcccttg

SEQ ID NO: 754322 - DNA, 33 bp, Homo sapien
gcatgtaaaggccttagcagaaagctgcccttg

SEQ ID NO: 754323 - DNA, 33 bp, Homo sapien
tctcctgatgtctaaaatgtgacctataatttc

SEQ ID NO: 754324 - DNA, 33 bp, Homo sapien
tctcctgatgtctaaagtgtgacctataatttc

SEQ ID NO: 754325 - DNA, 33 bp, Homo sapien
agagaatgattagagaaatagaaaaattaatta

SEQ ID NO: 754326 - DNA, 33 bp, Homo sapien
agagaatgattagagagatagaaaaattaatta

SEQ ID NO: 754327 - DNA, 33 bp, Homo sapien
ggaccagcgccgtgtacctattctgtgcatcct

SEQ ID NO: 754328 - DNA, 33 bp, Homo sapien
ggaccagcgccgtgtatctattctgtgcatcct

SEQ ID NO: 754329 - DNA, 33 bp, Homo sapien
atacacagcagggacaagccattcctatcctct

SEQ ID NO: 754330 - DNA, 33 bp, Homo sapien
atacacagcagggacaggccattcctatcctct

SEQ ID NO: 754331 - DNA, 33 bp, Homo sapien
taaatgagataaaatacatatgacgtggtatag

SEQ ID NO: 754332 - DNA, 33 bp, Homo sapien
taaatgagataaaatatatatgacgtggtatag

SEQ ID NO: 754333 - DNA, 33 bp, Homo sapien
agggaaaatgccatgcaatgatgatgacagaga

SEQ ID NO: 754334 - DNA, 33 bp, Homo sapien
agggaaaatgccatgcgatgatgatgacagaga

SEQ ID NO: 754335 - DNA, 33 bp, Homo sapien
caactgggttcagccaatgctccacagcaggct

SEQ ID NO: 754336 - DNA, 33 bp, Homo sapien
caactgggttcagccactgctccacagcaggct

SEQ ID NO: 754337 - DNA, 33 bp, Homo sapien
cccagaaaaggacaaacagtgagggttgccaca

SEQ ID NO: 754338 - DNA, 33 bp, Homo sapien
cccagaaaaggacaaatagtgagggttgccaca

SEQ ID NO: 754339 - DNA, 33 bp, Homo sapien
tgctatcaacttaagagaactgggttccagagg

SEQ ID NO: 754340 - DNA, 33 bp, Homo sapien
tgctatcaacttaagataactgggttccagagg

SEQ ID NO: 754341 - DNA, 33 bp, Homo sapien
tctggggaagccaacactgctacgaacctgggc

SEQ ID NO: 754342 - DNA, 33 bp, Homo sapien
tctggggaagccaacattgctacgaacctgggc

SEQ ID NO: 754343 - DNA, 33 bp, Homo sapien
aacctgcgtgcaaaaacgctgagacctatcacc

SEQ ID NO: 754344 - DNA, 33 bp, Homo sapien
aacctgcgtgcaaaaatgctgagacctatcacc

SEQ ID NO: 754345 - DNA, 33 bp, Homo sapien
tttctgtcgcattttacgttgtaatggaaaaga

SEQ ID NO: 754346 - DNA, 33 bp, Homo sapien
tttctgtcgcattttatgttgtaatggaaaaga

SEQ ID NO: 754347 - DNA, 33 bp, Homo sapien
atcactttttccctagaattcaggattgatgag

SEQ ID NO: 754348 - DNA, 33 bp, Homo sapien
atcactttttccctagcattcaggattgatgag

SEQ ID NO: 754349 - DNA, 33 bp, Homo sapien
tggaatgccctgtttacaatatgctttaatgag

SEQ ID NO: 754350 - DNA, 33 bp, Homo sapien
tggaatgccctgtttataatatgctttaatgag

SEQ ID NO: 754351 - DNA, 33 bp, Homo sapien
tgtgaacaggaaaaagacgtatgagtcctcagg

SEQ ID NO: 754352 - DNA, 33 bp, Homo sapien
tgtgaacaggaaaaaggcgtatgagtcctcagg

SEQ ID NO: 754353 - DNA, 33 bp, Homo sapien
tatgtgaggggattcaaatgaaaatgcctgccc

SEQ ID NO: 754354 - DNA, 33 bp, Homo sapien
tatgtgaggggattcagatgaaaatgcctgccc

SEQ ID NO: 754355 - DNA, 33 bp, Homo sapien
taaagagtgaaaacccaaagtagagaaacaata

SEQ ID NO: 754356 - DNA, 33 bp, Homo sapien
taaagagtgaaaacccgaagtagagaaacaata

SEQ ID NO: 754357 - DNA, 33 bp, Homo sapien
tgccaagatgctttaaaagtagtgaaaatggaa

SEQ ID NO: 754358 - DNA, 33 bp, Homo sapien
tgccaagatgctttaagagtagtgaaaatggaa

SEQ ID NO: 754359 - DNA, 33 bp, Homo sapien
tacacagctaaaatcaatcctttcacttttccg

SEQ ID NO: 754360 - DNA, 33 bp, Homo sapien
tacacagctaaaatcagtcctttcacttttccg

SEQ ID NO: 754361 - DNA, 33 bp, Homo sapien
tctaccatccaggtgactaagttatgcagaata

SEQ ID NO: 754362 - DNA, 33 bp, Homo sapien
tctaccatccaggtgattaagttatgcagaata

SEQ ID NO: 754363 - DNA, 33 bp, Homo sapien
agagaaacctgcatcaagagcaaatgaactgcc

SEQ ID NO: 754364 - DNA, 33 bp, Homo sapien
agagaaacctgcatcaggagcaaatgaactgcc

SEQ ID NO: 754365 - DNA, 33 bp, Homo sapien
tttaaaagcgttaacacatggttttatcagatt

SEQ ID NO: 754366 - DNA, 33 bp, Homo sapien
tttaaaagcgttaacatatggttttatcagatt

SEQ ID NO: 754367 - DNA, 33 bp, Homo sapien
tttgtggaattcataaatagcaatgtgtttaac

SEQ ID NO: 754368 - DNA, 33 bp, Homo sapien
tttgtggaattcataagtagcaatgtgtttaac

SEQ ID NO: 754369 - DNA, 33 bp, Homo sapien
ttgtatgagaagatccaaaacatgtggacgatg

SEQ ID NO: 754370 - DNA, 33 bp, Homo sapien
ttgtatgagaagatccgaaacatgtggacgatg

SEQ ID NO: 754371 - DNA, 33 bp, Homo sapien
agattctactgaaatacggcagaacatcccttc

SEQ ID NO: 754372 - DNA, 33 bp, Homo sapien
agattctactgaaatatggcagaacatcccttc

SEQ ID NO: 754373 - DNA, 33 bp, Homo sapien
agtccagggacgctgaaggtttataggttttta

SEQ ID NO: 754374 - DNA, 33 bp, Homo sapien
agtccagggacgctgagggtttataggttttta

SEQ ID NO: 754375 - DNA, 33 bp, Homo sapien
gtacctgaatgattggaagagccatggcgagga

SEQ ID NO: 754376 - DNA, 33 bp, Homo sapien
gtacctgaatgattgggagagccatggcgagga

SEQ ID NO: 754377 - DNA, 33 bp, Homo sapien
ggtgtggacaccgatgaaagcaccgagcatccg

SEQ ID NO: 754378 - DNA, 33 bp, Homo sapien
ggtgtggacaccgatggaagcaccgagcatccg

SEQ ID NO: 754379 - DNA, 33 bp, Homo sapien
agcctcaagaataaaaaacttactggcaaaata

SEQ ID NO: 754380 - DNA, 33 bp, Homo sapien
agcctcaagaataaaacacttactggcaaaata

SEQ ID NO: 754381 - DNA, 33 bp, Homo sapien
gcccaggcctctgagacggaacgcttggagctc

SEQ ID NO: 754382 - DNA, 33 bp, Homo sapien
gcccaggcctctgagatggaacgcttggagctc

SEQ ID NO: 754383 - DNA, 33 bp, Homo sapien
cacttgaaccagcaagaaaaagcctgaagcaca

SEQ ID NO: 754384 - DNA, 33 bp, Homo sapien
cacttgaaccagcaaggaaaagcctgaagcaca

SEQ ID NO: 754385 - DNA, 33 bp, Homo sapien
attttgcccaactggacgcaaatataagtgctc

SEQ ID NO: 754386 - DNA, 33 bp, Homo sapien
attttgcccaactggatgcaaatataagtgctc

SEQ ID NO: 754387 - DNA, 33 bp, Homo sapien
tgctaagcccccatcacagtggtttgtttaggg

SEQ ID NO: 754388 - DNA, 33 bp, Homo sapien
tgctaagcccccatcatagtggtttgtttaggg

SEQ ID NO: 754389 - DNA, 33 bp, Homo sapien
cagtcatcggattaggccagctctaatccggtg

SEQ ID NO: 754390 - DNA, 33 bp, Homo sapien
cagtcatcggattaggtcagctctaatccggtg

SEQ ID NO: 754391 - DNA, 33 bp, Homo sapien
ggttgttttatggaaccctggtttagtagctgg

SEQ ID NO: 754392 - DNA, 33 bp, Homo sapien
ggttgttttatggaactctggtttagtagctgg

SEQ ID NO: 754393 - DNA, 33 bp, Homo sapien
ggctgagcagtgagacagatgctttggaacaat

SEQ ID NO: 754394 - DNA, 33 bp, Homo sapien
ggctgagcagtgagacggatgctttggaacaat

SEQ ID NO: 754395 - DNA, 33 bp, Homo sapien
gcttcgtctgtctttacggccactccccattgg

SEQ ID NO: 754396 - DNA, 33 bp, Homo sapien
gcttcgtctgtctttatggccactccccattgg

SEQ ID NO: 754397 - DNA, 33 bp, Homo sapien
tagggtctaccactcacggacctccagacatag

SEQ ID NO: 754398 - DNA, 33 bp, Homo sapien
tagggtctaccactcatggacctccagacatag

SEQ ID NO: 754399 - DNA, 33 bp, Homo sapien
tgttaacatttcggctcaagttagcttattcat

SEQ ID NO: 754400 - DNA, 33 bp, Homo sapien
tgttaacatttcggcttaagttagcttattcat

SEQ ID NO: 754401 - DNA, 33 bp, Homo sapien
agccaaggtcacggtaaaacacctgatgagtca

SEQ ID NO: 754402 - DNA, 33 bp, Homo sapien
agccaaggtcacggtagaacacctgatgagtca

SEQ ID NO: 754403 - DNA, 33 bp, Homo sapien
agtgttgtttagtgtgaaatggcaaaaaccaac

SEQ ID NO: 754404 - DNA, 33 bp, Homo sapien
agtgttgtttagtgtggaatggcaaaaaccaac

SEQ ID NO: 754405 - DNA, 33 bp, Homo sapien
agggcaggaagagggcacattactgcctcacac

SEQ ID NO: 754406 - DNA, 33 bp, Homo sapien
agggcaggaagagggcgcattactgcctcacac

SEQ ID NO: 754407 - DNA, 33 bp, Homo sapien
cagacctggatgggaacctaagagtctgggcaa

SEQ ID NO: 754408 - DNA, 33 bp, Homo sapien
cagacctggatgggaagctaagagtctgggcaa

SEQ ID NO: 754409 - DNA, 33 bp, Homo sapien
tccatgatattcacaagtacgttaacttgtaca

SEQ ID NO: 754410 - DNA, 33 bp, Homo sapien
tccatgatattcacaattacgttaacttgtaca

SEQ ID NO: 754411 - DNA, 33 bp, Homo sapien
attcctgttaacacacaatcagtccatcctatg

SEQ ID NO: 754412 - DNA, 33 bp, Homo sapien
attcctgttaacacacgatcagtccatcctatg

SEQ ID NO: 754413 - DNA, 33 bp, Homo sapien
catagcttatactgcaacatggcaagcatagtt

SEQ ID NO: 754414 - DNA, 33 bp, Homo sapien
catagcttatactgcagcatggcaagcatagtt

SEQ ID NO: 754415 - DNA, 33 bp, Homo sapien
aaagaggtttatggctcacatacctgcatttta

SEQ ID NO: 754416 - DNA, 33 bp, Homo sapien
aaagaggtttatggcttacatacctgcatttta

SEQ ID NO: 754417 - DNA, 33 bp, Homo sapien
taccaagcagttttgacccaaatgtagtatctc

SEQ ID NO: 754418 - DNA, 33 bp, Homo sapien
taccaagcagttttgatccaaatgtagtatctc

SEQ ID NO: 754419 - DNA, 33 bp, Homo sapien
ctttatgaaaaaaaataacttcacaatccaggt

SEQ ID NO: 754420 - DNA, 33 bp, Homo sapien
ctttatgaaaaaaaatgacttcacaatccaggt

SEQ ID NO: 754421 - DNA, 33 bp, Homo sapien
aaaatagtgcctggaaagatgttcttcattaac

SEQ ID NO: 754422 - DNA, 33 bp, Homo sapien
aaaatagtgcctggaaggatgttcttcattaac

SEQ ID NO: 754423 - DNA, 33 bp, Homo sapien
ttggaactatagaaaaatgtcaccatgtcaatg

SEQ ID NO: 754424 - DNA, 33 bp, Homo sapien
ttggaactatagaaaagtgtcaccatgtcaatg

SEQ ID NO: 754425 - DNA, 33 bp, Homo sapien
cacgtaggtgacttgccatgcccagtagcctgc

SEQ ID NO: 754426 - DNA, 33 bp, Homo sapien
cacgtaggtgacttgctatgcccagtagcctgc

SEQ ID NO: 754427 - DNA, 33 bp, Homo sapien
tgtgtctgtgtgcttacatacctacagttgcat

SEQ ID NO: 754428 - DNA, 33 bp, Homo sapien
tgtgtctgtgtgcttatatacctacagttgcat

SEQ ID NO: 754429 - DNA, 33 bp, Homo sapien
aatgaatgccttaccaaaacagacattctgaaa

SEQ ID NO: 754430 - DNA, 33 bp, Homo sapien
aatgaatgccttaccagaacagacattctgaaa

SEQ ID NO: 754431 - DNA, 33 bp, Homo sapien
ggtgtgtcttgaggcacagttaggtggaagaaa

SEQ ID NO: 754432 - DNA, 33 bp, Homo sapien
ggtgtgtcttgaggcatagttaggtggaagaaa

SEQ ID NO: 754433 - DNA, 33 bp, Homo sapien
gcagctgaagctaatccctaactggtacagtgc

SEQ ID NO: 754434 - DNA, 33 bp, Homo sapien
gcagctgaagctaatctctaactggtacagtgc

SEQ ID NO: 754435 - DNA, 33 bp, Homo sapien
cagtattttagctaccaggatgtcgcatgatat

SEQ ID NO: 754436 - DNA, 33 bp, Homo sapien
cagtattttagctacctggatgtcgcatgatat

SEQ ID NO: 754437 - DNA, 33 bp, Homo sapien
agctgaaaggaggaagccagacacttatctgat

SEQ ID NO: 754438 - DNA, 33 bp, Homo sapien
agctgaaaggaggaaggcagacacttatctgat

SEQ ID NO: 754439 - DNA, 33 bp, Homo sapien
tctcagggtgggccgcaaaggcagccagccaga

SEQ ID NO: 754440 - DNA, 33 bp, Homo sapien
tctcagggtgggccgcgaaggcagccagccaga

SEQ ID NO: 754441 - DNA, 33 bp, Homo sapien
cagttcagcaaaaccaaccactgaatagaaact

SEQ ID NO: 754442 - DNA, 33 bp, Homo sapien
cagttcagcaaaaccatccactgaatagaaact

SEQ ID NO: 754443 - DNA, 33 bp, Homo sapien
attagatatggagagaagactaaaactccactg

SEQ ID NO: 754444 - DNA, 33 bp, Homo sapien
attagatatggagagaggactaaaactccactg

SEQ ID NO: 754445 - DNA, 33 bp, Homo sapien
catcaattcataatcaccctaagagagagcagg

SEQ ID NO: 754446 - DNA, 33 bp, Homo sapien
catcaattcataatcatcctaagagagagcagg

SEQ ID NO: 754447 - DNA, 33 bp, Homo sapien
gcaaagccccacagctaaatggcgtaccgcaga

SEQ ID NO: 754448 - DNA, 33 bp, Homo sapien
gcaaagccccacagctgaatggcgtaccgcaga

SEQ ID NO: 754449 - DNA, 33 bp, Homo sapien
aactaatgaataaagaagatctgaattttactt

SEQ ID NO: 754450 - DNA, 33 bp, Homo sapien
aactaatgaataaagaggatctgaattttactt

SEQ ID NO: 754451 - DNA, 33 bp, Homo sapien
tttatccagtcaaacaatattaaccatcgagtt

SEQ ID NO: 754452 - DNA, 33 bp, Homo sapien
tttatccagtcaaacagtattaaccatcgagtt

SEQ ID NO: 754453 - DNA, 33 bp, Homo sapien
aagaagagaccacaaaagaatctagggaggaga

SEQ ID NO: 754454 - DNA, 33 bp, Homo sapien
aagaagagaccacaaaggaatctagggaggaga

SEQ ID NO: 754455 - DNA, 33 bp, Homo sapien
aatcttcaaatgattacgtatcaggaaactgaa

SEQ ID NO: 754456 - DNA, 33 bp, Homo sapien
aatcttcaaatgattatgtatcaggaaactgaa

SEQ ID NO: 754457 - DNA, 33 bp, Homo sapien
atcaattgcctagtaacgtaaacacttgggatt

SEQ ID NO: 754458 - DNA, 33 bp, Homo sapien
atcaattgcctagtaatgtaaacacttgggatt

SEQ ID NO: 754459 - DNA, 33 bp, Homo sapien
atcattaactttcaaccacttttctaaaatgca

SEQ ID NO: 754460 - DNA, 33 bp, Homo sapien
atcattaactttcaacgacttttctaaaatgca

SEQ ID NO: 754461 - DNA, 33 bp, Homo sapien
gtgcaggagaatataacaagttttttgattcat

SEQ ID NO: 754462 - DNA, 33 bp, Homo sapien
gtgcaggagaatataagaagttttttgattcat

SEQ ID NO: 754463 - DNA, 33 bp, Homo sapien
tgtaatctcaagggtcaaagtggatgagaaaat

SEQ ID NO: 754464 - DNA, 33 bp, Homo sapien
tgtaatctcaagggtcgaagtggatgagaaaat

SEQ ID NO: 754465 - DNA, 33 bp, Homo sapien
gtttatgcagttgtggaacatagtggttgtgct

SEQ ID NO: 754466 - DNA, 33 bp, Homo sapien
gtttatgcagttgtggcacatagtggttgtgct

SEQ ID NO: 754467 - DNA, 33 bp, Homo sapien
caaaatccagattacaaattggatgtggtatta

SEQ ID NO: 754468 - DNA, 33 bp, Homo sapien
caaaatccagattacagattggatgtggtatta

SEQ ID NO: 754469 - DNA, 33 bp, Homo sapien
ctgtaaagaagcagaagcactttatagcagaga

SEQ ID NO: 754470 - DNA, 33 bp, Homo sapien
ctgtaaagaagcagaatcactttatagcagaga

SEQ ID NO: 754471 - DNA, 33 bp, Homo sapien
tatgaagcaaatgaagaagctcaaaaggaaggc

SEQ ID NO: 754472 - DNA, 33 bp, Homo sapien
tatgaagcaaatgaagcagctcaaaaggaaggc

SEQ ID NO: 754473 - DNA, 33 bp, Homo sapien
tctcacagttccctaactcagaagcctgtggag

SEQ ID NO: 754474 - DNA, 33 bp, Homo sapien
tctcacagttccctaattcagaagcctgtggag

SEQ ID NO: 754475 - DNA, 33 bp, Homo sapien
aagtagctattatccaaataggttagtgggttt

SEQ ID NO: 754476 - DNA, 33 bp, Homo sapien
aagtagctattatccacataggttagtgggttt

SEQ ID NO: 754477 - DNA, 33 bp, Homo sapien
cccggcccgacaaacaacctgaacttccccaga

SEQ ID NO: 754478 - DNA, 33 bp, Homo sapien
cccggcccgacaaacagcctgaacttccccaga

SEQ ID NO: 754479 - DNA, 33 bp, Homo sapien
gtataaaaattttgtacggtgagaagcaaatac

SEQ ID NO: 754480 - DNA, 33 bp, Homo sapien
gtataaaaattttgtatggtgagaagcaaatac

SEQ ID NO: 754481 - DNA, 33 bp, Homo sapien
ctcctttaggcctcacagatatattttgttctg

SEQ ID NO: 754482 - DNA, 33 bp, Homo sapien
ctcctttaggcctcacggatatattttgttctg

SEQ ID NO: 754483 - DNA, 33 bp, Homo sapien
agttcaaggaaggagcaacgtctgaagaagttg

SEQ ID NO: 754484 - DNA, 33 bp, Homo sapien
agttcaaggaaggagcgacgtctgaagaagttg

SEQ ID NO: 754485 - DNA, 33 bp, Homo sapien
ccttcttgttcatccacaagagtgattcaattt

SEQ ID NO: 754486 - DNA, 33 bp, Homo sapien
ccttcttgttcatccataagagtgattcaattt

SEQ ID NO: 754487 - DNA, 33 bp, Homo sapien
ttgtagatggttttccgcgctattccacactgg

SEQ ID NO: 754488 - DNA, 33 bp, Homo sapien
ttgtagatggttttcctcgctattccacactgg

SEQ ID NO: 754489 - DNA, 33 bp, Homo sapien
cataacaaaagagatcagaaaatgcatggtgtg

SEQ ID NO: 754490 - DNA, 33 bp, Homo sapien
cataacaaaagagatcggaaaatgcatggtgtg

SEQ ID NO: 754491 - DNA, 33 bp, Homo sapien
ccttacttggccctgcactctttgggtggtcct

SEQ ID NO: 754492 - DNA, 33 bp, Homo sapien
ccttacttggccctgcgctctttgggtggtcct

SEQ ID NO: 754493 - DNA, 33 bp, Homo sapien
atgggcttccctggaacgagtgagaaaagattg

SEQ ID NO: 754494 - DNA, 33 bp, Homo sapien
atgggcttccctggaatgagtgagaaaagattg

SEQ ID NO: 754495 - DNA, 33 bp, Homo sapien
atgtgagaaagacagaaggatgcaccaggacat

SEQ ID NO: 754496 - DNA, 33 bp, Homo sapien
atgtgagaaagacagagggatgcaccaggacat

SEQ ID NO: 754497 - DNA, 33 bp, Homo sapien
agttgatctgtgtatacgatgtaaagaaggagt

SEQ ID NO: 754498 - DNA, 33 bp, Homo sapien
agttgatctgtgtatatgatgtaaagaaggagt

SEQ ID NO: 754499 - DNA, 33 bp, Homo sapien
ccccagaactggcttacgtagccttgaggctga

SEQ ID NO: 754500 - DNA, 33 bp, Homo sapien
ccccagaactggcttatgtagccttgaggctga

SEQ ID NO: 754501 - DNA, 33 bp, Homo sapien
tcaaattgagtgccacagcaataagagcttatg

SEQ ID NO: 754502 - DNA, 33 bp, Homo sapien
tcaaattgagtgccaccgcaataagagcttatg

SEQ ID NO: 754503 - DNA, 33 bp, Homo sapien
ctgtcgtaggcagcgacggggatgttgccaagc

SEQ ID NO: 754504 - DNA, 33 bp, Homo sapien
ctgtcgtaggcagcgatggggatgttgccaagc

SEQ ID NO: 754505 - DNA, 33 bp, Homo sapien
atgcaaatagactttcaagcaccccatgctgac

SEQ ID NO: 754506 - DNA, 33 bp, Homo sapien
atgcaaatagactttccagcaccccatgctgac

SEQ ID NO: 754507 - DNA, 33 bp, Homo sapien
ttctcacaccccagaaatggatttggactttcc

SEQ ID NO: 754508 - DNA, 33 bp, Homo sapien
ttctcacaccccagaagtggatttggactttcc

SEQ ID NO: 754509 - DNA, 33 bp, Homo sapien
agatcgtttagagatacacacttaatccttcaa

SEQ ID NO: 754510 - DNA, 33 bp, Homo sapien
agatcgtttagagatatacacttaatccttcaa

SEQ ID NO: 754511 - DNA, 33 bp, Homo sapien
cctacgttctcacgtcagaacatgctcctgtta

SEQ ID NO: 754512 - DNA, 33 bp, Homo sapien
cctacgttctcacgtcggaacatgctcctgtta

SEQ ID NO: 754513 - DNA, 33 bp, Homo sapien
acccacccatccattggagtagtaggacagaca

SEQ ID NO: 754514 - DNA, 33 bp, Homo sapien
acccacccatccattgtagtagtaggacagaca

SEQ ID NO: 754515 - DNA, 33 bp, Homo sapien
agaactcagttaagcacgtacttgatcctcttc

SEQ ID NO: 754516 - DNA, 33 bp, Homo sapien
agaactcagttaagcatgtacttgatcctcttc

SEQ ID NO: 754517 - DNA, 33 bp, Homo sapien
ggggactcccgaggcacctttctgttttgtaac

SEQ ID NO: 754518 - DNA, 33 bp, Homo sapien
ggggactcccgaggcatctttctgttttgtaac

SEQ ID NO: 754519 - DNA, 33 bp, Homo sapien
gaaacttagagtcagcagaaaagaatgttttaa

SEQ ID NO: 754520 - DNA, 33 bp, Homo sapien
gaaacttagagtcagcggaaaagaatgttttaa

SEQ ID NO: 754521 - DNA, 33 bp, Homo sapien
ttgttttctgaatgataaagatgcagagatgca

SEQ ID NO: 754522 - DNA, 33 bp, Homo sapien
ttgttttctgaatgattaagatgcagagatgca

SEQ ID NO: 754523 - DNA, 33 bp, Homo sapien
catggtaatatagacacgagaaccacctggatt

SEQ ID NO: 754524 - DNA, 33 bp, Homo sapien
catggtaatatagacatgagaaccacctggatt

SEQ ID NO: 754525 - DNA, 33 bp, Homo sapien
aagtgcaacaaagcaaaacataatagttctacc

SEQ ID NO: 754526 - DNA, 33 bp, Homo sapien
aagtgcaacaaagcaagacataatagttctacc

SEQ ID NO: 754527 - DNA, 33 bp, Homo sapien
acactttttatgttctcactctttgggtgacaa

SEQ ID NO: 754528 - DNA, 33 bp, Homo sapien
acactttttatgttcttactctttgggtgacaa

SEQ ID NO: 754529 - DNA, 33 bp, Homo sapien
gctgtggctcctgagaggggtatctgagaagcc

SEQ ID NO: 754530 - DNA, 33 bp, Homo sapien
gctgtggctcctgagatgggtatctgagaagcc

SEQ ID NO: 754531 - DNA, 33 bp, Homo sapien
cacgtggaggatgatcactttttactcttttcc

SEQ ID NO: 754532 - DNA, 33 bp, Homo sapien
cacgtggaggatgatccctttttactcttttcc

SEQ ID NO: 754533 - DNA, 33 bp, Homo sapien
ttttgtttgtgttgtcaaagataagtcggctgt

SEQ ID NO: 754534 - DNA, 33 bp, Homo sapien
ttttgtttgtgttgtcgaagataagtcggctgt

SEQ ID NO: 754535 - DNA, 33 bp, Homo sapien
ttgatttacatttccccgataattagtaatgtt

SEQ ID NO: 754536 - DNA, 33 bp, Homo sapien
ttgatttacatttccctgataattagtaatgtt

SEQ ID NO: 754537 - DNA, 33 bp, Homo sapien
tagctggactttcgtacccattaattaatcttt

SEQ ID NO: 754538 - DNA, 33 bp, Homo sapien
tagctggactttcgtatccattaattaatcttt

SEQ ID NO: 754539 - DNA, 33 bp, Homo sapien
aattgctacaaagagactaagaaacctaggaat

SEQ ID NO: 754540 - DNA, 33 bp, Homo sapien
aattgctacaaagagattaagaaacctaggaat

SEQ ID NO: 754541 - DNA, 33 bp, Homo sapien
tccccatcatctgaaacgaggtgccatttacag

SEQ ID NO: 754542 - DNA, 33 bp, Homo sapien
tccccatcatctgaaaggaggtgccatttacag

SEQ ID NO: 754543 - DNA, 33 bp, Homo sapien
ctgaatgaacttctcaacttattctaatcagca

SEQ ID NO: 754544 - DNA, 33 bp, Homo sapien
ctgaatgaacttctcagcttattctaatcagca

SEQ ID NO: 754545 - DNA, 33 bp, Homo sapien
gactccaccactgtagaaagagatgtcagaacc

SEQ ID NO: 754546 - DNA, 33 bp, Homo sapien
gactccaccactgtaggaagagatgtcagaacc

SEQ ID NO: 754547 - DNA, 33 bp, Homo sapien
atgaaagttaccagaccgaaaatactgattaac

SEQ ID NO: 754548 - DNA, 33 bp, Homo sapien
atgaaagttaccagactgaaaatactgattaac

SEQ ID NO: 754549 - DNA, 33 bp, Homo sapien
ttttcatgaaatgccacgttttgctttaatctc

SEQ ID NO: 754550 - DNA, 33 bp, Homo sapien
ttttcatgaaatgccatgttttgctttaatctc

SEQ ID NO: 754551 - DNA, 33 bp, Homo sapien
tgctcccatctctagtaaagccagtgacaaatc

SEQ ID NO: 754552 - DNA, 33 bp, Homo sapien
tgctcccatctctagtcaagccagtgacaaatc

SEQ ID NO: 754553 - DNA, 33 bp, Homo sapien
ggaaatggaggccacacagtctcttgtcacctg

SEQ ID NO: 754554 - DNA, 33 bp, Homo sapien
ggaaatggaggccacatagtctcttgtcacctg

SEQ ID NO: 754555 - DNA, 33 bp, Homo sapien
aaacaattcaatgtttaaaaagcgttaactcca

SEQ ID NO: 754556 - DNA, 33 bp, Homo sapien
aaacaattcaatgttttaaaagcgttaactcca

SEQ ID NO: 754557 - DNA, 33 bp, Homo sapien
tctctgaatgtcaataactcgttgttcctattg

SEQ ID NO: 754558 - DNA, 33 bp, Homo sapien
tctctgaatgtcaatacctcgttgttcctattg

SEQ ID NO: 754559 - DNA, 33 bp, Homo sapien
tagaggaagggacctacggtgctgagcctgaga

SEQ ID NO: 754560 - DNA, 33 bp, Homo sapien
tagaggaagggacctatggtgctgagcctgaga

SEQ ID NO: 754561 - DNA, 33 bp, Homo sapien
ggaaattaggtttccaatgaaaacaaggacatc

SEQ ID NO: 754562 - DNA, 33 bp, Homo sapien
ggaaattaggtttccagtgaaaacaaggacatc

SEQ ID NO: 754563 - DNA, 33 bp, Homo sapien
gatagtcatggaaacacggtaagtgacgtgaca

SEQ ID NO: 754564 - DNA, 33 bp, Homo sapien
gatagtcatggaaacatggtaagtgacgtgaca

SEQ ID NO: 754565 - DNA, 33 bp, Homo sapien
taaaatatggctaacacaactgaggaattaatt

SEQ ID NO: 754566 - DNA, 33 bp, Homo sapien
taaaatatggctaacataactgaggaattaatt

SEQ ID NO: 754567 - DNA, 33 bp, Homo sapien
tctgtgcacaaacacaaggaatcctggtagtca

SEQ ID NO: 754568 - DNA, 33 bp, Homo sapien
tctgtgcacaaacacagggaatcctggtagtca

SEQ ID NO: 754569 - DNA, 33 bp, Homo sapien
acttggggacatggagaaagttggtgaccttga

SEQ ID NO: 754570 - DNA, 33 bp, Homo sapien
acttggggacatggaggaagttggtgaccttga

SEQ ID NO: 754571 - DNA, 33 bp, Homo sapien
ggacagcaggcattaaaagattccagtaaagaa

SEQ ID NO: 754572 - DNA, 33 bp, Homo sapien
ggacagcaggcattaagagattccagtaaagaa

SEQ ID NO: 754573 - DNA, 33 bp, Homo sapien
catttacacaccctaaatcagagccgcaaatct

SEQ ID NO: 754574 - DNA, 33 bp, Homo sapien
catttacacaccctaactcagagccgcaaatct

SEQ ID NO: 754575 - DNA, 33 bp, Homo sapien
tttgtcctagagaagcaaaaagcagtaacattt

SEQ ID NO: 754576 - DNA, 33 bp, Homo sapien
tttgtcctagagaagcgaaaagcagtaacattt

SEQ ID NO: 754577 - DNA, 33 bp, Homo sapien
attacattagaaacagaaattattaggccagat

SEQ ID NO: 754578 - DNA, 33 bp, Homo sapien
attacattagaaacaggaattattaggccagat

SEQ ID NO: 754579 - DNA, 33 bp, Homo sapien
tggaaatgttttgagaaagcaccatttttaatt

SEQ ID NO: 754580 - DNA, 33 bp, Homo sapien
tggaaatgttttgagagagcaccatttttaatt

SEQ ID NO: 754581 - DNA, 33 bp, Homo sapien
ccaatgtctgatagcacgagttaaggcaactct

SEQ ID NO: 754582 - DNA, 33 bp, Homo sapien
ccaatgtctgatagcatgagttaaggcaactct

SEQ ID NO: 754583 - DNA, 33 bp, Homo sapien
tattttggatctattaagggagtagtactaaat

SEQ ID NO: 754584 - DNA, 33 bp, Homo sapien
tattttggatctattacgggagtagtactaaat

SEQ ID NO: 754585 - DNA, 33 bp, Homo sapien
tgctcctacaccagtacgttcctctcgaagtcc

SEQ ID NO: 754586 - DNA, 33 bp, Homo sapien
tgctcctacaccagtatgttcctctcgaagtcc

SEQ ID NO: 754587 - DNA, 33 bp, Homo sapien
ggtggttggacattgacaggagcaaattagcag

SEQ ID NO: 754588 - DNA, 33 bp, Homo sapien
ggtggttggacattgagaggagcaaattagcag

SEQ ID NO: 754589 - DNA, 33 bp, Homo sapien
tagagagagagagaaacgtgttcaaagcagcaa

SEQ ID NO: 754590 - DNA, 33 bp, Homo sapien
tagagagagagagaaatgtgttcaaagcagcaa

SEQ ID NO: 754591 - DNA, 33 bp, Homo sapien
ctccatatttcagaaaagtcaaagtctagatgg

SEQ ID NO: 754592 - DNA, 33 bp, Homo sapien
ctccatatttcagaaacgtcaaagtctagatgg

SEQ ID NO: 754593 - DNA, 33 bp, Homo sapien
taaaatggtatctgaccagttttctataaaggt

SEQ ID NO: 754594 - DNA, 33 bp, Homo sapien
taaaatggtatctgactagttttctataaaggt

SEQ ID NO: 754595 - DNA, 33 bp, Homo sapien
aggagtagtagagtagcagatggaacactgaga

SEQ ID NO: 754596 - DNA, 33 bp, Homo sapien
aggagtagtagagtaggagatggaacactgaga

SEQ ID NO: 754597 - DNA, 33 bp, Homo sapien
ggagcgctattgcttgcacaaagtctgctgtgg

SEQ ID NO: 754598 - DNA, 33 bp, Homo sapien
ggagcgctattgcttggacaaagtctgctgtgg

SEQ ID NO: 754599 - DNA, 33 bp, Homo sapien
acttgcaaggtatttgcacattgacttgtctta

SEQ ID NO: 754600 - DNA, 33 bp, Homo sapien
acttgcaaggtatttgtacattgacttgtctta

SEQ ID NO: 754601 - DNA, 33 bp, Homo sapien
ttgaatgaagaaccagcatttttttgagaggtc

SEQ ID NO: 754602 - DNA, 33 bp, Homo sapien
ttgaatgaagaaccaggatttttttgagaggtc

SEQ ID NO: 754603 - DNA, 33 bp, Homo sapien
tctctctaaataaaacagccctcaaccactcac

SEQ ID NO: 754604 - DNA, 33 bp, Homo sapien
tctctctaaataaaacggccctcaaccactcac

SEQ ID NO: 754605 - DNA, 33 bp, Homo sapien
cttctttttatgggacacatcaaaaagagccta

SEQ ID NO: 754606 - DNA, 33 bp, Homo sapien
cttctttttatgggacgcatcaaaaagagccta

SEQ ID NO: 754607 - DNA, 33 bp, Homo sapien
tgtcagttgattacaaggttaaaatttcaacat

SEQ ID NO: 754608 - DNA, 33 bp, Homo sapien
tgtcagttgattacaatgttaaaatttcaacat

SEQ ID NO: 754609 - DNA, 33 bp, Homo sapien
taagcgcaaagtaaaaatgctacactcaagaaa

SEQ ID NO: 754610 - DNA, 33 bp, Homo sapien
taagcgcaaagtaaaactgctacactcaagaaa

SEQ ID NO: 754611 - DNA, 33 bp, Homo sapien
ttcctgttttcttctcacgtgtctaactgtatt

SEQ ID NO: 754612 - DNA, 33 bp, Homo sapien
ttcctgttttcttctcgcgtgtctaactgtatt

SEQ ID NO: 754613 - DNA, 33 bp, Homo sapien
ttcaaacacattcaacaattaagccaaggcttt

SEQ ID NO: 754614 - DNA, 33 bp, Homo sapien
ttcaaacacattcaacgattaagccaaggcttt

SEQ ID NO: 754615 - DNA, 33 bp, Homo sapien
tatgccatgaagctagcacagcaacatcagttt

SEQ ID NO: 754616 - DNA, 33 bp, Homo sapien
tatgccatgaagctaggacagcaacatcagttt

SEQ ID NO: 754617 - DNA, 33 bp, Homo sapien
catcagttttgcactccgagaaaccagcccgaa

SEQ ID NO: 754618 - DNA, 33 bp, Homo sapien
catcagttttgcactctgagaaaccagcccgaa

SEQ ID NO: 754619 - DNA, 33 bp, Homo sapien
gagaaaccagcccgaaagtgaagacagtattta

SEQ ID NO: 754620 - DNA, 33 bp, Homo sapien
gagaaaccagcccgaaggtgaagacagtattta

SEQ ID NO: 754621 - DNA, 33 bp, Homo sapien
tttcaaatagtgtgtcagaaaacctttaaaaaa

SEQ ID NO: 754622 - DNA, 33 bp, Homo sapien
tttcaaatagtgtgtctgaaaacctttaaaaaa

SEQ ID NO: 754623 - DNA, 33 bp, Homo sapien
tgtgaaatatatttgacaaagaaacaagaagta

SEQ ID NO: 754624 - DNA, 33 bp, Homo sapien
tgtgaaatatatttgagaaagaaacaagaagta

SEQ ID NO: 754625 - DNA, 33 bp, Homo sapien
gctgaaagccattgaacgaaggtgtgcactgaa

SEQ ID NO: 754626 - DNA, 33 bp, Homo sapien
gctgaaagccattgaatgaaggtgtgcactgaa

SEQ ID NO: 754627 - DNA, 33 bp, Homo sapien
ctcttcacatgggcccactaattctgccagagc

SEQ ID NO: 754628 - DNA, 33 bp, Homo sapien
ctcttcacatgggcccgctaattctgccagagc

SEQ ID NO: 754629 - DNA, 33 bp, Homo sapien
tgatctcctgctctccacctgcttgcacagaga

SEQ ID NO: 754630 - DNA, 33 bp, Homo sapien
tgatctcctgctctccgcctgcttgcacagaga

SEQ ID NO: 754631 - DNA, 33 bp, Homo sapien
ctgtgcacaccactccagctattctaactccca

SEQ ID NO: 754632 - DNA, 33 bp, Homo sapien
ctgtgcacaccactccggctattctaactccca

SEQ ID NO: 754633 - DNA, 33 bp, Homo sapien
gttacagagcacaaaagttccaatccatcaatg

SEQ ID NO: 754634 - DNA, 33 bp, Homo sapien
gttacagagcacaaaatttccaatccatcaatg

SEQ ID NO: 754635 - DNA, 33 bp, Homo sapien
aaagttccatacattccctctcaagtatatgac

SEQ ID NO: 754636 - DNA, 33 bp, Homo sapien
aaagttccatacattctctctcaagtatatgac

SEQ ID NO: 754637 - DNA, 33 bp, Homo sapien
ttttcaaacagccaaaacgttgggtctctctga

SEQ ID NO: 754638 - DNA, 33 bp, Homo sapien
ttttcaaacagccaaagcgttgggtctctctga

SEQ ID NO: 754639 - DNA, 33 bp, Homo sapien
ccaatttctgaatgaaagccatctttgcaacac

SEQ ID NO: 754640 - DNA, 33 bp, Homo sapien
ccaatttctgaatgaaggccatctttgcaacac

SEQ ID NO: 754641 - DNA, 33 bp, Homo sapien
tgcttagcaaactaagaataacagttctatcca

SEQ ID NO: 754642 - DNA, 33 bp, Homo sapien
tgcttagcaaactaaggataacagttctatcca

SEQ ID NO: 754643 - DNA, 33 bp, Homo sapien
cactaaagcacaatagaattaaaggcattttat

SEQ ID NO: 754644 - DNA, 33 bp, Homo sapien
cactaaagcacaatagcattaaaggcattttat

SEQ ID NO: 754645 - DNA, 33 bp, Homo sapien
ataatgtgctaataaacgttatatcctgcctgt

SEQ ID NO: 754646 - DNA, 33 bp, Homo sapien
ataatgtgctaataaatgttatatcctgcctgt

SEQ ID NO: 754647 - DNA, 33 bp, Homo sapien
aaataaaaagataaggcaacgacttgctgaaaa

SEQ ID NO: 754648 - DNA, 33 bp, Homo sapien
aaataaaaagataagggaacgacttgctgaaaa

SEQ ID NO: 754649 - DNA, 33 bp, Homo sapien
ttacttaatccccataaaaatcctatgtggcag

SEQ ID NO: 754650 - DNA, 33 bp, Homo sapien
ttacttaatccccatacaaatcctatgtggcag

SEQ ID NO: 754651 - DNA, 33 bp, Homo sapien
attagggtagactcacagacggaagaccatgtg

SEQ ID NO: 754652 - DNA, 33 bp, Homo sapien
attagggtagactcacggacggaagaccatgtg

SEQ ID NO: 754653 - DNA, 33 bp, Homo sapien
actcctgagatctccaagtagaaatattaggga

SEQ ID NO: 754654 - DNA, 33 bp, Homo sapien
actcctgagatctccaggtagaaatattaggga

SEQ ID NO: 754655 - DNA, 33 bp, Homo sapien
tcctctccatctttccagagtctacacaatgga

SEQ ID NO: 754656 - DNA, 33 bp, Homo sapien
tcctctccatctttccggagtctacacaatgga

SEQ ID NO: 754657 - DNA, 33 bp, Homo sapien
agaaccattggcatcacctgagagctcattaaa

SEQ ID NO: 754658 - DNA, 33 bp, Homo sapien
agaaccattggcatcatctgagagctcattaaa

SEQ ID NO: 754659 - DNA, 33 bp, Homo sapien
cccagaaaaaggtcagaacaaaggcttgaagca

SEQ ID NO: 754660 - DNA, 33 bp, Homo sapien
cccagaaaaaggtcaggacaaaggcttgaagca

SEQ ID NO: 754661 - DNA, 33 bp, Homo sapien
acagagagatttatagaagtgaaggcctgaatg

SEQ ID NO: 754662 - DNA, 33 bp, Homo sapien
acagagagatttataggagtgaaggcctgaatg

SEQ ID NO: 754663 - DNA, 33 bp, Homo sapien
acttactttgtaaaaactggaggtatattcaga

SEQ ID NO: 754664 - DNA, 33 bp, Homo sapien
acttactttgtaaaaattggaggtatattcaga

SEQ ID NO: 754665 - DNA, 33 bp, Homo sapien
acaagataatgatagcacaatggtaaacttttc

SEQ ID NO: 754666 - DNA, 33 bp, Homo sapien
acaagataatgatagcgcaatggtaaacttttc

SEQ ID NO: 754667 - DNA, 33 bp, Homo sapien
agtgatgcatgaggaccgaaaggggttcagagg

SEQ ID NO: 754668 - DNA, 33 bp, Homo sapien
agtgatgcatgaggactgaaaggggttcagagg

SEQ ID NO: 754669 - DNA, 33 bp, Homo sapien
ttttaagaaaactcagaaatctaacattaattt

SEQ ID NO: 754670 - DNA, 33 bp, Homo sapien
ttttaagaaaactcaggaatctaacattaattt

SEQ ID NO: 754671 - DNA, 33 bp, Homo sapien
aaattactgttcaaacaataataattctagagg

SEQ ID NO: 754672 - DNA, 33 bp, Homo sapien
aaattactgttcaaacgataataattctagagg

SEQ ID NO: 754673 - DNA, 33 bp, Homo sapien
ctgctaaaattcttcagcatttgtgaacgttac

SEQ ID NO: 754674 - DNA, 33 bp, Homo sapien
ctgctaaaattcttcatcatttgtgaacgttac

SEQ ID NO: 754675 - DNA, 33 bp, Homo sapien
tataatttgtttcccacctctgtgctctcaatg

SEQ ID NO: 754676 - DNA, 33 bp, Homo sapien
tataatttgtttcccatctctgtgctctcaatg

SEQ ID NO: 754677 - DNA, 33 bp, Homo sapien
ccctatcaaggccagccgctcacccatctctca

SEQ ID NO: 754678 - DNA, 33 bp, Homo sapien
ccctatcaaggccagctgctcacccatctctca

SEQ ID NO: 754679 - DNA, 33 bp, Homo sapien
cgatagatagaccaacagataaatcaattgatt

SEQ ID NO: 754680 - DNA, 33 bp, Homo sapien
cgatagatagaccaacggataaatcaattgatt

SEQ ID NO: 754681 - DNA, 33 bp, Homo sapien
tcctatgaattcaaagaccctaagcattgactt

SEQ ID NO: 754682 - DNA, 33 bp, Homo sapien
tcctatgaattcaaaggccctaagcattgactt

SEQ ID NO: 754683 - DNA, 33 bp, Homo sapien
ttttaggtaaacagtgaaaacttagcctggagc

SEQ ID NO: 754684 - DNA, 33 bp, Homo sapien
ttttaggtaaacagtggaaacttagcctggagc

SEQ ID NO: 754685 - DNA, 33 bp, Homo sapien
tattcattaccatcaaactgcttcaacattgta

SEQ ID NO: 754686 - DNA, 33 bp, Homo sapien
tattcattaccatcaagctgcttcaacattgta

SEQ ID NO: 754687 - DNA, 33 bp, Homo sapien
tattctcccttcctcccatgcacttctcagcct

SEQ ID NO: 754688 - DNA, 33 bp, Homo sapien
tattctcccttcctcctatgcacttctcagcct

SEQ ID NO: 754689 - DNA, 33 bp, Homo sapien
atggagaaagccacaaaggtaaatacgaagtct

SEQ ID NO: 754690 - DNA, 33 bp, Homo sapien
atggagaaagccacaagggtaaatacgaagtct

SEQ ID NO: 754691 - DNA, 33 bp, Homo sapien
ctttctcctagttccaatcatgtaggcttatac

SEQ ID NO: 754692 - DNA, 33 bp, Homo sapien
ctttctcctagttccagtcatgtaggcttatac

SEQ ID NO: 754693 - DNA, 33 bp, Homo sapien
acaaaagaaatgaaaacaaaatgatgtggaata

SEQ ID NO: 754694 - DNA, 33 bp, Homo sapien
acaaaagaaatgaaaataaaatgatgtggaata

SEQ ID NO: 754695 - DNA, 33 bp, Homo sapien
tgattcacaaaatgccccaacagattatgtcag

SEQ ID NO: 754696 - DNA, 33 bp, Homo sapien
tgattcacaaaatgcctcaacagattatgtcag

SEQ ID NO: 754697 - DNA, 33 bp, Homo sapien
tataaatatccagctacaacaacagtgtgcttc

SEQ ID NO: 754698 - DNA, 33 bp, Homo sapien
tataaatatccagctataacaacagtgtgcttc

SEQ ID NO: 754699 - DNA, 33 bp, Homo sapien
gtaaaaagaaggtgaactgattaatgagtcaac

SEQ ID NO: 754700 - DNA, 33 bp, Homo sapien
gtaaaaagaaggtgaattgattaatgagtcaac

SEQ ID NO: 754701 - DNA, 33 bp, Homo sapien
ttatctccaaacatagaaatctaacaaatatgt

SEQ ID NO: 754702 - DNA, 33 bp, Homo sapien
ttatctccaaacatagcaatctaacaaatatgt

SEQ ID NO: 754703 - DNA, 33 bp, Homo sapien
ttctggatcaatttggaaactaagactagaaaa

SEQ ID NO: 754704 - DNA, 33 bp, Homo sapien
ttctggatcaatttgggaactaagactagaaaa

SEQ ID NO: 754705 - DNA, 33 bp, Homo sapien
gtgcaagtaaaattcacatgtagcaaactatgg

SEQ ID NO: 754706 - DNA, 33 bp, Homo sapien
gtgcaagtaaaattcagatgtagcaaactatgg

SEQ ID NO: 754707 - DNA, 33 bp, Homo sapien
gtgtatgttttgcatacgtaaggtaagacgtca

SEQ ID NO: 754708 - DNA, 33 bp, Homo sapien
gtgtatgttttgcatatgtaaggtaagacgtca

SEQ ID NO: 754709 - DNA, 33 bp, Homo sapien
tggattcaaagtagcaatgatttctgaacatct

SEQ ID NO: 754710 - DNA, 33 bp, Homo sapien
tggattcaaagtagcactgatttctgaacatct

SEQ ID NO: 754711 - DNA, 33 bp, Homo sapien
actccatcaggaagcaaaatttaaagcagaaag

SEQ ID NO: 754712 - DNA, 33 bp, Homo sapien
actccatcaggaagcataatttaaagcagaaag

SEQ ID NO: 754713 - DNA, 33 bp, Homo sapien
tatacagcttagattaaaattatgcagagtaaa

SEQ ID NO: 754714 - DNA, 33 bp, Homo sapien
tatacagcttagattacaattatgcagagtaaa

SEQ ID NO: 754715 - DNA, 33 bp, Homo sapien
tttaagcaaacacttactaactgttcattaggt

SEQ ID NO: 754716 - DNA, 33 bp, Homo sapien
tttaagcaaacacttattaactgttcattaggt

SEQ ID NO: 754717 - DNA, 33 bp, Homo sapien
ccgcttctgcccttcaagtggtatcagtggagc

SEQ ID NO: 754718 - DNA, 33 bp, Homo sapien
ccgcttctgcccttcaggtggtatcagtggagc

SEQ ID NO: 754719 - DNA, 33 bp, Homo sapien
gttaaaagcaggtagaaggcaacagcaagaatt

SEQ ID NO: 754720 - DNA, 33 bp, Homo sapien
gttaaaagcaggtagagggcaacagcaagaatt

SEQ ID NO: 754721 - DNA, 33 bp, Homo sapien
ccttatttatgatccaacaatttaactctaagg

SEQ ID NO: 754722 - DNA, 33 bp, Homo sapien
ccttatttatgatccagcaatttaactctaagg

SEQ ID NO: 754723 - DNA, 33 bp, Homo sapien
tcagccacagtcacaacgggaaataaaccatta

SEQ ID NO: 754724 - DNA, 33 bp, Homo sapien
tcagccacagtcacaatgggaaataaaccatta

SEQ ID NO: 754725 - DNA, 33 bp, Homo sapien
ggaagaggggcagactcactagcacgaaatcac

SEQ ID NO: 754726 - DNA, 33 bp, Homo sapien
ggaagaggggcagactgactagcacgaaatcac

SEQ ID NO: 754727 - DNA, 33 bp, Homo sapien
ctgacacaaaactaaacgtaaaggtgttggaga

SEQ ID NO: 754728 - DNA, 33 bp, Homo sapien
ctgacacaaaactaaatgtaaaggtgttggaga

SEQ ID NO: 754729 - DNA, 33 bp, Homo sapien
gacaatagcagttcagaatttcttaatacaaat

SEQ ID NO: 754730 - DNA, 33 bp, Homo sapien
gacaatagcagttcagcatttcttaatacaaat

SEQ ID NO: 754731 - DNA, 33 bp, Homo sapien
gctcttgctcggagaacgtgatctaaaaagcaa

SEQ ID NO: 754732 - DNA, 33 bp, Homo sapien
gctcttgctcggagaatgtgatctaaaaagcaa

SEQ ID NO: 754733 - DNA, 33 bp, Homo sapien
cgatggctggggtaggaacatttgaaggtagaa

SEQ ID NO: 754734 - DNA, 33 bp, Homo sapien
cgatggctggggtagggacatttgaaggtagaa

SEQ ID NO: 754735 - DNA, 33 bp, Homo sapien
ccacagtttcgacaacccagtccttctgtttcc

SEQ ID NO: 754736 - DNA, 33 bp, Homo sapien
ccacagtttcgacaactcagtccttctgtttcc

SEQ ID NO: 754737 - DNA, 33 bp, Homo sapien
acatggagttttgaagacatccagggagagggt

SEQ ID NO: 754738 - DNA, 33 bp, Homo sapien
acatggagttttgaagccatccagggagagggt

SEQ ID NO: 754739 - DNA, 33 bp, Homo sapien
caaaatactacatcagaataaggtaaattaagg

SEQ ID NO: 754740 - DNA, 33 bp, Homo sapien
caaaatactacatcagcataaggtaaattaagg

SEQ ID NO: 754741 - DNA, 33 bp, Homo sapien
tagaaccaattaatcaagataaggtccttttgt

SEQ ID NO: 754742 - DNA, 33 bp, Homo sapien
tagaaccaattaatcaggataaggtccttttgt

SEQ ID NO: 754743 - DNA, 33 bp, Homo sapien
agcattctgctaagggcaaggataggatactgg

SEQ ID NO: 754744 - DNA, 33 bp, Homo sapien
agcattctgctaagggtaaggataggatactgg

SEQ ID NO: 754745 - DNA, 33 bp, Homo sapien
tcaaatagaacaatccagattcacaaatatgtc

SEQ ID NO: 754746 - DNA, 33 bp, Homo sapien
tcaaatagaacaatccggattcacaaatatgtc

SEQ ID NO: 754747 - DNA, 33 bp, Homo sapien
actaatattattttcactcaagtcgtaaaggga

SEQ ID NO: 754748 - DNA, 33 bp, Homo sapien
actaatattattttcattcaagtcgtaaaggga

SEQ ID NO: 754749 - DNA, 33 bp, Homo sapien
aaaattacagttccaaagggaaacacacattaa

SEQ ID NO: 754750 - DNA, 33 bp, Homo sapien
aaaattacagttccaatgggaaacacacattaa

SEQ ID NO: 754751 - DNA, 33 bp, Homo sapien
gaagatgggattcagaagctggatatgacatgg

SEQ ID NO: 754752 - DNA, 33 bp, Homo sapien
gaagatgggattcagaggctggatatgacatgg

SEQ ID NO: 754753 - DNA, 33 bp, Homo sapien
atcacaaaagtgtcccaaacaggctgcacacgc

SEQ ID NO: 754754 - DNA, 33 bp, Homo sapien
atcacaaaagtgtcccgaacaggctgcacacgc

SEQ ID NO: 754755 - DNA, 33 bp, Homo sapien
agatgaatgattaacaggacctattttatcctg

SEQ ID NO: 754756 - DNA, 33 bp, Homo sapien
agatgaatgattaacatgacctattttatcctg

SEQ ID NO: 754757 - DNA, 33 bp, Homo sapien
cagcaatgtctggtcaactgtccactgagagta

SEQ ID NO: 754758 - DNA, 33 bp, Homo sapien
cagcaatgtctggtcagctgtccactgagagta

SEQ ID NO: 754759 - DNA, 33 bp, Homo sapien
tccttactctgaaaatcagcagttgttgagaaa

SEQ ID NO: 754760 - DNA, 33 bp, Homo sapien
tccttactctgaaaattagcagttgttgagaaa

SEQ ID NO: 754761 - DNA, 33 bp, Homo sapien
tatttcgtgaaatgcagccttagaatggagaca

SEQ ID NO: 754762 - DNA, 33 bp, Homo sapien
tatttcgtgaaatgcatccttagaatggagaca

SEQ ID NO: 754763 - DNA, 33 bp, Homo sapien
gttactgaagtaagacacttgaaatgaaaatgt

SEQ ID NO: 754764 - DNA, 33 bp, Homo sapien
gttactgaagtaagacgcttgaaatgaaaatgt

SEQ ID NO: 754765 - DNA, 33 bp, Homo sapien
aggacagtttgagaacaaagaatgttgaaattt

SEQ ID NO: 754766 - DNA, 33 bp, Homo sapien
aggacagtttgagaaccaagaatgttgaaattt

SEQ ID NO: 754767 - DNA, 33 bp, Homo sapien
ctcatttttctctgaagctgagaagtaagaggc

SEQ ID NO: 754768 - DNA, 33 bp, Homo sapien
ctcatttttctctgaatctgagaagtaagaggc

SEQ ID NO: 754769 - DNA, 33 bp, Homo sapien
cccctcaattctgtgaagatttattcagtgtcc

SEQ ID NO: 754770 - DNA, 33 bp, Homo sapien
cccctcaattctgtgaggatttattcagtgtcc

SEQ ID NO: 754771 - DNA, 33 bp, Homo sapien
ggggctcagatgtagaaccagatcagttcaatt

SEQ ID NO: 754772 - DNA, 33 bp, Homo sapien
ggggctcagatgtagacccagatcagttcaatt

SEQ ID NO: 754773 - DNA, 33 bp, Homo sapien
acttacttgggtgttacataagatgcaccaaaa

SEQ ID NO: 754774 - DNA, 33 bp, Homo sapien
acttacttgggtgttatataagatgcaccaaaa

SEQ ID NO: 754775 - DNA, 33 bp, Homo sapien
tctaggcctagttgaccgataacaaaagggtta

SEQ ID NO: 754776 - DNA, 33 bp, Homo sapien
tctaggcctagttgactgataacaaaagggtta

SEQ ID NO: 754777 - DNA, 33 bp, Homo sapien
cacaaatgggtgagaacgtgcaaagttagtgtt

SEQ ID NO: 754778 - DNA, 33 bp, Homo sapien
cacaaatgggtgagaatgtgcaaagttagtgtt

SEQ ID NO: 754779 - DNA, 33 bp, Homo sapien
aaataacttggagaaactcgcacagaaagttta

SEQ ID NO: 754780 - DNA, 33 bp, Homo sapien
aaataacttggagaaattcgcacagaaagttta

SEQ ID NO: 754781 - DNA, 33 bp, Homo sapien
caacaatagtaccgcaatatagttcttatacat

SEQ ID NO: 754782 - DNA, 33 bp, Homo sapien
caacaatagtaccgcagtatagttcttatacat

SEQ ID NO: 754783 - DNA, 33 bp, Homo sapien
cctaacaaacagaaacaccagtaaccagctcag

SEQ ID NO: 754784 - DNA, 33 bp, Homo sapien
cctaacaaacagaaacgccagtaaccagctcag

SEQ ID NO: 754785 - DNA, 33 bp, Homo sapien
ccaagagatagcattcaactatctggagctttt

SEQ ID NO: 754786 - DNA, 33 bp, Homo sapien
ccaagagatagcattcgactatctggagctttt

SEQ ID NO: 754787 - DNA, 33 bp, Homo sapien
acacagagattccaaaataaatttcatttgctc

SEQ ID NO: 754788 - DNA, 33 bp, Homo sapien
acacagagattccaaagtaaatttcatttgctc

SEQ ID NO: 754789 - DNA, 33 bp, Homo sapien
caataagctaggctcccgacggatttaaagagg

SEQ ID NO: 754790 - DNA, 33 bp, Homo sapien
caataagctaggctcctgacggatttaaagagg

SEQ ID NO: 754791 - DNA, 33 bp, Homo sapien
tctttgctttagaacacgcactgaggattcttg

SEQ ID NO: 754792 - DNA, 33 bp, Homo sapien
tctttgctttagaacatgcactgaggattcttg

SEQ ID NO: 754793 - DNA, 33 bp, Homo sapien
cttttctccatcacaacgattagtctgttattg

SEQ ID NO: 754794 - DNA, 33 bp, Homo sapien
cttttctccatcacaatgattagtctgttattg

SEQ ID NO: 754795 - DNA, 33 bp, Homo sapien
atgcagcctttagtggcatggaaacaggaggct

SEQ ID NO: 754796 - DNA, 33 bp, Homo sapien
atgcagcctttagtgggatggaaacaggaggct

SEQ ID NO: 754797 - DNA, 33 bp, Homo sapien
ggcagcatggtgtacaacacgaagatgatgaag

SEQ ID NO: 754798 - DNA, 33 bp, Homo sapien
ggcagcatggtgtacaccacgaagatgatgaag

SEQ ID NO: 754799 - DNA, 33 bp, Homo sapien
tggggtaccctggaacacatcccttgtacttat

SEQ ID NO: 754800 - DNA, 33 bp, Homo sapien
tggggtaccctggaacgcatcccttgtacttat

SEQ ID NO: 754801 - DNA, 33 bp, Homo sapien
tgggaaaggtggaacacgcgaacagatttgaaa

SEQ ID NO: 754802 - DNA, 33 bp, Homo sapien
tgggaaaggtggaacatgcgaacagatttgaaa

SEQ ID NO: 754803 - DNA, 33 bp, Homo sapien
ggatctaatctgagaaactcaaaggaaaaacag

SEQ ID NO: 754804 - DNA, 33 bp, Homo sapien
ggatctaatctgagaagctcaaaggaaaaacag

SEQ ID NO: 754805 - DNA, 33 bp, Homo sapien
atgttggctagaggcaccactcactaatgtttc

SEQ ID NO: 754806 - DNA, 33 bp, Homo sapien
atgttggctagaggcatcactcactaatgtttc

SEQ ID NO: 754807 - DNA, 33 bp, Homo sapien
ttctcattgtcttacacggtttcaaagattgat

SEQ ID NO: 754808 - DNA, 33 bp, Homo sapien
ttctcattgtcttacatggtttcaaagattgat

SEQ ID NO: 754809 - DNA, 33 bp, Homo sapien
ctgcagacaacactctcaatggccaggaagcca

SEQ ID NO: 754810 - DNA, 33 bp, Homo sapien
ctgcagacaacactcttaatggccaggaagcca

SEQ ID NO: 754811 - DNA, 33 bp, Homo sapien
tggtgcttagccatcaatgagtagtaggcagca

SEQ ID NO: 754812 - DNA, 33 bp, Homo sapien
tggtgcttagccatcagtgagtagtaggcagca

SEQ ID NO: 754813 - DNA, 33 bp, Homo sapien
tgtaaatacgtggagacgagaacgagcatggca

SEQ ID NO: 754814 - DNA, 33 bp, Homo sapien
tgtaaatacgtggagatgagaacgagcatggca

SEQ ID NO: 754815 - DNA, 33 bp, Homo sapien
gataatctaagataaccagctctctatatgcct

SEQ ID NO: 754816 - DNA, 33 bp, Homo sapien
gataatctaagataacgagctctctatatgcct

SEQ ID NO: 754817 - DNA, 33 bp, Homo sapien
acaaacaatgagagaactcacaagtggctagag

SEQ ID NO: 754818 - DNA, 33 bp, Homo sapien
acaaacaatgagagaattcacaagtggctagag

SEQ ID NO: 754819 - DNA, 33 bp, Homo sapien
gacaagtgggtctccactgaaaggctgggaagt

SEQ ID NO: 754820 - DNA, 33 bp, Homo sapien
gacaagtgggtctccattgaaaggctgggaagt

SEQ ID NO: 754821 - DNA, 33 bp, Homo sapien
tgtctttgatctcgggcacatagcagatactgc

SEQ ID NO: 754822 - DNA, 33 bp, Homo sapien
tgtctttgatctcgggtacatagcagatactgc

SEQ ID NO: 754823 - DNA, 33 bp, Homo sapien
aactgtgaagttgtcaataggtatttcgagtga

SEQ ID NO: 754824 - DNA, 33 bp, Homo sapien
aactgtgaagttgtcagtaggtatttcgagtga

SEQ ID NO: 754825 - DNA, 33 bp, Homo sapien
atgaagagagaaactgaagttgatgcaaatgta

SEQ ID NO: 754826 - DNA, 33 bp, Homo sapien
atgaagagagaaactggagttgatgcaaatgta

SEQ ID NO: 754827 - DNA, 33 bp, Homo sapien
ggagagatgcactcataaatagcagggatagag

SEQ ID NO: 754828 - DNA, 33 bp, Homo sapien
ggagagatgcactcatcaatagcagggatagag

SEQ ID NO: 754829 - DNA, 33 bp, Homo sapien
acagcttctccaggcaagttgtctgcgctgggt

SEQ ID NO: 754830 - DNA, 33 bp, Homo sapien
acagcttctccaggcaggttgtctgcgctgggt

SEQ ID NO: 754831 - DNA, 33 bp, Homo sapien
catctctattatcatcaatgtatttagtcatgc

SEQ ID NO: 754832 - DNA, 33 bp, Homo sapien
catctctattatcatcgatgtatttagtcatgc

SEQ ID NO: 754833 - DNA, 33 bp, Homo sapien
agaaaatgattagtcaaatgttttcaaatgtgc

SEQ ID NO: 754834 - DNA, 33 bp, Homo sapien
agaaaatgattagtcagatgttttcaaatgtgc

SEQ ID NO: 754835 - DNA, 33 bp, Homo sapien
catctaactccctgtacgatgaaactttccaag

SEQ ID NO: 754836 - DNA, 33 bp, Homo sapien
catctaactccctgtaggatgaaactttccaag

SEQ ID NO: 754837 - DNA, 33 bp, Homo sapien
atctttagcttttacactggtgaaagttaattc

SEQ ID NO: 754838 - DNA, 33 bp, Homo sapien
atctttagcttttacattggtgaaagttaattc

SEQ ID NO: 754839 - DNA, 33 bp, Homo sapien
atagttttgttgattccatgaatgggtttataa

SEQ ID NO: 754840 - DNA, 33 bp, Homo sapien
atagttttgttgattctatgaatgggtttataa

SEQ ID NO: 754841 - DNA, 33 bp, Homo sapien
acaaagacagaggatacagatggagtggtattc

SEQ ID NO: 754842 - DNA, 33 bp, Homo sapien
acaaagacagaggatagagatggagtggtattc

SEQ ID NO: 754843 - DNA, 33 bp, Homo sapien
ctcgtttttttggaatcacttgcttcattctta

SEQ ID NO: 754844 - DNA, 33 bp, Homo sapien
ctcgtttttttggaattacttgcttcattctta

SEQ ID NO: 754845 - DNA, 33 bp, Homo sapien
taagtgtccttactcccctaaaccttaggacat

SEQ ID NO: 754846 - DNA, 33 bp, Homo sapien
taagtgtccttactcctctaaaccttaggacat

SEQ ID NO: 754847 - DNA, 33 bp, Homo sapien
aaatcaactgtagtacacagcctatttgatcat

SEQ ID NO: 754848 - DNA, 33 bp, Homo sapien
aaatcaactgtagtacccagcctatttgatcat

SEQ ID NO: 754849 - DNA, 33 bp, Homo sapien
aatgagaactactcaagtctgcattcatttctc

SEQ ID NO: 754850 - DNA, 33 bp, Homo sapien
aatgagaactactcaattctgcattcatttctc

SEQ ID NO: 754851 - DNA, 33 bp, Homo sapien
aaaagcctgagaaggaagagttctgatgtcaaa

SEQ ID NO: 754852 - DNA, 33 bp, Homo sapien
aaaagcctgagaaggaggagttctgatgtcaaa

SEQ ID NO: 754853 - DNA, 33 bp, Homo sapien
gttggattgccaggaaagaagaacaacctttgg

SEQ ID NO: 754854 - DNA, 33 bp, Homo sapien
gttggattgccaggaaggaagaacaacctttgg

SEQ ID NO: 754855 - DNA, 33 bp, Homo sapien
tgagaaagatacataaactaagaaggccatatt

SEQ ID NO: 754856 - DNA, 33 bp, Homo sapien
tgagaaagatacataagctaagaaggccatatt

SEQ ID NO: 754857 - DNA, 33 bp, Homo sapien
ttaaaaattattggcccgaaaaccagcaaggaa

SEQ ID NO: 754858 - DNA, 33 bp, Homo sapien
ttaaaaattattggccggaaaaccagcaaggaa

SEQ ID NO: 754859 - DNA, 33 bp, Homo sapien
tgcaccagcagaagtacgagcctccccctcatc

SEQ ID NO: 754860 - DNA, 33 bp, Homo sapien
tgcaccagcagaagtatgagcctccccctcatc

SEQ ID NO: 754861 - DNA, 33 bp, Homo sapien
attcacagcaaaataagaacactgtttgctaac

SEQ ID NO: 754862 - DNA, 33 bp, Homo sapien
attcacagcaaaataataacactgtttgctaac

SEQ ID NO: 754863 - DNA, 33 bp, Homo sapien
cttttgccaatgaaacagaccttacgaggactc

SEQ ID NO: 754864 - DNA, 33 bp, Homo sapien
cttttgccaatgaaacggaccttacgaggactc

SEQ ID NO: 754865 - DNA, 33 bp, Homo sapien
gtaggaataaactagacacaggtcagatgagag

SEQ ID NO: 754866 - DNA, 33 bp, Homo sapien
gtaggaataaactagatacaggtcagatgagag

SEQ ID NO: 754867 - DNA, 33 bp, Homo sapien
aaattgatgccaaagcaacaaaaaattataaga

SEQ ID NO: 754868 - DNA, 33 bp, Homo sapien
aaattgatgccaaagctacaaaaaattataaga

SEQ ID NO: 754869 - DNA, 33 bp, Homo sapien
tattaccaaagatgcaatattaagatgtgtaat

SEQ ID NO: 754870 - DNA, 33 bp, Homo sapien
tattaccaaagatgcattattaagatgtgtaat

SEQ ID NO: 754871 - DNA, 33 bp, Homo sapien
agtattttacggttgacacttgaaaactgagtt

SEQ ID NO: 754872 - DNA, 33 bp, Homo sapien
agtattttacggttgatacttgaaaactgagtt

SEQ ID NO: 754873 - DNA, 33 bp, Homo sapien
actctttagggtatgacgcattttggatatgct

SEQ ID NO: 754874 - DNA, 33 bp, Homo sapien
actctttagggtatgatgcattttggatatgct

SEQ ID NO: 754875 - DNA, 33 bp, Homo sapien
tgtgtttaatcaagtaaaatcagtgtcagatca

SEQ ID NO: 754876 - DNA, 33 bp, Homo sapien
tgtgtttaatcaagtagaatcagtgtcagatca

SEQ ID NO: 754877 - DNA, 33 bp, Homo sapien
ttctacaaacatgggaataaatatgtgctatga

SEQ ID NO: 754878 - DNA, 33 bp, Homo sapien
ttctacaaacatgggagtaaatatgtgctatga

SEQ ID NO: 754879 - DNA, 33 bp, Homo sapien
agacacttgtgacccccggaaacctcatggtga

SEQ ID NO: 754880 - DNA, 33 bp, Homo sapien
agacacttgtgacccctggaaacctcatggtga

SEQ ID NO: 754881 - DNA, 33 bp, Homo sapien
atttagaaccagataacgggggctgaagtccca

SEQ ID NO: 754882 - DNA, 33 bp, Homo sapien
atttagaaccagataatgggggctgaagtccca

SEQ ID NO: 754883 - DNA, 33 bp, Homo sapien
gaacttgatgggatagcccaatgtatatcaaga

SEQ ID NO: 754884 - DNA, 33 bp, Homo sapien
gaacttgatgggatagtccaatgtatatcaaga

SEQ ID NO: 754885 - DNA, 33 bp, Homo sapien
agcggaaagcctgtcacgatcctggaattttat

SEQ ID NO: 754886 - DNA, 33 bp, Homo sapien
agcggaaagcctgtcatgatcctggaattttat

SEQ ID NO: 754887 - DNA, 33 bp, Homo sapien
ctggctgattaatccccattacttttgcatcca

SEQ ID NO: 754888 - DNA, 33 bp, Homo sapien
ctggctgattaatccctattacttttgcatcca

SEQ ID NO: 754889 - DNA, 33 bp, Homo sapien
ttcctccaaaataaaaaccagaggtcatgtctc

SEQ ID NO: 754890 - DNA, 33 bp, Homo sapien
ttcctccaaaataaaagccagaggtcatgtctc

SEQ ID NO: 754891 - DNA, 33 bp, Homo sapien
gcaggaatgatcccaccgagtacagggacaact

SEQ ID NO: 754892 - DNA, 33 bp, Homo sapien
gcaggaatgatcccactgagtacagggacaact

SEQ ID NO: 754893 - DNA, 33 bp, Homo sapien
aaccactattgttcagccactttgatttgggag

SEQ ID NO: 754894 - DNA, 33 bp, Homo sapien
aaccactattgttcaggcactttgatttgggag

SEQ ID NO: 754895 - DNA, 33 bp, Homo sapien
catccagtctcaactcacaggtgacgaccacct

SEQ ID NO: 754896 - DNA, 33 bp, Homo sapien
catccagtctcaactcgcaggtgacgaccacct

SEQ ID NO: 754897 - DNA, 33 bp, Homo sapien
taccagagaccctgtcacattcttctttgattt

SEQ ID NO: 754898 - DNA, 33 bp, Homo sapien
taccagagaccctgtcgcattcttctttgattt

SEQ ID NO: 754899 - DNA, 33 bp, Homo sapien
ggctgcttcaggtctacgttttttgaagcttat

SEQ ID NO: 754900 - DNA, 33 bp, Homo sapien
ggctgcttcaggtctaggttttttgaagcttat

SEQ ID NO: 754901 - DNA, 33 bp, Homo sapien
attgtataggcaaaacgctcacaaacctgaagg

SEQ ID NO: 754902 - DNA, 33 bp, Homo sapien
attgtataggcaaaactctcacaaacctgaagg

SEQ ID NO: 754903 - DNA, 33 bp, Homo sapien
atttcagcacattgtaaaccttcagttgggctc

SEQ ID NO: 754904 - DNA, 33 bp, Homo sapien
atttcagcacattgtagaccttcagttgggctc

SEQ ID NO: 754905 - DNA, 33 bp, Homo sapien
tttttatgatttgtaactggacatttgttgatg

SEQ ID NO: 754906 - DNA, 33 bp, Homo sapien
tttttatgatttgtaattggacatttgttgatg

SEQ ID NO: 754907 - DNA, 33 bp, Homo sapien
gaaaactctgtctcctaacctcctttcttccca

SEQ ID NO: 754908 - DNA, 33 bp, Homo sapien
gaaaactctgtctcctcacctcctttcttccca

SEQ ID NO: 754909 - DNA, 33 bp, Homo sapien
tcttcaagacattggaataacttaaacattatg

SEQ ID NO: 754910 - DNA, 33 bp, Homo sapien
tcttcaagacattggattaacttaaacattatg

SEQ ID NO: 754911 - DNA, 33 bp, Homo sapien
tgaaacaaacagaggaagaatgtggaatccctt

SEQ ID NO: 754912 - DNA, 33 bp, Homo sapien
tgaaacaaacagaggaggaatgtggaatccctt

SEQ ID NO: 754913 - DNA, 33 bp, Homo sapien
tgattcatttcactacaattcacaagtggtggt

SEQ ID NO: 754914 - DNA, 33 bp, Homo sapien
tgattcatttcactacgattcacaagtggtggt

SEQ ID NO: 754915 - DNA, 33 bp, Homo sapien
agtaagccttttccccacaggaacacatgaaaa

SEQ ID NO: 754916 - DNA, 33 bp, Homo sapien
agtaagccttttccccgcaggaacacatgaaaa

SEQ ID NO: 754917 - DNA, 33 bp, Homo sapien
aagagcttaatcctaaatgtgaatcaagttgta

SEQ ID NO: 754918 - DNA, 33 bp, Homo sapien
aagagcttaatcctaagtgtgaatcaagttgta

SEQ ID NO: 754919 - DNA, 33 bp, Homo sapien
gggtgactgtagttagcaacaatgtactgtgta

SEQ ID NO: 754920 - DNA, 33 bp, Homo sapien
gggtgactgtagttaggaacaatgtactgtgta

SEQ ID NO: 754921 - DNA, 33 bp, Homo sapien
gaaggatgctttcactcaagcagaggaaatagc

SEQ ID NO: 754922 - DNA, 33 bp, Homo sapien
gaaggatgctttcactgaagcagaggaaatagc

SEQ ID NO: 754923 - DNA, 33 bp, Homo sapien
gaaatactgtttttagcaagttacctgcatata

SEQ ID NO: 754924 - DNA, 33 bp, Homo sapien
gaaatactgtttttagtaagttacctgcatata

SEQ ID NO: 754925 - DNA, 33 bp, Homo sapien
tacactgaaatctatcccatagtgatgccatta

SEQ ID NO: 754926 - DNA, 33 bp, Homo sapien
tacactgaaatctatctcatagtgatgccatta

SEQ ID NO: 754927 - DNA, 33 bp, Homo sapien
cgtgaatgaggctccccctagtggccagctgca

SEQ ID NO: 754928 - DNA, 33 bp, Homo sapien
cgtgaatgaggctccctctagtggccagctgca

SEQ ID NO: 754929 - DNA, 33 bp, Homo sapien
atttggtttgattctcacaaattaagacagtat

SEQ ID NO: 754930 - DNA, 33 bp, Homo sapien
atttggtttgattctcgcaaattaagacagtat

SEQ ID NO: 754931 - DNA, 33 bp, Homo sapien
tttccacataccaagcggccttctgtagcagta

SEQ ID NO: 754932 - DNA, 33 bp, Homo sapien
tttccacataccaagctgccttctgtagcagta

SEQ ID NO: 754933 - DNA, 33 bp, Homo sapien
tctgagatgtgtaaaccaagaagtgtctgagac

SEQ ID NO: 754934 - DNA, 33 bp, Homo sapien
tctgagatgtgtaaacgaagaagtgtctgagac

SEQ ID NO: 754935 - DNA, 33 bp, Homo sapien
ctctgtacttaatcacacaatgcagatcttccc

SEQ ID NO: 754936 - DNA, 33 bp, Homo sapien
ctctgtacttaatcacgcaatgcagatcttccc

SEQ ID NO: 754937 - DNA, 33 bp, Homo sapien
cctatgccgtctcctcaaggaccctgtactccc

SEQ ID NO: 754938 - DNA, 33 bp, Homo sapien
cctatgccgtctcctcgaggaccctgtactccc

SEQ ID NO: 754939 - DNA, 33 bp, Homo sapien
ggctcttcttataacaccctcattatgtgtttt

SEQ ID NO: 754940 - DNA, 33 bp, Homo sapien
ggctcttcttataacatcctcattatgtgtttt

SEQ ID NO: 754941 - DNA, 33 bp, Homo sapien
caagaatgatgtaatcactgtaacaatcaattc

SEQ ID NO: 754942 - DNA, 33 bp, Homo sapien
caagaatgatgtaatcgctgtaacaatcaattc

SEQ ID NO: 754943 - DNA, 33 bp, Homo sapien
gaacaagctcaaggcaagaaaaaataatcacaa

SEQ ID NO: 754944 - DNA, 33 bp, Homo sapien
gaacaagctcaaggcatgaaaaaataatcacaa

SEQ ID NO: 754945 - DNA, 33 bp, Homo sapien
gagtggtctcttggaaactctgaggctctgagg

SEQ ID NO: 754946 - DNA, 33 bp, Homo sapien
gagtggtctcttggaagctctgaggctctgagg

SEQ ID NO: 754947 - DNA, 33 bp, Homo sapien
cagggcttactgataacgttcatgtagaatgga

SEQ ID NO: 754948 - DNA, 33 bp, Homo sapien
cagggcttactgataatgttcatgtagaatgga

SEQ ID NO: 754949 - DNA, 33 bp, Homo sapien
attatgatgcaaatgacgatgggcttgaataaa

SEQ ID NO: 754950 - DNA, 33 bp, Homo sapien
attatgatgcaaatgatgatgggcttgaataaa

SEQ ID NO: 754951 - DNA, 33 bp, Homo sapien
acaggaaactcaaaacggaaagaaaatgaactg

SEQ ID NO: 754952 - DNA, 33 bp, Homo sapien
acaggaaactcaaaactgaaagaaaatgaactg

SEQ ID NO: 754953 - DNA, 33 bp, Homo sapien
tccccagctatttaacaggcttccagctacaca

SEQ ID NO: 754954 - DNA, 33 bp, Homo sapien
tccccagctatttaacgggcttccagctacaca

SEQ ID NO: 754955 - DNA, 33 bp, Homo sapien
tggaaattttgcttaaactgtggttagagatta

SEQ ID NO: 754956 - DNA, 33 bp, Homo sapien
tggaaattttgcttaagctgtggttagagatta

SEQ ID NO: 754957 - DNA, 33 bp, Homo sapien
cagaatgtaacataacaggggtgaaacgtgaat

SEQ ID NO: 754958 - DNA, 33 bp, Homo sapien
cagaatgtaacataacgggggtgaaacgtgaat

SEQ ID NO: 754959 - DNA, 33 bp, Homo sapien
cgacctgccctgagtcacatggagctttatgaa

SEQ ID NO: 754960 - DNA, 33 bp, Homo sapien
cgacctgccctgagtcgcatggagctttatgaa

SEQ ID NO: 754961 - DNA, 33 bp, Homo sapien
ccatctcgatgcacaccggttactatgcctcca

SEQ ID NO: 754962 - DNA, 33 bp, Homo sapien
ccatctcgatgcacactggttactatgcctcca

SEQ ID NO: 754963 - DNA, 33 bp, Homo sapien
cagatgccaccttctcactgtgcaaacttgcca

SEQ ID NO: 754964 - DNA, 33 bp, Homo sapien
cagatgccaccttctcgctgtgcaaacttgcca

SEQ ID NO: 754965 - DNA, 33 bp, Homo sapien
ccccagcctcaaggaacccggctttgggcacat

SEQ ID NO: 754966 - DNA, 33 bp, Homo sapien
ccccagcctcaaggaatccggctttgggcacat

SEQ ID NO: 754967 - DNA, 33 bp, Homo sapien
acagctcacccgtgcacccatcagcctgggtcc

SEQ ID NO: 754968 - DNA, 33 bp, Homo sapien
acagctcacccgtgcatccatcagcctgggtcc

SEQ ID NO: 754969 - DNA, 33 bp, Homo sapien
ggaaactgtgccggacaatttgctctacccgtt

SEQ ID NO: 754970 - DNA, 33 bp, Homo sapien
ggaaactgtgccggaccatttgctctacccgtt

SEQ ID NO: 754971 - DNA, 33 bp, Homo sapien
gggaaatgaccaggaaaagcacagggacaaacg

SEQ ID NO: 754972 - DNA, 33 bp, Homo sapien
gggaaatgaccaggaagagcacagggacaaacg

SEQ ID NO: 754973 - DNA, 33 bp, Homo sapien
acttgtatatgcactgcaacaccaaaacgtttg

SEQ ID NO: 754974 - DNA, 33 bp, Homo sapien
acttgtatatgcactggaacaccaaaacgtttg

SEQ ID NO: 754975 - DNA, 33 bp, Homo sapien
gcctagattatgatcacaagttgcaccgagatg

SEQ ID NO: 754976 - DNA, 33 bp, Homo sapien
gcctagattatgatcagaagttgcaccgagatg

SEQ ID NO: 754977 - DNA, 33 bp, Homo sapien
tactgtcctcactcaaagagccgtctagtaagg

SEQ ID NO: 754978 - DNA, 33 bp, Homo sapien
tactgtcctcactcaatgagccgtctagtaagg

SEQ ID NO: 754979 - DNA, 33 bp, Homo sapien
ttgttttaagccaccaagtccgtggtacatttt

SEQ ID NO: 754980 - DNA, 33 bp, Homo sapien
ttgttttaagccaccaggtccgtggtacatttt

SEQ ID NO: 754981 - DNA, 33 bp, Homo sapien
gtttatccctggacaaacaaactcacggaaagc

SEQ ID NO: 754982 - DNA, 33 bp, Homo sapien
gtttatccctggacaagcaaactcacggaaagc

SEQ ID NO: 754983 - DNA, 33 bp, Homo sapien
ctgtgtcaaattctaacagtgttctgattcaga

SEQ ID NO: 754984 - DNA, 33 bp, Homo sapien
ctgtgtcaaattctaagagtgttctgattcaga

SEQ ID NO: 754985 - DNA, 33 bp, Homo sapien
gtcctctgaggcagagacaatcttgtgtttgaa

SEQ ID NO: 754986 - DNA, 33 bp, Homo sapien
gtcctctgaggcagaggcaatcttgtgtttgaa

SEQ ID NO: 754987 - DNA, 33 bp, Homo sapien
atggagagatcttacaaatgatggaaggagcag

SEQ ID NO: 754988 - DNA, 33 bp, Homo sapien
atggagagatcttacagatgatggaaggagcag

SEQ ID NO: 754989 - DNA, 33 bp, Homo sapien
atgtctgtactcgtacccaaaagttctgtgccg

SEQ ID NO: 754990 - DNA, 33 bp, Homo sapien
atgtctgtactcgtactcaaaagttctgtgccg

SEQ ID NO: 754991 - DNA, 33 bp, Homo sapien
cctggacagcactgacaagagactccaagtcct

SEQ ID NO: 754992 - DNA, 33 bp, Homo sapien
cctggacagcactgacgagagactccaagtcct

SEQ ID NO: 754993 - DNA, 33 bp, Homo sapien
aagatttatcctattacctatcacattccttat

SEQ ID NO: 754994 - DNA, 33 bp, Homo sapien
aagatttatcctattatctatcacattccttat

SEQ ID NO: 754995 - DNA, 33 bp, Homo sapien
gcctatctggtggcaaatgactccaagtaaatg

SEQ ID NO: 754996 - DNA, 33 bp, Homo sapien
gcctatctggtggcaactgactccaagtaaatg

SEQ ID NO: 754997 - DNA, 33 bp, Homo sapien
tctttacctgaaacagaaagcatcccagtcata

SEQ ID NO: 754998 - DNA, 33 bp, Homo sapien
tctttacctgaaacagtaagcatcccagtcata

SEQ ID NO: 754999 - DNA, 33 bp, Homo sapien
caaatggttccattaacgcagaaatctgacgag

SEQ ID NO: 755000 - DNA, 33 bp, Homo sapien
caaatggttccattaaggcagaaatctgacgag

SEQ ID NO: 755001 - DNA, 33 bp, Homo sapien
tattggtgtaagtattaaaatgcttgactgtat

SEQ ID NO: 755002 - DNA, 33 bp, Homo sapien
tattggtgtaagtattgaaatgcttgactgtat

SEQ ID NO: 755003 - DNA, 33 bp, Homo sapien
gactacgcaagatccacaggggcttacaaaact

SEQ ID NO: 755004 - DNA, 33 bp, Homo sapien
gactacgcaagatccataggggcttacaaaact

SEQ ID NO: 755005 - DNA, 33 bp, Homo sapien
agtccacaagggctcgcaaaaatgcctacaaaa

SEQ ID NO: 755006 - DNA, 33 bp, Homo sapien
agtccacaagggctcgtaaaaatgcctacaaaa

SEQ ID NO: 755007 - DNA, 33 bp, Homo sapien
aagacaagatataagacgtttacttaccaatca

SEQ ID NO: 755008 - DNA, 33 bp, Homo sapien
aagacaagatataagatgtttacttaccaatca

SEQ ID NO: 755009 - DNA, 33 bp, Homo sapien
agaaaggtcagcaaacccaaaacagattcaatc

SEQ ID NO: 755010 - DNA, 33 bp, Homo sapien
agaaaggtcagcaaacgcaaaacagattcaatc

SEQ ID NO: 755011 - DNA, 33 bp, Homo sapien
catatcagccacatacacaaattgttttcccat

SEQ ID NO: 755012 - DNA, 33 bp, Homo sapien
catatcagccacatactcaaattgttttcccat

SEQ ID NO: 755013 - DNA, 33 bp, Homo sapien
cctcaatatcttggccccatagctgttccttcc

SEQ ID NO: 755014 - DNA, 33 bp, Homo sapien
cctcaatatcttggcctcatagctgttccttcc

SEQ ID NO: 755015 - DNA, 33 bp, Homo sapien
aaggcaaccaacggatcaggttaatggagtgtc

SEQ ID NO: 755016 - DNA, 33 bp, Homo sapien
aaggcaaccaacggattaggttaatggagtgtc

SEQ ID NO: 755017 - DNA, 33 bp, Homo sapien
tctggaggaatctgcaaattctattgatggcaa

SEQ ID NO: 755018 - DNA, 33 bp, Homo sapien
tctggaggaatctgcacattctattgatggcaa

SEQ ID NO: 755019 - DNA, 33 bp, Homo sapien
gttataatactagtaaaaagaaggcagccattt

SEQ ID NO: 755020 - DNA, 33 bp, Homo sapien
gttataatactagtaataagaaggcagccattt

SEQ ID NO: 755021 - DNA, 33 bp, Homo sapien
atatgtacaactgttacgtattcacaaaaatta

SEQ ID NO: 755022 - DNA, 33 bp, Homo sapien
atatgtacaactgttaggtattcacaaaaatta

SEQ ID NO: 755023 - DNA, 33 bp, Homo sapien
agcttccttttgacaaatgcggcctgaaaaaat

SEQ ID NO: 755024 - DNA, 33 bp, Homo sapien
agcttccttttgacaagtgcggcctgaaaaaat

SEQ ID NO: 755025 - DNA, 33 bp, Homo sapien
cagatgtccattgtggcatataggaaatgattt

SEQ ID NO: 755026 - DNA, 33 bp, Homo sapien
cagatgtccattgtggtatataggaaatgattt

SEQ ID NO: 755027 - DNA, 33 bp, Homo sapien
aaacacgcataaaacccgaagtagaaatattca

SEQ ID NO: 755028 - DNA, 33 bp, Homo sapien
aaacacgcataaaacctgaagtagaaatattca

SEQ ID NO: 755029 - DNA, 33 bp, Homo sapien
gcttccaagaattccacagtgttattcagacag

SEQ ID NO: 755030 - DNA, 33 bp, Homo sapien
gcttccaagaattccatagtgttattcagacag

SEQ ID NO: 755031 - DNA, 33 bp, Homo sapien
ctgcagaacacgtccccgcttcattgtgcctgc

SEQ ID NO: 755032 - DNA, 33 bp, Homo sapien
ctgcagaacacgtccctgcttcattgtgcctgc

SEQ ID NO: 755033 - DNA, 33 bp, Homo sapien
ccaaaagtcagaataaagcgagtttagcagcaa

SEQ ID NO: 755034 - DNA, 33 bp, Homo sapien
ccaaaagtcagaataaggcgagtttagcagcaa

SEQ ID NO: 755035 - DNA, 33 bp, Homo sapien
tgaatatttatggatgacaattagggaaagtat

SEQ ID NO: 755036 - DNA, 33 bp, Homo sapien
tgaatatttatggatgccaattagggaaagtat

SEQ ID NO: 755037 - DNA, 33 bp, Homo sapien
agaggcatgaaaacacaagcaaaagctatagag

SEQ ID NO: 755038 - DNA, 33 bp, Homo sapien
agaggcatgaaaacacgagcaaaagctatagag

SEQ ID NO: 755039 - DNA, 33 bp, Homo sapien
tccagtagaggtggcaaatagcactgcatatac

SEQ ID NO: 755040 - DNA, 33 bp, Homo sapien
tccagtagaggtggcagatagcactgcatatac

SEQ ID NO: 755041 - DNA, 33 bp, Homo sapien
tccagcctaaagaagaaatgcattatgaaagag

SEQ ID NO: 755042 - DNA, 33 bp, Homo sapien
tccagcctaaagaagagatgcattatgaaagag

SEQ ID NO: 755043 - DNA, 33 bp, Homo sapien
agttatacagaaattagaactgtgacaagtgtc

SEQ ID NO: 755044 - DNA, 33 bp, Homo sapien
agttatacagaaattataactgtgacaagtgtc

SEQ ID NO: 755045 - DNA, 33 bp, Homo sapien
tatatgagctaatgaaacaagcatattacagtg

SEQ ID NO: 755046 - DNA, 33 bp, Homo sapien
tatatgagctaatgaagcaagcatattacagtg

SEQ ID NO: 755047 - DNA, 33 bp, Homo sapien
cttcacaaaatggaagacatttatcaaatcagg

SEQ ID NO: 755048 - DNA, 33 bp, Homo sapien
cttcacaaaatggaaggcatttatcaaatcagg

SEQ ID NO: 755049 - DNA, 33 bp, Homo sapien
gtcaaatctttcacataagctgaatctcagtat

SEQ ID NO: 755050 - DNA, 33 bp, Homo sapien
gtcaaatctttcacatcagctgaatctcagtat

SEQ ID NO: 755051 - DNA, 33 bp, Homo sapien
tactctttcctttgcagaaaaagcacaactatt

SEQ ID NO: 755052 - DNA, 33 bp, Homo sapien
tactctttcctttgcataaaaagcacaactatt

SEQ ID NO: 755053 - DNA, 33 bp, Homo sapien
aggagttagacctggaagaacctcacaatgagg

SEQ ID NO: 755054 - DNA, 33 bp, Homo sapien
aggagttagacctggaggaacctcacaatgagg

SEQ ID NO: 755055 - DNA, 33 bp, Homo sapien
gacaaaggtagacaaaatcctcattgtgaggtt

SEQ ID NO: 755056 - DNA, 33 bp, Homo sapien
gacaaaggtagacaaagtcctcattgtgaggtt

SEQ ID NO: 755057 - DNA, 33 bp, Homo sapien
taaatgtaaaataaaaatgcatagctgagattg

SEQ ID NO: 755058 - DNA, 33 bp, Homo sapien
taaatgtaaaataaaagtgcatagctgagattg

SEQ ID NO: 755059 - DNA, 33 bp, Homo sapien
tgtggagacatcagaaacaaagattgtcttgag

SEQ ID NO: 755060 - DNA, 33 bp, Homo sapien
tgtggagacatcagaagcaaagattgtcttgag

SEQ ID NO: 755061 - DNA, 33 bp, Homo sapien
gacttttggactagaaatgaacagatctagctt

SEQ ID NO: 755062 - DNA, 33 bp, Homo sapien
gacttttggactagaagtgaacagatctagctt

SEQ ID NO: 755063 - DNA, 33 bp, Homo sapien
gcacatacatttgatgaaaaagagtgactggga

SEQ ID NO: 755064 - DNA, 33 bp, Homo sapien
gcacatacatttgatggaaaagagtgactggga

SEQ ID NO: 755065 - DNA, 33 bp, Homo sapien
tgaaagaaaagcacacacttaaagagttattaa

SEQ ID NO: 755066 - DNA, 33 bp, Homo sapien
tgaaagaaaagcacacgcttaaagagttattaa

SEQ ID NO: 755067 - DNA, 33 bp, Homo sapien
ctaaaggggaaatttgcaatgaaatagcctcgc

SEQ ID NO: 755068 - DNA, 33 bp, Homo sapien
ctaaaggggaaatttggaatgaaatagcctcgc

SEQ ID NO: 755069 - DNA, 33 bp, Homo sapien
tatacacacacagatacgttggtttgaggttat

SEQ ID NO: 755070 - DNA, 33 bp, Homo sapien
tatacacacacagatatgttggtttgaggttat

SEQ ID NO: 755071 - DNA, 33 bp, Homo sapien
tctatggttgattaaactgggaaagagagttct

SEQ ID NO: 755072 - DNA, 33 bp, Homo sapien
tctatggttgattaaattgggaaagagagttct

SEQ ID NO: 755073 - DNA, 33 bp, Homo sapien
aagaccacttcaaacactatactttgtgatatt

SEQ ID NO: 755074 - DNA, 33 bp, Homo sapien
aagaccacttcaaacagtatactttgtgatatt

SEQ ID NO: 755075 - DNA, 33 bp, Homo sapien
cagcaggttataggaaagggttaagcggcagct

SEQ ID NO: 755076 - DNA, 33 bp, Homo sapien
cagcaggttataggaaggggttaagcggcagct

SEQ ID NO: 755077 - DNA, 33 bp, Homo sapien
agttcaaatttctgcaataaaatcaagcaagaa

SEQ ID NO: 755078 - DNA, 33 bp, Homo sapien
agttcaaatttctgcagtaaaatcaagcaagaa

SEQ ID NO: 755079 - DNA, 33 bp, Homo sapien
tctcatttaatcccaaaatgaagctttgagaat

SEQ ID NO: 755080 - DNA, 33 bp, Homo sapien
tctcatttaatcccaatatgaagctttgagaat

SEQ ID NO: 755081 - DNA, 33 bp, Homo sapien
accagcccagtaaactaacctgttatctagcca

SEQ ID NO: 755082 - DNA, 33 bp, Homo sapien
accagcccagtaaactcacctgttatctagcca

SEQ ID NO: 755083 - DNA, 33 bp, Homo sapien
ctatattctatcccagcaacaactgtagagacg

SEQ ID NO: 755084 - DNA, 33 bp, Homo sapien
ctatattctatcccaggaacaactgtagagacg

SEQ ID NO: 755085 - DNA, 33 bp, Homo sapien
acagacaaaccaagctcacactagcttatggga

SEQ ID NO: 755086 - DNA, 33 bp, Homo sapien
acagacaaaccaagctgacactagcttatggga

SEQ ID NO: 755087 - DNA, 33 bp, Homo sapien
aggatggcgccacacccgacagtcatagagcaa

SEQ ID NO: 755088 - DNA, 33 bp, Homo sapien
aggatggcgccacacctgacagtcatagagcaa

SEQ ID NO: 755089 - DNA, 33 bp, Homo sapien
taaattacaagtaaggccatttgctttttcttt

SEQ ID NO: 755090 - DNA, 33 bp, Homo sapien
taaattacaagtaaggtcatttgctttttcttt

SEQ ID NO: 755091 - DNA, 33 bp, Homo sapien
ttaattgattcgtgaaatgtggactgaagactc

SEQ ID NO: 755092 - DNA, 33 bp, Homo sapien
ttaattgattcgtgaactgtggactgaagactc

SEQ ID NO: 755093 - DNA, 33 bp, Homo sapien
ttctcttgaccactcaaaataggttttcaattc

SEQ ID NO: 755094 - DNA, 33 bp, Homo sapien
ttctcttgaccactcagaataggttttcaattc

SEQ ID NO: 755095 - DNA, 33 bp, Homo sapien
gtggtcaggacgttcacgttaaagagaccaaga

SEQ ID NO: 755096 - DNA, 33 bp, Homo sapien
gtggtcaggacgttcatgttaaagagaccaaga

SEQ ID NO: 755097 - DNA, 33 bp, Homo sapien
ttgagtaagtactgcccggagtttaattcatct

SEQ ID NO: 755098 - DNA, 33 bp, Homo sapien
ttgagtaagtactgcctggagtttaattcatct

SEQ ID NO: 755099 - DNA, 33 bp, Homo sapien
aatattagacctcagaaagtaaccctttgtgcc

SEQ ID NO: 755100 - DNA, 33 bp, Homo sapien
aatattagacctcagagagtaaccctttgtgcc

SEQ ID NO: 755101 - DNA, 33 bp, Homo sapien
atatctatgtttacaacgaccctcgtaagtatt

SEQ ID NO: 755102 - DNA, 33 bp, Homo sapien
atatctatgtttacaatgaccctcgtaagtatt

SEQ ID NO: 755103 - DNA, 33 bp, Homo sapien
cagagctgtaagaaaacaaattcctgctgttta

SEQ ID NO: 755104 - DNA, 33 bp, Homo sapien
cagagctgtaagaaaagaaattcctgctgttta

SEQ ID NO: 755105 - DNA, 33 bp, Homo sapien
gggctggcttagggacggaactgcatctaccca

SEQ ID NO: 755106 - DNA, 33 bp, Homo sapien
gggctggcttagggactgaactgcatctaccca

SEQ ID NO: 755107 - DNA, 33 bp, Homo sapien
atggtgcttctaagtacgggggactttaatgct

SEQ ID NO: 755108 - DNA, 33 bp, Homo sapien
atggtgcttctaagtatgggggactttaatgct

SEQ ID NO: 755109 - DNA, 33 bp, Homo sapien
aggtcagaccagtagacgctttcctggtaaaca

SEQ ID NO: 755110 - DNA, 33 bp, Homo sapien
aggtcagaccagtagatgctttcctggtaaaca

SEQ ID NO: 755111 - DNA, 33 bp, Homo sapien
gacatgccgtgttagactccaaactggttccat

SEQ ID NO: 755112 - DNA, 33 bp, Homo sapien
gacatgccgtgttagattccaaactggttccat

SEQ ID NO: 755113 - DNA, 33 bp, Homo sapien
tgtttgtgtttactaacttacccagtatctcaa

SEQ ID NO: 755114 - DNA, 33 bp, Homo sapien
tgtttgtgtttactaatttacccagtatctcaa

SEQ ID NO: 755115 - DNA, 33 bp, Homo sapien
ccgatactatgagtcaaaaagtcctttgtttct

SEQ ID NO: 755116 - DNA, 33 bp, Homo sapien
ccgatactatgagtcataaagtcctttgtttct

SEQ ID NO: 755117 - DNA, 33 bp, Homo sapien
ctgaaaataccacaaacgtttcacagaagagag

SEQ ID NO: 755118 - DNA, 33 bp, Homo sapien
ctgaaaataccacaaatgtttcacagaagagag

SEQ ID NO: 755119 - DNA, 33 bp, Homo sapien
tataatgattatgttacggtttaagtctaacat

SEQ ID NO: 755120 - DNA, 33 bp, Homo sapien
tataatgattatgttatggtttaagtctaacat

SEQ ID NO: 755121 - DNA, 33 bp, Homo sapien
tgcagtgtgcgtcaccagctatcaggaaggtgt

SEQ ID NO: 755122 - DNA, 33 bp, Homo sapien
tgcagtgtgcgtcaccggctatcaggaaggtgt

SEQ ID NO: 755123 - DNA, 33 bp, Homo sapien
ttcgtggtaccagggacgccaaagatattgaca

SEQ ID NO: 755124 - DNA, 33 bp, Homo sapien
ttcgtggtaccagggatgccaaagatattgaca

SEQ ID NO: 755125 - DNA, 33 bp, Homo sapien
caaagatattgacatggacttttctgagaggag

SEQ ID NO: 755126 - DNA, 33 bp, Homo sapien
caaagatattgacatgtacttttctgagaggag

SEQ ID NO: 755127 - DNA, 33 bp, Homo sapien
aaaggacacccgctcaaacctctaatgggccaa

SEQ ID NO: 755128 - DNA, 33 bp, Homo sapien
aaaggacacccgctcatacctctaatgggccaa

SEQ ID NO: 755129 - DNA, 33 bp, Homo sapien
gcttggcttcttgaaagcatctcctcggaacct

SEQ ID NO: 755130 - DNA, 33 bp, Homo sapien
gcttggcttcttgaaatcatctcctcggaacct

SEQ ID NO: 755131 - DNA, 33 bp, Homo sapien
tatgcataaaagacaaaagtgcaaggtcacctg

SEQ ID NO: 755132 - DNA, 33 bp, Homo sapien
tatgcataaaagacaacagtgcaaggtcacctg

SEQ ID NO: 755133 - DNA, 33 bp, Homo sapien
atgtatctctgaatacaatcatcctacttttct

SEQ ID NO: 755134 - DNA, 33 bp, Homo sapien
atgtatctctgaatacgatcatcctacttttct

SEQ ID NO: 755135 - DNA, 33 bp, Homo sapien
aatcttcacactgagacgtctactaattgcacc

SEQ ID NO: 755136 - DNA, 33 bp, Homo sapien
aatcttcacactgagatgtctactaattgcacc

SEQ ID NO: 755137 - DNA, 33 bp, Homo sapien
aggacagtgtgtagacaagaggacaccaaggcc

SEQ ID NO: 755138 - DNA, 33 bp, Homo sapien
aggacagtgtgtagaccagaggacaccaaggcc

SEQ ID NO: 755139 - DNA, 33 bp, Homo sapien
cccaagtgattcttctaaaaacgccaatcaatt

SEQ ID NO: 755140 - DNA, 33 bp, Homo sapien
cccaagtgattcttcttaaaacgccaatcaatt

SEQ ID NO: 755141 - DNA, 33 bp, Homo sapien
gatacacggtgtctacaaatttcacacttgggt

SEQ ID NO: 755142 - DNA, 33 bp, Homo sapien
gatacacggtgtctacgaatttcacacttgggt

SEQ ID NO: 755143 - DNA, 33 bp, Homo sapien
ataaacgtctgacaaaggctctgaatgacacgt

SEQ ID NO: 755144 - DNA, 33 bp, Homo sapien
ataaacgtctgacaaatgctctgaatgacacgt

SEQ ID NO: 755145 - DNA, 33 bp, Homo sapien
cctggaatgtgcgggaaagctggggtagcagag

SEQ ID NO: 755146 - DNA, 33 bp, Homo sapien
cctggaatgtgcgggagagctggggtagcagag

SEQ ID NO: 755147 - DNA, 33 bp, Homo sapien
ggcccagcagcctcaggaggaaatctaaggcta

SEQ ID NO: 755148 - DNA, 33 bp, Homo sapien
ggcccagcagcctcagtaggaaatctaaggcta

SEQ ID NO: 755149 - DNA, 33 bp, Homo sapien
aaacttccctctagttaaaagaagtaggactca

SEQ ID NO: 755150 - DNA, 33 bp, Homo sapien
aaacttccctctagttgaaagaagtaggactca

SEQ ID NO: 755151 - DNA, 33 bp, Homo sapien
ttgcaggtacaagctaaatccaagaagttgcac

SEQ ID NO: 755152 - DNA, 33 bp, Homo sapien
ttgcaggtacaagctacatccaagaagttgcac

SEQ ID NO: 755153 - DNA, 33 bp, Homo sapien
aatgggataatttggaacagctaaatgtcaagg

SEQ ID NO: 755154 - DNA, 33 bp, Homo sapien
aatgggataatttggagcagctaaatgtcaagg

SEQ ID NO: 755155 - DNA, 33 bp, Homo sapien
atattctaagtgtttgcagcagaaaccacagca

SEQ ID NO: 755156 - DNA, 33 bp, Homo sapien
atattctaagtgtttgtagcagaaaccacagca

SEQ ID NO: 755157 - DNA, 33 bp, Homo sapien
tttactgctaaatccccggcaatcaatacaggt

SEQ ID NO: 755158 - DNA, 33 bp, Homo sapien
tttactgctaaatccctggcaatcaatacaggt

SEQ ID NO: 755159 - DNA, 33 bp, Homo sapien
ttttactgagataggagagaattctggagtaat

SEQ ID NO: 755160 - DNA, 33 bp, Homo sapien
ttttactgagataggatagaattctggagtaat

SEQ ID NO: 755161 - DNA, 33 bp, Homo sapien
gccctcaaggatttgaagacttagaggctgaga

SEQ ID NO: 755162 - DNA, 33 bp, Homo sapien
gccctcaaggatttgacgacttagaggctgaga

SEQ ID NO: 755163 - DNA, 33 bp, Homo sapien
aagggctattacctgcagaagtttcagaagtct

SEQ ID NO: 755164 - DNA, 33 bp, Homo sapien
aagggctattacctgcggaagtttcagaagtct

SEQ ID NO: 755165 - DNA, 33 bp, Homo sapien
gtgagagagcgcatacaagcaaagagggaagag

SEQ ID NO: 755166 - DNA, 33 bp, Homo sapien
gtgagagagcgcatacgagcaaagagggaagag

SEQ ID NO: 755167 - DNA, 33 bp, Homo sapien
ttgcacacagatgtaacgaaaagccatcaggga

SEQ ID NO: 755168 - DNA, 33 bp, Homo sapien
ttgcacacagatgtaatgaaaagccatcaggga

SEQ ID NO: 755169 - DNA, 33 bp, Homo sapien
cctgcatataggaaaaactggcactctgtatac

SEQ ID NO: 755170 - DNA, 33 bp, Homo sapien
cctgcatataggaaaagctggcactctgtatac

SEQ ID NO: 755171 - DNA, 33 bp, Homo sapien
aatttatggtaagagagacttttctaacaatat

SEQ ID NO: 755172 - DNA, 33 bp, Homo sapien
aatttatggtaagagatacttttctaacaatat

SEQ ID NO: 755173 - DNA, 33 bp, Homo sapien
agaacttagggttgaacgtcctggaaaatattt

SEQ ID NO: 755174 - DNA, 33 bp, Homo sapien
agaacttagggttgaatgtcctggaaaatattt

SEQ ID NO: 755175 - DNA, 33 bp, Homo sapien
cctcacacttcagtaacatcagagaaccgcatc

SEQ ID NO: 755176 - DNA, 33 bp, Homo sapien
cctcacacttcagtaatatcagagaaccgcatc

SEQ ID NO: 755177 - DNA, 33 bp, Homo sapien
caatgtttattatctcccttgacattgctattg

SEQ ID NO: 755178 - DNA, 33 bp, Homo sapien
caatgtttattatctctcttgacattgctattg

SEQ ID NO: 755179 - DNA, 33 bp, Homo sapien
attttgtaaaagaatgaatgaccacttaaaggt

SEQ ID NO: 755180 - DNA, 33 bp, Homo sapien
attttgtaaaagaatgtatgaccacttaaaggt

SEQ ID NO: 755181 - DNA, 33 bp, Homo sapien
ctttactgttgctaacggaaggaattgaggtat

SEQ ID NO: 755182 - DNA, 33 bp, Homo sapien
ctttactgttgctaactgaaggaattgaggtat

SEQ ID NO: 755183 - DNA, 33 bp, Homo sapien
tatggtttttatattccatactctcaggtacag

SEQ ID NO: 755184 - DNA, 33 bp, Homo sapien
tatggtttttatattcgatactctcaggtacag

SEQ ID NO: 755185 - DNA, 33 bp, Homo sapien
tgtaaacatatggacactaggttcatggcaaga

SEQ ID NO: 755186 - DNA, 33 bp, Homo sapien
tgtaaacatatggacagtaggttcatggcaaga

SEQ ID NO: 755187 - DNA, 33 bp, Homo sapien
ttgaagattcgaagacggaagcgatgccaccac

SEQ ID NO: 755188 - DNA, 33 bp, Homo sapien
ttgaagattcgaagactgaagcgatgccaccac

SEQ ID NO: 755189 - DNA, 33 bp, Homo sapien
atgtgacatcacattcaatcttcacctgtgggg

SEQ ID NO: 755190 - DNA, 33 bp, Homo sapien
atgtgacatcacattcgatcttcacctgtgggg

SEQ ID NO: 755191 - DNA, 33 bp, Homo sapien
tttttattccatgcacaggaaaataaactcaat

SEQ ID NO: 755192 - DNA, 33 bp, Homo sapien
tttttattccatgcaccggaaaataaactcaat

SEQ ID NO: 755193 - DNA, 33 bp, Homo sapien
attcctttcaatagacagcttctcataagaagc

SEQ ID NO: 755194 - DNA, 33 bp, Homo sapien
attcctttcaatagactgcttctcataagaagc

SEQ ID NO: 755195 - DNA, 33 bp, Homo sapien
tgttgcttcccaaagcagatgattacaacacag

SEQ ID NO: 755196 - DNA, 33 bp, Homo sapien
tgttgcttcccaaagccgatgattacaacacag

SEQ ID NO: 755197 - DNA, 33 bp, Homo sapien
gaaaactaggtggtgaaataaatcctaccagaa

SEQ ID NO: 755198 - DNA, 33 bp, Homo sapien
gaaaactaggtggtgacataaatcctaccagaa

SEQ ID NO: 755199 - DNA, 33 bp, Homo sapien
aatgtttgaattggaaactacaaattaatactg

SEQ ID NO: 755200 - DNA, 33 bp, Homo sapien
aatgtttgaattggaacctacaaattaatactg

SEQ ID NO: 755201 - DNA, 33 bp, Homo sapien
agagtttctgctgaaaaatccatcattaacctg

SEQ ID NO: 755202 - DNA, 33 bp, Homo sapien
agagtttctgctgaaagatccatcattaacctg

SEQ ID NO: 755203 - DNA, 33 bp, Homo sapien
agattttagagcataaccctggagtagaaatat

SEQ ID NO: 755204 - DNA, 33 bp, Homo sapien
agattttagagcataatcctggagtagaaatat

SEQ ID NO: 755205 - DNA, 33 bp, Homo sapien
ttcctaaatgcccctaaatgacagctgagctcc

SEQ ID NO: 755206 - DNA, 33 bp, Homo sapien
ttcctaaatgcccctagatgacagctgagctcc

SEQ ID NO: 755207 - DNA, 33 bp, Homo sapien
tttagaacactgtctcaaattgtataatggttt

SEQ ID NO: 755208 - DNA, 33 bp, Homo sapien
tttagaacactgtctcgaattgtataatggttt

SEQ ID NO: 755209 - DNA, 33 bp, Homo sapien
ccctcacggtgacaaacgagaaacccaacttac

SEQ ID NO: 755210 - DNA, 33 bp, Homo sapien
ccctcacggtgacaaatgagaaacccaacttac

SEQ ID NO: 755211 - DNA, 33 bp, Homo sapien
aatctgttcagtctgacaaggatattcacacaa

SEQ ID NO: 755212 - DNA, 33 bp, Homo sapien
aatctgttcagtctgataaggatattcacacaa

SEQ ID NO: 755213 - DNA, 33 bp, Homo sapien
atgtcctatgagagtcaactaaagaagttacaa

SEQ ID NO: 755214 - DNA, 33 bp, Homo sapien
atgtcctatgagagtcgactaaagaagttacaa

SEQ ID NO: 755215 - DNA, 33 bp, Homo sapien
caatctttactctccacgtctatgcaatctaag

SEQ ID NO: 755216 - DNA, 33 bp, Homo sapien
caatctttactctccatgtctatgcaatctaag

SEQ ID NO: 755217 - DNA, 33 bp, Homo sapien
gtcgctatatcttggaaagaggctaaagatatc

SEQ ID NO: 755218 - DNA, 33 bp, Homo sapien
gtcgctatatcttggagagaggctaaagatatc

SEQ ID NO: 755219 - DNA, 33 bp, Homo sapien
tgggaaacagaaggccaagccctaagtttccac

SEQ ID NO: 755220 - DNA, 33 bp, Homo sapien
tgggaaacagaaggcccagccctaagtttccac

SEQ ID NO: 755221 - DNA, 33 bp, Homo sapien
tacaaaagaaagatgaacttcggtggtcttaaa

SEQ ID NO: 755222 - DNA, 33 bp, Homo sapien
tacaaaagaaagatgatcttcggtggtcttaaa

SEQ ID NO: 755223 - DNA, 33 bp, Homo sapien
gaaagtcctaacccacagaactcaagttgcctc

SEQ ID NO: 755224 - DNA, 33 bp, Homo sapien
gaaagtcctaacccacggaactcaagttgcctc

SEQ ID NO: 755225 - DNA, 33 bp, Homo sapien
agcaattcctttatgacgaccctgaactttgta

SEQ ID NO: 755226 - DNA, 33 bp, Homo sapien
agcaattcctttatgatgaccctgaactttgta

SEQ ID NO: 755227 - DNA, 33 bp, Homo sapien
acatctacaacttcaacctgaataaacttgact

SEQ ID NO: 755228 - DNA, 33 bp, Homo sapien
acatctacaacttcaatctgaataaacttgact

SEQ ID NO: 755229 - DNA, 33 bp, Homo sapien
aataagtacctatatgccaaaaaaagataaatg

SEQ ID NO: 755230 - DNA, 33 bp, Homo sapien
aataagtacctatatgtcaaaaaaagataaatg

SEQ ID NO: 755231 - DNA, 33 bp, Homo sapien
aaatgctgtatttagtaacagtgaattaatacc

SEQ ID NO: 755232 - DNA, 33 bp, Homo sapien
aaatgctgtatttagtcacagtgaattaatacc

SEQ ID NO: 755233 - DNA, 33 bp, Homo sapien
gaacataccttgggaaactctaaagcacattgg

SEQ ID NO: 755234 - DNA, 33 bp, Homo sapien
gaacataccttgggaacctctaaagcacattgg

SEQ ID NO: 755235 - DNA, 33 bp, Homo sapien
atgacagagagataaacgtggggttcacaagca

SEQ ID NO: 755236 - DNA, 33 bp, Homo sapien
atgacagagagataaatgtggggttcacaagca

SEQ ID NO: 755237 - DNA, 33 bp, Homo sapien
ttggaataagaccccaagtagtgaattaatata

SEQ ID NO: 755238 - DNA, 33 bp, Homo sapien
ttggaataagaccccatgtagtgaattaatata

SEQ ID NO: 755239 - DNA, 33 bp, Homo sapien
atgattacaaaacaaccaagcttagagggattg

SEQ ID NO: 755240 - DNA, 33 bp, Homo sapien
atgattacaaaacaacgaagcttagagggattg

SEQ ID NO: 755241 - DNA, 33 bp, Homo sapien
ttaggctgcatgggaaacaaagtcataatcaaa

SEQ ID NO: 755242 - DNA, 33 bp, Homo sapien
ttaggctgcatgggaagcaaagtcataatcaaa

SEQ ID NO: 755243 - DNA, 33 bp, Homo sapien
atcacaatatcaccaccctatcctaatctggta

SEQ ID NO: 755244 - DNA, 33 bp, Homo sapien
atcacaatatcaccacgctatcctaatctggta

SEQ ID NO: 755245 - DNA, 33 bp, Homo sapien
agcctgaccagcaagaagaatgctctgggagag

SEQ ID NO: 755246 - DNA, 33 bp, Homo sapien
agcctgaccagcaagaggaatgctctgggagag

SEQ ID NO: 755247 - DNA, 33 bp, Homo sapien
tcaggtgcctgagcaacttaaaatcattttcca

SEQ ID NO: 755248 - DNA, 33 bp, Homo sapien
tcaggtgcctgagcaatttaaaatcattttcca

SEQ ID NO: 755249 - DNA, 33 bp, Homo sapien
cctaactctctccagacgctatagatgaagaag

SEQ ID NO: 755250 - DNA, 33 bp, Homo sapien
cctaactctctccagatgctatagatgaagaag

SEQ ID NO: 755251 - DNA, 33 bp, Homo sapien
aatcttgaataagcaacacccctgaccactttg

SEQ ID NO: 755252 - DNA, 33 bp, Homo sapien
aatcttgaataagcaagacccctgaccactttg

SEQ ID NO: 755253 - DNA, 33 bp, Homo sapien
ttacaacactctaacaactcctaaagacccaga

SEQ ID NO: 755254 - DNA, 33 bp, Homo sapien
ttacaacactctaacatctcctaaagacccaga

SEQ ID NO: 755255 - DNA, 33 bp, Homo sapien
ttcatcatcttctatccctcatagcctctgtaa

SEQ ID NO: 755256 - DNA, 33 bp, Homo sapien
ttcatcatcttctatctctcatagcctctgtaa

SEQ ID NO: 755257 - DNA, 33 bp, Homo sapien
gactcctagggcaaaagaaatacctacaattca

SEQ ID NO: 755258 - DNA, 33 bp, Homo sapien
gactcctagggcaaaataaatacctacaattca

SEQ ID NO: 755259 - DNA, 33 bp, Homo sapien
gcagtggaggtgatagccaaggtctccgtaata

SEQ ID NO: 755260 - DNA, 33 bp, Homo sapien
gcagtggaggtgatagtcaaggtctccgtaata

SEQ ID NO: 755261 - DNA, 33 bp, Homo sapien
tctcagtgacctaggaaggaataaccaaaggaa

SEQ ID NO: 755262 - DNA, 33 bp, Homo sapien
tctcagtgacctaggatggaataaccaaaggaa

SEQ ID NO: 755263 - DNA, 33 bp, Homo sapien
caaaggaaggtttaaactgtatgcctctctttg

SEQ ID NO: 755264 - DNA, 33 bp, Homo sapien
caaaggaaggtttaaattgtatgcctctctttg

SEQ ID NO: 755265 - DNA, 33 bp, Homo sapien
aaaagtcagggtttaacagctctacaagtttac

SEQ ID NO: 755266 - DNA, 33 bp, Homo sapien
aaaagtcagggtttaatagctctacaagtttac

SEQ ID NO: 755267 - DNA, 33 bp, Homo sapien
tatgtaataaattaccaccgtgttaacagaagg

SEQ ID NO: 755268 - DNA, 33 bp, Homo sapien
tatgtaataaattaccgccgtgttaacagaagg

SEQ ID NO: 755269 - DNA, 33 bp, Homo sapien
agtaatggctgggccgcaaatgatgaaaatgtg

SEQ ID NO: 755270 - DNA, 33 bp, Homo sapien
agtaatggctgggccgtaaatgatgaaaatgtg

SEQ ID NO: 755271 - DNA, 33 bp, Homo sapien
aagcaccatccctttcaaatctcctttacagaa

SEQ ID NO: 755272 - DNA, 33 bp, Homo sapien
aagcaccatccctttccaatctcctttacagaa

SEQ ID NO: 755273 - DNA, 33 bp, Homo sapien
ctccactagtctcatcaacaatattatttagtt

SEQ ID NO: 755274 - DNA, 33 bp, Homo sapien
ctccactagtctcatcgacaatattatttagtt

SEQ ID NO: 755275 - DNA, 33 bp, Homo sapien
acagaagactttaatgcaaaactattgcagaga

SEQ ID NO: 755276 - DNA, 33 bp, Homo sapien
acagaagactttaatggaaaactattgcagaga

SEQ ID NO: 755277 - DNA, 33 bp, Homo sapien
catcttctgcctgctaaacaaaatcccactgca

SEQ ID NO: 755278 - DNA, 33 bp, Homo sapien
catcttctgcctgctacacaaaatcccactgca

SEQ ID NO: 755279 - DNA, 33 bp, Homo sapien
tacaaatgatagattaaaagcatgacaaataaa

SEQ ID NO: 755280 - DNA, 33 bp, Homo sapien
tacaaatgatagattacaagcatgacaaataaa

SEQ ID NO: 755281 - DNA, 33 bp, Homo sapien
ccaaagacaccaaacacctgacagacatggagt

SEQ ID NO: 755282 - DNA, 33 bp, Homo sapien
ccaaagacaccaaacatctgacagacatggagt

SEQ ID NO: 755283 - DNA, 33 bp, Homo sapien
cctaccgttgacttccacacctcaggatccggc

SEQ ID NO: 755284 - DNA, 33 bp, Homo sapien
cctaccgttgacttccgcacctcaggatccggc

SEQ ID NO: 755285 - DNA, 33 bp, Homo sapien
catggagacgatgagacggggtaagattcagac

SEQ ID NO: 755286 - DNA, 33 bp, Homo sapien
catggagacgatgagatggggtaagattcagac

SEQ ID NO: 755287 - DNA, 33 bp, Homo sapien
aaatgtccaaccataacctggaaattctcagtc

SEQ ID NO: 755288 - DNA, 33 bp, Homo sapien
aaatgtccaaccataagctggaaattctcagtc

SEQ ID NO: 755289 - DNA, 33 bp, Homo sapien
ttcaagtcaactgtcacggtggggagggctggc

SEQ ID NO: 755290 - DNA, 33 bp, Homo sapien
ttcaagtcaactgtcatggtggggagggctggc

SEQ ID NO: 755291 - DNA, 33 bp, Homo sapien
aaacactactaatttcaccaaataaaatccagt

SEQ ID NO: 755292 - DNA, 33 bp, Homo sapien
aaacactactaatttcgccaaataaaatccagt

SEQ ID NO: 755293 - DNA, 33 bp, Homo sapien
gccagaagccaaaaaaataacctgaaggctgca

SEQ ID NO: 755294 - DNA, 33 bp, Homo sapien
gccagaagccaaaaaagtaacctgaaggctgca

SEQ ID NO: 755295 - DNA, 33 bp, Homo sapien
gatctctgtgagaaagcactggatgtttatttg

SEQ ID NO: 755296 - DNA, 33 bp, Homo sapien
gatctctgtgagaaagtactggatgtttatttg

SEQ ID NO: 755297 - DNA, 33 bp, Homo sapien
ttacaaatactgcagagacacaaggattagttg

SEQ ID NO: 755298 - DNA, 33 bp, Homo sapien
ttacaaatactgcagatacacaaggattagttg

SEQ ID NO: 755299 - DNA, 33 bp, Homo sapien
attttttgaaagtttgaaatgtacacactttat

SEQ ID NO: 755300 - DNA, 33 bp, Homo sapien
attttttgaaagtttgcaatgtacacactttat

SEQ ID NO: 755301 - DNA, 33 bp, Homo sapien
aggtgagtcatcaggtaaaagagctcatgaagc

SEQ ID NO: 755302 - DNA, 33 bp, Homo sapien
aggtgagtcatcaggtgaaagagctcatgaagc

SEQ ID NO: 755303 - DNA, 33 bp, Homo sapien
tatggttgttagatgaatcaagagaataagcgt

SEQ ID NO: 755304 - DNA, 33 bp, Homo sapien
tatggttgttagatgagtcaagagaataagcgt

SEQ ID NO: 755305 - DNA, 33 bp, Homo sapien
ctcattatgctgttccaatatgacctgtggttc

SEQ ID NO: 755306 - DNA, 33 bp, Homo sapien
ctcattatgctgttccgatatgacctgtggttc

SEQ ID NO: 755307 - DNA, 33 bp, Homo sapien
ctgtaagaacaattcaggatgcccataaatatg

SEQ ID NO: 755308 - DNA, 33 bp, Homo sapien
ctgtaagaacaattcatgatgcccataaatatg

SEQ ID NO: 755309 - DNA, 33 bp, Homo sapien
aagccgtagaaacgggcaagatcatgtctgaag

SEQ ID NO: 755310 - DNA, 33 bp, Homo sapien
aagccgtagaaacgggtaagatcatgtctgaag

SEQ ID NO: 755311 - DNA, 33 bp, Homo sapien
aattcttgttgatgacagtctccaggcccactg

SEQ ID NO: 755312 - DNA, 33 bp, Homo sapien
aattcttgttgatgacggtctccaggcccactg

SEQ ID NO: 755313 - DNA, 33 bp, Homo sapien
aaaagaccagaaacaacagaagagtgatgtcag

SEQ ID NO: 755314 - DNA, 33 bp, Homo sapien
aaaagaccagaaacaatagaagagtgatgtcag

SEQ ID NO: 755315 - DNA, 33 bp, Homo sapien
ttcctgtgtgactctccaaatcttttcatgggt

SEQ ID NO: 755316 - DNA, 33 bp, Homo sapien
ttcctgtgtgactctctaaatcttttcatgggt

SEQ ID NO: 755317 - DNA, 33 bp, Homo sapien
ttatgcaaccaaagtaagtatcacttcctcaca

SEQ ID NO: 755318 - DNA, 33 bp, Homo sapien
ttatgcaaccaaagtacgtatcacttcctcaca

SEQ ID NO: 755319 - DNA, 33 bp, Homo sapien
gtagatgacttcccaaattgctctaggttgtca

SEQ ID NO: 755320 - DNA, 33 bp, Homo sapien
gtagatgacttcccaacttgctctaggttgtca

SEQ ID NO: 755321 - DNA, 33 bp, Homo sapien
gagaagatgattaggaaaattcaggagctgatt

SEQ ID NO: 755322 - DNA, 33 bp, Homo sapien
gagaagatgattaggacaattcaggagctgatt

SEQ ID NO: 755323 - DNA, 33 bp, Homo sapien
aaactacatcttaggcaaaactttactgcagac

SEQ ID NO: 755324 - DNA, 33 bp, Homo sapien
aaactacatcttaggctaaactttactgcagac

SEQ ID NO: 755325 - DNA, 33 bp, Homo sapien
taatgcctggaaaccaaaaaagccacctcagct

SEQ ID NO: 755326 - DNA, 33 bp, Homo sapien
taatgcctggaaaccagaaaagccacctcagct

SEQ ID NO: 755327 - DNA, 33 bp, Homo sapien
gatcaacagaaacttgcattcattggtggtgga

SEQ ID NO: 755328 - DNA, 33 bp, Homo sapien
gatcaacagaaacttgtattcattggtggtgga

SEQ ID NO: 755329 - DNA, 33 bp, Homo sapien
acgagttttgtattacaaccagaatactgacat

SEQ ID NO: 755330 - DNA, 33 bp, Homo sapien
acgagttttgtattacgaccagaatactgacat

SEQ ID NO: 755331 - DNA, 33 bp, Homo sapien
atcttcgtcttattcaccctccacttgtctgca

SEQ ID NO: 755332 - DNA, 33 bp, Homo sapien
atcttcgtcttattcatcctccacttgtctgca

SEQ ID NO: 755333 - DNA, 33 bp, Homo sapien
ggccaacctctcaacactaccacattggggatc

SEQ ID NO: 755334 - DNA, 33 bp, Homo sapien
ggccaacctctcaacattaccacattggggatc

SEQ ID NO: 755335 - DNA, 33 bp, Homo sapien
agaaaaataatcgtggaagttctctgctgaaaa

SEQ ID NO: 755336 - DNA, 33 bp, Homo sapien
agaaaaataatcgtgggagttctctgctgaaaa

SEQ ID NO: 755337 - DNA, 33 bp, Homo sapien
gtaaccagcctattgaacgcttacattttcttc

SEQ ID NO: 755338 - DNA, 33 bp, Homo sapien
gtaaccagcctattgatcgcttacattttcttc

SEQ ID NO: 755339 - DNA, 33 bp, Homo sapien
tgcagggaacctggaccagatgacaactgcaat

SEQ ID NO: 755340 - DNA, 33 bp, Homo sapien
tgcagggaacctggactagatgacaactgcaat

SEQ ID NO: 755341 - DNA, 33 bp, Homo sapien
ctgataagaattggaaatcaactaactacctga

SEQ ID NO: 755342 - DNA, 33 bp, Homo sapien
ctgataagaattggaactcaactaactacctga

SEQ ID NO: 755343 - DNA, 33 bp, Homo sapien
gacttcactagaacaactgcttgatattctaca

SEQ ID NO: 755344 - DNA, 33 bp, Homo sapien
gacttcactagaacaattgcttgatattctaca

SEQ ID NO: 755345 - DNA, 33 bp, Homo sapien
ggcaacaccagatgaaagaaaaaggttctacca

SEQ ID NO: 755346 - DNA, 33 bp, Homo sapien
ggcaacaccagatgaatgaaaaaggttctacca

SEQ ID NO: 755347 - DNA, 33 bp, Homo sapien
tgaggaatcgaagaccaattcagtcaagcagca

SEQ ID NO: 755348 - DNA, 33 bp, Homo sapien
tgaggaatcgaagacctattcagtcaagcagca

SEQ ID NO: 755349 - DNA, 33 bp, Homo sapien
taacctacatagactgaaacttgcttaaataat

SEQ ID NO: 755350 - DNA, 33 bp, Homo sapien
taacctacatagactgcaacttgcttaaataat

SEQ ID NO: 755351 - DNA, 33 bp, Homo sapien
gttgagcttatggaatcaatgtagcagcctatg

SEQ ID NO: 755352 - DNA, 33 bp, Homo sapien
gttgagcttatggaatgaatgtagcagcctatg

SEQ ID NO: 755353 - DNA, 33 bp, Homo sapien
cttgagtcaaaaaacaaggaaggaaggactgaa

SEQ ID NO: 755354 - DNA, 33 bp, Homo sapien
cttgagtcaaaaaacagggaaggaaggactgaa

SEQ ID NO: 755355 - DNA, 33 bp, Homo sapien
cattcttcattaaaagaaacaagggctctttgg

SEQ ID NO: 755356 - DNA, 33 bp, Homo sapien
cattcttcattaaaaggaacaagggctctttgg

SEQ ID NO: 755357 - DNA, 33 bp, Homo sapien
tgaggaacagaacaaaggtgataacagcaagca

SEQ ID NO: 755358 - DNA, 33 bp, Homo sapien
tgaggaacagaacaaatgtgataacagcaagca

SEQ ID NO: 755359 - DNA, 33 bp, Homo sapien
tatgaactcactagaacatagtacctaaggtct

SEQ ID NO: 755360 - DNA, 33 bp, Homo sapien
tatgaactcactagaatatagtacctaaggtct

SEQ ID NO: 755361 - DNA, 33 bp, Homo sapien
agccaattagctaacacagatggtgaccacaat

SEQ ID NO: 755362 - DNA, 33 bp, Homo sapien
agccaattagctaacagagatggtgaccacaat

SEQ ID NO: 755363 - DNA, 33 bp, Homo sapien
aggtagtctactgagaaattgcaaagacaaaga

SEQ ID NO: 755364 - DNA, 33 bp, Homo sapien
aggtagtctactgagagattgcaaagacaaaga

SEQ ID NO: 755365 - DNA, 33 bp, Homo sapien
gatacctgatctccaactggaaactgcaatgtt

SEQ ID NO: 755366 - DNA, 33 bp, Homo sapien
gatacctgatctccaagtggaaactgcaatgtt

SEQ ID NO: 755367 - DNA, 33 bp, Homo sapien
ctctgctgtgaagattaaaagttttgtgtctgt

SEQ ID NO: 755368 - DNA, 33 bp, Homo sapien
ctctgctgtgaagatttaaagttttgtgtctgt

SEQ ID NO: 755369 - DNA, 33 bp, Homo sapien
taataatgcattaaacaaggcttaagtaaaatg

SEQ ID NO: 755370 - DNA, 33 bp, Homo sapien
taataatgcattaaaccaggcttaagtaaaatg

SEQ ID NO: 755371 - DNA, 33 bp, Homo sapien
ggagtgatcaactatgacacggaattgggaaat

SEQ ID NO: 755372 - DNA, 33 bp, Homo sapien
ggagtgatcaactatgtcacggaattgggaaat

SEQ ID NO: 755373 - DNA, 33 bp, Homo sapien
ctaaggagagtcttggaatacttactcagaata

SEQ ID NO: 755374 - DNA, 33 bp, Homo sapien
ctaaggagagtcttgggatacttactcagaata

SEQ ID NO: 755375 - DNA, 33 bp, Homo sapien
tgattctagtcctgaacacatggaatcaattgt

SEQ ID NO: 755376 - DNA, 33 bp, Homo sapien
tgattctagtcctgaatacatggaatcaattgt

SEQ ID NO: 755377 - DNA, 33 bp, Homo sapien
ccccatttaaaacacaactcactgtgacaattg

SEQ ID NO: 755378 - DNA, 33 bp, Homo sapien
ccccatttaaaacacacctcactgtgacaattg

SEQ ID NO: 755379 - DNA, 33 bp, Homo sapien
cattgcagtttaaataccattttcttgtggcca

SEQ ID NO: 755380 - DNA, 33 bp, Homo sapien
cattgcagtttaaatagcattttcttgtggcca

SEQ ID NO: 755381 - DNA, 33 bp, Homo sapien
gtacgatgcaaagctgccaataatttggtcaga

SEQ ID NO: 755382 - DNA, 33 bp, Homo sapien
gtacgatgcaaagctgtcaataatttggtcaga

SEQ ID NO: 755383 - DNA, 33 bp, Homo sapien
ttcaagttgcttgttcaatacgctgagctacag

SEQ ID NO: 755384 - DNA, 33 bp, Homo sapien
ttcaagttgcttgttcgatacgctgagctacag

SEQ ID NO: 755385 - DNA, 33 bp, Homo sapien
tcaaatagaactttaaacaatcatatctcaaaa

SEQ ID NO: 755386 - DNA, 33 bp, Homo sapien
tcaaatagaactttaatcaatcatatctcaaaa

SEQ ID NO: 755387 - DNA, 33 bp, Homo sapien
ccgacaggaaggtgaacaagtcatctgcgtgct

SEQ ID NO: 755388 - DNA, 33 bp, Homo sapien
ccgacaggaaggtgaagaagtcatctgcgtgct

SEQ ID NO: 755389 - DNA, 33 bp, Homo sapien
tccattcagtatccaaaagaggtatatccctga

SEQ ID NO: 755390 - DNA, 33 bp, Homo sapien
tccattcagtatccaacagaggtatatccctga

SEQ ID NO: 755391 - DNA, 33 bp, Homo sapien
atttgaattgtccataagtttccttaataagct

SEQ ID NO: 755392 - DNA, 33 bp, Homo sapien
atttgaattgtccatatgtttccttaataagct

SEQ ID NO: 755393 - DNA, 33 bp, Homo sapien
aacagggagcttattggaggcattgacgaacac

SEQ ID NO: 755394 - DNA, 33 bp, Homo sapien
aacagggagcttattgtaggcattgacgaacac

SEQ ID NO: 755395 - DNA, 33 bp, Homo sapien
tgtaatctgtttactccctacaattaaaggtgg

SEQ ID NO: 755396 - DNA, 33 bp, Homo sapien
tgtaatctgtttactctctacaattaaaggtgg

SEQ ID NO: 755397 - DNA, 33 bp, Homo sapien
gcaaccactgtatgacccttctttcctgcttgt

SEQ ID NO: 755398 - DNA, 33 bp, Homo sapien
gcaaccactgtatgactcttctttcctgcttgt

SEQ ID NO: 755399 - DNA, 33 bp, Homo sapien
atagacaatttacacaaatcataagtgtgccac

SEQ ID NO: 755400 - DNA, 33 bp, Homo sapien
atagacaatttacacagatcataagtgtgccac

SEQ ID NO: 755401 - DNA, 33 bp, Homo sapien
gctacccaattctttacagagatgccattttcc

SEQ ID NO: 755402 - DNA, 33 bp, Homo sapien
gctacccaattctttatagagatgccattttcc

SEQ ID NO: 755403 - DNA, 33 bp, Homo sapien
atgaacaagttcacaacactggatgaggaagta

SEQ ID NO: 755404 - DNA, 33 bp, Homo sapien
atgaacaagttcacaatactggatgaggaagta

SEQ ID NO: 755405 - DNA, 33 bp, Homo sapien
acagagatgattagagaatacaaagatagacct

SEQ ID NO: 755406 - DNA, 33 bp, Homo sapien
acagagatgattagaggatacaaagatagacct

SEQ ID NO: 755407 - DNA, 33 bp, Homo sapien
acacatgccttaatgaagaaattggagacggaa

SEQ ID NO: 755408 - DNA, 33 bp, Homo sapien
acacatgccttaatgaggaaattggagacggaa

SEQ ID NO: 755409 - DNA, 33 bp, Homo sapien
ggaggcagtttctgaacctaaggtataatgttg

SEQ ID NO: 755410 - DNA, 33 bp, Homo sapien
ggaggcagtttctgaatctaaggtataatgttg

SEQ ID NO: 755411 - DNA, 33 bp, Homo sapien
gtctagactaacaaaaactcctataaacctcca

SEQ ID NO: 755412 - DNA, 33 bp, Homo sapien
gtctagactaacaaaacctcctataaacctcca

SEQ ID NO: 755413 - DNA, 33 bp, Homo sapien
catgcttttaaagatacagccacatgtccatag

SEQ ID NO: 755414 - DNA, 33 bp, Homo sapien
catgcttttaaagatatagccacatgtccatag

SEQ ID NO: 755415 - DNA, 33 bp, Homo sapien
ggtggtattactcagacgaatatggtcagactc

SEQ ID NO: 755416 - DNA, 33 bp, Homo sapien
ggtggtattactcagaggaatatggtcagactc

SEQ ID NO: 755417 - DNA, 33 bp, Homo sapien
ttccgacactaaaaaacgagcattggcgcatta

SEQ ID NO: 755418 - DNA, 33 bp, Homo sapien
ttccgacactaaaaaatgagcattggcgcatta

SEQ ID NO: 755419 - DNA, 33 bp, Homo sapien
tgttttcacaaaatccccaaatatatagtttag

SEQ ID NO: 755420 - DNA, 33 bp, Homo sapien
tgttttcacaaaatcctcaaatatatagtttag

SEQ ID NO: 755421 - DNA, 33 bp, Homo sapien
ccatctccacattcaaataattcctcatgttct

SEQ ID NO: 755422 - DNA, 33 bp, Homo sapien
ccatctccacattcaagtaattcctcatgttct

SEQ ID NO: 755423 - DNA, 33 bp, Homo sapien
agagtattattctgcaataaaaagatatgaaat

SEQ ID NO: 755424 - DNA, 33 bp, Homo sapien
agagtattattctgcagtaaaaagatatgaaat

SEQ ID NO: 755425 - DNA, 33 bp, Homo sapien
gaaacaagctggaaagacttcttcaacattgtc

SEQ ID NO: 755426 - DNA, 33 bp, Homo sapien
gaaacaagctggaaaggcttcttcaacattgtc

SEQ ID NO: 755427 - DNA, 33 bp, Homo sapien
agggagacttctgagtcacgactttccatgctt

SEQ ID NO: 755428 - DNA, 33 bp, Homo sapien
agggagacttctgagtgacgactttccatgctt

SEQ ID NO: 755429 - DNA, 33 bp, Homo sapien
acaacttcatctgaaaggctcaactgattagga

SEQ ID NO: 755430 - DNA, 33 bp, Homo sapien
acaacttcatctgaaatgctcaactgattagga

SEQ ID NO: 755431 - DNA, 33 bp, Homo sapien
ctgtggtcagacaggaaaggtgctgcatgaaga

SEQ ID NO: 755432 - DNA, 33 bp, Homo sapien
ctgtggtcagacaggagaggtgctgcatgaaga

SEQ ID NO: 755433 - DNA, 33 bp, Homo sapien
gttcttgaacatagatcaaacttgcagaagtga

SEQ ID NO: 755434 - DNA, 33 bp, Homo sapien
gttcttgaacatagatgaaacttgcagaagtga

SEQ ID NO: 755435 - DNA, 33 bp, Homo sapien
tagccaaggataattacgcagttctcctcattt

SEQ ID NO: 755436 - DNA, 33 bp, Homo sapien
tagccaaggataattatgcagttctcctcattt

SEQ ID NO: 755437 - DNA, 33 bp, Homo sapien
tccttgggggaatgacagataaaagcaggggtt

SEQ ID NO: 755438 - DNA, 33 bp, Homo sapien
tccttgggggaatgacggataaaagcaggggtt

SEQ ID NO: 755439 - DNA, 33 bp, Homo sapien
agaactgctactacacagagatttgtcgatcac

SEQ ID NO: 755440 - DNA, 33 bp, Homo sapien
agaactgctactacacggagatttgtcgatcac

SEQ ID NO: 755441 - DNA, 33 bp, Homo sapien
tgtaaatttagagtgagcaaacctaacaagaga

SEQ ID NO: 755442 - DNA, 33 bp, Homo sapien
tgtaaatttagagtgatcaaacctaacaagaga

SEQ ID NO: 755443 - DNA, 33 bp, Homo sapien
tcacggtgctttgtgaagtggctaaatgcggtt

SEQ ID NO: 755444 - DNA, 33 bp, Homo sapien
tcacggtgctttgtgaggtggctaaatgcggtt

SEQ ID NO: 755445 - DNA, 33 bp, Homo sapien
caagaacaaacttgtgaacctaatgttaaaagt

SEQ ID NO: 755446 - DNA, 33 bp, Homo sapien
caagaacaaacttgtggacctaatgttaaaagt

SEQ ID NO: 755447 - DNA, 33 bp, Homo sapien
aatagcaaagaacatgaaatcaaggtaaatgcc

SEQ ID NO: 755448 - DNA, 33 bp, Homo sapien
aatagcaaagaacatggaatcaaggtaaatgcc

SEQ ID NO: 755449 - DNA, 33 bp, Homo sapien
gtgatgcctctggactaaattcctatctttcac

SEQ ID NO: 755450 - DNA, 33 bp, Homo sapien
gtgatgcctctggactgaattcctatctttcac

SEQ ID NO: 755451 - DNA, 33 bp, Homo sapien
ttgtgttaacgaatgaatatgaaatctatagat

SEQ ID NO: 755452 - DNA, 33 bp, Homo sapien
ttgtgttaacgaatgagtatgaaatctatagat

SEQ ID NO: 755453 - DNA, 33 bp, Homo sapien
tggtcaaagaatagaccgaggcaggtatccagg

SEQ ID NO: 755454 - DNA, 33 bp, Homo sapien
tggtcaaagaatagactgaggcaggtatccagg

SEQ ID NO: 755455 - DNA, 33 bp, Homo sapien
accagtggactgatacaactgatatgtttattg

SEQ ID NO: 755456 - DNA, 33 bp, Homo sapien
accagtggactgatacgactgatatgtttattg

SEQ ID NO: 755457 - DNA, 33 bp, Homo sapien
cttttgtcatttaagagccaataatagtagacc

SEQ ID NO: 755458 - DNA, 33 bp, Homo sapien
cttttgtcatttaagatccaataatagtagacc

SEQ ID NO: 755459 - DNA, 33 bp, Homo sapien
acttagaattacagtacggcagaaaagtacctt

SEQ ID NO: 755460 - DNA, 33 bp, Homo sapien
acttagaattacagtatggcagaaaagtacctt

SEQ ID NO: 755461 - DNA, 33 bp, Homo sapien
tattactgctaataccaggaaggaaagtgctaa

SEQ ID NO: 755462 - DNA, 33 bp, Homo sapien
tattactgctaataccgggaaggaaagtgctaa

SEQ ID NO: 755463 - DNA, 33 bp, Homo sapien
ccataatcaagtcttcacttttatttcccatag

SEQ ID NO: 755464 - DNA, 33 bp, Homo sapien
ccataatcaagtcttcgcttttatttcccatag

SEQ ID NO: 755465 - DNA, 33 bp, Homo sapien
tgaggactgcagataccgatttgtgagtcgtcg

SEQ ID NO: 755466 - DNA, 33 bp, Homo sapien
tgaggactgcagatacggatttgtgagtcgtcg

SEQ ID NO: 755467 - DNA, 33 bp, Homo sapien
cacagatacactgcgaatagtgagaagccagag

SEQ ID NO: 755468 - DNA, 33 bp, Homo sapien
cacagatacactgcgagtagtgagaagccagag

SEQ ID NO: 755469 - DNA, 33 bp, Homo sapien
tagtctcttccccacacggtagccagaataacc

SEQ ID NO: 755470 - DNA, 33 bp, Homo sapien
tagtctcttccccacatggtagccagaataacc

SEQ ID NO: 755471 - DNA, 33 bp, Homo sapien
attgttctgcagttgaaaagcctccattggctt

SEQ ID NO: 755472 - DNA, 33 bp, Homo sapien
attgttctgcagttgacaagcctccattggctt

SEQ ID NO: 755473 - DNA, 33 bp, Homo sapien
aatattggaatttcaacgtaggtcaaatgttag

SEQ ID NO: 755474 - DNA, 33 bp, Homo sapien
aatattggaatttcaatgtaggtcaaatgttag

SEQ ID NO: 755475 - DNA, 33 bp, Homo sapien
tcgtgacactgaaatacgggcagtccacctatt

SEQ ID NO: 755476 - DNA, 33 bp, Homo sapien
tcgtgacactgaaatatgggcagtccacctatt

SEQ ID NO: 755477 - DNA, 33 bp, Homo sapien
accaagacggaatgccaagtacacacatgtagg

SEQ ID NO: 755478 - DNA, 33 bp, Homo sapien
accaagacggaatgccgagtacacacatgtagg

SEQ ID NO: 755479 - DNA, 33 bp, Homo sapien
ctgtgcctcttgggtaactacatccctgaacac

SEQ ID NO: 755480 - DNA, 33 bp, Homo sapien
ctgtgcctcttgggtatctacatccctgaacac

SEQ ID NO: 755481 - DNA, 33 bp, Homo sapien
ggaaaattcttgctcaaaattctctggcaatga

SEQ ID NO: 755482 - DNA, 33 bp, Homo sapien
ggaaaattcttgctcacaattctctggcaatga

SEQ ID NO: 755483 - DNA, 33 bp, Homo sapien
ctgatgagataaagtaacaacagaacctaaata

SEQ ID NO: 755484 - DNA, 33 bp, Homo sapien
ctgatgagataaagtagcaacagaacctaaata

SEQ ID NO: 755485 - DNA, 33 bp, Homo sapien
catgttactgattccaatcttggttcacaaatc

SEQ ID NO: 755486 - DNA, 33 bp, Homo sapien
catgttactgattccagtcttggttcacaaatc

SEQ ID NO: 755487 - DNA, 33 bp, Homo sapien
gattttaacagagaaaagatatatctgccttta

SEQ ID NO: 755488 - DNA, 33 bp, Homo sapien
gattttaacagagaaaggatatatctgccttta

SEQ ID NO: 755489 - DNA, 33 bp, Homo sapien
gagatctgaatccacaatccaggaaaaagatga

SEQ ID NO: 755490 - DNA, 33 bp, Homo sapien
gagatctgaatccacagtccaggaaaaagatga

SEQ ID NO: 755491 - DNA, 33 bp, Homo sapien
gtcagacttggattgaaccatgctactggtatc

SEQ ID NO: 755492 - DNA, 33 bp, Homo sapien
gtcagacttggattgatccatgctactggtatc

SEQ ID NO: 755493 - DNA, 33 bp, Homo sapien
agtagtggtcgtagagaaagaaaattttaagaa

SEQ ID NO: 755494 - DNA, 33 bp, Homo sapien
agtagtggtcgtagaggaagaaaattttaagaa

SEQ ID NO: 755495 - DNA, 33 bp, Homo sapien
gagtaaggagtaagaaataagaagtctcaaagt

SEQ ID NO: 755496 - DNA, 33 bp, Homo sapien
gagtaaggagtaagaagtaagaagtctcaaagt

SEQ ID NO: 755497 - DNA, 33 bp, Homo sapien
cctgaagcacagatgaaaaatactcagtcctta

SEQ ID NO: 755498 - DNA, 33 bp, Homo sapien
cctgaagcacagatgacaaatactcagtcctta

SEQ ID NO: 755499 - DNA, 33 bp, Homo sapien
ccctccatccagtaaaaggttgaatcatgtcac

SEQ ID NO: 755500 - DNA, 33 bp, Homo sapien
ccctccatccagtaaagggttgaatcatgtcac

SEQ ID NO: 755501 - DNA, 33 bp, Homo sapien
gttatcagcatttacccatcaacagttgactcc

SEQ ID NO: 755502 - DNA, 33 bp, Homo sapien
gttatcagcatttacctatcaacagttgactcc

SEQ ID NO: 755503 - DNA, 33 bp, Homo sapien
cgatttagttttcccactgataagagaaaatga

SEQ ID NO: 755504 - DNA, 33 bp, Homo sapien
cgatttagttttcccattgataagagaaaatga

SEQ ID NO: 755505 - DNA, 33 bp, Homo sapien
cactgaagctcagaaagaaacttatgagacagc

SEQ ID NO: 755506 - DNA, 33 bp, Homo sapien
cactgaagctcagaaataaacttatgagacagc

SEQ ID NO: 755507 - DNA, 33 bp, Homo sapien
atttagtaaaatgatgaaccagttagaaccaat

SEQ ID NO: 755508 - DNA, 33 bp, Homo sapien
atttagtaaaatgatggaccagttagaaccaat

SEQ ID NO: 755509 - DNA, 33 bp, Homo sapien
cctaacaataagactacgatgaatagatgagtg

SEQ ID NO: 755510 - DNA, 33 bp, Homo sapien
cctaacaataagactatgatgaatagatgagtg

SEQ ID NO: 755511 - DNA, 33 bp, Homo sapien
actttggtctagaaaaattaaggcttaaaatat

SEQ ID NO: 755512 - DNA, 33 bp, Homo sapien
actttggtctagaaaagttaaggcttaaaatat

SEQ ID NO: 755513 - DNA, 33 bp, Homo sapien
acatgaacttgaaggacgaggaagttgactatg

SEQ ID NO: 755514 - DNA, 33 bp, Homo sapien
acatgaacttgaaggatgaggaagttgactatg

SEQ ID NO: 755515 - DNA, 33 bp, Homo sapien
ttccctggaatccacacgaagacagactgccac

SEQ ID NO: 755516 - DNA, 33 bp, Homo sapien
ttccctggaatccacatgaagacagactgccac

SEQ ID NO: 755517 - DNA, 33 bp, Homo sapien
ttccgacctttgccaccatcactcatgactgag

SEQ ID NO: 755518 - DNA, 33 bp, Homo sapien
ttccgacctttgccactatcactcatgactgag

SEQ ID NO: 755519 - DNA, 33 bp, Homo sapien
catgagattattagagaaaaatgtgcttggccc

SEQ ID NO: 755520 - DNA, 33 bp, Homo sapien
catgagattattagaggaaaatgtgcttggccc

SEQ ID NO: 755521 - DNA, 33 bp, Homo sapien
aaacttatgaaaaacaaatggtgttgaatcttc

SEQ ID NO: 755522 - DNA, 33 bp, Homo sapien
aaacttatgaaaaacagatggtgttgaatcttc

SEQ ID NO: 755523 - DNA, 33 bp, Homo sapien
cttttctacttcatgagagagtcacagaacttt

SEQ ID NO: 755524 - DNA, 33 bp, Homo sapien
cttttctacttcatgatagagtcacagaacttt

SEQ ID NO: 755525 - DNA, 33 bp, Homo sapien
actataaaaattgtcaatccatcgtttctggct

SEQ ID NO: 755526 - DNA, 33 bp, Homo sapien
actataaaaattgtcagtccatcgtttctggct

SEQ ID NO: 755527 - DNA, 33 bp, Homo sapien
gcactgagattctgccacagtcaatttgataac

SEQ ID NO: 755528 - DNA, 33 bp, Homo sapien
gcactgagattctgccgcagtcaatttgataac

SEQ ID NO: 755529 - DNA, 33 bp, Homo sapien
tgtgctgttagtacttaaaaaaagtgtgttgaa

SEQ ID NO: 755530 - DNA, 33 bp, Homo sapien
tgtgctgttagtactttaaaaaagtgtgttgaa

SEQ ID NO: 755531 - DNA, 33 bp, Homo sapien
aatgtggattttcataccattttcataaacacc

SEQ ID NO: 755532 - DNA, 33 bp, Homo sapien
aatgtggattttcatatcattttcataaacacc

SEQ ID NO: 755533 - DNA, 33 bp, Homo sapien
tagataactcacaacacctcttataacttggag

SEQ ID NO: 755534 - DNA, 33 bp, Homo sapien
tagataactcacaacatctcttataacttggag

SEQ ID NO: 755535 - DNA, 33 bp, Homo sapien
gttgacgacttatgaagactcatctatagaagt

SEQ ID NO: 755536 - DNA, 33 bp, Homo sapien
gttgacgacttatgaatactcatctatagaagt

SEQ ID NO: 755537 - DNA, 33 bp, Homo sapien
agcaaacagacaaacaagagttaggattcaggg

SEQ ID NO: 755538 - DNA, 33 bp, Homo sapien
agcaaacagacaaacaggagttaggattcaggg

SEQ ID NO: 755539 - DNA, 33 bp, Homo sapien
tggagatagtatttgacgttcatacagatttaa

SEQ ID NO: 755540 - DNA, 33 bp, Homo sapien
tggagatagtatttgatgttcatacagatttaa

SEQ ID NO: 755541 - DNA, 33 bp, Homo sapien
atcagaattagaactacgactaacggtactctt

SEQ ID NO: 755542 - DNA, 33 bp, Homo sapien
atcagaattagaactatgactaacggtactctt

SEQ ID NO: 755543 - DNA, 33 bp, Homo sapien
ataagtgctctaaacccattcatgaatgacatg

SEQ ID NO: 755544 - DNA, 33 bp, Homo sapien
ataagtgctctaaacctattcatgaatgacatg

SEQ ID NO: 755545 - DNA, 33 bp, Homo sapien
tgtgttcacactgtaaaaattccaggaaacatg

SEQ ID NO: 755546 - DNA, 33 bp, Homo sapien
tgtgttcacactgtaagaattccaggaaacatg

SEQ ID NO: 755547 - DNA, 33 bp, Homo sapien
agcattagtttttgcagtcatttctgtgatttc

SEQ ID NO: 755548 - DNA, 33 bp, Homo sapien
agcattagtttttgcattcatttctgtgatttc

SEQ ID NO: 755549 - DNA, 33 bp, Homo sapien
gtggtgtgggatattgaaaatgcaggaggctag

SEQ ID NO: 755550 - DNA, 33 bp, Homo sapien
gtggtgtgggatattgtaaatgcaggaggctag

SEQ ID NO: 755551 - DNA, 33 bp, Homo sapien
gtaggttaaccgattgcagcaaatgcaccactg

SEQ ID NO: 755552 - DNA, 33 bp, Homo sapien
gtaggttaaccgattgtagcaaatgcaccactg

SEQ ID NO: 755553 - DNA, 33 bp, Homo sapien
gcacagtcttatataaacatgagagaatagtct

SEQ ID NO: 755554 - DNA, 33 bp, Homo sapien
gcacagtcttatataagcatgagagaatagtct

SEQ ID NO: 755555 - DNA, 33 bp, Homo sapien
ggcttctcaaaggcacaaaatcaaagattgtaa

SEQ ID NO: 755556 - DNA, 33 bp, Homo sapien
ggcttctcaaaggcacgaaatcaaagattgtaa

SEQ ID NO: 755557 - DNA, 33 bp, Homo sapien
ttgtccaagcacacacaaaagcaaataaattag

SEQ ID NO: 755558 - DNA, 33 bp, Homo sapien
ttgtccaagcacacacgaaagcaaataaattag

SEQ ID NO: 755559 - DNA, 33 bp, Homo sapien
tcctaagataatacaccggccatgttgtcgcat

SEQ ID NO: 755560 - DNA, 33 bp, Homo sapien
tcctaagataatacactggccatgttgtcgcat

SEQ ID NO: 755561 - DNA, 33 bp, Homo sapien
ccgtttctctctctctcagaaagtttttcatag

SEQ ID NO: 755562 - DNA, 33 bp, Homo sapien
ccgtttctctctctcttagaaagtttttcatag

SEQ ID NO: 755563 - DNA, 33 bp, Homo sapien
tgggtgttcagcataactgtccttggtttgact

SEQ ID NO: 755564 - DNA, 33 bp, Homo sapien
tgggtgttcagcataattgtccttggtttgact

SEQ ID NO: 755565 - DNA, 33 bp, Homo sapien
tattctggaaaggacaatctagaataaagccaa

SEQ ID NO: 755566 - DNA, 33 bp, Homo sapien
tattctggaaaggacagtctagaataaagccaa

SEQ ID NO: 755567 - DNA, 33 bp, Homo sapien
cacaaccatccaagataaaaagtaagttcatgg

SEQ ID NO: 755568 - DNA, 33 bp, Homo sapien
cacaaccatccaagattaaaagtaagttcatgg

SEQ ID NO: 755569 - DNA, 33 bp, Homo sapien
tatttcaagcaatatgccagactaaatagaagg

SEQ ID NO: 755570 - DNA, 33 bp, Homo sapien
tatttcaagcaatatggcagactaaatagaagg

SEQ ID NO: 755571 - DNA, 33 bp, Homo sapien
agactaaatagaaggcaactccatcttagatga

SEQ ID NO: 755572 - DNA, 33 bp, Homo sapien
agactaaatagaaggccactccatcttagatga

SEQ ID NO: 755573 - DNA, 33 bp, Homo sapien
tctaaagatggctcaacgtgatttgcttgccat

SEQ ID NO: 755574 - DNA, 33 bp, Homo sapien
tctaaagatggctcaatgtgatttgcttgccat

SEQ ID NO: 755575 - DNA, 33 bp, Homo sapien
taccaaggctgaataaagaggaatatctctgac

SEQ ID NO: 755576 - DNA, 33 bp, Homo sapien
taccaaggctgaataaggaggaatatctctgac

SEQ ID NO: 755577 - DNA, 33 bp, Homo sapien
aaggcatgaataaccactgacagtttagccata

SEQ ID NO: 755578 - DNA, 33 bp, Homo sapien
aaggcatgaataaccattgacagtttagccata

SEQ ID NO: 755579 - DNA, 33 bp, Homo sapien
ctttgagtttccaagacagagcgtggagagagg

SEQ ID NO: 755580 - DNA, 33 bp, Homo sapien
ctttgagtttccaagagagagcgtggagagagg

SEQ ID NO: 755581 - DNA, 33 bp, Homo sapien
ggaaggaagtatgtctcaacatggtggagcagg

SEQ ID NO: 755582 - DNA, 33 bp, Homo sapien
ggaaggaagtatgtcttaacatggtggagcagg

SEQ ID NO: 755583 - DNA, 33 bp, Homo sapien
ctatttcacacgtttccaattaacaaaccatgt

SEQ ID NO: 755584 - DNA, 33 bp, Homo sapien
ctatttcacacgtttctaattaacaaaccatgt

SEQ ID NO: 755585 - DNA, 33 bp, Homo sapien
ctagttttctacctccaaagtaaagcaggaaga

SEQ ID NO: 755586 - DNA, 33 bp, Homo sapien
ctagttttctacctcccaagtaaagcaggaaga

SEQ ID NO: 755587 - DNA, 33 bp, Homo sapien
ttttccaaatggctcacggttggagtctgtttt

SEQ ID NO: 755588 - DNA, 33 bp, Homo sapien
ttttccaaatggctcatggttggagtctgtttt

SEQ ID NO: 755589 - DNA, 33 bp, Homo sapien
ttgcctgactgttgaagtagggccatagacttt

SEQ ID NO: 755590 - DNA, 33 bp, Homo sapien
ttgcctgactgttgaattagggccatagacttt

SEQ ID NO: 755591 - DNA, 33 bp, Homo sapien
atgcactgaccctgaaatgtttcagaaaggctg

SEQ ID NO: 755592 - DNA, 33 bp, Homo sapien
atgcactgaccctgaagtgtttcagaaaggctg

SEQ ID NO: 755593 - DNA, 33 bp, Homo sapien
gactccaaaccaagataacacctttgaaatatc

SEQ ID NO: 755594 - DNA, 33 bp, Homo sapien
gactccaaaccaagatgacacctttgaaatatc

SEQ ID NO: 755595 - DNA, 33 bp, Homo sapien
acgaacataatcaaaaataattgtgcatctgtt

SEQ ID NO: 755596 - DNA, 33 bp, Homo sapien
acgaacataatcaaaagtaattgtgcatctgtt

SEQ ID NO: 755597 - DNA, 33 bp, Homo sapien
ttatgagtctttattccagcccgtttatctgat

SEQ ID NO: 755598 - DNA, 33 bp, Homo sapien
ttatgagtctttattctagcccgtttatctgat

SEQ ID NO: 755599 - DNA, 33 bp, Homo sapien
atgaactaaactcctggaacctcagtttttctg

SEQ ID NO: 755600 - DNA, 33 bp, Homo sapien
atgaactaaactcctgtaacctcagtttttctg

SEQ ID NO: 755601 - DNA, 33 bp, Homo sapien
tgggggaatttgagaacatgaactaaactcctg

SEQ ID NO: 755602 - DNA, 33 bp, Homo sapien
tgggggaatttgagaagatgaactaaactcctg

SEQ ID NO: 755603 - DNA, 33 bp, Homo sapien
gatctagctgagtctcccagaattgtagagtag

SEQ ID NO: 755604 - DNA, 33 bp, Homo sapien
gatctagctgagtctcgcagaattgtagagtag

SEQ ID NO: 755605 - DNA, 33 bp, Homo sapien
gacagcttataaaaaccgctggcaatgatgcag

SEQ ID NO: 755606 - DNA, 33 bp, Homo sapien
gacagcttataaaaactgctggcaatgatgcag

SEQ ID NO: 755607 - DNA, 33 bp, Homo sapien
ttaccagtcacttcttaaacaaatagccattca

SEQ ID NO: 755608 - DNA, 33 bp, Homo sapien
ttaccagtcacttcttcaacaaatagccattca

SEQ ID NO: 755609 - DNA, 33 bp, Homo sapien
tgatgtgttttgagagacatttctggaaagatg

SEQ ID NO: 755610 - DNA, 33 bp, Homo sapien
tgatgtgttttgagagccatttctggaaagatg

SEQ ID NO: 755611 - DNA, 33 bp, Homo sapien
tcagagacatgaaggcactgtataccagcttgt

SEQ ID NO: 755612 - DNA, 33 bp, Homo sapien
tcagagacatgaaggcgctgtataccagcttgt

SEQ ID NO: 755613 - DNA, 33 bp, Homo sapien
ctacaaagaaactagactcaattttctaagtga

SEQ ID NO: 755614 - DNA, 33 bp, Homo sapien
ctacaaagaaactagagtcaattttctaagtga

SEQ ID NO: 755615 - DNA, 33 bp, Homo sapien
tgagggtcaggcctagaagcagcatcaatcaca

SEQ ID NO: 755616 - DNA, 33 bp, Homo sapien
tgagggtcaggcctagtagcagcatcaatcaca

SEQ ID NO: 755617 - DNA, 33 bp, Homo sapien
tttcttactgctctacacttaaagtaggaatta

SEQ ID NO: 755618 - DNA, 33 bp, Homo sapien
tttcttactgctctacccttaaagtaggaatta

SEQ ID NO: 755619 - DNA, 33 bp, Homo sapien
tgcctagaatataatgaatcctttgtaaacatt

SEQ ID NO: 755620 - DNA, 33 bp, Homo sapien
tgcctagaatataatgcatcctttgtaaacatt

SEQ ID NO: 755621 - DNA, 33 bp, Homo sapien
gtactgatggtttcccaacaaggaacgtccaca

SEQ ID NO: 755622 - DNA, 33 bp, Homo sapien
gtactgatggtttcccgacaaggaacgtccaca

SEQ ID NO: 755623 - DNA, 33 bp, Homo sapien
aaaaagaaacggttcacctagataccttcctaa

SEQ ID NO: 755624 - DNA, 33 bp, Homo sapien
aaaaagaaacggttcatctagataccttcctaa

SEQ ID NO: 755625 - DNA, 33 bp, Homo sapien
tcattcctgatcattccactctcctgttaaaaa

SEQ ID NO: 755626 - DNA, 33 bp, Homo sapien
tcattcctgatcattctactctcctgttaaaaa

SEQ ID NO: 755627 - DNA, 33 bp, Homo sapien
actctcgttgtctcccactaggacgattgcaat

SEQ ID NO: 755628 - DNA, 33 bp, Homo sapien
actctcgttgtctcccgctaggacgattgcaat

SEQ ID NO: 755629 - DNA, 33 bp, Homo sapien
taattaccagttacaggataatgataggtttaa

SEQ ID NO: 755630 - DNA, 33 bp, Homo sapien
taattaccagttacagtataatgataggtttaa

SEQ ID NO: 755631 - DNA, 33 bp, Homo sapien
agccacacctcatgacaagatcatttcttatat

SEQ ID NO: 755632 - DNA, 33 bp, Homo sapien
agccacacctcatgacgagatcatttcttatat

SEQ ID NO: 755633 - DNA, 33 bp, Homo sapien
aggtgctttcaatacaatgattgcttgagggaa

SEQ ID NO: 755634 - DNA, 33 bp, Homo sapien
aggtgctttcaatacagtgattgcttgagggaa

SEQ ID NO: 755635 - DNA, 33 bp, Homo sapien
cccatctggggagtcaatagcaacaaagtcatt

SEQ ID NO: 755636 - DNA, 33 bp, Homo sapien
cccatctggggagtcattagcaacaaagtcatt

SEQ ID NO: 755637 - DNA, 33 bp, Homo sapien
gcctaggaattgggaaatccagtctcaatcact

SEQ ID NO: 755638 - DNA, 33 bp, Homo sapien
gcctaggaattgggaagtccagtctcaatcact

SEQ ID NO: 755639 - DNA, 33 bp, Homo sapien
tcctttttgccaaagacatgcaggatgttccaa

SEQ ID NO: 755640 - DNA, 33 bp, Homo sapien
tcctttttgccaaagagatgcaggatgttccaa

SEQ ID NO: 755641 - DNA, 33 bp, Homo sapien
atatgtccagggtggcaaagttatgacacagaa

SEQ ID NO: 755642 - DNA, 33 bp, Homo sapien
atatgtccagggtggcgaagttatgacacagaa

SEQ ID NO: 755643 - DNA, 33 bp, Homo sapien
aacctttacatcttcacaaaaatgaggcagtaa

SEQ ID NO: 755644 - DNA, 33 bp, Homo sapien
aacctttacatcttcagaaaaatgaggcagtaa

SEQ ID NO: 755645 - DNA, 33 bp, Homo sapien
agctcagattttatcactgaaaacatgtattat

SEQ ID NO: 755646 - DNA, 33 bp, Homo sapien
agctcagattttatcattgaaaacatgtattat

SEQ ID NO: 755647 - DNA, 33 bp, Homo sapien
cagagttttacaataaactggccagccagaagc

SEQ ID NO: 755648 - DNA, 33 bp, Homo sapien
cagagttttacaataagctggccagccagaagc

SEQ ID NO: 755649 - DNA, 33 bp, Homo sapien
gaatcaagcattctggaattttaaaatgcaaag

SEQ ID NO: 755650 - DNA, 33 bp, Homo sapien
gaatcaagcattctgggattttaaaatgcaaag

SEQ ID NO: 755651 - DNA, 33 bp, Homo sapien
tgattcattggccccaatactgtttgtgaagcc

SEQ ID NO: 755652 - DNA, 33 bp, Homo sapien
tgattcattggccccattactgtttgtgaagcc

SEQ ID NO: 755653 - DNA, 33 bp, Homo sapien
agggctgcagagtgtgcagtatgaatctctcat

SEQ ID NO: 755654 - DNA, 33 bp, Homo sapien
agggctgcagagtgtgtagtatgaatctctcat

SEQ ID NO: 755655 - DNA, 33 bp, Homo sapien
gtttccaattctacaccgcaaccaaatggctca

SEQ ID NO: 755656 - DNA, 33 bp, Homo sapien
gtttccaattctacactgcaaccaaatggctca

SEQ ID NO: 755657 - DNA, 33 bp, Homo sapien
aagcaccaaaataagacgctaggaagagaaagt

SEQ ID NO: 755658 - DNA, 33 bp, Homo sapien
aagcaccaaaataagatgctaggaagagaaagt

SEQ ID NO: 755659 - DNA, 33 bp, Homo sapien
agtatgtcctctcgtacagtcattttaaaatac

SEQ ID NO: 755660 - DNA, 33 bp, Homo sapien
agtatgtcctctcgtatagtcattttaaaatac

SEQ ID NO: 755661 - DNA, 33 bp, Homo sapien
taaaatctaagatgaaagaaaatgactaagtaa

SEQ ID NO: 755662 - DNA, 33 bp, Homo sapien
taaaatctaagatgaatgaaaatgactaagtaa

SEQ ID NO: 755663 - DNA, 33 bp, Homo sapien
agaactagggtcataagcctctgtccacaagta

SEQ ID NO: 755664 - DNA, 33 bp, Homo sapien
agaactagggtcataatcctctgtccacaagta

SEQ ID NO: 755665 - DNA, 33 bp, Homo sapien
atcacacttacaaaaacgcaggacactgccacc

SEQ ID NO: 755666 - DNA, 33 bp, Homo sapien
atcacacttacaaaaaggcaggacactgccacc

SEQ ID NO: 755667 - DNA, 33 bp, Homo sapien
gagaatggtttttatacgccctatcaagcttag

SEQ ID NO: 755668 - DNA, 33 bp, Homo sapien
gagaatggtttttatatgccctatcaagcttag

SEQ ID NO: 755669 - DNA, 33 bp, Homo sapien
aaggtactgcaaattcccagtttgtacagccta

SEQ ID NO: 755670 - DNA, 33 bp, Homo sapien
aaggtactgcaaattctcagtttgtacagccta

SEQ ID NO: 755671 - DNA, 33 bp, Homo sapien
attctagtaggtatgaagtagtatcaaattgta

SEQ ID NO: 755672 - DNA, 33 bp, Homo sapien
attctagtaggtatgatgtagtatcaaattgta

SEQ ID NO: 755673 - DNA, 33 bp, Homo sapien
ttgacatctagagtaacaaaacgatctgtatct

SEQ ID NO: 755674 - DNA, 33 bp, Homo sapien
ttgacatctagagtaagaaaacgatctgtatct

SEQ ID NO: 755675 - DNA, 33 bp, Homo sapien
ttagaatgccaggaaacaaagagtgctctcaga

SEQ ID NO: 755676 - DNA, 33 bp, Homo sapien
ttagaatgccaggaaataaagagtgctctcaga

SEQ ID NO: 755677 - DNA, 33 bp, Homo sapien
atagagttagatacaaaaagtaagttctaatgt

SEQ ID NO: 755678 - DNA, 33 bp, Homo sapien
atagagttagatacaagaagtaagttctaatgt

SEQ ID NO: 755679 - DNA, 33 bp, Homo sapien
ttgcaaataacttcagcccttcaacagggtgtc

SEQ ID NO: 755680 - DNA, 33 bp, Homo sapien
ttgcaaataacttcagtccttcaacagggtgtc

SEQ ID NO: 755681 - DNA, 33 bp, Homo sapien
atcctctttttttggcaaagcaaattgttatta

SEQ ID NO: 755682 - DNA, 33 bp, Homo sapien
atcctctttttttggcgaagcaaattgttatta

SEQ ID NO: 755683 - DNA, 33 bp, Homo sapien
ttttgaaaaagacaccacataattcccagttta

SEQ ID NO: 755684 - DNA, 33 bp, Homo sapien
ttttgaaaaagacaccgcataattcccagttta

SEQ ID NO: 755685 - DNA, 33 bp, Homo sapien
aaataatgcacagttaacccttttaaaatctgg

SEQ ID NO: 755686 - DNA, 33 bp, Homo sapien
aaataatgcacagttaccccttttaaaatctgg

SEQ ID NO: 755687 - DNA, 33 bp, Homo sapien
attctttcacagttcacatcccaaatgagtaag

SEQ ID NO: 755688 - DNA, 33 bp, Homo sapien
attctttcacagttcagatcccaaatgagtaag

SEQ ID NO: 755689 - DNA, 33 bp, Homo sapien
ttaagaaccattaacccgatgatcttcctagtg

SEQ ID NO: 755690 - DNA, 33 bp, Homo sapien
ttaagaaccattaacctgatgatcttcctagtg

SEQ ID NO: 755691 - DNA, 33 bp, Homo sapien
ctgttgaaggataggcaatataaaaatatgtaa

SEQ ID NO: 755692 - DNA, 33 bp, Homo sapien
ctgttgaaggataggcgatataaaaatatgtaa

SEQ ID NO: 755693 - DNA, 33 bp, Homo sapien
ggattagatgcttgggaaaaaatggagagaagg

SEQ ID NO: 755694 - DNA, 33 bp, Homo sapien
ggattagatgcttggggaaaaatggagagaagg

SEQ ID NO: 755695 - DNA, 33 bp, Homo sapien
ttcttgccttttcacgcagttgtgctgtagtta

SEQ ID NO: 755696 - DNA, 33 bp, Homo sapien
ttcttgccttttcacgtagttgtgctgtagtta

SEQ ID NO: 755697 - DNA, 33 bp, Homo sapien
atcacgagggaaatgaagaataattggccactt

SEQ ID NO: 755698 - DNA, 33 bp, Homo sapien
atcacgagggaaatgaggaataattggccactt

SEQ ID NO: 755699 - DNA, 33 bp, Homo sapien
caataaagccttgagaatacttttccttgatca

SEQ ID NO: 755700 - DNA, 33 bp, Homo sapien
caataaagccttgagattacttttccttgatca

SEQ ID NO: 755701 - DNA, 33 bp, Homo sapien
gcttttataaaatctgaaaaatgatgtaaataa

SEQ ID NO: 755702 - DNA, 33 bp, Homo sapien
gcttttataaaatctggaaaatgatgtaaataa

SEQ ID NO: 755703 - DNA, 33 bp, Homo sapien
ccatgtgtcatgtcatcaatgtgctgatgtgaa

SEQ ID NO: 755704 - DNA, 33 bp, Homo sapien
ccatgtgtcatgtcattaatgtgctgatgtgaa

SEQ ID NO: 755705 - DNA, 33 bp, Homo sapien
catggcccctgaagtacgtgaacggtaaagcta

SEQ ID NO: 755706 - DNA, 33 bp, Homo sapien
catggcccctgaagtatgtgaacggtaaagcta

SEQ ID NO: 755707 - DNA, 33 bp, Homo sapien
aaaaatgtatgtgtcacaagttgagtcaaaatg

SEQ ID NO: 755708 - DNA, 33 bp, Homo sapien
aaaaatgtatgtgtcagaagttgagtcaaaatg

SEQ ID NO: 755709 - DNA, 33 bp, Homo sapien
tcacaattcattaaaaaactaagtactgtgagc

SEQ ID NO: 755710 - DNA, 33 bp, Homo sapien
tcacaattcattaaaatactaagtactgtgagc

SEQ ID NO: 755711 - DNA, 33 bp, Homo sapien
aagagaacaccatcaaattattcataaaagatc

SEQ ID NO: 755712 - DNA, 33 bp, Homo sapien
aagagaacaccatcaagttattcataaaagatc

SEQ ID NO: 755713 - DNA, 33 bp, Homo sapien
tggtgaggctccagacaaaaaggaatgcttata

SEQ ID NO: 755714 - DNA, 33 bp, Homo sapien
tggtgaggctccagacgaaaaggaatgcttata

SEQ ID NO: 755715 - DNA, 33 bp, Homo sapien
aaagcaaaggaaaataagttgctttaatccttg

SEQ ID NO: 755716 - DNA, 33 bp, Homo sapien
aaagcaaaggaaaatatgttgctttaatccttg

SEQ ID NO: 755717 - DNA, 33 bp, Homo sapien
actttgacctaagaaacgcataaaagggaatgc

SEQ ID NO: 755718 - DNA, 33 bp, Homo sapien
actttgacctaagaaatgcataaaagggaatgc

SEQ ID NO: 755719 - DNA, 33 bp, Homo sapien
tttctgaatacagttgcagataggctggttttc

SEQ ID NO: 755720 - DNA, 33 bp, Homo sapien
tttctgaatacagttggagataggctggttttc

SEQ ID NO: 755721 - DNA, 33 bp, Homo sapien
catgagcacagggaagacagctcagaaaatccc

SEQ ID NO: 755722 - DNA, 33 bp, Homo sapien
catgagcacagggaaggcagctcagaaaatccc

SEQ ID NO: 755723 - DNA, 33 bp, Homo sapien
ccaagaatgaaaaaccagagaaagtcatggatc

SEQ ID NO: 755724 - DNA, 33 bp, Homo sapien
ccaagaatgaaaaaccggagaaagtcatggatc

SEQ ID NO: 755725 - DNA, 33 bp, Homo sapien
catgaaccaccttgtacggttattgatgtaaag

SEQ ID NO: 755726 - DNA, 33 bp, Homo sapien
catgaaccaccttgtatggttattgatgtaaag

SEQ ID NO: 755727 - DNA, 33 bp, Homo sapien
tgaaatagccttcatcacaagggagcctgtaca

SEQ ID NO: 755728 - DNA, 33 bp, Homo sapien
tgaaatagccttcatcgcaagggagcctgtaca

SEQ ID NO: 755729 - DNA, 33 bp, Homo sapien
ctcgtttctgtccctcaagacccagcttaaggg

SEQ ID NO: 755730 - DNA, 33 bp, Homo sapien
ctcgtttctgtccctcgagacccagcttaaggg

SEQ ID NO: 755731 - DNA, 33 bp, Homo sapien
ttattcttctgtatctcaatggctttgagttct

SEQ ID NO: 755732 - DNA, 33 bp, Homo sapien
ttattcttctgtatcttaatggctttgagttct

SEQ ID NO: 755733 - DNA, 33 bp, Homo sapien
atggtgatctgtgacacgagagcagctggtggc

SEQ ID NO: 755734 - DNA, 33 bp, Homo sapien
atggtgatctgtgacatgagagcagctggtggc

SEQ ID NO: 755735 - DNA, 33 bp, Homo sapien
ctatacggggtaaacaaagcaacctcacgaagg

SEQ ID NO: 755736 - DNA, 33 bp, Homo sapien
ctatacggggtaaacagagcaacctcacgaagg

SEQ ID NO: 755737 - DNA, 33 bp, Homo sapien
aagttgctttctatcccactggaaacatactaa

SEQ ID NO: 755738 - DNA, 33 bp, Homo sapien
aagttgctttctatcctactggaaacatactaa

SEQ ID NO: 755739 - DNA, 33 bp, Homo sapien
gcaaatttgtcaaaagcaagaactttgtcacgt

SEQ ID NO: 755740 - DNA, 33 bp, Homo sapien
gcaaatttgtcaaaaggaagaactttgtcacgt

SEQ ID NO: 755741 - DNA, 33 bp, Homo sapien
aaggcctgtgccagcacgaaaaagcactgtgac

SEQ ID NO: 755742 - DNA, 33 bp, Homo sapien
aaggcctgtgccagcatgaaaaagcactgtgac

SEQ ID NO: 755743 - DNA, 33 bp, Homo sapien
tctcctaacaccaaaacgcctttgcaatccaca

SEQ ID NO: 755744 - DNA, 33 bp, Homo sapien
tctcctaacaccaaaatgcctttgcaatccaca

SEQ ID NO: 755745 - DNA, 33 bp, Homo sapien
caaaacgtttctattgcattttattgtgattct

SEQ ID NO: 755746 - DNA, 33 bp, Homo sapien
caaaacgtttctattgtattttattgtgattct

SEQ ID NO: 755747 - DNA, 33 bp, Homo sapien
ttaattagattcttatcactgcatgaatatttc

SEQ ID NO: 755748 - DNA, 33 bp, Homo sapien
ttaattagattcttattactgcatgaatatttc

SEQ ID NO: 755749 - DNA, 33 bp, Homo sapien
cagcaaaagtgcaaaagtggcctctcaaagggg

SEQ ID NO: 755750 - DNA, 33 bp, Homo sapien
cagcaaaagtgcaaaattggcctctcaaagggg

SEQ ID NO: 755751 - DNA, 33 bp, Homo sapien
gcactacaatcaatgacggaagatgcatttgga

SEQ ID NO: 755752 - DNA, 33 bp, Homo sapien
gcactacaatcaatgatggaagatgcatttgga

SEQ ID NO: 755753 - DNA, 33 bp, Homo sapien
tgatctcccttgctgaaactggatattatatct

SEQ ID NO: 755754 - DNA, 33 bp, Homo sapien
tgatctcccttgctgacactggatattatatct

SEQ ID NO: 755755 - DNA, 33 bp, Homo sapien
gagagagatacaggacaggaaggccctttcttt

SEQ ID NO: 755756 - DNA, 33 bp, Homo sapien
gagagagatacaggacgggaaggccctttcttt

SEQ ID NO: 755757 - DNA, 33 bp, Homo sapien
gtggatgtgtctggcaaagaactgaccaccatt

SEQ ID NO: 755758 - DNA, 33 bp, Homo sapien
gtggatgtgtctggcagagaactgaccaccatt

SEQ ID NO: 755759 - DNA, 33 bp, Homo sapien
gaaggtgacacactcccgagaggcatttacagg

SEQ ID NO: 755760 - DNA, 33 bp, Homo sapien
gaaggtgacacactcctgagaggcatttacagg

SEQ ID NO: 755761 - DNA, 33 bp, Homo sapien
agaagtttgttgtatccagctaaatatgaccta

SEQ ID NO: 755762 - DNA, 33 bp, Homo sapien
agaagtttgttgtatctagctaaatatgaccta

SEQ ID NO: 755763 - DNA, 33 bp, Homo sapien
ctggcaaccttcctacaacctggaccatctcgc

SEQ ID NO: 755764 - DNA, 33 bp, Homo sapien
ctggcaaccttcctacgacctggaccatctcgc

SEQ ID NO: 755765 - DNA, 33 bp, Homo sapien
taaattgctcaatgtcaaaagcttgggaaaccc

SEQ ID NO: 755766 - DNA, 33 bp, Homo sapien
taaattgctcaatgtcgaaagcttgggaaaccc

SEQ ID NO: 755767 - DNA, 33 bp, Homo sapien
atccttgggaaattctcagaaaggaagagggat

SEQ ID NO: 755768 - DNA, 33 bp, Homo sapien
atccttgggaaattctgagaaaggaagagggat

SEQ ID NO: 755769 - DNA, 33 bp, Homo sapien
tagatgttctgcaaccactgagtgctctgtaaa

SEQ ID NO: 755770 - DNA, 33 bp, Homo sapien
tagatgttctgcaaccgctgagtgctctgtaaa

SEQ ID NO: 755771 - DNA, 33 bp, Homo sapien
tagtgtctgccaagaaactcatgtttgcagaag

SEQ ID NO: 755772 - DNA, 33 bp, Homo sapien
tagtgtctgccaagaatctcatgtttgcagaag

SEQ ID NO: 755773 - DNA, 33 bp, Homo sapien
gagagtggtctctaaacaacaactatgtaagga

SEQ ID NO: 755774 - DNA, 33 bp, Homo sapien
gagagtggtctctaaataacaactatgtaagga

SEQ ID NO: 755775 - DNA, 33 bp, Homo sapien
taatgaggctttaaaaacgtaagtggattgctt

SEQ ID NO: 755776 - DNA, 33 bp, Homo sapien
taatgaggctttaaaagcgtaagtggattgctt

SEQ ID NO: 755777 - DNA, 33 bp, Homo sapien
gcaagaactgaagacagatcgataaataagtta

SEQ ID NO: 755778 - DNA, 33 bp, Homo sapien
gcaagaactgaagacatatcgataaataagtta

SEQ ID NO: 755779 - DNA, 33 bp, Homo sapien
aacttctaagagcttacgggccagtgagaaaca

SEQ ID NO: 755780 - DNA, 33 bp, Homo sapien
aacttctaagagcttatgggccagtgagaaaca

SEQ ID NO: 755781 - DNA, 33 bp, Homo sapien
tcattgaagaagggacagcttcttgccaaatct

SEQ ID NO: 755782 - DNA, 33 bp, Homo sapien
tcattgaagaagggacggcttcttgccaaatct

SEQ ID NO: 755783 - DNA, 33 bp, Homo sapien
attgggaatttccttccatacctggctatctat

SEQ ID NO: 755784 - DNA, 33 bp, Homo sapien
attgggaatttccttctatacctggctatctat

SEQ ID NO: 755785 - DNA, 33 bp, Homo sapien
taacgtcgcaggctaaactgttttatgtaattt

SEQ ID NO: 755786 - DNA, 33 bp, Homo sapien
taacgtcgcaggctaacctgttttatgtaattt

SEQ ID NO: 755787 - DNA, 33 bp, Homo sapien
cctgtttgaggttcagaagcatggccggtggtg

SEQ ID NO: 755788 - DNA, 33 bp, Homo sapien
cctgtttgaggttcagcagcatggccggtggtg

SEQ ID NO: 755789 - DNA, 33 bp, Homo sapien
tgtgacccagttctggccaatgagactcaagag

SEQ ID NO: 755790 - DNA, 33 bp, Homo sapien
tgtgacccagttctggtcaatgagactcaagag

SEQ ID NO: 755791 - DNA, 33 bp, Homo sapien
aatagtggttggaatacagtaagaatctaaaga

SEQ ID NO: 755792 - DNA, 33 bp, Homo sapien
aatagtggttggaatatagtaagaatctaaaga

SEQ ID NO: 755793 - DNA, 33 bp, Homo sapien
catgcagacgcttaaacgatttgataggcaggt

SEQ ID NO: 755794 - DNA, 33 bp, Homo sapien
catgcagacgcttaaatgatttgataggcaggt

SEQ ID NO: 755795 - DNA, 33 bp, Homo sapien
atgacatccttttcaaatactacaagtttataa

SEQ ID NO: 755796 - DNA, 33 bp, Homo sapien
atgacatccttttcaattactacaagtttataa

SEQ ID NO: 755797 - DNA, 33 bp, Homo sapien
aggaagaaattgctgacacctggataataaatg

SEQ ID NO: 755798 - DNA, 33 bp, Homo sapien
aggaagaaattgctgatacctggataataaatg

SEQ ID NO: 755799 - DNA, 33 bp, Homo sapien
gtgtatgattctttacacagagcaaaagcatag

SEQ ID NO: 755800 - DNA, 33 bp, Homo sapien
gtgtatgattctttacgcagagcaaaagcatag

SEQ ID NO: 755801 - DNA, 33 bp, Homo sapien
agacttaaaacaatgccacagtgttagagggaa

SEQ ID NO: 755802 - DNA, 33 bp, Homo sapien
agacttaaaacaatgctacagtgttagagggaa

SEQ ID NO: 755803 - DNA, 33 bp, Homo sapien
acttgctgtaactacccgctgagagggacaaat

SEQ ID NO: 755804 - DNA, 33 bp, Homo sapien
acttgctgtaactacctgctgagagggacaaat

SEQ ID NO: 755805 - DNA, 33 bp, Homo sapien
tccacattcaaggcagacctcacacttgctgta

SEQ ID NO: 755806 - DNA, 33 bp, Homo sapien
tccacattcaaggcagtcctcacacttgctgta

SEQ ID NO: 755807 - DNA, 33 bp, Homo sapien
aaattccatggtgttcagaaaatattagggtac

SEQ ID NO: 755808 - DNA, 33 bp, Homo sapien
aaattccatggtgttcggaaaatattagggtac

SEQ ID NO: 755809 - DNA, 33 bp, Homo sapien
gtggaattaaacaagacgcctaagaacatttaa

SEQ ID NO: 755810 - DNA, 33 bp, Homo sapien
gtggaattaaacaagatgcctaagaacatttaa

SEQ ID NO: 755811 - DNA, 33 bp, Homo sapien
tcctctgtctacattaactccttctttcctcct

SEQ ID NO: 755812 - DNA, 33 bp, Homo sapien
tcctctgtctacattagctccttctttcctcct

SEQ ID NO: 755813 - DNA, 33 bp, Homo sapien
gagttattctaaaaccagaagtagtcaagaata

SEQ ID NO: 755814 - DNA, 33 bp, Homo sapien
gagttattctaaaacctgaagtagtcaagaata

SEQ ID NO: 755815 - DNA, 33 bp, Homo sapien
cacataagttctcccacgagccttgcttcccct

SEQ ID NO: 755816 - DNA, 33 bp, Homo sapien
cacataagttctcccatgagccttgcttcccct

SEQ ID NO: 755817 - DNA, 33 bp, Homo sapien
atgatcaaagatggctcactcttttaagtcaaa

SEQ ID NO: 755818 - DNA, 33 bp, Homo sapien
atgatcaaagatggcttactcttttaagtcaaa

SEQ ID NO: 755819 - DNA, 33 bp, Homo sapien
acatgctggtaggccaaatggagagtcagggag

SEQ ID NO: 755820 - DNA, 33 bp, Homo sapien
acatgctggtaggccacatggagagtcagggag

SEQ ID NO: 755821 - DNA, 33 bp, Homo sapien
tggctgctattagggccagtagagattagatgt

SEQ ID NO: 755822 - DNA, 33 bp, Homo sapien
tggctgctattagggctagtagagattagatgt

SEQ ID NO: 755823 - DNA, 33 bp, Homo sapien
tcagcattctcctccactggaagactttgtctg

SEQ ID NO: 755824 - DNA, 33 bp, Homo sapien
tcagcattctcctccattggaagactttgtctg

SEQ ID NO: 755825 - DNA, 33 bp, Homo sapien
aggacaagcagaggcacatctgtgtcagaaggc

SEQ ID NO: 755826 - DNA, 33 bp, Homo sapien
aggacaagcagaggcatatctgtgtcagaaggc

SEQ ID NO: 755827 - DNA, 33 bp, Homo sapien
gaaaactagtgtctaaaggatgccaagcccagg

SEQ ID NO: 755828 - DNA, 33 bp, Homo sapien
gaaaactagtgtctaagggatgccaagcccagg

SEQ ID NO: 755829 - DNA, 33 bp, Homo sapien
catgaagcaaacagggaaacagacgatgaaaaa

SEQ ID NO: 755830 - DNA, 33 bp, Homo sapien
catgaagcaaacaggggaacagacgatgaaaaa

SEQ ID NO: 755831 - DNA, 33 bp, Homo sapien
ttaaatcactatttgccatatataatgtagact

SEQ ID NO: 755832 - DNA, 33 bp, Homo sapien
ttaaatcactatttgctatatataatgtagact

SEQ ID NO: 755833 - DNA, 33 bp, Homo sapien
tttgtgtcctagggcaaatagttggtagttctg

SEQ ID NO: 755834 - DNA, 33 bp, Homo sapien
tttgtgtcctagggcagatagttggtagttctg

SEQ ID NO: 755835 - DNA, 33 bp, Homo sapien
acagtgaaaataattccctgcaagtaacacttt

SEQ ID NO: 755836 - DNA, 33 bp, Homo sapien
acagtgaaaataattctctgcaagtaacacttt

SEQ ID NO: 755837 - DNA, 33 bp, Homo sapien
tggcttttcatcccccagcactatgagaaatac

SEQ ID NO: 755838 - DNA, 33 bp, Homo sapien
tggcttttcatcccccggcactatgagaaatac

SEQ ID NO: 755839 - DNA, 33 bp, Homo sapien
tgaaaaactagaatgacggcaaaaagatgccta

SEQ ID NO: 755840 - DNA, 33 bp, Homo sapien
tgaaaaactagaatgatggcaaaaagatgccta

SEQ ID NO: 755841 - DNA, 33 bp, Homo sapien
ttgttttaaattgggactcatggtcgagacgac

SEQ ID NO: 755842 - DNA, 33 bp, Homo sapien
ttgttttaaattgggattcatggtcgagacgac

SEQ ID NO: 755843 - DNA, 33 bp, Homo sapien
gacaagtatgcagttacacttggccattgtcaa

SEQ ID NO: 755844 - DNA, 33 bp, Homo sapien
gacaagtatgcagttagacttggccattgtcaa

SEQ ID NO: 755845 - DNA, 33 bp, Homo sapien
aagtcattagtggaaaaaaactcgcctcaaatc

SEQ ID NO: 755846 - DNA, 33 bp, Homo sapien
aagtcattagtggaaacaaactcgcctcaaatc

SEQ ID NO: 755847 - DNA, 33 bp, Homo sapien
cagctttccacccatacccttcttcaatgtggc

SEQ ID NO: 755848 - DNA, 33 bp, Homo sapien
cagctttccacccatatccttcttcaatgtggc

SEQ ID NO: 755849 - DNA, 33 bp, Homo sapien
actgggtcacctctgcaagaactggggcccctt

SEQ ID NO: 755850 - DNA, 33 bp, Homo sapien
actgggtcacctctgccagaactggggcccctt

SEQ ID NO: 755851 - DNA, 33 bp, Homo sapien
ctaagcatgaggataccggaaatggacacacgg

SEQ ID NO: 755852 - DNA, 33 bp, Homo sapien
ctaagcatgaggatactggaaatggacacacgg

SEQ ID NO: 755853 - DNA, 33 bp, Homo sapien
tctttagtgcctgataggtgtttttatataaat

SEQ ID NO: 755854 - DNA, 33 bp, Homo sapien
tctttagtgcctgatatgtgtttttatataaat

SEQ ID NO: 755855 - DNA, 33 bp, Homo sapien
ttccccaccactgtgaaagtccctcgcagtccc

SEQ ID NO: 755856 - DNA, 33 bp, Homo sapien
ttccccaccactgtgacagtccctcgcagtccc

SEQ ID NO: 755857 - DNA, 33 bp, Homo sapien
gggaagagccagtggagaagtgtttccaagtca

SEQ ID NO: 755858 - DNA, 33 bp, Homo sapien
gggaagagccagtggataagtgtttccaagtca

SEQ ID NO: 755859 - DNA, 33 bp, Homo sapien
gtctcacttctatctacgtctgtatctgtaccc

SEQ ID NO: 755860 - DNA, 33 bp, Homo sapien
gtctcacttctatctatgtctgtatctgtaccc

SEQ ID NO: 755861 - DNA, 33 bp, Homo sapien
tatctgcctgacaaatcaggtagcaaattgaaa

SEQ ID NO: 755862 - DNA, 33 bp, Homo sapien
tatctgcctgacaaattaggtagcaaattgaaa

SEQ ID NO: 755863 - DNA, 33 bp, Homo sapien
atacaagtagaaaacaataaggccagcacagta

SEQ ID NO: 755864 - DNA, 33 bp, Homo sapien
atacaagtagaaaacagtaaggccagcacagta

SEQ ID NO: 755865 - DNA, 33 bp, Homo sapien
gcaaatttataagaagaacaggagatgaggagg

SEQ ID NO: 755866 - DNA, 33 bp, Homo sapien
gcaaatttataagaagtacaggagatgaggagg

SEQ ID NO: 755867 - DNA, 33 bp, Homo sapien
cttgatctaatgtctacgcagaaaggttctagt

SEQ ID NO: 755868 - DNA, 33 bp, Homo sapien
cttgatctaatgtctatgcagaaaggttctagt

SEQ ID NO: 755869 - DNA, 33 bp, Homo sapien
ttcaatttgaactaacaatccctccccagacat

SEQ ID NO: 755870 - DNA, 33 bp, Homo sapien
ttcaatttgaactaacgatccctccccagacat

SEQ ID NO: 755871 - DNA, 33 bp, Homo sapien
gaggagaaaatgagacaaaatatgcatttacac

SEQ ID NO: 755872 - DNA, 33 bp, Homo sapien
gaggagaaaatgagacgaaatatgcatttacac

SEQ ID NO: 755873 - DNA, 33 bp, Homo sapien
gtaagaaaacagtagcacagagagtttacgcag

SEQ ID NO: 755874 - DNA, 33 bp, Homo sapien
gtaagaaaacagtagcgcagagagtttacgcag

SEQ ID NO: 755875 - DNA, 33 bp, Homo sapien
gcatttcaaatatgagcaaggtttaagcaagag

SEQ ID NO: 755876 - DNA, 33 bp, Homo sapien
gcatttcaaatatgagtaaggtttaagcaagag

SEQ ID NO: 755877 - DNA, 33 bp, Homo sapien
ggggcctgcttcatcaagtaattctgttttgga

SEQ ID NO: 755878 - DNA, 33 bp, Homo sapien
ggggcctgcttcatcaggtaattctgttttgga

SEQ ID NO: 755879 - DNA, 33 bp, Homo sapien
ttattggctctctgaggctatggttggccctcc

SEQ ID NO: 755880 - DNA, 33 bp, Homo sapien
ttattggctctctgagtctatggttggccctcc

SEQ ID NO: 755881 - DNA, 33 bp, Homo sapien
gggtggtttggagatacggtagaggctctctgt

SEQ ID NO: 755882 - DNA, 33 bp, Homo sapien
gggtggtttggagatatggtagaggctctctgt

SEQ ID NO: 755883 - DNA, 33 bp, Homo sapien
tctggctttctctgcaagtaaaatgggggctct

SEQ ID NO: 755884 - DNA, 33 bp, Homo sapien
tctggctttctctgcaggtaaaatgggggctct

SEQ ID NO: 755885 - DNA, 33 bp, Homo sapien
ggaggcaaaatcaagcaaagtgaggacaaaata

SEQ ID NO: 755886 - DNA, 33 bp, Homo sapien
ggaggcaaaatcaagcgaagtgaggacaaaata

SEQ ID NO: 755887 - DNA, 33 bp, Homo sapien
gggatctctgtatcccagccagatgtcaccatg

SEQ ID NO: 755888 - DNA, 33 bp, Homo sapien
gggatctctgtatcccggccagatgtcaccatg

SEQ ID NO: 755889 - DNA, 33 bp, Homo sapien
ggaaaagccagtatcagcatttgcctgaagatt

SEQ ID NO: 755890 - DNA, 33 bp, Homo sapien
ggaaaagccagtatcatcatttgcctgaagatt

SEQ ID NO: 755891 - DNA, 33 bp, Homo sapien
tcttttgagatagtaactcagatatagaataag

SEQ ID NO: 755892 - DNA, 33 bp, Homo sapien
tcttttgagatagtaattcagatatagaataag

SEQ ID NO: 755893 - DNA, 33 bp, Homo sapien
taagcaacacaagatcaagctcactgctaactc

SEQ ID NO: 755894 - DNA, 33 bp, Homo sapien
taagcaacacaagatcgagctcactgctaactc

SEQ ID NO: 755895 - DNA, 33 bp, Homo sapien
cattcttgagacttgcagaggagagaagcgccc

SEQ ID NO: 755896 - DNA, 33 bp, Homo sapien
cattcttgagacttgcggaggagagaagcgccc

SEQ ID NO: 755897 - DNA, 33 bp, Homo sapien
taacaatgttatgcctaagaagactgtgataaa

SEQ ID NO: 755898 - DNA, 33 bp, Homo sapien
taacaatgttatgcctgagaagactgtgataaa

SEQ ID NO: 755899 - DNA, 33 bp, Homo sapien
agctgtccatgcactgcaatgaggacacacaga

SEQ ID NO: 755900 - DNA, 33 bp, Homo sapien
agctgtccatgcactgtaatgaggacacacaga

SEQ ID NO: 755901 - DNA, 33 bp, Homo sapien
atcaatacttcacgcagtcaaaacatgtaatgg

SEQ ID NO: 755902 - DNA, 33 bp, Homo sapien
atcaatacttcacgcattcaaaacatgtaatgg

SEQ ID NO: 755903 - DNA, 33 bp, Homo sapien
gtaatttgttccaggaaaatcatctggattgaa

SEQ ID NO: 755904 - DNA, 33 bp, Homo sapien
gtaatttgttccaggagaatcatctggattgaa

SEQ ID NO: 755905 - DNA, 33 bp, Homo sapien
ccagggaggggcagtgaaaacccagctggtagt

SEQ ID NO: 755906 - DNA, 33 bp, Homo sapien
ccagggaggggcagtgcaaacccagctggtagt

SEQ ID NO: 755907 - DNA, 33 bp, Homo sapien
gaggtgggtggtattcaagtttcttcttaactg

SEQ ID NO: 755908 - DNA, 33 bp, Homo sapien
gaggtgggtggtattcgagtttcttcttaactg

SEQ ID NO: 755909 - DNA, 33 bp, Homo sapien
tacttcccgttcttacgcccttaaaggcatcct

SEQ ID NO: 755910 - DNA, 33 bp, Homo sapien
tacttcccgttcttactcccttaaaggcatcct

SEQ ID NO: 755911 - DNA, 33 bp, Homo sapien
aaagaataatgcaaaacgtgacatctcaaaaat

SEQ ID NO: 755912 - DNA, 33 bp, Homo sapien
aaagaataatgcaaaatgtgacatctcaaaaat

SEQ ID NO: 755913 - DNA, 33 bp, Homo sapien
aagttcttatgagaacagaattacaaagtttcc

SEQ ID NO: 755914 - DNA, 33 bp, Homo sapien
aagttcttatgagaacggaattacaaagtttcc

SEQ ID NO: 755915 - DNA, 33 bp, Homo sapien
ttaaggcaacctaaaagaacgtgtgatttatct

SEQ ID NO: 755916 - DNA, 33 bp, Homo sapien
ttaaggcaacctaaaataacgtgtgatttatct

SEQ ID NO: 755917 - DNA, 33 bp, Homo sapien
ggatgatgccatccaaataccacaatatctgta

SEQ ID NO: 755918 - DNA, 33 bp, Homo sapien
ggatgatgccatccaagtaccacaatatctgta

SEQ ID NO: 755919 - DNA, 33 bp, Homo sapien
taataggactcaaaccaatgatgccaatatagg

SEQ ID NO: 755920 - DNA, 33 bp, Homo sapien
taataggactcaaaccgatgatgccaatatagg

SEQ ID NO: 755921 - DNA, 33 bp, Homo sapien
atggagacattatgcaaactggtaagcatggag

SEQ ID NO: 755922 - DNA, 33 bp, Homo sapien
atggagacattatgcagactggtaagcatggag

SEQ ID NO: 755923 - DNA, 33 bp, Homo sapien
agcttgaataaggctgaatgcactgtaagctgt

SEQ ID NO: 755924 - DNA, 33 bp, Homo sapien
agcttgaataaggctgcatgcactgtaagctgt

SEQ ID NO: 755925 - DNA, 33 bp, Homo sapien
tgcagatgttttattacaactctaccaaggggc

SEQ ID NO: 755926 - DNA, 33 bp, Homo sapien
tgcagatgttttattagaactctaccaaggggc

SEQ ID NO: 755927 - DNA, 33 bp, Homo sapien
gattaaatgctatttgaaagcactccttaatac

SEQ ID NO: 755928 - DNA, 33 bp, Homo sapien
gattaaatgctatttgtaagcactccttaatac

SEQ ID NO: 755929 - DNA, 33 bp, Homo sapien
gtgataagtcatggagaataactgtatggactg

SEQ ID NO: 755930 - DNA, 33 bp, Homo sapien
gtgataagtcatggaggataactgtatggactg

SEQ ID NO: 755931 - DNA, 33 bp, Homo sapien
agaggggaggtgacgacgtaccggaaggccaaa

SEQ ID NO: 755932 - DNA, 33 bp, Homo sapien
agaggggaggtgacgatgtaccggaaggccaaa

SEQ ID NO: 755933 - DNA, 33 bp, Homo sapien
aaagttaggtgaccaaaatgtcctctagtcatc

SEQ ID NO: 755934 - DNA, 33 bp, Homo sapien
aaagttaggtgaccaacatgtcctctagtcatc

SEQ ID NO: 755935 - DNA, 33 bp, Homo sapien
gctgtaagatttgttccaaattactatcctctt

SEQ ID NO: 755936 - DNA, 33 bp, Homo sapien
gctgtaagatttgttctaaattactatcctctt

SEQ ID NO: 755937 - DNA, 33 bp, Homo sapien
agggcttgcgtaatacaattttactcctgtctg

SEQ ID NO: 755938 - DNA, 33 bp, Homo sapien
agggcttgcgtaatacgattttactcctgtctg

SEQ ID NO: 755939 - DNA, 33 bp, Homo sapien
agtagcctgcacttgacgtcactctttgagctc

SEQ ID NO: 755940 - DNA, 33 bp, Homo sapien
agtagcctgcacttgatgtcactctttgagctc

SEQ ID NO: 755941 - DNA, 33 bp, Homo sapien
cattaaaggccactgactaagggcacttgggtc

SEQ ID NO: 755942 - DNA, 33 bp, Homo sapien
cattaaaggccactgattaagggcacttgggtc

SEQ ID NO: 755943 - DNA, 33 bp, Homo sapien
tctcttactcaaacaaaaaatcattactaaaat

SEQ ID NO: 755944 - DNA, 33 bp, Homo sapien
tctcttactcaaacaagaaatcattactaaaat

SEQ ID NO: 755945 - DNA, 33 bp, Homo sapien
tgttcttcggctgccaaatttggagtgtttggt

SEQ ID NO: 755946 - DNA, 33 bp, Homo sapien
tgttcttcggctgccacatttggagtgtttggt

SEQ ID NO: 755947 - DNA, 33 bp, Homo sapien
aaaaaatactgagtcacattgtgttcactcatc

SEQ ID NO: 755948 - DNA, 33 bp, Homo sapien
aaaaaatactgagtcatattgtgttcactcatc

SEQ ID NO: 755949 - DNA, 33 bp, Homo sapien
gatagattagttacaccgggctttggactctag

SEQ ID NO: 755950 - DNA, 33 bp, Homo sapien
gatagattagttacactgggctttggactctag

SEQ ID NO: 755951 - DNA, 33 bp, Homo sapien
cttggctaatgttgaaatgcgagtcaccctcca

SEQ ID NO: 755952 - DNA, 33 bp, Homo sapien
cttggctaatgttgaactgcgagtcaccctcca

SEQ ID NO: 755953 - DNA, 33 bp, Homo sapien
tcattcctccaagctacacaactaatgcattca

SEQ ID NO: 755954 - DNA, 33 bp, Homo sapien
tcattcctccaagctatacaactaatgcattca

SEQ ID NO: 755955 - DNA, 33 bp, Homo sapien
aactgttacactttggaaaactcttgcttttca

SEQ ID NO: 755956 - DNA, 33 bp, Homo sapien
aactgttacactttggcaaactcttgcttttca

SEQ ID NO: 755957 - DNA, 33 bp, Homo sapien
caggcctggtaacgcaaactgcaaaggaaaggg

SEQ ID NO: 755958 - DNA, 33 bp, Homo sapien
caggcctggtaacgcagactgcaaaggaaaggg

SEQ ID NO: 755959 - DNA, 33 bp, Homo sapien
tgtggtcagcctggtacagaccacttttttttt

SEQ ID NO: 755960 - DNA, 33 bp, Homo sapien
tgtggtcagcctggtagagaccacttttttttt

SEQ ID NO: 755961 - DNA, 33 bp, Homo sapien
aaatcattgaacctgacagtggtactggagacc

SEQ ID NO: 755962 - DNA, 33 bp, Homo sapien
aaatcattgaacctgatagtggtactggagacc

SEQ ID NO: 755963 - DNA, 33 bp, Homo sapien
ctagaaactagacaaacgccactcatgatccag

SEQ ID NO: 755964 - DNA, 33 bp, Homo sapien
ctagaaactagacaaatgccactcatgatccag

SEQ ID NO: 755965 - DNA, 33 bp, Homo sapien
ctttcttcattgaataacagtgttaattgctca

SEQ ID NO: 755966 - DNA, 33 bp, Homo sapien
ctttcttcattgaatatcagtgttaattgctca

SEQ ID NO: 755967 - DNA, 33 bp, Homo sapien
ttcacaatgaactgggaacactcatgatgtggg

SEQ ID NO: 755968 - DNA, 33 bp, Homo sapien
ttcacaatgaactggggacactcatgatgtggg

SEQ ID NO: 755969 - DNA, 33 bp, Homo sapien
attttattctatgggaaaggttggcaaacttgt

SEQ ID NO: 755970 - DNA, 33 bp, Homo sapien
attttattctatgggagaggttggcaaacttgt

SEQ ID NO: 755971 - DNA, 33 bp, Homo sapien
tgtggctgggttccaccaagacaatattcacaa

SEQ ID NO: 755972 - DNA, 33 bp, Homo sapien
tgtggctgggttccactaagacaatattcacaa

SEQ ID NO: 755973 - DNA, 33 bp, Homo sapien
agacaatattcacaacaacaagtgggaggctga

SEQ ID NO: 755974 - DNA, 33 bp, Homo sapien
agacaatattcacaacgacaagtgggaggctga

SEQ ID NO: 755975 - DNA, 33 bp, Homo sapien
tgtagaatttcagagcaatggctatgacgattt

SEQ ID NO: 755976 - DNA, 33 bp, Homo sapien
tgtagaatttcagagcgatggctatgacgattt

SEQ ID NO: 755977 - DNA, 33 bp, Homo sapien
gaagataaatgggttacgtatcagggatggcgt

SEQ ID NO: 755978 - DNA, 33 bp, Homo sapien
gaagataaatgggttatgtatcagggatggcgt

SEQ ID NO: 755979 - DNA, 33 bp, Homo sapien
ccaatttatatggatgccagtagaaacagaatc

SEQ ID NO: 755980 - DNA, 33 bp, Homo sapien
ccaatttatatggatgtcagtagaaacagaatc

SEQ ID NO: 755981 - DNA, 33 bp, Homo sapien
attacaagtgacccatcaaataaagcagttatt

SEQ ID NO: 755982 - DNA, 33 bp, Homo sapien
attacaagtgacccatgaaataaagcagttatt

SEQ ID NO: 755983 - DNA, 33 bp, Homo sapien
gtctcttccactgaaacgctcatgcacctgata

SEQ ID NO: 755984 - DNA, 33 bp, Homo sapien
gtctcttccactgaaatgctcatgcacctgata

SEQ ID NO: 755985 - DNA, 33 bp, Homo sapien
tcttgaagtcaggctcactgaatatgttcagga

SEQ ID NO: 755986 - DNA, 33 bp, Homo sapien
tcttgaagtcaggctcgctgaatatgttcagga

SEQ ID NO: 755987 - DNA, 33 bp, Homo sapien
ttctctatgtcttgcaagctggtaattcctcat

SEQ ID NO: 755988 - DNA, 33 bp, Homo sapien
ttctctatgtcttgcaggctggtaattcctcat

SEQ ID NO: 755989 - DNA, 33 bp, Homo sapien
accgcagattcaccccccaagacgagaagagga

SEQ ID NO: 755990 - DNA, 33 bp, Homo sapien
accgcagattcaccccgcaagacgagaagagga

SEQ ID NO: 755991 - DNA, 33 bp, Homo sapien
tttgatattcatctagacatgagagcatactac

SEQ ID NO: 755992 - DNA, 33 bp, Homo sapien
tttgatattcatctagccatgagagcatactac

SEQ ID NO: 755993 - DNA, 33 bp, Homo sapien
tctatctgcaaatgcaaaaatgagaaacaacag

SEQ ID NO: 755994 - DNA, 33 bp, Homo sapien
tctatctgcaaatgcacaaatgagaaacaacag

SEQ ID NO: 755995 - DNA, 33 bp, Homo sapien
aatatgagtcacaacaagtttgggagaatggaa

SEQ ID NO: 755996 - DNA, 33 bp, Homo sapien
aatatgagtcacaacaggtttgggagaatggaa

SEQ ID NO: 755997 - DNA, 33 bp, Homo sapien
gcaataattagactgacgaaaatggtttattga

SEQ ID NO: 755998 - DNA, 33 bp, Homo sapien
gcaataattagactgatgaaaatggtttattga

SEQ ID NO: 755999 - DNA, 33 bp, Homo sapien
agtcttagatgattgaaaaaacagtgactgaaa

SEQ ID NO: 756000 - DNA, 33 bp, Homo sapien
agtcttagatgattgagaaaacagtgactgaaa

SEQ ID NO: 756001 - DNA, 33 bp, Homo sapien
tttaacaggaactgagcatcttcttgatctcct

SEQ ID NO: 756002 - DNA, 33 bp, Homo sapien
tttaacaggaactgagtatcttcttgatctcct

SEQ ID NO: 756003 - DNA, 33 bp, Homo sapien
aaatcccaattcgaataatctctttcaacggta

SEQ ID NO: 756004 - DNA, 33 bp, Homo sapien
aaatcccaattcgaatcatctctttcaacggta

SEQ ID NO: 756005 - DNA, 33 bp, Homo sapien
tgggagtcaagggagaatacgactgctacagag

SEQ ID NO: 756006 - DNA, 33 bp, Homo sapien
tgggagtcaagggagagtacgactgctacagag

SEQ ID NO: 756007 - DNA, 33 bp, Homo sapien
agtgaaatttgatacaccctcaaatctatgttt

SEQ ID NO: 756008 - DNA, 33 bp, Homo sapien
agtgaaatttgatacatcctcaaatctatgttt

SEQ ID NO: 756009 - DNA, 33 bp, Homo sapien
tttgcaaaggaaccaaaaagcatgaggtaaggc

SEQ ID NO: 756010 - DNA, 33 bp, Homo sapien
tttgcaaaggaaccaagaagcatgaggtaaggc

SEQ ID NO: 756011 - DNA, 33 bp, Homo sapien
aaaacatctgtgacaacgaatggcagagtcata

SEQ ID NO: 756012 - DNA, 33 bp, Homo sapien
aaaacatctgtgacaatgaatggcagagtcata

SEQ ID NO: 756013 - DNA, 33 bp, Homo sapien
tcacttaaaactacttaaaattgcttgactgat

SEQ ID NO: 756014 - DNA, 33 bp, Homo sapien
tcacttaaaactacttcaaattgcttgactgat

SEQ ID NO: 756015 - DNA, 33 bp, Homo sapien
gcaagtttcaggagcactgctatggaaaagtac

SEQ ID NO: 756016 - DNA, 33 bp, Homo sapien
gcaagtttcaggagcattgctatggaaaagtac

SEQ ID NO: 756017 - DNA, 33 bp, Homo sapien
aattgggagcttaagcactgtctctaattcaca

SEQ ID NO: 756018 - DNA, 33 bp, Homo sapien
aattgggagcttaagcgctgtctctaattcaca

SEQ ID NO: 756019 - DNA, 33 bp, Homo sapien
tgactcccatagtcaccgctatcaccaaacacc

SEQ ID NO: 756020 - DNA, 33 bp, Homo sapien
tgactcccatagtcactgctatcaccaaacacc

SEQ ID NO: 756021 - DNA, 33 bp, Homo sapien
gaagagcaagctggaaaacccagtgagcatgaa

SEQ ID NO: 756022 - DNA, 33 bp, Homo sapien
gaagagcaagctggaagacccagtgagcatgaa

SEQ ID NO: 756023 - DNA, 33 bp, Homo sapien
agtaaaatatgcaagcacttgtgatacatagtg

SEQ ID NO: 756024 - DNA, 33 bp, Homo sapien
agtaaaatatgcaagctcttgtgatacatagtg

SEQ ID NO: 756025 - DNA, 33 bp, Homo sapien
acctgtgcaattacaaggactcagcatccccgt

SEQ ID NO: 756026 - DNA, 33 bp, Homo sapien
acctgtgcaattacaatgactcagcatccccgt

SEQ ID NO: 756027 - DNA, 33 bp, Homo sapien
agatgctatgactttacctatgattcctccatg

SEQ ID NO: 756028 - DNA, 33 bp, Homo sapien
agatgctatgactttatctatgattcctccatg

SEQ ID NO: 756029 - DNA, 33 bp, Homo sapien
tctgagaaatttgatacagtaccttcctcattc

SEQ ID NO: 756030 - DNA, 33 bp, Homo sapien
tctgagaaatttgatagagtaccttcctcattc

SEQ ID NO: 756031 - DNA, 33 bp, Homo sapien
gcctgtgtttaagtaacgcccattctcctgtaa

SEQ ID NO: 756032 - DNA, 33 bp, Homo sapien
gcctgtgtttaagtaatgcccattctcctgtaa

SEQ ID NO: 756033 - DNA, 33 bp, Homo sapien
ttctgagcctttggaaagattttgaaagtttag

SEQ ID NO: 756034 - DNA, 33 bp, Homo sapien
ttctgagcctttggaacgattttgaaagtttag

SEQ ID NO: 756035 - DNA, 33 bp, Homo sapien
aaaaagataacacccacgacaggtaaggatgct

SEQ ID NO: 756036 - DNA, 33 bp, Homo sapien
aaaaagataacacccatgacaggtaaggatgct

SEQ ID NO: 756037 - DNA, 33 bp, Homo sapien
cattaaaaatttgctgcactgtgttctcactcc

SEQ ID NO: 756038 - DNA, 33 bp, Homo sapien
cattaaaaatttgctgtactgtgttctcactcc

SEQ ID NO: 756039 - DNA, 33 bp, Homo sapien
attccatttggagaaacctatagctgctttact

SEQ ID NO: 756040 - DNA, 33 bp, Homo sapien
attccatttggagaaatctatagctgctttact

SEQ ID NO: 756041 - DNA, 33 bp, Homo sapien
tatcaccaagttattaccagtgcttcaaaaaat

SEQ ID NO: 756042 - DNA, 33 bp, Homo sapien
tatcaccaagttattagcagtgcttcaaaaaat

SEQ ID NO: 756043 - DNA, 33 bp, Homo sapien
ccacatggatgataaactgcaaacacctgtact

SEQ ID NO: 756044 - DNA, 33 bp, Homo sapien
ccacatggatgataaagtgcaaacacctgtact

SEQ ID NO: 756045 - DNA, 33 bp, Homo sapien
acattcttgttcaacaaaattatcagaaggccc

SEQ ID NO: 756046 - DNA, 33 bp, Homo sapien
acattcttgttcaacataattatcagaaggccc

SEQ ID NO: 756047 - DNA, 33 bp, Homo sapien
atccagagattttctgaataattggtgaccatt

SEQ ID NO: 756048 - DNA, 33 bp, Homo sapien
atccagagattttctggataattggtgaccatt

SEQ ID NO: 756049 - DNA, 33 bp, Homo sapien
tgtaggggaggaacaaataaagtgagagaaagt

SEQ ID NO: 756050 - DNA, 33 bp, Homo sapien
tgtaggggaggaacaagtaaagtgagagaaagt

SEQ ID NO: 756051 - DNA, 33 bp, Homo sapien
ttttctgttctcttcactcatctggtttttctc

SEQ ID NO: 756052 - DNA, 33 bp, Homo sapien
ttttctgttctcttcattcatctggtttttctc

SEQ ID NO: 756053 - DNA, 33 bp, Homo sapien
tgcttggcaagggccaggttcatccttcactgc

SEQ ID NO: 756054 - DNA, 33 bp, Homo sapien
tgcttggcaagggccatgttcatccttcactgc

SEQ ID NO: 756055 - DNA, 33 bp, Homo sapien
agccacatggcaaacacggtcagggggccccac

SEQ ID NO: 756056 - DNA, 33 bp, Homo sapien
agccacatggcaaacagggtcagggggccccac

SEQ ID NO: 756057 - DNA, 33 bp, Homo sapien
gaatttagggcaataaactaaatgacgaaaatc

SEQ ID NO: 756058 - DNA, 33 bp, Homo sapien
gaatttagggcaataacctaaatgacgaaaatc

SEQ ID NO: 756059 - DNA, 33 bp, Homo sapien
tttgtttcatgttttagagaggacttaacacta

SEQ ID NO: 756060 - DNA, 33 bp, Homo sapien
tttgtttcatgttttatagaggacttaacacta

SEQ ID NO: 756061 - DNA, 33 bp, Homo sapien
ccaccctgggcggagaactttctgaagtcatcc

SEQ ID NO: 756062 - DNA, 33 bp, Homo sapien
ccaccctgggcggagacctttctgaagtcatcc

SEQ ID NO: 756063 - DNA, 33 bp, Homo sapien
ccagctcctcggaacaagtatgagcatcaattt

SEQ ID NO: 756064 - DNA, 33 bp, Homo sapien
ccagctcctcggaacacgtatgagcatcaattt

SEQ ID NO: 756065 - DNA, 33 bp, Homo sapien
tgtcctataatctccaagttagcctttctagcc

SEQ ID NO: 756066 - DNA, 33 bp, Homo sapien
tgtcctataatctccaggttagcctttctagcc

SEQ ID NO: 756067 - DNA, 33 bp, Homo sapien
aatatatcttggcacacgataagtctttaaaat

SEQ ID NO: 756068 - DNA, 33 bp, Homo sapien
aatatatcttggcacatgataagtctttaaaat

SEQ ID NO: 756069 - DNA, 33 bp, Homo sapien
gctactcagatacttgcacccccaactctcaga

SEQ ID NO: 756070 - DNA, 33 bp, Homo sapien
gctactcagatacttgtacccccaactctcaga

SEQ ID NO: 756071 - DNA, 33 bp, Homo sapien
ggaagtggaaggtgcccggagttctaatctggg

SEQ ID NO: 756072 - DNA, 33 bp, Homo sapien
ggaagtggaaggtgcctggagttctaatctggg

SEQ ID NO: 756073 - DNA, 33 bp, Homo sapien
agccaaccctcaagggacattggtttctgaaac

SEQ ID NO: 756074 - DNA, 33 bp, Homo sapien
agccaaccctcaagggccattggtttctgaaac

SEQ ID NO: 756075 - DNA, 33 bp, Homo sapien
aggaagctgacgctccaacactccagatggaac

SEQ ID NO: 756076 - DNA, 33 bp, Homo sapien
aggaagctgacgctccgacactccagatggaac

SEQ ID NO: 756077 - DNA, 33 bp, Homo sapien
acccgaacttttgggacgttgatgcaagaacct

SEQ ID NO: 756078 - DNA, 33 bp, Homo sapien
acccgaacttttgggatgttgatgcaagaacct

SEQ ID NO: 756079 - DNA, 33 bp, Homo sapien
aaatagatgtgtttaacgagaaatttcacaaaa

SEQ ID NO: 756080 - DNA, 33 bp, Homo sapien
aaatagatgtgtttaatgagaaatttcacaaaa

SEQ ID NO: 756081 - DNA, 33 bp, Homo sapien
agccaccagggtgaccacttgggctatagaggc

SEQ ID NO: 756082 - DNA, 33 bp, Homo sapien
agccaccagggtgaccgcttgggctatagaggc

SEQ ID NO: 756083 - DNA, 33 bp, Homo sapien
ttacttttcttcccataacttgtgatagtgttt

SEQ ID NO: 756084 - DNA, 33 bp, Homo sapien
ttacttttcttcccatgacttgtgatagtgttt

SEQ ID NO: 756085 - DNA, 33 bp, Homo sapien
tgttgttatatatgaacgagcaattgttagtaa

SEQ ID NO: 756086 - DNA, 33 bp, Homo sapien
tgttgttatatatgaatgagcaattgttagtaa

SEQ ID NO: 756087 - DNA, 33 bp, Homo sapien
aaatgcctgctgtgtacgacacattcttcttgg

SEQ ID NO: 756088 - DNA, 33 bp, Homo sapien
aaatgcctgctgtgtatgacacattcttcttgg

SEQ ID NO: 756089 - DNA, 33 bp, Homo sapien
tggaaagtaaatagaactgcatgttgcaaacat

SEQ ID NO: 756090 - DNA, 33 bp, Homo sapien
tggaaagtaaatagaattgcatgttgcaaacat

SEQ ID NO: 756091 - DNA, 33 bp, Homo sapien
taattgcatatgttgcactgtagggtgatatag

SEQ ID NO: 756092 - DNA, 33 bp, Homo sapien
taattgcatatgttgcgctgtagggtgatatag

SEQ ID NO: 756093 - DNA, 33 bp, Homo sapien
caatattgaggaagtcactgaaagatccaggtt

SEQ ID NO: 756094 - DNA, 33 bp, Homo sapien
caatattgaggaagtcgctgaaagatccaggtt

SEQ ID NO: 756095 - DNA, 33 bp, Homo sapien
ggatgaagaaaaagtgaatctacaactagggac

SEQ ID NO: 756096 - DNA, 33 bp, Homo sapien
ggatgaagaaaaagtggatctacaactagggac

SEQ ID NO: 756097 - DNA, 33 bp, Homo sapien
agcaaaataaggcagaacattttttgcaacttg

SEQ ID NO: 756098 - DNA, 33 bp, Homo sapien
agcaaaataaggcagagcattttttgcaacttg

SEQ ID NO: 756099 - DNA, 33 bp, Homo sapien
agcccatgtgagaataacaggatttggtagaat

SEQ ID NO: 756100 - DNA, 33 bp, Homo sapien
agcccatgtgagaataccaggatttggtagaat

SEQ ID NO: 756101 - DNA, 33 bp, Homo sapien
tccagggtgccactgagaggctccacctgattt

SEQ ID NO: 756102 - DNA, 33 bp, Homo sapien
tccagggtgccactgataggctccacctgattt

SEQ ID NO: 756103 - DNA, 33 bp, Homo sapien
atgtctttgttcacttaaaagcactttgcaaaa

SEQ ID NO: 756104 - DNA, 33 bp, Homo sapien
atgtctttgttcacttgaaagcactttgcaaaa

SEQ ID NO: 756105 - DNA, 33 bp, Homo sapien
atccaaaatctgctcacctaaccactaccttta

SEQ ID NO: 756106 - DNA, 33 bp, Homo sapien
atccaaaatctgctcatctaaccactaccttta

SEQ ID NO: 756107 - DNA, 33 bp, Homo sapien
atatcaagatcttctacgccttttcactgtaat

SEQ ID NO: 756108 - DNA, 33 bp, Homo sapien
atatcaagatcttctaggccttttcactgtaat

SEQ ID NO: 756109 - DNA, 33 bp, Homo sapien
aacaaatgagtttaccgatttaatgcattttat

SEQ ID NO: 756110 - DNA, 33 bp, Homo sapien
aacaaatgagtttacctatttaatgcattttat

SEQ ID NO: 756111 - DNA, 33 bp, Homo sapien
aggactttgtacttacaagaaatccaaagagct

SEQ ID NO: 756112 - DNA, 33 bp, Homo sapien
aggactttgtacttacgagaaatccaaagagct

SEQ ID NO: 756113 - DNA, 33 bp, Homo sapien
aggctctgaagagcaggcaaaggcaaggcagag

SEQ ID NO: 756114 - DNA, 33 bp, Homo sapien
aggctctgaagagcagtcaaaggcaaggcagag

SEQ ID NO: 756115 - DNA, 33 bp, Homo sapien
tccctccatggtataaatcaacacagcaaacag

SEQ ID NO: 756116 - DNA, 33 bp, Homo sapien
tccctccatggtataactcaacacagcaaacag

SEQ ID NO: 756117 - DNA, 33 bp, Homo sapien
gagtcaaagaaagggaaatggatttggtgaatt

SEQ ID NO: 756118 - DNA, 33 bp, Homo sapien
gagtcaaagaaagggatatggatttggtgaatt

SEQ ID NO: 756119 - DNA, 33 bp, Homo sapien
cttggctatcatggcaacctttatctgtggaaa

SEQ ID NO: 756120 - DNA, 33 bp, Homo sapien
cttggctatcatggcagcctttatctgtggaaa

SEQ ID NO: 756121 - DNA, 33 bp, Homo sapien
ttgttaaatgaattgacgaccttgcatgacttg

SEQ ID NO: 756122 - DNA, 33 bp, Homo sapien
ttgttaaatgaattgatgaccttgcatgacttg

SEQ ID NO: 756123 - DNA, 33 bp, Homo sapien
tgtccctggcctccgaagcgttctctttccaca

SEQ ID NO: 756124 - DNA, 33 bp, Homo sapien
tgtccctggcctccgacgcgttctctttccaca

SEQ ID NO: 756125 - DNA, 33 bp, Homo sapien
ctaaatgtccagccaaaagtataaaggcattgc

SEQ ID NO: 756126 - DNA, 33 bp, Homo sapien
ctaaatgtccagccaagagtataaaggcattgc

SEQ ID NO: 756127 - DNA, 33 bp, Homo sapien
tgggccactagcacacagtacagagaaaggctt

SEQ ID NO: 756128 - DNA, 33 bp, Homo sapien
tgggccactagcacacggtacagagaaaggctt

SEQ ID NO: 756129 - DNA, 33 bp, Homo sapien
atccttttctgtatgcccagaagatttcataat

SEQ ID NO: 756130 - DNA, 33 bp, Homo sapien
atccttttctgtatgctcagaagatttcataat

SEQ ID NO: 756131 - DNA, 33 bp, Homo sapien
atagagaaataagagaactccaggaactaagac

SEQ ID NO: 756132 - DNA, 33 bp, Homo sapien
atagagaaataagagacctccaggaactaagac

SEQ ID NO: 756133 - DNA, 33 bp, Homo sapien
attactgttgttcaacaagaggacgatcaccag

SEQ ID NO: 756134 - DNA, 33 bp, Homo sapien
attactgttgttcaacgagaggacgatcaccag

SEQ ID NO: 756135 - DNA, 33 bp, Homo sapien
ggcccagttgtatttacctggccatctctaatg

SEQ ID NO: 756136 - DNA, 33 bp, Homo sapien
ggcccagttgtatttatctggccatctctaatg

SEQ ID NO: 756137 - DNA, 33 bp, Homo sapien
gagagcaaatatgttacgctttgtgagccatac

SEQ ID NO: 756138 - DNA, 33 bp, Homo sapien
gagagcaaatatgttaggctttgtgagccatac

SEQ ID NO: 756139 - DNA, 33 bp, Homo sapien
atggttgctcgtggaaggaaactcaaatgaatg

SEQ ID NO: 756140 - DNA, 33 bp, Homo sapien
atggttgctcgtggaatgaaactcaaatgaatg

SEQ ID NO: 756141 - DNA, 33 bp, Homo sapien
tataccatacaaacaaattgcctatattaggta

SEQ ID NO: 756142 - DNA, 33 bp, Homo sapien
tataccatacaaacaagttgcctatattaggta

SEQ ID NO: 756143 - DNA, 33 bp, Homo sapien
ttacagaaggcattaccagtcccggcaaaacca

SEQ ID NO: 756144 - DNA, 33 bp, Homo sapien
ttacagaaggcattactagtcccggcaaaacca

SEQ ID NO: 756145 - DNA, 33 bp, Homo sapien
taagtcttctcacatacggaattttctgccaaa

SEQ ID NO: 756146 - DNA, 33 bp, Homo sapien
taagtcttctcacatatggaattttctgccaaa

SEQ ID NO: 756147 - DNA, 33 bp, Homo sapien
acacaaataagaaggaaggattgaaagttgtcc

SEQ ID NO: 756148 - DNA, 33 bp, Homo sapien
acacaaataagaaggagggattgaaagttgtcc

SEQ ID NO: 756149 - DNA, 33 bp, Homo sapien
tggatgaccctggtggcaatcaagggatagcat

SEQ ID NO: 756150 - DNA, 33 bp, Homo sapien
tggatgaccctggtgggaatcaagggatagcat

SEQ ID NO: 756151 - DNA, 33 bp, Homo sapien
ggtttcattggttccacgtccatacttttcatc

SEQ ID NO: 756152 - DNA, 33 bp, Homo sapien
ggtttcattggttccatgtccatacttttcatc

SEQ ID NO: 756153 - DNA, 33 bp, Homo sapien
taactattagtgacccactgattcaaccaaaag

SEQ ID NO: 756154 - DNA, 33 bp, Homo sapien
taactattagtgacccgctgattcaaccaaaag

SEQ ID NO: 756155 - DNA, 33 bp, Homo sapien
cgtggactggtaatgacgaccagtgatattgag

SEQ ID NO: 756156 - DNA, 33 bp, Homo sapien
cgtggactggtaatgatgaccagtgatattgag

SEQ ID NO: 756157 - DNA, 33 bp, Homo sapien
caggctgccactataaagcaccacacattcagc

SEQ ID NO: 756158 - DNA, 33 bp, Homo sapien
caggctgccactataaggcaccacacattcagc

SEQ ID NO: 756159 - DNA, 33 bp, Homo sapien
attattcactccatacaagatagatgaattttc

SEQ ID NO: 756160 - DNA, 33 bp, Homo sapien
attattcactccataccagatagatgaattttc

SEQ ID NO: 756161 - DNA, 33 bp, Homo sapien
atgatttcgctgaccacagattctttgtgacat

SEQ ID NO: 756162 - DNA, 33 bp, Homo sapien
atgatttcgctgaccatagattctttgtgacat

SEQ ID NO: 756163 - DNA, 33 bp, Homo sapien
gtcactcatttttgcaccaattcaatccttttg

SEQ ID NO: 756164 - DNA, 33 bp, Homo sapien
gtcactcatttttgcagcaattcaatccttttg

SEQ ID NO: 756165 - DNA, 33 bp, Homo sapien
ttattactcaaacatacctggaactgatttcaa

SEQ ID NO: 756166 - DNA, 33 bp, Homo sapien
ttattactcaaacatatctggaactgatttcaa

SEQ ID NO: 756167 - DNA, 33 bp, Homo sapien
tgggaaagaaacttgcaaaagactaagaaggga

SEQ ID NO: 756168 - DNA, 33 bp, Homo sapien
tgggaaagaaacttgcgaaagactaagaaggga

SEQ ID NO: 756169 - DNA, 33 bp, Homo sapien
aatcagctggaggcccaatagaagaaaaaggca

SEQ ID NO: 756170 - DNA, 33 bp, Homo sapien
aatcagctggaggcccgatagaagaaaaaggca

SEQ ID NO: 756171 - DNA, 33 bp, Homo sapien
tgcttaaatgtgtataggctctggagacatgtt

SEQ ID NO: 756172 - DNA, 33 bp, Homo sapien
tgcttaaatgtgtatatgctctggagacatgtt

SEQ ID NO: 756173 - DNA, 33 bp, Homo sapien
ctttgtaagatctccaacttcattctgttacct

SEQ ID NO: 756174 - DNA, 33 bp, Homo sapien
ctttgtaagatctccagcttcattctgttacct

SEQ ID NO: 756175 - DNA, 33 bp, Homo sapien
cttcttgcaagtactacgacactccaatcccat

SEQ ID NO: 756176 - DNA, 33 bp, Homo sapien
cttcttgcaagtactaggacactccaatcccat

SEQ ID NO: 756177 - DNA, 33 bp, Homo sapien
atgggcgcatgtcccaagtgctgttgaaccctg

SEQ ID NO: 756178 - DNA, 33 bp, Homo sapien
atgggcgcatgtcccacgtgctgttgaaccctg

SEQ ID NO: 756179 - DNA, 33 bp, Homo sapien
cttcaaagtcttgacaaagatagaaagtcagga

SEQ ID NO: 756180 - DNA, 33 bp, Homo sapien
cttcaaagtcttgacacagatagaaagtcagga

SEQ ID NO: 756181 - DNA, 33 bp, Homo sapien
tattactggtgattgaaaaatctaaacctaaac

SEQ ID NO: 756182 - DNA, 33 bp, Homo sapien
tattactggtgattgacaaatctaaacctaaac

SEQ ID NO: 756183 - DNA, 33 bp, Homo sapien
gcgtgatgatgcaaagcaggtttaggtttagat

SEQ ID NO: 756184 - DNA, 33 bp, Homo sapien
gcgtgatgatgcaaagtaggtttaggtttagat

SEQ ID NO: 756185 - DNA, 33 bp, Homo sapien
cttaccctggaggatgaaaaaataagagacgtc

SEQ ID NO: 756186 - DNA, 33 bp, Homo sapien
cttaccctggaggatggaaaaataagagacgtc

SEQ ID NO: 756187 - DNA, 33 bp, Homo sapien
tctgaatctactgcatcaatcaagccacagatg

SEQ ID NO: 756188 - DNA, 33 bp, Homo sapien
tctgaatctactgcatgaatcaagccacagatg

SEQ ID NO: 756189 - DNA, 33 bp, Homo sapien
gcagctctttttcctgaaaacacagctgaacac

SEQ ID NO: 756190 - DNA, 33 bp, Homo sapien
gcagctctttttcctggaaacacagctgaacac

SEQ ID NO: 756191 - DNA, 33 bp, Homo sapien
aggcaatgtgttctcacgacaagacggctggga

SEQ ID NO: 756192 - DNA, 33 bp, Homo sapien
aggcaatgtgttctcatgacaagacggctggga

SEQ ID NO: 756193 - DNA, 33 bp, Homo sapien
aagaaactggagttcacgctaagaggctgtggc

SEQ ID NO: 756194 - DNA, 33 bp, Homo sapien
aagaaactggagttcatgctaagaggctgtggc

SEQ ID NO: 756195 - DNA, 33 bp, Homo sapien
cgcatacaaaacacacaatcaacagagtaaaag

SEQ ID NO: 756196 - DNA, 33 bp, Homo sapien
cgcatacaaaacacacgatcaacagagtaaaag

SEQ ID NO: 756197 - DNA, 33 bp, Homo sapien
attaggaactcttccacccgtaagactgtctct

SEQ ID NO: 756198 - DNA, 33 bp, Homo sapien
attaggaactcttccatccgtaagactgtctct

SEQ ID NO: 756199 - DNA, 33 bp, Homo sapien
catgagagtgcagataccctttagatatacaga

SEQ ID NO: 756200 - DNA, 33 bp, Homo sapien
catgagagtgcagatagcctttagatatacaga

SEQ ID NO: 756201 - DNA, 33 bp, Homo sapien
actctgttgctaaggccgaagtgcaacagctat

SEQ ID NO: 756202 - DNA, 33 bp, Homo sapien
actctgttgctaaggctgaagtgcaacagctat

SEQ ID NO: 756203 - DNA, 33 bp, Homo sapien
actacccactctgacacagatctgaacacagtc

SEQ ID NO: 756204 - DNA, 33 bp, Homo sapien
actacccactctgacatagatctgaacacagtc

SEQ ID NO: 756205 - DNA, 33 bp, Homo sapien
aggcccaatttaacaaataatacgaattgtgat

SEQ ID NO: 756206 - DNA, 33 bp, Homo sapien
aggcccaatttaacaagtaatacgaattgtgat

SEQ ID NO: 756207 - DNA, 33 bp, Homo sapien
ttgcccctgtacatcacattaatctcactctaa

SEQ ID NO: 756208 - DNA, 33 bp, Homo sapien
ttgcccctgtacatcagattaatctcactctaa

SEQ ID NO: 756209 - DNA, 33 bp, Homo sapien
catcaagaaggctatgaacgaatctccctgaga

SEQ ID NO: 756210 - DNA, 33 bp, Homo sapien
catcaagaaggctatgcacgaatctccctgaga

SEQ ID NO: 756211 - DNA, 33 bp, Homo sapien
taataagcttttgccccgcagtccacaattatc

SEQ ID NO: 756212 - DNA, 33 bp, Homo sapien
taataagcttttgccctgcagtccacaattatc

SEQ ID NO: 756213 - DNA, 33 bp, Homo sapien
cttaggctctttcttgaaaggtgcagtttctcc

SEQ ID NO: 756214 - DNA, 33 bp, Homo sapien
cttaggctctttcttgcaaggtgcagtttctcc

SEQ ID NO: 756215 - DNA, 33 bp, Homo sapien
tagtaggaaggacagccagttatcaaaaagtga

SEQ ID NO: 756216 - DNA, 33 bp, Homo sapien
tagtaggaaggacagctagttatcaaaaagtga

SEQ ID NO: 756217 - DNA, 33 bp, Homo sapien
gctagttatggttaacactgtgctaaactctgg

SEQ ID NO: 756218 - DNA, 33 bp, Homo sapien
gctagttatggttaacgctgtgctaaactctgg

SEQ ID NO: 756219 - DNA, 33 bp, Homo sapien
tcctcttctgctggtcactgcacatctttccag

SEQ ID NO: 756220 - DNA, 33 bp, Homo sapien
tcctcttctgctggtcgctgcacatctttccag

SEQ ID NO: 756221 - DNA, 33 bp, Homo sapien
agtctcaaaatatatgaatgggaagagttaaat

SEQ ID NO: 756222 - DNA, 33 bp, Homo sapien
agtctcaaaatatatggatgggaagagttaaat

SEQ ID NO: 756223 - DNA, 33 bp, Homo sapien
cttgtcgttaaaagaacgtaaattatttcacaa

SEQ ID NO: 756224 - DNA, 33 bp, Homo sapien
cttgtcgttaaaagaaggtaaattatttcacaa

SEQ ID NO: 756225 - DNA, 33 bp, Homo sapien
gtgaggaaagaatggacatggtggctgcaggtg

SEQ ID NO: 756226 - DNA, 33 bp, Homo sapien
gtgaggaaagaatggatatggtggctgcaggtg

SEQ ID NO: 756227 - DNA, 33 bp, Homo sapien
taactttgcatgagcaagaaatcagttttgttg

SEQ ID NO: 756228 - DNA, 33 bp, Homo sapien
taactttgcatgagcaggaaatcagttttgttg

SEQ ID NO: 756229 - DNA, 33 bp, Homo sapien
cagaaaagagtcccgaaccagactccgagagag

SEQ ID NO: 756230 - DNA, 33 bp, Homo sapien
cagaaaagagtcccgatccagactccgagagag

SEQ ID NO: 756231 - DNA, 33 bp, Homo sapien
tctaagagtaaagcctaaattgctggcctgtac

SEQ ID NO: 756232 - DNA, 33 bp, Homo sapien
tctaagagtaaagcctcaattgctggcctgtac

SEQ ID NO: 756233 - DNA, 33 bp, Homo sapien
catttttgccactttaagaagatgtaaaagggg

SEQ ID NO: 756234 - DNA, 33 bp, Homo sapien
catttttgccactttatgaagatgtaaaagggg

SEQ ID NO: 756235 - DNA, 33 bp, Homo sapien
tgcacttgtcccataacagttgtcaagtaaatc

SEQ ID NO: 756236 - DNA, 33 bp, Homo sapien
tgcacttgtcccataatagttgtcaagtaaatc

SEQ ID NO: 756237 - DNA, 33 bp, Homo sapien
aaataatggagtcaccaccatctgctttgactt

SEQ ID NO: 756238 - DNA, 33 bp, Homo sapien
aaataatggagtcaccgccatctgctttgactt

SEQ ID NO: 756239 - DNA, 33 bp, Homo sapien
atattgcttttctgcagggatgatgatttactt

SEQ ID NO: 756240 - DNA, 33 bp, Homo sapien
atattgcttttctgcatggatgatgatttactt

SEQ ID NO: 756241 - DNA, 33 bp, Homo sapien
tgacgtgaaattaaaaagaggtagtgtgatcgc

SEQ ID NO: 756242 - DNA, 33 bp, Homo sapien
tgacgtgaaattaaaacgaggtagtgtgatcgc

SEQ ID NO: 756243 - DNA, 33 bp, Homo sapien
gatgtcattaggaaaaagtgaaggaggtgacaa

SEQ ID NO: 756244 - DNA, 33 bp, Homo sapien
gatgtcattaggaaaaggtgaaggaggtgacaa

SEQ ID NO: 756245 - DNA, 33 bp, Homo sapien
gttattctgacaaagagcagtatttgctccact

SEQ ID NO: 756246 - DNA, 33 bp, Homo sapien
gttattctgacaaagatcagtatttgctccact

SEQ ID NO: 756247 - DNA, 33 bp, Homo sapien
gcaatcaaatcaaatccgaagtccttgttatcc

SEQ ID NO: 756248 - DNA, 33 bp, Homo sapien
gcaatcaaatcaaatctgaagtccttgttatcc

SEQ ID NO: 756249 - DNA, 33 bp, Homo sapien
gttgtctctctaaagcaccacttgtcactaggt

SEQ ID NO: 756250 - DNA, 33 bp, Homo sapien
gttgtctctctaaagcgccacttgtcactaggt

SEQ ID NO: 756251 - DNA, 33 bp, Homo sapien
gaaacacatcataaggaccctgtaattttcaac

SEQ ID NO: 756252 - DNA, 33 bp, Homo sapien
gaaacacatcataagggccctgtaattttcaac

SEQ ID NO: 756253 - DNA, 33 bp, Homo sapien
gtgtaagtttcaggaacattaatgaccctaaga

SEQ ID NO: 756254 - DNA, 33 bp, Homo sapien
gtgtaagtttcaggaagattaatgaccctaaga

SEQ ID NO: 756255 - DNA, 33 bp, Homo sapien
aagattaactgtgtgaactgagagcccttgaat

SEQ ID NO: 756256 - DNA, 33 bp, Homo sapien
aagattaactgtgtgagctgagagcccttgaat

SEQ ID NO: 756257 - DNA, 33 bp, Homo sapien
aaggactcgaggtcaccatcgctcagagatgag

SEQ ID NO: 756258 - DNA, 33 bp, Homo sapien
aaggactcgaggtcactatcgctcagagatgag

SEQ ID NO: 756259 - DNA, 33 bp, Homo sapien
gttgttttaaccctggaatcatgtaggtattag

SEQ ID NO: 756260 - DNA, 33 bp, Homo sapien
gttgttttaaccctgggatcatgtaggtattag

SEQ ID NO: 756261 - DNA, 33 bp, Homo sapien
atcctgtcagcagttgcatatagatttctgagg

SEQ ID NO: 756262 - DNA, 33 bp, Homo sapien
atcctgtcagcagttggatatagatttctgagg

SEQ ID NO: 756263 - DNA, 33 bp, Homo sapien
gaaaaacagctttgcaaaaatatgaaggtacta

SEQ ID NO: 756264 - DNA, 33 bp, Homo sapien
gaaaaacagctttgcagaaatatgaaggtacta

SEQ ID NO: 756265 - DNA, 33 bp, Homo sapien
ggaaattactttgttacccatgaacaacctaaa

SEQ ID NO: 756266 - DNA, 33 bp, Homo sapien
ggaaattactttgttatccatgaacaacctaaa

SEQ ID NO: 756267 - DNA, 33 bp, Homo sapien
tgaattcatctttgaaatcaactgctttgcatt

SEQ ID NO: 756268 - DNA, 33 bp, Homo sapien
tgaattcatctttgaagtcaactgctttgcatt

SEQ ID NO: 756269 - DNA, 33 bp, Homo sapien
tatccctgtttttctacactggaagctaaaaac

SEQ ID NO: 756270 - DNA, 33 bp, Homo sapien
tatccctgtttttctatactggaagctaaaaac

SEQ ID NO: 756271 - DNA, 33 bp, Homo sapien
cttgtctatggtcacaaagataagataatttct

SEQ ID NO: 756272 - DNA, 33 bp, Homo sapien
cttgtctatggtcacagagataagataatttct

SEQ ID NO: 756273 - DNA, 33 bp, Homo sapien
cacagagaaacaaaaacgtaattgcatccccca

SEQ ID NO: 756274 - DNA, 33 bp, Homo sapien
cacagagaaacaaaaatgtaattgcatccccca

SEQ ID NO: 756275 - DNA, 33 bp, Homo sapien
ctctctagtatgtcagaattttgtttggaaaat

SEQ ID NO: 756276 - DNA, 33 bp, Homo sapien
ctctctagtatgtcaggattttgtttggaaaat

SEQ ID NO: 756277 - DNA, 33 bp, Homo sapien
cctaagccggagatgaactggacttgataacag

SEQ ID NO: 756278 - DNA, 33 bp, Homo sapien
cctaagccggagatgagctggacttgataacag

SEQ ID NO: 756279 - DNA, 33 bp, Homo sapien
ataatacaattgaagcactttgcaaatattcct

SEQ ID NO: 756280 - DNA, 33 bp, Homo sapien
ataatacaattgaagcgctttgcaaatattcct

SEQ ID NO: 756281 - DNA, 33 bp, Homo sapien
caggccctacctggaaaagcgtaaggtccctgg

SEQ ID NO: 756282 - DNA, 33 bp, Homo sapien
caggccctacctggaagagcgtaaggtccctgg

SEQ ID NO: 756283 - DNA, 33 bp, Homo sapien
tctgtgaatgggtctaagtcacctgacactgaa

SEQ ID NO: 756284 - DNA, 33 bp, Homo sapien
tctgtgaatgggtctaggtcacctgacactgaa

SEQ ID NO: 756285 - DNA, 33 bp, Homo sapien
tggaactcaatggtgaactgtttttaatgaggc

SEQ ID NO: 756286 - DNA, 33 bp, Homo sapien
tggaactcaatggtgacctgtttttaatgaggc

SEQ ID NO: 756287 - DNA, 33 bp, Homo sapien
cgggcagcttcctaaactgttcctggatctata

SEQ ID NO: 756288 - DNA, 33 bp, Homo sapien
cgggcagcttcctaaattgttcctggatctata

SEQ ID NO: 756289 - DNA, 33 bp, Homo sapien
cacacacacgtctccactggaaacaccttcttc

SEQ ID NO: 756290 - DNA, 33 bp, Homo sapien
cacacacacgtctccattggaaacaccttcttc

SEQ ID NO: 756291 - DNA, 33 bp, Homo sapien
ttcagtgcctatctaacgtgaacctactatata

SEQ ID NO: 756292 - DNA, 33 bp, Homo sapien
ttcagtgcctatctaatgtgaacctactatata

SEQ ID NO: 756293 - DNA, 33 bp, Homo sapien
tggtctctctttactcaaatatctgtgagtccc

SEQ ID NO: 756294 - DNA, 33 bp, Homo sapien
tggtctctctttactcgaatatctgtgagtccc

SEQ ID NO: 756295 - DNA, 33 bp, Homo sapien
attgcttcctcagttggatcacatcacagagca

SEQ ID NO: 756296 - DNA, 33 bp, Homo sapien
attgcttcctcagttgtatcacatcacagagca

SEQ ID NO: 756297 - DNA, 33 bp, Homo sapien
agaaacttgtaaaaaccgcaactttgccacaaa

SEQ ID NO: 756298 - DNA, 33 bp, Homo sapien
agaaacttgtaaaaactgcaactttgccacaaa

SEQ ID NO: 756299 - DNA, 33 bp, Homo sapien
ttttggccatcgcaagacagttatgacccaata

SEQ ID NO: 756300 - DNA, 33 bp, Homo sapien
ttttggccatcgcaaggcagttatgacccaata

SEQ ID NO: 756301 - DNA, 33 bp, Homo sapien
gattgtatgggcaagaaactaagaagctgagta

SEQ ID NO: 756302 - DNA, 33 bp, Homo sapien
gattgtatgggcaagagactaagaagctgagta

SEQ ID NO: 756303 - DNA, 33 bp, Homo sapien
aactaatctatcttcaaccacgattttcacttt

SEQ ID NO: 756304 - DNA, 33 bp, Homo sapien
aactaatctatcttcagccacgattttcacttt

SEQ ID NO: 756305 - DNA, 33 bp, Homo sapien
ttacaggaaaacttcacagatgaccctaaaact

SEQ ID NO: 756306 - DNA, 33 bp, Homo sapien
ttacaggaaaacttcatagatgaccctaaaact

SEQ ID NO: 756307 - DNA, 33 bp, Homo sapien
tacacgctgaaatccaagttgatcttcctctca

SEQ ID NO: 756308 - DNA, 33 bp, Homo sapien
tacacgctgaaatccaggttgatcttcctctca

SEQ ID NO: 756309 - DNA, 33 bp, Homo sapien
tggacctggaaatgaacgttgtctcttttcagg

SEQ ID NO: 756310 - DNA, 33 bp, Homo sapien
tggacctggaaatgaatgttgtctcttttcagg

SEQ ID NO: 756311 - DNA, 33 bp, Homo sapien
tgcaactaggttatcaataagtttggatgttga

SEQ ID NO: 756312 - DNA, 33 bp, Homo sapien
tgcaactaggttatcagtaagtttggatgttga

SEQ ID NO: 756313 - DNA, 33 bp, Homo sapien
agccttaaagacttcaagctttgctggtcacac

SEQ ID NO: 756314 - DNA, 33 bp, Homo sapien
agccttaaagacttcaggctttgctggtcacac

SEQ ID NO: 756315 - DNA, 33 bp, Homo sapien
ctaagtttccagtctccaccatagttgggtatg

SEQ ID NO: 756316 - DNA, 33 bp, Homo sapien
ctaagtttccagtctctaccatagttgggtatg

SEQ ID NO: 756317 - DNA, 33 bp, Homo sapien
tcatattcctgtctgacgatccatgaagaaagt

SEQ ID NO: 756318 - DNA, 33 bp, Homo sapien
tcatattcctgtctgatgatccatgaagaaagt

SEQ ID NO: 756319 - DNA, 33 bp, Homo sapien
atcatcacaaatgtcacggctattctggtttca

SEQ ID NO: 756320 - DNA, 33 bp, Homo sapien
atcatcacaaatgtcatggctattctggtttca

SEQ ID NO: 756321 - DNA, 33 bp, Homo sapien
acctgagcagtctttaaaggtagattcatggga

SEQ ID NO: 756322 - DNA, 33 bp, Homo sapien
acctgagcagtctttagaggtagattcatggga

SEQ ID NO: 756323 - DNA, 33 bp, Homo sapien
agatgatgaaagcaaccaaacaatttatctgaa

SEQ ID NO: 756324 - DNA, 33 bp, Homo sapien
agatgatgaaagcaactaaacaatttatctgaa

SEQ ID NO: 756325 - DNA, 33 bp, Homo sapien
aattactaagagcctgaagattaaagaacacat

SEQ ID NO: 756326 - DNA, 33 bp, Homo sapien
aattactaagagcctgcagattaaagaacacat

SEQ ID NO: 756327 - DNA, 33 bp, Homo sapien
gccataggaattgatacagacaccacagaggaa

SEQ ID NO: 756328 - DNA, 33 bp, Homo sapien
gccataggaattgatatagacaccacagaggaa

SEQ ID NO: 756329 - DNA, 33 bp, Homo sapien
ctctcttccctcttcaatcccaaaaggcactga

SEQ ID NO: 756330 - DNA, 33 bp, Homo sapien
ctctcttccctcttcagtcccaaaaggcactga

SEQ ID NO: 756331 - DNA, 33 bp, Homo sapien
atgctcacaactgttgaagccctcagaggccat

SEQ ID NO: 756332 - DNA, 33 bp, Homo sapien
atgctcacaactgttggagccctcagaggccat

SEQ ID NO: 756333 - DNA, 33 bp, Homo sapien
gtgagctataaagataagagatcattgttttct

SEQ ID NO: 756334 - DNA, 33 bp, Homo sapien
gtgagctataaagatacgagatcattgttttct

SEQ ID NO: 756335 - DNA, 33 bp, Homo sapien
acatttactgaggaccggctacggagcgtaact

SEQ ID NO: 756336 - DNA, 33 bp, Homo sapien
acatttactgaggacctgctacggagcgtaact

SEQ ID NO: 756337 - DNA, 33 bp, Homo sapien
ttaaaattatgttgaaagagaaacaagaaagct

SEQ ID NO: 756338 - DNA, 33 bp, Homo sapien
ttaaaattatgttgaaggagaaacaagaaagct

SEQ ID NO: 756339 - DNA, 33 bp, Homo sapien
gaagagagctagaaaactgttatcatgttattc

SEQ ID NO: 756340 - DNA, 33 bp, Homo sapien
gaagagagctagaaaattgttatcatgttattc

SEQ ID NO: 756341 - DNA, 33 bp, Homo sapien
tatctaacgcaggtccacagagaataatctgaa

SEQ ID NO: 756342 - DNA, 33 bp, Homo sapien
tatctaacgcaggtccgcagagaataatctgaa

SEQ ID NO: 756343 - DNA, 33 bp, Homo sapien
gtccccttctgatgtacagtcaccatcgggctg

SEQ ID NO: 756344 - DNA, 33 bp, Homo sapien
gtccccttctgatgtatagtcaccatcgggctg

SEQ ID NO: 756345 - DNA, 33 bp, Homo sapien
acacttgtgatttacaacctaaggtcctttgca

SEQ ID NO: 756346 - DNA, 33 bp, Homo sapien
acacttgtgatttacatcctaaggtcctttgca

SEQ ID NO: 756347 - DNA, 33 bp, Homo sapien
aaacaggacattcttaaagccaacgctaaagcc

SEQ ID NO: 756348 - DNA, 33 bp, Homo sapien
aaacaggacattcttagagccaacgctaaagcc

SEQ ID NO: 756349 - DNA, 33 bp, Homo sapien
cagccacatctaagcccagcatccctagccatc

SEQ ID NO: 756350 - DNA, 33 bp, Homo sapien
cagccacatctaagccgagcatccctagccatc

SEQ ID NO: 756351 - DNA, 33 bp, Homo sapien
cagaggtgctgcaaaaccagttacgttaagtct

SEQ ID NO: 756352 - DNA, 33 bp, Homo sapien
cagaggtgctgcaaaatcagttacgttaagtct

SEQ ID NO: 756353 - DNA, 33 bp, Homo sapien
gcccaacatgaaaaaccggtaaatgtggcgtca

SEQ ID NO: 756354 - DNA, 33 bp, Homo sapien
gcccaacatgaaaaactggtaaatgtggcgtca

SEQ ID NO: 756355 - DNA, 33 bp, Homo sapien
taagggggaagactgcagaaagaggatatttcc

SEQ ID NO: 756356 - DNA, 33 bp, Homo sapien
taagggggaagactgcggaaagaggatatttcc

SEQ ID NO: 756357 - DNA, 33 bp, Homo sapien
tactattataatgagcaaaaggtcaatttgagg

SEQ ID NO: 756358 - DNA, 33 bp, Homo sapien
tactattataatgagcgaaaggtcaatttgagg

SEQ ID NO: 756359 - DNA, 33 bp, Homo sapien
aatcaaggttgagtacagaaaagagagtcgggt

SEQ ID NO: 756360 - DNA, 33 bp, Homo sapien
aatcaaggttgagtacggaaaagagagtcgggt

SEQ ID NO: 756361 - DNA, 33 bp, Homo sapien
ttctaaaggcttatccaaaactgaatatacaca

SEQ ID NO: 756362 - DNA, 33 bp, Homo sapien
ttctaaaggcttatccgaaactgaatatacaca

SEQ ID NO: 756363 - DNA, 33 bp, Homo sapien
gaaatatccagaataacgtttgaacaatatgta

SEQ ID NO: 756364 - DNA, 33 bp, Homo sapien
gaaatatccagaataatgtttgaacaatatgta

SEQ ID NO: 756365 - DNA, 33 bp, Homo sapien
cttgtccagctttctaataaggaaactcgatgc

SEQ ID NO: 756366 - DNA, 33 bp, Homo sapien
cttgtccagctttctagtaaggaaactcgatgc

SEQ ID NO: 756367 - DNA, 33 bp, Homo sapien
agccctcatcagcttgcaggtacaaatagaaat

SEQ ID NO: 756368 - DNA, 33 bp, Homo sapien
agccctcatcagcttgtaggtacaaatagaaat

SEQ ID NO: 756369 - DNA, 33 bp, Homo sapien
tctcaggaactgagaactgcatgtcccaaataa

SEQ ID NO: 756370 - DNA, 33 bp, Homo sapien
tctcaggaactgagaattgcatgtcccaaataa

SEQ ID NO: 756371 - DNA, 33 bp, Homo sapien
cacacacacaaaagaaaaaaaatgtcttatcac

SEQ ID NO: 756372 - DNA, 33 bp, Homo sapien
cacacacacaaaagaagaaaaatgtcttatcac

SEQ ID NO: 756373 - DNA, 33 bp, Homo sapien
tgccccagattgcaaacaactcatgctgcataa

SEQ ID NO: 756374 - DNA, 33 bp, Homo sapien
tgccccagattgcaaagaactcatgctgcataa

SEQ ID NO: 756375 - DNA, 33 bp, Homo sapien
gcagggtgtgggagctcacaaagactgaaacta

SEQ ID NO: 756376 - DNA, 33 bp, Homo sapien
gcagggtgtgggagcttacaaagactgaaacta

SEQ ID NO: 756377 - DNA, 33 bp, Homo sapien
gttattgggtatctaaaattgccagattcccat

SEQ ID NO: 756378 - DNA, 33 bp, Homo sapien
gttattgggtatctaagattgccagattcccat

SEQ ID NO: 756379 - DNA, 33 bp, Homo sapien
caatcaagaagttgaacacatagataaggagtt

SEQ ID NO: 756380 - DNA, 33 bp, Homo sapien
caatcaagaagttgaatacatagataaggagtt

SEQ ID NO: 756381 - DNA, 33 bp, Homo sapien
cagctaatcggaaggaacagtgggtcactctct

SEQ ID NO: 756382 - DNA, 33 bp, Homo sapien
cagctaatcggaaggagcagtgggtcactctct

SEQ ID NO: 756383 - DNA, 33 bp, Homo sapien
ttcccctaaagggatccaaacattctcaaataa

SEQ ID NO: 756384 - DNA, 33 bp, Homo sapien
ttcccctaaagggatcgaaacattctcaaataa

SEQ ID NO: 756385 - DNA, 33 bp, Homo sapien
atttcctcttttggttaaaacttcaaagtgacc

SEQ ID NO: 756386 - DNA, 33 bp, Homo sapien
atttcctcttttggttgaaacttcaaagtgacc

SEQ ID NO: 756387 - DNA, 33 bp, Homo sapien
taccataagtgactgacattttatgagcaggca

SEQ ID NO: 756388 - DNA, 33 bp, Homo sapien
taccataagtgactgatattttatgagcaggca

SEQ ID NO: 756389 - DNA, 33 bp, Homo sapien
gcacacatgaatgtgaccaactattaccaccaa

SEQ ID NO: 756390 - DNA, 33 bp, Homo sapien
gcacacatgaatgtgatcaactattaccaccaa

SEQ ID NO: 756391 - DNA, 33 bp, Homo sapien
aatttcttggtattcaaaaaggatccttgaaga

SEQ ID NO: 756392 - DNA, 33 bp, Homo sapien
aatttcttggtattcagaaaggatccttgaaga

SEQ ID NO: 756393 - DNA, 33 bp, Homo sapien
aacttggaagctgatccgagccaaagtgtcggt

SEQ ID NO: 756394 - DNA, 33 bp, Homo sapien
aacttggaagctgatctgagccaaagtgtcggt

SEQ ID NO: 756395 - DNA, 33 bp, Homo sapien
gacttgctacagactcaaatgaaaggaaagaat

SEQ ID NO: 756396 - DNA, 33 bp, Homo sapien
gacttgctacagactcgaatgaaaggaaagaat

SEQ ID NO: 756397 - DNA, 33 bp, Homo sapien
acacttaactaaaacactgaaccctatggacat

SEQ ID NO: 756398 - DNA, 33 bp, Homo sapien
acacttaactaaaacattgaaccctatggacat

SEQ ID NO: 756399 - DNA, 33 bp, Homo sapien
ttaaactaacatattaaggcatcacactgtgtg

SEQ ID NO: 756400 - DNA, 33 bp, Homo sapien
ttaaactaacatattatggcatcacactgtgtg

SEQ ID NO: 756401 - DNA, 33 bp, Homo sapien
ttagatgaacctgccacgcaatcggtcagacta

SEQ ID NO: 756402 - DNA, 33 bp, Homo sapien
ttagatgaacctgccatgcaatcggtcagacta

SEQ ID NO: 756403 - DNA, 33 bp, Homo sapien
gcgttatctcctatacgggtcattttttgtatg

SEQ ID NO: 756404 - DNA, 33 bp, Homo sapien
gcgttatctcctatactggtcattttttgtatg

SEQ ID NO: 756405 - DNA, 33 bp, Homo sapien
aacactaagaaaagcgcccttgaacaggattgc

SEQ ID NO: 756406 - DNA, 33 bp, Homo sapien
aacactaagaaaagcgtccttgaacaggattgc

SEQ ID NO: 756407 - DNA, 33 bp, Homo sapien
tgtttgctagggcataacctgggcattgacatc

SEQ ID NO: 756408 - DNA, 33 bp, Homo sapien
tgtttgctagggcatatcctgggcattgacatc

SEQ ID NO: 756409 - DNA, 33 bp, Homo sapien
acaaactacatatgcaaacatctcaattacttt

SEQ ID NO: 756410 - DNA, 33 bp, Homo sapien
acaaactacatatgcagacatctcaattacttt

SEQ ID NO: 756411 - DNA, 33 bp, Homo sapien
cagcaagggttcttaaacaagctgaagtggctg

SEQ ID NO: 756412 - DNA, 33 bp, Homo sapien
cagcaagggttcttaaccaagctgaagtggctg

SEQ ID NO: 756413 - DNA, 33 bp, Homo sapien
gtgtattttgtgaaaacgtatttccttgccaag

SEQ ID NO: 756414 - DNA, 33 bp, Homo sapien
gtgtattttgtgaaaatgtatttccttgccaag

SEQ ID NO: 756415 - DNA, 33 bp, Homo sapien
aagccaataaaaatcaatcttgtcctaggagct

SEQ ID NO: 756416 - DNA, 33 bp, Homo sapien
aagccaataaaaatcagtcttgtcctaggagct

SEQ ID NO: 756417 - DNA, 33 bp, Homo sapien
taagcccaggaagctgaatctgttgtggattaa

SEQ ID NO: 756418 - DNA, 33 bp, Homo sapien
taagcccaggaagctggatctgttgtggattaa

SEQ ID NO: 756419 - DNA, 33 bp, Homo sapien
tctccttctcccaccacaatttttgttttactt

SEQ ID NO: 756420 - DNA, 33 bp, Homo sapien
tctccttctcccaccagaatttttgttttactt

SEQ ID NO: 756421 - DNA, 33 bp, Homo sapien
tcactattagatctgaatactgggaagtaaaac

SEQ ID NO: 756422 - DNA, 33 bp, Homo sapien
tcactattagatctgagtactgggaagtaaaac

SEQ ID NO: 756423 - DNA, 33 bp, Homo sapien
tcagatctaatagtgacgctaaaatttaggggg

SEQ ID NO: 756424 - DNA, 33 bp, Homo sapien
tcagatctaatagtgatgctaaaatttaggggg

SEQ ID NO: 756425 - DNA, 33 bp, Homo sapien
aggtgaggtgtggaaaccatttctgtgcactgg

SEQ ID NO: 756426 - DNA, 33 bp, Homo sapien
aggtgaggtgtggaaagcatttctgtgcactgg

SEQ ID NO: 756427 - DNA, 33 bp, Homo sapien
atagcttcaaatgactcagaaggccaaacttca

SEQ ID NO: 756428 - DNA, 33 bp, Homo sapien
atagcttcaaatgacttagaaggccaaacttca

SEQ ID NO: 756429 - DNA, 33 bp, Homo sapien
caacaggggctctctaagtataggatgaacatc

SEQ ID NO: 756430 - DNA, 33 bp, Homo sapien
caacaggggctctctaggtataggatgaacatc

SEQ ID NO: 756431 - DNA, 33 bp, Homo sapien
aatatgtagatgaagcaaaatttaatttaagtt

SEQ ID NO: 756432 - DNA, 33 bp, Homo sapien
aatatgtagatgaagctaaatttaatttaagtt

SEQ ID NO: 756433 - DNA, 33 bp, Homo sapien
atgctgagtgcttccgacagaaagaccgcgctc

SEQ ID NO: 756434 - DNA, 33 bp, Homo sapien
atgctgagtgcttccggcagaaagaccgcgctc

SEQ ID NO: 756435 - DNA, 33 bp, Homo sapien
ggctaatggaagactgaacaactcggccctttg

SEQ ID NO: 756436 - DNA, 33 bp, Homo sapien
ggctaatggaagactgcacaactcggccctttg

SEQ ID NO: 756437 - DNA, 33 bp, Homo sapien
ctcaagtgctgttgtacattcagctcctataga

SEQ ID NO: 756438 - DNA, 33 bp, Homo sapien
ctcaagtgctgttgtatattcagctcctataga

SEQ ID NO: 756439 - DNA, 33 bp, Homo sapien
caaaagacatgtccacacggaaactcagaatgt

SEQ ID NO: 756440 - DNA, 33 bp, Homo sapien
caaaagacatgtccacgcggaaactcagaatgt

SEQ ID NO: 756441 - DNA, 33 bp, Homo sapien
ctctgtcttcctcttcaaagggcatcagtcatt

SEQ ID NO: 756442 - DNA, 33 bp, Homo sapien
ctctgtcttcctcttcgaagggcatcagtcatt

SEQ ID NO: 756443 - DNA, 33 bp, Homo sapien
ggttaaatgagatggtaaatgaagtgagtacac

SEQ ID NO: 756444 - DNA, 33 bp, Homo sapien
ggttaaatgagatggtgaatgaagtgagtacac

SEQ ID NO: 756445 - DNA, 33 bp, Homo sapien
agcagaactccaagtaccagggagaagtataag

SEQ ID NO: 756446 - DNA, 33 bp, Homo sapien
agcagaactccaagtatcagggagaagtataag

SEQ ID NO: 756447 - DNA, 33 bp, Homo sapien
gtgtttccaagcatccaccaagcagatctgatg

SEQ ID NO: 756448 - DNA, 33 bp, Homo sapien
gtgtttccaagcatccgccaagcagatctgatg

SEQ ID NO: 756449 - DNA, 33 bp, Homo sapien
ggaccacaaagaaagcaaaacgcatgctgcctt

SEQ ID NO: 756450 - DNA, 33 bp, Homo sapien
ggaccacaaagaaagctaaacgcatgctgcctt

SEQ ID NO: 756451 - DNA, 33 bp, Homo sapien
cattaagaggcagttcaaaaaagaaaccaccaa

SEQ ID NO: 756452 - DNA, 33 bp, Homo sapien
cattaagaggcagttcgaaaaagaaaccaccaa

SEQ ID NO: 756453 - DNA, 33 bp, Homo sapien
ttatagtttactccaacttgcccataaagtttt

SEQ ID NO: 756454 - DNA, 33 bp, Homo sapien
ttatagtttactccaatttgcccataaagtttt

SEQ ID NO: 756455 - DNA, 33 bp, Homo sapien
taggcttgagactgcaaggtaactggtgttttg

SEQ ID NO: 756456 - DNA, 33 bp, Homo sapien
taggcttgagactgcagggtaactggtgttttg

SEQ ID NO: 756457 - DNA, 33 bp, Homo sapien
attaattccgagagaacagctcaccaccagagt

SEQ ID NO: 756458 - DNA, 33 bp, Homo sapien
attaattccgagagaagagctcaccaccagagt

SEQ ID NO: 756459 - DNA, 33 bp, Homo sapien
tgtggcaccttgtcatgactgagatactgcaat

SEQ ID NO: 756460 - DNA, 33 bp, Homo sapien
tgtggcaccttgtcattactgagatactgcaat

SEQ ID NO: 756461 - DNA, 33 bp, Homo sapien
aaagtaagggaagaaaataccatgaaagcactt

SEQ ID NO: 756462 - DNA, 33 bp, Homo sapien
aaagtaagggaagaaactaccatgaaagcactt

SEQ ID NO: 756463 - DNA, 33 bp, Homo sapien
cactttgggaagacaaaaagggccgatcacgag

SEQ ID NO: 756464 - DNA, 33 bp, Homo sapien
cactttgggaagacaagaagggccgatcacgag

SEQ ID NO: 756465 - DNA, 33 bp, Homo sapien
aagtaacagaggtaaaatgactttcctccctgc

SEQ ID NO: 756466 - DNA, 33 bp, Homo sapien
aagtaacagaggtaaactgactttcctccctgc

SEQ ID NO: 756467 - DNA, 33 bp, Homo sapien
tgcaataaagcaggcacggaaagaaatactgca

SEQ ID NO: 756468 - DNA, 33 bp, Homo sapien
tgcaataaagcaggcatggaaagaaatactgca

SEQ ID NO: 756469 - DNA, 33 bp, Homo sapien
tggagaggttatgtgacgtgcacagactagaaa

SEQ ID NO: 756470 - DNA, 33 bp, Homo sapien
tggagaggttatgtgatgtgcacagactagaaa

SEQ ID NO: 756471 - DNA, 33 bp, Homo sapien
aaaaattgatgaatggcacttagcaaggtacaa

SEQ ID NO: 756472 - DNA, 33 bp, Homo sapien
aaaaattgatgaatggtacttagcaaggtacaa

SEQ ID NO: 756473 - DNA, 33 bp, Homo sapien
ccctggttgccgtgaacattaagcggccaactt

SEQ ID NO: 756474 - DNA, 33 bp, Homo sapien
ccctggttgccgtgaagattaagcggccaactt

SEQ ID NO: 756475 - DNA, 33 bp, Homo sapien
tcacaaggtgaatttccccgtgaataaactcaa

SEQ ID NO: 756476 - DNA, 33 bp, Homo sapien
tcacaaggtgaatttctccgtgaataaactcaa

SEQ ID NO: 756477 - DNA, 33 bp, Homo sapien
gggttaaatggaaccacagttagcagagtagag

SEQ ID NO: 756478 - DNA, 33 bp, Homo sapien
gggttaaatggaaccatagttagcagagtagag

SEQ ID NO: 756479 - DNA, 33 bp, Homo sapien
gagttgctttccttcaaggtgggctcagaacat

SEQ ID NO: 756480 - DNA, 33 bp, Homo sapien
gagttgctttccttcagggtgggctcagaacat

SEQ ID NO: 756481 - DNA, 33 bp, Homo sapien
tgtttctcatctccaactggcaaaagataaaac

SEQ ID NO: 756482 - DNA, 33 bp, Homo sapien
tgtttctcatctccaattggcaaaagataaaac

SEQ ID NO: 756483 - DNA, 33 bp, Homo sapien
agataaaactgagaagaccttgagctatgaagt

SEQ ID NO: 756484 - DNA, 33 bp, Homo sapien
agataaaactgagaaggccttgagctatgaagt

SEQ ID NO: 756485 - DNA, 33 bp, Homo sapien
atgtccaatttttatccactttcattggcactt

SEQ ID NO: 756486 - DNA, 33 bp, Homo sapien
atgtccaatttttatctactttcattggcactt

SEQ ID NO: 756487 - DNA, 33 bp, Homo sapien
ccaggccttacaaagaacaaacctactccgctc

SEQ ID NO: 756488 - DNA, 33 bp, Homo sapien
ccaggccttacaaagaccaaacctactccgctc

SEQ ID NO: 756489 - DNA, 33 bp, Homo sapien
agacaagcagctgactcaagtatttgctggagt

SEQ ID NO: 756490 - DNA, 33 bp, Homo sapien
agacaagcagctgacttaagtatttgctggagt

SEQ ID NO: 756491 - DNA, 33 bp, Homo sapien
cacgacatctcctctacgacaagagacaagttc

SEQ ID NO: 756492 - DNA, 33 bp, Homo sapien
cacgacatctcctctatgacaagagacaagttc

SEQ ID NO: 756493 - DNA, 33 bp, Homo sapien
caataagagtagttgacggcacttcatgcattc

SEQ ID NO: 756494 - DNA, 33 bp, Homo sapien
caataagagtagttgatggcacttcatgcattc

SEQ ID NO: 756495 - DNA, 33 bp, Homo sapien
tgtttcattatctggaaccaaagaaaagatgaa

SEQ ID NO: 756496 - DNA, 33 bp, Homo sapien
tgtttcattatctggacccaaagaaaagatgaa

SEQ ID NO: 756497 - DNA, 33 bp, Homo sapien
cagacatggaggtaacaaccagatttaaaatga

SEQ ID NO: 756498 - DNA, 33 bp, Homo sapien
cagacatggaggtaaccaccagatttaaaatga

SEQ ID NO: 756499 - DNA, 33 bp, Homo sapien
cctcagttcagttctcgaaacaaaactgctttt

SEQ ID NO: 756500 - DNA, 33 bp, Homo sapien
cctcagttcagttctctaaacaaaactgctttt

SEQ ID NO: 756501 - DNA, 33 bp, Homo sapien
cataagcaccctgcaaatatagaaggccaatat

SEQ ID NO: 756502 - DNA, 33 bp, Homo sapien
cataagcaccctgcaagtatagaaggccaatat

SEQ ID NO: 756503 - DNA, 33 bp, Homo sapien
tatagaaggccaatataacttcctactgacaag

SEQ ID NO: 756504 - DNA, 33 bp, Homo sapien
tatagaaggccaatatcacttcctactgacaag

SEQ ID NO: 756505 - DNA, 33 bp, Homo sapien
gagagtaagtaacgaacccaaagtcaactgtcc

SEQ ID NO: 756506 - DNA, 33 bp, Homo sapien
gagagtaagtaacgaagccaaagtcaactgtcc

SEQ ID NO: 756507 - DNA, 33 bp, Homo sapien
ggtttctgccatggataaaatgtaagtgctggt

SEQ ID NO: 756508 - DNA, 33 bp, Homo sapien
ggtttctgccatggatgaaatgtaagtgctggt

SEQ ID NO: 756509 - DNA, 33 bp, Homo sapien
gacatttccagttttacaaggaagagtcattct

SEQ ID NO: 756510 - DNA, 33 bp, Homo sapien
gacatttccagttttataaggaagagtcattct

SEQ ID NO: 756511 - DNA, 33 bp, Homo sapien
ggatttggttccaaagaaaattgtcagttcgtc

SEQ ID NO: 756512 - DNA, 33 bp, Homo sapien
ggatttggttccaaaggaaattgtcagttcgtc

SEQ ID NO: 756513 - DNA, 33 bp, Homo sapien
ctgaaaatgctacatacatctgctcccaaatat

SEQ ID NO: 756514 - DNA, 33 bp, Homo sapien
ctgaaaatgctacatatatctgctcccaaatat

SEQ ID NO: 756515 - DNA, 33 bp, Homo sapien
ttgtaattcaaaggaacggctgtatttcaaagg

SEQ ID NO: 756516 - DNA, 33 bp, Homo sapien
ttgtaattcaaaggaatggctgtatttcaaagg

SEQ ID NO: 756517 - DNA, 33 bp, Homo sapien
aggtggagtttaaatcactgtgtcccagtttcc

SEQ ID NO: 756518 - DNA, 33 bp, Homo sapien
aggtggagtttaaatcgctgtgtcccagtttcc

SEQ ID NO: 756519 - DNA, 33 bp, Homo sapien
aataataataataacgacaatctcccatattta

SEQ ID NO: 756520 - DNA, 33 bp, Homo sapien
aataataataataacggcaatctcccatattta

SEQ ID NO: 756521 - DNA, 33 bp, Homo sapien
ccttgcttgccagggtcaaggatgctttccacc

SEQ ID NO: 756522 - DNA, 33 bp, Homo sapien
ccttgcttgccagggttaaggatgctttccacc

SEQ ID NO: 756523 - DNA, 33 bp, Homo sapien
tgagtgtgatatcaccacatcaattggaaatgg

SEQ ID NO: 756524 - DNA, 33 bp, Homo sapien
tgagtgtgatatcaccgcatcaattggaaatgg

SEQ ID NO: 756525 - DNA, 33 bp, Homo sapien
atggtttgtaaaaataacattctgtctgttcca

SEQ ID NO: 756526 - DNA, 33 bp, Homo sapien
atggtttgtaaaaatagcattctgtctgttcca

SEQ ID NO: 756527 - DNA, 33 bp, Homo sapien
cttccagacactcttcaagatgatgactgcgtt

SEQ ID NO: 756528 - DNA, 33 bp, Homo sapien
cttccagacactcttcgagatgatgactgcgtt

SEQ ID NO: 756529 - DNA, 33 bp, Homo sapien
tttactactaagcttaagagttcatactacagg

SEQ ID NO: 756530 - DNA, 33 bp, Homo sapien
tttactactaagcttaggagttcatactacagg

SEQ ID NO: 756531 - DNA, 33 bp, Homo sapien
cccagaagaaagcgtcacaggttatgtatgggc

SEQ ID NO: 756532 - DNA, 33 bp, Homo sapien
cccagaagaaagcgtcgcaggttatgtatgggc

SEQ ID NO: 756533 - DNA, 33 bp, Homo sapien
ttttgctgaaaaatgcaacttttcttcctgatt

SEQ ID NO: 756534 - DNA, 33 bp, Homo sapien
ttttgctgaaaaatgcgacttttcttcctgatt

SEQ ID NO: 756535 - DNA, 33 bp, Homo sapien
agctcttctgcatcaaccctgggctcagctaga

SEQ ID NO: 756536 - DNA, 33 bp, Homo sapien
agctcttctgcatcaatcctgggctcagctaga

SEQ ID NO: 756537 - DNA, 33 bp, Homo sapien
tcccataggtcaactacgcaatgtggcagcttg

SEQ ID NO: 756538 - DNA, 33 bp, Homo sapien
tcccataggtcaactaggcaatgtggcagcttg

SEQ ID NO: 756539 - DNA, 33 bp, Homo sapien
tgagctgtcaaatacaccctttgaaatgtacag

SEQ ID NO: 756540 - DNA, 33 bp, Homo sapien
tgagctgtcaaatacatcctttgaaatgtacag

SEQ ID NO: 756541 - DNA, 33 bp, Homo sapien
ttctgttatagccacaaaaaatgagccaagaaa

SEQ ID NO: 756542 - DNA, 33 bp, Homo sapien
ttctgttatagccacagaaaatgagccaagaaa

SEQ ID NO: 756543 - DNA, 33 bp, Homo sapien
gaatcaaggaaattcaataattaccgtgattta

SEQ ID NO: 756544 - DNA, 33 bp, Homo sapien
gaatcaaggaaattcagtaattaccgtgattta

SEQ ID NO: 756545 - DNA, 33 bp, Homo sapien
agcccagcagtaactcaaaactgccaagaagcg

SEQ ID NO: 756546 - DNA, 33 bp, Homo sapien
agcccagcagtaactcgaaactgccaagaagcg

SEQ ID NO: 756547 - DNA, 33 bp, Homo sapien
atgaatagttgtgtcactgaataacccacatac

SEQ ID NO: 756548 - DNA, 33 bp, Homo sapien
atgaatagttgtgtcattgaataacccacatac

SEQ ID NO: 756549 - DNA, 33 bp, Homo sapien
gtcagtaaaatgtgggaagaagtctttgagatc

SEQ ID NO: 756550 - DNA, 33 bp, Homo sapien
gtcagtaaaatgtgggcagaagtctttgagatc

SEQ ID NO: 756551 - DNA, 33 bp, Homo sapien
tcataagatgaactatcaagcaaaattcaggta

SEQ ID NO: 756552 - DNA, 33 bp, Homo sapien
tcataagatgaactatgaagcaaaattcaggta

SEQ ID NO: 756553 - DNA, 33 bp, Homo sapien
aattgcctgtgaaccaacgcaacttgcaggtta

SEQ ID NO: 756554 - DNA, 33 bp, Homo sapien
aattgcctgtgaaccagcgcaacttgcaggtta

SEQ ID NO: 756555 - DNA, 33 bp, Homo sapien
tgattccttctttccaactttgaattaaaccta

SEQ ID NO: 756556 - DNA, 33 bp, Homo sapien
tgattccttctttccagctttgaattaaaccta

SEQ ID NO: 756557 - DNA, 33 bp, Homo sapien
cccgcattgtctttggaagataataagttcctt

SEQ ID NO: 756558 - DNA, 33 bp, Homo sapien
cccgcattgtctttgggagataataagttcctt

SEQ ID NO: 756559 - DNA, 33 bp, Homo sapien
cttgttatgtgaagtaataagcccatgttttat

SEQ ID NO: 756560 - DNA, 33 bp, Homo sapien
cttgttatgtgaagtagtaagcccatgttttat

SEQ ID NO: 756561 - DNA, 33 bp, Homo sapien
aacagtggagtggggaccaatttctaaaactca

SEQ ID NO: 756562 - DNA, 33 bp, Homo sapien
aacagtggagtggggatcaatttctaaaactca

SEQ ID NO: 756563 - DNA, 33 bp, Homo sapien
ggtacaagctgggagacaggttataagctcttg

SEQ ID NO: 756564 - DNA, 33 bp, Homo sapien
ggtacaagctgggagagaggttataagctcttg

SEQ ID NO: 756565 - DNA, 33 bp, Homo sapien
tagttgcaggtacaaacggcaaacagacttttc

SEQ ID NO: 756566 - DNA, 33 bp, Homo sapien
tagttgcaggtacaaatggcaaacagacttttc

SEQ ID NO: 756567 - DNA, 33 bp, Homo sapien
tcccatctcaagaccactgattacatctgtaca

SEQ ID NO: 756568 - DNA, 33 bp, Homo sapien
tcccatctcaagaccattgattacatctgtaca

SEQ ID NO: 756569 - DNA, 33 bp, Homo sapien
cccaccacacccatgaactacggcaatctattc

SEQ ID NO: 756570 - DNA, 33 bp, Homo sapien
cccaccacacccatgagctacggcaatctattc

SEQ ID NO: 756571 - DNA, 33 bp, Homo sapien
tttcacagtggaaaaccaactgggtcggcggag

SEQ ID NO: 756572 - DNA, 33 bp, Homo sapien
tttcacagtggaaaacgaactgggtcggcggag

SEQ ID NO: 756573 - DNA, 33 bp, Homo sapien
ttccagttgtacagtacagcagttaagaggatt

SEQ ID NO: 756574 - DNA, 33 bp, Homo sapien
ttccagttgtacagtatagcagttaagaggatt

SEQ ID NO: 756575 - DNA, 33 bp, Homo sapien
tcaggcttgtgctaaaggctttgtttacattat

SEQ ID NO: 756576 - DNA, 33 bp, Homo sapien
tcaggcttgtgctaaatgctttgtttacattat

SEQ ID NO: 756577 - DNA, 33 bp, Homo sapien
gccatatttttgcttacgcatttgttcaccaag

SEQ ID NO: 756578 - DNA, 33 bp, Homo sapien
gccatatttttgcttatgcatttgttcaccaag

SEQ ID NO: 756579 - DNA, 33 bp, Homo sapien
gaggcggaggaaagaccgattccaacaatggga

SEQ ID NO: 756580 - DNA, 33 bp, Homo sapien
gaggcggaggaaagactgattccaacaatggga

SEQ ID NO: 756581 - DNA, 33 bp, Homo sapien
ttagtagtccatccttgaaagtcaaacacagaa

SEQ ID NO: 756582 - DNA, 33 bp, Homo sapien
ttagtagtccatcctttaaagtcaaacacagaa

SEQ ID NO: 756583 - DNA, 33 bp, Homo sapien
ggctagttactattccaaacaggctccttctct

SEQ ID NO: 756584 - DNA, 33 bp, Homo sapien
ggctagttactattcctaacaggctccttctct

SEQ ID NO: 756585 - DNA, 33 bp, Homo sapien
agtaatcactcaggaaaagtcactcttatctca

SEQ ID NO: 756586 - DNA, 33 bp, Homo sapien
agtaatcactcaggaagagtcactcttatctca

SEQ ID NO: 756587 - DNA, 33 bp, Homo sapien
gtctaaccaattcctacggcaatcaaacattct

SEQ ID NO: 756588 - DNA, 33 bp, Homo sapien
gtctaaccaattcctatggcaatcaaacattct

SEQ ID NO: 756589 - DNA, 33 bp, Homo sapien
ctagacctagcaacataagactcattgtaataa

SEQ ID NO: 756590 - DNA, 33 bp, Homo sapien
ctagacctagcaacatgagactcattgtaataa

SEQ ID NO: 756591 - DNA, 33 bp, Homo sapien
ttgctgtttttacacaaatgtctgtcagtgggc

SEQ ID NO: 756592 - DNA, 33 bp, Homo sapien
ttgctgtttttacacagatgtctgtcagtgggc

SEQ ID NO: 756593 - DNA, 33 bp, Homo sapien
gtaatcgtgggggtaccatctcaactgcttttg

SEQ ID NO: 756594 - DNA, 33 bp, Homo sapien
gtaatcgtgggggtactatctcaactgcttttg

SEQ ID NO: 756595 - DNA, 33 bp, Homo sapien
tagagaaagaaaatgacagtcaagaaattcagt

SEQ ID NO: 756596 - DNA, 33 bp, Homo sapien
tagagaaagaaaatgagagtcaagaaattcagt

SEQ ID NO: 756597 - DNA, 33 bp, Homo sapien
gtatgaatctttgacactgcataatgaaatgtg

SEQ ID NO: 756598 - DNA, 33 bp, Homo sapien
gtatgaatctttgacattgcataatgaaatgtg

SEQ ID NO: 756599 - DNA, 33 bp, Homo sapien
cttcagaatccttgacaatgcctgaaaaacaag

SEQ ID NO: 756600 - DNA, 33 bp, Homo sapien
cttcagaatccttgacgatgcctgaaaaacaag

SEQ ID NO: 756601 - DNA, 33 bp, Homo sapien
attagtgtatctctagaaggaaaacactgtttt

SEQ ID NO: 756602 - DNA, 33 bp, Homo sapien
attagtgtatctctagcaggaaaacactgtttt

SEQ ID NO: 756603 - DNA, 33 bp, Homo sapien
cctgtcttcaccagcactgcctttcctgtgcac

SEQ ID NO: 756604 - DNA, 33 bp, Homo sapien
cctgtcttcaccagcagtgcctttcctgtgcac

SEQ ID NO: 756605 - DNA, 33 bp, Homo sapien
tatctgttactattcccgcacactagctagttt

SEQ ID NO: 756606 - DNA, 33 bp, Homo sapien
tatctgttactattcctgcacactagctagttt

SEQ ID NO: 756607 - DNA, 33 bp, Homo sapien
ataagctatgggaggaacattgaatattgatga

SEQ ID NO: 756608 - DNA, 33 bp, Homo sapien
ataagctatgggaggagcattgaatattgatga

SEQ ID NO: 756609 - DNA, 33 bp, Homo sapien
cgttctggcagatctccgaaggatgcacagtga

SEQ ID NO: 756610 - DNA, 33 bp, Homo sapien
cgttctggcagatctctgaaggatgcacagtga

SEQ ID NO: 756611 - DNA, 33 bp, Homo sapien
acattttaacttggtgcattgtagttggacctt

SEQ ID NO: 756612 - DNA, 33 bp, Homo sapien
acattttaacttggtgtattgtagttggacctt

SEQ ID NO: 756613 - DNA, 33 bp, Homo sapien
tggcttttccacctcaccttctgtactggtcag

SEQ ID NO: 756614 - DNA, 33 bp, Homo sapien
tggcttttccacctcatcttctgtactggtcag

SEQ ID NO: 756615 - DNA, 33 bp, Homo sapien
cagctaccttattcatcactagtctagacttaa

SEQ ID NO: 756616 - DNA, 33 bp, Homo sapien
cagctaccttattcattactagtctagacttaa

SEQ ID NO: 756617 - DNA, 33 bp, Homo sapien
taaaagttccagaaaagttatggccatgaatca

SEQ ID NO: 756618 - DNA, 33 bp, Homo sapien
taaaagttccagaaaatttatggccatgaatca

SEQ ID NO: 756619 - DNA, 33 bp, Homo sapien
ttggacattaaagcaaaaatctatcacttgaca

SEQ ID NO: 756620 - DNA, 33 bp, Homo sapien
ttggacattaaagcaagaatctatcacttgaca

SEQ ID NO: 756621 - DNA, 33 bp, Homo sapien
gtgggagaaattgtgacgggaagatagaaatta

SEQ ID NO: 756622 - DNA, 33 bp, Homo sapien
gtgggagaaattgtgatgggaagatagaaatta

SEQ ID NO: 756623 - DNA, 33 bp, Homo sapien
aacctgtgctgctttgcatttatctcttgtagt

SEQ ID NO: 756624 - DNA, 33 bp, Homo sapien
aacctgtgctgctttgtatttatctcttgtagt

SEQ ID NO: 756625 - DNA, 33 bp, Homo sapien
ttcagtataatttagcagattaacagttcacaa

SEQ ID NO: 756626 - DNA, 33 bp, Homo sapien
ttcagtataatttagcggattaacagttcacaa

SEQ ID NO: 756627 - DNA, 33 bp, Homo sapien
gtaaacatcatgttaacgtcaactgcagtgttt

SEQ ID NO: 756628 - DNA, 33 bp, Homo sapien
gtaaacatcatgttaatgtcaactgcagtgttt

SEQ ID NO: 756629 - DNA, 33 bp, Homo sapien
ataaatcgacagcgcactagattaccaggggag

SEQ ID NO: 756630 - DNA, 33 bp, Homo sapien
ataaatcgacagcgcagtagattaccaggggag

SEQ ID NO: 756631 - DNA, 33 bp, Homo sapien
ctttctaatagtggagaattttattgcccattt

SEQ ID NO: 756632 - DNA, 33 bp, Homo sapien
ctttctaatagtggaggattttattgcccattt

SEQ ID NO: 756633 - DNA, 33 bp, Homo sapien
ggaagattcctttgggcccatattaagaacaag

SEQ ID NO: 756634 - DNA, 33 bp, Homo sapien
ggaagattcctttgggtccatattaagaacaag

SEQ ID NO: 756635 - DNA, 33 bp, Homo sapien
caaaacaacacaactcccttatctgcaattcta

SEQ ID NO: 756636 - DNA, 33 bp, Homo sapien
caaaacaacacaactctcttatctgcaattcta

SEQ ID NO: 756637 - DNA, 33 bp, Homo sapien
ggtttttaacatcatacaattaagatctcaagt

SEQ ID NO: 756638 - DNA, 33 bp, Homo sapien
ggtttttaacatcatagaattaagatctcaagt

SEQ ID NO: 756639 - DNA, 33 bp, Homo sapien
ctaaatacagtgctagaaacaaaacagacacca

SEQ ID NO: 756640 - DNA, 33 bp, Homo sapien
ctaaatacagtgctagcaacaaaacagacacca

SEQ ID NO: 756641 - DNA, 33 bp, Homo sapien
gttgggtgaaggaagaataaccaggcatctgcc

SEQ ID NO: 756642 - DNA, 33 bp, Homo sapien
gttgggtgaaggaagagtaaccaggcatctgcc

SEQ ID NO: 756643 - DNA, 33 bp, Homo sapien
ccaatgtggccactaacgcaccaacagtcactt

SEQ ID NO: 756644 - DNA, 33 bp, Homo sapien
ccaatgtggccactaatgcaccaacagtcactt

SEQ ID NO: 756645 - DNA, 33 bp, Homo sapien
gatgttctgagagctccaaagtgtgtgttgtca

SEQ ID NO: 756646 - DNA, 33 bp, Homo sapien
gatgttctgagagctcgaaagtgtgtgttgtca

SEQ ID NO: 756647 - DNA, 33 bp, Homo sapien
tgggaaggagcagttcaccccgtggctggggtg

SEQ ID NO: 756648 - DNA, 33 bp, Homo sapien
tgggaaggagcagttctccccgtggctggggtg

SEQ ID NO: 756649 - DNA, 33 bp, Homo sapien
gggttttaaacaaagacggagcactgtagagtg

SEQ ID NO: 756650 - DNA, 33 bp, Homo sapien
gggttttaaacaaagatggagcactgtagagtg

SEQ ID NO: 756651 - DNA, 33 bp, Homo sapien
caggtgtcctaattccacagctggcctatggga

SEQ ID NO: 756652 - DNA, 33 bp, Homo sapien
caggtgtcctaattccgcagctggcctatggga

SEQ ID NO: 756653 - DNA, 33 bp, Homo sapien
gttctcccaccttcttcaaacaaacacacaaac

SEQ ID NO: 756654 - DNA, 33 bp, Homo sapien
gttctcccaccttcttgaaacaaacacacaaac

SEQ ID NO: 756655 - DNA, 33 bp, Homo sapien
ggagaagtaatgtggcgcggaggaacttgagtc

SEQ ID NO: 756656 - DNA, 33 bp, Homo sapien
ggagaagtaatgtggctcggaggaacttgagtc

SEQ ID NO: 756657 - DNA, 33 bp, Homo sapien
acgagaccataagatacataactgacgattccc

SEQ ID NO: 756658 - DNA, 33 bp, Homo sapien
acgagaccataagatatataactgacgattccc

SEQ ID NO: 756659 - DNA, 33 bp, Homo sapien
ccacatctggatttagcacctcaagagtcaaag

SEQ ID NO: 756660 - DNA, 33 bp, Homo sapien
ccacatctggatttagtacctcaagagtcaaag

SEQ ID NO: 756661 - DNA, 33 bp, Homo sapien
gcatataaaaatacaactgatgggttcgattat

SEQ ID NO: 756662 - DNA, 33 bp, Homo sapien
gcatataaaaatacaattgatgggttcgattat

SEQ ID NO: 756663 - DNA, 33 bp, Homo sapien
ctcaagtatctggagaaggctcaaggtttctct

SEQ ID NO: 756664 - DNA, 33 bp, Homo sapien
ctcaagtatctggagagggctcaaggtttctct

SEQ ID NO: 756665 - DNA, 33 bp, Homo sapien
catgtgggatgtcacccggctctaaaaggcagt

SEQ ID NO: 756666 - DNA, 33 bp, Homo sapien
catgtgggatgtcacctggctctaaaaggcagt

SEQ ID NO: 756667 - DNA, 33 bp, Homo sapien
tccaaatgcatctcacaccataggtctatgcac

SEQ ID NO: 756668 - DNA, 33 bp, Homo sapien
tccaaatgcatctcacgccataggtctatgcac

SEQ ID NO: 756669 - DNA, 33 bp, Homo sapien
tttacatggtcactcccccagagagagcagtcc

SEQ ID NO: 756670 - DNA, 33 bp, Homo sapien
tttacatggtcactccgccagagagagcagtcc

SEQ ID NO: 756671 - DNA, 33 bp, Homo sapien
cctgcagatcctggccaaacaacagatgaacac

SEQ ID NO: 756672 - DNA, 33 bp, Homo sapien
cctgcagatcctggccgaacaacagatgaacac

SEQ ID NO: 756673 - DNA, 33 bp, Homo sapien
gacactgttcaacccaatatagagtctttcctg

SEQ ID NO: 756674 - DNA, 33 bp, Homo sapien
gacactgttcaacccagtatagagtctttcctg

SEQ ID NO: 756675 - DNA, 33 bp, Homo sapien
agaaatgataaacagcgcaaagagaggattgca

SEQ ID NO: 756676 - DNA, 33 bp, Homo sapien
agaaatgataaacagctcaaagagaggattgca

SEQ ID NO: 756677 - DNA, 33 bp, Homo sapien
atgggtttatttcaagactgattattctgctcc

SEQ ID NO: 756678 - DNA, 33 bp, Homo sapien
atgggtttatttcaaggctgattattctgctcc

SEQ ID NO: 756679 - DNA, 33 bp, Homo sapien
agcatggccccatcacagagaaagtctcctccg

SEQ ID NO: 756680 - DNA, 33 bp, Homo sapien
agcatggccccatcacggagaaagtctcctccg

SEQ ID NO: 756681 - DNA, 33 bp, Homo sapien
attttaatatgttaccaataaatgacaccaact

SEQ ID NO: 756682 - DNA, 33 bp, Homo sapien
attttaatatgttaccgataaatgacaccaact

SEQ ID NO: 756683 - DNA, 33 bp, Homo sapien
acccaacctctctaggacatttgctgatctttt

SEQ ID NO: 756684 - DNA, 33 bp, Homo sapien
acccaacctctctaggccatttgctgatctttt

SEQ ID NO: 756685 - DNA, 33 bp, Homo sapien
aagctctcgttcccaccgctacggctgtccagc

SEQ ID NO: 756686 - DNA, 33 bp, Homo sapien
aagctctcgttcccactgctacggctgtccagc

SEQ ID NO: 756687 - DNA, 33 bp, Homo sapien
atgacgctggaactgacagtggcctccctcttg

SEQ ID NO: 756688 - DNA, 33 bp, Homo sapien
atgacgctggaactgatagtggcctccctcttg

SEQ ID NO: 756689 - DNA, 33 bp, Homo sapien
catgcgggaatgacacagtcacactgcagaaga

SEQ ID NO: 756690 - DNA, 33 bp, Homo sapien
catgcgggaatgacacggtcacactgcagaaga

SEQ ID NO: 756691 - DNA, 33 bp, Homo sapien
tacaactccctttgcccaagatgtctgtcacac

SEQ ID NO: 756692 - DNA, 33 bp, Homo sapien
tacaactccctttgccgaagatgtctgtcacac

SEQ ID NO: 756693 - DNA, 33 bp, Homo sapien
cttgatgaaaaagccccgatttgtcgcatctag

SEQ ID NO: 756694 - DNA, 33 bp, Homo sapien
cttgatgaaaaagccctgatttgtcgcatctag

SEQ ID NO: 756695 - DNA, 33 bp, Homo sapien
cactgcatcctatttcaacacaaattgccagaa

SEQ ID NO: 756696 - DNA, 33 bp, Homo sapien
cactgcatcctatttcgacacaaattgccagaa

SEQ ID NO: 756697 - DNA, 33 bp, Homo sapien
tgcagggacccagtaccgcgatgacagaggcca

SEQ ID NO: 756698 - DNA, 33 bp, Homo sapien
tgcagggacccagtactgcgatgacagaggcca

SEQ ID NO: 756699 - DNA, 33 bp, Homo sapien
ttttgccttaatttgcacaatcatttccatatt

SEQ ID NO: 756700 - DNA, 33 bp, Homo sapien
ttttgccttaatttgcgcaatcatttccatatt

SEQ ID NO: 756701 - DNA, 33 bp, Homo sapien
cacattgcttctctaactgaactgtcctggggc

SEQ ID NO: 756702 - DNA, 33 bp, Homo sapien
cacattgcttctctaattgaactgtcctggggc

SEQ ID NO: 756703 - DNA, 33 bp, Homo sapien
aaccctcgccactggaaagtgatgttgcctgct

SEQ ID NO: 756704 - DNA, 33 bp, Homo sapien
aaccctcgccactggagagtgatgttgcctgct

SEQ ID NO: 756705 - DNA, 33 bp, Homo sapien
aaggctatgagcagaactccaggctactctccc

SEQ ID NO: 756706 - DNA, 33 bp, Homo sapien
aaggctatgagcagaattccaggctactctccc

SEQ ID NO: 756707 - DNA, 33 bp, Homo sapien
aaattcagtcagcaaaacaaagcctaaatcagg

SEQ ID NO: 756708 - DNA, 33 bp, Homo sapien
aaattcagtcagcaaagcaaagcctaaatcagg

SEQ ID NO: 756709 - DNA, 33 bp, Homo sapien
gtgtaggatgaggacacgtttaaactgcgaagc

SEQ ID NO: 756710 - DNA, 33 bp, Homo sapien
gtgtaggatgaggacaggtttaaactgcgaagc

SEQ ID NO: 756711 - DNA, 33 bp, Homo sapien
aaaggcagggactgccagattcagttttgagtc

SEQ ID NO: 756712 - DNA, 33 bp, Homo sapien
aaaggcagggactgccggattcagttttgagtc

SEQ ID NO: 756713 - DNA, 33 bp, Homo sapien
gagcagaatcctagaccgggagtccgaggggct

SEQ ID NO: 756714 - DNA, 33 bp, Homo sapien
gagcagaatcctagactgggagtccgaggggct

SEQ ID NO: 756715 - DNA, 33 bp, Homo sapien
ctctggtgttagataacgggcaggtttctagga

SEQ ID NO: 756716 - DNA, 33 bp, Homo sapien
ctctggtgttagataatgggcaggtttctagga

SEQ ID NO: 756717 - DNA, 33 bp, Homo sapien
caaaattaactcaatacacttgtgcctcataaa

SEQ ID NO: 756718 - DNA, 33 bp, Homo sapien
caaaattaactcaatatacttgtgcctcataaa

SEQ ID NO: 756719 - DNA, 33 bp, Homo sapien
tggctcttctagaacagtccagctctaccacct

SEQ ID NO: 756720 - DNA, 33 bp, Homo sapien
tggctcttctagaacattccagctctaccacct

SEQ ID NO: 756721 - DNA, 33 bp, Homo sapien
tcctgccctctccccacggtgctctgctgtagt

SEQ ID NO: 756722 - DNA, 33 bp, Homo sapien
tcctgccctctccccatggtgctctgctgtagt

SEQ ID NO: 756723 - DNA, 33 bp, Homo sapien
aaacactgaaaaggcaatgatctaagtaagcac

SEQ ID NO: 756724 - DNA, 33 bp, Homo sapien
aaacactgaaaaggcattgatctaagtaagcac

SEQ ID NO: 756725 - DNA, 33 bp, Homo sapien
tatgaatgtctaaatacgtctcttattggctct

SEQ ID NO: 756726 - DNA, 33 bp, Homo sapien
tatgaatgtctaaatatgtctcttattggctct

SEQ ID NO: 756727 - DNA, 33 bp, Homo sapien
atcttttttccttagcaccttcatgagggcacc

SEQ ID NO: 756728 - DNA, 33 bp, Homo sapien
atcttttttccttagcgccttcatgagggcacc

SEQ ID NO: 756729 - DNA, 33 bp, Homo sapien
ctgcacctgactacaccaagcctcaccatctca

SEQ ID NO: 756730 - DNA, 33 bp, Homo sapien
ctgcacctgactacactaagcctcaccatctca

SEQ ID NO: 756731 - DNA, 33 bp, Homo sapien
aagaattagaggttcacattagaaagcataatt

SEQ ID NO: 756732 - DNA, 33 bp, Homo sapien
aagaattagaggttcatattagaaagcataatt

SEQ ID NO: 756733 - DNA, 33 bp, Homo sapien
aagtttgaagccgttacgacaaaatattgacct

SEQ ID NO: 756734 - DNA, 33 bp, Homo sapien
aagtttgaagccgttatgacaaaatattgacct

SEQ ID NO: 756735 - DNA, 33 bp, Homo sapien
aatactcgggcagcgtcaatgaagactgactca

SEQ ID NO: 756736 - DNA, 33 bp, Homo sapien
aatactcgggcagcgtgaatgaagactgactca

SEQ ID NO: 756737 - DNA, 33 bp, Homo sapien
gtgcccccgaccacaccgtatgttgattctggt

SEQ ID NO: 756738 - DNA, 33 bp, Homo sapien
gtgcccccgaccacactgtatgttgattctggt

SEQ ID NO: 756739 - DNA, 33 bp, Homo sapien
tgcagctcatgggacacagaaacacacgaagcc

SEQ ID NO: 756740 - DNA, 33 bp, Homo sapien
tgcagctcatgggacagagaaacacacgaagcc

SEQ ID NO: 756741 - DNA, 33 bp, Homo sapien
catgaggtgctttccaaagtcttgcctgtttgc

SEQ ID NO: 756742 - DNA, 33 bp, Homo sapien
catgaggtgctttccagagtcttgcctgtttgc

SEQ ID NO: 756743 - DNA, 33 bp, Homo sapien
caaactgcagttctccagaccaggccagtagag

SEQ ID NO: 756744 - DNA, 33 bp, Homo sapien
caaactgcagttctccggaccaggccagtagag

SEQ ID NO: 756745 - DNA, 33 bp, Homo sapien
ggtataacgaggcgcactgcccttccatcctgt

SEQ ID NO: 756746 - DNA, 33 bp, Homo sapien
ggtataacgaggcgcattgcccttccatcctgt

SEQ ID NO: 756747 - DNA, 33 bp, Homo sapien
caggaagtcagtgcacacagcccgcgggttaag

SEQ ID NO: 756748 - DNA, 33 bp, Homo sapien
caggaagtcagtgcacgcagcccgcgggttaag

SEQ ID NO: 756749 - DNA, 33 bp, Homo sapien
ccatttgtgaaaattacaggagacaatctgtgt

SEQ ID NO: 756750 - DNA, 33 bp, Homo sapien
ccatttgtgaaaattataggagacaatctgtgt

SEQ ID NO: 756751 - DNA, 33 bp, Homo sapien
agtctcaaatctaatgccaaatttgtatccaaa

SEQ ID NO: 756752 - DNA, 33 bp, Homo sapien
agtctcaaatctaatgtcaaatttgtatccaaa

SEQ ID NO: 756753 - DNA, 33 bp, Homo sapien
tgtagtgtagaacttacggaatattttcatctt

SEQ ID NO: 756754 - DNA, 33 bp, Homo sapien
tgtagtgtagaacttatggaatattttcatctt

SEQ ID NO: 756755 - DNA, 33 bp, Homo sapien
acacacgttccatccacaagaggcaactcagag

SEQ ID NO: 756756 - DNA, 33 bp, Homo sapien
acacacgttccatccagaagaggcaactcagag

SEQ ID NO: 756757 - DNA, 33 bp, Homo sapien; identical to SEQ ID NO: 756755

SEQ ID NO: 756758 - DNA, 33 bp, Homo sapien; identical to SEQ ID NO: 756756

SEQ ID NO: 756759 - DNA, 33 bp, Homo sapien
gtgggtttgtgtcccccgcaaaatatgttcaag

SEQ ID NO: 756760 - DNA, 33 bp, Homo sapien
gtgggtttgtgtcccctgcaaaatatgttcaag

SEQ ID NO: 756761 - DNA, 33 bp, Homo sapien
ttgtccacaacttgaacgctgacttagcacaat

SEQ ID NO: 756762 - DNA, 33 bp, Homo sapien
ttgtccacaacttgaatgctgacttagcacaat

SEQ ID NO: 756763 - DNA, 33 bp, Homo sapien
gtattaaggcagcgaaaatactttagctgtgaa

SEQ ID NO: 756764 - DNA, 33 bp, Homo sapien
gtattaaggcagcgaatatactttagctgtgaa

SEQ ID NO: 756765 - DNA, 33 bp, Homo sapien
tggtatcctcagaaaacaagaaagatttggaga

SEQ ID NO: 756766 - DNA, 33 bp, Homo sapien
tggtatcctcagaaaataagaaagatttggaga

SEQ ID NO: 756767 - DNA, 33 bp, Homo sapien
ccttcaaggccctgtcaccacctatttcctgat

SEQ ID NO: 756768 - DNA, 33 bp, Homo sapien
ccttcaaggccctgtcgccacctatttcctgat

SEQ ID NO: 756769 - DNA, 33 bp, Homo sapien
ccctctggcttttcgaagacgcagggtacccta

SEQ ID NO: 756770 - DNA, 33 bp, Homo sapien
ccctctggcttttcgaggacgcagggtacccta

SEQ ID NO: 756771 - DNA, 33 bp, Homo sapien
gcatgagatctcggcacggcaagcccagcatcg

SEQ ID NO: 756772 - DNA, 33 bp, Homo sapien
gcatgagatctcggcatggcaagcccagcatcg

SEQ ID NO: 756773 - DNA, 33 bp, Homo sapien
caggagtcaacatgccaaagaatgaggctggag

SEQ ID NO: 756774 - DNA, 33 bp, Homo sapien
caggagtcaacatgccgaagaatgaggctggag

SEQ ID NO: 756775 - DNA, 33 bp, Homo sapien
tgggccaataaaatctcaacacctgtgggagag

SEQ ID NO: 756776 - DNA, 33 bp, Homo sapien
tgggccaataaaatcttaacacctgtgggagag

SEQ ID NO: 756777 - DNA, 33 bp, Homo sapien
gcacttggtatttccccgacagagagaaccagc

SEQ ID NO: 756778 - DNA, 33 bp, Homo sapien
gcacttggtatttccctgacagagagaaccagc

SEQ ID NO: 756779 - DNA, 33 bp, Homo sapien
caaacccaccgcagacactcccagacttacccg

SEQ ID NO: 756780 - DNA, 33 bp, Homo sapien
caaacccaccgcagacgctcccagacttacccg

SEQ ID NO: 756781 - DNA, 33 bp, Homo sapien
gtgatcattacaacaaataacgcagaggagagg

SEQ ID NO: 756782 - DNA, 33 bp, Homo sapien
gtgatcattacaacaagtaacgcagaggagagg

SEQ ID NO: 756783 - DNA, 33 bp, Homo sapien
gactgcagccaactgcaagtgaattgccttcaa

SEQ ID NO: 756784 - DNA, 33 bp, Homo sapien
gactgcagccaactgcgagtgaattgccttcaa

SEQ ID NO: 756785 - DNA, 33 bp, Homo sapien
ttctgatttaccattccaatctgtgaaatggac

SEQ ID NO: 756786 - DNA, 33 bp, Homo sapien
ttctgatttaccattctaatctgtgaaatggac

SEQ ID NO: 756787 - DNA, 33 bp, Homo sapien
gtctctagcatttaaccagcatacaaagcactt

SEQ ID NO: 756788 - DNA, 33 bp, Homo sapien
gtctctagcatttaactagcatacaaagcactt

SEQ ID NO: 756789 - DNA, 33 bp, Homo sapien
ccatgtaataaagcacagtgagcaggcacttcc

SEQ ID NO: 756790 - DNA, 33 bp, Homo sapien
ccatgtaataaagcacggtgagcaggcacttcc

SEQ ID NO: 756791 - DNA, 33 bp, Homo sapien
cgcatctgtcttgtaacgagctaaccatgtaat

SEQ ID NO: 756792 - DNA, 33 bp, Homo sapien
cgcatctgtcttgtaatgagctaaccatgtaat

SEQ ID NO: 756793 - DNA, 33 bp, Homo sapien
gagtcactctttggaacttcaattatggggagg

SEQ ID NO: 756794 - DNA, 33 bp, Homo sapien
gagtcactctttggaatttcaattatggggagg

SEQ ID NO: 756795 - DNA, 33 bp, Homo sapien
ttcctcctctccactaacaggcatttggtgttc

SEQ ID NO: 756796 - DNA, 33 bp, Homo sapien
ttcctcctctccactagcaggcatttggtgttc

SEQ ID NO: 756797 - DNA, 33 bp, Homo sapien
aagtttgccttgaaaaaatctgaagaagtacct

SEQ ID NO: 756798 - DNA, 33 bp, Homo sapien
aagtttgccttgaaaagatctgaagaagtacct

SEQ ID NO: 756799 - DNA, 33 bp, Homo sapien
agagagcatcttagacaaaagttgagttctcct

SEQ ID NO: 756800 - DNA, 33 bp, Homo sapien
agagagcatcttagaccaaagttgagttctcct

SEQ ID NO: 756801 - DNA, 33 bp, Homo sapien
tggatgcaaatgccgacgtgagctaagctctct

SEQ ID NO: 756802 - DNA, 33 bp, Homo sapien
tggatgcaaatgccgatgtgagctaagctctct

SEQ ID NO: 756803 - DNA, 33 bp, Homo sapien
tcttcatgaacaacacaaacatcctgtgtcctc

SEQ ID NO: 756804 - DNA, 33 bp, Homo sapien
tcttcatgaacaacacgaacatcctgtgtcctc

SEQ ID NO: 756805 - DNA, 33 bp, Homo sapien
gcctggaaggaccggcacaattcagggtatgga

SEQ ID NO: 756806 - DNA, 33 bp, Homo sapien
gcctggaaggaccggcgcaattcagggtatgga

SEQ ID NO: 756807 - DNA, 33 bp, Homo sapien
tgagacaaggtgaccaataagaggttctgtggc

SEQ ID NO: 756808 - DNA, 33 bp, Homo sapien
tgagacaaggtgaccagtaagaggttctgtggc

SEQ ID NO: 756809 - DNA, 33 bp, Homo sapien
ccagctacctagtgacaagttgattataatgga

SEQ ID NO: 756810 - DNA, 33 bp, Homo sapien
ccagctacctagtgactagttgattataatgga

SEQ ID NO: 756811 - DNA, 33 bp, Homo sapien
agcattgtaatgaagacgaagataatggcatat

SEQ ID NO: 756812 - DNA, 33 bp, Homo sapien
agcattgtaatgaagatgaagataatggcatat

SEQ ID NO: 756813 - DNA, 33 bp, Homo sapien
gcattgtttgggtgcacaaaaaaacatatagca

SEQ ID NO: 756814 - DNA, 33 bp, Homo sapien
gcattgtttgggtgcagaaaaaaacatatagca

SEQ ID NO: 756815 - DNA, 33 bp, Homo sapien
actaaagctgcagaggaaacattcctcctttct

SEQ ID NO: 756816 - DNA, 33 bp, Homo sapien
actaaagctgcagagggaacattcctcctttct

SEQ ID NO: 756817 - DNA, 33 bp, Homo sapien
gcggaagagagtataaatgacaactgtccaaca

SEQ ID NO: 756818 - DNA, 33 bp, Homo sapien
gcggaagagagtataagtgacaactgtccaaca

SEQ ID NO: 756819 - DNA, 33 bp, Homo sapien
cctacctagaatgccacagcaactacagccaac

SEQ ID NO: 756820 - DNA, 33 bp, Homo sapien
cctacctagaatgccagagcaactacagccaac

SEQ ID NO: 756821 - DNA, 33 bp, Homo sapien
aatgttacctcaataaaaaggaagtccttaggc

SEQ ID NO: 756822 - DNA, 33 bp, Homo sapien
aatgttacctcaataagaaggaagtccttaggc

SEQ ID NO: 756823 - DNA, 33 bp, Homo sapien
ataaatggccttgttgaatatgtggcctggtgt

SEQ ID NO: 756824 - DNA, 33 bp, Homo sapien
ataaatggccttgttgcatatgtggcctggtgt

SEQ ID NO: 756825 - DNA, 33 bp, Homo sapien
taaacacacactaaagcattccagagtaaaaga

SEQ ID NO: 756826 - DNA, 33 bp, Homo sapien
taaacacacactaaagtattccagagtaaaaga

SEQ ID NO: 756827 - DNA, 33 bp, Homo sapien
tttaaagaaaatgctacaattgtccgggcacgg

SEQ ID NO: 756828 - DNA, 33 bp, Homo sapien
tttaaagaaaatgctagaattgtccgggcacgg

SEQ ID NO: 756829 - DNA, 33 bp, Homo sapien
ggccactgagcaaccaaaacctttccagctggt

SEQ ID NO: 756830 - DNA, 33 bp, Homo sapien
ggccactgagcaaccagaacctttccagctggt

SEQ ID NO: 756831 - DNA, 33 bp, Homo sapien
agggcacaaactacacaaagagagtggctgctg

SEQ ID NO: 756832 - DNA, 33 bp, Homo sapien
agggcacaaactacacgaagagagtggctgctg

SEQ ID NO: 756833 - DNA, 33 bp, Homo sapien
ttaggcttaagacataagacataagtttttaac

SEQ ID NO: 756834 - DNA, 33 bp, Homo sapien
ttaggcttaagacatacgacataagtttttaac

SEQ ID NO: 756835 - DNA, 33 bp, Homo sapien
gttttatacattggcacacttctggagtcttgc

SEQ ID NO: 756836 - DNA, 33 bp, Homo sapien
gttttatacattggcatacttctggagtcttgc

SEQ ID NO: 756837 - DNA, 33 bp, Homo sapien
caatttctcaatgcctaaaaccctagaagacag

SEQ ID NO: 756838 - DNA, 33 bp, Homo sapien
caatttctcaatgcctcaaaccctagaagacag

SEQ ID NO: 756839 - DNA, 33 bp, Homo sapien
ccaacaagaaacagaactgacacaccatctcat

SEQ ID NO: 756840 - DNA, 33 bp, Homo sapien
ccaacaagaaacagaattgacacaccatctcat

SEQ ID NO: 756841 - DNA, 33 bp, Homo sapien
ccagattttcacacaacgaaggcaaggtgagaa

SEQ ID NO: 756842 - DNA, 33 bp, Homo sapien
ccagattttcacacaatgaaggcaaggtgagaa

SEQ ID NO: 756843 - DNA, 33 bp, Homo sapien
ttttaagcagggaaatgaacattaatcttcacc

SEQ ID NO: 756844 - DNA, 33 bp, Homo sapien
ttttaagcagggaaattaacattaatcttcacc

SEQ ID NO: 756845 - DNA, 33 bp, Homo sapien
gataaatcaagcccacaaggatcgcagagagag

SEQ ID NO: 756846 - DNA, 33 bp, Homo sapien
gataaatcaagcccacgaggatcgcagagagag

SEQ ID NO: 756847 - DNA, 33 bp, Homo sapien
ttagaatgtattttccaatatagctgcagtgtc

SEQ ID NO: 756848 - DNA, 33 bp, Homo sapien
ttagaatgtattttccgatatagctgcagtgtc

SEQ ID NO: 756849 - DNA, 33 bp, Homo sapien
gaataaaaggaatagaagatgcaggcaaaagag

SEQ ID NO: 756850 - DNA, 33 bp, Homo sapien
gaataaaaggaatagaggatgcaggcaaaagag

SEQ ID NO: 756851 - DNA, 33 bp, Homo sapien
aagtcaaatccagaaaatgtcttgaaatactat

SEQ ID NO: 756852 - DNA, 33 bp, Homo sapien
aagtcaaatccagaaagtgtcttgaaatactat

SEQ ID NO: 756853 - DNA, 33 bp, Homo sapien
cacagcttagtcctaaatatactccaatgtttc

SEQ ID NO: 756854 - DNA, 33 bp, Homo sapien
cacagcttagtcctaattatactccaatgtttc

SEQ ID NO: 756855 - DNA, 33 bp, Homo sapien
aacagtcataagcaaaagataacaagtccagga

SEQ ID NO: 756856 - DNA, 33 bp, Homo sapien
aacagtcataagcaaaggataacaagtccagga

SEQ ID NO: 756857 - DNA, 33 bp, Homo sapien
ccacatctatcctaaaccatcaggcactttcag

SEQ ID NO: 756858 - DNA, 33 bp, Homo sapien
ccacatctatcctaaatcatcaggcactttcag

SEQ ID NO: 756859 - DNA, 33 bp, Homo sapien
tgtttttaaactgggacggagctgctgacactt

SEQ ID NO: 756860 - DNA, 33 bp, Homo sapien
tgtttttaaactgggagggagctgctgacactt

SEQ ID NO: 756861 - DNA, 33 bp, Homo sapien
gcaggcaaattgtccacggaagaaaccagggca

SEQ ID NO: 756862 - DNA, 33 bp, Homo sapien
gcaggcaaattgtccatggaagaaaccagggca

SEQ ID NO: 756863 - DNA, 33 bp, Homo sapien
tgcaattggccagctcaatgatccttagcaagg

SEQ ID NO: 756864 - DNA, 33 bp, Homo sapien
tgcaattggccagctcgatgatccttagcaagg

SEQ ID NO: 756865 - DNA, 33 bp, Homo sapien
gcaaacataaaaaaaagtcaacataactgatca

SEQ ID NO: 756866 - DNA, 33 bp, Homo sapien
gcaaacataaaaaaaattcaacataactgatca

SEQ ID NO: 756867 - DNA, 33 bp, Homo sapien
cacttataagtgggaacggaatgaagagaacac

SEQ ID NO: 756868 - DNA, 33 bp, Homo sapien
cacttataagtgggaatggaatgaagagaacac

SEQ ID NO: 756869 - DNA, 33 bp, Homo sapien
cttaaggagcttgtgaactgaggtgatgggatt

SEQ ID NO: 756870 - DNA, 33 bp, Homo sapien
cttaaggagcttgtgagctgaggtgatgggatt

SEQ ID NO: 756871 - DNA, 33 bp, Homo sapien
actcttgtgtataatcaaggaatgcaaatctta

SEQ ID NO: 756872 - DNA, 33 bp, Homo sapien
actcttgtgtataatccaggaatgcaaatctta

SEQ ID NO: 756873 - DNA, 33 bp, Homo sapien
gtctgtgtttcttccccatgaatgtgagacttg

SEQ ID NO: 756874 - DNA, 33 bp, Homo sapien
gtctgtgtttcttccctatgaatgtgagacttg

SEQ ID NO: 756875 - DNA, 33 bp, Homo sapien
ttccaccattttctcacgattggagcagtcaca

SEQ ID NO: 756876 - DNA, 33 bp, Homo sapien
ttccaccattttctcatgattggagcagtcaca

SEQ ID NO: 756877 - DNA, 33 bp, Homo sapien
agaggtaaaagtcaagcatttagaaaaataggg

SEQ ID NO: 756878 - DNA, 33 bp, Homo sapien
agaggtaaaagtcaaggatttagaaaaataggg

SEQ ID NO: 756879 - DNA, 33 bp, Homo sapien
atctcaaaaagatctccagataaacaattcctt

SEQ ID NO: 756880 - DNA, 33 bp, Homo sapien
atctcaaaaagatctcgagataaacaattcctt

SEQ ID NO: 756881 - DNA, 33 bp, Homo sapien
attttcactgtagggaagaattagaggacagtc

SEQ ID NO: 756882 - DNA, 33 bp, Homo sapien
attttcactgtagggaggaattagaggacagtc

SEQ ID NO: 756883 - DNA, 33 bp, Homo sapien
gaccttcttttccacaccactctgtaatgccgc

SEQ ID NO: 756884 - DNA, 33 bp, Homo sapien
gaccttcttttccacatcactctgtaatgccgc

SEQ ID NO: 756885 - DNA, 33 bp, Homo sapien
agggccattgtattaacctggtgatcaagcaaa

SEQ ID NO: 756886 - DNA, 33 bp, Homo sapien
agggccattgtattaatctggtgatcaagcaaa

SEQ ID NO: 756887 - DNA, 33 bp, Homo sapien
aaactttggaaagtgacaccaagcaatcagaca

SEQ ID NO: 756888 - DNA, 33 bp, Homo sapien
aaactttggaaagtgagaccaagcaatcagaca

SEQ ID NO: 756889 - DNA, 33 bp, Homo sapien
ggttgttaaggtgtcacctcttgaattagaatg

SEQ ID NO: 756890 - DNA, 33 bp, Homo sapien
ggttgttaaggtgtcatctcttgaattagaatg

SEQ ID NO: 756891 - DNA, 33 bp, Homo sapien
ctttaattcataacgaccacagacatccagttc

SEQ ID NO: 756892 - DNA, 33 bp, Homo sapien
ctttaattcataacgatcacagacatccagttc

SEQ ID NO: 756893 - DNA, 33 bp, Homo sapien
attttctcatattccacgttgggtaattcatct

SEQ ID NO: 756894 - DNA, 33 bp, Homo sapien
attttctcatattccatgttgggtaattcatct

SEQ ID NO: 756895 - DNA, 33 bp, Homo sapien
aacagcataacagttacaaacagcaaattctac

SEQ ID NO: 756896 - DNA, 33 bp, Homo sapien
aacagcataacagttataaacagcaaattctac

SEQ ID NO: 756897 - DNA, 33 bp, Homo sapien
gatgatggaatctaccaaacgaataataacata

SEQ ID NO: 756898 - DNA, 33 bp, Homo sapien
gatgatggaatctaccgaacgaataataacata

SEQ ID NO: 756899 - DNA, 33 bp, Homo sapien
gaagtacttgccttcaggaaagatccactatgt

SEQ ID NO: 756900 - DNA, 33 bp, Homo sapien
gaagtacttgccttcatgaaagatccactatgt

SEQ ID NO: 756901 - DNA, 33 bp, Homo sapien
tggaatgcactttccaccttgctgcaaggacag

SEQ ID NO: 756902 - DNA, 33 bp, Homo sapien
tggaatgcactttccatcttgctgcaaggacag

SEQ ID NO: 756903 - DNA, 33 bp, Homo sapien
tcccttagaccttctcgcatggattgtggttcc

SEQ ID NO: 756904 - DNA, 33 bp, Homo sapien
tcccttagaccttctctcatggattgtggttcc

SEQ ID NO: 756905 - DNA, 33 bp, Homo sapien
tgacttctcagtcaagcctctacatttgtttta

SEQ ID NO: 756906 - DNA, 33 bp, Homo sapien
tgacttctcagtcaagtctctacatttgtttta

SEQ ID NO: 756907 - DNA, 33 bp, Homo sapien
gggccttccagaaagaaagacaaggctcaagag

SEQ ID NO: 756908 - DNA, 33 bp, Homo sapien
gggccttccagaaagagagacaaggctcaagag

SEQ ID NO: 756909 - DNA, 33 bp, Homo sapien
gaagtgaacagaccaaatagacatagttcaaaa

SEQ ID NO: 756910 - DNA, 33 bp, Homo sapien
gaagtgaacagaccaagtagacatagttcaaaa

SEQ ID NO: 756911 - DNA, 33 bp, Homo sapien
tgtaaccaggctgttacgtaggctattatttgg

SEQ ID NO: 756912 - DNA, 33 bp, Homo sapien
tgtaaccaggctgttatgtaggctattatttgg

SEQ ID NO: 756913 - DNA, 33 bp, Homo sapien
tattttgctgagggggaaaaaagatgtattttg

SEQ ID NO: 756914 - DNA, 33 bp, Homo sapien
tattttgctgaggggggaaaaagatgtattttg

SEQ ID NO: 756915 - DNA, 33 bp, Homo sapien
agacaacaaccaacataagcagagtcagggaac

SEQ ID NO: 756916 - DNA, 33 bp, Homo sapien
agacaacaaccaacatgagcagagtcagggaac

SEQ ID NO: 756917 - DNA, 33 bp, Homo sapien
gaaaagtcctctattcacatattgcaccatcga

SEQ ID NO: 756918 - DNA, 33 bp, Homo sapien
gaaaagtcctctattctcatattgcaccatcga

SEQ ID NO: 756919 - DNA, 33 bp, Homo sapien
ggaaaaactcttagaaacaacagaaaaactaag

SEQ ID NO: 756920 - DNA, 33 bp, Homo sapien
ggaaaaactcttagaaccaacagaaaaactaag

SEQ ID NO: 756921 - DNA, 33 bp, Homo sapien
ttaggaataaacgtgacgaattgtagaaggaat

SEQ ID NO: 756922 - DNA, 33 bp, Homo sapien
ttaggaataaacgtgaggaattgtagaaggaat

SEQ ID NO: 756923 - DNA, 33 bp, Homo sapien
ctgatttacccacataaaggttcatcccgctag

SEQ ID NO: 756924 - DNA, 33 bp, Homo sapien
ctgatttacccacatagaggttcatcccgctag

SEQ ID NO: 756925 - DNA, 33 bp, Homo sapien
agaccctcacttcaaccgggcatgacaatgggg

SEQ ID NO: 756926 - DNA, 33 bp, Homo sapien
agaccctcacttcaactgggcatgacaatgggg

SEQ ID NO: 756927 - DNA, 33 bp, Homo sapien
tcaagttggggtcatccattctagcctccagtt

SEQ ID NO: 756928 - DNA, 33 bp, Homo sapien
tcaagttggggtcatctattctagcctccagtt

SEQ ID NO: 756929 - DNA, 33 bp, Homo sapien
tcacaagaatgataaaacctaaatactgagtcc

SEQ ID NO: 756930 - DNA, 33 bp, Homo sapien
tcacaagaatgataaaccctaaatactgagtcc

SEQ ID NO: 756931 - DNA, 33 bp, Homo sapien
gcacagcaaggattcaataaatgtctgctgcat

SEQ ID NO: 756932 - DNA, 33 bp, Homo sapien
gcacagcaaggattcagtaaatgtctgctgcat

SEQ ID NO: 756933 - DNA, 33 bp, Homo sapien
tatgccttgtttaactgaagtcaggtgtttgag

SEQ ID NO: 756934 - DNA, 33 bp, Homo sapien
tatgccttgtttaacttaagtcaggtgtttgag

SEQ ID NO: 756935 - DNA, 33 bp, Homo sapien
tagccagtaataaaggcaatcagccataaggtt

SEQ ID NO: 756936 - DNA, 33 bp, Homo sapien
tagccagtaataaaggtaatcagccataaggtt

SEQ ID NO: 756937 - DNA, 33 bp, Homo sapien
aagagaatcctaggcaaaaactaagcatatgaa

SEQ ID NO: 756938 - DNA, 33 bp, Homo sapien
aagagaatcctaggcagaaactaagcatatgaa

SEQ ID NO: 756939 - DNA, 33 bp, Homo sapien
atgagatctctggatcaagaggtcagtactaaa

SEQ ID NO: 756940 - DNA, 33 bp, Homo sapien
atgagatctctggatcgagaggtcagtactaaa

SEQ ID NO: 756941 - DNA, 33 bp, Homo sapien
tggtaaagttggcgtcagacagggagcaggtgt

SEQ ID NO: 756942 - DNA, 33 bp, Homo sapien
tggtaaagttggcgtcggacagggagcaggtgt

SEQ ID NO: 756943 - DNA, 33 bp, Homo sapien
accactggacactggacactgtgacacctgctc

SEQ ID NO: 756944 - DNA, 33 bp, Homo sapien
accactggacactggatactgtgacacctgctc

SEQ ID NO: 756945 - DNA, 33 bp, Homo sapien
gcgatgctgggtcaagaaactcaggctctgctc

SEQ ID NO: 756946 - DNA, 33 bp, Homo sapien
gcgatgctgggtcaaggaactcaggctctgctc

SEQ ID NO: 756947 - DNA, 33 bp, Homo sapien
tccagattttgtggtaagaggacctcagccacc

SEQ ID NO: 756948 - DNA, 33 bp, Homo sapien
tccagattttgtggtaggaggacctcagccacc

SEQ ID NO: 756949 - DNA, 33 bp, Homo sapien
agggtgaagactgcaaaaggactgttgttgaaa

SEQ ID NO: 756950 - DNA, 33 bp, Homo sapien
agggtgaagactgcaagaggactgttgttgaaa

SEQ ID NO: 756951 - DNA, 33 bp, Homo sapien
gtggtgcccgtgtgataaggtttttctcgggac

SEQ ID NO: 756952 - DNA, 33 bp, Homo sapien
gtggtgcccgtgtgatgaggtttttctcgggac

SEQ ID NO: 756953 - DNA, 33 bp, Homo sapien
gtcactctgaagagaaactgaattgaaactagt

SEQ ID NO: 756954 - DNA, 33 bp, Homo sapien
gtcactctgaagagaacctgaattgaaactagt

SEQ ID NO: 756955 - DNA, 33 bp, Homo sapien
tggtggtcgtcttaccagagaaagttactgaaa

SEQ ID NO: 756956 - DNA, 33 bp, Homo sapien
tggtggtcgtcttaccggagaaagttactgaaa

SEQ ID NO: 756957 - DNA, 33 bp, Homo sapien
gaaagaaaagtggggaaacggagaatagagtca

SEQ ID NO: 756958 - DNA, 33 bp, Homo sapien
gaaagaaaagtggggagacggagaatagagtca

SEQ ID NO: 756959 - DNA, 33 bp, Homo sapien
atttcccatcataccacctacaggaccagggga

SEQ ID NO: 756960 - DNA, 33 bp, Homo sapien
atttcccatcataccatctacaggaccagggga

SEQ ID NO: 756961 - DNA, 33 bp, Homo sapien
actgcacgtgtcaaaggccaagatggagtaaca

SEQ ID NO: 756962 - DNA, 33 bp, Homo sapien
actgcacgtgtcaaagtccaagatggagtaaca

SEQ ID NO: 756963 - DNA, 33 bp, Homo sapien
gtgaagcaaaactgtacatatagagaataaatt

SEQ ID NO: 756964 - DNA, 33 bp, Homo sapien
gtgaagcaaaactgtagatatagagaataaatt

SEQ ID NO: 756965 - DNA, 33 bp, Homo sapien
ttgttgctcccatgcaaagccccaacttggcaa

SEQ ID NO: 756966 - DNA, 33 bp, Homo sapien
ttgttgctcccatgcacagccccaacttggcaa

SEQ ID NO: 756967 - DNA, 33 bp, Homo sapien
aatcaaggtgagagatgaagtcaaactggattt

SEQ ID NO: 756968 - DNA, 33 bp, Homo sapien
aatcaaggtgagagattaagtcaaactggattt

SEQ ID NO: 756969 - DNA, 33 bp, Homo sapien
cttggaagaaacagttcaacccagtccacaaag

SEQ ID NO: 756970 - DNA, 33 bp, Homo sapien
cttggaagaaacagtttaacccagtccacaaag

SEQ ID NO: 756971 - DNA, 33 bp, Homo sapien
aacaagtgtagattatgaacctgggaccccgtt

SEQ ID NO: 756972 - DNA, 33 bp, Homo sapien
aacaagtgtagattattaacctgggaccccgtt

SEQ ID NO: 756973 - DNA, 33 bp, Homo sapien
tggctgtcatccatgcaagagtagacatgagat

SEQ ID NO: 756974 - DNA, 33 bp, Homo sapien
tggctgtcatccatgccagagtagacatgagat

SEQ ID NO: 756975 - DNA, 33 bp, Homo sapien
cctggaccgatggaagaaatctcaacacaaaac

SEQ ID NO: 756976 - DNA, 33 bp, Homo sapien
cctggaccgatggaagcaatctcaacacaaaac

SEQ ID NO: 756977 - DNA, 33 bp, Homo sapien
gctgccaggaacaacagtggctgaatgcttcct

SEQ ID NO: 756978 - DNA, 33 bp, Homo sapien
gctgccaggaacaacattggctgaatgcttcct

SEQ ID NO: 756979 - DNA, 33 bp, Homo sapien
ttttcacttcttctagcaaaactcatcattttt

SEQ ID NO: 756980 - DNA, 33 bp, Homo sapien
ttttcacttcttctagtaaaactcatcattttt

SEQ ID NO: 756981 - DNA, 33 bp, Homo sapien
ggtgcctatttcctaacggctgcaaggattctt

SEQ ID NO: 756982 - DNA, 33 bp, Homo sapien
ggtgcctatttcctaatggctgcaaggattctt

SEQ ID NO: 756983 - DNA, 33 bp, Homo sapien
gcacactaggtaataaagaaagtggagttttaa

SEQ ID NO: 756984 - DNA, 33 bp, Homo sapien
gcacactaggtaataacgaaagtggagttttaa

SEQ ID NO: 756985 - DNA, 33 bp, Homo sapien
ctcagtttctcaataaaatgaagacattatgaa

SEQ ID NO: 756986 - DNA, 33 bp, Homo sapien
ctcagtttctcaataacatgaagacattatgaa

SEQ ID NO: 756987 - DNA, 33 bp, Homo sapien
tgaaggctacagtgaccaaactgcacaacttca

SEQ ID NO: 756988 - DNA, 33 bp, Homo sapien
tgaaggctacagtgactaaactgcacaacttca

SEQ ID NO: 756989 - DNA, 33 bp, Homo sapien
ggctgtttaacagagaaagatgtgtcagggcct

SEQ ID NO: 756990 - DNA, 33 bp, Homo sapien
ggctgtttaacagagagagatgtgtcagggcct

SEQ ID NO: 756991 - DNA, 33 bp, Homo sapien
aaatgggggtactatcacatagactggcataga

SEQ ID NO: 756992 - DNA, 33 bp, Homo sapien
aaatgggggtactatcgcatagactggcataga

SEQ ID NO: 756993 - DNA, 33 bp, Homo sapien
cagaattctcaatcagcctcagactacacacag

SEQ ID NO: 756994 - DNA, 33 bp, Homo sapien
cagaattctcaatcaggctcagactacacacag

SEQ ID NO: 756995 - DNA, 33 bp, Homo sapien
gcacaccgagttctcaaagatgtgatatcaccc

SEQ ID NO: 756996 - DNA, 33 bp, Homo sapien
gcacaccgagttctcatagatgtgatatcaccc

SEQ ID NO: 756997 - DNA, 33 bp, Homo sapien
catttgaaaaacaataccagattccagtgagaa

SEQ ID NO: 756998 - DNA, 33 bp, Homo sapien
catttgaaaaacaatatcagattccagtgagaa

SEQ ID NO: 756999 - DNA, 33 bp, Homo sapien
gctgaaggtttggatccgaggatttcattttat

SEQ ID NO: 757000 - DNA, 33 bp, Homo sapien
gctgaaggtttggatctgaggatttcattttat

SEQ ID NO: 757001 - DNA, 33 bp, Homo sapien
ccattaattcaacaacacttttccaagctgttt

SEQ ID NO: 757002 - DNA, 33 bp, Homo sapien
ccattaattcaacaacccttttccaagctgttt

SEQ ID NO: 757003 - DNA, 33 bp, Homo sapien
cactgcaaactaggaacactgaataggagactc

SEQ ID NO: 757004 - DNA, 33 bp, Homo sapien
cactgcaaactaggaatactgaataggagactc

SEQ ID NO: 757005 - DNA, 33 bp, Homo sapien
tcattctcatataatcaatgctgaacaaagatt

SEQ ID NO: 757006 - DNA, 33 bp, Homo sapien
tcattctcatataatcgatgctgaacaaagatt

SEQ ID NO: 757007 - DNA, 33 bp, Homo sapien
agtttagtttcataaagaattagtcagtgacgg

SEQ ID NO: 757008 - DNA, 33 bp, Homo sapien
agtttagtttcataaataattagtcagtgacgg

SEQ ID NO: 757009 - DNA, 33 bp, Homo sapien
aagacaacatatcaaactaatgatcacaaatag

SEQ ID NO: 757010 - DNA, 33 bp, Homo sapien
aagacaacatatcaaattaatgatcacaaatag

SEQ ID NO: 757011 - DNA, 33 bp, Homo sapien
ttggctcagatataacaataagtcattttaatt

SEQ ID NO: 757012 - DNA, 33 bp, Homo sapien
ttggctcagatataacgataagtcattttaatt

SEQ ID NO: 757013 - DNA, 33 bp, Homo sapien
tcttttactcatcaaaactttctcctttgctac

SEQ ID NO: 757014 - DNA, 33 bp, Homo sapien
tcttttactcatcaaatctttctcctttgctac

SEQ ID NO: 757015 - DNA, 33 bp, Homo sapien
cctgctgataaacgaaagtcacggcacatatgt

SEQ ID NO: 757016 - DNA, 33 bp, Homo sapien
cctgctgataaacgaacgtcacggcacatatgt

SEQ ID NO: 757017 - DNA, 33 bp, Homo sapien
gtatttattagggtgacgctggacctataccag

SEQ ID NO: 757018 - DNA, 33 bp, Homo sapien
gtatttattagggtgatgctggacctataccag

SEQ ID NO: 757019 - DNA, 33 bp, Homo sapien
tgcttaccaggtaaaacaccagctcttgggact

SEQ ID NO: 757020 - DNA, 33 bp, Homo sapien
tgcttaccaggtaaaataccagctcttgggact

SEQ ID NO: 757021 - DNA, 33 bp, Homo sapien
gatgcataacttaaacagttgagccatgtaaca

SEQ ID NO: 757022 - DNA, 33 bp, Homo sapien
gatgcataacttaaactgttgagccatgtaaca

SEQ ID NO: 757023 - DNA, 33 bp, Homo sapien
tgactggggtaaactcacaggcttgccagggta

SEQ ID NO: 757024 - DNA, 33 bp, Homo sapien
tgactggggtaaactcgcaggcttgccagggta

SEQ ID NO: 757025 - DNA, 33 bp, Homo sapien
aaatgtacaacaatgcccaacacttagccagaa

SEQ ID NO: 757026 - DNA, 33 bp, Homo sapien
aaatgtacaacaatgctcaacacttagccagaa

SEQ ID NO: 757027 - DNA, 33 bp, Homo sapien
gacagagagaatgagcggctactggcctacacc

SEQ ID NO: 757028 - DNA, 33 bp, Homo sapien
gacagagagaatgagctgctactggcctacacc

SEQ ID NO: 757029 - DNA, 33 bp, Homo sapien
cactgcaatgcagatacgtgatgctcagcctgg

SEQ ID NO: 757030 - DNA, 33 bp, Homo sapien
cactgcaatgcagatatgtgatgctcagcctgg

SEQ ID NO: 757031 - DNA, 33 bp, Homo sapien
ctggagacttcataaccaatcagaggctgattc

SEQ ID NO: 757032 - DNA, 33 bp, Homo sapien
ctggagacttcataacgaatcagaggctgattc

SEQ ID NO: 757033 - DNA, 33 bp, Homo sapien
gcagaagacaagaccaaagttggcctacagctg

SEQ ID NO: 757034 - DNA, 33 bp, Homo sapien
gcagaagacaagaccagagttggcctacagctg

SEQ ID NO: 757035 - DNA, 33 bp, Homo sapien
tctcctctaccttataccaatacctggacgatt

SEQ ID NO: 757036 - DNA, 33 bp, Homo sapien
tctcctctaccttatatcaatacctggacgatt

SEQ ID NO: 757037 - DNA, 33 bp, Homo sapien
tgaatggtgagaaactgagacaccttgagtggg

SEQ ID NO: 757038 - DNA, 33 bp, Homo sapien
tgaatggtgagaaacttagacaccttgagtggg

SEQ ID NO: 757039 - DNA, 33 bp, Homo sapien
agaattaccaacttcagtctattcaaatctttc

SEQ ID NO: 757040 - DNA, 33 bp, Homo sapien
agaattaccaacttcattctattcaaatctttc

SEQ ID NO: 757041 - DNA, 33 bp, Homo sapien
tactttagatataccaaatctacacaattcaca

SEQ ID NO: 757042 - DNA, 33 bp, Homo sapien
tactttagatataccagatctacacaattcaca

SEQ ID NO: 757043 - DNA, 33 bp, Homo sapien
ttctcccagctggaaaagaactgtgcttggttc

SEQ ID NO: 757044 - DNA, 33 bp, Homo sapien
ttctcccagctggaaaggaactgtgcttggttc

SEQ ID NO: 757045 - DNA, 33 bp, Homo sapien
caaagtgtctacaaaacccattacagatgctgc

SEQ ID NO: 757046 - DNA, 33 bp, Homo sapien
caaagtgtctacaaaatccattacagatgctgc

SEQ ID NO: 757047 - DNA, 33 bp, Homo sapien
tgtaaccattttaaacactagcagtcgttttgt

SEQ ID NO: 757048 - DNA, 33 bp, Homo sapien
tgtaaccattttaaaccctagcagtcgttttgt

SEQ ID NO: 757049 - DNA, 33 bp, Homo sapien
aaaaagaaaatcttcaaagcatccagaggaaga

SEQ ID NO: 757050 - DNA, 33 bp, Homo sapien
aaaaagaaaatcttcagagcatccagaggaaga

SEQ ID NO: 757051 - DNA, 33 bp, Homo sapien
tagaactttagaaatcagatcatccaatgacag

SEQ ID NO: 757052 - DNA, 33 bp, Homo sapien
tagaactttagaaatcggatcatccaatgacag

SEQ ID NO: 757053 - DNA, 33 bp, Homo sapien
cattctgtaggtttgccagtttcaatgacaaag

SEQ ID NO: 757054 - DNA, 33 bp, Homo sapien
cattctgtaggtttgctagtttcaatgacaaag

SEQ ID NO: 757055 - DNA, 33 bp, Homo sapien
atgtgaaacttccaacacaacatggatagattt

SEQ ID NO: 757056 - DNA, 33 bp, Homo sapien
atgtgaaacttccaactcaacatggatagattt

SEQ ID NO: 757057 - DNA, 33 bp, Homo sapien
ttgaagcagtgaccacacagtgattcagccctg

SEQ ID NO: 757058 - DNA, 33 bp, Homo sapien
ttgaagcagtgaccactcagtgattcagccctg

SEQ ID NO: 757059 - DNA, 33 bp, Homo sapien
agtaaaatgtcatcaaatcaggagagagaattt

SEQ ID NO: 757060 - DNA, 33 bp, Homo sapien
agtaaaatgtcatcaagtcaggagagagaattt

SEQ ID NO: 757061 - DNA, 33 bp, Homo sapien
ctcaaacataaggagtaaaattctgaggaggaa

SEQ ID NO: 757062 - DNA, 33 bp, Homo sapien
ctcaaacataaggagtcaaattctgaggaggaa

SEQ ID NO: 757063 - DNA, 33 bp, Homo sapien
cacctctagtggaagacatagcccatcacctaa

SEQ ID NO: 757064 - DNA, 33 bp, Homo sapien
cacctctagtggaagatatagcccatcacctaa

SEQ ID NO: 757065 - DNA, 33 bp, Homo sapien
tcctggaagcaacatacctcatgagcctgcaaa

SEQ ID NO: 757066 - DNA, 33 bp, Homo sapien
tcctggaagcaacatatctcatgagcctgcaaa

SEQ ID NO: 757067 - DNA, 33 bp, Homo sapien
taaagtggtcagcaaaatgacatagagcagact

SEQ ID NO: 757068 - DNA, 33 bp, Homo sapien
taaagtggtcagcaaagtgacatagagcagact

SEQ ID NO: 757069 - DNA, 33 bp, Homo sapien
aagagactcctcctcacaaggagagccccctac

SEQ ID NO: 757070 - DNA, 33 bp, Homo sapien
aagagactcctcctcataaggagagccccctac

SEQ ID NO: 757071 - DNA, 33 bp, Homo sapien
gaaaaacatctgaaaggatatatgcccagatgt

SEQ ID NO: 757072 - DNA, 33 bp, Homo sapien
gaaaaacatctgaaagtatatatgcccagatgt

SEQ ID NO: 757073 - DNA, 33 bp, Homo sapien
atgtaagttgtaactacgaatctctctagaagg

SEQ ID NO: 757074 - DNA, 33 bp, Homo sapien
atgtaagttgtaactatgaatctctctagaagg

SEQ ID NO: 757075 - DNA, 33 bp, Homo sapien
caaaagtgagactctaaggctaaataaacagca

SEQ ID NO: 757076 - DNA, 33 bp, Homo sapien
caaaagtgagactctagggctaaataaacagca

SEQ ID NO: 757077 - DNA, 33 bp, Homo sapien
ttttgagatgcctgacactcatgttttcttagc

SEQ ID NO: 757078 - DNA, 33 bp, Homo sapien
ttttgagatgcctgacgctcatgttttcttagc

SEQ ID NO: 757079 - DNA, 33 bp, Homo sapien
cacatgttttagctcaactaatgcacaagaacc

SEQ ID NO: 757080 - DNA, 33 bp, Homo sapien
cacatgttttagctcacctaatgcacaagaacc

SEQ ID NO: 757081 - DNA, 33 bp, Homo sapien
gtctggagaagttgaaagaaatgaatctccagc

SEQ ID NO: 757082 - DNA, 33 bp, Homo sapien
gtctggagaagttgaatgaaatgaatctccagc

SEQ ID NO: 757083 - DNA, 33 bp, Homo sapien
cctcctttactgatcaccattgattttgtattg

SEQ ID NO: 757084 - DNA, 33 bp, Homo sapien
cctcctttactgatcatcattgattttgtattg

SEQ ID NO: 757085 - DNA, 33 bp, Homo sapien
ttactcaaccacattccctgtgctaagtgcttc

SEQ ID NO: 757086 - DNA, 33 bp, Homo sapien
ttactcaaccacattctctgtgctaagtgcttc

SEQ ID NO: 757087 - DNA, 33 bp, Homo sapien
gctacatgattccaatcaaaactgatggtcgcc

SEQ ID NO: 757088 - DNA, 33 bp, Homo sapien
gctacatgattccaattaaaactgatggtcgcc

SEQ ID NO: 757089 - DNA, 33 bp, Homo sapien
tatggcgttactccaagcttgagacgtcgtccg

SEQ ID NO: 757090 - DNA, 33 bp, Homo sapien
tatggcgttactccaatcttgagacgtcgtccg

SEQ ID NO: 757091 - DNA, 33 bp, Homo sapien
ctggcaaatcatttagcaagcatggtaatgctt

SEQ ID NO: 757092 - DNA, 33 bp, Homo sapien
ctggcaaatcatttagtaagcatggtaatgctt

SEQ ID NO: 757093 - DNA, 33 bp, Homo sapien
ttcctattcagagtccagaaatttgattttttt

SEQ ID NO: 757094 - DNA, 33 bp, Homo sapien
ttcctattcagagtccggaaatttgattttttt

SEQ ID NO: 757095 - DNA, 33 bp, Homo sapien
gaagacagggaaagaaaactcagtgccagcttc

SEQ ID NO: 757096 - DNA, 33 bp, Homo sapien
gaagacagggaaagaatactcagtgccagcttc

SEQ ID NO: 757097 - DNA, 33 bp, Homo sapien
ctcctcttctgttaaaacacaactgtcacttcc

SEQ ID NO: 757098 - DNA, 33 bp, Homo sapien
ctcctcttctgttaaaccacaactgtcacttcc

SEQ ID NO: 757099 - DNA, 33 bp, Homo sapien
agtgctttgtggacaaaataactctttaatacc

SEQ ID NO: 757100 - DNA, 33 bp, Homo sapien
agtgctttgtggacaagataactctttaatacc

SEQ ID NO: 757101 - DNA, 33 bp, Homo sapien
agcaccaagcaaggaaacttttcactctcctgg

SEQ ID NO: 757102 - DNA, 33 bp, Homo sapien
agcaccaagcaaggaaccttttcactctcctgg

SEQ ID NO: 757103 - DNA, 33 bp, Homo sapien
gccagctgcctaataactgtcctgtactaatca

SEQ ID NO: 757104 - DNA, 33 bp, Homo sapien
gccagctgcctaataagtgtcctgtactaatca

SEQ ID NO: 757105 - DNA, 33 bp, Homo sapien
gtcacttgtgaagtgacgggccttaaataccca

SEQ ID NO: 757106 - DNA, 33 bp, Homo sapien
gtcacttgtgaagtgatgggccttaaataccca

SEQ ID NO: 757107 - DNA, 33 bp, Homo sapien
gaaggccgaatatatacggaatgaacgtgtcaa

SEQ ID NO: 757108 - DNA, 33 bp, Homo sapien
gaaggccgaatatatatggaatgaacgtgtcaa

SEQ ID NO: 757109 - DNA, 33 bp, Homo sapien
gctagtattgcaaacagggtgaatgaagagcag

SEQ ID NO: 757110 - DNA, 33 bp, Homo sapien
gctagtattgcaaacatggtgaatgaagagcag

SEQ ID NO: 757111 - DNA, 33 bp, Homo sapien
tttattttaagcatctcagaactggtatcagcc

SEQ ID NO: 757112 - DNA, 33 bp, Homo sapien
tttattttaagcatctgagaactggtatcagcc

SEQ ID NO: 757113 - DNA, 33 bp, Homo sapien
aatgaggcgacaacataaaacgaaggtaatgtg

SEQ ID NO: 757114 - DNA, 33 bp, Homo sapien
aatgaggcgacaacatgaaacgaaggtaatgtg

SEQ ID NO: 757115 - DNA, 33 bp, Homo sapien
atgagcattgctttcacagaaaagctgacaaaa

SEQ ID NO: 757116 - DNA, 33 bp, Homo sapien
atgagcattgctttcagagaaaagctgacaaaa

SEQ ID NO: 757117 - DNA, 33 bp, Homo sapien
agaggccctttcttcccattgccggctctctga

SEQ ID NO: 757118 - DNA, 33 bp, Homo sapien
agaggccctttcttcctattgccggctctctga

SEQ ID NO: 757119 - DNA, 33 bp, Homo sapien
taaattcatcaccttacctctatgcatggaaca

SEQ ID NO: 757120 - DNA, 33 bp, Homo sapien
taaattcatcaccttatctctatgcatggaaca

SEQ ID NO: 757121 - DNA, 33 bp, Homo sapien
agcatcttgggttctacggctttcaaagaaaag

SEQ ID NO: 757122 - DNA, 33 bp, Homo sapien
agcatcttgggttctatggctttcaaagaaaag

SEQ ID NO: 757123 - DNA, 33 bp, Homo sapien
tattaacttgtgtaaaccttcaaccaagtccat

SEQ ID NO: 757124 - DNA, 33 bp, Homo sapien
tattaacttgtgtaaatcttcaaccaagtccat

SEQ ID NO: 757125 - DNA, 33 bp, Homo sapien
aatggggaggaaataacaaaggttgacgttaag

SEQ ID NO: 757126 - DNA, 33 bp, Homo sapien
aatggggaggaaataataaaggttgacgttaag

SEQ ID NO: 757127 - DNA, 33 bp, Homo sapien
tacctcagtatttaaaatgtgtagactctaccc

SEQ ID NO: 757128 - DNA, 33 bp, Homo sapien
tacctcagtatttaaagtgtgtagactctaccc

SEQ ID NO: 757129 - DNA, 33 bp, Homo sapien
ctggagagcattttggaaatatacctcagtatt

SEQ ID NO: 757130 - DNA, 33 bp, Homo sapien
ctggagagcattttggcaatatacctcagtatt

SEQ ID NO: 757131 - DNA, 33 bp, Homo sapien
taattaaaaggaatgcccatgggaaggagatgc

SEQ ID NO: 757132 - DNA, 33 bp, Homo sapien
taattaaaaggaatgcgcatgggaaggagatgc

SEQ ID NO: 757133 - DNA, 33 bp, Homo sapien
ttgaaatcagtatctcccagtcttagatttcca

SEQ ID NO: 757134 - DNA, 33 bp, Homo sapien
ttgaaatcagtatctcgcagtcttagatttcca

SEQ ID NO: 757135 - DNA, 33 bp, Homo sapien
cacaatagtgaacaagcattaatctactatgca

SEQ ID NO: 757136 - DNA, 33 bp, Homo sapien
cacaatagtgaacaaggattaatctactatgca

SEQ ID NO: 757137 - DNA, 33 bp, Homo sapien
tttcacttagcaactcactcttccatcatgacg

SEQ ID NO: 757138 - DNA, 33 bp, Homo sapien
tttcacttagcaactcgctcttccatcatgacg

SEQ ID NO: 757139 - DNA, 33 bp, Homo sapien
aatgctttcaggttcaagaacaacggaaaagta

SEQ ID NO: 757140 - DNA, 33 bp, Homo sapien
aatgctttcaggttcacgaacaacggaaaagta

SEQ ID NO: 757141 - DNA, 33 bp, Homo sapien
gctccttgcgacaaaagacgtgaagccagcctt

SEQ ID NO: 757142 - DNA, 33 bp, Homo sapien
gctccttgcgacaaaatacgtgaagccagcctt

SEQ ID NO: 757143 - DNA, 33 bp, Homo sapien
cactgcacaaagcaaaactaaaatgaggcaaaa

SEQ ID NO: 757144 - DNA, 33 bp, Homo sapien
cactgcacaaagcaaacctaaaatgaggcaaaa

SEQ ID NO: 757145 - DNA, 33 bp, Homo sapien
catgttgacaagctgaacttcatggtttctgaa

SEQ ID NO: 757146 - DNA, 33 bp, Homo sapien
catgttgacaagctgagcttcatggtttctgaa

SEQ ID NO: 757147 - DNA, 33 bp, Homo sapien
tctgtctcctcctagaagaaatgctgtcttttg

SEQ ID NO: 757148 - DNA, 33 bp, Homo sapien
tctgtctcctcctagacgaaatgctgtcttttg

SEQ ID NO: 757149 - DNA, 33 bp, Homo sapien
aagacagaaggtcgacagaatcacagatgatta

SEQ ID NO: 757150 - DNA, 33 bp, Homo sapien
aagacagaaggtcgacggaatcacagatgatta

SEQ ID NO: 757151 - DNA, 33 bp, Homo sapien
ttgtcagtggatgaagaagtagttgagcatcgt

SEQ ID NO: 757152 - DNA, 33 bp, Homo sapien
ttgtcagtggatgaagtagtagttgagcatcgt

SEQ ID NO: 757153 - DNA, 33 bp, Homo sapien
ctctaaccacaccgttcaaaactgcacttagaa

SEQ ID NO: 757154 - DNA, 33 bp, Homo sapien
ctctaaccacaccgtttaaaactgcacttagaa

SEQ ID NO: 757155 - DNA, 33 bp, Homo sapien
tctaagaatgtgagaaccctacttctgttttct

SEQ ID NO: 757156 - DNA, 33 bp, Homo sapien
tctaagaatgtgagaatcctacttctgttttct

SEQ ID NO: 757157 - DNA, 33 bp, Homo sapien
gtggagtgatcgactaaggggataaattggaac

SEQ ID NO: 757158 - DNA, 33 bp, Homo sapien
gtggagtgatcgactagggggataaattggaac

SEQ ID NO: 757159 - DNA, 33 bp, Homo sapien
ttcaaatagctacagacgttgagaaggctgtta

SEQ ID NO: 757160 - DNA, 33 bp, Homo sapien
ttcaaatagctacagatgttgagaaggctgtta

SEQ ID NO: 757161 - DNA, 33 bp, Homo sapien
agcagagatcttgcccaacttgctcaatgctgt

SEQ ID NO: 757162 - DNA, 33 bp, Homo sapien
agcagagatcttgcccgacttgctcaatgctgt

SEQ ID NO: 757163 - DNA, 33 bp, Homo sapien
ttctcatttgtaagcccgataatcattatacca

SEQ ID NO: 757164 - DNA, 33 bp, Homo sapien
ttctcatttgtaagcctgataatcattatacca

SEQ ID NO: 757165 - DNA, 33 bp, Homo sapien
acaccgtttccaggggacatacatttcaattgc

SEQ ID NO: 757166 - DNA, 33 bp, Homo sapien
acaccgtttccagggggcatacatttcaattgc

SEQ ID NO: 757167 - DNA, 33 bp, Homo sapien
aagagctcttagcaaaccagatttttttttctt

SEQ ID NO: 757168 - DNA, 33 bp, Homo sapien
aagagctcttagcaaagcagatttttttttctt

SEQ ID NO: 757169 - DNA, 33 bp, Homo sapien
tcagacagcagtctctcaaactgggtcatgact

SEQ ID NO: 757170 - DNA, 33 bp, Homo sapien
tcagacagcagtctctgaaactgggtcatgact

SEQ ID NO: 757171 - DNA, 33 bp, Homo sapien
aaggtggatgaatgcacatttcgctactaagca

SEQ ID NO: 757172 - DNA, 33 bp, Homo sapien
aaggtggatgaatgcatatttcgctactaagca

SEQ ID NO: 757173 - DNA, 33 bp, Homo sapien
ctggagcaacagagcccattaggaaaccatcac

SEQ ID NO: 757174 - DNA, 33 bp, Homo sapien
ctggagcaacagagcctattaggaaaccatcac

SEQ ID NO: 757175 - DNA, 33 bp, Homo sapien
atgtgaccttggattgcagagccatcatctgtg

SEQ ID NO: 757176 - DNA, 33 bp, Homo sapien
atgtgaccttggattgtagagccatcatctgtg

SEQ ID NO: 757177 - DNA, 33 bp, Homo sapien
tcatactatgacttcaagttcaacatcaggaaa

SEQ ID NO: 757178 - DNA, 33 bp, Homo sapien
tcatactatgacttcacgttcaacatcaggaaa

SEQ ID NO: 757179 - DNA, 33 bp, Homo sapien
aagtgcccagagaagacgtactcaacagggaga

SEQ ID NO: 757180 - DNA, 33 bp, Homo sapien
aagtgcccagagaagatgtactcaacagggaga

SEQ ID NO: 757181 - DNA, 33 bp, Homo sapien
aaccacattctcctaacagagaggagcgtgaag

SEQ ID NO: 757182 - DNA, 33 bp, Homo sapien
aaccacattctcctaatagagaggagcgtgaag

SEQ ID NO: 757183 - DNA, 33 bp, Homo sapien
cacatacagggtgaaacagaaactgtcataaac

SEQ ID NO: 757184 - DNA, 33 bp, Homo sapien
cacatacagggtgaaatagaaactgtcataaac

SEQ ID NO: 757185 - DNA, 33 bp, Homo sapien
gctttggacaaactaacgggggaagcacaattt

SEQ ID NO: 757186 - DNA, 33 bp, Homo sapien
gctttggacaaactaatgggggaagcacaattt

SEQ ID NO: 757187 - DNA, 33 bp, Homo sapien
gtgacatcaactcgtacatatagtttcactgtc

SEQ ID NO: 757188 - DNA, 33 bp, Homo sapien
gtgacatcaactcgtatatatagtttcactgtc

SEQ ID NO: 757189 - DNA, 33 bp, Homo sapien
gaggtgagtgggaaggcagcctaaagaggtgac

SEQ ID NO: 757190 - DNA, 33 bp, Homo sapien
gaggtgagtgggaaggtagcctaaagaggtgac

SEQ ID NO: 757191 - DNA, 33 bp, Homo sapien
cgtgaaactttcctgccaaggtgtgtctgattt

SEQ ID NO: 757192 - DNA, 33 bp, Homo sapien
cgtgaaactttcctgctaaggtgtgtctgattt

SEQ ID NO: 757193 - DNA, 33 bp, Homo sapien
tatgccatgtagaaacacggccacttatgtgtg

SEQ ID NO: 757194 - DNA, 33 bp, Homo sapien
tatgccatgtagaaacgcggccacttatgtgtg

SEQ ID NO: 757195 - DNA, 33 bp, Homo sapien
gatgacacatccctccaagacttcagctaagag

SEQ ID NO: 757196 - DNA, 33 bp, Homo sapien
gatgacacatccctccgagacttcagctaagag

SEQ ID NO: 757197 - DNA, 33 bp, Homo sapien
cctcaacaaccaataactcagatagcatttgta

SEQ ID NO: 757198 - DNA, 33 bp, Homo sapien
cctcaacaaccaataagtcagatagcatttgta

SEQ ID NO: 757199 - DNA, 33 bp, Homo sapien
attccagttgttcccacaggtctctgaagaagg

SEQ ID NO: 757200 - DNA, 33 bp, Homo sapien
attccagttgttcccagaggtctctgaagaagg

SEQ ID NO: 757201 - DNA, 33 bp, Homo sapien
gcattggggacataaaactgagcaggtgagcaa

SEQ ID NO: 757202 - DNA, 33 bp, Homo sapien
gcattggggacataaagctgagcaggtgagcaa

SEQ ID NO: 757203 - DNA, 33 bp, Homo sapien
aaaatgcaccctttaaagttttctctgctgttt

SEQ ID NO: 757204 - DNA, 33 bp, Homo sapien
aaaatgcaccctttaaggttttctctgctgttt

SEQ ID NO: 757205 - DNA, 33 bp, Homo sapien
gtagtgcaagaatgaaccctctttgcctgaact

SEQ ID NO: 757206 - DNA, 33 bp, Homo sapien
gtagtgcaagaatgaatcctctttgcctgaact

SEQ ID NO: 757207 - DNA, 33 bp, Homo sapien
agcccagaaggaggcagattaagtggccattca

SEQ ID NO: 757208 - DNA, 33 bp, Homo sapien
agcccagaaggaggcatattaagtggccattca

SEQ ID NO: 757209 - DNA, 33 bp, Homo sapien
tgcagaagtcctgtgcaatagcagcccaggaag

SEQ ID NO: 757210 - DNA, 33 bp, Homo sapien
tgcagaagtcctgtgcgatagcagcccaggaag

SEQ ID NO: 757211 - DNA, 33 bp, Homo sapien
cctgccttagtcttcacagtagataggaccaca

SEQ ID NO: 757212 - DNA, 33 bp, Homo sapien
cctgccttagtcttcagagtagataggaccaca

SEQ ID NO: 757213 - DNA, 33 bp, Homo sapien
attaatttggagataccgaccttgataaggaga

SEQ ID NO: 757214 - DNA, 33 bp, Homo sapien
attaatttggagatactgaccttgataaggaga

SEQ ID NO: 757215 - DNA, 33 bp, Homo sapien
acataaacacacaaccagaatgggcttttcaaa

SEQ ID NO: 757216 - DNA, 33 bp, Homo sapien
acataaacacacaaccggaatgggcttttcaaa

SEQ ID NO: 757217 - DNA, 33 bp, Homo sapien
tactgtgtgccctttgcagcattaacaaacatg

SEQ ID NO: 757218 - DNA, 33 bp, Homo sapien
tactgtgtgccctttgtagcattaacaaacatg

SEQ ID NO: 757219 - DNA, 33 bp, Homo sapien
aagctataaacttaaaacataatgacaacattg

SEQ ID NO: 757220 - DNA, 33 bp, Homo sapien
aagctataaacttaaagcataatgacaacattg

SEQ ID NO: 757221 - DNA, 33 bp, Homo sapien
cattccaaaataacaactcatttctaatgctac

SEQ ID NO: 757222 - DNA, 33 bp, Homo sapien
cattccaaaataacaattcatttctaatgctac

SEQ ID NO: 757223 - DNA, 33 bp, Homo sapien
catcctttgaaatgggaaaatcagacatatgtg

SEQ ID NO: 757224 - DNA, 33 bp, Homo sapien
catcctttgaaatgggtaaatcagacatatgtg

SEQ ID NO: 757225 - DNA, 33 bp, Homo sapien
caagtatagaaagagaataagtgttactttggg

SEQ ID NO: 757226 - DNA, 33 bp, Homo sapien
caagtatagaaagagagtaagtgttactttggg

SEQ ID NO: 757227 - DNA, 33 bp, Homo sapien
ttattgaattacctaacacggtcagaaaactta

SEQ ID NO: 757228 - DNA, 33 bp, Homo sapien
ttattgaattacctaatacggtcagaaaactta

SEQ ID NO: 757229 - DNA, 33 bp, Homo sapien
aattagttaacataccaactcgtaatatgtttt

SEQ ID NO: 757230 - DNA, 33 bp, Homo sapien
aattagttaacataccgactcgtaatatgtttt

SEQ ID NO: 757231 - DNA, 33 bp, Homo sapien
attggaaaagaagacactgaaaacaccagaaca

SEQ ID NO: 757232 - DNA, 33 bp, Homo sapien
attggaaaagaagacattgaaaacaccagaaca

SEQ ID NO: 757233 - DNA, 33 bp, Homo sapien
tcatgcccatgaacccaagctggtagagcgtac

SEQ ID NO: 757234 - DNA, 33 bp, Homo sapien
tcatgcccatgaacccgagctggtagagcgtac

SEQ ID NO: 757235 - DNA, 33 bp, Homo sapien
gttcaattttgtttcaaagaaagacataaacat

SEQ ID NO: 757236 - DNA, 33 bp, Homo sapien
gttcaattttgtttcagagaaagacataaacat

SEQ ID NO: 757237 - DNA, 33 bp, Homo sapien
cagataaacaaaggtaagatgaagaataaaggg

SEQ ID NO: 757238 - DNA, 33 bp, Homo sapien
cagataaacaaaggtaggatgaagaataaaggg

SEQ ID NO: 757239 - DNA, 33 bp, Homo sapien
ctgtgttgtacatacccctaccctggagaccac

SEQ ID NO: 757240 - DNA, 33 bp, Homo sapien
ctgtgttgtacataccgctaccctggagaccac

SEQ ID NO: 757241 - DNA, 33 bp, Homo sapien
gggaatggaatagttcaaagattctccaggctt

SEQ ID NO: 757242 - DNA, 33 bp, Homo sapien
gggaatggaatagttcgaagattctccaggctt

SEQ ID NO: 757243 - DNA, 33 bp, Homo sapien
aacagctgtgtctcaacaccccatcagtgcaat

SEQ ID NO: 757244 - DNA, 33 bp, Homo sapien
aacagctgtgtctcaataccccatcagtgcaat

SEQ ID NO: 757245 - DNA, 33 bp, Homo sapien
atcgcagttgtattcactaaaacattaattttc

SEQ ID NO: 757246 - DNA, 33 bp, Homo sapien
atcgcagttgtattcattaaaacattaattttc

SEQ ID NO: 757247 - DNA, 33 bp, Homo sapien
ttgttattcacatgaccaaaaacagtccccttt

SEQ ID NO: 757248 - DNA, 33 bp, Homo sapien
ttgttattcacatgacgaaaaacagtccccttt

SEQ ID NO: 757249 - DNA, 33 bp, Homo sapien
tttttcatgccactaactctttccaattcctca

SEQ ID NO: 757250 - DNA, 33 bp, Homo sapien
tttttcatgccactaattctttccaattcctca

SEQ ID NO: 757251 - DNA, 33 bp, Homo sapien
tctactggggtaatgaacgagtttgtttaggcc

SEQ ID NO: 757252 - DNA, 33 bp, Homo sapien
tctactggggtaatgagcgagtttgtttaggcc

SEQ ID NO: 757253 - DNA, 33 bp, Homo sapien
ctcaattgatggtgacgctattcttctggttgt

SEQ ID NO: 757254 - DNA, 33 bp, Homo sapien
ctcaattgatggtgactctattcttctggttgt

SEQ ID NO: 757255 - DNA, 33 bp, Homo sapien
ttctctactggctcctcacttcactcccagtaa

SEQ ID NO: 757256 - DNA, 33 bp, Homo sapien
ttctctactggctccttacttcactcccagtaa

SEQ ID NO: 757257 - DNA, 33 bp, Homo sapien
atctcatcctgacctaaatagagacatttctta

SEQ ID NO: 757258 - DNA, 33 bp, Homo sapien
atctcatcctgacctacatagagacatttctta

SEQ ID NO: 757259 - DNA, 33 bp, Homo sapien
actaatgtcagagcaaatagatgaggagctaaa

SEQ ID NO: 757260 - DNA, 33 bp, Homo sapien
actaatgtcagagcaactagatgaggagctaaa

SEQ ID NO: 757261 - DNA, 33 bp, Homo sapien
taatttgtaaatgggcaagttcttctggaaccc

SEQ ID NO: 757262 - DNA, 33 bp, Homo sapien
taatttgtaaatgggcgagttcttctggaaccc

SEQ ID NO: 757263 - DNA, 33 bp, Homo sapien
cttggcttaattagtacgcttttccaagtttga

SEQ ID NO: 757264 - DNA, 33 bp, Homo sapien
cttggcttaattagtatgcttttccaagtttga

SEQ ID NO: 757265 - DNA, 33 bp, Homo sapien
cttaatttacaagagacgtttgagagatcaggt

SEQ ID NO: 757266 - DNA, 33 bp, Homo sapien
cttaatttacaagagatgtttgagagatcaggt

SEQ ID NO: 757267 - DNA, 33 bp, Homo sapien
aaaggtctacaatccacgtgctgttgtgaaact

SEQ ID NO: 757268 - DNA, 33 bp, Homo sapien
aaaggtctacaatccatgtgctgttgtgaaact

SEQ ID NO: 757269 - DNA, 33 bp, Homo sapien
tatccctgttgtcggaccatctcagttaaggca

SEQ ID NO: 757270 - DNA, 33 bp, Homo sapien
tatccctgttgtcggatcatctcagttaaggca

SEQ ID NO: 757271 - DNA, 33 bp, Homo sapien
tttcaatattggagcacagtacaagtcttaatg

SEQ ID NO: 757272 - DNA, 33 bp, Homo sapien
tttcaatattggagcagagtacaagtcttaatg

SEQ ID NO: 757273 - DNA, 33 bp, Homo sapien
agtaaatatgcttccacagagccagtgaagtat

SEQ ID NO: 757274 - DNA, 33 bp, Homo sapien
agtaaatatgcttccagagagccagtgaagtat

SEQ ID NO: 757275 - DNA, 33 bp, Homo sapien
atacaagccatcgataaattgctctaacaagcc

SEQ ID NO: 757276 - DNA, 33 bp, Homo sapien
atacaagccatcgatacattgctctaacaagcc

SEQ ID NO: 757277 - DNA, 33 bp, Homo sapien
atgaatgttcttcagtcaaatagaataggagtt

SEQ ID NO: 757278 - DNA, 33 bp, Homo sapien
atgaatgttcttcagtgaaatagaataggagtt

SEQ ID NO: 757279 - DNA, 33 bp, Homo sapien
acacgaatgatacataagttgagagccattgaa

SEQ ID NO: 757280 - DNA, 33 bp, Homo sapien
acacgaatgatacataggttgagagccattgaa

SEQ ID NO: 757281 - DNA, 33 bp, Homo sapien
gtttatacccaaataaacgcagctggcaaccat

SEQ ID NO: 757282 - DNA, 33 bp, Homo sapien
gtttatacccaaataagcgcagctggcaaccat

SEQ ID NO: 757283 - DNA, 33 bp, Homo sapien
ttatttttgccagactaactcgaatgaagatca

SEQ ID NO: 757284 - DNA, 33 bp, Homo sapien
ttatttttgccagactgactcgaatgaagatca

SEQ ID NO: 757285 - DNA, 33 bp, Homo sapien
gatattagaatcagtcccagtcaacaatagagg

SEQ ID NO: 757286 - DNA, 33 bp, Homo sapien
gatattagaatcagtctcagtcaacaatagagg

SEQ ID NO: 757287 - DNA, 33 bp, Homo sapien
ctcactcaatattcaacgatctagccgagtgtt

SEQ ID NO: 757288 - DNA, 33 bp, Homo sapien
ctcactcaatattcaatgatctagccgagtgtt

SEQ ID NO: 757289 - DNA, 33 bp, Homo sapien
gaagccagagggcagaatcggagccaaattcaa

SEQ ID NO: 757290 - DNA, 33 bp, Homo sapien
gaagccagagggcagattcggagccaaattcaa

SEQ ID NO: 757291 - DNA, 33 bp, Homo sapien
caaccatgtcatgtcacatctcgctacttctct

SEQ ID NO: 757292 - DNA, 33 bp, Homo sapien
caaccatgtcatgtcatatctcgctacttctct

SEQ ID NO: 757293 - DNA, 33 bp, Homo sapien
acttttattttgatgaacaattatttggcatat

SEQ ID NO: 757294 - DNA, 33 bp, Homo sapien
acttttattttgatgagcaattatttggcatat

SEQ ID NO: 757295 - DNA, 33 bp, Homo sapien
aaatgttcaatggtaactagaatgcgtcacaag

SEQ ID NO: 757296 - DNA, 33 bp, Homo sapien
aaatgttcaatggtaattagaatgcgtcacaag

SEQ ID NO: 757297 - DNA, 33 bp, Homo sapien
atcataaagcgatatacgggatgtgtgcatggt

SEQ ID NO: 757298 - DNA, 33 bp, Homo sapien
atcataaagcgatatatgggatgtgtgcatggt

SEQ ID NO: 757299 - DNA, 33 bp, Homo sapien
ggatgatgttgacttccagccaattttgtgctt

SEQ ID NO: 757300 - DNA, 33 bp, Homo sapien
ggatgatgttgacttctagccaattttgtgctt

SEQ ID NO: 757301 - DNA, 33 bp, Homo sapien
ggaaaacagaatcctacataatccttacgattt

SEQ ID NO: 757302 - DNA, 33 bp, Homo sapien
ggaaaacagaatcctatataatccttacgattt

SEQ ID NO: 757303 - DNA, 33 bp, Homo sapien
ttatgttgaaataaaccgcttaatgtttgcaag

SEQ ID NO: 757304 - DNA, 33 bp, Homo sapien
ttatgttgaaataaactgcttaatgtttgcaag

SEQ ID NO: 757305 - DNA, 33 bp, Homo sapien
aacagcagaagaaatacggtcgtgtgcagatca

SEQ ID NO: 757306 - DNA, 33 bp, Homo sapien
aacagcagaagaaatatggtcgtgtgcagatca

SEQ ID NO: 757307 - DNA, 33 bp, Homo sapien
ggaaaaatcttaaaaccggatctagtctcttta

SEQ ID NO: 757308 - DNA, 33 bp, Homo sapien
ggaaaaatcttaaaactggatctagtctcttta

SEQ ID NO: 757309 - DNA, 33 bp, Homo sapien
aaaatcattttctgtacgtataattgcacaaca

SEQ ID NO: 757310 - DNA, 33 bp, Homo sapien
aaaatcattttctgtatgtataattgcacaaca

SEQ ID NO: 757311 - DNA, 33 bp, Homo sapien
gggtgatgttgccaaagggcacaaagttttagt

SEQ ID NO: 757312 - DNA, 33 bp, Homo sapien
gggtgatgttgccaaatggcacaaagttttagt

SEQ ID NO: 757313 - DNA, 33 bp, Homo sapien
ttagttacagtcacacaacgtcacataacaaca

SEQ ID NO: 757314 - DNA, 33 bp, Homo sapien
ttagttacagtcacacgacgtcacataacaaca

SEQ ID NO: 757315 - DNA, 33 bp, Homo sapien
acacaaaaagcagcaccctgtttacactgtagt

SEQ ID NO: 757316 - DNA, 33 bp, Homo sapien
acacaaaaagcagcactctgtttacactgtagt

SEQ ID NO: 757317 - DNA, 33 bp, Homo sapien
ccctacacaggtgaggaaagagggagtcaggga

SEQ ID NO: 757318 - DNA, 33 bp, Homo sapien
ccctacacaggtgagggaagagggagtcaggga

SEQ ID NO: 757319 - DNA, 33 bp, Homo sapien
tgctgatatttcagtcactctgtactgttgctg

SEQ ID NO: 757320 - DNA, 33 bp, Homo sapien
tgctgatatttcagtcgctctgtactgttgctg

SEQ ID NO: 757321 - DNA, 33 bp, Homo sapien
ataaacacaaaattgacaaagctgtttgacata

SEQ ID NO: 757322 - DNA, 33 bp, Homo sapien
ataaacacaaaattgagaaagctgtttgacata

SEQ ID NO: 757323 - DNA, 33 bp, Homo sapien
tattttctctcaaaaactttaataattcagctt

SEQ ID NO: 757324 - DNA, 33 bp, Homo sapien
tattttctctcaaaaagtttaataattcagctt

SEQ ID NO: 757325 - DNA, 33 bp, Homo sapien
cctatagctttgagtgcaagaacatggagtttg

SEQ ID NO: 757326 - DNA, 33 bp, Homo sapien
cctatagctttgagtggaagaacatggagtttg

SEQ ID NO: 757327 - DNA, 33 bp, Homo sapien
ccttattgagtcaacactggaataaataagtta

SEQ ID NO: 757328 - DNA, 33 bp, Homo sapien
ccttattgagtcaacattggaataaataagtta

SEQ ID NO: 757329 - DNA, 33 bp, Homo sapien
gcttgaaatgaactgacgcagataaaattcatg

SEQ ID NO: 757330 - DNA, 33 bp, Homo sapien
gcttgaaatgaactgaggcagataaaattcatg

SEQ ID NO: 757331 - DNA, 33 bp, Homo sapien
aaagctatgcaataaacaaccatcttcagagtt

SEQ ID NO: 757332 - DNA, 33 bp, Homo sapien
aaagctatgcaataaataaccatcttcagagtt

SEQ ID NO: 757333 - DNA, 33 bp, Homo sapien
ttagctagtgtgtgataacatatacatctagtc

SEQ ID NO: 757334 - DNA, 33 bp, Homo sapien
ttagctagtgtgtgatgacatatacatctagtc

SEQ ID NO: 757335 - DNA, 33 bp, Homo sapien
atacatgtttttgtataaccattccctgtagga

SEQ ID NO: 757336 - DNA, 33 bp, Homo sapien
atacatgtttttgtattaccattccctgtagga

SEQ ID NO: 757337 - DNA, 33 bp, Homo sapien
tgttccagcctaaatgcaaaggatttttataat

SEQ ID NO: 757338 - DNA, 33 bp, Homo sapien
tgttccagcctaaatgtaaaggatttttataat

SEQ ID NO: 757339 - DNA, 33 bp, Homo sapien
agataccaatgtataggcactgttcggaaatag

SEQ ID NO: 757340 - DNA, 33 bp, Homo sapien
agataccaatgtatagtcactgttcggaaatag

SEQ ID NO: 757341 - DNA, 33 bp, Homo sapien
tgcttttcttaattcaccaatgagcagtccgaa

SEQ ID NO: 757342 - DNA, 33 bp, Homo sapien
tgcttttcttaattcatcaatgagcagtccgaa

SEQ ID NO: 757343 - DNA, 33 bp, Homo sapien
tttttatcacatgagaatatggaaaagggtaat

SEQ ID NO: 757344 - DNA, 33 bp, Homo sapien
tttttatcacatgagactatggaaaagggtaat

SEQ ID NO: 757345 - DNA, 33 bp, Homo sapien
ccaggaaatattgctacgttatcatgaactgcc

SEQ ID NO: 757346 - DNA, 33 bp, Homo sapien
ccaggaaatattgctatgttatcatgaactgcc

SEQ ID NO: 757347 - DNA, 33 bp, Homo sapien
taataaatagcacagaaatcagaaggtaatgag

SEQ ID NO: 757348 - DNA, 33 bp, Homo sapien
taataaatagcacagacatcagaaggtaatgag

SEQ ID NO: 757349 - DNA, 33 bp, Homo sapien
gaaggcaaaacataaaccagatctagaaactat

SEQ ID NO: 757350 - DNA, 33 bp, Homo sapien
gaaggcaaaacataaatcagatctagaaactat

SEQ ID NO: 757351 - DNA, 33 bp, Homo sapien
acaagcatctttattacggaattctcagagcca

SEQ ID NO: 757352 - DNA, 33 bp, Homo sapien
acaagcatctttattatggaattctcagagcca

SEQ ID NO: 757353 - DNA, 33 bp, Homo sapien
tgtgtttgactgcccaaattttatggatggaaa

SEQ ID NO: 757354 - DNA, 33 bp, Homo sapien
tgtgtttgactgcccacattttatggatggaaa

SEQ ID NO: 757355 - DNA, 33 bp, Homo sapien
gagatttttcaaatgacatgaaatggacatcat

SEQ ID NO: 757356 - DNA, 33 bp, Homo sapien
gagatttttcaaatgatatgaaatggacatcat

SEQ ID NO: 757357 - DNA, 33 bp, Homo sapien
taattcctacttgttacgagagggacttggtgg

SEQ ID NO: 757358 - DNA, 33 bp, Homo sapien
taattcctacttgttatgagagggacttggtgg

SEQ ID NO: 757359 - DNA, 33 bp, Homo sapien
acttggcaagcacttcccacttaagctaatgca

SEQ ID NO: 757360 - DNA, 33 bp, Homo sapien
acttggcaagcacttctcacttaagctaatgca

SEQ ID NO: 757361 - DNA, 33 bp, Homo sapien
ctcaattctcaaaacaatacaatgtagcaatat

SEQ ID NO: 757362 - DNA, 33 bp, Homo sapien
ctcaattctcaaaacagtacaatgtagcaatat

SEQ ID NO: 757363 - DNA, 33 bp, Homo sapien
caaataggctatgatacgtcatgctttaattgt

SEQ ID NO: 757364 - DNA, 33 bp, Homo sapien
caaataggctatgatatgtcatgctttaattgt

SEQ ID NO: 757365 - DNA, 33 bp, Homo sapien
aggagttttaagagcaaataagactcgaatgga

SEQ ID NO: 757366 - DNA, 33 bp, Homo sapien
aggagttttaagagcagataagactcgaatgga

SEQ ID NO: 757367 - DNA, 33 bp, Homo sapien
atggaattttttcataagctacacagtggaact

SEQ ID NO: 757368 - DNA, 33 bp, Homo sapien
atggaattttttcatatgctacacagtggaact

SEQ ID NO: 757369 - DNA, 33 bp, Homo sapien
ccagatggcattaggaacatactctaaagtatt

SEQ ID NO: 757370 - DNA, 33 bp, Homo sapien
ccagatggcattaggagcatactctaaagtatt

SEQ ID NO: 757371 - DNA, 33 bp, Homo sapien
tgtgaaaggctctggcactggaaacagaccctg

SEQ ID NO: 757372 - DNA, 33 bp, Homo sapien
tgtgaaaggctctggcgctggaaacagaccctg

SEQ ID NO: 757373 - DNA, 33 bp, Homo sapien
tggaacttatatttaaaaggagagcagagtaaa

SEQ ID NO: 757374 - DNA, 33 bp, Homo sapien
tggaacttatatttaataggagagcagagtaaa

SEQ ID NO: 757375 - DNA, 33 bp, Homo sapien
ttcattcagagcgtagaaatcaaataagatcaa

SEQ ID NO: 757376 - DNA, 33 bp, Homo sapien
ttcattcagagcgtaggaatcaaataagatcaa

SEQ ID NO: 757377 - DNA, 33 bp, Homo sapien
attccattagttgccaacatatttcaaagctac

SEQ ID NO: 757378 - DNA, 33 bp, Homo sapien
attccattagttgccatcatatttcaaagctac

SEQ ID NO: 757379 - DNA, 33 bp, Homo sapien
agttggactctcatagaattgtctaagctatgc

SEQ ID NO: 757380 - DNA, 33 bp, Homo sapien
agttggactctcataggattgtctaagctatgc

SEQ ID NO: 757381 - DNA, 33 bp, Homo sapien
ggacaggcttagtacccgatcatgtcaactctt

SEQ ID NO: 757382 - DNA, 33 bp, Homo sapien
ggacaggcttagtacctgatcatgtcaactctt

SEQ ID NO: 757383 - DNA, 33 bp, Homo sapien
ggctagctagaggaagcagcagctgtactggga

SEQ ID NO: 757384 - DNA, 33 bp, Homo sapien
ggctagctagaggaagtagcagctgtactggga

SEQ ID NO: 757385 - DNA, 33 bp, Homo sapien
aggctaagagagatctcacaacctattctgggt

SEQ ID NO: 757386 - DNA, 33 bp, Homo sapien
aggctaagagagatcttacaacctattctgggt

SEQ ID NO: 757387 - DNA, 33 bp, Homo sapien
ccaaagagttgaacaaccaagcattctagcttt

SEQ ID NO: 757388 - DNA, 33 bp, Homo sapien
ccaaagagttgaacaatcaagcattctagcttt

SEQ ID NO: 757389 - DNA, 33 bp, Homo sapien
ctctcccgttgatagacgagctccatatttcct

SEQ ID NO: 757390 - DNA, 33 bp, Homo sapien
ctctcccgttgatagatgagctccatatttcct

SEQ ID NO: 757391 - DNA, 33 bp, Homo sapien
taagcaaagttttaaacaagagaggaagtccag

SEQ ID NO: 757392 - DNA, 33 bp, Homo sapien
taagcaaagttttaaataagagaggaagtccag

SEQ ID NO: 757393 - DNA, 33 bp, Homo sapien
tagtatcatcacaatactactgtctcccaaatt

SEQ ID NO: 757394 - DNA, 33 bp, Homo sapien
tagtatcatcacaatattactgtctcccaaatt

SEQ ID NO: 757395 - DNA, 33 bp, Homo sapien
tttacctgctctaaggcaggactctaatcctcc

SEQ ID NO: 757396 - DNA, 33 bp, Homo sapien
tttacctgctctaaggtaggactctaatcctcc

SEQ ID NO: 757397 - DNA, 33 bp, Homo sapien
aatagcactggaaaaggaaatctgttatgaaca

SEQ ID NO: 757398 - DNA, 33 bp, Homo sapien
aatagcactggaaaagtaaatctgttatgaaca

SEQ ID NO: 757399 - DNA, 33 bp, Homo sapien
ctagtacaatgaggctaaaggccactggcatac

SEQ ID NO: 757400 - DNA, 33 bp, Homo sapien
ctagtacaatgaggctgaaggccactggcatac

SEQ ID NO: 757401 - DNA, 33 bp, Homo sapien
tatcctaaacaaatacacagttttccagcttag

SEQ ID NO: 757402 - DNA, 33 bp, Homo sapien
tatcctaaacaaatacgcagttttccagcttag

SEQ ID NO: 757403 - DNA, 33 bp, Homo sapien
ctttttttccaatcaggatgtcttcgagaccat

SEQ ID NO: 757404 - DNA, 33 bp, Homo sapien
ctttttttccaatcagtatgtcttcgagaccat

SEQ ID NO: 757405 - DNA, 33 bp, Homo sapien
taagatggatgatagcaatcaagcaaatttctc

SEQ ID NO: 757406 - DNA, 33 bp, Homo sapien
taagatggatgatagcgatcaagcaaatttctc

SEQ ID NO: 757407 - DNA, 33 bp, Homo sapien
aacagtaatatttactaacagcaagtggaaagg

SEQ ID NO: 757408 - DNA, 33 bp, Homo sapien
aacagtaatatttactgacagcaagtggaaagg

SEQ ID NO: 757409 - DNA, 33 bp, Homo sapien
tctctagaggcttcagaagcagtgcagacctac

SEQ ID NO: 757410 - DNA, 33 bp, Homo sapien
tctctagaggcttcagcagcagtgcagacctac

SEQ ID NO: 757411 - DNA, 33 bp, Homo sapien
tccaatataatgctcaatagcccctccttcatc

SEQ ID NO: 757412 - DNA, 33 bp, Homo sapien
tccaatataatgctcattagcccctccttcatc

SEQ ID NO: 757413 - DNA, 33 bp, Homo sapien
atagagcaggtagtcccgaaagtgacccaggac

SEQ ID NO: 757414 - DNA, 33 bp, Homo sapien
atagagcaggtagtcctgaaagtgacccaggac

SEQ ID NO: 757415 - DNA, 33 bp, Homo sapien
tcacctattttaagcaacttcagcttcagcttt

SEQ ID NO: 757416 - DNA, 33 bp, Homo sapien
tcacctattttaagcatcttcagcttcagcttt

SEQ ID NO: 757417 - DNA, 33 bp, Homo sapien
aagtagttggcttggaacaaaggctaaggaggt

SEQ ID NO: 757418 - DNA, 33 bp, Homo sapien
aagtagttggcttggatcaaaggctaaggaggt

SEQ ID NO: 757419 - DNA, 33 bp, Homo sapien
ttacagcagcatataaagtaggaattatgttca

SEQ ID NO: 757420 - DNA, 33 bp, Homo sapien
ttacagcagcatataacgtaggaattatgttca

SEQ ID NO: 757421 - DNA, 33 bp, Homo sapien
tagctattgtgtttcacgttgatacaccatttt

SEQ ID NO: 757422 - DNA, 33 bp, Homo sapien
tagctattgtgtttcaggttgatacaccatttt

SEQ ID NO: 757423 - DNA, 33 bp, Homo sapien
gacaaagatttcttggaaaggagaatatggtat

SEQ ID NO: 757424 - DNA, 33 bp, Homo sapien
gacaaagatttcttgggaaggagaatatggtat

SEQ ID NO: 757425 - DNA, 33 bp, Homo sapien
cactttatgggccatacaaaacacagtataaat

SEQ ID NO: 757426 - DNA, 33 bp, Homo sapien
cactttatgggccatataaaacacagtataaat

SEQ ID NO: 757427 - DNA, 33 bp, Homo sapien
gtgattatttatatgaaaaagagcacaaacatt

SEQ ID NO: 757428 - DNA, 33 bp, Homo sapien
gtgattatttatatgataaagagcacaaacatt

SEQ ID NO: 757429 - DNA, 33 bp, Homo sapien
gtaattctatagcatcaaataactggacaataa

SEQ ID NO: 757430 - DNA, 33 bp, Homo sapien
gtaattctatagcatccaataactggacaataa

SEQ ID NO: 757431 - DNA, 33 bp, Homo sapien
gtgtaatatactgttaaacagaaaccatgactt

SEQ ID NO: 757432 - DNA, 33 bp, Homo sapien
gtgtaatatactgttagacagaaaccatgactt

SEQ ID NO: 757433 - DNA, 33 bp, Homo sapien
gtattctagaataggaaaactatagagatggca

SEQ ID NO: 757434 - DNA, 33 bp, Homo sapien
gtattctagaataggacaactatagagatggca

SEQ ID NO: 757435 - DNA, 33 bp, Homo sapien
tgcctactccaaatataagaaacctggctcaaa

SEQ ID NO: 757436 - DNA, 33 bp, Homo sapien
tgcctactccaaatatgagaaacctggctcaaa

SEQ ID NO: 757437 - DNA, 33 bp, Homo sapien
tgtgaactgatatataactttgtacagatacag

SEQ ID NO: 757438 - DNA, 33 bp, Homo sapien
tgtgaactgatatatagctttgtacagatacag

SEQ ID NO: 757439 - DNA, 33 bp, Homo sapien
gggacatcctataatacgactgaccaatactcc

SEQ ID NO: 757440 - DNA, 33 bp, Homo sapien
gggacatcctataatatgactgaccaatactcc

SEQ ID NO: 757441 - DNA, 33 bp, Homo sapien
gctaaaacctaggaaaattggaataaagtgtgg

SEQ ID NO: 757442 - DNA, 33 bp, Homo sapien
gctaaaacctaggaaagttggaataaagtgtgg

SEQ ID NO: 757443 - DNA, 33 bp, Homo sapien
caaataaaatcaatagcaactaacgctcactgc

SEQ ID NO: 757444 - DNA, 33 bp, Homo sapien
caaataaaatcaatagtaactaacgctcactgc

SEQ ID NO: 757445 - DNA, 33 bp, Homo sapien
atgatccatccactcaaatgtaattactactag

SEQ ID NO: 757446 - DNA, 33 bp, Homo sapien
atgatccatccactcagatgtaattactactag

SEQ ID NO: 757447 - DNA, 33 bp, Homo sapien
agcaacttgagaataaaaacaaaacataaagaa

SEQ ID NO: 757448 - DNA, 33 bp, Homo sapien
agcaacttgagaataacaacaaaacataaagaa

SEQ ID NO: 757449 - DNA, 33 bp, Homo sapien
ttaagcaggggtgatacaagcattgatctcatg

SEQ ID NO: 757450 - DNA, 33 bp, Homo sapien
ttaagcaggggtgatataagcattgatctcatg

SEQ ID NO: 757451 - DNA, 33 bp, Homo sapien
tttattgtagtctaaaatcaaaagataatgttt

SEQ ID NO: 757452 - DNA, 33 bp, Homo sapien
tttattgtagtctaaagtcaaaagataatgttt

SEQ ID NO: 757453 - DNA, 33 bp, Homo sapien
atacacatcacattcactagagacagcaatgca

SEQ ID NO: 757454 - DNA, 33 bp, Homo sapien
atacacatcacattcattagagacagcaatgca

SEQ ID NO: 757455 - DNA, 33 bp, Homo sapien
gcagacaaaacatccaagatactaagaaaatta

SEQ ID NO: 757456 - DNA, 33 bp, Homo sapien
gcagacaaaacatccacgatactaagaaaatta

SEQ ID NO: 757457 - DNA, 33 bp, Homo sapien
aattatttacaataggaccgcagtgacttctca

SEQ ID NO: 757458 - DNA, 33 bp, Homo sapien
aattatttacaatagggccgcagtgacttctca

SEQ ID NO: 757459 - DNA, 33 bp, Homo sapien
gggcagacagaatgaaatacagagaatgtggtt

SEQ ID NO: 757460 - DNA, 33 bp, Homo sapien
gggcagacagaatgaagtacagagaatgtggtt

SEQ ID NO: 757461 - DNA, 33 bp, Homo sapien
tagaattcacttcaccaggaaaccatctaggcc

SEQ ID NO: 757462 - DNA, 33 bp, Homo sapien
tagaattcacttcaccgggaaaccatctaggcc

SEQ ID NO: 757463 - DNA, 33 bp, Homo sapien
aattgtgcagatgacaaattcctcctcaaaatt

SEQ ID NO: 757464 - DNA, 33 bp, Homo sapien
aattgtgcagatgacagattcctcctcaaaatt

SEQ ID NO: 757465 - DNA, 33 bp, Homo sapien
ggatctggggtcatacaattggtgatctagtat

SEQ ID NO: 757466 - DNA, 33 bp, Homo sapien
ggatctggggtcatacgattggtgatctagtat

SEQ ID NO: 757467 - DNA, 33 bp, Homo sapien
accagtcagtcccaaaatcacgttatgggtagt

SEQ ID NO: 757468 - DNA, 33 bp, Homo sapien
accagtcagtcccaaattcacgttatgggtagt

SEQ ID NO: 757469 - DNA, 33 bp, Homo sapien
aattccacatttcctagtactccaggttaagtt

SEQ ID NO: 757470 - DNA, 33 bp, Homo sapien
aattccacatttcctattactccaggttaagtt

SEQ ID NO: 757471 - DNA, 33 bp, Homo sapien
cattctgctactgagccacaaaagataataaca

SEQ ID NO: 757472 - DNA, 33 bp, Homo sapien
cattctgctactgagctacaaaagataataaca

SEQ ID NO: 757473 - DNA, 33 bp, Homo sapien
ctggatctcgttctaacgatttggccacgaagt

SEQ ID NO: 757474 - DNA, 33 bp, Homo sapien
ctggatctcgttctaatgatttggccacgaagt

SEQ ID NO: 757475 - DNA, 33 bp, Homo sapien
aatatttaaggttcaactggtttatgctacaat

SEQ ID NO: 757476 - DNA, 33 bp, Homo sapien
aatatttaaggttcaattggtttatgctacaat

SEQ ID NO: 757477 - DNA, 33 bp, Homo sapien
aatgtttcaaccactgaacaattctgtaatcac

SEQ ID NO: 757478 - DNA, 33 bp, Homo sapien
aatgtttcaaccactggacaattctgtaatcac

SEQ ID NO: 757479 - DNA, 33 bp, Homo sapien
caacagcatttacaacagagctctacaatttac

SEQ ID NO: 757480 - DNA, 33 bp, Homo sapien
caacagcatttacaactgagctctacaatttac

SEQ ID NO: 757481 - DNA, 33 bp, Homo sapien
tgaattactataacaaatgccttcattttaatg

SEQ ID NO: 757482 - DNA, 33 bp, Homo sapien
tgaattactataacaagtgccttcattttaatg

SEQ ID NO: 757483 - DNA, 33 bp, Homo sapien
ggcgacaaggaggaaacgtgcagcttcacagta

SEQ ID NO: 757484 - DNA, 33 bp, Homo sapien
ggcgacaaggaggaaatgtgcagcttcacagta

SEQ ID NO: 757485 - DNA, 33 bp, Homo sapien
cgatgctggtatatcacacttgtcctattgtat

SEQ ID NO: 757486 - DNA, 33 bp, Homo sapien
cgatgctggtatatcatacttgtcctattgtat

SEQ ID NO: 757487 - DNA, 33 bp, Homo sapien
ccagatctcaaactgaatacaactgcaccagaa

SEQ ID NO: 757488 - DNA, 33 bp, Homo sapien
ccagatctcaaactgagtacaactgcaccagaa

SEQ ID NO: 757489 - DNA, 33 bp, Homo sapien
tggccttttgtagatcgctcatctgtcttctta

SEQ ID NO: 757490 - DNA, 33 bp, Homo sapien
tggccttttgtagatctctcatctgtcttctta

SEQ ID NO: 757491 - DNA, 33 bp, Homo sapien
gccaatggtttcatgcaaagagtacatatagca

SEQ ID NO: 757492 - DNA, 33 bp, Homo sapien
gccaatggtttcatgcgaagagtacatatagca

SEQ ID NO: 757493 - DNA, 33 bp, Homo sapien
caaatgaccataaatacctatcttcaaagctat

SEQ ID NO: 757494 - DNA, 33 bp, Homo sapien
caaatgaccataaatatctatcttcaaagctat

SEQ ID NO: 757495 - DNA, 33 bp, Homo sapien
ttggggatttctgctacgagacgtgtgatatat

SEQ ID NO: 757496 - DNA, 33 bp, Homo sapien
ttggggatttctgctatgagacgtgtgatatat

SEQ ID NO: 757497 - DNA, 33 bp, Homo sapien
aaagagaaaaccaaacaatagcagactgacaga

SEQ ID NO: 757498 - DNA, 33 bp, Homo sapien
aaagagaaaaccaaacgatagcagactgacaga

SEQ ID NO: 757499 - DNA, 33 bp, Homo sapien
catgaaaaggaaaagacggagaaattcaccaaa

SEQ ID NO: 757500 - DNA, 33 bp, Homo sapien
catgaaaaggaaaagatggagaaattcaccaaa

SEQ ID NO: 757501 - DNA, 33 bp, Homo sapien
ccactgaagaagctgcgaaatctttcctcagtt

SEQ ID NO: 757502 - DNA, 33 bp, Homo sapien
ccactgaagaagctgctaaatctttcctcagtt

SEQ ID NO: 757503 - DNA, 33 bp, Homo sapien
atgaatctggatagaaagtcatgaatggtcatg

SEQ ID NO: 757504 - DNA, 33 bp, Homo sapien
atgaatctggatagaatgtcatgaatggtcatg

SEQ ID NO: 757505 - DNA, 33 bp, Homo sapien
caggccatatgtttgggatgagtgagatcatga

SEQ ID NO: 757506 - DNA, 33 bp, Homo sapien
caggccatatgtttggtatgagtgagatcatga

SEQ ID NO: 757507 - DNA, 33 bp, Homo sapien
ataagaaatatgcttaaaacactcagcgcagtg

SEQ ID NO: 757508 - DNA, 33 bp, Homo sapien
ataagaaatatgcttacaacactcagcgcagtg

SEQ ID NO: 757509 - DNA, 33 bp, Homo sapien
gtttaggtccatgcaaaaaggggcaatatggaa

SEQ ID NO: 757510 - DNA, 33 bp, Homo sapien
gtttaggtccatgcaagaaggggcaatatggaa

SEQ ID NO: 757511 - DNA, 33 bp, Homo sapien
ggtagctgacaacaccaaccaaaaaaaatagac

SEQ ID NO: 757512 - DNA, 33 bp, Homo sapien
ggtagctgacaacaccgaccaaaaaaaatagac

SEQ ID NO: 757513 - DNA, 33 bp, Homo sapien
agcttttccattcaccaaagttcagagagggat

SEQ ID NO: 757514 - DNA, 33 bp, Homo sapien
agcttttccattcaccgaagttcagagagggat

SEQ ID NO: 757515 - DNA, 33 bp, Homo sapien
ttgttcaaaccacttacgcacaaatagacaaaa

SEQ ID NO: 757516 - DNA, 33 bp, Homo sapien
ttgttcaaaccacttatgcacaaatagacaaaa

SEQ ID NO: 757517 - DNA, 33 bp, Homo sapien
aatataacaattttaacgatttttggcagctgt

SEQ ID NO: 757518 - DNA, 33 bp, Homo sapien
aatataacaattttaatgatttttggcagctgt

SEQ ID NO: 757519 - DNA, 33 bp, Homo sapien
gagtaaagctttgtcaatagatagttaagagct

SEQ ID NO: 757520 - DNA, 33 bp, Homo sapien
gagtaaagctttgtcattagatagttaagagct

SEQ ID NO: 757521 - DNA, 33 bp, Homo sapien
tgccatattttggaaggcaactggaaaatgaca

SEQ ID NO: 757522 - DNA, 33 bp, Homo sapien
tgccatattttggaagtcaactggaaaatgaca

SEQ ID NO: 757523 - DNA, 33 bp, Homo sapien
tactgttcagattgtcccctgttgtgtgtataa

SEQ ID NO: 757524 - DNA, 33 bp, Homo sapien
tactgttcagattgtctcctgttgtgtgtataa

SEQ ID NO: 757525 - DNA, 33 bp, Homo sapien
gacctgttctacacctaaaacccggaactgctg

SEQ ID NO: 757526 - DNA, 33 bp, Homo sapien
gacctgttctacacctgaaacccggaactgctg

SEQ ID NO: 757527 - DNA, 33 bp, Homo sapien
cacaggccgttcaaaacttacttggatttgttc

SEQ ID NO: 757528 - DNA, 33 bp, Homo sapien
cacaggccgttcaaaagttacttggatttgttc

SEQ ID NO: 757529 - DNA, 33 bp, Homo sapien
tctctacctcttaaaactacgacatacattata

SEQ ID NO: 757530 - DNA, 33 bp, Homo sapien
tctctacctcttaaaagtacgacatacattata

SEQ ID NO: 757531 - DNA, 33 bp, Homo sapien
aatgcatagatggagacaagctttaaaagactt

SEQ ID NO: 757532 - DNA, 33 bp, Homo sapien
aatgcatagatggagagaagctttaaaagactt

SEQ ID NO: 757533 - DNA, 33 bp, Homo sapien
attctaaattagtgagaatattgtagtgtagga

SEQ ID NO: 757534 - DNA, 33 bp, Homo sapien
attctaaattagtgagcatattgtagtgtagga

SEQ ID NO: 757535 - DNA, 33 bp, Homo sapien
tcccttcctgcctctaaacaataaaacttttaa

SEQ ID NO: 757536 - DNA, 33 bp, Homo sapien
tcccttcctgcctctagacaataaaacttttaa

SEQ ID NO: 757537 - DNA, 33 bp, Homo sapien
catgagagactctagaactttgtgaaccctgag

SEQ ID NO: 757538 - DNA, 33 bp, Homo sapien
catgagagactctagacctttgtgaaccctgag

SEQ ID NO: 757539 - DNA, 33 bp, Homo sapien
tcacccatgtctaccacaatcagcacctgtgtg

SEQ ID NO: 757540 - DNA, 33 bp, Homo sapien
tcacccatgtctaccagaatcagcacctgtgtg

SEQ ID NO: 757541 - DNA, 33 bp, Homo sapien
cacaaaatagaatgaaattatgtaatctgcagc

SEQ ID NO: 757542 - DNA, 33 bp, Homo sapien
cacaaaatagaatgaagttatgtaatctgcagc

SEQ ID NO: 757543 - DNA, 33 bp, Homo sapien
aggtaaataattctgacgattttcaaacaaatt

SEQ ID NO: 757544 - DNA, 33 bp, Homo sapien
aggtaaataattctgatgattttcaaacaaatt

SEQ ID NO: 757545 - DNA, 33 bp, Homo sapien
cacccacccacacatacagcgagacactttttg

SEQ ID NO: 757546 - DNA, 33 bp, Homo sapien
cacccacccacacatagagcgagacactttttg

SEQ ID NO: 757547 - DNA, 33 bp, Homo sapien
tagagcctcatactgtaaatgtaagcagcatat

SEQ ID NO: 757548 - DNA, 33 bp, Homo sapien
tagagcctcatactgtgaatgtaagcagcatat

SEQ ID NO: 757549 - DNA, 33 bp, Homo sapien
acccgcaacgaggaaaatgcaccttgccaagat

SEQ ID NO: 757550 - DNA, 33 bp, Homo sapien
acccgcaacgaggaaattgcaccttgccaagat

SEQ ID NO: 757551 - DNA, 33 bp, Homo sapien
tgtagttatcactcaacttagccaattatatct

SEQ ID NO: 757552 - DNA, 33 bp, Homo sapien
tgtagttatcactcaatttagccaattatatct

SEQ ID NO: 757553 - DNA, 33 bp, Homo sapien
cagtcttataagaaaacttcaaagatgtcaaag

SEQ ID NO: 757554 - DNA, 33 bp, Homo sapien
cagtcttataagaaaatttcaaagatgtcaaag

SEQ ID NO: 757555 - DNA, 33 bp, Homo sapien
ttatgacctcatcaaccgatactatttctaagt

SEQ ID NO: 757556 - DNA, 33 bp, Homo sapien
ttatgacctcatcaactgatactatttctaagt

SEQ ID NO: 757557 - DNA, 33 bp, Homo sapien
ttgtgcaagaaccctcggactccaacaagagtg

SEQ ID NO: 757558 - DNA, 33 bp, Homo sapien
ttgtgcaagaaccctctgactccaacaagagtg

SEQ ID NO: 757559 - DNA, 33 bp, Homo sapien
aaatattggtgtgaaaaagcaccaaattaatgg

SEQ ID NO: 757560 - DNA, 33 bp, Homo sapien
aaatattggtgtgaaagagcaccaaattaatgg

SEQ ID NO: 757561 - DNA, 33 bp, Homo sapien
aaataaaaacctctaacttaacatgcttttata

SEQ ID NO: 757562 - DNA, 33 bp, Homo sapien
aaataaaaacctctaagttaacatgcttttata

SEQ ID NO: 757563 - DNA, 33 bp, Homo sapien
gaacaggaaggcattcaagctgatatacatata

SEQ ID NO: 757564 - DNA, 33 bp, Homo sapien
gaacaggaaggcattccagctgatatacatata

SEQ ID NO: 757565 - DNA, 33 bp, Homo sapien
ctaattttctagaacactgattatacctgcttt

SEQ ID NO: 757566 - DNA, 33 bp, Homo sapien
ctaattttctagaacattgattatacctgcttt

SEQ ID NO: 757567 - DNA, 33 bp, Homo sapien
ctgaaaatgactaaaacagtatgggatttaact

SEQ ID NO: 757568 - DNA, 33 bp, Homo sapien
ctgaaaatgactaaaatagtatgggatttaact

SEQ ID NO: 757569 - DNA, 33 bp, Homo sapien
gattcagtgtgatacacgagttgcttataatat

SEQ ID NO: 757570 - DNA, 33 bp, Homo sapien
gattcagtgtgatacatgagttgcttataatat

SEQ ID NO: 757571 - DNA, 33 bp, Homo sapien
cctcttcattcaggaacgtcaatgaatatctac

SEQ ID NO: 757572 - DNA, 33 bp, Homo sapien
cctcttcattcaggaaggtcaatgaatatctac

SEQ ID NO: 757573 - DNA, 33 bp, Homo sapien
taatgaagccactagccattaaaaagtaagtca

SEQ ID NO: 757574 - DNA, 33 bp, Homo sapien
taatgaagccactagctattaaaaagtaagtca

SEQ ID NO: 757575 - DNA, 33 bp, Homo sapien
ctgtgttaataccaaacagcatgacaactaagg

SEQ ID NO: 757576 - DNA, 33 bp, Homo sapien
ctgtgttaataccaaatagcatgacaactaagg

SEQ ID NO: 757577 - DNA, 33 bp, Homo sapien
caccaaagtttaagaacaggtctgaaaaggggg

SEQ ID NO: 757578 - DNA, 33 bp, Homo sapien
caccaaagtttaagaataggtctgaaaaggggg

SEQ ID NO: 757579 - DNA, 33 bp, Homo sapien
tcaccagtcagtcatacgcttactatctcgtct

SEQ ID NO: 757580 - DNA, 33 bp, Homo sapien
tcaccagtcagtcatatgcttactatctcgtct

SEQ ID NO: 757581 - DNA, 33 bp, Homo sapien
ctgggcagtcagacaacacttctcacctacttc

SEQ ID NO: 757582 - DNA, 33 bp, Homo sapien
ctgggcagtcagacaatacttctcacctacttc

SEQ ID NO: 757583 - DNA, 33 bp, Homo sapien
taaaattttaacaacagtcacaacactttaaat

SEQ ID NO: 757584 - DNA, 33 bp, Homo sapien
taaaattttaacaacattcacaacactttaaat

SEQ ID NO: 757585 - DNA, 33 bp, Homo sapien
gattctcatagagggaaacaaatccagttcact

SEQ ID NO: 757586 - DNA, 33 bp, Homo sapien
gattctcatagagggagacaaatccagttcact

SEQ ID NO: 757587 - DNA, 33 bp, Homo sapien
aattattcacattttacgctctttgaaatcaaa

SEQ ID NO: 757588 - DNA, 33 bp, Homo sapien
aattattcacattttatgctctttgaaatcaaa

SEQ ID NO: 757589 - DNA, 33 bp, Homo sapien
attgttcatgaaaataataagtactcatgcgac

SEQ ID NO: 757590 - DNA, 33 bp, Homo sapien
attgttcatgaaaatagtaagtactcatgcgac

SEQ ID NO: 757591 - DNA, 33 bp, Homo sapien
tctggcctctacctttccaagtgtatggctctt

SEQ ID NO: 757592 - DNA, 33 bp, Homo sapien
tctggcctctaccttttcaagtgtatggctctt

SEQ ID NO: 757593 - DNA, 33 bp, Homo sapien
aatagacatttcttaaaccattaatgccagaag

SEQ ID NO: 757594 - DNA, 33 bp, Homo sapien
aatagacatttcttaacccattaatgccagaag

SEQ ID NO: 757595 - DNA, 33 bp, Homo sapien
aggaagcacggctaccaaggccttaggaaattt

SEQ ID NO: 757596 - DNA, 33 bp, Homo sapien
aggaagcacggctaccgaggccttaggaaattt

SEQ ID NO: 757597 - DNA, 33 bp, Homo sapien
ggtgtcatatctaagaatctcttgtcaaatcta

SEQ ID NO: 757598 - DNA, 33 bp, Homo sapien
ggtgtcatatctaagagtctcttgtcaaatcta

SEQ ID NO: 757599 - DNA, 33 bp, Homo sapien
agatcattcaggtaccaaaaggtaaaacatcta

SEQ ID NO: 757600 - DNA, 33 bp, Homo sapien
agatcattcaggtaccgaaaggtaaaacatcta

SEQ ID NO: 757601 - DNA, 33 bp, Homo sapien
ccctctcaagcttcacccttttgctcacagact

SEQ ID NO: 757602 - DNA, 33 bp, Homo sapien
ccctctcaagcttcactcttttgctcacagact

SEQ ID NO: 757603 - DNA, 33 bp, Homo sapien
gtagggatagaaattcaattctcgttccttgcc

SEQ ID NO: 757604 - DNA, 33 bp, Homo sapien
gtagggatagaaattcgattctcgttccttgcc

SEQ ID NO: 757605 - DNA, 33 bp, Homo sapien
gggtatattgtctgtacgttttattggaatgta

SEQ ID NO: 757606 - DNA, 33 bp, Homo sapien
gggtatattgtctgtatgttttattggaatgta

SEQ ID NO: 757607 - DNA, 33 bp, Homo sapien
aatgtggagtagtcaacagttgtgatgatgaga

SEQ ID NO: 757608 - DNA, 33 bp, Homo sapien
aatgtggagtagtcaagagttgtgatgatgaga

SEQ ID NO: 757609 - DNA, 33 bp, Homo sapien
gcaggtagaatacataaatgcaagtgctgggaa

SEQ ID NO: 757610 - DNA, 33 bp, Homo sapien
gcaggtagaatacatagatgcaagtgctgggaa

SEQ ID NO: 757611 - DNA, 33 bp, Homo sapien
gtacataccttctatagtacactgatgatacaa

SEQ ID NO: 757612 - DNA, 33 bp, Homo sapien
gtacataccttctatattacactgatgatacaa

SEQ ID NO: 757613 - DNA, 33 bp, Homo sapien
gatttgttttctcccacgaatactggcataatt

SEQ ID NO: 757614 - DNA, 33 bp, Homo sapien
gatttgttttctcccatgaatactggcataatt

SEQ ID NO: 757615 - DNA, 33 bp, Homo sapien
gagatatcagaagacaagaaatatccaaaatcg

SEQ ID NO: 757616 - DNA, 33 bp, Homo sapien
gagatatcagaagacaggaaatatccaaaatcg

SEQ ID NO: 757617 - DNA, 33 bp, Homo sapien
gagtgtatttttgtgacggagagtaacaatctt

SEQ ID NO: 757618 - DNA, 33 bp, Homo sapien
gagtgtatttttgtgatggagagtaacaatctt

SEQ ID NO: 757619 - DNA, 33 bp, Homo sapien
caaaactggtaagcaaatagttttatgactgag

SEQ ID NO: 757620 - DNA, 33 bp, Homo sapien
caaaactggtaagcaagtagttttatgactgag

SEQ ID NO: 757621 - DNA, 33 bp, Homo sapien
gaatttctgtcttcaaacctctttcagacagaa

SEQ ID NO: 757622 - DNA, 33 bp, Homo sapien
gaatttctgtcttcaagcctctttcagacagaa

SEQ ID NO: 757623 - DNA, 33 bp, Homo sapien
aaataatttctcccagcatgtgcgttgtctctt

SEQ ID NO: 757624 - DNA, 33 bp, Homo sapien
aaataatttctcccagtatgtgcgttgtctctt

SEQ ID NO: 757625 - DNA, 33 bp, Homo sapien
gctggctggatctataaaagtcagttccaaaat

SEQ ID NO: 757626 - DNA, 33 bp, Homo sapien
gctggctggatctatagaagtcagttccaaaat

SEQ ID NO: 757627 - DNA, 33 bp, Homo sapien
gaatatgaacagttacggtaaatgctcacactt

SEQ ID NO: 757628 - DNA, 33 bp, Homo sapien
gaatatgaacagttactgtaaatgctcacactt

SEQ ID NO: 757629 - DNA, 33 bp, Homo sapien
gtgtcatctcattataacccttattcttcaatc

SEQ ID NO: 757630 - DNA, 33 bp, Homo sapien
gtgtcatctcattataccccttattcttcaatc

SEQ ID NO: 757631 - DNA, 33 bp, Homo sapien
attttgtaagcttgaacatctcacaaacacttt

SEQ ID NO: 757632 - DNA, 33 bp, Homo sapien
attttgtaagcttgaatatctcacaaacacttt

SEQ ID NO: 757633 - DNA, 33 bp, Homo sapien
taaagaccatcttcacagcaaagaaactatcaa

SEQ ID NO: 757634 - DNA, 33 bp, Homo sapien
taaagaccatcttcaccgcaaagaaactatcaa

SEQ ID NO: 757635 - DNA, 33 bp, Homo sapien
atgcaggacttaaggtaaaaagtactgtcaagg

SEQ ID NO: 757636 - DNA, 33 bp, Homo sapien
atgcaggacttaaggtgaaaagtactgtcaagg

SEQ ID NO: 757637 - DNA, 33 bp, Homo sapien
ttgttttgcctgagagaagtaactcccttgaca

SEQ ID NO: 757638 - DNA, 33 bp, Homo sapien
ttgttttgcctgagagcagtaactcccttgaca

SEQ ID NO: 757639 - DNA, 33 bp, Homo sapien
acactaaaagccataaaatattaagcgaaaaaa

SEQ ID NO: 757640 - DNA, 33 bp, Homo sapien
acactaaaagccataagatattaagcgaaaaaa

SEQ ID NO: 757641 - DNA, 33 bp, Homo sapien
tattctagatattaaccctttgccagatgtata

SEQ ID NO: 757642 - DNA, 33 bp, Homo sapien
tattctagatattaactctttgccagatgtata

SEQ ID NO: 757643 - DNA, 33 bp, Homo sapien
aaaaaatgaaatcctagaatttgtgacaacaca

SEQ ID NO: 757644 - DNA, 33 bp, Homo sapien
aaaaaatgaaatcctataatttgtgacaacaca

SEQ ID NO: 757645 - DNA, 33 bp, Homo sapien
gcatacttttctataaccataacacctatgtca

SEQ ID NO: 757646 - DNA, 33 bp, Homo sapien
gcatacttttctataagcataacacctatgtca

SEQ ID NO: 757647 - DNA, 33 bp, Homo sapien
tttattgatgtgcgtaagttgacccaaacttgc

SEQ ID NO: 757648 - DNA, 33 bp, Homo sapien
tttattgatgtgcgtacgttgacccaaacttgc

SEQ ID NO: 757649 - DNA, 33 bp, Homo sapien
catccaggaagaaatgaatatgtctggcatagt

SEQ ID NO: 757650 - DNA, 33 bp, Homo sapien
catccaggaagaaatgcatatgtctggcatagt

SEQ ID NO: 757651 - DNA, 33 bp, Homo sapien
tgaaactcctgaattaccttgagggagaaagac

SEQ ID NO: 757652 - DNA, 33 bp, Homo sapien
tgaaactcctgaattatcttgagggagaaagac

SEQ ID NO: 757653 - DNA, 33 bp, Homo sapien
gacatgtaagagttacccataatgtagaagggt

SEQ ID NO: 757654 - DNA, 33 bp, Homo sapien
gacatgtaagagttacgcataatgtagaagggt

SEQ ID NO: 757655 - DNA, 33 bp, Homo sapien
aatgacacagatgaaacgtggataaatagtagt

SEQ ID NO: 757656 - DNA, 33 bp, Homo sapien
aatgacacagatgaaatgtggataaatagtagt

SEQ ID NO: 757657 - DNA, 33 bp, Homo sapien
tctgagttcatgtaacaatgttaatgctcaatg

SEQ ID NO: 757658 - DNA, 33 bp, Homo sapien
tctgagttcatgtaacgatgttaatgctcaatg

SEQ ID NO: 757659 - DNA, 33 bp, Homo sapien
acatttgtgaggctcaaggaatgagtgtaagtg

SEQ ID NO: 757660 - DNA, 33 bp, Homo sapien
acatttgtgaggctcagggaatgagtgtaagtg

SEQ ID NO: 757661 - DNA, 33 bp, Homo sapien
ccttgagggcaatagaacaagaggtaaaattta

SEQ ID NO: 757662 - DNA, 33 bp, Homo sapien
ccttgagggcaatagaccaagaggtaaaattta

SEQ ID NO: 757663 - DNA, 33 bp, Homo sapien
tgattgtctctttaaacgttaatgtggaagcct

SEQ ID NO: 757664 - DNA, 33 bp, Homo sapien
tgattgtctctttaaatgttaatgtggaagcct

SEQ ID NO: 757665 - DNA, 33 bp, Homo sapien
gatcccacaaactgaacaggctatcataaatca

SEQ ID NO: 757666 - DNA, 33 bp, Homo sapien
gatcccacaaactgaagaggctatcataaatca

SEQ ID NO: 757667 - DNA, 33 bp, Homo sapien
gcctccctggtaagtaaaactacaagcaagtgc

SEQ ID NO: 757668 - DNA, 33 bp, Homo sapien
gcctccctggtaagtagaactacaagcaagtgc

SEQ ID NO: 757669 - DNA, 33 bp, Homo sapien
agtcttctgttttcccccttgaggtatttgtca

SEQ ID NO: 757670 - DNA, 33 bp, Homo sapien
agtcttctgttttccctcttgaggtatttgtca

SEQ ID NO: 757671 - DNA, 33 bp, Homo sapien
ttcgtagtctctttccactgctataatatagta

SEQ ID NO: 757672 - DNA, 33 bp, Homo sapien
ttcgtagtctctttccgctgctataatatagta

SEQ ID NO: 757673 - DNA, 33 bp, Homo sapien
gaagatttttaccttcaacaaactaagtatgaa

SEQ ID NO: 757674 - DNA, 33 bp, Homo sapien
gaagatttttaccttctacaaactaagtatgaa

SEQ ID NO: 757675 - DNA, 33 bp, Homo sapien
ttttaaaggatacttccagaactacaaaccaac

SEQ ID NO: 757676 - DNA, 33 bp, Homo sapien
ttttaaaggatacttctagaactacaaaccaac

SEQ ID NO: 757677 - DNA, 33 bp, Homo sapien
gttaaaaatactgaagaaaaacatggtgttgtc

SEQ ID NO: 757678 - DNA, 33 bp, Homo sapien
gttaaaaatactgaaggaaaacatggtgttgtc

SEQ ID NO: 757679 - DNA, 33 bp, Homo sapien
cttggtagaaaactaagagtctgcaaacgacga

SEQ ID NO: 757680 - DNA, 33 bp, Homo sapien
cttggtagaaaactaatagtctgcaaacgacga

SEQ ID NO: 757681 - DNA, 33 bp, Homo sapien
ggtagacataccagcaatacaatcatgtagaac

SEQ ID NO: 757682 - DNA, 33 bp, Homo sapien
ggtagacataccagcagtacaatcatgtagaac

SEQ ID NO: 757683 - DNA, 33 bp, Homo sapien
caaaggccctttggccacttttcaatctttcta

SEQ ID NO: 757684 - DNA, 33 bp, Homo sapien
caaaggccctttggccgcttttcaatctttcta

SEQ ID NO: 757685 - DNA, 33 bp, Homo sapien
tataatccaatgtaaactggaacacatggaaaa

SEQ ID NO: 757686 - DNA, 33 bp, Homo sapien
tataatccaatgtaaagtggaacacatggaaaa

SEQ ID NO: 757687 - DNA, 33 bp, Homo sapien
tgatacattagctttacctaatccacgactgat

SEQ ID NO: 757688 - DNA, 33 bp, Homo sapien
tgatacattagctttatctaatccacgactgat

SEQ ID NO: 757689 - DNA, 33 bp, Homo sapien
aatacaaaaaagatgacagatatctaagacaat

SEQ ID NO: 757690 - DNA, 33 bp, Homo sapien
aatacaaaaaagatgagagatatctaagacaat

SEQ ID NO: 757691 - DNA, 33 bp, Homo sapien
tctgtaaaattgtgggcagccgagaaatttgtg

SEQ ID NO: 757692 - DNA, 33 bp, Homo sapien
tctgtaaaattgtgggtagccgagaaatttgtg

SEQ ID NO: 757693 - DNA, 33 bp, Homo sapien
ccccagtctcttataaacactattctattgact

SEQ ID NO: 757694 - DNA, 33 bp, Homo sapien
ccccagtctcttataaccactattctattgact

SEQ ID NO: 757695 - DNA, 33 bp, Homo sapien; identical to SEQ ID NO: 757693

SEQ ID NO: 757696 - DNA, 33 bp, Homo sapien; identical to SEQ ID NO: 757694

SEQ ID NO: 757697 - DNA, 33 bp, Homo sapien
ctgtgatgattattacaaaataacaatgtgtca

SEQ ID NO: 757698 - DNA, 33 bp, Homo sapien
ctgtgatgattattacgaaataacaatgtgtca

SEQ ID NO: 757699 - DNA, 33 bp, Homo sapien
tgcatggaccattaacaaaagctatgtggaaga

SEQ ID NO: 757700 - DNA, 33 bp, Homo sapien
tgcatggaccattaacgaaagctatgtggaaga

SEQ ID NO: 757701 - DNA, 33 bp, Homo sapien
cagacctcatacttccccaagctgttgctttgg

SEQ ID NO: 757702 - DNA, 33 bp, Homo sapien
cagacctcatacttccgcaagctgttgctttgg

SEQ ID NO: 757703 - DNA, 33 bp, Homo sapien
tactaatggatgataacattaacaacaggaact

SEQ ID NO: 757704 - DNA, 33 bp, Homo sapien
tactaatggatgataatattaacaacaggaact

SEQ ID NO: 757705 - DNA, 33 bp, Homo sapien
aagataaaaattgaaaatgcagactattttgaa

SEQ ID NO: 757706 - DNA, 33 bp, Homo sapien
aagataaaaattgaaagtgcagactattttgaa

SEQ ID NO: 757707 - DNA, 33 bp, Homo sapien
tgttaccttcaatctcactcaagatctgacttt

SEQ ID NO: 757708 - DNA, 33 bp, Homo sapien
tgttaccttcaatctcgctcaagatctgacttt

SEQ ID NO: 757709 - DNA, 33 bp, Homo sapien
ttcataatggagattcaagaaaacaagattact

SEQ ID NO: 757710 - DNA, 33 bp, Homo sapien
ttcataatggagattccagaaaacaagattact

SEQ ID NO: 757711 - DNA, 33 bp, Homo sapien; identical to SEQ ID NO: 757709

SEQ ID NO: 757712 - DNA, 33 bp, Homo sapien; identical to SEQ ID NO: 757710

SEQ ID NO: 757713 - DNA, 33 bp, Homo sapien
ttaaatcagaggtggaagagtttgtataaaaaa

SEQ ID NO: 757714 - DNA, 33 bp, Homo sapien
ttaaatcagaggtggaggagtttgtataaaaaa

SEQ ID NO: 757715 - DNA, 33 bp, Homo sapien
aaactggccttgagccccatctaatatggcaga

SEQ ID NO: 757716 - DNA, 33 bp, Homo sapien
aaactggccttgagcctcatctaatatggcaga

SEQ ID NO: 757717 - DNA, 33 bp, Homo sapien
tattcttaaaattagactagagtgtccagaaac

SEQ ID NO: 757718 - DNA, 33 bp, Homo sapien
tattcttaaaattagagtagagtgtccagaaac

SEQ ID NO: 757719 - DNA, 33 bp, Homo sapien
cgagacatgcttttgacgtgcaaggaatttcaa

SEQ ID NO: 757720 - DNA, 33 bp, Homo sapien
cgagacatgcttttgatgtgcaaggaatttcaa

SEQ ID NO: 757721 - DNA, 33 bp, Homo sapien
ctaagttaagcagtgccattacgttaggaattt

SEQ ID NO: 757722 - DNA, 33 bp, Homo sapien
ctaagttaagcagtgcgattacgttaggaattt

SEQ ID NO: 757723 - DNA, 33 bp, Homo sapien
actgttcttgtgtccaatcttgctattcagacc

SEQ ID NO: 757724 - DNA, 33 bp, Homo sapien
actgttcttgtgtccagtcttgctattcagacc

SEQ ID NO: 757725 - DNA, 33 bp, Homo sapien; identical to SEQ ID NO: 757723

SEQ ID NO: 757726 - DNA, 33 bp, Homo sapien; identical to SEQ ID NO: 757724

SEQ ID NO: 757727 - DNA, 33 bp, Homo sapien
ttctgctctctccaacaacaataaaatgtccat

SEQ ID NO: 757728 - DNA, 33 bp, Homo sapien
ttctgctctctccaacgacaataaaatgtccat

SEQ ID NO: 757729 - DNA, 33 bp, Homo sapien
ttggttgcagcattccaagtttatttctttgaa

SEQ ID NO: 757730 - DNA, 33 bp, Homo sapien
ttggttgcagcattcccagtttatttctttgaa

SEQ ID NO: 757731 - DNA, 33 bp, Homo sapien
ttcaaactgaatatgacgcaatgctcttttttt

SEQ ID NO: 757732 - DNA, 33 bp, Homo sapien
ttcaaactgaatatgatgcaatgctcttttttt

SEQ ID NO: 757733 - DNA, 33 bp, Homo sapien
tactcaggtaggctagcaaattagacaaaaaca

SEQ ID NO: 757734 - DNA, 33 bp, Homo sapien
tactcaggtaggctaggaaattagacaaaaaca

SEQ ID NO: 757735 - DNA, 33 bp, Homo sapien; identical to SEQ ID NO: 757733

SEQ ID NO: 757736 - DNA, 33 bp, Homo sapien; identical to SEQ ID NO: 757734

SEQ ID NO: 757737 - DNA, 33 bp, Homo sapien
agagtcatggaagagacaaagtgttaaagagtt

SEQ ID NO: 757738 - DNA, 33 bp, Homo sapien
agagtcatggaagagagaaagtgttaaagagtt

SEQ ID NO: 757739 - DNA, 33 bp, Homo sapien
aatttttgaaaatagggcaaatgcgacatgaaa

SEQ ID NO: 757740 - DNA, 33 bp, Homo sapien
aatttttgaaaataggtcaaatgcgacatgaaa

SEQ ID NO: 757741 - DNA, 33 bp, Homo sapien; identical to SEQ ID NO: 757739

SEQ ID NO: 757742 - DNA, 33 bp, Homo sapien; identical to SEQ ID NO: 757740

SEQ ID NO: 757743 - DNA, 33 bp, Homo sapien
tgagaacagtatgtggacatttttagataaata

SEQ ID NO: 757744 - DNA, 33 bp, Homo sapien
tgagaacagtatgtgggcatttttagataaata

SEQ ID NO: 757745 - DNA, 33 bp, Homo sapien
catgtgaaagaaaccaacttgtaatcatgcatt

SEQ ID NO: 757746 - DNA, 33 bp, Homo sapien
catgtgaaagaaaccatcttgtaatcatgcatt

SEQ ID NO: 757747 - DNA, 33 bp, Homo sapien
tcagtaatctccatcacgtaagaaaaccatcaa

SEQ ID NO: 757748 - DNA, 33 bp, Homo sapien
tcagtaatctccatcaggtaagaaaaccatcaa

SEQ ID NO: 757749 - DNA, 33 bp, Homo sapien; identical to SEQ ID NO: 757747

SEQ ID NO: 757750 - DNA, 33 bp, Homo sapien; identical to SEQ ID NO: 757748

SEQ ID NO: 757751 - DNA, 33 bp, Homo sapien
attattccagtacacaatagtctcataaatcaa

SEQ ID NO: 757752 - DNA, 33 bp, Homo sapien
attattccagtacacactagtctcataaatcaa

SEQ ID NO: 757753 - DNA, 33 bp, Homo sapien; identical to SEQ ID NO: 757751

SEQ ID NO: 757754 - DNA, 33 bp, Homo sapien; identical to SEQ ID NO: 757752

SEQ ID NO: 757755 - DNA, 33 bp, Homo sapien
tttgtatagccatgtcggaatatgtatttcaca

SEQ ID NO: 757756 - DNA, 33 bp, Homo sapien
tttgtatagccatgtctgaatatgtatttcaca

SEQ ID NO: 757757 - DNA, 33 bp, Homo sapien
caaagagaaagcgttacgggagaggaactttgg

SEQ ID NO: 757758 - DNA, 33 bp, Homo sapien
caaagagaaagcgttatgggagaggaactttgg

SEQ ID NO: 757759 - DNA, 33 bp, Homo sapien
ttgcaatacgctaacacgtatctataggctttg

SEQ ID NO: 757760 - DNA, 33 bp, Homo sapien
ttgcaatacgctaacaggtatctataggctttg

SEQ ID NO: 757761 - DNA, 33 bp, Homo sapien
tttcttctgaacatataaaagcagctttcttaa

SEQ ID NO: 757762 - DNA, 33 bp, Homo sapien
tttcttctgaacatattaaagcagctttcttaa

SEQ ID NO: 757763 - DNA, 33 bp, Homo sapien
aaaactggattcacaaatattaaggattttact

SEQ ID NO: 757764 - DNA, 33 bp, Homo sapien
aaaactggattcacaagtattaaggattttact

SEQ ID NO: 757765 - DNA, 33 bp, Homo sapien
agggttccgacttctgcattagcctgactctat

SEQ ID NO: 757766 - DNA, 33 bp, Homo sapien
agggttccgacttctggattagcctgactctat

SEQ ID NO: 757767 - DNA, 33 bp, Homo sapien
atttcaaccagacatgcacttgtcaaaagtgag

SEQ ID NO: 757768 - DNA, 33 bp, Homo sapien
atttcaaccagacatggacttgtcaaaagtgag

SEQ ID NO: 757769 - DNA, 33 bp, Homo sapien
atggcttcctcttaacactgaagtccccaccaa

SEQ ID NO: 757770 - DNA, 33 bp, Homo sapien
atggcttcctcttaacgctgaagtccccaccaa

SEQ ID NO: 757771 - DNA, 33 bp, Homo sapien
atgaaatgagttacagcagaatgaataattgca

SEQ ID NO: 757772 - DNA, 33 bp, Homo sapien
atgaaatgagttacaggagaatgaataattgca

SEQ ID NO: 757773 - DNA, 33 bp, Homo sapien
tgggactacagcaataacatactcattagtgca

SEQ ID NO: 757774 - DNA, 33 bp, Homo sapien
tgggactacagcaataccatactcattagtgca

SEQ ID NO: 757775 - DNA, 33 bp, Homo sapien; identical to SEQ ID NO: 757773

SEQ ID NO: 757776 - DNA, 33 bp, Homo sapien; identical to SEQ ID NO: 757774

SEQ ID NO: 757777 - DNA, 33 bp, Homo sapien
aacatggacatatcctcaaaccagagattttac

SEQ ID NO: 757778 - DNA, 33 bp, Homo sapien
aacatggacatatcctgaaaccagagattttac

SEQ ID NO: 757779 - DNA, 33 bp, Homo sapien
aagtctcaaaggtgcaaagataaagtttttata

SEQ ID NO: 757780 - DNA, 33 bp, Homo sapien
aagtctcaaaggtgcagagataaagtttttata

SEQ ID NO: 757781 - DNA, 33 bp, Homo sapien
tacaaacaaatcatgaccttagatgaagtgtat

SEQ ID NO: 757782 - DNA, 33 bp, Homo sapien
tacaaacaaatcatgagcttagatgaagtgtat

SEQ ID NO: 757783 - DNA, 33 bp, Homo sapien
ttgtcgaggcaactcaatagcgttgtgccacag

SEQ ID NO: 757784 - DNA, 33 bp, Homo sapien
ttgtcgaggcaactcagtagcgttgtgccacag

SEQ ID NO: 757785 - DNA, 33 bp, Homo sapien
gtcagcataagattacaatttcatacatttggt

SEQ ID NO: 757786 - DNA, 33 bp, Homo sapien
gtcagcataagattacgatttcatacatttggt

SEQ ID NO: 757787 - DNA, 33 bp, Homo sapien
tggaagagtaggtgcaaaattccaaaggtgagt

SEQ ID NO: 757788 - DNA, 33 bp, Homo sapien
tggaagagtaggtgcagaattccaaaggtgagt

SEQ ID NO: 757789 - DNA, 33 bp, Homo sapien
tagatattcttataacggaaattctcatttgtg

SEQ ID NO: 757790 - DNA, 33 bp, Homo sapien
tagatattcttataactgaaattctcatttgtg

SEQ ID NO: 757791 - DNA, 33 bp, Homo sapien
gctgctgcttctgggacgaacgaagcctgatgt

SEQ ID NO: 757792 - DNA, 33 bp, Homo sapien
gctgctgcttctgggatgaacgaagcctgatgt

SEQ ID NO: 757793 - DNA, 33 bp, Homo sapien
aaaataagttaatgcgaaacatggtcttacaga

SEQ ID NO: 757794 - DNA, 33 bp, Homo sapien
aaaataagttaatgcgcaacatggtcttacaga

SEQ ID NO: 757795 - DNA, 33 bp, Homo sapien
agatcctataactaacaaggatgggttcatatt

SEQ ID NO: 757796 - DNA, 33 bp, Homo sapien
agatcctataactaacgaggatgggttcatatt

SEQ ID NO: 757797 - DNA, 33 bp, Homo sapien
attgccaattgtcctacataagctccgggtttc

SEQ ID NO: 757798 - DNA, 33 bp, Homo sapien
attgccaattgtcctatataagctccgggtttc

SEQ ID NO: 757799 - DNA, 33 bp, Homo sapien
tcaataattttgaagcacaatcttttatctctt

SEQ ID NO: 757800 - DNA, 33 bp, Homo sapien
tcaataattttgaagcgcaatcttttatctctt

SEQ ID NO: 757801 - DNA, 33 bp, Homo sapien
gattctcaaaccttaaatgcctactacttatca

SEQ ID NO: 757802 - DNA, 33 bp, Homo sapien
gattctcaaaccttaactgcctactacttatca

SEQ ID NO: 757803 - DNA, 33 bp, Homo sapien
tcactggagtaatggaagtgggtaatggcctaa

SEQ ID NO: 757804 - DNA, 33 bp, Homo sapien
tcactggagtaatggaggtgggtaatggcctaa

SEQ ID NO: 757805 - DNA, 33 bp, Homo sapien
ggctgctcttctcttaggtttttgcatgtctgg

SEQ ID NO: 757806 - DNA, 33 bp, Homo sapien
ggctgctcttctcttatgtttttgcatgtctgg

SEQ ID NO: 757807 - DNA, 33 bp, Homo sapien
aacattctgtgtgagccaaaaagtctggtgctt

SEQ ID NO: 757808 - DNA, 33 bp, Homo sapien
aacattctgtgtgagctaaaaagtctggtgctt

SEQ ID NO: 757809 - DNA, 33 bp, Homo sapien
ttatgcatacaagcccggatattctgttgatag

SEQ ID NO: 757810 - DNA, 33 bp, Homo sapien
ttatgcatacaagccctgatattctgttgatag

SEQ ID NO: 757811 - DNA, 33 bp, Homo sapien
agcctggtaaaatgcacaaattgatagtccgaa

SEQ ID NO: 757812 - DNA, 33 bp, Homo sapien
agcctggtaaaatgcagaaattgatagtccgaa

SEQ ID NO: 757813 - DNA, 33 bp, Homo sapien
taacctgctgctttgaagtgtaaatcataaatc

SEQ ID NO: 757814 - DNA, 33 bp, Homo sapien
taacctgctgctttgatgtgtaaatcataaatc

SEQ ID NO: 757815 - DNA, 33 bp, Homo sapien
gcatgttctcacttatcactgggacttgaacaa

SEQ ID NO: 757816 - DNA, 33 bp, Homo sapien
gcatgttctcacttatgactgggacttgaacaa

SEQ ID NO: 757817 - DNA, 33 bp, Homo sapien
cataaacgtcttcacactgctcaaggaaattag

SEQ ID NO: 757818 - DNA, 33 bp, Homo sapien
cataaacgtcttcacagtgctcaaggaaattag

SEQ ID NO: 757819 - DNA, 33 bp, Homo sapien
catttttgctccaaaccgtgttgcatttgtgat

SEQ ID NO: 757820 - DNA, 33 bp, Homo sapien
catttttgctccaaactgtgttgcatttgtgat

SEQ ID NO: 757821 - DNA, 33 bp, Homo sapien
gggtaatatgcttcaaccaaagtctactgattt

SEQ ID NO: 757822 - DNA, 33 bp, Homo sapien
gggtaatatgcttcaatcaaagtctactgattt

SEQ ID NO: 757823 - DNA, 33 bp, Homo sapien
tcctcttgtagaagagaccatgtcaatcagtca

SEQ ID NO: 757824 - DNA, 33 bp, Homo sapien
tcctcttgtagaagaggccatgtcaatcagtca

SEQ ID NO: 757825 - DNA, 33 bp, Homo sapien
gctaaatgttggcagaaagaacaattgagcatc

SEQ ID NO: 757826 - DNA, 33 bp, Homo sapien
gctaaatgttggcagagagaacaattgagcatc

SEQ ID NO: 757827 - DNA, 33 bp, Homo sapien
acattactgagttaatcatatcgaactgactca

SEQ ID NO: 757828 - DNA, 33 bp, Homo sapien
acattactgagttaattatatcgaactgactca

SEQ ID NO: 757829 - DNA, 33 bp, Homo sapien
acaggtgatgaacttacgttgacacaccattat

SEQ ID NO: 757830 - DNA, 33 bp, Homo sapien
acaggtgatgaacttatgttgacacaccattat

SEQ ID NO: 757831 - DNA, 33 bp, Homo sapien
ggacaatagacactgtcaactattagagatggg

SEQ ID NO: 757832 - DNA, 33 bp, Homo sapien
ggacaatagacactgtgaactattagagatggg

SEQ ID NO: 757833 - DNA, 33 bp, Homo sapien
gtgggatcgtgtaatagatgtccttctgtatct

SEQ ID NO: 757834 - DNA, 33 bp, Homo sapien
gtgggatcgtgtaatatatgtccttctgtatct

SEQ ID NO: 757835 - DNA, 33 bp, Homo sapien
cttccagaatttctgccagtttttcaaatctgg

SEQ ID NO: 757836 - DNA, 33 bp, Homo sapien
cttccagaatttctgctagtttttcaaatctgg

SEQ ID NO: 757837 - DNA, 33 bp, Homo sapien
tatatctatgtagaaaattaccttgtgacagtt

SEQ ID NO: 757838 - DNA, 33 bp, Homo sapien
tatatctatgtagaaatttaccttgtgacagtt

SEQ ID NO: 757839 - DNA, 33 bp, Homo sapien
taataagacactggccaactcttgactttcaac

SEQ ID NO: 757840 - DNA, 33 bp, Homo sapien
taataagacactggccgactcttgactttcaac

SEQ ID NO: 757841 - DNA, 33 bp, Homo sapien
tgagttatttgcgaaacagatgaataagacact

SEQ ID NO: 757842 - DNA, 33 bp, Homo sapien
tgagttatttgcgaaatagatgaataagacact

SEQ ID NO: 757843 - DNA, 33 bp, Homo sapien
gacacttatgatagcccgcactattgactagaa

SEQ ID NO: 757844 - DNA, 33 bp, Homo sapien
gacacttatgatagcctgcactattgactagaa

SEQ ID NO: 757845 - DNA, 33 bp, Homo sapien
gacatagtcattgtcaaaaaggtaactggagag

SEQ ID NO: 757846 - DNA, 33 bp, Homo sapien
gacatagtcattgtcagaaaggtaactggagag

SEQ ID NO: 757847 - DNA, 33 bp, Homo sapien
gctccaatggccaacaagaaaagagagtatctc

SEQ ID NO: 757848 - DNA, 33 bp, Homo sapien
gctccaatggccaacatgaaaagagagtatctc

SEQ ID NO: 757849 - DNA, 33 bp, Homo sapien
tgagaaacattcaagaaatgctaggtatctaaa

SEQ ID NO: 757850 - DNA, 33 bp, Homo sapien
tgagaaacattcaagagatgctaggtatctaaa

SEQ ID NO: 757851 - DNA, 33 bp, Homo sapien
aaataagtacaacacaatcagaagcacaggaat

SEQ ID NO: 757852 - DNA, 33 bp, Homo sapien
aaataagtacaacacagtcagaagcacaggaat

SEQ ID NO: 757853 - DNA, 33 bp, Homo sapien
aagacaaacctggaaaccagataaggagaaatt

SEQ ID NO: 757854 - DNA, 33 bp, Homo sapien
aagacaaacctggaaatcagataaggagaaatt

SEQ ID NO: 757855 - DNA, 33 bp, Homo sapien
gtaggtaaagtttgtccccagaaatgctgccta

SEQ ID NO: 757856 - DNA, 33 bp, Homo sapien
gtaggtaaagtttgtctccagaaatgctgccta

SEQ ID NO: 757857 - DNA, 33 bp, Homo sapien
agtccaaagtttgttcacctctcacagagcctc

SEQ ID NO: 757858 - DNA, 33 bp, Homo sapien
agtccaaagtttgttcgcctctcacagagcctc

SEQ ID NO: 757859 - DNA, 33 bp, Homo sapien
agcaggtatttgaaaagttcttcagacaatacc

SEQ ID NO: 757860 - DNA, 33 bp, Homo sapien
agcaggtatttgaaaatttcttcagacaatacc

SEQ ID NO: 757861 - DNA, 33 bp, Homo sapien
tggctgcagcaactcaagtggggaatggtgcgc

SEQ ID NO: 757862 - DNA, 33 bp, Homo sapien
tggctgcagcaactcaggtggggaatggtgcgc

SEQ ID NO: 757863 - DNA, 33 bp, Homo sapien
tactgtaacaccagcaacctgaacatgcagcta

SEQ ID NO: 757864 - DNA, 33 bp, Homo sapien
tactgtaacaccagcagcctgaacatgcagcta

SEQ ID NO: 757865 - DNA, 33 bp, Homo sapien
ggactgctgctgcccaagagcctcggtctgatg

SEQ ID NO: 757866 - DNA, 33 bp, Homo sapien
ggactgctgctgcccaggagcctcggtctgatg

SEQ ID NO: 757867 - DNA, 33 bp, Homo sapien
taatgataaaagttgaagttcagaatttcctca

SEQ ID NO: 757868 - DNA, 33 bp, Homo sapien
taatgataaaagttgaggttcagaatttcctca

SEQ ID NO: 757869 - DNA, 33 bp, Homo sapien
ttcaagtcacagctcaaatgtcacgggttctgc

SEQ ID NO: 757870 - DNA, 33 bp, Homo sapien
ttcaagtcacagctcagatgtcacgggttctgc

SEQ ID NO: 757871 - DNA, 33 bp, Homo sapien
gattggtgagtgttaactgaggtatgatacatg

SEQ ID NO: 757872 - DNA, 33 bp, Homo sapien
gattggtgagtgttaattgaggtatgatacatg

SEQ ID NO: 757873 - DNA, 33 bp, Homo sapien
aaaacataacttcttgaaaaatgtcactgtcat

SEQ ID NO: 757874 - DNA, 33 bp, Homo sapien
aaaacataacttcttggaaaatgtcactgtcat

SEQ ID NO: 757875 - DNA, 33 bp, Homo sapien
actccccaaatttgatgaaaagtagtattctac

SEQ ID NO: 757876 - DNA, 33 bp, Homo sapien
actccccaaatttgattaaaagtagtattctac

SEQ ID NO: 757877 - DNA, 33 bp, Homo sapien
cttctatcacgcagtgcagcaaggaggaatatg

SEQ ID NO: 757878 - DNA, 33 bp, Homo sapien
cttctatcacgcagtggagcaaggaggaatatg

SEQ ID NO: 757879 - DNA, 33 bp, Homo sapien
aactaacttaatctgacagagttcaagcttcat

SEQ ID NO: 757880 - DNA, 33 bp, Homo sapien
aactaacttaatctgatagagttcaagcttcat

SEQ ID NO: 757881 - DNA, 33 bp, Homo sapien
atgtccacactgaattaaaatctataaaatttt

SEQ ID NO: 757882 - DNA, 33 bp, Homo sapien
atgtccacactgaattcaaatctataaaatttt

SEQ ID NO: 757883 - DNA, 33 bp, Homo sapien
gaggaagaaaccaataaataaggtagcaaaatc

SEQ ID NO: 757884 - DNA, 33 bp, Homo sapien
gaggaagaaaccaatacataaggtagcaaaatc

SEQ ID NO: 757885 - DNA, 33 bp, Homo sapien
tgctgtggaattttcaacaccagtagtttccat

SEQ ID NO: 757886 - DNA, 33 bp, Homo sapien
tgctgtggaattttcaccaccagtagtttccat

SEQ ID NO: 757887 - DNA, 33 bp, Homo sapien
gttctcctcgtatttacagcagttcatttatct

SEQ ID NO: 757888 - DNA, 33 bp, Homo sapien
gttctcctcgtatttatagcagttcatttatct

SEQ ID NO: 757889 - DNA, 33 bp, Homo sapien
tctcatatattttggaacagtgcctatttcaaa

SEQ ID NO: 757890 - DNA, 33 bp, Homo sapien
tctcatatattttggatcagtgcctatttcaaa

SEQ ID NO: 757891 - DNA, 33 bp, Homo sapien
tgtgacttgactaaatcaaccctgttattgcca

SEQ ID NO: 757892 - DNA, 33 bp, Homo sapien
tgtgacttgactaaattaaccctgttattgcca

SEQ ID NO: 757893 - DNA, 33 bp, Homo sapien
atacatgaaatttgcaaggaactaaatagtagt

SEQ ID NO: 757894 - DNA, 33 bp, Homo sapien
atacatgaaatttgcagggaactaaatagtagt

SEQ ID NO: 757895 - DNA, 33 bp, Homo sapien
tgtgatttgcagcaccacatatggaactacaga

SEQ ID NO: 757896 - DNA, 33 bp, Homo sapien
tgtgatttgcagcaccgcatatggaactacaga

SEQ ID NO: 757897 - DNA, 33 bp, Homo sapien
acatggctttggaacacggtgagccttagggaa

SEQ ID NO: 757898 - DNA, 33 bp, Homo sapien
acatggctttggaacatggtgagccttagggaa

SEQ ID NO: 757899 - DNA, 33 bp, Homo sapien
tggcgagatctgcaagaagagctggcagagaca

SEQ ID NO: 757900 - DNA, 33 bp, Homo sapien
tggcgagatctgcaaggagagctggcagagaca

SEQ ID NO: 757901 - DNA, 33 bp, Homo sapien
cttgctgccgcaatgcaatttaaaaagtgcctt

SEQ ID NO: 757902 - DNA, 33 bp, Homo sapien
cttgctgccgcaatgcgatttaaaaagtgcctt

SEQ ID NO: 757903 - DNA, 33 bp, Homo sapien
atcatgagaatagtacaagcaagactggccccc

SEQ ID NO: 757904 - DNA, 33 bp, Homo sapien
atcatgagaatagtacgagcaagactggccccc

SEQ ID NO: 757905 - DNA, 33 bp, Homo sapien
tggctgtctccatctacattgcaaaggacattg

SEQ ID NO: 757906 - DNA, 33 bp, Homo sapien
tggctgtctccatctagattgcaaaggacattg

SEQ ID NO: 757907 - DNA, 33 bp, Homo sapien
tgctgctagcctaacaactctggagtctctgag

SEQ ID NO: 757908 - DNA, 33 bp, Homo sapien
tgctgctagcctaacagctctggagtctctgag

SEQ ID NO: 757909 - DNA, 33 bp, Homo sapien
ttaggctagcagcatacagtgccagcctggaag

SEQ ID NO: 757910 - DNA, 33 bp, Homo sapien
ttaggctagcagcatatagtgccagcctggaag

SEQ ID NO: 757911 - DNA, 33 bp, Homo sapien
tttcaatttaaatgtgccaatgcttttagcatg

SEQ ID NO: 757912 - DNA, 33 bp, Homo sapien
tttcaatttaaatgtgtcaatgcttttagcatg

SEQ ID NO: 757913 - DNA, 33 bp, Homo sapien
gttctaggactgaagaatacaagtgtgaaaaaa

SEQ ID NO: 757914 - DNA, 33 bp, Homo sapien
gttctaggactgaagagtacaagtgtgaaaaaa

SEQ ID NO: 757915 - DNA, 33 bp, Homo sapien
ataagtacacagaagccatttttgggatgaaaa

SEQ ID NO: 757916 - DNA, 33 bp, Homo sapien
ataagtacacagaagctatttttgggatgaaaa

SEQ ID NO: 757917 - DNA, 33 bp, Homo sapien
ttattctttgtcagaactgatttggtagatgca

SEQ ID NO: 757918 - DNA, 33 bp, Homo sapien
ttattctttgtcagaattgatttggtagatgca

SEQ ID NO: 757919 - DNA, 33 bp, Homo sapien
ctcacagctttgaagacgtgcctctattcacat

SEQ ID NO: 757920 - DNA, 33 bp, Homo sapien
ctcacagctttgaagatgtgcctctattcacat

SEQ ID NO: 757921 - DNA, 33 bp, Homo sapien
attgaggccaaaattcaagtttcaagataggtc

SEQ ID NO: 757922 - DNA, 33 bp, Homo sapien
attgaggccaaaattcgagtttcaagataggtc

SEQ ID NO: 757923 - DNA, 33 bp, Homo sapien
ccctctgacacctagaaataatgtatgctgaaa

SEQ ID NO: 757924 - DNA, 33 bp, Homo sapien
ccctctgacacctagacataatgtatgctgaaa

SEQ ID NO: 757925 - DNA, 33 bp, Homo sapien
actatctgaaactaaagaaaattgtgtggagtt

SEQ ID NO: 757926 - DNA, 33 bp, Homo sapien
actatctgaaactaaataaaattgtgtggagtt

SEQ ID NO: 757927 - DNA, 33 bp, Homo sapien
ctcttcactccttgggaagctgaattcagagca

SEQ ID NO: 757928 - DNA, 33 bp, Homo sapien
ctcttcactccttgggtagctgaattcagagca

SEQ ID NO: 757929 - DNA, 33 bp, Homo sapien
ggctaaactagtggagaaataatatctcaaaat

SEQ ID NO: 757930 - DNA, 33 bp, Homo sapien
ggctaaactagtggagtaataatatctcaaaat

SEQ ID NO: 757931 - DNA, 33 bp, Homo sapien
attgtagaaattggctaaaaatacctcggagat

SEQ ID NO: 757932 - DNA, 33 bp, Homo sapien
attgtagaaattggctgaaaatacctcggagat

SEQ ID NO: 757933 - DNA, 33 bp, Homo sapien
aaacccttgcaataaaaatgttgtatgttcagg

SEQ ID NO: 757934 - DNA, 33 bp, Homo sapien
aaacccttgcaataaatatgttgtatgttcagg

SEQ ID NO: 757935 - DNA, 33 bp, Homo sapien
gatcatagaacatttacgtatggttgtcagcta

SEQ ID NO: 757936 - DNA, 33 bp, Homo sapien
gatcatagaacatttatgtatggttgtcagcta

SEQ ID NO: 757937 - DNA, 33 bp, Homo sapien
tctttatcacaggaccaacaattgtgaatggcc

SEQ ID NO: 757938 - DNA, 33 bp, Homo sapien
tctttatcacaggaccgacaattgtgaatggcc

SEQ ID NO: 757939 - DNA, 33 bp, Homo sapien
caaatcctactgtaaccaatctaatctacattg

SEQ ID NO: 757940 - DNA, 33 bp, Homo sapien
caaatcctactgtaactaatctaatctacattg

SEQ ID NO: 757941 - DNA, 33 bp, Homo sapien
aagaagggcgtttaacaaagaactgtgactata

SEQ ID NO: 757942 - DNA, 33 bp, Homo sapien
aagaagggcgtttaaccaagaactgtgactata

SEQ ID NO: 757943 - DNA, 33 bp, Homo sapien
tactgtgtttgtagagcctcccaaaggtgcaaa

SEQ ID NO: 757944 - DNA, 33 bp, Homo sapien
tactgtgtttgtagaggctcccaaaggtgcaaa

SEQ ID NO: 757945 - DNA, 33 bp, Homo sapien
tgtttttaagtgttggcaacattttgttatgtg

SEQ ID NO: 757946 - DNA, 33 bp, Homo sapien
tgtttttaagtgttgggaacattttgttatgtg

SEQ ID NO: 757947 - DNA, 33 bp, Homo sapien
ttgggcttgagatgaacgttgacaggacagaaa

SEQ ID NO: 757948 - DNA, 33 bp, Homo sapien
ttgggcttgagatgaatgttgacaggacagaaa

SEQ ID NO: 757949 - DNA, 33 bp, Homo sapien
cccaatagtaatgagcacctcttaatgcctaca

SEQ ID NO: 757950 - DNA, 33 bp, Homo sapien
cccaatagtaatgagcgcctcttaatgcctaca

SEQ ID NO: 757951 - DNA, 33 bp, Homo sapien
aactatttttaaaaagacacatgcagagaactc

SEQ ID NO: 757952 - DNA, 33 bp, Homo sapien
aactatttttaaaaagtcacatgcagagaactc

SEQ ID NO: 757953 - DNA, 33 bp, Homo sapien
ttcatttgtctagataagatggctcaagttgca

SEQ ID NO: 757954 - DNA, 33 bp, Homo sapien
ttcatttgtctagatatgatggctcaagttgca

SEQ ID NO: 757955 - DNA, 33 bp, Homo sapien
gggccactgagctccaacctgagtgaaaaagca

SEQ ID NO: 757956 - DNA, 33 bp, Homo sapien
gggccactgagctccagcctgagtgaaaaagca

SEQ ID NO: 757957 - DNA, 33 bp, Homo sapien
aaattacagctcttacccatgaatggtgccttt

SEQ ID NO: 757958 - DNA, 33 bp, Homo sapien
aaattacagctcttactcatgaatggtgccttt

SEQ ID NO: 757959 - DNA, 33 bp, Homo sapien
atttgagaaagagaacaacagatatacttgctg

SEQ ID NO: 757960 - DNA, 33 bp, Homo sapien
atttgagaaagagaacgacagatatacttgctg

SEQ ID NO: 757961 - DNA, 33 bp, Homo sapien
agacttatttctgtagcacaaatacccgggaac

SEQ ID NO: 757962 - DNA, 33 bp, Homo sapien
agacttatttctgtagtacaaatacccgggaac

SEQ ID NO: 757963 - DNA, 33 bp, Homo sapien
aaggcctccagaccaacgtcattccagattctg

SEQ ID NO: 757964 - DNA, 33 bp, Homo sapien
aaggcctccagaccaatgtcattccagattctg

SEQ ID NO: 757965 - DNA, 33 bp, Homo sapien
tccatttcactggataaaggaggattctctgga

SEQ ID NO: 757966 - DNA, 33 bp, Homo sapien
tccatttcactggatagaggaggattctctgga

SEQ ID NO: 757967 - DNA, 33 bp, Homo sapien
gattctgcacaaacacagcatatttagaaatga

SEQ ID NO: 757968 - DNA, 33 bp, Homo sapien
gattctgcacaaacacggcatatttagaaatga

SEQ ID NO: 757969 - DNA, 33 bp, Homo sapien
cacatctccagataaaccagacttctacttttt

SEQ ID NO: 757970 - DNA, 33 bp, Homo sapien
cacatctccagataaatcagacttctacttttt

SEQ ID NO: 757971 - DNA, 33 bp, Homo sapien
ctgaagactctcccaccggctcacaggtccctc

SEQ ID NO: 757972 - DNA, 33 bp, Homo sapien
ctgaagactctcccactggctcacaggtccctc

SEQ ID NO: 757973 - DNA, 33 bp, Homo sapien
taaattgaggaagtcaaaaaataatatgtccat

SEQ ID NO: 757974 - DNA, 33 bp, Homo sapien
taaattgaggaagtcagaaaataatatgtccat

SEQ ID NO: 757975 - DNA, 33 bp, Homo sapien
aaaccaatcaagttgacgcgtaaaactaaccat

SEQ ID NO: 757976 - DNA, 33 bp, Homo sapien
aaaccaatcaagttgatgcgtaaaactaaccat

SEQ ID NO: 757977 - DNA, 33 bp, Homo sapien
aggagtaatgataaaaatacacatttgaatgcc

SEQ ID NO: 757978 - DNA, 33 bp, Homo sapien
aggagtaatgataaaagtacacatttgaatgcc

SEQ ID NO: 757979 - DNA, 33 bp, Homo sapien
tctaggacaagatttacggtgcatactctcaga

SEQ ID NO: 757980 - DNA, 33 bp, Homo sapien
tctaggacaagatttatggtgcatactctcaga

SEQ ID NO: 757981 - DNA, 33 bp, Homo sapien
tcctgtgtaaagctcactcagattgagaaacaa

SEQ ID NO: 757982 - DNA, 33 bp, Homo sapien
tcctgtgtaaagctcattcagattgagaaacaa

SEQ ID NO: 757983 - DNA, 33 bp, Homo sapien
tgcagcaagagagatcaacactatggtaaattg

SEQ ID NO: 757984 - DNA, 33 bp, Homo sapien
tgcagcaagagagatcgacactatggtaaattg

SEQ ID NO: 757985 - DNA, 33 bp, Homo sapien
tatcaggggatcccaagagccataagcccaact

SEQ ID NO: 757986 - DNA, 33 bp, Homo sapien
tatcaggggatcccaatagccataagcccaact

SEQ ID NO: 757987 - DNA, 33 bp, Homo sapien
ccttcacacccctacaactggctgcagctccat

SEQ ID NO: 757988 - DNA, 33 bp, Homo sapien
ccttcacacccctacagctggctgcagctccat

SEQ ID NO: 757989 - DNA, 33 bp, Homo sapien
gggtccacgatcctcacgtcaaaatccagcggc

SEQ ID NO: 757990 - DNA, 33 bp, Homo sapien
gggtccacgatcctcatgtcaaaatccagcggc

SEQ ID NO: 757991 - DNA, 33 bp, Homo sapien
tagtaaatgaaatacacgacaggctttgttagt

SEQ ID NO: 757992 - DNA, 33 bp, Homo sapien
tagtaaatgaaatacatgacaggctttgttagt

SEQ ID NO: 757993 - DNA, 33 bp, Homo sapien
tgcttaagctacccaccgtatggtactttgcta

SEQ ID NO: 757994 - DNA, 33 bp, Homo sapien
tgcttaagctacccactgtatggtactttgcta

SEQ ID NO: 757995 - DNA, 33 bp, Homo sapien
taattgattaactgatcatattgcatttatgga

SEQ ID NO: 757996 - DNA, 33 bp, Homo sapien
taattgattaactgattatattgcatttatgga

SEQ ID NO: 757997 - DNA, 33 bp, Homo sapien
gaattctatgagattaagcactgtgactgtttt

SEQ ID NO: 757998 - DNA, 33 bp, Homo sapien
gaattctatgagattaggcactgtgactgtttt

SEQ ID NO: 757999 - DNA, 33 bp, Homo sapien
aagactctctgctgaactggtgatgcaatggtg

SEQ ID NO: 758000 - DNA, 33 bp, Homo sapien
aagactctctgctgaattggtgatgcaatggtg

SEQ ID NO: 758001 - DNA, 33 bp, Homo sapien
tttctatcttgccatccaatctttgtccacatg

SEQ ID NO: 758002 - DNA, 33 bp, Homo sapien
tttctatcttgccatctaatctttgtccacatg

SEQ ID NO: 758003 - DNA, 33 bp, Homo sapien
ggctctaaagtggaaaattcaccaagttctttt

SEQ ID NO: 758004 - DNA, 33 bp, Homo sapien
ggctctaaagtggaaatttcaccaagttctttt

SEQ ID NO: 758005 - DNA, 33 bp, Homo sapien
ccctgtactcttccggaaagtcaatattacaaa

SEQ ID NO: 758006 - DNA, 33 bp, Homo sapien
ccctgtactcttccgggaagtcaatattacaaa

SEQ ID NO: 758007 - DNA, 33 bp, Homo sapien
taggtagaacaaatcaactaagtatgtttaaag

SEQ ID NO: 758008 - DNA, 33 bp, Homo sapien
taggtagaacaaatcacctaagtatgtttaaag

SEQ ID NO: 758009 - DNA, 33 bp, Homo sapien
tccaaagtattgcagaaatgaagcggagaggcc

SEQ ID NO: 758010 - DNA, 33 bp, Homo sapien
tccaaagtattgcagagatgaagcggagaggcc

SEQ ID NO: 758011 - DNA, 33 bp, Homo sapien
ctcgtggagctgagtcgcaaacaggggtgatag

SEQ ID NO: 758012 - DNA, 33 bp, Homo sapien
ctcgtggagctgagtctcaaacaggggtgatag

SEQ ID NO: 758013 - DNA, 33 bp, Homo sapien
tactgaatgaccaagcaagctaatgctatttcc

SEQ ID NO: 758014 - DNA, 33 bp, Homo sapien
tactgaatgaccaagcgagctaatgctatttcc

SEQ ID NO: 758015 - DNA, 33 bp, Homo sapien
gtaatcaacctgggtaaaacacttgaatttcaa

SEQ ID NO: 758016 - DNA, 33 bp, Homo sapien
gtaatcaacctgggtataacacttgaatttcaa

SEQ ID NO: 758017 - DNA, 33 bp, Homo sapien
taatctgctgaagcccaggatgacatacctgag

SEQ ID NO: 758018 - DNA, 33 bp, Homo sapien
taatctgctgaagcccgggatgacatacctgag

SEQ ID NO: 758019 - DNA, 33 bp, Homo sapien
agtcctttgacctaagcatagtatccggttctt

SEQ ID NO: 758020 - DNA, 33 bp, Homo sapien
agtcctttgacctaagtatagtatccggttctt

SEQ ID NO: 758021 - DNA, 33 bp, Homo sapien
ttatggtgaaaaaatacgtaggaaaagagtggg

SEQ ID NO: 758022 - DNA, 33 bp, Homo sapien
ttatggtgaaaaaatatgtaggaaaagagtggg

SEQ ID NO: 758023 - DNA, 33 bp, Homo sapien
accctgtcctagaggacgttcttacacaaagca

SEQ ID NO: 758024 - DNA, 33 bp, Homo sapien
accctgtcctagaggaggttcttacacaaagca

SEQ ID NO: 758025 - DNA, 33 bp, Homo sapien
tctctgaaaaatcttcaaagagactttggggag

SEQ ID NO: 758026 - DNA, 33 bp, Homo sapien
tctctgaaaaatcttccaagagactttggggag

SEQ ID NO: 758027 - DNA, 33 bp, Homo sapien
ttggaatgacttttaccgacttgtatactgttt

SEQ ID NO: 758028 - DNA, 33 bp, Homo sapien
ttggaatgacttttactgacttgtatactgttt

SEQ ID NO: 758029 - DNA, 33 bp, Homo sapien
ttgccaacctctggaacagataaccacagggaa

SEQ ID NO: 758030 - DNA, 33 bp, Homo sapien
ttgccaacctctggaatagataaccacagggaa

SEQ ID NO: 758031 - DNA, 33 bp, Homo sapien
gattctaaggttggcaaataggtataacataca

SEQ ID NO: 758032 - DNA, 33 bp, Homo sapien
gattctaaggttggcatataggtataacataca

SEQ ID NO: 758033 - DNA, 33 bp, Homo sapien
cccgagttaaatctcaatagaggtggtgaagga

SEQ ID NO: 758034 - DNA, 33 bp, Homo sapien
cccgagttaaatctcagtagaggtggtgaagga

SEQ ID NO: 758035 - DNA, 33 bp, Homo sapien
agtaaggactcaaaaactctatcacctcttcat

SEQ ID NO: 758036 - DNA, 33 bp, Homo sapien
agtaaggactcaaaaattctatcacctcttcat

SEQ ID NO: 758037 - DNA, 33 bp, Homo sapien
agagtaaaataaagtcaaaacacttctttccat

SEQ ID NO: 758038 - DNA, 33 bp, Homo sapien
agagtaaaataaagtcgaaacacttctttccat

SEQ ID NO: 758039 - DNA, 33 bp, Homo sapien
gctagaatctgtatcacgaaggaaacatactta

SEQ ID NO: 758040 - DNA, 33 bp, Homo sapien
gctagaatctgtatcatgaaggaaacatactta

SEQ ID NO: 758041 - DNA, 33 bp, Homo sapien
atgtctctgcacaagcaccaggcaacaaagagt

SEQ ID NO: 758042 - DNA, 33 bp, Homo sapien
atgtctctgcacaagcgccaggcaacaaagagt

SEQ ID NO: 758043 - DNA, 33 bp, Homo sapien
aaaggacaatttgctacgtaaagaataaggtca

SEQ ID NO: 758044 - DNA, 33 bp, Homo sapien
aaaggacaatttgctatgtaaagaataaggtca

SEQ ID NO: 758045 - DNA, 33 bp, Homo sapien
cacattgcagacagaaaaacggtaaaaacacaa

SEQ ID NO: 758046 - DNA, 33 bp, Homo sapien
cacattgcagacagaataacggtaaaaacacaa

SEQ ID NO: 758047 - DNA, 33 bp, Homo sapien
aaaaaagctaaatgtacgctctctaacctctcc

SEQ ID NO: 758048 - DNA, 33 bp, Homo sapien
aaaaaagctaaatgtatgctctctaacctctcc

SEQ ID NO: 758049 - DNA, 33 bp, Homo sapien
aaagtgaacatgaagaaataaacagaggtgatt

SEQ ID NO: 758050 - DNA, 33 bp, Homo sapien
aaagtgaacatgaagagataaacagaggtgatt

SEQ ID NO: 758051 - DNA, 33 bp, Homo sapien
aggatattctcatcaacgacgatgccctgtatg

SEQ ID NO: 758052 - DNA, 33 bp, Homo sapien
aggatattctcatcaatgacgatgccctgtatg

SEQ ID NO: 758053 - DNA, 33 bp, Homo sapien
cactctacagccagaacgagctttctaaagggc

SEQ ID NO: 758054 - DNA, 33 bp, Homo sapien
cactctacagccagaatgagctttctaaagggc

SEQ ID NO: 758055 - DNA, 33 bp, Homo sapien
agagtagccatttctaagccaaaaaaaaatctc

SEQ ID NO: 758056 - DNA, 33 bp, Homo sapien
agagtagccatttctacgccaaaaaaaaatctc

SEQ ID NO: 758057 - DNA, 33 bp, Homo sapien
ggtataatacaacccaaaaatgagagtgtgtat

SEQ ID NO: 758058 - DNA, 33 bp, Homo sapien
ggtataatacaacccagaaatgagagtgtgtat

SEQ ID NO: 758059 - DNA, 33 bp, Homo sapien
tgctttgataggccaacgttgggggattacttg

SEQ ID NO: 758060 - DNA, 33 bp, Homo sapien
tgctttgataggccaatgttgggggattacttg

SEQ ID NO: 758061 - DNA, 33 bp, Homo sapien
accacttgcagacaaactatcactcttacctca

SEQ ID NO: 758062 - DNA, 33 bp, Homo sapien
accacttgcagacaaattatcactcttacctca

SEQ ID NO: 758063 - DNA, 33 bp, Homo sapien
ggaaataatgtgtaaactctacaagtgtgtgat

SEQ ID NO: 758064 - DNA, 33 bp, Homo sapien
ggaaataatgtgtaaattctacaagtgtgtgat

SEQ ID NO: 758065 - DNA, 33 bp, Homo sapien
aaacgagattgagatacgtaaatgagttccctg

SEQ ID NO: 758066 - DNA, 33 bp, Homo sapien
aaacgagattgagatatgtaaatgagttccctg

SEQ ID NO: 758067 - DNA, 33 bp, Homo sapien
accaaatctatcaccaacattcatcgtaactat

SEQ ID NO: 758068 - DNA, 33 bp, Homo sapien
accaaatctatcaccagcattcatcgtaactat

SEQ ID NO: 758069 - DNA, 33 bp, Homo sapien
gataacacattctttagcaaccttgtctttggt

SEQ ID NO: 758070 - DNA, 33 bp, Homo sapien
gataacacattctttatcaaccttgtctttggt

SEQ ID NO: 758071 - DNA, 33 bp, Homo sapien
cctcccgcaatctccaaatctcataaccctctt

SEQ ID NO: 758072 - DNA, 33 bp, Homo sapien
cctcccgcaatctccacatctcataaccctctt

SEQ ID NO: 758073 - DNA, 33 bp, Homo sapien
caggccaagtgtataacgagggcaagggccctg

SEQ ID NO: 758074 - DNA, 33 bp, Homo sapien
caggccaagtgtataatgagggcaagggccctg

SEQ ID NO: 758075 - DNA, 33 bp, Homo sapien
accaaaatctgcccccaattgtagaaaccttat

SEQ ID NO: 758076 - DNA, 33 bp, Homo sapien
accaaaatctgcccccgattgtagaaaccttat

SEQ ID NO: 758077 - DNA, 33 bp, Homo sapien
caaaggccaggtgcatcacattacggaattcag

SEQ ID NO: 758078 - DNA, 33 bp, Homo sapien
caaaggccaggtgcattacattacggaattcag

SEQ ID NO: 758079 - DNA, 33 bp, Homo sapien
acagcacaagttcatgaaaggttagcgtattcc

SEQ ID NO: 758080 - DNA, 33 bp, Homo sapien
acagcacaagttcatggaaggttagcgtattcc

SEQ ID NO: 758081 - DNA, 33 bp, Homo sapien
cgtattcccagtgttaagcatgacatctggaac

SEQ ID NO: 758082 - DNA, 33 bp, Homo sapien
cgtattcccagtgttacgcatgacatctggaac

SEQ ID NO: 758083 - DNA, 33 bp, Homo sapien
ctaatacaaatgataaaggaagagcaaaaatta

SEQ ID NO: 758084 - DNA, 33 bp, Homo sapien
ctaatacaaatgataagggaagagcaaaaatta

SEQ ID NO: 758085 - DNA, 33 bp, Homo sapien
ccactaaaacacttgccgaggaactgtctactg

SEQ ID NO: 758086 - DNA, 33 bp, Homo sapien
ccactaaaacacttgctgaggaactgtctactg

SEQ ID NO: 758087 - DNA, 33 bp, Homo sapien
ggacaaaaagggctaacaagctcagagggtaaa

SEQ ID NO: 758088 - DNA, 33 bp, Homo sapien
ggacaaaaagggctaataagctcagagggtaaa

SEQ ID NO: 758089 - DNA, 33 bp, Homo sapien
ttgtgaattccaagagccataaagtttttttgt

SEQ ID NO: 758090 - DNA, 33 bp, Homo sapien
ttgtgaattccaagagtcataaagtttttttgt

SEQ ID NO: 758091 - DNA, 33 bp, Homo sapien
atctggactggttaaaactctagcctcagctgg

SEQ ID NO: 758092 - DNA, 33 bp, Homo sapien
atctggactggttaaagctctagcctcagctgg

SEQ ID NO: 758093 - DNA, 33 bp, Homo sapien
atatccaagcaatatacgcctaatgtcacacac

SEQ ID NO: 758094 - DNA, 33 bp, Homo sapien
atatccaagcaatatatgcctaatgtcacacac

SEQ ID NO: 758095 - DNA, 33 bp, Homo sapien
tacccaaacggccaccgaattttgtgcttgaaa

SEQ ID NO: 758096 - DNA, 33 bp, Homo sapien
tacccaaacggccacctaattttgtgcttgaaa

SEQ ID NO: 758097 - DNA, 33 bp, Homo sapien
cctttgaagaataacaacattaacagtgacaac

SEQ ID NO: 758098 - DNA, 33 bp, Homo sapien
cctttgaagaataacagcattaacagtgacaac

SEQ ID NO: 758099 - DNA, 33 bp, Homo sapien
tggtaattgtgcagaaagtggataccattgaga

SEQ ID NO: 758100 - DNA, 33 bp, Homo sapien
tggtaattgtgcagaatgtggataccattgaga

SEQ ID NO: 758101 - DNA, 33 bp, Homo sapien
atgctttcctctttgacaggcagccaagttctc

SEQ ID NO: 758102 - DNA, 33 bp, Homo sapien
atgctttcctctttgataggcagccaagttctc

SEQ ID NO: 758103 - DNA, 33 bp, Homo sapien
gtatgttgatcatgtagaaatcattttgatgcg

SEQ ID NO: 758104 - DNA, 33 bp, Homo sapien
gtatgttgatcatgtataaatcattttgatgcg

SEQ ID NO: 758105 - DNA, 33 bp, Homo sapien
tttcccttctccagcacattataattgcctgga

SEQ ID NO: 758106 - DNA, 33 bp, Homo sapien
tttcccttctccagcatattataattgcctgga

SEQ ID NO: 758107 - DNA, 33 bp, Homo sapien
catgagaactcactaccgagagaacagcatggg

SEQ ID NO: 758108 - DNA, 33 bp, Homo sapien
catgagaactcactactgagagaacagcatggg

SEQ ID NO: 758109 - DNA, 33 bp, Homo sapien
gtattcactcatccccaaaaacgcacacagaga

SEQ ID NO: 758110 - DNA, 33 bp, Homo sapien
gtattcactcatccccgaaaacgcacacagaga

SEQ ID NO: 758111 - DNA, 33 bp, Homo sapien
cttatttcacgtgatcaataagaggttccaata

SEQ ID NO: 758112 - DNA, 33 bp, Homo sapien
cttatttcacgtgatcgataagaggttccaata

SEQ ID NO: 758113 - DNA, 33 bp, Homo sapien
tcacctttatgcctgacggaagttattcggaag

SEQ ID NO: 758114 - DNA, 33 bp, Homo sapien
tcacctttatgcctgatggaagttattcggaag

SEQ ID NO: 758115 - DNA, 33 bp, Homo sapien
ccagacattccagttacagtgtgatgaaaagat

SEQ ID NO: 758116 - DNA, 33 bp, Homo sapien
ccagacattccagttatagtgtgatgaaaagat

SEQ ID NO: 758117 - DNA, 33 bp, Homo sapien
gaatcaggaaaggaagccaatcagctatggact

SEQ ID NO: 758118 - DNA, 33 bp, Homo sapien
gaatcaggaaaggaagtcaatcagctatggact

SEQ ID NO: 758119 - DNA, 33 bp, Homo sapien
aaacgttgagctggaccaaacaatcaaaataac

SEQ ID NO: 758120 - DNA, 33 bp, Homo sapien
aaacgttgagctggactaaacaatcaaaataac

SEQ ID NO: 758121 - DNA, 33 bp, Homo sapien
tcatcaacttctaacaaaacctggcttaaaagg

SEQ ID NO: 758122 - DNA, 33 bp, Homo sapien
tcatcaacttctaacacaacctggcttaaaagg

SEQ ID NO: 758123 - DNA, 33 bp, Homo sapien
aagaatgtactttcagcagatgaggatatttct

SEQ ID NO: 758124 - DNA, 33 bp, Homo sapien
aagaatgtactttcaggagatgaggatatttct

SEQ ID NO: 758125 - DNA, 33 bp, Homo sapien
ggctggaaaagctacactggcccccaaggacct

SEQ ID NO: 758126 - DNA, 33 bp, Homo sapien
ggctggaaaagctacagtggcccccaaggacct

SEQ ID NO: 758127 - DNA, 33 bp, Homo sapien
gagagtgaagtcaaaaatacctgctgccattga

SEQ ID NO: 758128 - DNA, 33 bp, Homo sapien
gagagtgaagtcaaaattacctgctgccattga

SEQ ID NO: 758129 - DNA, 33 bp, Homo sapien
tcttccagaaacgagacagatacaaaaggaact

SEQ ID NO: 758130 - DNA, 33 bp, Homo sapien
tcttccagaaacgagatagatacaaaaggaact

SEQ ID NO: 758131 - DNA, 33 bp, Homo sapien
ttgggcagtcaattcaataaaacctttcaatga

SEQ ID NO: 758132 - DNA, 33 bp, Homo sapien
ttgggcagtcaattcagtaaaacctttcaatga

SEQ ID NO: 758133 - DNA, 33 bp, Homo sapien
cagctatggagacatcacatcctgacagcctac

SEQ ID NO: 758134 - DNA, 33 bp, Homo sapien
cagctatggagacatcgcatcctgacagcctac

SEQ ID NO: 758135 - DNA, 33 bp, Homo sapien
aatggcttaaacttgcaattaaaggaaagagag

SEQ ID NO: 758136 - DNA, 33 bp, Homo sapien
aatggcttaaacttgcgattaaaggaaagagag

SEQ ID NO: 758137 - DNA, 33 bp, Homo sapien
ggctctttgccttacaatcaattttgtgaatta

SEQ ID NO: 758138 - DNA, 33 bp, Homo sapien
ggctctttgccttacagtcaattttgtgaatta

SEQ ID NO: 758139 - DNA, 33 bp, Homo sapien
tcatcccagtgaggtgcaaatgtctatctttct

SEQ ID NO: 758140 - DNA, 33 bp, Homo sapien
tcatcccagtgaggtggaaatgtctatctttct

SEQ ID NO: 758141 - DNA, 33 bp, Homo sapien
tgttttatgtgcttaaaatcattttattggaaa

SEQ ID NO: 758142 - DNA, 33 bp, Homo sapien
tgttttatgtgcttaacatcattttattggaaa

SEQ ID NO: 758143 - DNA, 33 bp, Homo sapien
cactccagtcaataaacaaggtcttcaacccaa

SEQ ID NO: 758144 - DNA, 33 bp, Homo sapien
cactccagtcaataaataaggtcttcaacccaa

SEQ ID NO: 758145 - DNA, 33 bp, Homo sapien
agaatgaattggaagccgaacgtctaccagtgt

SEQ ID NO: 758146 - DNA, 33 bp, Homo sapien
agaatgaattggaagctgaacgtctaccagtgt

SEQ ID NO: 758147 - DNA, 33 bp, Homo sapien
gttagagaccaaaggcactgctaaaacctcaca

SEQ ID NO: 758148 - DNA, 33 bp, Homo sapien
gttagagaccaaaggcgctgctaaaacctcaca

SEQ ID NO: 758149 - DNA, 33 bp, Homo sapien
ccacctgctggttgaaagagctgttgatgtgta

SEQ ID NO: 758150 - DNA, 33 bp, Homo sapien
ccacctgctggttgaacgagctgttgatgtgta

SEQ ID NO: 758151 - DNA, 33 bp, Homo sapien
ttttacttaaatatcacaggagaaagaaacttc

SEQ ID NO: 758152 - DNA, 33 bp, Homo sapien
ttttacttaaatatcagaggagaaagaaacttc

SEQ ID NO: 758153 - DNA, 33 bp, Homo sapien
cctagtgtcatatagacgaaatgccacaatgtt

SEQ ID NO: 758154 - DNA, 33 bp, Homo sapien
cctagtgtcatatagatgaaatgccacaatgtt

SEQ ID NO: 758155 - DNA, 33 bp, Homo sapien
ttaaaaagcaatttcaatattcccaggatacct

SEQ ID NO: 758156 - DNA, 33 bp, Homo sapien
ttaaaaagcaatttcagtattcccaggatacct

SEQ ID NO: 758157 - DNA, 33 bp, Homo sapien
agtgactgtctcaaaactaatctatccatctga

SEQ ID NO: 758158 - DNA, 33 bp, Homo sapien
agtgactgtctcaaaagtaatctatccatctga

SEQ ID NO: 758159 - DNA, 33 bp, Homo sapien
tgttttgtttcacttaaattttgatgtccagga

SEQ ID NO: 758160 - DNA, 33 bp, Homo sapien
tgttttgtttcacttacattttgatgtccagga

SEQ ID NO: 758161 - DNA, 33 bp, Homo sapien
accagtccacactggcactaaaataccactgat

SEQ ID NO: 758162 - DNA, 33 bp, Homo sapien
accagtccacactggcgctaaaataccactgat

SEQ ID NO: 758163 - DNA, 33 bp, Homo sapien
attacccaaccattaaccatcaacatcatctgc

SEQ ID NO: 758164 - DNA, 33 bp, Homo sapien
attacccaaccattaatcatcaacatcatctgc

SEQ ID NO: 758165 - DNA, 33 bp, Homo sapien
tataagacatcgaaggaaagtgctgacagggta

SEQ ID NO: 758166 - DNA, 33 bp, Homo sapien
tataagacatcgaagggaagtgctgacagggta

SEQ ID NO: 758167 - DNA, 33 bp, Homo sapien
tgaatgggacagtgaccagcagagatggaatga

SEQ ID NO: 758168 - DNA, 33 bp, Homo sapien
tgaatgggacagtgactagcagagatggaatga

SEQ ID NO: 758169 - DNA, 33 bp, Homo sapien
tcatgagtacatcaaacgttatcaattatttac

SEQ ID NO: 758170 - DNA, 33 bp, Homo sapien
tcatgagtacatcaaaggttatcaattatttac

SEQ ID NO: 758171 - DNA, 33 bp, Homo sapien
tggtaagttgctgttagcttcttgcaagtttaa

SEQ ID NO: 758172 - DNA, 33 bp, Homo sapien
tggtaagttgctgttatcttcttgcaagtttaa

SEQ ID NO: 758173 - DNA, 33 bp, Homo sapien
agctcccatgcagctcaaaagctagtctcactc

SEQ ID NO: 758174 - DNA, 33 bp, Homo sapien
agctcccatgcagctcgaaagctagtctcactc

SEQ ID NO: 758175 - DNA, 33 bp, Homo sapien
gtgcccactcagccagacatggtacccagatat

SEQ ID NO: 758176 - DNA, 33 bp, Homo sapien
gtgcccactcagccaggcatggtacccagatat

SEQ ID NO: 758177 - DNA, 33 bp, Homo sapien
aatttcaattccccccaccatacacgcttgagg

SEQ ID NO: 758178 - DNA, 33 bp, Homo sapien
aatttcaattccccccgccatacacgcttgagg

SEQ ID NO: 758179 - DNA, 33 bp, Homo sapien
ctataggaagaaagaaaggagaaggtaaggagc

SEQ ID NO: 758180 - DNA, 33 bp, Homo sapien
ctataggaagaaagaagggagaaggtaaggagc

SEQ ID NO: 758181 - DNA, 33 bp, Homo sapien
tggaggcatgaccaaactctggatgacatcatt

SEQ ID NO: 758182 - DNA, 33 bp, Homo sapien
tggaggcatgaccaaattctggatgacatcatt

SEQ ID NO: 758183 - DNA, 33 bp, Homo sapien
ttgcctcttggctcaaccactcagacaattttc

SEQ ID NO: 758184 - DNA, 33 bp, Homo sapien
ttgcctcttggctcaatcactcagacaattttc

SEQ ID NO: 758185 - DNA, 33 bp, Homo sapien
tactgccatcaaagagacaggttctagcttagc

SEQ ID NO: 758186 - DNA, 33 bp, Homo sapien
tactgccatcaaagagtcaggttctagcttagc

SEQ ID NO: 758187 - DNA, 33 bp, Homo sapien
ttcaggtggactaagacggctgccctgcttagt

SEQ ID NO: 758188 - DNA, 33 bp, Homo sapien
ttcaggtggactaagatggctgccctgcttagt

SEQ ID NO: 758189 - DNA, 33 bp, Homo sapien
tcatgaaaagatcatacggttaatatgtaagtg

SEQ ID NO: 758190 - DNA, 33 bp, Homo sapien
tcatgaaaagatcatatggttaatatgtaagtg

SEQ ID NO: 758191 - DNA, 33 bp, Homo sapien
gattcttgtttgctgaaactcatgtgtgatgga

SEQ ID NO: 758192 - DNA, 33 bp, Homo sapien
gattcttgtttgctgacactcatgtgtgatgga

SEQ ID NO: 758193 - DNA, 33 bp, Homo sapien
aatttattctaaacatcatcttatgaggaaagt

SEQ ID NO: 758194 - DNA, 33 bp, Homo sapien
aatttattctaaacattatcttatgaggaaagt

SEQ ID NO: 758195 - DNA, 33 bp, Homo sapien
acgatgggccaagagaaggagagacaagttagg

SEQ ID NO: 758196 - DNA, 33 bp, Homo sapien
acgatgggccaagagagggagagacaagttagg

SEQ ID NO: 758197 - DNA, 33 bp, Homo sapien
aattatgccctctccaagtttgtacattgaatt

SEQ ID NO: 758198 - DNA, 33 bp, Homo sapien
aattatgccctctccaggtttgtacattgaatt

SEQ ID NO: 758199 - DNA, 33 bp, Homo sapien
ttaattgtgtaatgaacgttaggagagctccag

SEQ ID NO: 758200 - DNA, 33 bp, Homo sapien
ttaattgtgtaatgaatgttaggagagctccag

SEQ ID NO: 758201 - DNA, 33 bp, Homo sapien
gaactggtggaatgaacgctttctttttctgtt

SEQ ID NO: 758202 - DNA, 33 bp, Homo sapien
gaactggtggaatgaatgctttctttttctgtt

SEQ ID NO: 758203 - DNA, 33 bp, Homo sapien
acaggacaaactgatccatgtcctgtctcgaag

SEQ ID NO: 758204 - DNA, 33 bp, Homo sapien
acaggacaaactgatctatgtcctgtctcgaag

SEQ ID NO: 758205 - DNA, 33 bp, Homo sapien
tgtttatgaataaaaaccgacggcttcaactca

SEQ ID NO: 758206 - DNA, 33 bp, Homo sapien
tgtttatgaataaaaatcgacggcttcaactca

SEQ ID NO: 758207 - DNA, 33 bp, Homo sapien
caatcaaacaatgccaaacactatattagggaa

SEQ ID NO: 758208 - DNA, 33 bp, Homo sapien
caatcaaacaatgccagacactatattagggaa

SEQ ID NO: 758209 - DNA, 33 bp, Homo sapien
aaatacctgttacccaagagcacctactgacac

SEQ ID NO: 758210 - DNA, 33 bp, Homo sapien
aaatacctgttacccaggagcacctactgacac

SEQ ID NO: 758211 - DNA, 33 bp, Homo sapien
ttgagcagtcatgccaagaacctccaacagctc

SEQ ID NO: 758212 - DNA, 33 bp, Homo sapien
ttgagcagtcatgccaggaacctccaacagctc

SEQ ID NO: 758213 - DNA, 33 bp, Homo sapien
aatgagccaccttcacaagttagacggctcatg

SEQ ID NO: 758214 - DNA, 33 bp, Homo sapien
aatgagccaccttcaccagttagacggctcatg

SEQ ID NO: 758215 - DNA, 33 bp, Homo sapien
cctgagtgcagagacaagagacagatctctgtt

SEQ ID NO: 758216 - DNA, 33 bp, Homo sapien
cctgagtgcagagacatgagacagatctctgtt

SEQ ID NO: 758217 - DNA, 33 bp, Homo sapien
agaaaaagtggatgtcacataaaataataaaat

SEQ ID NO: 758218 - DNA, 33 bp, Homo sapien
agaaaaagtggatgtcgcataaaataataaaat

SEQ ID NO: 758219 - DNA, 33 bp, Homo sapien
taggcaagtaatagaaagcactaactatggtga

SEQ ID NO: 758220 - DNA, 33 bp, Homo sapien
taggcaagtaatagaaggcactaactatggtga

SEQ ID NO: 758221 - DNA, 33 bp, Homo sapien
caaaggggtctgtgtaactataggccagtgaac

SEQ ID NO: 758222 - DNA, 33 bp, Homo sapien
caaaggggtctgtgtagctataggccagtgaac

SEQ ID NO: 758223 - DNA, 33 bp, Homo sapien
cattgttatcacaggaaaggacagctctgtgca

SEQ ID NO: 758224 - DNA, 33 bp, Homo sapien
cattgttatcacaggagaggacagctctgtgca

SEQ ID NO: 758225 - DNA, 33 bp, Homo sapien
ttttggacagctgtacaatctgcttaaagctaa

SEQ ID NO: 758226 - DNA, 33 bp, Homo sapien
ttttggacagctgtacgatctgcttaaagctaa

SEQ ID NO: 758227 - DNA, 33 bp, Homo sapien
tggacgataatacataaatgagtggatatggcg

SEQ ID NO: 758228 - DNA, 33 bp, Homo sapien
tggacgataatacatagatgagtggatatggcg

SEQ ID NO: 758229 - DNA, 33 bp, Homo sapien
tattactagtgtttcaatctttttttcatgatg

SEQ ID NO: 758230 - DNA, 33 bp, Homo sapien
tattactagtgtttcagtctttttttcatgatg

SEQ ID NO: 758231 - DNA, 33 bp, Homo sapien
tttgtaagttatcaagaatcagggtgatttccc

SEQ ID NO: 758232 - DNA, 33 bp, Homo sapien
tttgtaagttatcaagtatcagggtgatttccc

SEQ ID NO: 758233 - DNA, 33 bp, Homo sapien
attgagatgagctgaaagtgtaaaatgcactcc

SEQ ID NO: 758234 - DNA, 33 bp, Homo sapien
attgagatgagctgaatgtgtaaaatgcactcc

SEQ ID NO: 758235 - DNA, 33 bp, Homo sapien
acactctatgcctgtccgaaaataaaacccttt

SEQ ID NO: 758236 - DNA, 33 bp, Homo sapien
acactctatgcctgtctgaaaataaaacccttt

SEQ ID NO: 758237 - DNA, 33 bp, Homo sapien
gatttctcctaaggtacctgaaagcaaacataa

SEQ ID NO: 758238 - DNA, 33 bp, Homo sapien
gatttctcctaaggtagctgaaagcaaacataa

SEQ ID NO: 758239 - DNA, 33 bp, Homo sapien
acttcctactggaaaaccctatcctccttaaag

SEQ ID NO: 758240 - DNA, 33 bp, Homo sapien
acttcctactggaaaatcctatcctccttaaag

SEQ ID NO: 758241 - DNA, 33 bp, Homo sapien
caaatgacatggtaaacaaaacaaaacaagaca

SEQ ID NO: 758242 - DNA, 33 bp, Homo sapien
caaatgacatggtaaataaaacaaaacaagaca

SEQ ID NO: 758243 - DNA, 33 bp, Homo sapien
ttgtctcaaagcaaaagcagatggttcacagtc

SEQ ID NO: 758244 - DNA, 33 bp, Homo sapien
ttgtctcaaagcaaaatcagatggttcacagtc

SEQ ID NO: 758245 - DNA, 33 bp, Homo sapien
aattcatagaatgagactaaacgctttcatgaa

SEQ ID NO: 758246 - DNA, 33 bp, Homo sapien
aattcatagaatgagattaaacgctttcatgaa

SEQ ID NO: 758247 - DNA, 33 bp, Homo sapien
ttctctcgcattagaccgagaccaactgaccaa

SEQ ID NO: 758248 - DNA, 33 bp, Homo sapien
ttctctcgcattagacggagaccaactgaccaa

SEQ ID NO: 758249 - DNA, 33 bp, Homo sapien
tcagggataacttcccccaggacgcccatgccc

SEQ ID NO: 758250 - DNA, 33 bp, Homo sapien
tcagggataacttccctcaggacgcccatgccc

SEQ ID NO: 758251 - DNA, 33 bp, Homo sapien
tgattccttttgaacacataatagaatgggaag

SEQ ID NO: 758252 - DNA, 33 bp, Homo sapien
tgattccttttgaacagataatagaatgggaag

SEQ ID NO: 758253 - DNA, 33 bp, Homo sapien
gcattggccgggcaacaagttaggcacaagatg

SEQ ID NO: 758254 - DNA, 33 bp, Homo sapien
gcattggccgggcaacgagttaggcacaagatg

SEQ ID NO: 758255 - DNA, 33 bp, Homo sapien
tgtcacgagtctctctaaagggaggctacagaa

SEQ ID NO: 758256 - DNA, 33 bp, Homo sapien
tgtcacgagtctctctgaagggaggctacagaa

SEQ ID NO: 758257 - DNA, 33 bp, Homo sapien
ccgtgctgtttgtgcaagttctcaacctctctc

SEQ ID NO: 758258 - DNA, 33 bp, Homo sapien
ccgtgctgtttgtgcacgttctcaacctctctc

SEQ ID NO: 758259 - DNA, 33 bp, Homo sapien
catgaagaaaatgctcaataaatatttgtgttt

SEQ ID NO: 758260 - DNA, 33 bp, Homo sapien
catgaagaaaatgctcgataaatatttgtgttt

SEQ ID NO: 758261 - DNA, 33 bp, Homo sapien
gagcattttcttcatgcaatgacttgtacaaag

SEQ ID NO: 758262 - DNA, 33 bp, Homo sapien
gagcattttcttcatgtaatgacttgtacaaag

SEQ ID NO: 758263 - DNA, 33 bp, Homo sapien
cacaagcaaagggcacagattgctactggaggt

SEQ ID NO: 758264 - DNA, 33 bp, Homo sapien
cacaagcaaagggcacggattgctactggaggt

SEQ ID NO: 758265 - DNA, 33 bp, Homo sapien
caggtaacgaaggaaacgggtgtgagttattga

SEQ ID NO: 758266 - DNA, 33 bp, Homo sapien
caggtaacgaaggaaatgggtgtgagttattga

SEQ ID NO: 758267 - DNA, 33 bp, Homo sapien
aacagaaactgcctatcaaaagattagatgtca

SEQ ID NO: 758268 - DNA, 33 bp, Homo sapien
aacagaaactgcctatgaaaagattagatgtca

SEQ ID NO: 758269 - DNA, 33 bp, Homo sapien
cggcaggacaaaataaagacaaggatgcagaca

SEQ ID NO: 758270 - DNA, 33 bp, Homo sapien
cggcaggacaaaataaggacaaggatgcagaca

SEQ ID NO: 758271 - DNA, 33 bp, Homo sapien
ggcaggcataagagaaaatactgtgtccctgac

SEQ ID NO: 758272 - DNA, 33 bp, Homo sapien
ggcaggcataagagaagatactgtgtccctgac

SEQ ID NO: 758273 - DNA, 33 bp, Homo sapien
cacagagaattagtaaagctcagggcttcgtaa

SEQ ID NO: 758274 - DNA, 33 bp, Homo sapien
cacagagaattagtaacgctcagggcttcgtaa

SEQ ID NO: 758275 - DNA, 33 bp, Homo sapien
ggctgtggtctcttgaaaaagccactttgatct

SEQ ID NO: 758276 - DNA, 33 bp, Homo sapien
ggctgtggtctcttgagaaagccactttgatct

SEQ ID NO: 758277 - DNA, 33 bp, Homo sapien
gatgatcttcatctacaaacactattcattgca

SEQ ID NO: 758278 - DNA, 33 bp, Homo sapien
gatgatcttcatctacgaacactattcattgca

SEQ ID NO: 758279 - DNA, 33 bp, Homo sapien
ccagccatcatgtccacatttcaggcaggaaga

SEQ ID NO: 758280 - DNA, 33 bp, Homo sapien
ccagccatcatgtccatatttcaggcaggaaga

SEQ ID NO: 758281 - DNA, 33 bp, Homo sapien
ttcattatttattcacggatacagccaactcaa

SEQ ID NO: 758282 - DNA, 33 bp, Homo sapien
ttcattatttattcactgatacagccaactcaa

SEQ ID NO: 758283 - DNA, 33 bp, Homo sapien
tagtgtgaacacccacagtgcgggagtgggtga

SEQ ID NO: 758284 - DNA, 33 bp, Homo sapien
tagtgtgaacacccactgtgcgggagtgggtga

SEQ ID NO: 758285 - DNA, 33 bp, Homo sapien
acattcattaggaaagacgatccagaggaattt

SEQ ID NO: 758286 - DNA, 33 bp, Homo sapien
acattcattaggaaaggcgatccagaggaattt

SEQ ID NO: 758287 - DNA, 33 bp, Homo sapien
tcaattcaagttaaatcatctcacttctaccag

SEQ ID NO: 758288 - DNA, 33 bp, Homo sapien
tcaattcaagttaaatgatctcacttctaccag

SEQ ID NO: 758289 - DNA, 33 bp, Homo sapien
ttgttccatcacaaaaactcaagttgaaagctg

SEQ ID NO: 758290 - DNA, 33 bp, Homo sapien
ttgttccatcacaaaagctcaagttgaaagctg

SEQ ID NO: 758291 - DNA, 33 bp, Homo sapien
tgtagacggcagcttgaagattctttttctctt

SEQ ID NO: 758292 - DNA, 33 bp, Homo sapien
tgtagacggcagcttggagattctttttctctt

SEQ ID NO: 758293 - DNA, 33 bp, Homo sapien
ctgcaacacatcaaaaaccttcacatgacaaga

SEQ ID NO: 758294 - DNA, 33 bp, Homo sapien
ctgcaacacatcaaaagccttcacatgacaaga

SEQ ID NO: 758295 - DNA, 33 bp, Homo sapien
atgttggcatcaaggacggtccagttagcactc

SEQ ID NO: 758296 - DNA, 33 bp, Homo sapien
atgttggcatcaaggatggtccagttagcactc

SEQ ID NO: 758297 - DNA, 33 bp, Homo sapien
atgagagaactgtgaacaaggtgaaaccatgcc

SEQ ID NO: 758298 - DNA, 33 bp, Homo sapien
atgagagaactgtgaagaaggtgaaaccatgcc

SEQ ID NO: 758299 - DNA, 33 bp, Homo sapien
gaagatagaaatgaagaaactagttgtattgca

SEQ ID NO: 758300 - DNA, 33 bp, Homo sapien
gaagatagaaatgaaggaactagttgtattgca

SEQ ID NO: 758301 - DNA, 33 bp, Homo sapien
tggacggggccattcactcctatgttaaaggtc

SEQ ID NO: 758302 - DNA, 33 bp, Homo sapien
tggacggggccattcattcctatgttaaaggtc

SEQ ID NO: 758303 - DNA, 33 bp, Homo sapien
gcacaagtgcagacgacgttataatacattgtg

SEQ ID NO: 758304 - DNA, 33 bp, Homo sapien
gcacaagtgcagacgatgttataatacattgtg

SEQ ID NO: 758305 - DNA, 33 bp, Homo sapien
gtagccgacaacatcaagtccacattttccttt

SEQ ID NO: 758306 - DNA, 33 bp, Homo sapien
gtagccgacaacatcaggtccacattttccttt

SEQ ID NO: 758307 - DNA, 33 bp, Homo sapien
gaaagtgacggtaatacgtggggatggaaagat

SEQ ID NO: 758308 - DNA, 33 bp, Homo sapien
gaaagtgacggtaatatgtggggatggaaagat

SEQ ID NO: 758309 - DNA, 33 bp, Homo sapien
aaaataaatgggctagacccagttctcaaatag

SEQ ID NO: 758310 - DNA, 33 bp, Homo sapien
aaaataaatgggctagtcccagttctcaaatag

SEQ ID NO: 758311 - DNA, 33 bp, Homo sapien
gacttctgagcatagacatcagtaaacatttag

SEQ ID NO: 758312 - DNA, 33 bp, Homo sapien
gacttctgagcatagatatcagtaaacatttag

SEQ ID NO: 758313 - DNA, 33 bp, Homo sapien
ttgccaaatttcagcaacacttgaattcttcac

SEQ ID NO: 758314 - DNA, 33 bp, Homo sapien
ttgccaaatttcagcatcacttgaattcttcac

SEQ ID NO: 758315 - DNA, 33 bp, Homo sapien
agtgatggaaggcaccaataaaaaaagtactgg

SEQ ID NO: 758316 - DNA, 33 bp, Homo sapien
agtgatggaaggcaccgataaaaaaagtactgg

SEQ ID NO: 758317 - DNA, 33 bp, Homo sapien
agattagtagattagccgagaattggtccaaag

SEQ ID NO: 758318 - DNA, 33 bp, Homo sapien
agattagtagattagctgagaattggtccaaag

SEQ ID NO: 758319 - DNA, 33 bp, Homo sapien
atgttcatcaccaaaacgaggttttacatttcc

SEQ ID NO: 758320 - DNA, 33 bp, Homo sapien
atgttcatcaccaaaatgaggttttacatttcc

SEQ ID NO: 758321 - DNA, 33 bp, Homo sapien
gcaaaatgaataaacaatggagatcaatttata

SEQ ID NO: 758322 - DNA, 33 bp, Homo sapien
gcaaaatgaataaacagtggagatcaatttata

SEQ ID NO: 758323 - DNA, 33 bp, Homo sapien
ttaaggatcaaagctaaaatttacaagtctcac

SEQ ID NO: 758324 - DNA, 33 bp, Homo sapien
ttaaggatcaaagctataatttacaagtctcac

SEQ ID NO: 758325 - DNA, 33 bp, Homo sapien
atcaggagtcgccagaaaagaaagggagattaa

SEQ ID NO: 758326 - DNA, 33 bp, Homo sapien
atcaggagtcgccagagaagaaagggagattaa

SEQ ID NO: 758327 - DNA, 33 bp, Homo sapien
ctgtcatctttgtttcccagtttcaaatgccta

SEQ ID NO: 758328 - DNA, 33 bp, Homo sapien
ctgtcatctttgtttcgcagtttcaaatgccta

SEQ ID NO: 758329 - DNA, 33 bp, Homo sapien
tttacctcaggatgacacattcacgtgacttaa

SEQ ID NO: 758330 - DNA, 33 bp, Homo sapien
tttacctcaggatgacgcattcacgtgacttaa

SEQ ID NO: 758331 - DNA, 33 bp, Homo sapien
gaagccatgcaattcaatacccaggtaatctga

SEQ ID NO: 758332 - DNA, 33 bp, Homo sapien
gaagccatgcaattcagtacccaggtaatctga

SEQ ID NO: 758333 - DNA, 33 bp, Homo sapien
tgaggaggtatttaagccatagcaaatcaggaa

SEQ ID NO: 758334 - DNA, 33 bp, Homo sapien
tgaggaggtatttaagtcatagcaaatcaggaa

SEQ ID NO: 758335 - DNA, 33 bp, Homo sapien
tgagttgttattcatcaaacacacacgtgtgtg

SEQ ID NO: 758336 - DNA, 33 bp, Homo sapien
tgagttgttattcatcgaacacacacgtgtgtg

SEQ ID NO: 758337 - DNA, 33 bp, Homo sapien
gtgttgtgaccatctgcagagtgatgtggtaat

SEQ ID NO: 758338 - DNA, 33 bp, Homo sapien
gtgttgtgaccatctgtagagtgatgtggtaat

SEQ ID NO: 758339 - DNA, 33 bp, Homo sapien
acgcttctaatttacacgtggaaaacaaagcaa

SEQ ID NO: 758340 - DNA, 33 bp, Homo sapien
acgcttctaatttacatgtggaaaacaaagcaa

SEQ ID NO: 758341 - DNA, 33 bp, Homo sapien
gctgcaagtccatttacgcaaggctgttgtagg

SEQ ID NO: 758342 - DNA, 33 bp, Homo sapien
gctgcaagtccatttatgcaaggctgttgtagg

SEQ ID NO: 758343 - DNA, 33 bp, Homo sapien
gactgttaacaaccacagcaacagaaggttaca

SEQ ID NO: 758344 - DNA, 33 bp, Homo sapien
gactgttaacaaccacggcaacagaaggttaca

SEQ ID NO: 758345 - DNA, 33 bp, Homo sapien
ctttaaacttgtgaaacataagccactaaaagc

SEQ ID NO: 758346 - DNA, 33 bp, Homo sapien
ctttaaacttgtgaaatataagccactaaaagc

SEQ ID NO: 758347 - DNA, 33 bp, Homo sapien
tacctgtggtttatgaccagataggaaatttaa

SEQ ID NO: 758348 - DNA, 33 bp, Homo sapien
tacctgtggtttatgatcagataggaaatttaa

SEQ ID NO: 758349 - DNA, 33 bp, Homo sapien
ttctaatgcactgcaaatattttatcaacattg

SEQ ID NO: 758350 - DNA, 33 bp, Homo sapien
ttctaatgcactgcaagtattttatcaacattg

SEQ ID NO: 758351 - DNA, 33 bp, Homo sapien
aaaagattattttgaaagtaatgggacaaaaga

SEQ ID NO: 758352 - DNA, 33 bp, Homo sapien
aaaagattattttgaaggtaatgggacaaaaga

SEQ ID NO: 758353 - DNA, 33 bp, Homo sapien
gtaggtggaatagcaaagttttagaaatgattg

SEQ ID NO: 758354 - DNA, 33 bp, Homo sapien
gtaggtggaatagcaaggttttagaaatgattg

SEQ ID NO: 758355 - DNA, 33 bp, Homo sapien
gtctgttaaaaatccaaccggctagtaacgaaa

SEQ ID NO: 758356 - DNA, 33 bp, Homo sapien
gtctgttaaaaatccagccggctagtaacgaaa

SEQ ID NO: 758357 - DNA, 33 bp, Homo sapien
tgagactttgaacataagtttttagaaaataat

SEQ ID NO: 758358 - DNA, 33 bp, Homo sapien
tgagactttgaacatatgtttttagaaaataat

SEQ ID NO: 758359 - DNA, 33 bp, Homo sapien
cttttccagtccactgaagctttatagtttgct

SEQ ID NO: 758360 - DNA, 33 bp, Homo sapien
cttttccagtccactggagctttatagtttgct

SEQ ID NO: 758361 - DNA, 33 bp, Homo sapien
tggtaataccaagatacgtaaatgtggagaagt

SEQ ID NO: 758362 - DNA, 33 bp, Homo sapien
tggtaataccaagatatgtaaatgtggagaagt

SEQ ID NO: 758363 - DNA, 33 bp, Homo sapien
tttccaggtttgtcccacgcattgaattccatg

SEQ ID NO: 758364 - DNA, 33 bp, Homo sapien
tttccaggtttgtcccgcgcattgaattccatg

SEQ ID NO: 758365 - DNA, 33 bp, Homo sapien
gtttttcaagagagagccatggccaaacctgta

SEQ ID NO: 758366 - DNA, 33 bp, Homo sapien
gtttttcaagagagaggcatggccaaacctgta

SEQ ID NO: 758367 - DNA, 33 bp, Homo sapien
tggttgcaagcagtcaaaactgtctctagccaa

SEQ ID NO: 758368 - DNA, 33 bp, Homo sapien
tggttgcaagcagtcagaactgtctctagccaa

SEQ ID NO: 758369 - DNA, 33 bp, Homo sapien
cttagtgtcctggcaactagacagtggttcata

SEQ ID NO: 758370 - DNA, 33 bp, Homo sapien
cttagtgtcctggcaagtagacagtggttcata

SEQ ID NO: 758371 - DNA, 33 bp, Homo sapien
ttcaccagccactctacagttgttaggtccttt

SEQ ID NO: 758372 - DNA, 33 bp, Homo sapien
ttcaccagccactctatagttgttaggtccttt

SEQ ID NO: 758373 - DNA, 33 bp, Homo sapien
accaaaacaacatcaacgactccctcccttact

SEQ ID NO: 758374 - DNA, 33 bp, Homo sapien
accaaaacaacatcaatgactccctcccttact

SEQ ID NO: 758375 - DNA, 33 bp, Homo sapien
ctgcttaattcctctagattcttgctcttgtct

SEQ ID NO: 758376 - DNA, 33 bp, Homo sapien
ctgcttaattcctctatattcttgctcttgtct

SEQ ID NO: 758377 - DNA, 33 bp, Homo sapien
tgctgttgaacaacacagacaaagtacactagg

SEQ ID NO: 758378 - DNA, 33 bp, Homo sapien
tgctgttgaacaacacggacaaagtacactagg

SEQ ID NO: 758379 - DNA, 33 bp, Homo sapien
ttaaaataagctgtcacattaagcacaggagag

SEQ ID NO: 758380 - DNA, 33 bp, Homo sapien
ttaaaataagctgtcatattaagcacaggagag

SEQ ID NO: 758381 - DNA, 33 bp, Homo sapien
taaatgtaccatgtaacgtatagtgtaaacata

SEQ ID NO: 758382 - DNA, 33 bp, Homo sapien
taaatgtaccatgtaatgtatagtgtaaacata

SEQ ID NO: 758383 - DNA, 33 bp, Homo sapien
gacgctgtcacataaccctctgccactgcccaa

SEQ ID NO: 758384 - DNA, 33 bp, Homo sapien
gacgctgtcacataactctctgccactgcccaa

SEQ ID NO: 758385 - DNA, 33 bp, Homo sapien
aggattcaatttcccacgcacaaaaggaggtcc

SEQ ID NO: 758386 - DNA, 33 bp, Homo sapien
aggattcaatttcccatgcacaaaaggaggtcc

SEQ ID NO: 758387 - DNA, 33 bp, Homo sapien
atgtgcagcaatgatgccagacaattcctgccc

SEQ ID NO: 758388 - DNA, 33 bp, Homo sapien
atgtgcagcaatgatgtcagacaattcctgccc

SEQ ID NO: 758389 - DNA, 33 bp, Homo sapien
accatgctttgatcaactgcagtctggttccac

SEQ ID NO: 758390 - DNA, 33 bp, Homo sapien
accatgctttgatcaattgcagtctggttccac

SEQ ID NO: 758391 - DNA, 33 bp, Homo sapien
tgagatttagaacagaagcgcaaaattcacttc

SEQ ID NO: 758392 - DNA, 33 bp, Homo sapien
tgagatttagaacagaggcgcaaaattcacttc

SEQ ID NO: 758393 - DNA, 33 bp, Homo sapien
aatagatcaaaaagcccgaatagcctgaacaac

SEQ ID NO: 758394 - DNA, 33 bp, Homo sapien
aatagatcaaaaagcctgaatagcctgaacaac

SEQ ID NO: 758395 - DNA, 33 bp, Homo sapien
agtgcattcccgaaaccggcaacttcaaatgca

SEQ ID NO: 758396 - DNA, 33 bp, Homo sapien
agtgcattcccgaaactggcaacttcaaatgca

SEQ ID NO: 758397 - DNA, 33 bp, Homo sapien
tctgcctgagaagcgaccaagagcagagacaga

SEQ ID NO: 758398 - DNA, 33 bp, Homo sapien
tctgcctgagaagcgagcaagagcagagacaga

SEQ ID NO: 758399 - DNA, 33 bp, Homo sapien
tgccagaataaagaacacattcgtctacctgtc

SEQ ID NO: 758400 - DNA, 33 bp, Homo sapien
tgccagaataaagaacgcattcgtctacctgtc

SEQ ID NO: 758401 - DNA, 33 bp, Homo sapien
actgaacatgaagcaaaacaagattagcaaaaa

SEQ ID NO: 758402 - DNA, 33 bp, Homo sapien
actgaacatgaagcaacacaagattagcaaaaa

SEQ ID NO: 758403 - DNA, 33 bp, Homo sapien
ttcaagtcacaatacaaaactcttcattatttt

SEQ ID NO: 758404 - DNA, 33 bp, Homo sapien
ttcaagtcacaatacagaactcttcattatttt

SEQ ID NO: 758405 - DNA, 33 bp, Homo sapien
tgtggccacttctttcaatttggactactctga

SEQ ID NO: 758406 - DNA, 33 bp, Homo sapien
tgtggccacttctttccatttggactactctga

SEQ ID NO: 758407 - DNA, 33 bp, Homo sapien
ccttcagatgcagcccagagatgtaaccctgag

SEQ ID NO: 758408 - DNA, 33 bp, Homo sapien
ccttcagatgcagcccggagatgtaaccctgag

SEQ ID NO: 758409 - DNA, 33 bp, Homo sapien
tggaaacttaacttagaatgtccaagcttctgg

SEQ ID NO: 758410 - DNA, 33 bp, Homo sapien
tggaaacttaacttaggatgtccaagcttctgg

SEQ ID NO: 758411 - DNA, 33 bp, Homo sapien
aaccatcatcattaataaatcatcaggtctaag

SEQ ID NO: 758412 - DNA, 33 bp, Homo sapien
aaccatcatcattaatgaatcatcaggtctaag

SEQ ID NO: 758413 - DNA, 33 bp, Homo sapien
gttttactatagaaaaagctatcacttatttaa

SEQ ID NO: 758414 - DNA, 33 bp, Homo sapien
gttttactatagaaaaggctatcacttatttaa

SEQ ID NO: 758415 - DNA, 33 bp, Homo sapien
gagattctgtatttaacgaaaactgccgagagc

SEQ ID NO: 758416 - DNA, 33 bp, Homo sapien
gagattctgtatttaatgaaaactgccgagagc

SEQ ID NO: 758417 - DNA, 33 bp, Homo sapien
agacagtaatttgaaccggatgaactgaaagga

SEQ ID NO: 758418 - DNA, 33 bp, Homo sapien
agacagtaatttgaactggatgaactgaaagga

SEQ ID NO: 758419 - DNA, 33 bp, Homo sapien
ttgaaatataagagcaacaaaagtagagcccag

SEQ ID NO: 758420 - DNA, 33 bp, Homo sapien
ttgaaatataagagcagcaaaagtagagcccag

SEQ ID NO: 758421 - DNA, 33 bp, Homo sapien
attgcactatttctgccgactcaaagccaacac

SEQ ID NO: 758422 - DNA, 33 bp, Homo sapien
attgcactatttctgctgactcaaagccaacac

SEQ ID NO: 758423 - DNA, 33 bp, Homo sapien
ttttatcctatataaaactgcctctgagtaaaa

SEQ ID NO: 758424 - DNA, 33 bp, Homo sapien
ttttatcctatataaagctgcctctgagtaaaa

SEQ ID NO: 758425 - DNA, 33 bp, Homo sapien
gtgaaaactgggcttaagaacgcgtgttcaggc

SEQ ID NO: 758426 - DNA, 33 bp, Homo sapien
gtgaaaactgggcttaggaacgcgtgttcaggc

SEQ ID NO: 758427 - DNA, 33 bp, Homo sapien
cgtgtttctgaaactcaaggaattaatgacaca

SEQ ID NO: 758428 - DNA, 33 bp, Homo sapien
cgtgtttctgaaactcgaggaattaatgacaca

SEQ ID NO: 758429 - DNA, 33 bp, Homo sapien
tcagagatgtaacctgccacaaagttattatcc

SEQ ID NO: 758430 - DNA, 33 bp, Homo sapien
tcagagatgtaacctgtcacaaagttattatcc

SEQ ID NO: 758431 - DNA, 33 bp, Homo sapien
aacgtggacttttgcaccttatatgtgaacagg

SEQ ID NO: 758432 - DNA, 33 bp, Homo sapien
aacgtggacttttgcatcttatatgtgaacagg

SEQ ID NO: 758433 - DNA, 33 bp, Homo sapien
ttttttgataccatgcaagcagaagtcagtcca

SEQ ID NO: 758434 - DNA, 33 bp, Homo sapien
ttttttgataccatgcgagcagaagtcagtcca

SEQ ID NO: 758435 - DNA, 33 bp, Homo sapien
ccacaggattctctggaaagtccactgcttgga

SEQ ID NO: 758436 - DNA, 33 bp, Homo sapien
ccacaggattctctgggaagtccactgcttgga

SEQ ID NO: 758437 - DNA, 33 bp, Homo sapien
atcagtcagtaaacgacgccgacagcaaaactc

SEQ ID NO: 758438 - DNA, 33 bp, Homo sapien
atcagtcagtaaacgatgccgacagcaaaactc

SEQ ID NO: 758439 - DNA, 33 bp, Homo sapien
aagttgcaaggtaatacagtcccatttttgtaa

SEQ ID NO: 758440 - DNA, 33 bp, Homo sapien
aagttgcaaggtaatatagtcccatttttgtaa

SEQ ID NO: 758441 - DNA, 33 bp, Homo sapien
ttccaacatctttgtaaaaacagttttgaatag

SEQ ID NO: 758442 - DNA, 33 bp, Homo sapien
ttccaacatctttgtacaaacagttttgaatag

SEQ ID NO: 758443 - DNA, 33 bp, Homo sapien
gcaatcaattaaaacaaccgcgaaattccattc

SEQ ID NO: 758444 - DNA, 33 bp, Homo sapien
gcaatcaattaaaacacccgcgaaattccattc

SEQ ID NO: 758445 - DNA, 33 bp, Homo sapien
tttaattgattgcaagcaccaacatacatcatt

SEQ ID NO: 758446 - DNA, 33 bp, Homo sapien
tttaattgattgcaagtaccaacatacatcatt

SEQ ID NO: 758447 - DNA, 33 bp, Homo sapien
tctgtacttaggtaaacatgatggatttttttt

SEQ ID NO: 758448 - DNA, 33 bp, Homo sapien
tctgtacttaggtaaatatgatggatttttttt

SEQ ID NO: 758449 - DNA, 33 bp, Homo sapien
gaagtgaagataaaaagataatgcagcttgcca

SEQ ID NO: 758450 - DNA, 33 bp, Homo sapien
gaagtgaagataaaaatataatgcagcttgcca

SEQ ID NO: 758451 - DNA, 33 bp, Homo sapien
tctagttaaagcttaacggagaatagcaggttc

SEQ ID NO: 758452 - DNA, 33 bp, Homo sapien
tctagttaaagcttaatggagaatagcaggttc

SEQ ID NO: 758453 - DNA, 33 bp, Homo sapien
gtgtagaatggatgcacggaggaatgtatgcga

SEQ ID NO: 758454 - DNA, 33 bp, Homo sapien
gtgtagaatggatgcatggaggaatgtatgcga

SEQ ID NO: 758455 - DNA, 33 bp, Homo sapien
tgctgatttaattaaccgagttcattggctctg

SEQ ID NO: 758456 - DNA, 33 bp, Homo sapien
tgctgatttaattaactgagttcattggctctg

SEQ ID NO: 758457 - DNA, 33 bp, Homo sapien
ggagttacaaatgctgaaactcttctttaccct

SEQ ID NO: 758458 - DNA, 33 bp, Homo sapien
ggagttacaaatgctggaactcttctttaccct

SEQ ID NO: 758459 - DNA, 33 bp, Homo sapien
agaaaaatctacagacagtaataagtagctaca

SEQ ID NO: 758460 - DNA, 33 bp, Homo sapien
agaaaaatctacagacggtaataagtagctaca

SEQ ID NO: 758461 - DNA, 33 bp, Homo sapien
aggacactgaaaggtaaactgcctttgtagaat

SEQ ID NO: 758462 - DNA, 33 bp, Homo sapien
aggacactgaaaggtagactgcctttgtagaat

SEQ ID NO: 758463 - DNA, 33 bp, Homo sapien
cagctaggatgaaagacggaacagctggaaagg

SEQ ID NO: 758464 - DNA, 33 bp, Homo sapien
cagctaggatgaaagatggaacagctggaaagg

SEQ ID NO: 758465 - DNA, 33 bp, Homo sapien
tctgaggaacaaaggaagacgtgacaactcgca

SEQ ID NO: 758466 - DNA, 33 bp, Homo sapien
tctgaggaacaaaggaggacgtgacaactcgca

SEQ ID NO: 758467 - DNA, 33 bp, Homo sapien
ttgcataagaggatgacgtgtttttagaaggtc

SEQ ID NO: 758468 - DNA, 33 bp, Homo sapien
ttgcataagaggatgatgtgtttttagaaggtc

SEQ ID NO: 758469 - DNA, 33 bp, Homo sapien
tgtttccatcaacacccagatgaccgtgcctat

SEQ ID NO: 758470 - DNA, 33 bp, Homo sapien
tgtttccatcaacacctagatgaccgtgcctat

SEQ ID NO: 758471 - DNA, 33 bp, Homo sapien
gtcagtgtggtagaataaaatccaccgcgtctg

SEQ ID NO: 758472 - DNA, 33 bp, Homo sapien
gtcagtgtggtagaatgaaatccaccgcgtctg

SEQ ID NO: 758473 - DNA, 33 bp, Homo sapien
gatgctcaaagtcttgcatttgtctacatagct

SEQ ID NO: 758474 - DNA, 33 bp, Homo sapien
gatgctcaaagtcttgtatttgtctacatagct

SEQ ID NO: 758475 - DNA, 33 bp, Homo sapien
gaatctaaggacaagcaccccaggcccagagtg

SEQ ID NO: 758476 - DNA, 33 bp, Homo sapien
gaatctaaggacaagcgccccaggcccagagtg

SEQ ID NO: 758477 - DNA, 33 bp, Homo sapien
agcagagtagtaagccaaactaaaaacttcagc

SEQ ID NO: 758478 - DNA, 33 bp, Homo sapien
agcagagtagtaagccgaactaaaaacttcagc

SEQ ID NO: 758479 - DNA, 33 bp, Homo sapien
ccaggcttagtgggaactgaaggcattcttgct

SEQ ID NO: 758480 - DNA, 33 bp, Homo sapien
ccaggcttagtgggaattgaaggcattcttgct

SEQ ID NO: 758481 - DNA, 33 bp, Homo sapien
attctttcattttgccagaatatttatgactta

SEQ ID NO: 758482 - DNA, 33 bp, Homo sapien
attctttcattttgccggaatatttatgactta

SEQ ID NO: 758483 - DNA, 33 bp, Homo sapien
tgaatctatgtcaaacaaaagactgtccttaaa

SEQ ID NO: 758484 - DNA, 33 bp, Homo sapien
tgaatctatgtcaaacgaaagactgtccttaaa

SEQ ID NO: 758485 - DNA, 33 bp, Homo sapien
gtggaactcaccgtaaggagactgtgaacccaa

SEQ ID NO: 758486 - DNA, 33 bp, Homo sapien
gtggaactcaccgtaatgagactgtgaacccaa

SEQ ID NO: 758487 - DNA, 33 bp, Homo sapien
gaggagaaaatagaacaagtgttagagatttta

SEQ ID NO: 758488 - DNA, 33 bp, Homo sapien
gaggagaaaatagaaccagtgttagagatttta

SEQ ID NO: 758489 - DNA, 33 bp, Homo sapien
tgattgaactggaaaaaaatgtgatgaatttat

SEQ ID NO: 758490 - DNA, 33 bp, Homo sapien
tgattgaactggaaaacaatgtgatgaatttat

SEQ ID NO: 758491 - DNA, 33 bp, Homo sapien
agttagaaatacttgaagcttattctatgcaga

SEQ ID NO: 758492 - DNA, 33 bp, Homo sapien
agttagaaatacttgaggcttattctatgcaga

SEQ ID NO: 758493 - DNA, 33 bp, Homo sapien
agtgatcctcaaagtacagtgtgcagaccccca

SEQ ID NO: 758494 - DNA, 33 bp, Homo sapien
agtgatcctcaaagtatagtgtgcagaccccca

SEQ ID NO: 758495 - DNA, 33 bp, Homo sapien
ccccttctctaggaccaaggaaaactggtttaa

SEQ ID NO: 758496 - DNA, 33 bp, Homo sapien
ccccttctctaggaccgaggaaaactggtttaa

SEQ ID NO: 758497 - DNA, 33 bp, Homo sapien
ggtgcctcgttcccgtaaacttgtgctcaaagg

SEQ ID NO: 758498 - DNA, 33 bp, Homo sapien
ggtgcctcgttcccgtgaacttgtgctcaaagg

SEQ ID NO: 758499 - DNA, 33 bp, Homo sapien
attagtgtgacatgaaacttttgagtgcagtga

SEQ ID NO: 758500 - DNA, 33 bp, Homo sapien
attagtgtgacatgaagcttttgagtgcagtga

SEQ ID NO: 758501 - DNA, 33 bp, Homo sapien
cttgtggtttagctgaggagaaagaacaagctc

SEQ ID NO: 758502 - DNA, 33 bp, Homo sapien
cttgtggtttagctgatgagaaagaacaagctc

SEQ ID NO: 758503 - DNA, 33 bp, Homo sapien
ccatgcacaaatgaaacgtgaagggcacaagag

SEQ ID NO: 758504 - DNA, 33 bp, Homo sapien
ccatgcacaaatgaaatgtgaagggcacaagag

SEQ ID NO: 758505 - DNA, 33 bp, Homo sapien
cacaaccaggatactgacactaacactgtcaag

SEQ ID NO: 758506 - DNA, 33 bp, Homo sapien
cacaaccaggatactgtcactaacactgtcaag

SEQ ID NO: 758507 - DNA, 33 bp, Homo sapien
tcaggaggttaagataccttactatagccttga

SEQ ID NO: 758508 - DNA, 33 bp, Homo sapien
tcaggaggttaagatagcttactatagccttga

SEQ ID NO: 758509 - DNA, 33 bp, Homo sapien
aaggagtccaggtggacaaaaggagtttctggg

SEQ ID NO: 758510 - DNA, 33 bp, Homo sapien
aaggagtccaggtggataaaaggagtttctggg

SEQ ID NO: 758511 - DNA, 33 bp, Homo sapien
gaaacaggagagtaataaaacaggacaactcat

SEQ ID NO: 758512 - DNA, 33 bp, Homo sapien
gaaacaggagagtaatgaaacaggacaactcat

SEQ ID NO: 758513 - DNA, 33 bp, Homo sapien
cttgttgacattagtacgtgaggacaagtcctg

SEQ ID NO: 758514 - DNA, 33 bp, Homo sapien
cttgttgacattagtatgtgaggacaagtcctg

SEQ ID NO: 758515 - DNA, 33 bp, Homo sapien
tgtacaattataaggacggcagttttcagaggt

SEQ ID NO: 758516 - DNA, 33 bp, Homo sapien
tgtacaattataaggatggcagttttcagaggt

SEQ ID NO: 758517 - DNA, 33 bp, Homo sapien
aggctgaacctggaaaaccagaaacaagctttc

SEQ ID NO: 758518 - DNA, 33 bp, Homo sapien
aggctgaacctggaaagccagaaacaagctttc

SEQ ID NO: 758519 - DNA, 33 bp, Homo sapien
aaggaagcattcagacagaaagttcttggggag

SEQ ID NO: 758520 - DNA, 33 bp, Homo sapien
aaggaagcattcagacggaaagttcttggggag

SEQ ID NO: 758521 - DNA, 33 bp, Homo sapien
caaacacaaggtcaaaagtcagaggtggtgagt

SEQ ID NO: 758522 - DNA, 33 bp, Homo sapien
caaacacaaggtcaaaggtcagaggtggtgagt

SEQ ID NO: 758523 - DNA, 33 bp, Homo sapien
ttttccactgtgaaaaacagtatagtggctcct

SEQ ID NO: 758524 - DNA, 33 bp, Homo sapien
ttttccactgtgaaaaccagtatagtggctcct

SEQ ID NO: 758525 - DNA, 33 bp, Homo sapien
tatgttctcatttttccagtaactttttatgct

SEQ ID NO: 758526 - DNA, 33 bp, Homo sapien
tatgttctcatttttctagtaactttttatgct

SEQ ID NO: 758527 - DNA, 33 bp, Homo sapien
gtgcaaaactctttacaatgcaaaactctttac

SEQ ID NO: 758528 - DNA, 33 bp, Homo sapien
gtgcaaaactctttacgatgcaaaactctttac

SEQ ID NO: 758529 - DNA, 33 bp, Homo sapien
tatttagaaaacttgacggcctaacaggatttg

SEQ ID NO: 758530 - DNA, 33 bp, Homo sapien
tatttagaaaacttgatggcctaacaggatttg

SEQ ID NO: 758531 - DNA, 33 bp, Homo sapien
tgtttgaactctctaggcctgttagttttctct

SEQ ID NO: 758532 - DNA, 33 bp, Homo sapien
tgtttgaactctctagtcctgttagttttctct

SEQ ID NO: 758533 - DNA, 33 bp, Homo sapien
ctgcttgttgacagacccacccatacaccactg

SEQ ID NO: 758534 - DNA, 33 bp, Homo sapien
ctgcttgttgacagactcacccatacaccactg

SEQ ID NO: 758535 - DNA, 33 bp, Homo sapien
ctgtggctgatacttacagaattgttgctccaa

SEQ ID NO: 758536 - DNA, 33 bp, Homo sapien
ctgtggctgatacttatagaattgttgctccaa

SEQ ID NO: 758537 - DNA, 33 bp, Homo sapien
acagatgtgcctactaagaatcacattacactg

SEQ ID NO: 758538 - DNA, 33 bp, Homo sapien
acagatgtgcctactaggaatcacattacactg

SEQ ID NO: 758539 - DNA, 33 bp, Homo sapien
gcttatgcttaagagcagaggagctaatttctc

SEQ ID NO: 758540 - DNA, 33 bp, Homo sapien
gcttatgcttaagagcggaggagctaatttctc

SEQ ID NO: 758541 - DNA, 33 bp, Homo sapien
agttatttcccgaaaagaaaaatctgagtgtgc

SEQ ID NO: 758542 - DNA, 33 bp, Homo sapien
agttatttcccgaaaataaaaatctgagtgtgc

SEQ ID NO: 758543 - DNA, 33 bp, Homo sapien
tgatctcatacgtgaaatcttaaaaaaccagtc

SEQ ID NO: 758544 - DNA, 33 bp, Homo sapien
tgatctcatacgtgaagtcttaaaaaaccagtc

SEQ ID NO: 758545 - DNA, 33 bp, Homo sapien
aggctgcagggcggtcaagggaaacagtctgaa

SEQ ID NO: 758546 - DNA, 33 bp, Homo sapien
aggctgcagggcggtcgagggaaacagtctgaa

SEQ ID NO: 758547 - DNA, 33 bp, Homo sapien
gtacccatcatctgaagagcgaacactgtgctc

SEQ ID NO: 758548 - DNA, 33 bp, Homo sapien
gtacccatcatctgaatagcgaacactgtgctc

SEQ ID NO: 758549 - DNA, 33 bp, Homo sapien
ccatatgaaaaaaggaaagaacactggcatcag

SEQ ID NO: 758550 - DNA, 33 bp, Homo sapien
ccatatgaaaaaaggagagaacactggcatcag

SEQ ID NO: 758551 - DNA, 33 bp, Homo sapien
ataaggctctcacaacaaactacagccaggaga

SEQ ID NO: 758552 - DNA, 33 bp, Homo sapien
ataaggctctcacaaccaactacagccaggaga

SEQ ID NO: 758553 - DNA, 33 bp, Homo sapien
tttcctactgtgaatagtatgtagaggaataag

SEQ ID NO: 758554 - DNA, 33 bp, Homo sapien
tttcctactgtgaatattatgtagaggaataag

SEQ ID NO: 758555 - DNA, 33 bp, Homo sapien
aattctggaccaagacaaaagaaaaatgtgtga

SEQ ID NO: 758556 - DNA, 33 bp, Homo sapien
aattctggaccaagacgaaagaaaaatgtgtga

SEQ ID NO: 758557 - DNA, 33 bp, Homo sapien
taaggagtattgacccacatgatcacaaggtga

SEQ ID NO: 758558 - DNA, 33 bp, Homo sapien
taaggagtattgacccccatgatcacaaggtga

SEQ ID NO: 758559 - DNA, 33 bp, Homo sapien
actcagcgattaaacacagcattagagcttttt

SEQ ID NO: 758560 - DNA, 33 bp, Homo sapien
actcagcgattaaacatagcattagagcttttt

SEQ ID NO: 758561 - DNA, 33 bp, Homo sapien
caaaacaagaaaacaaagtagcttatccatgtg

SEQ ID NO: 758562 - DNA, 33 bp, Homo sapien
caaaacaagaaaacaatgtagcttatccatgtg

SEQ ID NO: 758563 - DNA, 33 bp, Homo sapien
tgcacaaacatctgctaacttcatggccaccaa

SEQ ID NO: 758564 - DNA, 33 bp, Homo sapien
tgcacaaacatctgcttacttcatggccaccaa

SEQ ID NO: 758565 - DNA, 33 bp, Homo sapien
cagctgtataataggacggaaaatgtcagtgca

SEQ ID NO: 758566 - DNA, 33 bp, Homo sapien
cagctgtataataggatggaaaatgtcagtgca

SEQ ID NO: 758567 - DNA, 33 bp, Homo sapien
gtgatgggtgccaggacgattaggagcacaaaa

SEQ ID NO: 758568 - DNA, 33 bp, Homo sapien
gtgatgggtgccaggatgattaggagcacaaaa

SEQ ID NO: 758569 - DNA, 33 bp, Homo sapien
attagaacaccaataacaacgtctatagcagtc

SEQ ID NO: 758570 - DNA, 33 bp, Homo sapien
attagaacaccaataataacgtctatagcagtc

SEQ ID NO: 758571 - DNA, 33 bp, Homo sapien
gcagacgatactagaaagtagcatggacagaaa

SEQ ID NO: 758572 - DNA, 33 bp, Homo sapien
gcagacgatactagaaggtagcatggacagaaa

SEQ ID NO: 758573 - DNA, 33 bp, Homo sapien
cggctctccaagtacaacacggaagaattcatc

SEQ ID NO: 758574 - DNA, 33 bp, Homo sapien
cggctctccaagtacagcacggaagaattcatc

SEQ ID NO: 758575 - DNA, 33 bp, Homo sapien
taaattttgagagttacgatatgtaatgattat

SEQ ID NO: 758576 - DNA, 33 bp, Homo sapien
taaattttgagagttatgatatgtaatgattat

SEQ ID NO: 758577 - DNA, 33 bp, Homo sapien
tgggcactgcagggacagtcagtcaggatgaca

SEQ ID NO: 758578 - DNA, 33 bp, Homo sapien
tgggcactgcagggacggtcagtcaggatgaca

SEQ ID NO: 758579 - DNA, 33 bp, Homo sapien
acaaaagtgatcagaaaggcccttgcgcaagct

SEQ ID NO: 758580 - DNA, 33 bp, Homo sapien
acaaaagtgatcagaagggcccttgcgcaagct

SEQ ID NO: 758581 - DNA, 33 bp, Homo sapien
cagccacattggtatcactgtcccctctcccat

SEQ ID NO: 758582 - DNA, 33 bp, Homo sapien
cagccacattggtatctctgtcccctctcccat

SEQ ID NO: 758583 - DNA, 33 bp, Homo sapien
tttcagaaagccagcgaagatggggcgaaattc

SEQ ID NO: 758584 - DNA, 33 bp, Homo sapien
tttcagaaagccagcgtagatggggcgaaattc

SEQ ID NO: 758585 - DNA, 33 bp, Homo sapien
gcaggcagacagacccactgaggtttttgacca

SEQ ID NO: 758586 - DNA, 33 bp, Homo sapien
gcaggcagacagacccgctgaggtttttgacca

SEQ ID NO: 758587 - DNA, 33 bp, Homo sapien
gtctctggatgaggtaaaacagaggggtacctg

SEQ ID NO: 758588 - DNA, 33 bp, Homo sapien
gtctctggatgaggtacaacagaggggtacctg

SEQ ID NO: 758589 - DNA, 33 bp, Homo sapien
ttttcgatttttggatgaggcatactcaatctg

SEQ ID NO: 758590 - DNA, 33 bp, Homo sapien
ttttcgatttttggattaggcatactcaatctg

SEQ ID NO: 758591 - DNA, 33 bp, Homo sapien
cgttaggctcaaccaaatcatccctggaaactg

SEQ ID NO: 758592 - DNA, 33 bp, Homo sapien
cgttaggctcaaccaagtcatccctggaaactg

SEQ ID NO: 758593 - DNA, 33 bp, Homo sapien
tgttttaaaatgatacacaggaaggaagcaaac

SEQ ID NO: 758594 - DNA, 33 bp, Homo sapien
tgttttaaaatgatacgcaggaaggaagcaaac

SEQ ID NO: 758595 - DNA, 33 bp, Homo sapien
aagtctataggtttaaatgataacgctataaaa

SEQ ID NO: 758596 - DNA, 33 bp, Homo sapien
aagtctataggtttaagtgataacgctataaaa

SEQ ID NO: 758597 - DNA, 33 bp, Homo sapien
actggaatacgtctgcaatatcaaaacactgga

SEQ ID NO: 758598 - DNA, 33 bp, Homo sapien
actggaatacgtctgccatatcaaaacactgga

SEQ ID NO: 758599 - DNA, 33 bp, Homo sapien
gcgtcacattttacgcagatccaatgagaaaca

SEQ ID NO: 758600 - DNA, 33 bp, Homo sapien
gcgtcacattttacgcggatccaatgagaaaca

SEQ ID NO: 758601 - DNA, 33 bp, Homo sapien
tggaactgctggtcccaaggaaggctcatggct

SEQ ID NO: 758602 - DNA, 33 bp, Homo sapien
tggaactgctggtcccgaggaaggctcatggct

SEQ ID NO: 758603 - DNA, 33 bp, Homo sapien
tggcttgtctacagacacttttccttatattac

SEQ ID NO: 758604 - DNA, 33 bp, Homo sapien
tggcttgtctacagacgcttttccttatattac

SEQ ID NO: 758605 - DNA, 33 bp, Homo sapien
aacaattactgcttgacacgacaaagtaatgtg

SEQ ID NO: 758606 - DNA, 33 bp, Homo sapien
aacaattactgcttgatacgacaaagtaatgtg

SEQ ID NO: 758607 - DNA, 33 bp, Homo sapien
tacttgtttcttattcaactttcagggcacagc

SEQ ID NO: 758608 - DNA, 33 bp, Homo sapien
tacttgtttcttattcgactttcagggcacagc

SEQ ID NO: 758609 - DNA, 33 bp, Homo sapien
atctttgctctgttgactacccgctcctcagtc

SEQ ID NO: 758610 - DNA, 33 bp, Homo sapien
atctttgctctgttgattacccgctcctcagtc

SEQ ID NO: 758611 - DNA, 33 bp, Homo sapien
gatctactttgggtgccgaactgtggaaatttt

SEQ ID NO: 758612 - DNA, 33 bp, Homo sapien
gatctactttgggtgctgaactgtggaaatttt

SEQ ID NO: 758613 - DNA, 33 bp, Homo sapien
aacattttatggtttgcaacagctcctggatga

SEQ ID NO: 758614 - DNA, 33 bp, Homo sapien
aacattttatggtttgtaacagctcctggatga

SEQ ID NO: 758615 - DNA, 33 bp, Homo sapien
tgaccacattttcttcccgacaattgcaataac

SEQ ID NO: 758616 - DNA, 33 bp, Homo sapien
tgaccacattttcttctcgacaattgcaataac

SEQ ID NO: 758617 - DNA, 33 bp, Homo sapien
aattgcatgccattccaagtagtgtaatgaaat

SEQ ID NO: 758618 - DNA, 33 bp, Homo sapien
aattgcatgccattccgagtagtgtaatgaaat

SEQ ID NO: 758619 - DNA, 33 bp, Homo sapien
ttcctctttcaagcacccgttggctcctttggt

SEQ ID NO: 758620 - DNA, 33 bp, Homo sapien
ttcctctttcaagcactcgttggctcctttggt

SEQ ID NO: 758621 - DNA, 33 bp, Homo sapien
gaaggaatgcatctcaaagtcttcccagcctag

SEQ ID NO: 758622 - DNA, 33 bp, Homo sapien
gaaggaatgcatctcagagtcttcccagcctag

SEQ ID NO: 758623 - DNA, 33 bp, Homo sapien
ttcatagattctacccaaaaaagtatgggtttt

SEQ ID NO: 758624 - DNA, 33 bp, Homo sapien
ttcatagattctaccccaaaaagtatgggtttt

SEQ ID NO: 758625 - DNA, 33 bp, Homo sapien
ccttctgccctctggaggaaccataattattta

SEQ ID NO: 758626 - DNA, 33 bp, Homo sapien
ccttctgccctctggatgaaccataattattta

SEQ ID NO: 758627 - DNA, 33 bp, Homo sapien
tggaaaagtttgaaagaccctcctgcaaatctg

SEQ ID NO: 758628 - DNA, 33 bp, Homo sapien
tggaaaagtttgaaagcccctcctgcaaatctg

SEQ ID NO: 758629 - DNA, 33 bp, Homo sapien
gtgtgccctcctcagacagaagatggactgatc

SEQ ID NO: 758630 - DNA, 33 bp, Homo sapien
gtgtgccctcctcagatagaagatggactgatc

SEQ ID NO: 758631 - DNA, 33 bp, Homo sapien
ggcacaagaagcaaataactagcacagcactgg

SEQ ID NO: 758632 - DNA, 33 bp, Homo sapien
ggcacaagaagcaaatcactagcacagcactgg

SEQ ID NO: 758633 - DNA, 33 bp, Homo sapien
ccttctgagtttgacaagttcgaatgaatcatc

SEQ ID NO: 758634 - DNA, 33 bp, Homo sapien
ccttctgagtttgacaggttcgaatgaatcatc

SEQ ID NO: 758635 - DNA, 33 bp, Homo sapien
ctagttctgtatacagcaggaggattgaggagt

SEQ ID NO: 758636 - DNA, 33 bp, Homo sapien
ctagttctgtatacagtaggaggattgaggagt

SEQ ID NO: 758637 - DNA, 33 bp, Homo sapien
ggtttggactcttcccagcactggacacgtttt

SEQ ID NO: 758638 - DNA, 33 bp, Homo sapien
ggtttggactcttcccggcactggacacgtttt

SEQ ID NO: 758639 - DNA, 33 bp, Homo sapien
ctttaggcagtttttcacctaagtagctcctca

SEQ ID NO: 758640 - DNA, 33 bp, Homo sapien
ctttaggcagtttttcgcctaagtagctcctca

SEQ ID NO: 758641 - DNA, 33 bp, Homo sapien
acaactgtcacaaatcaagaaaatgcacaactc

SEQ ID NO: 758642 - DNA, 33 bp, Homo sapien
acaactgtcacaaatcgagaaaatgcacaactc

SEQ ID NO: 758643 - DNA, 33 bp, Homo sapien
ttttgcttgaaacaggcagctaagtaaaccatt

SEQ ID NO: 758644 - DNA, 33 bp, Homo sapien
ttttgcttgaaacagggagctaagtaaaccatt

SEQ ID NO: 758645 - DNA, 33 bp, Homo sapien
tcagagaaacttggcaagtgaaacaattgtgct

SEQ ID NO: 758646 - DNA, 33 bp, Homo sapien
tcagagaaacttggcaggtgaaacaattgtgct

SEQ ID NO: 758647 - DNA, 33 bp, Homo sapien
caagtccctgtcaacccaagtcctcttgcaggg

SEQ ID NO: 758648 - DNA, 33 bp, Homo sapien
caagtccctgtcaaccgaagtcctcttgcaggg

SEQ ID NO: 758649 - DNA, 33 bp, Homo sapien
tcccactgctctataacgaggaatagcacggca

SEQ ID NO: 758650 - DNA, 33 bp, Homo sapien
tcccactgctctataatgaggaatagcacggca

SEQ ID NO: 758651 - DNA, 33 bp, Homo sapien
ttaatgtttttgcatcaaaaataactcatttct

SEQ ID NO: 758652 - DNA, 33 bp, Homo sapien
ttaatgtttttgcatcgaaaataactcatttct

SEQ ID NO: 758653 - DNA, 33 bp, Homo sapien
tctccaggtggttcacagataaaaaagcataca

SEQ ID NO: 758654 - DNA, 33 bp, Homo sapien
tctccaggtggttcacggataaaaaagcataca

SEQ ID NO: 758655 - DNA, 33 bp, Homo sapien
agtaagcttttcagaacccttgcttcacttaaa

SEQ ID NO: 758656 - DNA, 33 bp, Homo sapien
agtaagcttttcagaatccttgcttcacttaaa

SEQ ID NO: 758657 - DNA, 33 bp, Homo sapien
ctataatttgaatgaaaggcagtaacctgaagt

SEQ ID NO: 758658 - DNA, 33 bp, Homo sapien
ctataatttgaatgaagggcagtaacctgaagt

SEQ ID NO: 758659 - DNA, 33 bp, Homo sapien
ttaaaaactcaacagaagtaggatgattaaaag

SEQ ID NO: 758660 - DNA, 33 bp, Homo sapien
ttaaaaactcaacagatgtaggatgattaaaag

SEQ ID NO: 758661 - DNA, 33 bp, Homo sapien
atgataatcaggttagcaatgttttaaggatga

SEQ ID NO: 758662 - DNA, 33 bp, Homo sapien
atgataatcaggttagtaatgttttaaggatga

SEQ ID NO: 758663 - DNA, 33 bp, Homo sapien
cagcaaagggcaaaataaaagatcacgtttaag

SEQ ID NO: 758664 - DNA, 33 bp, Homo sapien
cagcaaagggcaaaatgaaagatcacgtttaag

SEQ ID NO: 758665 - DNA, 33 bp, Homo sapien
atggttttattctctaccagttatagaaaaatc

SEQ ID NO: 758666 - DNA, 33 bp, Homo sapien
atggttttattctctagcagttatagaaaaatc

SEQ ID NO: 758667 - DNA, 33 bp, Homo sapien
tctggcaaggcttaataaggagagtggaatgaa

SEQ ID NO: 758668 - DNA, 33 bp, Homo sapien
tctggcaaggcttaatgaggagagtggaatgaa

SEQ ID NO: 758669 - DNA, 33 bp, Homo sapien
atatctaagctcagaaactatgggttgggcatt

SEQ ID NO: 758670 - DNA, 33 bp, Homo sapien
atatctaagctcagaagctatgggttgggcatt

SEQ ID NO: 758671 - DNA, 33 bp, Homo sapien
tggcagcctgctgtgtaacacaagtatacatta

SEQ ID NO: 758672 - DNA, 33 bp, Homo sapien
tggcagcctgctgtgtgacacaagtatacatta

SEQ ID NO: 758673 - DNA, 33 bp, Homo sapien
gctttggaaggcagccaccacttggactgaggt

SEQ ID NO: 758674 - DNA, 33 bp, Homo sapien
gctttggaaggcagcccccacttggactgaggt

SEQ ID NO: 758675 - DNA, 33 bp, Homo sapien
atttagcattccacaacgtatgcatttatcaat

SEQ ID NO: 758676 - DNA, 33 bp, Homo sapien
atttagcattccacaatgtatgcatttatcaat

SEQ ID NO: 758677 - DNA, 33 bp, Homo sapien
tcatcagcgttgaatacctgtctctctcattag

SEQ ID NO: 758678 - DNA, 33 bp, Homo sapien
tcatcagcgttgaatatctgtctctctcattag

SEQ ID NO: 758679 - DNA, 33 bp, Homo sapien
actactacactatatcacgagaaaaggaaactc

SEQ ID NO: 758680 - DNA, 33 bp, Homo sapien
actactacactatatctcgagaaaaggaaactc

SEQ ID NO: 758681 - DNA, 33 bp, Homo sapien
gaggctgcccgattcacgtgttcattgctcaat

SEQ ID NO: 758682 - DNA, 33 bp, Homo sapien
gaggctgcccgattcatgtgttcattgctcaat

SEQ ID NO: 758683 - DNA, 33 bp, Homo sapien
cttgtcacattcattcactgtacaggaagcttg

SEQ ID NO: 758684 - DNA, 33 bp, Homo sapien
cttgtcacattcattctctgtacaggaagcttg

SEQ ID NO: 758685 - DNA, 33 bp, Homo sapien
gaatccagagaaaggaagggtgctactggagct

SEQ ID NO: 758686 - DNA, 33 bp, Homo sapien
gaatccagagaaaggaggggtgctactggagct

SEQ ID NO: 758687 - DNA, 33 bp, Homo sapien
gctaatggcttgtcgaaagcagtagggtccctt

SEQ ID NO: 758688 - DNA, 33 bp, Homo sapien
gctaatggcttgtcgagagcagtagggtccctt

SEQ ID NO: 758689 - DNA, 33 bp, Homo sapien
aggttcatttaaactaggtatgctatttataag

SEQ ID NO: 758690 - DNA, 33 bp, Homo sapien
aggttcatttaaactatgtatgctatttataag

SEQ ID NO: 758691 - DNA, 33 bp, Homo sapien
tttaaatattaagtgaagcatgaggatcacttt

SEQ ID NO: 758692 - DNA, 33 bp, Homo sapien
tttaaatattaagtgaggcatgaggatcacttt

SEQ ID NO: 758693 - DNA, 33 bp, Homo sapien
ccaacagacgggggaaaagttaatgccattaat

SEQ ID NO: 758694 - DNA, 33 bp, Homo sapien
ccaacagacgggggaacagttaatgccattaat

SEQ ID NO: 758695 - DNA, 33 bp, Homo sapien
gtcatagccagaacaaaaagtcctgtaattata

SEQ ID NO: 758696 - DNA, 33 bp, Homo sapien
gtcatagccagaacaagaagtcctgtaattata

SEQ ID NO: 758697 - DNA, 33 bp, Homo sapien
gcttacattttgaggaccagattggaaaaaaaa

SEQ ID NO: 758698 - DNA, 33 bp, Homo sapien
gcttacattttgaggatcagattggaaaaaaaa

SEQ ID NO: 758699 - DNA, 33 bp, Homo sapien
ggtttatccactcatcactggtaatctcgtagt

SEQ ID NO: 758700 - DNA, 33 bp, Homo sapien
ggtttatccactcatcgctggtaatctcgtagt

SEQ ID NO: 758701 - DNA, 33 bp, Homo sapien
tcacaaagtcctgtcaaccactgaatggagaaa

SEQ ID NO: 758702 - DNA, 33 bp, Homo sapien
tcacaaagtcctgtcagccactgaatggagaaa

SEQ ID NO: 758703 - DNA, 33 bp, Homo sapien
atataaacttagaagaaaattgcattttgtggg

SEQ ID NO: 758704 - DNA, 33 bp, Homo sapien
atataaacttagaagacaattgcattttgtggg

SEQ ID NO: 758705 - DNA, 33 bp, Homo sapien
gaaggtgccctgccagaagctaaggaaagagtg

SEQ ID NO: 758706 - DNA, 33 bp, Homo sapien
gaaggtgccctgccaggagctaaggaaagagtg

SEQ ID NO: 758707 - DNA, 33 bp, Homo sapien
gtttgagtgactacgaagcccttttatgggcaa

SEQ ID NO: 758708 - DNA, 33 bp, Homo sapien
gtttgagtgactacgaggcccttttatgggcaa

SEQ ID NO: 758709 - DNA, 33 bp, Homo sapien
gcacatgttctcagaaacttttcaggctgtgtc

SEQ ID NO: 758710 - DNA, 33 bp, Homo sapien
gcacatgttctcagaaccttttcaggctgtgtc

SEQ ID NO: 758711 - DNA, 33 bp, Homo sapien
cattgcaaagtcacaaccaacatgatgataccc

SEQ ID NO: 758712 - DNA, 33 bp, Homo sapien
cattgcaaagtcacaatcaacatgatgataccc

SEQ ID NO: 758713 - DNA, 33 bp, Homo sapien
atgtgaccacaagctcaccaatacctaaccctg

SEQ ID NO: 758714 - DNA, 33 bp, Homo sapien
atgtgaccacaagctcgccaatacctaaccctg

SEQ ID NO: 758715 - DNA, 33 bp, Homo sapien
acatatagaggtcagcaactgaattagatgaat

SEQ ID NO: 758716 - DNA, 33 bp, Homo sapien
acatatagaggtcagctactgaattagatgaat

SEQ ID NO: 758717 - DNA, 33 bp, Homo sapien
catcagacaaaagcaacgaaaatccttcacaag

SEQ ID NO: 758718 - DNA, 33 bp, Homo sapien
catcagacaaaagcaatgaaaatccttcacaag

SEQ ID NO: 758719 - DNA, 33 bp, Homo sapien
tgcataagctcaatgacggcagggattattaca

SEQ ID NO: 758720 - DNA, 33 bp, Homo sapien
tgcataagctcaatgagggcagggattattaca

SEQ ID NO: 758721 - DNA, 33 bp, Homo sapien
gatttcggtttatgtcccaactgtaccaccagc

SEQ ID NO: 758722 - DNA, 33 bp, Homo sapien
gatttcggtttatgtcgcaactgtaccaccagc

SEQ ID NO: 758723 - DNA, 33 bp, Homo sapien
agaacaagagtaataaaattggcctttaattaa

SEQ ID NO: 758724 - DNA, 33 bp, Homo sapien
agaacaagagtaataacattggcctttaattaa

SEQ ID NO: 758725 - DNA, 33 bp, Homo sapien
cactgcctatgggagagctttggcttttgaatg

SEQ ID NO: 758726 - DNA, 33 bp, Homo sapien
cactgcctatgggagatctttggcttttgaatg

SEQ ID NO: 758727 - DNA, 33 bp, Homo sapien
gatctaacgtcaattcaaagttctctattgaag

SEQ ID NO: 758728 - DNA, 33 bp, Homo sapien
gatctaacgtcaattcgaagttctctattgaag

SEQ ID NO: 758729 - DNA, 33 bp, Homo sapien
tttaccaaaagaaatacgtaacattgagtagat

SEQ ID NO: 758730 - DNA, 33 bp, Homo sapien
tttaccaaaagaaatatgtaacattgagtagat

SEQ ID NO: 758731 - DNA, 33 bp, Homo sapien
ctttgtcaaagaataaaccttgaattctcgttt

SEQ ID NO: 758732 - DNA, 33 bp, Homo sapien
ctttgtcaaagaataatccttgaattctcgttt

SEQ ID NO: 758733 - DNA, 33 bp, Homo sapien
ctcaatggcataattcaaactatatctcagttc

SEQ ID NO: 758734 - DNA, 33 bp, Homo sapien
ctcaatggcataattctaactatatctcagttc

SEQ ID NO: 758735 - DNA, 33 bp, Homo sapien
ctgtcctttccatacaaagtcagatgctgggaa

SEQ ID NO: 758736 - DNA, 33 bp, Homo sapien
ctgtcctttccatacacagtcagatgctgggaa

SEQ ID NO: 758737 - DNA, 33 bp, Homo sapien
aaatgtacacaaattacgtcaaaactattatgt

SEQ ID NO: 758738 - DNA, 33 bp, Homo sapien
aaatgtacacaaattatgtcaaaactattatgt

SEQ ID NO: 758739 - DNA, 33 bp, Homo sapien
ttaatgccattattgaaagagtggttttgtcat

SEQ ID NO: 758740 - DNA, 33 bp, Homo sapien
ttaatgccattattgagagagtggttttgtcat

SEQ ID NO: 758741 - DNA, 33 bp, Homo sapien
tgtaaccactttactaagtatatgcctatcaaa

SEQ ID NO: 758742 - DNA, 33 bp, Homo sapien
tgtaaccactttactatgtatatgcctatcaaa

SEQ ID NO: 758743 - DNA, 33 bp, Homo sapien
tcttagggaattgaaaatgatactcacagactg

SEQ ID NO: 758744 - DNA, 33 bp, Homo sapien
tcttagggaattgaaagtgatactcacagactg

SEQ ID NO: 758745 - DNA, 33 bp, Homo sapien
tgttttgataaatgcacaaatgagtgaatgaac

SEQ ID NO: 758746 - DNA, 33 bp, Homo sapien
tgttttgataaatgcataaatgagtgaatgaac

SEQ ID NO: 758747 - DNA, 33 bp, Homo sapien
ataaaacattgttggaagcatcaatgagttaaa

SEQ ID NO: 758748 - DNA, 33 bp, Homo sapien
ataaaacattgttggaggcatcaatgagttaaa

SEQ ID NO: 758749 - DNA, 33 bp, Homo sapien
ttatctttttcctcccaagtcaaatgctttgtg

SEQ ID NO: 758750 - DNA, 33 bp, Homo sapien
ttatctttttcctcccgagtcaaatgctttgtg

SEQ ID NO: 758751 - DNA, 33 bp, Homo sapien
gcagctagtgaggaagaaacagggtggaacagt

SEQ ID NO: 758752 - DNA, 33 bp, Homo sapien
gcagctagtgaggaaggaacagggtggaacagt

SEQ ID NO: 758753 - DNA, 33 bp, Homo sapien
gccctgagagaagagagactagaaggaaaggta

SEQ ID NO: 758754 - DNA, 33 bp, Homo sapien
gccctgagagaagagatactagaaggaaaggta

SEQ ID NO: 758755 - DNA, 33 bp, Homo sapien
gaattataattggtgaagctaaccttgaccaca

SEQ ID NO: 758756 - DNA, 33 bp, Homo sapien
gaattataattggtgacgctaaccttgaccaca

SEQ ID NO: 758757 - DNA, 33 bp, Homo sapien
ggcagcagatgaagtacaatgatgtcaaaagtt

SEQ ID NO: 758758 - DNA, 33 bp, Homo sapien
ggcagcagatgaagtagaatgatgtcaaaagtt

SEQ ID NO: 758759 - DNA, 33 bp, Homo sapien
acaactcagtcttgaacaacaaaagcaaaacag

SEQ ID NO: 758760 - DNA, 33 bp, Homo sapien
acaactcagtcttgaagaacaaaagcaaaacag

SEQ ID NO: 758761 - DNA, 33 bp, Homo sapien
tcacatggacatccaactgactcactctttcct

SEQ ID NO: 758762 - DNA, 33 bp, Homo sapien
tcacatggacatccaagtgactcactctttcct

SEQ ID NO: 758763 - DNA, 33 bp, Homo sapien
tgaaactttacacccactgaagaccttcacatt

SEQ ID NO: 758764 - DNA, 33 bp, Homo sapien
tgaaactttacacccattgaagaccttcacatt

SEQ ID NO: 758765 - DNA, 33 bp, Homo sapien
tctcacttacagaggagataacataatctgctt

SEQ ID NO: 758766 - DNA, 33 bp, Homo sapien
tctcacttacagaggatataacataatctgctt

SEQ ID NO: 758767 - DNA, 33 bp, Homo sapien
cagtggtgtaaacaaccagctttatatagcaaa

SEQ ID NO: 758768 - DNA, 33 bp, Homo sapien
cagtggtgtaaacaactagctttatatagcaaa

SEQ ID NO: 758769 - DNA, 33 bp, Homo sapien
gaatgcacaagtttcaaatatgtacaggagtgc

SEQ ID NO: 758770 - DNA, 33 bp, Homo sapien
gaatgcacaagtttcagatatgtacaggagtgc

SEQ ID NO: 758771 - DNA, 33 bp, Homo sapien
gttaactatagttatccgacactgatatagaac

SEQ ID NO: 758772 - DNA, 33 bp, Homo sapien
gttaactatagttatctgacactgatatagaac

SEQ ID NO: 758773 - DNA, 33 bp, Homo sapien
agaagagtcttcaaaacttaaagaacaacaaat

SEQ ID NO: 758774 - DNA, 33 bp, Homo sapien
agaagagtcttcaaaagttaaagaacaacaaat

SEQ ID NO: 758775 - DNA, 33 bp, Homo sapien
caattggtcattaaaagccaatatcttggagca

SEQ ID NO: 758776 - DNA, 33 bp, Homo sapien
caattggtcattaaaatccaatatcttggagca

SEQ ID NO: 758777 - DNA, 33 bp, Homo sapien
tggtattgcagagaaacgacataagtttattga

SEQ ID NO: 758778 - DNA, 33 bp, Homo sapien
tggtattgcagagaaatgacataagtttattga

SEQ ID NO: 758779 - DNA, 33 bp, Homo sapien
tgtagaggatgaaatacgtggaggaaaacgtgt

SEQ ID NO: 758780 - DNA, 33 bp, Homo sapien
tgtagaggatgaaatatgtggaggaaaacgtgt

SEQ ID NO: 758781 - DNA, 33 bp, Homo sapien
actgagaaggaagatactagagaaggggaacac

SEQ ID NO: 758782 - DNA, 33 bp, Homo sapien
actgagaaggaagatagtagagaaggggaacac

SEQ ID NO: 758783 - DNA, 33 bp, Homo sapien
acttgaaatgtttctacgtaggtttaagccaca

SEQ ID NO: 758784 - DNA, 33 bp, Homo sapien
acttgaaatgtttctatgtaggtttaagccaca

SEQ ID NO: 758785 - DNA, 33 bp, Homo sapien
tggtcttatagtgacaggtaggtgtttcatact

SEQ ID NO: 758786 - DNA, 33 bp, Homo sapien
tggtcttatagtgacatgtaggtgtttcatact

SEQ ID NO: 758787 - DNA, 33 bp, Homo sapien
ggtttcctaagccttgaaaaaaattgaattcag

SEQ ID NO: 758788 - DNA, 33 bp, Homo sapien
ggtttcctaagccttgcaaaaaattgaattcag

SEQ ID NO: 758789 - DNA, 33 bp, Homo sapien
ttcttaattggattctaaaattcacatacaggc

SEQ ID NO: 758790 - DNA, 33 bp, Homo sapien
ttcttaattggattctgaaattcacatacaggc

SEQ ID NO: 758791 - DNA, 33 bp, Homo sapien
atacttaaggagctcacgggacctttacaagct

SEQ ID NO: 758792 - DNA, 33 bp, Homo sapien
atacttaaggagctcatgggacctttacaagct

SEQ ID NO: 758793 - DNA, 33 bp, Homo sapien
ttgttgttttgtaaagactctttcaattctcac

SEQ ID NO: 758794 - DNA, 33 bp, Homo sapien
ttgttgttttgtaaaggctctttcaattctcac

SEQ ID NO: 758795 - DNA, 33 bp, Homo sapien
tgagccaaagctacaggagaggactagtaaaat

SEQ ID NO: 758796 - DNA, 33 bp, Homo sapien
tgagccaaagctacagtagaggactagtaaaat

SEQ ID NO: 758797 - DNA, 33 bp, Homo sapien
catataccaggcattgcagcaactcggagcaat

SEQ ID NO: 758798 - DNA, 33 bp, Homo sapien
catataccaggcattgtagcaactcggagcaat

SEQ ID NO: 758799 - DNA, 33 bp, Homo sapien
aatgtcagcaaggaaacgaatatccagaggtac

SEQ ID NO: 758800 - DNA, 33 bp, Homo sapien
aatgtcagcaaggaaatgaatatccagaggtac

SEQ ID NO: 758801 - DNA, 33 bp, Homo sapien
ttgccactgtgacttacaaggattgatatggca

SEQ ID NO: 758802 - DNA, 33 bp, Homo sapien
ttgccactgtgacttagaaggattgatatggca

SEQ ID NO: 758803 - DNA, 33 bp, Homo sapien
tgtcaagttcctcaaactggtctattgtggcaa

SEQ ID NO: 758804 - DNA, 33 bp, Homo sapien
tgtcaagttcctcaaattggtctattgtggcaa

SEQ ID NO: 758805 - DNA, 33 bp, Homo sapien
aggacttgtatttgtaaaggtaatccacctcaa

SEQ ID NO: 758806 - DNA, 33 bp, Homo sapien
aggacttgtatttgtacaggtaatccacctcaa

SEQ ID NO: 758807 - DNA, 33 bp, Homo sapien
gataggaggggatcaaaatactcagtcattggg

SEQ ID NO: 758808 - DNA, 33 bp, Homo sapien
gataggaggggatcaagatactcagtcattggg

SEQ ID NO: 758809 - DNA, 33 bp, Homo sapien
atttctatcttgcttgaattccatactcttctg

SEQ ID NO: 758810 - DNA, 33 bp, Homo sapien
atttctatcttgcttgtattccatactcttctg

SEQ ID NO: 758811 - DNA, 33 bp, Homo sapien
tatattttgatatttacatttgatgctatgtag

SEQ ID NO: 758812 - DNA, 33 bp, Homo sapien
tatattttgatatttatatttgatgctatgtag

SEQ ID NO: 758813 - DNA, 33 bp, Homo sapien
gttttttcttctgctaactttgggattagataa

SEQ ID NO: 758814 - DNA, 33 bp, Homo sapien
gttttttcttctgctagctttgggattagataa

SEQ ID NO: 758815 - DNA, 33 bp, Homo sapien
taaaggaaattgccaccccaaaaccatacaaag

SEQ ID NO: 758816 - DNA, 33 bp, Homo sapien
taaaggaaattgccactccaaaaccatacaaag

SEQ ID NO: 758817 - DNA, 33 bp, Homo sapien
caatttctgaaactgaatcaaaaataaaaaacc

SEQ ID NO: 758818 - DNA, 33 bp, Homo sapien
caatttctgaaactgagtcaaaaataaaaaacc

SEQ ID NO: 758819 - DNA, 33 bp, Homo sapien
tttgacattttaagccgcaacaactacttcaaa

SEQ ID NO: 758820 - DNA, 33 bp, Homo sapien
tttgacattttaagcctcaacaactacttcaaa

SEQ ID NO: 758821 - DNA, 33 bp, Homo sapien
ctgaaaggactaccagcatcattgaagtgaaga

SEQ ID NO: 758822 - DNA, 33 bp, Homo sapien
ctgaaaggactaccagtatcattgaagtgaaga

SEQ ID NO: 758823 - DNA, 33 bp, Homo sapien
agtcacaagtatctcaagtatcctccaagctgt

SEQ ID NO: 758824 - DNA, 33 bp, Homo sapien
agtcacaagtatctcaggtatcctccaagctgt

SEQ ID NO: 758825 - DNA, 33 bp, Homo sapien
actacacggaaaagatcaggcagattttcttgc

SEQ ID NO: 758826 - DNA, 33 bp, Homo sapien
actacacggaaaagattaggcagattttcttgc

SEQ ID NO: 758827 - DNA, 33 bp, Homo sapien
catacatgggtgagggaattttctattggatca

SEQ ID NO: 758828 - DNA, 33 bp, Homo sapien
catacatgggtgagggcattttctattggatca

SEQ ID NO: 758829 - DNA, 33 bp, Homo sapien
agtagaattaaaacaaccctcttgaatagtgat

SEQ ID NO: 758830 - DNA, 33 bp, Homo sapien
agtagaattaaaacaagcctcttgaatagtgat

SEQ ID NO: 758831 - DNA, 33 bp, Homo sapien
attcagtagctatagtcacattgccgtttgtct

SEQ ID NO: 758832 - DNA, 33 bp, Homo sapien
attcagtagctatagttacattgccgtttgtct

SEQ ID NO: 758833 - DNA, 33 bp, Homo sapien
aatatggtattaaaacactattactttctgtat

SEQ ID NO: 758834 - DNA, 33 bp, Homo sapien
aatatggtattaaaacgctattactttctgtat

SEQ ID NO: 758835 - DNA, 33 bp, Homo sapien
ttttggaaccgcttcacaattaacctgcagcaa

SEQ ID NO: 758836 - DNA, 33 bp, Homo sapien
ttttggaaccgcttcataattaacctgcagcaa

SEQ ID NO: 758837 - DNA, 33 bp, Homo sapien
taccaagcagatcatagcttcacaggaaaaccc

SEQ ID NO: 758838 - DNA, 33 bp, Homo sapien
taccaagcagatcatatcttcacaggaaaaccc

SEQ ID NO: 758839 - DNA, 33 bp, Homo sapien
tggatccaaagccacaagaggaaatattaaaag

SEQ ID NO: 758840 - DNA, 33 bp, Homo sapien
tggatccaaagccacaggaggaaatattaaaag

SEQ ID NO: 758841 - DNA, 33 bp, Homo sapien
taatccaaatacacacagtggagaaaagggaat

SEQ ID NO: 758842 - DNA, 33 bp, Homo sapien
taatccaaatacacacggtggagaaaagggaat

SEQ ID NO: 758843 - DNA, 33 bp, Homo sapien
gtaagtttgcatcttaagagtttcttcttgact

SEQ ID NO: 758844 - DNA, 33 bp, Homo sapien
gtaagtttgcatcttaggagtttcttcttgact

SEQ ID NO: 758845 - DNA, 33 bp, Homo sapien
ctcatgtctgggtgacccacaaggtaaattagg

SEQ ID NO: 758846 - DNA, 33 bp, Homo sapien
ctcatgtctgggtgactcacaaggtaaattagg

SEQ ID NO: 758847 - DNA, 33 bp, Homo sapien
gagatattaacatttaggctttggcttacctga

SEQ ID NO: 758848 - DNA, 33 bp, Homo sapien
gagatattaacatttatgctttggcttacctga

SEQ ID NO: 758849 - DNA, 33 bp, Homo sapien
aaaaattcatagtgcaagtcgctgtagcaaaaa

SEQ ID NO: 758850 - DNA, 33 bp, Homo sapien
aaaaattcatagtgcaggtcgctgtagcaaaaa

SEQ ID NO: 758851 - DNA, 33 bp, Homo sapien
ccctgcagggtttctcaatgcctttaatgtgca

SEQ ID NO: 758852 - DNA, 33 bp, Homo sapien
ccctgcagggtttctccatgcctttaatgtgca

SEQ ID NO: 758853 - DNA, 33 bp, Homo sapien
cagcatttcgtgttaccggttattaagagtatt

SEQ ID NO: 758854 - DNA, 33 bp, Homo sapien
cagcatttcgtgttactggttattaagagtatt

SEQ ID NO: 758855 - DNA, 33 bp, Homo sapien
gaaacatttactcgaacaaggaaccaagtagaa

SEQ ID NO: 758856 - DNA, 33 bp, Homo sapien
gaaacatttactcgaagaaggaaccaagtagaa

SEQ ID NO: 758857 - DNA, 33 bp, Homo sapien
tacagattcccagataagtagatatgttagggg

SEQ ID NO: 758858 - DNA, 33 bp, Homo sapien
tacagattcccagataggtagatatgttagggg

SEQ ID NO: 758859 - DNA, 33 bp, Homo sapien
ggaggtgctctcagtacgcctctttctgtacct

SEQ ID NO: 758860 - DNA, 33 bp, Homo sapien
ggaggtgctctcagtatgcctctttctgtacct

SEQ ID NO: 758861 - DNA, 33 bp, Homo sapien
tggcaagagatgacccaagttctcagagtcccc

SEQ ID NO: 758862 - DNA, 33 bp, Homo sapien
tggcaagagatgacccgagttctcagagtcccc

SEQ ID NO: 758863 - DNA, 33 bp, Homo sapien
cgcattgatgttaagaatcagaatcagtactga

SEQ ID NO: 758864 - DNA, 33 bp, Homo sapien
cgcattgatgttaagagtcagaatcagtactga

SEQ ID NO: 758865 - DNA, 33 bp, Homo sapien
tgaaagagactggtaacatgaaattgcagaaga

SEQ ID NO: 758866 - DNA, 33 bp, Homo sapien
tgaaagagactggtaatatgaaattgcagaaga

SEQ ID NO: 758867 - DNA, 33 bp, Homo sapien
tgcttaacaatgccagactaccaactcatatga

SEQ ID NO: 758868 - DNA, 33 bp, Homo sapien
tgcttaacaatgccaggctaccaactcatatga

SEQ ID NO: 758869 - DNA, 33 bp, Homo sapien
ctgggagaactttccacagcaaagacagaagat

SEQ ID NO: 758870 - DNA, 33 bp, Homo sapien
ctgggagaactttccagagcaaagacagaagat

SEQ ID NO: 758871 - DNA, 33 bp, Homo sapien
atggtcatgccaaaaccgggctaaggtatgctt

SEQ ID NO: 758872 - DNA, 33 bp, Homo sapien
atggtcatgccaaaactgggctaaggtatgctt

SEQ ID NO: 758873 - DNA, 33 bp, Homo sapien
atgagtcattgtgttacgtgctaaaagatgcaa

SEQ ID NO: 758874 - DNA, 33 bp, Homo sapien
atgagtcattgtgttaggtgctaaaagatgcaa

SEQ ID NO: 758875 - DNA, 33 bp, Homo sapien
aactgtttctcatttagctttgcatcttttagc

SEQ ID NO: 758876 - DNA, 33 bp, Homo sapien
aactgtttctcatttatctttgcatcttttagc

SEQ ID NO: 758877 - DNA, 33 bp, Homo sapien
gctgaagacagaatcaatcatgtcctcagagca

SEQ ID NO: 758878 - DNA, 33 bp, Homo sapien
gctgaagacagaatcagtcatgtcctcagagca

SEQ ID NO: 758879 - DNA, 33 bp, Homo sapien
ggtaactctgttgttacgctttgaaaggttttc

SEQ ID NO: 758880 - DNA, 33 bp, Homo sapien
ggtaactctgttgttatgctttgaaaggttttc

SEQ ID NO: 758881 - DNA, 33 bp, Homo sapien
tgaggtactatgctcaatatactaagatcagtc

SEQ ID NO: 758882 - DNA, 33 bp, Homo sapien
tgaggtactatgctcagtatactaagatcagtc

SEQ ID NO: 758883 - DNA, 33 bp, Homo sapien
ttactttatgtggtaaaggaacttgcagatgtg

SEQ ID NO: 758884 - DNA, 33 bp, Homo sapien
ttactttatgtggtaagggaacttgcagatgtg

SEQ ID NO: 758885 - DNA, 33 bp, Homo sapien
agatcctcaaagggaaaacggctgctgccacct

SEQ ID NO: 758886 - DNA, 33 bp, Homo sapien
agatcctcaaagggaagacggctgctgccacct

SEQ ID NO: 758887 - DNA, 33 bp, Homo sapien
catgatgaagcctaagaattgggactcttgtcg

SEQ ID NO: 758888 - DNA, 33 bp, Homo sapien
catgatgaagcctaaggattgggactcttgtcg

SEQ ID NO: 758889 - DNA, 33 bp, Homo sapien
gaggccatgtcaaacaaaaacagggagaaattg

SEQ ID NO: 758890 - DNA, 33 bp, Homo sapien
gaggccatgtcaaacagaaacagggagaaattg

SEQ ID NO: 758891 - DNA, 33 bp, Homo sapien
atctgaaaaccatacactgaggagcgcctcaat

SEQ ID NO: 758892 - DNA, 33 bp, Homo sapien
atctgaaaaccatacagtgaggagcgcctcaat

SEQ ID NO: 758893 - DNA, 33 bp, Homo sapien
acaaatgtacttcttacgtttcttgattgatat

SEQ ID NO: 758894 - DNA, 33 bp, Homo sapien
acaaatgtacttcttaggtttcttgattgatat

SEQ ID NO: 758895 - DNA, 33 bp, Homo sapien
aaatcacaggaaaaccgctaatttagtctggtc

SEQ ID NO: 758896 - DNA, 33 bp, Homo sapien
aaatcacaggaaaacctctaatttagtctggtc

SEQ ID NO: 758897 - DNA, 33 bp, Homo sapien
attgtctttaattttaccatgctcctcaaaagc

SEQ ID NO: 758898 - DNA, 33 bp, Homo sapien
attgtctttaattttatcatgctcctcaaaagc

SEQ ID NO: 758899 - DNA, 33 bp, Homo sapien
atcttgaagatgtccacaaatctcaactatcaa

SEQ ID NO: 758900 - DNA, 33 bp, Homo sapien
atcttgaagatgtccataaatctcaactatcaa

SEQ ID NO: 758901 - DNA, 33 bp, Homo sapien
caaccatttatggaacaccaattatctgcctaa

SEQ ID NO: 758902 - DNA, 33 bp, Homo sapien
caaccatttatggaacgccaattatctgcctaa

SEQ ID NO: 758903 - DNA, 33 bp, Homo sapien
tggcctgactggaggcaaccatggagtggtcaa

SEQ ID NO: 758904 - DNA, 33 bp, Homo sapien
tggcctgactggaggcgaccatggagtggtcaa

SEQ ID NO: 758905 - DNA, 33 bp, Homo sapien
taaacatactgggttacggagtcagccccactg

SEQ ID NO: 758906 - DNA, 33 bp, Homo sapien
taaacatactgggttatggagtcagccccactg

SEQ ID NO: 758907 - DNA, 33 bp, Homo sapien
acaagtaaattaatcagagttgctcacaacagt

SEQ ID NO: 758908 - DNA, 33 bp, Homo sapien
acaagtaaattaatcatagttgctcacaacagt

SEQ ID NO: 758909 - DNA, 33 bp, Homo sapien
aaaataaaggaatgtaagtttatgaaaagtcaa

SEQ ID NO: 758910 - DNA, 33 bp, Homo sapien
aaaataaaggaatgtaggtttatgaaaagtcaa

SEQ ID NO: 758911 - DNA, 33 bp, Homo sapien
ttagtctccaaaaatcagaaaattggttccatg

SEQ ID NO: 758912 - DNA, 33 bp, Homo sapien
ttagtctccaaaaatcggaaaattggttccatg

SEQ ID NO: 758913 - DNA, 33 bp, Homo sapien
tgggctctgctcacaaagaacatacagtctagt

SEQ ID NO: 758914 - DNA, 33 bp, Homo sapien
tgggctctgctcacaaggaacatacagtctagt

SEQ ID NO: 758915 - DNA, 33 bp, Homo sapien
ctttaaatacctacaccgtccttgggaaacaaa

SEQ ID NO: 758916 - DNA, 33 bp, Homo sapien
ctttaaatacctacactgtccttgggaaacaaa

SEQ ID NO: 758917 - DNA, 33 bp, Homo sapien
ggagtaaggataaacaatagagcgttagcaatc

SEQ ID NO: 758918 - DNA, 33 bp, Homo sapien
ggagtaaggataaacattagagcgttagcaatc

SEQ ID NO: 758919 - DNA, 33 bp, Homo sapien
tttgctatcccctggacaaatgtgtgaattctt

SEQ ID NO: 758920 - DNA, 33 bp, Homo sapien
tttgctatcccctggagaaatgtgtgaattctt

SEQ ID NO: 758921 - DNA, 33 bp, Homo sapien
ctgtcttaacatgacaaatcctttgcccagaag

SEQ ID NO: 758922 - DNA, 33 bp, Homo sapien
ctgtcttaacatgacagatcctttgcccagaag

SEQ ID NO: 758923 - DNA, 33 bp, Homo sapien
ttttattacttttctcaaacagctggttagttc

SEQ ID NO: 758924 - DNA, 33 bp, Homo sapien
ttttattacttttctcgaacagctggttagttc

SEQ ID NO: 758925 - DNA, 33 bp, Homo sapien
ctactgatagggaatacgcagacttctctcctg

SEQ ID NO: 758926 - DNA, 33 bp, Homo sapien
ctactgatagggaatatgcagacttctctcctg

SEQ ID NO: 758927 - DNA, 33 bp, Homo sapien
gtgatcttgttgaacaaacaggatgcagtagct

SEQ ID NO: 758928 - DNA, 33 bp, Homo sapien
gtgatcttgttgaacagacaggatgcagtagct

SEQ ID NO: 758929 - DNA, 33 bp, Homo sapien
ctgagggtaaattatacaaccaattagaaactt

SEQ ID NO: 758930 - DNA, 33 bp, Homo sapien
ctgagggtaaattatagaaccaattagaaactt

SEQ ID NO: 758931 - DNA, 33 bp, Homo sapien
aaacttccacactgtcaactttcagctttcatt

SEQ ID NO: 758932 - DNA, 33 bp, Homo sapien
aaacttccacactgtcgactttcagctttcatt

SEQ ID NO: 758933 - DNA, 33 bp, Homo sapien
gaatttccaatatgtccctgttgtttcactttt

SEQ ID NO: 758934 - DNA, 33 bp, Homo sapien
gaatttccaatatgtctctgttgtttcactttt

SEQ ID NO: 758935 - DNA, 33 bp, Homo sapien
cccagaggcctatcaaaccaatgactttttatt

SEQ ID NO: 758936 - DNA, 33 bp, Homo sapien
cccagaggcctatcaacccaatgactttttatt

SEQ ID NO: 758937 - DNA, 33 bp, Homo sapien
cacttcaagacctacaagagtgctccttgaata

SEQ ID NO: 758938 - DNA, 33 bp, Homo sapien
cacttcaagacctacatgagtgctccttgaata

SEQ ID NO: 758939 - DNA, 33 bp, Homo sapien
taaaaagtgttggtgacgatgtagagaaattgg

SEQ ID NO: 758940 - DNA, 33 bp, Homo sapien
taaaaagtgttggtgatgatgtagagaaattgg

SEQ ID NO: 758941 - DNA, 33 bp, Homo sapien
caaatatccaactgccaactctaccgctcccct

SEQ ID NO: 758942 - DNA, 33 bp, Homo sapien
caaatatccaactgccgactctaccgctcccct

SEQ ID NO: 758943 - DNA, 33 bp, Homo sapien
tggcctggtcttcaaagcagctaagttctcatc

SEQ ID NO: 758944 - DNA, 33 bp, Homo sapien
tggcctggtcttcaaatcagctaagttctcatc

SEQ ID NO: 758945 - DNA, 33 bp, Homo sapien
tctatcctcaaaagaacggtcatggaaattcta

SEQ ID NO: 758946 - DNA, 33 bp, Homo sapien
tctatcctcaaaagaatggtcatggaaattcta

SEQ ID NO: 758947 - DNA, 33 bp, Homo sapien
ctaaggcagagtggaaaaaagggctgtcgaagg

SEQ ID NO: 758948 - DNA, 33 bp, Homo sapien
ctaaggcagagtggaagaaagggctgtcgaagg

SEQ ID NO: 758949 - DNA, 33 bp, Homo sapien
gaccctaggtggcacccgaagcatgaaatatgt

SEQ ID NO: 758950 - DNA, 33 bp, Homo sapien
gaccctaggtggcacctgaagcatgaaatatgt

SEQ ID NO: 758951 - DNA, 33 bp, Homo sapien
accactctgtgagctacgtcctatggaacaaga

SEQ ID NO: 758952 - DNA, 33 bp, Homo sapien
accactctgtgagctatgtcctatggaacaaga

SEQ ID NO: 758953 - DNA, 33 bp, Homo sapien
cccgtgaccgtagaccaggatttggcagttgag

SEQ ID NO: 758954 - DNA, 33 bp, Homo sapien
cccgtgaccgtagaccgggatttggcagttgag

SEQ ID NO: 758955 - DNA, 33 bp, Homo sapien
atatgtgttaagtgcccactgggaaccaagaac

SEQ ID NO: 758956 - DNA, 33 bp, Homo sapien
atatgtgttaagtgcctactgggaaccaagaac

SEQ ID NO: 758957 - DNA, 33 bp, Homo sapien
atgttgaaactctattcaaagttgtacatttgt

SEQ ID NO: 758958 - DNA, 33 bp, Homo sapien
atgttgaaactctattgaaagttgtacatttgt

SEQ ID NO: 758959 - DNA, 33 bp, Homo sapien
cagcagtatgaaaacgaactaatacaagggcga

SEQ ID NO: 758960 - DNA, 33 bp, Homo sapien
cagcagtatgaaaacgcactaatacaagggcga

SEQ ID NO: 758961 - DNA, 33 bp, Homo sapien
actccactgagtccaacgtgtgtcaacagggaa

SEQ ID NO: 758962 - DNA, 33 bp, Homo sapien
actccactgagtccaatgtgtgtcaacagggaa

SEQ ID NO: 758963 - DNA, 33 bp, Homo sapien
atttattctgaagccactgagacttaaacttca

SEQ ID NO: 758964 - DNA, 33 bp, Homo sapien
atttattctgaagccagtgagacttaaacttca

SEQ ID NO: 758965 - DNA, 33 bp, Homo sapien
ctttctctgaatctgaagacaaaatgtgaaacc

SEQ ID NO: 758966 - DNA, 33 bp, Homo sapien
ctttctctgaatctgaggacaaaatgtgaaacc

SEQ ID NO: 758967 - DNA, 33 bp, Homo sapien
ttctctgggctcgttgaaactctgttctcagtg

SEQ ID NO: 758968 - DNA, 33 bp, Homo sapien
ttctctgggctcgttgtaactctgttctcagtg

SEQ ID NO: 758969 - DNA, 33 bp, Homo sapien
atggtgatggttttagaaaaatcagtgcagtag

SEQ ID NO: 758970 - DNA, 33 bp, Homo sapien
atggtgatggttttaggaaaatcagtgcagtag

SEQ ID NO: 758971 - DNA, 33 bp, Homo sapien
cctttgtagatgttgacgaaaacaatctgttac

SEQ ID NO: 758972 - DNA, 33 bp, Homo sapien
cctttgtagatgttgatgaaaacaatctgttac

SEQ ID NO: 758973 - DNA, 33 bp, Homo sapien
tgaacccattacattacaaaccatactgcaaca

SEQ ID NO: 758974 - DNA, 33 bp, Homo sapien
tgaacccattacattataaaccatactgcaaca

SEQ ID NO: 758975 - DNA, 33 bp, Homo sapien
ccttgaatcactgcatcatctacttcacactgg

SEQ ID NO: 758976 - DNA, 33 bp, Homo sapien
ccttgaatcactgcatgatctacttcacactgg

SEQ ID NO: 758977 - DNA, 33 bp, Homo sapien
ggaatgagccttgcaactgtggaattattagct

SEQ ID NO: 758978 - DNA, 33 bp, Homo sapien
ggaatgagccttgcaagtgtggaattattagct

SEQ ID NO: 758979 - DNA, 33 bp, Homo sapien
acatgtaaactcaaaacgccataaacaaattca

SEQ ID NO: 758980 - DNA, 33 bp, Homo sapien
acatgtaaactcaaaatgccataaacaaattca

SEQ ID NO: 758981 - DNA, 33 bp, Homo sapien
aaggaatccaaaataaaacgtttgctgggaatt

SEQ ID NO: 758982 - DNA, 33 bp, Homo sapien
aaggaatccaaaataatacgtttgctgggaatt

SEQ ID NO: 758983 - DNA, 33 bp, Homo sapien
actaaacttacgaccacgtaaaagatcaataag

SEQ ID NO: 758984 - DNA, 33 bp, Homo sapien
actaaacttacgaccatgtaaaagatcaataag

SEQ ID NO: 758985 - DNA, 33 bp, Homo sapien
aaacttccagaacatacgtagagcaggtgcctt

SEQ ID NO: 758986 - DNA, 33 bp, Homo sapien
aaacttccagaacatatgtagagcaggtgcctt

SEQ ID NO: 758987 - DNA, 33 bp, Homo sapien
gcttatgtgcatccacactgtgctcatggagca

SEQ ID NO: 758988 - DNA, 33 bp, Homo sapien
gcttatgtgcatccacgctgtgctcatggagca

SEQ ID NO: 758989 - DNA, 33 bp, Homo sapien
tagcttttgcacaacaatggcagggcttgtcgt

SEQ ID NO: 758990 - DNA, 33 bp, Homo sapien
tagcttttgcacaacagtggcagggcttgtcgt

SEQ ID NO: 758991 - DNA, 33 bp, Homo sapien
aatagatgagaagaggccaaatgcaatctgaat

SEQ ID NO: 758992 - DNA, 33 bp, Homo sapien
aatagatgagaagaggtcaaatgcaatctgaat

SEQ ID NO: 758993 - DNA, 33 bp, Homo sapien
ggagaagatcaactaccaaacacaactttcatc

SEQ ID NO: 758994 - DNA, 33 bp, Homo sapien
ggagaagatcaactacgaaacacaactttcatc

SEQ ID NO: 758995 - DNA, 33 bp, Homo sapien
atagacctgctctgtaagaatgctcaagggagt

SEQ ID NO: 758996 - DNA, 33 bp, Homo sapien
atagacctgctctgtaggaatgctcaagggagt

SEQ ID NO: 758997 - DNA, 33 bp, Homo sapien
acagtgaatacctgaaccctatttctagcttgg

SEQ ID NO: 758998 - DNA, 33 bp, Homo sapien
acagtgaatacctgaagcctatttctagcttgg

SEQ ID NO: 758999 - DNA, 33 bp, Homo sapien
taaacttcactttttcaaatggaacatgagaaa

SEQ ID NO: 759000 - DNA, 33 bp, Homo sapien
taaacttcactttttcgaatggaacatgagaaa

SEQ ID NO: 759001 - DNA, 33 bp, Homo sapien
ccttcgactcgagcacagtccaagtttgcaccc

SEQ ID NO: 759002 - DNA, 33 bp, Homo sapien
ccttcgactcgagcacggtccaagtttgcaccc

SEQ ID NO: 759003 - DNA, 33 bp, Homo sapien
ttgtttgactttgggaaaagttcttaatctcac

SEQ ID NO: 759004 - DNA, 33 bp, Homo sapien
ttgtttgactttgggagaagttcttaatctcac

SEQ ID NO: 759005 - DNA, 33 bp, Homo sapien
gagcttgagatgtaaaaaggtagggagattccc

SEQ ID NO: 759006 - DNA, 33 bp, Homo sapien
gagcttgagatgtaaagaggtagggagattccc

SEQ ID NO: 759007 - DNA, 33 bp, Homo sapien
ctgctttgtggaccgacgtcatggcagcttctc

SEQ ID NO: 759008 - DNA, 33 bp, Homo sapien
ctgctttgtggaccgatgtcatggcagcttctc

SEQ ID NO: 759009 - DNA, 33 bp, Homo sapien
tttgtatgtagcatgaacccactttagtggaaa

SEQ ID NO: 759010 - DNA, 33 bp, Homo sapien
tttgtatgtagcatgaccccactttagtggaaa

SEQ ID NO: 759011 - DNA, 33 bp, Homo sapien
cttcagcaatgatcacacaagtcagctctggag

SEQ ID NO: 759012 - DNA, 33 bp, Homo sapien
cttcagcaatgatcacgcaagtcagctctggag

SEQ ID NO: 759013 - DNA, 33 bp, Homo sapien
actgctgcaatgtagactatattcactaaaatt

SEQ ID NO: 759014 - DNA, 33 bp, Homo sapien
actgctgcaatgtagagtatattcactaaaatt

SEQ ID NO: 759015 - DNA, 33 bp, Homo sapien
tatagatgagaaaaccaagctcaaaaaaatcta

SEQ ID NO: 759016 - DNA, 33 bp, Homo sapien
tatagatgagaaaaccgagctcaaaaaaatcta

SEQ ID NO: 759017 - DNA, 33 bp, Homo sapien
acagtcactctcctaacatgcactgggcaccta

SEQ ID NO: 759018 - DNA, 33 bp, Homo sapien
acagtcactctcctaatatgcactgggcaccta

SEQ ID NO: 759019 - DNA, 33 bp, Homo sapien
actgtcctagacacctgacgtaggtcatctcat

SEQ ID NO: 759020 - DNA, 33 bp, Homo sapien
actgtcctagacaccttacgtaggtcatctcat

SEQ ID NO: 759021 - DNA, 33 bp, Homo sapien
agcaggttctgacttacgttgttggaaaatgac

SEQ ID NO: 759022 - DNA, 33 bp, Homo sapien
agcaggttctgacttatgttgttggaaaatgac

SEQ ID NO: 759023 - DNA, 33 bp, Homo sapien
gtgagagtggcaagacagggtgagactcagatg

SEQ ID NO: 759024 - DNA, 33 bp, Homo sapien
gtgagagtggcaagacggggtgagactcagatg

SEQ ID NO: 759025 - DNA, 33 bp, Homo sapien
agttgataccagaaaccgtgactttatagggtc

SEQ ID NO: 759026 - DNA, 33 bp, Homo sapien
agttgataccagaaactgtgactttatagggtc

SEQ ID NO: 759027 - DNA, 33 bp, Homo sapien
cttgctgttccagacaagccttctctttcccag

SEQ ID NO: 759028 - DNA, 33 bp, Homo sapien
cttgctgttccagacaggccttctctttcccag

SEQ ID NO: 759029 - DNA, 33 bp, Homo sapien
tttaaatgggagttgaaattgtaaataagtgag

SEQ ID NO: 759030 - DNA, 33 bp, Homo sapien
tttaaatgggagttgacattgtaaataagtgag

SEQ ID NO: 759031 - DNA, 33 bp, Homo sapien
tggtagaatgatcctacgtcctttggtggcttc

SEQ ID NO: 759032 - DNA, 33 bp, Homo sapien
tggtagaatgatcctatgtcctttggtggcttc

SEQ ID NO: 759033 - DNA, 33 bp, Homo sapien
gttatgttattcatcaacagcaaaaatacagta

SEQ ID NO: 759034 - DNA, 33 bp, Homo sapien
gttatgttattcatcatcagcaaaaatacagta

SEQ ID NO: 759035 - DNA, 33 bp, Homo sapien
tgcttggccacacaataagcactcaagaatatg

SEQ ID NO: 759036 - DNA, 33 bp, Homo sapien
tgcttggccacacaatgagcactcaagaatatg

SEQ ID NO: 759037 - DNA, 33 bp, Homo sapien
tcaacagaatgagccaaagttgaatgaatcctt

SEQ ID NO: 759038 - DNA, 33 bp, Homo sapien
tcaacagaatgagccagagttgaatgaatcctt

SEQ ID NO: 759039 - DNA, 33 bp, Homo sapien
tcatccaggctataaaaaatagagaagcagata

SEQ ID NO: 759040 - DNA, 33 bp, Homo sapien
tcatccaggctataaataatagagaagcagata

SEQ ID NO: 759041 - DNA, 33 bp, Homo sapien
accatattgcattcaaaacaaattttagtgagt

SEQ ID NO: 759042 - DNA, 33 bp, Homo sapien
accatattgcattcaagacaaattttagtgagt

SEQ ID NO: 759043 - DNA, 33 bp, Homo sapien
tgggacccaggaaatcaagtggccatgcactga

SEQ ID NO: 759044 - DNA, 33 bp, Homo sapien
tgggacccaggaaatcgagtggccatgcactga

SEQ ID NO: 759045 - DNA, 33 bp, Homo sapien
ataaactagctctgtgaaaagtaagaccattgc

SEQ ID NO: 759046 - DNA, 33 bp, Homo sapien
ataaactagctctgtggaaagtaagaccattgc

SEQ ID NO: 759047 - DNA, 33 bp, Homo sapien
gactgctttatttaaactcacctgtcagctggt

SEQ ID NO: 759048 - DNA, 33 bp, Homo sapien
gactgctttatttaaattcacctgtcagctggt

SEQ ID NO: 759049 - DNA, 33 bp, Homo sapien
cctgataggaagcagacggaaccctcagcaggt

SEQ ID NO: 759050 - DNA, 33 bp, Homo sapien
cctgataggaagcagatggaaccctcagcaggt

SEQ ID NO: 759051 - DNA, 33 bp, Homo sapien
ccttcttttagtgggaccctgatcaactttaaa

SEQ ID NO: 759052 - DNA, 33 bp, Homo sapien
ccttcttttagtgggatcctgatcaactttaaa

SEQ ID NO: 759053 - DNA, 33 bp, Homo sapien
ttaaatggaaagatcactacttcgtgcttaaga

SEQ ID NO: 759054 - DNA, 33 bp, Homo sapien
ttaaatggaaagatcagtacttcgtgcttaaga

SEQ ID NO: 759055 - DNA, 33 bp, Homo sapien
aggtggaagagaaaaccgtatcatgattgtgag

SEQ ID NO: 759056 - DNA, 33 bp, Homo sapien
aggtggaagagaaaactgtatcatgattgtgag

SEQ ID NO: 759057 - DNA, 33 bp, Homo sapien
aaattcttcacttcaccctgtgttcatgccctt

SEQ ID NO: 759058 - DNA, 33 bp, Homo sapien
aaattcttcacttcacgctgtgttcatgccctt

SEQ ID NO: 759059 - DNA, 33 bp, Homo sapien
aagtaaacatttcataactcactcttaacttcg

SEQ ID NO: 759060 - DNA, 33 bp, Homo sapien
aagtaaacatttcatatctcactcttaacttcg

SEQ ID NO: 759061 - DNA, 33 bp, Homo sapien
ctataactgcctttaacagtgccaatattcatg

SEQ ID NO: 759062 - DNA, 33 bp, Homo sapien
ctataactgcctttaatagtgccaatattcatg

SEQ ID NO: 759063 - DNA, 33 bp, Homo sapien
atgatggtgtgtccataaaacttattaaactta

SEQ ID NO: 759064 - DNA, 33 bp, Homo sapien
atgatggtgtgtccattaaacttattaaactta

SEQ ID NO: 759065 - DNA, 33 bp, Homo sapien
aacccacttatgcttacggactctgagagctaa

SEQ ID NO: 759066 - DNA, 33 bp, Homo sapien
aacccacttatgcttatggactctgagagctaa

SEQ ID NO: 759067 - DNA, 33 bp, Homo sapien
tttggttgactaagtaacataagctcaaacaaa

SEQ ID NO: 759068 - DNA, 33 bp, Homo sapien
tttggttgactaagtaccataagctcaaacaaa

SEQ ID NO: 759069 - DNA, 33 bp, Homo sapien
ttaaatagaggaaataaaaatcttagagtagtc

SEQ ID NO: 759070 - DNA, 33 bp, Homo sapien
ttaaatagaggaaatacaaatcttagagtagtc

SEQ ID NO: 759071 - DNA, 33 bp, Homo sapien
ccaatcttccaaagcccgcaggaaataatttgg

SEQ ID NO: 759072 - DNA, 33 bp, Homo sapien
ccaatcttccaaagcctgcaggaaataatttgg

SEQ ID NO: 759073 - DNA, 33 bp, Homo sapien
aattttctcaccttagaagttaattttgtttca

SEQ ID NO: 759074 - DNA, 33 bp, Homo sapien
aattttctcaccttaggagttaattttgtttca

SEQ ID NO: 759075 - DNA, 33 bp, Homo sapien
ctaaagctcatccaaactctgtgcttcctatat

SEQ ID NO: 759076 - DNA, 33 bp, Homo sapien
ctaaagctcatccaaattctgtgcttcctatat

SEQ ID NO: 759077 - DNA, 33 bp, Homo sapien
taaaagctaactaataggaaataggctaaaagt

SEQ ID NO: 759078 - DNA, 33 bp, Homo sapien
taaaagctaactaatatgaaataggctaaaagt

SEQ ID NO: 759079 - DNA, 33 bp, Homo sapien
tcgctattaaaatctccccataagtctgttgga

SEQ ID NO: 759080 - DNA, 33 bp, Homo sapien
tcgctattaaaatctctccataagtctgttgga

SEQ ID NO: 759081 - DNA, 33 bp, Homo sapien
tggtgaaacataattccgaaaacaaatttgcaa

SEQ ID NO: 759082 - DNA, 33 bp, Homo sapien
tggtgaaacataattctgaaaacaaatttgcaa

SEQ ID NO: 759083 - DNA, 33 bp, Homo sapien
tatctctgatttggaacgaaaagccttgcccag

SEQ ID NO: 759084 - DNA, 33 bp, Homo sapien
tatctctgatttggaatgaaaagccttgcccag

SEQ ID NO: 759085 - DNA, 33 bp, Homo sapien
gaggtgaatggctaagaaactaagaaaccaaaa

SEQ ID NO: 759086 - DNA, 33 bp, Homo sapien
gaggtgaatggctaaggaactaagaaaccaaaa

SEQ ID NO: 759087 - DNA, 33 bp, Homo sapien
atttctgttatttcaaactacctgctttgtggg

SEQ ID NO: 759088 - DNA, 33 bp, Homo sapien
atttctgttatttcaagctacctgctttgtggg

SEQ ID NO: 759089 - DNA, 33 bp, Homo sapien
gaaatgagatgggctacacaatgatcaatgcta

SEQ ID NO: 759090 - DNA, 33 bp, Homo sapien
gaaatgagatgggctagacaatgatcaatgcta

SEQ ID NO: 759091 - DNA, 33 bp, Homo sapien
tctaattttgatatgccatgttttgagattata

SEQ ID NO: 759092 - DNA, 33 bp, Homo sapien
tctaattttgatatgctatgttttgagattata

SEQ ID NO: 759093 - DNA, 33 bp, Homo sapien
aacaacaatatttcaaagtttatagtacctctt

SEQ ID NO: 759094 - DNA, 33 bp, Homo sapien
aacaacaatatttcaacgtttatagtacctctt

SEQ ID NO: 759095 - DNA, 33 bp, Homo sapien
cacagcattgtgagaaataacttgttaactcac

SEQ ID NO: 759096 - DNA, 33 bp, Homo sapien
cacagcattgtgagaagtaacttgttaactcac

SEQ ID NO: 759097 - DNA, 33 bp, Homo sapien
agccagcactagtaaacgtggttggtgaaaaca

SEQ ID NO: 759098 - DNA, 33 bp, Homo sapien
agccagcactagtaaatgtggttggtgaaaaca

SEQ ID NO: 759099 - DNA, 33 bp, Homo sapien
aaaccaaaattctctaccactttagggcaaagg

SEQ ID NO: 759100 - DNA, 33 bp, Homo sapien
aaaccaaaattctctatcactttagggcaaagg

SEQ ID NO: 759101 - DNA, 33 bp, Homo sapien
taaattaggagagagcaatatgaacatgaggga

SEQ ID NO: 759102 - DNA, 33 bp, Homo sapien
taaattaggagagagcgatatgaacatgaggga

SEQ ID NO: 759103 - DNA, 33 bp, Homo sapien
ctggtgtgttaaaaaccgcagaaagctctttca

SEQ ID NO: 759104 - DNA, 33 bp, Homo sapien
ctggtgtgttaaaaactgcagaaagctctttca

SEQ ID NO: 759105 - DNA, 33 bp, Homo sapien
agtgcattggaaggacagtagacctgttcatag

SEQ ID NO: 759106 - DNA, 33 bp, Homo sapien
agtgcattggaaggacggtagacctgttcatag

SEQ ID NO: 759107 - DNA, 33 bp, Homo sapien
agtagaaccaggatgacagcctactcaggccct

SEQ ID NO: 759108 - DNA, 33 bp, Homo sapien
agtagaaccaggatgatagcctactcaggccct

SEQ ID NO: 759109 - DNA, 33 bp, Homo sapien
ttctatgccagcttcaaattctcccaaatgtcc

SEQ ID NO: 759110 - DNA, 33 bp, Homo sapien
ttctatgccagcttcagattctcccaaatgtcc

SEQ ID NO: 759111 - DNA, 33 bp, Homo sapien
ttatttgtgtggaaaactttctcagacaacatt

SEQ ID NO: 759112 - DNA, 33 bp, Homo sapien
ttatttgtgtggaaaagtttctcagacaacatt

SEQ ID NO: 759113 - DNA, 33 bp, Homo sapien
ttttcatgacactgaactgttgatgtgtctggg

SEQ ID NO: 759114 - DNA, 33 bp, Homo sapien
ttttcatgacactgaattgttgatgtgtctggg

SEQ ID NO: 759115 - DNA, 33 bp, Homo sapien
ctttgatgcttctctcaactctccattttccag

SEQ ID NO: 759116 - DNA, 33 bp, Homo sapien
ctttgatgcttctctcgactctccattttccag

SEQ ID NO: 759117 - DNA, 33 bp, Homo sapien
catcaatctgaaacaggaaagttccctgatgcc

SEQ ID NO: 759118 - DNA, 33 bp, Homo sapien
catcaatctgaaacagtaaagttccctgatgcc

SEQ ID NO: 759119 - DNA, 33 bp, Homo sapien
gttggctgcaaacaccgccaggtcagacttttc

SEQ ID NO: 759120 - DNA, 33 bp, Homo sapien
gttggctgcaaacacctccaggtcagacttttc

SEQ ID NO: 759121 - DNA, 33 bp, Homo sapien
agaaatggtcctcctgaatactgaaaagtctga

SEQ ID NO: 759122 - DNA, 33 bp, Homo sapien
agaaatggtcctcctggatactgaaaagtctga

SEQ ID NO: 759123 - DNA, 33 bp, Homo sapien
aaatatttcagtgtgaagttacatgattgccta

SEQ ID NO: 759124 - DNA, 33 bp, Homo sapien
aaatatttcagtgtgatgttacatgattgccta

SEQ ID NO: 759125 - DNA, 33 bp, Homo sapien
gtattaaggaccattacgagaaaaatatgtctt

SEQ ID NO: 759126 - DNA, 33 bp, Homo sapien
gtattaaggaccattatgagaaaaatatgtctt

SEQ ID NO: 759127 - DNA, 33 bp, Homo sapien
tcttctccttgaggtccgaaactatctcaaaca

SEQ ID NO: 759128 - DNA, 33 bp, Homo sapien
tcttctccttgaggtctgaaactatctcaaaca

SEQ ID NO: 759129 - DNA, 33 bp, Homo sapien
atctgtgagtccatacgggtaaaaataaagtga

SEQ ID NO: 759130 - DNA, 33 bp, Homo sapien
atctgtgagtccatactggtaaaaataaagtga

SEQ ID NO: 759131 - DNA, 33 bp, Homo sapien
acacccatgaagctgaaaaaattgaacaatata

SEQ ID NO: 759132 - DNA, 33 bp, Homo sapien
acacccatgaagctgacaaaattgaacaatata

SEQ ID NO: 759133 - DNA, 33 bp, Homo sapien
aaccttgcacaaagaacacttctgtgaggacat

SEQ ID NO: 759134 - DNA, 33 bp, Homo sapien
aaccttgcacaaagaatacttctgtgaggacat

SEQ ID NO: 759135 - DNA, 33 bp, Homo sapien
gccacttggtacgatacgaaatgatatttatct

SEQ ID NO: 759136 - DNA, 33 bp, Homo sapien
gccacttggtacgatatgaaatgatatttatct

SEQ ID NO: 759137 - DNA, 33 bp, Homo sapien
ttttgattacatttccaaacttttattgtgttt

SEQ ID NO: 759138 - DNA, 33 bp, Homo sapien
ttttgattacatttcctaacttttattgtgttt

SEQ ID NO: 759139 - DNA, 33 bp, Homo sapien
ctggtcaaaggaatcacgtaaggtctatatgca

SEQ ID NO: 759140 - DNA, 33 bp, Homo sapien
ctggtcaaaggaatcatgtaaggtctatatgca

SEQ ID NO: 759141 - DNA, 33 bp, Homo sapien
cccaacttggagataaacattgttaaatatgaa

SEQ ID NO: 759142 - DNA, 33 bp, Homo sapien
cccaacttggagataaccattgttaaatatgaa

SEQ ID NO: 759143 - DNA, 33 bp, Homo sapien
agctttgcattagagaactatttggatggtaaa

SEQ ID NO: 759144 - DNA, 33 bp, Homo sapien
agctttgcattagagagctatttggatggtaaa

SEQ ID NO: 759145 - DNA, 33 bp, Homo sapien
attaaaaagttattgacagcaatcatcatagat

SEQ ID NO: 759146 - DNA, 33 bp, Homo sapien
attaaaaagttattgagagcaatcatcatagat

SEQ ID NO: 759147 - DNA, 33 bp, Homo sapien
aagaaaaacagaggacaggaattacacaggtcc

SEQ ID NO: 759148 - DNA, 33 bp, Homo sapien
aagaaaaacagaggacgggaattacacaggtcc

SEQ ID NO: 759149 - DNA, 33 bp, Homo sapien
tgaatctctgcatcaactacaattaaaatacaa

SEQ ID NO: 759150 - DNA, 33 bp, Homo sapien
tgaatctctgcatcaattacaattaaaatacaa

SEQ ID NO: 759151 - DNA, 33 bp, Homo sapien
cagaagatgagaaggaagcaatgccaggttcag

SEQ ID NO: 759152 - DNA, 33 bp, Homo sapien
cagaagatgagaaggaggcaatgccaggttcag

SEQ ID NO: 759153 - DNA, 33 bp, Homo sapien
tggaagcaaccgtgacaccttcaataggtgaat

SEQ ID NO: 759154 - DNA, 33 bp, Homo sapien
tggaagcaaccgtgactccttcaataggtgaat

SEQ ID NO: 759155 - DNA, 33 bp, Homo sapien
tggacaaggaaattgaccctcacccgataatga

SEQ ID NO: 759156 - DNA, 33 bp, Homo sapien
tggacaaggaaattgatcctcacccgataatga

SEQ ID NO: 759157 - DNA, 33 bp, Homo sapien
catacaacataacagaatcataggagtgacttc

SEQ ID NO: 759158 - DNA, 33 bp, Homo sapien
catacaacataacagagtcataggagtgacttc

SEQ ID NO: 759159 - DNA, 33 bp, Homo sapien
ctgctctctgcttccaaaatggttccttgaatg

SEQ ID NO: 759160 - DNA, 33 bp, Homo sapien
ctgctctctgcttccagaatggttccttgaatg

SEQ ID NO: 759161 - DNA, 33 bp, Homo sapien
atgttgtaaaatcatgacagttatattaccaag

SEQ ID NO: 759162 - DNA, 33 bp, Homo sapien
atgttgtaaaatcatggcagttatattaccaag

SEQ ID NO: 759163 - DNA, 33 bp, Homo sapien
ttttaacatgaagtaaatccctaaggagccttt

SEQ ID NO: 759164 - DNA, 33 bp, Homo sapien
ttttaacatgaagtaattccctaaggagccttt

SEQ ID NO: 759165 - DNA, 33 bp, Homo sapien
gggtgaatgggaatcaccttccccggctgtcag

SEQ ID NO: 759166 - DNA, 33 bp, Homo sapien
gggtgaatgggaatcatcttccccggctgtcag

SEQ ID NO: 759167 - DNA, 33 bp, Homo sapien
aattaaagtaaccacaaaatcctgtagctgaca

SEQ ID NO: 759168 - DNA, 33 bp, Homo sapien
aattaaagtaaccacacaatcctgtagctgaca

SEQ ID NO: 759169 - DNA, 33 bp, Homo sapien
gaatgctggagggacactgtagaagagctcatc

SEQ ID NO: 759170 - DNA, 33 bp, Homo sapien
gaatgctggagggacagtgtagaagagctcatc

SEQ ID NO: 759171 - DNA, 33 bp, Homo sapien
gctgataaggtgtcccagcctcatcaaaagggc

SEQ ID NO: 759172 - DNA, 33 bp, Homo sapien
gctgataaggtgtcccggcctcatcaaaagggc

SEQ ID NO: 759173 - DNA, 33 bp, Homo sapien
gattttaatacagcaacgtgtgaaaacttcact

SEQ ID NO: 759174 - DNA, 33 bp, Homo sapien
gattttaatacagcaatgtgtgaaaacttcact

SEQ ID NO: 759175 - DNA, 33 bp, Homo sapien
tggatactggctaccaaggtttttatcactttc

SEQ ID NO: 759176 - DNA, 33 bp, Homo sapien
tggatactggctaccagggtttttatcactttc

SEQ ID NO: 759177 - DNA, 33 bp, Homo sapien
tgagctcttagtaaacacttagtaaatacagac

SEQ ID NO: 759178 - DNA, 33 bp, Homo sapien
tgagctcttagtaaacgcttagtaaatacagac

SEQ ID NO: 759179 - DNA, 33 bp, Homo sapien
atggaagtactaaggaaagctgctaactcagca

SEQ ID NO: 759180 - DNA, 33 bp, Homo sapien
atggaagtactaaggagagctgctaactcagca

SEQ ID NO: 759181 - DNA, 33 bp, Homo sapien
ggtgtcagtttccagacggtgagagaggcctcc

SEQ ID NO: 759182 - DNA, 33 bp, Homo sapien
ggtgtcagtttccagatggtgagagaggcctcc

SEQ ID NO: 759183 - DNA, 33 bp, Homo sapien
aactccagctaaatagcaccgaatgctttatct

SEQ ID NO: 759184 - DNA, 33 bp, Homo sapien
aactccagctaaataggaccgaatgctttatct

SEQ ID NO: 759185 - DNA, 33 bp, Homo sapien
gtttcttgcaaacaaacgtgttctgccaatttt

SEQ ID NO: 759186 - DNA, 33 bp, Homo sapien
gtttcttgcaaacaaatgtgttctgccaatttt

SEQ ID NO: 759187 - DNA, 33 bp, Homo sapien
tttgctttgacttacaaattgtattaggccatt

SEQ ID NO: 759188 - DNA, 33 bp, Homo sapien
tttgctttgacttacagattgtattaggccatt

SEQ ID NO: 759189 - DNA, 33 bp, Homo sapien
cataccataagcaaatcaaatgtgaaaaatctc

SEQ ID NO: 759190 - DNA, 33 bp, Homo sapien
cataccataagcaaatgaaatgtgaaaaatctc

SEQ ID NO: 759191 - DNA, 33 bp, Homo sapien
gggttcacgggagaaacagacccaatttgatgt

SEQ ID NO: 759192 - DNA, 33 bp, Homo sapien
gggttcacgggagaaatagacccaatttgatgt

SEQ ID NO: 759193 - DNA, 33 bp, Homo sapien
aaagaaatgtattaaactcagccatagaagaaa

SEQ ID NO: 759194 - DNA, 33 bp, Homo sapien
aaagaaatgtattaaattcagccatagaagaaa

SEQ ID NO: 759195 - DNA, 33 bp, Homo sapien
cccagttgtcctgaaaggcccattattcatggt

SEQ ID NO: 759196 - DNA, 33 bp, Homo sapien
cccagttgtcctgaaatgcccattattcatggt

SEQ ID NO: 759197 - DNA, 33 bp, Homo sapien
attacaagtccagtaaatggcagaattgggaag

SEQ ID NO: 759198 - DNA, 33 bp, Homo sapien
attacaagtccagtaagtggcagaattgggaag

SEQ ID NO: 759199 - DNA, 33 bp, Homo sapien
gaggcacttgccaagacagcatttgcattccat

SEQ ID NO: 759200 - DNA, 33 bp, Homo sapien
gaggcacttgccaagagagcatttgcattccat

SEQ ID NO: 759201 - DNA, 33 bp, Homo sapien
tgtgcaccagaaactacgtcagtaagttgtgag

SEQ ID NO: 759202 - DNA, 33 bp, Homo sapien
tgtgcaccagaaactatgtcagtaagttgtgag

SEQ ID NO: 759203 - DNA, 33 bp, Homo sapien
aaccatatccctggaaagaagtgtcattacaag

SEQ ID NO: 759204 - DNA, 33 bp, Homo sapien
aaccatatccctggaaggaagtgtcattacaag

SEQ ID NO: 759205 - DNA, 33 bp, Homo sapien
gataatagcattcagaaggtaaaaataagtcca

SEQ ID NO: 759206 - DNA, 33 bp, Homo sapien
gataatagcattcagagggtaaaaataagtcca

SEQ ID NO: 759207 - DNA, 33 bp, Homo sapien
agcaggattgggcacacggagaagtagaactgt

SEQ ID NO: 759208 - DNA, 33 bp, Homo sapien
agcaggattgggcacatggagaagtagaactgt

SEQ ID NO: 759209 - DNA, 33 bp, Homo sapien
gccacaacagataccacgagaagaccaagcaga

SEQ ID NO: 759210 - DNA, 33 bp, Homo sapien
gccacaacagataccaggagaagaccaagcaga

SEQ ID NO: 759211 - DNA, 33 bp, Homo sapien
ttatgattctgttgcaataaaggccttcagcaa

SEQ ID NO: 759212 - DNA, 33 bp, Homo sapien
ttatgattctgttgcagtaaaggccttcagcaa

SEQ ID NO: 759213 - DNA, 33 bp, Homo sapien
atttatgcttgaaacacgacttcagttccaaga

SEQ ID NO: 759214 - DNA, 33 bp, Homo sapien
atttatgcttgaaacatgacttcagttccaaga

SEQ ID NO: 759215 - DNA, 33 bp, Homo sapien
tctctcacctttataaatcgtctcattttccac

SEQ ID NO: 759216 - DNA, 33 bp, Homo sapien
tctctcacctttataagtcgtctcattttccac

SEQ ID NO: 759217 - DNA, 33 bp, Homo sapien
tgttttaaggacaataagtactgtggcaggacg

SEQ ID NO: 759218 - DNA, 33 bp, Homo sapien
tgttttaaggacaataggtactgtggcaggacg

SEQ ID NO: 759219 - DNA, 33 bp, Homo sapien
catggtgagttactctcaaagttaaactaagtt

SEQ ID NO: 759220 - DNA, 33 bp, Homo sapien
catggtgagttactctgaaagttaaactaagtt

SEQ ID NO: 759221 - DNA, 33 bp, Homo sapien
tgcagtgattctccaaaggggattttatccagc

SEQ ID NO: 759222 - DNA, 33 bp, Homo sapien
tgcagtgattctccaatggggattttatccagc

SEQ ID NO: 759223 - DNA, 33 bp, Homo sapien
gtcttagtctgtccaccctgctataaggaagta

SEQ ID NO: 759224 - DNA, 33 bp, Homo sapien
gtcttagtctgtccactctgctataaggaagta

SEQ ID NO: 759225 - DNA, 33 bp, Homo sapien
agtcagaaagtcagaaatccattactcttctgc

SEQ ID NO: 759226 - DNA, 33 bp, Homo sapien
agtcagaaagtcagaagtccattactcttctgc

SEQ ID NO: 759227 - DNA, 33 bp, Homo sapien
ttaccaaattgatcaccctgaagaatttaaact

SEQ ID NO: 759228 - DNA, 33 bp, Homo sapien
ttaccaaattgatcactctgaagaatttaaact

SEQ ID NO: 759229 - DNA, 33 bp, Homo sapien
agtggactgaagtactcaaaatgtgaaccatgg

SEQ ID NO: 759230 - DNA, 33 bp, Homo sapien
agtggactgaagtacttaaaatgtgaaccatgg

SEQ ID NO: 759231 - DNA, 33 bp, Homo sapien
acacaaggatgttgaaagttcttgtttgtgtat

SEQ ID NO: 759232 - DNA, 33 bp, Homo sapien
acacaaggatgttgaaggttcttgtttgtgtat

SEQ ID NO: 759233 - DNA, 33 bp, Homo sapien
ctgtgaaatggataacagaagttcagactgaag

SEQ ID NO: 759234 - DNA, 33 bp, Homo sapien
ctgtgaaatggataacggaagttcagactgaag

SEQ ID NO: 759235 - DNA, 33 bp, Homo sapien
aactcaaatgtctctaaaggccaagaaattgta

SEQ ID NO: 759236 - DNA, 33 bp, Homo sapien
aactcaaatgtctctagaggccaagaaattgta

SEQ ID NO: 759237 - DNA, 33 bp, Homo sapien
gttacaggcaccataaaaaagaatagctaacac

SEQ ID NO: 759238 - DNA, 33 bp, Homo sapien
gttacaggcaccataagaaagaatagctaacac

SEQ ID NO: 759239 - DNA, 33 bp, Homo sapien
cctatgacaccctgaaatagcagactcctgtgc

SEQ ID NO: 759240 - DNA, 33 bp, Homo sapien
cctatgacaccctgaactagcagactcctgtgc

SEQ ID NO: 759241 - DNA, 33 bp, Homo sapien
ctaggcaacagagagcaactttgtgtcaaaaat

SEQ ID NO: 759242 - DNA, 33 bp, Homo sapien
ctaggcaacagagagcgactttgtgtcaaaaat

SEQ ID NO: 759243 - DNA, 33 bp, Homo sapien
caacccatgatctcaaaactgaacctgacattt

SEQ ID NO: 759244 - DNA, 33 bp, Homo sapien
caacccatgatctcaagactgaacctgacattt

SEQ ID NO: 759245 - DNA, 33 bp, Homo sapien
gctgaaactgtggaacagcaaagtcaggtgact

SEQ ID NO: 759246 - DNA, 33 bp, Homo sapien
gctgaaactgtggaacggcaaagtcaggtgact

SEQ ID NO: 759247 - DNA, 33 bp, Homo sapien
atgatttctagcaataactcacttgtcaggagg

SEQ ID NO: 759248 - DNA, 33 bp, Homo sapien
atgatttctagcaatatctcacttgtcaggagg

SEQ ID NO: 759249 - DNA, 33 bp, Homo sapien
gacaactgcagttaagaatcaggaagtaagtta

SEQ ID NO: 759250 - DNA, 33 bp, Homo sapien
gacaactgcagttaaggatcaggaagtaagtta

SEQ ID NO: 759251 - DNA, 33 bp, Homo sapien
aatacagcctgattgggcacactagaggcaaga

SEQ ID NO: 759252 - DNA, 33 bp, Homo sapien
aatacagcctgattggtcacactagaggcaaga

SEQ ID NO: 759253 - DNA, 33 bp, Homo sapien
agtttcggagattttaccaaagtgaagggggaa

SEQ ID NO: 759254 - DNA, 33 bp, Homo sapien
agtttcggagattttatcaaagtgaagggggaa

SEQ ID NO: 759255 - DNA, 33 bp, Homo sapien
gtttctttcctatttcaagtactagaggaagtc

SEQ ID NO: 759256 - DNA, 33 bp, Homo sapien
gtttctttcctatttcgagtactagaggaagtc

SEQ ID NO: 759257 - DNA, 33 bp, Homo sapien
ccaggttaggttccccaaaagtggactatgaga

SEQ ID NO: 759258 - DNA, 33 bp, Homo sapien
ccaggttaggttccccgaaagtggactatgaga

SEQ ID NO: 759259 - DNA, 33 bp, Homo sapien
gacttgacaccagaaacattgccctttagtggt

SEQ ID NO: 759260 - DNA, 33 bp, Homo sapien
gacttgacaccagaaatattgccctttagtggt

SEQ ID NO: 759261 - DNA, 33 bp, Homo sapien
tttcaacccacagataaattgcaaatcccaaca

SEQ ID NO: 759262 - DNA, 33 bp, Homo sapien
tttcaacccacagatacattgcaaatcccaaca

SEQ ID NO: 759263 - DNA, 33 bp, Homo sapien
tgctgagcctccgcggaatttccaggcagtgga

SEQ ID NO: 759264 - DNA, 33 bp, Homo sapien
tgctgagcctccgcggcatttccaggcagtgga

SEQ ID NO: 759265 - DNA, 33 bp, Homo sapien
tcggtcggagcgagccaggagacaaggaaaggt

SEQ ID NO: 759266 - DNA, 33 bp, Homo sapien
tcggtcggagcgagccgggagacaaggaaaggt

SEQ ID NO: 759267 - DNA, 33 bp, Homo sapien
agttctgcccttagcaatagtgaagtcacatca

SEQ ID NO: 759268 - DNA, 33 bp, Homo sapien
agttctgcccttagcagtagtgaagtcacatca

SEQ ID NO: 759269 - DNA, 33 bp, Homo sapien
ggacaggaaggagcaaaagaacactgtgtctat

SEQ ID NO: 759270 - DNA, 33 bp, Homo sapien
ggacaggaaggagcaagagaacactgtgtctat

SEQ ID NO: 759271 - DNA, 33 bp, Homo sapien
accatcagtacctccagcagtgagagcattgct

SEQ ID NO: 759272 - DNA, 33 bp, Homo sapien
accatcagtacctccatcagtgagagcattgct

SEQ ID NO: 759273 - DNA, 33 bp, Homo sapien
ctccattcatttaccaccaatattttccaaact

SEQ ID NO: 759274 - DNA, 33 bp, Homo sapien
ctccattcatttaccagcaatattttccaaact

SEQ ID NO: 759275 - DNA, 33 bp, Homo sapien
tttttaggagtgaaaaaccaaattcaagggcct

SEQ ID NO: 759276 - DNA, 33 bp, Homo sapien
tttttaggagtgaaaagccaaattcaagggcct

SEQ ID NO: 759277 - DNA, 33 bp, Homo sapien
aacaattattctagccgagttattttccatatt

SEQ ID NO: 759278 - DNA, 33 bp, Homo sapien
aacaattattctagcctagttattttccatatt

SEQ ID NO: 759279 - DNA, 33 bp, Homo sapien
gcgtgagctaccgagcaaggatgaagtagcccc

SEQ ID NO: 759280 - DNA, 33 bp, Homo sapien
gcgtgagctaccgagcgaggatgaagtagcccc

SEQ ID NO: 759281 - DNA, 33 bp, Homo sapien
ggtaacttatcaatgacgtaatactcagaactc

SEQ ID NO: 759282 - DNA, 33 bp, Homo sapien
ggtaacttatcaatgatgtaatactcagaactc

SEQ ID NO: 759283 - DNA, 33 bp, Homo sapien
acgtatcaccctcatcaacagagcaactaggat

SEQ ID NO: 759284 - DNA, 33 bp, Homo sapien
acgtatcaccctcatcgacagagcaactaggat

SEQ ID NO: 759285 - DNA, 33 bp, Homo sapien
ctaactcaagtaagtacgtgcctagaatgtaag

SEQ ID NO: 759286 - DNA, 33 bp, Homo sapien
ctaactcaagtaagtaggtgcctagaatgtaag

SEQ ID NO: 759287 - DNA, 33 bp, Homo sapien
tcagccaaagatttacccaagcacagataggct

SEQ ID NO: 759288 - DNA, 33 bp, Homo sapien
tcagccaaagatttactcaagcacagataggct

SEQ ID NO: 759289 - DNA, 33 bp, Homo sapien
agagagcacaccgctaagggcatctggattcct

SEQ ID NO: 759290 - DNA, 33 bp, Homo sapien
agagagcacaccgctaggggcatctggattcct

SEQ ID NO: 759291 - DNA, 33 bp, Homo sapien
ttctttcagatttactaagactcagtttgactg

SEQ ID NO: 759292 - DNA, 33 bp, Homo sapien
ttctttcagatttactgagactcagtttgactg

SEQ ID NO: 759293 - DNA, 33 bp, Homo sapien
cagacaaaatatgaacccaagtaaatatgaacc

SEQ ID NO: 759294 - DNA, 33 bp, Homo sapien
cagacaaaatatgaactcaagtaaatatgaacc

SEQ ID NO: 759295 - DNA, 33 bp, Homo sapien
ttccaagtctgtactcaatcgccctgccctcat

SEQ ID NO: 759296 - DNA, 33 bp, Homo sapien
ttccaagtctgtactcgatcgccctgccctcat

SEQ ID NO: 759297 - DNA, 33 bp, Homo sapien
atctctttagagaaagaagtctattacctacca

SEQ ID NO: 759298 - DNA, 33 bp, Homo sapien
atctctttagagaaaggagtctattacctacca

SEQ ID NO: 759299 - DNA, 33 bp, Homo sapien
ccttgctgacctgggcacattccctgaattcac

SEQ ID NO: 759300 - DNA, 33 bp, Homo sapien
ccttgctgacctgggcgcattccctgaattcac

SEQ ID NO: 759301 - DNA, 33 bp, Homo sapien
caaaccactggactgcaaaggtgtctcagggcc

SEQ ID NO: 759302 - DNA, 33 bp, Homo sapien
caaaccactggactgcgaaggtgtctcagggcc

SEQ ID NO: 759303 - DNA, 33 bp, Homo sapien
gccttttcagcacctagcactatgccttattcc

SEQ ID NO: 759304 - DNA, 33 bp, Homo sapien
gccttttcagcacctatcactatgccttattcc

SEQ ID NO: 759305 - DNA, 33 bp, Homo sapien
atgtcttcctggcataacttctgaatttaactt

SEQ ID NO: 759306 - DNA, 33 bp, Homo sapien
atgtcttcctggcataccttctgaatttaactt

SEQ ID NO: 759307 - DNA, 33 bp, Homo sapien
ggggctcagttacttaggagttgcatagatcca

SEQ ID NO: 759308 - DNA, 33 bp, Homo sapien
ggggctcagttacttatgagttgcatagatcca

SEQ ID NO: 759309 - DNA, 33 bp, Homo sapien
gcccagttctttgaagccactagtctgttttca

SEQ ID NO: 759310 - DNA, 33 bp, Homo sapien
gcccagttctttgaaggcactagtctgttttca

SEQ ID NO: 759311 - DNA, 33 bp, Homo sapien
ttcaggattctttccacgtcctttggtgtagat

SEQ ID NO: 759312 - DNA, 33 bp, Homo sapien
ttcaggattctttccatgtcctttggtgtagat

SEQ ID NO: 759313 - DNA, 33 bp, Homo sapien
agaaggaaaacgacgacgatgggcgtgtcctaa

SEQ ID NO: 759314 - DNA, 33 bp, Homo sapien
agaaggaaaacgacgatgatgggcgtgtcctaa

SEQ ID NO: 759315 - DNA, 33 bp, Homo sapien
ggaagaaatgggagataagcactggatgttgtc

SEQ ID NO: 759316 - DNA, 33 bp, Homo sapien
ggaagaaatgggagatgagcactggatgttgtc

SEQ ID NO: 759317 - DNA, 33 bp, Homo sapien
ctggtccaagttcctcaccttatctttgttccg

SEQ ID NO: 759318 - DNA, 33 bp, Homo sapien
ctggtccaagttcctcgccttatctttgttccg

SEQ ID NO: 759319 - DNA, 33 bp, Homo sapien
agaaggatctgcaaaccagacaggacagcggtg

SEQ ID NO: 759320 - DNA, 33 bp, Homo sapien
agaaggatctgcaaacgagacaggacagcggtg

SEQ ID NO: 759321 - DNA, 33 bp, Homo sapien
atgggtccaaaaccaaatcacaccatcagagtg

SEQ ID NO: 759322 - DNA, 33 bp, Homo sapien
atgggtccaaaaccaagtcacaccatcagagtg

SEQ ID NO: 759323 - DNA, 33 bp, Homo sapien
attttatttatactgacggagaggaaaacattg

SEQ ID NO: 759324 - DNA, 33 bp, Homo sapien
attttatttatactgatggagaggaaaacattg

SEQ ID NO: 759325 - DNA, 33 bp, Homo sapien
ccaaaatcagcttccaatgagccctcagattct

SEQ ID NO: 759326 - DNA, 33 bp, Homo sapien
ccaaaatcagcttccagtgagccctcagattct

SEQ ID NO: 759327 - DNA, 33 bp, Homo sapien
tataaaagtctgcccactccaagaaggcactag

SEQ ID NO: 759328 - DNA, 33 bp, Homo sapien
tataaaagtctgcccattccaagaaggcactag

SEQ ID NO: 759329 - DNA, 33 bp, Homo sapien
aaaaattacaatctagcatgtgtaggctaaatt

SEQ ID NO: 759330 - DNA, 33 bp, Homo sapien
aaaaattacaatctagtatgtgtaggctaaatt

SEQ ID NO: 759331 - DNA, 33 bp, Homo sapien
agagaatcaacattaactcaacagaatgatcta

SEQ ID NO: 759332 - DNA, 33 bp, Homo sapien
agagaatcaacattaattcaacagaatgatcta

SEQ ID NO: 759333 - DNA, 33 bp, Homo sapien
ccacagaaagttgaaacaacagtacaaggaaca

SEQ ID NO: 759334 - DNA, 33 bp, Homo sapien
ccacagaaagttgaaagaacagtacaaggaaca

SEQ ID NO: 759335 - DNA, 33 bp, Homo sapien
cctttagggatgacaccaatttctgccattcat

SEQ ID NO: 759336 - DNA, 33 bp, Homo sapien
cctttagggatgacactaatttctgccattcat

SEQ ID NO: 759337 - DNA, 33 bp, Homo sapien
ctgtatcgctttggacgcactgtctatggttat

SEQ ID NO: 759338 - DNA, 33 bp, Homo sapien
ctgtatcgctttggactcactgtctatggttat

SEQ ID NO: 759339 - DNA, 33 bp, Homo sapien
tgtgatactcctcccacgaaaaggtggagtcta

SEQ ID NO: 759340 - DNA, 33 bp, Homo sapien
tgtgatactcctcccatgaaaaggtggagtcta

SEQ ID NO: 759341 - DNA, 33 bp, Homo sapien
cactcgaggaactacccgcaaggagcctcaccc

SEQ ID NO: 759342 - DNA, 33 bp, Homo sapien
cactcgaggaactacctgcaaggagcctcaccc

SEQ ID NO: 759343 - DNA, 33 bp, Homo sapien
tcctgacagtgccctgaatttgatatcttccag

SEQ ID NO: 759344 - DNA, 33 bp, Homo sapien
tcctgacagtgccctgcatttgatatcttccag

SEQ ID NO: 759345 - DNA, 33 bp, Homo sapien
aagaaaaccttcgtgacgcaacagcaggaagtt

SEQ ID NO: 759346 - DNA, 33 bp, Homo sapien
aagaaaaccttcgtgatgcaacagcaggaagtt

SEQ ID NO: 759347 - DNA, 33 bp, Homo sapien
aaggaggccacacagaaaggaaagcttgacaca

SEQ ID NO: 759348 - DNA, 33 bp, Homo sapien
aaggaggccacacagagaggaaagcttgacaca

SEQ ID NO: 759349 - DNA, 33 bp, Homo sapien
aacatagtctatttggcatggcatcttttggct

SEQ ID NO: 759350 - DNA, 33 bp, Homo sapien
aacatagtctatttgggatggcatcttttggct

SEQ ID NO: 759351 - DNA, 33 bp, Homo sapien
gggagaggtaacaagaagttgcagtatgtttta

SEQ ID NO: 759352 - DNA, 33 bp, Homo sapien
gggagaggtaacaagaggttgcagtatgtttta

SEQ ID NO: 759353 - DNA, 33 bp, Homo sapien
tttatggaagttgctgcaaagtcattcaacaaa

SEQ ID NO: 759354 - DNA, 33 bp, Homo sapien
tttatggaagttgctgtaaagtcattcaacaaa

SEQ ID NO: 759355 - DNA, 33 bp, Homo sapien
tcaggaggcagggaaacagactccataacttta

SEQ ID NO: 759356 - DNA, 33 bp, Homo sapien
tcaggaggcagggaaatagactccataacttta

SEQ ID NO: 759357 - DNA, 33 bp, Homo sapien
tgaagtagaaagaagaaacttacaaagccttaa

SEQ ID NO: 759358 - DNA, 33 bp, Homo sapien
tgaagtagaaagaagacacttacaaagccttaa

SEQ ID NO: 759359 - DNA, 33 bp, Homo sapien
attgacagagaatgccccccttccacgctctgt

SEQ ID NO: 759360 - DNA, 33 bp, Homo sapien
attgacagagaatgcctcccttccacgctctgt

SEQ ID NO: 759361 - DNA, 33 bp, Homo sapien
aagtaggtccattttacattgtagacataacac

SEQ ID NO: 759362 - DNA, 33 bp, Homo sapien
aagtaggtccattttatattgtagacataacac

SEQ ID NO: 759363 - DNA, 33 bp, Homo sapien
taggaatcgagaaaaacagcggatatgcaaagt

SEQ ID NO: 759364 - DNA, 33 bp, Homo sapien
taggaatcgagaaaaatagcggatatgcaaagt

SEQ ID NO: 759365 - DNA, 33 bp, Homo sapien
gattacagaaaaaaaactgagcttcactaatgc

SEQ ID NO: 759366 - DNA, 33 bp, Homo sapien
gattacagaaaaaaaattgagcttcactaatgc

SEQ ID NO: 759367 - DNA, 33 bp, Homo sapien
gtgcacactacagtaacacctctagcccacaac

SEQ ID NO: 759368 - DNA, 33 bp, Homo sapien
gtgcacactacagtaatacctctagcccacaac

SEQ ID NO: 759369 - DNA, 33 bp, Homo sapien
catatttgatagcgctcacattttgtagttggt

SEQ ID NO: 759370 - DNA, 33 bp, Homo sapien
catatttgatagcgcttacattttgtagttggt

SEQ ID NO: 759371 - DNA, 33 bp, Homo sapien
aaaataataggccctcaatagtccaaagctttg

SEQ ID NO: 759372 - DNA, 33 bp, Homo sapien
aaaataataggccctcgatagtccaaagctttg

SEQ ID NO: 759373 - DNA, 33 bp, Homo sapien
aaaagcaaagtactcacggattaagtcttgctt

SEQ ID NO: 759374 - DNA, 33 bp, Homo sapien
aaaagcaaagtactcatggattaagtcttgctt

SEQ ID NO: 759375 - DNA, 33 bp, Homo sapien
ctgaactgaactatcaagacacctgctacaggc

SEQ ID NO: 759376 - DNA, 33 bp, Homo sapien
ctgaactgaactatcaggacacctgctacaggc

SEQ ID NO: 759377 - DNA, 33 bp, Homo sapien
gcccggataaaataacacctcgctctcccccta

SEQ ID NO: 759378 - DNA, 33 bp, Homo sapien
gcccggataaaataacgcctcgctctcccccta

SEQ ID NO: 759379 - DNA, 33 bp, Homo sapien
gccaaataccacagaccggtggattgaacagtg

SEQ ID NO: 759380 - DNA, 33 bp, Homo sapien
gccaaataccacagactggtggattgaacagtg

SEQ ID NO: 759381 - DNA, 33 bp, Homo sapien
atgtatttccctgctgaacagctgcgtttacgg

SEQ ID NO: 759382 - DNA, 33 bp, Homo sapien
atgtatttccctgctggacagctgcgtttacgg

SEQ ID NO: 759383 - DNA, 33 bp, Homo sapien
tctacttgtttcttgactaaaatgctcacttcc

SEQ ID NO: 759384 - DNA, 33 bp, Homo sapien
tctacttgtttcttgattaaaatgctcacttcc

SEQ ID NO: 759385 - DNA, 33 bp, Homo sapien
ctgtcagcttagatgcccttgcccggactgcta

SEQ ID NO: 759386 - DNA, 33 bp, Homo sapien
ctgtcagcttagatgctcttgcccggactgcta

SEQ ID NO: 759387 - DNA, 33 bp, Homo sapien
gggacgttatcaagaaagaggaattttgctaaa

SEQ ID NO: 759388 - DNA, 33 bp, Homo sapien
gggacgttatcaagaatgaggaattttgctaaa

SEQ ID NO: 759389 - DNA, 33 bp, Homo sapien
cacagtacccttgacactacgacattatgtctt

SEQ ID NO: 759390 - DNA, 33 bp, Homo sapien
cacagtacccttgacattacgacattatgtctt

SEQ ID NO: 759391 - DNA, 33 bp, Homo sapien
ggaaaccccaactaaaagtggcctaatttatgc

SEQ ID NO: 759392 - DNA, 33 bp, Homo sapien
ggaaaccccaactaaaggtggcctaatttatgc

SEQ ID NO: 759393 - DNA, 33 bp, Homo sapien
atgttatgtgttcctcaacctacctctttatcc

SEQ ID NO: 759394 - DNA, 33 bp, Homo sapien
atgttatgtgttcctctacctacctctttatcc

SEQ ID NO: 759395 - DNA, 33 bp, Homo sapien
tctagtttttcatacaccgtataggccagacag

SEQ ID NO: 759396 - DNA, 33 bp, Homo sapien
tctagtttttcatacatcgtataggccagacag

SEQ ID NO: 759397 - DNA, 33 bp, Homo sapien
atttggtacccagaaacgcagggacagtgtgca

SEQ ID NO: 759398 - DNA, 33 bp, Homo sapien
atttggtacccagaaaggcagggacagtgtgca

SEQ ID NO: 759399 - DNA, 33 bp, Homo sapien
cagtctcctgtctcatcaaatggctactgtgaa

SEQ ID NO: 759400 - DNA, 33 bp, Homo sapien
cagtctcctgtctcattaaatggctactgtgaa

SEQ ID NO: 759401 - DNA, 33 bp, Homo sapien
ttgcctaaagcagcaaaagtctgttattaatat

SEQ ID NO: 759402 - DNA, 33 bp, Homo sapien
ttgcctaaagcagcaacagtctgttattaatat

SEQ ID NO: 759403 - DNA, 33 bp, Homo sapien
accaccctcgtatggaccaatctgtggggacca

SEQ ID NO: 759404 - DNA, 33 bp, Homo sapien
accaccctcgtatggatcaatctgtggggacca

SEQ ID NO: 759405 - DNA, 33 bp, Homo sapien
ccccactatcaaggaaatctgtagaaatatcag

SEQ ID NO: 759406 - DNA, 33 bp, Homo sapien
ccccactatcaaggaagtctgtagaaatatcag

SEQ ID NO: 759407 - DNA, 33 bp, Homo sapien
tttccattaattcagacagtgttttcctgatat

SEQ ID NO: 759408 - DNA, 33 bp, Homo sapien
tttccattaattcagagagtgttttcctgatat

SEQ ID NO: 759409 - DNA, 33 bp, Homo sapien
ttcatgattgagccaacgggtgtcaagtaggag

SEQ ID NO: 759410 - DNA, 33 bp, Homo sapien
ttcatgattgagccaatgggtgtcaagtaggag

SEQ ID NO: 759411 - DNA, 33 bp, Homo sapien
ttaaggtgaatgggcactgattttatgaacagc

SEQ ID NO: 759412 - DNA, 33 bp, Homo sapien
ttaaggtgaatgggcattgattttatgaacagc

SEQ ID NO: 759413 - DNA, 33 bp, Homo sapien
caattaggttagtataagcacaatcaactcgct

SEQ ID NO: 759414 - DNA, 33 bp, Homo sapien
caattaggttagtatatgcacaatcaactcgct

SEQ ID NO: 759415 - DNA, 33 bp, Homo sapien
ctgctgccgtaaaggaatccttattgagcagta

SEQ ID NO: 759416 - DNA, 33 bp, Homo sapien
ctgctgccgtaaaggagtccttattgagcagta

SEQ ID NO: 759417 - DNA, 33 bp, Homo sapien
tcagggataaatgcacaaacgcaaatatgcagg

SEQ ID NO: 759418 - DNA, 33 bp, Homo sapien
tcagggataaatgcacgaacgcaaatatgcagg

SEQ ID NO: 759419 - DNA, 33 bp, Homo sapien
ttccaaaactgaaacaatatccccattaaacag

SEQ ID NO: 759420 - DNA, 33 bp, Homo sapien
ttccaaaactgaaacactatccccattaaacag

SEQ ID NO: 759421 - DNA, 33 bp, Homo sapien
tcctaatgcttggcgacgattcctgcatgttcc

SEQ ID NO: 759422 - DNA, 33 bp, Homo sapien
tcctaatgcttggcgatgattcctgcatgttcc

SEQ ID NO: 759423 - DNA, 33 bp, Homo sapien
agttctgatcattttcaacagtatttatgggtt

SEQ ID NO: 759424 - DNA, 33 bp, Homo sapien
agttctgatcattttcgacagtatttatgggtt

SEQ ID NO: 759425 - DNA, 33 bp, Homo sapien
agttaatcagtcagcaaatatcatatacttgaa

SEQ ID NO: 759426 - DNA, 33 bp, Homo sapien
agttaatcagtcagcatatatcatatacttgaa

SEQ ID NO: 759427 - DNA, 33 bp, Homo sapien
tccacctcaatattggaatctccagccactgtg

SEQ ID NO: 759428 - DNA, 33 bp, Homo sapien
tccacctcaatattgggatctccagccactgtg

SEQ ID NO: 759429 - DNA, 33 bp, Homo sapien
ggagcatctttgaagaactatgaatggagtaaa

SEQ ID NO: 759430 - DNA, 33 bp, Homo sapien
ggagcatctttgaagatctatgaatggagtaaa

SEQ ID NO: 759431 - DNA, 33 bp, Homo sapien
atgatcaaacttgttccacctgcttataaaggc

SEQ ID NO: 759432 - DNA, 33 bp, Homo sapien
atgatcaaacttgttctacctgcttataaaggc

SEQ ID NO: 759433 - DNA, 33 bp, Homo sapien
attcttaaccattccacagtaggaaagcccaat

SEQ ID NO: 759434 - DNA, 33 bp, Homo sapien
attcttaaccattccagagtaggaaagcccaat

SEQ ID NO: 759435 - DNA, 33 bp, Homo sapien
ccaggcaagctcccaacaagctctcaggtgttt

SEQ ID NO: 759436 - DNA, 33 bp, Homo sapien
ccaggcaagctcccaataagctctcaggtgttt

SEQ ID NO: 759437 - DNA, 33 bp, Homo sapien
tatctgatactgataacgcatgttaggttctta

SEQ ID NO: 759438 - DNA, 33 bp, Homo sapien
tatctgatactgataatgcatgttaggttctta

SEQ ID NO: 759439 - DNA, 33 bp, Homo sapien
ccaccagggaatggcaagtacacagaaagggcc

SEQ ID NO: 759440 - DNA, 33 bp, Homo sapien
ccaccagggaatggcaggtacacagaaagggcc

SEQ ID NO: 759441 - DNA, 33 bp, Homo sapien
aaaaactaaagtaaaaatccatacaaataattc

SEQ ID NO: 759442 - DNA, 33 bp, Homo sapien
aaaaactaaagtaaaactccatacaaataattc

SEQ ID NO: 759443 - DNA, 33 bp, Homo sapien
cctggctatcgttttccagctgtgtgacactga

SEQ ID NO: 759444 - DNA, 33 bp, Homo sapien
cctggctatcgttttctagctgtgtgacactga

SEQ ID NO: 759445 - DNA, 33 bp, Homo sapien
agggctgactgtactcaagaaacactagccata

SEQ ID NO: 759446 - DNA, 33 bp, Homo sapien
agggctgactgtactcgagaaacactagccata

SEQ ID NO: 759447 - DNA, 33 bp, Homo sapien
gcacatagtaggtgaggaataacaaaggcttgg

SEQ ID NO: 759448 - DNA, 33 bp, Homo sapien
gcacatagtaggtgagtaataacaaaggcttgg

SEQ ID NO: 759449 - DNA, 33 bp, Homo sapien
aaaaaaaactgactccaaatctctgtggcaaat

SEQ ID NO: 759450 - DNA, 33 bp, Homo sapien
aaaaaaaactgactccgaatctctgtggcaaat

SEQ ID NO: 759451 - DNA, 33 bp, Homo sapien
agaacctcactaggaaaaattcaacgaatggtt

SEQ ID NO: 759452 - DNA, 33 bp, Homo sapien
agaacctcactaggaacaattcaacgaatggtt

SEQ ID NO: 759453 - DNA, 33 bp, Homo sapien
ggttaacattggagaactgactctttggagagg

SEQ ID NO: 759454 - DNA, 33 bp, Homo sapien
ggttaacattggagaattgactctttggagagg

SEQ ID NO: 759455 - DNA, 33 bp, Homo sapien
cgtaacacagctaacactggaaagctgaatctt

SEQ ID NO: 759456 - DNA, 33 bp, Homo sapien
cgtaacacagctaacattggaaagctgaatctt

SEQ ID NO: 759457 - DNA, 33 bp, Homo sapien
gtatatagcatgattgaatcgcatttcctagat

SEQ ID NO: 759458 - DNA, 33 bp, Homo sapien
gtatatagcatgattggatcgcatttcctagat

SEQ ID NO: 759459 - DNA, 33 bp, Homo sapien
aagacttggtcactgcagaagagatgaaatgta

SEQ ID NO: 759460 - DNA, 33 bp, Homo sapien
aagacttggtcactgcggaagagatgaaatgta

SEQ ID NO: 759461 - DNA, 33 bp, Homo sapien
ggagatcagaggaggaatcagtaaagagaccga

SEQ ID NO: 759462 - DNA, 33 bp, Homo sapien
ggagatcagaggaggagtcagtaaagagaccga

SEQ ID NO: 759463 - DNA, 33 bp, Homo sapien
ctaagactcaaacgacaaactttctagtgaatt

SEQ ID NO: 759464 - DNA, 33 bp, Homo sapien
ctaagactcaaacgaccaactttctagtgaatt

SEQ ID NO: 759465 - DNA, 33 bp, Homo sapien
tgcttgctcttttgacaccagtggaagtttaaa

SEQ ID NO: 759466 - DNA, 33 bp, Homo sapien
tgcttgctcttttgacgccagtggaagtttaaa

SEQ ID NO: 759467 - DNA, 33 bp, Homo sapien
gctaggcttccttataacttggccaaataagag

SEQ ID NO: 759468 - DNA, 33 bp, Homo sapien
gctaggcttccttatatcttggccaaataagag

SEQ ID NO: 759469 - DNA, 33 bp, Homo sapien
ccctggttaatttgaaaaggagcactctcttaa

SEQ ID NO: 759470 - DNA, 33 bp, Homo sapien
ccctggttaatttgaagaggagcactctcttaa

SEQ ID NO: 759471 - DNA, 33 bp, Homo sapien
aacgtgaaaaaacaacaaagattggcaagtttg

SEQ ID NO: 759472 - DNA, 33 bp, Homo sapien
aacgtgaaaaaacaacgaagattggcaagtttg

SEQ ID NO: 759473 - DNA, 33 bp, Homo sapien
actggcaatcatgagccaagtcaggtatagaaa

SEQ ID NO: 759474 - DNA, 33 bp, Homo sapien
actggcaatcatgagctaagtcaggtatagaaa

SEQ ID NO: 759475 - DNA, 33 bp, Homo sapien
tttataagctcttgaaagggttaacaactagaa

SEQ ID NO: 759476 - DNA, 33 bp, Homo sapien
tttataagctcttgaaggggttaacaactagaa

SEQ ID NO: 759477 - DNA, 33 bp, Homo sapien
cgggcgtgcatctcaacccccggctagtttttt

SEQ ID NO: 759478 - DNA, 33 bp, Homo sapien
cgggcgtgcatctcaatccccggctagtttttt

SEQ ID NO: 759479 - DNA, 33 bp, Homo sapien
aaggattttgcatcaacttcactagctaacatt

SEQ ID NO: 759480 - DNA, 33 bp, Homo sapien
aaggattttgcatcaatttcactagctaacatt

SEQ ID NO: 759481 - DNA, 33 bp, Homo sapien
gacttttactggataagctgagactcagtaaca

SEQ ID NO: 759482 - DNA, 33 bp, Homo sapien
gacttttactggataatctgagactcagtaaca

SEQ ID NO: 759483 - DNA, 33 bp, Homo sapien
cccacagctcattactgaacaatcactgagtat

SEQ ID NO: 759484 - DNA, 33 bp, Homo sapien
cccacagctcattacttaacaatcactgagtat

SEQ ID NO: 759485 - DNA, 33 bp, Homo sapien
ccttctcagagcaaacagaccttataatggcat

SEQ ID NO: 759486 - DNA, 33 bp, Homo sapien
ccttctcagagcaaaccgaccttataatggcat

SEQ ID NO: 759487 - DNA, 33 bp, Homo sapien; identical to SEQ ID NO: 759485

SEQ ID NO: 759488 - DNA, 33 bp, Homo sapien; identical to SEQ ID NO: 759486

SEQ ID NO: 759489 - DNA, 33 bp, Homo sapien
ggtctatccttccaaccgagtgttccggaacag

SEQ ID NO: 759490 - DNA, 33 bp, Homo sapien
ggtctatccttccaactgagtgttccggaacag

SEQ ID NO: 759491 - DNA, 33 bp, Homo sapien
gtttactggtctgtaacagatcctgcattagct

SEQ ID NO: 759492 - DNA, 33 bp, Homo sapien
gtttactggtctgtaatagatcctgcattagct

SEQ ID NO: 759493 - DNA, 33 bp, Homo sapien
atgcactaaaaagcaaaggtgtgattcacacga

SEQ ID NO: 759494 - DNA, 33 bp, Homo sapien
atgcactaaaaagcaagggtgtgattcacacga

SEQ ID NO: 759495 - DNA, 33 bp, Homo sapien
cttagcctgtttgcaaggcgatatactccaagt

SEQ ID NO: 759496 - DNA, 33 bp, Homo sapien
cttagcctgtttgcaatgcgatatactccaagt

SEQ ID NO: 759497 - DNA, 33 bp, Homo sapien
agagcattcatttaggcataagttgaagttatt

SEQ ID NO: 759498 - DNA, 33 bp, Homo sapien
agagcattcatttaggtataagttgaagttatt

SEQ ID NO: 759499 - DNA, 33 bp, Homo sapien
attcgttgactgcagaggaggtacacgacctct

SEQ ID NO: 759500 - DNA, 33 bp, Homo sapien
attcgttgactgcagatgaggtacacgacctct

SEQ ID NO: 759501 - DNA, 33 bp, Homo sapien
tggctagacaaataggcatgtgataggagaagt

SEQ ID NO: 759502 - DNA, 33 bp, Homo sapien
tggctagacaaataggtatgtgataggagaagt

SEQ ID NO: 759503 - DNA, 33 bp, Homo sapien
acagtgaaggtggcaccgaaagataccccaacc

SEQ ID NO: 759504 - DNA, 33 bp, Homo sapien
acagtgaaggtggcactgaaagataccccaacc

SEQ ID NO: 759505 - DNA, 33 bp, Homo sapien
atgttattttccatccaaagatgaaggcagtga

SEQ ID NO: 759506 - DNA, 33 bp, Homo sapien
atgttattttccatcctaagatgaaggcagtga

SEQ ID NO: 759507 - DNA, 33 bp, Homo sapien
acactggaatatctagccatttttacgaaccac

SEQ ID NO: 759508 - DNA, 33 bp, Homo sapien
acactggaatatctaggcatttttacgaaccac

SEQ ID NO: 759509 - DNA, 33 bp, Homo sapien
actcctacctgtggcaatcatgaatctgttttc

SEQ ID NO: 759510 - DNA, 33 bp, Homo sapien
actcctacctgtggcagtcatgaatctgttttc

SEQ ID NO: 759511 - DNA, 33 bp, Homo sapien
aatacataataatgatcaagagcaggaattcaa

SEQ ID NO: 759512 - DNA, 33 bp, Homo sapien
aatacataataatgatgaagagcaggaattcaa

SEQ ID NO: 759513 - DNA, 33 bp, Homo sapien
ccatgccctactattccagacttaaaagttata

SEQ ID NO: 759514 - DNA, 33 bp, Homo sapien
ccatgccctactattctagacttaaaagttata

SEQ ID NO: 759515 - DNA, 33 bp, Homo sapien
ggaaacctgatctgacactgcaacattggttta

SEQ ID NO: 759516 - DNA, 33 bp, Homo sapien
ggaaacctgatctgacgctgcaacattggttta

SEQ ID NO: 759517 - DNA, 33 bp, Homo sapien
ccccttccggtgcctacacattactttacatcc

SEQ ID NO: 759518 - DNA, 33 bp, Homo sapien
ccccttccggtgcctagacattactttacatcc

SEQ ID NO: 759519 - DNA, 33 bp, Homo sapien
gtaggtggttgctgctcaagttttcagaggtga

SEQ ID NO: 759520 - DNA, 33 bp, Homo sapien
gtaggtggttgctgctgaagttttcagaggtga

SEQ ID NO: 759521 - DNA, 33 bp, Homo sapien
gtagctgaaagagaccagggtaaccatcagggc

SEQ ID NO: 759522 - DNA, 33 bp, Homo sapien
gtagctgaaagagacccgggtaaccatcagggc

SEQ ID NO: 759523 - DNA, 33 bp, Homo sapien
gttttagaaagattccactagcagtgtacatat

SEQ ID NO: 759524 - DNA, 33 bp, Homo sapien
gttttagaaagattcctctagcagtgtacatat

SEQ ID NO: 759525 - DNA, 33 bp, Homo sapien
tgccttttgccagaaaacttcagactcgcagac

SEQ ID NO: 759526 - DNA, 33 bp, Homo sapien
tgccttttgccagaaagcttcagactcgcagac

SEQ ID NO: 759527 - DNA, 33 bp, Homo sapien
caataagaaacaatcaaagctctcatttattaa

SEQ ID NO: 759528 - DNA, 33 bp, Homo sapien
caataagaaacaatcagagctctcatttattaa

SEQ ID NO: 759529 - DNA, 33 bp, Homo sapien
ctgttgttcaagtttaaatgaattgctctatgg

SEQ ID NO: 759530 - DNA, 33 bp, Homo sapien
ctgttgttcaagtttagatgaattgctctatgg

SEQ ID NO: 759531 - DNA, 33 bp, Homo sapien
agaaacacttggaagacgtgaaatctgttgtct

SEQ ID NO: 759532 - DNA, 33 bp, Homo sapien
agaaacacttggaagatgtgaaatctgttgtct

SEQ ID NO: 759533 - DNA, 33 bp, Homo sapien
cccaacgtcaaagagaaacaatccatctaaggc

SEQ ID NO: 759534 - DNA, 33 bp, Homo sapien
cccaacgtcaaagagacacaatccatctaaggc

SEQ ID NO: 759535 - DNA, 33 bp, Homo sapien
catttgccccttcactcactcaacaaagaaata

SEQ ID NO: 759536 - DNA, 33 bp, Homo sapien
catttgccccttcacttactcaacaaagaaata

SEQ ID NO: 759537 - DNA, 33 bp, Homo sapien
ctgatggaacagagaaaaaactcaggccactaa

SEQ ID NO: 759538 - DNA, 33 bp, Homo sapien
ctgatggaacagagaacaaactcaggccactaa

SEQ ID NO: 759539 - DNA, 33 bp, Homo sapien
atctacaaaagtgcacgggaaaagaccactgtc

SEQ ID NO: 759540 - DNA, 33 bp, Homo sapien
atctacaaaagtgcactggaaaagaccactgtc

SEQ ID NO: 759541 - DNA, 33 bp, Homo sapien
gtgagaaagctgtgcaaccgcctgtgtgtctgc

SEQ ID NO: 759542 - DNA, 33 bp, Homo sapien
gtgagaaagctgtgcatccgcctgtgtgtctgc

SEQ ID NO: 759543 - DNA, 33 bp, Homo sapien
agccaggattgtcttacgtggggcccagctttg

SEQ ID NO: 759544 - DNA, 33 bp, Homo sapien
agccaggattgtcttatgtggggcccagctttg

SEQ ID NO: 759545 - DNA, 33 bp, Homo sapien
ttctttgtaaaatctcaaagtctgggaatctct

SEQ ID NO: 759546 - DNA, 33 bp, Homo sapien
ttctttgtaaaatctcgaagtctgggaatctct

SEQ ID NO: 759547 - DNA, 33 bp, Homo sapien
aagtaagacgatgtgacgtgtagacttttaaca

SEQ ID NO: 759548 - DNA, 33 bp, Homo sapien
aagtaagacgatgtgatgtgtagacttttaaca

SEQ ID NO: 759549 - DNA, 33 bp, Homo sapien
aacgaatgctgacaaccgctggaaatgctggca

SEQ ID NO: 759550 - DNA, 33 bp, Homo sapien
aacgaatgctgacaactgctggaaatgctggca

SEQ ID NO: 759551 - DNA, 33 bp, Homo sapien
ctcacctctaacaatacgctggaaaaaaaatta

SEQ ID NO: 759552 - DNA, 33 bp, Homo sapien
ctcacctctaacaatatgctggaaaaaaaatta

SEQ ID NO: 759553 - DNA, 33 bp, Homo sapien
aattgccaaaaaaaataattccagagtcagaga

SEQ ID NO: 759554 - DNA, 33 bp, Homo sapien
aattgccaaaaaaaatgattccagagtcagaga

SEQ ID NO: 759555 - DNA, 33 bp, Homo sapien
tttgatatctccttgacgtagctgaatgtcaaa

SEQ ID NO: 759556 - DNA, 33 bp, Homo sapien
tttgatatctccttgatgtagctgaatgtcaaa

SEQ ID NO: 759557 - DNA, 33 bp, Homo sapien
aggtgccaagaactcactatcataagtggaaga

SEQ ID NO: 759558 - DNA, 33 bp, Homo sapien
aggtgccaagaactcattatcataagtggaaga

SEQ ID NO: 759559 - DNA, 33 bp, Homo sapien
ctgctcaaaacaaccaataagaagaaatcactc

SEQ ID NO: 759560 - DNA, 33 bp, Homo sapien
ctgctcaaaacaaccagtaagaagaaatcactc

SEQ ID NO: 759561 - DNA, 33 bp, Homo sapien
tttatagttcagaaggcacacatttctttgact

SEQ ID NO: 759562 - DNA, 33 bp, Homo sapien
tttatagttcagaaggtacacatttctttgact

SEQ ID NO: 759563 - DNA, 33 bp, Homo sapien
tgtcctctgcacttctcactgctttccatggag

SEQ ID NO: 759564 - DNA, 33 bp, Homo sapien
tgtcctctgcacttctgactgctttccatggag

SEQ ID NO: 759565 - DNA, 33 bp, Homo sapien
tcccaaacagataccacaaccctcttgcatttc

SEQ ID NO: 759566 - DNA, 33 bp, Homo sapien
tcccaaacagataccataaccctcttgcatttc

SEQ ID NO: 759567 - DNA, 33 bp, Homo sapien
gtcccctccatttcaactccgatgcttcgtagt

SEQ ID NO: 759568 - DNA, 33 bp, Homo sapien
gtcccctccatttcaagtccgatgcttcgtagt

SEQ ID NO: 759569 - DNA, 33 bp, Homo sapien
atgtactgtaaaaggagagctgggaaacctgag

SEQ ID NO: 759570 - DNA, 33 bp, Homo sapien
atgtactgtaaaaggatagctgggaaacctgag

SEQ ID NO: 759571 - DNA, 33 bp, Homo sapien
gctaaatgaacaagtacgcagctcctctaacaa

SEQ ID NO: 759572 - DNA, 33 bp, Homo sapien
gctaaatgaacaagtaggcagctcctctaacaa

SEQ ID NO: 759573 - DNA, 33 bp, Homo sapien
gagtgatcaaatctcccccaaatgaaagtttct

SEQ ID NO: 759574 - DNA, 33 bp, Homo sapien
gagtgatcaaatctcctccaaatgaaagtttct

SEQ ID NO: 759575 - DNA, 33 bp, Homo sapien
acgaacctttggcaaacatcaccgtggattttt

SEQ ID NO: 759576 - DNA, 33 bp, Homo sapien
acgaacctttggcaaatatcaccgtggattttt

SEQ ID NO: 759577 - DNA, 33 bp, Homo sapien
aacatgagcaagcactaaaccaactgtcctttc

SEQ ID NO: 759578 - DNA, 33 bp, Homo sapien
aacatgagcaagcactgaaccaactgtcctttc

SEQ ID NO: 759579 - DNA, 33 bp, Homo sapien
ccaagagaggagcagacggcttcttgttttgac

SEQ ID NO: 759580 - DNA, 33 bp, Homo sapien
ccaagagaggagcagatggcttcttgttttgac

SEQ ID NO: 759581 - DNA, 33 bp, Homo sapien
tcctaccctgtaacaccgtcaagagtggtgagt

SEQ ID NO: 759582 - DNA, 33 bp, Homo sapien
tcctaccctgtaacactgtcaagagtggtgagt

SEQ ID NO: 759583 - DNA, 33 bp, Homo sapien
ataaatattgaagaaacgccctaggtcaagatt

SEQ ID NO: 759584 - DNA, 33 bp, Homo sapien
ataaatattgaagaaatgccctaggtcaagatt

SEQ ID NO: 759585 - DNA, 33 bp, Homo sapien
aaaaccatttataatgcagcaagcctgtttgct

SEQ ID NO: 759586 - DNA, 33 bp, Homo sapien
aaaaccatttataatgtagcaagcctgtttgct

SEQ ID NO: 759587 - DNA, 33 bp, Homo sapien
ttcatctagaaccagcagaataaagttattaag

SEQ ID NO: 759588 - DNA, 33 bp, Homo sapien
ttcatctagaaccagcggaataaagttattaag

SEQ ID NO: 759589 - DNA, 33 bp, Homo sapien
tatttattagggaacaagatttgctgccaataa

SEQ ID NO: 759590 - DNA, 33 bp, Homo sapien
tatttattagggaacatgatttgctgccaataa

SEQ ID NO: 759591 - DNA, 33 bp, Homo sapien
tggcagaaggaacagtaactcactaggtcctac

SEQ ID NO: 759592 - DNA, 33 bp, Homo sapien
tggcagaaggaacagtgactcactaggtcctac

SEQ ID NO: 759593 - DNA, 33 bp, Homo sapien
tcataatttagaaaaaaaggctaccgtatgtgt

SEQ ID NO: 759594 - DNA, 33 bp, Homo sapien
tcataatttagaaaaagaggctaccgtatgtgt

SEQ ID NO: 759595 - DNA, 33 bp, Homo sapien
ctgtgttttttggagccaggaacttcacaaagg

SEQ ID NO: 759596 - DNA, 33 bp, Homo sapien
ctgtgttttttggagctaggaacttcacaaagg

SEQ ID NO: 759597 - DNA, 33 bp, Homo sapien
aaaagaggttcagtaacgtgggtcattagagaa

SEQ ID NO: 759598 - DNA, 33 bp, Homo sapien
aaaagaggttcagtaatgtgggtcattagagaa

SEQ ID NO: 759599 - DNA, 33 bp, Homo sapien
gatattcggttatagaacattgaggctcccagc

SEQ ID NO: 759600 - DNA, 33 bp, Homo sapien
gatattcggttatagaccattgaggctcccagc

SEQ ID NO: 759601 - DNA, 33 bp, Homo sapien
ttgactcattgactaaggcaagctttttttttt

SEQ ID NO: 759602 - DNA, 33 bp, Homo sapien
ttgactcattgactaatgcaagctttttttttt

SEQ ID NO: 759603 - DNA, 33 bp, Homo sapien
ctaaagtcatgaccaacttcaaattatatatat

SEQ ID NO: 759604 - DNA, 33 bp, Homo sapien
ctaaagtcatgaccaatttcaaattatatatat

SEQ ID NO: 759605 - DNA, 33 bp, Homo sapien
aaaaaaaatgtctacacaacgtcttcagcttag

SEQ ID NO: 759606 - DNA, 33 bp, Homo sapien
aaaaaaaatgtctacataacgtcttcagcttag

SEQ ID NO: 759607 - DNA, 33 bp, Homo sapien
acatccctgagaataaatacttgtctgcatttc

SEQ ID NO: 759608 - DNA, 33 bp, Homo sapien
acatccctgagaataagtacttgtctgcatttc

SEQ ID NO: 759609 - DNA, 33 bp, Homo sapien
gtgcatacctcatgcaaccggtgcacattttct

SEQ ID NO: 759610 - DNA, 33 bp, Homo sapien
gtgcatacctcatgcagccggtgcacattttct

SEQ ID NO: 759611 - DNA, 33 bp, Homo sapien
aaatataggagacagacgtaaacaaataataac

SEQ ID NO: 759612 - DNA, 33 bp, Homo sapien
aaatataggagacagatgtaaacaaataataac

SEQ ID NO: 759613 - DNA, 33 bp, Homo sapien
agtaggctccagtacaacttttaagacacccag

SEQ ID NO: 759614 - DNA, 33 bp, Homo sapien
agtaggctccagtacaccttttaagacacccag

SEQ ID NO: 759615 - DNA, 33 bp, Homo sapien
gatgtttttgcttgcacattacagaaaatcaac

SEQ ID NO: 759616 - DNA, 33 bp, Homo sapien
gatgtttttgcttgcagattacagaaaatcaac

SEQ ID NO: 759617 - DNA, 33 bp, Homo sapien
tcagggtctcacataaaccaaaacttacacatt

SEQ ID NO: 759618 - DNA, 33 bp, Homo sapien
tcagggtctcacataatccaaaacttacacatt

SEQ ID NO: 759619 - DNA, 33 bp, Homo sapien
attaactgatatccaaataacttgtaataacta

SEQ ID NO: 759620 - DNA, 33 bp, Homo sapien
attaactgatatccaattaacttgtaataacta

SEQ ID NO: 759621 - DNA, 33 bp, Homo sapien
gaacctcatgtgaggacgaagggagagattagg

SEQ ID NO: 759622 - DNA, 33 bp, Homo sapien
gaacctcatgtgaggatgaagggagagattagg

SEQ ID NO: 759623 - DNA, 33 bp, Homo sapien
gacctctattctccagcactgtaagacaacaca

SEQ ID NO: 759624 - DNA, 33 bp, Homo sapien
gacctctattctccaggactgtaagacaacaca

SEQ ID NO: 759625 - DNA, 33 bp, Homo sapien
ttttttcttacaaagcagcattaccttctgggg

SEQ ID NO: 759626 - DNA, 33 bp, Homo sapien
ttttttcttacaaagccgcattaccttctgggg

SEQ ID NO: 759627 - DNA, 33 bp, Homo sapien
ttctttctctctctctcaatactctaccttctc

SEQ ID NO: 759628 - DNA, 33 bp, Homo sapien
ttctttctctctctcttaatactctaccttctc

SEQ ID NO: 759629 - DNA, 33 bp, Homo sapien
catccagattatcatcaacttctgtactgatgc

SEQ ID NO: 759630 - DNA, 33 bp, Homo sapien
catccagattatcatcgacttctgtactgatgc

SEQ ID NO: 759631 - DNA, 33 bp, Homo sapien
caaaatttggatggaaatcagtcttcagtctgc

SEQ ID NO: 759632 - DNA, 33 bp, Homo sapien
caaaatttggatggaagtcagtcttcagtctgc

SEQ ID NO: 759633 - DNA, 33 bp, Homo sapien
ctgaaccacttagctacgataagagtgaggatg

SEQ ID NO: 759634 - DNA, 33 bp, Homo sapien
ctgaaccacttagctatgataagagtgaggatg

SEQ ID NO: 759635 - DNA, 33 bp, Homo sapien
ttaaatgggcatataaaatgaatccattgtgtc

SEQ ID NO: 759636 - DNA, 33 bp, Homo sapien
ttaaatgggcatataacatgaatccattgtgtc

SEQ ID NO: 759637 - DNA, 33 bp, Homo sapien
tttgaggctcccaaggcactagtgtcaagtgga

SEQ ID NO: 759638 - DNA, 33 bp, Homo sapien
tttgaggctcccaaggtactagtgtcaagtgga

SEQ ID NO: 759639 - DNA, 33 bp, Homo sapien
ctagctccactattcccaagcacatattatcta

SEQ ID NO: 759640 - DNA, 33 bp, Homo sapien
ctagctccactattcctaagcacatattatcta

SEQ ID NO: 759641 - DNA, 33 bp, Homo sapien
atttcaatacagttgcacattagatgacttccg

SEQ ID NO: 759642 - DNA, 33 bp, Homo sapien
atttcaatacagttgcgcattagatgacttccg

SEQ ID NO: 759643 - DNA, 33 bp, Homo sapien
acaggaaatcccatgacaatcaatactcacaaa

SEQ ID NO: 759644 - DNA, 33 bp, Homo sapien
acaggaaatcccatgataatcaatactcacaaa

SEQ ID NO: 759645 - DNA, 33 bp, Homo sapien
tagtacatatgtcaggcaatggctgtcagttac

SEQ ID NO: 759646 - DNA, 33 bp, Homo sapien
tagtacatatgtcaggtaatggctgtcagttac

SEQ ID NO: 759647 - DNA, 33 bp, Homo sapien
ctcaatgtagatggaaagtttacaaacaaaaga

SEQ ID NO: 759648 - DNA, 33 bp, Homo sapien
ctcaatgtagatggaaggtttacaaacaaaaga

SEQ ID NO: 759649 - DNA, 33 bp, Homo sapien
cacagcaaaagagaaaccattaacagagaaaaa

SEQ ID NO: 759650 - DNA, 33 bp, Homo sapien
cacagcaaaagagaaagcattaacagagaaaaa

SEQ ID NO: 759651 - DNA, 33 bp, Homo sapien
ttggtgtttgttttaaatatccaaaattggtga

SEQ ID NO: 759652 - DNA, 33 bp, Homo sapien
ttggtgtttgttttaattatccaaaattggtga

SEQ ID NO: 759653 - DNA, 33 bp, Homo sapien
gcaaaaaggatcgaaaagaccccatagttcaac

SEQ ID NO: 759654 - DNA, 33 bp, Homo sapien
gcaaaaaggatcgaaacgaccccatagttcaac

SEQ ID NO: 759655 - DNA, 33 bp, Homo sapien
ctgggtgatgggaataagaaaatatgatttcaa

SEQ ID NO: 759656 - DNA, 33 bp, Homo sapien
ctgggtgatgggaatatgaaaatatgatttcaa

SEQ ID NO: 759657 - DNA, 33 bp, Homo sapien
cacttactgaaacccaaacataagcatacaagc

SEQ ID NO: 759658 - DNA, 33 bp, Homo sapien
cacttactgaaacccagacataagcatacaagc

SEQ ID NO: 759659 - DNA, 33 bp, Homo sapien; identical to SEQ ID NO: 759657

SEQ ID NO: 759660 - DNA, 33 bp, Homo sapien; identical to SEQ ID NO: 759658

SEQ ID NO: 759661 - DNA, 33 bp, Homo sapien
tgtgcacattgtctaacatctaatttaggtaat

SEQ ID NO: 759662 - DNA, 33 bp, Homo sapien
tgtgcacattgtctaatatctaatttaggtaat

SEQ ID NO: 759663 - DNA, 33 bp, Homo sapien
aatcctgaagttactacgactttggatgttttt

SEQ ID NO: 759664 - DNA, 33 bp, Homo sapien
aatcctgaagttactatgactttggatgttttt

SEQ ID NO: 759665 - DNA, 33 bp, Homo sapien
taatagatggtacaaacgagcaggaatactttc

SEQ ID NO: 759666 - DNA, 33 bp, Homo sapien
taatagatggtacaaatgagcaggaatactttc

SEQ ID NO: 759667 - DNA, 33 bp, Homo sapien
ctgccacagagaaataacagctagaggagtggc

SEQ ID NO: 759668 - DNA, 33 bp, Homo sapien
ctgccacagagaaatatcagctagaggagtggc

SEQ ID NO: 759669 - DNA, 33 bp, Homo sapien
gaaatgctggcaagccaaaaagtgtcagctgaa

SEQ ID NO: 759670 - DNA, 33 bp, Homo sapien
gaaatgctggcaagccgaaaagtgtcagctgaa

SEQ ID NO: 759671 - DNA, 33 bp, Homo sapien
acatcagaagtttttacgacttagggtctaagc

SEQ ID NO: 759672 - DNA, 33 bp, Homo sapien
acatcagaagtttttatgacttagggtctaagc

SEQ ID NO: 759673 - DNA, 33 bp, Homo sapien
ctagttacaatctgaaacaaaacacctcactag

SEQ ID NO: 759674 - DNA, 33 bp, Homo sapien
ctagttacaatctgaagcaaaacacctcactag

SEQ ID NO: 759675 - DNA, 33 bp, Homo sapien
gaggttggatctccacaatgccgttcaatgctt

SEQ ID NO: 759676 - DNA, 33 bp, Homo sapien
gaggttggatctccacgatgccgttcaatgctt

SEQ ID NO: 759677 - DNA, 33 bp, Homo sapien
ttcaaaaaaagcagataaggttgatgcatacta

SEQ ID NO: 759678 - DNA, 33 bp, Homo sapien
ttcaaaaaaagcagattaggttgatgcatacta

SEQ ID NO: 759679 - DNA, 33 bp, Homo sapien
tcacttgtggatttaaaggttcccattgtgcaa

SEQ ID NO: 759680 - DNA, 33 bp, Homo sapien
tcacttgtggatttaatggttcccattgtgcaa

SEQ ID NO: 759681 - DNA, 33 bp, Homo sapien
tgtaatttggtgctacagaatgaagagggttct

SEQ ID NO: 759682 - DNA, 33 bp, Homo sapien
tgtaatttggtgctactgaatgaagagggttct

SEQ ID NO: 759683 - DNA, 33 bp, Homo sapien
cctgtagtttagcttagctcagtctatgcctca

SEQ ID NO: 759684 - DNA, 33 bp, Homo sapien
cctgtagtttagcttatctcagtctatgcctca

SEQ ID NO: 759685 - DNA, 33 bp, Homo sapien
tcttaaacttaaatcaatgaggcagaaaattca

SEQ ID NO: 759686 - DNA, 33 bp, Homo sapien
tcttaaacttaaatcagtgaggcagaaaattca

SEQ ID NO: 759687 - DNA, 33 bp, Homo sapien
aatgagtgatagagacaaattatgattcgagag

SEQ ID NO: 759688 - DNA, 33 bp, Homo sapien
aatgagtgatagagaccaattatgattcgagag

SEQ ID NO: 759689 - DNA, 33 bp, Homo sapien
gatgggcaaggcatccgcaggccaatgcagtag

SEQ ID NO: 759690 - DNA, 33 bp, Homo sapien
gatgggcaaggcatcctcaggccaatgcagtag

SEQ ID NO: 759691 - DNA, 33 bp, Homo sapien
ataacttgatttggaccccagctggcagagaat

SEQ ID NO: 759692 - DNA, 33 bp, Homo sapien
ataacttgatttggactccagctggcagagaat

SEQ ID NO: 759693 - DNA, 33 bp, Homo sapien
aggaagggagcatagacaacagaagctggcagt

SEQ ID NO: 759694 - DNA, 33 bp, Homo sapien
aggaagggagcatagagaacagaagctggcagt

SEQ ID NO: 759695 - DNA, 33 bp, Homo sapien
aacagctattttaagacgttgaagatgcattac

SEQ ID NO: 759696 - DNA, 33 bp, Homo sapien
aacagctattttaagatgttgaagatgcattac

SEQ ID NO: 759697 - DNA, 33 bp, Homo sapien
gcaattcagaataaagaaatagctcactgtttg

SEQ ID NO: 759698 - DNA, 33 bp, Homo sapien
gcaattcagaataaagcaatagctcactgtttg

SEQ ID NO: 759699 - DNA, 33 bp, Homo sapien
agacctgactattcagcccaaaatttgccaact

SEQ ID NO: 759700 - DNA, 33 bp, Homo sapien
agacctgactattcagtccaaaatttgccaact

SEQ ID NO: 759701 - DNA, 33 bp, Homo sapien
ctcctaggcacagtcaagattcacagaaaagag

SEQ ID NO: 759702 - DNA, 33 bp, Homo sapien
ctcctaggcacagtcaggattcacagaaaagag

SEQ ID NO: 759703 - DNA, 33 bp, Homo sapien
ccgtaagaaacacacactgaagatagaaccttg

SEQ ID NO: 759704 - DNA, 33 bp, Homo sapien
ccgtaagaaacacacattgaagatagaaccttg

SEQ ID NO: 759705 - DNA, 33 bp, Homo sapien
aaagcacttcacatacagaagagggtaatatga

SEQ ID NO: 759706 - DNA, 33 bp, Homo sapien
aaagcacttcacatacggaagagggtaatatga

SEQ ID NO: 759707 - DNA, 33 bp, Homo sapien
agtgtatggttattaagattggactcagagatc

SEQ ID NO: 759708 - DNA, 33 bp, Homo sapien
agtgtatggttattaatattggactcagagatc

SEQ ID NO: 759709 - DNA, 33 bp, Homo sapien
ggtcctttaattgctacgttcacatttactacc

SEQ ID NO: 759710 - DNA, 33 bp, Homo sapien
ggtcctttaattgctatgttcacatttactacc

SEQ ID NO: 759711 - DNA, 33 bp, Homo sapien
agagcctgacatttggcatacttgatggacatg

SEQ ID NO: 759712 - DNA, 33 bp, Homo sapien
agagcctgacatttggtatacttgatggacatg

SEQ ID NO: 759713 - DNA, 33 bp, Homo sapien
aatgttacgtgaagaactgtagatgccttccat

SEQ ID NO: 759714 - DNA, 33 bp, Homo sapien
aatgttacgtgaagaattgtagatgccttccat

SEQ ID NO: 759715 - DNA, 33 bp, Homo sapien
gaaaaactgaagtctacaatttgcattatcttt

SEQ ID NO: 759716 - DNA, 33 bp, Homo sapien
gaaaaactgaagtctataatttgcattatcttt

SEQ ID NO: 759717 - DNA, 33 bp, Homo sapien
attattctgaaccatcaatatctcccgatttaa

SEQ ID NO: 759718 - DNA, 33 bp, Homo sapien
attattctgaaccatctatatctcccgatttaa

SEQ ID NO: 759719 - DNA, 33 bp, Homo sapien
tatttttgcaagaaaccctggttccttttaccg

SEQ ID NO: 759720 - DNA, 33 bp, Homo sapien
tatttttgcaagaaactctggttccttttaccg

SEQ ID NO: 759721 - DNA, 33 bp, Homo sapien
tagctgggattacaggaacgtatttatgctttg

SEQ ID NO: 759722 - DNA, 33 bp, Homo sapien
tagctgggattacaggcacgtatttatgctttg

SEQ ID NO: 759723 - DNA, 33 bp, Homo sapien
acatgatatgaagaaccagagaaattaaagtgg

SEQ ID NO: 759724 - DNA, 33 bp, Homo sapien
acatgatatgaagaacgagagaaattaaagtgg

SEQ ID NO: 759725 - DNA, 33 bp, Homo sapien
aaacccagtgttttaaccatagcacttgatata

SEQ ID NO: 759726 - DNA, 33 bp, Homo sapien
aaacccagtgttttaatcatagcacttgatata

SEQ ID NO: 759727 - DNA, 33 bp, Homo sapien
aggttgtacagcaataaagttaaacatcagatc

SEQ ID NO: 759728 - DNA, 33 bp, Homo sapien
aggttgtacagcaatatagttaaacatcagatc

SEQ ID NO: 759729 - DNA, 33 bp, Homo sapien
aatagttattcaataaatagttgtagcatgagt

SEQ ID NO: 759730 - DNA, 33 bp, Homo sapien
aatagttattcaataagtagttgtagcatgagt

SEQ ID NO: 759731 - DNA, 33 bp, Homo sapien
taggaacgcttccaaccgaaaataacaggaaac

SEQ ID NO: 759732 - DNA, 33 bp, Homo sapien
taggaacgcttccaactgaaaataacaggaaac

SEQ ID NO: 759733 - DNA, 33 bp, Homo sapien
gatccttcaacccacaagtgcattatcctccat

SEQ ID NO: 759734 - DNA, 33 bp, Homo sapien
gatccttcaacccacaggtgcattatcctccat

SEQ ID NO: 759735 - DNA, 33 bp, Homo sapien
caaagactaaccataccgaacgttcttcacaga

SEQ ID NO: 759736 - DNA, 33 bp, Homo sapien
caaagactaaccatactgaacgttcttcacaga

SEQ ID NO: 759737 - DNA, 33 bp, Homo sapien
tgcctgtataggacagaacaggaagaattttat

SEQ ID NO: 759738 - DNA, 33 bp, Homo sapien
tgcctgtataggacaggacaggaagaattttat

SEQ ID NO: 759739 - DNA, 33 bp, Homo sapien
tatcatttagcttttaactacatatctgattat

SEQ ID NO: 759740 - DNA, 33 bp, Homo sapien
tatcatttagcttttatctacatatctgattat

SEQ ID NO: 759741 - DNA, 33 bp, Homo sapien
cttttgatgtcctgtaggaagctcattctcaac

SEQ ID NO: 759742 - DNA, 33 bp, Homo sapien
cttttgatgtcctgtatgaagctcattctcaac

SEQ ID NO: 759743 - DNA, 33 bp, Homo sapien
attacaaacacaccaacctggatggcattgaaa

SEQ ID NO: 759744 - DNA, 33 bp, Homo sapien
attacaaacacaccaatctggatggcattgaaa

SEQ ID NO: 759745 - DNA, 33 bp, Homo sapien
ctgttgatatacacaacagtcaatagtggttat

SEQ ID NO: 759746 - DNA, 33 bp, Homo sapien
ctgttgatatacacaatagtcaatagtggttat

SEQ ID NO: 759747 - DNA, 33 bp, Homo sapien
ttgtagcacagataaacgaaataatgatgacag

SEQ ID NO: 759748 - DNA, 33 bp, Homo sapien
ttgtagcacagataaatgaaataatgatgacag

SEQ ID NO: 759749 - DNA, 33 bp, Homo sapien
ctgctctctgtagcaacacccatcctcttgtac

SEQ ID NO: 759750 - DNA, 33 bp, Homo sapien
ctgctctctgtagcaatacccatcctcttgtac

SEQ ID NO: 759751 - DNA, 33 bp, Homo sapien
tggcgggccttgaaaaatgaaagcagatgagaa

SEQ ID NO: 759752 - DNA, 33 bp, Homo sapien
tggcgggccttgaaaattgaaagcagatgagaa

SEQ ID NO: 759753 - DNA, 33 bp, Homo sapien
catgatgtggcctttcactttgtgcctgcttca

SEQ ID NO: 759754 - DNA, 33 bp, Homo sapien
catgatgtggcctttcgctttgtgcctgcttca

SEQ ID NO: 759755 - DNA, 33 bp, Homo sapien
cctacatctttacacacggtaatgaaattggtg

SEQ ID NO: 759756 - DNA, 33 bp, Homo sapien
cctacatctttacacatggtaatgaaattggtg

SEQ ID NO: 759757 - DNA, 33 bp, Homo sapien
atcattgaatcaaaacacaatgctttggaagct

SEQ ID NO: 759758 - DNA, 33 bp, Homo sapien
atcattgaatcaaaacgcaatgctttggaagct

SEQ ID NO: 759759 - DNA, 33 bp, Homo sapien
ttccaattaacctttaagttgggaactcagaac

SEQ ID NO: 759760 - DNA, 33 bp, Homo sapien
ttccaattaacctttacgttgggaactcagaac

SEQ ID NO: 759761 - DNA, 33 bp, Homo sapien
ttttgaaaaggcctgaataagccaaataaaatt

SEQ ID NO: 759762 - DNA, 33 bp, Homo sapien
ttttgaaaaggcctgagtaagccaaataaaatt

SEQ ID NO: 759763 - DNA, 33 bp, Homo sapien
gtagagatttaaaataccacaatagaattttcc

SEQ ID NO: 759764 - DNA, 33 bp, Homo sapien
gtagagatttaaaatagcacaatagaattttcc

SEQ ID NO: 759765 - DNA, 33 bp, Homo sapien
ctttctctggaactgtcaatgatcttgttgaca

SEQ ID NO: 759766 - DNA, 33 bp, Homo sapien
ctttctctggaactgttaatgatcttgttgaca

SEQ ID NO: 759767 - DNA, 33 bp, Homo sapien
accacatccacttagccattgaagacgaatgtg

SEQ ID NO: 759768 - DNA, 33 bp, Homo sapien
accacatccacttagctattgaagacgaatgtg

SEQ ID NO: 759769 - DNA, 33 bp, Homo sapien
tacttaatagtatcaaattatgtgttgggtaca

SEQ ID NO: 759770 - DNA, 33 bp, Homo sapien
tacttaatagtatcaatttatgtgttgggtaca

SEQ ID NO: 759771 - DNA, 33 bp, Homo sapien
tttgtattgccaaataatattgaattgtatgga

SEQ ID NO: 759772 - DNA, 33 bp, Homo sapien
tttgtattgccaaatattattgaattgtatgga

SEQ ID NO: 759773 - DNA, 33 bp, Homo sapien
agcaccaaggcacaaaatgttgattgatataaa

SEQ ID NO: 759774 - DNA, 33 bp, Homo sapien
agcaccaaggcacaaactgttgattgatataaa

SEQ ID NO: 759775 - DNA, 33 bp, Homo sapien
ttttggtttaaaggaacctgaccaaagtagcaa

SEQ ID NO: 759776 - DNA, 33 bp, Homo sapien
ttttggtttaaaggaatctgaccaaagtagcaa

SEQ ID NO: 759777 - DNA, 33 bp, Homo sapien
gttcccctgctactaccgctgtccaagtcacat

SEQ ID NO: 759778 - DNA, 33 bp, Homo sapien
gttcccctgctactactgctgtccaagtcacat

SEQ ID NO: 759779 - DNA, 33 bp, Homo sapien
tactcaaactctgatacgtctctaagcatttga

SEQ ID NO: 759780 - DNA, 33 bp, Homo sapien
tactcaaactctgatatgtctctaagcatttga

SEQ ID NO: 759781 - DNA, 33 bp, Homo sapien
aatcttatcatctaacccagatccaggtacaga

SEQ ID NO: 759782 - DNA, 33 bp, Homo sapien
aatcttatcatctaacgcagatccaggtacaga

SEQ ID NO: 759783 - DNA, 33 bp, Homo sapien
tctttgatgttgatgacctatggatggggtttt

SEQ ID NO: 759784 - DNA, 33 bp, Homo sapien
tctttgatgttgatgatctatggatggggtttt

SEQ ID NO: 759785 - DNA, 33 bp, Homo sapien
gggcttttgtcccaataaatcttctccatgtac

SEQ ID NO: 759786 - DNA, 33 bp, Homo sapien
gggcttttgtcccaatgaatcttctccatgtac

SEQ ID NO: 759787 - DNA, 33 bp, Homo sapien
acctaaggagggtactcaaaagatcgtgtgtgt

SEQ ID NO: 759788 - DNA, 33 bp, Homo sapien
acctaaggagggtacttaaaagatcgtgtgtgt

SEQ ID NO: 759789 - DNA, 33 bp, Homo sapien
atgcttgaaaacaagaaatgttcaaataataat

SEQ ID NO: 759790 - DNA, 33 bp, Homo sapien
atgcttgaaaacaagagatgttcaaataataat

SEQ ID NO: 759791 - DNA, 33 bp, Homo sapien
aaaggacaccaggtatcagccccaagaatgtgt

SEQ ID NO: 759792 - DNA, 33 bp, Homo sapien
aaaggacaccaggtatgagccccaagaatgtgt

SEQ ID NO: 759793 - DNA, 33 bp, Homo sapien
tcactgtttgtccacgccgctagactatgaaca

SEQ ID NO: 759794 - DNA, 33 bp, Homo sapien
tcactgtttgtccacgtcgctagactatgaaca

SEQ ID NO: 759795 - DNA, 33 bp, Homo sapien
gttctgaagggtttcacagttcacaagcactaa

SEQ ID NO: 759796 - DNA, 33 bp, Homo sapien
gttctgaagggtttcatagttcacaagcactaa

SEQ ID NO: 759797 - DNA, 33 bp, Homo sapien
ttaagactttttcataagtaagaatgctcaagt

SEQ ID NO: 759798 - DNA, 33 bp, Homo sapien
ttaagactttttcatatgtaagaatgctcaagt

SEQ ID NO: 759799 - DNA, 33 bp, Homo sapien
aactagtttggtttgccctcagtattaagataa

SEQ ID NO: 759800 - DNA, 33 bp, Homo sapien
aactagtttggtttgctctcagtattaagataa

SEQ ID NO: 759801 - DNA, 33 bp, Homo sapien
gaatattcctgagcaacacaattttactgacat

SEQ ID NO: 759802 - DNA, 33 bp, Homo sapien
gaatattcctgagcaatacaattttactgacat

SEQ ID NO: 759803 - DNA, 33 bp, Homo sapien
gactctagtgtaaaatcagttccatacctctct

SEQ ID NO: 759804 - DNA, 33 bp, Homo sapien
gactctagtgtaaaattagttccatacctctct

SEQ ID NO: 759805 - DNA, 33 bp, Homo sapien
gtttattctactgccaagaccaaaacaaatagg

SEQ ID NO: 759806 - DNA, 33 bp, Homo sapien
gtttattctactgccaggaccaaaacaaatagg

SEQ ID NO: 759807 - DNA, 33 bp, Homo sapien
ctgtgctgagaacaaacgaagttaatcaaagta

SEQ ID NO: 759808 - DNA, 33 bp, Homo sapien
ctgtgctgagaacaaatgaagttaatcaaagta

SEQ ID NO: 759809 - DNA, 33 bp, Homo sapien
attatttacactcaacactaaaaaaagatgacc

SEQ ID NO: 759810 - DNA, 33 bp, Homo sapien
attatttacactcaacgctaaaaaaagatgacc

SEQ ID NO: 759811 - DNA, 33 bp, Homo sapien
taagtgaaacaagtcaaaaacagacgaatacca

SEQ ID NO: 759812 - DNA, 33 bp, Homo sapien
taagtgaaacaagtcagaaacagacgaatacca

SEQ ID NO: 759813 - DNA, 33 bp, Homo sapien
tgaaaagggctgtaaacgtggcaagatttttcc

SEQ ID NO: 759814 - DNA, 33 bp, Homo sapien
tgaaaagggctgtaaatgtggcaagatttttcc

SEQ ID NO: 759815 - DNA, 33 bp, Homo sapien
ttcttttccaggaaggaacagtattggagtaac

SEQ ID NO: 759816 - DNA, 33 bp, Homo sapien
ttcttttccaggaagggacagtattggagtaac

SEQ ID NO: 759817 - DNA, 33 bp, Homo sapien
gtatagcacatgatctaagaagaaatctgttag

SEQ ID NO: 759818 - DNA, 33 bp, Homo sapien
gtatagcacatgatctgagaagaaatctgttag

SEQ ID NO: 759819 - DNA, 33 bp, Homo sapien
caacctacttgagggaacatttctattcattcc

SEQ ID NO: 759820 - DNA, 33 bp, Homo sapien
caacctacttgagggagcatttctattcattcc

SEQ ID NO: 759821 - DNA, 33 bp, Homo sapien
tgtaagacggcagaaacgtaaaccttgagaaat

SEQ ID NO: 759822 - DNA, 33 bp, Homo sapien
tgtaagacggcagaaatgtaaaccttgagaaat

SEQ ID NO: 759823 - DNA, 33 bp, Homo sapien
aggagaagagtgttgaagtattttgagaataag

SEQ ID NO: 759824 - DNA, 33 bp, Homo sapien
aggagaagagtgttgacgtattttgagaataag

SEQ ID NO: 759825 - DNA, 33 bp, Homo sapien
agcaagtcaaacagacaaagtaacaaaagcttg

SEQ ID NO: 759826 - DNA, 33 bp, Homo sapien
agcaagtcaaacagacgaagtaacaaaagcttg

SEQ ID NO: 759827 - DNA, 33 bp, Homo sapien
actatattctagtagaacgatgcttaatgaatt

SEQ ID NO: 759828 - DNA, 33 bp, Homo sapien
actatattctagtagaccgatgcttaatgaatt

SEQ ID NO: 759829 - DNA, 33 bp, Homo sapien
gatgaatttttatgtaaatcaaggcataatcaa

SEQ ID NO: 759830 - DNA, 33 bp, Homo sapien
gatgaatttttatgtagatcaaggcataatcaa

SEQ ID NO: 759831 - DNA, 33 bp, Homo sapien
actaaagtagctatacaaggacttaggtgtttt

SEQ ID NO: 759832 - DNA, 33 bp, Homo sapien
actaaagtagctatacgaggacttaggtgtttt

SEQ ID NO: 759833 - DNA, 33 bp, Homo sapien
tatctttcatgccaatgaactaattattttctt

SEQ ID NO: 759834 - DNA, 33 bp, Homo sapien
tatctttcatgccaattaactaattattttctt

SEQ ID NO: 759835 - DNA, 33 bp, Homo sapien
agtagaaattcatccactgatactataaaaaca

SEQ ID NO: 759836 - DNA, 33 bp, Homo sapien
agtagaaattcatccattgatactataaaaaca

SEQ ID NO: 759837 - DNA, 33 bp, Homo sapien
ttttcaggaactttggaaaaactacaggctaca

SEQ ID NO: 759838 - DNA, 33 bp, Homo sapien
ttttcaggaactttgggaaaactacaggctaca

SEQ ID NO: 759839 - DNA, 33 bp, Homo sapien
gatttgagcttttgtacatttgagccccagaat

SEQ ID NO: 759840 - DNA, 33 bp, Homo sapien
gatttgagcttttgtatatttgagccccagaat

SEQ ID NO: 759841 - DNA, 33 bp, Homo sapien
ctaagataaccaatcacaaaattcagtagctgc

SEQ ID NO: 759842 - DNA, 33 bp, Homo sapien
ctaagataaccaatcataaaattcagtagctgc

SEQ ID NO: 759843 - DNA, 33 bp, Homo sapien
gcgatactctggcatacccaagaaagatctggg

SEQ ID NO: 759844 - DNA, 33 bp, Homo sapien
gcgatactctggcatatccaagaaagatctggg

SEQ ID NO: 759845 - DNA, 33 bp, Homo sapien
aaccaatgtaatgatacggtatgggatgatatc

SEQ ID NO: 759846 - DNA, 33 bp, Homo sapien
aaccaatgtaatgatatggtatgggatgatatc

SEQ ID NO: 759847 - DNA, 33 bp, Homo sapien
tgtattcaattcataaaccagggcaactaaaat

SEQ ID NO: 759848 - DNA, 33 bp, Homo sapien
tgtattcaattcataacccagggcaactaaaat

SEQ ID NO: 759849 - DNA, 33 bp, Homo sapien
gcttatatgagagtacaataaattttgccatgt

SEQ ID NO: 759850 - DNA, 33 bp, Homo sapien
gcttatatgagagtacgataaattttgccatgt

SEQ ID NO: 759851 - DNA, 33 bp, Homo sapien
ctattaggacagatcaaagaagcttggataaaa

SEQ ID NO: 759852 - DNA, 33 bp, Homo sapien
ctattaggacagatcagagaagcttggataaaa

SEQ ID NO: 759853 - DNA, 33 bp, Homo sapien
cagcagattgtcctcaactgtcgtcttctccag

SEQ ID NO: 759854 - DNA, 33 bp, Homo sapien
cagcagattgtcctcagctgtcgtcttctccag

SEQ ID NO: 759855 - DNA, 33 bp, Homo sapien
atgaatttaacctggaacaatgcagaatcaatt

SEQ ID NO: 759856 - DNA, 33 bp, Homo sapien
atgaatttaacctggagcaatgcagaatcaatt

SEQ ID NO: 759857 - DNA, 33 bp, Homo sapien
cagaaacctcaccaagcctgagagcccatcaag

SEQ ID NO: 759858 - DNA, 33 bp, Homo sapien
cagaaacctcaccaagtctgagagcccatcaag

SEQ ID NO: 759859 - DNA, 33 bp, Homo sapien
aacaaatgattgtttacaaagtttaaggtcctt

SEQ ID NO: 759860 - DNA, 33 bp, Homo sapien
aacaaatgattgtttagaaagtttaaggtcctt

SEQ ID NO: 759861 - DNA, 33 bp, Homo sapien
gtaagactttggggaaatatggataaggaattg

SEQ ID NO: 759862 - DNA, 33 bp, Homo sapien
gtaagactttggggaactatggataaggaattg

SEQ ID NO: 759863 - DNA, 33 bp, Homo sapien
aaatcaaatagcaaaaattacatcataaagtac

SEQ ID NO: 759864 - DNA, 33 bp, Homo sapien
aaatcaaatagcaaaatttacatcataaagtac

SEQ ID NO: 759865 - DNA, 33 bp, Homo sapien
ccaacaaatatatgcgaaaaagctcatcatcag

SEQ ID NO: 759866 - DNA, 33 bp, Homo sapien
ccaacaaatatatgcgtaaaagctcatcatcag

SEQ ID NO: 759867 - DNA, 33 bp, Homo sapien
ttttgtaacatttgaaacatgattaaccaatta

SEQ ID NO: 759868 - DNA, 33 bp, Homo sapien
ttttgtaacatttgaagcatgattaaccaatta

SEQ ID NO: 759869 - DNA, 33 bp, Homo sapien
aactgacaattggctggataatactgatatttt

SEQ ID NO: 759870 - DNA, 33 bp, Homo sapien
aactgacaattggctgtataatactgatatttt

SEQ ID NO: 759871 - DNA, 33 bp, Homo sapien
tggaagacccaggtaaatgtcttggagttgttt

SEQ ID NO: 759872 - DNA, 33 bp, Homo sapien
tggaagacccaggtaagtgtcttggagttgttt

SEQ ID NO: 759873 - DNA, 33 bp, Homo sapien
tatttaaagtgcactacgtctgaagtatgaaga

SEQ ID NO: 759874 - DNA, 33 bp, Homo sapien
tatttaaagtgcactatgtctgaagtatgaaga

SEQ ID NO: 759875 - DNA, 33 bp, Homo sapien
ataaggagaggaatgtgaagcatcaagacaatg

SEQ ID NO: 759876 - DNA, 33 bp, Homo sapien
ataaggagaggaatgttaagcatcaagacaatg

SEQ ID NO: 759877 - DNA, 33 bp, Homo sapien
aaaactgtgctagacaatgaatcatatttaaac

SEQ ID NO: 759878 - DNA, 33 bp, Homo sapien
aaaactgtgctagacattgaatcatatttaaac

SEQ ID NO: 759879 - DNA, 33 bp, Homo sapien
tcatgagtcactgcaaagatttgggatcctttt

SEQ ID NO: 759880 - DNA, 33 bp, Homo sapien
tcatgagtcactgcaaggatttgggatcctttt

SEQ ID NO: 759881 - DNA, 33 bp, Homo sapien
ttcatcacccaactcaataaggtatcttaacct

SEQ ID NO: 759882 - DNA, 33 bp, Homo sapien
ttcatcacccaactcactaaggtatcttaacct

SEQ ID NO: 759883 - DNA, 33 bp, Homo sapien
taataggaattctaggcattaaggaagcaagtg

SEQ ID NO: 759884 - DNA, 33 bp, Homo sapien
taataggaattctaggtattaaggaagcaagtg

SEQ ID NO: 759885 - DNA, 33 bp, Homo sapien
catacatatacaagtaacttttaattccattcc

SEQ ID NO: 759886 - DNA, 33 bp, Homo sapien
catacatatacaagtagcttttaattccattcc

SEQ ID NO: 759887 - DNA, 33 bp, Homo sapien
tttggttaaattcttaaagtgtatgtgcttaac

SEQ ID NO: 759888 - DNA, 33 bp, Homo sapien
tttggttaaattcttatagtgtatgtgcttaac

SEQ ID NO: 759889 - DNA, 33 bp, Homo sapien
ttggttagaagataacaagaatcaaaaatcata

SEQ ID NO: 759890 - DNA, 33 bp, Homo sapien
ttggttagaagataacgagaatcaaaaatcata

SEQ ID NO: 759891 - DNA, 33 bp, Homo sapien
agtgtcttgaaaaagaaccataatgatgtatat

SEQ ID NO: 759892 - DNA, 33 bp, Homo sapien
agtgtcttgaaaaagatccataatgatgtatat

SEQ ID NO: 759893 - DNA, 33 bp, Homo sapien
gctttataagtctccactaacacacggaatttc

SEQ ID NO: 759894 - DNA, 33 bp, Homo sapien
gctttataagtctccagtaacacacggaatttc

SEQ ID NO: 759895 - DNA, 33 bp, Homo sapien
attagtagaatgatgccatgagagtatgaagag

SEQ ID NO: 759896 - DNA, 33 bp, Homo sapien
attagtagaatgatgctatgagagtatgaagag

SEQ ID NO: 759897 - DNA, 33 bp, Homo sapien
agttccttagtcttgaaaagcatgttttctcca

SEQ ID NO: 759898 - DNA, 33 bp, Homo sapien
agttccttagtcttgataagcatgttttctcca

SEQ ID NO: 759899 - DNA, 33 bp, Homo sapien
aaacaaacagttatcaaaatcaaataccttctc

SEQ ID NO: 759900 - DNA, 33 bp, Homo sapien
aaacaaacagttatcataatcaaataccttctc

SEQ ID NO: 759901 - DNA, 33 bp, Homo sapien
tagaggcacatataaaaaatacattctgtttat

SEQ ID NO: 759902 - DNA, 33 bp, Homo sapien
tagaggcacatataaacaatacattctgtttat

SEQ ID NO: 759903 - DNA, 33 bp, Homo sapien
ggaggtttgaggagaacagtgagataggaacct

SEQ ID NO: 759904 - DNA, 33 bp, Homo sapien
ggaggtttgaggagaagagtgagataggaacct

SEQ ID NO: 759905 - DNA, 33 bp, Homo sapien
ttaggctgcattgggacgagtggtttcggtcct

SEQ ID NO: 759906 - DNA, 33 bp, Homo sapien
ttaggctgcattgggatgagtggtttcggtcct

SEQ ID NO: 759907 - DNA, 33 bp, Homo sapien
tcatgcaaacaataataaccaagaatcttctat

SEQ ID NO: 759908 - DNA, 33 bp, Homo sapien
tcatgcaaacaataattaccaagaatcttctat

SEQ ID NO: 759909 - DNA, 33 bp, Homo sapien
ttaaagaagtaaagggccattcttcactctctg

SEQ ID NO: 759910 - DNA, 33 bp, Homo sapien
ttaaagaagtaaagggtcattcttcactctctg

SEQ ID NO: 759911 - DNA, 33 bp, Homo sapien
cacggttagtaatggaaactgccgacttctgga

SEQ ID NO: 759912 - DNA, 33 bp, Homo sapien
cacggttagtaatggacactgccgacttctgga

SEQ ID NO: 759913 - DNA, 33 bp, Homo sapien
atcagcgaatctttcaactctatcatcagatat

SEQ ID NO: 759914 - DNA, 33 bp, Homo sapien
atcagcgaatctttcatctctatcatcagatat

SEQ ID NO: 759915 - DNA, 33 bp, Homo sapien
tgaggataatagcttccaggtccattcatgtcc

SEQ ID NO: 759916 - DNA, 33 bp, Homo sapien
tgaggataatagcttctaggtccattcatgtcc

SEQ ID NO: 759917 - DNA, 33 bp, Homo sapien
tattataaagatacacacacatctgtgttcact

SEQ ID NO: 759918 - DNA, 33 bp, Homo sapien
tattataaagatacacgcacatctgtgttcact

SEQ ID NO: 759919 - DNA, 33 bp, Homo sapien
aaacttgtttgctgacaaaaagaaaagaacaca

SEQ ID NO: 759920 - DNA, 33 bp, Homo sapien
aaacttgtttgctgacgaaaagaaaagaacaca

SEQ ID NO: 759921 - DNA, 33 bp, Homo sapien
tttttaaagtagcataactatcaacttaatatt

SEQ ID NO: 759922 - DNA, 33 bp, Homo sapien
tttttaaagtagcatacctatcaacttaatatt

SEQ ID NO: 759923 - DNA, 33 bp, Homo sapien
ataagagctttttaccaacttctcttacagtac

SEQ ID NO: 759924 - DNA, 33 bp, Homo sapien
ataagagctttttaccgacttctcttacagtac

SEQ ID NO: 759925 - DNA, 33 bp, Homo sapien
ggatactctccaaaaacggcaggcaaacatttt

SEQ ID NO: 759926 - DNA, 33 bp, Homo sapien
ggatactctccaaaaatggcaggcaaacatttt

SEQ ID NO: 759927 - DNA, 33 bp, Homo sapien
aatggggcagtggtcaccaagcttcacttaggt

SEQ ID NO: 759928 - DNA, 33 bp, Homo sapien
aatggggcagtggtcatcaagcttcacttaggt

SEQ ID NO: 759929 - DNA, 33 bp, Homo sapien
aatagccagagtgcagaaaatcaactctttcta

SEQ ID NO: 759930 - DNA, 33 bp, Homo sapien
aatagccagagtgcaggaaatcaactctttcta

SEQ ID NO: 759931 - DNA, 33 bp, Homo sapien
acagtgcttgtactcaaattttgtgaatgaagt

SEQ ID NO: 759932 - DNA, 33 bp, Homo sapien
acagtgcttgtactcagattttgtgaatgaagt

SEQ ID NO: 759933 - DNA, 33 bp, Homo sapien
agggaattactagcaaagaaaagcacagtaaca

SEQ ID NO: 759934 - DNA, 33 bp, Homo sapien
agggaattactagcaatgaaaagcacagtaaca

SEQ ID NO: 759935 - DNA, 33 bp, Homo sapien
cctttcagtggaacaactcaaagacgagtcttt

SEQ ID NO: 759936 - DNA, 33 bp, Homo sapien
cctttcagtggaacaattcaaagacgagtcttt

SEQ ID NO: 759937 - DNA, 33 bp, Homo sapien
ggcactagagataaaaatgtgagaacaatatga

SEQ ID NO: 759938 - DNA, 33 bp, Homo sapien
ggcactagagataaaagtgtgagaacaatatga

SEQ ID NO: 759939 - DNA, 33 bp, Homo sapien
gctctgctttagactacggattggattcaggtc

SEQ ID NO: 759940 - DNA, 33 bp, Homo sapien
gctctgctttagactatggattggattcaggtc

SEQ ID NO: 759941 - DNA, 33 bp, Homo sapien
agcggctttcctaacaatgaattcctgactcac

SEQ ID NO: 759942 - DNA, 33 bp, Homo sapien
agcggctttcctaacactgaattcctgactcac

SEQ ID NO: 759943 - DNA, 33 bp, Homo sapien
ttgtttctgctggaccaatccggaggggacaga

SEQ ID NO: 759944 - DNA, 33 bp, Homo sapien
ttgtttctgctggaccgatccggaggggacaga

SEQ ID NO: 759945 - DNA, 33 bp, Homo sapien
acttggtcagtgttcaaattttgggggcaaatg

SEQ ID NO: 759946 - DNA, 33 bp, Homo sapien
acttggtcagtgttcacattttgggggcaaatg

SEQ ID NO: 759947 - DNA, 33 bp, Homo sapien
atacaaaatacaatccaatctgaagtttcaaaa

SEQ ID NO: 759948 - DNA, 33 bp, Homo sapien
atacaaaatacaatccgatctgaagtttcaaaa

SEQ ID NO: 759949 - DNA, 33 bp, Homo sapien
aggatcctgtggcccacaccaaagcaacaggta

SEQ ID NO: 759950 - DNA, 33 bp, Homo sapien
aggatcctgtggcccataccaaagcaacaggta

SEQ ID NO: 759951 - DNA, 33 bp, Homo sapien
gaaggaaacagaactaaacagaatagcaaagaa

SEQ ID NO: 759952 - DNA, 33 bp, Homo sapien
gaaggaaacagaactatacagaatagcaaagaa

SEQ ID NO: 759953 - DNA, 33 bp, Homo sapien
taaaaataatgtctggccagttctatggtctag

SEQ ID NO: 759954 - DNA, 33 bp, Homo sapien
taaaaataatgtctggtcagttctatggtctag

SEQ ID NO: 759955 - DNA, 33 bp, Homo sapien
ctagccagaggtttaaggatgtttgagagagtt

SEQ ID NO: 759956 - DNA, 33 bp, Homo sapien
ctagccagaggtttaatgatgtttgagagagtt

SEQ ID NO: 759957 - DNA, 33 bp, Homo sapien
agtagaattcctcagaaacatacaatgcttcat

SEQ ID NO: 759958 - DNA, 33 bp, Homo sapien
agtagaattcctcagagacatacaatgcttcat

SEQ ID NO: 759959 - DNA, 33 bp, Homo sapien
cacttgatttttctatgaactcactcaaggttc

SEQ ID NO: 759960 - DNA, 33 bp, Homo sapien
cacttgatttttctattaactcactcaaggttc

SEQ ID NO: 759961 - DNA, 33 bp, Homo sapien
aaataaacaatctggcaatcagagcacttctct

SEQ ID NO: 759962 - DNA, 33 bp, Homo sapien
aaataaacaatctggcgatcagagcacttctct

SEQ ID NO: 759963 - DNA, 33 bp, Homo sapien
cacacaataattctcaataaagcacagcaaaaa

SEQ ID NO: 759964 - DNA, 33 bp, Homo sapien
cacacaataattctcagtaaagcacagcaaaaa

SEQ ID NO: 759965 - DNA, 33 bp, Homo sapien
attaatggcaccaattaaaaaaggttataagag

SEQ ID NO: 759966 - DNA, 33 bp, Homo sapien
attaatggcaccaatttaaaaaggttataagag

SEQ ID NO: 759967 - DNA, 33 bp, Homo sapien
ctcactctactgttaccaatttaccgtatcagt

SEQ ID NO: 759968 - DNA, 33 bp, Homo sapien
ctcactctactgttactaatttaccgtatcagt

SEQ ID NO: 759969 - DNA, 33 bp, Homo sapien
atcattattctgcacaccttaattttgcatata

SEQ ID NO: 759970 - DNA, 33 bp, Homo sapien
atcattattctgcacatcttaattttgcatata

SEQ ID NO: 759971 - DNA, 33 bp, Homo sapien
catatatattgccaaaatagctctagagtatag

SEQ ID NO: 759972 - DNA, 33 bp, Homo sapien
catatatattgccaaattagctctagagtatag

SEQ ID NO: 759973 - DNA, 33 bp, Homo sapien
atgagctaaatcaatccctttcctttacgcagt

SEQ ID NO: 759974 - DNA, 33 bp, Homo sapien
atgagctaaatcaatctctttcctttacgcagt

SEQ ID NO: 759975 - DNA, 33 bp, Homo sapien
attatagaataatgatcagagctacaactaatt

SEQ ID NO: 759976 - DNA, 33 bp, Homo sapien
attatagaataatgattagagctacaactaatt

SEQ ID NO: 759977 - DNA, 33 bp, Homo sapien
ttggtatattgtgttaagtcctccatttccgta

SEQ ID NO: 759978 - DNA, 33 bp, Homo sapien
ttggtatattgtgttaggtcctccatttccgta

SEQ ID NO: 759979 - DNA, 33 bp, Homo sapien
ctcttaagtttggacaagtatttgagtataagc

SEQ ID NO: 759980 - DNA, 33 bp, Homo sapien
ctcttaagtttggacatgtatttgagtataagc

SEQ ID NO: 759981 - DNA, 33 bp, Homo sapien
tgctccaaaatattggccagagtctttcacaag

SEQ ID NO: 759982 - DNA, 33 bp, Homo sapien
tgctccaaaatattggtcagagtctttcacaag

SEQ ID NO: 759983 - DNA, 33 bp, Homo sapien
tggtttttaaaggatagacaaacaatgctatat

SEQ ID NO: 759984 - DNA, 33 bp, Homo sapien
tggtttttaaaggatatacaaacaatgctatat

SEQ ID NO: 759985 - DNA, 33 bp, Homo sapien
agggcatatttttaaaccgtgggctacagattt

SEQ ID NO: 759986 - DNA, 33 bp, Homo sapien
agggcatatttttaaatcgtgggctacagattt

SEQ ID NO: 759987 - DNA, 33 bp, Homo sapien
ttttggagttgtttcaataggaatagtaccagc

SEQ ID NO: 759988 - DNA, 33 bp, Homo sapien
ttttggagttgtttcagtaggaatagtaccagc

SEQ ID NO: 759989 - DNA, 33 bp, Homo sapien
ctagttcctattgttccatttttgtgtctatat

SEQ ID NO: 759990 - DNA, 33 bp, Homo sapien
ctagttcctattgttctatttttgtgtctatat

SEQ ID NO: 759991 - DNA, 33 bp, Homo sapien
catatttagtgagtgactcaatcaaattagaaa

SEQ ID NO: 759992 - DNA, 33 bp, Homo sapien
catatttagtgagtgattcaatcaaattagaaa

SEQ ID NO: 759993 - DNA, 33 bp, Homo sapien
agtaataaagtgataaacatctctggcctggct

SEQ ID NO: 759994 - DNA, 33 bp, Homo sapien
agtaataaagtgataaccatctctggcctggct

SEQ ID NO: 759995 - DNA, 33 bp, Homo sapien
ataaaactgctgtcaaagatacaatatagtcac

SEQ ID NO: 759996 - DNA, 33 bp, Homo sapien
ataaaactgctgtcaaggatacaatatagtcac

SEQ ID NO: 759997 - DNA, 33 bp, Homo sapien
caggtcaatttttgtgacaatcagtactgggat

SEQ ID NO: 759998 - DNA, 33 bp, Homo sapien
caggtcaatttttgtggcaatcagtactgggat

SEQ ID NO: 759999 - DNA, 33 bp, Homo sapien
ctccgtcctctgaaaccccattgatatctcaca

SEQ ID NO: 760000 - DNA, 33 bp, Homo sapien
ctccgtcctctgaaactccattgatatctcaca

SEQ ID NO: 760001 - DNA, 33 bp, Homo sapien
taatgcatacaaaccaacagataaaaggaataa

SEQ ID NO: 760002 - DNA, 33 bp, Homo sapien
taatgcatacaaaccagcagataaaaggaataa

SEQ ID NO: 760003 - DNA, 33 bp, Homo sapien
acatggtctttctctcactttgctttctgctgt

SEQ ID NO: 760004 - DNA, 33 bp, Homo sapien
acatggtctttctctcgctttgctttctgctgt

SEQ ID NO: 760005 - DNA, 33 bp, Homo sapien
gtaatactttcaggtacgtgttactgctttggt

SEQ ID NO: 760006 - DNA, 33 bp, Homo sapien
gtaatactttcaggtatgtgttactgctttggt

SEQ ID NO: 760007 - DNA, 33 bp, Homo sapien
acctgcccatcttctcacatttttccaacataa

SEQ ID NO: 760008 - DNA, 33 bp, Homo sapien
acctgcccatcttctcgcatttttccaacataa

SEQ ID NO: 760009 - DNA, 33 bp, Homo sapien
tcttttcttcacttgcacctcttcattacttga

SEQ ID NO: 760010 - DNA, 33 bp, Homo sapien
tcttttcttcacttgcgcctcttcattacttga

SEQ ID NO: 760011 - DNA, 33 bp, Homo sapien
gaacctggactgttagaatctgtattagttttc

SEQ ID NO: 760012 - DNA, 33 bp, Homo sapien
gaacctggactgttaggatctgtattagttttc

SEQ ID NO: 760013 - DNA, 33 bp, Homo sapien
ggactccaatacacaacgtagaagagcatgatt

SEQ ID NO: 760014 - DNA, 33 bp, Homo sapien
ggactccaatacacaatgtagaagagcatgatt

SEQ ID NO: 760015 - DNA, 33 bp, Homo sapien
attaggtgccacttgaagacattcatttattat

SEQ ID NO: 760016 - DNA, 33 bp, Homo sapien
attaggtgccacttgatgacattcatttattat

SEQ ID NO: 760017 - DNA, 33 bp, Homo sapien
aatttgatgagactgaatatcaggagctctagc

SEQ ID NO: 760018 - DNA, 33 bp, Homo sapien
aatttgatgagactgagtatcaggagctctagc

SEQ ID NO: 760019 - DNA, 33 bp, Homo sapien
cctccagactccggaacggtatgtgaacctaca

SEQ ID NO: 760020 - DNA, 33 bp, Homo sapien
cctccagactccggaatggtatgtgaacctaca

SEQ ID NO: 760021 - DNA, 33 bp, Homo sapien
ctagaacccactgaacacaatatctggagcaat

SEQ ID NO: 760022 - DNA, 33 bp, Homo sapien
ctagaacccactgaacccaatatctggagcaat

SEQ ID NO: 760023 - DNA, 33 bp, Homo sapien
aagcagggaatgataacagataggtgggagaag

SEQ ID NO: 760024 - DNA, 33 bp, Homo sapien
aagcagggaatgataagagataggtgggagaag

SEQ ID NO: 760025 - DNA, 33 bp, Homo sapien
tgtgacttgccaaaacagccatgctagagattg

SEQ ID NO: 760026 - DNA, 33 bp, Homo sapien
tgtgacttgccaaaacggccatgctagagattg

SEQ ID NO: 760027 - DNA, 33 bp, Homo sapien
ttcttaatcttaactgaaaaacagatgcaaaat

SEQ ID NO: 760028 - DNA, 33 bp, Homo sapien
ttcttaatcttaactggaaaacagatgcaaaat

SEQ ID NO: 760029 - DNA, 33 bp, Homo sapien
gataaatacataaaaaatcaatgccagtgtcaa

SEQ ID NO: 760030 - DNA, 33 bp, Homo sapien
gataaatacataaaaagtcaatgccagtgtcaa

SEQ ID NO: 760031 - DNA, 33 bp, Homo sapien
ggtgccaaatgtcaaaaacttctataaacaagg

SEQ ID NO: 760032 - DNA, 33 bp, Homo sapien
ggtgccaaatgtcaaagacttctataaacaagg

SEQ ID NO: 760033 - DNA, 33 bp, Homo sapien
tgacatttgatataaaattgctagacaagtgga

SEQ ID NO: 760034 - DNA, 33 bp, Homo sapien
tgacatttgatataaagttgctagacaagtgga

SEQ ID NO: 760035 - DNA, 33 bp, Homo sapien
ttgaatgtatcagaaaagagccaaatgtaaaaa

SEQ ID NO: 760036 - DNA, 33 bp, Homo sapien
ttgaatgtatcagaaaggagccaaatgtaaaaa

SEQ ID NO: 760037 - DNA, 33 bp, Homo sapien
aaaccttgtgttcagcacttacctgggccaaca

SEQ ID NO: 760038 - DNA, 33 bp, Homo sapien
aaaccttgtgttcagcgcttacctgggccaaca

SEQ ID NO: 760039 - DNA, 33 bp, Homo sapien
cttaaacataaacttaacctataccaacaattc

SEQ ID NO: 760040 - DNA, 33 bp, Homo sapien
cttaaacataaacttaccctataccaacaattc

SEQ ID NO: 760041 - DNA, 33 bp, Homo sapien
cagcttaacttgcaaaatgataagcaaatactg

SEQ ID NO: 760042 - DNA, 33 bp, Homo sapien
cagcttaacttgcaaactgataagcaaatactg

SEQ ID NO: 760043 - DNA, 33 bp, Homo sapien
cagtttgtctcttaaaaagaaattgtcactcat

SEQ ID NO: 760044 - DNA, 33 bp, Homo sapien
cagtttgtctcttaaatagaaattgtcactcat

SEQ ID NO: 760045 - DNA, 33 bp, Homo sapien
acattttggaaaacaacaggtatgagactaaat

SEQ ID NO: 760046 - DNA, 33 bp, Homo sapien
acattttggaaaacaataggtatgagactaaat

SEQ ID NO: 760047 - DNA, 33 bp, Homo sapien
attctctgcttcatctaaaatttgaggacttca

SEQ ID NO: 760048 - DNA, 33 bp, Homo sapien
attctctgcttcatctgaaatttgaggacttca

SEQ ID NO: 760049 - DNA, 33 bp, Homo sapien
agtagtagactcttgaagataaaaatgagatcc

SEQ ID NO: 760050 - DNA, 33 bp, Homo sapien
agtagtagactcttgatgataaaaatgagatcc

SEQ ID NO: 760051 - DNA, 33 bp, Homo sapien
agaggccatctgaggacctcaatatttcataca

SEQ ID NO: 760052 - DNA, 33 bp, Homo sapien
agaggccatctgaggatctcaatatttcataca

SEQ ID NO: 760053 - DNA, 33 bp, Homo sapien
aatgaccattatttgcagatgttttaatggtca

SEQ ID NO: 760054 - DNA, 33 bp, Homo sapien
aatgaccattatttgccgatgttttaatggtca

SEQ ID NO: 760055 - DNA, 33 bp, Homo sapien
agctaatgttcagctgaagtaaagataacttaa

SEQ ID NO: 760056 - DNA, 33 bp, Homo sapien
agctaatgttcagctgtagtaaagataacttaa

SEQ ID NO: 760057 - DNA, 33 bp, Homo sapien
ggatgcagtcaatacaaaacaataacaacaaga

SEQ ID NO: 760058 - DNA, 33 bp, Homo sapien
ggatgcagtcaatacagaacaataacaacaaga

SEQ ID NO: 760059 - DNA, 33 bp, Homo sapien
ttgttcaggttaacacaaaaagcacaagcagtg

SEQ ID NO: 760060 - DNA, 33 bp, Homo sapien
ttgttcaggttaacacgaaaagcacaagcagtg

SEQ ID NO: 760061 - DNA, 33 bp, Homo sapien
tgattacatctcaaaagtcagttaatatcttcc

SEQ ID NO: 760062 - DNA, 33 bp, Homo sapien
tgattacatctcaaaattcagttaatatcttcc

SEQ ID NO: 760063 - DNA, 33 bp, Homo sapien
gaggacacaataaaaaaattttctgagtgagag

SEQ ID NO: 760064 - DNA, 33 bp, Homo sapien
gaggacacaataaaaagattttctgagtgagag

SEQ ID NO: 760065 - DNA, 33 bp, Homo sapien
ttgttcagtaagataacagtcgcattaattttg

SEQ ID NO: 760066 - DNA, 33 bp, Homo sapien
ttgttcagtaagataagagtcgcattaattttg

SEQ ID NO: 760067 - DNA, 33 bp, Homo sapien
gagctttcatatataacgtggacagtttcaaat

SEQ ID NO: 760068 - DNA, 33 bp, Homo sapien
gagctttcatatataatgtggacagtttcaaat

SEQ ID NO: 760069 - DNA, 33 bp, Homo sapien
tctaatttccatcatgcattcatttgcattttt

SEQ ID NO: 760070 - DNA, 33 bp, Homo sapien
tctaatttccatcatgtattcatttgcattttt

SEQ ID NO: 760071 - DNA, 33 bp, Homo sapien
cagttctcagtagttaccagtgttgaatgtcca

SEQ ID NO: 760072 - DNA, 33 bp, Homo sapien
cagttctcagtagttatcagtgttgaatgtcca

SEQ ID NO: 760073 - DNA, 33 bp, Homo sapien
gaaaatgacatcagtaccttgctagcattcttg

SEQ ID NO: 760074 - DNA, 33 bp, Homo sapien
gaaaatgacatcagtagcttgctagcattcttg

SEQ ID NO: 760075 - DNA, 33 bp, Homo sapien
agtgttttgcttctggccaactagaatgctcag

SEQ ID NO: 760076 - DNA, 33 bp, Homo sapien
agtgttttgcttctggtcaactagaatgctcag

SEQ ID NO: 760077 - DNA, 33 bp, Homo sapien
tgaaaattgttggatactaaataactgcaaaaa

SEQ ID NO: 760078 - DNA, 33 bp, Homo sapien
tgaaaattgttggatagtaaataactgcaaaaa

SEQ ID NO: 760079 - DNA, 33 bp, Homo sapien
tccaaagacgaactgacggtgtgtgtgaacaca

SEQ ID NO: 760080 - DNA, 33 bp, Homo sapien
tccaaagacgaactgagggtgtgtgtgaacaca

SEQ ID NO: 760081 - DNA, 33 bp, Homo sapien
atcactgtgtcattaaacaatgaaaaacataca

SEQ ID NO: 760082 - DNA, 33 bp, Homo sapien
atcactgtgtcattaagcaatgaaaaacataca

SEQ ID NO: 760083 - DNA, 33 bp, Homo sapien
gtgttagtggatttcccattctcgacctctagt

SEQ ID NO: 760084 - DNA, 33 bp, Homo sapien
gtgttagtggatttcctattctcgacctctagt

SEQ ID NO: 760085 - DNA, 33 bp, Homo sapien
ttcagtcacttaaaaacgcagagagctttatca

SEQ ID NO: 760086 - DNA, 33 bp, Homo sapien
ttcagtcacttaaaaatgcagagagctttatca

SEQ ID NO: 760087 - DNA, 33 bp, Homo sapien
tcttaatattttcttacggagaattttgcatgg

SEQ ID NO: 760088 - DNA, 33 bp, Homo sapien
tcttaatattttcttatggagaattttgcatgg

SEQ ID NO: 760089 - DNA, 33 bp, Homo sapien
taagagcaactgatacagatgggattttatgac

SEQ ID NO: 760090 - DNA, 33 bp, Homo sapien
taagagcaactgatacggatgggattttatgac

SEQ ID NO: 760091 - DNA, 33 bp, Homo sapien
aattattttacaaacaacaatgttcctgtcata

SEQ ID NO: 760092 - DNA, 33 bp, Homo sapien
aattattttacaaacagcaatgttcctgtcata

SEQ ID NO: 760093 - DNA, 33 bp, Homo sapien
gctaatttcacatggaatacttctgttgcttta

SEQ ID NO: 760094 - DNA, 33 bp, Homo sapien
gctaatttcacatggagtacttctgttgcttta

SEQ ID NO: 760095 - DNA, 33 bp, Homo sapien
aggtttttcatgaacgaaaaaaaggcatgtatt

SEQ ID NO: 760096 - DNA, 33 bp, Homo sapien
aggtttttcatgaacgtaaaaaaggcatgtatt

SEQ ID NO: 760097 - DNA, 33 bp, Homo sapien
aaatgcatatggatctcagaaatctgatgcttt

SEQ ID NO: 760098 - DNA, 33 bp, Homo sapien
aaatgcatatggatctgagaaatctgatgcttt

SEQ ID NO: 760099 - DNA, 33 bp, Homo sapien
aaaggagattttctcaaactaaaatgtgagaac

SEQ ID NO: 760100 - DNA, 33 bp, Homo sapien
aaaggagattttctcatactaaaatgtgagaac

SEQ ID NO: 760101 - DNA, 33 bp, Homo sapien
gaaatgcattgacctaaaaaaatagctgcttta

SEQ ID NO: 760102 - DNA, 33 bp, Homo sapien
gaaatgcattgacctacaaaaatagctgcttta

SEQ ID NO: 760103 - DNA, 33 bp, Homo sapien
actcctctaaaaaagccagtgggtggtgcatca

SEQ ID NO: 760104 - DNA, 33 bp, Homo sapien
actcctctaaaaaagcgagtgggtggtgcatca

SEQ ID NO: 760105 - DNA, 33 bp, Homo sapien
aattacaagaagataaaaaatcaagctccaaat

SEQ ID NO: 760106 - DNA, 33 bp, Homo sapien
aattacaagaagataagaaatcaagctccaaat

SEQ ID NO: 760107 - DNA, 33 bp, Homo sapien
atatagtggaaaatgcaaagcatagataaaata

SEQ ID NO: 760108 - DNA, 33 bp, Homo sapien
atatagtggaaaatgcgaagcatagataaaata

SEQ ID NO: 760109 - DNA, 33 bp, Homo sapien
gtgacaatctgataaactatgtgatttaaggag

SEQ ID NO: 760110 - DNA, 33 bp, Homo sapien
gtgacaatctgataaagtatgtgatttaaggag

SEQ ID NO: 760111 - DNA, 33 bp, Homo sapien
tcaattgccagacatgaacttatgcttgagagg

SEQ ID NO: 760112 - DNA, 33 bp, Homo sapien
tcaattgccagacatggacttatgcttgagagg

SEQ ID NO: 760113 - DNA, 33 bp, Homo sapien
tggtatgcacgtggacacacaatagtatcataa

SEQ ID NO: 760114 - DNA, 33 bp, Homo sapien
tggtatgcacgtggacgcacaatagtatcataa

SEQ ID NO: 760115 - DNA, 33 bp, Homo sapien
tatattatgcgaactacatacatcgataagtcc

SEQ ID NO: 760116 - DNA, 33 bp, Homo sapien
tatattatgcgaactatatacatcgataagtcc

SEQ ID NO: 760117 - DNA, 33 bp, Homo sapien
tttatttgtggatgaacgttctgatttctgagt

SEQ ID NO: 760118 - DNA, 33 bp, Homo sapien
tttatttgtggatgaaggttctgatttctgagt

SEQ ID NO: 760119 - DNA, 33 bp, Homo sapien
accttgagcaatgcacagaaaagtaatatatta

SEQ ID NO: 760120 - DNA, 33 bp, Homo sapien
accttgagcaatgcacggaaaagtaatatatta

SEQ ID NO: 760121 - DNA, 33 bp, Homo sapien
ggcttacttagaaatgcagatatggtgagttcc

SEQ ID NO: 760122 - DNA, 33 bp, Homo sapien
ggcttacttagaaatgtagatatggtgagttcc

SEQ ID NO: 760123 - DNA, 33 bp, Homo sapien
ttaagtcagatataaaagattgcattcctgttt

SEQ ID NO: 760124 - DNA, 33 bp, Homo sapien
ttaagtcagatataaacgattgcattcctgttt

SEQ ID NO: 760125 - DNA, 33 bp, Homo sapien
aataaatgcgcaagtacgaggttaaatgcttga

SEQ ID NO: 760126 - DNA, 33 bp, Homo sapien
aataaatgcgcaagtatgaggttaaatgcttga

SEQ ID NO: 760127 - DNA, 33 bp, Homo sapien
gttatggcagccttaaaaaaataatacacatta

SEQ ID NO: 760128 - DNA, 33 bp, Homo sapien
gttatggcagccttaacaaaataatacacatta

SEQ ID NO: 760129 - DNA, 33 bp, Homo sapien
gaaagtggctgaataccatgcagtcattacgag

SEQ ID NO: 760130 - DNA, 33 bp, Homo sapien
gaaagtggctgaatactatgcagtcattacgag

SEQ ID NO: 760131 - DNA, 33 bp, Homo sapien
acgtactaaaaggcaaaactttaagatcatgtc

SEQ ID NO: 760132 - DNA, 33 bp, Homo sapien
acgtactaaaaggcaagactttaagatcatgtc

SEQ ID NO: 760133 - DNA, 33 bp, Homo sapien
agatgccttgatataaaagtaatctgaggctga

SEQ ID NO: 760134 - DNA, 33 bp, Homo sapien
agatgccttgatataagagtaatctgaggctga

SEQ ID NO: 760135 - DNA, 33 bp, Homo sapien
catgatgataaagaaaaggtgatgagagaagtt

SEQ ID NO: 760136 - DNA, 33 bp, Homo sapien
catgatgataaagaaatggtgatgagagaagtt

SEQ ID NO: 760137 - DNA, 33 bp, Homo sapien
ttcatgtcagactctagtaagtgctaagattaa

SEQ ID NO: 760138 - DNA, 33 bp, Homo sapien
ttcatgtcagactctattaagtgctaagattaa

SEQ ID NO: 760139 - DNA, 33 bp, Homo sapien
gtgagttctgttggcaatctaagagggggacag

SEQ ID NO: 760140 - DNA, 33 bp, Homo sapien
gtgagttctgttggcagtctaagagggggacag

SEQ ID NO: 760141 - DNA, 33 bp, Homo sapien
atcatttcatcaaataagttcagattcacattt

SEQ ID NO: 760142 - DNA, 33 bp, Homo sapien
atcatttcatcaaataggttcagattcacattt

SEQ ID NO: 760143 - DNA, 33 bp, Homo sapien
cttcctgttatgtaaaatgagcttctggtagat

SEQ ID NO: 760144 - DNA, 33 bp, Homo sapien
cttcctgttatgtaaactgagcttctggtagat

SEQ ID NO: 760145 - DNA, 33 bp, Homo sapien
cattagagatagggaaaaagagtgcctgacagt

SEQ ID NO: 760146 - DNA, 33 bp, Homo sapien
cattagagatagggaagaagagtgcctgacagt

SEQ ID NO: 760147 - DNA, 33 bp, Homo sapien
ttttttgtttttgccaatatatgttagtcaggc

SEQ ID NO: 760148 - DNA, 33 bp, Homo sapien
ttttttgtttttgccagtatatgttagtcaggc

SEQ ID NO: 760149 - DNA, 33 bp, Homo sapien
agagtaagctttggacaacatgacttgtattac

SEQ ID NO: 760150 - DNA, 33 bp, Homo sapien
agagtaagctttggacgacatgacttgtattac

SEQ ID NO: 760151 - DNA, 33 bp, Homo sapien
attaggattctctttgcaaattagctgcctcag

SEQ ID NO: 760152 - DNA, 33 bp, Homo sapien
attaggattctctttgtaaattagctgcctcag

SEQ ID NO: 760153 - DNA, 33 bp, Homo sapien
cactaaggaacagtgactactagtttagtacca

SEQ ID NO: 760154 - DNA, 33 bp, Homo sapien
cactaaggaacagtgattactagtttagtacca

SEQ ID NO: 760155 - DNA, 33 bp, Homo sapien
ctggacagcctatgatcagttattggcacatac

SEQ ID NO: 760156 - DNA, 33 bp, Homo sapien
ctggacagcctatgatgagttattggcacatac

SEQ ID NO: 760157 - DNA, 33 bp, Homo sapien
tcccatttatcattgaataccttcagaacattt

SEQ ID NO: 760158 - DNA, 33 bp, Homo sapien
tcccatttatcattgagtaccttcagaacattt

SEQ ID NO: 760159 - DNA, 33 bp, Homo sapien
tcctctctcttccctacctgttgcagaaaaaaa

SEQ ID NO: 760160 - DNA, 33 bp, Homo sapien
tcctctctcttccctatctgttgcagaaaaaaa

SEQ ID NO: 760161 - DNA, 33 bp, Homo sapien
gtactctaatgagcagcctaactcagagcaatg

SEQ ID NO: 760162 - DNA, 33 bp, Homo sapien
gtactctaatgagcaggctaactcagagcaatg

SEQ ID NO: 760163 - DNA, 33 bp, Homo sapien
aaaaatgaagaaaacaacatactccatgtgtaa

SEQ ID NO: 760164 - DNA, 33 bp, Homo sapien
aaaaatgaagaaaacagcatactccatgtgtaa

SEQ ID NO: 760165 - DNA, 33 bp, Homo sapien
tgttggctcacattcaagtccaactcttaactc

SEQ ID NO: 760166 - DNA, 33 bp, Homo sapien
tgttggctcacattcaggtccaactcttaactc

SEQ ID NO: 760167 - DNA, 33 bp, Homo sapien
atgtgtgaagataaaacttgtagccaggtctgc

SEQ ID NO: 760168 - DNA, 33 bp, Homo sapien
atgtgtgaagataaaatttgtagccaggtctgc

SEQ ID NO: 760169 - DNA, 33 bp, Homo sapien
agaaagtatagtgatgaacacaaaaagtcaacg

SEQ ID NO: 760170 - DNA, 33 bp, Homo sapien
agaaagtatagtgatggacacaaaaagtcaacg

SEQ ID NO: 760171 - DNA, 33 bp, Homo sapien
catacccatgactatcaaacaatctgtgaccaa

SEQ ID NO: 760172 - DNA, 33 bp, Homo sapien
catacccatgactatcgaacaatctgtgaccaa

SEQ ID NO: 760173 - DNA, 33 bp, Homo sapien
gacacaatcaaagactaaatacatggatacata

SEQ ID NO: 760174 - DNA, 33 bp, Homo sapien
gacacaatcaaagactgaatacatggatacata

SEQ ID NO: 760175 - DNA, 33 bp, Homo sapien
tattaatggaattgacaaatcaccgtagcagaa

SEQ ID NO: 760176 - DNA, 33 bp, Homo sapien
tattaatggaattgacgaatcaccgtagcagaa

SEQ ID NO: 760177 - DNA, 33 bp, Homo sapien
gccctttcatgtactaataattttcggttatca

SEQ ID NO: 760178 - DNA, 33 bp, Homo sapien
gccctttcatgtactagtaattttcggttatca

SEQ ID NO: 760179 - DNA, 33 bp, Homo sapien
gattttatgtgcagaaagatgaaattcatggta

SEQ ID NO: 760180 - DNA, 33 bp, Homo sapien
gattttatgtgcagaacgatgaaattcatggta

SEQ ID NO: 760181 - DNA, 33 bp, Homo sapien
tatgatactgaataacaactaagaatttttagt

SEQ ID NO: 760182 - DNA, 33 bp, Homo sapien
tatgatactgaataacgactaagaatttttagt

SEQ ID NO: 760183 - DNA, 33 bp, Homo sapien
acatggactcaaaaaacatcattttggaacttt

SEQ ID NO: 760184 - DNA, 33 bp, Homo sapien
acatggactcaaaaaagatcattttggaacttt

SEQ ID NO: 760185 - DNA, 33 bp, Homo sapien
agggctcaccatcctaaatatagcttacaactt

SEQ ID NO: 760186 - DNA, 33 bp, Homo sapien
agggctcaccatcctacatatagcttacaactt

SEQ ID NO: 760187 - DNA, 33 bp, Homo sapien
agtctgcattctaaaactgtcttccagaatccc

SEQ ID NO: 760188 - DNA, 33 bp, Homo sapien
agtctgcattctaaaattgtcttccagaatccc

SEQ ID NO: 760189 - DNA, 33 bp, Homo sapien
gcattttatcaatacactctggaacactccaac

SEQ ID NO: 760190 - DNA, 33 bp, Homo sapien
gcattttatcaatacattctggaacactccaac

SEQ ID NO: 760191 - DNA, 33 bp, Homo sapien
cttatgttcttttgagccctcaactttcttcca

SEQ ID NO: 760192 - DNA, 33 bp, Homo sapien
cttatgttcttttgagtcctcaactttcttcca

SEQ ID NO: 760193 - DNA, 33 bp, Homo sapien
atgggtttttcaagaacgatttagtaccatctt

SEQ ID NO: 760194 - DNA, 33 bp, Homo sapien
atgggtttttcaagaatgatttagtaccatctt

SEQ ID NO: 760195 - DNA, 33 bp, Homo sapien
aaactaaatattctctaaccatgatatcatctc

SEQ ID NO: 760196 - DNA, 33 bp, Homo sapien
aaactaaatattctcttaccatgatatcatctc

SEQ ID NO: 760197 - DNA, 33 bp, Homo sapien
gtgctgaatcactccaagtcctagatcaacagc

SEQ ID NO: 760198 - DNA, 33 bp, Homo sapien
gtgctgaatcactccatgtcctagatcaacagc

SEQ ID NO: 760199 - DNA, 33 bp, Homo sapien
ggctcatgtctttaacagcaataaatttaaaaa

SEQ ID NO: 760200 - DNA, 33 bp, Homo sapien
ggctcatgtctttaactgcaataaatttaaaaa

SEQ ID NO: 760201 - DNA, 33 bp, Homo sapien
gcaggagcccatgttcacaggtgcaaccgcatg

SEQ ID NO: 760202 - DNA, 33 bp, Homo sapien
gcaggagcccatgttcgcaggtgcaaccgcatg

SEQ ID NO: 760203 - DNA, 33 bp, Homo sapien
cttgacaataataacaatgaatgctctaaatct

SEQ ID NO: 760204 - DNA, 33 bp, Homo sapien
cttgacaataataacattgaatgctctaaatct

SEQ ID NO: 760205 - DNA, 33 bp, Homo sapien
atttatcttcagtgtacgtgtatctttatagga

SEQ ID NO: 760206 - DNA, 33 bp, Homo sapien
atttatcttcagtgtatgtgtatctttatagga

SEQ ID NO: 760207 - DNA, 33 bp, Homo sapien
aatagaacccttatacactcttgtcaggaatgt

SEQ ID NO: 760208 - DNA, 33 bp, Homo sapien
aatagaacccttatacgctcttgtcaggaatgt

SEQ ID NO: 760209 - DNA, 33 bp, Homo sapien
cggaaactcagcccgacgtgcaaaaattcttag

SEQ ID NO: 760210 - DNA, 33 bp, Homo sapien
cggaaactcagcccgatgtgcaaaaattcttag

SEQ ID NO: 760211 - DNA, 33 bp, Homo sapien
tatatctggggaattccaaaatctttctggtgt

SEQ ID NO: 760212 - DNA, 33 bp, Homo sapien
tatatctggggaattctaaaatctttctggtgt

SEQ ID NO: 760213 - DNA, 33 bp, Homo sapien
taacagctagagcatacgcttaaagtcatataa

SEQ ID NO: 760214 - DNA, 33 bp, Homo sapien
taacagctagagcataggcttaaagtcatataa

SEQ ID NO: 760215 - DNA, 33 bp, Homo sapien
aattgaagaggttgagaattgcaccaccactgc

SEQ ID NO: 760216 - DNA, 33 bp, Homo sapien
aattgaagaggttgaggattgcaccaccactgc

SEQ ID NO: 760217 - DNA, 33 bp, Homo sapien
cttttggattaataacagaatgagttaaaacct

SEQ ID NO: 760218 - DNA, 33 bp, Homo sapien
cttttggattaataacggaatgagttaaaacct

SEQ ID NO: 760219 - DNA, 33 bp, Homo sapien
cacacggtgatctctccactttcctaagatctc

SEQ ID NO: 760220 - DNA, 33 bp, Homo sapien
cacacggtgatctctctactttcctaagatctc

SEQ ID NO: 760221 - DNA, 33 bp, Homo sapien
tattactgatttgtgacagttatacagatgatt

SEQ ID NO: 760222 - DNA, 33 bp, Homo sapien
tattactgatttgtgatagttatacagatgatt

SEQ ID NO: 760223 - DNA, 33 bp, Homo sapien
tagcaagaattttggaaatgtaatgcttttcca

SEQ ID NO: 760224 - DNA, 33 bp, Homo sapien
tagcaagaattttggatatgtaatgcttttcca

SEQ ID NO: 760225 - DNA, 33 bp, Homo sapien
gtgggggctacaacccaacatttgctttttgca

SEQ ID NO: 760226 - DNA, 33 bp, Homo sapien
gtgggggctacaaccccacatttgctttttgca

SEQ ID NO: 760227 - DNA, 33 bp, Homo sapien
tggctgaggagatagcaaaagacaactgagcca

SEQ ID NO: 760228 - DNA, 33 bp, Homo sapien
tggctgaggagatagccaaagacaactgagcca

SEQ ID NO: 760229 - DNA, 33 bp, Homo sapien
ggtgaaatctaatgccacataatatttaacttt

SEQ ID NO: 760230 - DNA, 33 bp, Homo sapien
ggtgaaatctaatgccgcataatatttaacttt

SEQ ID NO: 760231 - DNA, 33 bp, Homo sapien
aaatgtacactattcaacccagatttcatcact

SEQ ID NO: 760232 - DNA, 33 bp, Homo sapien
aaatgtacactattcagcccagatttcatcact

SEQ ID NO: 760233 - DNA, 33 bp, Homo sapien
aatagataaaagtagaacatgagggttgtaaag

SEQ ID NO: 760234 - DNA, 33 bp, Homo sapien
aatagataaaagtagatcatgagggttgtaaag

SEQ ID NO: 760235 - DNA, 33 bp, Homo sapien
ttaggtgaactttttgcaggtagaaatgaatga

SEQ ID NO: 760236 - DNA, 33 bp, Homo sapien
ttaggtgaactttttggaggtagaaatgaatga

SEQ ID NO: 760237 - DNA, 33 bp, Homo sapien
tcaaattcagatgttaccaaggagatgaatgga

SEQ ID NO: 760238 - DNA, 33 bp, Homo sapien
tcaaattcagatgttatcaaggagatgaatgga

SEQ ID NO: 760239 - DNA, 33 bp, Homo sapien
ataaaactttagaccaactattagcacaggttt

SEQ ID NO: 760240 - DNA, 33 bp, Homo sapien
ataaaactttagaccagctattagcacaggttt

SEQ ID NO: 760241 - DNA, 33 bp, Homo sapien
acctttgttctgggaaaccaactaaaatagtca

SEQ ID NO: 760242 - DNA, 33 bp, Homo sapien
acctttgttctgggaagccaactaaaatagtca

SEQ ID NO: 760243 - DNA, 33 bp, Homo sapien
atttacttaagttttaacagctaatgtacatat

SEQ ID NO: 760244 - DNA, 33 bp, Homo sapien
atttacttaagttttagcagctaatgtacatat

SEQ ID NO: 760245 - DNA, 33 bp, Homo sapien
aaatagatcagtatcaaatctacggaagtcata

SEQ ID NO: 760246 - DNA, 33 bp, Homo sapien
aaatagatcagtatcacatctacggaagtcata

SEQ ID NO: 760247 - DNA, 33 bp, Homo sapien
tggtaagtgatagatacgtaccaatttttaagc

SEQ ID NO: 760248 - DNA, 33 bp, Homo sapien
tggtaagtgatagatatgtaccaatttttaagc

SEQ ID NO: 760249 - DNA, 33 bp, Homo sapien
cctgaacttaacctgacgagacaattttaatta

SEQ ID NO: 760250 - DNA, 33 bp, Homo sapien
cctgaacttaacctgatgagacaattttaatta

SEQ ID NO: 760251 - DNA, 33 bp, Homo sapien
tatataagcctccatgcatgtaacagatgtatt

SEQ ID NO: 760252 - DNA, 33 bp, Homo sapien
tatataagcctccatgtatgtaacagatgtatt

SEQ ID NO: 760253 - DNA, 33 bp, Homo sapien
gactcttagttttcaacgaaagaccacagggta

SEQ ID NO: 760254 - DNA, 33 bp, Homo sapien
gactcttagttttcaatgaaagaccacagggta

SEQ ID NO: 760255 - DNA, 33 bp, Homo sapien
tcgctctgcttctttccatttctgtcacatggc

SEQ ID NO: 760256 - DNA, 33 bp, Homo sapien
tcgctctgcttctttcgatttctgtcacatggc

SEQ ID NO: 760257 - DNA, 33 bp, Homo sapien
aggacttcaacaaataaatttgacagagcaagg

SEQ ID NO: 760258 - DNA, 33 bp, Homo sapien
aggacttcaacaaatagatttgacagagcaagg

SEQ ID NO: 760259 - DNA, 33 bp, Homo sapien
atttgcgcaaacaaataagatgttagcagaagc

SEQ ID NO: 760260 - DNA, 33 bp, Homo sapien
atttgcgcaaacaaatgagatgttagcagaagc

SEQ ID NO: 760261 - DNA, 33 bp, Homo sapien
gagaggaagagaacggcaaagaaagagggaaat

SEQ ID NO: 760262 - DNA, 33 bp, Homo sapien
gagaggaagagaacgggaaagaaagagggaaat

SEQ ID NO: 760263 - DNA, 33 bp, Homo sapien
gggtgagaaaaatatgaataacgtgctcaagag

SEQ ID NO: 760264 - DNA, 33 bp, Homo sapien
gggtgagaaaaatatggataacgtgctcaagag

SEQ ID NO: 760265 - DNA, 33 bp, Homo sapien
tgagtgggaactattaacatgacagtacaaagc

SEQ ID NO: 760266 - DNA, 33 bp, Homo sapien
tgagtgggaactattatcatgacagtacaaagc

SEQ ID NO: 760267 - DNA, 33 bp, Homo sapien
atgtgctaagggttaactggaatatggacaagc

SEQ ID NO: 760268 - DNA, 33 bp, Homo sapien
atgtgctaagggttaattggaatatggacaagc

SEQ ID NO: 760269 - DNA, 33 bp, Homo sapien
gtatataattgtggacaccttatttcaaccaaa

SEQ ID NO: 760270 - DNA, 33 bp, Homo sapien
gtatataattgtggactccttatttcaaccaaa

SEQ ID NO: 760271 - DNA, 33 bp, Homo sapien
ggggagaacagctctccacattctcagttttgc

SEQ ID NO: 760272 - DNA, 33 bp, Homo sapien
ggggagaacagctctctacattctcagttttgc

SEQ ID NO: 760273 - DNA, 33 bp, Homo sapien
tattctaactaaacacacaaaggagtgtcattt

SEQ ID NO: 760274 - DNA, 33 bp, Homo sapien
tattctaactaaacacgcaaaggagtgtcattt

SEQ ID NO: 760275 - DNA, 33 bp, Homo sapien
tctctgtttttgttcaatattctctctgagctc

SEQ ID NO: 760276 - DNA, 33 bp, Homo sapien
tctctgtttttgttcagtattctctctgagctc

SEQ ID NO: 760277 - DNA, 33 bp, Homo sapien
agagtgaaggaagtgaaggtcagccacaacaaa

SEQ ID NO: 760278 - DNA, 33 bp, Homo sapien
agagtgaaggaagtgagggtcagccacaacaaa

SEQ ID NO: 760279 - DNA, 33 bp, Homo sapien
ccctgttacatgaagaaaaataaaaaagcccac

SEQ ID NO: 760280 - DNA, 33 bp, Homo sapien
ccctgttacatgaagagaaataaaaaagcccac

SEQ ID NO: 760281 - DNA, 33 bp, Homo sapien
ggtctcactcaccatcagagttaccaaggagct

SEQ ID NO: 760282 - DNA, 33 bp, Homo sapien
ggtctcactcaccatcggagttaccaaggagct

SEQ ID NO: 760283 - DNA, 33 bp, Homo sapien
gaaagtttctgctttacctgattgaaatcttgt

SEQ ID NO: 760284 - DNA, 33 bp, Homo sapien
gaaagtttctgctttatctgattgaaatcttgt

SEQ ID NO: 760285 - DNA, 33 bp, Homo sapien
tctttatgtttggtcacactctccttctttctg

SEQ ID NO: 760286 - DNA, 33 bp, Homo sapien
tctttatgtttggtcatactctccttctttctg

SEQ ID NO: 760287 - DNA, 33 bp, Homo sapien
atgagatgtcattttacgtgatttcaaggattg

SEQ ID NO: 760288 - DNA, 33 bp, Homo sapien
atgagatgtcattttatgtgatttcaaggattg

SEQ ID NO: 760289 - DNA, 33 bp, Homo sapien
tattatttgttggcataaatttcagaacatttt

SEQ ID NO: 760290 - DNA, 33 bp, Homo sapien
tattatttgttggcatgaatttcagaacatttt

SEQ ID NO: 760291 - DNA, 33 bp, Homo sapien
aataaccttgacaccaaaattagaaaaaatggt

SEQ ID NO: 760292 - DNA, 33 bp, Homo sapien
aataaccttgacaccacaattagaaaaaatggt

SEQ ID NO: 760293 - DNA, 33 bp, Homo sapien
aggtgggccaccaacaatatctggcttgtgagt

SEQ ID NO: 760294 - DNA, 33 bp, Homo sapien
aggtgggccaccaacagtatctggcttgtgagt

SEQ ID NO: 760295 - DNA, 33 bp, Homo sapien
ctatctgaaaaactaacgattgtgaacttccct

SEQ ID NO: 760296 - DNA, 33 bp, Homo sapien
ctatctgaaaaactaatgattgtgaacttccct

SEQ ID NO: 760297 - DNA, 33 bp, Homo sapien
tccacatctttgccttcaacctttccaaatctt

SEQ ID NO: 760298 - DNA, 33 bp, Homo sapien
tccacatctttgcctttaacctttccaaatctt

SEQ ID NO: 760299 - DNA, 33 bp, Homo sapien
caatcgaatgtacctccctgattattatgaagt

SEQ ID NO: 760300 - DNA, 33 bp, Homo sapien
caatcgaatgtacctctctgattattatgaagt

SEQ ID NO: 760301 - DNA, 33 bp, Homo sapien
tccaccacgtgttcacaccaaacccacttcgat

SEQ ID NO: 760302 - DNA, 33 bp, Homo sapien
tccaccacgtgttcactccaaacccacttcgat

SEQ ID NO: 760303 - DNA, 33 bp, Homo sapien
atctctaagacataagcacataaagatgttcat

SEQ ID NO: 760304 - DNA, 33 bp, Homo sapien
atctctaagacataaggacataaagatgttcat

SEQ ID NO: 760305 - DNA, 33 bp, Homo sapien
actattttttaaggtcccaaagtcttctaaaca

SEQ ID NO: 760306 - DNA, 33 bp, Homo sapien
actattttttaaggtctcaaagtcttctaaaca

SEQ ID NO: 760307 - DNA, 33 bp, Homo sapien
ttttactcctactcacaaatgaaagaaaactga

SEQ ID NO: 760308 - DNA, 33 bp, Homo sapien
ttttactcctactcacgaatgaaagaaaactga

SEQ ID NO: 760309 - DNA, 33 bp, Homo sapien
tcaaaatgaagacaaacgctttacacacacaca

SEQ ID NO: 760310 - DNA, 33 bp, Homo sapien
tcaaaatgaagacaaatgctttacacacacaca

SEQ ID NO: 760311 - DNA, 33 bp, Homo sapien
aactgcatcagtgagcagaaagttcaaaagggg

SEQ ID NO: 760312 - DNA, 33 bp, Homo sapien
aactgcatcagtgagccgaaagttcaaaagggg

SEQ ID NO: 760313 - DNA, 33 bp, Homo sapien
tagactatcattgaacagcatcctttctctgaa

SEQ ID NO: 760314 - DNA, 33 bp, Homo sapien
tagactatcattgaacggcatcctttctctgaa

SEQ ID NO: 760315 - DNA, 33 bp, Homo sapien
gggaatgggaaagatccgacaaaaccatggaac

SEQ ID NO: 760316 - DNA, 33 bp, Homo sapien
gggaatgggaaagatctgacaaaaccatggaac

SEQ ID NO: 760317 - DNA, 33 bp, Homo sapien
aacactgcagaagagacagtctggaagaaaata

SEQ ID NO: 760318 - DNA, 33 bp, Homo sapien
aacactgcagaagagatagtctggaagaaaata

SEQ ID NO: 760319 - DNA, 33 bp, Homo sapien
atttcaatggaagatagcgaaactaacttttta

SEQ ID NO: 760320 - DNA, 33 bp, Homo sapien
atttcaatggaagatatcgaaactaacttttta

SEQ ID NO: 760321 - DNA, 33 bp, Homo sapien
aaatgcgcacaaagccaaaagatctatatgaac

SEQ ID NO: 760322 - DNA, 33 bp, Homo sapien
aaatgcgcacaaagccgaaagatctatatgaac

SEQ ID NO: 760323 - DNA, 33 bp, Homo sapien
gatcctaatcagaaaactgcacataccatatgg

SEQ ID NO: 760324 - DNA, 33 bp, Homo sapien
gatcctaatcagaaaattgcacataccatatgg

SEQ ID NO: 760325 - DNA, 33 bp, Homo sapien
ttggtacatttctcaaagttccatataagtcat

SEQ ID NO: 760326 - DNA, 33 bp, Homo sapien
ttggtacatttctcaaggttccatataagtcat

SEQ ID NO: 760327 - DNA, 33 bp, Homo sapien
ctaatgcaggatacagaaatttagttgattgtt

SEQ ID NO: 760328 - DNA, 33 bp, Homo sapien
ctaatgcaggatacagcaatttagttgattgtt

SEQ ID NO: 760329 - DNA, 33 bp, Homo sapien
aaaagcttccaaaaacgagaatgtcagtctgac

SEQ ID NO: 760330 - DNA, 33 bp, Homo sapien
aaaagcttccaaaaactagaatgtcagtctgac

SEQ ID NO: 760331 - DNA, 33 bp, Homo sapien
aatacagagcagagaccaagcaaatattacagc

SEQ ID NO: 760332 - DNA, 33 bp, Homo sapien
aatacagagcagagacgaagcaaatattacagc

SEQ ID NO: 760333 - DNA, 33 bp, Homo sapien
taatatatggtgatgacggcattacagatcaat

SEQ ID NO: 760334 - DNA, 33 bp, Homo sapien
taatatatggtgatgatggcattacagatcaat

SEQ ID NO: 760335 - DNA, 33 bp, Homo sapien
tattcttttgacagcacagtaaataaaatatat

SEQ ID NO: 760336 - DNA, 33 bp, Homo sapien
tattcttttgacagcagagtaaataaaatatat

SEQ ID NO: 760337 - DNA, 33 bp, Homo sapien
gccacctccaagacgacaccaattattccagcc

SEQ ID NO: 760338 - DNA, 33 bp, Homo sapien
gccacctccaagacgataccaattattccagcc

SEQ ID NO: 760339 - DNA, 33 bp, Homo sapien
agatcactcagataaccgtgcaaatgatacagt

SEQ ID NO: 760340 - DNA, 33 bp, Homo sapien
agatcactcagataacggtgcaaatgatacagt

SEQ ID NO: 760341 - DNA, 33 bp, Homo sapien
agttaatctatatctacgaagtaaagcagtaca

SEQ ID NO: 760342 - DNA, 33 bp, Homo sapien
agttaatctatatctatgaagtaaagcagtaca

SEQ ID NO: 760343 - DNA, 33 bp, Homo sapien
aactgaccattgtacaataaattttctaataat

SEQ ID NO: 760344 - DNA, 33 bp, Homo sapien
aactgaccattgtacattaaattttctaataat

SEQ ID NO: 760345 - DNA, 33 bp, Homo sapien
gaagctgattttcttacagtaaccaaaaatgga

SEQ ID NO: 760346 - DNA, 33 bp, Homo sapien
gaagctgattttcttagagtaaccaaaaatgga

SEQ ID NO: 760347 - DNA, 33 bp, Homo sapien
tttttatttctacaccactctttgttctatcat

SEQ ID NO: 760348 - DNA, 33 bp, Homo sapien
tttttatttctacaccgctctttgttctatcat

SEQ ID NO: 760349 - DNA, 33 bp, Homo sapien
taggctgttagataaactttaaccagaaatgga

SEQ ID NO: 760350 - DNA, 33 bp, Homo sapien
taggctgttagataaattttaaccagaaatgga

SEQ ID NO: 760351 - DNA, 33 bp, Homo sapien
caaacataattataacacatttagtcatacaac

SEQ ID NO: 760352 - DNA, 33 bp, Homo sapien
caaacataattataacgcatttagtcatacaac

SEQ ID NO: 760353 - DNA, 33 bp, Homo sapien
gaaaacctgacatagactaaaacaaactgactg

SEQ ID NO: 760354 - DNA, 33 bp, Homo sapien
gaaaacctgacatagagtaaaacaaactgactg

SEQ ID NO: 760355 - DNA, 33 bp, Homo sapien
cttattatatgctgggcaatgtgttaagtcctt

SEQ ID NO: 760356 - DNA, 33 bp, Homo sapien
cttattatatgctgggtaatgtgttaagtcctt

SEQ ID NO: 760357 - DNA, 33 bp, Homo sapien
ttgactatgatattgacccttaatgtaaaggac

SEQ ID NO: 760358 - DNA, 33 bp, Homo sapien
ttgactatgatattgatccttaatgtaaaggac

SEQ ID NO: 760359 - DNA, 33 bp, Homo sapien
ctgtatttcaatagtaccattggttgcacaaca

SEQ ID NO: 760360 - DNA, 33 bp, Homo sapien
ctgtatttcaatagtatcattggttgcacaaca

SEQ ID NO: 760361 - DNA, 33 bp, Homo sapien
gttactagatgacttaccttacaagagcaatcc

SEQ ID NO: 760362 - DNA, 33 bp, Homo sapien
gttactagatgacttatcttacaagagcaatcc

SEQ ID NO: 760363 - DNA, 33 bp, Homo sapien
gtgtcaattgtaagaaatataactgtctcagac

SEQ ID NO: 760364 - DNA, 33 bp, Homo sapien
gtgtcaattgtaagaagtataactgtctcagac

SEQ ID NO: 760365 - DNA, 33 bp, Homo sapien
cgaaatgcctttctcaactttatctcttgtctc

SEQ ID NO: 760366 - DNA, 33 bp, Homo sapien
cgaaatgcctttctcagctttatctcttgtctc

SEQ ID NO: 760367 - DNA, 33 bp, Homo sapien
aggaggcatattaacacgtatcaaagactaaga

SEQ ID NO: 760368 - DNA, 33 bp, Homo sapien
aggaggcatattaacatgtatcaaagactaaga

SEQ ID NO: 760369 - DNA, 33 bp, Homo sapien
ctggctactttggcccaattctggactctactt

SEQ ID NO: 760370 - DNA, 33 bp, Homo sapien
ctggctactttggcccgattctggactctactt

SEQ ID NO: 760371 - DNA, 33 bp, Homo sapien
taaaagtaacagaaagaaccagtgatgatatca

SEQ ID NO: 760372 - DNA, 33 bp, Homo sapien
taaaagtaacagaaagcaccagtgatgatatca

SEQ ID NO: 760373 - DNA, 33 bp, Homo sapien
gaagtaatttccataacgccatagagttaatcc

SEQ ID NO: 760374 - DNA, 33 bp, Homo sapien
gaagtaatttccataaggccatagagttaatcc

SEQ ID NO: 760375 - DNA, 33 bp, Homo sapien
ctcctgtgaggtgatagaacacaatgtttacac

SEQ ID NO: 760376 - DNA, 33 bp, Homo sapien
ctcctgtgaggtgatataacacaatgtttacac

SEQ ID NO: 760377 - DNA, 33 bp, Homo sapien
tcctgtaaggggtttgaatgcacagcggctaaa

SEQ ID NO: 760378 - DNA, 33 bp, Homo sapien
tcctgtaaggggtttggatgcacagcggctaaa

SEQ ID NO: 760379 - DNA, 33 bp, Homo sapien
ggctgtgagatggtcaaactccaggggaagatg

SEQ ID NO: 760380 - DNA, 33 bp, Homo sapien
ggctgtgagatggtcagactccaggggaagatg

SEQ ID NO: 760381 - DNA, 33 bp, Homo sapien
gttaacacttcatccacagaaacaagtacttta

SEQ ID NO: 760382 - DNA, 33 bp, Homo sapien
gttaacacttcatccatagaaacaagtacttta

SEQ ID NO: 760383 - DNA, 33 bp, Homo sapien
tttctaccaaactaccaatgtcatttttcacag

SEQ ID NO: 760384 - DNA, 33 bp, Homo sapien
tttctaccaaactaccgatgtcatttttcacag

SEQ ID NO: 760385 - DNA, 33 bp, Homo sapien
gttgtaatatggctgtaaaaattttccagagtc

SEQ ID NO: 760386 - DNA, 33 bp, Homo sapien
gttgtaatatggctgtcaaaattttccagagtc

SEQ ID NO: 760387 - DNA, 33 bp, Homo sapien
attgaaaactggatccaaccagggcatgctgcc

SEQ ID NO: 760388 - DNA, 33 bp, Homo sapien
attgaaaactggatccgaccagggcatgctgcc

SEQ ID NO: 760389 - DNA, 33 bp, Homo sapien
attcaacatagtactaaatgacctagccataga

SEQ ID NO: 760390 - DNA, 33 bp, Homo sapien
attcaacatagtactagatgacctagccataga

SEQ ID NO: 760391 - DNA, 33 bp, Homo sapien
tgggttatcaacataacagggaaagcataatat

SEQ ID NO: 760392 - DNA, 33 bp, Homo sapien
tgggttatcaacataatagggaaagcataatat

SEQ ID NO: 760393 - DNA, 33 bp, Homo sapien
tttacagcattctccaaggacaaccctacttct

SEQ ID NO: 760394 - DNA, 33 bp, Homo sapien
tttacagcattctccagggacaaccctacttct

SEQ ID NO: 760395 - DNA, 33 bp, Homo sapien
agtttaattgctcccacctaagatttaatttgt

SEQ ID NO: 760396 - DNA, 33 bp, Homo sapien
agtttaattgctcccatctaagatttaatttgt

SEQ ID NO: 760397 - DNA, 33 bp, Homo sapien
ggatattattgtcctgcacaagctaaatggcca

SEQ ID NO: 760398 - DNA, 33 bp, Homo sapien
ggatattattgtcctgtacaagctaaatggcca

SEQ ID NO: 760399 - DNA, 33 bp, Homo sapien
ctccttgccagagtataagtacaagaaaatttc

SEQ ID NO: 760400 - DNA, 33 bp, Homo sapien
ctccttgccagagtatgagtacaagaaaatttc

SEQ ID NO: 760401 - DNA, 33 bp, Homo sapien
ggaagtgaaattggctgagagaaactcagagga

SEQ ID NO: 760402 - DNA, 33 bp, Homo sapien
ggaagtgaaattggcttagagaaactcagagga

SEQ ID NO: 760403 - DNA, 33 bp, Homo sapien
ctgtgtagtcattctacacccaattgctgtatc

SEQ ID NO: 760404 - DNA, 33 bp, Homo sapien
ctgtgtagtcattctatacccaattgctgtatc

SEQ ID NO: 760405 - DNA, 33 bp, Homo sapien
gtcttgatctttaccaacttctatcaattattt

SEQ ID NO: 760406 - DNA, 33 bp, Homo sapien
gtcttgatctttaccaccttctatcaattattt

SEQ ID NO: 760407 - DNA, 33 bp, Homo sapien
tactaggaaccaaacacaattcaagtggtcttc

SEQ ID NO: 760408 - DNA, 33 bp, Homo sapien
tactaggaaccaaacataattcaagtggtcttc

SEQ ID NO: 760409 - DNA, 33 bp, Homo sapien
atcattttatcctgtacgtcaaatgtccattta

SEQ ID NO: 760410 - DNA, 33 bp, Homo sapien
atcattttatcctgtatgtcaaatgtccattta

SEQ ID NO: 760411 - DNA, 33 bp, Homo sapien
ctgaagcctttaattccccctcgactctccttg

SEQ ID NO: 760412 - DNA, 33 bp, Homo sapien
ctgaagcctttaattctccctcgactctccttg

SEQ ID NO: 760413 - DNA, 33 bp, Homo sapien
aaaaagaaaatgcagtcaccctagtgaagcaaa

SEQ ID NO: 760414 - DNA, 33 bp, Homo sapien
aaaaagaaaatgcagttaccctagtgaagcaaa

SEQ ID NO: 760415 - DNA, 33 bp, Homo sapien
attgtagaatccttaacgtgagtctctgtctgc

SEQ ID NO: 760416 - DNA, 33 bp, Homo sapien
attgtagaatccttaatgtgagtctctgtctgc

SEQ ID NO: 760417 - DNA, 33 bp, Homo sapien
tttcaggactgatccaccacataatatttttca

SEQ ID NO: 760418 - DNA, 33 bp, Homo sapien
tttcaggactgatccatcacataatatttttca

SEQ ID NO: 760419 - DNA, 33 bp, Homo sapien
atatgatatccaaggcgataagtgaagaaagtc

SEQ ID NO: 760420 - DNA, 33 bp, Homo sapien
atatgatatccaaggctataagtgaagaaagtc

SEQ ID NO: 760421 - DNA, 33 bp, Homo sapien
ctgatattgtaactgaaagcttagacacatatt

SEQ ID NO: 760422 - DNA, 33 bp, Homo sapien
ctgatattgtaactgatagcttagacacatatt

SEQ ID NO: 760423 - DNA, 33 bp, Homo sapien
aagatacatacgtctactacaaataagtaaata

SEQ ID NO: 760424 - DNA, 33 bp, Homo sapien
aagatacatacgtctattacaaataagtaaata

SEQ ID NO: 760425 - DNA, 33 bp, Homo sapien
ttctatagcgtaattcactctacaacataattt

SEQ ID NO: 760426 - DNA, 33 bp, Homo sapien
ttctatagcgtaattcgctctacaacataattt

SEQ ID NO: 760427 - DNA, 33 bp, Homo sapien
tttccttgtcagctacaaaagcttagtgagcat

SEQ ID NO: 760428 - DNA, 33 bp, Homo sapien
tttccttgtcagctacgaaagcttagtgagcat

SEQ ID NO: 760429 - DNA, 33 bp, Homo sapien
aaaagacaagatttgcaaggggtcaggagtgga

SEQ ID NO: 760430 - DNA, 33 bp, Homo sapien
aaaagacaagatttgcgaggggtcaggagtgga

SEQ ID NO: 760431 - DNA, 33 bp, Homo sapien
tctaggagagaattaactaggtccagcaacttt

SEQ ID NO: 760432 - DNA, 33 bp, Homo sapien
tctaggagagaattaattaggtccagcaacttt

SEQ ID NO: 760433 - DNA, 33 bp, Homo sapien
gaggcatcgtgttagacactggtgggaatttga

SEQ ID NO: 760434 - DNA, 33 bp, Homo sapien
gaggcatcgtgttagatactggtgggaatttga

SEQ ID NO: 760435 - DNA, 33 bp, Homo sapien
gaggagctcttcaacaaactgtcaaataaatct

SEQ ID NO: 760436 - DNA, 33 bp, Homo sapien
gaggagctcttcaacagactgtcaaataaatct

SEQ ID NO: 760437 - DNA, 33 bp, Homo sapien
gagagagtttattaaacggtgccataagctaga

SEQ ID NO: 760438 - DNA, 33 bp, Homo sapien
gagagagtttattaaatggtgccataagctaga

SEQ ID NO: 760439 - DNA, 33 bp, Homo sapien
gactatgcacataaacaattgcacagattctac

SEQ ID NO: 760440 - DNA, 33 bp, Homo sapien
gactatgcacataaacgattgcacagattctac

SEQ ID NO: 760441 - DNA, 33 bp, Homo sapien
gctcatgagaaatctcacacaagattgccgttg

SEQ ID NO: 760442 - DNA, 33 bp, Homo sapien
gctcatgagaaatctcgcacaagattgccgttg

SEQ ID NO: 760443 - DNA, 33 bp, Homo sapien
gggaagtgttagatcacatttttagctttagaa

SEQ ID NO: 760444 - DNA, 33 bp, Homo sapien
gggaagtgttagatcatatttttagctttagaa

SEQ ID NO: 760445 - DNA, 33 bp, Homo sapien
taagtcctactttttaagtccttacgtatatat

SEQ ID NO: 760446 - DNA, 33 bp, Homo sapien
taagtcctactttttatgtccttacgtatatat

SEQ ID NO: 760447 - DNA, 33 bp, Homo sapien
atgataatagttcccaaatagaaagaggaagag

SEQ ID NO: 760448 - DNA, 33 bp, Homo sapien
atgataatagttcccatatagaaagaggaagag

SEQ ID NO: 760449 - DNA, 33 bp, Homo sapien
aaggcataaaacagggaaccatggaacagccta

SEQ ID NO: 760450 - DNA, 33 bp, Homo sapien
aaggcataaaacagggtaccatggaacagccta

SEQ ID NO: 760451 - DNA, 33 bp, Homo sapien
aggaggagaacgtaagaaagcccagaataacat

SEQ ID NO: 760452 - DNA, 33 bp, Homo sapien
aggaggagaacgtaaggaagcccagaataacat

SEQ ID NO: 760453 - DNA, 33 bp, Homo sapien
attatcttgaagtgtactaacttgtgacagtca

SEQ ID NO: 760454 - DNA, 33 bp, Homo sapien
attatcttgaagtgtattaacttgtgacagtca

SEQ ID NO: 760455 - DNA, 33 bp, Homo sapien
catatctctaactcagaacaaacaactgagcta

SEQ ID NO: 760456 - DNA, 33 bp, Homo sapien
catatctctaactcaggacaaacaactgagcta

SEQ ID NO: 760457 - DNA, 33 bp, Homo sapien
gaaatatcttggcataacttttcagaaaaaaac

SEQ ID NO: 760458 - DNA, 33 bp, Homo sapien
gaaatatcttggcataccttttcagaaaaaaac

SEQ ID NO: 760459 - DNA, 33 bp, Homo sapien
tcacaatactctatgacgtagttttgactcttg

SEQ ID NO: 760460 - DNA, 33 bp, Homo sapien
tcacaatactctatgaggtagttttgactcttg

SEQ ID NO: 760461 - DNA, 33 bp, Homo sapien
gcttgcaagtaaattgcactctctgttctgaca

SEQ ID NO: 760462 - DNA, 33 bp, Homo sapien
gcttgcaagtaaattgtactctctgttctgaca

SEQ ID NO: 760463 - DNA, 33 bp, Homo sapien
tgagattgctagtcacaaagatgagtcagggcc

SEQ ID NO: 760464 - DNA, 33 bp, Homo sapien
tgagattgctagtcacgaagatgagtcagggcc

SEQ ID NO: 760465 - DNA, 33 bp, Homo sapien
tgtttcttctctgggcacagaaaaataacatta

SEQ ID NO: 760466 - DNA, 33 bp, Homo sapien
tgtttcttctctgggcgcagaaaaataacatta

SEQ ID NO: 760467 - DNA, 33 bp, Homo sapien
tataataggtcctgaaatgaatgcaaagatgtg

SEQ ID NO: 760468 - DNA, 33 bp, Homo sapien
tataataggtcctgaagtgaatgcaaagatgtg

SEQ ID NO: 760469 - DNA, 33 bp, Homo sapien
gacaaaccaaatttgcacagtcattaacaactc

SEQ ID NO: 760470 - DNA, 33 bp, Homo sapien
gacaaaccaaatttgcgcagtcattaacaactc

SEQ ID NO: 760471 - DNA, 33 bp, Homo sapien
tagtatgttttaatgacgaataacctccactga

SEQ ID NO: 760472 - DNA, 33 bp, Homo sapien
tagtatgttttaatgatgaataacctccactga

SEQ ID NO: 760473 - DNA, 33 bp, Homo sapien
tagggatcaagttggacaggaaggctagatgag

SEQ ID NO: 760474 - DNA, 33 bp, Homo sapien
tagggatcaagttggagaggaaggctagatgag

SEQ ID NO: 760475 - DNA, 33 bp, Homo sapien
ttttccatttttttcaaagaacacatcaatttc

SEQ ID NO: 760476 - DNA, 33 bp, Homo sapien
ttttccatttttttcagagaacacatcaatttc

SEQ ID NO: 760477 - DNA, 33 bp, Homo sapien
tttggccagcttatccacgctgtatttgctgct

SEQ ID NO: 760478 - DNA, 33 bp, Homo sapien
tttggccagcttatccgcgctgtatttgctgct

SEQ ID NO: 760479 - DNA, 33 bp, Homo sapien
aaacttcttatccacaacatttaaacatctcaa

SEQ ID NO: 760480 - DNA, 33 bp, Homo sapien
aaacttcttatccacagcatttaaacatctcaa

SEQ ID NO: 760481 - DNA, 33 bp, Homo sapien
agacaatgtaggtaaactgcttagcatgtcaga

SEQ ID NO: 760482 - DNA, 33 bp, Homo sapien
agacaatgtaggtaaattgcttagcatgtcaga

SEQ ID NO: 760483 - DNA, 33 bp, Homo sapien
cccgattctagaatcaagttgctagagttcata

SEQ ID NO: 760484 - DNA, 33 bp, Homo sapien
cccgattctagaatcatgttgctagagttcata

SEQ ID NO: 760485 - DNA, 33 bp, Homo sapien
cacaagatatagtgacaatgattaaaaatgtga

SEQ ID NO: 760486 - DNA, 33 bp, Homo sapien
cacaagatatagtgacgatgattaaaaatgtga

SEQ ID NO: 760487 - DNA, 33 bp, Homo sapien
tagaacaatctagtgacacgtttcttttccaaa

SEQ ID NO: 760488 - DNA, 33 bp, Homo sapien
tagaacaatctagtgatacgtttcttttccaaa

SEQ ID NO: 760489 - DNA, 33 bp, Homo sapien
cagtggcctagaaaacaacaaaatgagatttaa

SEQ ID NO: 760490 - DNA, 33 bp, Homo sapien
cagtggcctagaaaaccacaaaatgagatttaa

SEQ ID NO: 760491 - DNA, 33 bp, Homo sapien
catgactctagcaataagcactaaactgttaaa

SEQ ID NO: 760492 - DNA, 33 bp, Homo sapien
catgactctagcaataggcactaaactgttaaa

SEQ ID NO: 760493 - DNA, 33 bp, Homo sapien
gttgataagggctttgaagttaaaacaacagac

SEQ ID NO: 760494 - DNA, 33 bp, Homo sapien
gttgataagggctttgcagttaaaacaacagac

SEQ ID NO: 760495 - DNA, 33 bp, Homo sapien
cttctcctctactacaaatgtgactctcaacaa

SEQ ID NO: 760496 - DNA, 33 bp, Homo sapien
cttctcctctactacagatgtgactctcaacaa

SEQ ID NO: 760497 - DNA, 33 bp, Homo sapien
gttctccatctgtaaaactatgagccagacaag

SEQ ID NO: 760498 - DNA, 33 bp, Homo sapien
gttctccatctgtaaagctatgagccagacaag

SEQ ID NO: 760499 - DNA, 33 bp, Homo sapien
aatgtataggtatctcacatatatcaaaaataa

SEQ ID NO: 760500 - DNA, 33 bp, Homo sapien
aatgtataggtatctctcatatatcaaaaataa

SEQ ID NO: 760501 - DNA, 33 bp, Homo sapien
atgttgtaagagtcaacgaagaaaatattcagt

SEQ ID NO: 760502 - DNA, 33 bp, Homo sapien
atgttgtaagagtcaatgaagaaaatattcagt

SEQ ID NO: 760503 - DNA, 33 bp, Homo sapien
cagatgctggatttagacctttttctgatgcat

SEQ ID NO: 760504 - DNA, 33 bp, Homo sapien
cagatgctggatttagtcctttttctgatgcat

SEQ ID NO: 760505 - DNA, 33 bp, Homo sapien
ttatcttataaagcaaacccaagcctgttcacc

SEQ ID NO: 760506 - DNA, 33 bp, Homo sapien
ttatcttataaagcaatcccaagcctgttcacc

SEQ ID NO: 760507 - DNA, 33 bp, Homo sapien
ataaatttcctgcttgcagctgtcaaatacatg

SEQ ID NO: 760508 - DNA, 33 bp, Homo sapien
ataaatttcctgcttgtagctgtcaaatacatg

SEQ ID NO: 760509 - DNA, 33 bp, Homo sapien
agcgaggtagtataaactggacttaggaccagg

SEQ ID NO: 760510 - DNA, 33 bp, Homo sapien
agcgaggtagtataaattggacttaggaccagg

SEQ ID NO: 760511 - DNA, 33 bp, Homo sapien
ttgctatttgctgttgcagagtcctgaaatttt

SEQ ID NO: 760512 - DNA, 33 bp, Homo sapien
ttgctatttgctgttgtagagtcctgaaatttt

SEQ ID NO: 760513 - DNA, 33 bp, Homo sapien
tgtatgactgtttagagagcattatgtgttaca

SEQ ID NO: 760514 - DNA, 33 bp, Homo sapien
tgtatgactgtttagatagcattatgtgttaca

SEQ ID NO: 760515 - DNA, 33 bp, Homo sapien
aagtgaggcagtcctacaccagccaattcccag

SEQ ID NO: 760516 - DNA, 33 bp, Homo sapien
aagtgaggcagtcctataccagccaattcccag

SEQ ID NO: 760517 - DNA, 33 bp, Homo sapien
tcttccatgaatttgaaagtgattattcctcag

SEQ ID NO: 760518 - DNA, 33 bp, Homo sapien
tcttccatgaatttgagagtgattattcctcag

SEQ ID NO: 760519 - DNA, 33 bp, Homo sapien
ataatgatgcttaacacaaggaactagggaaaa

SEQ ID NO: 760520 - DNA, 33 bp, Homo sapien
ataatgatgcttaacagaaggaactagggaaaa

SEQ ID NO: 760521 - DNA, 33 bp, Homo sapien
ataaatctgtctgtaactctactcttttagctt

SEQ ID NO: 760522 - DNA, 33 bp, Homo sapien
ataaatctgtctgtaattctactcttttagctt

SEQ ID NO: 760523 - DNA, 33 bp, Homo sapien
caggaggttgaggtaaaatagcgttcttgaacc

SEQ ID NO: 760524 - DNA, 33 bp, Homo sapien
caggaggttgaggtaagatagcgttcttgaacc

SEQ ID NO: 760525 - DNA, 33 bp, Homo sapien
tacaatccattcaatcaaaagatacaaggccat

SEQ ID NO: 760526 - DNA, 33 bp, Homo sapien
tacaatccattcaatccaaagatacaaggccat

SEQ ID NO: 760527 - DNA, 33 bp, Homo sapien
tacaaagtcatgtacaaaaacccatgaggctag

SEQ ID NO: 760528 - DNA, 33 bp, Homo sapien
tacaaagtcatgtacagaaacccatgaggctag

SEQ ID NO: 760529 - DNA, 33 bp, Homo sapien
tattggaatgctgaataaaaccaagtatagtaa

SEQ ID NO: 760530 - DNA, 33 bp, Homo sapien
tattggaatgctgaatgaaaccaagtatagtaa

SEQ ID NO: 760531 - DNA, 33 bp, Homo sapien
aaaccgagagtcctaaaataccctaatactaca

SEQ ID NO: 760532 - DNA, 33 bp, Homo sapien
aaaccgagagtcctaacataccctaatactaca

SEQ ID NO: 760533 - DNA, 33 bp, Homo sapien
atgaaggccattgcaaaaatcaagataaggaat

SEQ ID NO: 760534 - DNA, 33 bp, Homo sapien
atgaaggccattgcaacaatcaagataaggaat

SEQ ID NO: 760535 - DNA, 33 bp, Homo sapien
atagttggatagggaaatgggcagagtcctgag

SEQ ID NO: 760536 - DNA, 33 bp, Homo sapien
atagttggatagggaactgggcagagtcctgag

SEQ ID NO: 760537 - DNA, 33 bp, Homo sapien
aataatatttgagccacatcctgacaagcattc

SEQ ID NO: 760538 - DNA, 33 bp, Homo sapien
aataatatttgagccatatcctgacaagcattc

SEQ ID NO: 760539 - DNA, 33 bp, Homo sapien
aagcataaactcaaccaatacatattatttcaa

SEQ ID NO: 760540 - DNA, 33 bp, Homo sapien
aagcataaactcaaccgatacatattatttcaa

SEQ ID NO: 760541 - DNA, 33 bp, Homo sapien
tcgagcaagaacctcacgacaacattggcccaa

SEQ ID NO: 760542 - DNA, 33 bp, Homo sapien
tcgagcaagaacctcatgacaacattggcccaa

SEQ ID NO: 760543 - DNA, 33 bp, Homo sapien
aattctatccagtaacaaccaaatatatatccc

SEQ ID NO: 760544 - DNA, 33 bp, Homo sapien
aattctatccagtaacgaccaaatatatatccc

SEQ ID NO: 760545 - DNA, 33 bp, Homo sapien
atcataaatccatacaatgctactcttcattgc

SEQ ID NO: 760546 - DNA, 33 bp, Homo sapien
atcataaatccatacagtgctactcttcattgc

SEQ ID NO: 760547 - DNA, 33 bp, Homo sapien
gaaaccaaagagaagactcaaaaagaccagtaa

SEQ ID NO: 760548 - DNA, 33 bp, Homo sapien
gaaaccaaagagaagagtcaaaaagaccagtaa

SEQ ID NO: 760549 - DNA, 33 bp, Homo sapien
gaaaagaggacctgtaacttaatgggaccatat

SEQ ID NO: 760550 - DNA, 33 bp, Homo sapien
gaaaagaggacctgtaccttaatgggaccatat

SEQ ID NO: 760551 - DNA, 33 bp, Homo sapien
tggaaagattttatgcaacccttgaatcaaacc

SEQ ID NO: 760552 - DNA, 33 bp, Homo sapien
tggaaagattttatgcgacccttgaatcaaacc

SEQ ID NO: 760553 - DNA, 33 bp, Homo sapien
aagcctgaaggttgagaacaaaacatgaggaag

SEQ ID NO: 760554 - DNA, 33 bp, Homo sapien
aagcctgaaggttgaggacaaaacatgaggaag

SEQ ID NO: 760555 - DNA, 33 bp, Homo sapien
ttctgcatgaaaggtaggcttccaataattgct

SEQ ID NO: 760556 - DNA, 33 bp, Homo sapien
ttctgcatgaaaggtatgcttccaataattgct

SEQ ID NO: 760557 - DNA, 33 bp, Homo sapien
atgttgaaacaaggaaattacataaacaaacac

SEQ ID NO: 760558 - DNA, 33 bp, Homo sapien
atgttgaaacaaggaatttacataaacaaacac

SEQ ID NO: 760559 - DNA, 33 bp, Homo sapien
aggcctttagtaatgccccacgggaaaatacta

SEQ ID NO: 760560 - DNA, 33 bp, Homo sapien
aggcctttagtaatgctccacgggaaaatacta

SEQ ID NO: 760561 - DNA, 33 bp, Homo sapien
ccttcataacaagcaaaatgagaatcctgtgac

SEQ ID NO: 760562 - DNA, 33 bp, Homo sapien
ccttcataacaagcaacatgagaatcctgtgac

SEQ ID NO: 760563 - DNA, 33 bp, Homo sapien
gaatacaagttgaatacaagttcttgcacttac

SEQ ID NO: 760564 - DNA, 33 bp, Homo sapien
gaatacaagttgaatataagttcttgcacttac

SEQ ID NO: 760565 - DNA, 33 bp, Homo sapien
ttgactcatgtgcttacaggctaccacaccata

SEQ ID NO: 760566 - DNA, 33 bp, Homo sapien
ttgactcatgtgcttataggctaccacaccata

SEQ ID NO: 760567 - DNA, 33 bp, Homo sapien
ttgaatccttgtggtaagaaaagtgttgtgaag

SEQ ID NO: 760568 - DNA, 33 bp, Homo sapien
ttgaatccttgtggtaggaaaagtgttgtgaag

SEQ ID NO: 760569 - DNA, 33 bp, Homo sapien
aagtgctagaaattaaagcgctgacaccttatc

SEQ ID NO: 760570 - DNA, 33 bp, Homo sapien
aagtgctagaaattaaggcgctgacaccttatc

SEQ ID NO: 760571 - DNA, 33 bp, Homo sapien
gaagtggttttactcccgcagcaattcatcata

SEQ ID NO: 760572 - DNA, 33 bp, Homo sapien
gaagtggttttactcctgcagcaattcatcata

SEQ ID NO: 760573 - DNA, 33 bp, Homo sapien
ttcatgatctaagagacaaagttactagatgaa

SEQ ID NO: 760574 - DNA, 33 bp, Homo sapien
ttcatgatctaagagagaaagttactagatgaa

SEQ ID NO: 760575 - DNA, 33 bp, Homo sapien
gaataatttatgcctacagtaattaatgttctt

SEQ ID NO: 760576 - DNA, 33 bp, Homo sapien
gaataatttatgcctagagtaattaatgttctt

SEQ ID NO: 760577 - DNA, 33 bp, Homo sapien
tcatgtaaatgtattacaaaccagcaatgagag

SEQ ID NO: 760578 - DNA, 33 bp, Homo sapien
tcatgtaaatgtattataaaccagcaatgagag

SEQ ID NO: 760579 - DNA, 33 bp, Homo sapien
caagttaaaaaatgacacaatcaagggttttat

SEQ ID NO: 760580 - DNA, 33 bp, Homo sapien
caagttaaaaaatgacgcaatcaagggttttat

SEQ ID NO: 760581 - DNA, 33 bp, Homo sapien
atcttaacagtgtttcaattgggccatgtaggg

SEQ ID NO: 760582 - DNA, 33 bp, Homo sapien
atcttaacagtgtttcgattgggccatgtaggg

SEQ ID NO: 760583 - DNA, 33 bp, Homo sapien
tcaacacattccacacagagtaaaatagacaag

SEQ ID NO: 760584 - DNA, 33 bp, Homo sapien
tcaacacattccacacggagtaaaatagacaag

SEQ ID NO: 760585 - DNA, 33 bp, Homo sapien
tttagcaatatttagacagcaacacacaagcct

SEQ ID NO: 760586 - DNA, 33 bp, Homo sapien
tttagcaatatttagagagcaacacacaagcct

SEQ ID NO: 760587 - DNA, 33 bp, Homo sapien
aattaagctcctgaaacaaatgtaaaacctttt

SEQ ID NO: 760588 - DNA, 33 bp, Homo sapien
aattaagctcctgaaagaaatgtaaaacctttt

SEQ ID NO: 760589 - DNA, 33 bp, Homo sapien
gcacatcattgtgttacggaaggccacaggaaa

SEQ ID NO: 760590 - DNA, 33 bp, Homo sapien
gcacatcattgtgttatggaaggccacaggaaa

SEQ ID NO: 760591 - DNA, 33 bp, Homo sapien
aaactgttggcacaaacaggaaatgagaggatc

SEQ ID NO: 760592 - DNA, 33 bp, Homo sapien
aaactgttggcacaaagaggaaatgagaggatc

SEQ ID NO: 760593 - DNA, 33 bp, Homo sapien
agtagaatgacagaaaccagagcctgggaagag

SEQ ID NO: 760594 - DNA, 33 bp, Homo sapien
agtagaatgacagaaatcagagcctgggaagag

SEQ ID NO: 760595 - DNA, 33 bp, Homo sapien
aacttgtatcttccaactgtatgtttgtaccct

SEQ ID NO: 760596 - DNA, 33 bp, Homo sapien
aacttgtatcttccaattgtatgtttgtaccct

SEQ ID NO: 760597 - DNA, 33 bp, Homo sapien
tactatttccaagaacactaatcattgatttat

SEQ ID NO: 760598 - DNA, 33 bp, Homo sapien
tactatttccaagaactctaatcattgatttat

SEQ ID NO: 760599 - DNA, 33 bp, Homo sapien
tcagtcatttacagagcagagaagagatgtcta

SEQ ID NO: 760600 - DNA, 33 bp, Homo sapien
tcagtcatttacagaggagagaagagatgtcta

SEQ ID NO: 760601 - DNA, 33 bp, Homo sapien
cttaaatttcgtattaacattatcctcatagac

SEQ ID NO: 760602 - DNA, 33 bp, Homo sapien
cttaaatttcgtattagcattatcctcatagac

SEQ ID NO: 760603 - DNA, 33 bp, Homo sapien
atgcacatattaaagacggtttgttcatacgat

SEQ ID NO: 760604 - DNA, 33 bp, Homo sapien
atgcacatattaaagatggtttgttcatacgat

SEQ ID NO: 760605 - DNA, 33 bp, Homo sapien
cgtagactgtaacaaacgtaccaccttgtgcct

SEQ ID NO: 760606 - DNA, 33 bp, Homo sapien
cgtagactgtaacaaatgtaccaccttgtgcct

SEQ ID NO: 760607 - DNA, 33 bp, Homo sapien
caactatctaaacaaccaaccacacaagaaagg

SEQ ID NO: 760608 - DNA, 33 bp, Homo sapien
caactatctaaacaactaaccacacaagaaagg

SEQ ID NO: 760609 - DNA, 33 bp, Homo sapien
ataatcagaaatttgaactctaaatcataaaga

SEQ ID NO: 760610 - DNA, 33 bp, Homo sapien
ataatcagaaatttgagctctaaatcataaaga

SEQ ID NO: 760611 - DNA, 33 bp, Homo sapien
tgcaaaagtacaatcaagttaaaaatgctttaa

SEQ ID NO: 760612 - DNA, 33 bp, Homo sapien
tgcaaaagtacaatcatgttaaaaatgctttaa

SEQ ID NO: 760613 - DNA, 33 bp, Homo sapien
aaagtggacagtgacacgagtttaaggccggta

SEQ ID NO: 760614 - DNA, 33 bp, Homo sapien
aaagtggacagtgacatgagtttaaggccggta

SEQ ID NO: 760615 - DNA, 33 bp, Homo sapien
tgcactgctcctttagcaagtatgctgtaaatg

SEQ ID NO: 760616 - DNA, 33 bp, Homo sapien
tgcactgctcctttagtaagtatgctgtaaatg

SEQ ID NO: 760617 - DNA, 33 bp, Homo sapien
tctctaggacaaattgaagaagttttagaaaga

SEQ ID NO: 760618 - DNA, 33 bp, Homo sapien
tctctaggacaaattggagaagttttagaaaga

SEQ ID NO: 760619 - DNA, 33 bp, Homo sapien
catcctcaacacttggaagaaaaaatgacaaac

SEQ ID NO: 760620 - DNA, 33 bp, Homo sapien
catcctcaacacttggtagaaaaaatgacaaac

SEQ ID NO: 760621 - DNA, 33 bp, Homo sapien
cttttagtcatgctgcaaggaaatacaagtggc

SEQ ID NO: 760622 - DNA, 33 bp, Homo sapien
cttttagtcatgctgccaggaaatacaagtggc

SEQ ID NO: 760623 - DNA, 33 bp, Homo sapien
tagaaagtactaacaacccataagtggacaaat

SEQ ID NO: 760624 - DNA, 33 bp, Homo sapien
tagaaagtactaacaatccataagtggacaaat

SEQ ID NO: 760625 - DNA, 33 bp, Homo sapien
ttctaatagaggcatacgcaaatatatcttcag

SEQ ID NO: 760626 - DNA, 33 bp, Homo sapien
ttctaatagaggcataggcaaatatatcttcag

SEQ ID NO: 760627 - DNA, 33 bp, Homo sapien
gctaatgcttaagtcaccagtcaaaaacttcat

SEQ ID NO: 760628 - DNA, 33 bp, Homo sapien
gctaatgcttaagtcatcagtcaaaaacttcat

SEQ ID NO: 760629 - DNA, 33 bp, Homo sapien
caggcagctttccttacctctacttggtcctag

SEQ ID NO: 760630 - DNA, 33 bp, Homo sapien
caggcagctttccttatctctacttggtcctag

SEQ ID NO: 760631 - DNA, 33 bp, Homo sapien
tcatatgctggaatatcataatggaaacacaag

SEQ ID NO: 760632 - DNA, 33 bp, Homo sapien
tcatatgctggaatatgataatggaaacacaag

SEQ ID NO: 760633 - DNA, 33 bp, Homo sapien
gccaaactcagctttaaaagagaaggagaaata

SEQ ID NO: 760634 - DNA, 33 bp, Homo sapien
gccaaactcagctttataagagaaggagaaata

SEQ ID NO: 760635 - DNA, 33 bp, Homo sapien
aatatagtgttaaaaaccatggattcagaaagc

SEQ ID NO: 760636 - DNA, 33 bp, Homo sapien
aatatagtgttaaaaatcatggattcagaaagc

SEQ ID NO: 760637 - DNA, 33 bp, Homo sapien
agtgctgtagatactaaggaaaaactgaactct

SEQ ID NO: 760638 - DNA, 33 bp, Homo sapien
agtgctgtagatactatggaaaaactgaactct

SEQ ID NO: 760639 - DNA, 33 bp, Homo sapien
ttattattttccatacaaaagacatttttctcc

SEQ ID NO: 760640 - DNA, 33 bp, Homo sapien
ttattattttccatacgaaagacatttttctcc

SEQ ID NO: 760641 - DNA, 33 bp, Homo sapien
acacctacaagcccaaaagcaaatggaagctgc

SEQ ID NO: 760642 - DNA, 33 bp, Homo sapien
acacctacaagcccaacagcaaatggaagctgc

SEQ ID NO: 760643 - DNA, 33 bp, Homo sapien
agtctgccagttgcaaaaccgacattttattgt

SEQ ID NO: 760644 - DNA, 33 bp, Homo sapien
agtctgccagttgcaataccgacattttattgt

SEQ ID NO: 760645 - DNA, 33 bp, Homo sapien
gtctgtgcatttcaaagattttagatacattag

SEQ ID NO: 760646 - DNA, 33 bp, Homo sapien
gtctgtgcatttcaaatattttagatacattag

SEQ ID NO: 760647 - DNA, 33 bp, Homo sapien
ttgaattttccatgacaacttctcacctgcact

SEQ ID NO: 760648 - DNA, 33 bp, Homo sapien
ttgaattttccatgacgacttctcacctgcact

SEQ ID NO: 760649 - DNA, 33 bp, Homo sapien
caaaagattctcaaacacatgaacaccaattta

SEQ ID NO: 760650 - DNA, 33 bp, Homo sapien
caaaagattctcaaactcatgaacaccaattta

SEQ ID NO: 760651 - DNA, 33 bp, Homo sapien
attctgatgatgaagactattaacatgaactgt

SEQ ID NO: 760652 - DNA, 33 bp, Homo sapien
attctgatgatgaagattattaacatgaactgt

SEQ ID NO: 760653 - DNA, 33 bp, Homo sapien
tgagtgtatctcgaataaggtagggttatctga

SEQ ID NO: 760654 - DNA, 33 bp, Homo sapien
tgagtgtatctcgaatgaggtagggttatctga

SEQ ID NO: 760655 - DNA, 33 bp, Homo sapien
ttacagtaattctgcactgagaagctttctctg

SEQ ID NO: 760656 - DNA, 33 bp, Homo sapien
ttacagtaattctgcattgagaagctttctctg

SEQ ID NO: 760657 - DNA, 33 bp, Homo sapien
tctctgccacaggaaacgtcctgcactgaatta

SEQ ID NO: 760658 - DNA, 33 bp, Homo sapien
tctctgccacaggaaatgtcctgcactgaatta

SEQ ID NO: 760659 - DNA, 33 bp, Homo sapien
cttgtgtctgtcaccagggcttcccaatcactt

SEQ ID NO: 760660 - DNA, 33 bp, Homo sapien
cttgtgtctgtcaccatggcttcccaatcactt

SEQ ID NO: 760661 - DNA, 33 bp, Homo sapien
cccatctcgtgaagaacgctctaaactctctat

SEQ ID NO: 760662 - DNA, 33 bp, Homo sapien
cccatctcgtgaagaatgctctaaactctctat

SEQ ID NO: 760663 - DNA, 33 bp, Homo sapien
aaatctagtacttccccatgtggacctgtaata

SEQ ID NO: 760664 - DNA, 33 bp, Homo sapien
aaatctagtacttccctatgtggacctgtaata

SEQ ID NO: 760665 - DNA, 33 bp, Homo sapien
tatttctgaatccatcactgtgggaaatctgga

SEQ ID NO: 760666 - DNA, 33 bp, Homo sapien
tatttctgaatccatcgctgtgggaaatctgga

SEQ ID NO: 760667 - DNA, 33 bp, Homo sapien
ctggtgccaatgcaaacgcttaagaaagccacc

SEQ ID NO: 760668 - DNA, 33 bp, Homo sapien
ctggtgccaatgcaaatgcttaagaaagccacc

SEQ ID NO: 760669 - DNA, 33 bp, Homo sapien
cttgaaagatggaaaaaattgcttttatgttgc

SEQ ID NO: 760670 - DNA, 33 bp, Homo sapien
cttgaaagatggaaaacattgcttttatgttgc

SEQ ID NO: 760671 - DNA, 33 bp, Homo sapien
taataaaaacctccaaggcttgcacatcattct

SEQ ID NO: 760672 - DNA, 33 bp, Homo sapien
taataaaaacctccaatgcttgcacatcattct

SEQ ID NO: 760673 - DNA, 33 bp, Homo sapien
ttgtggagtgaataaacgaagctaacatatcta

SEQ ID NO: 760674 - DNA, 33 bp, Homo sapien
ttgtggagtgaataaatgaagctaacatatcta

SEQ ID NO: 760675 - DNA, 33 bp, Homo sapien
ggattgagtatggaaaaaagcagaatggaatcc

SEQ ID NO: 760676 - DNA, 33 bp, Homo sapien
ggattgagtatggaaataagcagaatggaatcc

SEQ ID NO: 760677 - DNA, 33 bp, Homo sapien
gtccacgaatcagtacaatcatctcttgataac

SEQ ID NO: 760678 - DNA, 33 bp, Homo sapien
gtccacgaatcagtaccatcatctcttgataac

SEQ ID NO: 760679 - DNA, 33 bp, Homo sapien
tctctgtgtgcccaaacctgttctctgaattga

SEQ ID NO: 760680 - DNA, 33 bp, Homo sapien
tctctgtgtgcccaaatctgttctctgaattga

SEQ ID NO: 760681 - DNA, 33 bp, Homo sapien
catttctttccccaaaataggtcagattactta

SEQ ID NO: 760682 - DNA, 33 bp, Homo sapien
catttctttccccaaattaggtcagattactta

SEQ ID NO: 760683 - DNA, 33 bp, Homo sapien
gtcaatgttagacataagaatgtaaatgatgca

SEQ ID NO: 760684 - DNA, 33 bp, Homo sapien
gtcaatgttagacataggaatgtaaatgatgca

SEQ ID NO: 760685 - DNA, 33 bp, Homo sapien
aaaatggtgaactcacagattctatctcctggc

SEQ ID NO: 760686 - DNA, 33 bp, Homo sapien
aaaatggtgaactcacggattctatctcctggc

SEQ ID NO: 760687 - DNA, 33 bp, Homo sapien
tacttttttcaatgaacgatgctaatttgcacc

SEQ ID NO: 760688 - DNA, 33 bp, Homo sapien
tacttttttcaatgaatgatgctaatttgcacc

SEQ ID NO: 760689 - DNA, 33 bp, Homo sapien
gaaaacctttcttctcaatgttagtcttacgtt

SEQ ID NO: 760690 - DNA, 33 bp, Homo sapien
gaaaacctttcttctcgatgttagtcttacgtt

SEQ ID NO: 760691 - DNA, 33 bp, Homo sapien
agggcttgctagcctacagaaattacatcaatc

SEQ ID NO: 760692 - DNA, 33 bp, Homo sapien
agggcttgctagcctatagaaattacatcaatc

SEQ ID NO: 760693 - DNA, 33 bp, Homo sapien
gattttgttagatcaagaaaacatacataaaac

SEQ ID NO: 760694 - DNA, 33 bp, Homo sapien
gattttgttagatcaataaaacatacataaaac

SEQ ID NO: 760695 - DNA, 33 bp, Homo sapien; identical to SEQ ID NO: 760693

SEQ ID NO: 760696 - DNA, 33 bp, Homo sapien; identical to SEQ ID NO: 760694

SEQ ID NO: 760697 - DNA, 33 bp, Homo sapien
tactaaggagataaaacatgaggtgaagatttt

SEQ ID NO: 760698 - DNA, 33 bp, Homo sapien
tactaaggagataaaatatgaggtgaagatttt

SEQ ID NO: 760699 - DNA, 33 bp, Homo sapien; identical to SEQ ID NO: 760697

SEQ ID NO: 760700 - DNA, 33 bp, Homo sapien; identical to SEQ ID NO: 760698

SEQ ID NO: 760701 - DNA, 33 bp, Homo sapien
atagtgtatactaagaggatgtttttccttatg

SEQ ID NO: 760702 - DNA, 33 bp, Homo sapien
atagtgtatactaagatgatgtttttccttatg

SEQ ID NO: 760703 - DNA, 33 bp, Homo sapien
atttaatgtgttaggggacaatcataatgagtc

SEQ ID NO: 760704 - DNA, 33 bp, Homo sapien
atttaatgtgttagggtacaatcataatgagtc

SEQ ID NO: 760705 - DNA, 33 bp, Homo sapien
agaaagaatattttgcacccttcaatccaagta

SEQ ID NO: 760706 - DNA, 33 bp, Homo sapien
agaaagaatattttgctcccttcaatccaagta

SEQ ID NO: 760707 - DNA, 33 bp, Homo sapien
tggaagccaactactacagcataaggacaaata

SEQ ID NO: 760708 - DNA, 33 bp, Homo sapien
tggaagccaactactatagcataaggacaaata

SEQ ID NO: 760709 - DNA, 33 bp, Homo sapien
gttcatcataccatcaatataataaagtttacc

SEQ ID NO: 760710 - DNA, 33 bp, Homo sapien
gttcatcataccatcagtataataaagtttacc

SEQ ID NO: 760711 - DNA, 33 bp, Homo sapien
attaaaggtaagttccagcagcaaggctcttga

SEQ ID NO: 760712 - DNA, 33 bp, Homo sapien
attaaaggtaagttccggcagcaaggctcttga

SEQ ID NO: 760713 - DNA, 33 bp, Homo sapien
ttaacatttctctagacgcaatttattgaaaat

SEQ ID NO: 760714 - DNA, 33 bp, Homo sapien
ttaacatttctctagatgcaatttattgaaaat

SEQ ID NO: 760715 - DNA, 33 bp, Homo sapien
gaagccgctgtctaacacacccttcagaaggga

SEQ ID NO: 760716 - DNA, 33 bp, Homo sapien
gaagccgctgtctaacgcacccttcagaaggga

SEQ ID NO: 760717 - DNA, 33 bp, Homo sapien
caggcagcagatctccaggaatcaggagcatcc

SEQ ID NO: 760718 - DNA, 33 bp, Homo sapien
caggcagcagatctccgggaatcaggagcatcc

SEQ ID NO: 760719 - DNA, 33 bp, Homo sapien
agttctgaataccaggaaggacaccattaagat

SEQ ID NO: 760720 - DNA, 33 bp, Homo sapien
agttctgaataccaggtaggacaccattaagat

SEQ ID NO: 760721 - DNA, 33 bp, Homo sapien
catagagtaagcaaacaaggaaagctgaactat

SEQ ID NO: 760722 - DNA, 33 bp, Homo sapien
catagagtaagcaaacgaggaaagctgaactat

SEQ ID NO: 760723 - DNA, 33 bp, Homo sapien
tttggggattgaagaactgatgtatttaaagag

SEQ ID NO: 760724 - DNA, 33 bp, Homo sapien
tttggggattgaagaattgatgtatttaaagag

SEQ ID NO: 760725 - DNA, 33 bp, Homo sapien
cataattcacctgcacacaatctcatatacatg

SEQ ID NO: 760726 - DNA, 33 bp, Homo sapien
cataattcacctgcacgcaatctcatatacatg

SEQ ID NO: 760727 - DNA, 33 bp, Homo sapien
ttatgttatcccctacaatctagttacatcaca

SEQ ID NO: 760728 - DNA, 33 bp, Homo sapien
ttatgttatcccctacgatctagttacatcaca

SEQ ID NO: 760729 - DNA, 33 bp, Homo sapien
acctcagagtgatgtcgaactatccagcaatat

SEQ ID NO: 760730 - DNA, 33 bp, Homo sapien
acctcagagtgatgtctaactatccagcaatat

SEQ ID NO: 760731 - DNA, 33 bp, Homo sapien
acttgcttcctttcatcacttttcctgaatgtt

SEQ ID NO: 760732 - DNA, 33 bp, Homo sapien
acttgcttcctttcatgacttttcctgaatgtt

SEQ ID NO: 760733 - DNA, 33 bp, Homo sapien
aacaaacaacaaagaccaattggcaaacaagga

SEQ ID NO: 760734 - DNA, 33 bp, Homo sapien
aacaaacaacaaagactaattggcaaacaagga

SEQ ID NO: 760735 - DNA, 33 bp, Homo sapien
gcttaaaattgtgaacaaaggataagattcaaa

SEQ ID NO: 760736 - DNA, 33 bp, Homo sapien
gcttaaaattgtgaacgaaggataagattcaaa

SEQ ID NO: 760737 - DNA, 33 bp, Homo sapien
cacactgaagatcctagggtgtgtattcctaag

SEQ ID NO: 760738 - DNA, 33 bp, Homo sapien
cacactgaagatcctatggtgtgtattcctaag

SEQ ID NO: 760739 - DNA, 33 bp, Homo sapien
ccttctgctgaaaaaaataactcaaagaccttg

SEQ ID NO: 760740 - DNA, 33 bp, Homo sapien
ccttctgctgaaaaaattaactcaaagaccttg

SEQ ID NO: 760741 - DNA, 33 bp, Homo sapien
tggatatctaccaacaaaacaagcatttgagta

SEQ ID NO: 760742 - DNA, 33 bp, Homo sapien
tggatatctaccaacagaacaagcatttgagta

SEQ ID NO: 760743 - DNA, 33 bp, Homo sapien
ttatattctaatcctcccagtccttttaaatta

SEQ ID NO: 760744 - DNA, 33 bp, Homo sapien
ttatattctaatcctctcagtccttttaaatta

SEQ ID NO: 760745 - DNA, 33 bp, Homo sapien
tgttagtgtatggtcacaaatatttaggtaaca

SEQ ID NO: 760746 - DNA, 33 bp, Homo sapien
tgttagtgtatggtcagaaatatttaggtaaca

SEQ ID NO: 760747 - DNA, 33 bp, Homo sapien
tggacaatgatgtctaagttgaggtggtttcag

SEQ ID NO: 760748 - DNA, 33 bp, Homo sapien
tggacaatgatgtctacgttgaggtggtttcag

SEQ ID NO: 760749 - DNA, 33 bp, Homo sapien
taagagggacactagaagtaactatttccaagg

SEQ ID NO: 760750 - DNA, 33 bp, Homo sapien
taagagggacactagaggtaactatttccaagg

SEQ ID NO: 760751 - DNA, 33 bp, Homo sapien
aactaagtctacagggaaatagtaatcgcttca

SEQ ID NO: 760752 - DNA, 33 bp, Homo sapien
aactaagtctacaggggaatagtaatcgcttca

SEQ ID NO: 760753 - DNA, 33 bp, Homo sapien
aattacaagaaaggtaaaaagataccccatata

SEQ ID NO: 760754 - DNA, 33 bp, Homo sapien
aattacaagaaaggtacaaagataccccatata

SEQ ID NO: 760755 - DNA, 33 bp, Homo sapien
atgattttgtgcagtcactcttttgagatgcca

SEQ ID NO: 760756 - DNA, 33 bp, Homo sapien
atgattttgtgcagtcgctcttttgagatgcca

SEQ ID NO: 760757 - DNA, 33 bp, Homo sapien
tcaaaaggaaatctcaataccatgggttttaat

SEQ ID NO: 760758 - DNA, 33 bp, Homo sapien
tcaaaaggaaatctcagtaccatgggttttaat

SEQ ID NO: 760759 - DNA, 33 bp, Homo sapien
gtatgtaagtgtatgacgatttatagtaacatt

SEQ ID NO: 760760 - DNA, 33 bp, Homo sapien
gtatgtaagtgtatgatgatttatagtaacatt

SEQ ID NO: 760761 - DNA, 33 bp, Homo sapien
agtaaagtttgtgaaacagattcatctggtggt

SEQ ID NO: 760762 - DNA, 33 bp, Homo sapien
agtaaagtttgtgaaatagattcatctggtggt

SEQ ID NO: 760763 - DNA, 33 bp, Homo sapien
aagaggtggcttaaaacgctgacttatgtagca

SEQ ID NO: 760764 - DNA, 33 bp, Homo sapien
aagaggtggcttaaaatgctgacttatgtagca

SEQ ID NO: 760765 - DNA, 33 bp, Homo sapien
tgttggttagtgtaaacgggtgaatttgttctt

SEQ ID NO: 760766 - DNA, 33 bp, Homo sapien
tgttggttagtgtaaatgggtgaatttgttctt

SEQ ID NO: 760767 - DNA, 33 bp, Homo sapien
caatcaacatcaaacaactattatttacaatgg

SEQ ID NO: 760768 - DNA, 33 bp, Homo sapien
caatcaacatcaaacagctattatttacaatgg

SEQ ID NO: 760769 - DNA, 33 bp, Homo sapien
gtgtttctcttcaacacggataattgccttaac

SEQ ID NO: 760770 - DNA, 33 bp, Homo sapien
gtgtttctcttcaacatggataattgccttaac

SEQ ID NO: 760771 - DNA, 33 bp, Homo sapien
acccactacctaccacagaaactccacagtggc

SEQ ID NO: 760772 - DNA, 33 bp, Homo sapien
acccactacctaccacggaaactccacagtggc

SEQ ID NO: 760773 - DNA, 33 bp, Homo sapien
cttgcacgtggggactcagcatttaatcaccct

SEQ ID NO: 760774 - DNA, 33 bp, Homo sapien
cttgcacgtggggacttagcatttaatcaccct

SEQ ID NO: 760775 - DNA, 33 bp, Homo sapien
tatggaaaatggctaactactctgtcaaaaatt

SEQ ID NO: 760776 - DNA, 33 bp, Homo sapien
tatggaaaatggctaagtactctgtcaaaaatt

SEQ ID NO: 760777 - DNA, 33 bp, Homo sapien
gcatagacgtgggtcaatcatatagagctcaat

SEQ ID NO: 760778 - DNA, 33 bp, Homo sapien
gcatagacgtgggtcagtcatatagagctcaat

SEQ ID NO: 760779 - DNA, 33 bp, Homo sapien
tttgccagatattgtgaaaagggtagaactagg

SEQ ID NO: 760780 - DNA, 33 bp, Homo sapien
tttgccagatattgtggaaagggtagaactagg

SEQ ID NO: 760781 - DNA, 33 bp, Homo sapien
actcaacaggcctcaaaagcgacacttctttgc

SEQ ID NO: 760782 - DNA, 33 bp, Homo sapien
actcaacaggcctcaatagcgacacttctttgc

SEQ ID NO: 760783 - DNA, 33 bp, Homo sapien
tttaaacctgcttattaaaaccagaaaaaaaca

SEQ ID NO: 760784 - DNA, 33 bp, Homo sapien
tttaaacctgcttattgaaaccagaaaaaaaca

SEQ ID NO: 760785 - DNA, 33 bp, Homo sapien
agtaaaattggatgaactaaactgaattagaca

SEQ ID NO: 760786 - DNA, 33 bp, Homo sapien
agtaaaattggatgaagtaaactgaattagaca

SEQ ID NO: 760787 - DNA, 33 bp, Homo sapien
tgacatacttgaaaaccgtatgtcaatgtaata

SEQ ID NO: 760788 - DNA, 33 bp, Homo sapien
tgacatacttgaaaactgtatgtcaatgtaata

SEQ ID NO: 760789 - DNA, 33 bp, Homo sapien
ttgacttttggaaatacgaaattaacagtgatg

SEQ ID NO: 760790 - DNA, 33 bp, Homo sapien
ttgacttttggaaatatgaaattaacagtgatg

SEQ ID NO: 760791 - DNA, 33 bp, Homo sapien
tgcagtctcttgatctcaattatctttttcatt

SEQ ID NO: 760792 - DNA, 33 bp, Homo sapien
tgcagtctcttgatctgaattatctttttcatt

SEQ ID NO: 760793 - DNA, 33 bp, Homo sapien
tggttgtcactgaaaaagtaagttatgcattcc

SEQ ID NO: 760794 - DNA, 33 bp, Homo sapien
tggttgtcactgaaaacgtaagttatgcattcc

SEQ ID NO: 760795 - DNA, 33 bp, Homo sapien
ttttttcatacttcacaattttcacaatgtaac

SEQ ID NO: 760796 - DNA, 33 bp, Homo sapien
ttttttcatacttcaccattttcacaatgtaac

SEQ ID NO: 760797 - DNA, 33 bp, Homo sapien
ggcatgggtatagggaagcaagggtgaataatg

SEQ ID NO: 760798 - DNA, 33 bp, Homo sapien
ggcatgggtatagggacgcaagggtgaataatg

SEQ ID NO: 760799 - DNA, 33 bp, Homo sapien
cctttctggcaaaacaaagtgactcaggctcct

SEQ ID NO: 760800 - DNA, 33 bp, Homo sapien
cctttctggcaaaacagagtgactcaggctcct

SEQ ID NO: 760801 - DNA, 33 bp, Homo sapien
ccttattactgatcttaaacagaagttacttgc

SEQ ID NO: 760802 - DNA, 33 bp, Homo sapien
ccttattactgatcttcaacagaagttacttgc

SEQ ID NO: 760803 - DNA, 33 bp, Homo sapien
ttgctgtgggatgtcacctcctcagcataagat

SEQ ID NO: 760804 - DNA, 33 bp, Homo sapien
ttgctgtgggatgtcagctcctcagcataagat

SEQ ID NO: 760805 - DNA, 33 bp, Homo sapien
gcccagaaatagacccacaccaatatagtcaac

SEQ ID NO: 760806 - DNA, 33 bp, Homo sapien
gcccagaaatagacccccaccaatatagtcaac

SEQ ID NO: 760807 - DNA, 33 bp, Homo sapien
catgttcttctgtaaaagtgataattgccctca

SEQ ID NO: 760808 - DNA, 33 bp, Homo sapien
catgttcttctgtaaacgtgataattgccctca

SEQ ID NO: 760809 - DNA, 33 bp, Homo sapien
taagctgttttcctgacatttaggcaaaatagg

SEQ ID NO: 760810 - DNA, 33 bp, Homo sapien
taagctgttttcctgatatttaggcaaaatagg

SEQ ID NO: 760811 - DNA, 33 bp, Homo sapien
gcagtacttgtggttgcagtgattatcctgaga

SEQ ID NO: 760812 - DNA, 33 bp, Homo sapien
gcagtacttgtggttgtagtgattatcctgaga

SEQ ID NO: 760813 - DNA, 33 bp, Homo sapien
gaaagtagtaagacaaatggatgtggaggcaca

SEQ ID NO: 760814 - DNA, 33 bp, Homo sapien
gaaagtagtaagacaagtggatgtggaggcaca

SEQ ID NO: 760815 - DNA, 33 bp, Homo sapien
aagggacattgaaaaccgatacttgaagatcat

SEQ ID NO: 760816 - DNA, 33 bp, Homo sapien
aagggacattgaaaactgatacttgaagatcat

SEQ ID NO: 760817 - DNA, 33 bp, Homo sapien
tgtatgtgtgtttgcacaggacatacttcatct

SEQ ID NO: 760818 - DNA, 33 bp, Homo sapien
tgtatgtgtgtttgcataggacatacttcatct

SEQ ID NO: 760819 - DNA, 33 bp, Homo sapien
tgcaaacaatgggtaactggtctaagctgcatt

SEQ ID NO: 760820 - DNA, 33 bp, Homo sapien
tgcaaacaatgggtaagtggtctaagctgcatt

SEQ ID NO: 760821 - DNA, 33 bp, Homo sapien
tgtaatttagaatggaaaagttcaatgaggaat

SEQ ID NO: 760822 - DNA, 33 bp, Homo sapien
tgtaatttagaatggagaagttcaatgaggaat

SEQ ID NO: 760823 - DNA, 33 bp, Homo sapien
ggtgactgtattcacgcaggtctgcagcaactt

SEQ ID NO: 760824 - DNA, 33 bp, Homo sapien
ggtgactgtattcacgtaggtctgcagcaactt

SEQ ID NO: 760825 - DNA, 33 bp, Homo sapien
aaacagagtgagaaagaagcaaaccctaaacac

SEQ ID NO: 760826 - DNA, 33 bp, Homo sapien
aaacagagtgagaaagcagcaaaccctaaacac

SEQ ID NO: 760827 - DNA, 33 bp, Homo sapien
tatagtccactcataacggtatggaattacaca

SEQ ID NO: 760828 - DNA, 33 bp, Homo sapien
tatagtccactcataatggtatggaattacaca

SEQ ID NO: 760829 - DNA, 33 bp, Homo sapien
gctaaggcaagagatacctaaggcaaactgctc

SEQ ID NO: 760830 - DNA, 33 bp, Homo sapien
gctaaggcaagagatatctaaggcaaactgctc

SEQ ID NO: 760831 - DNA, 33 bp, Homo sapien
tcaggggcagaaactaatacccctctcaaccct

SEQ ID NO: 760832 - DNA, 33 bp, Homo sapien
tcaggggcagaaactagtacccctctcaaccct

SEQ ID NO: 760833 - DNA, 33 bp, Homo sapien
tatactaaggcttgcaatcacacggcaaaagac

SEQ ID NO: 760834 - DNA, 33 bp, Homo sapien
tatactaaggcttgcagtcacacggcaaaagac

SEQ ID NO: 760835 - DNA, 33 bp, Homo sapien
agaaattttctacagaactcccgaagtgtattg

SEQ ID NO: 760836 - DNA, 33 bp, Homo sapien
agaaattttctacagagctcccgaagtgtattg

SEQ ID NO: 760837 - DNA, 33 bp, Homo sapien
tacatgtgtatggtgcaagtaactagtgtctca

SEQ ID NO: 760838 - DNA, 33 bp, Homo sapien
tacatgtgtatggtgccagtaactagtgtctca

SEQ ID NO: 760839 - DNA, 33 bp, Homo sapien
tgcagtatcctgaaaccagatgcagataagagg

SEQ ID NO: 760840 - DNA, 33 bp, Homo sapien
tgcagtatcctgaaactagatgcagataagagg

SEQ ID NO: 760841 - DNA, 33 bp, Homo sapien
actttctgcaatgaaagaaattctgtatctctt

SEQ ID NO: 760842 - DNA, 33 bp, Homo sapien
actttctgcaatgaaataaattctgtatctctt

SEQ ID NO: 760843 - DNA, 33 bp, Homo sapien
tatatatcctggtagaactaggtagtcagactc

SEQ ID NO: 760844 - DNA, 33 bp, Homo sapien
tatatatcctggtagagctaggtagtcagactc

SEQ ID NO: 760845 - DNA, 33 bp, Homo sapien
attgtttgcaggagtcaaaatagtgtatataat

SEQ ID NO: 760846 - DNA, 33 bp, Homo sapien
attgtttgcaggagtcgaaatagtgtatataat

SEQ ID NO: 760847 - DNA, 33 bp, Homo sapien
aataaatcaagtggtccaatattcattgtttgc

SEQ ID NO: 760848 - DNA, 33 bp, Homo sapien
aataaatcaagtggtctaatattcattgtttgc

SEQ ID NO: 760849 - DNA, 33 bp, Homo sapien
ggcccatcaataacacaaatagcaccatgtgag

SEQ ID NO: 760850 - DNA, 33 bp, Homo sapien
ggcccatcaataacaccaatagcaccatgtgag

SEQ ID NO: 760851 - DNA, 33 bp, Homo sapien
agaaatgtagctagaacatcaaatggatgcaga

SEQ ID NO: 760852 - DNA, 33 bp, Homo sapien
agaaatgtagctagaatatcaaatggatgcaga

SEQ ID NO: 760853 - DNA, 33 bp, Homo sapien
gatttttgcatactcaatgaaacatacatattt

SEQ ID NO: 760854 - DNA, 33 bp, Homo sapien
gatttttgcatactcagtgaaacatacatattt

SEQ ID NO: 760855 - DNA, 33 bp, Homo sapien
aaatacctcagtcaaactgttgatagcaagttt

SEQ ID NO: 760856 - DNA, 33 bp, Homo sapien
aaatacctcagtcaaattgttgatagcaagttt

SEQ ID NO: 760857 - DNA, 33 bp, Homo sapien
ctgccagttcaaataccctattgagctaatgta

SEQ ID NO: 760858 - DNA, 33 bp, Homo sapien
ctgccagttcaaatacgctattgagctaatgta

SEQ ID NO: 760859 - DNA, 33 bp, Homo sapien
tagttacttcagtctaaactacgtgtttttcag

SEQ ID NO: 760860 - DNA, 33 bp, Homo sapien
tagttacttcagtctagactacgtgtttttcag

SEQ ID NO: 760861 - DNA, 33 bp, Homo sapien
tcaggcaattcagcaacagacaccattagaatc

SEQ ID NO: 760862 - DNA, 33 bp, Homo sapien
tcaggcaattcagcaatagacaccattagaatc

SEQ ID NO: 760863 - DNA, 33 bp, Homo sapien
ggagactgcaaatggaagattaaggcactagca

SEQ ID NO: 760864 - DNA, 33 bp, Homo sapien
ggagactgcaaatggaggattaaggcactagca

SEQ ID NO: 760865 - DNA, 33 bp, Homo sapien
gtggactcagaaaataaattgaatacagcctca

SEQ ID NO: 760866 - DNA, 33 bp, Homo sapien
gtggactcagaaaatagattgaatacagcctca

SEQ ID NO: 760867 - DNA, 33 bp, Homo sapien
ttgtatctgatacatgaaaaactttaatccaga

SEQ ID NO: 760868 - DNA, 33 bp, Homo sapien
ttgtatctgatacatggaaaactttaatccaga

SEQ ID NO: 760869 - DNA, 33 bp, Homo sapien
atgattgtagatgtgcaattttatttctgagat

SEQ ID NO: 760870 - DNA, 33 bp, Homo sapien
atgattgtagatgtgcgattttatttctgagat

SEQ ID NO: 760871 - DNA, 33 bp, Homo sapien
taatttatagattcaacgctacttccatcaaac

SEQ ID NO: 760872 - DNA, 33 bp, Homo sapien
taatttatagattcaatgctacttccatcaaac

SEQ ID NO: 760873 - DNA, 33 bp, Homo sapien
ttaaggacaatggaaaagattatctatgtttgt

SEQ ID NO: 760874 - DNA, 33 bp, Homo sapien
ttaaggacaatggaaacgattatctatgtttgt

SEQ ID NO: 760875 - DNA, 33 bp, Homo sapien
ttaatagttgtcacagaaacagtggctgcagtg

SEQ ID NO: 760876 - DNA, 33 bp, Homo sapien
ttaatagttgtcacagcaacagtggctgcagtg

SEQ ID NO: 760877 - DNA, 33 bp, Homo sapien
acgttatagagatacactaagccacaatatgtc

SEQ ID NO: 760878 - DNA, 33 bp, Homo sapien
acgttatagagatacattaagccacaatatgtc

SEQ ID NO: 760879 - DNA, 33 bp, Homo sapien
acaaaatagttatgcaagttgaagagtattcaa

SEQ ID NO: 760880 - DNA, 33 bp, Homo sapien
acaaaatagttatgcaggttgaagagtattcaa

SEQ ID NO: 760881 - DNA, 33 bp, Homo sapien
ggaatcagactacacaatctcattgctttacta

SEQ ID NO: 760882 - DNA, 33 bp, Homo sapien
ggaatcagactacacagtctcattgctttacta

SEQ ID NO: 760883 - DNA, 33 bp, Homo sapien
ttcattagtctttaagcagcaaattctcattat

SEQ ID NO: 760884 - DNA, 33 bp, Homo sapien
ttcattagtctttaagtagcaaattctcattat

SEQ ID NO: 760885 - DNA, 33 bp, Homo sapien
ataatctaaaggagaactgttgcccagcaggtg

SEQ ID NO: 760886 - DNA, 33 bp, Homo sapien
ataatctaaaggagaattgttgcccagcaggtg

SEQ ID NO: 760887 - DNA, 33 bp, Homo sapien
caaagatcttataaaacgaaagtggatttttaa

SEQ ID NO: 760888 - DNA, 33 bp, Homo sapien
caaagatcttataaaatgaaagtggatttttaa

SEQ ID NO: 760889 - DNA, 33 bp, Homo sapien
aataggagtgaagtaccatacagtgaagagcca

SEQ ID NO: 760890 - DNA, 33 bp, Homo sapien
aataggagtgaagtacgatacagtgaagagcca

SEQ ID NO: 760891 - DNA, 33 bp, Homo sapien
acctgcaatatatccaaggtatatctgtaattg

SEQ ID NO: 760892 - DNA, 33 bp, Homo sapien
acctgcaatatatccagggtatatctgtaattg

SEQ ID NO: 760893 - DNA, 33 bp, Homo sapien
tgtcagccaaatatcacgtgcaggaaggattgc

SEQ ID NO: 760894 - DNA, 33 bp, Homo sapien
tgtcagccaaatatcatgtgcaggaaggattgc

SEQ ID NO: 760895 - DNA, 33 bp, Homo sapien
aacagcagtagcaaaacgacacaggtggtgtag

SEQ ID NO: 760896 - DNA, 33 bp, Homo sapien
aacagcagtagcaaaatgacacaggtggtgtag

SEQ ID NO: 760897 - DNA, 33 bp, Homo sapien
gttctgttgataattacaaaagtagaagatgcc

SEQ ID NO: 760898 - DNA, 33 bp, Homo sapien
gttctgttgataattagaaaagtagaagatgcc

SEQ ID NO: 760899 - DNA, 33 bp, Homo sapien
agggctccatccggatcaactaattacctccca

SEQ ID NO: 760900 - DNA, 33 bp, Homo sapien
agggctccatccggatgaactaattacctccca

SEQ ID NO: 760901 - DNA, 33 bp, Homo sapien
gtaaagattaaaacaaaggatcaagtgttcagt

SEQ ID NO: 760902 - DNA, 33 bp, Homo sapien
gtaaagattaaaacaatggatcaagtgttcagt

SEQ ID NO: 760903 - DNA, 33 bp, Homo sapien
taaatgggctccaagcaatgccacaaagttctc

SEQ ID NO: 760904 - DNA, 33 bp, Homo sapien
taaatgggctccaagccatgccacaaagttctc

SEQ ID NO: 760905 - DNA, 33 bp, Homo sapien
cttagccctaaatcaacgtaaccactgcagatt

SEQ ID NO: 760906 - DNA, 33 bp, Homo sapien
cttagccctaaatcaatgtaaccactgcagatt

SEQ ID NO: 760907 - DNA, 33 bp, Homo sapien
tttattaggctctgaaatctcaaatgcttggtg

SEQ ID NO: 760908 - DNA, 33 bp, Homo sapien
tttattaggctctgaagtctcaaatgcttggtg

SEQ ID NO: 760909 - DNA, 33 bp, Homo sapien
gcatcaaaagtaggacacctggaagacggtggc

SEQ ID NO: 760910 - DNA, 33 bp, Homo sapien
gcatcaaaagtaggacgcctggaagacggtggc

SEQ ID NO: 760911 - DNA, 33 bp, Homo sapien
tctgttgacacgctaccatttttcacaatggcc

SEQ ID NO: 760912 - DNA, 33 bp, Homo sapien
tctgttgacacgctactatttttcacaatggcc

SEQ ID NO: 760913 - DNA, 33 bp, Homo sapien
agaataatgtcagaagaccagttagcaggcatc

SEQ ID NO: 760914 - DNA, 33 bp, Homo sapien
agaataatgtcagaaggccagttagcaggcatc

SEQ ID NO: 760915 - DNA, 33 bp, Homo sapien
taatgtagtgtataagaattgacaaaataacca

SEQ ID NO: 760916 - DNA, 33 bp, Homo sapien
taatgtagtgtataagtattgacaaaataacca

SEQ ID NO: 760917 - DNA, 33 bp, Homo sapien
caactgtgacatggaaagcctactctgatcatc

SEQ ID NO: 760918 - DNA, 33 bp, Homo sapien
caactgtgacatggaaggcctactctgatcatc

SEQ ID NO: 760919 - DNA, 33 bp, Homo sapien
ctcatccaaaaggtagcaagttgagagtggaac

SEQ ID NO: 760920 - DNA, 33 bp, Homo sapien
ctcatccaaaaggtaggaagttgagagtggaac

SEQ ID NO: 760921 - DNA, 33 bp, Homo sapien
tttcaaatgtgccttgcagattagattccaact

SEQ ID NO: 760922 - DNA, 33 bp, Homo sapien
tttcaaatgtgccttgtagattagattccaact

SEQ ID NO: 760923 - DNA, 33 bp, Homo sapien
atgctgtgactactcacacttatttactgttta

SEQ ID NO: 760924 - DNA, 33 bp, Homo sapien
atgctgtgactactcatacttatttactgttta

SEQ ID NO: 760925 - DNA, 33 bp, Homo sapien
cagtgtaaaacagaccaatacaccatgtcagag

SEQ ID NO: 760926 - DNA, 33 bp, Homo sapien
cagtgtaaaacagaccgatacaccatgtcagag

SEQ ID NO: 760927 - DNA, 33 bp, Homo sapien
ttgatactctgcaaaaatgagaagaaatcagtc

SEQ ID NO: 760928 - DNA, 33 bp, Homo sapien
ttgatactctgcaaaagtgagaagaaatcagtc

SEQ ID NO: 760929 - DNA, 33 bp, Homo sapien
tacaaatgagttaagacgctaatgataatattt

SEQ ID NO: 760930 - DNA, 33 bp, Homo sapien
tacaaatgagttaagatgctaatgataatattt

SEQ ID NO: 760931 - DNA, 33 bp, Homo sapien
attttggaattcttgacagtaatcaaaccagac

SEQ ID NO: 760932 - DNA, 33 bp, Homo sapien
attttggaattcttgagagtaatcaaaccagac

SEQ ID NO: 760933 - DNA, 33 bp, Homo sapien
gggctctaccaagacaaaactattgcctgggcg

SEQ ID NO: 760934 - DNA, 33 bp, Homo sapien
gggctctaccaagacagaactattgcctgggcg

SEQ ID NO: 760935 - DNA, 33 bp, Homo sapien
tacataacattgtcctcacgattgcagttacaa

SEQ ID NO: 760936 - DNA, 33 bp, Homo sapien
tacataacattgtcctgacgattgcagttacaa

SEQ ID NO: 760937 - DNA, 33 bp, Homo sapien
tacactctcatgcgtaacctgctatcaagttgg

SEQ ID NO: 760938 - DNA, 33 bp, Homo sapien
tacactctcatgcgtaccctgctatcaagttgg

SEQ ID NO: 760939 - DNA, 33 bp, Homo sapien
ttgaaatgcatattaccggccccaaattttatt

SEQ ID NO: 760940 - DNA, 33 bp, Homo sapien
ttgaaatgcatattactggccccaaattttatt

SEQ ID NO: 760941 - DNA, 33 bp, Homo sapien
gaacatcaaattcagaagctccaaggatgtcat

SEQ ID NO: 760942 - DNA, 33 bp, Homo sapien
gaacatcaaattcagaggctccaaggatgtcat

SEQ ID NO: 760943 - DNA, 33 bp, Homo sapien
cttgggcatgtcaataagaagaatgccttgaag

SEQ ID NO: 760944 - DNA, 33 bp, Homo sapien
cttgggcatgtcaataggaagaatgccttgaag

SEQ ID NO: 760945 - DNA, 33 bp, Homo sapien
ttttatagcacaggttaaacaacaggctagaca

SEQ ID NO: 760946 - DNA, 33 bp, Homo sapien
ttttatagcacaggttgaacaacaggctagaca

SEQ ID NO: 760947 - DNA, 33 bp, Homo sapien
tttgcattgcctcaaactggctaactcactgtc

SEQ ID NO: 760948 - DNA, 33 bp, Homo sapien
tttgcattgcctcaaagtggctaactcactgtc

SEQ ID NO: 760949 - DNA, 33 bp, Homo sapien
taagaaccagtgaataagtgtttgctacaagag

SEQ ID NO: 760950 - DNA, 33 bp, Homo sapien
taagaaccagtgaatatgtgtttgctacaagag

SEQ ID NO: 760951 - DNA, 33 bp, Homo sapien
acttccacataatgtaaaatcactctctatatt

SEQ ID NO: 760952 - DNA, 33 bp, Homo sapien
acttccacataatgtacaatcactctctatatt

SEQ ID NO: 760953 - DNA, 33 bp, Homo sapien
accaattaatcaccacagaatatatgagacatt

SEQ ID NO: 760954 - DNA, 33 bp, Homo sapien
accaattaatcaccacggaatatatgagacatt

SEQ ID NO: 760955 - DNA, 33 bp, Homo sapien
aagaactgtcacagaaagaaagaatacaggaag

SEQ ID NO: 760956 - DNA, 33 bp, Homo sapien
aagaactgtcacagaaggaaagaatacaggaag

SEQ ID NO: 760957 - DNA, 33 bp, Homo sapien
tgatcattctcagaaagctagccagagaaagtc

SEQ ID NO: 760958 - DNA, 33 bp, Homo sapien
tgatcattctcagaaatctagccagagaaagtc

SEQ ID NO: 760959 - DNA, 33 bp, Homo sapien; identical to SEQ ID NO: 760957

SEQ ID NO: 760960 - DNA, 33 bp, Homo sapien; identical to SEQ ID NO: 760958

SEQ ID NO: 760961 - DNA, 33 bp, Homo sapien
ttacataagagaataacgacaaagtaagaatga

SEQ ID NO: 760962 - DNA, 33 bp, Homo sapien
ttacataagagaataaggacaaagtaagaatga

SEQ ID NO: 760963 - DNA, 33 bp, Homo sapien
tctctagttgtttaaaccaatcgttaataatta

SEQ ID NO: 760964 - DNA, 33 bp, Homo sapien
tctctagttgtttaaatcaatcgttaataatta

SEQ ID NO: 760965 - DNA, 33 bp, Homo sapien
tttattagatttcttgaagaggcattttctctt

SEQ ID NO: 760966 - DNA, 33 bp, Homo sapien
tttattagatttcttgcagaggcattttctctt

SEQ ID NO: 760967 - DNA, 33 bp, Homo sapien
gttctctactgctctccataaggttggatgccg

SEQ ID NO: 760968 - DNA, 33 bp, Homo sapien
gttctctactgctctctataaggttggatgccg

SEQ ID NO: 760969 - DNA, 33 bp, Homo sapien
ttgataaacagtaagccgcaggaaaaagcattt

SEQ ID NO: 760970 - DNA, 33 bp, Homo sapien
ttgataaacagtaagctgcaggaaaaagcattt

SEQ ID NO: 760971 - DNA, 33 bp, Homo sapien
aaaaaccttactaccaccactgttgccacagac

SEQ ID NO: 760972 - DNA, 33 bp, Homo sapien
aaaaaccttactaccagcactgttgccacagac

SEQ ID NO: 760973 - DNA, 33 bp, Homo sapien
taacaacgtagtcataacctttaaggcccaggc

SEQ ID NO: 760974 - DNA, 33 bp, Homo sapien
taacaacgtagtcatagcctttaaggcccaggc

SEQ ID NO: 760975 - DNA, 33 bp, Homo sapien
cctaatcagctgaagagcttaacaaaacaaaga

SEQ ID NO: 760976 - DNA, 33 bp, Homo sapien
cctaatcagctgaagatcttaacaaaacaaaga

SEQ ID NO: 760977 - DNA, 33 bp, Homo sapien
ataatcacatgagtacactcctaatataaatta

SEQ ID NO: 760978 - DNA, 33 bp, Homo sapien
ataatcacatgagtaccctcctaatataaatta

SEQ ID NO: 760979 - DNA, 33 bp, Homo sapien
taaacctatcccaaaaggacatatgactctctc

SEQ ID NO: 760980 - DNA, 33 bp, Homo sapien
taaacctatcccaaaatgacatatgactctctc

SEQ ID NO: 760981 - DNA, 33 bp, Homo sapien
gaattttgctcagtaaaagtctcggtgtctaaa

SEQ ID NO: 760982 - DNA, 33 bp, Homo sapien
gaattttgctcagtaagagtctcggtgtctaaa

SEQ ID NO: 760983 - DNA, 33 bp, Homo sapien
ggattctatttgaagccacgttatgtcagatag

SEQ ID NO: 760984 - DNA, 33 bp, Homo sapien
ggattctatttgaagctacgttatgtcagatag

SEQ ID NO: 760985 - DNA, 33 bp, Homo sapien
ccaatgtttaacaatgaaaatcacttatctcca

SEQ ID NO: 760986 - DNA, 33 bp, Homo sapien
ccaatgtttaacaatggaaatcacttatctcca

SEQ ID NO: 760987 - DNA, 33 bp, Homo sapien
gtttgcaggtctattccaaactctctgtgctct

SEQ ID NO: 760988 - DNA, 33 bp, Homo sapien
gtttgcaggtctattcgaaactctctgtgctct

SEQ ID NO: 760989 - DNA, 33 bp, Homo sapien
tgtaacaaagtttatgaatttaagctaaataga

SEQ ID NO: 760990 - DNA, 33 bp, Homo sapien
tgtaacaaagtttatggatttaagctaaataga

SEQ ID NO: 760991 - DNA, 33 bp, Homo sapien
gcaacataaactgataagaagtcattatacaga

SEQ ID NO: 760992 - DNA, 33 bp, Homo sapien
gcaacataaactgataggaagtcattatacaga

SEQ ID NO: 760993 - DNA, 33 bp, Homo sapien
gttttccctggtcgcaagtatgatgtgtttatt

SEQ ID NO: 760994 - DNA, 33 bp, Homo sapien
gttttccctggtcgcaggtatgatgtgtttatt

SEQ ID NO: 760995 - DNA, 33 bp, Homo sapien
acaaaaaccctcattcccaatcaattacatttc

SEQ ID NO: 760996 - DNA, 33 bp, Homo sapien
acaaaaaccctcattctcaatcaattacatttc

SEQ ID NO: 760997 - DNA, 33 bp, Homo sapien
cttagtaccttcctaaatctctcaactttagaa

SEQ ID NO: 760998 - DNA, 33 bp, Homo sapien
cttagtaccttcctaattctctcaactttagaa

SEQ ID NO: 760999 - DNA, 33 bp, Homo sapien
cagcaaatgctgagaaagaaagaatggattgga

SEQ ID NO: 761000 - DNA, 33 bp, Homo sapien
cagcaaatgctgagaaggaaagaatggattgga

SEQ ID NO: 761001 - DNA, 33 bp, Homo sapien
atcttgattaaatggcaacagttatggtgatgc

SEQ ID NO: 761002 - DNA, 33 bp, Homo sapien
atcttgattaaatggccacagttatggtgatgc

SEQ ID NO: 761003 - DNA, 33 bp, Homo sapien
actactgacagaaaaaacactctactgtaagca

SEQ ID NO: 761004 - DNA, 33 bp, Homo sapien
actactgacagaaaaagcactctactgtaagca

SEQ ID NO: 761005 - DNA, 33 bp, Homo sapien
aaaacttacatttggaaaagtgaaatcacttat

SEQ ID NO: 761006 - DNA, 33 bp, Homo sapien
aaaacttacatttggagaagtgaaatcacttat

SEQ ID NO: 761007 - DNA, 33 bp, Homo sapien
aatttcatagtggaaacagaatcacctgcaaat

SEQ ID NO: 761008 - DNA, 33 bp, Homo sapien
aatttcatagtggaaatagaatcacctgcaaat

SEQ ID NO: 761009 - DNA, 33 bp, Homo sapien
aagttcatacaagaacaaacacatatttatcaa

SEQ ID NO: 761010 - DNA, 33 bp, Homo sapien
aagttcatacaagaacgaacacatatttatcaa

SEQ ID NO: 761011 - DNA, 33 bp, Homo sapien
taaacaaatgcacagaagtatgtggccagacat

SEQ ID NO: 761012 - DNA, 33 bp, Homo sapien
taaacaaatgcacagaggtatgtggccagacat

SEQ ID NO: 761013 - DNA, 33 bp, Homo sapien
tgtataattgctctcaaaatattctgtaagcag

SEQ ID NO: 761014 - DNA, 33 bp, Homo sapien
tgtataattgctctcataatattctgtaagcag

SEQ ID NO: 761015 - DNA, 33 bp, Homo sapien
ctctggtttcagagctgacaaatgatttcagta

SEQ ID NO: 761016 - DNA, 33 bp, Homo sapien
ctctggtttcagagcttacaaatgatttcagta

SEQ ID NO: 761017 - DNA, 33 bp, Homo sapien
tccacataattaaccagaatactgcctgagttg

SEQ ID NO: 761018 - DNA, 33 bp, Homo sapien
tccacataattaaccataatactgcctgagttg

SEQ ID NO: 761019 - DNA, 33 bp, Homo sapien
tgataccatgatcttaaagtaaagccaaaacac

SEQ ID NO: 761020 - DNA, 33 bp, Homo sapien
tgataccatgatcttagagtaaagccaaaacac

SEQ ID NO: 761021 - DNA, 33 bp, Homo sapien
aaactgatgatttagacagagctccctttccac

SEQ ID NO: 761022 - DNA, 33 bp, Homo sapien
aaactgatgatttagatagagctccctttccac

SEQ ID NO: 761023 - DNA, 33 bp, Homo sapien
atagatcctgtaggcaagcttcatttttttatt

SEQ ID NO: 761024 - DNA, 33 bp, Homo sapien
atagatcctgtaggcatgcttcatttttttatt

SEQ ID NO: 761025 - DNA, 33 bp, Homo sapien
atctgcagtgtttccaagtggatggtgcaagct

SEQ ID NO: 761026 - DNA, 33 bp, Homo sapien
atctgcagtgtttccaggtggatggtgcaagct

SEQ ID NO: 761027 - DNA, 33 bp, Homo sapien; identical to SEQ ID NO: 761025

SEQ ID NO: 761028 - DNA, 33 bp, Homo sapien; identical to SEQ ID NO: 761026

SEQ ID NO: 761029 - DNA, 33 bp, Homo sapien
ataatggaattcaggcagagtcaagccttatag

SEQ ID NO: 761030 - DNA, 33 bp, Homo sapien
ataatggaattcaggcggagtcaagccttatag

SEQ ID NO: 761031 - DNA, 33 bp, Homo sapien
tgatcaaaatgcagaaacattcctgccataaga

SEQ ID NO: 761032 - DNA, 33 bp, Homo sapien
tgatcaaaatgcagaatcattcctgccataaga

SEQ ID NO: 761033 - DNA, 33 bp, Homo sapien
gggcctattggtagaacgttattgaattcatca

SEQ ID NO: 761034 - DNA, 33 bp, Homo sapien
gggcctattggtagaatgttattgaattcatca

SEQ ID NO: 761035 - DNA, 33 bp, Homo sapien
acataaaacctgatcaactgttcttagataacc

SEQ ID NO: 761036 - DNA, 33 bp, Homo sapien
acataaaacctgatcatctgttcttagataacc

SEQ ID NO: 761037 - DNA, 33 bp, Homo sapien
ttttaaggatattatcaattataggcaagtgag

SEQ ID NO: 761038 - DNA, 33 bp, Homo sapien
ttttaaggatattatccattataggcaagtgag

SEQ ID NO: 761039 - DNA, 33 bp, Homo sapien
agtggtcatttttggagatttacaccctaattc

SEQ ID NO: 761040 - DNA, 33 bp, Homo sapien
agtggtcatttttggatatttacaccctaattc

SEQ ID NO: 761041 - DNA, 33 bp, Homo sapien
acatagatacctcttacatggatcagattgaat

SEQ ID NO: 761042 - DNA, 33 bp, Homo sapien
acatagatacctcttatatggatcagattgaat

SEQ ID NO: 761043 - DNA, 33 bp, Homo sapien
attagcttcctgtgacagcctgtacaaatgggt

SEQ ID NO: 761044 - DNA, 33 bp, Homo sapien
attagcttcctgtgactgcctgtacaaatgggt

SEQ ID NO: 761045 - DNA, 33 bp, Homo sapien
ggattgactaaaataacgaagaatgcagatata

SEQ ID NO: 761046 - DNA, 33 bp, Homo sapien
ggattgactaaaataatgaagaatgcagatata

SEQ ID NO: 761047 - DNA, 33 bp, Homo sapien
tagactcaatatcactgaagtcaaaacacctgg

SEQ ID NO: 761048 - DNA, 33 bp, Homo sapien
tagactcaatatcacttaagtcaaaacacctgg

SEQ ID NO: 761049 - DNA, 33 bp, Homo sapien
attatattgatttgaaaaaaatacagcataact

SEQ ID NO: 761050 - DNA, 33 bp, Homo sapien
attatattgatttgaagaaaatacagcataact

SEQ ID NO: 761051 - DNA, 33 bp, Homo sapien
gagtagtgctttgtgccgaaatgttatgatggc

SEQ ID NO: 761052 - DNA, 33 bp, Homo sapien
gagtagtgctttgtgctgaaatgttatgatggc

SEQ ID NO: 761053 - DNA, 33 bp, Homo sapien
agaatggaggttaagacgtttctaagtaaagat

SEQ ID NO: 761054 - DNA, 33 bp, Homo sapien
agaatggaggttaagatgtttctaagtaaagat

SEQ ID NO: 761055 - DNA, 33 bp, Homo sapien
tctttcttccttgtacacgtcaaaatcctgatt

SEQ ID NO: 761056 - DNA, 33 bp, Homo sapien
tctttcttccttgtacgcgtcaaaatcctgatt

SEQ ID NO: 761057 - DNA, 33 bp, Homo sapien
attcacttattctctcccctccagctttagtcc

SEQ ID NO: 761058 - DNA, 33 bp, Homo sapien
attcacttattctctctcctccagctttagtcc

SEQ ID NO: 761059 - DNA, 33 bp, Homo sapien
aatgaatattctcagacccaataccagaactac

SEQ ID NO: 761060 - DNA, 33 bp, Homo sapien
aatgaatattctcagatccaataccagaactac

SEQ ID NO: 761061 - DNA, 33 bp, Homo sapien
aagaaaaagatcagcaagttagagaaaaagtaa

SEQ ID NO: 761062 - DNA, 33 bp, Homo sapien
aagaaaaagatcagcaggttagagaaaaagtaa

SEQ ID NO: 761063 - DNA, 33 bp, Homo sapien
ggtgaaactggttacacagactggttatattta

SEQ ID NO: 761064 - DNA, 33 bp, Homo sapien
ggtgaaactggttacagagactggttatattta

SEQ ID NO: 761065 - DNA, 33 bp, Homo sapien
tgagaaaaaatatgacaggagaatatacaccac

SEQ ID NO: 761066 - DNA, 33 bp, Homo sapien
tgagaaaaaatatgactggagaatatacaccac

SEQ ID NO: 761067 - DNA, 33 bp, Homo sapien
gaatccttttaccctcaagattcctatgccata

SEQ ID NO: 761068 - DNA, 33 bp, Homo sapien
gaatccttttaccctcgagattcctatgccata

SEQ ID NO: 761069 - DNA, 33 bp, Homo sapien
cacaaggtagagtcaaaagagcaaatgatcagc

SEQ ID NO: 761070 - DNA, 33 bp, Homo sapien
cacaaggtagagtcaagagagcaaatgatcagc

SEQ ID NO: 761071 - DNA, 33 bp, Homo sapien
tgatatatttggatgccaggttacaagtgatat

SEQ ID NO: 761072 - DNA, 33 bp, Homo sapien
tgatatatttggatgctaggttacaagtgatat

SEQ ID NO: 761073 - DNA, 33 bp, Homo sapien
tccaaagacccttgaaaaatgactatgtaatta

SEQ ID NO: 761074 - DNA, 33 bp, Homo sapien
tccaaagacccttgaagaatgactatgtaatta

SEQ ID NO: 761075 - DNA, 33 bp, Homo sapien
atgagatcatgtgagaaaagaatttacaatggg

SEQ ID NO: 761076 - DNA, 33 bp, Homo sapien
atgagatcatgtgagagaagaatttacaatggg

SEQ ID NO: 761077 - DNA, 33 bp, Homo sapien
aatctgacacaggttccaggatgagtggacaag

SEQ ID NO: 761078 - DNA, 33 bp, Homo sapien
aatctgacacaggttctaggatgagtggacaag

SEQ ID NO: 761079 - DNA, 33 bp, Homo sapien
ctagacttttctgccacgtaaactaagactgat

SEQ ID NO: 761080 - DNA, 33 bp, Homo sapien
ctagacttttctgccatgtaaactaagactgat

SEQ ID NO: 761081 - DNA, 33 bp, Homo sapien
aaacagaataaaaaaggcagaaatcactttctg

SEQ ID NO: 761082 - DNA, 33 bp, Homo sapien
aaacagaataaaaaagtcagaaatcactttctg

SEQ ID NO: 761083 - DNA, 33 bp, Homo sapien
cagtgagccagagtcacgaactttaataaaaga

SEQ ID NO: 761084 - DNA, 33 bp, Homo sapien
cagtgagccagagtcatgaactttaataaaaga

SEQ ID NO: 761085 - DNA, 33 bp, Homo sapien
agcatatggccctggaatatatacccaatttca

SEQ ID NO: 761086 - DNA, 33 bp, Homo sapien
agcatatggccctggattatatacccaatttca

SEQ ID NO: 761087 - DNA, 33 bp, Homo sapien
ttaattcctgaagtaacgtttgctttttctttt

SEQ ID NO: 761088 - DNA, 33 bp, Homo sapien
ttaattcctgaagtaatgtttgctttttctttt

SEQ ID NO: 761089 - DNA, 33 bp, Homo sapien
aagtcttctttctgtacataatgcaactgttgt

SEQ ID NO: 761090 - DNA, 33 bp, Homo sapien
aagtcttctttctgtatataatgcaactgttgt

SEQ ID NO: 761091 - DNA, 33 bp, Homo sapien
ctcagtggagaaagcaatattgatacagtacca

SEQ ID NO: 761092 - DNA, 33 bp, Homo sapien
ctcagtggagaaagcagtattgatacagtacca

SEQ ID NO: 761093 - DNA, 33 bp, Homo sapien
tttaaaacaggacacaatgaaagatgcaataga

SEQ ID NO: 761094 - DNA, 33 bp, Homo sapien
tttaaaacaggacacagtgaaagatgcaataga

SEQ ID NO: 761095 - DNA, 33 bp, Homo sapien
ttaccacaagtatattaaaacatccgaggagtt

SEQ ID NO: 761096 - DNA, 33 bp, Homo sapien
ttaccacaagtatattgaaacatccgaggagtt

SEQ ID NO: 761097 - DNA, 33 bp, Homo sapien
agtctaaatgcgcagaagcatcaagtgtagaca

SEQ ID NO: 761098 - DNA, 33 bp, Homo sapien
agtctaaatgcgcagaggcatcaagtgtagaca

SEQ ID NO: 761099 - DNA, 33 bp, Homo sapien
gatatcacctttttagccaacgatgctctgcag

SEQ ID NO: 761100 - DNA, 33 bp, Homo sapien
gatatcacctttttaggcaacgatgctctgcag

SEQ ID NO: 761101 - DNA, 33 bp, Homo sapien
atttggtaaagttgaagtaatagatcccatgct

SEQ ID NO: 761102 - DNA, 33 bp, Homo sapien
atttggtaaagttgaattaatagatcccatgct

SEQ ID NO: 761103 - DNA, 33 bp, Homo sapien
gctggagtcacttagacagaaaaggaaagcaat

SEQ ID NO: 761104 - DNA, 33 bp, Homo sapien
gctggagtcacttagagagaaaaggaaagcaat

SEQ ID NO: 761105 - DNA, 33 bp, Homo sapien
tattaattttttcaggccattgtttcattgatc

SEQ ID NO: 761106 - DNA, 33 bp, Homo sapien
tattaattttttcaggtcattgtttcattgatc

SEQ ID NO: 761107 - DNA, 33 bp, Homo sapien
aaactcaactgaaagagaactgaaactctttgg

SEQ ID NO: 761108 - DNA, 33 bp, Homo sapien
aaactcaactgaaagataactgaaactctttgg

SEQ ID NO: 761109 - DNA, 33 bp, Homo sapien
aacatggtcgccaaaaatcagagccttatgttt

SEQ ID NO: 761110 - DNA, 33 bp, Homo sapien
aacatggtcgccaaaattcagagccttatgttt

SEQ ID NO: 761111 - DNA, 33 bp, Homo sapien
acatatccctgaataccattgtccagttccttc

SEQ ID NO: 761112 - DNA, 33 bp, Homo sapien
acatatccctgaatactattgtccagttccttc

SEQ ID NO: 761113 - DNA, 33 bp, Homo sapien
ttacttattggttatacgcctcactcatggtct

SEQ ID NO: 761114 - DNA, 33 bp, Homo sapien
ttacttattggttatatgcctcactcatggtct

SEQ ID NO: 761115 - DNA, 33 bp, Homo sapien
ttgtttatttgttttacgaatggggtctcacta

SEQ ID NO: 761116 - DNA, 33 bp, Homo sapien
ttgtttatttgttttatgaatggggtctcacta

SEQ ID NO: 761117 - DNA, 33 bp, Homo sapien
tgattaagaatcaaacaaggtaaggagagagct

SEQ ID NO: 761118 - DNA, 33 bp, Homo sapien
tgattaagaatcaaacgaggtaaggagagagct

SEQ ID NO: 761119 - DNA, 33 bp, Homo sapien
aacatggctaagaatgaagtttaccctctcatg

SEQ ID NO: 761120 - DNA, 33 bp, Homo sapien
aacatggctaagaatggagtttaccctctcatg

SEQ ID NO: 761121 - DNA, 33 bp, Homo sapien
aaataacttgtaatgaaacttgggcaagagaaa

SEQ ID NO: 761122 - DNA, 33 bp, Homo sapien
aaataacttgtaatgagacttgggcaagagaaa

SEQ ID NO: 761123 - DNA, 33 bp, Homo sapien
tgaacatgtcttatgacggttctatttaattgg

SEQ ID NO: 761124 - DNA, 33 bp, Homo sapien
tgaacatgtcttatgatggttctatttaattgg

SEQ ID NO: 761125 - DNA, 33 bp, Homo sapien
gttttgattcacatgagaagaactatgtaagtg

SEQ ID NO: 761126 - DNA, 33 bp, Homo sapien
gttttgattcacatgataagaactatgtaagtg

SEQ ID NO: 761127 - DNA, 33 bp, Homo sapien
cgtgaacattagcatcaaaataaaagcatagtc

SEQ ID NO: 761128 - DNA, 33 bp, Homo sapien
cgtgaacattagcatcgaaataaaagcatagtc

SEQ ID NO: 761129 - DNA, 33 bp, Homo sapien
gctttattttttagccacaccatttactgaatt

SEQ ID NO: 761130 - DNA, 33 bp, Homo sapien
gctttattttttagccgcaccatttactgaatt

SEQ ID NO: 761131 - DNA, 33 bp, Homo sapien
tatccatatctacatcacctaacacagtgtagc

SEQ ID NO: 761132 - DNA, 33 bp, Homo sapien
tatccatatctacatctcctaacacagtgtagc

SEQ ID NO: 761133 - DNA, 33 bp, Homo sapien
gagcttcttttgtacaaatcctagcttcacctc

SEQ ID NO: 761134 - DNA, 33 bp, Homo sapien
gagcttcttttgtacacatcctagcttcacctc

SEQ ID NO: 761135 - DNA, 33 bp, Homo sapien
aaataaaagtggaaaaaatcatgtcggagtgta

SEQ ID NO: 761136 - DNA, 33 bp, Homo sapien
aaataaaagtggaaaagatcatgtcggagtgta

SEQ ID NO: 761137 - DNA, 33 bp, Homo sapien
ttattctggaacatgaacaaagagagccacagg

SEQ ID NO: 761138 - DNA, 33 bp, Homo sapien
ttattctggaacatgaccaaagagagccacagg

SEQ ID NO: 761139 - DNA, 33 bp, Homo sapien
ttccagatgagcaagcacttgggaataaattgg

SEQ ID NO: 761140 - DNA, 33 bp, Homo sapien
ttccagatgagcaagcgcttgggaataaattgg

SEQ ID NO: 761141 - DNA, 33 bp, Homo sapien
aattaaactgacagaaaaattgcttttccagat

SEQ ID NO: 761142 - DNA, 33 bp, Homo sapien
aattaaactgacagaacaattgcttttccagat

SEQ ID NO: 761143 - DNA, 33 bp, Homo sapien
tgtcttgtattaggacaatggttatcttatctg

SEQ ID NO: 761144 - DNA, 33 bp, Homo sapien
tgtcttgtattaggaccatggttatcttatctg

SEQ ID NO: 761145 - DNA, 33 bp, Homo sapien
cattaagtaatactcaaaaagtcaactgcatta

SEQ ID NO: 761146 - DNA, 33 bp, Homo sapien
cattaagtaatactcagaaagtcaactgcatta

SEQ ID NO: 761147 - DNA, 33 bp, Homo sapien
tatggttgtaatggacaaaaaaactcaattctt

SEQ ID NO: 761148 - DNA, 33 bp, Homo sapien
tatggttgtaatggaccaaaaaactcaattctt

SEQ ID NO: 761149 - DNA, 33 bp, Homo sapien
cagagtgggcgagcatcaggaaaggtaagagga

SEQ ID NO: 761150 - DNA, 33 bp, Homo sapien
cagagtgggcgagcatgaggaaaggtaagagga

SEQ ID NO: 761151 - DNA, 33 bp, Homo sapien
ttacatacccgtttacccactagtcctacacgt

SEQ ID NO: 761152 - DNA, 33 bp, Homo sapien
ttacatacccgtttacgcactagtcctacacgt

SEQ ID NO: 761153 - DNA, 33 bp, Homo sapien
ccatcttgaagaataaacaaacagactatttgc

SEQ ID NO: 761154 - DNA, 33 bp, Homo sapien
ccatcttgaagaataagcaaacagactatttgc

SEQ ID NO: 761155 - DNA, 33 bp, Homo sapien
accatatcaggatttgcattagtatgttttcat

SEQ ID NO: 761156 - DNA, 33 bp, Homo sapien
accatatcaggatttgtattagtatgttttcat

SEQ ID NO: 761157 - DNA, 33 bp, Homo sapien
aagagtcaaagtaatcccatttccattggccag

SEQ ID NO: 761158 - DNA, 33 bp, Homo sapien
aagagtcaaagtaatctcatttccattggccag

SEQ ID NO: 761159 - DNA, 33 bp, Homo sapien
taattcaatcatcttccaccatgtctgtcccac

SEQ ID NO: 761160 - DNA, 33 bp, Homo sapien
taattcaatcatcttctaccatgtctgtcccac

SEQ ID NO: 761161 - DNA, 33 bp, Homo sapien
atagtgatgtgaataacaaggtccaggctaagg

SEQ ID NO: 761162 - DNA, 33 bp, Homo sapien
atagtgatgtgaataataaggtccaggctaagg

SEQ ID NO: 761163 - DNA, 33 bp, Homo sapien
ttctggcctgtagagaatatgatcaatacagtt

SEQ ID NO: 761164 - DNA, 33 bp, Homo sapien
ttctggcctgtagagactatgatcaatacagtt

SEQ ID NO: 761165 - DNA, 33 bp, Homo sapien
ttagacaggtcttcatcacccaggactcataga

SEQ ID NO: 761166 - DNA, 33 bp, Homo sapien
ttagacaggtcttcattacccaggactcataga

SEQ ID NO: 761167 - DNA, 33 bp, Homo sapien
gatttaattttgcacaatcaagttatctatact

SEQ ID NO: 761168 - DNA, 33 bp, Homo sapien
gatttaattttgcacattcaagttatctatact

SEQ ID NO: 761169 - DNA, 33 bp, Homo sapien
ttttacactttctactaaatctcagactctcat

SEQ ID NO: 761170 - DNA, 33 bp, Homo sapien
ttttacactttctactgaatctcagactctcat

SEQ ID NO: 761171 - DNA, 33 bp, Homo sapien
agtttcagatgtcaaaaaaactgacagcaggta

SEQ ID NO: 761172 - DNA, 33 bp, Homo sapien
agtttcagatgtcaaacaaactgacagcaggta

SEQ ID NO: 761173 - DNA, 33 bp, Homo sapien
gataaaaattatgaggccaatttgtttataaga

SEQ ID NO: 761174 - DNA, 33 bp, Homo sapien
gataaaaattatgaggtcaatttgtttataaga

SEQ ID NO: 761175 - DNA, 33 bp, Homo sapien
gatcaaaatgaagttcactatacgctgagcaga

SEQ ID NO: 761176 - DNA, 33 bp, Homo sapien
gatcaaaatgaagttctctatacgctgagcaga

SEQ ID NO: 761177 - DNA, 33 bp, Homo sapien
taaggtactgaagtaaatcattctttagcgatc

SEQ ID NO: 761178 - DNA, 33 bp, Homo sapien
taaggtactgaagtaagtcattctttagcgatc

SEQ ID NO: 761179 - DNA, 33 bp, Homo sapien
ccaacttggcaacaaactgtgtgcagcctctag

SEQ ID NO: 761180 - DNA, 33 bp, Homo sapien
ccaacttggcaacaaattgtgtgcagcctctag

SEQ ID NO: 761181 - DNA, 33 bp, Homo sapien
taagagctgtgctatacggaaaaaacacacctg

SEQ ID NO: 761182 - DNA, 33 bp, Homo sapien
taagagctgtgctatatggaaaaaacacacctg

SEQ ID NO: 761183 - DNA, 33 bp, Homo sapien
acaatgtgtagaatcaatgagacaagaatatac

SEQ ID NO: 761184 - DNA, 33 bp, Homo sapien
acaatgtgtagaatcagtgagacaagaatatac

SEQ ID NO: 761185 - DNA, 33 bp, Homo sapien
cattgtctcgatgtaccatagctaatttattca

SEQ ID NO: 761186 - DNA, 33 bp, Homo sapien
cattgtctcgatgtactatagctaatttattca

SEQ ID NO: 761187 - DNA, 33 bp, Homo sapien
tcctttggcagggctacgacagctggtgtgaga

SEQ ID NO: 761188 - DNA, 33 bp, Homo sapien
tcctttggcagggctatgacagctggtgtgaga

SEQ ID NO: 761189 - DNA, 33 bp, Homo sapien
tgaaacactagctctgacaaagtttacaacaat

SEQ ID NO: 761190 - DNA, 33 bp, Homo sapien
tgaaacactagctctggcaaagtttacaacaat

SEQ ID NO: 761191 - DNA, 33 bp, Homo sapien
aaaggaacaccttcataagcaccgaaagtcaga

SEQ ID NO: 761192 - DNA, 33 bp, Homo sapien
aaaggaacaccttcatgagcaccgaaagtcaga

SEQ ID NO: 761193 - DNA, 33 bp, Homo sapien; identical to SEQ ID NO: 761191

SEQ ID NO: 761194 - DNA, 33 bp, Homo sapien; identical to SEQ ID NO: 761192

SEQ ID NO: 761195 - DNA, 33 bp, Homo sapien
aaagtaatggcaaaaaatcacccatcccagggg

SEQ ID NO: 761196 - DNA, 33 bp, Homo sapien
aaagtaatggcaaaaattcacccatcccagggg

SEQ ID NO: 761197 - DNA, 33 bp, Homo sapien
taaggaaacttgaaagccagggtaggccaaaaa

SEQ ID NO: 761198 - DNA, 33 bp, Homo sapien
taaggaaacttgaaaggcagggtaggccaaaaa

SEQ ID NO: 761199 - DNA, 33 bp, Homo sapien
gttaactggacctagaaaaaatgtactggacaa

SEQ ID NO: 761200 - DNA, 33 bp, Homo sapien
gttaactggacctagagaaaatgtactggacaa

SEQ ID NO: 761201 - DNA, 33 bp, Homo sapien
ctgtatatcctaactaaaacaatcacacaaaag

SEQ ID NO: 761202 - DNA, 33 bp, Homo sapien
ctgtatatcctaactagaacaatcacacaaaag

SEQ ID NO: 761203 - DNA, 33 bp, Homo sapien
attgtagaaagacgacagaaaaataacagaaga

SEQ ID NO: 761204 - DNA, 33 bp, Homo sapien
attgtagaaagacgacggaaaaataacagaaga

SEQ ID NO: 761205 - DNA, 33 bp, Homo sapien
gagaatccactggaaaatcttactccagataag

SEQ ID NO: 761206 - DNA, 33 bp, Homo sapien
gagaatccactggaaactcttactccagataag

SEQ ID NO: 761207 - DNA, 33 bp, Homo sapien
tcttctggttcctaataaatttccatcacactc

SEQ ID NO: 761208 - DNA, 33 bp, Homo sapien
tcttctggttcctaatgaatttccatcacactc

SEQ ID NO: 761209 - DNA, 33 bp, Homo sapien
atcctttattgaacacacttttttaatggcaga

SEQ ID NO: 761210 - DNA, 33 bp, Homo sapien
atcctttattgaacacgcttttttaatggcaga

SEQ ID NO: 761211 - DNA, 33 bp, Homo sapien
atttatatctgtttaaccatggatgtgttcaag

SEQ ID NO: 761212 - DNA, 33 bp, Homo sapien
atttatatctgtttaatcatggatgtgttcaag

SEQ ID NO: 761213 - DNA, 33 bp, Homo sapien
tgtgatgtcatcgatacaataaaacaaggtgat

SEQ ID NO: 761214 - DNA, 33 bp, Homo sapien
tgtgatgtcatcgatataataaaacaaggtgat

SEQ ID NO: 761215 - DNA, 33 bp, Homo sapien
agttaacagaactcagacacatttgcacagtta

SEQ ID NO: 761216 - DNA, 33 bp, Homo sapien
agttaacagaactcaggcacatttgcacagtta

SEQ ID NO: 761217 - DNA, 33 bp, Homo sapien
tcttatctgatctaccccattaactcttcttat

SEQ ID NO: 761218 - DNA, 33 bp, Homo sapien
tcttatctgatctacctcattaactcttcttat

SEQ ID NO: 761219 - DNA, 33 bp, Homo sapien
ttttgattaaagggaaattcaaaaagtggcagc

SEQ ID NO: 761220 - DNA, 33 bp, Homo sapien
ttttgattaaagggaacttcaaaaagtggcagc

SEQ ID NO: 761221 - DNA, 33 bp, Homo sapien
agagctaactctgtaccggcactgaggtacttc

SEQ ID NO: 761222 - DNA, 33 bp, Homo sapien
agagctaactctgtactggcactgaggtacttc

SEQ ID NO: 761223 - DNA, 33 bp, Homo sapien
cataggttatgccaaaagaccaagaaaaaatca

SEQ ID NO: 761224 - DNA, 33 bp, Homo sapien
cataggttatgccaaacgaccaagaaaaaatca

SEQ ID NO: 761225 - DNA, 33 bp, Homo sapien
ctataagcctttgataaagaggaatttgcttgg

SEQ ID NO: 761226 - DNA, 33 bp, Homo sapien
ctataagcctttgatagagaggaatttgcttgg

SEQ ID NO: 761227 - DNA, 33 bp, Homo sapien
gacggaggataaaatacgagtcagtggttgagg

SEQ ID NO: 761228 - DNA, 33 bp, Homo sapien
gacggaggataaaatatgagtcagtggttgagg

SEQ ID NO: 761229 - DNA, 33 bp, Homo sapien
ggaatggagagaagagaatatgaagtggttagg

SEQ ID NO: 761230 - DNA, 33 bp, Homo sapien
ggaatggagagaagaggatatgaagtggttagg

SEQ ID NO: 761231 - DNA, 33 bp, Homo sapien
ttaaatctttgacacccgaagaacccacaatcc

SEQ ID NO: 761232 - DNA, 33 bp, Homo sapien
ttaaatctttgacacctgaagaacccacaatcc

SEQ ID NO: 761233 - DNA, 33 bp, Homo sapien
gccctggcaaagactaactactctctttaattc

SEQ ID NO: 761234 - DNA, 33 bp, Homo sapien
gccctggcaaagactagctactctctttaattc

SEQ ID NO: 761235 - DNA, 33 bp, Homo sapien
gacaaacagtaagagaaagactagctagacagg

SEQ ID NO: 761236 - DNA, 33 bp, Homo sapien
gacaaacagtaagagatagactagctagacagg

SEQ ID NO: 761237 - DNA, 33 bp, Homo sapien
actcatgcaactatgagagctgtaatgtccaaa

SEQ ID NO: 761238 - DNA, 33 bp, Homo sapien
actcatgcaactatgatagctgtaatgtccaaa

SEQ ID NO: 761239 - DNA, 33 bp, Homo sapien
gtggtagaaaaagatacgtggtagagttaatgg

SEQ ID NO: 761240 - DNA, 33 bp, Homo sapien
gtggtagaaaaagatatgtggtagagttaatgg

SEQ ID NO: 761241 - DNA, 33 bp, Homo sapien
tcatacgatttgaggaatatctgaggctaagag

SEQ ID NO: 761242 - DNA, 33 bp, Homo sapien
tcatacgatttgaggactatctgaggctaagag

SEQ ID NO: 761243 - DNA, 33 bp, Homo sapien
catccctatatcatcacgaagaattggcagtgt

SEQ ID NO: 761244 - DNA, 33 bp, Homo sapien
catccctatatcatcatgaagaattggcagtgt

SEQ ID NO: 761245 - DNA, 33 bp, Homo sapien
caggttaaaaagtagaatccttgtcaaagtcca

SEQ ID NO: 761246 - DNA, 33 bp, Homo sapien
caggttaaaaagtagagtccttgtcaaagtcca

SEQ ID NO: 761247 - DNA, 33 bp, Homo sapien
aaccagcagaaccttcaagaggatacaattttt

SEQ ID NO: 761248 - DNA, 33 bp, Homo sapien
aaccagcagaaccttcgagaggatacaattttt

SEQ ID NO: 761249 - DNA, 33 bp, Homo sapien
atgatattggacatgaagacaacgtgaataata

SEQ ID NO: 761250 - DNA, 33 bp, Homo sapien
atgatattggacatgaggacaacgtgaataata

SEQ ID NO: 761251 - DNA, 33 bp, Homo sapien
cttgctaaaatgtataggatcctcaagtatttc

SEQ ID NO: 761252 - DNA, 33 bp, Homo sapien
cttgctaaaatgtatatgatcctcaagtatttc

SEQ ID NO: 761253 - DNA, 33 bp, Homo sapien
aaagtcctactctgaccggtggaacacaatggt

SEQ ID NO: 761254 - DNA, 33 bp, Homo sapien
aaagtcctactctgactggtggaacacaatggt

SEQ ID NO: 761255 - DNA, 33 bp, Homo sapien
aaacagatgtttgagagattgtggagaaaagag

SEQ ID NO: 761256 - DNA, 33 bp, Homo sapien
aaacagatgtttgagatattgtggagaaaagag

SEQ ID NO: 761257 - DNA, 33 bp, Homo sapien
acaaccagatcattcagagaacaaatctgtttc

SEQ ID NO: 761258 - DNA, 33 bp, Homo sapien
acaaccagatcattcatagaacaaatctgtttc

SEQ ID NO: 761259 - DNA, 33 bp, Homo sapien
acatactgtcatgaagcattttgtctcatataa

SEQ ID NO: 761260 - DNA, 33 bp, Homo sapien
acatactgtcatgaaggattttgtctcatataa

SEQ ID NO: 761261 - DNA, 33 bp, Homo sapien
cctctcaacagaaacactggaataggaggcaat

SEQ ID NO: 761262 - DNA, 33 bp, Homo sapien
cctctcaacagaaacattggaataggaggcaat

SEQ ID NO: 761263 - DNA, 33 bp, Homo sapien
tgaatttcataatgagacccaaaatggaacaaa

SEQ ID NO: 761264 - DNA, 33 bp, Homo sapien
tgaatttcataatgaggcccaaaatggaacaaa

SEQ ID NO: 761265 - DNA, 33 bp, Homo sapien
tggggagtctgaaataacaacactcttaactga

SEQ ID NO: 761266 - DNA, 33 bp, Homo sapien
tggggagtctgaaatagcaacactcttaactga

SEQ ID NO: 761267 - DNA, 33 bp, Homo sapien
tatagcaaaatgaaaaacagcataggtatagag

SEQ ID NO: 761268 - DNA, 33 bp, Homo sapien
tatagcaaaatgaaaagcagcataggtatagag

SEQ ID NO: 761269 - DNA, 33 bp, Homo sapien
cataaagctccaaatgcatatattggcagttaa

SEQ ID NO: 761270 - DNA, 33 bp, Homo sapien
cataaagctccaaatgtatatattggcagttaa

SEQ ID NO: 761271 - DNA, 33 bp, Homo sapien
ttatatgtctgtagcaactactttatccaaatt

SEQ ID NO: 761272 - DNA, 33 bp, Homo sapien
ttatatgtctgtagcacctactttatccaaatt

SEQ ID NO: 761273 - DNA, 33 bp, Homo sapien
tatgttctatcatctgcaatcaaatatcaccat

SEQ ID NO: 761274 - DNA, 33 bp, Homo sapien
tatgttctatcatctggaatcaaatatcaccat

SEQ ID NO: 761275 - DNA, 33 bp, Homo sapien
tgcatagtctgttatacgtacctatgtgccttt

SEQ ID NO: 761276 - DNA, 33 bp, Homo sapien
tgcatagtctgttatatgtacctatgtgccttt

SEQ ID NO: 761277 - DNA, 33 bp, Homo sapien
attctattgatcacaggataactattccttcaa

SEQ ID NO: 761278 - DNA, 33 bp, Homo sapien
attctattgatcacagtataactattccttcaa

SEQ ID NO: 761279 - DNA, 33 bp, Homo sapien
ttaaggatttttattccctcagctactatgcca

SEQ ID NO: 761280 - DNA, 33 bp, Homo sapien
ttaaggatttttattctctcagctactatgcca

SEQ ID NO: 761281 - DNA, 33 bp, Homo sapien
aaagggtcagaaattgaacctagacctgtctga

SEQ ID NO: 761282 - DNA, 33 bp, Homo sapien
aaagggtcagaaattgtacctagacctgtctga

SEQ ID NO: 761283 - DNA, 33 bp, Homo sapien
tgccttcacacagtgcaaatttaaagaagttac

SEQ ID NO: 761284 - DNA, 33 bp, Homo sapien
tgccttcacacagtgcgaatttaaagaagttac

SEQ ID NO: 761285 - DNA, 33 bp, Homo sapien
aaattaaaaacatgaaataattagaaagttgaa

SEQ ID NO: 761286 - DNA, 33 bp, Homo sapien
aaattaaaaacatgaagtaattagaaagttgaa

SEQ ID NO: 761287 - DNA, 33 bp, Homo sapien
aattttctgaagcaaacagtcgtgctttacagt

SEQ ID NO: 761288 - DNA, 33 bp, Homo sapien
aattttctgaagcaaatagtcgtgctttacagt

SEQ ID NO: 761289 - DNA, 33 bp, Homo sapien
tgtaaggggtttctaaactttctgagatatgca

SEQ ID NO: 761290 - DNA, 33 bp, Homo sapien
tgtaaggggtttctaatctttctgagatatgca

SEQ ID NO: 761291 - DNA, 33 bp, Homo sapien
taaatgaaaatccttcgcaaaagtctccgtgaa

SEQ ID NO: 761292 - DNA, 33 bp, Homo sapien
taaatgaaaatccttctcaaaagtctccgtgaa

SEQ ID NO: 761293 - DNA, 33 bp, Homo sapien
ccatgtttgaggaataaatttaaaagtcggtct

SEQ ID NO: 761294 - DNA, 33 bp, Homo sapien
ccatgtttgaggaatacatttaaaagtcggtct

SEQ ID NO: 761295 - DNA, 33 bp, Homo sapien
ttctaatagtgagtaaatcgaattaagtgttac

SEQ ID NO: 761296 - DNA, 33 bp, Homo sapien
ttctaatagtgagtaagtcgaattaagtgttac

SEQ ID NO: 761297 - DNA, 33 bp, Homo sapien
ggggaacccggttaccacagaaagcagttgaga

SEQ ID NO: 761298 - DNA, 33 bp, Homo sapien
ggggaacccggttaccgcagaaagcagttgaga

SEQ ID NO: 761299 - DNA, 33 bp, Homo sapien
cctgtttctttctgcgccacccaaattattgat

SEQ ID NO: 761300 - DNA, 33 bp, Homo sapien
cctgtttctttctgcgtcacccaaattattgat

SEQ ID NO: 761301 - DNA, 33 bp, Homo sapien
actttttcttagctacaaaatcacctttccata

SEQ ID NO: 761302 - DNA, 33 bp, Homo sapien
actttttcttagctacgaaatcacctttccata

SEQ ID NO: 761303 - DNA, 33 bp, Homo sapien
aagtgatggattgtgagatatagtttggctctt

SEQ ID NO: 761304 - DNA, 33 bp, Homo sapien
aagtgatggattgtgatatatagtttggctctt

SEQ ID NO: 761305 - DNA, 33 bp, Homo sapien
agacagaatatgttaccattacattgcctttat

SEQ ID NO: 761306 - DNA, 33 bp, Homo sapien
agacagaatatgttacgattacattgcctttat

SEQ ID NO: 761307 - DNA, 33 bp, Homo sapien
agggaaataaatggccaatgttaagttgagtag

SEQ ID NO: 761308 - DNA, 33 bp, Homo sapien
agggaaataaatggccgatgttaagttgagtag

SEQ ID NO: 761309 - DNA, 33 bp, Homo sapien
gatcaaagtgttcaaaaaataagacttatcaga

SEQ ID NO: 761310 - DNA, 33 bp, Homo sapien
gatcaaagtgttcaaagaataagacttatcaga

SEQ ID NO: 761311 - DNA, 33 bp, Homo sapien
aagattgtaagaaaaaaaggacagtatcaaatt

SEQ ID NO: 761312 - DNA, 33 bp, Homo sapien
aagattgtaagaaaaacaggacagtatcaaatt

SEQ ID NO: 761313 - DNA, 33 bp, Homo sapien
aattagtcttccacatcaagtcagttatccttt

SEQ ID NO: 761314 - DNA, 33 bp, Homo sapien
aattagtcttccacattaagtcagttatccttt

SEQ ID NO: 761315 - DNA, 33 bp, Homo sapien
taatgatctcagagcacaagagtagtgatgttg

SEQ ID NO: 761316 - DNA, 33 bp, Homo sapien
taatgatctcagagcataagagtagtgatgttg

SEQ ID NO: 761317 - DNA, 33 bp, Homo sapien
gcaaatgagtaaagaccgctatacacatcctat

SEQ ID NO: 761318 - DNA, 33 bp, Homo sapien
gcaaatgagtaaagactgctatacacatcctat

SEQ ID NO: 761319 - DNA, 33 bp, Homo sapien
gaataaaactcagtaacaggttatcacataaaa

SEQ ID NO: 761320 - DNA, 33 bp, Homo sapien
gaataaaactcagtaataggttatcacataaaa

SEQ ID NO: 761321 - DNA, 33 bp, Homo sapien
taaaagtttatttgacccacagctctagagact

SEQ ID NO: 761322 - DNA, 33 bp, Homo sapien
taaaagtttatttgactcacagctctagagact

SEQ ID NO: 761323 - DNA, 33 bp, Homo sapien
aagataatacatcaaaaattcttagtatacatt

SEQ ID NO: 761324 - DNA, 33 bp, Homo sapien
aagataatacatcaaacattcttagtatacatt

SEQ ID NO: 761325 - DNA, 33 bp, Homo sapien
acctcaccaaaatgtaaaaatcacttgtctgtt

SEQ ID NO: 761326 - DNA, 33 bp, Homo sapien
acctcaccaaaatgtagaaatcacttgtctgtt

SEQ ID NO: 761327 - DNA, 33 bp, Homo sapien
attgaatgatgattcaacatatgaggcaaaggg

SEQ ID NO: 761328 - DNA, 33 bp, Homo sapien
attgaatgatgattcagcatatgaggcaaaggg

SEQ ID NO: 761329 - DNA, 33 bp, Homo sapien
ccagctactgtaagcaacttcggcttcccaagt

SEQ ID NO: 761330 - DNA, 33 bp, Homo sapien
ccagctactgtaagcaccttcggcttcccaagt

SEQ ID NO: 761331 - DNA, 33 bp, Homo sapien
ccaagttcactagcaacttctacttttgctaat

SEQ ID NO: 761332 - DNA, 33 bp, Homo sapien
ccaagttcactagcaagttctacttttgctaat

SEQ ID NO: 761333 - DNA, 33 bp, Homo sapien; identical to SEQ ID NO: 761331

SEQ ID NO: 761334 - DNA, 33 bp, Homo sapien; identical to SEQ ID NO: 761332

SEQ ID NO: 761335 - DNA, 33 bp, Homo sapien
atattccctggtccaacctttgaaagttcaagt

SEQ ID NO: 761336 - DNA, 33 bp, Homo sapien
atattccctggtccaatctttgaaagttcaagt

SEQ ID NO: 761337 - DNA, 33 bp, Homo sapien
caacaaaagaagtggagagaggaaagagtaaat

SEQ ID NO: 761338 - DNA, 33 bp, Homo sapien
caacaaaagaagtggatagaggaaagagtaaat

SEQ ID NO: 761339 - DNA, 33 bp, Homo sapien
agttccaagaaaactcacgagtgattgtcatga

SEQ ID NO: 761340 - DNA, 33 bp, Homo sapien
agttccaagaaaactcccgagtgattgtcatga

SEQ ID NO: 761341 - DNA, 33 bp, Homo sapien
acacgacggtgatcccaatgagcctgtttcaga

SEQ ID NO: 761342 - DNA, 33 bp, Homo sapien
acacgacggtgatcccgatgagcctgtttcaga

SEQ ID NO: 761343 - DNA, 33 bp, Homo sapien; identical to SEQ ID NO: 761341

SEQ ID NO: 761344 - DNA, 33 bp, Homo sapien; identical to SEQ ID NO: 761342

SEQ ID NO: 761345 - DNA, 33 bp, Homo sapien
taccctttgatcatacgagggttgtcctacacg

SEQ ID NO: 761346 - DNA, 33 bp, Homo sapien
taccctttgatcatactagggttgtcctacacg

SEQ ID NO: 761347 - DNA, 33 bp, Homo sapien
aggaactgaaatatgacgttggtggaggagaac

SEQ ID NO: 761348 - DNA, 33 bp, Homo sapien
aggaactgaaatatgatgttggtggaggagaac

SEQ ID NO: 761349 - DNA, 33 bp, Homo sapien
caccttgtgccataaacttctgtgtgatatatg

SEQ ID NO: 761350 - DNA, 33 bp, Homo sapien
caccttgtgccataaagttctgtgtgatatatg

SEQ ID NO: 761351 - DNA, 33 bp, Homo sapien
gaggatgcatatctccccattccttaagtgcag

SEQ ID NO: 761352 - DNA, 33 bp, Homo sapien
gaggatgcatatctcctcattccttaagtgcag

SEQ ID NO: 761353 - DNA, 33 bp, Homo sapien
cacgttcatagaaacaaggaaaaggcactgagt

SEQ ID NO: 761354 - DNA, 33 bp, Homo sapien
cacgttcatagaaacagggaaaaggcactgagt

SEQ ID NO: 761355 - DNA, 33 bp, Homo sapien
ctactcagcagaatacaagcagaggtcagagaa

SEQ ID NO: 761356 - DNA, 33 bp, Homo sapien
ctactcagcagaatacgagcagaggtcagagaa

SEQ ID NO: 761357 - DNA, 33 bp, Homo sapien
taggaatagtctgaaaacctgcttaaatagaca

SEQ ID NO: 761358 - DNA, 33 bp, Homo sapien
taggaatagtctgaaaccctgcttaaatagaca

SEQ ID NO: 761359 - DNA, 33 bp, Homo sapien
acaggtctctgtaaccacatttcatcccataaa

SEQ ID NO: 761360 - DNA, 33 bp, Homo sapien
acaggtctctgtaaccgcatttcatcccataaa

SEQ ID NO: 761361 - DNA, 33 bp, Homo sapien
tatgcaccgattttaaccatatttgtataattt

SEQ ID NO: 761362 - DNA, 33 bp, Homo sapien
tatgcaccgattttaagcatatttgtataattt

SEQ ID NO: 761363 - DNA, 33 bp, Homo sapien
aggagaaatccaatgacctttaggactaggttc

SEQ ID NO: 761364 - DNA, 33 bp, Homo sapien
aggagaaatccaatgatctttaggactaggttc

SEQ ID NO: 761365 - DNA, 33 bp, Homo sapien
tatgtgcctctgtcatcacaaggagtctttatc

SEQ ID NO: 761366 - DNA, 33 bp, Homo sapien
tatgtgcctctgtcattacaaggagtctttatc

SEQ ID NO: 761367 - DNA, 33 bp, Homo sapien
ccccattaagccttgcacagatgacagattgct

SEQ ID NO: 761368 - DNA, 33 bp, Homo sapien
ccccattaagccttgcccagatgacagattgct

SEQ ID NO: 761369 - DNA, 33 bp, Homo sapien
gatacaacagtgaatacgttggaagcaccactc

SEQ ID NO: 761370 - DNA, 33 bp, Homo sapien
gatacaacagtgaatatgttggaagcaccactc

SEQ ID NO: 761371 - DNA, 33 bp, Homo sapien
tttgttaaatatgaaactctgttgatccatatg

SEQ ID NO: 761372 - DNA, 33 bp, Homo sapien
tttgttaaatatgaaattctgttgatccatatg

SEQ ID NO: 761373 - DNA, 33 bp, Homo sapien
aataagagttttttcaacatatctgcaaatttg

SEQ ID NO: 761374 - DNA, 33 bp, Homo sapien
aataagagttttttcagcatatctgcaaatttg

SEQ ID NO: 761375 - DNA, 33 bp, Homo sapien
cacacacatgcaattaacttcctctcaccagtg

SEQ ID NO: 761376 - DNA, 33 bp, Homo sapien
cacacacatgcaattagcttcctctcaccagtg

SEQ ID NO: 761377 - DNA, 33 bp, Homo sapien
tctctaaaatgttctacgtaagtcaaagggaag

SEQ ID NO: 761378 - DNA, 33 bp, Homo sapien
tctctaaaatgttctatgtaagtcaaagggaag

SEQ ID NO: 761379 - DNA, 33 bp, Homo sapien
gccttcagtgataaggaaagaatgaggtacaca

SEQ ID NO: 761380 - DNA, 33 bp, Homo sapien
gccttcagtgataagggaagaatgaggtacaca

SEQ ID NO: 761381 - DNA, 33 bp, Homo sapien
agtaaagaagaaaagtaacagagcagtaggtaa

SEQ ID NO: 761382 - DNA, 33 bp, Homo sapien
agtaaagaagaaaagtgacagagcagtaggtaa

SEQ ID NO: 761383 - DNA, 33 bp, Homo sapien
tcatttctccaagaaacactggttccttcgatt

SEQ ID NO: 761384 - DNA, 33 bp, Homo sapien
tcatttctccaagaaatactggttccttcgatt

SEQ ID NO: 761385 - DNA, 33 bp, Homo sapien
agaaacttggactgtgaaataaaaagagatctt

SEQ ID NO: 761386 - DNA, 33 bp, Homo sapien
agaaacttggactgtgtaataaaaagagatctt

SEQ ID NO: 761387 - DNA, 33 bp, Homo sapien
gtacaagtcagcattacccattatcttaattat

SEQ ID NO: 761388 - DNA, 33 bp, Homo sapien
gtacaagtcagcattatccattatcttaattat

SEQ ID NO: 761389 - DNA, 33 bp, Homo sapien
tagtttccacaaaaaaattcctgccttgcttca

SEQ ID NO: 761390 - DNA, 33 bp, Homo sapien
tagtttccacaaaaaatttcctgccttgcttca

SEQ ID NO: 761391 - DNA, 33 bp, Homo sapien
taattcttgcaaagcacctgagtaatttcctat

SEQ ID NO: 761392 - DNA, 33 bp, Homo sapien
taattcttgcaaagcatctgagtaatttcctat

SEQ ID NO: 761393 - DNA, 33 bp, Homo sapien
caaacatagaactttcccacagaatcttttcac

SEQ ID NO: 761394 - DNA, 33 bp, Homo sapien
caaacatagaactttctcacagaatcttttcac

SEQ ID NO: 761395 - DNA, 33 bp, Homo sapien
aacattcttctaaaatgactttcaatcatccct

SEQ ID NO: 761396 - DNA, 33 bp, Homo sapien
aacattcttctaaaattactttcaatcatccct

SEQ ID NO: 761397 - DNA, 33 bp, Homo sapien
cactggtgtaagtatacgagtccaaaagctgaa

SEQ ID NO: 761398 - DNA, 33 bp, Homo sapien
cactggtgtaagtataggagtccaaaagctgaa

SEQ ID NO: 761399 - DNA, 33 bp, Homo sapien
atcctgcaatccaatcaacacaatattaaccat

SEQ ID NO: 761400 - DNA, 33 bp, Homo sapien
atcctgcaatccaatcgacacaatattaaccat

SEQ ID NO: 761401 - DNA, 33 bp, Homo sapien
tggaagcagcttgggaaccacgtaacaggcaga

SEQ ID NO: 761402 - DNA, 33 bp, Homo sapien
tggaagcagcttgggatccacgtaacaggcaga

SEQ ID NO: 761403 - DNA, 33 bp, Homo sapien
ggcttatagcttgcacaccctggacctatggcc

SEQ ID NO: 761404 - DNA, 33 bp, Homo sapien
ggcttatagcttgcaccccctggacctatggcc

SEQ ID NO: 761405 - DNA, 33 bp, Homo sapien
gaaatgtggggttggaaggcctgaagtccctag

SEQ ID NO: 761406 - DNA, 33 bp, Homo sapien
gaaatgtggggttggagggcctgaagtccctag

SEQ ID NO: 761407 - DNA, 33 bp, Homo sapien
gttcattttaccaacacagcaatcagaatatag

SEQ ID NO: 761408 - DNA, 33 bp, Homo sapien
gttcattttaccaacagagcaatcagaatatag

SEQ ID NO: 761409 - DNA, 33 bp, Homo sapien
tcagtaatgatgggaaaaagtcatagtgttcag

SEQ ID NO: 761410 - DNA, 33 bp, Homo sapien
tcagtaatgatgggaagaagtcatagtgttcag

SEQ ID NO: 761411 - DNA, 33 bp, Homo sapien
gggttcttgcaccatcaaggattttaggacagg

SEQ ID NO: 761412 - DNA, 33 bp, Homo sapien
gggttcttgcaccatcgaggattttaggacagg

SEQ ID NO: 761413 - DNA, 33 bp, Homo sapien
cttatatagtaatatcacacagcaggatttaga

SEQ ID NO: 761414 - DNA, 33 bp, Homo sapien
cttatatagtaatatcgcacagcaggatttaga

SEQ ID NO: 761415 - DNA, 33 bp, Homo sapien
agaaggatggatacaaataagtcagactacaaa

SEQ ID NO: 761416 - DNA, 33 bp, Homo sapien
agaaggatggatacaagtaagtcagactacaaa

SEQ ID NO: 761417 - DNA, 33 bp, Homo sapien
ctttaaatgaatccgaagtccttatgatcagct

SEQ ID NO: 761418 - DNA, 33 bp, Homo sapien
ctttaaatgaatccgatgtccttatgatcagct

SEQ ID NO: 761419 - DNA, 33 bp, Homo sapien
gttgttttatgcaaaacatctatctgaaccatc

SEQ ID NO: 761420 - DNA, 33 bp, Homo sapien
gttgttttatgcaaaatatctatctgaaccatc

SEQ ID NO: 761421 - DNA, 33 bp, Homo sapien
ttatgtaggccagagaaggttatgggatgatat

SEQ ID NO: 761422 - DNA, 33 bp, Homo sapien
ttatgtaggccagagagggttatgggatgatat

SEQ ID NO: 761423 - DNA, 33 bp, Homo sapien
gggaaaacataagtcaactgcttatgaattagt

SEQ ID NO: 761424 - DNA, 33 bp, Homo sapien
gggaaaacataagtcagctgcttatgaattagt

SEQ ID NO: 761425 - DNA, 33 bp, Homo sapien
ataactgctcttgccacgcacattgcagcaaaa

SEQ ID NO: 761426 - DNA, 33 bp, Homo sapien
ataactgctcttgccatgcacattgcagcaaaa

SEQ ID NO: 761427 - DNA, 33 bp, Homo sapien
atcttgcttaataaaaactctaaaccagcatat

SEQ ID NO: 761428 - DNA, 33 bp, Homo sapien
atcttgcttaataaaacctctaaaccagcatat

SEQ ID NO: 761429 - DNA, 33 bp, Homo sapien
taatgggtccatggcaaaagtttgggttgccag

SEQ ID NO: 761430 - DNA, 33 bp, Homo sapien
taatgggtccatggcagaagtttgggttgccag

SEQ ID NO: 761431 - DNA, 33 bp, Homo sapien
cgccaggcaaagctcaatcacctgggaccccag

SEQ ID NO: 761432 - DNA, 33 bp, Homo sapien
cgccaggcaaagctcagtcacctgggaccccag

SEQ ID NO: 761433 - DNA, 33 bp, Homo sapien
actttgactggtaatacctctccatttctctag

SEQ ID NO: 761434 - DNA, 33 bp, Homo sapien
actttgactggtaatagctctccatttctctag

SEQ ID NO: 761435 - DNA, 33 bp, Homo sapien
catgcttttccatacaatgactgcaaagcgctg

SEQ ID NO: 761436 - DNA, 33 bp, Homo sapien
catgcttttccatacagtgactgcaaagcgctg

SEQ ID NO: 761437 - DNA, 33 bp, Homo sapien
caatcagaataatcaactgttggtggggtggct

SEQ ID NO: 761438 - DNA, 33 bp, Homo sapien
caatcagaataatcaattgttggtggggtggct

SEQ ID NO: 761439 - DNA, 33 bp, Homo sapien
gaaatatagagaacccccatgagaaactataca

SEQ ID NO: 761440 - DNA, 33 bp, Homo sapien
gaaatatagagaacccgcatgagaaactataca

SEQ ID NO: 761441 - DNA, 33 bp, Homo sapien
attgacattgttgttacaaattcttttcgagaa

SEQ ID NO: 761442 - DNA, 33 bp, Homo sapien
attgacattgttgttataaattcttttcgagaa

SEQ ID NO: 761443 - DNA, 33 bp, Homo sapien
atatgagatatgcaaacaggttgggacacgtca

SEQ ID NO: 761444 - DNA, 33 bp, Homo sapien
atatgagatatgcaaataggttgggacacgtca

SEQ ID NO: 761445 - DNA, 33 bp, Homo sapien
cattactaacgcttgaataaaatacaggttttc

SEQ ID NO: 761446 - DNA, 33 bp, Homo sapien
cattactaacgcttgattaaaatacaggttttc

SEQ ID NO: 761447 - DNA, 33 bp, Homo sapien
ataagaagcagctcccaaagttgaaaaaaaagg

SEQ ID NO: 761448 - DNA, 33 bp, Homo sapien
ataagaagcagctcccgaagttgaaaaaaaagg

SEQ ID NO: 761449 - DNA, 33 bp, Homo sapien
aagattaatttccagacaagaaacagaaagttt

SEQ ID NO: 761450 - DNA, 33 bp, Homo sapien
aagattaatttccagagaagaaacagaaagttt

SEQ ID NO: 761451 - DNA, 33 bp, Homo sapien
ctaggcaaggaaaataccatgtacttaatctaa

SEQ ID NO: 761452 - DNA, 33 bp, Homo sapien
ctaggcaaggaaaatatcatgtacttaatctaa

SEQ ID NO: 761453 - DNA, 33 bp, Homo sapien
ttctattgcagtgtacaaaactattgcaaacat

SEQ ID NO: 761454 - DNA, 33 bp, Homo sapien
ttctattgcagtgtacgaaactattgcaaacat

SEQ ID NO: 761455 - DNA, 33 bp, Homo sapien
atattgaatatactgaagactcagaagaaagta

SEQ ID NO: 761456 - DNA, 33 bp, Homo sapien
atattgaatatactgacgactcagaagaaagta

SEQ ID NO: 761457 - DNA, 33 bp, Homo sapien
tgacttctaagtaagcgcactgttcatggtgta

SEQ ID NO: 761458 - DNA, 33 bp, Homo sapien
tgacttctaagtaagctcactgttcatggtgta

SEQ ID NO: 761459 - DNA, 33 bp, Homo sapien
ccccatatactttctgacaaatacatccttgtt

SEQ ID NO: 761460 - DNA, 33 bp, Homo sapien
ccccatatactttctgtcaaatacatccttgtt

SEQ ID NO: 761461 - DNA, 33 bp, Homo sapien
aaaatatttactggcacctttaatattttgtgt

SEQ ID NO: 761462 - DNA, 33 bp, Homo sapien
aaaatatttactggcatctttaatattttgtgt

SEQ ID NO: 761463 - DNA, 33 bp, Homo sapien
atttaatacaatggagaagtgagtgaattattt

SEQ ID NO: 761464 - DNA, 33 bp, Homo sapien
atttaatacaatggaggagtgagtgaattattt

SEQ ID NO: 761465 - DNA, 33 bp, Homo sapien
taactgctaacattgaaatggactgtcataatc

SEQ ID NO: 761466 - DNA, 33 bp, Homo sapien
taactgctaacattgagatggactgtcataatc

SEQ ID NO: 761467 - DNA, 33 bp, Homo sapien
ttgctatcatgtctagccactttgtttttcaat

SEQ ID NO: 761468 - DNA, 33 bp, Homo sapien
ttgctatcatgtctagtcactttgtttttcaat

SEQ ID NO: 761469 - DNA, 33 bp, Homo sapien
gggaaatcgaaactgaaggcaccagatttggtg

SEQ ID NO: 761470 - DNA, 33 bp, Homo sapien
gggaaatcgaaactgacggcaccagatttggtg

SEQ ID NO: 761471 - DNA, 33 bp, Homo sapien
aacagaaaaggaaaaaaattctgaggagaaatt

SEQ ID NO: 761472 - DNA, 33 bp, Homo sapien
aacagaaaaggaaaaacattctgaggagaaatt

SEQ ID NO: 761473 - DNA, 33 bp, Homo sapien
gaagcccttggaaagaaagtcacttctggaact

SEQ ID NO: 761474 - DNA, 33 bp, Homo sapien
gaagcccttggaaagatagtcacttctggaact

SEQ ID NO: 761475 - DNA, 33 bp, Homo sapien
agagtggcaaagattaccctggcatataaatta

SEQ ID NO: 761476 - DNA, 33 bp, Homo sapien
agagtggcaaagattatcctggcatataaatta

SEQ ID NO: 761477 - DNA, 33 bp, Homo sapien
ccaagatatccacttacattttcatacatccgg

SEQ ID NO: 761478 - DNA, 33 bp, Homo sapien
ccaagatatccacttatattttcatacatccgg

SEQ ID NO: 761479 - DNA, 33 bp, Homo sapien
gccaacatccacaacactcttgtcaggattaaa

SEQ ID NO: 761480 - DNA, 33 bp, Homo sapien
gccaacatccacaacattcttgtcaggattaaa

SEQ ID NO: 761481 - DNA, 33 bp, Homo sapien
cggtgtgtgtaggcaaactcatgaaatatttaa

SEQ ID NO: 761482 - DNA, 33 bp, Homo sapien
cggtgtgtgtaggcaagctcatgaaatatttaa

SEQ ID NO: 761483 - DNA, 33 bp, Homo sapien
gttccattgtgtagtacgataaacttcattgac

SEQ ID NO: 761484 - DNA, 33 bp, Homo sapien
gttccattgtgtagtatgataaacttcattgac

SEQ ID NO: 761485 - DNA, 33 bp, Homo sapien
ttattctggatctttacggagttttgacagaga

SEQ ID NO: 761486 - DNA, 33 bp, Homo sapien
ttattctggatctttatggagttttgacagaga

SEQ ID NO: 761487 - DNA, 33 bp, Homo sapien
caaactatagaagaatcaaggagggctgggaaa

SEQ ID NO: 761488 - DNA, 33 bp, Homo sapien
caaactatagaagaatgaaggagggctgggaaa

SEQ ID NO: 761489 - DNA, 33 bp, Homo sapien
tttctgatactgaacaacttggtctttttcttt

SEQ ID NO: 761490 - DNA, 33 bp, Homo sapien
tttctgatactgaacatcttggtctttttcttt

SEQ ID NO: 761491 - DNA, 33 bp, Homo sapien
actccttataccaaaacctgtattagccaggga

SEQ ID NO: 761492 - DNA, 33 bp, Homo sapien
actccttataccaaaatctgtattagccaggga

SEQ ID NO: 761493 - DNA, 33 bp, Homo sapien
tctacagaacacgaaaccttgcacagttgtttc

SEQ ID NO: 761494 - DNA, 33 bp, Homo sapien
tctacagaacacgaaatcttgcacagttgtttc

SEQ ID NO: 761495 - DNA, 33 bp, Homo sapien
taccctgagcggatcaatccacattccatgcat

SEQ ID NO: 761496 - DNA, 33 bp, Homo sapien
taccctgagcggatcattccacattccatgcat

SEQ ID NO: 761497 - DNA, 33 bp, Homo sapien
agggactcatctcaaacgtaatgacacccttgt

SEQ ID NO: 761498 - DNA, 33 bp, Homo sapien
agggactcatctcaaatgtaatgacacccttgt

SEQ ID NO: 761499 - DNA, 33 bp, Homo sapien
ttcacatcatgaagaacagaaggtaaataggct

SEQ ID NO: 761500 - DNA, 33 bp, Homo sapien
ttcacatcatgaagaatagaaggtaaataggct

SEQ ID NO: 761501 - DNA, 33 bp, Homo sapien
cctggtaagttgtttaaatcatgttatacgtgc

SEQ ID NO: 761502 - DNA, 33 bp, Homo sapien
cctggtaagttgtttacatcatgttatacgtgc

SEQ ID NO: 761503 - DNA, 33 bp, Homo sapien
aaagtgactatcaagacagtaaacagacaaact

SEQ ID NO: 761504 - DNA, 33 bp, Homo sapien
aaagtgactatcaagagagtaaacagacaaact

SEQ ID NO: 761505 - DNA, 33 bp, Homo sapien
gttttaatattctgtaggtagctagtccgttat

SEQ ID NO: 761506 - DNA, 33 bp, Homo sapien
gttttaatattctgtatgtagctagtccgttat

SEQ ID NO: 761507 - DNA, 33 bp, Homo sapien
gttcttgttgtaatgcactagtcttatgaaatc

SEQ ID NO: 761508 - DNA, 33 bp, Homo sapien
gttcttgttgtaatgcgctagtcttatgaaatc

SEQ ID NO: 761509 - DNA, 33 bp, Homo sapien
gatgtgggaaatggggacaaagattaatttgta

SEQ ID NO: 761510 - DNA, 33 bp, Homo sapien
gatgtgggaaatggggtcaaagattaatttgta

SEQ ID NO: 761511 - DNA, 33 bp, Homo sapien
taagtctaaagtacagccactcatcatttacca

SEQ ID NO: 761512 - DNA, 33 bp, Homo sapien
taagtctaaagtacagtcactcatcatttacca

SEQ ID NO: 761513 - DNA, 33 bp, Homo sapien
acaaaatacaagagaccggatgtgttaaacaat

SEQ ID NO: 761514 - DNA, 33 bp, Homo sapien
acaaaatacaagagactggatgtgttaaacaat

SEQ ID NO: 761515 - DNA, 33 bp, Homo sapien
acttcagataaagcagcagtaattaccgcaaat

SEQ ID NO: 761516 - DNA, 33 bp, Homo sapien
acttcagataaagcaggagtaattaccgcaaat

SEQ ID NO: 761517 - DNA, 33 bp, Homo sapien
ggggctttttgcaaaaaaatacagtcatctgga

SEQ ID NO: 761518 - DNA, 33 bp, Homo sapien
ggggctttttgcaaaataatacagtcatctgga

SEQ ID NO: 761519 - DNA, 33 bp, Homo sapien
cgaatctgggctttacacttatgacctcatttt

SEQ ID NO: 761520 - DNA, 33 bp, Homo sapien
cgaatctgggctttacgcttatgacctcatttt

SEQ ID NO: 761521 - DNA, 33 bp, Homo sapien
ctgctgtatcttcaaccgtctcttaggtctctt

SEQ ID NO: 761522 - DNA, 33 bp, Homo sapien
ctgctgtatcttcaactgtctcttaggtctctt

SEQ ID NO: 761523 - DNA, 33 bp, Homo sapien
ctatcaatggttaatgcacatcaagacaaatct

SEQ ID NO: 761524 - DNA, 33 bp, Homo sapien
ctatcaatggttaatgtacatcaagacaaatct

SEQ ID NO: 761525 - DNA, 33 bp, Homo sapien
tcactacccaatgttacgactcagtggatcaga

SEQ ID NO: 761526 - DNA, 33 bp, Homo sapien
tcactacccaatgttatgactcagtggatcaga

SEQ ID NO: 761527 - DNA, 33 bp, Homo sapien
atctgagactgtagacgaacatacacagagaag

SEQ ID NO: 761528 - DNA, 33 bp, Homo sapien
atctgagactgtagactaacatacacagagaag

SEQ ID NO: 761529 - DNA, 33 bp, Homo sapien
aaagcatgaaaatgtaaaattagattggaattt

SEQ ID NO: 761530 - DNA, 33 bp, Homo sapien
aaagcatgaaaatgtagaattagattggaattt

SEQ ID NO: 761531 - DNA, 33 bp, Homo sapien
tgatttaacaatttaacctcaatgcatttaaac

SEQ ID NO: 761532 - DNA, 33 bp, Homo sapien
tgatttaacaatttaatctcaatgcatttaaac

SEQ ID NO: 761533 - DNA, 33 bp, Homo sapien
tttctttactgtttgccaatgactttgtgaaac

SEQ ID NO: 761534 - DNA, 33 bp, Homo sapien
tttctttactgtttgcgaatgactttgtgaaac

SEQ ID NO: 761535 - DNA, 33 bp, Homo sapien
caaggacaaaattggccaaaggtgtagggtttt

SEQ ID NO: 761536 - DNA, 33 bp, Homo sapien
caaggacaaaattggctaaaggtgtagggtttt

SEQ ID NO: 761537 - DNA, 33 bp, Homo sapien
ggcttgttaaaagatgaaaagataagttagtgg

SEQ ID NO: 761538 - DNA, 33 bp, Homo sapien
ggcttgttaaaagatggaaagataagttagtgg

SEQ ID NO: 761539 - DNA, 33 bp, Homo sapien
tttttaataaattaatcatggcaaagtgttaca

SEQ ID NO: 761540 - DNA, 33 bp, Homo sapien
tttttaataaattaatgatggcaaagtgttaca

SEQ ID NO: 761541 - DNA, 33 bp, Homo sapien
acctaacaagcgcatcgctaagatctgggagga

SEQ ID NO: 761542 - DNA, 33 bp, Homo sapien
acctaacaagcgcatctctaagatctgggagga

SEQ ID NO: 761543 - DNA, 33 bp, Homo sapien
ttaagctttgccacccaattttctcctctgtaa

SEQ ID NO: 761544 - DNA, 33 bp, Homo sapien
ttaagctttgccacccgattttctcctctgtaa

SEQ ID NO: 761545 - DNA, 33 bp, Homo sapien
tgatgggaattcatcaaaatggaggcctaagtg

SEQ ID NO: 761546 - DNA, 33 bp, Homo sapien
tgatgggaattcatcataatggaggcctaagtg

SEQ ID NO: 761547 - DNA, 33 bp, Homo sapien
tagtaacatttaactgaattgccatgaggatct

SEQ ID NO: 761548 - DNA, 33 bp, Homo sapien
tagtaacatttaactggattgccatgaggatct

SEQ ID NO: 761549 - DNA, 33 bp, Homo sapien
gagttcattaagccacactgaaaagtttacttt

SEQ ID NO: 761550 - DNA, 33 bp, Homo sapien
gagttcattaagccacgctgaaaagtttacttt

SEQ ID NO: 761551 - DNA, 33 bp, Homo sapien
agaggagttacagttaagaatgccttctgagta

SEQ ID NO: 761552 - DNA, 33 bp, Homo sapien
agaggagttacagttaggaatgccttctgagta

SEQ ID NO: 761553 - DNA, 33 bp, Homo sapien
gatttatatttttacaagtctgaggataggaaa

SEQ ID NO: 761554 - DNA, 33 bp, Homo sapien
gatttatatttttacaggtctgaggataggaaa

SEQ ID NO: 761555 - DNA, 33 bp, Homo sapien
ctttctcttgttttaaagacactgaccatatcg

SEQ ID NO: 761556 - DNA, 33 bp, Homo sapien
ctttctcttgttttaaggacactgaccatatcg

SEQ ID NO: 761557 - DNA, 33 bp, Homo sapien
tcagtaatattccaccagacagaaaggatgcag

SEQ ID NO: 761558 - DNA, 33 bp, Homo sapien
tcagtaatattccaccggacagaaaggatgcag

SEQ ID NO: 761559 - DNA, 33 bp, Homo sapien
tcattcaatgccagatcaaagcaaaacaaaatg

SEQ ID NO: 761560 - DNA, 33 bp, Homo sapien
tcattcaatgccagatgaaagcaaaacaaaatg

SEQ ID NO: 761561 - DNA, 33 bp, Homo sapien
gacagataaagaaacaataatctcagttacagt

SEQ ID NO: 761562 - DNA, 33 bp, Homo sapien
gacagataaagaaacagtaatctcagttacagt

SEQ ID NO: 761563 - DNA, 33 bp, Homo sapien
aaacaaccagataatcaatatttagactttata

SEQ ID NO: 761564 - DNA, 33 bp, Homo sapien
aaacaaccagataatcgatatttagactttata

SEQ ID NO: 761565 - DNA, 33 bp, Homo sapien
tatcaatgcaaaaggaaataggaactgagtaaa

SEQ ID NO: 761566 - DNA, 33 bp, Homo sapien
tatcaatgcaaaaggagataggaactgagtaaa

SEQ ID NO: 761567 - DNA, 33 bp, Homo sapien
ttataataaagcagcactgaattcactacctca

SEQ ID NO: 761568 - DNA, 33 bp, Homo sapien
ttataataaagcagcattgaattcactacctca

SEQ ID NO: 761569 - DNA, 33 bp, Homo sapien
tttatttagggctccacagcacttttgtccaca

SEQ ID NO: 761570 - DNA, 33 bp, Homo sapien
tttatttagggctccatagcacttttgtccaca

SEQ ID NO: 761571 - DNA, 33 bp, Homo sapien
taggaatgccattctacagctagtgtctggaaa

SEQ ID NO: 761572 - DNA, 33 bp, Homo sapien
taggaatgccattctatagctagtgtctggaaa

SEQ ID NO: 761573 - DNA, 33 bp, Homo sapien
aacataagtccaaaaacactgccatctcagacc

SEQ ID NO: 761574 - DNA, 33 bp, Homo sapien
aacataagtccaaaaagactgccatctcagacc

SEQ ID NO: 761575 - DNA, 33 bp, Homo sapien
gctaaagtgataaagaaaagtagatacaccaac

SEQ ID NO: 761576 - DNA, 33 bp, Homo sapien
gctaaagtgataaagagaagtagatacaccaac

SEQ ID NO: 761577 - DNA, 33 bp, Homo sapien
tctacaagctctgtacacaaacgatctgaaggt

SEQ ID NO: 761578 - DNA, 33 bp, Homo sapien
tctacaagctctgtacgcaaacgatctgaaggt

SEQ ID NO: 761579 - DNA, 33 bp, Homo sapien
aatatcccaattttgacggaaagcaaggatctg

SEQ ID NO: 761580 - DNA, 33 bp, Homo sapien
aatatcccaattttgatggaaagcaaggatctg

SEQ ID NO: 761581 - DNA, 33 bp, Homo sapien
catgtgtgatcagttacgtcatatttttttaag

SEQ ID NO: 761582 - DNA, 33 bp, Homo sapien
catgtgtgatcagttaggtcatatttttttaag

SEQ ID NO: 761583 - DNA, 33 bp, Homo sapien
aatatttgaaaccttgaaaagcgtacaaaggat

SEQ ID NO: 761584 - DNA, 33 bp, Homo sapien
aatatttgaaaccttgtaaagcgtacaaaggat

SEQ ID NO: 761585 - DNA, 33 bp, Homo sapien
ttttgttttaagctcaactctgtgaaaattgga

SEQ ID NO: 761586 - DNA, 33 bp, Homo sapien
ttttgttttaagctcatctctgtgaaaattgga

SEQ ID NO: 761587 - DNA, 33 bp, Homo sapien
aactaaagggcccatgaacataccttagatgtg

SEQ ID NO: 761588 - DNA, 33 bp, Homo sapien
aactaaagggcccatggacataccttagatgtg

SEQ ID NO: 761589 - DNA, 33 bp, Homo sapien
gtgatggaaaaaataactatgactgtcctatag

SEQ ID NO: 761590 - DNA, 33 bp, Homo sapien
gtgatggaaaaaataagtatgactgtcctatag

SEQ ID NO: 761591 - DNA, 33 bp, Homo sapien
gaacaaatgactgctagattttagatagtttat

SEQ ID NO: 761592 - DNA, 33 bp, Homo sapien
gaacaaatgactgctatattttagatagtttat

SEQ ID NO: 761593 - DNA, 33 bp, Homo sapien
atatgcaatgatattcacgacccagaagtcctc

SEQ ID NO: 761594 - DNA, 33 bp, Homo sapien
atatgcaatgatattcgcgacccagaagtcctc

SEQ ID NO: 761595 - DNA, 33 bp, Homo sapien
ctgagtcagcaggaaaccaatctatttttcaag

SEQ ID NO: 761596 - DNA, 33 bp, Homo sapien
ctgagtcagcaggaaagcaatctatttttcaag

SEQ ID NO: 761597 - DNA, 33 bp, Homo sapien
attaaccaagagtgccgctcaaaagatcatgtt

SEQ ID NO: 761598 - DNA, 33 bp, Homo sapien
attaaccaagagtgcctctcaaaagatcatgtt

SEQ ID NO: 761599 - DNA, 33 bp, Homo sapien
tcccttcttacccttacctctatgtcccgcata

SEQ ID NO: 761600 - DNA, 33 bp, Homo sapien
tcccttcttacccttatctctatgtcccgcata

SEQ ID NO: 761601 - DNA, 33 bp, Homo sapien
ctttatgtgcctagcacgataacttcacagatg

SEQ ID NO: 761602 - DNA, 33 bp, Homo sapien
ctttatgtgcctagcatgataacttcacagatg

SEQ ID NO: 761603 - DNA, 33 bp, Homo sapien
gataaaaagaagtgtaataagcacactgtaaaa

SEQ ID NO: 761604 - DNA, 33 bp, Homo sapien
gataaaaagaagtgtagtaagcacactgtaaaa

SEQ ID NO: 761605 - DNA, 33 bp, Homo sapien
atgctaggaaacttataaacagcagttccattt

SEQ ID NO: 761606 - DNA, 33 bp, Homo sapien
atgctaggaaacttatcaacagcagttccattt

SEQ ID NO: 761607 - DNA, 33 bp, Homo sapien
tttgattaaatagaggcaatggttggctaagcg

SEQ ID NO: 761608 - DNA, 33 bp, Homo sapien
tttgattaaatagaggtaatggttggctaagcg

SEQ ID NO: 761609 - DNA, 33 bp, Homo sapien
gccattataactcttaaagaatctggccaggcg

SEQ ID NO: 761610 - DNA, 33 bp, Homo sapien
gccattataactcttacagaatctggccaggcg

SEQ ID NO: 761611 - DNA, 33 bp, Homo sapien
accacaagcaacggacaagtaggggaagagtcg

SEQ ID NO: 761612 - DNA, 33 bp, Homo sapien
accacaagcaacggactagtaggggaagagtcg

SEQ ID NO: 761613 - DNA, 33 bp, Homo sapien
atctatgggaaaataaccttgtaccatattaaa

SEQ ID NO: 761614 - DNA, 33 bp, Homo sapien
atctatgggaaaataatcttgtaccatattaaa

SEQ ID NO: 761615 - DNA, 33 bp, Homo sapien
gttaatattaaactgacccgtctctttttgcct

SEQ ID NO: 761616 - DNA, 33 bp, Homo sapien
gttaatattaaactgatccgtctctttttgcct

SEQ ID NO: 761617 - DNA, 33 bp, Homo sapien
caagccacgctcataaactctacctattctgtc

SEQ ID NO: 761618 - DNA, 33 bp, Homo sapien
caagccacgctcataatctctacctattctgtc

SEQ ID NO: 761619 - DNA, 33 bp, Homo sapien
tttaaaagaactggtgaaggaacaattgcaaaa

SEQ ID NO: 761620 - DNA, 33 bp, Homo sapien
tttaaaagaactggtgcaggaacaattgcaaaa

SEQ ID NO: 761621 - DNA, 33 bp, Homo sapien
ctcttgaaaaagataccgcacttcacaagcatc

SEQ ID NO: 761622 - DNA, 33 bp, Homo sapien
ctcttgaaaaagatactgcacttcacaagcatc

SEQ ID NO: 761623 - DNA, 33 bp, Homo sapien
aactctaatttctctgaaaaccttaatagttta

SEQ ID NO: 761624 - DNA, 33 bp, Homo sapien
aactctaatttctctggaaaccttaatagttta

SEQ ID NO: 761625 - DNA, 33 bp, Homo sapien
catgtgcatttggggcaaagacaaaaaatcaag

SEQ ID NO: 761626 - DNA, 33 bp, Homo sapien
catgtgcatttggggcgaagacaaaaaatcaag

SEQ ID NO: 761627 - DNA, 33 bp, Homo sapien
agtacctagaacaaaacggaacatcttcatgaa

SEQ ID NO: 761628 - DNA, 33 bp, Homo sapien
agtacctagaacaaaatggaacatcttcatgaa

SEQ ID NO: 761629 - DNA, 33 bp, Homo sapien
gtggccacagtacaaaattctatttcaaattac

SEQ ID NO: 761630 - DNA, 33 bp, Homo sapien
gtggccacagtacaaagttctatttcaaattac

SEQ ID NO: 761631 - DNA, 33 bp, Homo sapien
tgttaggaagacacaaatataaacatacaatta

SEQ ID NO: 761632 - DNA, 33 bp, Homo sapien
tgttaggaagacacaagtataaacatacaatta

SEQ ID NO: 761633 - DNA, 33 bp, Homo sapien
ccaatccctttccaaacgacgtggctaaactta

SEQ ID NO: 761634 - DNA, 33 bp, Homo sapien
ccaatccctttccaaatgacgtggctaaactta

SEQ ID NO: 761635 - DNA, 33 bp, Homo sapien
cctctatagctggtgacgctctgtcagctatct

SEQ ID NO: 761636 - DNA, 33 bp, Homo sapien
cctctatagctggtgatgctctgtcagctatct

SEQ ID NO: 761637 - DNA, 33 bp, Homo sapien
attatagataattatcaaagatgtgctctgtat

SEQ ID NO: 761638 - DNA, 33 bp, Homo sapien
attatagataattatcgaagatgtgctctgtat

SEQ ID NO: 761639 - DNA, 33 bp, Homo sapien
gtgtgggatctttaataactgcgacacctctgt

SEQ ID NO: 761640 - DNA, 33 bp, Homo sapien
gtgtgggatctttaatgactgcgacacctctgt

SEQ ID NO: 761641 - DNA, 33 bp, Homo sapien
aagcttcttcctatcaagtgcatttttcttgaa

SEQ ID NO: 761642 - DNA, 33 bp, Homo sapien
aagcttcttcctatcatgtgcatttttcttgaa

SEQ ID NO: 761643 - DNA, 33 bp, Homo sapien
tgaagtgttatatcacagattgagaccagtaaa

SEQ ID NO: 761644 - DNA, 33 bp, Homo sapien
tgaagtgttatatcaccgattgagaccagtaaa

SEQ ID NO: 761645 - DNA, 33 bp, Homo sapien
tatggtagtcttcatacatgtacaaaaagcatt

SEQ ID NO: 761646 - DNA, 33 bp, Homo sapien
tatggtagtcttcatagatgtacaaaaagcatt

SEQ ID NO: 761647 - DNA, 33 bp, Homo sapien
agaatcaaatgttagcaagtatgtgaagcagtt

SEQ ID NO: 761648 - DNA, 33 bp, Homo sapien
agaatcaaatgttagccagtatgtgaagcagtt

SEQ ID NO: 761649 - DNA, 33 bp, Homo sapien
atattgagtaagtaaaacatgttgtaaacaaat

SEQ ID NO: 761650 - DNA, 33 bp, Homo sapien
atattgagtaagtaaaccatgttgtaaacaaat

SEQ ID NO: 761651 - DNA, 33 bp, Homo sapien
aggagtataattgaagcacctgggtttggcaac

SEQ ID NO: 761652 - DNA, 33 bp, Homo sapien
aggagtataattgaaggacctgggtttggcaac

SEQ ID NO: 761653 - DNA, 33 bp, Homo sapien
aatgggtccagaagtaagagacataaagaaaca

SEQ ID NO: 761654 - DNA, 33 bp, Homo sapien
aatgggtccagaagtaggagacataaagaaaca

SEQ ID NO: 761655 - DNA, 33 bp, Homo sapien
agattcactcacacctcactttcaaccactaca

SEQ ID NO: 761656 - DNA, 33 bp, Homo sapien
agattcactcacaccttactttcaaccactaca

SEQ ID NO: 761657 - DNA, 33 bp, Homo sapien
ggaaaatagaaactcaggaccacagttcattat

SEQ ID NO: 761658 - DNA, 33 bp, Homo sapien
ggaaaatagaaactcatgaccacagttcattat

SEQ ID NO: 761659 - DNA, 33 bp, Homo sapien
aattaaacctgttgaactattccaccatttacc

SEQ ID NO: 761660 - DNA, 33 bp, Homo sapien
aattaaacctgttgaagtattccaccatttacc

SEQ ID NO: 761661 - DNA, 33 bp, Homo sapien
acttaaccttatggcacaatagctaaaattcaa

SEQ ID NO: 761662 - DNA, 33 bp, Homo sapien
acttaaccttatggcagaatagctaaaattcaa

SEQ ID NO: 761663 - DNA, 33 bp, Homo sapien
tgataaaagtagaaaaatggaaacatctataga

SEQ ID NO: 761664 - DNA, 33 bp, Homo sapien
tgataaaagtagaaaagtggaaacatctataga

SEQ ID NO: 761665 - DNA, 33 bp, Homo sapien
tgaaacatcctccatacgggaatcaagtagggg

SEQ ID NO: 761666 - DNA, 33 bp, Homo sapien
tgaaacatcctccatatgggaatcaagtagggg

SEQ ID NO: 761667 - DNA, 33 bp, Homo sapien
gaatcatttaccaagaatacagatgataacaac

SEQ ID NO: 761668 - DNA, 33 bp, Homo sapien
gaatcatttaccaagattacagatgataacaac

SEQ ID NO: 761669 - DNA, 33 bp, Homo sapien
agaatgacctaattaactggcattttggcaaat

SEQ ID NO: 761670 - DNA, 33 bp, Homo sapien
agaatgacctaattaattggcattttggcaaat

SEQ ID NO: 761671 - DNA, 33 bp, Homo sapien
aagtggcatacttaaagtgtaataccaagatat

SEQ ID NO: 761672 - DNA, 33 bp, Homo sapien
aagtggcatacttaaattgtaataccaagatat

SEQ ID NO: 761673 - DNA, 33 bp, Homo sapien
agcctgctaaaccttacaatctctaccaagaaa

SEQ ID NO: 761674 - DNA, 33 bp, Homo sapien
agcctgctaaaccttagaatctctaccaagaaa

SEQ ID NO: 761675 - DNA, 33 bp, Homo sapien
gaatgcataaagagtaaaagttgaatcctaaat

SEQ ID NO: 761676 - DNA, 33 bp, Homo sapien
gaatgcataaagagtagaagttgaatcctaaat

SEQ ID NO: 761677 - DNA, 33 bp, Homo sapien
gttcatatctctcgcaagaacatggatagaggt

SEQ ID NO: 761678 - DNA, 33 bp, Homo sapien
gttcatatctctcgcaggaacatggatagaggt

SEQ ID NO: 761679 - DNA, 33 bp, Homo sapien
tattttgacatatttacacattatgaagcaaga

SEQ ID NO: 761680 - DNA, 33 bp, Homo sapien
tattttgacatatttagacattatgaagcaaga

SEQ ID NO: 761681 - DNA, 33 bp, Homo sapien
tgcctactgcttgcccaaaatgtcaaacaccct

SEQ ID NO: 761682 - DNA, 33 bp, Homo sapien
tgcctactgcttgcccgaaatgtcaaacaccct

SEQ ID NO: 761683 - DNA, 33 bp, Homo sapien
tacgatcatcaactcacctttgggcatttaagt

SEQ ID NO: 761684 - DNA, 33 bp, Homo sapien
tacgatcatcaactcagctttgggcatttaagt

SEQ ID NO: 761685 - DNA, 33 bp, Homo sapien
tgtattaaacattgaccgaagccctactatgtg

SEQ ID NO: 761686 - DNA, 33 bp, Homo sapien
tgtattaaacattgactgaagccctactatgtg

SEQ ID NO: 761687 - DNA, 33 bp, Homo sapien
tctagaaaaaaaatgaacctacttacatgcaaa

SEQ ID NO: 761688 - DNA, 33 bp, Homo sapien
tctagaaaaaaaatgatcctacttacatgcaaa

SEQ ID NO: 761689 - DNA, 33 bp, Homo sapien
agctctgtctgaagaaaaaatcaaaattaacct

SEQ ID NO: 761690 - DNA, 33 bp, Homo sapien
agctctgtctgaagaagaaatcaaaattaacct

SEQ ID NO: 761691 - DNA, 33 bp, Homo sapien
atacaggaccttcatactatcctgtaacttttc

SEQ ID NO: 761692 - DNA, 33 bp, Homo sapien
atacaggaccttcatattatcctgtaacttttc

SEQ ID NO: 761693 - DNA, 33 bp, Homo sapien
ccaactgatctgttaacgtttctctttcactac

SEQ ID NO: 761694 - DNA, 33 bp, Homo sapien
ccaactgatctgttaatgtttctctttcactac

SEQ ID NO: 761695 - DNA, 33 bp, Homo sapien
aaatgtgtaatggagaggacaaatacctgcctc

SEQ ID NO: 761696 - DNA, 33 bp, Homo sapien
aaatgtgtaatggagatgacaaatacctgcctc

SEQ ID NO: 761697 - DNA, 33 bp, Homo sapien
gttataatcatccagaagaagtgtcaaagtaac

SEQ ID NO: 761698 - DNA, 33 bp, Homo sapien
gttataatcatccagacgaagtgtcaaagtaac

SEQ ID NO: 761699 - DNA, 33 bp, Homo sapien
atctgaactatgattacgcttaaatttcaaaaa

SEQ ID NO: 761700 - DNA, 33 bp, Homo sapien
atctgaactatgattatgcttaaatttcaaaaa

SEQ ID NO: 761701 - DNA, 33 bp, Homo sapien
taagtgaaaagatttacgagtgacattttattg

SEQ ID NO: 761702 - DNA, 33 bp, Homo sapien
taagtgaaaagatttatgagtgacattttattg

SEQ ID NO: 761703 - DNA, 33 bp, Homo sapien
gcaaatgagaataagacggctttgagctagact

SEQ ID NO: 761704 - DNA, 33 bp, Homo sapien
gcaaatgagaataagatggctttgagctagact

SEQ ID NO: 761705 - DNA, 33 bp, Homo sapien
tttttatgacttatacactaagcttacaacaat

SEQ ID NO: 761706 - DNA, 33 bp, Homo sapien
tttttatgacttatacgctaagcttacaacaat

SEQ ID NO: 761707 - DNA, 33 bp, Homo sapien
actttgtcattatcaagataaccgtaaacccaa

SEQ ID NO: 761708 - DNA, 33 bp, Homo sapien
actttgtcattatcaatataaccgtaaacccaa

SEQ ID NO: 761709 - DNA, 33 bp, Homo sapien
atgccttggtcaaatgcatgaataaataaatgg

SEQ ID NO: 761710 - DNA, 33 bp, Homo sapien
atgccttggtcaaatgtatgaataaataaatgg

SEQ ID NO: 761711 - DNA, 33 bp, Homo sapien
catttctatactatcaaagcataacagcaggtt

SEQ ID NO: 761712 - DNA, 33 bp, Homo sapien
catttctatactatcagagcataacagcaggtt

SEQ ID NO: 761713 - DNA, 33 bp, Homo sapien
aaagggtgccctaagacctagtataattgaagt

SEQ ID NO: 761714 - DNA, 33 bp, Homo sapien
aaagggtgccctaagagctagtataattgaagt

SEQ ID NO: 761715 - DNA, 33 bp, Homo sapien
tttgaacattgttgcactgatattaaaaagcca

SEQ ID NO: 761716 - DNA, 33 bp, Homo sapien
tttgaacattgttgcattgatattaaaaagcca

SEQ ID NO: 761717 - DNA, 33 bp, Homo sapien
atacaggaaaatggtcacaatggttgcttctgg

SEQ ID NO: 761718 - DNA, 33 bp, Homo sapien
atacaggaaaatggtcgcaatggttgcttctgg

SEQ ID NO: 761719 - DNA, 33 bp, Homo sapien
gactactcttatggcaacgtggtaataacacag

SEQ ID NO: 761720 - DNA, 33 bp, Homo sapien
gactactcttatggcatcgtggtaataacacag

SEQ ID NO: 761721 - DNA, 33 bp, Homo sapien
catgagtagaagaccaagttccctcatccacat

SEQ ID NO: 761722 - DNA, 33 bp, Homo sapien
catgagtagaagaccatgttccctcatccacat

SEQ ID NO: 761723 - DNA, 33 bp, Homo sapien
cactgcattaatcataacacattgaaaacacat

SEQ ID NO: 761724 - DNA, 33 bp, Homo sapien
cactgcattaatcatagcacattgaaaacacat

SEQ ID NO: 761725 - DNA, 33 bp, Homo sapien
agaatctgactttatacaacttcttttccttct

SEQ ID NO: 761726 - DNA, 33 bp, Homo sapien
agaatctgactttatataacttcttttccttct

SEQ ID NO: 761727 - DNA, 33 bp, Homo sapien
agggatcacaacaatacgactgtggattgggtg

SEQ ID NO: 761728 - DNA, 33 bp, Homo sapien
agggatcacaacaatatgactgtggattgggtg

SEQ ID NO: 761729 - DNA, 33 bp, Homo sapien
tatgtctgtcaacaggaaagtgttaaatgtatt

SEQ ID NO: 761730 - DNA, 33 bp, Homo sapien
tatgtctgtcaacaggtaagtgttaaatgtatt

SEQ ID NO: 761731 - DNA, 33 bp, Homo sapien
cctgggaaagtattgacggctttcatgaggaag

SEQ ID NO: 761732 - DNA, 33 bp, Homo sapien
cctgggaaagtattgatggctttcatgaggaag

SEQ ID NO: 761733 - DNA, 33 bp, Homo sapien
aaagtaataaggccaaagtgtttgaaatacaga

SEQ ID NO: 761734 - DNA, 33 bp, Homo sapien
aaagtaataaggccaatgtgtttgaaatacaga

SEQ ID NO: 761735 - DNA, 33 bp, Homo sapien
atccagtacatgatccaccgtgacaatgagtag

SEQ ID NO: 761736 - DNA, 33 bp, Homo sapien
atccagtacatgatccgccgtgacaatgagtag

SEQ ID NO: 761737 - DNA, 33 bp, Homo sapien
tagggttcgtagaataagagtgttttagagtga

SEQ ID NO: 761738 - DNA, 33 bp, Homo sapien
tagggttcgtagaatatgagtgttttagagtga

SEQ ID NO: 761739 - DNA, 33 bp, Homo sapien
ctcttaaaaatatgacagaccacatttgcattt

SEQ ID NO: 761740 - DNA, 33 bp, Homo sapien
ctcttaaaaatatgacggaccacatttgcattt

SEQ ID NO: 761741 - DNA, 33 bp, Homo sapien
tcaaatgtaattcaaaattgcaaaatgtaatgt

SEQ ID NO: 761742 - DNA, 33 bp, Homo sapien
tcaaatgtaattcaaagttgcaaaatgtaatgt

SEQ ID NO: 761743 - DNA, 33 bp, Homo sapien
cattatggaccaatagaagaggtcgtgtagtgg

SEQ ID NO: 761744 - DNA, 33 bp, Homo sapien
cattatggaccaatagcagaggtcgtgtagtgg

SEQ ID NO: 761745 - DNA, 33 bp, Homo sapien
gatatttttagagtgcccacgttgctttgtgta

SEQ ID NO: 761746 - DNA, 33 bp, Homo sapien
gatatttttagagtgctcacgttgctttgtgta

SEQ ID NO: 761747 - DNA, 33 bp, Homo sapien
gagcaattttgacttaccagatgatatttattt

SEQ ID NO: 761748 - DNA, 33 bp, Homo sapien
gagcaattttgacttagcagatgatatttattt

SEQ ID NO: 761749 - DNA, 33 bp, Homo sapien
aatccccagttttccagaatctcaagttattct

SEQ ID NO: 761750 - DNA, 33 bp, Homo sapien
aatccccagttttccataatctcaagttattct

SEQ ID NO: 761751 - DNA, 33 bp, Homo sapien
ttgctctcccaggatccattgtgtcttgagtta

SEQ ID NO: 761752 - DNA, 33 bp, Homo sapien
ttgctctcccaggatctattgtgtcttgagtta

SEQ ID NO: 761753 - DNA, 33 bp, Homo sapien
cacacataaattccacagtagtattccatgatg

SEQ ID NO: 761754 - DNA, 33 bp, Homo sapien
cacacataaattccacggtagtattccatgatg

SEQ ID NO: 761755 - DNA, 33 bp, Homo sapien
ctacagttccggtcacccacatttgaaacatga

SEQ ID NO: 761756 - DNA, 33 bp, Homo sapien
ctacagttccggtcacgcacatttgaaacatga

SEQ ID NO: 761757 - DNA, 33 bp, Homo sapien
atcaatcatttacttcaagaagatttttctgac

SEQ ID NO: 761758 - DNA, 33 bp, Homo sapien
atcaatcatttacttcgagaagatttttctgac

SEQ ID NO: 761759 - DNA, 33 bp, Homo sapien
actctcagtcactcaaacaattgtgaaatgtgc

SEQ ID NO: 761760 - DNA, 33 bp, Homo sapien
actctcagtcactcaagcaattgtgaaatgtgc

SEQ ID NO: 761761 - DNA, 33 bp, Homo sapien
cttactagctacacaaacttgcatctgttatgc

SEQ ID NO: 761762 - DNA, 33 bp, Homo sapien
cttactagctacacaaccttgcatctgttatgc

SEQ ID NO: 761763 - DNA, 33 bp, Homo sapien
atctacaaaatacaaaatcagcaagtagagctc

SEQ ID NO: 761764 - DNA, 33 bp, Homo sapien
atctacaaaatacaaagtcagcaagtagagctc

SEQ ID NO: 761765 - DNA, 33 bp, Homo sapien
ttcttctgtcacaggcacaatttgacaagcttg

SEQ ID NO: 761766 - DNA, 33 bp, Homo sapien
ttcttctgtcacaggcgcaatttgacaagcttg

SEQ ID NO: 761767 - DNA, 33 bp, Homo sapien
gcagctacttctctaccgacagtcgtgattttc

SEQ ID NO: 761768 - DNA, 33 bp, Homo sapien
gcagctacttctctactgacagtcgtgattttc

SEQ ID NO: 761769 - DNA, 33 bp, Homo sapien
ttactttacaattataacttcagctgtatgcca

SEQ ID NO: 761770 - DNA, 33 bp, Homo sapien
ttactttacaattatatcttcagctgtatgcca

SEQ ID NO: 761771 - DNA, 33 bp, Homo sapien
attgctcaatccaggccaaaacatcatattgca

SEQ ID NO: 761772 - DNA, 33 bp, Homo sapien
attgctcaatccaggcgaaaacatcatattgca

SEQ ID NO: 761773 - DNA, 33 bp, Homo sapien
atagtaagctttactacgtcaacccagataagc

SEQ ID NO: 761774 - DNA, 33 bp, Homo sapien
atagtaagctttactatgtcaacccagataagc

SEQ ID NO: 761775 - DNA, 33 bp, Homo sapien
tcattctttcagaaaaagtacataagtggtaaa

SEQ ID NO: 761776 - DNA, 33 bp, Homo sapien
tcattctttcagaaaaggtacataagtggtaaa

SEQ ID NO: 761777 - DNA, 33 bp, Homo sapien
tagctagcctaacactaagattaacagctggaa

SEQ ID NO: 761778 - DNA, 33 bp, Homo sapien
tagctagcctaacactgagattaacagctggaa

SEQ ID NO: 761779 - DNA, 33 bp, Homo sapien
ctttctgaggccctgaaggaaatattcataatt

SEQ ID NO: 761780 - DNA, 33 bp, Homo sapien
ctttctgaggccctgacggaaatattcataatt

SEQ ID NO: 761781 - DNA, 33 bp, Homo sapien
aatagaaatcttcaaactgggtcagggagaagt

SEQ ID NO: 761782 - DNA, 33 bp, Homo sapien
aatagaaatcttcaaattgggtcagggagaagt

SEQ ID NO: 761783 - DNA, 33 bp, Homo sapien
attttggcattaatggaaccttgatgaggaaca

SEQ ID NO: 761784 - DNA, 33 bp, Homo sapien
attttggcattaatggtaccttgatgaggaaca

SEQ ID NO: 761785 - DNA, 33 bp, Homo sapien
tttttttctttatcatcacaacgagagtctagg

SEQ ID NO: 761786 - DNA, 33 bp, Homo sapien
tttttttctttatcattacaacgagagtctagg

SEQ ID NO: 761787 - DNA, 33 bp, Homo sapien
attttaactgcattgccaatttctggagctttc

SEQ ID NO: 761788 - DNA, 33 bp, Homo sapien
attttaactgcattgctaatttctggagctttc

SEQ ID NO: 761789 - DNA, 33 bp, Homo sapien
ttccttcctatatataacccctagaactgatat

SEQ ID NO: 761790 - DNA, 33 bp, Homo sapien
ttccttcctatatataccccctagaactgatat

SEQ ID NO: 761791 - DNA, 33 bp, Homo sapien
atttaatatgcagggagcttcggtgatggttaa

SEQ ID NO: 761792 - DNA, 33 bp, Homo sapien
atttaatatgcagggatcttcggtgatggttaa

SEQ ID NO: 761793 - DNA, 33 bp, Homo sapien
gctctctgtagcacaacagttaagtaagcacac

SEQ ID NO: 761794 - DNA, 33 bp, Homo sapien
gctctctgtagcacaatagttaagtaagcacac

SEQ ID NO: 761795 - DNA, 33 bp, Homo sapien
accacattttgtcaacccttacacactgttcaa

SEQ ID NO: 761796 - DNA, 33 bp, Homo sapien
accacattttgtcaactcttacacactgttcaa

SEQ ID NO: 761797 - DNA, 33 bp, Homo sapien
ccccaaatagtcttaacggctacttgtaaagat

SEQ ID NO: 761798 - DNA, 33 bp, Homo sapien
ccccaaatagtcttaatggctacttgtaaagat

SEQ ID NO: 761799 - DNA, 33 bp, Homo sapien
tagcccttatgtcatcacttttgtgttaaagac

SEQ ID NO: 761800 - DNA, 33 bp, Homo sapien
tagcccttatgtcatcgcttttgtgttaaagac

SEQ ID NO: 761801 - DNA, 33 bp, Homo sapien
aaacaagtggcataaaatgagagggaaacaaat

SEQ ID NO: 761802 - DNA, 33 bp, Homo sapien
aaacaagtggcataaactgagagggaaacaaat

SEQ ID NO: 761803 - DNA, 33 bp, Homo sapien
aggtaagccatcccaactgcttgatgcttatga

SEQ ID NO: 761804 - DNA, 33 bp, Homo sapien
aggtaagccatcccaattgcttgatgcttatga

SEQ ID NO: 761805 - DNA, 33 bp, Homo sapien
tttttcactctattaaccagtgatcagatcaat

SEQ ID NO: 761806 - DNA, 33 bp, Homo sapien
tttttcactctattaatcagtgatcagatcaat

SEQ ID NO: 761807 - DNA, 33 bp, Homo sapien
taccaactgtaatgagacagaaaaataaatgaa

SEQ ID NO: 761808 - DNA, 33 bp, Homo sapien
taccaactgtaatgagtcagaaaaataaatgaa

SEQ ID NO: 761809 - DNA, 33 bp, Homo sapien
ctccacaacttgcttacggagtcattggatgac

SEQ ID NO: 761810 - DNA, 33 bp, Homo sapien
ctccacaacttgcttatggagtcattggatgac

SEQ ID NO: 761811 - DNA, 33 bp, Homo sapien
tcaaagcttagccccaacaaataagtgagaata

SEQ ID NO: 761812 - DNA, 33 bp, Homo sapien
tcaaagcttagccccagcaaataagtgagaata

SEQ ID NO: 761813 - DNA, 33 bp, Homo sapien
gctataatatacaaacagtcgatgtcccaaagc

SEQ ID NO: 761814 - DNA, 33 bp, Homo sapien
gctataatatacaaacggtcgatgtcccaaagc

SEQ ID NO: 761815 - DNA, 33 bp, Homo sapien
agtagggatggctccactacacattggaggttg

SEQ ID NO: 761816 - DNA, 33 bp, Homo sapien
agtagggatggctccattacacattggaggttg

SEQ ID NO: 761817 - DNA, 33 bp, Homo sapien
atagttaggcagatgaccacagtgaacctatat

SEQ ID NO: 761818 - DNA, 33 bp, Homo sapien
atagttaggcagatgatcacagtgaacctatat

SEQ ID NO: 761819 - DNA, 33 bp, Homo sapien
tgttatgaaaattacacaatatcacaagaaatt

SEQ ID NO: 761820 - DNA, 33 bp, Homo sapien
tgttatgaaaattacagaatatcacaagaaatt

SEQ ID NO: 761821 - DNA, 33 bp, Homo sapien
ttcagtaggtagataaagttgccaaaagaaaga

SEQ ID NO: 761822 - DNA, 33 bp, Homo sapien
ttcagtaggtagataaggttgccaaaagaaaga

SEQ ID NO: 761823 - DNA, 33 bp, Homo sapien
atgttgaaactttttcaccggcaactccagcca

SEQ ID NO: 761824 - DNA, 33 bp, Homo sapien
atgttgaaactttttcgccggcaactccagcca

SEQ ID NO: 761825 - DNA, 33 bp, Homo sapien
aaactttgagcaattcacgtaatcaaatatctt

SEQ ID NO: 761826 - DNA, 33 bp, Homo sapien
aaactttgagcaattcccgtaatcaaatatctt

SEQ ID NO: 761827 - DNA, 33 bp, Homo sapien
ttcttgtagagagtccaattttcaagcatttct

SEQ ID NO: 761828 - DNA, 33 bp, Homo sapien
ttcttgtagagagtcccattttcaagcatttct

SEQ ID NO: 761829 - DNA, 33 bp, Homo sapien
ccaataggatatacgcaaaggttaatattagaa

SEQ ID NO: 761830 - DNA, 33 bp, Homo sapien
ccaataggatatacgcgaaggttaatattagaa

SEQ ID NO: 761831 - DNA, 33 bp, Homo sapien
attgactttatgtctaaatggaaaaatggaagg

SEQ ID NO: 761832 - DNA, 33 bp, Homo sapien
attgactttatgtctagatggaaaaatggaagg

SEQ ID NO: 761833 - DNA, 33 bp, Homo sapien
acaaagagatgtagtaagagtatcactagactt

SEQ ID NO: 761834 - DNA, 33 bp, Homo sapien
acaaagagatgtagtaggagtatcactagactt

SEQ ID NO: 761835 - DNA, 33 bp, Homo sapien
ttcaaaacactgttgccgaatctcaaagaggtc

SEQ ID NO: 761836 - DNA, 33 bp, Homo sapien
ttcaaaacactgttgctgaatctcaaagaggtc

SEQ ID NO: 761837 - DNA, 33 bp, Homo sapien
aaattggactgataaaagggaaccgcatagagc

SEQ ID NO: 761838 - DNA, 33 bp, Homo sapien
aaattggactgataaaggggaaccgcatagagc

SEQ ID NO: 761839 - DNA, 33 bp, Homo sapien
ttaagccaaagcctaacctacaacaaggctcta

SEQ ID NO: 761840 - DNA, 33 bp, Homo sapien
ttaagccaaagcctaatctacaacaaggctcta

SEQ ID NO: 761841 - DNA, 33 bp, Homo sapien
ggctagactgtagtccccagtttttcacataca

SEQ ID NO: 761842 - DNA, 33 bp, Homo sapien
ggctagactgtagtcctcagtttttcacataca

SEQ ID NO: 761843 - DNA, 33 bp, Homo sapien
ctaagaatgtagaatcactagcggctttatgtt

SEQ ID NO: 761844 - DNA, 33 bp, Homo sapien
ctaagaatgtagaatcgctagcggctttatgtt

SEQ ID NO: 761845 - DNA, 33 bp, Homo sapien
tgaaaggatcctgaataagaaggtagtgtgacc

SEQ ID NO: 761846 - DNA, 33 bp, Homo sapien
tgaaaggatcctgaatcagaaggtagtgtgacc

SEQ ID NO: 761847 - DNA, 33 bp, Homo sapien
atataaatgcaaaatcaagcaatgtgagataac

SEQ ID NO: 761848 - DNA, 33 bp, Homo sapien
atataaatgcaaaatcgagcaatgtgagataac

SEQ ID NO: 761849 - DNA, 33 bp, Homo sapien
aatctatgcatcttacaatcacaataaaaaata

SEQ ID NO: 761850 - DNA, 33 bp, Homo sapien
aatctatgcatcttacgatcacaataaaaaata

SEQ ID NO: 761851 - DNA, 33 bp, Homo sapien
cctcctttgcagttgccaggaattttgtccaaa

SEQ ID NO: 761852 - DNA, 33 bp, Homo sapien
cctcctttgcagttgcgaggaattttgtccaaa

SEQ ID NO: 761853 - DNA, 33 bp, Homo sapien
tgccatgctgctacaacgtcataaagtagataa

SEQ ID NO: 761854 - DNA, 33 bp, Homo sapien
tgccatgctgctacaaggtcataaagtagataa

SEQ ID NO: 761855 - DNA, 33 bp, Homo sapien
ccagtgtaacgcctaaagttcttgccaagccat

SEQ ID NO: 761856 - DNA, 33 bp, Homo sapien
ccagtgtaacgcctaaggttcttgccaagccat

SEQ ID NO: 761857 - DNA, 33 bp, Homo sapien
ctcatgacctttcactaagatgtatgtatattt

SEQ ID NO: 761858 - DNA, 33 bp, Homo sapien
ctcatgacctttcacttagatgtatgtatattt

SEQ ID NO: 761859 - DNA, 33 bp, Homo sapien
atgtttcagtggatatcagactgaatataaatt

SEQ ID NO: 761860 - DNA, 33 bp, Homo sapien
atgtttcagtggatattagactgaatataaatt

SEQ ID NO: 761861 - DNA, 33 bp, Homo sapien
ttgcttgacaatgtgtaaaacctcaggaaaaat

SEQ ID NO: 761862 - DNA, 33 bp, Homo sapien
ttgcttgacaatgtgtgaaacctcaggaaaaat

SEQ ID NO: 761863 - DNA, 33 bp, Homo sapien
ggtatgaacacgttaaacgaagtactgccagga

SEQ ID NO: 761864 - DNA, 33 bp, Homo sapien
ggtatgaacacgttaaccgaagtactgccagga

SEQ ID NO: 761865 - DNA, 33 bp, Homo sapien
ggccatgactaactaccaagaggacaagtacta

SEQ ID NO: 761866 - DNA, 33 bp, Homo sapien
ggccatgactaactactaagaggacaagtacta

SEQ ID NO: 761867 - DNA, 33 bp, Homo sapien
tctcctattttaccaacctgacaaacaaacaaa

SEQ ID NO: 761868 - DNA, 33 bp, Homo sapien
tctcctattttaccaatctgacaaacaaacaaa

SEQ ID NO: 761869 - DNA, 33 bp, Homo sapien
gacatgaaaggactgtaaagacagaaaaaatta

SEQ ID NO: 761870 - DNA, 33 bp, Homo sapien
gacatgaaaggactgtgaagacagaaaaaatta

SEQ ID NO: 761871 - DNA, 33 bp, Homo sapien
cacaatgtcatcttccaattgattgactagtct

SEQ ID NO: 761872 - DNA, 33 bp, Homo sapien
cacaatgtcatcttccgattgattgactagtct

SEQ ID NO: 761873 - DNA, 33 bp, Homo sapien
actggaatgagaaaacacaattttggtatttgt

SEQ ID NO: 761874 - DNA, 33 bp, Homo sapien
actggaatgagaaaacgcaattttggtatttgt

SEQ ID NO: 761875 - DNA, 33 bp, Homo sapien
aagtcaagaagtcagaagagatttcattaatct

SEQ ID NO: 761876 - DNA, 33 bp, Homo sapien
aagtcaagaagtcagaggagatttcattaatct

SEQ ID NO: 761877 - DNA, 33 bp, Homo sapien
tggtgacaagcattcacggacccaatgcaagta

SEQ ID NO: 761878 - DNA, 33 bp, Homo sapien
tggtgacaagcattcatggacccaatgcaagta

SEQ ID NO: 761879 - DNA, 33 bp, Homo sapien
tacatttgccaaaatcaatggttgtaatacata

SEQ ID NO: 761880 - DNA, 33 bp, Homo sapien
tacatttgccaaaatcgatggttgtaatacata

SEQ ID NO: 761881 - DNA, 33 bp, Homo sapien
tctgactgctctatagaaatttgggtgagggta

SEQ ID NO: 761882 - DNA, 33 bp, Homo sapien
tctgactgctctataggaatttgggtgagggta

SEQ ID NO: 761883 - DNA, 33 bp, Homo sapien
cattctgccatacagacaaaaaagtagtatggt

SEQ ID NO: 761884 - DNA, 33 bp, Homo sapien
cattctgccatacagagaaaaaagtagtatggt

SEQ ID NO: 761885 - DNA, 33 bp, Homo sapien
atgctttcctcaatacaaggttgaaaataggaa

SEQ ID NO: 761886 - DNA, 33 bp, Homo sapien
atgctttcctcaatacgaggttgaaaataggaa

SEQ ID NO: 761887 - DNA, 33 bp, Homo sapien
cataattttttgatcaagcatctgaaaccaaag

SEQ ID NO: 761888 - DNA, 33 bp, Homo sapien
cataattttttgatcaggcatctgaaaccaaag

SEQ ID NO: 761889 - DNA, 33 bp, Homo sapien
gaaaacagatatttcacgccaatggaaaccaaa

SEQ ID NO: 761890 - DNA, 33 bp, Homo sapien
gaaaacagatatttcatgccaatggaaaccaaa

SEQ ID NO: 761891 - DNA, 33 bp, Homo sapien
caataaaattttgaagaaaatctctgtgtaagg

SEQ ID NO: 761892 - DNA, 33 bp, Homo sapien
caataaaattttgaagtaaatctctgtgtaagg

SEQ ID NO: 761893 - DNA, 33 bp, Homo sapien
ataacaaaatttcagacaggtaagcagataatt

SEQ ID NO: 761894 - DNA, 33 bp, Homo sapien
ataacaaaatttcagagaggtaagcagataatt

SEQ ID NO: 761895 - DNA, 33 bp, Homo sapien
tgttatgcatcctgtacatttattctacattgt

SEQ ID NO: 761896 - DNA, 33 bp, Homo sapien
tgttatgcatcctgtatatttattctacattgt

SEQ ID NO: 761897 - DNA, 33 bp, Homo sapien
tgtccataatgtataccgaaacaagatatggag

SEQ ID NO: 761898 - DNA, 33 bp, Homo sapien
tgtccataatgtatactgaaacaagatatggag

SEQ ID NO: 761899 - DNA, 33 bp, Homo sapien
tcatttacctggagcactcttcctccacaattg

SEQ ID NO: 761900 - DNA, 33 bp, Homo sapien
tcatttacctggagcattcttcctccacaattg

SEQ ID NO: 761901 - DNA, 33 bp, Homo sapien
gcattctactggataaggagctcccaactcagt

SEQ ID NO: 761902 - DNA, 33 bp, Homo sapien
gcattctactggataatgagctcccaactcagt

SEQ ID NO: 761903 - DNA, 33 bp, Homo sapien
gctctgggcttttccactgatgaatttcctata

SEQ ID NO: 761904 - DNA, 33 bp, Homo sapien
gctctgggcttttccattgatgaatttcctata

SEQ ID NO: 761905 - DNA, 33 bp, Homo sapien
tctttttcaagtaaaaattcaatcaaatcaatt

SEQ ID NO: 761906 - DNA, 33 bp, Homo sapien
tctttttcaagtaaaagttcaatcaaatcaatt

SEQ ID NO: 761907 - DNA, 33 bp, Homo sapien
tatctttttttctgacaccacttgccttttatt

SEQ ID NO: 761908 - DNA, 33 bp, Homo sapien
tatctttttttctgacgccacttgccttttatt

SEQ ID NO: 761909 - DNA, 33 bp, Homo sapien
aatatatagtctccacaatcaaatgtagctcat

SEQ ID NO: 761910 - DNA, 33 bp, Homo sapien
aatatatagtctccacgatcaaatgtagctcat

SEQ ID NO: 761911 - DNA, 33 bp, Homo sapien
gaaaaagaagtatcagaatcgacgaaatacgtt

SEQ ID NO: 761912 - DNA, 33 bp, Homo sapien
gaaaaagaagtatcagcatcgacgaaatacgtt

SEQ ID NO: 761913 - DNA, 33 bp, Homo sapien
atgatgtattccataacgaaacttcaaaaccta

SEQ ID NO: 761914 - DNA, 33 bp, Homo sapien
atgatgtattccataatgaaacttcaaaaccta

SEQ ID NO: 761915 - DNA, 33 bp, Homo sapien
gtaattcaatggattccagcatgaaagctatgg

SEQ ID NO: 761916 - DNA, 33 bp, Homo sapien
gtaattcaatggattctagcatgaaagctatgg

SEQ ID NO: 761917 - DNA, 33 bp, Homo sapien
tatgttgaaaataatgaatggacttcttctatg

SEQ ID NO: 761918 - DNA, 33 bp, Homo sapien
tatgttgaaaataatgcatggacttcttctatg

SEQ ID NO: 761919 - DNA, 33 bp, Homo sapien
aaacaaaaccaagtccaagaaaaattgcaacaa

SEQ ID NO: 761920 - DNA, 33 bp, Homo sapien
aaacaaaaccaagtccgagaaaaattgcaacaa

SEQ ID NO: 761921 - DNA, 33 bp, Homo sapien
tgcttctgtaataatacgaaattagtttggcct

SEQ ID NO: 761922 - DNA, 33 bp, Homo sapien
tgcttctgtaataatatgaaattagtttggcct

SEQ ID NO: 761923 - DNA, 33 bp, Homo sapien
aagagcccagcatcgaagtcacataatatcctg

SEQ ID NO: 761924 - DNA, 33 bp, Homo sapien
aagagcccagcatcgaggtcacataatatcctg

SEQ ID NO: 761925 - DNA, 33 bp, Homo sapien
atggcatgtcaggagacgggttgcacagcagga

SEQ ID NO: 761926 - DNA, 33 bp, Homo sapien
atggcatgtcaggagatgggttgcacagcagga

SEQ ID NO: 761927 - DNA, 33 bp, Homo sapien
gcagcaggacaccaagcatgatcttagcctaac

SEQ ID NO: 761928 - DNA, 33 bp, Homo sapien
gcagcaggacaccaagtatgatcttagcctaac

SEQ ID NO: 761929 - DNA, 33 bp, Homo sapien
agagaaaggaaattgacgtagctctgcagcagg

SEQ ID NO: 761930 - DNA, 33 bp, Homo sapien
agagaaaggaaattgatgtagctctgcagcagg

SEQ ID NO: 761931 - DNA, 33 bp, Homo sapien
gaattcagatgtcttagataatcaactcacttc

SEQ ID NO: 761932 - DNA, 33 bp, Homo sapien
gaattcagatgtcttatataatcaactcacttc

SEQ ID NO: 761933 - DNA, 33 bp, Homo sapien
gaacctgatgcagagaggtcttttgctccaaga

SEQ ID NO: 761934 - DNA, 33 bp, Homo sapien
gaacctgatgcagagatgtcttttgctccaaga

SEQ ID NO: 761935 - DNA, 33 bp, Homo sapien
ataagcatagtgtataagataaattaacctgta

SEQ ID NO: 761936 - DNA, 33 bp, Homo sapien
ataagcatagtgtatacgataaattaacctgta

SEQ ID NO: 761937 - DNA, 33 bp, Homo sapien
ttgagctaaatactacaaccaccctaataagcc

SEQ ID NO: 761938 - DNA, 33 bp, Homo sapien
ttgagctaaatactacgaccaccctaataagcc

SEQ ID NO: 761939 - DNA, 33 bp, Homo sapien
agaaagtgacaccatcaacataccagaggccaa

SEQ ID NO: 761940 - DNA, 33 bp, Homo sapien
agaaagtgacaccatccacataccagaggccaa

SEQ ID NO: 761941 - DNA, 33 bp, Homo sapien
agtggaaacataaaccactctcactgagacaga

SEQ ID NO: 761942 - DNA, 33 bp, Homo sapien
agtggaaacataaacctctctcactgagacaga

SEQ ID NO: 761943 - DNA, 33 bp, Homo sapien
atttcttaaatggacaagcataccttaaaaata

SEQ ID NO: 761944 - DNA, 33 bp, Homo sapien
atttcttaaatggacaggcataccttaaaaata

SEQ ID NO: 761945 - DNA, 33 bp, Homo sapien
gactgcctgtatcccccgaagtgattaaactat

SEQ ID NO: 761946 - DNA, 33 bp, Homo sapien
gactgcctgtatcccctgaagtgattaaactat

SEQ ID NO: 761947 - DNA, 33 bp, Homo sapien
gttatttatttcttgcggagacatattgttgaa

SEQ ID NO: 761948 - DNA, 33 bp, Homo sapien
gttatttatttcttgctgagacatattgttgaa

SEQ ID NO: 761949 - DNA, 33 bp, Homo sapien
gagaataagagggtgacgaagactgacacatat

SEQ ID NO: 761950 - DNA, 33 bp, Homo sapien
gagaataagagggtgatgaagactgacacatat

SEQ ID NO: 761951 - DNA, 33 bp, Homo sapien
tttaaaatcaattataaaccaaagttcaccaat

SEQ ID NO: 761952 - DNA, 33 bp, Homo sapien
tttaaaatcaattatagaccaaagttcaccaat

SEQ ID NO: 761953 - DNA, 33 bp, Homo sapien
aaggaactgattgacaaggaaagctaagaattt

SEQ ID NO: 761954 - DNA, 33 bp, Homo sapien
aaggaactgattgacacggaaagctaagaattt

SEQ ID NO: 761955 - DNA, 33 bp, Homo sapien
aaagtaagtcacgatacataggctcaaatacaa

SEQ ID NO: 761956 - DNA, 33 bp, Homo sapien
aaagtaagtcacgatatataggctcaaatacaa

SEQ ID NO: 761957 - DNA, 33 bp, Homo sapien
tacattcccacaagaagtataacagttcttcct

SEQ ID NO: 761958 - DNA, 33 bp, Homo sapien
tacattcccacaagaattataacagttcttcct

SEQ ID NO: 761959 - DNA, 33 bp, Homo sapien
acacacattgagccagaagaaggtcacagaact

SEQ ID NO: 761960 - DNA, 33 bp, Homo sapien
acacacattgagccaggagaaggtcacagaact

SEQ ID NO: 761961 - DNA, 33 bp, Homo sapien
tatgacttctttttcaactatctgttaggtatt

SEQ ID NO: 761962 - DNA, 33 bp, Homo sapien
tatgacttctttttcatctatctgttaggtatt

SEQ ID NO: 761963 - DNA, 33 bp, Homo sapien
cctccttttagcaccaccatgaggaacatctca

SEQ ID NO: 761964 - DNA, 33 bp, Homo sapien
cctccttttagcaccatcatgaggaacatctca

SEQ ID NO: 761965 - DNA, 33 bp, Homo sapien
ccagtatccagaaaaacgttcaacttcctccct

SEQ ID NO: 761966 - DNA, 33 bp, Homo sapien
ccagtatccagaaaaatgttcaacttcctccct

SEQ ID NO: 761967 - DNA, 33 bp, Homo sapien
attctagttctttgtaagccttccaatttgtgc

SEQ ID NO: 761968 - DNA, 33 bp, Homo sapien
attctagttctttgtaggccttccaatttgtgc

SEQ ID NO: 761969 - DNA, 33 bp, Homo sapien
ttaatatctggatcccaagaagggaaaaacaga

SEQ ID NO: 761970 - DNA, 33 bp, Homo sapien
ttaatatctggatcccgagaagggaaaaacaga

SEQ ID NO: 761971 - DNA, 33 bp, Homo sapien
ttgggtctgtgttggactattgagtgctgcttc

SEQ ID NO: 761972 - DNA, 33 bp, Homo sapien
ttgggtctgtgttggattattgagtgctgcttc

SEQ ID NO: 761973 - DNA, 33 bp, Homo sapien
aatatatctatatcaaagttccttgacttacaa

SEQ ID NO: 761974 - DNA, 33 bp, Homo sapien
aatatatctatatcaatgttccttgacttacaa

SEQ ID NO: 761975 - DNA, 33 bp, Homo sapien
atctatatccatctgaaaaaaacaagcaatgag

SEQ ID NO: 761976 - DNA, 33 bp, Homo sapien
atctatatccatctgacaaaaacaagcaatgag

SEQ ID NO: 761977 - DNA, 33 bp, Homo sapien
cattcctgacaagcgacggaattaagagaaatg

SEQ ID NO: 761978 - DNA, 33 bp, Homo sapien
cattcctgacaagcgatggaattaagagaaatg

SEQ ID NO: 761979 - DNA, 33 bp, Homo sapien
atctattcattcatcaatctaacctccctactt

SEQ ID NO: 761980 - DNA, 33 bp, Homo sapien
atctattcattcatcagtctaacctccctactt

SEQ ID NO: 761981 - DNA, 33 bp, Homo sapien
tgctccatacaaaagaaagagtaaaatctagaa

SEQ ID NO: 761982 - DNA, 33 bp, Homo sapien
tgctccatacaaaagagagagtaaaatctagaa

SEQ ID NO: 761983 - DNA, 33 bp, Homo sapien
aagatcacaaatctaacgatgcaaaacttgtag

SEQ ID NO: 761984 - DNA, 33 bp, Homo sapien
aagatcacaaatctaatgatgcaaaacttgtag

SEQ ID NO: 761985 - DNA, 33 bp, Homo sapien
gagagtaatgacacagaatagccatgctgaata

SEQ ID NO: 761986 - DNA, 33 bp, Homo sapien
gagagtaatgacacaggatagccatgctgaata

SEQ ID NO: 761987 - DNA, 33 bp, Homo sapien
tcttcagcaaagattacagtagctgaacagtga

SEQ ID NO: 761988 - DNA, 33 bp, Homo sapien
tcttcagcaaagattatagtagctgaacagtga

SEQ ID NO: 761989 - DNA, 33 bp, Homo sapien
ttcccttccttttccaatctcttcttgccattt

SEQ ID NO: 761990 - DNA, 33 bp, Homo sapien
ttcccttccttttccagtctcttcttgccattt

SEQ ID NO: 761991 - DNA, 33 bp, Homo sapien
ttataaaatgcctttgaaagaaagattgaacta

SEQ ID NO: 761992 - DNA, 33 bp, Homo sapien
ttataaaatgcctttggaagaaagattgaacta

SEQ ID NO: 761993 - DNA, 33 bp, Homo sapien
ggggtactgtgataacggcaaatatttttaaaa

SEQ ID NO: 761994 - DNA, 33 bp, Homo sapien
ggggtactgtgataactgcaaatatttttaaaa

SEQ ID NO: 761995 - DNA, 33 bp, Homo sapien
aactctccttatttgcacataacataattgtgt

SEQ ID NO: 761996 - DNA, 33 bp, Homo sapien
aactctccttatttgcgcataacataattgtgt

SEQ ID NO: 761997 - DNA, 33 bp, Homo sapien
ttgagaaaaaatagcaacagtgtcaaaaaacaa

SEQ ID NO: 761998 - DNA, 33 bp, Homo sapien
ttgagaaaaaatagcatcagtgtcaaaaaacaa

SEQ ID NO: 761999 - DNA, 33 bp, Homo sapien
gggattccccatgttaaaagagctccgaaatga

SEQ ID NO: 762000 - DNA, 33 bp, Homo sapien
gggattccccatgttacaagagctccgaaatga

SEQ ID NO: 762001 - DNA, 33 bp, Homo sapien
gtgtgaatcctctggacatttttatgccttgtg

SEQ ID NO: 762002 - DNA, 33 bp, Homo sapien
gtgtgaatcctctggatatttttatgccttgtg

SEQ ID NO: 762003 - DNA, 33 bp, Homo sapien
ttgtttccaggcagtcccctagttagtgtcagg

SEQ ID NO: 762004 - DNA, 33 bp, Homo sapien
ttgtttccaggcagtctcctagttagtgtcagg

SEQ ID NO: 762005 - DNA, 33 bp, Homo sapien
tagatacatcttcaagacaaagtcctctgctat

SEQ ID NO: 762006 - DNA, 33 bp, Homo sapien
tagatacatcttcaaggcaaagtcctctgctat

SEQ ID NO: 762007 - DNA, 33 bp, Homo sapien
tgtgcatatggtgtaacagttgtttcttctgat

SEQ ID NO: 762008 - DNA, 33 bp, Homo sapien
tgtgcatatggtgtaatagttgtttcttctgat

SEQ ID NO: 762009 - DNA, 33 bp, Homo sapien
agatacttcagcaaaaatggtagatggatgaca

SEQ ID NO: 762010 - DNA, 33 bp, Homo sapien
agatacttcagcaaaagtggtagatggatgaca

SEQ ID NO: 762011 - DNA, 33 bp, Homo sapien
gaaataaatcaactccaacctgagaaactaaat

SEQ ID NO: 762012 - DNA, 33 bp, Homo sapien
gaaataaatcaactccgacctgagaaactaaat

SEQ ID NO: 762013 - DNA, 33 bp, Homo sapien
tttgatgacctttaaacctggttcctccactct

SEQ ID NO: 762014 - DNA, 33 bp, Homo sapien
tttgatgacctttaaatctggttcctccactct

SEQ ID NO: 762015 - DNA, 33 bp, Homo sapien
agcataataactaaaaggcagtttttgatcctc

SEQ ID NO: 762016 - DNA, 33 bp, Homo sapien
agcataataactaaaatgcagtttttgatcctc

SEQ ID NO: 762017 - DNA, 33 bp, Homo sapien
cctctgagcctcaaacactttatccacctctgc

SEQ ID NO: 762018 - DNA, 33 bp, Homo sapien
cctctgagcctcaaacgctttatccacctctgc

SEQ ID NO: 762019 - DNA, 33 bp, Homo sapien
tgagccccgggaattacggaatgcccatgttcc

SEQ ID NO: 762020 - DNA, 33 bp, Homo sapien
tgagccccgggaattatggaatgcccatgttcc

SEQ ID NO: 762021 - DNA, 33 bp, Homo sapien
cttgttatatcttaaccattggagggctcagat

SEQ ID NO: 762022 - DNA, 33 bp, Homo sapien
cttgttatatcttaacgattggagggctcagat

SEQ ID NO: 762023 - DNA, 33 bp, Homo sapien
tatatgtactgagaaaagttttccatgagggac

SEQ ID NO: 762024 - DNA, 33 bp, Homo sapien
tatatgtactgagaaatgttttccatgagggac

SEQ ID NO: 762025 - DNA, 33 bp, Homo sapien
cctagttcaggtaagcccagtggagaccagagg

SEQ ID NO: 762026 - DNA, 33 bp, Homo sapien
cctagttcaggtaagcgcagtggagaccagagg

SEQ ID NO: 762027 - DNA, 33 bp, Homo sapien
gcttaagataaaggaaaggccctcgacctgaga

SEQ ID NO: 762028 - DNA, 33 bp, Homo sapien
gcttaagataaaggaagggccctcgacctgaga

SEQ ID NO: 762029 - DNA, 33 bp, Homo sapien
gatcatagttcaccataactttgaactcctggg

SEQ ID NO: 762030 - DNA, 33 bp, Homo sapien
gatcatagttcaccatgactttgaactcctggg

SEQ ID NO: 762031 - DNA, 33 bp, Homo sapien
tagctttctagaggataagagacaatatgaagt

SEQ ID NO: 762032 - DNA, 33 bp, Homo sapien
tagctttctagaggatgagagacaatatgaagt

SEQ ID NO: 762033 - DNA, 33 bp, Homo sapien
gagggaaaagaagagggatagcaagagggaaag

SEQ ID NO: 762034 - DNA, 33 bp, Homo sapien
gagggaaaagaagaggtatagcaagagggaaag

SEQ ID NO: 762035 - DNA, 33 bp, Homo sapien
tcttagtggtagagaaaagaattcagaagcaaa

SEQ ID NO: 762036 - DNA, 33 bp, Homo sapien
tcttagtggtagagaatagaattcagaagcaaa

SEQ ID NO: 762037 - DNA, 33 bp, Homo sapien
gacaagctatgccttaacctgtgtagccacaac

SEQ ID NO: 762038 - DNA, 33 bp, Homo sapien
gacaagctatgccttatcctgtgtagccacaac

SEQ ID NO: 762039 - DNA, 33 bp, Homo sapien
cactctatgccaagaaagataggtagtgatcag

SEQ ID NO: 762040 - DNA, 33 bp, Homo sapien
cactctatgccaagaaggataggtagtgatcag

SEQ ID NO: 762041 - DNA, 33 bp, Homo sapien
ctgggcaatggaataaaacatagactggaggtt

SEQ ID NO: 762042 - DNA, 33 bp, Homo sapien
ctgggcaatggaataagacatagactggaggtt

SEQ ID NO: 762043 - DNA, 33 bp, Homo sapien
aagtcttcaaaagtaagtgtagtatatgtgaat

SEQ ID NO: 762044 - DNA, 33 bp, Homo sapien
aagtcttcaaaagtaattgtagtatatgtgaat

SEQ ID NO: 762045 - DNA, 33 bp, Homo sapien
gttaaagacagctgtacagaaggggcaagtcac

SEQ ID NO: 762046 - DNA, 33 bp, Homo sapien
gttaaagacagctgtagagaaggggcaagtcac

SEQ ID NO: 762047 - DNA, 33 bp, Homo sapien
gaacaaaccatctgagaaatatggaattatgta

SEQ ID NO: 762048 - DNA, 33 bp, Homo sapien
gaacaaaccatctgaggaatatggaattatgta

SEQ ID NO: 762049 - DNA, 33 bp, Homo sapien
gcggccactaggaagaaacttgtttgggcatct

SEQ ID NO: 762050 - DNA, 33 bp, Homo sapien
gcggccactaggaagagacttgtttgggcatct

SEQ ID NO: 762051 - DNA, 33 bp, Homo sapien
tgttttactctactgaactacacttattgtcat

SEQ ID NO: 762052 - DNA, 33 bp, Homo sapien
tgttttactctactgagctacacttattgtcat

SEQ ID NO: 762053 - DNA, 33 bp, Homo sapien
atatatataatagatacgtacttggcttctttg

SEQ ID NO: 762054 - DNA, 33 bp, Homo sapien
atatatataatagatatgtacttggcttctttg

SEQ ID NO: 762055 - DNA, 33 bp, Homo sapien
ggcctttcagagcacccaataacattgaatcac

SEQ ID NO: 762056 - DNA, 33 bp, Homo sapien
ggcctttcagagcacctaataacattgaatcac

SEQ ID NO: 762057 - DNA, 33 bp, Homo sapien
aatcacttccttaacaaaatacagctatgcacc

SEQ ID NO: 762058 - DNA, 33 bp, Homo sapien
aatcacttccttaacacaatacagctatgcacc

SEQ ID NO: 762059 - DNA, 33 bp, Homo sapien
cagaatctgtatcacccagcactggccaatgta

SEQ ID NO: 762060 - DNA, 33 bp, Homo sapien
cagaatctgtatcacctagcactggccaatgta

SEQ ID NO: 762061 - DNA, 33 bp, Homo sapien
agacaattgggagaaacaacaggacccgggcat

SEQ ID NO: 762062 - DNA, 33 bp, Homo sapien
agacaattgggagaaataacaggacccgggcat

SEQ ID NO: 762063 - DNA, 33 bp, Homo sapien
taagtggattttaacaatggtctaagctatttt

SEQ ID NO: 762064 - DNA, 33 bp, Homo sapien
taagtggattttaacagtggtctaagctatttt

SEQ ID NO: 762065 - DNA, 33 bp, Homo sapien
caaataagaatatccacagccaaaccaggacat

SEQ ID NO: 762066 - DNA, 33 bp, Homo sapien
caaataagaatatccatagccaaaccaggacat

SEQ ID NO: 762067 - DNA, 33 bp, Homo sapien
ttgtgttaactttccacctttctgctgaattta

SEQ ID NO: 762068 - DNA, 33 bp, Homo sapien
ttgtgttaactttccatctttctgctgaattta

SEQ ID NO: 762069 - DNA, 33 bp, Homo sapien
tggaaagttaacacaagtcaaaagggagtatga

SEQ ID NO: 762070 - DNA, 33 bp, Homo sapien
tggaaagttaacacaattcaaaagggagtatga

SEQ ID NO: 762071 - DNA, 33 bp, Homo sapien
gttgcagaaactcaaacgctatgaaggaaatgg

SEQ ID NO: 762072 - DNA, 33 bp, Homo sapien
gttgcagaaactcaaatgctatgaaggaaatgg

SEQ ID NO: 762073 - DNA, 33 bp, Homo sapien
ggttctccttgagggcacagccactgtagcaga

SEQ ID NO: 762074 - DNA, 33 bp, Homo sapien
ggttctccttgagggcgcagccactgtagcaga

SEQ ID NO: 762075 - DNA, 33 bp, Homo sapien
gtttttgtgtggacaaatgtttgcaactgattt

SEQ ID NO: 762076 - DNA, 33 bp, Homo sapien
gtttttgtgtggacaagtgtttgcaactgattt

SEQ ID NO: 762077 - DNA, 33 bp, Homo sapien
tgatctagacataaaaagagatgtacaattacc

SEQ ID NO: 762078 - DNA, 33 bp, Homo sapien
tgatctagacataaaaggagatgtacaattacc

SEQ ID NO: 762079 - DNA, 33 bp, Homo sapien
aaagttacaggactcaaaaacctcacaggtctc

SEQ ID NO: 762080 - DNA, 33 bp, Homo sapien
aaagttacaggactcagaaacctcacaggtctc

SEQ ID NO: 762081 - DNA, 33 bp, Homo sapien
ctcagctttagttgaagagagtactaggtagat

SEQ ID NO: 762082 - DNA, 33 bp, Homo sapien
ctcagctttagttgaatagagtactaggtagat

SEQ ID NO: 762083 - DNA, 33 bp, Homo sapien
tagaacggcttcccaactccgttttagagctct

SEQ ID NO: 762084 - DNA, 33 bp, Homo sapien
tagaacggcttcccaattccgttttagagctct

SEQ ID NO: 762085 - DNA, 33 bp, Homo sapien
cctgtattcatgggccgatagttttctcacaaa

SEQ ID NO: 762086 - DNA, 33 bp, Homo sapien
cctgtattcatgggcctatagttttctcacaaa

SEQ ID NO: 762087 - DNA, 33 bp, Homo sapien
gtctgcagtaccaggacaccaaaggtttctcca

SEQ ID NO: 762088 - DNA, 33 bp, Homo sapien
gtctgcagtaccaggataccaaaggtttctcca

SEQ ID NO: 762089 - DNA, 33 bp, Homo sapien
cagtctaagtatgggaacttcagtaaggaggtg

SEQ ID NO: 762090 - DNA, 33 bp, Homo sapien
cagtctaagtatgggagcttcagtaaggaggtg

SEQ ID NO: 762091 - DNA, 33 bp, Homo sapien
ccactccatagcctcactctctttcttctgtcg

SEQ ID NO: 762092 - DNA, 33 bp, Homo sapien
ccactccatagcctcattctctttcttctgtcg

SEQ ID NO: 762093 - DNA, 33 bp, Homo sapien
agtgaggaggaatgtaacactgaggcagagaag

SEQ ID NO: 762094 - DNA, 33 bp, Homo sapien
agtgaggaggaatgtaccactgaggcagagaag

SEQ ID NO: 762095 - DNA, 33 bp, Homo sapien
gccctgacgatctggcacagggtcttgtattta

SEQ ID NO: 762096 - DNA, 33 bp, Homo sapien
gccctgacgatctggcgcagggtcttgtattta

SEQ ID NO: 762097 - DNA, 33 bp, Homo sapien
ttgacgaatttgagtccaagtaatgggcaccca

SEQ ID NO: 762098 - DNA, 33 bp, Homo sapien
ttgacgaatttgagtctaagtaatgggcaccca

SEQ ID NO: 762099 - DNA, 33 bp, Homo sapien
ccaattctttacaggaatataggcctgtctaaa

SEQ ID NO: 762100 - DNA, 33 bp, Homo sapien
ccaattctttacaggagtataggcctgtctaaa

SEQ ID NO: 762101 - DNA, 33 bp, Homo sapien
attgcacttatgctgcccttctttcagttctgt

SEQ ID NO: 762102 - DNA, 33 bp, Homo sapien
attgcacttatgctgctcttctttcagttctgt

SEQ ID NO: 762103 - DNA, 33 bp, Homo sapien
cctgactcctgccatacagtttagacataaata

SEQ ID NO: 762104 - DNA, 33 bp, Homo sapien
cctgactcctgccatagagtttagacataaata

SEQ ID NO: 762105 - DNA, 33 bp, Homo sapien
aatacaccttctcttcccagacttaattctatc

SEQ ID NO: 762106 - DNA, 33 bp, Homo sapien
aatacaccttctcttctcagacttaattctatc

SEQ ID NO: 762107 - DNA, 33 bp, Homo sapien
aatactcggtcagtgacgtaagcattagttcat

SEQ ID NO: 762108 - DNA, 33 bp, Homo sapien
aatactcggtcagtgatgtaagcattagttcat

SEQ ID NO: 762109 - DNA, 33 bp, Homo sapien
caaagaaatcacataaaagcacattatctcata

SEQ ID NO: 762110 - DNA, 33 bp, Homo sapien
caaagaaatcacataagagcacattatctcata

SEQ ID NO: 762111 - DNA, 33 bp, Homo sapien
ccacctcgtttgcttcgctcctatttcttcttc

SEQ ID NO: 762112 - DNA, 33 bp, Homo sapien
ccacctcgtttgcttctctcctatttcttcttc

SEQ ID NO: 762113 - DNA, 33 bp, Homo sapien
agcacacaaacacttaccgttgcgttacaattg

SEQ ID NO: 762114 - DNA, 33 bp, Homo sapien
agcacacaaacacttatcgttgcgttacaattg

SEQ ID NO: 762115 - DNA, 33 bp, Homo sapien
gatttcattaaagttacgagacaattcagtaaa

SEQ ID NO: 762116 - DNA, 33 bp, Homo sapien
gatttcattaaagttaggagacaattcagtaaa

SEQ ID NO: 762117 - DNA, 33 bp, Homo sapien
cttcttcccctcactacggtcttgtttcatggg

SEQ ID NO: 762118 - DNA, 33 bp, Homo sapien
cttcttcccctcactatggtcttgtttcatggg

SEQ ID NO: 762119 - DNA, 33 bp, Homo sapien
tatgcaagaaatgatacgaagtcctcacaaact

SEQ ID NO: 762120 - DNA, 33 bp, Homo sapien
tatgcaagaaatgataggaagtcctcacaaact

SEQ ID NO: 762121 - DNA, 33 bp, Homo sapien
atcctggttacatgaaacaattcggacacatca

SEQ ID NO: 762122 - DNA, 33 bp, Homo sapien
atcctggttacatgaagcaattcggacacatca

SEQ ID NO: 762123 - DNA, 33 bp, Homo sapien
atacttataaagcaaacaaaacagcaaaatatg

SEQ ID NO: 762124 - DNA, 33 bp, Homo sapien
atacttataaagcaaataaaacagcaaaatatg

SEQ ID NO: 762125 - DNA, 33 bp, Homo sapien
agttgtggtgaatataaatctgtgcagggtgat

SEQ ID NO: 762126 - DNA, 33 bp, Homo sapien
agttgtggtgaatatacatctgtgcagggtgat

SEQ ID NO: 762127 - DNA, 33 bp, Homo sapien
tatataaaggtacttaacataaagcatagccta

SEQ ID NO: 762128 - DNA, 33 bp, Homo sapien
tatataaaggtacttagcataaagcatagccta

SEQ ID NO: 762129 - DNA, 33 bp, Homo sapien
atgaatttccagaaacaacaactctatagaaat

SEQ ID NO: 762130 - DNA, 33 bp, Homo sapien
atgaatttccagaaacgacaactctatagaaat

SEQ ID NO: 762131 - DNA, 33 bp, Homo sapien
attggaataccattcaataacaaaaaagaaaca

SEQ ID NO: 762132 - DNA, 33 bp, Homo sapien
attggaataccattcagtaacaaaaaagaaaca

SEQ ID NO: 762133 - DNA, 33 bp, Homo sapien
taattacctcagatccaaaatctttgttttctt

SEQ ID NO: 762134 - DNA, 33 bp, Homo sapien
taattacctcagatccgaaatctttgttttctt

SEQ ID NO: 762135 - DNA, 33 bp, Homo sapien
tgagtgaatcttgagcccttatggtaagtgaaa

SEQ ID NO: 762136 - DNA, 33 bp, Homo sapien
tgagtgaatcttgagcgcttatggtaagtgaaa

SEQ ID NO: 762137 - DNA, 33 bp, Homo sapien
ggtaataactgtatccacatccttgtacagcca

SEQ ID NO: 762138 - DNA, 33 bp, Homo sapien
ggtaataactgtatccgcatccttgtacagcca

SEQ ID NO: 762139 - DNA, 33 bp, Homo sapien
tctaccagagtaagggaagaactggatatctga

SEQ ID NO: 762140 - DNA, 33 bp, Homo sapien
tctaccagagtaaggggagaactggatatctga

SEQ ID NO: 762141 - DNA, 33 bp, Homo sapien
ggtgttctatgtggacaaaaccttactagcttg

SEQ ID NO: 762142 - DNA, 33 bp, Homo sapien
ggtgttctatgtggactaaaccttactagcttg

SEQ ID NO: 762143 - DNA, 33 bp, Homo sapien
aatgaaaattggaacacataggtttgaggtagg

SEQ ID NO: 762144 - DNA, 33 bp, Homo sapien
aatgaaaattggaacagataggtttgaggtagg

SEQ ID NO: 762145 - DNA, 33 bp, Homo sapien
tcctgaccaagttgctcacctgagaggggtgcc

SEQ ID NO: 762146 - DNA, 33 bp, Homo sapien
tcctgaccaagttgcttacctgagaggggtgcc

SEQ ID NO: 762147 - DNA, 33 bp, Homo sapien
tcactagttttgtatcagataaagtatacagta

SEQ ID NO: 762148 - DNA, 33 bp, Homo sapien
tcactagttttgtatcggataaagtatacagta

SEQ ID NO: 762149 - DNA, 33 bp, Homo sapien
attgaagatcactaaaataccttcctgttagtc

SEQ ID NO: 762150 - DNA, 33 bp, Homo sapien
attgaagatcactaaagtaccttcctgttagtc

SEQ ID NO: 762151 - DNA, 33 bp, Homo sapien
atacacatcgttttaaaaaatgctctagattgg

SEQ ID NO: 762152 - DNA, 33 bp, Homo sapien
atacacatcgttttaagaaatgctctagattgg

SEQ ID NO: 762153 - DNA, 33 bp, Homo sapien
taggatccgttttcataagtaaataacaaatgc

SEQ ID NO: 762154 - DNA, 33 bp, Homo sapien
taggatccgttttcatgagtaaataacaaatgc

SEQ ID NO: 762155 - DNA, 33 bp, Homo sapien
tggaggtttctatcaaattccagggacaggcag

SEQ ID NO: 762156 - DNA, 33 bp, Homo sapien
tggaggtttctatcaagttccagggacaggcag

SEQ ID NO: 762157 - DNA, 33 bp, Homo sapien
aagaagagttgtattcccaaaagcagaaataac

SEQ ID NO: 762158 - DNA, 33 bp, Homo sapien
aagaagagttgtattctcaaaagcagaaataac

SEQ ID NO: 762159 - DNA, 33 bp, Homo sapien
ttatatcaaataagtacatggattggagcttgg

SEQ ID NO: 762160 - DNA, 33 bp, Homo sapien
ttatatcaaataagtatatggattggagcttgg

SEQ ID NO: 762161 - DNA, 33 bp, Homo sapien
tatttcccatcttctggcacacaaatgtttcac

SEQ ID NO: 762162 - DNA, 33 bp, Homo sapien
tatttcccatcttctgtcacacaaatgtttcac

SEQ ID NO: 762163 - DNA, 33 bp, Homo sapien
aataagattatgacacaaagccggagagttgat

SEQ ID NO: 762164 - DNA, 33 bp, Homo sapien
aataagattatgacaccaagccggagagttgat

SEQ ID NO: 762165 - DNA, 33 bp, Homo sapien
ataacagatactaggacatgtgttaatttgctc

SEQ ID NO: 762166 - DNA, 33 bp, Homo sapien
ataacagatactaggagatgtgttaatttgctc

SEQ ID NO: 762167 - DNA, 33 bp, Homo sapien
ctcccactcagggcaaccctagcagacttgagg

SEQ ID NO: 762168 - DNA, 33 bp, Homo sapien
ctcccactcagggcaatcctagcagacttgagg

SEQ ID NO: 762169 - DNA, 33 bp, Homo sapien
aatctgatgagcttcaagcaaatataaagcagg

SEQ ID NO: 762170 - DNA, 33 bp, Homo sapien
aatctgatgagcttcaggcaaatataaagcagg

SEQ ID NO: 762171 - DNA, 33 bp, Homo sapien
ttgagcctgtaaaagacggtaattccctggaga

SEQ ID NO: 762172 - DNA, 33 bp, Homo sapien
ttgagcctgtaaaagatggtaattccctggaga

SEQ ID NO: 762173 - DNA, 33 bp, Homo sapien
aaacaattaatctgccaaaaaagatggctacaa

SEQ ID NO: 762174 - DNA, 33 bp, Homo sapien
aaacaattaatctgcctaaaaagatggctacaa

SEQ ID NO: 762175 - DNA, 33 bp, Homo sapien
actttcagctgacagaactaggaaatacatttg

SEQ ID NO: 762176 - DNA, 33 bp, Homo sapien
actttcagctgacagagctaggaaatacatttg

SEQ ID NO: 762177 - DNA, 33 bp, Homo sapien
cctccttgactttggacgtctctacaaactcct

SEQ ID NO: 762178 - DNA, 33 bp, Homo sapien
cctccttgactttggatgtctctacaaactcct

SEQ ID NO: 762179 - DNA, 33 bp, Homo sapien
gtaatttaggcactacaaaaatgaaaaaaaaaa

SEQ ID NO: 762180 - DNA, 33 bp, Homo sapien
gtaatttaggcactacgaaaatgaaaaaaaaaa

SEQ ID NO: 762181 - DNA, 33 bp, Homo sapien
agaaggtagagtaagaataaatatacatagcac

SEQ ID NO: 762182 - DNA, 33 bp, Homo sapien
agaaggtagagtaagagtaaatatacatagcac

SEQ ID NO: 762183 - DNA, 33 bp, Homo sapien
tatgtcaaaacatagaagttaatgtgaggatat

SEQ ID NO: 762184 - DNA, 33 bp, Homo sapien
tatgtcaaaacatagaggttaatgtgaggatat

SEQ ID NO: 762185 - DNA, 33 bp, Homo sapien
tctgggagtatcagagaaaagttggaggtggta

SEQ ID NO: 762186 - DNA, 33 bp, Homo sapien
tctgggagtatcagaggaaagttggaggtggta

SEQ ID NO: 762187 - DNA, 33 bp, Homo sapien
gtaattttcagagaacaaaacatagcgtcaaag

SEQ ID NO: 762188 - DNA, 33 bp, Homo sapien
gtaattttcagagaaccaaacatagcgtcaaag

SEQ ID NO: 762189 - DNA, 33 bp, Homo sapien
taatcagggaaattccaatcaaaactcacattt

SEQ ID NO: 762190 - DNA, 33 bp, Homo sapien
taatcagggaaattccgatcaaaactcacattt

SEQ ID NO: 762191 - DNA, 33 bp, Homo sapien
ccaaagtatgagtggtaaaataaatggttaata

SEQ ID NO: 762192 - DNA, 33 bp, Homo sapien
ccaaagtatgagtggtgaaataaatggttaata

SEQ ID NO: 762193 - DNA, 33 bp, Homo sapien
gttgacacaaacactccctgggctgcccctact

SEQ ID NO: 762194 - DNA, 33 bp, Homo sapien
gttgacacaaacactctctgggctgcccctact

SEQ ID NO: 762195 - DNA, 33 bp, Homo sapien
aattctaactgtctacggaattgactttcaaag

SEQ ID NO: 762196 - DNA, 33 bp, Homo sapien
aattctaactgtctactgaattgactttcaaag

SEQ ID NO: 762197 - DNA, 33 bp, Homo sapien
cctgcagacaccattgcaaagggaagtcagctc

SEQ ID NO: 762198 - DNA, 33 bp, Homo sapien
cctgcagacaccattgtaaagggaagtcagctc

SEQ ID NO: 762199 - DNA, 33 bp, Homo sapien
agagatcaacgaaatgccacccaccaaccccag

SEQ ID NO: 762200 - DNA, 33 bp, Homo sapien
agagatcaacgaaatgtcacccaccaaccccag

SEQ ID NO: 762201 - DNA, 33 bp, Homo sapien
cttcagtgcagatagcaaaagttactataatgc

SEQ ID NO: 762202 - DNA, 33 bp, Homo sapien
cttcagtgcagatagcgaaagttactataatgc

SEQ ID NO: 762203 - DNA, 33 bp, Homo sapien
ttttgtaaaggcaataagataaaaatatagaat

SEQ ID NO: 762204 - DNA, 33 bp, Homo sapien
ttttgtaaaggcaatatgataaaaatatagaat

SEQ ID NO: 762205 - DNA, 33 bp, Homo sapien
agtcattagagcataaagtacacacagacaagc

SEQ ID NO: 762206 - DNA, 33 bp, Homo sapien
agtcattagagcataaggtacacacagacaagc

SEQ ID NO: 762207 - DNA, 33 bp, Homo sapien
ctctagattgttcttccaactacttttgccaat

SEQ ID NO: 762208 - DNA, 33 bp, Homo sapien
ctctagattgttcttctaactacttttgccaat

SEQ ID NO: 762209 - DNA, 33 bp, Homo sapien
tcctatacactgataacgaactagctgagaaat

SEQ ID NO: 762210 - DNA, 33 bp, Homo sapien
tcctatacactgataatgaactagctgagaaat

SEQ ID NO: 762211 - DNA, 33 bp, Homo sapien
tgtatggggacactgccactattaaaaccatta

SEQ ID NO: 762212 - DNA, 33 bp, Homo sapien
tgtatggggacactgctactattaaaaccatta

SEQ ID NO: 762213 - DNA, 33 bp, Homo sapien
ttatcacctttttcaacttcgtgagctgcaaga

SEQ ID NO: 762214 - DNA, 33 bp, Homo sapien
ttatcacctttttcaagttcgtgagctgcaaga

SEQ ID NO: 762215 - DNA, 33 bp, Homo sapien
aactttgcccacacttaaacttagttcatataa

SEQ ID NO: 762216 - DNA, 33 bp, Homo sapien
aactttgcccacacttcaacttagttcatataa

SEQ ID NO: 762217 - DNA, 33 bp, Homo sapien
aatgtcagttgtcaagccaatgggcaaaatgtc

SEQ ID NO: 762218 - DNA, 33 bp, Homo sapien
aatgtcagttgtcaagtcaatgggcaaaatgtc

SEQ ID NO: 762219 - DNA, 33 bp, Homo sapien
tctgtagaacgatcacaacaataaggataccaa

SEQ ID NO: 762220 - DNA, 33 bp, Homo sapien
tctgtagaacgatcacgacaataaggataccaa

SEQ ID NO: 762221 - DNA, 33 bp, Homo sapien
cctgaagctacttcaaacctcacatagacacac

SEQ ID NO: 762222 - DNA, 33 bp, Homo sapien
cctgaagctacttcaatcctcacatagacacac

SEQ ID NO: 762223 - DNA, 33 bp, Homo sapien
gaagctaaaggcacaacgcaggaaaaaaaatga

SEQ ID NO: 762224 - DNA, 33 bp, Homo sapien
gaagctaaaggcacaatgcaggaaaaaaaatga

SEQ ID NO: 762225 - DNA, 33 bp, Homo sapien
ttgttcagtttatagacgaagaaatgggacttc

SEQ ID NO: 762226 - DNA, 33 bp, Homo sapien
ttgttcagtttatagaggaagaaatgggacttc

SEQ ID NO: 762227 - DNA, 33 bp, Homo sapien
gatgaacggataaagaaattgttgtaaatatac

SEQ ID NO: 762228 - DNA, 33 bp, Homo sapien
gatgaacggataaagacattgttgtaaatatac

SEQ ID NO: 762229 - DNA, 33 bp, Homo sapien
ttctggggtactctcacagttcatttccctttc

SEQ ID NO: 762230 - DNA, 33 bp, Homo sapien
ttctggggtactctcatagttcatttccctttc

SEQ ID NO: 762231 - DNA, 33 bp, Homo sapien
caccttacctttaccacacaaaggagattaaca

SEQ ID NO: 762232 - DNA, 33 bp, Homo sapien
caccttacctttaccatacaaaggagattaaca

SEQ ID NO: 762233 - DNA, 33 bp, Homo sapien
gagagagctaacagaaacaatcacattgtcaaa

SEQ ID NO: 762234 - DNA, 33 bp, Homo sapien
gagagagctaacagaagcaatcacattgtcaaa

SEQ ID NO: 762235 - DNA, 33 bp, Homo sapien
tgtaatttggagataaatggattccagaccagc

SEQ ID NO: 762236 - DNA, 33 bp, Homo sapien
tgtaatttggagataagtggattccagaccagc

SEQ ID NO: 762237 - DNA, 33 bp, Homo sapien
cagggagtttgaggtacagtgtaatatgattgc

SEQ ID NO: 762238 - DNA, 33 bp, Homo sapien
cagggagtttgaggtatagtgtaatatgattgc

SEQ ID NO: 762239 - DNA, 33 bp, Homo sapien
gtcatgatgaggagtacaagagttactcaaaaa

SEQ ID NO: 762240 - DNA, 33 bp, Homo sapien
gtcatgatgaggagtagaagagttactcaaaaa

SEQ ID NO: 762241 - DNA, 33 bp, Homo sapien
aaagaaacaatcataacagaaagtgaaaccact

SEQ ID NO: 762242 - DNA, 33 bp, Homo sapien
aaagaaacaatcataatagaaagtgaaaccact

SEQ ID NO: 762243 - DNA, 33 bp, Homo sapien
acttttgttatttgtacctttcaacctgagaaa

SEQ ID NO: 762244 - DNA, 33 bp, Homo sapien
acttttgttatttgtagctttcaacctgagaaa

SEQ ID NO: 762245 - DNA, 33 bp, Homo sapien
tttgtggcagttttacagaagtatcataagtat

SEQ ID NO: 762246 - DNA, 33 bp, Homo sapien
tttgtggcagttttacggaagtatcataagtat

SEQ ID NO: 762247 - DNA, 33 bp, Homo sapien
acctccttatgtcttaacttgtaaagaatgcta

SEQ ID NO: 762248 - DNA, 33 bp, Homo sapien
acctccttatgtcttaccttgtaaagaatgcta

SEQ ID NO: 762249 - DNA, 33 bp, Homo sapien
acttcaggtctcagcacaatcagcttaaatgtc

SEQ ID NO: 762250 - DNA, 33 bp, Homo sapien
acttcaggtctcagcataatcagcttaaatgtc

SEQ ID NO: 762251 - DNA, 33 bp, Homo sapien
cactgccgcaagagcaataagcaaagttcacat

SEQ ID NO: 762252 - DNA, 33 bp, Homo sapien
cactgccgcaagagcattaagcaaagttcacat

SEQ ID NO: 762253 - DNA, 33 bp, Homo sapien
gattatataagagtaactgcaagtgagatgaat

SEQ ID NO: 762254 - DNA, 33 bp, Homo sapien
gattatataagagtaattgcaagtgagatgaat

SEQ ID NO: 762255 - DNA, 33 bp, Homo sapien
tctttgtcattgcactaaaaatctctttcaatt

SEQ ID NO: 762256 - DNA, 33 bp, Homo sapien
tctttgtcattgcactgaaaatctctttcaatt

SEQ ID NO: 762257 - DNA, 33 bp, Homo sapien
ataaatgtcttcttcagaattttcccgattgct

SEQ ID NO: 762258 - DNA, 33 bp, Homo sapien
ataaatgtcttcttcataattttcccgattgct

SEQ ID NO: 762259 - DNA, 33 bp, Homo sapien
ccctcatctaacatcaagcactattagaaaaag

SEQ ID NO: 762260 - DNA, 33 bp, Homo sapien
ccctcatctaacatcatgcactattagaaaaag

SEQ ID NO: 762261 - DNA, 33 bp, Homo sapien
gtgaaggatatgaggacgatgtttacaaaagta

SEQ ID NO: 762262 - DNA, 33 bp, Homo sapien
gtgaaggatatgaggatgatgtttacaaaagta

SEQ ID NO: 762263 - DNA, 33 bp, Homo sapien
caattcttcattttcaatataatgccacagaaa

SEQ ID NO: 762264 - DNA, 33 bp, Homo sapien
caattcttcattttcagtataatgccacagaaa

SEQ ID NO: 762265 - DNA, 33 bp, Homo sapien
atagatgttctttcaactgtgctttattttgag

SEQ ID NO: 762266 - DNA, 33 bp, Homo sapien
atagatgttctttcaattgtgctttattttgag

SEQ ID NO: 762267 - DNA, 33 bp, Homo sapien
ccagtgtcatactctcaaaaacttaagtttcat

SEQ ID NO: 762268 - DNA, 33 bp, Homo sapien
ccagtgtcatactctcgaaaacttaagtttcat

SEQ ID NO: 762269 - DNA, 33 bp, Homo sapien
aggaatctagtatttacgacaaaggattcatta

SEQ ID NO: 762270 - DNA, 33 bp, Homo sapien
aggaatctagtatttaggacaaaggattcatta

SEQ ID NO: 762271 - DNA, 33 bp, Homo sapien
tgaaaataagggataaatagaaaggccacttac

SEQ ID NO: 762272 - DNA, 33 bp, Homo sapien
tgaaaataagggataagtagaaaggccacttac

SEQ ID NO: 762273 - DNA, 33 bp, Homo sapien
gacaatatactttgccaagagctcaattagaaa

SEQ ID NO: 762274 - DNA, 33 bp, Homo sapien
gacaatatactttgccgagagctcaattagaaa

SEQ ID NO: 762275 - DNA, 33 bp, Homo sapien
ggtagcttctcaatgacgtcagcgccactggca

SEQ ID NO: 762276 - DNA, 33 bp, Homo sapien
ggtagcttctcaatgatgtcagcgccactggca

SEQ ID NO: 762277 - DNA, 33 bp, Homo sapien
gggttggttcccaggaagtcagatttgtttgtg

SEQ ID NO: 762278 - DNA, 33 bp, Homo sapien
gggttggttcccaggatgtcagatttgtttgtg

SEQ ID NO: 762279 - DNA, 33 bp, Homo sapien
tgtgattagaagataactgagaacatggataaa

SEQ ID NO: 762280 - DNA, 33 bp, Homo sapien
tgtgattagaagataattgagaacatggataaa

SEQ ID NO: 762281 - DNA, 33 bp, Homo sapien
taaccaacctcttgaaaatctccatgtaaacta

SEQ ID NO: 762282 - DNA, 33 bp, Homo sapien
taaccaacctcttgaacatctccatgtaaacta

SEQ ID NO: 762283 - DNA, 33 bp, Homo sapien
aacataatataaatgaaagaaaccatgaaaaat

SEQ ID NO: 762284 - DNA, 33 bp, Homo sapien
aacataatataaatgacagaaaccatgaaaaat

SEQ ID NO: 762285 - DNA, 33 bp, Homo sapien
tgttttgctatgaaggaaaatttattgttagaa

SEQ ID NO: 762286 - DNA, 33 bp, Homo sapien
tgttttgctatgaaggcaaatttattgttagaa

SEQ ID NO: 762287 - DNA, 33 bp, Homo sapien
gctgcattctttgctacggtacataggtgccta

SEQ ID NO: 762288 - DNA, 33 bp, Homo sapien
gctgcattctttgctatggtacataggtgccta

SEQ ID NO: 762289 - DNA, 33 bp, Homo sapien
ataaggttaattcatagacagctttttaacatt

SEQ ID NO: 762290 - DNA, 33 bp, Homo sapien
ataaggttaattcatatacagctttttaacatt

SEQ ID NO: 762291 - DNA, 33 bp, Homo sapien
cgatgaaagatagcaaataacaaaataaataga

SEQ ID NO: 762292 - DNA, 33 bp, Homo sapien
cgatgaaagatagcaagtaacaaaataaataga

SEQ ID NO: 762293 - DNA, 33 bp, Homo sapien
agaggaagataagcaacgcctttagattttcac

SEQ ID NO: 762294 - DNA, 33 bp, Homo sapien
agaggaagataagcaatgcctttagattttcac

SEQ ID NO: 762295 - DNA, 33 bp, Homo sapien
attacatcacctggaaattacttcactcagagt

SEQ ID NO: 762296 - DNA, 33 bp, Homo sapien
attacatcacctggaagttacttcactcagagt

SEQ ID NO: 762297 - DNA, 33 bp, Homo sapien
gcttcctacctcatcaccttctcagaagtctct

SEQ ID NO: 762298 - DNA, 33 bp, Homo sapien
gcttcctacctcatcatcttctcagaagtctct

SEQ ID NO: 762299 - DNA, 33 bp, Homo sapien
aatggtaggatcatttaaaagtgcataatagat

SEQ ID NO: 762300 - DNA, 33 bp, Homo sapien
aatggtaggatcatttgaaagtgcataatagat

SEQ ID NO: 762301 - DNA, 33 bp, Homo sapien
cctttgaaaaagatccacatatccagattggac

SEQ ID NO: 762302 - DNA, 33 bp, Homo sapien
cctttgaaaaagatcctcatatccagattggac

SEQ ID NO: 762303 - DNA, 33 bp, Homo sapien
tgtggtaaggaggagcacttaaggattataggg

SEQ ID NO: 762304 - DNA, 33 bp, Homo sapien
tgtggtaaggaggagcgcttaaggattataggg

SEQ ID NO: 762305 - DNA, 33 bp, Homo sapien
tgttgagttgcaatccacaaagtggaaggtggg

SEQ ID NO: 762306 - DNA, 33 bp, Homo sapien
tgttgagttgcaatccccaaagtggaaggtggg

SEQ ID NO: 762307 - DNA, 33 bp, Homo sapien
tgataatacacaggtccagatcagtggggatga

SEQ ID NO: 762308 - DNA, 33 bp, Homo sapien
tgataatacacaggtctagatcagtggggatga

SEQ ID NO: 762309 - DNA, 33 bp, Homo sapien
cttgcaggagaagcttaaaatgagagaaagaga

SEQ ID NO: 762310 - DNA, 33 bp, Homo sapien
cttgcaggagaagcttcaaatgagagaaagaga

SEQ ID NO: 762311 - DNA, 33 bp, Homo sapien
cttggccaagaccaccactttctttaacctgtt

SEQ ID NO: 762312 - DNA, 33 bp, Homo sapien
cttggccaagaccaccgctttctttaacctgtt

SEQ ID NO: 762313 - DNA, 33 bp, Homo sapien
gatggagacaaggaaagataaagttccgaatgg

SEQ ID NO: 762314 - DNA, 33 bp, Homo sapien
gatggagacaaggaaatataaagttccgaatgg

SEQ ID NO: 762315 - DNA, 33 bp, Homo sapien
attctacattactgtcacaaagtaggtttttga

SEQ ID NO: 762316 - DNA, 33 bp, Homo sapien
attctacattactgtcgcaaagtaggtttttga

SEQ ID NO: 762317 - DNA, 33 bp, Homo sapien
caaggagatgcacgtgaaaaagtaaagattata

SEQ ID NO: 762318 - DNA, 33 bp, Homo sapien
caaggagatgcacgtgtaaaagtaaagattata

SEQ ID NO: 762319 - DNA, 33 bp, Homo sapien
aaggtaaagctgagtaacacatatctgaaatta

SEQ ID NO: 762320 - DNA, 33 bp, Homo sapien
aaggtaaagctgagtaccacatatctgaaatta

SEQ ID NO: 762321 - DNA, 33 bp, Homo sapien
ttaattcttatcctcaaaatgacaagaaaactg

SEQ ID NO: 762322 - DNA, 33 bp, Homo sapien
ttaattcttatcctcacaatgacaagaaaactg

SEQ ID NO: 762323 - DNA, 33 bp, Homo sapien
ttctaaatataattccaagatgggtcaagttta

SEQ ID NO: 762324 - DNA, 33 bp, Homo sapien
ttctaaatataattcccagatgggtcaagttta

SEQ ID NO: 762325 - DNA, 33 bp, Homo sapien
ttctagttttcactaccgcataacaaattggtc

SEQ ID NO: 762326 - DNA, 33 bp, Homo sapien
ttctagttttcactactgcataacaaattggtc

SEQ ID NO: 762327 - DNA, 33 bp, Homo sapien
gttccaaacagctttaacacccatgataccaaa

SEQ ID NO: 762328 - DNA, 33 bp, Homo sapien
gttccaaacagctttagcacccatgataccaaa

SEQ ID NO: 762329 - DNA, 33 bp, Homo sapien
aagtcattttctatctcactcatctccctctac

SEQ ID NO: 762330 - DNA, 33 bp, Homo sapien
aagtcattttctatcttactcatctccctctac

SEQ ID NO: 762331 - DNA, 33 bp, Homo sapien
gcagaaggaattcctaccgcaggaggctcagcc

SEQ ID NO: 762332 - DNA, 33 bp, Homo sapien
gcagaaggaattcctatcgcaggaggctcagcc

SEQ ID NO: 762333 - DNA, 33 bp, Homo sapien
atattgctaccaaataatatttatgccttttta

SEQ ID NO: 762334 - DNA, 33 bp, Homo sapien
atattgctaccaaatagtatttatgccttttta

SEQ ID NO: 762335 - DNA, 33 bp, Homo sapien
tttttttctgccaaataaaccttactattaata

SEQ ID NO: 762336 - DNA, 33 bp, Homo sapien
tttttttctgccaaatgaaccttactattaata

SEQ ID NO: 762337 - DNA, 33 bp, Homo sapien
atatttccaggagctaaacactttgatgttctc

SEQ ID NO: 762338 - DNA, 33 bp, Homo sapien
atatttccaggagctagacactttgatgttctc

SEQ ID NO: 762339 - DNA, 33 bp, Homo sapien
attagcaaggtgaaaccacgaaacttgtaaaaa

SEQ ID NO: 762340 - DNA, 33 bp, Homo sapien
attagcaaggtgaaactacgaaacttgtaaaaa

SEQ ID NO: 762341 - DNA, 33 bp, Homo sapien
accaacaaatacgtgaaaacaatgatgtacatc

SEQ ID NO: 762342 - DNA, 33 bp, Homo sapien
accaacaaatacgtgagaacaatgatgtacatc

SEQ ID NO: 762343 - DNA, 33 bp, Homo sapien
taacaccactgaagaacgggcaaagggcatgaa

SEQ ID NO: 762344 - DNA, 33 bp, Homo sapien
taacaccactgaagaatgggcaaagggcatgaa

SEQ ID NO: 762345 - DNA, 33 bp, Homo sapien
agacttgcctgcatcaatagatctcacatatca

SEQ ID NO: 762346 - DNA, 33 bp, Homo sapien
agacttgcctgcatcagtagatctcacatatca

SEQ ID NO: 762347 - DNA, 33 bp, Homo sapien
ataggcaaaactcaaaacaagatgcattcttct

SEQ ID NO: 762348 - DNA, 33 bp, Homo sapien
ataggcaaaactcaaagcaagatgcattcttct

SEQ ID NO: 762349 - DNA, 33 bp, Homo sapien
cagcttcttttggataccttcccagattgaagc

SEQ ID NO: 762350 - DNA, 33 bp, Homo sapien
cagcttcttttggatagcttcccagattgaagc

SEQ ID NO: 762351 - DNA, 33 bp, Homo sapien
acgcactgctttttggacaattacagtacagac

SEQ ID NO: 762352 - DNA, 33 bp, Homo sapien
acgcactgctttttgggcaattacagtacagac

SEQ ID NO: 762353 - DNA, 33 bp, Homo sapien
tacttgtcgtaaaggccgaagaatctgaatcct

SEQ ID NO: 762354 - DNA, 33 bp, Homo sapien
tacttgtcgtaaaggctgaagaatctgaatcct

SEQ ID NO: 762355 - DNA, 33 bp, Homo sapien
ctactactactatcacaaagagaaacacatatt

SEQ ID NO: 762356 - DNA, 33 bp, Homo sapien
ctactactactatcacgaagagaaacacatatt

SEQ ID NO: 762357 - DNA, 33 bp, Homo sapien
actgattagtatggggaaggtgcgataaaactg

SEQ ID NO: 762358 - DNA, 33 bp, Homo sapien
actgattagtatgggggaggtgcgataaaactg

SEQ ID NO: 762359 - DNA, 33 bp, Homo sapien
ttagctgcttcttctagtaagtgacattttcac

SEQ ID NO: 762360 - DNA, 33 bp, Homo sapien
ttagctgcttcttctattaagtgacattttcac

SEQ ID NO: 762361 - DNA, 33 bp, Homo sapien
aaaagatcttctggtgacaaagagatttttgga

SEQ ID NO: 762362 - DNA, 33 bp, Homo sapien
aaaagatcttctggtgtcaaagagatttttgga

SEQ ID NO: 762363 - DNA, 33 bp, Homo sapien
cctcaagactttgggcactgataagcacaggag

SEQ ID NO: 762364 - DNA, 33 bp, Homo sapien
cctcaagactttgggcgctgataagcacaggag

SEQ ID NO: 762365 - DNA, 33 bp, Homo sapien
gtactttcactcgtcacctcctttggctgggtg

SEQ ID NO: 762366 - DNA, 33 bp, Homo sapien
gtactttcactcgtcatctcctttggctgggtg

SEQ ID NO: 762367 - DNA, 33 bp, Homo sapien
ctgtttctataggtggcacccgatttatctctc

SEQ ID NO: 762368 - DNA, 33 bp, Homo sapien
ctgtttctataggtgggacccgatttatctctc

SEQ ID NO: 762369 - DNA, 33 bp, Homo sapien
gggagggctataggtcaaacttcagattgtgta

SEQ ID NO: 762370 - DNA, 33 bp, Homo sapien
gggagggctataggtcgaacttcagattgtgta

SEQ ID NO: 762371 - DNA, 33 bp, Homo sapien
ctcacattctgataccaagtaattttcttaaca

SEQ ID NO: 762372 - DNA, 33 bp, Homo sapien
ctcacattctgataccgagtaattttcttaaca

SEQ ID NO: 762373 - DNA, 33 bp, Homo sapien
actcaactcagagggaagttacagttacatagg

SEQ ID NO: 762374 - DNA, 33 bp, Homo sapien
actcaactcagagggaggttacagttacatagg

SEQ ID NO: 762375 - DNA, 33 bp, Homo sapien
ttacttccttctaagtaaaattgagcccaataa

SEQ ID NO: 762376 - DNA, 33 bp, Homo sapien
ttacttccttctaagttaaattgagcccaataa

SEQ ID NO: 762377 - DNA, 33 bp, Homo sapien
gatgcttattcaaagaacagcacataaaaagta

SEQ ID NO: 762378 - DNA, 33 bp, Homo sapien
gatgcttattcaaagagcagcacataaaaagta

SEQ ID NO: 762379 - DNA, 33 bp, Homo sapien
agggaatgactcatcaataaatttgagttggag

SEQ ID NO: 762380 - DNA, 33 bp, Homo sapien
agggaatgactcatcactaaatttgagttggag

SEQ ID NO: 762381 - DNA, 33 bp, Homo sapien
gaatcacttgggaaaaatttattgtgtattact

SEQ ID NO: 762382 - DNA, 33 bp, Homo sapien
gaatcacttgggaaaattttattgtgtattact

SEQ ID NO: 762383 - DNA, 33 bp, Homo sapien
gatgactagccattccaatgtgactagaacagg

SEQ ID NO: 762384 - DNA, 33 bp, Homo sapien
gatgactagccattccgatgtgactagaacagg

SEQ ID NO: 762385 - DNA, 33 bp, Homo sapien
tttcaacatatgtgacaaaattaaactcaaaag

SEQ ID NO: 762386 - DNA, 33 bp, Homo sapien
tttcaacatatgtgacgaaattaaactcaaaag

SEQ ID NO: 762387 - DNA, 33 bp, Homo sapien
gaacctggccaccagtcaagaaaatgacttttt

SEQ ID NO: 762388 - DNA, 33 bp, Homo sapien
gaacctggccaccagtgaagaaaatgacttttt

SEQ ID NO: 762389 - DNA, 33 bp, Homo sapien
aatacacagaaatacactgagtacaacattacc

SEQ ID NO: 762390 - DNA, 33 bp, Homo sapien
aatacacagaaatacattgagtacaacattacc

SEQ ID NO: 762391 - DNA, 33 bp, Homo sapien
gtatgtttttaatgtacactcttggagcacttt

SEQ ID NO: 762392 - DNA, 33 bp, Homo sapien
gtatgtttttaatgtatactcttggagcacttt

SEQ ID NO: 762393 - DNA, 33 bp, Homo sapien
ttagttgtgcaattctcaacaattagttccagt

SEQ ID NO: 762394 - DNA, 33 bp, Homo sapien
ttagttgtgcaattctgaacaattagttccagt

SEQ ID NO: 762395 - DNA, 33 bp, Homo sapien
cttatcttgaattacagcaatgagacttgaagg

SEQ ID NO: 762396 - DNA, 33 bp, Homo sapien
cttatcttgaattacatcaatgagacttgaagg

SEQ ID NO: 762397 - DNA, 33 bp, Homo sapien
ggctgattcctctgccacagatcctgactaagg

SEQ ID NO: 762398 - DNA, 33 bp, Homo sapien
ggctgattcctctgccgcagatcctgactaagg

SEQ ID NO: 762399 - DNA, 33 bp, Homo sapien
caaaaattattgtgaaaaccattgtgctaaaat

SEQ ID NO: 762400 - DNA, 33 bp, Homo sapien
caaaaattattgtgaagaccattgtgctaaaat

SEQ ID NO: 762401 - DNA, 33 bp, Homo sapien
gtggaacttcctgagcaaataaaacaacgtgaa

SEQ ID NO: 762402 - DNA, 33 bp, Homo sapien
gtggaacttcctgagcgaataaaacaacgtgaa

SEQ ID NO: 762403 - DNA, 33 bp, Homo sapien
caggtggtaaacaagcaaaatgtactacagtgt

SEQ ID NO: 762404 - DNA, 33 bp, Homo sapien
caggtggtaaacaagcgaaatgtactacagtgt

SEQ ID NO: 762405 - DNA, 33 bp, Homo sapien
aagacagagatacacaatacattccacctacat

SEQ ID NO: 762406 - DNA, 33 bp, Homo sapien
aagacagagatacacagtacattccacctacat

SEQ ID NO: 762407 - DNA, 33 bp, Homo sapien
cttatatcaggcctaccatctatagtctaaata

SEQ ID NO: 762408 - DNA, 33 bp, Homo sapien
cttatatcaggcctactatctatagtctaaata

SEQ ID NO: 762409 - DNA, 33 bp, Homo sapien
aaaccagattcatatacaggtgtgaagactaaa

SEQ ID NO: 762410 - DNA, 33 bp, Homo sapien
aaaccagattcatatagaggtgtgaagactaaa

SEQ ID NO: 762411 - DNA, 33 bp, Homo sapien
ctactatccttaagggaagaatccaattctggc

SEQ ID NO: 762412 - DNA, 33 bp, Homo sapien
ctactatccttaagggtagaatccaattctggc

SEQ ID NO: 762413 - DNA, 33 bp, Homo sapien
ttgcaggatgtgaaacccaaatatatgaagggc

SEQ ID NO: 762414 - DNA, 33 bp, Homo sapien
ttgcaggatgtgaaactcaaatatatgaagggc

SEQ ID NO: 762415 - DNA, 33 bp, Homo sapien
aattctgtgcttattcccaggatgcacggaagt

SEQ ID NO: 762416 - DNA, 33 bp, Homo sapien
aattctgtgcttattctcaggatgcacggaagt

SEQ ID NO: 762417 - DNA, 33 bp, Homo sapien
caagcaactgattcataatatgctgtttaaagt

SEQ ID NO: 762418 - DNA, 33 bp, Homo sapien
caagcaactgattcatgatatgctgtttaaagt

SEQ ID NO: 762419 - DNA, 33 bp, Homo sapien
tatacagaaaatttcagaaatagaagtctgttg

SEQ ID NO: 762420 - DNA, 33 bp, Homo sapien
tatacagaaaatttcataaatagaagtctgttg

SEQ ID NO: 762421 - DNA, 33 bp, Homo sapien
ccattgtcaatagcaaatgtttcaattgcctat

SEQ ID NO: 762422 - DNA, 33 bp, Homo sapien
ccattgtcaatagcaagtgtttcaattgcctat

SEQ ID NO: 762423 - DNA, 33 bp, Homo sapien
ctggtaaattcaatgacatcagtactaggtata

SEQ ID NO: 762424 - DNA, 33 bp, Homo sapien
ctggtaaattcaatgatatcagtactaggtata

SEQ ID NO: 762425 - DNA, 33 bp, Homo sapien
ccaagtaagatgggcaatcacttgctttagaaa

SEQ ID NO: 762426 - DNA, 33 bp, Homo sapien
ccaagtaagatgggcagtcacttgctttagaaa

SEQ ID NO: 762427 - DNA, 33 bp, Homo sapien
ttcagaggaaagagacaaaagattcagaaaaca

SEQ ID NO: 762428 - DNA, 33 bp, Homo sapien
ttcagaggaaagagacgaaagattcagaaaaca

SEQ ID NO: 762429 - DNA, 33 bp, Homo sapien
aaggagcaagaagagaagaaggactctactttc

SEQ ID NO: 762430 - DNA, 33 bp, Homo sapien
aaggagcaagaagagaggaaggactctactttc

SEQ ID NO: 762431 - DNA, 33 bp, Homo sapien
ggtttatgggtggtgacgaaactgcatgctaag

SEQ ID NO: 762432 - DNA, 33 bp, Homo sapien
ggtttatgggtggtgatgaaactgcatgctaag

SEQ ID NO: 762433 - DNA, 33 bp, Homo sapien
ttgcgagatctagaccagaagtgactagaaaat

SEQ ID NO: 762434 - DNA, 33 bp, Homo sapien
ttgcgagatctagaccggaagtgactagaaaat

SEQ ID NO: 762435 - DNA, 33 bp, Homo sapien
gctattaagtgggtaacaggatggacaattctt

SEQ ID NO: 762436 - DNA, 33 bp, Homo sapien
gctattaagtgggtaataggatggacaattctt

SEQ ID NO: 762437 - DNA, 33 bp, Homo sapien
ttcaggaaccagatgacgtactcaaatgcaatc

SEQ ID NO: 762438 - DNA, 33 bp, Homo sapien
ttcaggaaccagatgatgtactcaaatgcaatc

SEQ ID NO: 762439 - DNA, 33 bp, Homo sapien
tgtaggattttcgggcaaaatgtgggaaaacag

SEQ ID NO: 762440 - DNA, 33 bp, Homo sapien
tgtaggattttcgggccaaatgtgggaaaacag

SEQ ID NO: 762441 - DNA, 33 bp, Homo sapien
ttactgagttctaataagtgattggcaaaggaa

SEQ ID NO: 762442 - DNA, 33 bp, Homo sapien
ttactgagttctaataggtgattggcaaaggaa

SEQ ID NO: 762443 - DNA, 33 bp, Homo sapien
tatgagaagaccaggaatccatttcaaattaat

SEQ ID NO: 762444 - DNA, 33 bp, Homo sapien
tatgagaagaccaggagtccatttcaaattaat

SEQ ID NO: 762445 - DNA, 33 bp, Homo sapien
tgtccatcatttgagacctagttctttgtaacc

SEQ ID NO: 762446 - DNA, 33 bp, Homo sapien
tgtccatcatttgagatctagttctttgtaacc

SEQ ID NO: 762447 - DNA, 33 bp, Homo sapien
ctctctttcatccatgcaacattatagccatta

SEQ ID NO: 762448 - DNA, 33 bp, Homo sapien
ctctctttcatccatgtaacattatagccatta

SEQ ID NO: 762449 - DNA, 33 bp, Homo sapien
catacagatactcacactggaattaatcaagaa

SEQ ID NO: 762450 - DNA, 33 bp, Homo sapien
catacagatactcacattggaattaatcaagaa

SEQ ID NO: 762451 - DNA, 33 bp, Homo sapien
tgctgctcatcccgtgaattcagtatctttcct

SEQ ID NO: 762452 - DNA, 33 bp, Homo sapien
tgctgctcatcccgtggattcagtatctttcct

SEQ ID NO: 762453 - DNA, 33 bp, Homo sapien
ttagtccatctggagaagtcatgtttacctgga

SEQ ID NO: 762454 - DNA, 33 bp, Homo sapien
ttagtccatctggagaggtcatgtttacctgga

SEQ ID NO: 762455 - DNA, 33 bp, Homo sapien
gtgagcttaaaaaaaccgtgactaagacaagtc

SEQ ID NO: 762456 - DNA, 33 bp, Homo sapien
gtgagcttaaaaaaactgtgactaagacaagtc

SEQ ID NO: 762457 - DNA, 33 bp, Homo sapien
tgcctggcaccaaagaagttttcgacaggtcaa

SEQ ID NO: 762458 - DNA, 33 bp, Homo sapien
tgcctggcaccaaagaggttttcgacaggtcaa

SEQ ID NO: 762459 - DNA, 33 bp, Homo sapien
agccagatcatttttgaatgcccaaagaaacgt

SEQ ID NO: 762460 - DNA, 33 bp, Homo sapien
agccagatcatttttggatgcccaaagaaacgt

SEQ ID NO: 762461 - DNA, 33 bp, Homo sapien
agcaatatacgtaatgcatgggcaacttgtcac

SEQ ID NO: 762462 - DNA, 33 bp, Homo sapien
agcaatatacgtaatgtatgggcaacttgtcac

SEQ ID NO: 762463 - DNA, 33 bp, Homo sapien
acctgtagttcctttacctgggattctaacact

SEQ ID NO: 762464 - DNA, 33 bp, Homo sapien
acctgtagttcctttagctgggattctaacact

SEQ ID NO: 762465 - DNA, 33 bp, Homo sapien
ggatttcttgctcttaaccacacacaactaatt

SEQ ID NO: 762466 - DNA, 33 bp, Homo sapien
ggatttcttgctcttatccacacacaactaatt

SEQ ID NO: 762467 - DNA, 33 bp, Homo sapien
agcttaaaacaatacaaatttatcaggtctcag

SEQ ID NO: 762468 - DNA, 33 bp, Homo sapien
agcttaaaacaatacatatttatcaggtctcag

SEQ ID NO: 762469 - DNA, 33 bp, Homo sapien
gcagctgttgtaggcacaattttacctctcata

SEQ ID NO: 762470 - DNA, 33 bp, Homo sapien
gcagctgttgtaggcagaattttacctctcata

SEQ ID NO: 762471 - DNA, 33 bp, Homo sapien
ttacttaaatttagaccacattgactttatata

SEQ ID NO: 762472 - DNA, 33 bp, Homo sapien
ttacttaaatttagactacattgactttatata

SEQ ID NO: 762473 - DNA, 33 bp, Homo sapien
atatgctcataaggtactaacaatatggttcta

SEQ ID NO: 762474 - DNA, 33 bp, Homo sapien
atatgctcataaggtattaacaatatggttcta

SEQ ID NO: 762475 - DNA, 33 bp, Homo sapien
cttcttggggttacatcaaaatggatctctgtg

SEQ ID NO: 762476 - DNA, 33 bp, Homo sapien
cttcttggggttacatgaaaatggatctctgtg

SEQ ID NO: 762477 - DNA, 33 bp, Homo sapien
aagaataaaaaaggaaatctgcatcacattgct

SEQ ID NO: 762478 - DNA, 33 bp, Homo sapien
aagaataaaaaaggaactctgcatcacattgct

SEQ ID NO: 762479 - DNA, 33 bp, Homo sapien
ttagatactttaagaaaagtcacggctgcaagt

SEQ ID NO: 762480 - DNA, 33 bp, Homo sapien
ttagatactttaagaagagtcacggctgcaagt

SEQ ID NO: 762481 - DNA, 33 bp, Homo sapien
tgtttctgacaattgaacttcttactataatca

SEQ ID NO: 762482 - DNA, 33 bp, Homo sapien
tgtttctgacaattgagcttcttactataatca

SEQ ID NO: 762483 - DNA, 33 bp, Homo sapien
ctatttaattaccatacgagaaggtcaactcta

SEQ ID NO: 762484 - DNA, 33 bp, Homo sapien
ctatttaattaccatatgagaaggtcaactcta

SEQ ID NO: 762485 - DNA, 33 bp, Homo sapien
gcttatgtttcctgtaggcttttggtaaataac

SEQ ID NO: 762486 - DNA, 33 bp, Homo sapien
gcttatgtttcctgtatgcttttggtaaataac

SEQ ID NO: 762487 - DNA, 33 bp, Homo sapien
aggggaaatgaattcacaaaatttgggagcaat

SEQ ID NO: 762488 - DNA, 33 bp, Homo sapien
aggggaaatgaattcataaaatttgggagcaat

SEQ ID NO: 762489 - DNA, 33 bp, Homo sapien
agtataagtaggtgccaaaaggtaggtaattgg

SEQ ID NO: 762490 - DNA, 33 bp, Homo sapien
agtataagtaggtgccgaaaggtaggtaattgg

SEQ ID NO: 762491 - DNA, 33 bp, Homo sapien
aatatggagaataaagcccaggctgatgtgatc

SEQ ID NO: 762492 - DNA, 33 bp, Homo sapien
aatatggagaataaagtccaggctgatgtgatc

SEQ ID NO: 762493 - DNA, 33 bp, Homo sapien
tctattaatgccaggaaaatcacacttcaaaat

SEQ ID NO: 762494 - DNA, 33 bp, Homo sapien
tctattaatgccaggagaatcacacttcaaaat

SEQ ID NO: 762495 - DNA, 33 bp, Homo sapien
ttattcaatccatcaacgtaaatgctaatctca

SEQ ID NO: 762496 - DNA, 33 bp, Homo sapien
ttattcaatccatcaaggtaaatgctaatctca

SEQ ID NO: 762497 - DNA, 33 bp, Homo sapien
atatttgatgtaacaactgcctgaaagattttt

SEQ ID NO: 762498 - DNA, 33 bp, Homo sapien
atatttgatgtaacaattgcctgaaagattttt

SEQ ID NO: 762499 - DNA, 33 bp, Homo sapien
ttatcatctccataaagattatcttccagacca

SEQ ID NO: 762500 - DNA, 33 bp, Homo sapien
ttatcatctccataaatattatcttccagacca

SEQ ID NO: 762501 - DNA, 33 bp, Homo sapien
gctttttattcagcccacattcataattcaatg

SEQ ID NO: 762502 - DNA, 33 bp, Homo sapien
gctttttattcagcccgcattcataattcaatg

SEQ ID NO: 762503 - DNA, 33 bp, Homo sapien
aaatagaagccatataaaagtgtaacaaacact

SEQ ID NO: 762504 - DNA, 33 bp, Homo sapien
aaatagaagccatatacaagtgtaacaaacact

SEQ ID NO: 762505 - DNA, 33 bp, Homo sapien
gattaatagtttatcaacccaggcaggaaattg

SEQ ID NO: 762506 - DNA, 33 bp, Homo sapien
gattaatagtttatcaccccaggcaggaaattg

SEQ ID NO: 762507 - DNA, 33 bp, Homo sapien
tgcttgccttttccccacaacgaggagtttctc

SEQ ID NO: 762508 - DNA, 33 bp, Homo sapien
tgcttgccttttccccgcaacgaggagtttctc

SEQ ID NO: 762509 - DNA, 33 bp, Homo sapien
tccactcattttcaacacgactattgagaggac

SEQ ID NO: 762510 - DNA, 33 bp, Homo sapien
tccactcattttcaacgcgactattgagaggac

SEQ ID NO: 762511 - DNA, 33 bp, Homo sapien
atgagtaagtctacagaaataatgtcataatga

SEQ ID NO: 762512 - DNA, 33 bp, Homo sapien
atgagtaagtctacaggaataatgtcataatga

SEQ ID NO: 762513 - DNA, 33 bp, Homo sapien
ccactcaagaatgctgaacaatcgttaacacta

SEQ ID NO: 762514 - DNA, 33 bp, Homo sapien
ccactcaagaatgctggacaatcgttaacacta

SEQ ID NO: 762515 - DNA, 33 bp, Homo sapien
tgctgatgacatgaaaattgaaagttgggtgaa

SEQ ID NO: 762516 - DNA, 33 bp, Homo sapien
tgctgatgacatgaaatttgaaagttgggtgaa

SEQ ID NO: 762517 - DNA, 33 bp, Homo sapien
gtgtgtcacaagacacccttttctttcctttgt

SEQ ID NO: 762518 - DNA, 33 bp, Homo sapien
gtgtgtcacaagacactcttttctttcctttgt

SEQ ID NO: 762519 - DNA, 33 bp, Homo sapien
caaaatgcacactggaagaagtggatggagcca

SEQ ID NO: 762520 - DNA, 33 bp, Homo sapien
caaaatgcacactggaggaagtggatggagcca

SEQ ID NO: 762521 - DNA, 33 bp, Homo sapien
gaatatacatgaacacgggaaaacaatgttgac

SEQ ID NO: 762522 - DNA, 33 bp, Homo sapien
gaatatacatgaacactggaaaacaatgttgac

SEQ ID NO: 762523 - DNA, 33 bp, Homo sapien
agggagtttagttttacacactgttttgttccc

SEQ ID NO: 762524 - DNA, 33 bp, Homo sapien
agggagtttagttttatacactgttttgttccc

SEQ ID NO: 762525 - DNA, 33 bp, Homo sapien
tttagtttgacaaagaagtggaatcaaaaataa

SEQ ID NO: 762526 - DNA, 33 bp, Homo sapien
tttagtttgacaaagacgtggaatcaaaaataa

SEQ ID NO: 762527 - DNA, 33 bp, Homo sapien
ttctgggcataggcaaccttttctgttttttca

SEQ ID NO: 762528 - DNA, 33 bp, Homo sapien
ttctgggcataggcaatcttttctgttttttca

SEQ ID NO: 762529 - DNA, 33 bp, Homo sapien
cattaaacactaacttcaagaggattatacatt

SEQ ID NO: 762530 - DNA, 33 bp, Homo sapien
cattaaacactaacttgaagaggattatacatt

SEQ ID NO: 762531 - DNA, 33 bp, Homo sapien
gtttctttctttttcaatagatctgatcttgtt

SEQ ID NO: 762532 - DNA, 33 bp, Homo sapien
gtttctttctttttcagtagatctgatcttgtt

SEQ ID NO: 762533 - DNA, 33 bp, Homo sapien
gagagaaatgtatacaccggatttcaaaactta

SEQ ID NO: 762534 - DNA, 33 bp, Homo sapien
gagagaaatgtatacatcggatttcaaaactta

SEQ ID NO: 762535 - DNA, 33 bp, Homo sapien
aagtggggatcgctagaatgcttttctgtggtc

SEQ ID NO: 762536 - DNA, 33 bp, Homo sapien
aagtggggatcgctaggatgcttttctgtggtc

SEQ ID NO: 762537 - DNA, 33 bp, Homo sapien
cccctttacagctaatcaaggattgccaaatat

SEQ ID NO: 762538 - DNA, 33 bp, Homo sapien
cccctttacagctaattaaggattgccaaatat

SEQ ID NO: 762539 - DNA, 33 bp, Homo sapien
tttagcaaaagaaggacgaaatacccatatctt

SEQ ID NO: 762540 - DNA, 33 bp, Homo sapien
tttagcaaaagaaggatgaaatacccatatctt

SEQ ID NO: 762541 - DNA, 33 bp, Homo sapien
ttctagaacagctggtcaacacataactagtct

SEQ ID NO: 762542 - DNA, 33 bp, Homo sapien
ttctagaacagctggtgaacacataactagtct

SEQ ID NO: 762543 - DNA, 33 bp, Homo sapien
atggaaaatccgatacgctgttgatccgacaag

SEQ ID NO: 762544 - DNA, 33 bp, Homo sapien
atggaaaatccgatactctgttgatccgacaag

SEQ ID NO: 762545 - DNA, 33 bp, Homo sapien
ttttgaatctgcaataccctaaagagacacaaa

SEQ ID NO: 762546 - DNA, 33 bp, Homo sapien
ttttgaatctgcaatatcctaaagagacacaaa

SEQ ID NO: 762547 - DNA, 33 bp, Homo sapien
cttcatcaaagcataaggtggagcagttcattc

SEQ ID NO: 762548 - DNA, 33 bp, Homo sapien
cttcatcaaagcataatgtggagcagttcattc

SEQ ID NO: 762549 - DNA, 33 bp, Homo sapien
actgtctctgtagaacaaactgggaagaactgg

SEQ ID NO: 762550 - DNA, 33 bp, Homo sapien
actgtctctgtagaacgaactgggaagaactgg

SEQ ID NO: 762551 - DNA, 33 bp, Homo sapien
gacatgattgtgtttcaaaatgtaagaacttga

SEQ ID NO: 762552 - DNA, 33 bp, Homo sapien
gacatgattgtgtttcgaaatgtaagaacttga

SEQ ID NO: 762553 - DNA, 33 bp, Homo sapien
atgctatgttcttgacaaaagatttttgagtat

SEQ ID NO: 762554 - DNA, 33 bp, Homo sapien
atgctatgttcttgacgaaagatttttgagtat

SEQ ID NO: 762555 - DNA, 33 bp, Homo sapien
gtacctgttgcctaaactcaaatgcccatcaat

SEQ ID NO: 762556 - DNA, 33 bp, Homo sapien
gtacctgttgcctaaattcaaatgcccatcaat

SEQ ID NO: 762557 - DNA, 33 bp, Homo sapien
tcttcatatttaccaaatgtttaattacaactt

SEQ ID NO: 762558 - DNA, 33 bp, Homo sapien
tcttcatatttaccaagtgtttaattacaactt

SEQ ID NO: 762559 - DNA, 33 bp, Homo sapien
ttccacagccagttgcagaagattcactttaac

SEQ ID NO: 762560 - DNA, 33 bp, Homo sapien
ttccacagccagttgcggaagattcactttaac

SEQ ID NO: 762561 - DNA, 33 bp, Homo sapien
acatttatctccccaaaacaagccttaatttgt

SEQ ID NO: 762562 - DNA, 33 bp, Homo sapien
acatttatctccccaagacaagccttaatttgt

SEQ ID NO: 762563 - DNA, 33 bp, Homo sapien
tgagtgcattgctctacctaaagtactttccca

SEQ ID NO: 762564 - DNA, 33 bp, Homo sapien
tgagtgcattgctctatctaaagtactttccca

SEQ ID NO: 762565 - DNA, 33 bp, Homo sapien
ctttatgtgtatcttacagttaaaaatggtaag

SEQ ID NO: 762566 - DNA, 33 bp, Homo sapien
ctttatgtgtatcttagagttaaaaatggtaag

SEQ ID NO: 762567 - DNA, 33 bp, Homo sapien
tactatgcccattcaccgaaacagctggaaaaa

SEQ ID NO: 762568 - DNA, 33 bp, Homo sapien
tactatgcccattcactgaaacagctggaaaaa

SEQ ID NO: 762569 - DNA, 33 bp, Homo sapien
ctgtggtgaattccgcacaatccaaacctccca

SEQ ID NO: 762570 - DNA, 33 bp, Homo sapien
ctgtggtgaattccgcccaatccaaacctccca

SEQ ID NO: 762571 - DNA, 33 bp, Homo sapien
atgcccacaggaaaacaacatgacattctgaag

SEQ ID NO: 762572 - DNA, 33 bp, Homo sapien
atgcccacaggaaaaccacatgacattctgaag

SEQ ID NO: 762573 - DNA, 33 bp, Homo sapien
tagtgaactacctggcagcaggttgatgatatt

SEQ ID NO: 762574 - DNA, 33 bp, Homo sapien
tagtgaactacctggcggcaggttgatgatatt

SEQ ID NO: 762575 - DNA, 33 bp, Homo sapien
gttaattcttcacctacgcatattggctcgggc

SEQ ID NO: 762576 - DNA, 33 bp, Homo sapien
gttaattcttcacctatgcatattggctcgggc

SEQ ID NO: 762577 - DNA, 33 bp, Homo sapien
gttatttaaattcaccactgagagactgacaac

SEQ ID NO: 762578 - DNA, 33 bp, Homo sapien
gttatttaaattcaccgctgagagactgacaac

SEQ ID NO: 762579 - DNA, 33 bp, Homo sapien
gtgagacaggtagtaaagtgcctaggaaacatt

SEQ ID NO: 762580 - DNA, 33 bp, Homo sapien
gtgagacaggtagtaaggtgcctaggaaacatt

SEQ ID NO: 762581 - DNA, 33 bp, Homo sapien
atgtcatagaataaacaaagtgtccttgtattt

SEQ ID NO: 762582 - DNA, 33 bp, Homo sapien
atgtcatagaataaacgaagtgtccttgtattt

SEQ ID NO: 762583 - DNA, 33 bp, Homo sapien
tgataagtaattatgaaggttagtcctcagttc

SEQ ID NO: 762584 - DNA, 33 bp, Homo sapien
tgataagtaattatgagggttagtcctcagttc

SEQ ID NO: 762585 - DNA, 33 bp, Homo sapien
gtgggtttgatatgaccatatgaatgtgtgtaa

SEQ ID NO: 762586 - DNA, 33 bp, Homo sapien
gtgggtttgatatgactatatgaatgtgtgtaa

SEQ ID NO: 762587 - DNA, 33 bp, Homo sapien
tgcttgccgatgatgtcaatttaattggatttt

SEQ ID NO: 762588 - DNA, 33 bp, Homo sapien
tgcttgccgatgatgttaatttaattggatttt

SEQ ID NO: 762589 - DNA, 33 bp, Homo sapien
cagttctccagggaaacagaaccaacagcatat

SEQ ID NO: 762590 - DNA, 33 bp, Homo sapien
cagttctccagggaaatagaaccaacagcatat

SEQ ID NO: 762591 - DNA, 33 bp, Homo sapien
gacagcaatcaaattcaatactatctgtggttt

SEQ ID NO: 762592 - DNA, 33 bp, Homo sapien
gacagcaatcaaattcgatactatctgtggttt

SEQ ID NO: 762593 - DNA, 33 bp, Homo sapien
atcattttctgctgtacgtgtcaaatcagtgaa

SEQ ID NO: 762594 - DNA, 33 bp, Homo sapien
atcattttctgctgtatgtgtcaaatcagtgaa

SEQ ID NO: 762595 - DNA, 33 bp, Homo sapien
gggctttagaaagtgaactcttatttatgatga

SEQ ID NO: 762596 - DNA, 33 bp, Homo sapien
gggctttagaaagtgacctcttatttatgatga

SEQ ID NO: 762597 - DNA, 33 bp, Homo sapien
atgttgttgaaaattaccagaatcacatcagtc

SEQ ID NO: 762598 - DNA, 33 bp, Homo sapien
atgttgttgaaaattatcagaatcacatcagtc

SEQ ID NO: 762599 - DNA, 33 bp, Homo sapien
acagaaagcagacggaccattaaggcaaaggac

SEQ ID NO: 762600 - DNA, 33 bp, Homo sapien
acagaaagcagacggatcattaaggcaaaggac

SEQ ID NO: 762601 - DNA, 33 bp, Homo sapien
aatatcacaaatttatcacaaattcttgaatcc

SEQ ID NO: 762602 - DNA, 33 bp, Homo sapien
aatatcacaaatttatgacaaattcttgaatcc

SEQ ID NO: 762603 - DNA, 33 bp, Homo sapien
aatatgaagggagaccaatggagcaattgccca

SEQ ID NO: 762604 - DNA, 33 bp, Homo sapien
aatatgaagggagaccgatggagcaattgccca

SEQ ID NO: 762605 - DNA, 33 bp, Homo sapien
gactctaataattaaaataactgagcagaaata

SEQ ID NO: 762606 - DNA, 33 bp, Homo sapien
gactctaataattaaagtaactgagcagaaata

SEQ ID NO: 762607 - DNA, 33 bp, Homo sapien
ttgcgattttgtgttagatgtcactttcatgaa

SEQ ID NO: 762608 - DNA, 33 bp, Homo sapien
ttgcgattttgtgttatatgtcactttcatgaa

SEQ ID NO: 762609 - DNA, 33 bp, Homo sapien
agagaatggtcagtccaacattttctgaaccat

SEQ ID NO: 762610 - DNA, 33 bp, Homo sapien
agagaatggtcagtccgacattttctgaaccat

SEQ ID NO: 762611 - DNA, 33 bp, Homo sapien
gtatgatctcttataccgtactccttatactct

SEQ ID NO: 762612 - DNA, 33 bp, Homo sapien
gtatgatctcttatactgtactccttatactct

SEQ ID NO: 762613 - DNA, 33 bp, Homo sapien
catcctctacaaaccaagaaaggcaaagaaatg

SEQ ID NO: 762614 - DNA, 33 bp, Homo sapien
catcctctacaaaccaggaaaggcaaagaaatg

SEQ ID NO: 762615 - DNA, 33 bp, Homo sapien
gagaaagagtaccataagttggacactgattca

SEQ ID NO: 762616 - DNA, 33 bp, Homo sapien
gagaaagagtaccataggttggacactgattca

SEQ ID NO: 762617 - DNA, 33 bp, Homo sapien
attatctcagaataaaacctctacctccctgtt

SEQ ID NO: 762618 - DNA, 33 bp, Homo sapien
attatctcagaataaaccctctacctccctgtt

SEQ ID NO: 762619 - DNA, 33 bp, Homo sapien
ctattctggactttcacatcagtggactcatat

SEQ ID NO: 762620 - DNA, 33 bp, Homo sapien
ctattctggactttcatatcagtggactcatat

SEQ ID NO: 762621 - DNA, 33 bp, Homo sapien
gtcaaggaattagaaaatggcagagttcagaca

SEQ ID NO: 762622 - DNA, 33 bp, Homo sapien
gtcaaggaattagaaagtggcagagttcagaca

SEQ ID NO: 762623 - DNA, 33 bp, Homo sapien
tttgtttcttactctactaccttccaaatttca

SEQ ID NO: 762624 - DNA, 33 bp, Homo sapien
tttgtttcttactctattaccttccaaatttca

SEQ ID NO: 762625 - DNA, 33 bp, Homo sapien
catcatcatctacatccattaaaaatacccttc

SEQ ID NO: 762626 - DNA, 33 bp, Homo sapien
catcatcatctacatctattaaaaatacccttc

SEQ ID NO: 762627 - DNA, 33 bp, Homo sapien
atactagtaatgcaagaattttagcccacattt

SEQ ID NO: 762628 - DNA, 33 bp, Homo sapien
atactagtaatgcaaggattttagcccacattt

SEQ ID NO: 762629 - DNA, 33 bp, Homo sapien
gattttacattgcaaccggttactgagcatcta

SEQ ID NO: 762630 - DNA, 33 bp, Homo sapien
gattttacattgcaactggttactgagcatcta

SEQ ID NO: 762631 - DNA, 33 bp, Homo sapien
catctacttctatgcacaatagacactaaagaa

SEQ ID NO: 762632 - DNA, 33 bp, Homo sapien
catctacttctatgcataatagacactaaagaa

SEQ ID NO: 762633 - DNA, 33 bp, Homo sapien
attcatttaatcataacggcactgctagaagag

SEQ ID NO: 762634 - DNA, 33 bp, Homo sapien
attcatttaatcataatggcactgctagaagag

SEQ ID NO: 762635 - DNA, 33 bp, Homo sapien
ctagtttcttagcaaggcttccagttccttctt

SEQ ID NO: 762636 - DNA, 33 bp, Homo sapien
ctagtttcttagcaagtcttccagttccttctt

SEQ ID NO: 762637 - DNA, 33 bp, Homo sapien
tatcagagatgattaactgtttaactccttttc

SEQ ID NO: 762638 - DNA, 33 bp, Homo sapien
tatcagagatgattaattgtttaactccttttc

SEQ ID NO: 762639 - DNA, 33 bp, Homo sapien
tgagatgcatacacacacaaactgcttcttcct

SEQ ID NO: 762640 - DNA, 33 bp, Homo sapien
tgagatgcatacacactcaaactgcttcttcct

SEQ ID NO: 762641 - DNA, 33 bp, Homo sapien
agaaataaaatataaccggctggcatttctttc

SEQ ID NO: 762642 - DNA, 33 bp, Homo sapien
agaaataaaatataactggctggcatttctttc

SEQ ID NO: 762643 - DNA, 33 bp, Homo sapien
actgaattattttggactaagtgttctgatgtc

SEQ ID NO: 762644 - DNA, 33 bp, Homo sapien
actgaattattttggagtaagtgttctgatgtc

SEQ ID NO: 762645 - DNA, 33 bp, Homo sapien
gtaagctttaggattacaccaatgtgtgtattt

SEQ ID NO: 762646 - DNA, 33 bp, Homo sapien
gtaagctttaggattataccaatgtgtgtattt

SEQ ID NO: 762647 - DNA, 33 bp, Homo sapien
ctaaagcttaccaagacatgaaacattggcaat

SEQ ID NO: 762648 - DNA, 33 bp, Homo sapien
ctaaagcttaccaagatatgaaacattggcaat

SEQ ID NO: 762649 - DNA, 33 bp, Homo sapien
cagcctatttacactcccactctcctcttgtgc

SEQ ID NO: 762650 - DNA, 33 bp, Homo sapien
cagcctatttacactctcactctcctcttgtgc

SEQ ID NO: 762651 - DNA, 33 bp, Homo sapien
agaccagatcaatcttaaagacttgcttaaaaa

SEQ ID NO: 762652 - DNA, 33 bp, Homo sapien
agaccagatcaatctttaagacttgcttaaaaa

SEQ ID NO: 762653 - DNA, 33 bp, Homo sapien
aaacatcaaaggcttcacaatgattgataaata

SEQ ID NO: 762654 - DNA, 33 bp, Homo sapien
aaacatcaaaggcttcgcaatgattgataaata

SEQ ID NO: 762655 - DNA, 33 bp, Homo sapien
aagtaggaatttattacggtcatcacactctta

SEQ ID NO: 762656 - DNA, 33 bp, Homo sapien
aagtaggaatttattatggtcatcacactctta

SEQ ID NO: 762657 - DNA, 33 bp, Homo sapien
aattgctttatgtggaaagatgtgaaacataaa

SEQ ID NO: 762658 - DNA, 33 bp, Homo sapien
aattgctttatgtggacagatgtgaaacataaa

SEQ ID NO: 762659 - DNA, 33 bp, Homo sapien
ctcttatgcttccatgaatattgaacagtaact

SEQ ID NO: 762660 - DNA, 33 bp, Homo sapien
ctcttatgcttccatggatattgaacagtaact

SEQ ID NO: 762661 - DNA, 33 bp, Homo sapien
gtagatgttatggtgcaaaacaggtgtaggcaa

SEQ ID NO: 762662 - DNA, 33 bp, Homo sapien
gtagatgttatggtgcgaaacaggtgtaggcaa

SEQ ID NO: 762663 - DNA, 33 bp, Homo sapien
atgaagaattttgtgaaccatgtagaagattta

SEQ ID NO: 762664 - DNA, 33 bp, Homo sapien
atgaagaattttgtgacccatgtagaagattta

SEQ ID NO: 762665 - DNA, 33 bp, Homo sapien
aaaatctttgattaacaggcacaaaatcatcta

SEQ ID NO: 762666 - DNA, 33 bp, Homo sapien
aaaatctttgattaacgggcacaaaatcatcta

SEQ ID NO: 762667 - DNA, 33 bp, Homo sapien
tttaacccgtttctcaagatgagctggaaagag

SEQ ID NO: 762668 - DNA, 33 bp, Homo sapien
tttaacccgtttctcaggatgagctggaaagag

SEQ ID NO: 762669 - DNA, 33 bp, Homo sapien
gataaacgatctgaaaagtagaaatttcagaat

SEQ ID NO: 762670 - DNA, 33 bp, Homo sapien
gataaacgatctgaaacgtagaaatttcagaat

SEQ ID NO: 762671 - DNA, 33 bp, Homo sapien
gtcctccttccattggcccaatattagtttcat

SEQ ID NO: 762672 - DNA, 33 bp, Homo sapien
gtcctccttccattggtccaatattagtttcat

SEQ ID NO: 762673 - DNA, 33 bp, Homo sapien
tcttggcatccatttcacaacatcatactaaac

SEQ ID NO: 762674 - DNA, 33 bp, Homo sapien
tcttggcatccatttcgcaacatcatactaaac

SEQ ID NO: 762675 - DNA, 33 bp, Homo sapien
ggtttgagcagggagacactgaagaaacgacag

SEQ ID NO: 762676 - DNA, 33 bp, Homo sapien
ggtttgagcagggagatactgaagaaacgacag

SEQ ID NO: 762677 - DNA, 33 bp, Homo sapien
aatattcttcttttgaaaatgctgcatatgtgt

SEQ ID NO: 762678 - DNA, 33 bp, Homo sapien
aatattcttcttttgagaatgctgcatatgtgt

SEQ ID NO: 762679 - DNA, 33 bp, Homo sapien
aaatactgacaggaagaagaatatagaaaatga

SEQ ID NO: 762680 - DNA, 33 bp, Homo sapien
aaatactgacaggaaggagaatatagaaaatga

SEQ ID NO: 762681 - DNA, 33 bp, Homo sapien
cagaagaaacaatgggaagcaggaggaaaccca

SEQ ID NO: 762682 - DNA, 33 bp, Homo sapien
cagaagaaacaatggggagcaggaggaaaccca

SEQ ID NO: 762683 - DNA, 33 bp, Homo sapien
tgtacatagataggggaagataaatttttatga

SEQ ID NO: 762684 - DNA, 33 bp, Homo sapien
tgtacatagatagggggagataaatttttatga

SEQ ID NO: 762685 - DNA, 33 bp, Homo sapien
tgtttcctggagaaagcaagaaagtgaacctgt

SEQ ID NO: 762686 - DNA, 33 bp, Homo sapien
tgtttcctggagaaagtaagaaagtgaacctgt

SEQ ID NO: 762687 - DNA, 33 bp, Homo sapien
ccatctttgccacacacggagatggatgacaaa

SEQ ID NO: 762688 - DNA, 33 bp, Homo sapien
ccatctttgccacacagggagatggatgacaaa

SEQ ID NO: 762689 - DNA, 33 bp, Homo sapien
tcaaagtcaaactcacgaattagctcaacagag

SEQ ID NO: 762690 - DNA, 33 bp, Homo sapien
tcaaagtcaaactcactaattagctcaacagag

SEQ ID NO: 762691 - DNA, 33 bp, Homo sapien
aattgctatttgtgtacgtaaatagtggtcaaa

SEQ ID NO: 762692 - DNA, 33 bp, Homo sapien
aattgctatttgtgtatgtaaatagtggtcaaa

SEQ ID NO: 762693 - DNA, 33 bp, Homo sapien
cagaattactttcccccgacatcagaaacaagg

SEQ ID NO: 762694 - DNA, 33 bp, Homo sapien
cagaattactttcccctgacatcagaaacaagg

SEQ ID NO: 762695 - DNA, 33 bp, Homo sapien
caaggtttgattcataagagaggaagagagatt

SEQ ID NO: 762696 - DNA, 33 bp, Homo sapien
caaggtttgattcatatgagaggaagagagatt

SEQ ID NO: 762697 - DNA, 33 bp, Homo sapien
aagttttgaaaatagcagcataaatttttgact

SEQ ID NO: 762698 - DNA, 33 bp, Homo sapien
aagttttgaaaatagcggcataaatttttgact

SEQ ID NO: 762699 - DNA, 33 bp, Homo sapien
tctagccctgtctgaaggcagttcctaattgtg

SEQ ID NO: 762700 - DNA, 33 bp, Homo sapien
tctagccctgtctgaatgcagttcctaattgtg

SEQ ID NO: 762701 - DNA, 33 bp, Homo sapien
acctgtgtgagtgtccaatgagtgacctttcaa

SEQ ID NO: 762702 - DNA, 33 bp, Homo sapien
acctgtgtgagtgtccgatgagtgacctttcaa

SEQ ID NO: 762703 - DNA, 33 bp, Homo sapien
aatacggtgcattggagaacctaaggctttgtg

SEQ ID NO: 762704 - DNA, 33 bp, Homo sapien
aatacggtgcattggataacctaaggctttgtg

SEQ ID NO: 762705 - DNA, 33 bp, Homo sapien
tagaatattgatttgggaatttctctgttctgc

SEQ ID NO: 762706 - DNA, 33 bp, Homo sapien
tagaatattgatttggtaatttctctgttctgc

SEQ ID NO: 762707 - DNA, 33 bp, Homo sapien
aagagtaagcataagaactaataaaattagatg

SEQ ID NO: 762708 - DNA, 33 bp, Homo sapien
aagagtaagcataagagctaataaaattagatg

SEQ ID NO: 762709 - DNA, 33 bp, Homo sapien
aaagaatgaaatcacacgaacagccatattgga

SEQ ID NO: 762710 - DNA, 33 bp, Homo sapien
aaagaatgaaatcacatgaacagccatattgga

SEQ ID NO: 762711 - DNA, 33 bp, Homo sapien
ttaagaaacgttgtaaaaatctgtgggcctctc

SEQ ID NO: 762712 - DNA, 33 bp, Homo sapien
ttaagaaacgttgtaacaatctgtgggcctctc

SEQ ID NO: 762713 - DNA, 33 bp, Homo sapien
aacttctgccttcatgaaagagggaaaaccatg

SEQ ID NO: 762714 - DNA, 33 bp, Homo sapien
aacttctgccttcatggaagagggaaaaccatg

SEQ ID NO: 762715 - DNA, 33 bp, Homo sapien
aacataagacaactgaataaatacatataatat

SEQ ID NO: 762716 - DNA, 33 bp, Homo sapien
aacataagacaactgagtaaatacatataatat

SEQ ID NO: 762717 - DNA, 33 bp, Homo sapien
cttcaaactgtaagaaacctagaagaagaccta

SEQ ID NO: 762718 - DNA, 33 bp, Homo sapien
cttcaaactgtaagaatcctagaagaagaccta

SEQ ID NO: 762719 - DNA, 33 bp, Homo sapien
caaaaataagcattgaagaaaggactctctatt

SEQ ID NO: 762720 - DNA, 33 bp, Homo sapien
caaaaataagcattgaggaaaggactctctatt

SEQ ID NO: 762721 - DNA, 33 bp, Homo sapien
gtggtcactgagggcccaaaagtgtgtgcaggc

SEQ ID NO: 762722 - DNA, 33 bp, Homo sapien
gtggtcactgagggccgaaaagtgtgtgcaggc

SEQ ID NO: 762723 - DNA, 33 bp, Homo sapien
gcttcaaatccaggacagcaggtatttcaggtg

SEQ ID NO: 762724 - DNA, 33 bp, Homo sapien
gcttcaaatccaggacggcaggtatttcaggtg

SEQ ID NO: 762725 - DNA, 33 bp, Homo sapien
ttgatttagggtcaaaagtcacagatgttaccg

SEQ ID NO: 762726 - DNA, 33 bp, Homo sapien
ttgatttagggtcaaacgtcacagatgttaccg

SEQ ID NO: 762727 - DNA, 33 bp, Homo sapien
aatcctgcctttaaaacagtatttgttactcaa

SEQ ID NO: 762728 - DNA, 33 bp, Homo sapien
aatcctgcctttaaaagagtatttgttactcaa

SEQ ID NO: 762729 - DNA, 33 bp, Homo sapien
atatgttttaaatggccatgaggtttagttgtg

SEQ ID NO: 762730 - DNA, 33 bp, Homo sapien
atatgttttaaatggctatgaggtttagttgtg

SEQ ID NO: 762731 - DNA, 33 bp, Homo sapien
atgtgggacacagcccaaaaactttacatatgt

SEQ ID NO: 762732 - DNA, 33 bp, Homo sapien
atgtgggacacagccctaaaactttacatatgt

SEQ ID NO: 762733 - DNA, 33 bp, Homo sapien
ccacttttttctctccaatccttcctcacattt

SEQ ID NO: 762734 - DNA, 33 bp, Homo sapien
ccacttttttctctccgatccttcctcacattt

SEQ ID NO: 762735 - DNA, 33 bp, Homo sapien
aggatatccaaaatcaagtcacactcagaaaga

SEQ ID NO: 762736 - DNA, 33 bp, Homo sapien
aggatatccaaaatcatgtcacactcagaaaga

SEQ ID NO: 762737 - DNA, 33 bp, Homo sapien
ttgcatatggtctctacagtctctacagataag

SEQ ID NO: 762738 - DNA, 33 bp, Homo sapien
ttgcatatggtctctatagtctctacagataag

SEQ ID NO: 762739 - DNA, 33 bp, Homo sapien
tgccttcaagatgagaacattcttccattgccc

SEQ ID NO: 762740 - DNA, 33 bp, Homo sapien
tgccttcaagatgagatcattcttccattgccc

SEQ ID NO: 762741 - DNA, 33 bp, Homo sapien
agcactctctaagtacaaaagcagacgagttct

SEQ ID NO: 762742 - DNA, 33 bp, Homo sapien
agcactctctaagtacgaaagcagacgagttct

SEQ ID NO: 762743 - DNA, 33 bp, Homo sapien
tgtgtcctcaggcaaccggcctacttctcagga

SEQ ID NO: 762744 - DNA, 33 bp, Homo sapien
tgtgtcctcaggcaactggcctacttctcagga

SEQ ID NO: 762745 - DNA, 33 bp, Homo sapien
tgcctgtacattcaggcattccaatgcatcctc

SEQ ID NO: 762746 - DNA, 33 bp, Homo sapien
tgcctgtacattcaggtattccaatgcatcctc

SEQ ID NO: 762747 - DNA, 33 bp, Homo sapien
tataatctacacgaataagctgccagtaaaatg

SEQ ID NO: 762748 - DNA, 33 bp, Homo sapien
tataatctacacgaattagctgccagtaaaatg

SEQ ID NO: 762749 - DNA, 33 bp, Homo sapien
aagtacgtcagtgaacaattcctcatttgagag

SEQ ID NO: 762750 - DNA, 33 bp, Homo sapien
aagtacgtcagtgaacgattcctcatttgagag

SEQ ID NO: 762751 - DNA, 33 bp, Homo sapien
actggaaactttaaacagagaatgactctcaga

SEQ ID NO: 762752 - DNA, 33 bp, Homo sapien
actggaaactttaaacggagaatgactctcaga

SEQ ID NO: 762753 - DNA, 33 bp, Homo sapien
tgaaataaaaattctgccaattcagtgatgaaa

SEQ ID NO: 762754 - DNA, 33 bp, Homo sapien
tgaaataaaaattctgtcaattcagtgatgaaa

SEQ ID NO: 762755 - DNA, 33 bp, Homo sapien
acacaacactgtcctacgggatagaaaatacca

SEQ ID NO: 762756 - DNA, 33 bp, Homo sapien
acacaacactgtcctatgggatagaaaatacca

SEQ ID NO: 762757 - DNA, 33 bp, Homo sapien
taaaaatgagtggtacaggattgcctgcaagat

SEQ ID NO: 762758 - DNA, 33 bp, Homo sapien
taaaaatgagtggtacgggattgcctgcaagat

SEQ ID NO: 762759 - DNA, 33 bp, Homo sapien
tttttattttttacacactcattttaggaaata

SEQ ID NO: 762760 - DNA, 33 bp, Homo sapien
tttttattttttacacgctcattttaggaaata

SEQ ID NO: 762761 - DNA, 33 bp, Homo sapien
aatccaggcaatgaaaagttatggaaactgcta

SEQ ID NO: 762762 - DNA, 33 bp, Homo sapien
aatccaggcaatgaaaggttatggaaactgcta

SEQ ID NO: 762763 - DNA, 33 bp, Homo sapien
aaaatagttaagtgacagaatgcagaatgataa

SEQ ID NO: 762764 - DNA, 33 bp, Homo sapien
aaaatagttaagtgacggaatgcagaatgataa

SEQ ID NO: 762765 - DNA, 33 bp, Homo sapien
ttgttctcaccactctcaatcatagtggagcca

SEQ ID NO: 762766 - DNA, 33 bp, Homo sapien
ttgttctcaccactcttaatcatagtggagcca

SEQ ID NO: 762767 - DNA, 33 bp, Homo sapien
tctctctctctgcttaaggtttgcggtagttat

SEQ ID NO: 762768 - DNA, 33 bp, Homo sapien
tctctctctctgcttagggtttgcggtagttat

SEQ ID NO: 762769 - DNA, 33 bp, Homo sapien
tctaccattacattgagatagctccttacttca

SEQ ID NO: 762770 - DNA, 33 bp, Homo sapien
tctaccattacattgatatagctccttacttca

SEQ ID NO: 762771 - DNA, 33 bp, Homo sapien
catccttctgagctacacaatggtgagtagtac

SEQ ID NO: 762772 - DNA, 33 bp, Homo sapien
catccttctgagctacgcaatggtgagtagtac

SEQ ID NO: 762773 - DNA, 33 bp, Homo sapien
caaaaacactgtgcatcaattacatacagtgag

SEQ ID NO: 762774 - DNA, 33 bp, Homo sapien
caaaaacactgtgcattaattacatacagtgag

SEQ ID NO: 762775 - DNA, 33 bp, Homo sapien
ggaagaggaagccccaaagttgaggtgaaagta

SEQ ID NO: 762776 - DNA, 33 bp, Homo sapien
ggaagaggaagccccacagttgaggtgaaagta

SEQ ID NO: 762777 - DNA, 33 bp, Homo sapien
tgctcttaagagtgaaaaaaagctcacaagtgt

SEQ ID NO: 762778 - DNA, 33 bp, Homo sapien
tgctcttaagagtgaataaaagctcacaagtgt

SEQ ID NO: 762779 - DNA, 33 bp, Homo sapien
aatagaaaatgtgtaacagaagaaagtagtaat

SEQ ID NO: 762780 - DNA, 33 bp, Homo sapien
aatagaaaatgtgtaatagaagaaagtagtaat

SEQ ID NO: 762781 - DNA, 33 bp, Homo sapien
aatgccatattatagacgtggattcagagtata

SEQ ID NO: 762782 - DNA, 33 bp, Homo sapien
aatgccatattatagatgtggattcagagtata

SEQ ID NO: 762783 - DNA, 33 bp, Homo sapien
gggaaatgtgggattgaaacttccacaaagagt

SEQ ID NO: 762784 - DNA, 33 bp, Homo sapien
gggaaatgtgggattggaacttccacaaagagt

SEQ ID NO: 762785 - DNA, 33 bp, Homo sapien
atggaactagatgtcactatgttaagtaaaata

SEQ ID NO: 762786 - DNA, 33 bp, Homo sapien
atggaactagatgtcattatgttaagtaaaata

SEQ ID NO: 762787 - DNA, 33 bp, Homo sapien
aaaaaacaacttggaaaacataacacatctgac

SEQ ID NO: 762788 - DNA, 33 bp, Homo sapien
aaaaaacaacttggaagacataacacatctgac

SEQ ID NO: 762789 - DNA, 33 bp, Homo sapien
tgagatgcaaaaatccacataaaacttcaatga

SEQ ID NO: 762790 - DNA, 33 bp, Homo sapien
tgagatgcaaaaatccgcataaaacttcaatga

SEQ ID NO: 762791 - DNA, 33 bp, Homo sapien
catcgaaaaagagaagacattcaggaaactcat

SEQ ID NO: 762792 - DNA, 33 bp, Homo sapien
catcgaaaaagagaaggcattcaggaaactcat

SEQ ID NO: 762793 - DNA, 33 bp, Homo sapien
tatcaatattctatagaattcacgcattgcact

SEQ ID NO: 762794 - DNA, 33 bp, Homo sapien
tatcaatattctatagtattcacgcattgcact

SEQ ID NO: 762795 - DNA, 33 bp, Homo sapien
ttcttcacataatgccagacagaatactttcca

SEQ ID NO: 762796 - DNA, 33 bp, Homo sapien
ttcttcacataatgccggacagaatactttcca

SEQ ID NO: 762797 - DNA, 33 bp, Homo sapien
attaaaatactggagactcaattaagaagtgct

SEQ ID NO: 762798 - DNA, 33 bp, Homo sapien
attaaaatactggagattcaattaagaagtgct

SEQ ID NO: 762799 - DNA, 33 bp, Homo sapien
aatttctatgcagacaatgaccaattttcaaag

SEQ ID NO: 762800 - DNA, 33 bp, Homo sapien
aatttctatgcagacattgaccaattttcaaag

SEQ ID NO: 762801 - DNA, 33 bp, Homo sapien
gatctcatggacatcacaagagtaataaaataa

SEQ ID NO: 762802 - DNA, 33 bp, Homo sapien
gatctcatggacatcagaagagtaataaaataa

SEQ ID NO: 762803 - DNA, 33 bp, Homo sapien
gtgatgagtatgctaacaactttgattttgatc

SEQ ID NO: 762804 - DNA, 33 bp, Homo sapien
gtgatgagtatgctaataactttgattttgatc

SEQ ID NO: 762805 - DNA, 33 bp, Homo sapien
ttccttggttacttacaaagagagtaggttttc

SEQ ID NO: 762806 - DNA, 33 bp, Homo sapien
ttccttggttacttacgaagagagtaggttttc

SEQ ID NO: 762807 - DNA, 33 bp, Homo sapien
cagcagaggagaatgcagatgaaggaaagtaag

SEQ ID NO: 762808 - DNA, 33 bp, Homo sapien
cagcagaggagaatgcggatgaaggaaagtaag

SEQ ID NO: 762809 - DNA, 33 bp, Homo sapien
aaaactttgaccaaagaaaacaatttcataaaa

SEQ ID NO: 762810 - DNA, 33 bp, Homo sapien
aaaactttgaccaaaggaaacaatttcataaaa

SEQ ID NO: 762811 - DNA, 33 bp, Homo sapien
ttgttctgattgcaaactaaagacttaaatgaa

SEQ ID NO: 762812 - DNA, 33 bp, Homo sapien
ttgttctgattgcaaattaaagacttaaatgaa

SEQ ID NO: 762813 - DNA, 33 bp, Homo sapien
tgagctccaacaaaaacgattctagtgaattcc

SEQ ID NO: 762814 - DNA, 33 bp, Homo sapien
tgagctccaacaaaaatgattctagtgaattcc

SEQ ID NO: 762815 - DNA, 33 bp, Homo sapien
gacaaaggcatttttaagcccatccgtaattct

SEQ ID NO: 762816 - DNA, 33 bp, Homo sapien
gacaaaggcatttttaggcccatccgtaattct

SEQ ID NO: 762817 - DNA, 33 bp, Homo sapien
ttagtttgatttcttcacttcagtttgtatatt

SEQ ID NO: 762818 - DNA, 33 bp, Homo sapien
ttagtttgatttcttcgcttcagtttgtatatt

SEQ ID NO: 762819 - DNA, 33 bp, Homo sapien
tgatattaactaggaacgcttattttagttgag

SEQ ID NO: 762820 - DNA, 33 bp, Homo sapien
tgatattaactaggaatgcttattttagttgag

SEQ ID NO: 762821 - DNA, 33 bp, Homo sapien
gatatttacttcacagacaaattaggcaaatag

SEQ ID NO: 762822 - DNA, 33 bp, Homo sapien
gatatttacttcacagtcaaattaggcaaatag

SEQ ID NO: 762823 - DNA, 33 bp, Homo sapien
agatgacaaaacatacagagctttctttaatta

SEQ ID NO: 762824 - DNA, 33 bp, Homo sapien
agatgacaaaacatacggagctttctttaatta

SEQ ID NO: 762825 - DNA, 33 bp, Homo sapien
tatttttaaatcactgaacaactcataatttta

SEQ ID NO: 762826 - DNA, 33 bp, Homo sapien
tatttttaaatcactgtacaactcataatttta

SEQ ID NO: 762827 - DNA, 33 bp, Homo sapien
gttttcctaatcttaacacccagcaatcatgca

SEQ ID NO: 762828 - DNA, 33 bp, Homo sapien
gttttcctaatcttaatacccagcaatcatgca

SEQ ID NO: 762829 - DNA, 33 bp, Homo sapien
atcatgcattttatgacgttgcctttgatttac

SEQ ID NO: 762830 - DNA, 33 bp, Homo sapien
atcatgcattttatgatgttgcctttgatttac

SEQ ID NO: 762831 - DNA, 33 bp, Homo sapien
agttctgatagaaaaaccaatagtacacatatt

SEQ ID NO: 762832 - DNA, 33 bp, Homo sapien
agttctgatagaaaaagcaatagtacacatatt

SEQ ID NO: 762833 - DNA, 33 bp, Homo sapien
cttttatggtgcaagaaacattgatatattcag

SEQ ID NO: 762834 - DNA, 33 bp, Homo sapien
cttttatggtgcaagagacattgatatattcag

SEQ ID NO: 762835 - DNA, 33 bp, Homo sapien
tatagtataaaaacaccctgtagtcaattaatt

SEQ ID NO: 762836 - DNA, 33 bp, Homo sapien
tatagtataaaaacactctgtagtcaattaatt

SEQ ID NO: 762837 - DNA, 33 bp, Homo sapien
aggccttaggagaatactacaaagacataggat

SEQ ID NO: 762838 - DNA, 33 bp, Homo sapien
aggccttaggagaatagtacaaagacataggat

SEQ ID NO: 762839 - DNA, 33 bp, Homo sapien
acttatgctgatataacgtgtaacttttaagcc

SEQ ID NO: 762840 - DNA, 33 bp, Homo sapien
acttatgctgatataatgtgtaacttttaagcc

SEQ ID NO: 762841 - DNA, 33 bp, Homo sapien
agaattacatggcaaaacaattgtaaaactgtt

SEQ ID NO: 762842 - DNA, 33 bp, Homo sapien
agaattacatggcaaatcaattgtaaaactgtt

SEQ ID NO: 762843 - DNA, 33 bp, Homo sapien
aaaagcacaaaagctcactgagatccattgaat

SEQ ID NO: 762844 - DNA, 33 bp, Homo sapien
aaaagcacaaaagctcgctgagatccattgaat

SEQ ID NO: 762845 - DNA, 33 bp, Homo sapien
tgaagataatttatgcaattccagacaattagc

SEQ ID NO: 762846 - DNA, 33 bp, Homo sapien
tgaagataatttatgcgattccagacaattagc

SEQ ID NO: 762847 - DNA, 33 bp, Homo sapien
catgacattgatttaacatacaaccttcagcaa

SEQ ID NO: 762848 - DNA, 33 bp, Homo sapien
catgacattgatttaatatacaaccttcagcaa

SEQ ID NO: 762849 - DNA, 33 bp, Homo sapien
tctagtgtgctcatggacatcaaatggatttgc

SEQ ID NO: 762850 - DNA, 33 bp, Homo sapien
tctagtgtgctcatggtcatcaaatggatttgc

SEQ ID NO: 762851 - DNA, 33 bp, Homo sapien
tcccagaatcttttatcaaacatcttctagaaa

SEQ ID NO: 762852 - DNA, 33 bp, Homo sapien
tcccagaatcttttatgaaacatcttctagaaa

SEQ ID NO: 762853 - DNA, 33 bp, Homo sapien
tgtgtcctctaaacaactctctgaggcaatatt

SEQ ID NO: 762854 - DNA, 33 bp, Homo sapien
tgtgtcctctaaacaattctctgaggcaatatt

SEQ ID NO: 762855 - DNA, 33 bp, Homo sapien
ctttaaccaaggtagaaaatgcgtaagtaacaa

SEQ ID NO: 762856 - DNA, 33 bp, Homo sapien
ctttaaccaaggtagagaatgcgtaagtaacaa

SEQ ID NO: 762857 - DNA, 33 bp, Homo sapien
atacatttgacaatacccatagcctgtacaaag

SEQ ID NO: 762858 - DNA, 33 bp, Homo sapien
atacatttgacaatactcatagcctgtacaaag

SEQ ID NO: 762859 - DNA, 33 bp, Homo sapien
attgtagattaagacaacaaaataccattacat

SEQ ID NO: 762860 - DNA, 33 bp, Homo sapien
attgtagattaagacagcaaaataccattacat

SEQ ID NO: 762861 - DNA, 33 bp, Homo sapien
atagtaagattttgataaatgttggccattctt

SEQ ID NO: 762862 - DNA, 33 bp, Homo sapien
atagtaagattttgatgaatgttggccattctt

SEQ ID NO: 762863 - DNA, 33 bp, Homo sapien
acttataaatatactacggcaagaatggccaac

SEQ ID NO: 762864 - DNA, 33 bp, Homo sapien
acttataaatatactatggcaagaatggccaac

SEQ ID NO: 762865 - DNA, 33 bp, Homo sapien
tttcttcatagcagcaggagaacgaagtaatac

SEQ ID NO: 762866 - DNA, 33 bp, Homo sapien
tttcttcatagcagcatgagaacgaagtaatac

SEQ ID NO: 762867 - DNA, 33 bp, Homo sapien
taaatcacagtagagaccttcctttgagatttt

SEQ ID NO: 762868 - DNA, 33 bp, Homo sapien
taaatcacagtagagatcttcctttgagatttt

SEQ ID NO: 762869 - DNA, 33 bp, Homo sapien
gttggtttgatgaaaaggtagaacagcttttga

SEQ ID NO: 762870 - DNA, 33 bp, Homo sapien
gttggtttgatgaaaatgtagaacagcttttga

SEQ ID NO: 762871 - DNA, 33 bp, Homo sapien
ctagtgatgtattagcaaattttttattccctg

SEQ ID NO: 762872 - DNA, 33 bp, Homo sapien
ctagtgatgtattagcgaattttttattccctg

SEQ ID NO: 762873 - DNA, 33 bp, Homo sapien
aacaaaaattttcctactaatgaaagacatcaa

SEQ ID NO: 762874 - DNA, 33 bp, Homo sapien
aacaaaaattttcctagtaatgaaagacatcaa

SEQ ID NO: 762875 - DNA, 33 bp, Homo sapien
cttggaagcaatacagaatgtaatgtgggcttg

SEQ ID NO: 762876 - DNA, 33 bp, Homo sapien
cttggaagcaatacagcatgtaatgtgggcttg

SEQ ID NO: 762877 - DNA, 33 bp, Homo sapien
ctcattctggcattaaccagaaaacccaagtcc

SEQ ID NO: 762878 - DNA, 33 bp, Homo sapien
ctcattctggcattaatcagaaaacccaagtcc

SEQ ID NO: 762879 - DNA, 33 bp, Homo sapien
catctttttgatataaaggcatcttattttgct

SEQ ID NO: 762880 - DNA, 33 bp, Homo sapien
catctttttgatataatggcatcttattttgct

SEQ ID NO: 762881 - DNA, 33 bp, Homo sapien
acagtgggagctaattaaaccagggtggcagtt

SEQ ID NO: 762882 - DNA, 33 bp, Homo sapien
acagtgggagctaattgaaccagggtggcagtt

SEQ ID NO: 762883 - DNA, 33 bp, Homo sapien
tcatatagcctgaagaaggaaatgtagttttac

SEQ ID NO: 762884 - DNA, 33 bp, Homo sapien
tcatatagcctgaagagggaaatgtagttttac

SEQ ID NO: 762885 - DNA, 33 bp, Homo sapien
acctcatcaacaattaaggcccagattgccttc

SEQ ID NO: 762886 - DNA, 33 bp, Homo sapien
acctcatcaacaattacggcccagattgccttc

SEQ ID NO: 762887 - DNA, 33 bp, Homo sapien; identical to SEQ ID NO: 762885

SEQ ID NO: 762888 - DNA, 33 bp, Homo sapien; identical to SEQ ID NO: 762886

SEQ ID NO: 762889 - DNA, 33 bp, Homo sapien
cctcaaaattcaaaaaacagaaagttgagaaat

SEQ ID NO: 762890 - DNA, 33 bp, Homo sapien
cctcaaaattcaaaaatcagaaagttgagaaat

SEQ ID NO: 762891 - DNA, 33 bp, Homo sapien
gaattttgaggcaaacagaggatgtcagtgtgg

SEQ ID NO: 762892 - DNA, 33 bp, Homo sapien
gaattttgaggcaaacggaggatgtcagtgtgg

SEQ ID NO: 762893 - DNA, 33 bp, Homo sapien
tgctttccagaccactcactgaagcaaccctta

SEQ ID NO: 762894 - DNA, 33 bp, Homo sapien
tgctttccagaccactgactgaagcaaccctta

SEQ ID NO: 762895 - DNA, 33 bp, Homo sapien
aactacaagtgacataagtcaaggaaaaaataa

SEQ ID NO: 762896 - DNA, 33 bp, Homo sapien
aactacaagtgacataggtcaaggaaaaaataa

SEQ ID NO: 762897 - DNA, 33 bp, Homo sapien
taaaacccaagctccaagacaaattcctttttc

SEQ ID NO: 762898 - DNA, 33 bp, Homo sapien
taaaacccaagctccacgacaaattcctttttc

SEQ ID NO: 762899 - DNA, 33 bp, Homo sapien
ttacacattggcaaaaatcagtgagccaaaaat

SEQ ID NO: 762900 - DNA, 33 bp, Homo sapien
ttacacattggcaaaagtcagtgagccaaaaat

SEQ ID NO: 762901 - DNA, 33 bp, Homo sapien
tgttatgccttgaacacaatgattttattaaat

SEQ ID NO: 762902 - DNA, 33 bp, Homo sapien
tgttatgccttgaacagaatgattttattaaat

SEQ ID NO: 762903 - DNA, 33 bp, Homo sapien
ttttttatcttgaaaacgagtaggcaaaaaaga

SEQ ID NO: 762904 - DNA, 33 bp, Homo sapien
ttttttatcttgaaaatgagtaggcaaaaaaga

SEQ ID NO: 762905 - DNA, 33 bp, Homo sapien
tctgtctttactcataactttaataaacagtac

SEQ ID NO: 762906 - DNA, 33 bp, Homo sapien
tctgtctttactcatacctttaataaacagtac

SEQ ID NO: 762907 - DNA, 33 bp, Homo sapien
ccagcttgtctccctacctgtttttctctcctc

SEQ ID NO: 762908 - DNA, 33 bp, Homo sapien
ccagcttgtctccctatctgtttttctctcctc

SEQ ID NO: 762909 - DNA, 33 bp, Homo sapien
cttgataaaaacaacacatatgcacaatgggct

SEQ ID NO: 762910 - DNA, 33 bp, Homo sapien
cttgataaaaacaacatatatgcacaatgggct

SEQ ID NO: 762911 - DNA, 33 bp, Homo sapien
gacataacaatggaatcattatggctttagatt

SEQ ID NO: 762912 - DNA, 33 bp, Homo sapien
gacataacaatggaatgattatggctttagatt

SEQ ID NO: 762913 - DNA, 33 bp, Homo sapien
atttatatgccatgcccactacttctggacaac

SEQ ID NO: 762914 - DNA, 33 bp, Homo sapien
atttatatgccatgccgactacttctggacaac

SEQ ID NO: 762915 - DNA, 33 bp, Homo sapien
accatgaacatacgcactcatccatccattctt

SEQ ID NO: 762916 - DNA, 33 bp, Homo sapien
accatgaacatacgcattcatccatccattctt

SEQ ID NO: 762917 - DNA, 33 bp, Homo sapien
atttcattcccttcaccggatcatttgcttatt

SEQ ID NO: 762918 - DNA, 33 bp, Homo sapien
atttcattcccttcactggatcatttgcttatt

SEQ ID NO: 762919 - DNA, 33 bp, Homo sapien
gaatctgatgaatttgaaaaatctatagcattt

SEQ ID NO: 762920 - DNA, 33 bp, Homo sapien
gaatctgatgaatttggaaaatctatagcattt

SEQ ID NO: 762921 - DNA, 33 bp, Homo sapien
ccttagccatttgaacagtgcccgtccacatta

SEQ ID NO: 762922 - DNA, 33 bp, Homo sapien
ccttagccatttgaacggtgcccgtccacatta

SEQ ID NO: 762923 - DNA, 33 bp, Homo sapien
ttactattgcaatataaaaaactaggctaccta

SEQ ID NO: 762924 - DNA, 33 bp, Homo sapien
ttactattgcaatatacaaaactaggctaccta

SEQ ID NO: 762925 - DNA, 33 bp, Homo sapien
catattgaggttaaaacattctctaggagatag

SEQ ID NO: 762926 - DNA, 33 bp, Homo sapien
catattgaggttaaaagattctctaggagatag

SEQ ID NO: 762927 - DNA, 33 bp, Homo sapien
gttgccgccaatctgtaaaacatcaattcctat

SEQ ID NO: 762928 - DNA, 33 bp, Homo sapien
gttgccgccaatctgtgaaacatcaattcctat

SEQ ID NO: 762929 - DNA, 33 bp, Homo sapien
ttcatctctcagcgtgcaattcctctttgaaaa

SEQ ID NO: 762930 - DNA, 33 bp, Homo sapien
ttcatctctcagcgtgtaattcctctttgaaaa

SEQ ID NO: 762931 - DNA, 33 bp, Homo sapien
ctgtggcaaagatgtaaataactccatgtttta

SEQ ID NO: 762932 - DNA, 33 bp, Homo sapien
ctgtggcaaagatgtacataactccatgtttta

SEQ ID NO: 762933 - DNA, 33 bp, Homo sapien
tattttatgaaaaagaaagccttgtgtcaaaaa

SEQ ID NO: 762934 - DNA, 33 bp, Homo sapien
tattttatgaaaaagagagccttgtgtcaaaaa

SEQ ID NO: 762935 - DNA, 33 bp, Homo sapien
gttttcccagcaattgaataatactctgtctct

SEQ ID NO: 762936 - DNA, 33 bp, Homo sapien
gttttcccagcaattggataatactctgtctct

SEQ ID NO: 762937 - DNA, 33 bp, Homo sapien
atggtgacaaaaatcaacccgctaaagggctag

SEQ ID NO: 762938 - DNA, 33 bp, Homo sapien
atggtgacaaaaatcagcccgctaaagggctag

SEQ ID NO: 762939 - DNA, 33 bp, Homo sapien
ttcctttcttaataaaacataactctcaccttt

SEQ ID NO: 762940 - DNA, 33 bp, Homo sapien
ttcctttcttaataaaccataactctcaccttt

SEQ ID NO: 762941 - DNA, 33 bp, Homo sapien
tttagtcacagaaaaacgtactgtccaatatgg

SEQ ID NO: 762942 - DNA, 33 bp, Homo sapien
tttagtcacagaaaaatgtactgtccaatatgg

SEQ ID NO: 762943 - DNA, 33 bp, Homo sapien
acatgggtgcaccttaccatattcatcacagaa

SEQ ID NO: 762944 - DNA, 33 bp, Homo sapien
acatgggtgcaccttatcatattcatcacagaa

SEQ ID NO: 762945 - DNA, 33 bp, Homo sapien
aaagctaataagtgaaaaaacctggtaactatg

SEQ ID NO: 762946 - DNA, 33 bp, Homo sapien
aaagctaataagtgaagaaacctggtaactatg

SEQ ID NO: 762947 - DNA, 33 bp, Homo sapien
actgaaatacactgataaagaaattgctgaagg

SEQ ID NO: 762948 - DNA, 33 bp, Homo sapien
actgaaatacactgatgaagaaattgctgaagg

SEQ ID NO: 762949 - DNA, 33 bp, Homo sapien
gtagagtggtttcagtaaaagtgtgcatgaaaa

SEQ ID NO: 762950 - DNA, 33 bp, Homo sapien
gtagagtggtttcagtgaaagtgtgcatgaaaa

SEQ ID NO: 762951 - DNA, 33 bp, Homo sapien
gacttctggtatcacaacatttttagacattat

SEQ ID NO: 762952 - DNA, 33 bp, Homo sapien
gacttctggtatcacatcatttttagacattat

SEQ ID NO: 762953 - DNA, 33 bp, Homo sapien
attggtaattgaaagcaatggtaataaaaagca

SEQ ID NO: 762954 - DNA, 33 bp, Homo sapien
attggtaattgaaagcgatggtaataaaaagca

SEQ ID NO: 762955 - DNA, 33 bp, Homo sapien
cttctagtgtgcccatcatctaaatattaaaca

SEQ ID NO: 762956 - DNA, 33 bp, Homo sapien
cttctagtgtgcccatgatctaaatattaaaca

SEQ ID NO: 762957 - DNA, 33 bp, Homo sapien
taaaaattgaagtgtaaataattggtaatagat

SEQ ID NO: 762958 - DNA, 33 bp, Homo sapien
taaaaattgaagtgtacataattggtaatagat

SEQ ID NO: 762959 - DNA, 33 bp, Homo sapien
atttgtcttaaatgtacgtgtagcttatattta

SEQ ID NO: 762960 - DNA, 33 bp, Homo sapien
atttgtcttaaatgtatgtgtagcttatattta

SEQ ID NO: 762961 - DNA, 33 bp, Homo sapien
ttagtgatgatactacaacctggttaaataaca

SEQ ID NO: 762962 - DNA, 33 bp, Homo sapien
ttagtgatgatactacgacctggttaaataaca

SEQ ID NO: 762963 - DNA, 33 bp, Homo sapien
agtagtttccactaacagaatgtaagatagttg

SEQ ID NO: 762964 - DNA, 33 bp, Homo sapien
agtagtttccactaacggaatgtaagatagttg

SEQ ID NO: 762965 - DNA, 33 bp, Homo sapien
aacttgtcaacacctcgatcttgaacttttggc

SEQ ID NO: 762966 - DNA, 33 bp, Homo sapien
aacttgtcaacacctctatcttgaacttttggc

SEQ ID NO: 762967 - DNA, 33 bp, Homo sapien
ttttttcccaccataccatgctttttccttctt

SEQ ID NO: 762968 - DNA, 33 bp, Homo sapien
ttttttcccaccatactatgctttttccttctt

SEQ ID NO: 762969 - DNA, 33 bp, Homo sapien
gctaaaaagttatagacgagtagatagaaagag

SEQ ID NO: 762970 - DNA, 33 bp, Homo sapien
gctaaaaagttatagatgagtagatagaaagag

SEQ ID NO: 762971 - DNA, 33 bp, Homo sapien
tttggtttccttcatacatagcctgaaatgaaa

SEQ ID NO: 762972 - DNA, 33 bp, Homo sapien
tttggtttccttcatatatagcctgaaatgaaa

SEQ ID NO: 762973 - DNA, 33 bp, Homo sapien
tcttctacgtgggacaacttttcagctattcct

SEQ ID NO: 762974 - DNA, 33 bp, Homo sapien
tcttctacgtgggacagcttttcagctattcct

SEQ ID NO: 762975 - DNA, 33 bp, Homo sapien
tgtccaaggatcccaactgaggtcttcaaattt

SEQ ID NO: 762976 - DNA, 33 bp, Homo sapien
tgtccaaggatcccaattgaggtcttcaaattt

SEQ ID NO: 762977 - DNA, 33 bp, Homo sapien
catgccttgtcctctcagaagtctttgaccttg

SEQ ID NO: 762978 - DNA, 33 bp, Homo sapien
catgccttgtcctctcggaagtctttgaccttg

SEQ ID NO: 762979 - DNA, 33 bp, Homo sapien
ttaaaaaagagaaatccgagagatgataatatt

SEQ ID NO: 762980 - DNA, 33 bp, Homo sapien
ttaaaaaagagaaatctgagagatgataatatt

SEQ ID NO: 762981 - DNA, 33 bp, Homo sapien
gttcaaattagtgccaaagctgtcaatttccaa

SEQ ID NO: 762982 - DNA, 33 bp, Homo sapien
gttcaaattagtgccagagctgtcaatttccaa

SEQ ID NO: 762983 - DNA, 33 bp, Homo sapien
agcttattaaatatacagtagcattgtgtctaa

SEQ ID NO: 762984 - DNA, 33 bp, Homo sapien
agcttattaaatatacggtagcattgtgtctaa

SEQ ID NO: 762985 - DNA, 33 bp, Homo sapien
aatggcagaagggatccgagttactggtggtga

SEQ ID NO: 762986 - DNA, 33 bp, Homo sapien
aatggcagaagggatcggagttactggtggtga

SEQ ID NO: 762987 - DNA, 33 bp, Homo sapien
tttctttataaattacagagtcacaggcagttc

SEQ ID NO: 762988 - DNA, 33 bp, Homo sapien
tttctttataaattacggagtcacaggcagttc

SEQ ID NO: 762989 - DNA, 33 bp, Homo sapien
atctaccaattcacaaacttcttctcttaatat

SEQ ID NO: 762990 - DNA, 33 bp, Homo sapien
atctaccaattcacaagcttcttctcttaatat

SEQ ID NO: 762991 - DNA, 33 bp, Homo sapien
cctattcatgatgagcaactcaggcttccatct

SEQ ID NO: 762992 - DNA, 33 bp, Homo sapien
cctattcatgatgagcgactcaggcttccatct

SEQ ID NO: 762993 - DNA, 33 bp, Homo sapien
gggttatgcaataaacagagcagagtaaaacat

SEQ ID NO: 762994 - DNA, 33 bp, Homo sapien
gggttatgcaataaacggagcagagtaaaacat

SEQ ID NO: 762995 - DNA, 33 bp, Homo sapien
agcttcgacctatttccagaagatcaagcaagc

SEQ ID NO: 762996 - DNA, 33 bp, Homo sapien
agcttcgacctatttctagaagatcaagcaagc

SEQ ID NO: 762997 - DNA, 33 bp, Homo sapien
acacttagtacatgaaatctggcttctccacaa

SEQ ID NO: 762998 - DNA, 33 bp, Homo sapien
acacttagtacatgaagtctggcttctccacaa

SEQ ID NO: 762999 - DNA, 33 bp, Homo sapien
tcttttttgctactcaactttaattttctacaa

SEQ ID NO: 763000 - DNA, 33 bp, Homo sapien
tcttttttgctactcagctttaattttctacaa

SEQ ID NO: 763001 - DNA, 33 bp, Homo sapien
gtgttctagagtgtaaatgggcttatttttccc

SEQ ID NO: 763002 - DNA, 33 bp, Homo sapien
gtgttctagagtgtaattgggcttatttttccc

SEQ ID NO: 763003 - DNA, 33 bp, Homo sapien
gtctaagatgaaacttccaccctacagatgggg

SEQ ID NO: 763004 - DNA, 33 bp, Homo sapien
gtctaagatgaaactttcaccctacagatgggg

SEQ ID NO: 763005 - DNA, 33 bp, Homo sapien
cattatattttatacacaggattcagtaaacta

SEQ ID NO: 763006 - DNA, 33 bp, Homo sapien
cattatattttatacataggattcagtaaacta

SEQ ID NO: 763007 - DNA, 33 bp, Homo sapien
aaataggtatccactgaacgtagaagattgctt

SEQ ID NO: 763008 - DNA, 33 bp, Homo sapien
aaataggtatccactgcacgtagaagattgctt

SEQ ID NO: 763009 - DNA, 33 bp, Homo sapien
aatgtttaggcaagggaaaagtcgtagtttctg

SEQ ID NO: 763010 - DNA, 33 bp, Homo sapien
aatgtttaggcaaggggaaagtcgtagtttctg

SEQ ID NO: 763011 - DNA, 33 bp, Homo sapien
agaaaccctactgtgacggttaagttgaggtgt

SEQ ID NO: 763012 - DNA, 33 bp, Homo sapien
agaaaccctactgtgatggttaagttgaggtgt

SEQ ID NO: 763013 - DNA, 33 bp, Homo sapien
aggcttgaaaaaaaaactgcttcagtgtttgca

SEQ ID NO: 763014 - DNA, 33 bp, Homo sapien
aggcttgaaaaaaaaagtgcttcagtgtttgca

SEQ ID NO: 763015 - DNA, 33 bp, Homo sapien
aatggtcagttgcaaaagatatcatagttttag

SEQ ID NO: 763016 - DNA, 33 bp, Homo sapien
aatggtcagttgcaaaggatatcatagttttag

SEQ ID NO: 763017 - DNA, 33 bp, Homo sapien
cttaaacttccttccactgagttttgttctgtt

SEQ ID NO: 763018 - DNA, 33 bp, Homo sapien
cttaaacttccttccattgagttttgttctgtt

SEQ ID NO: 763019 - DNA, 33 bp, Homo sapien
tggttaagcattagaaaatgtttgaagatagat

SEQ ID NO: 763020 - DNA, 33 bp, Homo sapien
tggttaagcattagaatatgtttgaagatagat

SEQ ID NO: 763021 - DNA, 33 bp, Homo sapien
tgtggcttccaccaccaaaagcaaacttacaga

SEQ ID NO: 763022 - DNA, 33 bp, Homo sapien
tgtggcttccaccaccgaaagcaaacttacaga

SEQ ID NO: 763023 - DNA, 33 bp, Homo sapien
agtttaaatcctgcaactcatctatttccaagt

SEQ ID NO: 763024 - DNA, 33 bp, Homo sapien
agtttaaatcctgcaattcatctatttccaagt

SEQ ID NO: 763025 - DNA, 33 bp, Homo sapien
aaaacaatagtattaaagggtggcatatttagg

SEQ ID NO: 763026 - DNA, 33 bp, Homo sapien
aaaacaatagtattaaggggtggcatatttagg

SEQ ID NO: 763027 - DNA, 33 bp, Homo sapien
aattatgtggtgtagaaacttatctccttggca

SEQ ID NO: 763028 - DNA, 33 bp, Homo sapien
aattatgtggtgtagatacttatctccttggca

SEQ ID NO: 763029 - DNA, 33 bp, Homo sapien
ataatcaattttttccaagacattcagctcttc

SEQ ID NO: 763030 - DNA, 33 bp, Homo sapien
ataatcaattttttccgagacattcagctcttc

SEQ ID NO: 763031 - DNA, 33 bp, Homo sapien
tcatccagatgggaaaatgttcacatgtcacac

SEQ ID NO: 763032 - DNA, 33 bp, Homo sapien
tcatccagatgggaaagtgttcacatgtcacac

SEQ ID NO: 763033 - DNA, 33 bp, Homo sapien
attttctcatttctaacatgcacgtggttacag

SEQ ID NO: 763034 - DNA, 33 bp, Homo sapien
attttctcatttctaatatgcacgtggttacag

SEQ ID NO: 763035 - DNA, 33 bp, Homo sapien
tagctatcttttcagtcaaaatgactcagattc

SEQ ID NO: 763036 - DNA, 33 bp, Homo sapien
tagctatcttttcagttaaaatgactcagattc

SEQ ID NO: 763037 - DNA, 33 bp, Homo sapien
agagaagcaggcagaaaggatttaggtatcata

SEQ ID NO: 763038 - DNA, 33 bp, Homo sapien
agagaagcaggcagaagggatttaggtatcata

SEQ ID NO: 763039 - DNA, 33 bp, Homo sapien
tgtgcttcttttctcaccttgattagttctgca

SEQ ID NO: 763040 - DNA, 33 bp, Homo sapien
tgtgcttcttttctcagcttgattagttctgca

SEQ ID NO: 763041 - DNA, 33 bp, Homo sapien
tgcttataatgcttgaccatcttctctgcattt

SEQ ID NO: 763042 - DNA, 33 bp, Homo sapien
tgcttataatgcttgatcatcttctctgcattt

SEQ ID NO: 763043 - DNA, 33 bp, Homo sapien
aagggaagagcctgcagattacacatactgcag

SEQ ID NO: 763044 - DNA, 33 bp, Homo sapien
aagggaagagcctgcatattacacatactgcag

SEQ ID NO: 763045 - DNA, 33 bp, Homo sapien
aactggtatctgacaacggtagtgtaaagtaat

SEQ ID NO: 763046 - DNA, 33 bp, Homo sapien
aactggtatctgacaatggtagtgtaaagtaat

SEQ ID NO: 763047 - DNA, 33 bp, Homo sapien
agtgtctacgtgaaagacttaacacatccagag

SEQ ID NO: 763048 - DNA, 33 bp, Homo sapien
agtgtctacgtgaaagtcttaacacatccagag

SEQ ID NO: 763049 - DNA, 33 bp, Homo sapien
ttttttgacaccattaaaagttcttcacaaaga

SEQ ID NO: 763050 - DNA, 33 bp, Homo sapien
ttttttgacaccattagaagttcttcacaaaga

SEQ ID NO: 763051 - DNA, 33 bp, Homo sapien
tatctccatgttcctacaatttatgataaaaga

SEQ ID NO: 763052 - DNA, 33 bp, Homo sapien
tatctccatgttcctagaatttatgataaaaga

SEQ ID NO: 763053 - DNA, 33 bp, Homo sapien
atagactgcttgggaaaagatacacataatggg

SEQ ID NO: 763054 - DNA, 33 bp, Homo sapien
atagactgcttgggaagagatacacataatggg

SEQ ID NO: 763055 - DNA, 33 bp, Homo sapien
attttatcaatactagacaaacaaacctactga

SEQ ID NO: 763056 - DNA, 33 bp, Homo sapien
attttatcaatactagccaaacaaacctactga

SEQ ID NO: 763057 - DNA, 33 bp, Homo sapien
taactggattttggccaccaatgacatgtgaat

SEQ ID NO: 763058 - DNA, 33 bp, Homo sapien
taactggattttggccgccaatgacatgtgaat

SEQ ID NO: 763059 - DNA, 33 bp, Homo sapien
tagaactgaccattgacactctttttagcaaga

SEQ ID NO: 763060 - DNA, 33 bp, Homo sapien
tagaactgaccattgatactctttttagcaaga

SEQ ID NO: 763061 - DNA, 33 bp, Homo sapien
ggagaattgaaatggacgtaccaggaaaataag

SEQ ID NO: 763062 - DNA, 33 bp, Homo sapien
ggagaattgaaatggatgtaccaggaaaataag

SEQ ID NO: 763063 - DNA, 33 bp, Homo sapien
tcaggttgtccagatacgtctttactccatgtc

SEQ ID NO: 763064 - DNA, 33 bp, Homo sapien
tcaggttgtccagatatgtctttactccatgtc

SEQ ID NO: 763065 - DNA, 33 bp, Homo sapien
gatagcccttacaagcagatactggagaatgaa

SEQ ID NO: 763066 - DNA, 33 bp, Homo sapien
gatagcccttacaagctgatactggagaatgaa

SEQ ID NO: 763067 - DNA, 33 bp, Homo sapien
ttcaccgttattcagaagtaggatctaatgtca

SEQ ID NO: 763068 - DNA, 33 bp, Homo sapien
ttcaccgttattcagatgtaggatctaatgtca

SEQ ID NO: 763069 - DNA, 33 bp, Homo sapien
tatttatgagtaaaaaagtcagaaatcatttaa

SEQ ID NO: 763070 - DNA, 33 bp, Homo sapien
tatttatgagtaaaaaggtcagaaatcatttaa

SEQ ID NO: 763071 - DNA, 33 bp, Homo sapien
atatattttgatttagcatttacagtgcatatt

SEQ ID NO: 763072 - DNA, 33 bp, Homo sapien
atatattttgatttagtatttacagtgcatatt

SEQ ID NO: 763073 - DNA, 33 bp, Homo sapien
tacattagaagttaaaataaccatgttttttgt

SEQ ID NO: 763074 - DNA, 33 bp, Homo sapien
tacattagaagttaaagtaaccatgttttttgt

SEQ ID NO: 763075 - DNA, 33 bp, Homo sapien
gaggtccaagaacaaaatataattgaccctttg

SEQ ID NO: 763076 - DNA, 33 bp, Homo sapien
gaggtccaagaacaaagtataattgaccctttg

SEQ ID NO: 763077 - DNA, 33 bp, Homo sapien
agtttttctaagagtacattttacgctcttgcc

SEQ ID NO: 763078 - DNA, 33 bp, Homo sapien
agtttttctaagagtagattttacgctcttgcc

SEQ ID NO: 763079 - DNA, 33 bp, Homo sapien
atcagagccaatgacacatacagcgaacttgat

SEQ ID NO: 763080 - DNA, 33 bp, Homo sapien
atcagagccaatgacagatacagcgaacttgat

SEQ ID NO: 763081 - DNA, 33 bp, Homo sapien
gtagtctctccacaatcaagctgtgtgtcatgc

SEQ ID NO: 763082 - DNA, 33 bp, Homo sapien
gtagtctctccacaatgaagctgtgtgtcatgc

SEQ ID NO: 763083 - DNA, 33 bp, Homo sapien
ataaatgcagactcaaataaggagagagtttat

SEQ ID NO: 763084 - DNA, 33 bp, Homo sapien
ataaatgcagactcaagtaaggagagagtttat

SEQ ID NO: 763085 - DNA, 33 bp, Homo sapien
tgagattagtgtgctcaagaatgtccttttcct

SEQ ID NO: 763086 - DNA, 33 bp, Homo sapien
tgagattagtgtgctcgagaatgtccttttcct

SEQ ID NO: 763087 - DNA, 33 bp, Homo sapien
atagtaacccagaaaagggaaagattagtatga

SEQ ID NO: 763088 - DNA, 33 bp, Homo sapien
atagtaacccagaaaatggaaagattagtatga

SEQ ID NO: 763089 - DNA, 33 bp, Homo sapien
accctggactacattcccctataaggctcacca

SEQ ID NO: 763090 - DNA, 33 bp, Homo sapien
accctggactacattctcctataaggctcacca

SEQ ID NO: 763091 - DNA, 33 bp, Homo sapien
ctgtgccatagacgaaataagactgactctggc

SEQ ID NO: 763092 - DNA, 33 bp, Homo sapien
ctgtgccatagacgaactaagactgactctggc

SEQ ID NO: 763093 - DNA, 33 bp, Homo sapien
ctgaactggtatgcaaaatgcaagacaatattc

SEQ ID NO: 763094 - DNA, 33 bp, Homo sapien
ctgaactggtatgcaagatgcaagacaatattc

SEQ ID NO: 763095 - DNA, 33 bp, Homo sapien
tgtcagtgttttctagcaatgtcggcacatatg

SEQ ID NO: 763096 - DNA, 33 bp, Homo sapien
tgtcagtgttttctagtaatgtcggcacatatg

SEQ ID NO: 763097 - DNA, 33 bp, Homo sapien
aatgagttaagacttacggatttgttggaatgg

SEQ ID NO: 763098 - DNA, 33 bp, Homo sapien
aatgagttaagacttatggatttgttggaatgg

SEQ ID NO: 763099 - DNA, 33 bp, Homo sapien
agtgtgttagactgtagtaagtgcaatggcaaa

SEQ ID NO: 763100 - DNA, 33 bp, Homo sapien
agtgtgttagactgtattaagtgcaatggcaaa

SEQ ID NO: 763101 - DNA, 33 bp, Homo sapien
tgtgtgtcagtaacaacaagaccactaccagga

SEQ ID NO: 763102 - DNA, 33 bp, Homo sapien
tgtgtgtcagtaacaagaagaccactaccagga

SEQ ID NO: 763103 - DNA, 33 bp, Homo sapien
aaagaaagaaagaaaaatacataactctctcac

SEQ ID NO: 763104 - DNA, 33 bp, Homo sapien
aaagaaagaaagaaaactacataactctctcac

SEQ ID NO: 763105 - DNA, 33 bp, Homo sapien
tattcttgttggtaaacgatatcacacagtggt

SEQ ID NO: 763106 - DNA, 33 bp, Homo sapien
tattcttgttggtaaatgatatcacacagtggt

SEQ ID NO: 763107 - DNA, 33 bp, Homo sapien
cacatgagattactaacaaattgatcttcagct

SEQ ID NO: 763108 - DNA, 33 bp, Homo sapien
cacatgagattactaataaattgatcttcagct

SEQ ID NO: 763109 - DNA, 33 bp, Homo sapien
gagttaacatgggagacaatttggattataata

SEQ ID NO: 763110 - DNA, 33 bp, Homo sapien
gagttaacatgggagagaatttggattataata

SEQ ID NO: 763111 - DNA, 33 bp, Homo sapien
gtggctcaataatagaagatagctcactgcagg

SEQ ID NO: 763112 - DNA, 33 bp, Homo sapien
gtggctcaataatagatgatagctcactgcagg

SEQ ID NO: 763113 - DNA, 33 bp, Homo sapien
ttttaatgttggtttaccctaccagcatataaa

SEQ ID NO: 763114 - DNA, 33 bp, Homo sapien
ttttaatgttggtttatcctaccagcatataaa

SEQ ID NO: 763115 - DNA, 33 bp, Homo sapien
gtttatgcacctatcaactattaaaaatagagg

SEQ ID NO: 763116 - DNA, 33 bp, Homo sapien
gtttatgcacctatcagctattaaaaatagagg

SEQ ID NO: 763117 - DNA, 33 bp, Homo sapien
taataaaccaggagtggaagacattattgctca

SEQ ID NO: 763118 - DNA, 33 bp, Homo sapien
taataaaccaggagtgtaagacattattgctca

SEQ ID NO: 763119 - DNA, 33 bp, Homo sapien
ctttataatcagcaaactaagtacattttaaaa

SEQ ID NO: 763120 - DNA, 33 bp, Homo sapien
ctttataatcagcaaagtaagtacattttaaaa

SEQ ID NO: 763121 - DNA, 33 bp, Homo sapien
attagtcccagatttacgtttaggagccagagg

SEQ ID NO: 763122 - DNA, 33 bp, Homo sapien
attagtcccagatttatgtttaggagccagagg

SEQ ID NO: 763123 - DNA, 33 bp, Homo sapien
taaacactgcttttcaagtctagatctgaggca

SEQ ID NO: 763124 - DNA, 33 bp, Homo sapien
taaacactgcttttcacgtctagatctgaggca

SEQ ID NO: 763125 - DNA, 33 bp, Homo sapien
gatgaggcataaacttcaaactgatgggcatca

SEQ ID NO: 763126 - DNA, 33 bp, Homo sapien
gatgaggcataaactttaaactgatgggcatca

SEQ ID NO: 763127 - DNA, 33 bp, Homo sapien
cctgaagcatcccaataatatctctgaattctg

SEQ ID NO: 763128 - DNA, 33 bp, Homo sapien
cctgaagcatcccaatcatatctctgaattctg

SEQ ID NO: 763129 - DNA, 33 bp, Homo sapien
aagtgggcagcataaacgtcaaagagattttct

SEQ ID NO: 763130 - DNA, 33 bp, Homo sapien
aagtgggcagcataaaggtcaaagagattttct

SEQ ID NO: 763131 - DNA, 33 bp, Homo sapien
tgttctcgccatgtaacatgctcgctcttcctt

SEQ ID NO: 763132 - DNA, 33 bp, Homo sapien
tgttctcgccatgtaatatgctcgctcttcctt

SEQ ID NO: 763133 - DNA, 33 bp, Homo sapien
aatttttaagcacaaaccttatcgcagagaaaa

SEQ ID NO: 763134 - DNA, 33 bp, Homo sapien
aatttttaagcacaaatcttatcgcagagaaaa

SEQ ID NO: 763135 - DNA, 33 bp, Homo sapien
gcatttactgaaggaacgggaagccacctaata

SEQ ID NO: 763136 - DNA, 33 bp, Homo sapien
gcatttactgaaggaatgggaagccacctaata

SEQ ID NO: 763137 - DNA, 33 bp, Homo sapien
tcaaagacagggtacaaaaactatatcactttg

SEQ ID NO: 763138 - DNA, 33 bp, Homo sapien
tcaaagacagggtacacaaactatatcactttg

SEQ ID NO: 763139 - DNA, 33 bp, Homo sapien
caaatattgcaggatgacaaatattgctgcctg

SEQ ID NO: 763140 - DNA, 33 bp, Homo sapien
caaatattgcaggatggcaaatattgctgcctg

SEQ ID NO: 763141 - DNA, 33 bp, Homo sapien
acaggaggaaatctccagatctgccagttgtta

SEQ ID NO: 763142 - DNA, 33 bp, Homo sapien
acaggaggaaatctcctgatctgccagttgtta

SEQ ID NO: 763143 - DNA, 33 bp, Homo sapien
gggtttccttcatagagagtatggcccttttct

SEQ ID NO: 763144 - DNA, 33 bp, Homo sapien
gggtttccttcatagatagtatggcccttttct

SEQ ID NO: 763145 - DNA, 33 bp, Homo sapien
tagaatttggattaaaacaagagattagaccaa

SEQ ID NO: 763146 - DNA, 33 bp, Homo sapien
tagaatttggattaaaccaagagattagaccaa

SEQ ID NO: 763147 - DNA, 33 bp, Homo sapien
aaaggaagactcatcaagtgaaaggagtgtgag

SEQ ID NO: 763148 - DNA, 33 bp, Homo sapien
aaaggaagactcatcatgtgaaaggagtgtgag

SEQ ID NO: 763149 - DNA, 33 bp, Homo sapien
aaacaaaaagataaaggcagataatccaatgta

SEQ ID NO: 763150 - DNA, 33 bp, Homo sapien
aaacaaaaagataaagtcagataatccaatgta

SEQ ID NO: 763151 - DNA, 33 bp, Homo sapien
gtggtgccttgaaaaagttactccatattccct

SEQ ID NO: 763152 - DNA, 33 bp, Homo sapien
gtggtgccttgaaaaatttactccatattccct

SEQ ID NO: 763153 - DNA, 33 bp, Homo sapien
tctgacttcagagcaaaagtgaacataatgcaa

SEQ ID NO: 763154 - DNA, 33 bp, Homo sapien
tctgacttcagagcaacagtgaacataatgcaa

SEQ ID NO: 763155 - DNA, 33 bp, Homo sapien
atccttgatctatttacgctgtcttttccaatg

SEQ ID NO: 763156 - DNA, 33 bp, Homo sapien
atccttgatctatttatgctgtcttttccaatg

SEQ ID NO: 763157 - DNA, 33 bp, Homo sapien
agtttgaaaagtgtcaagatatcaagttatagc

SEQ ID NO: 763158 - DNA, 33 bp, Homo sapien
agtttgaaaagtgtcaggatatcaagttatagc

SEQ ID NO: 763159 - DNA, 33 bp, Homo sapien
gtggtttttaattgcacccatttgacttttaga

SEQ ID NO: 763160 - DNA, 33 bp, Homo sapien
gtggtttttaattgcatccatttgacttttaga

SEQ ID NO: 763161 - DNA, 33 bp, Homo sapien
cagatgacaggtacaacaaaatctcagatatca

SEQ ID NO: 763162 - DNA, 33 bp, Homo sapien
cagatgacaggtacaataaaatctcagatatca

SEQ ID NO: 763163 - DNA, 33 bp, Homo sapien
tattaacaggatgacaacatagaaataaaaacg

SEQ ID NO: 763164 - DNA, 33 bp, Homo sapien
tattaacaggatgacagcatagaaataaaaacg

SEQ ID NO: 763165 - DNA, 33 bp, Homo sapien
gaatcatttcattcagcccattccaaattgaag

SEQ ID NO: 763166 - DNA, 33 bp, Homo sapien
gaatcatttcattcaggccattccaaattgaag

SEQ ID NO: 763167 - DNA, 33 bp, Homo sapien
ataataaactaatgaaagtaagtatctagtagg

SEQ ID NO: 763168 - DNA, 33 bp, Homo sapien
ataataaactaatgaaggtaagtatctagtagg

SEQ ID NO: 763169 - DNA, 33 bp, Homo sapien
cagaggctaagacttccagactgtgagatatag

SEQ ID NO: 763170 - DNA, 33 bp, Homo sapien
cagaggctaagacttctagactgtgagatatag

SEQ ID NO: 763171 - DNA, 33 bp, Homo sapien
atttaacatttatgtcacactttacattttcaa

SEQ ID NO: 763172 - DNA, 33 bp, Homo sapien
atttaacatttatgtcgcactttacattttcaa

SEQ ID NO: 763173 - DNA, 33 bp, Homo sapien
tcatgctatgaagagaccaaggaattttgtcca

SEQ ID NO: 763174 - DNA, 33 bp, Homo sapien
tcatgctatgaagagatcaaggaattttgtcca

SEQ ID NO: 763175 - DNA, 33 bp, Homo sapien
ctctggacccaaaacaacaagtattatccttga

SEQ ID NO: 763176 - DNA, 33 bp, Homo sapien
ctctggacccaaaacagcaagtattatccttga

SEQ ID NO: 763177 - DNA, 33 bp, Homo sapien
cattataacaaatgcactatacttgtcctaaag

SEQ ID NO: 763178 - DNA, 33 bp, Homo sapien
cattataacaaatgcagtatacttgtcctaaag

SEQ ID NO: 763179 - DNA, 33 bp, Homo sapien
agttacttcctggatgaaatggtatacagaaat

SEQ ID NO: 763180 - DNA, 33 bp, Homo sapien
agttacttcctggatgcaatggtatacagaaat

SEQ ID NO: 763181 - DNA, 33 bp, Homo sapien
cgggatagaatagggacagctgcagaacaaaca

SEQ ID NO: 763182 - DNA, 33 bp, Homo sapien
cgggatagaatagggatagctgcagaacaaaca

SEQ ID NO: 763183 - DNA, 33 bp, Homo sapien
tgatctgagaacattcaatgacagaagatatac

SEQ ID NO: 763184 - DNA, 33 bp, Homo sapien
tgatctgagaacattcgatgacagaagatatac

SEQ ID NO: 763185 - DNA, 33 bp, Homo sapien
ctatcaccactaactcaagaaccttttcaacac

SEQ ID NO: 763186 - DNA, 33 bp, Homo sapien
ctatcaccactaactccagaaccttttcaacac

SEQ ID NO: 763187 - DNA, 33 bp, Homo sapien
ttgaattgtcttgacaaccttatcaaaatcaat

SEQ ID NO: 763188 - DNA, 33 bp, Homo sapien
ttgaattgtcttgacatccttatcaaaatcaat

SEQ ID NO: 763189 - DNA, 33 bp, Homo sapien
ttatgactgagaaaaacgttactgccagttttg

SEQ ID NO: 763190 - DNA, 33 bp, Homo sapien
ttatgactgagaaaaatgttactgccagttttg

SEQ ID NO: 763191 - DNA, 33 bp, Homo sapien
tagaagcacaaatggacggacagtattctatat

SEQ ID NO: 763192 - DNA, 33 bp, Homo sapien
tagaagcacaaatggatggacagtattctatat

SEQ ID NO: 763193 - DNA, 33 bp, Homo sapien
atttctgtttttcacaaccaccaatctaaggta

SEQ ID NO: 763194 - DNA, 33 bp, Homo sapien
atttctgtttttcacagccaccaatctaaggta

SEQ ID NO: 763195 - DNA, 33 bp, Homo sapien
ggattgtagttttaaagaattatcctgcaaaca

SEQ ID NO: 763196 - DNA, 33 bp, Homo sapien
ggattgtagttttaaataattatcctgcaaaca

SEQ ID NO: 763197 - DNA, 33 bp, Homo sapien
ctaatgaagtcttgatcacaaataacaatggtt

SEQ ID NO: 763198 - DNA, 33 bp, Homo sapien
ctaatgaagtcttgatgacaaataacaatggtt

SEQ ID NO: 763199 - DNA, 33 bp, Homo sapien
ttaaaaattcagttgaccattactgtaaaaata

SEQ ID NO: 763200 - DNA, 33 bp, Homo sapien
ttaaaaattcagttgatcattactgtaaaaata

SEQ ID NO: 763201 - DNA, 33 bp, Homo sapien
tggaaaatcaagtgggccagaatagcaaaatgt

SEQ ID NO: 763202 - DNA, 33 bp, Homo sapien
tggaaaatcaagtgggtcagaatagcaaaatgt

SEQ ID NO: 763203 - DNA, 33 bp, Homo sapien
tctagatcatccagtacggtattaagtacaagt

SEQ ID NO: 763204 - DNA, 33 bp, Homo sapien
tctagatcatccagtatggtattaagtacaagt

SEQ ID NO: 763205 - DNA, 33 bp, Homo sapien
ggcccactggccatccagaactaatgcccaaga

SEQ ID NO: 763206 - DNA, 33 bp, Homo sapien
ggcccactggccatccggaactaatgcccaaga

SEQ ID NO: 763207 - DNA, 33 bp, Homo sapien
agaaaagtccagcacaagtagcaaggactcttt

SEQ ID NO: 763208 - DNA, 33 bp, Homo sapien
agaaaagtccagcacaggtagcaaggactcttt

SEQ ID NO: 763209 - DNA, 33 bp, Homo sapien
acatactccaggcccaaggtccattctatgcat

SEQ ID NO: 763210 - DNA, 33 bp, Homo sapien
acatactccaggcccatggtccattctatgcat

SEQ ID NO: 763211 - DNA, 33 bp, Homo sapien
aataatagccattctacgaaactatcttaatcc

SEQ ID NO: 763212 - DNA, 33 bp, Homo sapien
aataatagccattctatgaaactatcttaatcc

SEQ ID NO: 763213 - DNA, 33 bp, Homo sapien
gatcttattaaccaccccagctgaagccaggaa

SEQ ID NO: 763214 - DNA, 33 bp, Homo sapien
gatcttattaaccacctcagctgaagccaggaa

SEQ ID NO: 763215 - DNA, 33 bp, Homo sapien
gattctggacatgtaacataccagtattctgta

SEQ ID NO: 763216 - DNA, 33 bp, Homo sapien
gattctggacatgtaatataccagtattctgta

SEQ ID NO: 763217 - DNA, 33 bp, Homo sapien
gttctctgtctttcaagagtcataatcttgtgc

SEQ ID NO: 763218 - DNA, 33 bp, Homo sapien
gttctctgtctttcaatagtcataatcttgtgc

SEQ ID NO: 763219 - DNA, 33 bp, Homo sapien
gctgactggaaacaaagaatgccacatcataac

SEQ ID NO: 763220 - DNA, 33 bp, Homo sapien
gctgactggaaacaaataatgccacatcataac

SEQ ID NO: 763221 - DNA, 33 bp, Homo sapien
gacttagcctgagaacaaaatggacctactaaa

SEQ ID NO: 763222 - DNA, 33 bp, Homo sapien
gacttagcctgagaaccaaatggacctactaaa

SEQ ID NO: 763223 - DNA, 33 bp, Homo sapien
ggtatactatcttcaaaagacctatcttacatg

SEQ ID NO: 763224 - DNA, 33 bp, Homo sapien
ggtatactatcttcaagagacctatcttacatg

SEQ ID NO: 763225 - DNA, 33 bp, Homo sapien
atcccctaccaactagaaaaagctcagaaccag

SEQ ID NO: 763226 - DNA, 33 bp, Homo sapien
atcccctaccaactaggaaaagctcagaaccag

SEQ ID NO: 763227 - DNA, 33 bp, Homo sapien
aatctcagggataaaacctacatgatcgtggtg

SEQ ID NO: 763228 - DNA, 33 bp, Homo sapien
aatctcagggataaaagctacatgatcgtggtg

SEQ ID NO: 763229 - DNA, 33 bp, Homo sapien
taggttttctggacaaaattttctagactatca

SEQ ID NO: 763230 - DNA, 33 bp, Homo sapien
taggttttctggacaatattttctagactatca

SEQ ID NO: 763231 - DNA, 33 bp, Homo sapien
gttctgtcaatagaaaatgctccatattatctc

SEQ ID NO: 763232 - DNA, 33 bp, Homo sapien
gttctgtcaatagaaactgctccatattatctc

SEQ ID NO: 763233 - DNA, 33 bp, Homo sapien
ctgactgagcaatttccaactgttgatcggacg

SEQ ID NO: 763234 - DNA, 33 bp, Homo sapien
ctgactgagcaatttcgaactgttgatcggacg

SEQ ID NO: 763235 - DNA, 33 bp, Homo sapien
tggaggaagaaggtgaaccaaacattatgtaat

SEQ ID NO: 763236 - DNA, 33 bp, Homo sapien
tggaggaagaaggtgagccaaacattatgtaat

SEQ ID NO: 763237 - DNA, 33 bp, Homo sapien
atatatactttagactaacaccgaaattcctac

SEQ ID NO: 763238 - DNA, 33 bp, Homo sapien
atatatactttagactgacaccgaaattcctac

SEQ ID NO: 763239 - DNA, 33 bp, Homo sapien
aattaatgggatcaaacacgtctccagaggaat

SEQ ID NO: 763240 - DNA, 33 bp, Homo sapien
aattaatgggatcaaagacgtctccagaggaat

SEQ ID NO: 763241 - DNA, 33 bp, Homo sapien
tttgaagaccagataaaattgaggctgacaggt

SEQ ID NO: 763242 - DNA, 33 bp, Homo sapien
tttgaagaccagataagattgaggctgacaggt

SEQ ID NO: 763243 - DNA, 33 bp, Homo sapien
aagaatggtagcaatgcagaagagaataaaacc

SEQ ID NO: 763244 - DNA, 33 bp, Homo sapien
aagaatggtagcaatggagaagagaataaaacc
